United States Patent Application Publication US 2005/0255487 A1 - sequence listing, part 17

SEQ ID NO: 447017 - RNA, 19 nt, Homo sapiens
  misc_RNA (1)...(19): siRNA sense strand
acgacaagcugaccuucau

SEQ ID NO: 447018 - RNA, 19 nt, Homo sapiens
  misc_RNA (1)...(19): siRNA sense strand
gacacuuccuggcucagau

SEQ ID NO: 447019 - RNA, 19 nt, Homo sapiens
  misc_RNA (1)...(19): siRNA sense strand
cuucuuccgugacuucuca

SEQ ID NO: 447020 - RNA, 19 nt, Homo sapiens
  misc_RNA (1)...(19): siRNA sense strand
cuacaucgugcucugcauu

SEQ ID NO: 447021 - RNA, 19 nt, Homo sapiens
  misc_RNA (1)...(19): siRNA sense strand
gcaggcugaccgagagcua

SEQ ID NO: 447022 - RNA, 19 nt, Homo sapiens
  misc_RNA (1)...(19): siRNA sense strand
cgggaugaacggauugaaa

SEQ ID NO: 447023 - RNA, 19 nt, Homo sapiens
  misc_RNA (1)...(19): siRNA sense strand
cgggcuggccuacgucuuu

SEQ ID NO: 447024 - RNA, 19 nt, Homo sapiens
  misc_RNA (1)...(19): siRNA sense strand
uuccagaagugaagaaguc

SEQ ID NO: 447025 - RNA, 19 nt, Homo sapiens
  misc_RNA (1)...(19): siRNA sense strand
ccguuugacuuucuucagu

SEQ ID NO: 447026 - RNA, 19 nt, Homo sapiens
  misc_RNA (1)...(19): siRNA sense strand
ugaccuucauugacaugga

SEQ ID NO: 447027 - RNA, 19 nt, Homo sapiens
  misc_RNA (1)...(19): siRNA sense strand
cgacaagcugaccuucauu

SEQ ID NO: 447028 - RNA, 19 nt, Homo sapiens
  misc_RNA (1)...(19): siRNA sense strand
cauggagggaucuggcuuu

SEQ ID NO: 447029 - RNA, 19 nt, Homo sapiens
  misc_RNA (1)...(19): siRNA sense strand
agggcaaccugggcucuaa

SEQ ID NO: 447030 - RNA, 19 nt, Homo sapiens
  misc_RNA (1)...(19): siRNA sense strand
ggcagcagcacggaagauu

SEQ ID NO: 447031 - RNA, 19 nt, Homo sapiens
  misc_RNA (1)...(19): siRNA sense strand
auugagaacagcuucauga

SEQ ID NO: 447032 - RNA, 19 nt, Homo sapiens
  misc_RNA (1)...(19): siRNA sense strand
ucaaggacgagcugcuguu

SEQ ID NO: 447033 - RNA, 19 nt, Homo sapiens
  misc_RNA (1)...(19): siRNA sense strand
gagggacggacaaugaagu

SEQ ID NO: 447034 - RNA, 19 nt, Homo sapiens
  misc_RNA (1)...(19): siRNA sense strand
acaagcugaccuucauuga

SEQ ID NO: 447035 - RNA, 19 nt, Homo sapiens
  misc_RNA (1)...(19): siRNA sense strand
caguguggcagguggcuuu

SEQ ID NO: 447036 - RNA, 19 nt, Homo sapiens
  misc_RNA (1)...(19): siRNA sense strand
ucucacugcuguuccacau

SEQ ID NO: 447037 - RNA, 19 nt, Homo sapiens
  misc_RNA (1)...(19): siRNA sense strand
cggauugaaaggagagaaa

SEQ ID NO: 447038 - RNA, 19 nt, Homo sapiens
  misc_RNA (1)...(19): siRNA sense strand
agauggagguggagcaaua

SEQ ID NO: 447039 - RNA, 19 nt, Homo sapiens
  misc_RNA (1)...(19): siRNA sense strand
caaaggaggaggcacagau

SEQ ID NO: 447040 - RNA, 19 nt, Homo sapiens
  misc_RNA (1)...(19): siRNA sense strand
gcagagcucccagcagaga

SEQ ID NO: 447041 - RNA, 19 nt, Homo sapiens
  misc_RNA (1)...(19): siRNA sense strand
gacugaagcaggcaaagga

SEQ ID NO: 447042 - RNA, 19 nt, Homo sapiens
  misc_RNA (1)...(19): siRNA sense strand
gagagcgagagcacgaauu

SEQ ID NO: 447043 - RNA, 19 nt, Homo sapiens
  misc_RNA (1)...(19): siRNA sense strand
gcaaaggaggaggcacaga

SEQ ID NO: 447044 - RNA, 19 nt, Homo sapiens
  misc_RNA (1)...(19): siRNA sense strand
aaaggaggaggcacagaug

SEQ ID NO: 447045 - RNA, 19 nt, Homo sapiens
  misc_RNA (1)...(19): siRNA sense strand
agagcgagagcacgaauuc

SEQ ID NO: 447046 - RNA, 19 nt, Homo sapiens
  misc_RNA (1)...(19): siRNA sense strand
gcagagcucccagcagaga

SEQ ID NO: 447047 - RNA, 19 nt, Homo sapiens
  misc_RNA (1)...(19): siRNA sense strand
gagagcgagagcacgaauu

SEQ ID NO: 447048 - RNA, 19 nt, Homo sapiens
  misc_RNA (1)...(19): siRNA sense strand
agagcgagagcacgaauuc

SEQ ID NO: 447049 - RNA, 19 nt, Homo sapiens
  misc_RNA (1)...(19): siRNA sense strand
gaacugguguguauccuaa

SEQ ID NO: 447050 - RNA, 19 nt, Homo sapiens
  misc_RNA (1)...(19): siRNA sense strand
gcaugucucugcucuauuu

SEQ ID NO: 447051 - RNA, 19 nt, Homo sapiens
  misc_RNA (1)...(19): siRNA sense strand
gcaagcagcugacagugaa

SEQ ID NO: 447052 - RNA, 19 nt, Homo sapiens
  misc_RNA (1)...(19): siRNA sense strand
ugaaggugcuguauauauu

SEQ ID NO: 447053 - RNA, 19 nt, Homo sapiens
  misc_RNA (1)...(19): siRNA sense strand
ucaauugguuggaagagua

SEQ ID NO: 447054 - RNA, 19 nt, Homo sapiens
  misc_RNA (1)...(19): siRNA sense strand
gaaagaaugcgaguacuug

SEQ ID NO: 447055 - RNA, 19 nt, Homo sapiens
  misc_RNA (1)...(19): siRNA sense strand
ggacaucuuugacuacauc

SEQ ID NO: 447056 - RNA, 19 nt, Homo sapiens
  misc_RNA (1)...(19): siRNA sense strand
gaaacggugcagaauauuu

SEQ ID NO: 447057 - RNA, 19 nt, Homo sapiens
  misc_RNA (1)...(19): siRNA sense strand
gaacaggaaucccaaucag

SEQ ID NO: 447058 - RNA, 19 nt, Homo sapiens
  misc_RNA (1)...(19): siRNA sense strand
aaacggugcagaauauuua

SEQ ID NO: 447059 - RNA, 19 nt, Homo sapiens
  misc_RNA (1)...(19): siRNA sense strand
cagagcacguuccuuguaa

SEQ ID NO: 447060 - RNA, 19 nt, Homo sapiens
  misc_RNA (1)...(19): siRNA sense strand
agaaagagaacauagauga

SEQ ID NO: 447061 - RNA, 19 nt, Homo sapiens
  misc_RNA (1)...(19): siRNA sense strand
gagguggccuucccuuaug

SEQ ID NO: 447062 - RNA, 19 nt, Homo sapiens
  misc_RNA (1)...(19): siRNA sense strand
gacaauugcucggcaguug

SEQ ID NO: 447063 - RNA, 19 nt, Homo sapiens
  misc_RNA (1)...(19): siRNA sense strand
gcaaagaaagagaacauag

SEQ ID NO: 447064 - RNA, 19 nt, Homo sapiens
  misc_RNA (1)...(19): siRNA sense strand
caaagaaagagaacauaga

SEQ ID NO: 447065 - RNA, 19 nt, Homo sapiens
  misc_RNA (1)...(19): siRNA sense strand
uguaauggcuucagugaca

SEQ ID NO: 447066 - RNA, 19 nt, Homo sapiens
  misc_RNA (1)...(19): siRNA sense strand
cauaccagcuccugagaga

SEQ ID NO: 447067 - RNA, 19 nt, Homo sapiens
  misc_RNA (1)...(19): siRNA sense strand
cuauaaugcccucaacuua

SEQ ID NO: 447068 - RNA, 19 nt, Homo sapiens
  misc_RNA (1)...(19): siRNA sense strand
gaaggugcuguauauauug

SEQ ID NO: 447069 - RNA, 19 nt, Homo sapiens
  misc_RNA (1)...(19): siRNA sense strand
aagagaacauagaugagua

SEQ ID NO: 447070 - RNA, 19 nt, Homo sapiens
  misc_RNA (1)...(19): siRNA sense strand
aggaugaacugguguguau

SEQ ID NO: 447071 - RNA, 19 nt, Homo sapiens
  misc_RNA (1)...(19): siRNA sense strand
gcaauccucucuccgacau

SEQ ID NO: 447072 - RNA, 19 nt, Homo sapiens
  misc_RNA (1)...(19): siRNA sense strand
ggccuucccuuaugaaaca

SEQ ID NO: 447073 - RNA, 19 nt, Homo sapiens
  misc_RNA (1)...(19): siRNA sense strand
gaaaagcuuugaccuggaa

SEQ ID NO: 447074 - RNA, 19 nt, Homo sapiens
  misc_RNA (1)...(19): siRNA sense strand
cgggugaggugcuggagua

SEQ ID NO: 447075 - RNA, 19 nt, Homo sapiens
  misc_RNA (1)...(19): siRNA sense strand
gccaugaacuauguccuuu

SEQ ID NO: 447076 - RNA, 19 nt, Homo sapiens
  misc_RNA (1)...(19): siRNA sense strand
gaguggauccggaacauga

SEQ ID NO: 447077 - RNA, 19 nt, Homo sapiens
  misc_RNA (1)...(19): siRNA sense strand
ggaagauuguagccucguu

SEQ ID NO: 447078 - RNA, 19 nt, Homo sapiens
  misc_RNA (1)...(19): siRNA sense strand
ugaacuauguccuuuacga

SEQ ID NO: 447079 - RNA, 19 nt, Homo sapiens
  misc_RNA (1)...(19): siRNA sense strand
aagaagguguuacagagaa

SEQ ID NO: 447080 - RNA, 19 nt, Homo sapiens
  misc_RNA (1)...(19): siRNA sense strand
cagaauauuuacagugcaa

SEQ ID NO: 447081 - RNA, 19 nt, Homo sapiens
  misc_RNA (1)...(19): siRNA sense strand
ucuugaaggugcuguauau

SEQ ID NO: 447082 - RNA, 19 nt, Homo sapiens
  misc_RNA (1)...(19): siRNA sense strand
gauccgguauccagaagau

SEQ ID NO: 447083 - RNA, 19 nt, Homo sapiens
  misc_RNA (1)...(19): siRNA sense strand
gggcgacccuggacaucuu

SEQ ID NO: 447084 - RNA, 19 nt, Homo sapiens
  misc_RNA (1)...(19): siRNA sense strand
gcccucaacuuauauaugc

SEQ ID NO: 447085 - RNA, 19 nt, Homo sapiens
  misc_RNA (1)...(19): siRNA sense strand
cuguauauauugaccagua

SEQ ID NO: 447086 - RNA, 19 nt, Homo sapiens
  misc_RNA (1)...(19): siRNA sense strand
uaacguggagccucaagaa

SEQ ID NO: 447087 - RNA, 19 nt, Homo sapiens
  misc_RNA (1)...(19): siRNA sense strand
augaaacggugcagaauau

SEQ ID NO: 447088 - RNA, 19 nt, Homo sapiens
  misc_RNA (1)...(19): siRNA sense strand
uaagagguauggcuauaac

SEQ ID NO: 447089 - RNA, 19 nt, Homo sapiens
  misc_RNA (1)...(19): siRNA sense strand
uaugaaacggugcagaaua

SEQ ID NO: 447090 - RNA, 19 nt, Homo sapiens
  misc_RNA (1)...(19): siRNA sense strand
ggcaacagaagaucuuaaa

SEQ ID NO: 447091 - RNA, 19 nt, Homo sapiens
  misc_RNA (1)...(19): siRNA sense strand
ggacggcuccugucgauac

SEQ ID NO: 447092 - RNA, 19 nt, Homo sapiens
  misc_RNA (1)...(19): siRNA sense strand
gacaucagccucaaagaca

SEQ ID NO: 447093 - RNA, 19 nt, Homo sapiens
  misc_RNA (1)...(19): siRNA sense strand
ucagagcacguuccuugua

SEQ ID NO: 447094 - RNA, 19 nt, Homo sapiens
  misc_RNA (1)...(19): siRNA sense strand
gaucuggaguuugucuaug

SEQ ID NO: 447095 - RNA, 19 nt, Homo sapiens
  misc_RNA (1)...(19): siRNA sense strand
gcagccagaugacuaugag

SEQ ID NO: 447096 - RNA, 19 nt, Homo sapiens
  misc_RNA (1)...(19): siRNA sense strand
gcgggaagguguggaagga

SEQ ID NO: 447097 - RNA, 19 nt, Homo sapiens
  misc_RNA (1)...(19): siRNA sense strand
ggagauccgguauccagaa

SEQ ID NO: 447098 - RNA, 19 nt, Homo sapiens
  misc_RNA (1)...(19): siRNA sense strand
gaugagaagcacagagaug

SEQ ID NO: 447099 - RNA, 19 nt, Homo sapiens
  misc_RNA (1)...(19): siRNA sense strand
gaguauaaaguucggcaaa

SEQ ID NO: 447100 - RNA, 19 nt, Homo sapiens
  misc_RNA (1)...(19): siRNA sense strand
caagaagguguuacagaga

SEQ ID NO: 447101 - RNA, 19 nt, Homo sapiens
  misc_RNA (1)...(19): siRNA sense strand
guuggaagaguauaaaguu

SEQ ID NO: 447102 - RNA, 19 nt, Homo sapiens
  misc_RNA (1)...(19): siRNA sense strand
caugaacuauguccuuuac

SEQ ID NO: 447103 - RNA, 19 nt, Homo sapiens
  misc_RNA (1)...(19): siRNA sense strand
gauuguagccucguucuca

SEQ ID NO: 447104 - RNA, 19 nt, Homo sapiens
  misc_RNA (1)...(19): siRNA sense strand
gaaagagaacauagaugag

SEQ ID NO: 447105 - RNA, 19 nt, Homo sapiens
  misc_RNA (1)...(19): siRNA sense strand
ccaccagccuuucuauaac

SEQ ID NO: 447106 - RNA, 19 nt, Homo sapiens
  misc_RNA (1)...(19): siRNA sense strand
gcuuugaccuggaaauacu

SEQ ID NO: 447107 - RNA, 19 nt, Homo sapiens
  misc_RNA (1)...(19): siRNA sense strand
ccgacuacgucaauugguu

SEQ ID NO: 447108 - RNA, 19 nt, Homo sapiens
  misc_RNA (1)...(19): siRNA sense strand
gagcacguuccuuguaaug

SEQ ID NO: 447109 - RNA, 19 nt, Homo sapiens
  misc_RNA (1)...(19): siRNA sense strand
gagauccgguauccagaag

SEQ ID NO: 447110 - RNA, 19 nt, Homo sapiens
  misc_RNA (1)...(19): siRNA sense strand
gacgcuauuucucagaguu

SEQ ID NO: 447111 - RNA, 19 nt, Homo sapiens
  misc_RNA (1)...(19): siRNA sense strand
cguggagccucaagaaauc

SEQ ID NO: 447112 - RNA, 19 nt, Homo sapiens
  misc_RNA (1)...(19): siRNA sense strand
uggaugccaugaacuaugu

SEQ ID NO: 447113 - RNA, 19 nt, Homo sapiens
  misc_RNA (1)...(19): siRNA sense strand
ucguggagcuuguuugcaa

SEQ ID NO: 447114 - RNA, 19 nt, Homo sapiens
  misc_RNA (1)...(19): siRNA sense strand
guuagaagcgcggaagauu

SEQ ID NO: 447115 - RNA, 19 nt, Homo sapiens
  misc_RNA (1)...(19): siRNA sense strand
agacauccaggcccaaauu

SEQ ID NO: 447116 - RNA, 19 nt, Homo sapiens
  misc_RNA (1)...(19): siRNA sense strand
gugaggugcuggaguacau

SEQ ID NO: 447117 - RNA, 19 nt, Homo sapiens
  misc_RNA (1)...(19): siRNA sense strand
uagaagcgcggaagauugu

SEQ ID NO: 447118 - RNA, 19 nt, Homo sapiens
  misc_RNA (1)...(19): siRNA sense strand
gcuauaacugugugaucua

SEQ ID NO: 447119 - RNA, 19 nt, Homo sapiens
  misc_RNA (1)...(19): siRNA sense strand
ggaaggcaucgaccaguca

SEQ ID NO: 447120 - RNA, 19 nt, Homo sapiens
  misc_RNA (1)...(19): siRNA sense strand
ugaaagaaugcgaguacuu

SEQ ID NO: 447121 - RNA, 19 nt, Homo sapiens
  misc_RNA (1)...(19): siRNA sense strand
gcaacagaagaucuuaaau

SEQ ID NO: 447122 - RNA, 19 nt, Homo sapiens
  misc_RNA (1)...(19): siRNA sense strand
ugagguggccuucccuuau

SEQ ID NO: 447123 - RNA, 19 nt, Homo sapiens
  misc_RNA (1)...(19): siRNA sense strand
cuacgucaauugguuggaa

SEQ ID NO: 447124 - RNA, 19 nt, Homo sapiens
  misc_RNA (1)...(19): siRNA sense strand
gcacucacuacaucccaaa

SEQ ID NO: 447125 - RNA, 19 nt, Homo sapiens
  misc_RNA (1)...(19): siRNA sense strand
gguggucaaugucaagaag

SEQ ID NO: 447126 - RNA, 19 nt, Homo sapiens
  misc_RNA (1)...(19): siRNA sense strand
caacuuauauaugcaucag

SEQ ID NO: 447127 - RNA, 19 nt, Homo sapiens
  misc_RNA (1)...(19): siRNA sense strand
gauaauggaaauagaacuc

SEQ ID NO: 447128 - RNA, 19 nt, Homo sapiens
  misc_RNA (1)...(19): siRNA sense strand
ccaugaacuauguccuuua

SEQ ID NO: 447129 - RNA, 19 nt, Homo sapiens
  misc_RNA (1)...(19): siRNA sense strand
aagcugcgcuccgaugaga

SEQ ID NO: 447130 - RNA, 19 nt, Homo sapiens
  misc_RNA (1)...(19): siRNA sense strand
ggcaagcagcugacaguga

SEQ ID NO: 447131 - RNA, 19 nt, Homo sapiens
  misc_RNA (1)...(19): siRNA sense strand
uacagagaauggugggaaa

SEQ ID NO: 447132 - RNA, 19 nt, Homo sapiens
  misc_RNA (1)...(19): siRNA sense strand
gaagaucuggaguuugucu

SEQ ID NO: 447133 - RNA, 19 nt, Homo sapiens
  misc_RNA (1)...(19): siRNA sense strand
gaggaugaacuggugugua

SEQ ID NO: 447134 - RNA, 19 nt, Homo sapiens
  misc_RNA (1)...(19): siRNA sense strand
gugagguggccuucccuua

SEQ ID NO: 447135 - RNA, 19 nt, Homo sapiens
  misc_RNA (1)...(19): siRNA sense strand
ucucugcucuauuugacaa

SEQ ID NO: 447136 - RNA, 19 nt, Homo sapiens
  misc_RNA (1)...(19): siRNA sense strand
ugguguguauccuaaauau

SEQ ID NO: 447137 - RNA, 19 nt, Homo sapiens
  misc_RNA (1)...(19): siRNA sense strand
ggcuauaacugugugaucu

SEQ ID NO: 447138 - RNA, 19 nt, Homo sapiens
  misc_RNA (1)...(19): siRNA sense strand
gagguauggcuauaacugu

SEQ ID NO: 447139 - RNA, 19 nt, Homo sapiens
  misc_RNA (1)...(19): siRNA sense strand
cauagaugcuuuugggaaa

SEQ ID NO: 447140 - RNA, 19 nt, Homo sapiens
  misc_RNA (1)...(19): siRNA sense strand
aaggugcuguauauauuga

SEQ ID NO: 447141 - RNA, 19 nt, Homo sapiens
  misc_RNA (1)...(19): siRNA sense strand
ggaaucccaaucagcaugu

SEQ ID NO: 447142 - RNA, 19 nt, Homo sapiens
  misc_RNA (1)...(19): siRNA sense strand
ggacgcuauuucucagagu

SEQ ID NO: 447143 - RNA, 19 nt, Homo sapiens
  misc_RNA (1)...(19): siRNA sense strand
gcagcugacagugaaagaa

SEQ ID NO: 447144 - RNA, 19 nt, Homo sapiens
  misc_RNA (1)...(19): siRNA sense strand
agagaacauagaugaguaa

SEQ ID NO: 447145 - RNA, 19 nt, Homo sapiens
  misc_RNA (1)...(19): siRNA sense strand
aaagagaacauagaugagu

SEQ ID NO: 447146 - RNA, 19 nt, Homo sapiens
  misc_RNA (1)...(19): siRNA sense strand
accaccagccuuucuauaa

SEQ ID NO: 447147 - RNA, 19 nt, Homo sapiens
  misc_RNA (1)...(19): siRNA sense strand
ggaucucuaucuggcaaug

SEQ ID NO: 447148 - RNA, 19 nt, Homo sapiens
  misc_RNA (1)...(19): siRNA sense strand
aaagaaugcgaguacuuga

SEQ ID NO: 447149 - RNA, 19 nt, Homo sapiens
  misc_RNA (1)...(19): siRNA sense strand
gaacugguguguauccuaa

SEQ ID NO: 447150 - RNA, 19 nt, Homo sapiens
  misc_RNA (1)...(19): siRNA sense strand
gcaugucucugcucuauuu

SEQ ID NO: 447151 - RNA, 19 nt, Homo sapiens
  misc_RNA (1)...(19): siRNA sense strand
gcaagcagcugacagugaa

SEQ ID NO: 447152 - RNA, 19 nt, Homo sapiens
  misc_RNA (1)...(19): siRNA sense strand
ugaaggugcuguauauauu

SEQ ID NO: 447153 - RNA, 19 nt, Homo sapiens
  misc_RNA (1)...(19): siRNA sense strand
ucaauugguuggaagagua

SEQ ID NO: 447154 - RNA, 19 nt, Homo sapiens
  misc_RNA (1)...(19): siRNA sense strand
gaaagaaugcgaguacuug

SEQ ID NO: 447155 - RNA, 19 nt, Homo sapiens
  misc_RNA (1)...(19): siRNA sense strand
ggacaucuuugacuacauc

SEQ ID NO: 447156 - RNA, 19 nt, Homo sapiens
  misc_RNA (1)...(19): siRNA sense strand
gaaacggugcagaauauuu

SEQ ID NO: 447157 - RNA, 19 nt, Homo sapiens
  misc_RNA (1)...(19): siRNA sense strand
gaacaggaaucccaaucag

SEQ ID NO: 447158 - RNA, 19 nt, Homo sapiens
  misc_RNA (1)...(19): siRNA sense strand
aaacggugcagaauauuua

SEQ ID NO: 447159 - RNA, 19 nt, Homo sapiens
  misc_RNA (1)...(19): siRNA sense strand
cagagcacguuccuuguaa

SEQ ID NO: 447160 - RNA, 19 nt, Homo sapiens
  misc_RNA (1)...(19): siRNA sense strand
agaaagagaacauagauga

SEQ ID NO: 447161 - RNA, 19 nt, Homo sapiens
  misc_RNA (1)...(19): siRNA sense strand
gagguggccuucccuuaug

SEQ ID NO: 447162 - RNA, 19 nt, Homo sapiens
  misc_RNA (1)...(19): siRNA sense strand
gacaauugcucggcaguug

SEQ ID NO: 447163 - RNA, 19 nt, Homo sapiens
  misc_RNA (1)...(19): siRNA sense strand
gcaaagaaagagaacauag

SEQ ID NO: 447164 - RNA, 19 nt, Homo sapiens
  misc_RNA (1)...(19): siRNA sense strand
caaagaaagagaacauaga

SEQ ID NO: 447165 - RNA, 19 nt, Homo sapiens
  misc_RNA (1)...(19): siRNA sense strand
uguaauggcuucagugaca

SEQ ID NO: 447166 - RNA, 19 nt, Homo sapiens
  misc_RNA (1)...(19): siRNA sense strand
cauaccagcuccugagaga

SEQ ID NO: 447167 - RNA, 19 nt, Homo sapiens
  misc_RNA (1)...(19): siRNA sense strand
cuauaaugcccucaacuua

SEQ ID NO: 447168 - RNA, 19 nt, Homo sapiens
  misc_RNA (1)...(19): siRNA sense strand
gaaggugcuguauauauug

SEQ ID NO: 447169 - RNA, 19 nt, Homo sapiens
  misc_RNA (1)...(19): siRNA sense strand
aagagaacauagaugagua

SEQ ID NO: 447170 - RNA, 19 nt, Homo sapiens
  misc_RNA (1)...(19): siRNA sense strand
aggaugaacugguguguau

SEQ ID NO: 447171 - RNA, 19 nt, Homo sapiens
  misc_RNA (1)...(19): siRNA sense strand
gcaauccucucuccgacau

SEQ ID NO: 447172 - RNA, 19 nt, Homo sapiens
  misc_RNA (1)...(19): siRNA sense strand
ggccuucccuuaugaaaca

SEQ ID NO: 447173 - RNA, 19 nt, Homo sapiens
  misc_RNA (1)...(19): siRNA sense strand
gaaaagcuuugaccuggaa

SEQ ID NO: 447174 - RNA, 19 nt, Homo sapiens
  misc_RNA (1)...(19): siRNA sense strand
cgggugaggugcuggagua

SEQ ID NO: 447175 - RNA, 19 nt, Homo sapiens
  misc_RNA (1)...(19): siRNA sense strand
gccaugaacuauguccuuu

SEQ ID NO: 447176 - RNA, 19 nt, Homo sapiens
  misc_RNA (1)...(19): siRNA sense strand
gaguggauccggaacauga

SEQ ID NO: 447177 - RNA, 19 nt, Homo sapiens
  misc_RNA (1)...(19): siRNA sense strand
ggaagauuguagccucguu

SEQ ID NO: 447178 - RNA, 19 nt, Homo sapiens
  misc_RNA (1)...(19): siRNA sense strand
ugaacuauguccuuuacga

SEQ ID NO: 447179 - RNA, 19 nt, Homo sapiens
  misc_RNA (1)...(19): siRNA sense strand
aagaagguguuacagagaa

SEQ ID NO: 447180 - RNA, 19 nt, Homo sapiens
  misc_RNA (1)...(19): siRNA sense strand
cagaauauuuacagugcaa

SEQ ID NO: 447181 - RNA, 19 nt, Homo sapiens
  misc_RNA (1)...(19): siRNA sense strand
ucuugaaggugcuguauau

SEQ ID NO: 447182 - RNA, 19 nt, Homo sapiens
  misc_RNA (1)...(19): siRNA sense strand
gauccgguauccagaagau

SEQ ID NO: 447183 - RNA, 19 nt, Homo sapiens
  misc_RNA (1)...(19): siRNA sense strand
gggcgacccuggacaucuu

SEQ ID NO: 447184 - RNA, 19 nt, Homo sapiens
  misc_RNA (1)...(19): siRNA sense strand
gcccucaacuuauauaugc

SEQ ID NO: 447185 - RNA, 19 nt, Homo sapiens
  misc_RNA (1)...(19): siRNA sense strand
cuguauauauugaccagua

SEQ ID NO: 447186 - RNA, 19 nt, Homo sapiens
  misc_RNA (1)...(19): siRNA sense strand
uaacguggagccucaagaa

SEQ ID NO: 447187 - RNA, 19 nt, Homo sapiens
  misc_RNA (1)...(19): siRNA sense strand
augaaacggugcagaauau

SEQ ID NO: 447188 - RNA, 19 nt, Homo sapiens
  misc_RNA (1)...(19): siRNA sense strand
uaagagguauggcuauaac

SEQ ID NO: 447189 - RNA, 19 nt, Homo sapiens
  misc_RNA (1)...(19): siRNA sense strand
uaugaaacggugcagaaua

SEQ ID NO: 447190 - RNA, 19 nt, Homo sapiens
  misc_RNA (1)...(19): siRNA sense strand
ggcaacagaagaucuuaaa

SEQ ID NO: 447191 - RNA, 19 nt, Homo sapiens
  misc_RNA (1)...(19): siRNA sense strand
ggacggcuccugucgauac

SEQ ID NO: 447192 - RNA, 19 nt, Homo sapiens
  misc_RNA (1)...(19): siRNA sense strand
gacaucagccucaaagaca

SEQ ID NO: 447193 - RNA, 19 nt, Homo sapiens
  misc_RNA (1)...(19): siRNA sense strand
ucagagcacguuccuugua

SEQ ID NO: 447194 - RNA, 19 nt, Homo sapiens
  misc_RNA (1)...(19): siRNA sense strand
gaucuggaguuugucuaug

SEQ ID NO: 447195 - RNA, 19 nt, Homo sapiens
  misc_RNA (1)...(19): siRNA sense strand
gcagccagaugacuaugag

SEQ ID NO: 447196 - RNA, 19 nt, Homo sapiens
  misc_RNA (1)...(19): siRNA sense strand
gcgggaagguguggaagga

SEQ ID NO: 447197 - RNA, 19 nt, Homo sapiens
  misc_RNA (1)...(19): siRNA sense strand
ggagauccgguauccagaa

SEQ ID NO: 447198 - RNA, 19 nt, Homo sapiens
  misc_RNA (1)...(19): siRNA sense strand
gaugagaagcacagagaug

SEQ ID NO: 447199 - RNA, 19 nt, Homo sapiens
  misc_RNA (1)...(19): siRNA sense strand
gaguauaaaguucggcaaa

SEQ ID NO: 447200 - RNA, 19 nt, Homo sapiens
  misc_RNA (1)...(19): siRNA sense strand
caagaagguguuacagaga

SEQ ID NO: 447201 - RNA, 19 nt, Homo sapiens
  misc_RNA (1)...(19): siRNA sense strand
guuggaagaguauaaaguu

SEQ ID NO: 447202 - RNA, 19 nt, Homo sapiens
  misc_RNA (1)...(19): siRNA sense strand
caugaacuauguccuuuac

SEQ ID NO: 447203 - RNA, 19 nt, Homo sapiens
  misc_RNA (1)...(19): siRNA sense strand
gauuguagccucguucuca

SEQ ID NO: 447204 - RNA, 19 nt, Homo sapiens
  misc_RNA (1)...(19): siRNA sense strand
gaaagagaacauagaugag

SEQ ID NO: 447205 - RNA, 19 nt, Homo sapiens
  misc_RNA (1)...(19): siRNA sense strand
ccaccagccuuucuauaac

SEQ ID NO: 447206 - RNA, 19 nt, Homo sapiens
  misc_RNA (1)...(19): siRNA sense strand
gcuuugaccuggaaauacu

SEQ ID NO: 447207 - RNA, 19 nt, Homo sapiens
  misc_RNA (1)...(19): siRNA sense strand
ccgacuacgucaauugguu

SEQ ID NO: 447208 - RNA, 19 nt, Homo sapiens
  misc_RNA (1)...(19): siRNA sense strand
gagcacguuccuuguaaug

SEQ ID NO: 447209 - RNA, 19 nt, Homo sapiens
  misc_RNA (1)...(19): siRNA sense strand
gagauccgguauccagaag

SEQ ID NO: 447210 - RNA, 19 nt, Homo sapiens
  misc_RNA (1)...(19): siRNA sense strand
gacgcuauuucucagaguu

SEQ ID NO: 447211 - RNA, 19 nt, Homo sapiens
  misc_RNA (1)...(19): siRNA sense strand
cguggagccucaagaaauc

SEQ ID NO: 447212 - RNA, 19 nt, Homo sapiens
  misc_RNA (1)...(19): siRNA sense strand
uggaugccaugaacuaugu

SEQ ID NO: 447213 - RNA, 19 nt, Homo sapiens
  misc_RNA (1)...(19): siRNA sense strand
ucguggagcuuguuugcaa

SEQ ID NO: 447214 - RNA, 19 nt, Homo sapiens
  misc_RNA (1)...(19): siRNA sense strand
guuagaagcgcggaagauu

SEQ ID NO: 447215 - RNA, 19 nt, Homo sapiens
  misc_RNA (1)...(19): siRNA sense strand
agacauccaggcccaaauu

SEQ ID NO: 447216 - RNA, 19 nt, Homo sapiens
  misc_RNA (1)...(19): siRNA sense strand
gugaggugcuggaguacau

SEQ ID NO: 447217 - RNA, 19 nt, Homo sapiens
  misc_RNA (1)...(19): siRNA sense strand
uagaagcgcggaagauugu

SEQ ID NO: 447218 - RNA, 19 nt, Homo sapiens
  misc_RNA (1)...(19): siRNA sense strand
gcuauaacugugugaucua

SEQ ID NO: 447219 - RNA, 19 nt, Homo sapiens
  misc_RNA (1)...(19): siRNA sense strand
ggaaggcaucgaccaguca

SEQ ID NO: 447220 - RNA, 19 nt, Homo sapiens
  misc_RNA (1)...(19): siRNA sense strand
ugaaagaaugcgaguacuu

SEQ ID NO: 447221 - RNA, 19 nt, Homo sapiens
  misc_RNA (1)...(19): siRNA sense strand
gcaacagaagaucuuaaau

SEQ ID NO: 447222 - RNA, 19 nt, Homo sapiens
  misc_RNA (1)...(19): siRNA sense strand
ugagguggccuucccuuau

SEQ ID NO: 447223 - RNA, 19 nt, Homo sapiens
  misc_RNA (1)...(19): siRNA sense strand
cuacgucaauugguuggaa

SEQ ID NO: 447224 - RNA, 19 nt, Homo sapiens
  misc_RNA (1)...(19): siRNA sense strand
gcacucacuacaucccaaa

SEQ ID NO: 447225 - RNA, 19 nt, Homo sapiens
  misc_RNA (1)...(19): siRNA sense strand
gguggucaaugucaagaag

SEQ ID NO: 447226 - RNA, 19 nt, Homo sapiens
  misc_RNA (1)...(19): siRNA sense strand
caacuuauauaugcaucag

SEQ ID NO: 447227 - RNA, 19 nt, Homo sapiens
  misc_RNA (1)...(19): siRNA sense strand
gauaauggaaauagaacuc

SEQ ID NO: 447228 - RNA, 19 nt, Homo sapiens
  misc_RNA (1)...(19): siRNA sense strand
ccaugaacuauguccuuua

SEQ ID NO: 447229 - RNA, 19 nt, Homo sapiens
  misc_RNA (1)...(19): siRNA sense strand
aagcugcgcuccgaugaga

SEQ ID NO: 447230 - RNA, 19 nt, Homo sapiens
  misc_RNA (1)...(19): siRNA sense strand
ggcaagcagcugacaguga

SEQ ID NO: 447231 - RNA, 19 nt, Homo sapiens
  misc_RNA (1)...(19): siRNA sense strand
uacagagaauggugggaaa

SEQ ID NO: 447232 - RNA, 19 nt, Homo sapiens
  misc_RNA (1)...(19): siRNA sense strand
gaagaucuggaguuugucu

SEQ ID NO: 447233 - RNA, 19 nt, Homo sapiens
  misc_RNA (1)...(19): siRNA sense strand
gaggaugaacuggugugua

SEQ ID NO: 447234 - RNA, 19 nt, Homo sapiens
  misc_RNA (1)...(19): siRNA sense strand
gugagguggccuucccuua

SEQ ID NO: 447235 - RNA, 19 nt, Homo sapiens
  misc_RNA (1)...(19): siRNA sense strand
ucucugcucuauuugacaa

SEQ ID NO: 447236 - RNA, 19 nt, Homo sapiens
  misc_RNA (1)...(19): siRNA sense strand
ugguguguauccuaaauau

SEQ ID NO: 447237 - RNA, 19 nt, Homo sapiens
  misc_RNA (1)...(19): siRNA sense strand
ggcuauaacugugugaucu

SEQ ID NO: 447238 - RNA, 19 nt, Homo sapiens
  misc_RNA (1)...(19): siRNA sense strand
gagguauggcuauaacugu

SEQ ID NO: 447239 - RNA, 19 nt, Homo sapiens
  misc_RNA (1)...(19): siRNA sense strand
cauagaugcuuuugggaaa

SEQ ID NO: 447240 - RNA, 19 nt, Homo sapiens
  misc_RNA (1)...(19): siRNA sense strand
aaggugcuguauauauuga

SEQ ID NO: 447241 - RNA, 19 nt, Homo sapiens
  misc_RNA (1)...(19): siRNA sense strand
ggaaucccaaucagcaugu

SEQ ID NO: 447242 - RNA, 19 nt, Homo sapiens
  misc_RNA (1)...(19): siRNA sense strand
ggacgcuauuucucagagu

SEQ ID NO: 447243 - RNA, 19 nt, Homo sapiens
  misc_RNA (1)...(19): siRNA sense strand
gcagcugacagugaaagaa

SEQ ID NO: 447244 - RNA, 19 nt, Homo sapiens
  misc_RNA (1)...(19): siRNA sense strand
agagaacauagaugaguaa

SEQ ID NO: 447245 - RNA, 19 nt, Homo sapiens
  misc_RNA (1)...(19): siRNA sense strand
aaagagaacauagaugagu

SEQ ID NO: 447246 - RNA, 19 nt, Homo sapiens
  misc_RNA (1)...(19): siRNA sense strand
accaccagccuuucuauaa

SEQ ID NO: 447247 - RNA, 19 nt, Homo sapiens
  misc_RNA (1)...(19): siRNA sense strand
ggaucucuaucuggcaaug

SEQ ID NO: 447248 - RNA, 19 nt, Homo sapiens
  misc_RNA (1)...(19): siRNA sense strand
aaagaaugcgaguacuuga

SEQ ID NO: 447249 - RNA, 19 nt, Homo sapiens
  misc_RNA (1)...(19): siRNA sense strand
ugaacaagcuggaauaaua

SEQ ID NO: 447250 - RNA, 19 nt, Homo sapiens
  misc_RNA (1)...(19): siRNA sense strand
agaagaagcuggucaguua

SEQ ID NO: 447251 - RNA, 19 nt, Homo sapiens
  misc_RNA (1)...(19): siRNA sense strand
ggaggaaguuggccgaaua

SEQ ID NO: 447252 - RNA, 19 nt, Homo sapiens
  misc_RNA (1)...(19): siRNA sense strand
ggacagauguggagccaaa

SEQ ID NO: 447253 - RNA, 19 nt, Homo sapiens
  misc_RNA (1)...(19): siRNA sense strand
ugacagagcugaggaagaa

SEQ ID NO: 447254 - RNA, 19 nt, Homo sapiens
  misc_RNA (1)...(19): siRNA sense strand
gaacaugaccugcuagaug

SEQ ID NO: 447255 - RNA, 19 nt, Homo sapiens
  misc_RNA (1)...(19): siRNA sense strand
ccaaaguucugucauuaaa

SEQ ID NO: 447256 - RNA, 19 nt, Homo sapiens
  misc_RNA (1)...(19): siRNA sense strand
ggaaguaacacucaacaaa

SEQ ID NO: 447257 - RNA, 19 nt, Homo sapiens
  misc_RNA (1)...(19): siRNA sense strand
gagaugaaauucuugcuau

SEQ ID NO: 447258 - RNA, 19 nt, Homo sapiens
  misc_RNA (1)...(19): siRNA sense strand
guaaauggcuuggaacaug

SEQ ID NO: 447259 - RNA, 19 nt, Homo sapiens
  misc_RNA (1)...(19): siRNA sense strand
ggccuuggcuuuaguauug

SEQ ID NO: 447260 - RNA, 19 nt, Homo sapiens
  misc_RNA (1)...(19): siRNA sense strand
gcagaggacggaagacuua

SEQ ID NO: 447261 - RNA, 19 nt, Homo sapiens
  misc_RNA (1)...(19): siRNA sense strand
gaacggcccugacccugaa

SEQ ID NO: 447262 - RNA, 19 nt, Homo sapiens
  misc_RNA (1)...(19): siRNA sense strand
gcauaggaauucuucauga

SEQ ID NO: 447263 - RNA, 19 nt, Homo sapiens
  misc_RNA (1)...(19): siRNA sense strand
gagacgagcugccuaguca

SEQ ID NO: 447264 - RNA, 19 nt, Homo sapiens
  misc_RNA (1)...(19): siRNA sense strand
agaaggaccugugcaguua

SEQ ID NO: 447265 - RNA, 19 nt, Homo sapiens
  misc_RNA (1)...(19): siRNA sense strand
gagcauagaauuccaaaga

SEQ ID NO: 447266 - RNA, 19 nt, Homo sapiens
  misc_RNA (1)...(19): siRNA sense strand
gaaaucacuugguccuuug

SEQ ID NO: 447267 - RNA, 19 nt, Homo sapiens
  misc_RNA (1)...(19): siRNA sense strand
gaugaaauccuagauguaa

SEQ ID NO: 447268 - RNA, 19 nt, Homo sapiens
  misc_RNA (1)...(19): siRNA sense strand
ggacagggcauauauagug

SEQ ID NO: 447269 - RNA, 19 nt, Homo sapiens
  misc_RNA (1)...(19): siRNA sense strand
gaugggcccuuggucauua

SEQ ID NO: 447270 - RNA, 19 nt, Homo sapiens
  misc_RNA (1)...(19): siRNA sense strand
uuugaugccuggaauauua

SEQ ID NO: 447271 - RNA, 19 nt, Homo sapiens
  misc_RNA (1)...(19): siRNA sense strand
aauagaagcuggagaugaa

SEQ ID NO: 447272 - RNA, 19 nt, Homo sapiens
  misc_RNA (1)...(19): siRNA sense strand
ccugugcaguuauuaauua

SEQ ID NO: 447273 - RNA, 19 nt, Homo sapiens
  misc_RNA (1)...(19): siRNA sense strand
gaucaaauccuggaaguga

SEQ ID NO: 447274 - RNA, 19 nt, Homo sapiens
  misc_RNA (1)...(19): siRNA sense strand
aaucugaacucucccagua

SEQ ID NO: 447275 - RNA, 19 nt, Homo sapiens
  misc_RNA (1)...(19): siRNA sense strand
caacaaagagccaagaguu

SEQ ID NO: 447276 - RNA, 19 nt, Homo sapiens
  misc_RNA (1)...(19): siRNA sense strand
gaacuaaagaaaucacuug

SEQ ID NO: 447277 - RNA, 19 nt, Homo sapiens
  misc_RNA (1)...(19): siRNA sense strand
acgaaacccugaaucaaua

SEQ ID NO: 447278 - RNA, 19 nt, Homo sapiens
  misc_RNA (1)...(19): siRNA sense strand
gcugugagguguccaguga

SEQ ID NO: 447279 - RNA, 19 nt, Homo sapiens
  misc_RNA (1)...(19): siRNA sense strand
ccacauggcuguccucucu

SEQ ID NO: 447280 - RNA, 19 nt, Homo sapiens
  misc_RNA (1)...(19): siRNA sense strand
auaaggaccugucuaagaa

SEQ ID NO: 447281 - RNA, 19 nt, Homo sapiens
  misc_RNA (1)...(19): siRNA sense strand
ggaagaguuugacagagaa

SEQ ID NO: 447282 - RNA, 19 nt, Homo sapiens
  misc_RNA (1)...(19): siRNA sense strand
cggaguggauuauuuguuu

SEQ ID NO: 447283 - RNA, 19 nt, Homo sapiens
  misc_RNA (1)...(19): siRNA sense strand
gaaguuggccgaauaugga

SEQ ID NO: 447284 - RNA, 19 nt, Homo sapiens
  misc_RNA (1)...(19): siRNA sense strand
auaaagggcuugacauuuc

SEQ ID NO: 447285 - RNA, 19 nt, Homo sapiens
  misc_RNA (1)...(19): siRNA sense strand
ggaauauuaugaagucugu

SEQ ID NO: 447286 - RNA, 19 nt, Homo sapiens
  misc_RNA (1)...(19): siRNA sense strand
ccacaucucugaaagucaa

SEQ ID NO: 447287 - RNA, 19 nt, Homo sapiens
  misc_RNA (1)...(19): siRNA sense strand
gaagacagcaccucccuau

SEQ ID NO: 447288 - RNA, 19 nt, Homo sapiens
  misc_RNA (1)...(19): siRNA sense strand
caauuccucuccuggcuua

SEQ ID NO: 447289 - RNA, 19 nt, Homo sapiens
  misc_RNA (1)...(19): siRNA sense strand
ggacggaagacuuaaagaa

SEQ ID NO: 447290 - RNA, 19 nt, Homo sapiens
  misc_RNA (1)...(19): siRNA sense strand
gggcauauauaguguaaag

SEQ ID NO: 447291 - RNA, 19 nt, Homo sapiens
  misc_RNA (1)...(19): siRNA sense strand
gaaaugcuucugacuaaug

SEQ ID NO: 447292 - RNA, 19 nt, Homo sapiens
  misc_RNA (1)...(19): siRNA sense strand
uaaauggcuuggaacauga

SEQ ID NO: 447293 - RNA, 19 nt, Homo sapiens
  misc_RNA (1)...(19): siRNA sense strand
gcagauguuugcuucauag

SEQ ID NO: 447294 - RNA, 19 nt, Homo sapiens
  misc_RNA (1)...(19): siRNA sense strand
gaaggaacaaccucuaaug

SEQ ID NO: 447295 - RNA, 19 nt, Homo sapiens
  misc_RNA (1)...(19): siRNA sense strand
agaaaucacuugguccuuu

SEQ ID NO: 447296 - RNA, 19 nt, Homo sapiens
  misc_RNA (1)...(19): siRNA sense strand
gcauagaauuccaaagaca

SEQ ID NO: 447297 - RNA, 19 nt, Homo sapiens
  misc_RNA (1)...(19): siRNA sense strand
gaacaagcuggaauaauag

SEQ ID NO: 447298 - RNA, 19 nt, Homo sapiens
  misc_RNA (1)...(19): siRNA sense strand
ggaggaccaucucuacuuc

SEQ ID NO: 447299 - RNA, 19 nt, Homo sapiens
  misc_RNA (1)...(19): siRNA sense strand
gaagaaaccacagaaguca

SEQ ID NO: 447300 - RNA, 19 nt, Homo sapiens
  misc_RNA (1)...(19): siRNA sense strand
gaacugucaggaucaagua

SEQ ID NO: 447301 - RNA, 19 nt, Homo sapiens
  misc_RNA (1)...(19): siRNA sense strand
uccagaagcugcaggagua

SEQ ID NO: 447302 - RNA, 19 nt, Homo sapiens
  misc_RNA (1)...(19): siRNA sense strand
acaaagcccacuccacuua

SEQ ID NO: 447303 - RNA, 19 nt, Homo sapiens
  misc_RNA (1)...(19): siRNA sense strand
gaaagcauaggaauucuuc

SEQ ID NO: 447304 - RNA, 19 nt, Homo sapiens
  misc_RNA (1)...(19): siRNA sense strand
gcacuuugaugccuggaau

SEQ ID NO: 447305 - RNA, 19 nt, Homo sapiens
  misc_RNA (1)...(19): siRNA sense strand
gaacaaaccagcugaaaau

SEQ ID NO: 447306 - RNA, 19 nt, Homo sapiens
  misc_RNA (1)...(19): siRNA sense strand
caucaucacucuuggagau

SEQ ID NO: 447307 - RNA, 19 nt, Homo sapiens
  misc_RNA (1)...(19): siRNA sense strand
gcacuuaucaggagagcaa

SEQ ID NO: 447308 - RNA, 19 nt, Homo sapiens
  misc_RNA (1)...(19): siRNA sense strand
gaaguaacacucaacaaag

SEQ ID NO: 447309 - RNA, 19 nt, Homo sapiens
  misc_RNA (1)...(19): siRNA sense strand
caauaaagggcuugacauu

SEQ ID NO: 447310 - RNA, 19 nt, Homo sapiens
  misc_RNA (1)...(19): siRNA sense strand
caagaccucuguagacaca

SEQ ID NO: 447311 - RNA, 19 nt, Homo sapiens
  misc_RNA (1)...(19): siRNA sense strand
aggcacagcugcacaaaga

SEQ ID NO: 447312 - RNA, 19 nt, Homo sapiens
  misc_RNA (1)...(19): siRNA sense strand
gagaaggaacaaccucuaa

SEQ ID NO: 447313 - RNA, 19 nt, Homo sapiens
  misc_RNA (1)...(19): siRNA sense strand
gacauaagcacuucacaga

SEQ ID NO: 447314 - RNA, 19 nt, Homo sapiens
  misc_RNA (1)...(19): siRNA sense strand
gcaacuacucuagaaauuu

SEQ ID NO: 447315 - RNA, 19 nt, Homo sapiens
  misc_RNA (1)...(19): siRNA sense strand
gaagucuacccgcuccuua

SEQ ID NO: 447316 - RNA, 19 nt, Homo sapiens
  misc_RNA (1)...(19): siRNA sense strand
ucagugggaucgaaaucua

SEQ ID NO: 447317 - RNA, 19 nt, Homo sapiens
  misc_RNA (1)...(19): siRNA sense strand
gaacuuugcuguggaugag

SEQ ID NO: 447318 - RNA, 19 nt, Homo sapiens
  misc_RNA (1)...(19): siRNA sense strand
gagaaacaccuaccuugga

SEQ ID NO: 447319 - RNA, 19 nt, Homo sapiens
  misc_RNA (1)...(19): siRNA sense strand
gauguuugcuucauagucu

SEQ ID NO: 447320 - RNA, 19 nt, Homo sapiens
  misc_RNA (1)...(19): siRNA sense strand
aacaugaccugcuagauga

SEQ ID NO: 447321 - RNA, 19 nt, Homo sapiens
  misc_RNA (1)...(19): siRNA sense strand
cagccaaaguucugucauu

SEQ ID NO: 447322 - RNA, 19 nt, Homo sapiens
  misc_RNA (1)...(19): siRNA sense strand
ccuggaagcugguggaaga

SEQ ID NO: 447323 - RNA, 19 nt, Homo sapiens
  misc_RNA (1)...(19): siRNA sense strand
ggaaaacacuggugagcaa

SEQ ID NO: 447324 - RNA, 19 nt, Homo sapiens
  misc_RNA (1)...(19): siRNA sense strand
gaagaguccggcagaaaug

SEQ ID NO: 447325 - RNA, 19 nt, Homo sapiens
  misc_RNA (1)...(19): siRNA sense strand
aggaacagauugagauuug

SEQ ID NO: 447326 - RNA, 19 nt, Homo sapiens
  misc_RNA (1)...(19): siRNA sense strand
gaagaggaacagauugaga

SEQ ID NO: 447327 - RNA, 19 nt, Homo sapiens
  misc_RNA (1)...(19): siRNA sense strand
aaagcccacuccacuuaua

SEQ ID NO: 447328 - RNA, 19 nt, Homo sapiens
  misc_RNA (1)...(19): siRNA sense strand
ggagaugaaauucuugcua

SEQ ID NO: 447329 - RNA, 19 nt, Homo sapiens
  misc_RNA (1)...(19): siRNA sense strand
ggagaaguguggcuguaca

SEQ ID NO: 447330 - RNA, 19 nt, Homo sapiens
  misc_RNA (1)...(19): siRNA sense strand
gaaagcacaaucagagaau

SEQ ID NO: 447331 - RNA, 19 nt, Homo sapiens
  misc_RNA (1)...(19): siRNA sense strand
gaagaagcuggucaguuaa

SEQ ID NO: 447332 - RNA, 19 nt, Homo sapiens
  misc_RNA (1)...(19): siRNA sense strand
ggccugguuuaaagaaaua

SEQ ID NO: 447333 - RNA, 19 nt, Homo sapiens
  misc_RNA (1)...(19): siRNA sense strand
ccaggccacuucugucaaa

SEQ ID NO: 447334 - RNA, 19 nt, Homo sapiens
  misc_RNA (1)...(19): siRNA sense strand
uaaagggcuugacauuuca

SEQ ID NO: 447335 - RNA, 19 nt, Homo sapiens
  misc_RNA (1)...(19): siRNA sense strand
gcagaaucauccacaaguc

SEQ ID NO: 447336 - RNA, 19 nt, Homo sapiens
  misc_RNA (1)...(19): siRNA sense strand
gacgaaacccugaaucaau

SEQ ID NO: 447337 - RNA, 19 nt, Homo sapiens
  misc_RNA (1)...(19): siRNA sense strand
caugguaaauggcuuggaa

SEQ ID NO: 447338 - RNA, 19 nt, Homo sapiens
  misc_RNA (1)...(19): siRNA sense strand
gagcaacuacucuagaaau

SEQ ID NO: 447339 - RNA, 19 nt, Homo sapiens
  misc_RNA (1)...(19): siRNA sense strand
caauuaaucccgacaaaca

SEQ ID NO: 447340 - RNA, 19 nt, Homo sapiens
  misc_RNA (1)...(19): siRNA sense strand
gcagcaaggucuccgucuu

SEQ ID NO: 447341 - RNA, 19 nt, Homo sapiens
  misc_RNA (1)...(19): siRNA sense strand
ugacggacauugacagcuu

SEQ ID NO: 447342 - RNA, 19 nt, Homo sapiens
  misc_RNA (1)...(19): siRNA sense strand
cauaagcacuucacagaac

SEQ ID NO: 447343 - RNA, 19 nt, Homo sapiens
  misc_RNA (1)...(19): siRNA sense strand
ggaauguccugaagguucu

SEQ ID NO: 447344 - RNA, 19 nt, Homo sapiens
  misc_RNA (1)...(19): siRNA sense strand
aaguaacacucaacaaaga

SEQ ID NO: 447345 - RNA, 19 nt, Homo sapiens
  misc_RNA (1)...(19): siRNA sense strand
aaacugagcuggagaucac

SEQ ID NO: 447346 - RNA, 19 nt, Homo sapiens
  misc_RNA (1)...(19): siRNA sense strand
gagcaugccugaccuugac

SEQ ID NO: 447347 - RNA, 19 nt, Homo sapiens
  misc_RNA (1)...(19): siRNA sense strand
gcacacauuugaggagcaa

SEQ ID NO: 447348 - RNA, 19 nt, Homo sapiens
  misc_RNA (1)...(19): siRNA sense strand
caucauggccugguuuaaa

SEQ ID NO: 447349 - RNA, 19 nt, Homo sapiens
  misc_RNA (1)...(19): siRNA sense strand
ugaacaagcuggaauaaua

SEQ ID NO: 447350 - RNA, 19 nt, Homo sapiens
  misc_RNA (1)...(19): siRNA sense strand
agaagaagcuggucaguua

SEQ ID NO: 447351 - RNA, 19 nt, Homo sapiens
  misc_RNA (1)...(19): siRNA sense strand
ggaggaaguuggccgaaua

SEQ ID NO: 447352 - RNA, 19 nt, Homo sapiens
  misc_RNA (1)...(19): siRNA sense strand
ggacagauguggagccaaa

SEQ ID NO: 447353 - RNA, 19 nt, Homo sapiens
  misc_RNA (1)...(19): siRNA sense strand
ugacagagcugaggaagaa

SEQ ID NO: 447354 - RNA, 19 nt, Homo sapiens
  misc_RNA (1)...(19): siRNA sense strand
gaacaugaccugcuagaug

SEQ ID NO: 447355 - RNA, 19 nt, Homo sapiens
  misc_RNA (1)...(19): siRNA sense strand
ccaaaguucugucauuaaa

SEQ ID NO: 447356 - RNA, 19 nt, Homo sapiens
  misc_RNA (1)...(19): siRNA sense strand
ggaaguaacacucaacaaa

SEQ ID NO: 447357 - RNA, 19 nt, Homo sapiens
  misc_RNA (1)...(19): siRNA sense strand
gagaugaaauucuugcuau

SEQ ID NO: 447358 - RNA, 19 nt, Homo sapiens
  misc_RNA (1)...(19): siRNA sense strand
guaaauggcuuggaacaug

SEQ ID NO: 447359 - RNA, 19 nt, Homo sapiens
  misc_RNA (1)...(19): siRNA sense strand
ggccuuggcuuuaguauug

SEQ ID NO: 447360 - RNA, 19 nt, Homo sapiens
  misc_RNA (1)...(19): siRNA sense strand
gcagaggacggaagacuua

SEQ ID NO: 447361 - RNA, 19 nt, Homo sapiens
  misc_RNA (1)...(19): siRNA sense strand
gaacggcccugacccugaa

SEQ ID NO: 447362 - RNA, 19 nt, Homo sapiens
  misc_RNA (1)...(19): siRNA sense strand
gcauaggaauucuucauga

SEQ ID NO: 447363 - RNA, 19 nt, Homo sapiens
  misc_RNA (1)...(19): siRNA sense strand
gagacgagcugccuaguca

SEQ ID NO: 447364 - RNA, 19 nt, Homo sapiens
  misc_RNA (1)...(19): siRNA sense strand
agaaggaccugugcaguua

SEQ ID NO: 447365 - RNA, 19 nt, Homo sapiens
  misc_RNA (1)...(19): siRNA sense strand
gagcauagaauuccaaaga

SEQ ID NO: 447366 - RNA, 19 nt, Homo sapiens
  misc_RNA (1)...(19): siRNA sense strand
gaaaucacuugguccuuug

SEQ ID NO: 447367 - RNA, 19 nt, Homo sapiens
  misc_RNA (1)...(19): siRNA sense strand
gaugaaauccuagauguaa

SEQ ID NO: 447368 - RNA, 19 nt, Homo sapiens
  misc_RNA (1)...(19): siRNA sense strand
ggacagggcauauauagug

SEQ ID NO: 447369 - RNA, 19 nt, Homo sapiens
  misc_RNA (1)...(19): siRNA sense strand
gaugggcccuuggucauua

SEQ ID NO: 447370 - RNA, 19 nt, Homo sapiens
  misc_RNA (1)...(19): siRNA sense strand
uuugaugccuggaauauua

SEQ ID NO: 447371 - RNA, 19 nt, Homo sapiens
  misc_RNA (1)...(19): siRNA sense strand
aauagaagcuggagaugaa

SEQ ID NO: 447372 - RNA, 19 nt, Homo sapiens
  misc_RNA (1)...(19): siRNA sense strand
ccugugcaguuauuaauua

SEQ ID NO: 447373 - RNA, 19 nt, Homo sapiens
  misc_RNA (1)...(19): siRNA sense strand
gaucaaauccuggaaguga

SEQ ID NO: 447374 - RNA, 19 nt, Homo sapiens
  misc_RNA (1)...(19): siRNA sense strand
aaucugaacucucccagua

SEQ ID NO: 447375 - RNA, 19 nt, Homo sapiens
  misc_RNA (1)...(19): siRNA sense strand
caacaaagagccaagaguu

SEQ ID NO: 447376 - RNA, 19 nt, Homo sapiens
  misc_RNA (1)...(19): siRNA sense strand
gaacuaaagaaaucacuug

SEQ ID NO: 447377 - RNA, 19 nt, Homo sapiens
  misc_RNA (1)...(19): siRNA sense strand
acgaaacccugaaucaaua

SEQ ID NO: 447378 - RNA, 19 nt, Homo sapiens
  misc_RNA (1)...(19): siRNA sense strand
gcugugagguguccaguga

SEQ ID NO: 447379 - RNA, 19 nt, Homo sapiens
  misc_RNA (1)...(19): siRNA sense strand
ccacauggcuguccucucu

SEQ ID NO: 447380 - RNA, 19 nt, Homo sapiens
  misc_RNA (1)...(19): siRNA sense strand
auaaggaccugucuaagaa

SEQ ID NO: 447381 - RNA, 19 nt, Homo sapiens
  misc_RNA (1)...(19): siRNA sense strand
ggaagaguuugacagagaa

SEQ ID NO: 447382 - RNA, 19 nt, Homo sapiens
  misc_RNA (1)...(19): siRNA sense strand
cggaguggauuauuuguuu

SEQ ID NO: 447383 - RNA, 19 nt, Homo sapiens
  misc_RNA (1)...(19): siRNA sense strand
gaaguuggccgaauaugga

SEQ ID NO: 447384 - RNA, 19 nt, Homo sapiens
  misc_RNA (1)...(19): siRNA sense strand
auaaagggcuugacauuuc

SEQ ID NO: 447385 - RNA, 19 nt, Homo sapiens
  misc_RNA (1)...(19): siRNA sense strand
ggaauauuaugaagucugu

SEQ ID NO: 447386 - RNA, 19 nt, Homo sapiens
  misc_RNA (1)...(19): siRNA sense strand
ccacaucucugaaagucaa

SEQ ID NO: 447387 - RNA, 19 nt, Homo sapiens
  misc_RNA (1)...(19): siRNA sense strand
gaagacagcaccucccuau

SEQ ID NO: 447388 - RNA, 19 nt, Homo sapiens
  misc_RNA (1)...(19): siRNA sense strand
caauuccucuccuggcuua

SEQ ID NO: 447389 - RNA, 19 nt, Homo sapiens
  misc_RNA (1)...(19): siRNA sense strand
ggacggaagacuuaaagaa

SEQ ID NO: 447390 - RNA, 19 nt, Homo sapiens
  misc_RNA (1)...(19): siRNA sense strand
gggcauauauaguguaaag

SEQ ID NO: 447391 - RNA, 19 nt, Homo sapiens
  misc_RNA (1)...(19): siRNA sense strand
gaaaugcuucugacuaaug

SEQ ID NO: 447392 - RNA, 19 nt, Homo sapiens
  misc_RNA (1)...(19): siRNA sense strand
uaaauggcuuggaacauga

SEQ ID NO: 447393 - RNA, 19 nt, Homo sapiens
  misc_RNA (1)...(19): siRNA sense strand
gcagauguuugcuucauag

SEQ ID NO: 447394 - RNA, 19 nt, Homo sapiens
  misc_RNA (1)...(19): siRNA sense strand
gaaggaacaaccucuaaug

SEQ ID NO: 447395 - RNA, 19 nt, Homo sapiens
  misc_RNA (1)...(19): siRNA sense strand
agaaaucacuugguccuuu

SEQ ID NO: 447396 - RNA, 19 nt, Homo sapiens
  misc_RNA (1)...(19): siRNA sense strand
gcauagaauuccaaagaca

SEQ ID NO: 447397 - RNA, 19 nt, Homo sapiens
  misc_RNA (1)...(19): siRNA sense strand
gaacaagcuggaauaauag

SEQ ID NO: 447398 - RNA, 19 nt, Homo sapiens
  misc_RNA (1)...(19): siRNA sense strand
ggaggaccaucucuacuuc

SEQ ID NO: 447399 - RNA, 19 nt, Homo sapiens
  misc_RNA (1)...(19): siRNA sense strand
gaagaaaccacagaaguca

SEQ ID NO: 447400 - RNA, 19 nt, Homo sapiens
  misc_RNA (1)...(19): siRNA sense strand
gaacugucaggaucaagua

SEQ ID NO: 447401 - RNA, 19 nt, Homo sapiens
  misc_RNA (1)...(19): siRNA sense strand
uccagaagcugcaggagua

SEQ ID NO: 447402 - RNA, 19 nt, Homo sapiens
  misc_RNA (1)...(19): siRNA sense strand
acaaagcccacuccacuua

SEQ ID NO: 447403 - RNA, 19 nt, Homo sapiens
  misc_RNA (1)...(19): siRNA sense strand
gaaagcauaggaauucuuc

SEQ ID NO: 447404 - RNA, 19 nt, Homo sapiens
  misc_RNA (1)...(19): siRNA sense strand
gcacuuugaugccuggaau

SEQ ID NO: 447405 - RNA, 19 nt, Homo sapiens
  misc_RNA (1)...(19): siRNA sense strand
gaacaaaccagcugaaaau

SEQ ID NO: 447406 - RNA, 19 nt, Homo sapiens
  misc_RNA (1)...(19): siRNA sense strand
caucaucacucuuggagau

SEQ ID NO: 447407 - RNA, 19 nt, Homo sapiens
  misc_RNA (1)...(19): siRNA sense strand
gcacuuaucaggagagcaa

SEQ ID NO: 447408 - RNA, 19 nt, Homo sapiens
  misc_RNA (1)...(19): siRNA sense strand
gaaguaacacucaacaaag

SEQ ID NO: 447409 - RNA, 19 nt, Homo sapiens
  misc_RNA (1)...(19): siRNA sense strand
caauaaagggcuugacauu

SEQ ID NO: 447410 - RNA, 19 nt, Homo sapiens
  misc_RNA (1)...(19): siRNA sense strand
caagaccucuguagacaca

SEQ ID NO: 447411 - RNA, 19 nt, Homo sapiens
  misc_RNA (1)...(19): siRNA sense strand
aggcacagcugcacaaaga

SEQ ID NO: 447412 - RNA, 19 nt, Homo sapiens
  misc_RNA (1)...(19): siRNA sense strand
gagaaggaacaaccucuaa

SEQ ID NO: 447413 - RNA, 19 nt, Homo sapiens
  misc_RNA (1)...(19): siRNA sense strand
gacauaagcacuucacaga

SEQ ID NO: 447414 - RNA, 19 nt, Homo sapiens
  misc_RNA (1)...(19): siRNA sense strand
gcaacuacucuagaaauuu

SEQ ID NO: 447415 - RNA, 19 nt, Homo sapiens
  misc_RNA (1)...(19): siRNA sense strand
gaagucuacccgcuccuua

SEQ ID NO: 447416 - RNA, 19 nt, Homo sapiens
  misc_RNA (1)...(19): siRNA sense strand
ucagugggaucgaaaucua

SEQ ID NO: 447417 - RNA, 19 nt, Homo sapiens
  misc_RNA (1)...(19): siRNA sense strand
gaacuuugcuguggaugag

SEQ ID NO: 447418 - RNA, 19 nt, Homo sapiens
  misc_RNA (1)...(19): siRNA sense strand
gagaaacaccuaccuugga

SEQ ID NO: 447419 - RNA, 19 nt, Homo sapiens
  misc_RNA (1)...(19): siRNA sense strand
gauguuugcuucauagucu

SEQ ID NO: 447420 - RNA, 19 nt, Homo sapiens
  misc_RNA (1)...(19): siRNA sense strand
aacaugaccugcuagauga

SEQ ID NO: 447421 - RNA, 19 nt, Homo sapiens
  misc_RNA (1)...(19): siRNA sense strand
cagccaaaguucugucauu

SEQ ID NO: 447422 - RNA, 19 nt, Homo sapiens
  misc_RNA (1)...(19): siRNA sense strand
ccuggaagcugguggaaga

SEQ ID NO: 447423 - RNA, 19 nt, Homo sapiens
  misc_RNA (1)...(19): siRNA sense strand
ggaaaacacuggugagcaa

SEQ ID NO: 447424 - RNA, 19 nt, Homo sapiens
  misc_RNA (1)...(19): siRNA sense strand
gaagaguccggcagaaaug

SEQ ID NO: 447425 - RNA, 19 nt, Homo sapiens
  misc_RNA (1)...(19): siRNA sense strand
aggaacagauugagauuug

SEQ ID NO: 447426 - RNA, 19 nt, Homo sapiens
  misc_RNA (1)...(19): siRNA sense strand
gaagaggaacagauugaga

SEQ ID NO: 447427 - RNA, 19 nt, Homo sapiens
  misc_RNA (1)...(19): siRNA sense strand
aaagcccacuccacuuaua

SEQ ID NO: 447428 - RNA, 19 nt, Homo sapiens
  misc_RNA (1)...(19): siRNA sense strand
ggagaugaaauucuugcua

SEQ ID NO: 447429 - RNA, 19 nt, Homo sapiens
  misc_RNA (1)...(19): siRNA sense strand
ggagaaguguggcuguaca

SEQ ID NO: 447430 - RNA, 19 nt, Homo sapiens
  misc_RNA (1)...(19): siRNA sense strand
gaaagcacaaucagagaau

SEQ ID NO: 447431 - RNA, 19 nt, Homo sapiens
  misc_RNA (1)...(19): siRNA sense strand
gaagaagcuggucaguuaa

SEQ ID NO: 447432 - RNA, 19 nt, Homo sapiens
  misc_RNA (1)...(19): siRNA sense strand
ggccugguuuaaagaaaua

SEQ ID NO: 447433 - RNA, 19 nt, Homo sapiens
  misc_RNA (1)...(19): siRNA sense strand
ccaggccacuucugucaaa

SEQ ID NO: 447434 - RNA, 19 nt, Homo sapiens
  misc_RNA (1)...(19): siRNA sense strand
uaaagggcuugacauuuca

SEQ ID NO: 447435 - RNA, 19 nt, Homo sapiens
  misc_RNA (1)...(19): siRNA sense strand
gcagaaucauccacaaguc

SEQ ID NO: 447436 - RNA, 19 nt, Homo sapiens
  misc_RNA (1)...(19): siRNA sense strand
gacgaaacccugaaucaau

SEQ ID NO: 447437 - RNA, 19 nt, Homo sapiens
  misc_RNA (1)...(19): siRNA sense strand
caugguaaauggcuuggaa

SEQ ID NO: 447438 - RNA, 19 nt, Homo sapiens
  misc_RNA (1)...(19): siRNA sense strand
gagcaacuacucuagaaau

SEQ ID NO: 447439 - RNA, 19 nt, Homo sapiens
  misc_RNA (1)...(19): siRNA sense strand
caauuaaucccgacaaaca

SEQ ID NO: 447440 - RNA, 19 nt, Homo sapiens
  misc_RNA (1)...(19): siRNA sense strand
gcagcaaggucuccgucuu

SEQ ID NO: 447441 - RNA, 19 nt, Homo sapiens
  misc_RNA (1)...(19): siRNA sense strand
ugacggacauugacagcuu

SEQ ID NO: 447442 - RNA, 19 nt, Homo sapiens
  misc_RNA (1)...(19): siRNA sense strand
cauaagcacuucacagaac

SEQ ID NO: 447443 - RNA, 19 nt, Homo sapiens
  misc_RNA (1)...(19): siRNA sense strand
ggaauguccugaagguucu

SEQ ID NO: 447444 - RNA, 19 nt, Homo sapiens
  misc_RNA (1)...(19): siRNA sense strand
aaguaacacucaacaaaga

SEQ ID NO: 447445 - RNA, 19 nt, Homo sapiens
  misc_RNA (1)...(19): siRNA sense strand
aaacugagcuggagaucac

SEQ ID NO: 447446 - RNA, 19 nt, Homo sapiens
  misc_RNA (1)...(19): siRNA sense strand
gagcaugccugaccuugac

SEQ ID NO: 447447 - RNA, 19 nt, Homo sapiens
  misc_RNA (1)...(19): siRNA sense strand
gcacacauuugaggagcaa

SEQ ID NO: 447448 - RNA, 19 nt, Homo sapiens
  misc_RNA (1)...(19): siRNA sense strand
caucauggccugguuuaaa

SEQ ID NO: 447449 - RNA, 19 nt, Homo sapiens
  misc_RNA (1)...(19): siRNA sense strand
ggacguagcucuuuccaaa

SEQ ID NO: 447450 - RNA, 19 nt, Homo sapiens
  misc_RNA (1)...(19): siRNA sense strand
ucaacaagcuuaucgacuu

SEQ ID NO: 447451 - RNA, 19 nt, Homo sapiens
  misc_RNA (1)...(19): siRNA sense strand
gcacuucacccaagccauu

SEQ ID NO: 447452 - RNA, 19 nt, Homo sapiens
  misc_RNA (1)...(19): siRNA sense strand
caagauacuuuggaacaga

SEQ ID NO: 447453 - RNA, 19 nt, Homo sapiens
  misc_RNA (1)...(19): siRNA sense strand
uccaaaagcugcaauauaa

SEQ ID NO: 447454 - RNA, 19 nt, Homo sapiens
  misc_RNA (1)...(19): siRNA sense strand
caacaagcuuaucgacuuc

SEQ ID NO: 447455 - RNA, 19 nt, Homo sapiens
  misc_RNA (1)...(19): siRNA sense strand
gcaauggaucaacuucaua

SEQ ID NO: 447456 - RNA, 19 nt, Homo sapiens
  misc_RNA (1)...(19): siRNA sense strand
ggaacuaugugcaggaaac

SEQ ID NO: 447457 - RNA, 19 nt, Homo sapiens
  misc_RNA (1)...(19): siRNA sense strand
gcugcaagauacuuuggaa

SEQ ID NO: 447458 - RNA, 19 nt, Homo sapiens
  misc_RNA (1)...(19): siRNA sense strand
auucaaagcugcaagauac

SEQ ID NO: 447459 - RNA, 19 nt, Homo sapiens
  misc_RNA (1)...(19): siRNA sense strand
uggaacagauugaggaaca

SEQ ID NO: 447460 - RNA, 19 nt, Homo sapiens
  misc_RNA (1)...(19): siRNA sense strand
gcaagauacuuuggaacag

SEQ ID NO: 447461 - RNA, 19 nt, Homo sapiens
  misc_RNA (1)...(19): siRNA sense strand
caauggaucaacuucauau

SEQ ID NO: 447462 - RNA, 19 nt, Homo sapiens
  misc_RNA (1)...(19): siRNA sense strand
caauauaaggaucucugua

SEQ ID NO: 447463 - RNA, 19 nt, Homo sapiens
  misc_RNA (1)...(19): siRNA sense strand
ccaagguucaacaagcuua

SEQ ID NO: 447464 - RNA, 19 nt, Homo sapiens
  misc_RNA (1)...(19): siRNA sense strand
gacauuaaccauuauacca

SEQ ID NO: 447465 - RNA, 19 nt, Homo sapiens
  misc_RNA (1)...(19): siRNA sense strand
caggaaacacagacacaaa

SEQ ID NO: 447466 - RNA, 19 nt, Homo sapiens
  misc_RNA (1)...(19): siRNA sense strand
gcuuaucgacuucuuggaa

SEQ ID NO: 447467 - RNA, 19 nt, Homo sapiens
  misc_RNA (1)...(19): siRNA sense strand
aaacacagacagcaaugga

SEQ ID NO: 447468 - RNA, 19 nt, Homo sapiens
  misc_RNA (1)...(19): siRNA sense strand
gcaggaaacacagacacaa

SEQ ID NO: 447469 - RNA, 19 nt, Homo sapiens
  misc_RNA (1)...(19): siRNA sense strand
uccaaaaucugcaagaauu

SEQ ID NO: 447470 - RNA, 19 nt, Homo sapiens
  misc_RNA (1)...(19): siRNA sense strand
gcaauauaaggaucucugu

SEQ ID NO: 447471 - RNA, 19 nt, Homo sapiens
  misc_RNA (1)...(19): siRNA sense strand
agacagcaauggaucaacu

SEQ ID NO: 447472 - RNA, 19 nt, Homo sapiens
  misc_RNA (1)...(19): siRNA sense strand
cuuaucgacuucuuggaaa

SEQ ID NO: 447473 - RNA, 19 nt, Homo sapiens
  misc_RNA (1)...(19): siRNA sense strand
uggaucaacuucauaugca

SEQ ID NO: 447474 - RNA, 19 nt, Homo sapiens
  misc_RNA (1)...(19): siRNA sense strand
gaaacacagacacaaaauu

SEQ ID NO: 447475 - RNA, 19 nt, Homo sapiens
  misc_RNA (1)...(19): siRNA sense strand
caccguguuucaaguuguu

SEQ ID NO: 447476 - RNA, 19 nt, Homo sapiens
  misc_RNA (1)...(19): siRNA sense strand
guggaacuaugugcaggaa

SEQ ID NO: 447477 - RNA, 19 nt, Homo sapiens
  misc_RNA (1)...(19): siRNA sense strand
ugaauucaaagcugcaaga

SEQ ID NO: 447478 - RNA, 19 nt, Homo sapiens
  misc_RNA (1)...(19): siRNA sense strand
gaacuaugugcaggaaaca

SEQ ID NO: 447479 - RNA, 19 nt, Homo sapiens
  misc_RNA (1)...(19): siRNA sense strand
caacuucauaugcacuuca

SEQ ID NO: 447480 - RNA, 19 nt, Homo sapiens
  misc_RNA (1)...(19): siRNA sense strand
auauaaggaucucuguaca

SEQ ID NO: 447481 - RNA, 19 nt, Homo sapiens
  misc_RNA (1)...(19): siRNA sense strand
aaacacagacacaaaauuc

SEQ ID NO: 447482 - RNA, 19 nt, Homo sapiens
  misc_RNA (1)...(19): siRNA sense strand
aagauacuuuggaacagau

SEQ ID NO: 447483 - RNA, 19 nt, Homo sapiens
  misc_RNA (1)...(19): siRNA sense strand
aauauaaggaucucuguac

SEQ ID NO: 447484 - RNA, 19 nt, Homo sapiens
  misc_RNA (1)...(19): siRNA sense strand
gaauucaaagcugcaagau

SEQ ID NO: 447485 - RNA, 19 nt, Homo sapiens
  misc_RNA (1)...(19): siRNA sense strand
aauucaaagcugcaagaua

SEQ ID NO: 447486 - RNA, 19 nt, Homo sapiens
  misc_RNA (1)...(19): siRNA sense strand
uaccaagguucaacaagcu

SEQ ID NO: 447487 - RNA, 19 nt, Homo sapiens
  misc_RNA (1)...(19): siRNA sense strand
ggaacagauugaggaacag

SEQ ID NO: 447488 - RNA, 19 nt, Homo sapiens
  misc_RNA (1)...(19): siRNA sense strand
uugguuauguggaacuaug

SEQ ID NO: 447489 - RNA, 19 nt, Homo sapiens
  misc_RNA (1)...(19): siRNA sense strand
agcaauggaucaacuucau

SEQ ID NO: 447490 - RNA, 19 nt, Homo sapiens
  misc_RNA (1)...(19): siRNA sense strand
cugcaagaauuuugacauu

SEQ ID NO: 447491 - RNA, 19 nt, Homo sapiens
  misc_RNA (1)...(19): siRNA sense strand
ggaaacacagacacaaaau

SEQ ID NO: 447492 - RNA, 19 nt, Homo sapiens
  misc_RNA (1)...(19): siRNA sense strand
gcacuucacccaagccauu

SEQ ID NO: 447493 - RNA, 19 nt, Homo sapiens
  misc_RNA (1)...(19): siRNA sense strand
uccaaaagcugcaauauaa

SEQ ID NO: 447494 - RNA, 19 nt, Homo sapiens
  misc_RNA (1)...(19): siRNA sense strand
ggaacuaugugcaggaaac

SEQ ID NO: 447495 - RNA, 19 nt, Homo sapiens
  misc_RNA (1)...(19): siRNA sense strand
caauauaaggaucucugua

SEQ ID NO: 447496 - RNA, 19 nt, Homo sapiens
  misc_RNA (1)...(19): siRNA sense strand
caggaaacacagacacaaa

SEQ ID NO: 447497 - RNA, 19 nt, Homo sapiens
  misc_RNA (1)...(19): siRNA sense strand
gcaggaaacacagacacaa

SEQ ID NO: 447498 - RNA, 19 nt, Homo sapiens
  misc_RNA (1)...(19): siRNA sense strand
gcaauauaaggaucucugu

SEQ ID NO: 447499 - RNA, 19 nt, Homo sapiens
  misc_RNA (1)...(19): siRNA sense strand
gaaacacagacacaaaauu

SEQ ID NO: 447500 - RNA, 19 nt, Homo sapiens
  misc_RNA (1)...(19): siRNA sense strand
caccguguuucaaguuguu

SEQ ID NO: 447501 - RNA, 19 nt, Homo sapiens
  misc_RNA (1)...(19): siRNA sense strand
guggaacuaugugcaggaa

SEQ ID NO: 447502 - RNA, 19 nt, Homo sapiens
  misc_RNA (1)...(19): siRNA sense strand
gaacuaugugcaggaaaca

SEQ ID NO: 447503 - RNA, 19 nt, Homo sapiens
  misc_RNA (1)...(19): siRNA sense strand
caacuucauaugcacuuca

SEQ ID NO: 447504 - RNA, 19 nt, Homo sapiens
  misc_RNA (1)...(19): siRNA sense strand
auauaaggaucucuguaca

SEQ ID NO: 447505 - RNA, 19 nt, Homo sapiens
  misc_RNA (1)...(19): siRNA sense strand
aaacacagacacaaaauuc

SEQ ID NO: 447506 - RNA, 19 nt, Homo sapiens
  misc_RNA (1)...(19): siRNA sense strand
aauauaaggaucucuguac

SEQ ID NO: 447507 - RNA, 19 nt, Homo sapiens
  misc_RNA (1)...(19): siRNA sense strand
uugguuauguggaacuaug

SEQ ID NO: 447508 - RNA, 19 nt, Homo sapiens
  misc_RNA (1)...(19): siRNA sense strand
ggaaacacagacacaaaau

SEQ ID NO: 447509 - RNA, 19 nt, Homo sapiens
  misc_RNA (1)...(19): siRNA sense strand
gcacuucacccaagccauu

SEQ ID NO: 447510 - RNA, 19 nt, Homo sapiens
  misc_RNA (1)...(19): siRNA sense strand
uccaaaagcugcaauauaa

SEQ ID NO: 447511 - RNA, 19 nt, Homo sapiens
  misc_RNA (1)...(19): siRNA sense strand
ggaacuaugugcaggaaac

SEQ ID NO: 447512 - RNA, 19 nt, Homo sapiens
  misc_RNA (1)...(19): siRNA sense strand
caauauaaggaucucugua

SEQ ID NO: 447513 - RNA, 19 nt, Homo sapiens
  misc_RNA (1)...(19): siRNA sense strand
caggaaacacagacacaaa

SEQ ID NO: 447514 - RNA, 19 nt, Homo sapiens
  misc_RNA (1)...(19): siRNA sense strand
gcaggaaacacagacacaa

SEQ ID NO: 447515 - RNA, 19 nt, Homo sapiens
  misc_RNA (1)...(19): siRNA sense strand
gcaauauaaggaucucugu

SEQ ID NO: 447516 - RNA, 19 nt, Homo sapiens
  misc_RNA (1)...(19): siRNA sense strand
gaaacacagacacaaaauu

SEQ ID NO: 447517 - RNA, 19 nt, Homo sapiens
  misc_RNA (1)...(19): siRNA sense strand
caccguguuucaaguuguu

SEQ ID NO: 447518 - RNA, 19 nt, Homo sapiens
  misc_RNA (1)...(19): siRNA sense strand
guggaacuaugugcaggaa

SEQ ID NO: 447519 - RNA, 19 nt, Homo sapiens
  misc_RNA (1)...(19): siRNA sense strand
gaacuaugugcaggaaaca

SEQ ID NO: 447520 - RNA, 19 nt, Homo sapiens
  misc_RNA (1)...(19): siRNA sense strand
caacuucauaugcacuuca

SEQ ID NO: 447521 - RNA, 19 nt, Homo sapiens
  misc_RNA (1)...(19): siRNA sense strand
auauaaggaucucuguaca

SEQ ID NO: 447522 - RNA, 19 nt, Homo sapiens
  misc_RNA (1)...(19): siRNA sense strand
aaacacagacacaaaauuc

SEQ ID NO: 447523 - RNA, 19 nt, Homo sapiens
  misc_RNA (1)...(19): siRNA sense strand
aauauaaggaucucuguac

SEQ ID NO: 447524 - RNA, 19 nt, Homo sapiens
  misc_RNA (1)...(19): siRNA sense strand
uugguuauguggaacuaug

SEQ ID NO: 447525 - RNA, 19 nt, Homo sapiens
  misc_RNA (1)...(19): siRNA sense strand
ggaaacacagacacaaaau

SEQ ID NO: 447526 - RNA, 19 nt, Homo sapiens
  misc_RNA (1)...(19): siRNA sense strand
ggcccuggcugccuucuua

SEQ ID NO: 447527 - RNA, 19 nt, Homo sapiens
  misc_RNA (1)...(19): siRNA sense strand
gagcucaaccugcaacuuu

SEQ ID NO: 447528 - RNA, 19 nt, Homo sapiens
  misc_RNA (1)...(19): siRNA sense strand
gcaccggcaucaaccguaa

SEQ ID NO: 447529 - RNA, 19 nt, Homo sapiens
  misc_RNA (1)...(19): siRNA sense strand
caucaaccguaauagcauu

SEQ ID NO: 447530 - RNA, 19 nt, Homo sapiens
  misc_RNA (1)...(19): siRNA sense strand
ccagcccugugcucucuua

SEQ ID NO: 447531 - RNA, 19 nt, Homo sapiens
  misc_RNA (1)...(19): siRNA sense strand
ugucgaggcucugcagaaa

SEQ ID NO: 447532 - RNA, 19 nt, Homo sapiens
  misc_RNA (1)...(19): siRNA sense strand
acccagaaguggugccaua

SEQ ID NO: 447533 - RNA, 19 nt, Homo sapiens
  misc_RNA (1)...(19): siRNA sense strand
gcaaguuguggcugaccua

SEQ ID NO: 447534 - RNA, 19 nt, Homo sapiens
  misc_RNA (1)...(19): siRNA sense strand
gcuuaugcccaaucgguuu

SEQ ID NO: 447535 - RNA, 19 nt, Homo sapiens
  misc_RNA (1)...(19): siRNA sense strand
gagaccgcauucccuugga

SEQ ID NO: 447536 - RNA, 19 nt, Homo sapiens
  misc_RNA (1)...(19): siRNA sense strand
gcaacuuugugagcaacga

SEQ ID NO: 447537 - RNA, 19 nt, Homo sapiens
  misc_RNA (1)...(19): siRNA sense strand
uggaaauccuggugcagau

SEQ ID NO: 447538 - RNA, 19 nt, Homo sapiens
  misc_RNA (1)...(19): siRNA sense strand
cggcuggccuucaggaucu

SEQ ID NO: 447539 - RNA, 19 nt, Homo sapiens
  misc_RNA (1)...(19): siRNA sense strand
ggcaucaaccguaauagca

SEQ ID NO: 447540 - RNA, 19 nt, Homo sapiens
  misc_RNA (1)...(19): siRNA sense strand
gcuguccucggcucacuuu

SEQ ID NO: 447541 - RNA, 19 nt, Homo sapiens
  misc_RNA (1)...(19): siRNA sense strand
caagcacugucagcucugu

SEQ ID NO: 447542 - RNA, 19 nt, Homo sapiens
  misc_RNA (1)...(19): siRNA sense strand
gggucaaggcggagaagaa

SEQ ID NO: 447543 - RNA, 19 nt, Homo sapiens
  misc_RNA (1)...(19): siRNA sense strand
ucgaggcucugcagaaagg

SEQ ID NO: 447544 - RNA, 19 nt, Homo sapiens
  misc_RNA (1)...(19): siRNA sense strand
guaauagcauuccccuuca

SEQ ID NO: 447545 - RNA, 19 nt, Homo sapiens
  misc_RNA (1)...(19): siRNA sense strand
ggucaaggcggagaagaag

SEQ ID NO: 447546 - RNA, 19 nt, Homo sapiens
  misc_RNA (1)...(19): siRNA sense strand
cagaaguggugccauacac

SEQ ID NO: 447547 - RNA, 19 nt, Homo sapiens
  misc_RNA (1)...(19): siRNA sense strand
gcaucaaccguaauagcau

SEQ ID NO: 447548 - RNA, 19 nt, Homo sapiens
  misc_RNA (1)...(19): siRNA sense strand
caaccugcgcuuacuggau

SEQ ID NO: 447549 - RNA, 19 nt, Homo sapiens
  misc_RNA (1)...(19): siRNA sense strand
acugucagcucugugauca

SEQ ID NO: 447550 - RNA, 19 nt, Homo sapiens
  misc_RNA (1)...(19): siRNA sense strand
ggccagggguucagugaga

SEQ ID NO: 447551 - RNA, 19 nt, Homo sapiens
  misc_RNA (1)...(19): siRNA sense strand
ugcgagaacuggacuugag

SEQ ID NO: 447552 - RNA, 19 nt, Homo sapiens
  misc_RNA (1)...(19): siRNA sense strand
gcucaaccugcaacuuugu

SEQ ID NO: 447553 - RNA, 19 nt, Homo sapiens
  misc_RNA (1)...(19): siRNA sense strand
ggcccuggcugccuucuua

SEQ ID NO: 447554 - RNA, 19 nt, Homo sapiens
  misc_RNA (1)...(19): siRNA sense strand
gagcucaaccugcaacuuu

SEQ ID NO: 447555 - RNA, 19 nt, Homo sapiens
  misc_RNA (1)...(19): siRNA sense strand
gcaccggcaucaaccguaa

SEQ ID NO: 447556 - RNA, 19 nt, Homo sapiens
  misc_RNA (1)...(19): siRNA sense strand
caucaaccguaauagcauu

SEQ ID NO: 447557 - RNA, 19 nt, Homo sapiens
  misc_RNA (1)...(19): siRNA sense strand
ccagcccugugcucucuua

SEQ ID NO: 447558 - RNA, 19 nt, Homo sapiens
  misc_RNA (1)...(19): siRNA sense strand
ugucgaggcucugcagaaa

SEQ ID NO: 447559 - RNA, 19 nt, Homo sapiens
  misc_RNA (1)...(19): siRNA sense strand
acccagaaguggugccaua

SEQ ID NO: 447560 - RNA, 19 nt, Homo sapiens
  misc_RNA (1)...(19): siRNA sense strand
gcaaguuguggcugaccua

SEQ ID NO: 447561 - RNA, 19 nt, Homo sapiens
  misc_RNA (1)...(19): siRNA sense strand
gcuuaugcccaaucgguuu

SEQ ID NO: 447562 - RNA, 19 nt, Homo sapiens
  misc_RNA (1)...(19): siRNA sense strand
gagaccgcauucccuugga

SEQ ID NO: 447563 - RNA, 19 nt, Homo sapiens
  misc_RNA (1)...(19): siRNA sense strand
gcaacuuugugagcaacga

SEQ ID NO: 447564 - RNA, 19 nt, Homo sapiens
  misc_RNA (1)...(19): siRNA sense strand
uggaaauccuggugcagau

SEQ ID NO: 447565 - RNA, 19 nt, Homo sapiens
  misc_RNA (1)...(19): siRNA sense strand
cggcuggccuucaggaucu

SEQ ID NO: 447566 - RNA, 19 nt, Homo sapiens
  misc_RNA (1)...(19): siRNA sense strand
ggcaucaaccguaauagca

SEQ ID NO: 447567 - RNA, 19 nt, Homo sapiens
  misc_RNA (1)...(19): siRNA sense strand
gcuguccucggcucacuuu

SEQ ID NO: 447568 - RNA, 19 nt, Homo sapiens
  misc_RNA (1)...(19): siRNA sense strand
caagcacugucagcucugu

SEQ ID NO: 447569 - RNA, 19 nt, Homo sapiens
  misc_RNA (1)...(19): siRNA sense strand
gggucaaggcggagaagaa

SEQ ID NO: 447570 - RNA, 19 nt, Homo sapiens
  misc_RNA (1)...(19): siRNA sense strand
ucgaggcucugcagaaagg

SEQ ID NO: 447571 - RNA, 19 nt, Homo sapiens
  misc_RNA (1)...(19): siRNA sense strand
guaauagcauuccccuuca

SEQ ID NO: 447572 - RNA, 19 nt, Homo sapiens
  misc_RNA (1)...(19): siRNA sense strand
ggucaaggcggagaagaag

SEQ ID NO: 447573 - RNA, 19 nt, Homo sapiens
  misc_RNA (1)...(19): siRNA sense strand
cagaaguggugccauacac

SEQ ID NO: 447574 - RNA, 19 nt, Homo sapiens
  misc_RNA (1)...(19): siRNA sense strand
gcaucaaccguaauagcau

SEQ ID NO: 447575 - RNA, 19 nt, Homo sapiens
  misc_RNA (1)...(19): siRNA sense strand
caaccugcgcuuacuggau

SEQ ID NO: 447576 - RNA, 19 nt, Homo sapiens
  misc_RNA (1)...(19): siRNA sense strand
acugucagcucugugauca

SEQ ID NO: 447577 - RNA, 19 nt, Homo sapiens
  misc_RNA (1)...(19): siRNA sense strand
ggccagggguucagugaga

SEQ ID NO: 447578 - RNA, 19 nt, Homo sapiens
  misc_RNA (1)...(19): siRNA sense strand
ugcgagaacuggacuugag

SEQ ID NO: 447579 - RNA, 19 nt, Homo sapiens
  misc_RNA (1)...(19): siRNA sense strand
gcucaaccugcaacuuugu

SEQ ID NO: 447580 - RNA, 19 nt, Homo sapiens
  misc_RNA (1)...(19): siRNA sense strand
ugaggaagcuggauaauua

SEQ ID NO: 447581 - RNA, 19 nt, Homo sapiens
  misc_RNA (1)...(19): siRNA sense strand
gaagcuggauaauuacuua

SEQ ID NO: 447582 - RNA, 19 nt, Homo sapiens
  misc_RNA (1)...(19): siRNA sense strand
gcugaaaggcguuauauuu

SEQ ID NO: 447583 - RNA, 19 nt, Homo sapiens
  misc_RNA (1)...(19): siRNA sense strand
agagaugaguucacaaaua

SEQ ID NO: 447584 - RNA, 19 nt, Homo sapiens
  misc_RNA (1)...(19): siRNA sense strand
gaacaaacccuccuuucau

SEQ ID NO: 447585 - RNA, 19 nt, Homo sapiens
  misc_RNA (1)...(19): siRNA sense strand
gaagaaggaugcaaaugag

SEQ ID NO: 447586 - RNA, 19 nt, Homo sapiens
  misc_RNA (1)...(19): siRNA sense strand
ugaauaagaucgaggaguu

SEQ ID NO: 447587 - RNA, 19 nt, Homo sapiens
  misc_RNA (1)...(19): siRNA sense strand
gagaugaguucacaaauac

SEQ ID NO: 447588 - RNA, 19 nt, Homo sapiens
  misc_RNA (1)...(19): siRNA sense strand
gaaccuggcucccggaaca

SEQ ID NO: 447589 - RNA, 19 nt, Homo sapiens
  misc_RNA (1)...(19): siRNA sense strand
gaacacgcauauucagaug

SEQ ID NO: 447590 - RNA, 19 nt, Homo sapiens
  misc_RNA (1)...(19): siRNA sense strand
ggagauacuugaauaaugc

SEQ ID NO: 447591 - RNA, 19 nt, Homo sapiens
  misc_RNA (1)...(19): siRNA sense strand
caacaucccgaaucuaauu

SEQ ID NO: 447592 - RNA, 19 nt, Homo sapiens
  misc_RNA (1)...(19): siRNA sense strand
cgaagaaggaugcaaauga

SEQ ID NO: 447593 - RNA, 19 nt, Homo sapiens
  misc_RNA (1)...(19): siRNA sense strand
ggcguuauauuuaauguga

SEQ ID NO: 447594 - RNA, 19 nt, Homo sapiens
  misc_RNA (1)...(19): siRNA sense strand
ggaacaaacccuccuuuca

SEQ ID NO: 447595 - RNA, 19 nt, Homo sapiens
  misc_RNA (1)...(19): siRNA sense strand
cagcgucucuuuaugauuc

SEQ ID NO: 447596 - RNA, 19 nt, Homo sapiens
  misc_RNA (1)...(19): siRNA sense strand
gccaagaaguacagagauu

SEQ ID NO: 447597 - RNA, 19 nt, Homo sapiens
  misc_RNA (1)...(19): siRNA sense strand
cugaaaggcguuauauuua

SEQ ID NO: 447598 - RNA, 19 nt, Homo sapiens
  misc_RNA (1)...(19): siRNA sense strand
uaucggaaauugcccguuu

SEQ ID NO: 447599 - RNA, 19 nt, Homo sapiens
  misc_RNA (1)...(19): siRNA sense strand
caaauucucagcguuuaua

SEQ ID NO: 447600 - RNA, 19 nt, Homo sapiens
  misc_RNA (1)...(19): siRNA sense strand
uacccaagcuccauauuau

SEQ ID NO: 447601 - RNA, 19 nt, Homo sapiens
  misc_RNA (1)...(19): siRNA sense strand
ucaagacggaugugaauaa

SEQ ID NO: 447602 - RNA, 19 nt, Homo sapiens
  misc_RNA (1)...(19): siRNA sense strand
gccaaauucucagcguuua

SEQ ID NO: 447603 - RNA, 19 nt, Homo sapiens
  misc_RNA (1)...(19): siRNA sense strand
agacggaugugaauaagau

SEQ ID NO: 447604 - RNA, 19 nt, Homo sapiens
  misc_RNA (1)...(19): siRNA sense strand
cgucaaggcugguuaugau

SEQ ID NO: 447605 - RNA, 19 nt, Homo sapiens
  misc_RNA (1)...(19): siRNA sense strand
cccaagcuccauauuauua

SEQ ID NO: 447606 - RNA, 19 nt, Homo sapiens
  misc_RNA (1)...(19): siRNA sense strand
gaaggaugcaaaugagauu

SEQ ID NO: 447607 - RNA, 19 nt, Homo sapiens
  misc_RNA (1)...(19): siRNA sense strand
cgcaggaaaugacguguuu

SEQ ID NO: 447608 - RNA, 19 nt, Homo sapiens
  misc_RNA (1)...(19): siRNA sense strand
acacgcauauucagauguu

SEQ ID NO: 447609 - RNA, 19 nt, Homo sapiens
  misc_RNA (1)...(19): siRNA sense strand
aacaaacccuccuuucaug

SEQ ID NO: 447610 - RNA, 19 nt, Homo sapiens
  misc_RNA (1)...(19): siRNA sense strand
uggagauacuugaauaaug

SEQ ID NO: 447611 - RNA, 19 nt, Homo sapiens
  misc_RNA (1)...(19): siRNA sense strand
uuacccaagcuccauauua

SEQ ID NO: 447612 - RNA, 19 nt, Homo sapiens
  misc_RNA (1)...(19): siRNA sense strand
gugagaguaucggaaauug

SEQ ID NO: 447613 - RNA, 19 nt, Homo sapiens
  misc_RNA (1)...(19): siRNA sense strand
gcaccgaggaugucacugu

SEQ ID NO: 447614 - RNA, 19 nt, Homo sapiens
  misc_RNA (1)...(19): siRNA sense strand
ccaagaaguacagagauuu

SEQ ID NO: 447615 - RNA, 19 nt, Homo sapiens
  misc_RNA (1)...(19): siRNA sense strand
gacccaacaucccgaaucu

SEQ ID NO: 447616 - RNA, 19 nt, Homo sapiens
  misc_RNA (1)...(19): siRNA sense strand
cccaacaucccgaaucuaa

SEQ ID NO: 447617 - RNA, 19 nt, Homo sapiens
  misc_RNA (1)...(19): siRNA sense strand
caagacggaugugaauaag

SEQ ID NO: 447618 - RNA, 19 nt, Homo sapiens
  misc_RNA (1)...(19): siRNA sense strand
cuagagaugaguucacaaa

SEQ ID NO: 447619 - RNA, 19 nt, Homo sapiens
  misc_RNA (1)...(19): siRNA sense strand
ccaagcuccauauuauuaa

SEQ ID NO: 447620 - RNA, 19 nt, Homo sapiens
  misc_RNA (1)...(19): siRNA sense strand
uuaagauuguggccaagaa

SEQ ID NO: 447621 - RNA, 19 nt, Homo sapiens
  misc_RNA (1)...(19): siRNA sense strand
acacgaagaaggaugcaaa

SEQ ID NO: 447622 - RNA, 19 nt, Homo sapiens
  misc_RNA (1)...(19): siRNA sense strand
ccgaggaugucacuguuuc

SEQ ID NO: 447623 - RNA, 19 nt, Homo sapiens
  misc_RNA (1)...(19): siRNA sense strand
ucucagcgucucuuuauga

SEQ ID NO: 447624 - RNA, 19 nt, Homo sapiens
  misc_RNA (1)...(19): siRNA sense strand
gaagucaagacggauguga

SEQ ID NO: 447625 - RNA, 19 nt, Homo sapiens
  misc_RNA (1)...(19): siRNA sense strand
ggugagaguaucggaaauu

SEQ ID NO: 447626 - RNA, 19 nt, Homo sapiens
  misc_RNA (1)...(19): siRNA sense strand
ggaagcuggauaauuacuu

SEQ ID NO: 447627 - RNA, 19 nt, Homo sapiens
  misc_RNA (1)...(19): siRNA sense strand
caccgaggaugucacuguu

SEQ ID NO: 447628 - RNA, 19 nt, Homo sapiens
  misc_RNA (1)...(19): siRNA sense strand
guuaugauggugagaguau

SEQ ID NO: 447629 - RNA, 19 nt, Homo sapiens
  misc_RNA (1)...(19): siRNA sense strand
caagcuccauauuauuaag

SEQ ID NO: 447630 - RNA, 19 nt, Homo sapiens
  misc_RNA (1)...(19): siRNA sense strand
cccucugccugaugaaaua

SEQ ID NO: 447631 - RNA, 19 nt, Homo sapiens
  misc_RNA (1)...(19): siRNA sense strand
gaucgaggaguucuuagag

SEQ ID NO: 447632 - RNA, 19 nt, Homo sapiens
  misc_RNA (1)...(19): siRNA sense strand
ggacccaacaucccgaauc

SEQ ID NO: 447633 - RNA, 19 nt, Homo sapiens
  misc_RNA (1)...(19): siRNA sense strand
gaauaagaucgaggaguuc

SEQ ID NO: 447634 - RNA, 19 nt, Homo sapiens
  misc_RNA (1)...(19): siRNA sense strand
agauugaacacgcauauuc

SEQ ID NO: 447635 - RNA, 19 nt, Homo sapiens
  misc_RNA (1)...(19): siRNA sense strand
gcccugaggaagcuggaua

SEQ ID NO: 447636 - RNA, 19 nt, Homo sapiens
  misc_RNA (1)...(19): siRNA sense strand
gagauugaacacgcauauu

SEQ ID NO: 447637 - RNA, 19 nt, Homo sapiens
  misc_RNA (1)...(19): siRNA sense strand
cauauucagauguugcaaa

SEQ ID NO: 447638 - RNA, 19 nt, Homo sapiens
  misc_RNA (1)...(19): siRNA sense strand
gcacgacaucacccucuuc

SEQ ID NO: 447639 - RNA, 19 nt, Homo sapiens
  misc_RNA (1)...(19): siRNA sense strand
caaggcugguuaugauggu

SEQ ID NO: 447640 - RNA, 19 nt, Homo sapiens
  misc_RNA (1)...(19): siRNA sense strand
caagaaguacagagauuuu

SEQ ID NO: 447641 - RNA, 19 nt, Homo sapiens
  misc_RNA (1)...(19): siRNA sense strand
acaaacccuccuuucauga

SEQ ID NO: 447642 - RNA, 19 nt, Homo sapiens
  misc_RNA (1)...(19): siRNA sense strand
agauuguggccaagaagua

SEQ ID NO: 447643 - RNA, 19 nt, Homo sapiens
  misc_RNA (1)...(19): siRNA sense strand
ccaaauucucagcguuuau

SEQ ID NO: 447644 - RNA, 19 nt, Homo sapiens
  misc_RNA (1)...(19): siRNA sense strand
gaaguacagagauuuugaa

SEQ ID NO: 447645 - RNA, 19 nt, Homo sapiens
  misc_RNA (1)...(19): siRNA sense strand
ugccaaauucucagcguuu

SEQ ID NO: 447646 - RNA, 19 nt, Homo sapiens
  misc_RNA (1)...(19): siRNA sense strand
agagauugaacacgcauau

SEQ ID NO: 447647 - RNA, 19 nt, Homo sapiens
  misc_RNA (1)...(19): siRNA sense strand
guguccagcugaucaagag

SEQ ID NO: 447648 - RNA, 19 nt, Homo sapiens
  misc_RNA (1)...(19): siRNA sense strand
gaugaguucacaaauacgu

SEQ ID NO: 447649 - RNA, 19 nt, Homo sapiens
  misc_RNA (1)...(19): siRNA sense strand
gaugucacuguuucuggaa

SEQ ID NO: 447650 - RNA, 19 nt, Homo sapiens
  misc_RNA (1)...(19): siRNA sense strand
uuucucagcgucucuuuau

SEQ ID NO: 447651 - RNA, 19 nt, Homo sapiens
  misc_RNA (1)...(19): siRNA sense strand
aaauagcccucugccugau

SEQ ID NO: 447652 - RNA, 19 nt, Homo sapiens
  misc_RNA (1)...(19): siRNA sense strand
ugaaggcccugaggaagcu

SEQ ID NO: 447653 - RNA, 19 nt, Homo sapiens
  misc_RNA (1)...(19): siRNA sense strand
guaaagggguccgaagaag

SEQ ID NO: 447654 - RNA, 19 nt, Homo sapiens
  misc_RNA (1)...(19): siRNA sense strand
caguggaccugaaaaggaa

SEQ ID NO: 447655 - RNA, 19 nt, Homo sapiens
  misc_RNA (1)...(19): siRNA sense strand
auagcccucugccugauga

SEQ ID NO: 447656 - RNA, 19 nt, Homo sapiens
  misc_RNA (1)...(19): siRNA sense strand
agaaggaugcaaaugagau

SEQ ID NO: 447657 - RNA, 19 nt, Homo sapiens
  misc_RNA (1)...(19): siRNA sense strand
gaaauagaauugcuggaau

SEQ ID NO: 447658 - RNA, 19 nt, Homo sapiens
  misc_RNA (1)...(19): siRNA sense strand
gcuagugcguuucucuaua

SEQ ID NO: 447659 - RNA, 19 nt, Homo sapiens
  misc_RNA (1)...(19): siRNA sense strand
gauacuuucucucucauug

SEQ ID NO: 447660 - RNA, 19 nt, Homo sapiens
  misc_RNA (1)...(19): siRNA sense strand
cuagugcguuucucuauaa

SEQ ID NO: 447661 - RNA, 19 nt, Homo sapiens
  misc_RNA (1)...(19): siRNA sense strand
gaaugucuuugacuuuguu

SEQ ID NO: 447662 - RNA, 19 nt, Homo sapiens
  misc_RNA (1)...(19): siRNA sense strand
ucaaacuccuugcacaauu

SEQ ID NO: 447663 - RNA, 19 nt, Homo sapiens
  misc_RNA (1)...(19): siRNA sense strand
ggagguggcagcuugguuu

SEQ ID NO: 447664 - RNA, 19 nt, Homo sapiens
  misc_RNA (1)...(19): siRNA sense strand
ccacaaauaccaaacuaug

SEQ ID NO: 447665 - RNA, 19 nt, Homo sapiens
  misc_RNA (1)...(19): siRNA sense strand
caaacuccuugcacaauuc

SEQ ID NO: 447666 - RNA, 19 nt, Homo sapiens
  misc_RNA (1)...(19): siRNA sense strand
caugugcgcugcagucaga

SEQ ID NO: 447667 - RNA, 19 nt, Homo sapiens
  misc_RNA (1)...(19): siRNA sense strand
cauugaagcugaccuugga

SEQ ID NO: 447668 - RNA, 19 nt, Homo sapiens
  misc_RNA (1)...(19): siRNA sense strand
ggaaugucuuugacuuugu

SEQ ID NO: 447669 - RNA, 19 nt, Homo sapiens
  misc_RNA (1)...(19): siRNA sense strand
ugaguguccucucuucaaa

SEQ ID NO: 447670 - RNA, 19 nt, Homo sapiens
  misc_RNA (1)...(19): siRNA sense strand
ccagaagaaacuuguauug

SEQ ID NO: 447671 - RNA, 19 nt, Homo sapiens
  misc_RNA (1)...(19): siRNA sense strand
cuauaaagccucagcguau

SEQ ID NO: 447672 - RNA, 19 nt, Homo sapiens
  misc_RNA (1)...(19): siRNA sense strand
guauagaacagauuucaca

SEQ ID NO: 447673 - RNA, 19 nt, Homo sapiens
  misc_RNA (1)...(19): siRNA sense strand
gucuuugacuuuguuguua

SEQ ID NO: 447674 - RNA, 19 nt, Homo sapiens
  misc_RNA (1)...(19): siRNA sense strand
aaauagaauugcuggaauc

SEQ ID NO: 447675 - RNA, 19 nt, Homo sapiens
  misc_RNA (1)...(19): siRNA sense strand
ugaaauagaauugcuggaa

SEQ ID NO: 447676 - RNA, 19 nt, Homo sapiens
  misc_RNA (1)...(19): siRNA sense strand
ggccaccucuuucuuugug

SEQ ID NO: 447677 - RNA, 19 nt, Homo sapiens
  misc_RNA (1)...(19): siRNA sense strand
uggaaugucuuugacuuug

SEQ ID NO: 447678 - RNA, 19 nt, Homo sapiens
  misc_RNA (1)...(19): siRNA sense strand
guucacgucucaucgauac

SEQ ID NO: 447679 - RNA, 19 nt, Homo sapiens
  misc_RNA (1)...(19): siRNA sense strand
ggaauccacaaauaccaaa

SEQ ID NO: 447680 - RNA, 19 nt, Homo sapiens
  misc_RNA (1)...(19): siRNA sense strand
gagguggcagcuugguuua

SEQ ID NO: 447681 - RNA, 19 nt, Homo sapiens
  misc_RNA (1)...(19): siRNA sense strand
gguggcagcuugguuuauc

SEQ ID NO: 447682 - RNA, 19 nt, Homo sapiens
  misc_RNA (1)...(19): siRNA sense strand
gccauucguucacgucuca

SEQ ID NO: 447683 - RNA, 19 nt, Homo sapiens
  misc_RNA (1)...(19): siRNA sense strand
cagcguauagaacagauuu

SEQ ID NO: 447684 - RNA, 19 nt, Homo sapiens
  misc_RNA (1)...(19): siRNA sense strand
ggaagagugccuggaaugu

SEQ ID NO: 447685 - RNA, 19 nt, Homo sapiens
  misc_RNA (1)...(19): siRNA sense strand
gaagagugccuggaauguc

SEQ ID NO: 447686 - RNA, 19 nt, Homo sapiens
  misc_RNA (1)...(19): siRNA sense strand
aaacuuguauugggagauc

SEQ ID NO: 447687 - RNA, 19 nt, Homo sapiens
  misc_RNA (1)...(19): siRNA sense strand
ccuggaaugucuuugacuu

SEQ ID NO: 447688 - RNA, 19 nt, Homo sapiens
  misc_RNA (1)...(19): siRNA sense strand
gaugguugaaauagaauug

SEQ ID NO: 447689 - RNA, 19 nt, Homo sapiens
  misc_RNA (1)...(19): siRNA sense strand
accaaacuauggccauuga

SEQ ID NO: 447690 - RNA, 19 nt, Homo sapiens
  misc_RNA (1)...(19): siRNA sense strand
uggagauccuucuuaagug

SEQ ID NO: 447691 - RNA, 19 nt, Homo sapiens
  misc_RNA (1)...(19): siRNA sense strand
uccuggagauccuucuuaa

SEQ ID NO: 447692 - RNA, 19 nt, Homo sapiens
  misc_RNA (1)...(19): siRNA sense strand
aagagugccuggaaugucu

SEQ ID NO: 447693 - RNA, 19 nt, Homo sapiens
  misc_RNA (1)...(19): siRNA sense strand
ucucaucgauacuuucucu

SEQ ID NO: 447694 - RNA, 19 nt, Homo sapiens
  misc_RNA (1)...(19): siRNA sense strand
aacaccagcuagugcguuu

SEQ ID NO: 447695 - RNA, 19 nt, Homo sapiens
  misc_RNA (1)...(19): siRNA sense strand
caaacuauggccauugaag

SEQ ID NO: 447696 - RNA, 19 nt, Homo sapiens
  misc_RNA (1)...(19): siRNA sense strand
gccagaagaaacuuguauu

SEQ ID NO: 447697 - RNA, 19 nt, Homo sapiens
  misc_RNA (1)...(19): siRNA sense strand
gcacacuaucagggaguua

SEQ ID NO: 447698 - RNA, 19 nt, Homo sapiens
  misc_RNA (1)...(19): siRNA sense strand
caucaucuuccuggucuuu

SEQ ID NO: 447699 - RNA, 19 nt, Homo sapiens
  misc_RNA (1)...(19): siRNA sense strand
cuggagauccuucuuaagu

SEQ ID NO: 447700 - RNA, 19 nt, Homo sapiens
  misc_RNA (1)...(19): siRNA sense strand
cagaagaaacuuguauugg

SEQ ID NO: 447701 - RNA, 19 nt, Homo sapiens
  misc_RNA (1)...(19): siRNA sense strand
gugcguuucucuauaaagc

SEQ ID NO: 447702 - RNA, 19 nt, Homo sapiens
  misc_RNA (1)...(19): siRNA sense strand
gagaucaacaccagcuagu

SEQ ID NO: 447703 - RNA, 19 nt, Homo sapiens
  misc_RNA (1)...(19): siRNA sense strand
auaccaaacuauggccauu

SEQ ID NO: 447704 - RNA, 19 nt, Homo sapiens
  misc_RNA (1)...(19): siRNA sense strand
cagcuagugcguuucucua

SEQ ID NO: 447705 - RNA, 19 nt, Homo sapiens
  misc_RNA (1)...(19): siRNA sense strand
gcguauagaacagauuuca

SEQ ID NO: 447706 - RNA, 19 nt, Homo sapiens
  misc_RNA (1)...(19): siRNA sense strand
cagcuugguuuaucuugcu

SEQ ID NO: 447707 - RNA, 19 nt, Homo sapiens
  misc_RNA (1)...(19): siRNA sense strand
ccaacaagaagagcagaug

SEQ ID NO: 447708 - RNA, 19 nt, Homo sapiens
  misc_RNA (1)...(19): siRNA sense strand
ccgcuuaccaacaagaaga

SEQ ID NO: 447709 - RNA, 19 nt, Homo sapiens
  misc_RNA (1)...(19): siRNA sense strand
cacgucucaucgauacuuu

SEQ ID NO: 447710 - RNA, 19 nt, Homo sapiens
  misc_RNA (1)...(19): siRNA sense strand
auccacaaauaccaaacua

SEQ ID NO: 447711 - RNA, 19 nt, Homo sapiens
  misc_RNA (1)...(19): siRNA sense strand
ucacgucucaucgauacuu

SEQ ID NO: 447712 - RNA, 19 nt, Homo sapiens
  misc_RNA (1)...(19): siRNA sense strand
cgagguugugguauuggua

SEQ ID NO: 447713 - RNA, 19 nt, Homo sapiens
  misc_RNA (1)...(19): siRNA sense strand
gugccuggaaugucuuuga

SEQ ID NO: 447714 - RNA, 19 nt, Homo sapiens
  misc_RNA (1)...(19): siRNA sense strand
cuauccaacuuuucuguuu

SEQ ID NO: 447715 - RNA, 19 nt, Homo sapiens
  misc_RNA (1)...(19): siRNA sense strand
gaaauagaauugcuggaau

SEQ ID NO: 447716 - RNA, 19 nt, Homo sapiens
  misc_RNA (1)...(19): siRNA sense strand
gcuagugcguuucucuaua

SEQ ID NO: 447717 - RNA, 19 nt, Homo sapiens
  misc_RNA (1)...(19): siRNA sense strand
gauacuuucucucucauug

SEQ ID NO: 447718 - RNA, 19 nt, Homo sapiens
  misc_RNA (1)...(19): siRNA sense strand
cuagugcguuucucuauaa

SEQ ID NO: 447719 - RNA, 19 nt, Homo sapiens
  misc_RNA (1)...(19): siRNA sense strand
gaaugucuuugacuuuguu

SEQ ID NO: 447720 - RNA, 19 nt, Homo sapiens
  misc_RNA (1)...(19): siRNA sense strand
ucaaacuccuugcacaauu

SEQ ID NO: 447721 - RNA, 19 nt, Homo sapiens
  misc_RNA (1)...(19): siRNA sense strand
ggagguggcagcuugguuu

SEQ ID NO: 447722 - RNA, 19 nt, Homo sapiens
  misc_RNA (1)...(19): siRNA sense strand
ccacaaauaccaaacuaug

SEQ ID NO: 447723 - RNA, 19 nt, Homo sapiens
  misc_RNA (1)...(19): siRNA sense strand
caaacuccuugcacaauuc

SEQ ID NO: 447724 - RNA, 19 nt, Homo sapiens
  misc_RNA (1)...(19): siRNA sense strand
caugugcgcugcagucaga

SEQ ID NO: 447725 - RNA, 19 nt, Homo sapiens
  misc_RNA (1)...(19): siRNA sense strand
cauugaagcugaccuugga

SEQ ID NO: 447726 - RNA, 19 nt, Homo sapiens
  misc_RNA (1)...(19): siRNA sense strand
ggaaugucuuugacuuugu

SEQ ID NO: 447727 - RNA, 19 nt, Homo sapiens
  misc_RNA (1)...(19): siRNA sense strand
ugaguguccucucuucaaa

SEQ ID NO: 447728 - RNA, 19 nt, Homo sapiens
  misc_RNA (1)...(19): siRNA sense strand
ccagaagaaacuuguauug

SEQ ID NO: 447729 - RNA, 19 nt, Homo sapiens
  misc_RNA (1)...(19): siRNA sense strand
cuauaaagccucagcguau

SEQ ID NO: 447730 - RNA, 19 nt, Homo sapiens
  misc_RNA (1)...(19): siRNA sense strand
guauagaacagauuucaca

SEQ ID NO: 447731 - RNA, 19 nt, Homo sapiens
  misc_RNA (1)...(19): siRNA sense strand
gucuuugacuuuguuguua

SEQ ID NO: 447732 - RNA, 19 nt, Homo sapiens
  misc_RNA (1)...(19): siRNA sense strand
aaauagaauugcuggaauc

SEQ ID NO: 447733 - RNA, 19 nt, Homo sapiens
  misc_RNA (1)...(19): siRNA sense strand
ugaaauagaauugcuggaa

SEQ ID NO: 447734 - RNA, 19 nt, Homo sapiens
  misc_RNA (1)...(19): siRNA sense strand
ggccaccucuuucuuugug

SEQ ID NO: 447735 - RNA, 19 nt, Homo sapiens
  misc_RNA (1)...(19): siRNA sense strand
uggaaugucuuugacuuug

SEQ ID NO: 447736 - RNA, 19 nt, Homo sapiens
  misc_RNA (1)...(19): siRNA sense strand
guucacgucucaucgauac

SEQ ID NO: 447737 - RNA, 19 nt, Homo sapiens
  misc_RNA (1)...(19): siRNA sense strand
ggaauccacaaauaccaaa

SEQ ID NO: 447738 - RNA, 19 nt, Homo sapiens
  misc_RNA (1)...(19): siRNA sense strand
gagguggcagcuugguuua

SEQ ID NO: 447739 - RNA, 19 nt, Homo sapiens
  misc_RNA (1)...(19): siRNA sense strand
gguggcagcuugguuuauc

SEQ ID NO: 447740 - RNA, 19 nt, Homo sapiens
  misc_RNA (1)...(19): siRNA sense strand
gccauucguucacgucuca

SEQ ID NO: 447741 - RNA, 19 nt, Homo sapiens
  misc_RNA (1)...(19): siRNA sense strand
cagcguauagaacagauuu

SEQ ID NO: 447742 - RNA, 19 nt, Homo sapiens
  misc_RNA (1)...(19): siRNA sense strand
ggaagagugccuggaaugu

SEQ ID NO: 447743 - RNA, 19 nt, Homo sapiens
  misc_RNA (1)...(19): siRNA sense strand
gaagagugccuggaauguc

SEQ ID NO: 447744 - RNA, 19 nt, Homo sapiens
  misc_RNA (1)...(19): siRNA sense strand
aaacuuguauugggagauc

SEQ ID NO: 447745 - RNA, 19 nt, Homo sapiens
  misc_RNA (1)...(19): siRNA sense strand
ccuggaaugucuuugacuu

SEQ ID NO: 447746 - RNA, 19 nt, Homo sapiens
  misc_RNA (1)...(19): siRNA sense strand
gaugguugaaauagaauug

SEQ ID NO: 447747 - RNA, 19 nt, Homo sapiens
  misc_RNA (1)...(19): siRNA sense strand
accaaacuauggccauuga

SEQ ID NO: 447748 - RNA, 19 nt, Homo sapiens
  misc_RNA (1)...(19): siRNA sense strand
uggagauccuucuuaagug

SEQ ID NO: 447749 - RNA, 19 nt, Homo sapiens
  misc_RNA (1)...(19): siRNA sense strand
uccuggagauccuucuuaa

SEQ ID NO: 447750 - RNA, 19 nt, Homo sapiens
  misc_RNA (1)...(19): siRNA sense strand
aagagugccuggaaugucu

SEQ ID NO: 447751 - RNA, 19 nt, Homo sapiens
  misc_RNA (1)...(19): siRNA sense strand
ucucaucgauacuuucucu

SEQ ID NO: 447752 - RNA, 19 nt, Homo sapiens
  misc_RNA (1)...(19): siRNA sense strand
aacaccagcuagugcguuu

SEQ ID NO: 447753 - RNA, 19 nt, Homo sapiens
  misc_RNA (1)...(19): siRNA sense strand
caaacuauggccauugaag

SEQ ID NO: 447754 - RNA, 19 nt, Homo sapiens
  misc_RNA (1)...(19): siRNA sense strand
gccagaagaaacuuguauu

SEQ ID NO: 447755 - RNA, 19 nt, Homo sapiens
  misc_RNA (1)...(19): siRNA sense strand
gcacacuaucagggaguua

SEQ ID NO: 447756 - RNA, 19 nt, Homo sapiens
  misc_RNA (1)...(19): siRNA sense strand
caucaucuuccuggucuuu

SEQ ID NO: 447757 - RNA, 19 nt, Homo sapiens
  misc_RNA (1)...(19): siRNA sense strand
cuggagauccuucuuaagu

SEQ ID NO: 447758 - RNA, 19 nt, Homo sapiens
  misc_RNA (1)...(19): siRNA sense strand
cagaagaaacuuguauugg

SEQ ID NO: 447759 - RNA, 19 nt, Homo sapiens
  misc_RNA (1)...(19): siRNA sense strand
gugcguuucucuauaaagc

SEQ ID NO: 447760 - RNA, 19 nt, Homo sapiens
  misc_RNA (1)...(19): siRNA sense strand
gagaucaacaccagcuagu

SEQ ID NO: 447761 - RNA, 19 nt, Homo sapiens
  misc_RNA (1)...(19): siRNA sense strand
auaccaaacuauggccauu

SEQ ID NO: 447762 - RNA, 19 nt, Homo sapiens
  misc_RNA (1)...(19): siRNA sense strand
cagcuagugcguuucucua

SEQ ID NO: 447763 - RNA, 19 nt, Homo sapiens
  misc_RNA (1)...(19): siRNA sense strand
gcguauagaacagauuuca

SEQ ID NO: 447764 - RNA, 19 nt, Homo sapiens
  misc_RNA (1)...(19): siRNA sense strand
cagcuugguuuaucuugcu

SEQ ID NO: 447765 - RNA, 19 nt, Homo sapiens
  misc_RNA (1)...(19): siRNA sense strand
ccaacaagaagagcagaug

SEQ ID NO: 447766 - RNA, 19 nt, Homo sapiens
  misc_RNA (1)...(19): siRNA sense strand
ccgcuuaccaacaagaaga

SEQ ID NO: 447767 - RNA, 19 nt, Homo sapiens
  misc_RNA (1)...(19): siRNA sense strand
cacgucucaucgauacuuu

SEQ ID NO: 447768 - RNA, 19 nt, Homo sapiens
  misc_RNA (1)...(19): siRNA sense strand
auccacaaauaccaaacua

SEQ ID NO: 447769 - RNA, 19 nt, Homo sapiens
  misc_RNA (1)...(19): siRNA sense strand
ucacgucucaucgauacuu

SEQ ID NO: 447770 - RNA, 19 nt, Homo sapiens
  misc_RNA (1)...(19): siRNA sense strand
cgagguugugguauuggua

SEQ ID NO: 447771 - RNA, 19 nt, Homo sapiens
  misc_RNA (1)...(19): siRNA sense strand
gugccuggaaugucuuuga

SEQ ID NO: 447772 - RNA, 19 nt, Homo sapiens
  misc_RNA (1)...(19): siRNA sense strand
cuauccaacuuuucuguuu

SEQ ID NO: 447773 - RNA, 19 nt, Homo sapiens
  misc_RNA (1)...(19): siRNA sense strand
gaaauagaauugcuggaau

SEQ ID NO: 447774 - RNA, 19 nt, Homo sapiens
  misc_RNA (1)...(19): siRNA sense strand
gcuagugcguuucucuaua

SEQ ID NO: 447775 - RNA, 19 nt, Homo sapiens
  misc_RNA (1)...(19): siRNA sense strand
gauacuuucucucucauug

SEQ ID NO: 447776 - RNA, 19 nt, Homo sapiens
  misc_RNA (1)...(19): siRNA sense strand
cuagugcguuucucuauaa

SEQ ID NO: 447777 - RNA, 19 nt, Homo sapiens
  misc_RNA (1)...(19): siRNA sense strand
gaaugucuuugacuuuguu

SEQ ID NO: 447778 - RNA, 19 nt, Homo sapiens
  misc_RNA (1)...(19): siRNA sense strand
ucaaacuccuugcacaauu

SEQ ID NO: 447779 - RNA, 19 nt, Homo sapiens
  misc_RNA (1)...(19): siRNA sense strand
ggagguggcagcuugguuu

SEQ ID NO: 447780 - RNA, 19 nt, Homo sapiens
  misc_RNA (1)...(19): siRNA sense strand
ccacaaauaccaaacuaug

SEQ ID NO: 447781 - RNA, 19 nt, Homo sapiens
  misc_RNA (1)...(19): siRNA sense strand
caaacuccuugcacaauuc

SEQ ID NO: 447782 - RNA, 19 nt, Homo sapiens
  misc_RNA (1)...(19): siRNA sense strand
caugugcgcugcagucaga

SEQ ID NO: 447783 - RNA, 19 nt, Homo sapiens
  misc_RNA (1)...(19): siRNA sense strand
cauugaagcugaccuugga

SEQ ID NO: 447784 - RNA, 19 nt, Homo sapiens
  misc_RNA (1)...(19): siRNA sense strand
ggaaugucuuugacuuugu

SEQ ID NO: 447785 - RNA, 19 nt, Homo sapiens
  misc_RNA (1)...(19): siRNA sense strand
ugaguguccucucuucaaa

SEQ ID NO: 447786 - RNA, 19 nt, Homo sapiens
  misc_RNA (1)...(19): siRNA sense strand
ccagaagaaacuuguauug

SEQ ID NO: 447787 - RNA, 19 nt, Homo sapiens
  misc_RNA (1)...(19): siRNA sense strand
cuauaaagccucagcguau

SEQ ID NO: 447788 - RNA, 19 nt, Homo sapiens
  misc_RNA (1)...(19): siRNA sense strand
guauagaacagauuucaca

SEQ ID NO: 447789 - RNA, 19 nt, Homo sapiens
  misc_RNA (1)...(19): siRNA sense strand
gucuuugacuuuguuguua

SEQ ID NO: 447790 - RNA, 19 nt, Homo sapiens
  misc_RNA (1)...(19): siRNA sense strand
aaauagaauugcuggaauc

SEQ ID NO: 447791 - RNA, 19 nt, Homo sapiens
  misc_RNA (1)...(19): siRNA sense strand
ugaaauagaauugcuggaa

SEQ ID NO: 447792 - RNA, 19 nt, Homo sapiens
  misc_RNA (1)...(19): siRNA sense strand
ggccaccucuuucuuugug

SEQ ID NO: 447793 - RNA, 19 nt, Homo sapiens
  misc_RNA (1)...(19): siRNA sense strand
uggaaugucuuugacuuug

SEQ ID NO: 447794 - RNA, 19 nt, Homo sapiens
  misc_RNA (1)...(19): siRNA sense strand
guucacgucucaucgauac

SEQ ID NO: 447795 - RNA, 19 nt, Homo sapiens
  misc_RNA (1)...(19): siRNA sense strand
ggaauccacaaauaccaaa

SEQ ID NO: 447796 - RNA, 19 nt, Homo sapiens
  misc_RNA (1)...(19): siRNA sense strand
gagguggcagcuugguuua

SEQ ID NO: 447797 - RNA, 19 nt, Homo sapiens
  misc_RNA (1)...(19): siRNA sense strand
gguggcagcuugguuuauc

SEQ ID NO: 447798 - RNA, 19 nt, Homo sapiens
  misc_RNA (1)...(19): siRNA sense strand
gccauucguucacgucuca

SEQ ID NO: 447799 - RNA, 19 nt, Homo sapiens
  misc_RNA (1)...(19): siRNA sense strand
cagcguauagaacagauuu

SEQ ID NO: 447800 - RNA, 19 nt, Homo sapiens
  misc_RNA (1)...(19): siRNA sense strand
ggaagagugccuggaaugu

SEQ ID NO: 447801 - RNA, 19 nt, Homo sapiens
  misc_RNA (1)...(19): siRNA sense strand
gaagagugccuggaauguc

SEQ ID NO: 447802 - RNA, 19 nt, Homo sapiens
  misc_RNA (1)...(19): siRNA sense strand
aaacuuguauugggagauc

SEQ ID NO: 447803 - RNA, 19 nt, Homo sapiens
  misc_RNA (1)...(19): siRNA sense strand
ccuggaaugucuuugacuu

SEQ ID NO: 447804 - RNA, 19 nt, Homo sapiens
  misc_RNA (1)...(19): siRNA sense strand
gaugguugaaauagaauug

SEQ ID NO: 447805 - RNA, 19 nt, Homo sapiens
  misc_RNA (1)...(19): siRNA sense strand
accaaacuauggccauuga

SEQ ID NO: 447806 - RNA, 19 nt, Homo sapiens
  misc_RNA (1)...(19): siRNA sense strand
uggagauccuucuuaagug

SEQ ID NO: 447807 - RNA, 19 nt, Homo sapiens
  misc_RNA (1)...(19): siRNA sense strand
uccuggagauccuucuuaa

SEQ ID NO: 447808 - RNA, 19 nt, Homo sapiens
  misc_RNA (1)...(19): siRNA sense strand
aagagugccuggaaugucu

SEQ ID NO: 447809 - RNA, 19 nt, Homo sapiens
  misc_RNA (1)...(19): siRNA sense strand
ucucaucgauacuuucucu

SEQ ID NO: 447810 - RNA, 19 nt, Homo sapiens
  misc_RNA (1)...(19): siRNA sense strand
aacaccagcuagugcguuu

SEQ ID NO: 447811 - RNA, 19 nt, Homo sapiens
  misc_RNA (1)...(19): siRNA sense strand
caaacuauggccauugaag

SEQ ID NO: 447812 - RNA, 19 nt, Homo sapiens
  misc_RNA (1)...(19): siRNA sense strand
gccagaagaaacuuguauu

SEQ ID NO: 447813 - RNA, 19 nt, Homo sapiens
  misc_RNA (1)...(19): siRNA sense strand
gcacacuaucagggaguua

SEQ ID NO: 447814 - RNA, 19 nt, Homo sapiens
  misc_RNA (1)...(19): siRNA sense strand
caucaucuuccuggucuuu

SEQ ID NO: 447815 - RNA, 19 nt, Homo sapiens
  misc_RNA (1)...(19): siRNA sense strand
cuggagauccuucuuaagu

SEQ ID NO: 447816 - RNA, 19 nt, Homo sapiens
  misc_RNA (1)...(19): siRNA sense strand
cagaagaaacuuguauugg

SEQ ID NO: 447817 - RNA, 19 nt, Homo sapiens
  misc_RNA (1)...(19): siRNA sense strand
gugcguuucucuauaaagc

SEQ ID NO: 447818 - RNA, 19 nt, Homo sapiens
  misc_RNA (1)...(19): siRNA sense strand
gagaucaacaccagcuagu

SEQ ID NO: 447819 - RNA, 19 nt, Homo sapiens
  misc_RNA (1)...(19): siRNA sense strand
auaccaaacuauggccauu

SEQ ID NO: 447820 - RNA, 19 nt, Homo sapiens
  misc_RNA (1)...(19): siRNA sense strand
cagcuagugcguuucucua

SEQ ID NO: 447821 - RNA, 19 nt, Homo sapiens
  misc_RNA (1)...(19): siRNA sense strand
gcguauagaacagauuuca

SEQ ID NO: 447822 - RNA, 19 nt, Homo sapiens
  misc_RNA (1)...(19): siRNA sense strand
cagcuugguuuaucuugcu

SEQ ID NO: 447823 - RNA, 19 nt, Homo sapiens
  misc_RNA (1)...(19): siRNA sense strand
ccaacaagaagagcagaug

SEQ ID NO: 447824 - RNA, 19 nt, Homo sapiens
  misc_RNA (1)...(19): siRNA sense strand
ccgcuuaccaacaagaaga

SEQ ID NO: 447825 - RNA, 19 nt, Homo sapiens
  misc_RNA (1)...(19): siRNA sense strand
cacgucucaucgauacuuu

SEQ ID NO: 447826 - RNA, 19 nt, Homo sapiens
  misc_RNA (1)...(19): siRNA sense strand
auccacaaauaccaaacua

SEQ ID NO: 447827 - RNA, 19 nt, Homo sapiens
  misc_RNA (1)...(19): siRNA sense strand
ucacgucucaucgauacuu

SEQ ID NO: 447828 - RNA, 19 nt, Homo sapiens
  misc_RNA (1)...(19): siRNA sense strand
cgagguugugguauuggua

SEQ ID NO: 447829 - RNA, 19 nt, Homo sapiens
  misc_RNA (1)...(19): siRNA sense strand
gugccuggaaugucuuuga

SEQ ID NO: 447830 - RNA, 19 nt, Homo sapiens
  misc_RNA (1)...(19): siRNA sense strand
cuauccaacuuuucuguuu

SEQ ID NO: 447831 - RNA, 19 nt, Homo sapiens
  misc_RNA (1)...(19): siRNA sense strand
gaaauagaauugcuggaau

SEQ ID NO: 447832 - RNA, 19 nt, Homo sapiens
  misc_RNA (1)...(19): siRNA sense strand
gcuagugcguuucucuaua

SEQ ID NO: 447833 - RNA, 19 nt, Homo sapiens
  misc_RNA (1)...(19): siRNA sense strand
gauacuuucucucucauug

SEQ ID NO: 447834 - RNA, 19 nt, Homo sapiens
  misc_RNA (1)...(19): siRNA sense strand
cuagugcguuucucuauaa

SEQ ID NO: 447835 - RNA, 19 nt, Homo sapiens
  misc_RNA (1)...(19): siRNA sense strand
gaaugucuuugacuuuguu

SEQ ID NO: 447836 - RNA, 19 nt, Homo sapiens
  misc_RNA (1)...(19): siRNA sense strand
ggagguggcagcuugguuu

SEQ ID NO: 447837 - RNA, 19 nt, Homo sapiens
  misc_RNA (1)...(19): siRNA sense strand
ccacaaauaccaaacuaug

SEQ ID NO: 447838 - RNA, 19 nt, Homo sapiens
  misc_RNA (1)...(19): siRNA sense strand
caugugcgcugcagucaga

SEQ ID NO: 447839 - RNA, 19 nt, Homo sapiens
  misc_RNA (1)...(19): siRNA sense strand
cauugaagcugaccuugga

SEQ ID NO: 447840 - RNA, 19 nt, Homo sapiens
  misc_RNA (1)...(19): siRNA sense strand
ggaaugucuuugacuuugu

SEQ ID NO: 447841 - RNA, 19 nt, Homo sapiens
  misc_RNA (1)...(19): siRNA sense strand
ugaguguccucucuucaaa

SEQ ID NO: 447842 - RNA, 19 nt, Homo sapiens
  misc_RNA (1)...(19): siRNA sense strand
ccagaagaaacuuguauug

SEQ ID NO: 447843 - RNA, 19 nt, Homo sapiens
  misc_RNA (1)...(19): siRNA sense strand
cuauaaagccucagcguau

SEQ ID NO: 447844 - RNA, 19 nt, Homo sapiens
  misc_RNA (1)...(19): siRNA sense strand
guauagaacagauuucaca

SEQ ID NO: 447845 - RNA, 19 nt, Homo sapiens
  misc_RNA (1)...(19): siRNA sense strand
gucuuugacuuuguuguua

SEQ ID NO: 447846 - RNA, 19 nt, Homo sapiens
  misc_RNA (1)...(19): siRNA sense strand
aaauagaauugcuggaauc

SEQ ID NO: 447847 - RNA, 19 nt, Homo sapiens
  misc_RNA (1)...(19): siRNA sense strand
ugaaauagaauugcuggaa

SEQ ID NO: 447848 - RNA, 19 nt, Homo sapiens
  misc_RNA (1)...(19): siRNA sense strand
ggccaccucuuucuuugug

SEQ ID NO: 447849 - RNA, 19 nt, Homo sapiens
  misc_RNA (1)...(19): siRNA sense strand
uggaaugucuuugacuuug

SEQ ID NO: 447850 - RNA, 19 nt, Homo sapiens
  misc_RNA (1)...(19): siRNA sense strand
guucacgucucaucgauac

SEQ ID NO: 447851 - RNA, 19 nt, Homo sapiens
  misc_RNA (1)...(19): siRNA sense strand
ggaauccacaaauaccaaa

SEQ ID NO: 447852 - RNA, 19 nt, Homo sapiens
  misc_RNA (1)...(19): siRNA sense strand
gagguggcagcuugguuua

SEQ ID NO: 447853 - RNA, 19 nt, Homo sapiens
  misc_RNA (1)...(19): siRNA sense strand
gguggcagcuugguuuauc

SEQ ID NO: 447854 - RNA, 19 nt, Homo sapiens
  misc_RNA (1)...(19): siRNA sense strand
gccauucguucacgucuca

SEQ ID NO: 447855 - RNA, 19 nt, Homo sapiens
  misc_RNA (1)...(19): siRNA sense strand
cagcguauagaacagauuu

SEQ ID NO: 447856 - RNA, 19 nt, Homo sapiens
  misc_RNA (1)...(19): siRNA sense strand
ggaagagugccuggaaugu

SEQ ID NO: 447857 - RNA, 19 nt, Homo sapiens
  misc_RNA (1)...(19): siRNA sense strand
gaagagugccuggaauguc

SEQ ID NO: 447858 - RNA, 19 nt, Homo sapiens
  misc_RNA (1)...(19): siRNA sense strand
aaacuuguauugggagauc

SEQ ID NO: 447859 - RNA, 19 nt, Homo sapiens
  misc_RNA (1)...(19): siRNA sense strand
ccuggaaugucuuugacuu

SEQ ID NO: 447860 - RNA, 19 nt, Homo sapiens
  misc_RNA (1)...(19): siRNA sense strand
gaugguugaaauagaauug

SEQ ID NO: 447861 - RNA, 19 nt, Homo sapiens
  misc_RNA (1)...(19): siRNA sense strand
accaaacuauggccauuga

SEQ ID NO: 447862 - RNA, 19 nt, Homo sapiens
  misc_RNA (1)...(19): siRNA sense strand
uggagauccuucuuaagug

SEQ ID NO: 447863 - RNA, 19 nt, Homo sapiens
  misc_RNA (1)...(19): siRNA sense strand
ucucaucgauacuuucucu

SEQ ID NO: 447864 - RNA, 19 nt, Homo sapiens
  misc_RNA (1)...(19): siRNA sense strand
aagagugccuggaaugucu

SEQ ID NO: 447865 - RNA, 19 nt, Homo sapiens
  misc_RNA (1)...(19): siRNA sense strand
uccuggagauccuucuuaa

SEQ ID NO: 447866 - RNA, 19 nt, Homo sapiens
  misc_RNA (1)...(19): siRNA sense strand
aacaccagcuagugcguuu

SEQ ID NO: 447867 - RNA, 19 nt, Homo sapiens
  misc_RNA (1)...(19): siRNA sense strand
caaacuauggccauugaag

SEQ ID NO: 447868 - RNA, 19 nt, Homo sapiens
  misc_RNA (1)...(19): siRNA sense strand
gccagaagaaacuuguauu

SEQ ID NO: 447869 - RNA, 19 nt, Homo sapiens
  misc_RNA (1)...(19): siRNA sense strand
gcacacuaucagggaguua

SEQ ID NO: 447870 - RNA, 19 nt, Homo sapiens
  misc_RNA (1)...(19): siRNA sense strand
caucaucuuccuggucuuu

SEQ ID NO: 447871 - RNA, 19 nt, Homo sapiens
  misc_RNA (1)...(19): siRNA sense strand
cuggagauccuucuuaagu

SEQ ID NO: 447872 - RNA, 19 nt, Homo sapiens
  misc_RNA (1)...(19): siRNA sense strand
cagaagaaacuuguauugg

SEQ ID NO: 447873 - RNA, 19 nt, Homo sapiens
  misc_RNA (1)...(19): siRNA sense strand
gugcguuucucuauaaagc

SEQ ID NO: 447874 - RNA, 19 nt, Homo sapiens
  misc_RNA (1)...(19): siRNA sense strand
gagaucaacaccagcuagu

SEQ ID NO: 447875 - RNA, 19 nt, Homo sapiens
  misc_RNA (1)...(19): siRNA sense strand
auaccaaacuauggccauu

SEQ ID NO: 447876 - RNA, 19 nt, Homo sapiens
  misc_RNA (1)...(19): siRNA sense strand
cagcuagugcguuucucua

SEQ ID NO: 447877 - RNA, 19 nt, Homo sapiens
  misc_RNA (1)...(19): siRNA sense strand
gcguauagaacagauuuca

SEQ ID NO: 447878 - RNA, 19 nt, Homo sapiens
  misc_RNA (1)...(19): siRNA sense strand
ccaacaagaagagcagaug

SEQ ID NO: 447879 - RNA, 19 nt, Homo sapiens
  misc_RNA (1)...(19): siRNA sense strand
cagcuugguuuaucuugcu

SEQ ID NO: 447880 - RNA, 19 nt, Homo sapiens
  misc_RNA (1)...(19): siRNA sense strand
ccgcuuaccaacaagaaga

SEQ ID NO: 447881 - RNA, 19 nt, Homo sapiens
  misc_RNA (1)...(19): siRNA sense strand
cacgucucaucgauacuuu

SEQ ID NO: 447882 - RNA, 19 nt, Homo sapiens
  misc_RNA (1)...(19): siRNA sense strand
auccacaaauaccaaacua

SEQ ID NO: 447883 - RNA, 19 nt, Homo sapiens
  misc_RNA (1)...(19): siRNA sense strand
ucacgucucaucgauacuu

SEQ ID NO: 447884 - RNA, 19 nt, Homo sapiens
  misc_RNA (1)...(19): siRNA sense strand
gugccuggaaugucuuuga

SEQ ID NO: 447885 - RNA, 19 nt, Homo sapiens
  misc_RNA (1)...(19): siRNA sense strand
cuauccaacuuuucuguuu

SEQ ID NO: 447886 - RNA, 19 nt, Homo sapiens
  misc_RNA (1)...(19): siRNA sense strand
gcucaaggaugacaagaug

SEQ ID NO: 447887 - RNA, 19 nt, Homo sapiens
  misc_RNA (1)...(19): siRNA sense strand
gagaagcgcgucaagaaga

SEQ ID NO: 447888 - RNA, 19 nt, Homo sapiens
  misc_RNA (1)...(19): siRNA sense strand
gcugagaagugcugcauca

SEQ ID NO: 447889 - RNA, 19 nt, Homo sapiens
  misc_RNA (1)...(19): siRNA sense strand
gcgagaagcgcgucaagaa

SEQ ID NO: 447890 - RNA, 19 nt, Homo sapiens
  misc_RNA (1)...(19): siRNA sense strand
caagaugggccucaaguuc

SEQ ID NO: 447891 - RNA, 19 nt, Homo sapiens
  misc_RNA (1)...(19): siRNA sense strand
uacaaccgcugcuauaugg

SEQ ID NO: 447892 - RNA, 19 nt, Homo sapiens
  misc_RNA (1)...(19): siRNA sense strand
ucuuggagcugcuggagaa

SEQ ID NO: 447893 - RNA, 19 nt, Homo sapiens
  misc_RNA (1)...(19): siRNA sense strand
cggacggccucaccuacua

SEQ ID NO: 447894 - RNA, 19 nt, Homo sapiens
  misc_RNA (1)...(19): siRNA sense strand
ucgaggacgugcucaagga

SEQ ID NO: 447895 - RNA, 19 nt, Homo sapiens
  misc_RNA (1)...(19): siRNA sense strand
gggcaacggcaacaacuuc

SEQ ID NO: 447896 - RNA, 19 nt, Homo sapiens
  misc_RNA (1)...(19): siRNA sense strand
cuacaaccgcugcuauaug

SEQ ID NO: 447897 - RNA, 19 nt, Homo sapiens
  misc_RNA (1)...(19): siRNA sense strand
caugcgcccugaucagaug

SEQ ID NO: 447898 - RNA, 19 nt, Homo sapiens
  misc_RNA (1)...(19): siRNA sense strand
ucgggcagcuggugcucua

SEQ ID NO: 447899 - RNA, 19 nt, Homo sapiens
  misc_RNA (1)...(19): siRNA sense strand
gcccugaucagauguaugg

SEQ ID NO: 447900 - RNA, 19 nt, Homo sapiens
  misc_RNA (1)...(19): siRNA sense strand
gacaagaugggccucaagu

SEQ ID NO: 447901 - RNA, 19 nt, Homo sapiens
  misc_RNA (1)...(19): siRNA sense strand
agaagcgcgucaagaagau

SEQ ID NO: 447902 - RNA, 19 nt, Homo sapiens
  misc_RNA (1)...(19): siRNA sense strand
aggacgugcucaaggauga

SEQ ID NO: 447903 - RNA, 19 nt, Homo sapiens
  misc_RNA (1)...(19): siRNA sense strand
agaugggccucaaguucuu

SEQ ID NO: 447904 - RNA, 19 nt, Homo sapiens
  misc_RNA (1)...(19): siRNA sense strand
uacuacaaccgcugcuaua

SEQ ID NO: 447905 - RNA, 19 nt, Homo sapiens
  misc_RNA (1)...(19): siRNA sense strand
ggcagcuggugcucuacaa

SEQ ID NO: 447906 - RNA, 19 nt, Homo sapiens
  misc_RNA (1)...(19): siRNA sense strand
cuacuacaaccgcugcuau

SEQ ID NO: 447907 - RNA, 19 nt, Homo sapiens
  misc_RNA (1)...(19): siRNA sense strand
cagagucaccagcgagaga

SEQ ID NO: 447908 - RNA, 19 nt, Homo sapiens
  misc_RNA (1)...(19): siRNA sense strand
ccugugagcgcgaguguag

SEQ ID NO: 447909 - RNA, 19 nt, Homo sapiens
  misc_RNA (1)...(19): siRNA sense strand
ucaaccgcuuccaggacua

SEQ ID NO: 447910 - RNA, 19 nt, Homo sapiens
  misc_RNA (1)...(19): siRNA sense strand
cgagaagcgcgucaagaag

SEQ ID NO: 447911 - RNA, 19 nt, Homo sapiens
  misc_RNA (1)...(19): siRNA sense strand
gugagaaggagcccagcuu

SEQ ID NO: 447912 - RNA, 19 nt, Homo sapiens
  misc_RNA (1)...(19): siRNA sense strand
gaauguaacugaugaucua

SEQ ID NO: 447913 - RNA, 19 nt, Homo sapiens
  misc_RNA (1)...(19): siRNA sense strand
ucaaagagaacaccauuua

SEQ ID NO: 447914 - RNA, 19 nt, Homo sapiens
  misc_RNA (1)...(19): siRNA sense strand
ggaagaaggaguuagauga

SEQ ID NO: 447915 - RNA, 19 nt, Homo sapiens
  misc_RNA (1)...(19): siRNA sense strand
gggacaagcuggcugauca

SEQ ID NO: 447916 - RNA, 19 nt, Homo sapiens
  misc_RNA (1)...(19): siRNA sense strand
gccagaggcuuguggauga

SEQ ID NO: 447917 - RNA, 19 nt, Homo sapiens
  misc_RNA (1)...(19): siRNA sense strand
gaaccgcucugccaaguac

SEQ ID NO: 447918 - RNA, 19 nt, Homo sapiens
  misc_RNA (1)...(19): siRNA sense strand
gaaggagguucaagagauc

SEQ ID NO: 447919 - RNA, 19 nt, Homo sapiens
  misc_RNA (1)...(19): siRNA sense strand
gcacauugcuaacaagaac

SEQ ID NO: 447920 - RNA, 19 nt, Homo sapiens
  misc_RNA (1)...(19): siRNA sense strand
gaaaagaccacaagaaaau

SEQ ID NO: 447921 - RNA, 19 nt, Homo sapiens
  misc_RNA (1)...(19): siRNA sense strand
aaagagcccuugcacauca

SEQ ID NO: 447922 - RNA, 19 nt, Homo sapiens
  misc_RNA (1)...(19): siRNA sense strand
aaagcgaugugaacaagaa

SEQ ID NO: 447923 - RNA, 19 nt, Homo sapiens
  misc_RNA (1)...(19): siRNA sense strand
caagauugaaggaaacuuu

SEQ ID NO: 447924 - RNA, 19 nt, Homo sapiens
  misc_RNA (1)...(19): siRNA sense strand
gagaucauccagggcauua

SEQ ID NO: 447925 - RNA, 19 nt, Homo sapiens
  misc_RNA (1)...(19): siRNA sense strand
aauauaggcuaaugaagga

SEQ ID NO: 447926 - RNA, 19 nt, Homo sapiens
  misc_RNA (1)...(19): siRNA sense strand
agaaugggcugaaggauac

SEQ ID NO: 447927 - RNA, 19 nt, Homo sapiens
  misc_RNA (1)...(19): siRNA sense strand
caccaaacaucagauauuc

SEQ ID NO: 447928 - RNA, 19 nt, Homo sapiens
  misc_RNA (1)...(19): siRNA sense strand
ccaaugaucugcgcaagca

SEQ ID NO: 447929 - RNA, 19 nt, Homo sapiens
  misc_RNA (1)...(19): siRNA sense strand
ugaaagagcccuugcacau

SEQ ID NO: 447930 - RNA, 19 nt, Homo sapiens
  misc_RNA (1)...(19): siRNA sense strand
gucgugaugucgcacaaua

SEQ ID NO: 447931 - RNA, 19 nt, Homo sapiens
  misc_RNA (1)...(19): siRNA sense strand
caacaacucaccaaacauc

SEQ ID NO: 447932 - RNA, 19 nt, Homo sapiens
  misc_RNA (1)...(19): siRNA sense strand
gagaagcgcauuggcauug

SEQ ID NO: 447933 - RNA, 19 nt, Homo sapiens
  misc_RNA (1)...(19): siRNA sense strand
gcucaaaggucccgaucag

SEQ ID NO: 447934 - RNA, 19 nt, Homo sapiens
  misc_RNA (1)...(19): siRNA sense strand
ccaaguuccugcccucaga

SEQ ID NO: 447935 - RNA, 19 nt, Homo sapiens
  misc_RNA (1)...(19): siRNA sense strand
gcacaauauaggcuaauga

SEQ ID NO: 447936 - RNA, 19 nt, Homo sapiens
  misc_RNA (1)...(19): siRNA sense strand
gagcagcuugugaauguaa

SEQ ID NO: 447937 - RNA, 19 nt, Homo sapiens
  misc_RNA (1)...(19): siRNA sense strand
gcuuguggaugaaauugaa

SEQ ID NO: 447938 - RNA, 19 nt, Homo sapiens
  misc_RNA (1)...(19): siRNA sense strand
ucaaaggucccgaucagaa

SEQ ID NO: 447939 - RNA, 19 nt, Homo sapiens
  misc_RNA (1)...(19): siRNA sense strand
agcaugagcugauaaagga

SEQ ID NO: 447940 - RNA, 19 nt, Homo sapiens
  misc_RNA (1)...(19): siRNA sense strand
caagcuggcugaucaucug

SEQ ID NO: 447941 - RNA, 19 nt, Homo sapiens
  misc_RNA (1)...(19): siRNA sense strand
gaacaagaaacuagaacag

SEQ ID NO: 447942 - RNA, 19 nt, Homo sapiens
  misc_RNA (1)...(19): siRNA sense strand
gaaggaguuagaugacaaa

SEQ ID NO: 447943 - RNA, 19 nt, Homo sapiens
  misc_RNA (1)...(19): siRNA sense strand
gaaagagcccuugcacauc

SEQ ID NO: 447944 - RNA, 19 nt, Homo sapiens
  misc_RNA (1)...(19): siRNA sense strand
uugagcagcuugugaaugu

SEQ ID NO: 447945 - RNA, 19 nt, Homo sapiens
  misc_RNA (1)...(19): siRNA sense strand
gaggaaauccaucccacuu

SEQ ID NO: 447946 - RNA, 19 nt, Homo sapiens
  misc_RNA (1)...(19): siRNA sense strand
gagaacaccauuuauaucg

SEQ ID NO: 447947 - RNA, 19 nt, Homo sapiens
  misc_RNA (1)...(19): siRNA sense strand
caaagagaacaccauuuau

SEQ ID NO: 447948 - RNA, 19 nt, Homo sapiens
  misc_RNA (1)...(19): siRNA sense strand
ggucaaagagaacaccauu

SEQ ID NO: 447949 - RNA, 19 nt, Homo sapiens
  misc_RNA (1)...(19): siRNA sense strand
cagaguggcacauugcuaa

SEQ ID NO: 447950 - RNA, 19 nt, Homo sapiens
  misc_RNA (1)...(19): siRNA sense strand
ucaccaaacaucagauauu

SEQ ID NO: 447951 - RNA, 19 nt, Homo sapiens
  misc_RNA (1)...(19): siRNA sense strand
aacaacaacucaccaaaca

SEQ ID NO: 447952 - RNA, 19 nt, Homo sapiens
  misc_RNA (1)...(19): siRNA sense strand
ucaaagcgaugugaacaag

SEQ ID NO: 447953 - RNA, 19 nt, Homo sapiens
  misc_RNA (1)...(19): siRNA sense strand
gcugaaggauacaaaggau

SEQ ID NO: 447954 - RNA, 19 nt, Homo sapiens
  misc_RNA (1)...(19): siRNA sense strand
aagaaugggcugaaggaua

SEQ ID NO: 447955 - RNA, 19 nt, Homo sapiens
  misc_RNA (1)...(19): siRNA sense strand
gcuucucgcucaacaacaa

SEQ ID NO: 447956 - RNA, 19 nt, Homo sapiens
  misc_RNA (1)...(19): siRNA sense strand
ggauuugaaggacaaguuu

SEQ ID NO: 447957 - RNA, 19 nt, Homo sapiens
  misc_RNA (1)...(19): siRNA sense strand
caagaaacuagaacagaga

SEQ ID NO: 447958 - RNA, 19 nt, Homo sapiens
  misc_RNA (1)...(19): siRNA sense strand
ccauuuauaucgacgaagu

SEQ ID NO: 447959 - RNA, 19 nt, Homo sapiens
  misc_RNA (1)...(19): siRNA sense strand
gagaacgccgugaggauug

SEQ ID NO: 447960 - RNA, 19 nt, Homo sapiens
  misc_RNA (1)...(19): siRNA sense strand
agaaggauuugaaggacaa

SEQ ID NO: 447961 - RNA, 19 nt, Homo sapiens
  misc_RNA (1)...(19): siRNA sense strand
gauaaaggaggcugagauc

SEQ ID NO: 447962 - RNA, 19 nt, Homo sapiens
  misc_RNA (1)...(19): siRNA sense strand
agaaggaguuagaugacaa

SEQ ID NO: 447963 - RNA, 19 nt, Homo sapiens
  misc_RNA (1)...(19): siRNA sense strand
aguacaaucuugagaagga

SEQ ID NO: 447964 - RNA, 19 nt, Homo sapiens
  misc_RNA (1)...(19): siRNA sense strand
uaaaggaggcugagaucau

SEQ ID NO: 447965 - RNA, 19 nt, Homo sapiens
  misc_RNA (1)...(19): siRNA sense strand
aaaggaggcugagaucauc

SEQ ID NO: 447966 - RNA, 19 nt, Homo sapiens
  misc_RNA (1)...(19): siRNA sense strand
gaucauccagggcauuaug

SEQ ID NO: 447967 - RNA, 19 nt, Homo sapiens
  misc_RNA (1)...(19): siRNA sense strand
cgugaugucgcacaauaua

SEQ ID NO: 447968 - RNA, 19 nt, Homo sapiens
  misc_RNA (1)...(19): siRNA sense strand
caacucaccaaacaucaga

SEQ ID NO: 447969 - RNA, 19 nt, Homo sapiens
  misc_RNA (1)...(19): siRNA sense strand
gaagaaggaguuagaugac

SEQ ID NO: 447970 - RNA, 19 nt, Homo sapiens
  misc_RNA (1)...(19): siRNA sense strand
ggacuucuccagcaccaau

SEQ ID NO: 447971 - RNA, 19 nt, Homo sapiens
  misc_RNA (1)...(19): siRNA sense strand
gagcaugagcugauaaagg

SEQ ID NO: 447972 - RNA, 19 nt, Homo sapiens
  misc_RNA (1)...(19): siRNA sense strand
ugacaaacuugagcagcuu

SEQ ID NO: 447973 - RNA, 19 nt, Homo sapiens
  misc_RNA (1)...(19): siRNA sense strand
gaugugaacaagaaacuag

SEQ ID NO: 447974 - RNA, 19 nt, Homo sapiens
  misc_RNA (1)...(19): siRNA sense strand
guaugcagaugaggaaauc

SEQ ID NO: 447975 - RNA, 19 nt, Homo sapiens
  misc_RNA (1)...(19): siRNA sense strand
caacaacaacucaccaaac

SEQ ID NO: 447976 - RNA, 19 nt, Homo sapiens
  misc_RNA (1)...(19): siRNA sense strand
gcccugaccauagaugaua

SEQ ID NO: 447977 - RNA, 19 nt, Homo sapiens
  misc_RNA (1)...(19): siRNA sense strand
ggagaagcgcauuggcauu

SEQ ID NO: 447978 - RNA, 19 nt, Homo sapiens
  misc_RNA (1)...(19): siRNA sense strand
acaacucccugaugcugaa

SEQ ID NO: 447979 - RNA, 19 nt, Homo sapiens
  misc_RNA (1)...(19): siRNA sense strand
uggccaaggucauggaaga

SEQ ID NO: 447980 - RNA, 19 nt, Homo sapiens
  misc_RNA (1)...(19): siRNA sense strand
caagaaccaguaccacaga

SEQ ID NO: 447981 - RNA, 19 nt, Homo sapiens
  misc_RNA (1)...(19): siRNA sense strand
guggagcugugucgugaug

SEQ ID NO: 447982 - RNA, 19 nt, Homo sapiens
  misc_RNA (1)...(19): siRNA sense strand
cacaauauaggcuaaugaa

SEQ ID NO: 447983 - RNA, 19 nt, Homo sapiens
  misc_RNA (1)...(19): siRNA sense strand
gcugaaagcccugguggau

SEQ ID NO: 447984 - RNA, 19 nt, Homo sapiens
  misc_RNA (1)...(19): siRNA sense strand
ucgacgaagugcuguguau

SEQ ID NO: 447985 - RNA, 19 nt, Homo sapiens
  misc_RNA (1)...(19): siRNA sense strand
ccaaggucauggaagagau

SEQ ID NO: 447986 - RNA, 19 nt, Homo sapiens
  misc_RNA (1)...(19): siRNA sense strand
aaacuugagcagcuuguga

SEQ ID NO: 447987 - RNA, 19 nt, Homo sapiens
  misc_RNA (1)...(19): siRNA sense strand
ggagcugugucgugauguc

SEQ ID NO: 447988 - RNA, 19 nt, Homo sapiens
  misc_RNA (1)...(19): siRNA sense strand
ucaagaaugggcugaagga

SEQ ID NO: 447989 - RNA, 19 nt, Homo sapiens
  misc_RNA (1)...(19): siRNA sense strand
ugagaacgccgugaggauu

SEQ ID NO: 447990 - RNA, 19 nt, Homo sapiens
  misc_RNA (1)...(19): siRNA sense strand
caaaggaugccagggacaa

SEQ ID NO: 447991 - RNA, 19 nt, Homo sapiens
  misc_RNA (1)...(19): siRNA sense strand
gcccugaugcugucugcua

SEQ ID NO: 447992 - RNA, 19 nt, Homo sapiens
  misc_RNA (1)...(19): siRNA sense strand
ggagauccaggucaaagag

SEQ ID NO: 447993 - RNA, 19 nt, Homo sapiens
  misc_RNA (1)...(19): siRNA sense strand
ccagaggcuuguggaugaa

SEQ ID NO: 447994 - RNA, 19 nt, Homo sapiens
  misc_RNA (1)...(19): siRNA sense strand
gaacgccuggucgcagaaa

SEQ ID NO: 447995 - RNA, 19 nt, Homo sapiens
  misc_RNA (1)...(19): siRNA sense strand
caccauuuauaucgacgaa

SEQ ID NO: 447996 - RNA, 19 nt, Homo sapiens
  misc_RNA (1)...(19): siRNA sense strand
agaacaccauuuauaucga

SEQ ID NO: 447997 - RNA, 19 nt, Homo sapiens
  misc_RNA (1)...(19): siRNA sense strand
caaggucauggaagagauu

SEQ ID NO: 447998 - RNA, 19 nt, Homo sapiens
  misc_RNA (1)...(19): siRNA sense strand
guacaaucuugagaaggau

SEQ ID NO: 447999 - RNA, 19 nt, Homo sapiens
  misc_RNA (1)...(19): siRNA sense strand
ucaacaacaacucaccaaa

SEQ ID NO: 448000 - RNA, 19 nt, Homo sapiens
  misc_RNA (1)...(19): siRNA sense strand
agauccaggucaaagagaa

SEQ ID NO: 448001 - RNA, 19 nt, Homo sapiens
  misc_RNA (1)...(19): siRNA sense strand
aggaggagauccaggucaa

SEQ ID NO: 448002 - RNA, 19 nt, Homo sapiens
  misc_RNA (1)...(19): siRNA sense strand
gcggaacaacucccugaug

SEQ ID NO: 448003 - RNA, 19 nt, Homo sapiens
  misc_RNA (1)...(19): siRNA sense strand
ccgugaggauugagccaaa

SEQ ID NO: 448004 - RNA, 19 nt, Homo sapiens
  misc_RNA (1)...(19): siRNA sense strand
agaagcgcauuggcauuga

SEQ ID NO: 448005 - RNA, 19 nt, Homo sapiens
  misc_RNA (1)...(19): siRNA sense strand
agagaacaccauuuauauc

SEQ ID NO: 448006 - RNA, 19 nt, Homo sapiens
  misc_RNA (1)...(19): siRNA sense strand
gaggagauccaggucaaag

SEQ ID NO: 448007 - RNA, 19 nt, Homo sapiens
  misc_RNA (1)...(19): siRNA sense strand
gaagcgcauuggcauugac

SEQ ID NO: 448008 - RNA, 19 nt, Homo sapiens
  misc_RNA (1)...(19): siRNA sense strand
gagauccaggucaaagaga

SEQ ID NO: 448009 - RNA, 19 nt, Homo sapiens
  misc_RNA (1)...(19): siRNA sense strand
ugaaaagaccacaagaaaa

SEQ ID NO: 448010 - RNA, 19 nt, Homo sapiens
  misc_RNA (1)...(19): siRNA sense strand
ggaggagauccaggucaaa

SEQ ID NO: 448011 - RNA, 19 nt, Homo sapiens
  misc_RNA (1)...(19): siRNA sense strand
cugaucaucuggccaaggu

SEQ ID NO: 448012 - RNA, 19 nt, Homo sapiens
  misc_RNA (1)...(19): siRNA sense strand
ccaaacagcugcccucauu

SEQ ID NO: 448013 - RNA, 19 nt, Homo sapiens
  misc_RNA (1)...(19): siRNA sense strand
ggagagagauugaugacuu

SEQ ID NO: 448014 - RNA, 19 nt, Homo sapiens
  misc_RNA (1)...(19): siRNA sense strand
ggaaguaugugucucagaa

SEQ ID NO: 448015 - RNA, 19 nt, Homo sapiens
  misc_RNA (1)...(19): siRNA sense strand
gaucugggauggaauugua

SEQ ID NO: 448016 - RNA, 19 nt, Homo sapiens
  misc_RNA (1)...(19): siRNA sense strand
gaacagauuucauucaaac

SEQ ID NO: 448017 - RNA, 19 nt, Homo sapiens
  misc_RNA (1)...(19): siRNA sense strand
caacagaucaagaacauuu

SEQ ID NO: 448018 - RNA, 19 nt, Homo sapiens
  misc_RNA (1)...(19): siRNA sense strand
ccaaacagcugcaguucuu

SEQ ID NO: 448019 - RNA, 19 nt, Homo sapiens
  misc_RNA (1)...(19): siRNA sense strand
uggaagagcuggucacuau

SEQ ID NO: 448020 - RNA, 19 nt, Homo sapiens
  misc_RNA (1)...(19): siRNA sense strand
gagagagauugaugacuuu

SEQ ID NO: 448021 - RNA, 19 nt, Homo sapiens
  misc_RNA (1)...(19): siRNA sense strand
caaagaggauaaugagaga

SEQ ID NO: 448022 - RNA, 19 nt, Homo sapiens
  misc_RNA (1)...(19): siRNA sense strand
gguuaaagcucuucuugga

SEQ ID NO: 448023 - RNA, 19 nt, Homo sapiens
  misc_RNA (1)...(19): siRNA sense strand
caagaucgaugccgugaug

SEQ ID NO: 448024 - RNA, 19 nt, Homo sapiens
  misc_RNA (1)...(19): siRNA sense strand
uggaaugccugaacaauga

SEQ ID NO: 448025 - RNA, 19 nt, Homo sapiens
  misc_RNA (1)...(19): siRNA sense strand
gagcaugguucaucgauag

SEQ ID NO: 448026 - RNA, 19 nt, Homo sapiens
  misc_RNA (1)...(19): siRNA sense strand
aagaaaggcuugugcagaa

SEQ ID NO: 448027 - RNA, 19 nt, Homo sapiens
  misc_RNA (1)...(19): siRNA sense strand
cgaaugcacacucaaauaa

SEQ ID NO: 448028 - RNA, 19 nt, Homo sapiens
  misc_RNA (1)...(19): siRNA sense strand
caacaucuguguccucuac

SEQ ID NO: 448029 - RNA, 19 nt, Homo sapiens
  misc_RNA (1)...(19): siRNA sense strand
uaaagaagcacacagucua

SEQ ID NO: 448030 - RNA, 19 nt, Homo sapiens
  misc_RNA (1)...(19): siRNA sense strand
ugacaacucucacacagau

SEQ ID NO: 448031 - RNA, 19 nt, Homo sapiens
  misc_RNA (1)...(19): siRNA sense strand
gagcuauguuucugaaguu

SEQ ID NO: 448032 - RNA, 19 nt, Homo sapiens
  misc_RNA (1)...(19): siRNA sense strand
ugacaugcuucguaaauuc

SEQ ID NO: 448033 - RNA, 19 nt, Homo sapiens
  misc_RNA (1)...(19): siRNA sense strand
gaccauuccuguuacaaau

SEQ ID NO: 448034 - RNA, 19 nt, Homo sapiens
  misc_RNA (1)...(19): siRNA sense strand
ggucauccgugugaaguuu

SEQ ID NO: 448035 - RNA, 19 nt, Homo sapiens
  misc_RNA (1)...(19): siRNA sense strand
gcagaaguccagaagguuu

SEQ ID NO: 448036 - RNA, 19 nt, Homo sapiens
  misc_RNA (1)...(19): siRNA sense strand
ggagucgacugcagagaga

SEQ ID NO: 448037 - RNA, 19 nt, Homo sapiens
  misc_RNA (1)...(19): siRNA sense strand
cagauggguucgugaguuu

SEQ ID NO: 448038 - RNA, 19 nt, Homo sapiens
  misc_RNA (1)...(19): siRNA sense strand
gaagaacagauuucauuca

SEQ ID NO: 448039 - RNA, 19 nt, Homo sapiens
  misc_RNA (1)...(19): siRNA sense strand
gcacaguucucagacaauc

SEQ ID NO: 448040 - RNA, 19 nt, Homo sapiens
  misc_RNA (1)...(19): siRNA sense strand
gaaugcacacucaaauaaa

SEQ ID NO: 448041 - RNA, 19 nt, Homo sapiens
  misc_RNA (1)...(19): siRNA sense strand
gggauggaauuguagagaa

SEQ ID NO: 448042 - RNA, 19 nt, Homo sapiens
  misc_RNA (1)...(19): siRNA sense strand
gaaggaugccauacgcuuu

SEQ ID NO: 448043 - RNA, 19 nt, Homo sapiens
  misc_RNA (1)...(19): siRNA sense strand
gaaucaaagaggauaauga

SEQ ID NO: 448044 - RNA, 19 nt, Homo sapiens
  misc_RNA (1)...(19): siRNA sense strand
ccucuuuccugaauucuuu

SEQ ID NO: 448045 - RNA, 19 nt, Homo sapiens
  misc_RNA (1)...(19): siRNA sense strand
uuaaagcucuucuuggaau

SEQ ID NO: 448046 - RNA, 19 nt, Homo sapiens
  misc_RNA (1)...(19): siRNA sense strand
aaacugcuguuccuauuca

SEQ ID NO: 448047 - RNA, 19 nt, Homo sapiens
  misc_RNA (1)...(19): siRNA sense strand
gugugaaguuugucaauga

SEQ ID NO: 448048 - RNA, 19 nt, Homo sapiens
  misc_RNA (1)...(19): siRNA sense strand
gaagaccauuccuguuaca

SEQ ID NO: 448049 - RNA, 19 nt, Homo sapiens
  misc_RNA (1)...(19): siRNA sense strand
aagcagggauugaucaaga

SEQ ID NO: 448050 - RNA, 19 nt, Homo sapiens
  misc_RNA (1)...(19): siRNA sense strand
gagaucaucaagagaguuu

SEQ ID NO: 448051 - RNA, 19 nt, Homo sapiens
  misc_RNA (1)...(19): siRNA sense strand
agaauuaccugcagcucuu

SEQ ID NO: 448052 - RNA, 19 nt, Homo sapiens
  misc_RNA (1)...(19): siRNA sense strand
gauaaugagagauuugaga

SEQ ID NO: 448053 - RNA, 19 nt, Homo sapiens
  misc_RNA (1)...(19): siRNA sense strand
ggauuccguuccauuauca

SEQ ID NO: 448054 - RNA, 19 nt, Homo sapiens
  misc_RNA (1)...(19): siRNA sense strand
uggaagagaucaucaagag

SEQ ID NO: 448055 - RNA, 19 nt, Homo sapiens
  misc_RNA (1)...(19): siRNA sense strand
ucacgaugcuugucaccuu

SEQ ID NO: 448056 - RNA, 19 nt, Homo sapiens
  misc_RNA (1)...(19): siRNA sense strand
gaacacgggcuuugaacuc

SEQ ID NO: 448057 - RNA, 19 nt, Homo sapiens
  misc_RNA (1)...(19): siRNA sense strand
cauccuacauccaugagaa

SEQ ID NO: 448058 - RNA, 19 nt, Homo sapiens
  misc_RNA (1)...(19): siRNA sense strand
ugagagauuugagaaguug

SEQ ID NO: 448059 - RNA, 19 nt, Homo sapiens
  misc_RNA (1)...(19): siRNA sense strand
gaugagagagcuauguuuc

SEQ ID NO: 448060 - RNA, 19 nt, Homo sapiens
  misc_RNA (1)...(19): siRNA sense strand
gcgggcagcuguugugauc

SEQ ID NO: 448061 - RNA, 19 nt, Homo sapiens
  misc_RNA (1)...(19): siRNA sense strand
uaccagaccucgcugacaa

SEQ ID NO: 448062 - RNA, 19 nt, Homo sapiens
  misc_RNA (1)...(19): siRNA sense strand
ccagaagguuugcaacauc

SEQ ID NO: 448063 - RNA, 19 nt, Homo sapiens
  misc_RNA (1)...(19): siRNA sense strand
ucaagaacauuuuguggua

SEQ ID NO: 448064 - RNA, 19 nt, Homo sapiens
  misc_RNA (1)...(19): siRNA sense strand
ggauucaacagaucaagaa

SEQ ID NO: 448065 - RNA, 19 nt, Homo sapiens
  misc_RNA (1)...(19): siRNA sense strand
gaccagcgaugaaccacau

SEQ ID NO: 448066 - RNA, 19 nt, Homo sapiens
  misc_RNA (1)...(19): siRNA sense strand
gaacaaugacacugaagag

SEQ ID NO: 448067 - RNA, 19 nt, Homo sapiens
  misc_RNA (1)...(19): siRNA sense strand
cacaauccuugaugacauu

SEQ ID NO: 448068 - RNA, 19 nt, Homo sapiens
  misc_RNA (1)...(19): siRNA sense strand
caccacagcgucuucuaua

SEQ ID NO: 448069 - RNA, 19 nt, Homo sapiens
  misc_RNA (1)...(19): siRNA sense strand
gcacucaaucuguucaaga

SEQ ID NO: 448070 - RNA, 19 nt, Homo sapiens
  misc_RNA (1)...(19): siRNA sense strand
gcaaauauaaugggacauc

SEQ ID NO: 448071 - RNA, 19 nt, Homo sapiens
  misc_RNA (1)...(19): siRNA sense strand
ucucaucucuggcgacaau

SEQ ID NO: 448072 - RNA, 19 nt, Homo sapiens
  misc_RNA (1)...(19): siRNA sense strand
gaagagcuggucacuaucu

SEQ ID NO: 448073 - RNA, 19 nt, Homo sapiens
  misc_RNA (1)...(19): siRNA sense strand
agaaugugcucccagugaa

SEQ ID NO: 448074 - RNA, 19 nt, Homo sapiens
  misc_RNA (1)...(19): siRNA sense strand
gaacugcagcgucucaucu

SEQ ID NO: 448075 - RNA, 19 nt, Homo sapiens
  misc_RNA (1)...(19): siRNA sense strand
ggacgaagcagggauugau

SEQ ID NO: 448076 - RNA, 19 nt, Homo sapiens
  misc_RNA (1)...(19): siRNA sense strand
ucacaauccuugaugacau

SEQ ID NO: 448077 - RNA, 19 nt, Homo sapiens
  misc_RNA (1)...(19): siRNA sense strand
gcgaaaggaucucaaaccu

SEQ ID NO: 448078 - RNA, 19 nt, Homo sapiens
  misc_RNA (1)...(19): siRNA sense strand
ugagagagcuauguuucug

SEQ ID NO: 448079 - RNA, 19 nt, Homo sapiens
  misc_RNA (1)...(19): siRNA sense strand
cacaguugauccugcagua

SEQ ID NO: 448080 - RNA, 19 nt, Homo sapiens
  misc_RNA (1)...(19): siRNA sense strand
ccuaaggugugguaugugu

SEQ ID NO: 448081 - RNA, 19 nt, Homo sapiens
  misc_RNA (1)...(19): siRNA sense strand
agagagcuauguuucugaa

SEQ ID NO: 448082 - RNA, 19 nt, Homo sapiens
  misc_RNA (1)...(19): siRNA sense strand
cgaaaggaucucaaaccua

SEQ ID NO: 448083 - RNA, 19 nt, Homo sapiens
  misc_RNA (1)...(19): siRNA sense strand
gaugaucugggauggaauu

SEQ ID NO: 448084 - RNA, 19 nt, Homo sapiens
  misc_RNA (1)...(19): siRNA sense strand
ccacuggcauccuguccuu

SEQ ID NO: 448085 - RNA, 19 nt, Homo sapiens
  misc_RNA (1)...(19): siRNA sense strand
agagagauaucaggagaga

SEQ ID NO: 448086 - RNA, 19 nt, Homo sapiens
  misc_RNA (1)...(19): siRNA sense strand
gaaacugcuguuccuauuc

SEQ ID NO: 448087 - RNA, 19 nt, Homo sapiens
  misc_RNA (1)...(19): siRNA sense strand
caaacagcugcccucauua

SEQ ID NO: 448088 - RNA, 19 nt, Homo sapiens
  misc_RNA (1)...(19): siRNA sense strand
uaucuccucuuuccugaau

SEQ ID NO: 448089 - RNA, 19 nt, Homo sapiens
  misc_RNA (1)...(19): siRNA sense strand
gccauacgcuuugucuaau

SEQ ID NO: 448090 - RNA, 19 nt, Homo sapiens
  misc_RNA (1)...(19): siRNA sense strand
ggaugagagagcuauguuu

SEQ ID NO: 448091 - RNA, 19 nt, Homo sapiens
  misc_RNA (1)...(19): siRNA sense strand
ucuggaagauuuaaagaag

SEQ ID NO: 448092 - RNA, 19 nt, Homo sapiens
  misc_RNA (1)...(19): siRNA sense strand
gcaucaguccggaauauuc

SEQ ID NO: 448093 - RNA, 19 nt, Homo sapiens
  misc_RNA (1)...(19): siRNA sense strand
gcacuuuaacagcagcuuu

SEQ ID NO: 448094 - RNA, 19 nt, Homo sapiens
  misc_RNA (1)...(19): siRNA sense strand
agagauaucaggagagaga

SEQ ID NO: 448095 - RNA, 19 nt, Homo sapiens
  misc_RNA (1)...(19): siRNA sense strand
uggaugaacugccuucucu

SEQ ID NO: 448096 - RNA, 19 nt, Homo sapiens
  misc_RNA (1)...(19): siRNA sense strand
ggauggaauuguagagaac

SEQ ID NO: 448097 - RNA, 19 nt, Homo sapiens
  misc_RNA (1)...(19): siRNA sense strand
cagaaugugcucccaguga

SEQ ID NO: 448098 - RNA, 19 nt, Homo sapiens
  misc_RNA (1)...(19): siRNA sense strand
gcaggacucccgacucauc

SEQ ID NO: 448099 - RNA, 19 nt, Homo sapiens
  misc_RNA (1)...(19): siRNA sense strand
ggaagucacagagucauca

SEQ ID NO: 448100 - RNA, 19 nt, Homo sapiens
  misc_RNA (1)...(19): siRNA sense strand
ucgaaugcacacucaaaua

SEQ ID NO: 448101 - RNA, 19 nt, Homo sapiens
  misc_RNA (1)...(19): siRNA sense strand
gaucgaugccgugauguau

SEQ ID NO: 448102 - RNA, 19 nt, Homo sapiens
  misc_RNA (1)...(19): siRNA sense strand
gggaaaaggugaaagucuu

SEQ ID NO: 448103 - RNA, 19 nt, Homo sapiens
  misc_RNA (1)...(19): siRNA sense strand
ggaaaauucuucggggaaa

SEQ ID NO: 448104 - RNA, 19 nt, Homo sapiens
  misc_RNA (1)...(19): siRNA sense strand
gggauucgccuaccucaag

SEQ ID NO: 448105 - RNA, 19 nt, Homo sapiens
  misc_RNA (1)...(19): siRNA sense strand
agaccucgcugacaacucu

SEQ ID NO: 448106 - RNA, 19 nt, Homo sapiens
  misc_RNA (1)...(19): siRNA sense strand
gauaucaggagagagauug

SEQ ID NO: 448107 - RNA, 19 nt, Homo sapiens
  misc_RNA (1)...(19): siRNA sense strand
cggcaucaguccggaauau

SEQ ID NO: 448108 - RNA, 19 nt, Homo sapiens
  misc_RNA (1)...(19): siRNA sense strand
ccagugaagagucuccuaa

SEQ ID NO: 448109 - RNA, 19 nt, Homo sapiens
  misc_RNA (1)...(19): siRNA sense strand
acagauggguucgugaguu

SEQ ID NO: 448110 - RNA, 19 nt, Homo sapiens
  misc_RNA (1)...(19): siRNA sense strand
aaugagagauuugagaagu

SEQ ID NO: 448111 - RNA, 19 nt, Homo sapiens
  misc_RNA (1)...(19): siRNA sense strand
cuacuacggugguuuccau

SEQ ID NO: 448112 - RNA, 19 nt, Homo sapiens
  misc_RNA (1)...(19): siRNA sense strand
ggagagagauugaugacuu

SEQ ID NO: 448113 - RNA, 19 nt, Homo sapiens
  misc_RNA (1)...(19): siRNA sense strand
ggaaguaugugucucagaa

SEQ ID NO: 448114 - RNA, 19 nt, Homo sapiens
  misc_RNA (1)...(19): siRNA sense strand
gaucugggauggaauugua

SEQ ID NO: 448115 - RNA, 19 nt, Homo sapiens
  misc_RNA (1)...(19): siRNA sense strand
gaacagauuucauucaaac

SEQ ID NO: 448116 - RNA, 19 nt, Homo sapiens
  misc_RNA (1)...(19): siRNA sense strand
caacagaucaagaacauuu

SEQ ID NO: 448117 - RNA, 19 nt, Homo sapiens
  misc_RNA (1)...(19): siRNA sense strand
ccaaacagcugcaguucuu

SEQ ID NO: 448118 - RNA, 19 nt, Homo sapiens
  misc_RNA (1)...(19): siRNA sense strand
uggaagagcuggucacuau

SEQ ID NO: 448119 - RNA, 19 nt, Homo sapiens
  misc_RNA (1)...(19): siRNA sense strand
gagagagauugaugacuuu

SEQ ID NO: 448120 - RNA, 19 nt, Homo sapiens
  misc_RNA (1)...(19): siRNA sense strand
caaagaggauaaugagaga

SEQ ID NO: 448121 - RNA, 19 nt, Homo sapiens
  misc_RNA (1)...(19): siRNA sense strand
gguuaaagcucuucuugga

SEQ ID NO: 448122 - RNA, 19 nt, Homo sapiens
  misc_RNA (1)...(19): siRNA sense strand
caagaucgaugccgugaug

SEQ ID NO: 448123 - RNA, 19 nt, Homo sapiens
  misc_RNA (1)...(19): siRNA sense strand
uggaaugccugaacaauga

SEQ ID NO: 448124 - RNA, 19 nt, Homo sapiens
  misc_RNA (1)...(19): siRNA sense strand
gagcaugguucaucgauag

SEQ ID NO: 448125 - RNA, 19 nt, Homo sapiens
  misc_RNA (1)...(19): siRNA sense strand
aagaaaggcuugugcagaa

SEQ ID NO: 448126 - RNA, 19 nt, Homo sapiens
  misc_RNA (1)...(19): siRNA sense strand
caacaucuguguccucuac

SEQ ID NO: 448127 - RNA, 19 nt, Homo sapiens
  misc_RNA (1)...(19): siRNA sense strand
ugacaacucucacacagau

SEQ ID NO: 448128 - RNA, 19 nt, Homo sapiens
  misc_RNA (1)...(19): siRNA sense strand
ugacaugcuucguaaauuc

SEQ ID NO: 448129 - RNA, 19 nt, Homo sapiens
  misc_RNA (1)...(19): siRNA sense strand
gcagaaguccagaagguuu

SEQ ID NO: 448130 - RNA, 19 nt, Homo sapiens
  misc_RNA (1)...(19): siRNA sense strand
ggagucgacugcagagaga

SEQ ID NO: 448131 - RNA, 19 nt, Homo sapiens
  misc_RNA (1)...(19): siRNA sense strand
cagauggguucgugaguuu

SEQ ID NO: 448132 - RNA, 19 nt, Homo sapiens
  misc_RNA (1)...(19): siRNA sense strand
gaagaacagauuucauuca

SEQ ID NO: 448133 - RNA, 19 nt, Homo sapiens
  misc_RNA (1)...(19): siRNA sense strand
gcacaguucucagacaauc

SEQ ID NO: 448134 - RNA, 19 nt, Homo sapiens
  misc_RNA (1)...(19): siRNA sense strand
gggauggaauuguagagaa

SEQ ID NO: 448135 - RNA, 19 nt, Homo sapiens
  misc_RNA (1)...(19): siRNA sense strand
gaaggaugccauacgcuuu

SEQ ID NO: 448136 - RNA, 19 nt, Homo sapiens
  misc_RNA (1)...(19): siRNA sense strand
gaaucaaagaggauaauga

SEQ ID NO: 448137 - RNA, 19 nt, Homo sapiens
  misc_RNA (1)...(19): siRNA sense strand
ccucuuuccugaauucuuu

SEQ ID NO: 448138 - RNA, 19 nt, Homo sapiens
  misc_RNA (1)...(19): siRNA sense strand
uuaaagcucuucuuggaau

SEQ ID NO: 448139 - RNA, 19 nt, Homo sapiens
  misc_RNA (1)...(19): siRNA sense strand
aaacugcuguuccuauuca

SEQ ID NO: 448140 - RNA, 19 nt, Homo sapiens
  misc_RNA (1)...(19): siRNA sense strand
gauaaugagagauuugaga

SEQ ID NO: 448141 - RNA, 19 nt, Homo sapiens
  misc_RNA (1)...(19): siRNA sense strand
ucacgaugcuugucaccuu

SEQ ID NO: 448142 - RNA, 19 nt, Homo sapiens
  misc_RNA (1)...(19): siRNA sense strand
ugagagauuugagaaguug

SEQ ID NO: 448143 - RNA, 19 nt, Homo sapiens
  misc_RNA (1)...(19): siRNA sense strand
gcgggcagcuguugugauc

SEQ ID NO: 448144 - RNA, 19 nt, Homo sapiens
  misc_RNA (1)...(19): siRNA sense strand
uaccagaccucgcugacaa

SEQ ID NO: 448145 - RNA, 19 nt, Homo sapiens
  misc_RNA (1)...(19): siRNA sense strand
ccagaagguuugcaacauc

SEQ ID NO: 448146 - RNA, 19 nt, Homo sapiens
  misc_RNA (1)...(19): siRNA sense strand
ucaagaacauuuuguggua

SEQ ID NO: 448147 - RNA, 19 nt, Homo sapiens
  misc_RNA (1)...(19): siRNA sense strand
ggauucaacagaucaagaa

SEQ ID NO: 448148 - RNA, 19 nt, Homo sapiens
  misc_RNA (1)...(19): siRNA sense strand
gaccagcgaugaaccacau

SEQ ID NO: 448149 - RNA, 19 nt, Homo sapiens
  misc_RNA (1)...(19): siRNA sense strand
gaacaaugacacugaagag

SEQ ID NO: 448150 - RNA, 19 nt, Homo sapiens
  misc_RNA (1)...(19): siRNA sense strand
cacaauccuugaugacauu

SEQ ID NO: 448151 - RNA, 19 nt, Homo sapiens
  misc_RNA (1)...(19): siRNA sense strand
gcaaauauaaugggacauc

SEQ ID NO: 448152 - RNA, 19 nt, Homo sapiens
  misc_RNA (1)...(19): siRNA sense strand
gaagagcuggucacuaucu

SEQ ID NO: 448153 - RNA, 19 nt, Homo sapiens
  misc_RNA (1)...(19): siRNA sense strand
agaaugugcucccagugaa

SEQ ID NO: 448154 - RNA, 19 nt, Homo sapiens
  misc_RNA (1)...(19): siRNA sense strand
ucacaauccuugaugacau

SEQ ID NO: 448155 - RNA, 19 nt, Homo sapiens
  misc_RNA (1)...(19): siRNA sense strand
gcgaaaggaucucaaaccu

SEQ ID NO: 448156 - RNA, 19 nt, Homo sapiens
  misc_RNA (1)...(19): siRNA sense strand
cacaguugauccugcagua

SEQ ID NO: 448157 - RNA, 19 nt, Homo sapiens
  misc_RNA (1)...(19): siRNA sense strand
ccuaaggugugguaugugu

SEQ ID NO: 448158 - RNA, 19 nt, Homo sapiens
  misc_RNA (1)...(19): siRNA sense strand
cgaaaggaucucaaaccua

SEQ ID NO: 448159 - RNA, 19 nt, Homo sapiens
  misc_RNA (1)...(19): siRNA sense strand
agagagauaucaggagaga

SEQ ID NO: 448160 - RNA, 19 nt, Homo sapiens
  misc_RNA (1)...(19): siRNA sense strand
gaugaucugggauggaauu

SEQ ID NO: 448161 - RNA, 19 nt, Homo sapiens
  misc_RNA (1)...(19): siRNA sense strand
ccacuggcauccuguccuu

SEQ ID NO: 448162 - RNA, 19 nt, Homo sapiens
  misc_RNA (1)...(19): siRNA sense strand
gaaacugcuguuccuauuc

SEQ ID NO: 448163 - RNA, 19 nt, Homo sapiens
  misc_RNA (1)...(19): siRNA sense strand
uaucuccucuuuccugaau

SEQ ID NO: 448164 - RNA, 19 nt, Homo sapiens
  misc_RNA (1)...(19): siRNA sense strand
gccauacgcuuugucuaau

SEQ ID NO: 448165 - RNA, 19 nt, Homo sapiens
  misc_RNA (1)...(19): siRNA sense strand
gcaucaguccggaauauuc

SEQ ID NO: 448166 - RNA, 19 nt, Homo sapiens
  misc_RNA (1)...(19): siRNA sense strand
gcacuuuaacagcagcuuu

SEQ ID NO: 448167 - RNA, 19 nt, Homo sapiens
  misc_RNA (1)...(19): siRNA sense strand
agagauaucaggagagaga

SEQ ID NO: 448168 - RNA, 19 nt, Homo sapiens
  misc_RNA (1)...(19): siRNA sense strand
ggauggaauuguagagaac

SEQ ID NO: 448169 - RNA, 19 nt, Homo sapiens
  misc_RNA (1)...(19): siRNA sense strand
cagaaugugcucccaguga

SEQ ID NO: 448170 - RNA, 19 nt, Homo sapiens
  misc_RNA (1)...(19): siRNA sense strand
gcaggacucccgacucauc

SEQ ID NO: 448171 - RNA, 19 nt, Homo sapiens
  misc_RNA (1)...(19): siRNA sense strand
gaucgaugccgugauguau

SEQ ID NO: 448172 - RNA, 19 nt, Homo sapiens
  misc_RNA (1)...(19): siRNA sense strand
gggaaaaggugaaagucuu

SEQ ID NO: 448173 - RNA, 19 nt, Homo sapiens
  misc_RNA (1)...(19): siRNA sense strand
gauaucaggagagagauug

SEQ ID NO: 448174 - RNA, 19 nt, Homo sapiens
  misc_RNA (1)...(19): siRNA sense strand
agaccucgcugacaacucu

SEQ ID NO: 448175 - RNA, 19 nt, Homo sapiens
  misc_RNA (1)...(19): siRNA sense strand
cggcaucaguccggaauau

SEQ ID NO: 448176 - RNA, 19 nt, Homo sapiens
  misc_RNA (1)...(19): siRNA sense strand
ccagugaagagucuccuaa

SEQ ID NO: 448177 - RNA, 19 nt, Homo sapiens
  misc_RNA (1)...(19): siRNA sense strand
acagauggguucgugaguu

SEQ ID NO: 448178 - RNA, 19 nt, Homo sapiens
  misc_RNA (1)...(19): siRNA sense strand
ggaaaauucuucggggaaa

SEQ ID NO: 448179 - RNA, 19 nt, Homo sapiens
  misc_RNA (1)...(19): siRNA sense strand
gaggauaaugagagauuug

SEQ ID NO: 448180 - RNA, 19 nt, Homo sapiens
  misc_RNA (1)...(19): siRNA sense strand
ugccauacgcuuugucuaa

SEQ ID NO: 448181 - RNA, 19 nt, Homo sapiens
  misc_RNA (1)...(19): siRNA sense strand
aaugagagauuugagaagu

SEQ ID NO: 448182 - RNA, 19 nt, Homo sapiens
  misc_RNA (1)...(19): siRNA sense strand
cugcaggacucccgacuca

SEQ ID NO: 448183 - RNA, 19 nt, Homo sapiens
  misc_RNA (1)...(19): siRNA sense strand
ccacaugucaucccucaca

SEQ ID NO: 448184 - RNA, 19 nt, Homo sapiens
  misc_RNA (1)...(19): siRNA sense strand
gaacucgacagggacagaa

SEQ ID NO: 448185 - RNA, 19 nt, Homo sapiens
  misc_RNA (1)...(19): siRNA sense strand
agagcaugguucaucgaua

SEQ ID NO: 448186 - RNA, 19 nt, Homo sapiens
  misc_RNA (1)...(19): siRNA sense strand
cagaagguuugcaacaucu

SEQ ID NO: 448187 - RNA, 19 nt, Homo sapiens
  misc_RNA (1)...(19): siRNA sense strand
ccauacgcuuugucuaaug

SEQ ID NO: 448188 - RNA, 19 nt, Homo sapiens
  misc_RNA (1)...(19): siRNA sense strand
cgugauguaugugaaaguu

SEQ ID NO: 448189 - RNA, 19 nt, Homo sapiens
  misc_RNA (1)...(19): siRNA sense strand
ugacucaucucagcacagu

SEQ ID NO: 448190 - RNA, 19 nt, Homo sapiens
  misc_RNA (1)...(19): siRNA sense strand
gaaaauucuucggggaaaa

SEQ ID NO: 448191 - RNA, 19 nt, Homo sapiens
  misc_RNA (1)...(19): siRNA sense strand
ccugaacaaugacacugaa

SEQ ID NO: 448192 - RNA, 19 nt, Homo sapiens
  misc_RNA (1)...(19): siRNA sense strand
caaauauaaugggacaucu

SEQ ID NO: 448193 - RNA, 19 nt, Homo sapiens
  misc_RNA (1)...(19): siRNA sense strand
ggaccucacccuccuuugg

SEQ ID NO: 448194 - RNA, 19 nt, Homo sapiens
  misc_RNA (1)...(19): siRNA sense strand
ccaaggagaaggagaaacu

SEQ ID NO: 448195 - RNA, 19 nt, Homo sapiens
  misc_RNA (1)...(19): siRNA sense strand
ggucucacuuaccuugaug

SEQ ID NO: 448196 - RNA, 19 nt, Homo sapiens
  misc_RNA (1)...(19): siRNA sense strand
caaugcacuugaucaccaa

SEQ ID NO: 448197 - RNA, 19 nt, Homo sapiens
  misc_RNA (1)...(19): siRNA sense strand
gggcaaccuccuacacuug

SEQ ID NO: 448198 - RNA, 19 nt, Homo sapiens
  misc_RNA (1)...(19): siRNA sense strand
ucgaugccgugauguaugu

SEQ ID NO: 448199 - RNA, 19 nt, Homo sapiens
  misc_RNA (1)...(19): siRNA sense strand
gggcagcuguugugaucca

SEQ ID NO: 448200 - RNA, 19 nt, Homo sapiens
  misc_RNA (1)...(19): siRNA sense strand
caaccagcauggauuuuau

SEQ ID NO: 448201 - RNA, 19 nt, Homo sapiens
  misc_RNA (1)...(19): siRNA sense strand
uaaagcucuucuuggaaug

SEQ ID NO: 448202 - RNA, 19 nt, Homo sapiens
  misc_RNA (1)...(19): siRNA sense strand
cugcagaaguccagaaggu

SEQ ID NO: 448203 - RNA, 19 nt, Homo sapiens
  misc_RNA (1)...(19): siRNA sense strand
ucaccaaacagcugcaguu

SEQ ID NO: 448204 - RNA, 19 nt, Homo sapiens
  misc_RNA (1)...(19): siRNA sense strand
guaugugucucagaagaag

SEQ ID NO: 448205 - RNA, 19 nt, Homo sapiens
  misc_RNA (1)...(19): siRNA sense strand
gaccucacccuccuuugga

SEQ ID NO: 448206 - RNA, 19 nt, Homo sapiens
  misc_RNA (1)...(19): siRNA sense strand
gcgccucacuguuuuagaa

SEQ ID NO: 448207 - RNA, 19 nt, Homo sapiens
  misc_RNA (1)...(19): siRNA sense strand
agaggauaaugagagauuu

SEQ ID NO: 448208 - RNA, 19 nt, Homo sapiens
  misc_RNA (1)...(19): siRNA sense strand
aaguaugugucucagaaga

SEQ ID NO: 448209 - RNA, 19 nt, Homo sapiens
  misc_RNA (1)...(19): siRNA sense strand
gaagguuugcaacaucugu

SEQ ID NO: 448210 - RNA, 19 nt, Homo sapiens
  misc_RNA (1)...(19): siRNA sense strand
aagaggauaaugagagauu

SEQ ID NO: 448211 - RNA, 19 nt, Homo sapiens
  misc_RNA (1)...(19): siRNA sense strand
ccugaauucuuuuguguuu

SEQ ID NO: 448212 - RNA, 19 nt, Homo sapiens
  misc_RNA (1)...(19): siRNA sense strand
ccaaacagcugcccucauu

SEQ ID NO: 448213 - RNA, 19 nt, Homo sapiens
  misc_RNA (1)...(19): siRNA sense strand
ggagagagauugaugacuu

SEQ ID NO: 448214 - RNA, 19 nt, Homo sapiens
  misc_RNA (1)...(19): siRNA sense strand
ggaaguaugugucucagaa

SEQ ID NO: 448215 - RNA, 19 nt, Homo sapiens
  misc_RNA (1)...(19): siRNA sense strand
gaucugggauggaauugua

SEQ ID NO: 448216 - RNA, 19 nt, Homo sapiens
  misc_RNA (1)...(19): siRNA sense strand
gaacagauuucauucaaac

SEQ ID NO: 448217 - RNA, 19 nt, Homo sapiens
  misc_RNA (1)...(19): siRNA sense strand
caacagaucaagaacauuu

SEQ ID NO: 448218 - RNA, 19 nt, Homo sapiens
  misc_RNA (1)...(19): siRNA sense strand
ccaaacagcugcaguucuu

SEQ ID NO: 448219 - RNA, 19 nt, Homo sapiens
  misc_RNA (1)...(19): siRNA sense strand
uggaagagcuggucacuau

SEQ ID NO: 448220 - RNA, 19 nt, Homo sapiens
  misc_RNA (1)...(19): siRNA sense strand
gagagagauugaugacuuu

SEQ ID NO: 448221 - RNA, 19 nt, Homo sapiens
  misc_RNA (1)...(19): siRNA sense strand
caaagaggauaaugagaga

SEQ ID NO: 448222 - RNA, 19 nt, Homo sapiens
  misc_RNA (1)...(19): siRNA sense strand
gguuaaagcucuucuugga

SEQ ID NO: 448223 - RNA, 19 nt, Homo sapiens
  misc_RNA (1)...(19): siRNA sense strand
caagaucgaugccgugaug

SEQ ID NO: 448224 - RNA, 19 nt, Homo sapiens
  misc_RNA (1)...(19): siRNA sense strand
uggaaugccugaacaauga

SEQ ID NO: 448225 - RNA, 19 nt, Homo sapiens
  misc_RNA (1)...(19): siRNA sense strand
gagcaugguucaucgauag

SEQ ID NO: 448226 - RNA, 19 nt, Homo sapiens
  misc_RNA (1)...(19): siRNA sense strand
aagaaaggcuugugcagaa

SEQ ID NO: 448227 - RNA, 19 nt, Homo sapiens
  misc_RNA (1)...(19): siRNA sense strand
cgaaugcacacucaaauaa

SEQ ID NO: 448228 - RNA, 19 nt, Homo sapiens
  misc_RNA (1)...(19): siRNA sense strand
caacaucuguguccucuac

SEQ ID NO: 448229 - RNA, 19 nt, Homo sapiens
  misc_RNA (1)...(19): siRNA sense strand
uaaagaagcacacagucua

SEQ ID NO: 448230 - RNA, 19 nt, Homo sapiens
  misc_RNA (1)...(19): siRNA sense strand
ugacaacucucacacagau

SEQ ID NO: 448231 - RNA, 19 nt, Homo sapiens
  misc_RNA (1)...(19): siRNA sense strand
gagcuauguuucugaaguu

SEQ ID NO: 448232 - RNA, 19 nt, Homo sapiens
  misc_RNA (1)...(19): siRNA sense strand
ugacaugcuucguaaauuc

SEQ ID NO: 448233 - RNA, 19 nt, Homo sapiens
  misc_RNA (1)...(19): siRNA sense strand
gaccauuccuguuacaaau

SEQ ID NO: 448234 - RNA, 19 nt, Homo sapiens
  misc_RNA (1)...(19): siRNA sense strand
ggucauccgugugaaguuu

SEQ ID NO: 448235 - RNA, 19 nt, Homo sapiens
  misc_RNA (1)...(19): siRNA sense strand
gcagaaguccagaagguuu

SEQ ID NO: 448236 - RNA, 19 nt, Homo sapiens
  misc_RNA (1)...(19): siRNA sense strand
ggagucgacugcagagaga

SEQ ID NO: 448237 - RNA, 19 nt, Homo sapiens
  misc_RNA (1)...(19): siRNA sense strand
cagauggguucgugaguuu

SEQ ID NO: 448238 - RNA, 19 nt, Homo sapiens
  misc_RNA (1)...(19): siRNA sense strand
gaagaacagauuucauuca

SEQ ID NO: 448239 - RNA, 19 nt, Homo sapiens
  misc_RNA (1)...(19): siRNA sense strand
gcacaguucucagacaauc

SEQ ID NO: 448240 - RNA, 19 nt, Homo sapiens
  misc_RNA (1)...(19): siRNA sense strand
gaaugcacacucaaauaaa

SEQ ID NO: 448241 - RNA, 19 nt, Homo sapiens
  misc_RNA (1)...(19): siRNA sense strand
gggauggaauuguagagaa

SEQ ID NO: 448242 - RNA, 19 nt, Homo sapiens
  misc_RNA (1)...(19): siRNA sense strand
gaaggaugccauacgcuuu

SEQ ID NO: 448243 - RNA, 19 nt, Homo sapiens
  misc_RNA (1)...(19): siRNA sense strand
gaaucaaagaggauaauga

SEQ ID NO: 448244 - RNA, 19 nt, Homo sapiens
  misc_RNA (1)...(19): siRNA sense strand
ccucuuuccugaauucuuu

SEQ ID NO: 448245 - RNA, 19 nt, Homo sapiens
  misc_RNA (1)...(19): siRNA sense strand
uuaaagcucuucuuggaau

SEQ ID NO: 448246 - RNA, 19 nt, Homo sapiens
  misc_RNA (1)...(19): siRNA sense strand
aaacugcuguuccuauuca

SEQ ID NO: 448247 - RNA, 19 nt, Homo sapiens
  misc_RNA (1)...(19): siRNA sense strand
gugugaaguuugucaauga

SEQ ID NO: 448248 - RNA, 19 nt, Homo sapiens
  misc_RNA (1)...(19): siRNA sense strand
gaagaccauuccuguuaca

SEQ ID NO: 448249 - RNA, 19 nt, Homo sapiens
  misc_RNA (1)...(19): siRNA sense strand
aagcagggauugaucaaga

SEQ ID NO: 448250 - RNA, 19 nt, Homo sapiens
  misc_RNA (1)...(19): siRNA sense strand
gagaucaucaagagaguuu

SEQ ID NO: 448251 - RNA, 19 nt, Homo sapiens
  misc_RNA (1)...(19): siRNA sense strand
agaauuaccugcagcucuu

SEQ ID NO: 448252 - RNA, 19 nt, Homo sapiens
  misc_RNA (1)...(19): siRNA sense strand
gauaaugagagauuugaga

SEQ ID NO: 448253 - RNA, 19 nt, Homo sapiens
  misc_RNA (1)...(19): siRNA sense strand
ggauuccguuccauuauca

SEQ ID NO: 448254 - RNA, 19 nt, Homo sapiens
  misc_RNA (1)...(19): siRNA sense strand
uggaagagaucaucaagag

SEQ ID NO: 448255 - RNA, 19 nt, Homo sapiens
  misc_RNA (1)...(19): siRNA sense strand
ucacgaugcuugucaccuu

SEQ ID NO: 448256 - RNA, 19 nt, Homo sapiens
  misc_RNA (1)...(19): siRNA sense strand
gaacacgggcuuugaacuc

SEQ ID NO: 448257 - RNA, 19 nt, Homo sapiens
  misc_RNA (1)...(19): siRNA sense strand
cauccuacauccaugagaa

SEQ ID NO: 448258 - RNA, 19 nt, Homo sapiens
  misc_RNA (1)...(19): siRNA sense strand
ugagagauuugagaaguug

SEQ ID NO: 448259 - RNA, 19 nt, Homo sapiens
  misc_RNA (1)...(19): siRNA sense strand
gaugagagagcuauguuuc

SEQ ID NO: 448260 - RNA, 19 nt, Homo sapiens
  misc_RNA (1)...(19): siRNA sense strand
gcgggcagcuguugugauc

SEQ ID NO: 448261 - RNA, 19 nt, Homo sapiens
  misc_RNA (1)...(19): siRNA sense strand
uaccagaccucgcugacaa

SEQ ID NO: 448262 - RNA, 19 nt, Homo sapiens
  misc_RNA (1)...(19): siRNA sense strand
ccagaagguuugcaacauc

SEQ ID NO: 448263 - RNA, 19 nt, Homo sapiens
  misc_RNA (1)...(19): siRNA sense strand
ucaagaacauuuuguggua

SEQ ID NO: 448264 - RNA, 19 nt, Homo sapiens
  misc_RNA (1)...(19): siRNA sense strand
ggauucaacagaucaagaa

SEQ ID NO: 448265 - RNA, 19 nt, Homo sapiens
  misc_RNA (1)...(19): siRNA sense strand
gaccagcgaugaaccacau

SEQ ID NO: 448266 - RNA, 19 nt, Homo sapiens
  misc_RNA (1)...(19): siRNA sense strand
gaacaaugacacugaagag

SEQ ID NO: 448267 - RNA, 19 nt, Homo sapiens
  misc_RNA (1)...(19): siRNA sense strand
cacaauccuugaugacauu

SEQ ID NO: 448268 - RNA, 19 nt, Homo sapiens
  misc_RNA (1)...(19): siRNA sense strand
caccacagcgucuucuaua

SEQ ID NO: 448269 - RNA, 19 nt, Homo sapiens
  misc_RNA (1)...(19): siRNA sense strand
gcacucaaucuguucaaga

SEQ ID NO: 448270 - RNA, 19 nt, Homo sapiens
  misc_RNA (1)...(19): siRNA sense strand
gcaaauauaaugggacauc

SEQ ID NO: 448271 - RNA, 19 nt, Homo sapiens
  misc_RNA (1)...(19): siRNA sense strand
ucucaucucuggcgacaau

SEQ ID NO: 448272 - RNA, 19 nt, Homo sapiens
  misc_RNA (1)...(19): siRNA sense strand
gaagagcuggucacuaucu

SEQ ID NO: 448273 - RNA, 19 nt, Homo sapiens
  misc_RNA (1)...(19): siRNA sense strand
agaaugugcucccagugaa

SEQ ID NO: 448274 - RNA, 19 nt, Homo sapiens
  misc_RNA (1)...(19): siRNA sense strand
gaacugcagcgucucaucu

SEQ ID NO: 448275 - RNA, 19 nt, Homo sapiens
  misc_RNA (1)...(19): siRNA sense strand
ggacgaagcagggauugau

SEQ ID NO: 448276 - RNA, 19 nt, Homo sapiens
  misc_RNA (1)...(19): siRNA sense strand
ucacaauccuugaugacau

SEQ ID NO: 448277 - RNA, 19 nt, Homo sapiens
  misc_RNA (1)...(19): siRNA sense strand
gcgaaaggaucucaaaccu

SEQ ID NO: 448278 - RNA, 19 nt, Homo sapiens
  misc_RNA (1)...(19): siRNA sense strand
ugagagagcuauguuucug

SEQ ID NO: 448279 - RNA, 19 nt, Homo sapiens
  misc_RNA (1)...(19): siRNA sense strand
cacaguugauccugcagua

SEQ ID NO: 448280 - RNA, 19 nt, Homo sapiens
  misc_RNA (1)...(19): siRNA sense strand
ccuaaggugugguaugugu

SEQ ID NO: 448281 - RNA, 19 nt, Homo sapiens
  misc_RNA (1)...(19): siRNA sense strand
agagagcuauguuucugaa

SEQ ID NO: 448282 - RNA, 19 nt, Homo sapiens
  misc_RNA (1)...(19): siRNA sense strand
cgaaaggaucucaaaccua

SEQ ID NO: 448283 - RNA, 19 nt, Homo sapiens
  misc_RNA (1)...(19): siRNA sense strand
gaugaucugggauggaauu

SEQ ID NO: 448284 - RNA, 19 nt, Homo sapiens
  misc_RNA (1)...(19): siRNA sense strand
ccacuggcauccuguccuu

SEQ ID NO: 448285 - RNA, 19 nt, Homo sapiens
  misc_RNA (1)...(19): siRNA sense strand
agagagauaucaggagaga

SEQ ID NO: 448286 - RNA, 19 nt, Homo sapiens
  misc_RNA (1)...(19): siRNA sense strand
gaaacugcuguuccuauuc

SEQ ID NO: 448287 - RNA, 19 nt, Homo sapiens
  misc_RNA (1)...(19): siRNA sense strand
caaacagcugcccucauua

SEQ ID NO: 448288 - RNA, 19 nt, Homo sapiens
  misc_RNA (1)...(19): siRNA sense strand
uaucuccucuuuccugaau

SEQ ID NO: 448289 - RNA, 19 nt, Homo sapiens
  misc_RNA (1)...(19): siRNA sense strand
gccauacgcuuugucuaau

SEQ ID NO: 448290 - RNA, 19 nt, Homo sapiens
  misc_RNA (1)...(19): siRNA sense strand
ggaugagagagcuauguuu

SEQ ID NO: 448291 - RNA, 19 nt, Homo sapiens
  misc_RNA (1)...(19): siRNA sense strand
ucuggaagauuuaaagaag

SEQ ID NO: 448292 - RNA, 19 nt, Homo sapiens
  misc_RNA (1)...(19): siRNA sense strand
gcaucaguccggaauauuc

SEQ ID NO: 448293 - RNA, 19 nt, Homo sapiens
  misc_RNA (1)...(19): siRNA sense strand
gcacuuuaacagcagcuuu

SEQ ID NO: 448294 - RNA, 19 nt, Homo sapiens
  misc_RNA (1)...(19): siRNA sense strand
agagauaucaggagagaga

SEQ ID NO: 448295 - RNA, 19 nt, Homo sapiens
  misc_RNA (1)...(19): siRNA sense strand
uggaugaacugccuucucu

SEQ ID NO: 448296 - RNA, 19 nt, Homo sapiens
  misc_RNA (1)...(19): siRNA sense strand
ggauggaauuguagagaac

SEQ ID NO: 448297 - RNA, 19 nt, Homo sapiens
  misc_RNA (1)...(19): siRNA sense strand
cagaaugugcucccaguga

SEQ ID NO: 448298 - RNA, 19 nt, Homo sapiens
  misc_RNA (1)...(19): siRNA sense strand
gcaggacucccgacucauc

SEQ ID NO: 448299 - RNA, 19 nt, Homo sapiens
  misc_RNA (1)...(19): siRNA sense strand
ggaagucacagagucauca

SEQ ID NO: 448300 - RNA, 19 nt, Homo sapiens
  misc_RNA (1)...(19): siRNA sense strand
ucgaaugcacacucaaaua

SEQ ID NO: 448301 - RNA, 19 nt, Homo sapiens
  misc_RNA (1)...(19): siRNA sense strand
gaucgaugccgugauguau

SEQ ID NO: 448302 - RNA, 19 nt, Homo sapiens
  misc_RNA (1)...(19): siRNA sense strand
gggaaaaggugaaagucuu

SEQ ID NO: 448303 - RNA, 19 nt, Homo sapiens
  misc_RNA (1)...(19): siRNA sense strand
ggaaaauucuucggggaaa

SEQ ID NO: 448304 - RNA, 19 nt, Homo sapiens
  misc_RNA (1)...(19): siRNA sense strand
gggauucgccuaccucaag

SEQ ID NO: 448305 - RNA, 19 nt, Homo sapiens
  misc_RNA (1)...(19): siRNA sense strand
agaccucgcugacaacucu

SEQ ID NO: 448306 - RNA, 19 nt, Homo sapiens
  misc_RNA (1)...(19): siRNA sense strand
gauaucaggagagagauug

SEQ ID NO: 448307 - RNA, 19 nt, Homo sapiens
  misc_RNA (1)...(19): siRNA sense strand
cggcaucaguccggaauau

SEQ ID NO: 448308 - RNA, 19 nt, Homo sapiens
  misc_RNA (1)...(19): siRNA sense strand
ccagugaagagucuccuaa

SEQ ID NO: 448309 - RNA, 19 nt, Homo sapiens
  misc_RNA (1)...(19): siRNA sense strand
acagauggguucgugaguu

SEQ ID NO: 448310 - RNA, 19 nt, Homo sapiens
  misc_RNA (1)...(19): siRNA sense strand
aaugagagauuugagaagu

SEQ ID NO: 448311 - RNA, 19 nt, Homo sapiens
  misc_RNA (1)...(19): siRNA sense strand
cuacuacggugguuuccau

SEQ ID NO: 448312 - RNA, 19 nt, Homo sapiens
  misc_RNA (1)...(19): siRNA sense strand
ccuccgagcuggcagaauu

SEQ ID NO: 448313 - RNA, 19 nt, Homo sapiens
  misc_RNA (1)...(19): siRNA sense strand
gcuuggagauuuggacuuu

SEQ ID NO: 448314 - RNA, 19 nt, Homo sapiens
  misc_RNA (1)...(19): siRNA sense strand
gagcucagccggcuacagu

SEQ ID NO: 448315 - RNA, 19 nt, Homo sapiens
  misc_RNA (1)...(19): siRNA sense strand
cgagcuggcagaauucuuu

SEQ ID NO: 448316 - RNA, 19 nt, Homo sapiens
  misc_RNA (1)...(19): siRNA sense strand
caacccgcuuggagauuug

SEQ ID NO: 448317 - RNA, 19 nt, Homo sapiens
  misc_RNA (1)...(19): siRNA sense strand
gcaccuacagcugcuacua

SEQ ID NO: 448318 - RNA, 19 nt, Homo sapiens
  misc_RNA (1)...(19): siRNA sense strand
gcucagccggcuacaguug

SEQ ID NO: 448319 - RNA, 19 nt, Homo sapiens
  misc_RNA (1)...(19): siRNA sense strand
uuucaagccuggagagauc

SEQ ID NO: 448320 - RNA, 19 nt, Homo sapiens
  misc_RNA (1)...(19): siRNA sense strand
gcgaggugcuggucaucag

SEQ ID NO: 448321 - RNA, 19 nt, Homo sapiens
  misc_RNA (1)...(19): siRNA sense strand
uggagcugcuggugacaga

SEQ ID NO: 448322 - RNA, 19 nt, Homo sapiens
  misc_RNA (1)...(19): siRNA sense strand
acaugagcuucgugcugua

SEQ ID NO: 448323 - RNA, 19 nt, Homo sapiens
  misc_RNA (1)...(19): siRNA sense strand
caccuacagcugcuacuau

SEQ ID NO: 448324 - RNA, 19 nt, Homo sapiens
  misc_RNA (1)...(19): siRNA sense strand
ccuccgagcuggcagaauu

SEQ ID NO: 448325 - RNA, 19 nt, Homo sapiens
  misc_RNA (1)...(19): siRNA sense strand
gcuuggagauuuggacuuu

SEQ ID NO: 448326 - RNA, 19 nt, Homo sapiens
  misc_RNA (1)...(19): siRNA sense strand
gagcucagccggcuacagu

SEQ ID NO: 448327 - RNA, 19 nt, Homo sapiens
  misc_RNA (1)...(19): siRNA sense strand
cgagcuggcagaauucuuu

SEQ ID NO: 448328 - RNA, 19 nt, Homo sapiens
  misc_RNA (1)...(19): siRNA sense strand
caacccgcuuggagauuug

SEQ ID NO: 448329 - RNA, 19 nt, Homo sapiens
  misc_RNA (1)...(19): siRNA sense strand
gcaccuacagcugcuacua

SEQ ID NO: 448330 - RNA, 19 nt, Homo sapiens
  misc_RNA (1)...(19): siRNA sense strand
gcucagccggcuacaguug

SEQ ID NO: 448331 - RNA, 19 nt, Homo sapiens
  misc_RNA (1)...(19): siRNA sense strand
uuucaagccuggagagauc

SEQ ID NO: 448332 - RNA, 19 nt, Homo sapiens
  misc_RNA (1)...(19): siRNA sense strand
gcgaggugcuggucaucag

SEQ ID NO: 448333 - RNA, 19 nt, Homo sapiens
  misc_RNA (1)...(19): siRNA sense strand
uggagcugcuggugacaga

SEQ ID NO: 448334 - RNA, 19 nt, Homo sapiens
  misc_RNA (1)...(19): siRNA sense strand
acaugagcuucgugcugua

SEQ ID NO: 448335 - RNA, 19 nt, Homo sapiens
  misc_RNA (1)...(19): siRNA sense strand
caccuacagcugcuacuau

SEQ ID NO: 448336 - RNA, 19 nt, Homo sapiens
  misc_RNA (1)...(19): siRNA sense strand
ccuccgagcuggcagaauu

SEQ ID NO: 448337 - RNA, 19 nt, Homo sapiens
  misc_RNA (1)...(19): siRNA sense strand
gcuuggagauuuggacuuu

SEQ ID NO: 448338 - RNA, 19 nt, Homo sapiens
  misc_RNA (1)...(19): siRNA sense strand
gagcucagccggcuacagu

SEQ ID NO: 448339 - RNA, 19 nt, Homo sapiens
  misc_RNA (1)...(19): siRNA sense strand
cgagcuggcagaauucuuu

SEQ ID NO: 448340 - RNA, 19 nt, Homo sapiens
  misc_RNA (1)...(19): siRNA sense strand
caacccgcuuggagauuug

SEQ ID NO: 448341 - RNA, 19 nt, Homo sapiens
  misc_RNA (1)...(19): siRNA sense strand
gcaccuacagcugcuacua

SEQ ID NO: 448342 - RNA, 19 nt, Homo sapiens
  misc_RNA (1)...(19): siRNA sense strand
gcucagccggcuacaguug

SEQ ID NO: 448343 - RNA, 19 nt, Homo sapiens
  misc_RNA (1)...(19): siRNA sense strand
uuucaagccuggagagauc

SEQ ID NO: 448344 - RNA, 19 nt, Homo sapiens
  misc_RNA (1)...(19): siRNA sense strand
gcgaggugcuggucaucag

SEQ ID NO: 448345 - RNA, 19 nt, Homo sapiens
  misc_RNA (1)...(19): siRNA sense strand
uggagcugcuggugacaga

SEQ ID NO: 448346 - RNA, 19 nt, Homo sapiens
  misc_RNA (1)...(19): siRNA sense strand
acaugagcuucgugcugua

SEQ ID NO: 448347 - RNA, 19 nt, Homo sapiens
  misc_RNA (1)...(19): siRNA sense strand
caccuacagcugcuacuau

SEQ ID NO: 448348 - RNA, 19 nt, Homo sapiens
  misc_RNA (1)...(19): siRNA sense strand
gaacaaggauggucugcuu

SEQ ID NO: 448349 - RNA, 19 nt, Homo sapiens
  misc_RNA (1)...(19): siRNA sense strand
gaaauaagcucuccuucag

SEQ ID NO: 448350 - RNA, 19 nt, Homo sapiens
  misc_RNA (1)...(19): siRNA sense strand
ggacuaccuucuauuguaa

SEQ ID NO: 448351 - RNA, 19 nt, Homo sapiens
  misc_RNA (1)...(19): siRNA sense strand
ggaauucagugccgauauu

SEQ ID NO: 448352 - RNA, 19 nt, Homo sapiens
  misc_RNA (1)...(19): siRNA sense strand
ggaaacagaguagagauua

SEQ ID NO: 448353 - RNA, 19 nt, Homo sapiens
  misc_RNA (1)...(19): siRNA sense strand
caacugugaugauccacua

SEQ ID NO: 448354 - RNA, 19 nt, Homo sapiens
  misc_RNA (1)...(19): siRNA sense strand
cuacggauguuccuauaaa

SEQ ID NO: 448355 - RNA, 19 nt, Homo sapiens
  misc_RNA (1)...(19): siRNA sense strand
gaauacagccggcuucuuc

SEQ ID NO: 448356 - RNA, 19 nt, Homo sapiens
  misc_RNA (1)...(19): siRNA sense strand
ccaaggaccucauuucagu

SEQ ID NO: 448357 - RNA, 19 nt, Homo sapiens
  misc_RNA (1)...(19): siRNA sense strand
ccauuuaccugguggauug

SEQ ID NO: 448358 - RNA, 19 nt, Homo sapiens
  misc_RNA (1)...(19): siRNA sense strand
gaugugaucucccugaagu

SEQ ID NO: 448359 - RNA, 19 nt, Homo sapiens
  misc_RNA (1)...(19): siRNA sense strand
cagaaaggcuuccuaggau

SEQ ID NO: 448360 - RNA, 19 nt, Homo sapiens
  misc_RNA (1)...(19): siRNA sense strand
gaaagcaucagaucuauac

SEQ ID NO: 448361 - RNA, 19 nt, Homo sapiens
  misc_RNA (1)...(19): siRNA sense strand
uaaaucccauuaaggcuuu

SEQ ID NO: 448362 - RNA, 19 nt, Homo sapiens
  misc_RNA (1)...(19): siRNA sense strand
gacauugacuaugagcuua

SEQ ID NO: 448363 - RNA, 19 nt, Homo sapiens
  misc_RNA (1)...(19): siRNA sense strand
aggcucaucuuuauugaua

SEQ ID NO: 448364 - RNA, 19 nt, Homo sapiens
  misc_RNA (1)...(19): siRNA sense strand
gacagcaucuggaccuuug

SEQ ID NO: 448365 - RNA, 19 nt, Homo sapiens
  misc_RNA (1)...(19): siRNA sense strand
gacaaaugauacuggcuuu

SEQ ID NO: 448366 - RNA, 19 nt, Homo sapiens
  misc_RNA (1)...(19): siRNA sense strand
gacgaaagcaucagaucua

SEQ ID NO: 448367 - RNA, 19 nt, Homo sapiens
  misc_RNA (1)...(19): siRNA sense strand
ggaaacaguacaaacaaga

SEQ ID NO: 448368 - RNA, 19 nt, Homo sapiens
  misc_RNA (1)...(19): siRNA sense strand
uggacuaccuucuauugua

SEQ ID NO: 448369 - RNA, 19 nt, Homo sapiens
  misc_RNA (1)...(19): siRNA sense strand
ccuuagacauugacuauga

SEQ ID NO: 448370 - RNA, 19 nt, Homo sapiens
  misc_RNA (1)...(19): siRNA sense strand
gaaacaguacaaacaagaa

SEQ ID NO: 448371 - RNA, 19 nt, Homo sapiens
  misc_RNA (1)...(19): siRNA sense strand
acacuugaauggacagaaa

SEQ ID NO: 448372 - RNA, 19 nt, Homo sapiens
  misc_RNA (1)...(19): siRNA sense strand
gaugaauggacaaaugaua

SEQ ID NO: 448373 - RNA, 19 nt, Homo sapiens
  misc_RNA (1)...(19): siRNA sense strand
gacaagaucuggacaucag

SEQ ID NO: 448374 - RNA, 19 nt, Homo sapiens
  misc_RNA (1)...(19): siRNA sense strand
gaaacagaguagagauuac

SEQ ID NO: 448375 - RNA, 19 nt, Homo sapiens
  misc_RNA (1)...(19): siRNA sense strand
ggaacgccgucucauuuua

SEQ ID NO: 448376 - RNA, 19 nt, Homo sapiens
  misc_RNA (1)...(19): siRNA sense strand
ggcagcaacuugaaugaug

SEQ ID NO: 448377 - RNA, 19 nt, Homo sapiens
  misc_RNA (1)...(19): siRNA sense strand
uaauugaccuggcuaagag

SEQ ID NO: 448378 - RNA, 19 nt, Homo sapiens
  misc_RNA (1)...(19): siRNA sense strand
uaacagcgacaaacuacaa

SEQ ID NO: 448379 - RNA, 19 nt, Homo sapiens
  misc_RNA (1)...(19): siRNA sense strand
cgacagaucaaacucagaa

SEQ ID NO: 448380 - RNA, 19 nt, Homo sapiens
  misc_RNA (1)...(19): siRNA sense strand
aaagaccacuugccuguca

SEQ ID NO: 448381 - RNA, 19 nt, Homo sapiens
  misc_RNA (1)...(19): siRNA sense strand
aaacuacugugaacaugga

SEQ ID NO: 448382 - RNA, 19 nt, Homo sapiens
  misc_RNA (1)...(19): siRNA sense strand
gcucacuucuguacagguu

SEQ ID NO: 448383 - RNA, 19 nt, Homo sapiens
  misc_RNA (1)...(19): siRNA sense strand
cgaaauaagcucuccuuca

SEQ ID NO: 448384 - RNA, 19 nt, Homo sapiens
  misc_RNA (1)...(19): siRNA sense strand
uaacugcagugacacaagu

SEQ ID NO: 448385 - RNA, 19 nt, Homo sapiens
  misc_RNA (1)...(19): siRNA sense strand
cuuguggcauuuaggauua

SEQ ID NO: 448386 - RNA, 19 nt, Homo sapiens
  misc_RNA (1)...(19): siRNA sense strand
gaucuauacuggcaauguc

SEQ ID NO: 448387 - RNA, 19 nt, Homo sapiens
  misc_RNA (1)...(19): siRNA sense strand
cuacaauggaguaaacaua

SEQ ID NO: 448388 - RNA, 19 nt, Homo sapiens
  misc_RNA (1)...(19): siRNA sense strand
cgacaaacuacaacuguga

SEQ ID NO: 448389 - RNA, 19 nt, Homo sapiens
  misc_RNA (1)...(19): siRNA sense strand
gauuaacagcgacaaacua

SEQ ID NO: 448390 - RNA, 19 nt, Homo sapiens
  misc_RNA (1)...(19): siRNA sense strand
cugacugggugacgaguua

SEQ ID NO: 448391 - RNA, 19 nt, Homo sapiens
  misc_RNA (1)...(19): siRNA sense strand
ggaacgucauccagacaga

SEQ ID NO: 448392 - RNA, 19 nt, Homo sapiens
  misc_RNA (1)...(19): siRNA sense strand
ucagugaguuuccaguuuc

SEQ ID NO: 448393 - RNA, 19 nt, Homo sapiens
  misc_RNA (1)...(19): siRNA sense strand
gcaugagagucgaggucua

SEQ ID NO: 448394 - RNA, 19 nt, Homo sapiens
  misc_RNA (1)...(19): siRNA sense strand
gaagauacggaagcucuga

SEQ ID NO: 448395 - RNA, 19 nt, Homo sapiens
  misc_RNA (1)...(19): siRNA sense strand
ccaaauugaugggcucuca

SEQ ID NO: 448396 - RNA, 19 nt, Homo sapiens
  misc_RNA (1)...(19): siRNA sense strand
gggcgagacggaugccuua

SEQ ID NO: 448397 - RNA, 19 nt, Homo sapiens
  misc_RNA (1)...(19): siRNA sense strand
cagguguacugcaauauca

SEQ ID NO: 448398 - RNA, 19 nt, Homo sapiens
  misc_RNA (1)...(19): siRNA sense strand
cuccuucucuucugaauga

SEQ ID NO: 448399 - RNA, 19 nt, Homo sapiens
  misc_RNA (1)...(19): siRNA sense strand
gaauucagugccgauauuu

SEQ ID NO: 448400 - RNA, 19 nt, Homo sapiens
  misc_RNA (1)...(19): siRNA sense strand
aaggaugaauggacaaaug

SEQ ID NO: 448401 - RNA, 19 nt, Homo sapiens
  misc_RNA (1)...(19): siRNA sense strand
caauaucacugaggacaag

SEQ ID NO: 448402 - RNA, 19 nt, Homo sapiens
  misc_RNA (1)...(19): siRNA sense strand
acagaaaggcuuccuagga

SEQ ID NO: 448403 - RNA, 19 nt, Homo sapiens
  misc_RNA (1)...(19): siRNA sense strand
ggcacucgguccucauuga

SEQ ID NO: 448404 - RNA, 19 nt, Homo sapiens
  misc_RNA (1)...(19): siRNA sense strand
gggaaacagaguagagauu

SEQ ID NO: 448405 - RNA, 19 nt, Homo sapiens
  misc_RNA (1)...(19): siRNA sense strand
gacaaccaauggcacuaug

SEQ ID NO: 448406 - RNA, 19 nt, Homo sapiens
  misc_RNA (1)...(19): siRNA sense strand
ccaaacuacugugaacaug

SEQ ID NO: 448407 - RNA, 19 nt, Homo sapiens
  misc_RNA (1)...(19): siRNA sense strand
cgaaagcaucagaucuaua

SEQ ID NO: 448408 - RNA, 19 nt, Homo sapiens
  misc_RNA (1)...(19): siRNA sense strand
gagaccacaucaccuugga

SEQ ID NO: 448409 - RNA, 19 nt, Homo sapiens
  misc_RNA (1)...(19): siRNA sense strand
ucucaccgauucccaaugu

SEQ ID NO: 448410 - RNA, 19 nt, Homo sapiens
  misc_RNA (1)...(19): siRNA sense strand
gauacuggcuuucuuuccu

SEQ ID NO: 448411 - RNA, 19 nt, Homo sapiens
  misc_RNA (1)...(19): siRNA sense strand
ggaccugggaaacagagua

SEQ ID NO: 448412 - RNA, 19 nt, Homo sapiens
  misc_RNA (1)...(19): siRNA sense strand
gaucaccuuugccaucgau

SEQ ID NO: 448413 - RNA, 19 nt, Homo sapiens
  misc_RNA (1)...(19): siRNA sense strand
uauuguaacugcagugaca

SEQ ID NO: 448414 - RNA, 19 nt, Homo sapiens
  misc_RNA (1)...(19): siRNA sense strand
ucgaaaaccuuuacuacaa

SEQ ID NO: 448415 - RNA, 19 nt, Homo sapiens
  misc_RNA (1)...(19): siRNA sense strand
gacggaugccuuagacauu

SEQ ID NO: 448416 - RNA, 19 nt, Homo sapiens
  misc_RNA (1)...(19): siRNA sense strand
gaacgucauccagacagaa

SEQ ID NO: 448417 - RNA, 19 nt, Homo sapiens
  misc_RNA (1)...(19): siRNA sense strand
cuggaacgccgucucauuu

SEQ ID NO: 448418 - RNA, 19 nt, Homo sapiens
  misc_RNA (1)...(19): siRNA sense strand
gaaaaccuuuacuacaaug

SEQ ID NO: 448419 - RNA, 19 nt, Homo sapiens
  misc_RNA (1)...(19): siRNA sense strand
cuucagagaucaccuuugc

SEQ ID NO: 448420 - RNA, 19 nt, Homo sapiens
  misc_RNA (1)...(19): siRNA sense strand
gugccgauauuuccuucuu

SEQ ID NO: 448421 - RNA, 19 nt, Homo sapiens
  misc_RNA (1)...(19): siRNA sense strand
gcaauaucacugaggacaa

SEQ ID NO: 448422 - RNA, 19 nt, Homo sapiens
  misc_RNA (1)...(19): siRNA sense strand
ucaccgauucccaauguuu

SEQ ID NO: 448423 - RNA, 19 nt, Homo sapiens
  misc_RNA (1)...(19): siRNA sense strand
ucagugagagcccgauuug

SEQ ID NO: 448424 - RNA, 19 nt, Homo sapiens
  misc_RNA (1)...(19): siRNA sense strand
gaaugguccuguggagcuu

SEQ ID NO: 448425 - RNA, 19 nt, Homo sapiens
  misc_RNA (1)...(19): siRNA sense strand
ggacaagaucuggacauca

SEQ ID NO: 448426 - RNA, 19 nt, Homo sapiens
  misc_RNA (1)...(19): siRNA sense strand
gcccaaggaccucauuuca

SEQ ID NO: 448427 - RNA, 19 nt, Homo sapiens
  misc_RNA (1)...(19): siRNA sense strand
caccgauucccaauguuua

SEQ ID NO: 448428 - RNA, 19 nt, Homo sapiens
  misc_RNA (1)...(19): siRNA sense strand
caaacuacaacugugauga

SEQ ID NO: 448429 - RNA, 19 nt, Homo sapiens
  misc_RNA (1)...(19): siRNA sense strand
gaacuucacgguggacaag

SEQ ID NO: 448430 - RNA, 19 nt, Homo sapiens
  misc_RNA (1)...(19): siRNA sense strand
agugagagcccgauuuguu

SEQ ID NO: 448431 - RNA, 19 nt, Homo sapiens
  misc_RNA (1)...(19): siRNA sense strand
ucagaucuauacuggcaau

SEQ ID NO: 448432 - RNA, 19 nt, Homo sapiens
  misc_RNA (1)...(19): siRNA sense strand
gucuacggauguuccuaua

SEQ ID NO: 448433 - RNA, 19 nt, Homo sapiens
  misc_RNA (1)...(19): siRNA sense strand
caaaugauacuggcuuucu

SEQ ID NO: 448434 - RNA, 19 nt, Homo sapiens
  misc_RNA (1)...(19): siRNA sense strand
gcaauugcgacgcugacaa

SEQ ID NO: 448435 - RNA, 19 nt, Homo sapiens
  misc_RNA (1)...(19): siRNA sense strand
cuacaacugugaugaucca

SEQ ID NO: 448436 - RNA, 19 nt, Homo sapiens
  misc_RNA (1)...(19): siRNA sense strand
cagguucaaucagaaguug

SEQ ID NO: 448437 - RNA, 19 nt, Homo sapiens
  misc_RNA (1)...(19): siRNA sense strand
ucacuucuguacagguuca

SEQ ID NO: 448438 - RNA, 19 nt, Homo sapiens
  misc_RNA (1)...(19): siRNA sense strand
acacaggacgcaacuggaa

SEQ ID NO: 448439 - RNA, 19 nt, Homo sapiens
  misc_RNA (1)...(19): siRNA sense strand
cagcccagcucaacucaac

SEQ ID NO: 448440 - RNA, 19 nt, Homo sapiens
  misc_RNA (1)...(19): siRNA sense strand
ucacugauaccgacagauc

SEQ ID NO: 448441 - RNA, 19 nt, Homo sapiens
  misc_RNA (1)...(19): siRNA sense strand
aaaugauacuggcuuucuu

SEQ ID NO: 448442 - RNA, 19 nt, Homo sapiens
  misc_RNA (1)...(19): siRNA sense strand
gacagaacgcguagcugaa

SEQ ID NO: 448443 - RNA, 19 nt, Homo sapiens
  misc_RNA (1)...(19): siRNA sense strand
cgagacggaugccuuagac

SEQ ID NO: 448444 - RNA, 19 nt, Homo sapiens
  misc_RNA (1)...(19): siRNA sense strand
cauuaaagacuucauucga

SEQ ID NO: 448445 - RNA, 19 nt, Homo sapiens
  misc_RNA (1)...(19): siRNA sense strand
caacacgccggauggaaca

SEQ ID NO: 448446 - RNA, 19 nt, Homo sapiens
  misc_RNA (1)...(19): siRNA sense strand
cuccagguguacugcaaua

SEQ ID NO: 448447 - RNA, 19 nt, Homo sapiens
  misc_RNA (1)...(19): siRNA sense strand
agagcugccuggacauuca

SEQ ID NO: 448448 - RNA, 19 nt, Homo sapiens
  misc_RNA (1)...(19): siRNA sense strand
gaacaaggauggucugcuu

SEQ ID NO: 448449 - RNA, 19 nt, Homo sapiens
  misc_RNA (1)...(19): siRNA sense strand
gaaauaagcucuccuucag

SEQ ID NO: 448450 - RNA, 19 nt, Homo sapiens
  misc_RNA (1)...(19): siRNA sense strand
ggacuaccuucuauuguaa

SEQ ID NO: 448451 - RNA, 19 nt, Homo sapiens
  misc_RNA (1)...(19): siRNA sense strand
ggaauucagugccgauauu

SEQ ID NO: 448452 - RNA, 19 nt, Homo sapiens
  misc_RNA (1)...(19): siRNA sense strand
ggaaacagaguagagauua

SEQ ID NO: 448453 - RNA, 19 nt, Homo sapiens
  misc_RNA (1)...(19): siRNA sense strand
caacugugaugauccacua

SEQ ID NO: 448454 - RNA, 19 nt, Homo sapiens
  misc_RNA (1)...(19): siRNA sense strand
cuacggauguuccuauaaa

SEQ ID NO: 448455 - RNA, 19 nt, Homo sapiens
  misc_RNA (1)...(19): siRNA sense strand
gaauacagccggcuucuuc

SEQ ID NO: 448456 - RNA, 19 nt, Homo sapiens
  misc_RNA (1)...(19): siRNA sense strand
ccaaggaccucauuucagu

SEQ ID NO: 448457 - RNA, 19 nt, Homo sapiens
  misc_RNA (1)...(19): siRNA sense strand
ccauuuaccugguggauug

SEQ ID NO: 448458 - RNA, 19 nt, Homo sapiens
  misc_RNA (1)...(19): siRNA sense strand
gaugugaucucccugaagu

SEQ ID NO: 448459 - RNA, 19 nt, Homo sapiens
  misc_RNA (1)...(19): siRNA sense strand
cagaaaggcuuccuaggau

SEQ ID NO: 448460 - RNA, 19 nt, Homo sapiens
  misc_RNA (1)...(19): siRNA sense strand
gaaagcaucagaucuauac

SEQ ID NO: 448461 - RNA, 19 nt, Homo sapiens
  misc_RNA (1)...(19): siRNA sense strand
uaaaucccauuaaggcuuu

SEQ ID NO: 448462 - RNA, 19 nt, Homo sapiens
  misc_RNA (1)...(19): siRNA sense strand
gacauugacuaugagcuua

SEQ ID NO: 448463 - RNA, 19 nt, Homo sapiens
  misc_RNA (1)...(19): siRNA sense strand
aggcucaucuuuauugaua

SEQ ID NO: 448464 - RNA, 19 nt, Homo sapiens
  misc_RNA (1)...(19): siRNA sense strand
gacagcaucuggaccuuug

SEQ ID NO: 448465 - RNA, 19 nt, Homo sapiens
  misc_RNA (1)...(19): siRNA sense strand
gacaaaugauacuggcuuu

SEQ ID NO: 448466 - RNA, 19 nt, Homo sapiens
  misc_RNA (1)...(19): siRNA sense strand
gacgaaagcaucagaucua

SEQ ID NO: 448467 - RNA, 19 nt, Homo sapiens
  misc_RNA (1)...(19): siRNA sense strand
ggaaacaguacaaacaaga

SEQ ID NO: 448468 - RNA, 19 nt, Homo sapiens
  misc_RNA (1)...(19): siRNA sense strand
uggacuaccuucuauugua

SEQ ID NO: 448469 - RNA, 19 nt, Homo sapiens
  misc_RNA (1)...(19): siRNA sense strand
ccuuagacauugacuauga

SEQ ID NO: 448470 - RNA, 19 nt, Homo sapiens
  misc_RNA (1)...(19): siRNA sense strand
gaaacaguacaaacaagaa

SEQ ID NO: 448471 - RNA, 19 nt, Homo sapiens
  misc_RNA (1)...(19): siRNA sense strand
acacuugaauggacagaaa

SEQ ID NO: 448472 - RNA, 19 nt, Homo sapiens
  misc_RNA (1)...(19): siRNA sense strand
gaugaauggacaaaugaua

SEQ ID NO: 448473 - RNA, 19 nt, Homo sapiens
  misc_RNA (1)...(19): siRNA sense strand
gacaagaucuggacaucag

SEQ ID NO: 448474 - RNA, 19 nt, Homo sapiens
  misc_RNA (1)...(19): siRNA sense strand
gaaacagaguagagauuac

SEQ ID NO: 448475 - RNA, 19 nt, Homo sapiens
  misc_RNA (1)...(19): siRNA sense strand
ggaacgccgucucauuuua

SEQ ID NO: 448476 - RNA, 19 nt, Homo sapiens
  misc_RNA (1)...(19): siRNA sense strand
ggcagcaacuugaaugaug

SEQ ID NO: 448477 - RNA, 19 nt, Homo sapiens
  misc_RNA (1)...(19): siRNA sense strand
uaauugaccuggcuaagag

SEQ ID NO: 448478 - RNA, 19 nt, Homo sapiens
  misc_RNA (1)...(19): siRNA sense strand
uaacagcgacaaacuacaa

SEQ ID NO: 448479 - RNA, 19 nt, Homo sapiens
  misc_RNA (1)...(19): siRNA sense strand
cgacagaucaaacucagaa

SEQ ID NO: 448480 - RNA, 19 nt, Homo sapiens
  misc_RNA (1)...(19): siRNA sense strand
aaagaccacuugccuguca

SEQ ID NO: 448481 - RNA, 19 nt, Homo sapiens
  misc_RNA (1)...(19): siRNA sense strand
aaacuacugugaacaugga

SEQ ID NO: 448482 - RNA, 19 nt, Homo sapiens
  misc_RNA (1)...(19): siRNA sense strand
gcucacuucuguacagguu

SEQ ID NO: 448483 - RNA, 19 nt, Homo sapiens
  misc_RNA (1)...(19): siRNA sense strand
cgaaauaagcucuccuuca

SEQ ID NO: 448484 - RNA, 19 nt, Homo sapiens
  misc_RNA (1)...(19): siRNA sense strand
uaacugcagugacacaagu

SEQ ID NO: 448485 - RNA, 19 nt, Homo sapiens
  misc_RNA (1)...(19): siRNA sense strand
cuuguggcauuuaggauua

SEQ ID NO: 448486 - RNA, 19 nt, Homo sapiens
  misc_RNA (1)...(19): siRNA sense strand
gaucuauacuggcaauguc

SEQ ID NO: 448487 - RNA, 19 nt, Homo sapiens
  misc_RNA (1)...(19): siRNA sense strand
cuacaauggaguaaacaua

SEQ ID NO: 448488 - RNA, 19 nt, Homo sapiens
  misc_RNA (1)...(19): siRNA sense strand
cgacaaacuacaacuguga

SEQ ID NO: 448489 - RNA, 19 nt, Homo sapiens
  misc_RNA (1)...(19): siRNA sense strand
gauuaacagcgacaaacua

SEQ ID NO: 448490 - RNA, 19 nt, Homo sapiens
  misc_RNA (1)...(19): siRNA sense strand
cugacugggugacgaguua

SEQ ID NO: 448491 - RNA, 19 nt, Homo sapiens
  misc_RNA (1)...(19): siRNA sense strand
ggaacgucauccagacaga

SEQ ID NO: 448492 - RNA, 19 nt, Homo sapiens
  misc_RNA (1)...(19): siRNA sense strand
ucagugaguuuccaguuuc

SEQ ID NO: 448493 - RNA, 19 nt, Homo sapiens
  misc_RNA (1)...(19): siRNA sense strand
gcaugagagucgaggucua

SEQ ID NO: 448494 - RNA, 19 nt, Homo sapiens
  misc_RNA (1)...(19): siRNA sense strand
gaagauacggaagcucuga

SEQ ID NO: 448495 - RNA, 19 nt, Homo sapiens
  misc_RNA (1)...(19): siRNA sense strand
ccaaauugaugggcucuca

SEQ ID NO: 448496 - RNA, 19 nt, Homo sapiens
  misc_RNA (1)...(19): siRNA sense strand
gggcgagacggaugccuua

SEQ ID NO: 448497 - RNA, 19 nt, Homo sapiens
  misc_RNA (1)...(19): siRNA sense strand
cagguguacugcaauauca

SEQ ID NO: 448498 - RNA, 19 nt, Homo sapiens
  misc_RNA (1)...(19): siRNA sense strand
cuccuucucuucugaauga

SEQ ID NO: 448499 - RNA, 19 nt, Homo sapiens
  misc_RNA (1)...(19): siRNA sense strand
gaauucagugccgauauuu

SEQ ID NO: 448500 - RNA, 19 nt, Homo sapiens
  misc_RNA (1)...(19): siRNA sense strand
aaggaugaauggacaaaug

SEQ ID NO: 448501 - RNA, 19 nt, Homo sapiens
  misc_RNA (1)...(19): siRNA sense strand
caauaucacugaggacaag

SEQ ID NO: 448502 - RNA, 19 nt, Homo sapiens
  misc_RNA (1)...(19): siRNA sense strand
acagaaaggcuuccuagga

SEQ ID NO: 448503 - RNA, 19 nt, Homo sapiens
  misc_RNA (1)...(19): siRNA sense strand
ggcacucgguccucauuga

SEQ ID NO: 448504 - RNA, 19 nt, Homo sapiens
  misc_RNA (1)...(19): siRNA sense strand
gcugcagcauaaagaaauu

SEQ ID NO: 448505 - RNA, 19 nt, Homo sapiens
  misc_RNA (1)...(19): siRNA sense strand
gggaaacagaguagagauu

SEQ ID NO: 448506 - RNA, 19 nt, Homo sapiens
  misc_RNA (1)...(19): siRNA sense strand
gacaaccaauggcacuaug

SEQ ID NO: 448507 - RNA, 19 nt, Homo sapiens
  misc_RNA (1)...(19): siRNA sense strand
ccaaacuacugugaacaug

SEQ ID NO: 448508 - RNA, 19 nt, Homo sapiens
  misc_RNA (1)...(19): siRNA sense strand
cgaaagcaucagaucuaua

SEQ ID NO: 448509 - RNA, 19 nt, Homo sapiens
  misc_RNA (1)...(19): siRNA sense strand
gagaccacaucaccuugga

SEQ ID NO: 448510 - RNA, 19 nt, Homo sapiens
  misc_RNA (1)...(19): siRNA sense strand
ucucaccgauucccaaugu

SEQ ID NO: 448511 - RNA, 19 nt, Homo sapiens
  misc_RNA (1)...(19): siRNA sense strand
gauacuggcuuucuuuccu

SEQ ID NO: 448512 - RNA, 19 nt, Homo sapiens
  misc_RNA (1)...(19): siRNA sense strand
ggaccugggaaacagagua

SEQ ID NO: 448513 - RNA, 19 nt, Homo sapiens
  misc_RNA (1)...(19): siRNA sense strand
gaucaccuuugccaucgau

SEQ ID NO: 448514 - RNA, 19 nt, Homo sapiens
  misc_RNA (1)...(19): siRNA sense strand
uauuguaacugcagugaca

SEQ ID NO: 448515 - RNA, 19 nt, Homo sapiens
  misc_RNA (1)...(19): siRNA sense strand
ucgaaaaccuuuacuacaa

SEQ ID NO: 448516 - RNA, 19 nt, Homo sapiens
  misc_RNA (1)...(19): siRNA sense strand
gacggaugccuuagacauu

SEQ ID NO: 448517 - RNA, 19 nt, Homo sapiens
  misc_RNA (1)...(19): siRNA sense strand
gaacgucauccagacagaa

SEQ ID NO: 448518 - RNA, 19 nt, Homo sapiens
  misc_RNA (1)...(19): siRNA sense strand
cuggaacgccgucucauuu

SEQ ID NO: 448519 - RNA, 19 nt, Homo sapiens
  misc_RNA (1)...(19): siRNA sense strand
gaaaaccuuuacuacaaug

SEQ ID NO: 448520 - RNA, 19 nt, Homo sapiens
  misc_RNA (1)...(19): siRNA sense strand
cuucagagaucaccuuugc

SEQ ID NO: 448521 - RNA, 19 nt, Homo sapiens
  misc_RNA (1)...(19): siRNA sense strand
gugccgauauuuccuucuu

SEQ ID NO: 448522 - RNA, 19 nt, Homo sapiens
  misc_RNA (1)...(19): siRNA sense strand
gcaauaucacugaggacaa

SEQ ID NO: 448523 - RNA, 19 nt, Homo sapiens
  misc_RNA (1)...(19): siRNA sense strand
ucaccgauucccaauguuu

SEQ ID NO: 448524 - RNA, 19 nt, Homo sapiens
  misc_RNA (1)...(19): siRNA sense strand
ucagugagagcccgauuug

SEQ ID NO: 448525 - RNA, 19 nt, Homo sapiens
  misc_RNA (1)...(19): siRNA sense strand
gaaugguccuguggagcuu

SEQ ID NO: 448526 - RNA, 19 nt, Homo sapiens
  misc_RNA (1)...(19): siRNA sense strand
ggacaagaucuggacauca

SEQ ID NO: 448527 - RNA, 19 nt, Homo sapiens
  misc_RNA (1)...(19): siRNA sense strand
gcccaaggaccucauuuca

SEQ ID NO: 448528 - RNA, 19 nt, Homo sapiens
  misc_RNA (1)...(19): siRNA sense strand
caccgauucccaauguuua

SEQ ID NO: 448529 - RNA, 19 nt, Homo sapiens
  misc_RNA (1)...(19): siRNA sense strand
caaacuacaacugugauga

SEQ ID NO: 448530 - RNA, 19 nt, Homo sapiens
  misc_RNA (1)...(19): siRNA sense strand
gaacuucacgguggacaag

SEQ ID NO: 448531 - RNA, 19 nt, Homo sapiens
  misc_RNA (1)...(19): siRNA sense strand
agugagagcccgauuuguu

SEQ ID NO: 448532 - RNA, 19 nt, Homo sapiens
  misc_RNA (1)...(19): siRNA sense strand
ucagaucuauacuggcaau

SEQ ID NO: 448533 - RNA, 19 nt, Homo sapiens
  misc_RNA (1)...(19): siRNA sense strand
gucuacggauguuccuaua

SEQ ID NO: 448534 - RNA, 19 nt, Homo sapiens
  misc_RNA (1)...(19): siRNA sense strand
caaaugauacuggcuuucu

SEQ ID NO: 448535 - RNA, 19 nt, Homo sapiens
  misc_RNA (1)...(19): siRNA sense strand
gcaauugcgacgcugacaa

SEQ ID NO: 448536 - RNA, 19 nt, Homo sapiens
  misc_RNA (1)...(19): siRNA sense strand
cuacaacugugaugaucca

SEQ ID NO: 448537 - RNA, 19 nt, Homo sapiens
  misc_RNA (1)...(19): siRNA sense strand
cagguucaaucagaaguug

SEQ ID NO: 448538 - RNA, 19 nt, Homo sapiens
  misc_RNA (1)...(19): siRNA sense strand
ucacuucuguacagguuca

SEQ ID NO: 448539 - RNA, 19 nt, Homo sapiens
  misc_RNA (1)...(19): siRNA sense strand
acacaggacgcaacuggaa

SEQ ID NO: 448540 - RNA, 19 nt, Homo sapiens
  misc_RNA (1)...(19): siRNA sense strand
ucacugauaccgacagauc

SEQ ID NO: 448541 - RNA, 19 nt, Homo sapiens
  misc_RNA (1)...(19): siRNA sense strand
aaaugauacuggcuuucuu

SEQ ID NO: 448542 - RNA, 19 nt, Homo sapiens
  misc_RNA (1)...(19): siRNA sense strand
cagcccagcucaacucaac

SEQ ID NO: 448543 - RNA, 19 nt, Homo sapiens
  misc_RNA (1)...(19): siRNA sense strand
gacagaacgcguagcugaa

SEQ ID NO: 448544 - RNA, 19 nt, Homo sapiens
  misc_RNA (1)...(19): siRNA sense strand
cgagacggaugccuuagac

SEQ ID NO: 448545 - RNA, 19 nt, Homo sapiens
  misc_RNA (1)...(19): siRNA sense strand
cauuaaagacuucauucga

SEQ ID NO: 448546 - RNA, 19 nt, Homo sapiens
  misc_RNA (1)...(19): siRNA sense strand
caacacgccggauggaaca

SEQ ID NO: 448547 - RNA, 19 nt, Homo sapiens
  misc_RNA (1)...(19): siRNA sense strand
cuccagguguacugcaaua

SEQ ID NO: 448548 - RNA, 19 nt, Homo sapiens
  misc_RNA (1)...(19): siRNA sense strand
gaaggaagauggcgacaga

SEQ ID NO: 448549 - RNA, 19 nt, Homo sapiens
  misc_RNA (1)...(19): siRNA sense strand
gaagauggcgacagaugaa

SEQ ID NO: 448550 - RNA, 19 nt, Homo sapiens
  misc_RNA (1)...(19): siRNA sense strand
ggacaagugccacguggaa

SEQ ID NO: 448551 - RNA, 19 nt, Homo sapiens
  misc_RNA (1)...(19): siRNA sense strand
ggaagauggcgacagauga

SEQ ID NO: 448552 - RNA, 19 nt, Homo sapiens
  misc_RNA (1)...(19): siRNA sense strand
gaaaaugucuaugguuuag

SEQ ID NO: 448553 - RNA, 19 nt, Homo sapiens
  misc_RNA (1)...(19): siRNA sense strand
gauggcgacagaugaagaa

SEQ ID NO: 448554 - RNA, 19 nt, Homo sapiens
  misc_RNA (1)...(19): siRNA sense strand
gaagaaaaugucuaugguu

SEQ ID NO: 448555 - RNA, 19 nt, Homo sapiens
  misc_RNA (1)...(19): siRNA sense strand
ggggcucccugcacgauua

SEQ ID NO: 448556 - RNA, 19 nt, Homo sapiens
  misc_RNA (1)...(19): siRNA sense strand
gcaggugagggacauguuc

SEQ ID NO: 448557 - RNA, 19 nt, Homo sapiens
  misc_RNA (1)...(19): siRNA sense strand
ggcgacagaugaagaaaau

SEQ ID NO: 448558 - RNA, 19 nt, Homo sapiens
  misc_RNA (1)...(19): siRNA sense strand
cguggacacuccggacauu

SEQ ID NO: 448559 - RNA, 19 nt, Homo sapiens
  misc_RNA (1)...(19): siRNA sense strand
ggccagagacgguucuucu

SEQ ID NO: 448560 - RNA, 19 nt, Homo sapiens
  misc_RNA (1)...(19): siRNA sense strand
ggucugugccuuugauaac

SEQ ID NO: 448561 - RNA, 19 nt, Homo sapiens
  misc_RNA (1)...(19): siRNA sense strand
cggaggcucauccuuguug

SEQ ID NO: 448562 - RNA, 19 nt, Homo sapiens
  misc_RNA (1)...(19): siRNA sense strand
ugaagaaaaugucuauggu

SEQ ID NO: 448563 - RNA, 19 nt, Homo sapiens
  misc_RNA (1)...(19): siRNA sense strand
cgcggaggcucauccuugu

SEQ ID NO: 448564 - RNA, 19 nt, Homo sapiens
  misc_RNA (1)...(19): siRNA sense strand
gcucccaaguguccaagac

SEQ ID NO: 448565 - RNA, 19 nt, Homo sapiens
  misc_RNA (1)...(19): siRNA sense strand
gggucugugccuuugauaa

SEQ ID NO: 448566 - RNA, 19 nt, Homo sapiens
  misc_RNA (1)...(19): siRNA sense strand
gaagucaucugucauuaaa

SEQ ID NO: 448567 - RNA, 19 nt, Homo sapiens
  misc_RNA (1)...(19): siRNA sense strand
gaagagaaguccaacagaa

SEQ ID NO: 448568 - RNA, 19 nt, Homo sapiens
  misc_RNA (1)...(19): siRNA sense strand
gaaguucuguccucgguua

SEQ ID NO: 448569 - RNA, 19 nt, Homo sapiens
  misc_RNA (1)...(19): siRNA sense strand
cuacggagauggaugauaa

SEQ ID NO: 448570 - RNA, 19 nt, Homo sapiens
  misc_RNA (1)...(19): siRNA sense strand
gcagugauaguauggauua

SEQ ID NO: 448571 - RNA, 19 nt, Homo sapiens
  misc_RNA (1)...(19): siRNA sense strand
ggaagcgccuggaagauga

SEQ ID NO: 448572 - RNA, 19 nt, Homo sapiens
  misc_RNA (1)...(19): siRNA sense strand
caagugcccuucugcauga

SEQ ID NO: 448573 - RNA, 19 nt, Homo sapiens
  misc_RNA (1)...(19): siRNA sense strand
ggacagacgucaggcagaa

SEQ ID NO: 448574 - RNA, 19 nt, Homo sapiens
  misc_RNA (1)...(19): siRNA sense strand
caaaaugccugaugaugua

SEQ ID NO: 448575 - RNA, 19 nt, Homo sapiens
  misc_RNA (1)...(19): siRNA sense strand
aaacacagcccaacaguga

SEQ ID NO: 448576 - RNA, 19 nt, Homo sapiens
  misc_RNA (1)...(19): siRNA sense strand
gaaaucugcuacuccguau

SEQ ID NO: 448577 - RNA, 19 nt, Homo sapiens
  misc_RNA (1)...(19): siRNA sense strand
ucagugaaaugaugaaaug

SEQ ID NO: 448578 - RNA, 19 nt, Homo sapiens
  misc_RNA (1)...(19): siRNA sense strand
cgauauggcaucuguguua

SEQ ID NO: 448579 - RNA, 19 nt, Homo sapiens
  misc_RNA (1)...(19): siRNA sense strand
gugauaguauggauuauga

SEQ ID NO: 448580 - RNA, 19 nt, Homo sapiens
  misc_RNA (1)...(19): siRNA sense strand
gaugauaguggcagugaua

SEQ ID NO: 448581 - RNA, 19 nt, Homo sapiens
  misc_RNA (1)...(19): siRNA sense strand
ccacugcgcuccagcucua

SEQ ID NO: 448582 - RNA, 19 nt, Homo sapiens
  misc_RNA (1)...(19): siRNA sense strand
gugaaaugaugaaauguga

SEQ ID NO: 448583 - RNA, 19 nt, Homo sapiens
  misc_RNA (1)...(19): siRNA sense strand
ggacagcaauagggugauu

SEQ ID NO: 448584 - RNA, 19 nt, Homo sapiens
  misc_RNA (1)...(19): siRNA sense strand
gcaaaucaaugaggugcuu

SEQ ID NO: 448585 - RNA, 19 nt, Homo sapiens
  misc_RNA (1)...(19): siRNA sense strand
caccagaaguuuaaaggaa

SEQ ID NO: 448586 - RNA, 19 nt, Homo sapiens
  misc_RNA (1)...(19): siRNA sense strand
gauauggcaucuguguuaa

SEQ ID NO: 448587 - RNA, 19 nt, Homo sapiens
  misc_RNA (1)...(19): siRNA sense strand
uauuaugucucuucucgua

SEQ ID NO: 448588 - RNA, 19 nt, Homo sapiens
  misc_RNA (1)...(19): siRNA sense strand
caacagaaaguguaaauac

SEQ ID NO: 448589 - RNA, 19 nt, Homo sapiens
  misc_RNA (1)...(19): siRNA sense strand
caagcuggcuccuuucuag

SEQ ID NO: 448590 - RNA, 19 nt, Homo sapiens
  misc_RNA (1)...(19): siRNA sense strand
gugcuaaccugcauucugu

SEQ ID NO: 448591 - RNA, 19 nt, Homo sapiens
  misc_RNA (1)...(19): siRNA sense strand
gauaguggcagugauagua

SEQ ID NO: 448592 - RNA, 19 nt, Homo sapiens
  misc_RNA (1)...(19): siRNA sense strand
guacguggcugcaguucau

SEQ ID NO: 448593 - RNA, 19 nt, Homo sapiens
  misc_RNA (1)...(19): siRNA sense strand
ucaaauucaugcacaauca

SEQ ID NO: 448594 - RNA, 19 nt, Homo sapiens
  misc_RNA (1)...(19): siRNA sense strand
agacccagcucaacaaguu

SEQ ID NO: 448595 - RNA, 19 nt, Homo sapiens
  misc_RNA (1)...(19): siRNA sense strand
ccagcgagguggagauuga

SEQ ID NO: 448596 - RNA, 19 nt, Homo sapiens
  misc_RNA (1)...(19): siRNA sense strand
gagcuguacuacuguguga

SEQ ID NO: 448597 - RNA, 19 nt, Homo sapiens
  misc_RNA (1)...(19): siRNA sense strand
guacaugcagggacagaua

SEQ ID NO: 448598 - RNA, 19 nt, Homo sapiens
  misc_RNA (1)...(19): siRNA sense strand
gaagcagacauuuguggua

SEQ ID NO: 448599 - RNA, 19 nt, Homo sapiens
  misc_RNA (1)...(19): siRNA sense strand
gcucugaccuuugcucuuc

SEQ ID NO: 448600 - RNA, 19 nt, Homo sapiens
  misc_RNA (1)...(19): siRNA sense strand
gagaagggauggguaugga

SEQ ID NO: 448601 - RNA, 19 nt, Homo sapiens
  misc_RNA (1)...(19): siRNA sense strand
ugaauuggguggcgaguuc

SEQ ID NO: 448602 - RNA, 19 nt, Homo sapiens
  misc_RNA (1)...(19): siRNA sense strand
agacgaagguguugugcuu

SEQ ID NO: 448603 - RNA, 19 nt, Homo sapiens
  misc_RNA (1)...(19): siRNA sense strand
ugaagaagcagacauuugu

SEQ ID NO: 448604 - RNA, 19 nt, Homo sapiens
  misc_RNA (1)...(19): siRNA sense strand
gaagggaucaaccucaaau

SEQ ID NO: 448605 - RNA, 19 nt, Homo sapiens
  misc_RNA (1)...(19): siRNA sense strand
gcaugagccuucgggauga

SEQ ID NO: 448606 - RNA, 19 nt, Homo sapiens
  misc_RNA (1)...(19): siRNA sense strand
ggaucaaccucaaauucau

SEQ ID NO: 448607 - RNA, 19 nt, Homo sapiens
  misc_RNA (1)...(19): siRNA sense strand
gaaaugaugaaaugugaca

SEQ ID NO: 448608 - RNA, 19 nt, Homo sapiens
  misc_RNA (1)...(19): siRNA sense strand
cagaaucacuagagcugaa

SEQ ID NO: 448609 - RNA, 19 nt, Homo sapiens
  misc_RNA (1)...(19): siRNA sense strand
gcaucuguguuaacuucua

SEQ ID NO: 448610 - RNA, 19 nt, Homo sapiens
  misc_RNA (1)...(19): siRNA sense strand
acacuggagucacgcgaua

SEQ ID NO: 448611 - RNA, 19 nt, Homo sapiens
  misc_RNA (1)...(19): siRNA sense strand
ggcccagacuccugaauug

SEQ ID NO: 448612 - RNA, 19 nt, Homo sapiens
  misc_RNA (1)...(19): siRNA sense strand
ggacugaucaagacucugu

SEQ ID NO: 448613 - RNA, 19 nt, Homo sapiens
  misc_RNA (1)...(19): siRNA sense strand
aguaccagcuucagucuuu

SEQ ID NO: 448614 - RNA, 19 nt, Homo sapiens
  misc_RNA (1)...(19): siRNA sense strand
gcaugaccuucgagagauu

SEQ ID NO: 448615 - RNA, 19 nt, Homo sapiens
  misc_RNA (1)...(19): siRNA sense strand
aaucugcuacuccguauua

SEQ ID NO: 448616 - RNA, 19 nt, Homo sapiens
  misc_RNA (1)...(19): siRNA sense strand
gcccagacccacuacuaua

SEQ ID NO: 448617 - RNA, 19 nt, Homo sapiens
  misc_RNA (1)...(19): siRNA sense strand
cagggucgauccagcaauu

SEQ ID NO: 448618 - RNA, 19 nt, Homo sapiens
  misc_RNA (1)...(19): siRNA sense strand
gaaaagagaaccuccauca

SEQ ID NO: 448619 - RNA, 19 nt, Homo sapiens
  misc_RNA (1)...(19): siRNA sense strand
gauucacccuaguggauuu

SEQ ID NO: 448620 - RNA, 19 nt, Homo sapiens
  misc_RNA (1)...(19): siRNA sense strand
ccagacuccugaauugcua

SEQ ID NO: 448621 - RNA, 19 nt, Homo sapiens
  misc_RNA (1)...(19): siRNA sense strand
agaaugacauccgcaagaa

SEQ ID NO: 448622 - RNA, 19 nt, Homo sapiens
  misc_RNA (1)...(19): siRNA sense strand
cuucuuagaugcugugaug

SEQ ID NO: 448623 - RNA, 19 nt, Homo sapiens
  misc_RNA (1)...(19): siRNA sense strand
gagcagcaaugcaggugau

SEQ ID NO: 448624 - RNA, 19 nt, Homo sapiens
  misc_RNA (1)...(19): siRNA sense strand
gauucaagcucuucuuacu

SEQ ID NO: 448625 - RNA, 19 nt, Homo sapiens
  misc_RNA (1)...(19): siRNA sense strand
ccaacgugcugcagggauu

SEQ ID NO: 448626 - RNA, 19 nt, Homo sapiens
  misc_RNA (1)...(19): siRNA sense strand
ccuggaagaugaugaagau

SEQ ID NO: 448627 - RNA, 19 nt, Homo sapiens
  misc_RNA (1)...(19): siRNA sense strand
gaaguaaucaaaccugucu

SEQ ID NO: 448628 - RNA, 19 nt, Homo sapiens
  misc_RNA (1)...(19): siRNA sense strand
gaagaggguggcacugaga

SEQ ID NO: 448629 - RNA, 19 nt, Homo sapiens
  misc_RNA (1)...(19): siRNA sense strand
caucaaacccggaccugaa

SEQ ID NO: 448630 - RNA, 19 nt, Homo sapiens
  misc_RNA (1)...(19): siRNA sense strand
acgagaagcucaucaacau

SEQ ID NO: 448631 - RNA, 19 nt, Homo sapiens
  misc_RNA (1)...(19): siRNA sense strand
ccagaggacugaucaagac

SEQ ID NO: 448632 - RNA, 19 nt, Homo sapiens
  misc_RNA (1)...(19): siRNA sense strand
ggugugagccugacgucua

SEQ ID NO: 448633 - RNA, 19 nt, Homo sapiens
  misc_RNA (1)...(19): siRNA sense strand
guacaaagggacaccaugu

SEQ ID NO: 448634 - RNA, 19 nt, Homo sapiens
  misc_RNA (1)...(19): siRNA sense strand
ggagggcguuaguggauca

SEQ ID NO: 448635 - RNA, 19 nt, Homo sapiens
  misc_RNA (1)...(19): siRNA sense strand
gggaucaaccucaaauuca

SEQ ID NO: 448636 - RNA, 19 nt, Homo sapiens
  misc_RNA (1)...(19): siRNA sense strand
gaugauaccucuuuugucu

SEQ ID NO: 448637 - RNA, 19 nt, Homo sapiens
  misc_RNA (1)...(19): siRNA sense strand
gaguccagcuguuaugauc

SEQ ID NO: 448638 - RNA, 19 nt, Homo sapiens
  misc_RNA (1)...(19): siRNA sense strand
ccagccagcucugaccuuu

SEQ ID NO: 448639 - RNA, 19 nt, Homo sapiens
  misc_RNA (1)...(19): siRNA sense strand
uaacaucggaacaguguau

SEQ ID NO: 448640 - RNA, 19 nt, Homo sapiens
  misc_RNA (1)...(19): siRNA sense strand
caaaggcuauggcacaacu

SEQ ID NO: 448641 - RNA, 19 nt, Homo sapiens
  misc_RNA (1)...(19): siRNA sense strand
ggaagagaaguccaacaga

SEQ ID NO: 448642 - RNA, 19 nt, Homo sapiens
  misc_RNA (1)...(19): siRNA sense strand
gguguacaagggaauguua

SEQ ID NO: 448643 - RNA, 19 nt, Homo sapiens
  misc_RNA (1)...(19): siRNA sense strand
ccacggagccaacucugaa

SEQ ID NO: 448644 - RNA, 19 nt, Homo sapiens
  misc_RNA (1)...(19): siRNA sense strand
uugacgagcugcagaauca

SEQ ID NO: 448645 - RNA, 19 nt, Homo sapiens
  misc_RNA (1)...(19): siRNA sense strand
gaauucaacccacucaucu

SEQ ID NO: 448646 - RNA, 19 nt, Homo sapiens
  misc_RNA (1)...(19): siRNA sense strand
cucaacaaguucuauacua

SEQ ID NO: 448647 - RNA, 19 nt, Homo sapiens
  misc_RNA (1)...(19): siRNA sense strand
gaaggugaggcgccuaaug

SEQ ID NO: 448648 - RNA, 19 nt, Homo sapiens
  misc_RNA (1)...(19): siRNA sense strand
aggaaaugaucgacaggua

SEQ ID NO: 448649 - RNA, 19 nt, Homo sapiens
  misc_RNA (1)...(19): siRNA sense strand
ccagaaguuuaaaggaaga

SEQ ID NO: 448650 - RNA, 19 nt, Homo sapiens
  misc_RNA (1)...(19): siRNA sense strand
gccagcaucuuugggcuuu

SEQ ID NO: 448651 - RNA, 19 nt, Homo sapiens
  misc_RNA (1)...(19): siRNA sense strand
guacaguccucagcuugga

SEQ ID NO: 448652 - RNA, 19 nt, Homo sapiens
  misc_RNA (1)...(19): siRNA sense strand
gugacaagccaaaguggua

SEQ ID NO: 448653 - RNA, 19 nt, Homo sapiens
  misc_RNA (1)...(19): siRNA sense strand
uggcggaucuuuacuggau

SEQ ID NO: 448654 - RNA, 19 nt, Homo sapiens
  misc_RNA (1)...(19): siRNA sense strand
gaagguaaauaagaaugac

SEQ ID NO: 448655 - RNA, 19 nt, Homo sapiens
  misc_RNA (1)...(19): siRNA sense strand
uggcaucuguguuaacuuc

SEQ ID NO: 448656 - RNA, 19 nt, Homo sapiens
  misc_RNA (1)...(19): siRNA sense strand
uguuagaccuccucaagug

SEQ ID NO: 448657 - RNA, 19 nt, Homo sapiens
  misc_RNA (1)...(19): siRNA sense strand
ccagacccaucucgauuca

SEQ ID NO: 448658 - RNA, 19 nt, Homo sapiens
  misc_RNA (1)...(19): siRNA sense strand
gucgggagcuguacuacug

SEQ ID NO: 448659 - RNA, 19 nt, Homo sapiens
  misc_RNA (1)...(19): siRNA sense strand
guaguaacaucggaacagu

SEQ ID NO: 448660 - RNA, 19 nt, Homo sapiens
  misc_RNA (1)...(19): siRNA sense strand
cgaauucacaacaauaugu

SEQ ID NO: 448661 - RNA, 19 nt, Homo sapiens
  misc_RNA (1)...(19): siRNA sense strand
cagcgaauucacaacaaua

SEQ ID NO: 448662 - RNA, 19 nt, Homo sapiens
  misc_RNA (1)...(19): siRNA sense strand
ucuacaaacuggacuucaa

SEQ ID NO: 448663 - RNA, 19 nt, Homo sapiens
  misc_RNA (1)...(19): siRNA sense strand
uacaaacggagauaucuuu

SEQ ID NO: 448664 - RNA, 19 nt, Homo sapiens
  misc_RNA (1)...(19): siRNA sense strand
ggaagggaucaaccucaaa

SEQ ID NO: 448665 - RNA, 19 nt, Homo sapiens
  misc_RNA (1)...(19): siRNA sense strand
ugugugguguugcguagua

SEQ ID NO: 448666 - RNA, 19 nt, Homo sapiens
  misc_RNA (1)...(19): siRNA sense strand
gaagucaucugucauuaaa

SEQ ID NO: 448667 - RNA, 19 nt, Homo sapiens
  misc_RNA (1)...(19): siRNA sense strand
gaagagaaguccaacagaa

SEQ ID NO: 448668 - RNA, 19 nt, Homo sapiens
  misc_RNA (1)...(19): siRNA sense strand
gaaguucuguccucgguua

SEQ ID NO: 448669 - RNA, 19 nt, Homo sapiens
  misc_RNA (1)...(19): siRNA sense strand
cuacggagauggaugauaa

SEQ ID NO: 448670 - RNA, 19 nt, Homo sapiens
  misc_RNA (1)...(19): siRNA sense strand
gcagugauaguauggauua

SEQ ID NO: 448671 - RNA, 19 nt, Homo sapiens
  misc_RNA (1)...(19): siRNA sense strand
ggaagcgccuggaagauga

SEQ ID NO: 448672 - RNA, 19 nt, Homo sapiens
  misc_RNA (1)...(19): siRNA sense strand
caagugcccuucugcauga

SEQ ID NO: 448673 - RNA, 19 nt, Homo sapiens
  misc_RNA (1)...(19): siRNA sense strand
ggacagacgucaggcagaa

SEQ ID NO: 448674 - RNA, 19 nt, Homo sapiens
  misc_RNA (1)...(19): siRNA sense strand
caaaaugccugaugaugua

SEQ ID NO: 448675 - RNA, 19 nt, Homo sapiens
  misc_RNA (1)...(19): siRNA sense strand
aaacacagcccaacaguga

SEQ ID NO: 448676 - RNA, 19 nt, Homo sapiens
  misc_RNA (1)...(19): siRNA sense strand
gaaaucugcuacuccguau

SEQ ID NO: 448677 - RNA, 19 nt, Homo sapiens
  misc_RNA (1)...(19): siRNA sense strand
ucagugaaaugaugaaaug

SEQ ID NO: 448678 - RNA, 19 nt, Homo sapiens
  misc_RNA (1)...(19): siRNA sense strand
cgauauggcaucuguguua

SEQ ID NO: 448679 - RNA, 19 nt, Homo sapiens
  misc_RNA (1)...(19): siRNA sense strand
gugauaguauggauuauga

SEQ ID NO: 448680 - RNA, 19 nt, Homo sapiens
  misc_RNA (1)...(19): siRNA sense strand
gaugauaguggcagugaua

SEQ ID NO: 448681 - RNA, 19 nt, Homo sapiens
  misc_RNA (1)...(19): siRNA sense strand
ccacugcgcuccagcucua

SEQ ID NO: 448682 - RNA, 19 nt, Homo sapiens
  misc_RNA (1)...(19): siRNA sense strand
gugaaaugaugaaauguga

SEQ ID NO: 448683 - RNA, 19 nt, Homo sapiens
  misc_RNA (1)...(19): siRNA sense strand
ggacagcaauagggugauu

SEQ ID NO: 448684 - RNA, 19 nt, Homo sapiens
  misc_RNA (1)...(19): siRNA sense strand
gcaaaucaaugaggugcuu

SEQ ID NO: 448685 - RNA, 19 nt, Homo sapiens
  misc_RNA (1)...(19): siRNA sense strand
caccagaaguuuaaaggaa

SEQ ID NO: 448686 - RNA, 19 nt, Homo sapiens
  misc_RNA (1)...(19): siRNA sense strand
gauauggcaucuguguuaa

SEQ ID NO: 448687 - RNA, 19 nt, Homo sapiens
  misc_RNA (1)...(19): siRNA sense strand
uauuaugucucuucucgua

SEQ ID NO: 448688 - RNA, 19 nt, Homo sapiens
  misc_RNA (1)...(19): siRNA sense strand
caacagaaaguguaaauac

SEQ ID NO: 448689 - RNA, 19 nt, Homo sapiens
  misc_RNA (1)...(19): siRNA sense strand
caagcuggcuccuuucuag

SEQ ID NO: 448690 - RNA, 19 nt, Homo sapiens
  misc_RNA (1)...(19): siRNA sense strand
gugcuaaccugcauucugu

SEQ ID NO: 448691 - RNA, 19 nt, Homo sapiens
  misc_RNA (1)...(19): siRNA sense strand
gauaguggcagugauagua

SEQ ID NO: 448692 - RNA, 19 nt, Homo sapiens
  misc_RNA (1)...(19): siRNA sense strand
guacguggcugcaguucau

SEQ ID NO: 448693 - RNA, 19 nt, Homo sapiens
  misc_RNA (1)...(19): siRNA sense strand
ucaaauucaugcacaauca

SEQ ID NO: 448694 - RNA, 19 nt, Homo sapiens
  misc_RNA (1)...(19): siRNA sense strand
agacccagcucaacaaguu

SEQ ID NO: 448695 - RNA, 19 nt, Homo sapiens
  misc_RNA (1)...(19): siRNA sense strand
ccagcgagguggagauuga

SEQ ID NO: 448696 - RNA, 19 nt, Homo sapiens
  misc_RNA (1)...(19): siRNA sense strand
gagcuguacuacuguguga

SEQ ID NO: 448697 - RNA, 19 nt, Homo sapiens
  misc_RNA (1)...(19): siRNA sense strand
guacaugcagggacagaua

SEQ ID NO: 448698 - RNA, 19 nt, Homo sapiens
  misc_RNA (1)...(19): siRNA sense strand
gaagcagacauuuguggua

SEQ ID NO: 448699 - RNA, 19 nt, Homo sapiens
  misc_RNA (1)...(19): siRNA sense strand
gcucugaccuuugcucuuc

SEQ ID NO: 448700 - RNA, 19 nt, Homo sapiens
  misc_RNA (1)...(19): siRNA sense strand
gagaagggauggguaugga

SEQ ID NO: 448701 - RNA, 19 nt, Homo sapiens
  misc_RNA (1)...(19): siRNA sense strand
ugaauuggguggcgaguuc

SEQ ID NO: 448702 - RNA, 19 nt, Homo sapiens
  misc_RNA (1)...(19): siRNA sense strand
agacgaagguguugugcuu

SEQ ID NO: 448703 - RNA, 19 nt, Homo sapiens
  misc_RNA (1)...(19): siRNA sense strand
ugaagaagcagacauuugu

SEQ ID NO: 448704 - RNA, 19 nt, Homo sapiens
  misc_RNA (1)...(19): siRNA sense strand
gaagggaucaaccucaaau

SEQ ID NO: 448705 - RNA, 19 nt, Homo sapiens
  misc_RNA (1)...(19): siRNA sense strand
gcaugagccuucgggauga

SEQ ID NO: 448706 - RNA, 19 nt, Homo sapiens
  misc_RNA (1)...(19): siRNA sense strand
ggaucaaccucaaauucau

SEQ ID NO: 448707 - RNA, 19 nt, Homo sapiens
  misc_RNA (1)...(19): siRNA sense strand
gaaaugaugaaaugugaca

SEQ ID NO: 448708 - RNA, 19 nt, Homo sapiens
  misc_RNA (1)...(19): siRNA sense strand
cagaaucacuagagcugaa

SEQ ID NO: 448709 - RNA, 19 nt, Homo sapiens
  misc_RNA (1)...(19): siRNA sense strand
gcaucuguguuaacuucua

SEQ ID NO: 448710 - RNA, 19 nt, Homo sapiens
  misc_RNA (1)...(19): siRNA sense strand
acacuggagucacgcgaua

SEQ ID NO: 448711 - RNA, 19 nt, Homo sapiens
  misc_RNA (1)...(19): siRNA sense strand
ggcccagacuccugaauug

SEQ ID NO: 448712 - RNA, 19 nt, Homo sapiens
  misc_RNA (1)...(19): siRNA sense strand
ggacugaucaagacucugu

SEQ ID NO: 448713 - RNA, 19 nt, Homo sapiens
  misc_RNA (1)...(19): siRNA sense strand
aguaccagcuucagucuuu

SEQ ID NO: 448714 - RNA, 19 nt, Homo sapiens
  misc_RNA (1)...(19): siRNA sense strand
gcaugaccuucgagagauu

SEQ ID NO: 448715 - RNA, 19 nt, Homo sapiens
  misc_RNA (1)...(19): siRNA sense strand
aaucugcuacuccguauua

SEQ ID NO: 448716 - RNA, 19 nt, Homo sapiens
  misc_RNA (1)...(19): siRNA sense strand
gcccagacccacuacuaua

SEQ ID NO: 448717 - RNA, 19 nt, Homo sapiens
  misc_RNA (1)...(19): siRNA sense strand
cagggucgauccagcaauu

SEQ ID NO: 448718 - RNA, 19 nt, Homo sapiens
  misc_RNA (1)...(19): siRNA sense strand
gaaaagagaaccuccauca

SEQ ID NO: 448719 - RNA, 19 nt, Homo sapiens
  misc_RNA (1)...(19): siRNA sense strand
gauucacccuaguggauuu

SEQ ID NO: 448720 - RNA, 19 nt, Homo sapiens
  misc_RNA (1)...(19): siRNA sense strand
ccagacuccugaauugcua

SEQ ID NO: 448721 - RNA, 19 nt, Homo sapiens
  misc_RNA (1)...(19): siRNA sense strand
agaaugacauccgcaagaa

SEQ ID NO: 448722 - RNA, 19 nt, Homo sapiens
  misc_RNA (1)...(19): siRNA sense strand
cuucuuagaugcugugaug

SEQ ID NO: 448723 - RNA, 19 nt, Homo sapiens
  misc_RNA (1)...(19): siRNA sense strand
gagcagcaaugcaggugau

SEQ ID NO: 448724 - RNA, 19 nt, Homo sapiens
  misc_RNA (1)...(19): siRNA sense strand
gauucaagcucuucuuacu

SEQ ID NO: 448725 - RNA, 19 nt, Homo sapiens
  misc_RNA (1)...(19): siRNA sense strand
ccaacgugcugcagggauu

SEQ ID NO: 448726 - RNA, 19 nt, Homo sapiens
  misc_RNA (1)...(19): siRNA sense strand
ccuggaagaugaugaagau

SEQ ID NO: 448727 - RNA, 19 nt, Homo sapiens
  misc_RNA (1)...(19): siRNA sense strand
gaaguaaucaaaccugucu

SEQ ID NO: 448728 - RNA, 19 nt, Homo sapiens
  misc_RNA (1)...(19): siRNA sense strand
gaagaggguggcacugaga

SEQ ID NO: 448729 - RNA, 19 nt, Homo sapiens
  misc_RNA (1)...(19): siRNA sense strand
caucaaacccggaccugaa

SEQ ID NO: 448730 - RNA, 19 nt, Homo sapiens
  misc_RNA (1)...(19): siRNA sense strand
acgagaagcucaucaacau

SEQ ID NO: 448731 - RNA, 19 nt, Homo sapiens
  misc_RNA (1)...(19): siRNA sense strand
ccagaggacugaucaagac

SEQ ID NO: 448732 - RNA, 19 nt, Homo sapiens
  misc_RNA (1)...(19): siRNA sense strand
ggugugagccugacgucua

SEQ ID NO: 448733 - RNA, 19 nt, Homo sapiens
  misc_RNA (1)...(19): siRNA sense strand
guacaaagggacaccaugu

SEQ ID NO: 448734 - RNA, 19 nt, Homo sapiens
  misc_RNA (1)...(19): siRNA sense strand
ggagggcguuaguggauca

SEQ ID NO: 448735 - RNA, 19 nt, Homo sapiens
  misc_RNA (1)...(19): siRNA sense strand
gggaucaaccucaaauuca

SEQ ID NO: 448736 - RNA, 19 nt, Homo sapiens
  misc_RNA (1)...(19): siRNA sense strand
gaugauaccucuuuugucu

SEQ ID NO: 448737 - RNA, 19 nt, Homo sapiens
  misc_RNA (1)...(19): siRNA sense strand
gaguccagcuguuaugauc

SEQ ID NO: 448738 - RNA, 19 nt, Homo sapiens
  misc_RNA (1)...(19): siRNA sense strand
ccagccagcucugaccuuu

SEQ ID NO: 448739 - RNA, 19 nt, Homo sapiens
  misc_RNA (1)...(19): siRNA sense strand
uaacaucggaacaguguau

SEQ ID NO: 448740 - RNA, 19 nt, Homo sapiens
  misc_RNA (1)...(19): siRNA sense strand
caaaggcuauggcacaacu

SEQ ID NO: 448741 - RNA, 19 nt, Homo sapiens
  misc_RNA (1)...(19): siRNA sense strand
ggaagagaaguccaacaga

SEQ ID NO: 448742 - RNA, 19 nt, Homo sapiens
  misc_RNA (1)...(19): siRNA sense strand
gguguacaagggaauguua

SEQ ID NO: 448743 - RNA, 19 nt, Homo sapiens
  misc_RNA (1)...(19): siRNA sense strand
ccacggagccaacucugaa

SEQ ID NO: 448744 - RNA, 19 nt, Homo sapiens
  misc_RNA (1)...(19): siRNA sense strand
uugacgagcugcagaauca

SEQ ID NO: 448745 - RNA, 19 nt, Homo sapiens
  misc_RNA (1)...(19): siRNA sense strand
gaauucaacccacucaucu

SEQ ID NO: 448746 - RNA, 19 nt, Homo sapiens
  misc_RNA (1)...(19): siRNA sense strand
cucaacaaguucuauacua

SEQ ID NO: 448747 - RNA, 19 nt, Homo sapiens
  misc_RNA (1)...(19): siRNA sense strand
gaaggugaggcgccuaaug

SEQ ID NO: 448748 - RNA, 19 nt, Homo sapiens
  misc_RNA (1)...(19): siRNA sense strand
aggaaaugaucgacaggua

SEQ ID NO: 448749 - RNA, 19 nt, Homo sapiens
  misc_RNA (1)...(19): siRNA sense strand
ccagaaguuuaaaggaaga

SEQ ID NO: 448750 - RNA, 19 nt, Homo sapiens
  misc_RNA (1)...(19): siRNA sense strand
gccagcaucuuugggcuuu

SEQ ID NO: 448751 - RNA, 19 nt, Homo sapiens
  misc_RNA (1)...(19): siRNA sense strand
guacaguccucagcuugga

SEQ ID NO: 448752 - RNA, 19 nt, Homo sapiens
  misc_RNA (1)...(19): siRNA sense strand
gugacaagccaaaguggua

SEQ ID NO: 448753 - RNA, 19 nt, Homo sapiens
  misc_RNA (1)...(19): siRNA sense strand
uggcggaucuuuacuggau

SEQ ID NO: 448754 - RNA, 19 nt, Homo sapiens
  misc_RNA (1)...(19): siRNA sense strand
gaagguaaauaagaaugac

SEQ ID NO: 448755 - RNA, 19 nt, Homo sapiens
  misc_RNA (1)...(19): siRNA sense strand
uggcaucuguguuaacuuc

SEQ ID NO: 448756 - RNA, 19 nt, Homo sapiens
  misc_RNA (1)...(19): siRNA sense strand
uguuagaccuccucaagug

SEQ ID NO: 448757 - RNA, 19 nt, Homo sapiens
  misc_RNA (1)...(19): siRNA sense strand
ccagacccaucucgauuca

SEQ ID NO: 448758 - RNA, 19 nt, Homo sapiens
  misc_RNA (1)...(19): siRNA sense strand
gucgggagcuguacuacug

SEQ ID NO: 448759 - RNA, 19 nt, Homo sapiens
  misc_RNA (1)...(19): siRNA sense strand
guaguaacaucggaacagu

SEQ ID NO: 448760 - RNA, 19 nt, Homo sapiens
  misc_RNA (1)...(19): siRNA sense strand
cgaauucacaacaauaugu

SEQ ID NO: 448761 - RNA, 19 nt, Homo sapiens
  misc_RNA (1)...(19): siRNA sense strand
cagcgaauucacaacaaua

SEQ ID NO: 448762 - RNA, 19 nt, Homo sapiens
  misc_RNA (1)...(19): siRNA sense strand
ucuacaaacuggacuucaa

SEQ ID NO: 448763 - RNA, 19 nt, Homo sapiens
  misc_RNA (1)...(19): siRNA sense strand
uacaaacggagauaucuuu

SEQ ID NO: 448764 - RNA, 19 nt, Homo sapiens
  misc_RNA (1)...(19): siRNA sense strand
ggaagggaucaaccucaaa

SEQ ID NO: 448765 - RNA, 19 nt, Homo sapiens
  misc_RNA (1)...(19): siRNA sense strand
ugugugguguugcguagua

SEQ ID NO: 448766 - RNA, 19 nt, Homo sapiens
  misc_RNA (1)...(19): siRNA sense strand
gaagucaucugucauuaaa

SEQ ID NO: 448767 - RNA, 19 nt, Homo sapiens
  misc_RNA (1)...(19): siRNA sense strand
gaagagaaguccaacagaa

SEQ ID NO: 448768 - RNA, 19 nt, Homo sapiens
  misc_RNA (1)...(19): siRNA sense strand
gaaguucuguccucgguua

SEQ ID NO: 448769 - RNA, 19 nt, Homo sapiens
  misc_RNA (1)...(19): siRNA sense strand
cuacggagauggaugauaa

SEQ ID NO: 448770 - RNA, 19 nt, Homo sapiens
  misc_RNA (1)...(19): siRNA sense strand
gcagugauaguauggauua

SEQ ID NO: 448771 - RNA, 19 nt, Homo sapiens
  misc_RNA (1)...(19): siRNA sense strand
ggaagcgccuggaagauga

SEQ ID NO: 448772 - RNA, 19 nt, Homo sapiens
  misc_RNA (1)...(19): siRNA sense strand
caagugcccuucugcauga

SEQ ID NO: 448773 - RNA, 19 nt, Homo sapiens
  misc_RNA (1)...(19): siRNA sense strand
ggacagacgucaggcagaa

SEQ ID NO: 448774 - RNA, 19 nt, Homo sapiens
  misc_RNA (1)...(19): siRNA sense strand
caaaaugccugaugaugua

SEQ ID NO: 448775 - RNA, 19 nt, Homo sapiens
  misc_RNA (1)...(19): siRNA sense strand
aaacacagcccaacaguga

SEQ ID NO: 448776 - RNA, 19 nt, Homo sapiens
  misc_RNA (1)...(19): siRNA sense strand
gaaaucugcuacuccguau

SEQ ID NO: 448777 - RNA, 19 nt, Homo sapiens
  misc_RNA (1)...(19): siRNA sense strand
ucagugaaaugaugaaaug

SEQ ID NO: 448778 - RNA, 19 nt, Homo sapiens
  misc_RNA (1)...(19): siRNA sense strand
cgauauggcaucuguguua

SEQ ID NO: 448779 - RNA, 19 nt, Homo sapiens
  misc_RNA (1)...(19): siRNA sense strand
gugauaguauggauuauga

SEQ ID NO: 448780 - RNA, 19 nt, Homo sapiens
  misc_RNA (1)...(19): siRNA sense strand
gaugauaguggcagugaua

SEQ ID NO: 448781 - RNA, 19 nt, Homo sapiens
  misc_RNA (1)...(19): siRNA sense strand
ccacugcgcuccagcucua

SEQ ID NO: 448782 - RNA, 19 nt, Homo sapiens
  misc_RNA (1)...(19): siRNA sense strand
gugaaaugaugaaauguga

SEQ ID NO: 448783 - RNA, 19 nt, Homo sapiens
  misc_RNA (1)...(19): siRNA sense strand
ggacagcaauagggugauu

SEQ ID NO: 448784 - RNA, 19 nt, Homo sapiens
  misc_RNA (1)...(19): siRNA sense strand
gcaaaucaaugaggugcuu

SEQ ID NO: 448785 - RNA, 19 nt, Homo sapiens
  misc_RNA (1)...(19): siRNA sense strand
caccagaaguuuaaaggaa

SEQ ID NO: 448786 - RNA, 19 nt, Homo sapiens
  misc_RNA (1)...(19): siRNA sense strand
gauauggcaucuguguuaa

SEQ ID NO: 448787 - RNA, 19 nt, Homo sapiens
  misc_RNA (1)...(19): siRNA sense strand
uauuaugucucuucucgua

SEQ ID NO: 448788 - RNA, 19 nt, Homo sapiens
  misc_RNA (1)...(19): siRNA sense strand
caacagaaaguguaaauac

SEQ ID NO: 448789 - RNA, 19 nt, Homo sapiens
  misc_RNA (1)...(19): siRNA sense strand
caagcuggcuccuuucuag

SEQ ID NO: 448790 - RNA, 19 nt, Homo sapiens
  misc_RNA (1)...(19): siRNA sense strand
gugcuaaccugcauucugu

SEQ ID NO: 448791 - RNA, 19 nt, Homo sapiens
  misc_RNA (1)...(19): siRNA sense strand
gauaguggcagugauagua

SEQ ID NO: 448792 - RNA, 19 nt, Homo sapiens
  misc_RNA (1)...(19): siRNA sense strand
guacguggcugcaguucau

SEQ ID NO: 448793 - RNA, 19 nt, Homo sapiens
  misc_RNA (1)...(19): siRNA sense strand
ucaaauucaugcacaauca

SEQ ID NO: 448794 - RNA, 19 nt, Homo sapiens
  misc_RNA (1)...(19): siRNA sense strand
agacccagcucaacaaguu

SEQ ID NO: 448795 - RNA, 19 nt, Homo sapiens
  misc_RNA (1)...(19): siRNA sense strand
ccagcgagguggagauuga

SEQ ID NO: 448796 - RNA, 19 nt, Homo sapiens
  misc_RNA (1)...(19): siRNA sense strand
gagcuguacuacuguguga

SEQ ID NO: 448797 - RNA, 19 nt, Homo sapiens
  misc_RNA (1)...(19): siRNA sense strand
guacaugcagggacagaua

SEQ ID NO: 448798 - RNA, 19 nt, Homo sapiens
  misc_RNA (1)...(19): siRNA sense strand
gaagcagacauuuguggua

SEQ ID NO: 448799 - RNA, 19 nt, Homo sapiens
  misc_RNA (1)...(19): siRNA sense strand
gcucugaccuuugcucuuc

SEQ ID NO: 448800 - RNA, 19 nt, Homo sapiens
  misc_RNA (1)...(19): siRNA sense strand
gagaagggauggguaugga

SEQ ID NO: 448801 - RNA, 19 nt, Homo sapiens
  misc_RNA (1)...(19): siRNA sense strand
ugaauuggguggcgaguuc

SEQ ID NO: 448802 - RNA, 19 nt, Homo sapiens
  misc_RNA (1)...(19): siRNA sense strand
agacgaagguguugugcuu

SEQ ID NO: 448803 - RNA, 19 nt, Homo sapiens
  misc_RNA (1)...(19): siRNA sense strand
ugaagaagcagacauuugu

SEQ ID NO: 448804 - RNA, 19 nt, Homo sapiens
  misc_RNA (1)...(19): siRNA sense strand
gaagggaucaaccucaaau

SEQ ID NO: 448805 - RNA, 19 nt, Homo sapiens
  misc_RNA (1)...(19): siRNA sense strand
gcaugagccuucgggauga

SEQ ID NO: 448806 - RNA, 19 nt, Homo sapiens
  misc_RNA (1)...(19): siRNA sense strand
ggaucaaccucaaauucau

SEQ ID NO: 448807 - RNA, 19 nt, Homo sapiens
  misc_RNA (1)...(19): siRNA sense strand
gaaaugaugaaaugugaca

SEQ ID NO: 448808 - RNA, 19 nt, Homo sapiens
  misc_RNA (1)...(19): siRNA sense strand
cagaaucacuagagcugaa

SEQ ID NO: 448809 - RNA, 19 nt, Homo sapiens
  misc_RNA (1)...(19): siRNA sense strand
gcaucuguguuaacuucua

SEQ ID NO: 448810 - RNA, 19 nt, Homo sapiens
  misc_RNA (1)...(19): siRNA sense strand
acacuggagucacgcgaua

SEQ ID NO: 448811 - RNA, 19 nt, Homo sapiens
  misc_RNA (1)...(19): siRNA sense strand
ggcccagacuccugaauug

SEQ ID NO: 448812 - RNA, 19 nt, Homo sapiens
  misc_RNA (1)...(19): siRNA sense strand
ggacugaucaagacucugu

SEQ ID NO: 448813 - RNA, 19 nt, Homo sapiens
  misc_RNA (1)...(19): siRNA sense strand
aguaccagcuucagucuuu

SEQ ID NO: 448814 - RNA, 19 nt, Homo sapiens
  misc_RNA (1)...(19): siRNA sense strand
gcaugaccuucgagagauu

SEQ ID NO: 448815 - RNA, 19 nt, Homo sapiens
  misc_RNA (1)...(19): siRNA sense strand
aaucugcuacuccguauua

SEQ ID NO: 448816 - RNA, 19 nt, Homo sapiens
  misc_RNA (1)...(19): siRNA sense strand
gcccagacccacuacuaua

SEQ ID NO: 448817 - RNA, 19 nt, Homo sapiens
  misc_RNA (1)...(19): siRNA sense strand
cagggucgauccagcaauu

SEQ ID NO: 448818 - RNA, 19 nt, Homo sapiens
  misc_RNA (1)...(19): siRNA sense strand
gaaaagagaaccuccauca

SEQ ID NO: 448819 - RNA, 19 nt, Homo sapiens
  misc_RNA (1)...(19): siRNA sense strand
gauucacccuaguggauuu

SEQ ID NO: 448820 - RNA, 19 nt, Homo sapiens
  misc_RNA (1)...(19): siRNA sense strand
ccagacuccugaauugcua

SEQ ID NO: 448821 - RNA, 19 nt, Homo sapiens
  misc_RNA (1)...(19): siRNA sense strand
agaaugacauccgcaagaa

SEQ ID NO: 448822 - RNA, 19 nt, Homo sapiens
  misc_RNA (1)...(19): siRNA sense strand
cuucuuagaugcugugaug

SEQ ID NO: 448823 - RNA, 19 nt, Homo sapiens
  misc_RNA (1)...(19): siRNA sense strand
gagcagcaaugcaggugau

SEQ ID NO: 448824 - RNA, 19 nt, Homo sapiens
  misc_RNA (1)...(19): siRNA sense strand
gauucaagcucuucuuacu

SEQ ID NO: 448825 - RNA, 19 nt, Homo sapiens
  misc_RNA (1)...(19): siRNA sense strand
ccaacgugcugcagggauu

SEQ ID NO: 448826 - RNA, 19 nt, Homo sapiens
  misc_RNA (1)...(19): siRNA sense strand
ccuggaagaugaugaagau

SEQ ID NO: 448827 - RNA, 19 nt, Homo sapiens
  misc_RNA (1)...(19): siRNA sense strand
gaaguaaucaaaccugucu

SEQ ID NO: 448828 - RNA, 19 nt, Homo sapiens
  misc_RNA (1)...(19): siRNA sense strand
gaagaggguggcacugaga

SEQ ID NO: 448829 - RNA, 19 nt, Homo sapiens
  misc_RNA (1)...(19): siRNA sense strand
caucaaacccggaccugaa

SEQ ID NO: 448830 - RNA, 19 nt, Homo sapiens
  misc_RNA (1)...(19): siRNA sense strand
acgagaagcucaucaacau

SEQ ID NO: 448831 - RNA, 19 nt, Homo sapiens
  misc_RNA (1)...(19): siRNA sense strand
ccagaggacugaucaagac

SEQ ID NO: 448832 - RNA, 19 nt, Homo sapiens
  misc_RNA (1)...(19): siRNA sense strand
ggugugagccugacgucua

SEQ ID NO: 448833 - RNA, 19 nt, Homo sapiens
  misc_RNA (1)...(19): siRNA sense strand
guacaaagggacaccaugu

SEQ ID NO: 448834 - RNA, 19 nt, Homo sapiens
  misc_RNA (1)...(19): siRNA sense strand
ggagggcguuaguggauca

SEQ ID NO: 448835 - RNA, 19 nt, Homo sapiens
  misc_RNA (1)...(19): siRNA sense strand
gggaucaaccucaaauuca

SEQ ID NO: 448836 - RNA, 19 nt, Homo sapiens
  misc_RNA (1)...(19): siRNA sense strand
gaugauaccucuuuugucu

SEQ ID NO: 448837 - RNA, 19 nt, Homo sapiens
  misc_RNA (1)...(19): siRNA sense strand
gaguccagcuguuaugauc

SEQ ID NO: 448838 - RNA, 19 nt, Homo sapiens
  misc_RNA (1)...(19): siRNA sense strand
ccagccagcucugaccuuu

SEQ ID NO: 448839 - RNA, 19 nt, Homo sapiens
  misc_RNA (1)...(19): siRNA sense strand
uaacaucggaacaguguau

SEQ ID NO: 448840 - RNA, 19 nt, Homo sapiens
  misc_RNA (1)...(19): siRNA sense strand
caaaggcuauggcacaacu

SEQ ID NO: 448841 - RNA, 19 nt, Homo sapiens
  misc_RNA (1)...(19): siRNA sense strand
ggaagagaaguccaacaga

SEQ ID NO: 448842 - RNA, 19 nt, Homo sapiens
  misc_RNA (1)...(19): siRNA sense strand
gguguacaagggaauguua

SEQ ID NO: 448843 - RNA, 19 nt, Homo sapiens
  misc_RNA (1)...(19): siRNA sense strand
ccacggagccaacucugaa

SEQ ID NO: 448844 - RNA, 19 nt, Homo sapiens
  misc_RNA (1)...(19): siRNA sense strand
uugacgagcugcagaauca

SEQ ID NO: 448845 - RNA, 19 nt, Homo sapiens
  misc_RNA (1)...(19): siRNA sense strand
gaauucaacccacucaucu

SEQ ID NO: 448846 - RNA, 19 nt, Homo sapiens
  misc_RNA (1)...(19): siRNA sense strand
cucaacaaguucuauacua

SEQ ID NO: 448847 - RNA, 19 nt, Homo sapiens
  misc_RNA (1)...(19): siRNA sense strand
gaaggugaggcgccuaaug

SEQ ID NO: 448848 - RNA, 19 nt, Homo sapiens
  misc_RNA (1)...(19): siRNA sense strand
aggaaaugaucgacaggua

SEQ ID NO: 448849 - RNA, 19 nt, Homo sapiens
  misc_RNA (1)...(19): siRNA sense strand
ccagaaguuuaaaggaaga

SEQ ID NO: 448850 - RNA, 19 nt, Homo sapiens
  misc_RNA (1)...(19): siRNA sense strand
gccagcaucuuugggcuuu

SEQ ID NO: 448851 - RNA, 19 nt, Homo sapiens
  misc_RNA (1)...(19): siRNA sense strand
guacaguccucagcuugga

SEQ ID NO: 448852 - RNA, 19 nt, Homo sapiens
  misc_RNA (1)...(19): siRNA sense strand
gugacaagccaaaguggua

SEQ ID NO: 448853 - RNA, 19 nt, Homo sapiens
  misc_RNA (1)...(19): siRNA sense strand
uggcggaucuuuacuggau

SEQ ID NO: 448854 - RNA, 19 nt, Homo sapiens
  misc_RNA (1)...(19): siRNA sense strand
gaagguaaauaagaaugac

SEQ ID NO: 448855 - RNA, 19 nt, Homo sapiens
  misc_RNA (1)...(19): siRNA sense strand
uggcaucuguguuaacuuc

SEQ ID NO: 448856 - RNA, 19 nt, Homo sapiens
  misc_RNA (1)...(19): siRNA sense strand
uguuagaccuccucaagug

SEQ ID NO: 448857 - RNA, 19 nt, Homo sapiens
  misc_RNA (1)...(19): siRNA sense strand
ccagacccaucucgauuca

SEQ ID NO: 448858 - RNA, 19 nt, Homo sapiens
  misc_RNA (1)...(19): siRNA sense strand
gucgggagcuguacuacug

SEQ ID NO: 448859 - RNA, 19 nt, Homo sapiens
  misc_RNA (1)...(19): siRNA sense strand
guaguaacaucggaacagu

SEQ ID NO: 448860 - RNA, 19 nt, Homo sapiens
  misc_RNA (1)...(19): siRNA sense strand
cgaauucacaacaauaugu

SEQ ID NO: 448861 - RNA, 19 nt, Homo sapiens
  misc_RNA (1)...(19): siRNA sense strand
cagcgaauucacaacaaua

SEQ ID NO: 448862 - RNA, 19 nt, Homo sapiens
  misc_RNA (1)...(19): siRNA sense strand
ucuacaaacuggacuucaa

SEQ ID NO: 448863 - RNA, 19 nt, Homo sapiens
  misc_RNA (1)...(19): siRNA sense strand
uacaaacggagauaucuuu

SEQ ID NO: 448864 - RNA, 19 nt, Homo sapiens
  misc_RNA (1)...(19): siRNA sense strand
ggaagggaucaaccucaaa

SEQ ID NO: 448865 - RNA, 19 nt, Homo sapiens
  misc_RNA (1)...(19): siRNA sense strand
ugugugguguugcguagua

SEQ ID NO: 448866 - RNA, 19 nt, Homo sapiens
  misc_RNA (1)...(19): siRNA sense strand
gaagucaucugucauuaaa

SEQ ID NO: 448867 - RNA, 19 nt, Homo sapiens
  misc_RNA (1)...(19): siRNA sense strand
gaagagaaguccaacagaa

SEQ ID NO: 448868 - RNA, 19 nt, Homo sapiens
  misc_RNA (1)...(19): siRNA sense strand
gaaguucuguccucgguua

SEQ ID NO: 448869 - RNA, 19 nt, Homo sapiens
  misc_RNA (1)...(19): siRNA sense strand
cuacggagauggaugauaa

SEQ ID NO: 448870 - RNA, 19 nt, Homo sapiens
  misc_RNA (1)...(19): siRNA sense strand
gcagugauaguauggauua

SEQ ID NO: 448871 - RNA, 19 nt, Homo sapiens
  misc_RNA (1)...(19): siRNA sense strand
ggaagcgccuggaagauga

SEQ ID NO: 448872 - RNA, 19 nt, Homo sapiens
  misc_RNA (1)...(19): siRNA sense strand
caagugcccuucugcauga

SEQ ID NO: 448873 - RNA, 19 nt, Homo sapiens
  misc_RNA (1)...(19): siRNA sense strand
ggacagacgucaggcagaa

SEQ ID NO: 448874 - RNA, 19 nt, Homo sapiens
  misc_RNA (1)...(19): siRNA sense strand
caaaaugccugaugaugua

SEQ ID NO: 448875 - RNA, 19 nt, Homo sapiens
  misc_RNA (1)...(19): siRNA sense strand
aaacacagcccaacaguga

SEQ ID NO: 448876 - RNA, 19 nt, Homo sapiens
  misc_RNA (1)...(19): siRNA sense strand
gaaaucugcuacuccguau

SEQ ID NO: 448877 - RNA, 19 nt, Homo sapiens
  misc_RNA (1)...(19): siRNA sense strand
ucagugaaaugaugaaaug

SEQ ID NO: 448878 - RNA, 19 nt, Homo sapiens
  misc_RNA (1)...(19): siRNA sense strand
cgauauggcaucuguguua

SEQ ID NO: 448879 - RNA, 19 nt, Homo sapiens
  misc_RNA (1)...(19): siRNA sense strand
gugauaguauggauuauga

SEQ ID NO: 448880 - RNA, 19 nt, Homo sapiens
  misc_RNA (1)...(19): siRNA sense strand
gaugauaguggcagugaua

SEQ ID NO: 448881 - RNA, 19 nt, Homo sapiens
  misc_RNA (1)...(19): siRNA sense strand
ccacugcgcuccagcucua

SEQ ID NO: 448882 - RNA, 19 nt, Homo sapiens
  misc_RNA (1)...(19): siRNA sense strand
gugaaaugaugaaauguga

SEQ ID NO: 448883 - RNA, 19 nt, Homo sapiens
  misc_RNA (1)...(19): siRNA sense strand
ggacagcaauagggugauu

SEQ ID NO: 448884 - RNA, 19 nt, Homo sapiens
  misc_RNA (1)...(19): siRNA sense strand
gcaaaucaaugaggugcuu

SEQ ID NO: 448885 - RNA, 19 nt, Homo sapiens
  misc_RNA (1)...(19): siRNA sense strand
caccagaaguuuaaaggaa

SEQ ID NO: 448886 - RNA, 19 nt, Homo sapiens
  misc_RNA (1)...(19): siRNA sense strand
gauauggcaucuguguuaa

SEQ ID NO: 448887 - RNA, 19 nt, Homo sapiens
  misc_RNA (1)...(19): siRNA sense strand
uauuaugucucuucucgua

SEQ ID NO: 448888 - RNA, 19 nt, Homo sapiens
  misc_RNA (1)...(19): siRNA sense strand
caacagaaaguguaaauac

SEQ ID NO: 448889 - RNA, 19 nt, Homo sapiens
  misc_RNA (1)...(19): siRNA sense strand
caagcuggcuccuuucuag

SEQ ID NO: 448890 - RNA, 19 nt, Homo sapiens
  misc_RNA (1)...(19): siRNA sense strand
gugcuaaccugcauucugu

SEQ ID NO: 448891 - RNA, 19 nt, Homo sapiens
  misc_RNA (1)...(19): siRNA sense strand
gauaguggcagugauagua

SEQ ID NO: 448892 - RNA, 19 nt, Homo sapiens
  misc_RNA (1)...(19): siRNA sense strand
guacguggcugcaguucau

SEQ ID NO: 448893 - RNA, 19 nt, Homo sapiens
  misc_RNA (1)...(19): siRNA sense strand
ucaaauucaugcacaauca

SEQ ID NO: 448894 - RNA, 19 nt, Homo sapiens
  misc_RNA (1)...(19): siRNA sense strand
agacccagcucaacaaguu

SEQ ID NO: 448895 - RNA, 19 nt, Homo sapiens
  misc_RNA (1)...(19): siRNA sense strand
ccagcgagguggagauuga

SEQ ID NO: 448896 - RNA, 19 nt, Homo sapiens
  misc_RNA (1)...(19): siRNA sense strand
gagcuguacuacuguguga

SEQ ID NO: 448897 - RNA, 19 nt, Homo sapiens
  misc_RNA (1)...(19): siRNA sense strand
guacaugcagggacagaua

SEQ ID NO: 448898 - RNA, 19 nt, Homo sapiens
  misc_RNA (1)...(19): siRNA sense strand
gaagcagacauuuguggua

SEQ ID NO: 448899 - RNA, 19 nt, Homo sapiens
  misc_RNA (1)...(19): siRNA sense strand
gcucugaccuuugcucuuc

SEQ ID NO: 448900 - RNA, 19 nt, Homo sapiens
  misc_RNA (1)...(19): siRNA sense strand
gagaagggauggguaugga

SEQ ID NO: 448901 - RNA, 19 nt, Homo sapiens
  misc_RNA (1)...(19): siRNA sense strand
ugaauuggguggcgaguuc

SEQ ID NO: 448902 - RNA, 19 nt, Homo sapiens
  misc_RNA (1)...(19): siRNA sense strand
agacgaagguguugugcuu

SEQ ID NO: 448903 - RNA, 19 nt, Homo sapiens
  misc_RNA (1)...(19): siRNA sense strand
ugaagaagcagacauuugu

SEQ ID NO: 448904 - RNA, 19 nt, Homo sapiens
  misc_RNA (1)...(19): siRNA sense strand
gaagggaucaaccucaaau

SEQ ID NO: 448905 - RNA, 19 nt, Homo sapiens
  misc_RNA (1)...(19): siRNA sense strand
gcaugagccuucgggauga

SEQ ID NO: 448906 - RNA, 19 nt, Homo sapiens
  misc_RNA (1)...(19): siRNA sense strand
ggaucaaccucaaauucau

SEQ ID NO: 448907 - RNA, 19 nt, Homo sapiens
  misc_RNA (1)...(19): siRNA sense strand
gaaaugaugaaaugugaca

SEQ ID NO: 448908 - RNA, 19 nt, Homo sapiens
  misc_RNA (1)...(19): siRNA sense strand
cagaaucacuagagcugaa

SEQ ID NO: 448909 - RNA, 19 nt, Homo sapiens
  misc_RNA (1)...(19): siRNA sense strand
gcaucuguguuaacuucua

SEQ ID NO: 448910 - RNA, 19 nt, Homo sapiens
  misc_RNA (1)...(19): siRNA sense strand
acacuggagucacgcgaua

SEQ ID NO: 448911 - RNA, 19 nt, Homo sapiens
  misc_RNA (1)...(19): siRNA sense strand
ggcccagacuccugaauug

SEQ ID NO: 448912 - RNA, 19 nt, Homo sapiens
  misc_RNA (1)...(19): siRNA sense strand
ggacugaucaagacucugu

SEQ ID NO: 448913 - RNA, 19 nt, Homo sapiens
  misc_RNA (1)...(19): siRNA sense strand
aguaccagcuucagucuuu

SEQ ID NO: 448914 - RNA, 19 nt, Homo sapiens
  misc_RNA (1)...(19): siRNA sense strand
gcaugaccuucgagagauu

SEQ ID NO: 448915 - RNA, 19 nt, Homo sapiens
  misc_RNA (1)...(19): siRNA sense strand
aaucugcuacuccguauua

SEQ ID NO: 448916 - RNA, 19 nt, Homo sapiens
  misc_RNA (1)...(19): siRNA sense strand
gcccagacccacuacuaua

SEQ ID NO: 448917 - RNA, 19 nt, Homo sapiens
  misc_RNA (1)...(19): siRNA sense strand
cagggucgauccagcaauu

SEQ ID NO: 448918 - RNA, 19 nt, Homo sapiens
  misc_RNA (1)...(19): siRNA sense strand
gaaaagagaaccuccauca

SEQ ID NO: 448919 - RNA, 19 nt, Homo sapiens
  misc_RNA (1)...(19): siRNA sense strand
gauucacccuaguggauuu

SEQ ID NO: 448920 - RNA, 19 nt, Homo sapiens
  misc_RNA (1)...(19): siRNA sense strand
ccagacuccugaauugcua

SEQ ID NO: 448921 - RNA, 19 nt, Homo sapiens
  misc_RNA (1)...(19): siRNA sense strand
agaaugacauccgcaagaa

SEQ ID NO: 448922 - RNA, 19 nt, Homo sapiens
  misc_RNA (1)...(19): siRNA sense strand
cuucuuagaugcugugaug

SEQ ID NO: 448923 - RNA, 19 nt, Homo sapiens
  misc_RNA (1)...(19): siRNA sense strand
gagcagcaaugcaggugau

SEQ ID NO: 448924 - RNA, 19 nt, Homo sapiens
  misc_RNA (1)...(19): siRNA sense strand
gauucaagcucuucuuacu

SEQ ID NO: 448925 - RNA, 19 nt, Homo sapiens
  misc_RNA (1)...(19): siRNA sense strand
ccaacgugcugcagggauu

SEQ ID NO: 448926 - RNA, 19 nt, Homo sapiens
  misc_RNA (1)...(19): siRNA sense strand
ccuggaagaugaugaagau

SEQ ID NO: 448927 - RNA, 19 nt, Homo sapiens
  misc_RNA (1)...(19): siRNA sense strand
gaaguaaucaaaccugucu

SEQ ID NO: 448928 - RNA, 19 nt, Homo sapiens
  misc_RNA (1)...(19): siRNA sense strand
gaagaggguggcacugaga

SEQ ID NO: 448929 - RNA, 19 nt, Homo sapiens
  misc_RNA (1)...(19): siRNA sense strand
caucaaacccggaccugaa

SEQ ID NO: 448930 - RNA, 19 nt, Homo sapiens
  misc_RNA (1)...(19): siRNA sense strand
acgagaagcucaucaacau

SEQ ID NO: 448931 - RNA, 19 nt, Homo sapiens
  misc_RNA (1)...(19): siRNA sense strand
ccagaggacugaucaagac

SEQ ID NO: 448932 - RNA, 19 nt, Homo sapiens
  misc_RNA (1)...(19): siRNA sense strand
ggugugagccugacgucua

SEQ ID NO: 448933 - RNA, 19 nt, Homo sapiens
  misc_RNA (1)...(19): siRNA sense strand
guacaaagggacaccaugu

SEQ ID NO: 448934 - RNA, 19 nt, Homo sapiens
  misc_RNA (1)...(19): siRNA sense strand
ggagggcguuaguggauca

SEQ ID NO: 448935 - RNA, 19 nt, Homo sapiens
  misc_RNA (1)...(19): siRNA sense strand
gggaucaaccucaaauuca

SEQ ID NO: 448936 - RNA, 19 nt, Homo sapiens
  misc_RNA (1)...(19): siRNA sense strand
gaugauaccucuuuugucu

SEQ ID NO: 448937 - RNA, 19 nt, Homo sapiens
  misc_RNA (1)...(19): siRNA sense strand
gaguccagcuguuaugauc

SEQ ID NO: 448938 - RNA, 19 nt, Homo sapiens
  misc_RNA (1)...(19): siRNA sense strand
ccagccagcucugaccuuu

SEQ ID NO: 448939 - RNA, 19 nt, Homo sapiens
  misc_RNA (1)...(19): siRNA sense strand
uaacaucggaacaguguau

SEQ ID NO: 448940 - RNA, 19 nt, Homo sapiens
  misc_RNA (1)...(19): siRNA sense strand
caaaggcuauggcacaacu

SEQ ID NO: 448941 - RNA, 19 nt, Homo sapiens
  misc_RNA (1)...(19): siRNA sense strand
ggaagagaaguccaacaga

SEQ ID NO: 448942 - RNA, 19 nt, Homo sapiens
  misc_RNA (1)...(19): siRNA sense strand
gguguacaagggaauguua

SEQ ID NO: 448943 - RNA, 19 nt, Homo sapiens
  misc_RNA (1)...(19): siRNA sense strand
ccacggagccaacucugaa

SEQ ID NO: 448944 - RNA, 19 nt, Homo sapiens
  misc_RNA (1)...(19): siRNA sense strand
uugacgagcugcagaauca

SEQ ID NO: 448945 - RNA, 19 nt, Homo sapiens
  misc_RNA (1)...(19): siRNA sense strand
gaauucaacccacucaucu

SEQ ID NO: 448946 - RNA, 19 nt, Homo sapiens
  misc_RNA (1)...(19): siRNA sense strand
cucaacaaguucuauacua

SEQ ID NO: 448947 - RNA, 19 nt, Homo sapiens
  misc_RNA (1)...(19): siRNA sense strand
gaaggugaggcgccuaaug

SEQ ID NO: 448948 - RNA, 19 nt, Homo sapiens
  misc_RNA (1)...(19): siRNA sense strand
aggaaaugaucgacaggua

SEQ ID NO: 448949 - RNA, 19 nt, Homo sapiens
  misc_RNA (1)...(19): siRNA sense strand
ccagaaguuuaaaggaaga

SEQ ID NO: 448950 - RNA, 19 nt, Homo sapiens
  misc_RNA (1)...(19): siRNA sense strand
gccagcaucuuugggcuuu

SEQ ID NO: 448951 - RNA, 19 nt, Homo sapiens
  misc_RNA (1)...(19): siRNA sense strand
guacaguccucagcuugga

SEQ ID NO: 448952 - RNA, 19 nt, Homo sapiens
  misc_RNA (1)...(19): siRNA sense strand
gugacaagccaaaguggua

SEQ ID NO: 448953 - RNA, 19 nt, Homo sapiens
  misc_RNA (1)...(19): siRNA sense strand
uggcggaucuuuacuggau

SEQ ID NO: 448954 - RNA, 19 nt, Homo sapiens
  misc_RNA (1)...(19): siRNA sense strand
gaagguaaauaagaaugac

SEQ ID NO: 448955 - RNA, 19 nt, Homo sapiens
  misc_RNA (1)...(19): siRNA sense strand
uggcaucuguguuaacuuc

SEQ ID NO: 448956 - RNA, 19 nt, Homo sapiens
  misc_RNA (1)...(19): siRNA sense strand
uguuagaccuccucaagug

SEQ ID NO: 448957 - RNA, 19 nt, Homo sapiens
  misc_RNA (1)...(19): siRNA sense strand
ccagacccaucucgauuca

SEQ ID NO: 448958 - RNA, 19 nt, Homo sapiens
  misc_RNA (1)...(19): siRNA sense strand
gucgggagcuguacuacug

SEQ ID NO: 448959 - RNA, 19 nt, Homo sapiens
  misc_RNA (1)...(19): siRNA sense strand
guaguaacaucggaacagu

SEQ ID NO: 448960 - RNA, 19 nt, Homo sapiens
  misc_RNA (1)...(19): siRNA sense strand
cgaauucacaacaauaugu

SEQ ID NO: 448961 - RNA, 19 nt, Homo sapiens
  misc_RNA (1)...(19): siRNA sense strand
cagcgaauucacaacaaua

SEQ ID NO: 448962 - RNA, 19 nt, Homo sapiens
  misc_RNA (1)...(19): siRNA sense strand
ucuacaaacuggacuucaa

SEQ ID NO: 448963 - RNA, 19 nt, Homo sapiens
  misc_RNA (1)...(19): siRNA sense strand
uacaaacggagauaucuuu

SEQ ID NO: 448964 - RNA, 19 nt, Homo sapiens
  misc_RNA (1)...(19): siRNA sense strand
ggaagggaucaaccucaaa

SEQ ID NO: 448965 - RNA, 19 nt, Homo sapiens
  misc_RNA (1)...(19): siRNA sense strand
ugugugguguugcguagua

SEQ ID NO: 448966 - RNA, 19 nt, Homo sapiens
  misc_RNA (1)...(19): siRNA sense strand
gaagucaucugucauuaaa

SEQ ID NO: 448967 - RNA, 19 nt, Homo sapiens
  misc_RNA (1)...(19): siRNA sense strand
gaagagaaguccaacagaa

SEQ ID NO: 448968 - RNA, 19 nt, Homo sapiens
  misc_RNA (1)...(19): siRNA sense strand
gaaguucuguccucgguua

SEQ ID NO: 448969 - RNA, 19 nt, Homo sapiens
  misc_RNA (1)...(19): siRNA sense strand
cuacggagauggaugauaa

SEQ ID NO: 448970 - RNA, 19 nt, Homo sapiens
  misc_RNA (1)...(19): siRNA sense strand
gcagugauaguauggauua

SEQ ID NO: 448971 - RNA, 19 nt, Homo sapiens
  misc_RNA (1)...(19): siRNA sense strand
ggaagcgccuggaagauga

SEQ ID NO: 448972 - RNA, 19 nt, Homo sapiens
  misc_RNA (1)...(19): siRNA sense strand
caagugcccuucugcauga

SEQ ID NO: 448973 - RNA, 19 nt, Homo sapiens
  misc_RNA (1)...(19): siRNA sense strand
ggacagacgucaggcagaa

SEQ ID NO: 448974 - RNA, 19 nt, Homo sapiens
  misc_RNA (1)...(19): siRNA sense strand
caaaaugccugaugaugua

SEQ ID NO: 448975 - RNA, 19 nt, Homo sapiens
  misc_RNA (1)...(19): siRNA sense strand
aaacacagcccaacaguga

SEQ ID NO: 448976 - RNA, 19 nt, Homo sapiens
  misc_RNA (1)...(19): siRNA sense strand
gaaaucugcuacuccguau

SEQ ID NO: 448977 - RNA, 19 nt, Homo sapiens
  misc_RNA (1)...(19): siRNA sense strand
ucagugaaaugaugaaaug

SEQ ID NO: 448978 - RNA, 19 nt, Homo sapiens
  misc_RNA (1)...(19): siRNA sense strand
cgauauggcaucuguguua

SEQ ID NO: 448979 - RNA, 19 nt, Homo sapiens
  misc_RNA (1)...(19): siRNA sense strand
gugauaguauggauuauga

SEQ ID NO: 448980 - RNA, 19 nt, Homo sapiens
  misc_RNA (1)...(19): siRNA sense strand
gaugauaguggcagugaua

SEQ ID NO: 448981 - RNA, 19 nt, Homo sapiens
  misc_RNA (1)...(19): siRNA sense strand
ccacugcgcuccagcucua

SEQ ID NO: 448982 - RNA, 19 nt, Homo sapiens
  misc_RNA (1)...(19): siRNA sense strand
gugaaaugaugaaauguga

SEQ ID NO: 448983 - RNA, 19 nt, Homo sapiens
  misc_RNA (1)...(19): siRNA sense strand
ggacagcaauagggugauu

SEQ ID NO: 448984 - RNA, 19 nt, Homo sapiens
  misc_RNA (1)...(19): siRNA sense strand
gcaaaucaaugaggugcuu

SEQ ID NO: 448985 - RNA, 19 nt, Homo sapiens
  misc_RNA (1)...(19): siRNA sense strand
caccagaaguuuaaaggaa

SEQ ID NO: 448986 - RNA, 19 nt, Homo sapiens
  misc_RNA (1)...(19): siRNA sense strand
gauauggcaucuguguuaa

SEQ ID NO: 448987 - RNA, 19 nt, Homo sapiens
  misc_RNA (1)...(19): siRNA sense strand
uauuaugucucuucucgua

SEQ ID NO: 448988 - RNA, 19 nt, Homo sapiens
  misc_RNA (1)...(19): siRNA sense strand
caacagaaaguguaaauac

SEQ ID NO: 448989 - RNA, 19 nt, Homo sapiens
  misc_RNA (1)...(19): siRNA sense strand
caagcuggcuccuuucuag

SEQ ID NO: 448990 - RNA, 19 nt, Homo sapiens
  misc_RNA (1)...(19): siRNA sense strand
gugcuaaccugcauucugu

SEQ ID NO: 448991 - RNA, 19 nt, Homo sapiens
  misc_RNA (1)...(19): siRNA sense strand
gauaguggcagugauagua

SEQ ID NO: 448992 - RNA, 19 nt, Homo sapiens
  misc_RNA (1)...(19): siRNA sense strand
guacguggcugcaguucau

SEQ ID NO: 448993 - RNA, 19 nt, Homo sapiens
  misc_RNA (1)...(19): siRNA sense strand
ucaaauucaugcacaauca

SEQ ID NO: 448994 - RNA, 19 nt, Homo sapiens
  misc_RNA (1)...(19): siRNA sense strand
agacccagcucaacaaguu

SEQ ID NO: 448995 - RNA, 19 nt, Homo sapiens
  misc_RNA (1)...(19): siRNA sense strand
ccagcgagguggagauuga

SEQ ID NO: 448996 - RNA, 19 nt, Homo sapiens
  misc_RNA (1)...(19): siRNA sense strand
gagcuguacuacuguguga

SEQ ID NO: 448997 - RNA, 19 nt, Homo sapiens
  misc_RNA (1)...(19): siRNA sense strand
guacaugcagggacagaua

SEQ ID NO: 448998 - RNA, 19 nt, Homo sapiens
  misc_RNA (1)...(19): siRNA sense strand
gaagcagacauuuguggua

SEQ ID NO: 448999 - RNA, 19 nt, Homo sapiens
  misc_RNA (1)...(19): siRNA sense strand
gcucugaccuuugcucuuc

SEQ ID NO: 449000 - RNA, 19 nt, Homo sapiens
  misc_RNA (1)...(19): siRNA sense strand
gagaagggauggguaugga

SEQ ID NO: 449001 - RNA, 19 nt, Homo sapiens
  misc_RNA (1)...(19): siRNA sense strand
ugaauuggguggcgaguuc

SEQ ID NO: 449002 - RNA, 19 nt, Homo sapiens
  misc_RNA (1)...(19): siRNA sense strand
agacgaagguguugugcuu

SEQ ID NO: 449003 - RNA, 19 nt, Homo sapiens
  misc_RNA (1)...(19): siRNA sense strand
ugaagaagcagacauuugu

SEQ ID NO: 449004 - RNA, 19 nt, Homo sapiens
  misc_RNA (1)...(19): siRNA sense strand
gaagggaucaaccucaaau

SEQ ID NO: 449005 - RNA, 19 nt, Homo sapiens
  misc_RNA (1)...(19): siRNA sense strand
gcaugagccuucgggauga

SEQ ID NO: 449006 - RNA, 19 nt, Homo sapiens
  misc_RNA (1)...(19): siRNA sense strand
ggaucaaccucaaauucau

SEQ ID NO: 449007 - RNA, 19 nt, Homo sapiens
  misc_RNA (1)...(19): siRNA sense strand
gaaaugaugaaaugugaca

SEQ ID NO: 449008 - RNA, 19 nt, Homo sapiens
  misc_RNA (1)...(19): siRNA sense strand
cagaaucacuagagcugaa

SEQ ID NO: 449009 - RNA, 19 nt, Homo sapiens
  misc_RNA (1)...(19): siRNA sense strand
gcaucuguguuaacuucua

SEQ ID NO: 449010 - RNA, 19 nt, Homo sapiens
  misc_RNA (1)...(19): siRNA sense strand
acacuggagucacgcgaua

SEQ ID NO: 449011 - RNA, 19 nt, Homo sapiens
  misc_RNA (1)...(19): siRNA sense strand
ggcccagacuccugaauug

SEQ ID NO: 449012 - RNA, 19 nt, Homo sapiens
  misc_RNA (1)...(19): siRNA sense strand
ggacugaucaagacucugu

SEQ ID NO: 449013 - RNA, 19 nt, Homo sapiens
  misc_RNA (1)...(19): siRNA sense strand
aguaccagcuucagucuuu

SEQ ID NO: 449014 - RNA, 19 nt, Homo sapiens
  misc_RNA (1)...(19): siRNA sense strand
gcaugaccuucgagagauu

SEQ ID NO: 449015 - RNA, 19 nt, Homo sapiens
  misc_RNA (1)...(19): siRNA sense strand
aaucugcuacuccguauua

SEQ ID NO: 449016 - RNA, 19 nt, Homo sapiens
  misc_RNA (1)...(19): siRNA sense strand
gcccagacccacuacuaua

SEQ ID NO: 449017 - RNA, 19 nt, Homo sapiens
  misc_RNA (1)...(19): siRNA sense strand
cagggucgauccagcaauu

SEQ ID NO: 449018 - RNA, 19 nt, Homo sapiens
  misc_RNA (1)...(19): siRNA sense strand
gaaaagagaaccuccauca

SEQ ID NO: 449019 - RNA, 19 nt, Homo sapiens
  misc_RNA (1)...(19): siRNA sense strand
gauucacccuaguggauuu

SEQ ID NO: 449020 - RNA, 19 nt, Homo sapiens
  misc_RNA (1)...(19): siRNA sense strand
ccagacuccugaauugcua

SEQ ID NO: 449021 - RNA, 19 nt, Homo sapiens
  misc_RNA (1)...(19): siRNA sense strand
agaaugacauccgcaagaa

SEQ ID NO: 449022 - RNA, 19 nt, Homo sapiens
  misc_RNA (1)...(19): siRNA sense strand
cuucuuagaugcugugaug

SEQ ID NO: 449023 - RNA, 19 nt, Homo sapiens
  misc_RNA (1)...(19): siRNA sense strand
gagcagcaaugcaggugau

SEQ ID NO: 449024 - RNA, 19 nt, Homo sapiens
  misc_RNA (1)...(19): siRNA sense strand
gauucaagcucuucuuacu

SEQ ID NO: 449025 - RNA, 19 nt, Homo sapiens
  misc_RNA (1)...(19): siRNA sense strand
ccaacgugcugcagggauu

SEQ ID NO: 449026 - RNA, 19 nt, Homo sapiens
  misc_RNA (1)...(19): siRNA sense strand
ccuggaagaugaugaagau

SEQ ID NO: 449027 - RNA, 19 nt, Homo sapiens
  misc_RNA (1)...(19): siRNA sense strand
gaaguaaucaaaccugucu

SEQ ID NO: 449028 - RNA, 19 nt, Homo sapiens
  misc_RNA (1)...(19): siRNA sense strand
gaagaggguggcacugaga

SEQ ID NO: 449029 - RNA, 19 nt, Homo sapiens
  misc_RNA (1)...(19): siRNA sense strand
caucaaacccggaccugaa

SEQ ID NO: 449030 - RNA, 19 nt, Homo sapiens
  misc_RNA (1)...(19): siRNA sense strand
acgagaagcucaucaacau

SEQ ID NO: 449031 - RNA, 19 nt, Homo sapiens
  misc_RNA (1)...(19): siRNA sense strand
ccagaggacugaucaagac

SEQ ID NO: 449032 - RNA, 19 nt, Homo sapiens
  misc_RNA (1)...(19): siRNA sense strand
ggugugagccugacgucua

SEQ ID NO: 449033 - RNA, 19 nt, Homo sapiens
  misc_RNA (1)...(19): siRNA sense strand
guacaaagggacaccaugu

SEQ ID NO: 449034 - RNA, 19 nt, Homo sapiens
  misc_RNA (1)...(19): siRNA sense strand
ggagggcguuaguggauca

SEQ ID NO: 449035 - RNA, 19 nt, Homo sapiens
  misc_RNA (1)...(19): siRNA sense strand
gggaucaaccucaaauuca

SEQ ID NO: 449036 - RNA, 19 nt, Homo sapiens
  misc_RNA (1)...(19): siRNA sense strand
gaugauaccucuuuugucu

SEQ ID NO: 449037 - RNA, 19 nt, Homo sapiens
  misc_RNA (1)...(19): siRNA sense strand
gaguccagcuguuaugauc

SEQ ID NO: 449038 - RNA, 19 nt, Homo sapiens
  misc_RNA (1)...(19): siRNA sense strand
ccagccagcucugaccuuu

SEQ ID NO: 449039 - RNA, 19 nt, Homo sapiens
  misc_RNA (1)...(19): siRNA sense strand
uaacaucggaacaguguau

SEQ ID NO: 449040 - RNA, 19 nt, Homo sapiens
  misc_RNA (1)...(19): siRNA sense strand
caaaggcuauggcacaacu

SEQ ID NO: 449041 - RNA, 19 nt, Homo sapiens
  misc_RNA (1)...(19): siRNA sense strand
ggaagagaaguccaacaga

SEQ ID NO: 449042 - RNA, 19 nt, Homo sapiens
  misc_RNA (1)...(19): siRNA sense strand
gguguacaagggaauguua

SEQ ID NO: 449043 - RNA, 19 nt, Homo sapiens
  misc_RNA (1)...(19): siRNA sense strand
ccacggagccaacucugaa

SEQ ID NO: 449044 - RNA, 19 nt, Homo sapiens
  misc_RNA (1)...(19): siRNA sense strand
uugacgagcugcagaauca

SEQ ID NO: 449045 - RNA, 19 nt, Homo sapiens
  misc_RNA (1)...(19): siRNA sense strand
gaauucaacccacucaucu

SEQ ID NO: 449046 - RNA, 19 nt, Homo sapiens
  misc_RNA (1)...(19): siRNA sense strand
cucaacaaguucuauacua

SEQ ID NO: 449047 - RNA, 19 nt, Homo sapiens
  misc_RNA (1)...(19): siRNA sense strand
gaaggugaggcgccuaaug

SEQ ID NO: 449048 - RNA, 19 nt, Homo sapiens
  misc_RNA (1)...(19): siRNA sense strand
aggaaaugaucgacaggua

SEQ ID NO: 449049 - RNA, 19 nt, Homo sapiens
  misc_RNA (1)...(19): siRNA sense strand
ccagaaguuuaaaggaaga

SEQ ID NO: 449050 - RNA, 19 nt, Homo sapiens
  misc_RNA (1)...(19): siRNA sense strand
gccagcaucuuugggcuuu

SEQ ID NO: 449051 - RNA, 19 nt, Homo sapiens
  misc_RNA (1)...(19): siRNA sense strand
guacaguccucagcuugga

SEQ ID NO: 449052 - RNA, 19 nt, Homo sapiens
  misc_RNA (1)...(19): siRNA sense strand
gugacaagccaaaguggua

SEQ ID NO: 449053 - RNA, 19 nt, Homo sapiens
  misc_RNA (1)...(19): siRNA sense strand
uggcggaucuuuacuggau

SEQ ID NO: 449054 - RNA, 19 nt, Homo sapiens
  misc_RNA (1)...(19): siRNA sense strand
gaagguaaauaagaaugac

SEQ ID NO: 449055 - RNA, 19 nt, Homo sapiens
  misc_RNA (1)...(19): siRNA sense strand
uggcaucuguguuaacuuc

SEQ ID NO: 449056 - RNA, 19 nt, Homo sapiens
  misc_RNA (1)...(19): siRNA sense strand
uguuagaccuccucaagug

SEQ ID NO: 449057 - RNA, 19 nt, Homo sapiens
  misc_RNA (1)...(19): siRNA sense strand
ccagacccaucucgauuca

SEQ ID NO: 449058 - RNA, 19 nt, Homo sapiens
  misc_RNA (1)...(19): siRNA sense strand
gucgggagcuguacuacug

SEQ ID NO: 449059 - RNA, 19 nt, Homo sapiens
  misc_RNA (1)...(19): siRNA sense strand
guaguaacaucggaacagu

SEQ ID NO: 449060 - RNA, 19 nt, Homo sapiens
  misc_RNA (1)...(19): siRNA sense strand
cgaauucacaacaauaugu

SEQ ID NO: 449061 - RNA, 19 nt, Homo sapiens
  misc_RNA (1)...(19): siRNA sense strand
cagcgaauucacaacaaua

SEQ ID NO: 449062 - RNA, 19 nt, Homo sapiens
  misc_RNA (1)...(19): siRNA sense strand
ucuacaaacuggacuucaa

SEQ ID NO: 449063 - RNA, 19 nt, Homo sapiens
  misc_RNA (1)...(19): siRNA sense strand
uacaaacggagauaucuuu

SEQ ID NO: 449064 - RNA, 19 nt, Homo sapiens
  misc_RNA (1)...(19): siRNA sense strand
ggaagggaucaaccucaaa

SEQ ID NO: 449065 - RNA, 19 nt, Homo sapiens
  misc_RNA (1)...(19): siRNA sense strand
ugugugguguugcguagua

SEQ ID NO: 449066 - RNA, 19 nt, Homo sapiens
  misc_RNA (1)...(19): siRNA sense strand
gaagucaucugucauuaaa

SEQ ID NO: 449067 - RNA, 19 nt, Homo sapiens
  misc_RNA (1)...(19): siRNA sense strand
gaagagaaguccaacagaa

SEQ ID NO: 449068 - RNA, 19 nt, Homo sapiens
  misc_RNA (1)...(19): siRNA sense strand
gaaguucuguccucgguua

SEQ ID NO: 449069 - RNA, 19 nt, Homo sapiens
  misc_RNA (1)...(19): siRNA sense strand
cuacggagauggaugauaa

SEQ ID NO: 449070 - RNA, 19 nt, Homo sapiens
  misc_RNA (1)...(19): siRNA sense strand
gcagugauaguauggauua

SEQ ID NO: 449071 - RNA, 19 nt, Homo sapiens
  misc_RNA (1)...(19): siRNA sense strand
ggaagcgccuggaagauga

SEQ ID NO: 449072 - RNA, 19 nt, Homo sapiens
  misc_RNA (1)...(19): siRNA sense strand
caagugcccuucugcauga

SEQ ID NO: 449073 - RNA, 19 nt, Homo sapiens
  misc_RNA (1)...(19): siRNA sense strand
ggacagacgucaggcagaa

SEQ ID NO: 449074 - RNA, 19 nt, Homo sapiens
  misc_RNA (1)...(19): siRNA sense strand
caaaaugccugaugaugua

SEQ ID NO: 449075 - RNA, 19 nt, Homo sapiens
  misc_RNA (1)...(19): siRNA sense strand
aaacacagcccaacaguga

SEQ ID NO: 449076 - RNA, 19 nt, Homo sapiens
  misc_RNA (1)...(19): siRNA sense strand
ucagugaaaugaugaaaug

SEQ ID NO: 449077 - RNA, 19 nt, Homo sapiens
  misc_RNA (1)...(19): siRNA sense strand
cgauauggcaucuguguua

SEQ ID NO: 449078 - RNA, 19 nt, Homo sapiens
  misc_RNA (1)...(19): siRNA sense strand
gugauaguauggauuauga

SEQ ID NO: 449079 - RNA, 19 nt, Homo sapiens
  misc_RNA (1)...(19): siRNA sense strand
gaugauaguggcagugaua

SEQ ID NO: 449080 - RNA, 19 nt, Homo sapiens
  misc_RNA (1)...(19): siRNA sense strand
ccacugcgcuccagcucua

SEQ ID NO: 449081 - RNA, 19 nt, Homo sapiens
  misc_RNA (1)...(19): siRNA sense strand
gugaaaugaugaaauguga

SEQ ID NO: 449082 - RNA, 19 nt, Homo sapiens
  misc_RNA (1)...(19): siRNA sense strand
ggacagcaauagggugauu

SEQ ID NO: 449083 - RNA, 19 nt, Homo sapiens
  misc_RNA (1)...(19): siRNA sense strand
gcaaaucaaugaggugcuu

SEQ ID NO: 449084 - RNA, 19 nt, Homo sapiens
  misc_RNA (1)...(19): siRNA sense strand
caccagaaguuuaaaggaa

SEQ ID NO: 449085 - RNA, 19 nt, Homo sapiens
  misc_RNA (1)...(19): siRNA sense strand
gauauggcaucuguguuaa

SEQ ID NO: 449086 - RNA, 19 nt, Homo sapiens
  misc_RNA (1)...(19): siRNA sense strand
caacagaaaguguaaauac

SEQ ID NO: 449087 - RNA, 19 nt, Homo sapiens
  misc_RNA (1)...(19): siRNA sense strand
caagcuggcuccuuucuag

SEQ ID NO: 449088 - RNA, 19 nt, Homo sapiens
  misc_RNA (1)...(19): siRNA sense strand
gugcuaaccugcauucugu

SEQ ID NO: 449089 - RNA, 19 nt, Homo sapiens
  misc_RNA (1)...(19): siRNA sense strand
gauaguggcagugauagua

SEQ ID NO: 449090 - RNA, 19 nt, Homo sapiens
  misc_RNA (1)...(19): siRNA sense strand
ucaaauucaugcacaauca

SEQ ID NO: 449091 - RNA, 19 nt, Homo sapiens
  misc_RNA (1)...(19): siRNA sense strand
agacccagcucaacaaguu

SEQ ID NO: 449092 - RNA, 19 nt, Homo sapiens
  misc_RNA (1)...(19): siRNA sense strand
ccagcgagguggagauuga

SEQ ID NO: 449093 - RNA, 19 nt, Homo sapiens
  misc_RNA (1)...(19): siRNA sense strand
gagcuguacuacuguguga

SEQ ID NO: 449094 - RNA, 19 nt, Homo sapiens
  misc_RNA (1)...(19): siRNA sense strand
guacaugcagggacagaua

SEQ ID NO: 449095 - RNA, 19 nt, Homo sapiens
  misc_RNA (1)...(19): siRNA sense strand
gaagcagacauuuguggua

SEQ ID NO: 449096 - RNA, 19 nt, Homo sapiens
  misc_RNA (1)...(19): siRNA sense strand
gcucugaccuuugcucuuc

SEQ ID NO: 449097 - RNA, 19 nt, Homo sapiens
  misc_RNA (1)...(19): siRNA sense strand
gagaagggauggguaugga

SEQ ID NO: 449098 - RNA, 19 nt, Homo sapiens
  misc_RNA (1)...(19): siRNA sense strand
ugaauuggguggcgaguuc

SEQ ID NO: 449099 - RNA, 19 nt, Homo sapiens
  misc_RNA (1)...(19): siRNA sense strand
agacgaagguguugugcuu

SEQ ID NO: 449100 - RNA, 19 nt, Homo sapiens
  misc_RNA (1)...(19): siRNA sense strand
ugaagaagcagacauuugu

SEQ ID NO: 449101 - RNA, 19 nt, Homo sapiens
  misc_RNA (1)...(19): siRNA sense strand
gaagggaucaaccucaaau

SEQ ID NO: 449102 - RNA, 19 nt, Homo sapiens
  misc_RNA (1)...(19): siRNA sense strand
gcaugagccuucgggauga

SEQ ID NO: 449103 - RNA, 19 nt, Homo sapiens
  misc_RNA (1)...(19): siRNA sense strand
ggaucaaccucaaauucau

SEQ ID NO: 449104 - RNA, 19 nt, Homo sapiens
  misc_RNA (1)...(19): siRNA sense strand
gaaaugaugaaaugugaca

SEQ ID NO: 449105 - RNA, 19 nt, Homo sapiens
  misc_RNA (1)...(19): siRNA sense strand
cagaaucacuagagcugaa

SEQ ID NO: 449106 - RNA, 19 nt, Homo sapiens
  misc_RNA (1)...(19): siRNA sense strand
gcaucuguguuaacuucua

SEQ ID NO: 449107 - RNA, 19 nt, Homo sapiens
  misc_RNA (1)...(19): siRNA sense strand
acacuggagucacgcgaua

SEQ ID NO: 449108 - RNA, 19 nt, Homo sapiens
  misc_RNA (1)...(19): siRNA sense strand
ggacugaucaagacucugu

SEQ ID NO: 449109 - RNA, 19 nt, Homo sapiens
  misc_RNA (1)...(19): siRNA sense strand
aguaccagcuucagucuuu

SEQ ID NO: 449110 - RNA, 19 nt, Homo sapiens
  misc_RNA (1)...(19): siRNA sense strand
ggcccagacuccugaauug

SEQ ID NO: 449111 - RNA, 19 nt, Homo sapiens
  misc_RNA (1)...(19): siRNA sense strand
gcaugaccuucgagagauu

SEQ ID NO: 449112 - RNA, 19 nt, Homo sapiens
  misc_RNA (1)...(19): siRNA sense strand
gcccagacccacuacuaua

SEQ ID NO: 449113 - RNA, 19 nt, Homo sapiens
  misc_RNA (1)...(19): siRNA sense strand
cagggucgauccagcaauu

SEQ ID NO: 449114 - RNA, 19 nt, Homo sapiens
  misc_RNA (1)...(19): siRNA sense strand
gaaaagagaaccuccauca

SEQ ID NO: 449115 - RNA, 19 nt, Homo sapiens
  misc_RNA (1)...(19): siRNA sense strand
gauucacccuaguggauuu

SEQ ID NO: 449116 - RNA, 19 nt, Homo sapiens
  misc_RNA (1)...(19): siRNA sense strand
gauucaagcucuucuuacu

SEQ ID NO: 449117 - RNA, 19 nt, Homo sapiens
  misc_RNA (1)...(19): siRNA sense strand
ccagacuccugaauugcua

SEQ ID NO: 449118 - RNA, 19 nt, Homo sapiens
  misc_RNA (1)...(19): siRNA sense strand
agaaugacauccgcaagaa

SEQ ID NO: 449119 - RNA, 19 nt, Homo sapiens
  misc_RNA (1)...(19): siRNA sense strand
cuucuuagaugcugugaug

SEQ ID NO: 449120 - RNA, 19 nt, Homo sapiens
  misc_RNA (1)...(19): siRNA sense strand
gagcagcaaugcaggugau

SEQ ID NO: 449121 - RNA, 19 nt, Homo sapiens
  misc_RNA (1)...(19): siRNA sense strand
ccaacgugcugcagggauu

SEQ ID NO: 449122 - RNA, 19 nt, Homo sapiens
  misc_RNA (1)...(19): siRNA sense strand
ccuggaagaugaugaagau

SEQ ID NO: 449123 - RNA, 19 nt, Homo sapiens
  misc_RNA (1)...(19): siRNA sense strand
gaaguaaucaaaccugucu

SEQ ID NO: 449124 - RNA, 19 nt, Homo sapiens
  misc_RNA (1)...(19): siRNA sense strand
gaagaggguggcacugaga

SEQ ID NO: 449125 - RNA, 19 nt, Homo sapiens
  misc_RNA (1)...(19): siRNA sense strand
caucaaacccggaccugaa

SEQ ID NO: 449126 - RNA, 19 nt, Homo sapiens
  misc_RNA (1)...(19): siRNA sense strand
acgagaagcucaucaacau

SEQ ID NO: 449127 - RNA, 19 nt, Homo sapiens
  misc_RNA (1)...(19): siRNA sense strand
ccagaggacugaucaagac

SEQ ID NO: 449128 - RNA, 19 nt, Homo sapiens
  misc_RNA (1)...(19): siRNA sense strand
ggugugagccugacgucua

SEQ ID NO: 449129 - RNA, 19 nt, Homo sapiens
  misc_RNA (1)...(19): siRNA sense strand
guacaaagggacaccaugu

SEQ ID NO: 449130 - RNA, 19 nt, Homo sapiens
  misc_RNA (1)...(19): siRNA sense strand
gaugauaccucuuuugucu

SEQ ID NO: 449131 - RNA, 19 nt, Homo sapiens
  misc_RNA (1)...(19): siRNA sense strand
gggaucaaccucaaauuca

SEQ ID NO: 449132 - RNA, 19 nt, Homo sapiens
  misc_RNA (1)...(19): siRNA sense strand
gaguccagcuguuaugauc

SEQ ID NO: 449133 - RNA, 19 nt, Homo sapiens
  misc_RNA (1)...(19): siRNA sense strand
ggagggcguuaguggauca

SEQ ID NO: 449134 - RNA, 19 nt, Homo sapiens
  misc_RNA (1)...(19): siRNA sense strand
ccagccagcucugaccuuu

SEQ ID NO: 449135 - RNA, 19 nt, Homo sapiens
  misc_RNA (1)...(19): siRNA sense strand
uaacaucggaacaguguau

SEQ ID NO: 449136 - RNA, 19 nt, Homo sapiens
  misc_RNA (1)...(19): siRNA sense strand
caaaggcuauggcacaacu

SEQ ID NO: 449137 - RNA, 19 nt, Homo sapiens
  misc_RNA (1)...(19): siRNA sense strand
ggaagagaaguccaacaga

SEQ ID NO: 449138 - RNA, 19 nt, Homo sapiens
  misc_RNA (1)...(19): siRNA sense strand
gguguacaagggaauguua

SEQ ID NO: 449139 - RNA, 19 nt, Homo sapiens
  misc_RNA (1)...(19): siRNA sense strand
ccacggagccaacucugaa

SEQ ID NO: 449140 - RNA, 19 nt, Homo sapiens
  misc_RNA (1)...(19): siRNA sense strand
uugacgagcugcagaauca

SEQ ID NO: 449141 - RNA, 19 nt, Homo sapiens
  misc_RNA (1)...(19): siRNA sense strand
gaauucaacccacucaucu

SEQ ID NO: 449142 - RNA, 19 nt, Homo sapiens
  misc_RNA (1)...(19): siRNA sense strand
cucaacaaguucuauacua

SEQ ID NO: 449143 - RNA, 19 nt, Homo sapiens
  misc_RNA (1)...(19): siRNA sense strand
gaaggugaggcgccuaaug

SEQ ID NO: 449144 - RNA, 19 nt, Homo sapiens
  misc_RNA (1)...(19): siRNA sense strand
aggaaaugaucgacaggua

SEQ ID NO: 449145 - RNA, 19 nt, Homo sapiens
  misc_RNA (1)...(19): siRNA sense strand
ccagaaguuuaaaggaaga

SEQ ID NO: 449146 - RNA, 19 nt, Homo sapiens
  misc_RNA (1)...(19): siRNA sense strand
gccagcaucuuugggcuuu

SEQ ID NO: 449147 - RNA, 19 nt, Homo sapiens
  misc_RNA (1)...(19): siRNA sense strand
guacaguccucagcuugga

SEQ ID NO: 449148 - RNA, 19 nt, Homo sapiens
  misc_RNA (1)...(19): siRNA sense strand
gugacaagccaaaguggua

SEQ ID NO: 449149 - RNA, 19 nt, Homo sapiens
  misc_RNA (1)...(19): siRNA sense strand
uggcggaucuuuacuggau

SEQ ID NO: 449150 - RNA, 19 nt, Homo sapiens
  misc_RNA (1)...(19): siRNA sense strand
gaagguaaauaagaaugac

SEQ ID NO: 449151 - RNA, 19 nt, Homo sapiens
  misc_RNA (1)...(19): siRNA sense strand
uguuagaccuccucaagug

SEQ ID NO: 449152 - RNA, 19 nt, Homo sapiens
  misc_RNA (1)...(19): siRNA sense strand
uggcaucuguguuaacuuc

SEQ ID NO: 449153 - RNA, 19 nt, Homo sapiens
  misc_RNA (1)...(19): siRNA sense strand
ccagacccaucucgauuca

SEQ ID NO: 449154 - RNA, 19 nt, Homo sapiens
  misc_RNA (1)...(19): siRNA sense strand
gucgggagcuguacuacug

SEQ ID NO: 449155 - RNA, 19 nt, Homo sapiens
  misc_RNA (1)...(19): siRNA sense strand
guaguaacaucggaacagu

SEQ ID NO: 449156 - RNA, 19 nt, Homo sapiens
  misc_RNA (1)...(19): siRNA sense strand
cgaauucacaacaauaugu

SEQ ID NO: 449157 - RNA, 19 nt, Homo sapiens
  misc_RNA (1)...(19): siRNA sense strand
cagcgaauucacaacaaua

SEQ ID NO: 449158 - RNA, 19 nt, Homo sapiens
  misc_RNA (1)...(19): siRNA sense strand
ucuacaaacuggacuucaa

SEQ ID NO: 449159 - RNA, 19 nt, Homo sapiens
  misc_RNA (1)...(19): siRNA sense strand
cagcgagucuaucucuaug

SEQ ID NO: 449160 - RNA, 19 nt, Homo sapiens
  misc_RNA (1)...(19): siRNA sense strand
ggaagggaucaaccucaaa

SEQ ID NO: 449161 - RNA, 19 nt, Homo sapiens
  misc_RNA (1)...(19): siRNA sense strand
ugugugguguugcguagua

SEQ ID NO: 449162 - RNA, 19 nt, Homo sapiens
  misc_RNA (1)...(19): siRNA sense strand
uacaaacggagauaucuuu

SEQ ID NO: 449163 - RNA, 19 nt, Homo sapiens
  misc_RNA (1)...(19): siRNA sense strand
gcagacauuugugguacau

SEQ ID NO: 449164 - RNA, 19 nt, Homo sapiens
  misc_RNA (1)...(19): siRNA sense strand
guacagccagcaaaucaau

SEQ ID NO: 449165 - RNA, 19 nt, Homo sapiens
  misc_RNA (1)...(19): siRNA sense strand
guaccugucccuuggagaa

SEQ ID NO: 449166 - RNA, 19 nt, Homo sapiens
  misc_RNA (1)...(19): siRNA sense strand
gaagucaucugucauuaaa

SEQ ID NO: 449167 - RNA, 19 nt, Homo sapiens
  misc_RNA (1)...(19): siRNA sense strand
gaagagaaguccaacagaa

SEQ ID NO: 449168 - RNA, 19 nt, Homo sapiens
  misc_RNA (1)...(19): siRNA sense strand
gaaguucuguccucgguua

SEQ ID NO: 449169 - RNA, 19 nt, Homo sapiens
  misc_RNA (1)...(19): siRNA sense strand
cuacggagauggaugauaa

SEQ ID NO: 449170 - RNA, 19 nt, Homo sapiens
  misc_RNA (1)...(19): siRNA sense strand
gcagugauaguauggauua

SEQ ID NO: 449171 - RNA, 19 nt, Homo sapiens
  misc_RNA (1)...(19): siRNA sense strand
ggaagcgccuggaagauga

SEQ ID NO: 449172 - RNA, 19 nt, Homo sapiens
  misc_RNA (1)...(19): siRNA sense strand
caagugcccuucugcauga

SEQ ID NO: 449173 - RNA, 19 nt, Homo sapiens
  misc_RNA (1)...(19): siRNA sense strand
ggacagacgucaggcagaa

SEQ ID NO: 449174 - RNA, 19 nt, Homo sapiens
  misc_RNA (1)...(19): siRNA sense strand
caaaaugccugaugaugua

SEQ ID NO: 449175 - RNA, 19 nt, Homo sapiens
  misc_RNA (1)...(19): siRNA sense strand
aaacacagcccaacaguga

SEQ ID NO: 449176 - RNA, 19 nt, Homo sapiens
  misc_RNA (1)...(19): siRNA sense strand
ucagugaaaugaugaaaug

SEQ ID NO: 449177 - RNA, 19 nt, Homo sapiens
  misc_RNA (1)...(19): siRNA sense strand
cgauauggcaucuguguua

SEQ ID NO: 449178 - RNA, 19 nt, Homo sapiens
  misc_RNA (1)...(19): siRNA sense strand
gugauaguauggauuauga

SEQ ID NO: 449179 - RNA, 19 nt, Homo sapiens
  misc_RNA (1)...(19): siRNA sense strand
gaugauaguggcagugaua

SEQ ID NO: 449180 - RNA, 19 nt, Homo sapiens
  misc_RNA (1)...(19): siRNA sense strand
ccacugcgcuccagcucua

SEQ ID NO: 449181 - RNA, 19 nt, Homo sapiens
  misc_RNA (1)...(19): siRNA sense strand
gugaaaugaugaaauguga

SEQ ID NO: 449182 - RNA, 19 nt, Homo sapiens
  misc_RNA (1)...(19): siRNA sense strand
ggacagcaauagggugauu

SEQ ID NO: 449183 - RNA, 19 nt, Homo sapiens
  misc_RNA (1)...(19): siRNA sense strand
gcaaaucaaugaggugcuu

SEQ ID NO: 449184 - RNA, 19 nt, Homo sapiens
  misc_RNA (1)...(19): siRNA sense strand
caccagaaguuuaaaggaa

SEQ ID NO: 449185 - RNA, 19 nt, Homo sapiens
  misc_RNA (1)...(19): siRNA sense strand
gauauggcaucuguguuaa

SEQ ID NO: 449186 - RNA, 19 nt, Homo sapiens
  misc_RNA (1)...(19): siRNA sense strand
caacagaaaguguaaauac

SEQ ID NO: 449187 - RNA, 19 nt, Homo sapiens
  misc_RNA (1)...(19): siRNA sense strand
caagcuggcuccuuucuag

SEQ ID NO: 449188 - RNA, 19 nt, Homo sapiens
  misc_RNA (1)...(19): siRNA sense strand
gugcuaaccugcauucugu

SEQ ID NO: 449189 - RNA, 19 nt, Homo sapiens
  misc_RNA (1)...(19): siRNA sense strand
gauaguggcagugauagua

SEQ ID NO: 449190 - RNA, 19 nt, Homo sapiens
  misc_RNA (1)...(19): siRNA sense strand
ucaaauucaugcacaauca

SEQ ID NO: 449191 - RNA, 19 nt, Homo sapiens
  misc_RNA (1)...(19): siRNA sense strand
agacccagcucaacaaguu

SEQ ID NO: 449192 - RNA, 19 nt, Homo sapiens
  misc_RNA (1)...(19): siRNA sense strand
ccagcgagguggagauuga

SEQ ID NO: 449193 - RNA, 19 nt, Homo sapiens
  misc_RNA (1)...(19): siRNA sense strand
gagcuguacuacuguguga

SEQ ID NO: 449194 - RNA, 19 nt, Homo sapiens
  misc_RNA (1)...(19): siRNA sense strand
guacaugcagggacagaua

SEQ ID NO: 449195 - RNA, 19 nt, Homo sapiens
  misc_RNA (1)...(19): siRNA sense strand
gaagcagacauuuguggua

SEQ ID NO: 449196 - RNA, 19 nt, Homo sapiens
  misc_RNA (1)...(19): siRNA sense strand
gcucugaccuuugcucuuc

SEQ ID NO: 449197 - RNA, 19 nt, Homo sapiens
  misc_RNA (1)...(19): siRNA sense strand
gagaagggauggguaugga

SEQ ID NO: 449198 - RNA, 19 nt, Homo sapiens
  misc_RNA (1)...(19): siRNA sense strand
ugaauuggguggcgaguuc

SEQ ID NO: 449199 - RNA, 19 nt, Homo sapiens
  misc_RNA (1)...(19): siRNA sense strand
agacgaagguguugugcuu

SEQ ID NO: 449200 - RNA, 19 nt, Homo sapiens
  misc_RNA (1)...(19): siRNA sense strand
ugaagaagcagacauuugu

SEQ ID NO: 449201 - RNA, 19 nt, Homo sapiens
  misc_RNA (1)...(19): siRNA sense strand
gaagggaucaaccucaaau

SEQ ID NO: 449202 - RNA, 19 nt, Homo sapiens
  misc_RNA (1)...(19): siRNA sense strand
gcaugagccuucgggauga

SEQ ID NO: 449203 - RNA, 19 nt, Homo sapiens
  misc_RNA (1)...(19): siRNA sense strand
ggaucaaccucaaauucau

SEQ ID NO: 449204 - RNA, 19 nt, Homo sapiens
  misc_RNA (1)...(19): siRNA sense strand
gaaaugaugaaaugugaca

SEQ ID NO: 449205 - RNA, 19 nt, Homo sapiens
  misc_RNA (1)...(19): siRNA sense strand
cagaaucacuagagcugaa

SEQ ID NO: 449206 - RNA, 19 nt, Homo sapiens
  misc_RNA (1)...(19): siRNA sense strand
gcaucuguguuaacuucua

SEQ ID NO: 449207 - RNA, 19 nt, Homo sapiens
  misc_RNA (1)...(19): siRNA sense strand
acacuggagucacgcgaua

SEQ ID NO: 449208 - RNA, 19 nt, Homo sapiens
  misc_RNA (1)...(19): siRNA sense strand
ggacugaucaagacucugu

SEQ ID NO: 449209 - RNA, 19 nt, Homo sapiens
  misc_RNA (1)...(19): siRNA sense strand
aguaccagcuucagucuuu

SEQ ID NO: 449210 - RNA, 19 nt, Homo sapiens
  misc_RNA (1)...(19): siRNA sense strand
ggcccagacuccugaauug

SEQ ID NO: 449211 - RNA, 19 nt, Homo sapiens
  misc_RNA (1)...(19): siRNA sense strand
gcaugaccuucgagagauu

SEQ ID NO: 449212 - RNA, 19 nt, Homo sapiens
  misc_RNA (1)...(19): siRNA sense strand
gcccagacccacuacuaua

SEQ ID NO: 449213 - RNA, 19 nt, Homo sapiens
  misc_RNA (1)...(19): siRNA sense strand
cagggucgauccagcaauu

SEQ ID NO: 449214 - RNA, 19 nt, Homo sapiens
  misc_RNA (1)...(19): siRNA sense strand
gaaaagagaaccuccauca

SEQ ID NO: 449215 - RNA, 19 nt, Homo sapiens
  misc_RNA (1)...(19): siRNA sense strand
gauucacccuaguggauuu

SEQ ID NO: 449216 - RNA, 19 nt, Homo sapiens
  misc_RNA (1)...(19): siRNA sense strand
gauucaagcucuucuuacu

SEQ ID NO: 449217 - RNA, 19 nt, Homo sapiens
  misc_RNA (1)...(19): siRNA sense strand
ccagacuccugaauugcua

SEQ ID NO: 449218 - RNA, 19 nt, Homo sapiens
  misc_RNA (1)...(19): siRNA sense strand
agaaugacauccgcaagaa

SEQ ID NO: 449219 - RNA, 19 nt, Homo sapiens
  misc_RNA (1)...(19): siRNA sense strand
cuucuuagaugcugugaug

SEQ ID NO: 449220 - RNA, 19 nt, Homo sapiens
  misc_RNA (1)...(19): siRNA sense strand
gagcagcaaugcaggugau

SEQ ID NO: 449221 - RNA, 19 nt, Homo sapiens
  misc_RNA (1)...(19): siRNA sense strand
ccaacgugcugcagggauu

SEQ ID NO: 449222 - RNA, 19 nt, Homo sapiens
  misc_RNA (1)...(19): siRNA sense strand
ccuggaagaugaugaagau

SEQ ID NO: 449223 - RNA, 19 nt, Homo sapiens
  misc_RNA (1)...(19): siRNA sense strand
gaaguaaucaaaccugucu

SEQ ID NO: 449224 - RNA, 19 nt, Homo sapiens
  misc_RNA (1)...(19): siRNA sense strand
gaagaggguggcacugaga

SEQ ID NO: 449225 - RNA, 19 nt, Homo sapiens
  misc_RNA (1)...(19): siRNA sense strand
caucaaacccggaccugaa

SEQ ID NO: 449226 - RNA, 19 nt, Homo sapiens
  misc_RNA (1)...(19): siRNA sense strand
acgagaagcucaucaacau

SEQ ID NO: 449227 - RNA, 19 nt, Homo sapiens
  misc_RNA (1)...(19): siRNA sense strand
ccagaggacugaucaagac

SEQ ID NO: 449228 - RNA, 19 nt, Homo sapiens
  misc_RNA (1)...(19): siRNA sense strand
ggugugagccugacgucua

SEQ ID NO: 449229 - RNA, 19 nt, Homo sapiens
  misc_RNA (1)...(19): siRNA sense strand
guacaaagggacaccaugu

SEQ ID NO: 449230 - RNA, 19 nt, Homo sapiens
  misc_RNA (1)...(19): siRNA sense strand
gaugauaccucuuuugucu

SEQ ID NO: 449231 - RNA, 19 nt, Homo sapiens
  misc_RNA (1)...(19): siRNA sense strand
gggaucaaccucaaauuca

SEQ ID NO: 449232 - RNA, 19 nt, Homo sapiens
  misc_RNA (1)...(19): siRNA sense strand
gaguccagcuguuaugauc

SEQ ID NO: 449233 - RNA, 19 nt, Homo sapiens
  misc_RNA (1)...(19): siRNA sense strand
ggagggcguuaguggauca

SEQ ID NO: 449234 - RNA, 19 nt, Homo sapiens
  misc_RNA (1)...(19): siRNA sense strand
ccagccagcucugaccuuu

SEQ ID NO: 449235 - RNA, 19 nt, Homo sapiens
  misc_RNA (1)...(19): siRNA sense strand
uaacaucggaacaguguau

SEQ ID NO: 449236 - RNA, 19 nt, Homo sapiens
  misc_RNA (1)...(19): siRNA sense strand
caaaggcuauggcacaacu

SEQ ID NO: 449237 - RNA, 19 nt, Homo sapiens
  misc_RNA (1)...(19): siRNA sense strand
ggaagagaaguccaacaga

SEQ ID NO: 449238 - RNA, 19 nt, Homo sapiens
  misc_RNA (1)...(19): siRNA sense strand
gguguacaagggaauguua

SEQ ID NO: 449239 - RNA, 19 nt, Homo sapiens
  misc_RNA (1)...(19): siRNA sense strand
ccacggagccaacucugaa

SEQ ID NO: 449240 - RNA, 19 nt, Homo sapiens
  misc_RNA (1)...(19): siRNA sense strand
uugacgagcugcagaauca

SEQ ID NO: 449241 - RNA, 19 nt, Homo sapiens
  misc_RNA (1)...(19): siRNA sense strand
gaauucaacccacucaucu

SEQ ID NO: 449242 - RNA, 19 nt, Homo sapiens
  misc_RNA (1)...(19): siRNA sense strand
cucaacaaguucuauacua

SEQ ID NO: 449243 - RNA, 19 nt, Homo sapiens
  misc_RNA (1)...(19): siRNA sense strand
gaaggugaggcgccuaaug

SEQ ID NO: 449244 - RNA, 19 nt, Homo sapiens
  misc_RNA (1)...(19): siRNA sense strand
aggaaaugaucgacaggua

SEQ ID NO: 449245 - RNA, 19 nt, Homo sapiens
  misc_RNA (1)...(19): siRNA sense strand
ccagaaguuuaaaggaaga

SEQ ID NO: 449246 - RNA, 19 nt, Homo sapiens
  misc_RNA (1)...(19): siRNA sense strand
gccagcaucuuugggcuuu

SEQ ID NO: 449247 - RNA, 19 nt, Homo sapiens
  misc_RNA (1)...(19): siRNA sense strand
guacaguccucagcuugga

SEQ ID NO: 449248 - RNA, 19 nt, Homo sapiens
  misc_RNA (1)...(19): siRNA sense strand
gugacaagccaaaguggua

SEQ ID NO: 449249 - RNA, 19 nt, Homo sapiens
  misc_RNA (1)...(19): siRNA sense strand
uggcggaucuuuacuggau

SEQ ID NO: 449250 - RNA, 19 nt, Homo sapiens
  misc_RNA (1)...(19): siRNA sense strand
gaagguaaauaagaaugac

SEQ ID NO: 449251 - RNA, 19 nt, Homo sapiens
  misc_RNA (1)...(19): siRNA sense strand
uguuagaccuccucaagug

SEQ ID NO: 449252 - RNA, 19 nt, Homo sapiens
  misc_RNA (1)...(19): siRNA sense strand
uggcaucuguguuaacuuc

SEQ ID NO: 449253 - RNA, 19 nt, Homo sapiens
  misc_RNA (1)...(19): siRNA sense strand
ccagacccaucucgauuca

SEQ ID NO: 449254 - RNA, 19 nt, Homo sapiens
  misc_RNA (1)...(19): siRNA sense strand
gucgggagcuguacuacug

SEQ ID NO: 449255 - RNA, 19 nt, Homo sapiens
  misc_RNA (1)...(19): siRNA sense strand
guaguaacaucggaacagu

SEQ ID NO: 449256 - RNA, 19 nt, Homo sapiens
  misc_RNA (1)...(19): siRNA sense strand
cgaauucacaacaauaugu

SEQ ID NO: 449257 - RNA, 19 nt, Homo sapiens
  misc_RNA (1)...(19): siRNA sense strand
cagcgaauucacaacaaua

SEQ ID NO: 449258 - RNA, 19 nt, Homo sapiens
  misc_RNA (1)...(19): siRNA sense strand
ucuacaaacuggacuucaa

SEQ ID NO: 449259 - RNA, 19 nt, Homo sapiens
  misc_RNA (1)...(19): siRNA sense strand
cagcgagucuaucucuaug

SEQ ID NO: 449260 - RNA, 19 nt, Homo sapiens
  misc_RNA (1)...(19): siRNA sense strand
ggaagggaucaaccucaaa

SEQ ID NO: 449261 - RNA, 19 nt, Homo sapiens
  misc_RNA (1)...(19): siRNA sense strand
ugugugguguugcguagua

SEQ ID NO: 449262 - RNA, 19 nt, Homo sapiens
  misc_RNA (1)...(19): siRNA sense strand
uacaaacggagauaucuuu

SEQ ID NO: 449263 - RNA, 19 nt, Homo sapiens
  misc_RNA (1)...(19): siRNA sense strand
gcagacauuugugguacau

SEQ ID NO: 449264 - RNA, 19 nt, Homo sapiens
  misc_RNA (1)...(19): siRNA sense strand
guacagccagcaaaucaau

SEQ ID NO: 449265 - RNA, 19 nt, Homo sapiens
  misc_RNA (1)...(19): siRNA sense strand
guaccugucccuuggagaa

SEQ ID NO: 449266 - RNA, 19 nt, Homo sapiens
  misc_RNA (1)...(19): siRNA sense strand
gaagucaucugucauuaaa

SEQ ID NO: 449267 - RNA, 19 nt, Homo sapiens
  misc_RNA (1)...(19): siRNA sense strand
gaagagaaguccaacagaa

SEQ ID NO: 449268 - RNA, 19 nt, Homo sapiens
  misc_RNA (1)...(19): siRNA sense strand
gaaguucuguccucgguua

SEQ ID NO: 449269 - RNA, 19 nt, Homo sapiens
  misc_RNA (1)...(19): siRNA sense strand
cuacggagauggaugauaa

SEQ ID NO: 449270 - RNA, 19 nt, Homo sapiens
  misc_RNA (1)...(19): siRNA sense strand
gcagugauaguauggauua

SEQ ID NO: 449271 - RNA, 19 nt, Homo sapiens
  misc_RNA (1)...(19): siRNA sense strand
ggaagcgccuggaagauga

SEQ ID NO: 449272 - RNA, 19 nt, Homo sapiens
  misc_RNA (1)...(19): siRNA sense strand
caagugcccuucugcauga

SEQ ID NO: 449273 - RNA, 19 nt, Homo sapiens
  misc_RNA (1)...(19): siRNA sense strand
ggacagacgucaggcagaa

SEQ ID NO: 449274 - RNA, 19 nt, Homo sapiens
  misc_RNA (1)...(19): siRNA sense strand
caaaaugccugaugaugua

SEQ ID NO: 449275 - RNA, 19 nt, Homo sapiens
  misc_RNA (1)...(19): siRNA sense strand
aaacacagcccaacaguga

SEQ ID NO: 449276 - RNA, 19 nt, Homo sapiens
  misc_RNA (1)...(19): siRNA sense strand
gaaaucugcuacuccguau

SEQ ID NO: 449277 - RNA, 19 nt, Homo sapiens
  misc_RNA (1)...(19): siRNA sense strand
ucagugaaaugaugaaaug

SEQ ID NO: 449278 - RNA, 19 nt, Homo sapiens
  misc_RNA (1)...(19): siRNA sense strand
cgauauggcaucuguguua

SEQ ID NO: 449279 - RNA, 19 nt, Homo sapiens
  misc_RNA (1)...(19): siRNA sense strand
gugauaguauggauuauga

SEQ ID NO: 449280 - RNA, 19 nt, Homo sapiens
  misc_RNA (1)...(19): siRNA sense strand
gaugauaguggcagugaua

SEQ ID NO: 449281 - RNA, 19 nt, Homo sapiens
  misc_RNA (1)...(19): siRNA sense strand
ccacugcgcuccagcucua

SEQ ID NO: 449282 - RNA, 19 nt, Homo sapiens
  misc_RNA (1)...(19): siRNA sense strand
gugaaaugaugaaauguga

SEQ ID NO: 449283 - RNA, 19 nt, Homo sapiens
  misc_RNA (1)...(19): siRNA sense strand
ggacagcaauagggugauu

SEQ ID NO: 449284 - RNA, 19 nt, Homo sapiens
  misc_RNA (1)...(19): siRNA sense strand
gcaaaucaaugaggugcuu

SEQ ID NO: 449285 - RNA, 19 nt, Homo sapiens
  misc_RNA (1)...(19): siRNA sense strand
caccagaaguuuaaaggaa

SEQ ID NO: 449286 - RNA, 19 nt, Homo sapiens
  misc_RNA (1)...(19): siRNA sense strand
gauauggcaucuguguuaa

SEQ ID NO: 449287 - RNA, 19 nt, Homo sapiens
  misc_RNA (1)...(19): siRNA sense strand
uauuaugucucuucucgua

SEQ ID NO: 449288 - RNA, 19 nt, Homo sapiens
  misc_RNA (1)...(19): siRNA sense strand
caacagaaaguguaaauac

SEQ ID NO: 449289 - RNA, 19 nt, Homo sapiens
  misc_RNA (1)...(19): siRNA sense strand
caagcuggcuccuuucuag

SEQ ID NO: 449290 - RNA, 19 nt, Homo sapiens
  misc_RNA (1)...(19): siRNA sense strand
gugcuaaccugcauucugu

SEQ ID NO: 449291 - RNA, 19 nt, Homo sapiens
  misc_RNA (1)...(19): siRNA sense strand
gauaguggcagugauagua

SEQ ID NO: 449292 - RNA, 19 nt, Homo sapiens
  misc_RNA (1)...(19): siRNA sense strand
guacguggcugcaguucau

SEQ ID NO: 449293 - RNA, 19 nt, Homo sapiens
  misc_RNA (1)...(19): siRNA sense strand
ucaaauucaugcacaauca

SEQ ID NO: 449294 - RNA, 19 nt, Homo sapiens
  misc_RNA (1)...(19): siRNA sense strand
agacccagcucaacaaguu

SEQ ID NO: 449295 - RNA, 19 nt, Homo sapiens
  misc_RNA (1)...(19): siRNA sense strand
ccagcgagguggagauuga

SEQ ID NO: 449296 - RNA, 19 nt, Homo sapiens
  misc_RNA (1)...(19): siRNA sense strand
gagcuguacuacuguguga

SEQ ID NO: 449297 - RNA, 19 nt, Homo sapiens
  misc_RNA (1)...(19): siRNA sense strand
guacaugcagggacagaua

SEQ ID NO: 449298 - RNA, 19 nt, Homo sapiens
  misc_RNA (1)...(19): siRNA sense strand
gaagcagacauuuguggua

SEQ ID NO: 449299 - RNA, 19 nt, Homo sapiens
  misc_RNA (1)...(19): siRNA sense strand
gcucugaccuuugcucuuc

SEQ ID NO: 449300 - RNA, 19 nt, Homo sapiens
  misc_RNA (1)...(19): siRNA sense strand
gagaagggauggguaugga

SEQ ID NO: 449301 - RNA, 19 nt, Homo sapiens
  misc_RNA (1)...(19): siRNA sense strand
ugaauuggguggcgaguuc

SEQ ID NO: 449302 - RNA, 19 nt, Homo sapiens
  misc_RNA (1)...(19): siRNA sense strand
agacgaagguguugugcuu

SEQ ID NO: 449303 - RNA, 19 nt, Homo sapiens
  misc_RNA (1)...(19): siRNA sense strand
ugaagaagcagacauuugu

SEQ ID NO: 449304 - RNA, 19 nt, Homo sapiens
  misc_RNA (1)...(19): siRNA sense strand
gaagggaucaaccucaaau

SEQ ID NO: 449305 - RNA, 19 nt, Homo sapiens
  misc_RNA (1)...(19): siRNA sense strand
gcaugagccuucgggauga

SEQ ID NO: 449306 - RNA, 19 nt, Homo sapiens
  misc_RNA (1)...(19): siRNA sense strand
ggaucaaccucaaauucau

SEQ ID NO: 449307 - RNA, 19 nt, Homo sapiens
  misc_RNA (1)...(19): siRNA sense strand
gaaaugaugaaaugugaca

SEQ ID NO: 449308 - RNA, 19 nt, Homo sapiens
  misc_RNA (1)...(19): siRNA sense strand
cagaaucacuagagcugaa

SEQ ID NO: 449309 - RNA, 19 nt, Homo sapiens
  misc_RNA (1)...(19): siRNA sense strand
gcaucuguguuaacuucua

SEQ ID NO: 449310 - RNA, 19 nt, Homo sapiens
  misc_RNA (1)...(19): siRNA sense strand
acacuggagucacgcgaua

SEQ ID NO: 449311 - RNA, 19 nt, Homo sapiens
  misc_RNA (1)...(19): siRNA sense strand
ggcccagacuccugaauug

SEQ ID NO: 449312 - RNA, 19 nt, Homo sapiens
  misc_RNA (1)...(19): siRNA sense strand
ggacugaucaagacucugu

SEQ ID NO: 449313 - RNA, 19 nt, Homo sapiens
  misc_RNA (1)...(19): siRNA sense strand
aguaccagcuucagucuuu

SEQ ID NO: 449314 - RNA, 19 nt, Homo sapiens
  misc_RNA (1)...(19): siRNA sense strand
gcaugaccuucgagagauu

SEQ ID NO: 449315 - RNA, 19 nt, Homo sapiens
  misc_RNA (1)...(19): siRNA sense strand
aaucugcuacuccguauua

SEQ ID NO: 449316 - RNA, 19 nt, Homo sapiens
  misc_RNA (1)...(19): siRNA sense strand
gcccagacccacuacuaua

SEQ ID NO: 449317 - RNA, 19 nt, Homo sapiens
  misc_RNA (1)...(19): siRNA sense strand
cagggucgauccagcaauu

SEQ ID NO: 449318 - RNA, 19 nt, Homo sapiens
  misc_RNA (1)...(19): siRNA sense strand
gaaaagagaaccuccauca

SEQ ID NO: 449319 - RNA, 19 nt, Homo sapiens
  misc_RNA (1)...(19): siRNA sense strand
gauucacccuaguggauuu

SEQ ID NO: 449320 - RNA, 19 nt, Homo sapiens
  misc_RNA (1)...(19): siRNA sense strand
ccagacuccugaauugcua

SEQ ID NO: 449321 - RNA, 19 nt, Homo sapiens
  misc_RNA (1)...(19): siRNA sense strand
agaaugacauccgcaagaa

SEQ ID NO: 449322 - RNA, 19 nt, Homo sapiens
  misc_RNA (1)...(19): siRNA sense strand
cuucuuagaugcugugaug

SEQ ID NO: 449323 - RNA, 19 nt, Homo sapiens
  misc_RNA (1)...(19): siRNA sense strand
gagcagcaaugcaggugau

SEQ ID NO: 449324 - RNA, 19 nt, Homo sapiens
  misc_RNA (1)...(19): siRNA sense strand
gauucaagcucuucuuacu

SEQ ID NO: 449325 - RNA, 19 nt, Homo sapiens
  misc_RNA (1)...(19): siRNA sense strand
ccaacgugcugcagggauu

SEQ ID NO: 449326 - RNA, 19 nt, Homo sapiens
  misc_RNA (1)...(19): siRNA sense strand
ccuggaagaugaugaagau

SEQ ID NO: 449327 - RNA, 19 nt, Homo sapiens
  misc_RNA (1)...(19): siRNA sense strand
gaaguaaucaaaccugucu

SEQ ID NO: 449328 - RNA, 19 nt, Homo sapiens
  misc_RNA (1)...(19): siRNA sense strand
gaagaggguggcacugaga

SEQ ID NO: 449329 - RNA, 19 nt, Homo sapiens
  misc_RNA (1)...(19): siRNA sense strand
caucaaacccggaccugaa

SEQ ID NO: 449330 - RNA, 19 nt, Homo sapiens
  misc_RNA (1)...(19): siRNA sense strand
acgagaagcucaucaacau

SEQ ID NO: 449331 - RNA, 19 nt, Homo sapiens
  misc_RNA (1)...(19): siRNA sense strand
ccagaggacugaucaagac

SEQ ID NO: 449332 - RNA, 19 nt, Homo sapiens
  misc_RNA (1)...(19): siRNA sense strand
ggugugagccugacgucua

SEQ ID NO: 449333 - RNA, 19 nt, Homo sapiens
  misc_RNA (1)...(19): siRNA sense strand
guacaaagggacaccaugu

SEQ ID NO: 449334 - RNA, 19 nt, Homo sapiens
  misc_RNA (1)...(19): siRNA sense strand
ggagggcguuaguggauca

SEQ ID NO: 449335 - RNA, 19 nt, Homo sapiens
  misc_RNA (1)...(19): siRNA sense strand
gggaucaaccucaaauuca

SEQ ID NO: 449336 - RNA, 19 nt, Homo sapiens
  misc_RNA (1)...(19): siRNA sense strand
gaugauaccucuuuugucu

SEQ ID NO: 449337 - RNA, 19 nt, Homo sapiens
  misc_RNA (1)...(19): siRNA sense strand
gaguccagcuguuaugauc

SEQ ID NO: 449338 - RNA, 19 nt, Homo sapiens
  misc_RNA (1)...(19): siRNA sense strand
ccagccagcucugaccuuu

SEQ ID NO: 449339 - RNA, 19 nt, Homo sapiens
  misc_RNA (1)...(19): siRNA sense strand
uaacaucggaacaguguau

SEQ ID NO: 449340 - RNA, 19 nt, Homo sapiens
  misc_RNA (1)...(19): siRNA sense strand
caaaggcuauggcacaacu

SEQ ID NO: 449341 - RNA, 19 nt, Homo sapiens
  misc_RNA (1)...(19): siRNA sense strand
ggaagagaaguccaacaga

SEQ ID NO: 449342 - RNA, 19 nt, Homo sapiens
  misc_RNA (1)...(19): siRNA sense strand
gguguacaagggaauguua

SEQ ID NO: 449343 - RNA, 19 nt, Homo sapiens
  misc_RNA (1)...(19): siRNA sense strand
ccacggagccaacucugaa

SEQ ID NO: 449344 - RNA, 19 nt, Homo sapiens
  misc_RNA (1)...(19): siRNA sense strand
uugacgagcugcagaauca

SEQ ID NO: 449345 - RNA, 19 nt, Homo sapiens
  misc_RNA (1)...(19): siRNA sense strand
gaauucaacccacucaucu

SEQ ID NO: 449346 - RNA, 19 nt, Homo sapiens
  misc_RNA (1)...(19): siRNA sense strand
cucaacaaguucuauacua

SEQ ID NO: 449347 - RNA, 19 nt, Homo sapiens
  misc_RNA (1)...(19): siRNA sense strand
gaaggugaggcgccuaaug

SEQ ID NO: 449348 - RNA, 19 nt, Homo sapiens
  misc_RNA (1)...(19): siRNA sense strand
aggaaaugaucgacaggua

SEQ ID NO: 449349 - RNA, 19 nt, Homo sapiens
  misc_RNA (1)...(19): siRNA sense strand
ccagaaguuuaaaggaaga

SEQ ID NO: 449350 - RNA, 19 nt, Homo sapiens
  misc_RNA (1)...(19): siRNA sense strand
gccagcaucuuugggcuuu

SEQ ID NO: 449351 - RNA, 19 nt, Homo sapiens
  misc_RNA (1)...(19): siRNA sense strand
guacaguccucagcuugga

SEQ ID NO: 449352 - RNA, 19 nt, Homo sapiens
  misc_RNA (1)...(19): siRNA sense strand
gugacaagccaaaguggua

SEQ ID NO: 449353 - RNA, 19 nt, Homo sapiens
  misc_RNA (1)...(19): siRNA sense strand
uggcggaucuuuacuggau

SEQ ID NO: 449354 - RNA, 19 nt, Homo sapiens
  misc_RNA (1)...(19): siRNA sense strand
gaagguaaauaagaaugac

SEQ ID NO: 449355 - RNA, 19 nt, Homo sapiens
  misc_RNA (1)...(19): siRNA sense strand
uggcaucuguguuaacuuc

SEQ ID NO: 449356 - RNA, 19 nt, Homo sapiens
  misc_RNA (1)...(19): siRNA sense strand
uguuagaccuccucaagug

SEQ ID NO: 449357 - RNA, 19 nt, Homo sapiens
  misc_RNA (1)...(19): siRNA sense strand
ccagacccaucucgauuca

SEQ ID NO: 449358 - RNA, 19 nt, Homo sapiens
  misc_RNA (1)...(19): siRNA sense strand
gucgggagcuguacuacug

SEQ ID NO: 449359 - RNA, 19 nt, Homo sapiens
  misc_RNA (1)...(19): siRNA sense strand
guaguaacaucggaacagu

SEQ ID NO: 449360 - RNA, 19 nt, Homo sapiens
  misc_RNA (1)...(19): siRNA sense strand
cgaauucacaacaauaugu

SEQ ID NO: 449361 - RNA, 19 nt, Homo sapiens
  misc_RNA (1)...(19): siRNA sense strand
cagcgaauucacaacaaua

SEQ ID NO: 449362 - RNA, 19 nt, Homo sapiens
  misc_RNA (1)...(19): siRNA sense strand
ucuacaaacuggacuucaa

SEQ ID NO: 449363 - RNA, 19 nt, Homo sapiens
  misc_RNA (1)...(19): siRNA sense strand
uacaaacggagauaucuuu

SEQ ID NO: 449364 - RNA, 19 nt, Homo sapiens
  misc_RNA (1)...(19): siRNA sense strand
ggaagggaucaaccucaaa

SEQ ID NO: 449365 - RNA, 19 nt, Homo sapiens
  misc_RNA (1)...(19): siRNA sense strand
ugugugguguugcguagua

SEQ ID NO: 449366 - RNA, 19 nt, Homo sapiens
  misc_RNA (1)...(19): siRNA sense strand
gaagucaucugucauuaaa

SEQ ID NO: 449367 - RNA, 19 nt, Homo sapiens
  misc_RNA (1)...(19): siRNA sense strand
gaagagaaguccaacagaa

SEQ ID NO: 449368 - RNA, 19 nt, Homo sapiens
  misc_RNA (1)...(19): siRNA sense strand
gaaguucuguccucgguua

SEQ ID NO: 449369 - RNA, 19 nt, Homo sapiens
  misc_RNA (1)...(19): siRNA sense strand
cuacggagauggaugauaa

SEQ ID NO: 449370 - RNA, 19 nt, Homo sapiens
  misc_RNA (1)...(19): siRNA sense strand
gcagugauaguauggauua

SEQ ID NO: 449371 - RNA, 19 nt, Homo sapiens
  misc_RNA (1)...(19): siRNA sense strand
ggaagcgccuggaagauga

SEQ ID NO: 449372 - RNA, 19 nt, Homo sapiens
  misc_RNA (1)...(19): siRNA sense strand
caagugcccuucugcauga

SEQ ID NO: 449373 - RNA, 19 nt, Homo sapiens
  misc_RNA (1)...(19): siRNA sense strand
ggacagacgucaggcagaa

SEQ ID NO: 449374 - RNA, 19 nt, Homo sapiens
  misc_RNA (1)...(19): siRNA sense strand
caaaaugccugaugaugua

SEQ ID NO: 449375 - RNA, 19 nt, Homo sapiens
  misc_RNA (1)...(19): siRNA sense strand
aaacacagcccaacaguga

SEQ ID NO: 449376 - RNA, 19 nt, Homo sapiens
  misc_RNA (1)...(19): siRNA sense strand
gaaaucugcuacuccguau

SEQ ID NO: 449377 - RNA, 19 nt, Homo sapiens
  misc_RNA (1)...(19): siRNA sense strand
ucagugaaaugaugaaaug

SEQ ID NO: 449378 - RNA, 19 nt, Homo sapiens
  misc_RNA (1)...(19): siRNA sense strand
cgauauggcaucuguguua

SEQ ID NO: 449379 - RNA, 19 nt, Homo sapiens
  misc_RNA (1)...(19): siRNA sense strand
gugauaguauggauuauga

SEQ ID NO: 449380 - RNA, 19 nt, Homo sapiens
  misc_RNA (1)...(19): siRNA sense strand
gaugauaguggcagugaua

SEQ ID NO: 449381 - RNA, 19 nt, Homo sapiens
  misc_RNA (1)...(19): siRNA sense strand
ccacugcgcuccagcucua

SEQ ID NO: 449382 - RNA, 19 nt, Homo sapiens
  misc_RNA (1)...(19): siRNA sense strand
gugaaaugaugaaauguga

SEQ ID NO: 449383 - RNA, 19 nt, Homo sapiens
  misc_RNA (1)...(19): siRNA sense strand
ggacagcaauagggugauu

SEQ ID NO: 449384 - RNA, 19 nt, Homo sapiens
  misc_RNA (1)...(19): siRNA sense strand
gcaaaucaaugaggugcuu

SEQ ID NO: 449385 - RNA, 19 nt, Homo sapiens
  misc_RNA (1)...(19): siRNA sense strand
caccagaaguuuaaaggaa

SEQ ID NO: 449386 - RNA, 19 nt, Homo sapiens
  misc_RNA (1)...(19): siRNA sense strand
gauauggcaucuguguuaa

SEQ ID NO: 449387 - RNA, 19 nt, Homo sapiens
  misc_RNA (1)...(19): siRNA sense strand
uauuaugucucuucucgua

SEQ ID NO: 449388 - RNA, 19 nt, Homo sapiens
  misc_RNA (1)...(19): siRNA sense strand
caacagaaaguguaaauac

SEQ ID NO: 449389 - RNA, 19 nt, Homo sapiens
  misc_RNA (1)...(19): siRNA sense strand
caagcuggcuccuuucuag

SEQ ID NO: 449390 - RNA, 19 nt, Homo sapiens
  misc_RNA (1)...(19): siRNA sense strand
gugcuaaccugcauucugu

SEQ ID NO: 449391 - RNA, 19 nt, Homo sapiens
  misc_RNA (1)...(19): siRNA sense strand
gauaguggcagugauagua

SEQ ID NO: 449392 - RNA, 19 nt, Homo sapiens
  misc_RNA (1)...(19): siRNA sense strand
guacguggcugcaguucau

SEQ ID NO: 449393 - RNA, 19 nt, Homo sapiens
  misc_RNA (1)...(19): siRNA sense strand
ucaaauucaugcacaauca

SEQ ID NO: 449394 - RNA, 19 nt, Homo sapiens
  misc_RNA (1)...(19): siRNA sense strand
agacccagcucaacaaguu

SEQ ID NO: 449395 - RNA, 19 nt, Homo sapiens
  misc_RNA (1)...(19): siRNA sense strand
ccagcgagguggagauuga

SEQ ID NO: 449396 - RNA, 19 nt, Homo sapiens
  misc_RNA (1)...(19): siRNA sense strand
gagcuguacuacuguguga

SEQ ID NO: 449397 - RNA, 19 nt, Homo sapiens
  misc_RNA (1)...(19): siRNA sense strand
guacaugcagggacagaua

SEQ ID NO: 449398 - RNA, 19 nt, Homo sapiens
  misc_RNA (1)...(19): siRNA sense strand
gaagcagacauuuguggua

SEQ ID NO: 449399 - RNA, 19 nt, Homo sapiens
  misc_RNA (1)...(19): siRNA sense strand
gcucugaccuuugcucuuc

SEQ ID NO: 449400 - RNA, 19 nt, Homo sapiens
  misc_RNA (1)...(19): siRNA sense strand
gagaagggauggguaugga

SEQ ID NO: 449401 - RNA, 19 nt, Homo sapiens
  misc_RNA (1)...(19): siRNA sense strand
ugaauuggguggcgaguuc

SEQ ID NO: 449402 - RNA, 19 nt, Homo sapiens
  misc_RNA (1)...(19): siRNA sense strand
agacgaagguguugugcuu

SEQ ID NO: 449403 - RNA, 19 nt, Homo sapiens
  misc_RNA (1)...(19): siRNA sense strand
ugaagaagcagacauuugu

SEQ ID NO: 449404 - RNA, 19 nt, Homo sapiens
  misc_RNA (1)...(19): siRNA sense strand
gaagggaucaaccucaaau

SEQ ID NO: 449405 - RNA, 19 nt, Homo sapiens
  misc_RNA (1)...(19): siRNA sense strand
gcaugagccuucgggauga

SEQ ID NO: 449406 - RNA, 19 nt, Homo sapiens
  misc_RNA (1)...(19): siRNA sense strand
ggaucaaccucaaauucau

SEQ ID NO: 449407 - RNA, 19 nt, Homo sapiens
  misc_RNA (1)...(19): siRNA sense strand
gaaaugaugaaaugugaca

SEQ ID NO: 449408 - RNA, 19 nt, Homo sapiens
  misc_RNA (1)...(19): siRNA sense strand
cagaaucacuagagcugaa

SEQ ID NO: 449409 - RNA, 19 nt, Homo sapiens
  misc_RNA (1)...(19): siRNA sense strand
gcaucuguguuaacuucua

SEQ ID NO: 449410 - RNA, 19 nt, Homo sapiens
  misc_RNA (1)...(19): siRNA sense strand
acacuggagucacgcgaua

SEQ ID NO: 449411 - RNA, 19 nt, Homo sapiens
  misc_RNA (1)...(19): siRNA sense strand
ggcccagacuccugaauug

SEQ ID NO: 449412 - RNA, 19 nt, Homo sapiens
  misc_RNA (1)...(19): siRNA sense strand
ggacugaucaagacucugu

SEQ ID NO: 449413 - RNA, 19 nt, Homo sapiens
  misc_RNA (1)...(19): siRNA sense strand
aguaccagcuucagucuuu

SEQ ID NO: 449414 - RNA, 19 nt, Homo sapiens
  misc_RNA (1)...(19): siRNA sense strand
gcaugaccuucgagagauu

SEQ ID NO: 449415 - RNA, 19 nt, Homo sapiens
  misc_RNA (1)...(19): siRNA sense strand
aaucugcuacuccguauua

SEQ ID NO: 449416 - RNA, 19 nt, Homo sapiens
  misc_RNA (1)...(19): siRNA sense strand
gcccagacccacuacuaua

SEQ ID NO: 449417 - RNA, 19 nt, Homo sapiens
  misc_RNA (1)...(19): siRNA sense strand
cagggucgauccagcaauu

SEQ ID NO: 449418 - RNA, 19 nt, Homo sapiens
  misc_RNA (1)...(19): siRNA sense strand
gaaaagagaaccuccauca

SEQ ID NO: 449419 - RNA, 19 nt, Homo sapiens
  misc_RNA (1)...(19): siRNA sense strand
gauucacccuaguggauuu

SEQ ID NO: 449420 - RNA, 19 nt, Homo sapiens
  misc_RNA (1)...(19): siRNA sense strand
ccagacuccugaauugcua

SEQ ID NO: 449421 - RNA, 19 nt, Homo sapiens
  misc_RNA (1)...(19): siRNA sense strand
agaaugacauccgcaagaa

SEQ ID NO: 449422 - RNA, 19 nt, Homo sapiens
  misc_RNA (1)...(19): siRNA sense strand
cuucuuagaugcugugaug

SEQ ID NO: 449423 - RNA, 19 nt, Homo sapiens
  misc_RNA (1)...(19): siRNA sense strand
gagcagcaaugcaggugau

SEQ ID NO: 449424 - RNA, 19 nt, Homo sapiens
  misc_RNA (1)...(19): siRNA sense strand
gauucaagcucuucuuacu

SEQ ID NO: 449425 - RNA, 19 nt, Homo sapiens
  misc_RNA (1)...(19): siRNA sense strand
ccaacgugcugcagggauu

SEQ ID NO: 449426 - RNA, 19 nt, Homo sapiens
  misc_RNA (1)...(19): siRNA sense strand
ccuggaagaugaugaagau

SEQ ID NO: 449427 - RNA, 19 nt, Homo sapiens
  misc_RNA (1)...(19): siRNA sense strand
gaaguaaucaaaccugucu

SEQ ID NO: 449428 - RNA, 19 nt, Homo sapiens
  misc_RNA (1)...(19): siRNA sense strand
gaagaggguggcacugaga

SEQ ID NO: 449429 - RNA, 19 nt, Homo sapiens
  misc_RNA (1)...(19): siRNA sense strand
caucaaacccggaccugaa

SEQ ID NO: 449430 - RNA, 19 nt, Homo sapiens
  misc_RNA (1)...(19): siRNA sense strand
acgagaagcucaucaacau

SEQ ID NO: 449431 - RNA, 19 nt, Homo sapiens
  misc_RNA (1)...(19): siRNA sense strand
ccagaggacugaucaagac

SEQ ID NO: 449432 - RNA, 19 nt, Homo sapiens
  misc_RNA (1)...(19): siRNA sense strand
ggugugagccugacgucua

SEQ ID NO: 449433 - RNA, 19 nt, Homo sapiens
  misc_RNA (1)...(19): siRNA sense strand
guacaaagggacaccaugu

SEQ ID NO: 449434 - RNA, 19 nt, Homo sapiens
  misc_RNA (1)...(19): siRNA sense strand
ggagggcguuaguggauca

SEQ ID NO: 449435 - RNA, 19 nt, Homo sapiens
  misc_RNA (1)...(19): siRNA sense strand
gggaucaaccucaaauuca

SEQ ID NO: 449436 - RNA, 19 nt, Homo sapiens
  misc_RNA (1)...(19): siRNA sense strand
gaugauaccucuuuugucu

SEQ ID NO: 449437 - RNA, 19 nt, Homo sapiens
  misc_RNA (1)...(19): siRNA sense strand
gaguccagcuguuaugauc

SEQ ID NO: 449438 - RNA, 19 nt, Homo sapiens
  misc_RNA (1)...(19): siRNA sense strand
ccagccagcucugaccuuu

SEQ ID NO: 449439 - RNA, 19 nt, Homo sapiens
  misc_RNA (1)...(19): siRNA sense strand
uaacaucggaacaguguau

SEQ ID NO: 449440 - RNA, 19 nt, Homo sapiens
  misc_RNA (1)...(19): siRNA sense strand
caaaggcuauggcacaacu

SEQ ID NO: 449441 - RNA, 19 nt, Homo sapiens
  misc_RNA (1)...(19): siRNA sense strand
ggaagagaaguccaacaga

SEQ ID NO: 449442 - RNA, 19 nt, Homo sapiens
  misc_RNA (1)...(19): siRNA sense strand
gguguacaagggaauguua

SEQ ID NO: 449443 - RNA, 19 nt, Homo sapiens
  misc_RNA (1)...(19): siRNA sense strand
ccacggagccaacucugaa

SEQ ID NO: 449444 - RNA, 19 nt, Homo sapiens
  misc_RNA (1)...(19): siRNA sense strand
uugacgagcugcagaauca

SEQ ID NO: 449445 - RNA, 19 nt, Homo sapiens
  misc_RNA (1)...(19): siRNA sense strand
gaauucaacccacucaucu

SEQ ID NO: 449446 - RNA, 19 nt, Homo sapiens
  misc_RNA (1)...(19): siRNA sense strand
cucaacaaguucuauacua

SEQ ID NO: 449447 - RNA, 19 nt, Homo sapiens
  misc_RNA (1)...(19): siRNA sense strand
gaaggugaggcgccuaaug

SEQ ID NO: 449448 - RNA, 19 nt, Homo sapiens
  misc_RNA (1)...(19): siRNA sense strand
aggaaaugaucgacaggua

SEQ ID NO: 449449 - RNA, 19 nt, Homo sapiens
  misc_RNA (1)...(19): siRNA sense strand
ccagaaguuuaaaggaaga

SEQ ID NO: 449450 - RNA, 19 nt, Homo sapiens
  misc_RNA (1)...(19): siRNA sense strand
gccagcaucuuugggcuuu

SEQ ID NO: 449451 - RNA, 19 nt, Homo sapiens
  misc_RNA (1)...(19): siRNA sense strand
guacaguccucagcuugga

SEQ ID NO: 449452 - RNA, 19 nt, Homo sapiens
  misc_RNA (1)...(19): siRNA sense strand
gugacaagccaaaguggua

SEQ ID NO: 449453 - RNA, 19 nt, Homo sapiens
  misc_RNA (1)...(19): siRNA sense strand
uggcggaucuuuacuggau

SEQ ID NO: 449454 - RNA, 19 nt, Homo sapiens
  misc_RNA (1)...(19): siRNA sense strand
gaagguaaauaagaaugac

SEQ ID NO: 449455 - RNA, 19 nt, Homo sapiens
  misc_RNA (1)...(19): siRNA sense strand
uggcaucuguguuaacuuc

SEQ ID NO: 449456 - RNA, 19 nt, Homo sapiens
  misc_RNA (1)...(19): siRNA sense strand
uguuagaccuccucaagug

SEQ ID NO: 449457 - RNA, 19 nt, Homo sapiens
  misc_RNA (1)...(19): siRNA sense strand
ccagacccaucucgauuca

SEQ ID NO: 449458 - RNA, 19 nt, Homo sapiens
  misc_RNA (1)...(19): siRNA sense strand
gucgggagcuguacuacug

SEQ ID NO: 449459 - RNA, 19 nt, Homo sapiens
  misc_RNA (1)...(19): siRNA sense strand
guaguaacaucggaacagu

SEQ ID NO: 449460 - RNA, 19 nt, Homo sapiens
  misc_RNA (1)...(19): siRNA sense strand
cgaauucacaacaauaugu

SEQ ID NO: 449461 - RNA, 19 nt, Homo sapiens
  misc_RNA (1)...(19): siRNA sense strand
cagcgaauucacaacaaua

SEQ ID NO: 449462 - RNA, 19 nt, Homo sapiens
  misc_RNA (1)...(19): siRNA sense strand
ucuacaaacuggacuucaa

SEQ ID NO: 449463 - RNA, 19 nt, Homo sapiens
  misc_RNA (1)...(19): siRNA sense strand
uacaaacggagauaucuuu

SEQ ID NO: 449464 - RNA, 19 nt, Homo sapiens
  misc_RNA (1)...(19): siRNA sense strand
ggaagggaucaaccucaaa

SEQ ID NO: 449465 - RNA, 19 nt, Homo sapiens
  misc_RNA (1)...(19): siRNA sense strand
ugugugguguugcguagua

SEQ ID NO: 449466 - RNA, 19 nt, Homo sapiens
  misc_RNA (1)...(19): siRNA sense strand
gaagucaucugucauuaaa

SEQ ID NO: 449467 - RNA, 19 nt, Homo sapiens
  misc_RNA (1)...(19): siRNA sense strand
gaagagaaguccaacagaa

SEQ ID NO: 449468 - RNA, 19 nt, Homo sapiens
  misc_RNA (1)...(19): siRNA sense strand
gaaguucuguccucgguua

SEQ ID NO: 449469 - RNA, 19 nt, Homo sapiens
  misc_RNA (1)...(19): siRNA sense strand
cuacggagauggaugauaa

SEQ ID NO: 449470 - RNA, 19 nt, Homo sapiens
  misc_RNA (1)...(19): siRNA sense strand
gcagugauaguauggauua

SEQ ID NO: 449471 - RNA, 19 nt, Homo sapiens
  misc_RNA (1)...(19): siRNA sense strand
ggaagcgccuggaagauga

SEQ ID NO: 449472 - RNA, 19 nt, Homo sapiens
  misc_RNA (1)...(19): siRNA sense strand
caagugcccuucugcauga

SEQ ID NO: 449473 - RNA, 19 nt, Homo sapiens
  misc_RNA (1)...(19): siRNA sense strand
ggacagacgucaggcagaa

SEQ ID NO: 449474 - RNA, 19 nt, Homo sapiens
  misc_RNA (1)...(19): siRNA sense strand
caaaaugccugaugaugua

SEQ ID NO: 449475 - RNA, 19 nt, Homo sapiens
  misc_RNA (1)...(19): siRNA sense strand
aaacacagcccaacaguga

SEQ ID NO: 449476 - RNA, 19 nt, Homo sapiens
  misc_RNA (1)...(19): siRNA sense strand
gaaaucugcuacuccguau

SEQ ID NO: 449477 - RNA, 19 nt, Homo sapiens
  misc_RNA (1)...(19): siRNA sense strand
ucagugaaaugaugaaaug

SEQ ID NO: 449478 - RNA, 19 nt, Homo sapiens
  misc_RNA (1)...(19): siRNA sense strand
cgauauggcaucuguguua

SEQ ID NO: 449479 - RNA, 19 nt, Homo sapiens
  misc_RNA (1)...(19): siRNA sense strand
gugauaguauggauuauga

SEQ ID NO: 449480 - RNA, 19 nt, Homo sapiens
  misc_RNA (1)...(19): siRNA sense strand
gaugauaguggcagugaua

SEQ ID NO: 449481 - RNA, 19 nt, Homo sapiens
  misc_RNA (1)...(19): siRNA sense strand
ccacugcgcuccagcucua

SEQ ID NO: 449482 - RNA, 19 nt, Homo sapiens
  misc_RNA (1)...(19): siRNA sense strand
gugaaaugaugaaauguga

SEQ ID NO: 449483 - RNA, 19 nt, Homo sapiens
  misc_RNA (1)...(19): siRNA sense strand
ggacagcaauagggugauu

SEQ ID NO: 449484 - RNA, 19 nt, Homo sapiens
  misc_RNA (1)...(19): siRNA sense strand
gcaaaucaaugaggugcuu

SEQ ID NO: 449485 - RNA, 19 nt, Homo sapiens
  misc_RNA (1)...(19): siRNA sense strand
caccagaaguuuaaaggaa

SEQ ID NO: 449486 - RNA, 19 nt, Homo sapiens
  misc_RNA (1)...(19): siRNA sense strand
gauauggcaucuguguuaa

SEQ ID NO: 449487 - RNA, 19 nt, Homo sapiens
  misc_RNA (1)...(19): siRNA sense strand
uauuaugucucuucucgua

SEQ ID NO: 449488 - RNA, 19 nt, Homo sapiens
  misc_RNA (1)...(19): siRNA sense strand
caacagaaaguguaaauac

SEQ ID NO: 449489 - RNA, 19 nt, Homo sapiens
  misc_RNA (1)...(19): siRNA sense strand
caagcuggcuccuuucuag

SEQ ID NO: 449490 - RNA, 19 nt, Homo sapiens
  misc_RNA (1)...(19): siRNA sense strand
gugcuaaccugcauucugu

SEQ ID NO: 449491 - RNA, 19 nt, Homo sapiens
  misc_RNA (1)...(19): siRNA sense strand
gauaguggcagugauagua

SEQ ID NO: 449492 - RNA, 19 nt, Homo sapiens
  misc_RNA (1)...(19): siRNA sense strand
guacguggcugcaguucau

SEQ ID NO: 449493 - RNA, 19 nt, Homo sapiens
  misc_RNA (1)...(19): siRNA sense strand
ucaaauucaugcacaauca

SEQ ID NO: 449494 - RNA, 19 nt, Homo sapiens
  misc_RNA (1)...(19): siRNA sense strand
agacccagcucaacaaguu

SEQ ID NO: 449495 - RNA, 19 nt, Homo sapiens
  misc_RNA (1)...(19): siRNA sense strand
ccagcgagguggagauuga

SEQ ID NO: 449496 - RNA, 19 nt, Homo sapiens
  misc_RNA (1)...(19): siRNA sense strand
gagcuguacuacuguguga

SEQ ID NO: 449497 - RNA, 19 nt, Homo sapiens
  misc_RNA (1)...(19): siRNA sense strand
guacaugcagggacagaua

SEQ ID NO: 449498 - RNA, 19 nt, Homo sapiens
  misc_RNA (1)...(19): siRNA sense strand
gaagcagacauuuguggua

SEQ ID NO: 449499 - RNA, 19 nt, Homo sapiens
  misc_RNA (1)...(19): siRNA sense strand
gcucugaccuuugcucuuc

SEQ ID NO: 449500 - RNA, 19 nt, Homo sapiens
  misc_RNA (1)...(19): siRNA sense strand
gagaagggauggguaugga

SEQ ID NO: 449501 - RNA, 19 nt, Homo sapiens
  misc_RNA (1)...(19): siRNA sense strand
ugaauuggguggcgaguuc

SEQ ID NO: 449502 - RNA, 19 nt, Homo sapiens
  misc_RNA (1)...(19): siRNA sense strand
agacgaagguguugugcuu

SEQ ID NO: 449503 - RNA, 19 nt, Homo sapiens
  misc_RNA (1)...(19): siRNA sense strand
ugaagaagcagacauuugu

SEQ ID NO: 449504 - RNA, 19 nt, Homo sapiens
  misc_RNA (1)...(19): siRNA sense strand
gaagggaucaaccucaaau

SEQ ID NO: 449505 - RNA, 19 nt, Homo sapiens
  misc_RNA (1)...(19): siRNA sense strand
gcaugagccuucgggauga

SEQ ID NO: 449506 - RNA, 19 nt, Homo sapiens
  misc_RNA (1)...(19): siRNA sense strand
ggaucaaccucaaauucau

SEQ ID NO: 449507 - RNA, 19 nt, Homo sapiens
  misc_RNA (1)...(19): siRNA sense strand
gaaaugaugaaaugugaca

SEQ ID NO: 449508 - RNA, 19 nt, Homo sapiens
  misc_RNA (1)...(19): siRNA sense strand
cagaaucacuagagcugaa

SEQ ID NO: 449509 - RNA, 19 nt, Homo sapiens
  misc_RNA (1)...(19): siRNA sense strand
gcaucuguguuaacuucua

SEQ ID NO: 449510 - RNA, 19 nt, Homo sapiens
  misc_RNA (1)...(19): siRNA sense strand
acacuggagucacgcgaua

SEQ ID NO: 449511 - RNA, 19 nt, Homo sapiens
  misc_RNA (1)...(19): siRNA sense strand
ggcccagacuccugaauug

SEQ ID NO: 449512 - RNA, 19 nt, Homo sapiens
  misc_RNA (1)...(19): siRNA sense strand
ggacugaucaagacucugu

SEQ ID NO: 449513 - RNA, 19 nt, Homo sapiens
  misc_RNA (1)...(19): siRNA sense strand
aguaccagcuucagucuuu

SEQ ID NO: 449514 - RNA, 19 nt, Homo sapiens
  misc_RNA (1)...(19): siRNA sense strand
gcaugaccuucgagagauu

SEQ ID NO: 449515 - RNA, 19 nt, Homo sapiens
  misc_RNA (1)...(19): siRNA sense strand
aaucugcuacuccguauua

SEQ ID NO: 449516 - RNA, 19 nt, Homo sapiens
  misc_RNA (1)...(19): siRNA sense strand
gcccagacccacuacuaua

SEQ ID NO: 449517 - RNA, 19 nt, Homo sapiens
  misc_RNA (1)...(19): siRNA sense strand
cagggucgauccagcaauu

SEQ ID NO: 449518 - RNA, 19 nt, Homo sapiens
  misc_RNA (1)...(19): siRNA sense strand
gaaaagagaaccuccauca

SEQ ID NO: 449519 - RNA, 19 nt, Homo sapiens
  misc_RNA (1)...(19): siRNA sense strand
gauucacccuaguggauuu

SEQ ID NO: 449520 - RNA, 19 nt, Homo sapiens
  misc_RNA (1)...(19): siRNA sense strand
ccagacuccugaauugcua

SEQ ID NO: 449521 - RNA, 19 nt, Homo sapiens
  misc_RNA (1)...(19): siRNA sense strand
agaaugacauccgcaagaa

SEQ ID NO: 449522 - RNA, 19 nt, Homo sapiens
  misc_RNA (1)...(19): siRNA sense strand
cuucuuagaugcugugaug

SEQ ID NO: 449523 - RNA, 19 nt, Homo sapiens
  misc_RNA (1)...(19): siRNA sense strand
gagcagcaaugcaggugau

SEQ ID NO: 449524 - RNA, 19 nt, Homo sapiens
  misc_RNA (1)...(19): siRNA sense strand
gauucaagcucuucuuacu

SEQ ID NO: 449525 - RNA, 19 nt, Homo sapiens
  misc_RNA (1)...(19): siRNA sense strand
ccaacgugcugcagggauu

SEQ ID NO: 449526 - RNA, 19 nt, Homo sapiens
  misc_RNA (1)...(19): siRNA sense strand
ccuggaagaugaugaagau

SEQ ID NO: 449527 - RNA, 19 nt, Homo sapiens
  misc_RNA (1)...(19): siRNA sense strand
gaaguaaucaaaccugucu

SEQ ID NO: 449528 - RNA, 19 nt, Homo sapiens
  misc_RNA (1)...(19): siRNA sense strand
gaagaggguggcacugaga

SEQ ID NO: 449529 - RNA, 19 nt, Homo sapiens
  misc_RNA (1)...(19): siRNA sense strand
caucaaacccggaccugaa

SEQ ID NO: 449530 - RNA, 19 nt, Homo sapiens
  misc_RNA (1)...(19): siRNA sense strand
acgagaagcucaucaacau

SEQ ID NO: 449531 - RNA, 19 nt, Homo sapiens
  misc_RNA (1)...(19): siRNA sense strand
ccagaggacugaucaagac

SEQ ID NO: 449532 - RNA, 19 nt, Homo sapiens
  misc_RNA (1)...(19): siRNA sense strand
ggugugagccugacgucua

SEQ ID NO: 449533 - RNA, 19 nt, Homo sapiens
  misc_RNA (1)...(19): siRNA sense strand
guacaaagggacaccaugu

SEQ ID NO: 449534 - RNA, 19 nt, Homo sapiens
  misc_RNA (1)...(19): siRNA sense strand
ggagggcguuaguggauca

SEQ ID NO: 449535 - RNA, 19 nt, Homo sapiens
  misc_RNA (1)...(19): siRNA sense strand
gggaucaaccucaaauuca

SEQ ID NO: 449536 - RNA, 19 nt, Homo sapiens
  misc_RNA (1)...(19): siRNA sense strand
gaugauaccucuuuugucu

SEQ ID NO: 449537 - RNA, 19 nt, Homo sapiens
  misc_RNA (1)...(19): siRNA sense strand
gaguccagcuguuaugauc

SEQ ID NO: 449538 - RNA, 19 nt, Homo sapiens
  misc_RNA (1)...(19): siRNA sense strand
ccagccagcucugaccuuu

SEQ ID NO: 449539 - RNA, 19 nt, Homo sapiens
  misc_RNA (1)...(19): siRNA sense strand
uaacaucggaacaguguau

SEQ ID NO: 449540 - RNA, 19 nt, Homo sapiens
  misc_RNA (1)...(19): siRNA sense strand
caaaggcuauggcacaacu

SEQ ID NO: 449541 - RNA, 19 nt, Homo sapiens
  misc_RNA (1)...(19): siRNA sense strand
ggaagagaaguccaacaga

SEQ ID NO: 449542 - RNA, 19 nt, Homo sapiens
  misc_RNA (1)...(19): siRNA sense strand
gguguacaagggaauguua

SEQ ID NO: 449543 - RNA, 19 nt, Homo sapiens
  misc_RNA (1)...(19): siRNA sense strand
ccacggagccaacucugaa

SEQ ID NO: 449544 - RNA, 19 nt, Homo sapiens
  misc_RNA (1)...(19): siRNA sense strand
uugacgagcugcagaauca

SEQ ID NO: 449545 - RNA, 19 nt, Homo sapiens
  misc_RNA (1)...(19): siRNA sense strand
gaauucaacccacucaucu

SEQ ID NO: 449546 - RNA, 19 nt, Homo sapiens
  misc_RNA (1)...(19): siRNA sense strand
cucaacaaguucuauacua

SEQ ID NO: 449547 - RNA, 19 nt, Homo sapiens
  misc_RNA (1)...(19): siRNA sense strand
gaaggugaggcgccuaaug

SEQ ID NO: 449548 - RNA, 19 nt, Homo sapiens
  misc_RNA (1)...(19): siRNA sense strand
aggaaaugaucgacaggua

SEQ ID NO: 449549 - RNA, 19 nt, Homo sapiens
  misc_RNA (1)...(19): siRNA sense strand
ccagaaguuuaaaggaaga

SEQ ID NO: 449550 - RNA, 19 nt, Homo sapiens
  misc_RNA (1)...(19): siRNA sense strand
gccagcaucuuugggcuuu

SEQ ID NO: 449551 - RNA, 19 nt, Homo sapiens
  misc_RNA (1)...(19): siRNA sense strand
guacaguccucagcuugga

SEQ ID NO: 449552 - RNA, 19 nt, Homo sapiens
  misc_RNA (1)...(19): siRNA sense strand
gugacaagccaaaguggua

SEQ ID NO: 449553 - RNA, 19 nt, Homo sapiens
  misc_RNA (1)...(19): siRNA sense strand
uggcggaucuuuacuggau

SEQ ID NO: 449554 - RNA, 19 nt, Homo sapiens
  misc_RNA (1)...(19): siRNA sense strand
gaagguaaauaagaaugac

SEQ ID NO: 449555 - RNA, 19 nt, Homo sapiens
  misc_RNA (1)...(19): siRNA sense strand
uggcaucuguguuaacuuc

SEQ ID NO: 449556 - RNA, 19 nt, Homo sapiens
  misc_RNA (1)...(19): siRNA sense strand
uguuagaccuccucaagug

SEQ ID NO: 449557 - RNA, 19 nt, Homo sapiens
  misc_RNA (1)...(19): siRNA sense strand
ccagacccaucucgauuca

SEQ ID NO: 449558 - RNA, 19 nt, Homo sapiens
  misc_RNA (1)...(19): siRNA sense strand
gucgggagcuguacuacug

SEQ ID NO: 449559 - RNA, 19 nt, Homo sapiens
  misc_RNA (1)...(19): siRNA sense strand
guaguaacaucggaacagu

SEQ ID NO: 449560 - RNA, 19 nt, Homo sapiens
  misc_RNA (1)...(19): siRNA sense strand
cgaauucacaacaauaugu

SEQ ID NO: 449561 - RNA, 19 nt, Homo sapiens
  misc_RNA (1)...(19): siRNA sense strand
cagcgaauucacaacaaua

SEQ ID NO: 449562 - RNA, 19 nt, Homo sapiens
  misc_RNA (1)...(19): siRNA sense strand
ucuacaaacuggacuucaa

SEQ ID NO: 449563 - RNA, 19 nt, Homo sapiens
  misc_RNA (1)...(19): siRNA sense strand
uacaaacggagauaucuuu

SEQ ID NO: 449564 - RNA, 19 nt, Homo sapiens
  misc_RNA (1)...(19): siRNA sense strand
ggaagggaucaaccucaaa

SEQ ID NO: 449565 - RNA, 19 nt, Homo sapiens
  misc_RNA (1)...(19): siRNA sense strand
ugugugguguugcguagua

SEQ ID NO: 449566 - RNA, 19 nt, Homo sapiens
  misc_RNA (1)...(19): siRNA sense strand
gaagucaucugucauuaaa

SEQ ID NO: 449567 - RNA, 19 nt, Homo sapiens
  misc_RNA (1)...(19): siRNA sense strand
gaagagaaguccaacagaa

SEQ ID NO: 449568 - RNA, 19 nt, Homo sapiens
  misc_RNA (1)...(19): siRNA sense strand
gaaguucuguccucgguua

SEQ ID NO: 449569 - RNA, 19 nt, Homo sapiens
  misc_RNA (1)...(19): siRNA sense strand
cuacggagauggaugauaa

SEQ ID NO: 449570 - RNA, 19 nt, Homo sapiens
  misc_RNA (1)...(19): siRNA sense strand
gcagugauaguauggauua

SEQ ID NO: 449571 - RNA, 19 nt, Homo sapiens
  misc_RNA (1)...(19): siRNA sense strand
ggaagcgccuggaagauga

SEQ ID NO: 449572 - RNA, 19 nt, Homo sapiens
  misc_RNA (1)...(19): siRNA sense strand
caagugcccuucugcauga

SEQ ID NO: 449573 - RNA, 19 nt, Homo sapiens
  misc_RNA (1)...(19): siRNA sense strand
ggacagacgucaggcagaa

SEQ ID NO: 449574 - RNA, 19 nt, Homo sapiens
  misc_RNA (1)...(19): siRNA sense strand
caaaaugccugaugaugua

SEQ ID NO: 449575 - RNA, 19 nt, Homo sapiens
  misc_RNA (1)...(19): siRNA sense strand
aaacacagcccaacaguga

SEQ ID NO: 449576 - RNA, 19 nt, Homo sapiens
  misc_RNA (1)...(19): siRNA sense strand
gaaaucugcuacuccguau

SEQ ID NO: 449577 - RNA, 19 nt, Homo sapiens
  misc_RNA (1)...(19): siRNA sense strand
ucagugaaaugaugaaaug

SEQ ID NO: 449578 - RNA, 19 nt, Homo sapiens
  misc_RNA (1)...(19): siRNA sense strand
cgauauggcaucuguguua

SEQ ID NO: 449579 - RNA, 19 nt, Homo sapiens
  misc_RNA (1)...(19): siRNA sense strand
gugauaguauggauuauga

SEQ ID NO: 449580 - RNA, 19 nt, Homo sapiens
  misc_RNA (1)...(19): siRNA sense strand
gaugauaguggcagugaua

SEQ ID NO: 449581 - RNA, 19 nt, Homo sapiens
  misc_RNA (1)...(19): siRNA sense strand
ccacugcgcuccagcucua

SEQ ID NO: 449582 - RNA, 19 nt, Homo sapiens
  misc_RNA (1)...(19): siRNA sense strand
gugaaaugaugaaauguga

SEQ ID NO: 449583 - RNA, 19 nt, Homo sapiens
  misc_RNA (1)...(19): siRNA sense strand
ggacagcaauagggugauu

SEQ ID NO: 449584 - RNA, 19 nt, Homo sapiens
  misc_RNA (1)...(19): siRNA sense strand
gcaaaucaaugaggugcuu

SEQ ID NO: 449585 - RNA, 19 nt, Homo sapiens
  misc_RNA (1)...(19): siRNA sense strand
caccagaaguuuaaaggaa

SEQ ID NO: 449586 - RNA, 19 nt, Homo sapiens
  misc_RNA (1)...(19): siRNA sense strand
gauauggcaucuguguuaa

SEQ ID NO: 449587 - RNA, 19 nt, Homo sapiens
  misc_RNA (1)...(19): siRNA sense strand
uauuaugucucuucucgua

SEQ ID NO: 449588 - RNA, 19 nt, Homo sapiens
  misc_RNA (1)...(19): siRNA sense strand
caacagaaaguguaaauac

SEQ ID NO: 449589 - RNA, 19 nt, Homo sapiens
  misc_RNA (1)...(19): siRNA sense strand
caagcuggcuccuuucuag

SEQ ID NO: 449590 - RNA, 19 nt, Homo sapiens
  misc_RNA (1)...(19): siRNA sense strand
gugcuaaccugcauucugu

SEQ ID NO: 449591 - RNA, 19 nt, Homo sapiens
  misc_RNA (1)...(19): siRNA sense strand
gauaguggcagugauagua

SEQ ID NO: 449592 - RNA, 19 nt, Homo sapiens
  misc_RNA (1)...(19): siRNA sense strand
guacguggcugcaguucau

SEQ ID NO: 449593 - RNA, 19 nt, Homo sapiens
  misc_RNA (1)...(19): siRNA sense strand
ucaaauucaugcacaauca

SEQ ID NO: 449594 - RNA, 19 nt, Homo sapiens
  misc_RNA (1)...(19): siRNA sense strand
agacccagcucaacaaguu

SEQ ID NO: 449595 - RNA, 19 nt, Homo sapiens
  misc_RNA (1)...(19): siRNA sense strand
ccagcgagguggagauuga

SEQ ID NO: 449596 - RNA, 19 nt, Homo sapiens
  misc_RNA (1)...(19): siRNA sense strand
gagcuguacuacuguguga

SEQ ID NO: 449597 - RNA, 19 nt, Homo sapiens
  misc_RNA (1)...(19): siRNA sense strand
guacaugcagggacagaua

SEQ ID NO: 449598 - RNA, 19 nt, Homo sapiens
  misc_RNA (1)...(19): siRNA sense strand
gaagcagacauuuguggua

SEQ ID NO: 449599 - RNA, 19 nt, Homo sapiens
  misc_RNA (1)...(19): siRNA sense strand
gcucugaccuuugcucuuc

SEQ ID NO: 449600 - RNA, 19 nt, Homo sapiens
  misc_RNA (1)...(19): siRNA sense strand
gagaagggauggguaugga

SEQ ID NO: 449601 - RNA, 19 nt, Homo sapiens
  misc_RNA (1)...(19): siRNA sense strand
ugaauuggguggcgaguuc

SEQ ID NO: 449602 - RNA, 19 nt, Homo sapiens
  misc_RNA (1)...(19): siRNA sense strand
agacgaagguguugugcuu

SEQ ID NO: 449603 - RNA, 19 nt, Homo sapiens
  misc_RNA (1)...(19): siRNA sense strand
ugaagaagcagacauuugu

SEQ ID NO: 449604 - RNA, 19 nt, Homo sapiens
  misc_RNA (1)...(19): siRNA sense strand
gaagggaucaaccucaaau

SEQ ID NO: 449605 - RNA, 19 nt, Homo sapiens
  misc_RNA (1)...(19): siRNA sense strand
gcaugagccuucgggauga

SEQ ID NO: 449606 - RNA, 19 nt, Homo sapiens
  misc_RNA (1)...(19): siRNA sense strand
ggaucaaccucaaauucau

SEQ ID NO: 449607 - RNA, 19 nt, Homo sapiens
  misc_RNA (1)...(19): siRNA sense strand
gaaaugaugaaaugugaca

SEQ ID NO: 449608 - RNA, 19 nt, Homo sapiens
  misc_RNA (1)...(19): siRNA sense strand
cagaaucacuagagcugaa

SEQ ID NO: 449609 - RNA, 19 nt, Homo sapiens
  misc_RNA (1)...(19): siRNA sense strand
gcaucuguguuaacuucua

SEQ ID NO: 449610 - RNA, 19 nt, Homo sapiens
  misc_RNA (1)...(19): siRNA sense strand
acacuggagucacgcgaua

SEQ ID NO: 449611 - RNA, 19 nt, Homo sapiens
  misc_RNA (1)...(19): siRNA sense strand
ggcccagacuccugaauug

SEQ ID NO: 449612 - RNA, 19 nt, Homo sapiens
  misc_RNA (1)...(19): siRNA sense strand
ggacugaucaagacucugu

SEQ ID NO: 449613 - RNA, 19 nt, Homo sapiens
  misc_RNA (1)...(19): siRNA sense strand
aguaccagcuucagucuuu

SEQ ID NO: 449614 - RNA, 19 nt, Homo sapiens
  misc_RNA (1)...(19): siRNA sense strand
gcaugaccuucgagagauu

SEQ ID NO: 449615 - RNA, 19 nt, Homo sapiens
  misc_RNA (1)...(19): siRNA sense strand
aaucugcuacuccguauua

SEQ ID NO: 449616 - RNA, 19 nt, Homo sapiens
  misc_RNA (1)...(19): siRNA sense strand
gcccagacccacuacuaua

SEQ ID NO: 449617 - RNA, 19 nt, Homo sapiens
  misc_RNA (1)...(19): siRNA sense strand
cagggucgauccagcaauu

SEQ ID NO: 449618 - RNA, 19 nt, Homo sapiens
  misc_RNA (1)...(19): siRNA sense strand
gaaaagagaaccuccauca

SEQ ID NO: 449619 - RNA, 19 nt, Homo sapiens
  misc_RNA (1)...(19): siRNA sense strand
gauucacccuaguggauuu

SEQ ID NO: 449620 - RNA, 19 nt, Homo sapiens
  misc_RNA (1)...(19): siRNA sense strand
ccagacuccugaauugcua

SEQ ID NO: 449621 - RNA, 19 nt, Homo sapiens
  misc_RNA (1)...(19): siRNA sense strand
agaaugacauccgcaagaa

SEQ ID NO: 449622 - RNA, 19 nt, Homo sapiens
  misc_RNA (1)...(19): siRNA sense strand
cuucuuagaugcugugaug

SEQ ID NO: 449623 - RNA, 19 nt, Homo sapiens
  misc_RNA (1)...(19): siRNA sense strand
gagcagcaaugcaggugau

SEQ ID NO: 449624 - RNA, 19 nt, Homo sapiens
  misc_RNA (1)...(19): siRNA sense strand
gauucaagcucuucuuacu

SEQ ID NO: 449625 - RNA, 19 nt, Homo sapiens
  misc_RNA (1)...(19): siRNA sense strand
ccaacgugcugcagggauu

SEQ ID NO: 449626 - RNA, 19 nt, Homo sapiens
  misc_RNA (1)...(19): siRNA sense strand
ccuggaagaugaugaagau

SEQ ID NO: 449627 - RNA, 19 nt, Homo sapiens
  misc_RNA (1)...(19): siRNA sense strand
gaaguaaucaaaccugucu

SEQ ID NO: 449628 - RNA, 19 nt, Homo sapiens
  misc_RNA (1)...(19): siRNA sense strand
gaagaggguggcacugaga

SEQ ID NO: 449629 - RNA, 19 nt, Homo sapiens
  misc_RNA (1)...(19): siRNA sense strand
caucaaacccggaccugaa

SEQ ID NO: 449630 - RNA, 19 nt, Homo sapiens
  misc_RNA (1)...(19): siRNA sense strand
acgagaagcucaucaacau

SEQ ID NO: 449631 - RNA, 19 nt, Homo sapiens
  misc_RNA (1)...(19): siRNA sense strand
ccagaggacugaucaagac

SEQ ID NO: 449632 - RNA, 19 nt, Homo sapiens
  misc_RNA (1)...(19): siRNA sense strand
ggugugagccugacgucua

SEQ ID NO: 449633 - RNA, 19 nt, Homo sapiens
  misc_RNA (1)...(19): siRNA sense strand
guacaaagggacaccaugu

SEQ ID NO: 449634 - RNA, 19 nt, Homo sapiens
  misc_RNA (1)...(19): siRNA sense strand
ggagggcguuaguggauca

SEQ ID NO: 449635 - RNA, 19 nt, Homo sapiens
  misc_RNA (1)...(19): siRNA sense strand
gggaucaaccucaaauuca

SEQ ID NO: 449636 - RNA, 19 nt, Homo sapiens
  misc_RNA (1)...(19): siRNA sense strand
gaugauaccucuuuugucu

SEQ ID NO: 449637 - RNA, 19 nt, Homo sapiens
  misc_RNA (1)...(19): siRNA sense strand
gaguccagcuguuaugauc

SEQ ID NO: 449638 - RNA, 19 nt, Homo sapiens
  misc_RNA (1)...(19): siRNA sense strand
ccagccagcucugaccuuu

SEQ ID NO: 449639 - RNA, 19 nt, Homo sapiens
  misc_RNA (1)...(19): siRNA sense strand
uaacaucggaacaguguau

SEQ ID NO: 449640 - RNA, 19 nt, Homo sapiens
  misc_RNA (1)...(19): siRNA sense strand
caaaggcuauggcacaacu

SEQ ID NO: 449641 - RNA, 19 nt, Homo sapiens
  misc_RNA (1)...(19): siRNA sense strand
ggaagagaaguccaacaga

SEQ ID NO: 449642 - RNA, 19 nt, Homo sapiens
  misc_RNA (1)...(19): siRNA sense strand
gguguacaagggaauguua

SEQ ID NO: 449643 - RNA, 19 nt, Homo sapiens
  misc_RNA (1)...(19): siRNA sense strand
ccacggagccaacucugaa

SEQ ID NO: 449644 - RNA, 19 nt, Homo sapiens
  misc_RNA (1)...(19): siRNA sense strand
uugacgagcugcagaauca

SEQ ID NO: 449645 - RNA, 19 nt, Homo sapiens
  misc_RNA (1)...(19): siRNA sense strand
gaauucaacccacucaucu

SEQ ID NO: 449646 - RNA, 19 nt, Homo sapiens
  misc_RNA (1)...(19): siRNA sense strand
cucaacaaguucuauacua

SEQ ID NO: 449647 - RNA, 19 nt, Homo sapiens
  misc_RNA (1)...(19): siRNA sense strand
gaaggugaggcgccuaaug

SEQ ID NO: 449648 - RNA, 19 nt, Homo sapiens
  misc_RNA (1)...(19): siRNA sense strand
aggaaaugaucgacaggua

SEQ ID NO: 449649 - RNA, 19 nt, Homo sapiens
  misc_RNA (1)...(19): siRNA sense strand
ccagaaguuuaaaggaaga

SEQ ID NO: 449650 - RNA, 19 nt, Homo sapiens
  misc_RNA (1)...(19): siRNA sense strand
gccagcaucuuugggcuuu

SEQ ID NO: 449651 - RNA, 19 nt, Homo sapiens
  misc_RNA (1)...(19): siRNA sense strand
guacaguccucagcuugga

SEQ ID NO: 449652 - RNA, 19 nt, Homo sapiens
  misc_RNA (1)...(19): siRNA sense strand
gugacaagccaaaguggua

SEQ ID NO: 449653 - RNA, 19 nt, Homo sapiens
  misc_RNA (1)...(19): siRNA sense strand
uggcggaucuuuacuggau

SEQ ID NO: 449654 - RNA, 19 nt, Homo sapiens
  misc_RNA (1)...(19): siRNA sense strand
gaagguaaauaagaaugac

SEQ ID NO: 449655 - RNA, 19 nt, Homo sapiens
  misc_RNA (1)...(19): siRNA sense strand
uggcaucuguguuaacuuc

SEQ ID NO: 449656 - RNA, 19 nt, Homo sapiens
  misc_RNA (1)...(19): siRNA sense strand
uguuagaccuccucaagug

SEQ ID NO: 449657 - RNA, 19 nt, Homo sapiens
  misc_RNA (1)...(19): siRNA sense strand
ccagacccaucucgauuca

SEQ ID NO: 449658 - RNA, 19 nt, Homo sapiens
  misc_RNA (1)...(19): siRNA sense strand
gucgggagcuguacuacug

SEQ ID NO: 449659 - RNA, 19 nt, Homo sapiens
  misc_RNA (1)...(19): siRNA sense strand
guaguaacaucggaacagu

SEQ ID NO: 449660 - RNA, 19 nt, Homo sapiens
  misc_RNA (1)...(19): siRNA sense strand
cgaauucacaacaauaugu

SEQ ID NO: 449661 - RNA, 19 nt, Homo sapiens
  misc_RNA (1)...(19): siRNA sense strand
cagcgaauucacaacaaua

SEQ ID NO: 449662 - RNA, 19 nt, Homo sapiens
  misc_RNA (1)...(19): siRNA sense strand
ucuacaaacuggacuucaa

SEQ ID NO: 449663 - RNA, 19 nt, Homo sapiens
  misc_RNA (1)...(19): siRNA sense strand
uacaaacggagauaucuuu

SEQ ID NO: 449664 - RNA, 19 nt, Homo sapiens
  misc_RNA (1)...(19): siRNA sense strand
ggaagggaucaaccucaaa

SEQ ID NO: 449665 - RNA, 19 nt, Homo sapiens
  misc_RNA (1)...(19): siRNA sense strand
ugugugguguugcguagua

SEQ ID NO: 449666 - RNA, 19 nt, Homo sapiens
  misc_RNA (1)...(19): siRNA sense strand
gaagucaucugucauuaaa

SEQ ID NO: 449667 - RNA, 19 nt, Homo sapiens
  misc_RNA (1)...(19): siRNA sense strand
gaagagaaguccaacagaa

SEQ ID NO: 449668 - RNA, 19 nt, Homo sapiens
  misc_RNA (1)...(19): siRNA sense strand
gaaguucuguccucgguua

SEQ ID NO: 449669 - RNA, 19 nt, Homo sapiens
  misc_RNA (1)...(19): siRNA sense strand
cuacggagauggaugauaa

SEQ ID NO: 449670 - RNA, 19 nt, Homo sapiens
  misc_RNA (1)...(19): siRNA sense strand
gcagugauaguauggauua

SEQ ID NO: 449671 - RNA, 19 nt, Homo sapiens
  misc_RNA (1)...(19): siRNA sense strand
ggaagcgccuggaagauga

SEQ ID NO: 449672 - RNA, 19 nt, Homo sapiens
  misc_RNA (1)...(19): siRNA sense strand
caagugcccuucugcauga

SEQ ID NO: 449673 - RNA, 19 nt, Homo sapiens
  misc_RNA (1)...(19): siRNA sense strand
ggacagacgucaggcagaa

SEQ ID NO: 449674 - RNA, 19 nt, Homo sapiens
  misc_RNA (1)...(19): siRNA sense strand
caaaaugccugaugaugua

SEQ ID NO: 449675 - RNA, 19 nt, Homo sapiens
  misc_RNA (1)...(19): siRNA sense strand
aaacacagcccaacaguga

SEQ ID NO: 449676 - RNA, 19 nt, Homo sapiens
  misc_RNA (1)...(19): siRNA sense strand
gaaaucugcuacuccguau

SEQ ID NO: 449677 - RNA, 19 nt, Homo sapiens
  misc_RNA (1)...(19): siRNA sense strand
ucagugaaaugaugaaaug

SEQ ID NO: 449678 - RNA, 19 nt, Homo sapiens
  misc_RNA (1)...(19): siRNA sense strand
cgauauggcaucuguguua

SEQ ID NO: 449679 - RNA, 19 nt, Homo sapiens
  misc_RNA (1)...(19): siRNA sense strand
gugauaguauggauuauga

SEQ ID NO: 449680 - RNA, 19 nt, Homo sapiens
  misc_RNA (1)...(19): siRNA sense strand
gaugauaguggcagugaua

SEQ ID NO: 449681 - RNA, 19 nt, Homo sapiens
  misc_RNA (1)...(19): siRNA sense strand
ccacugcgcuccagcucua

SEQ ID NO: 449682 - RNA, 19 nt, Homo sapiens
  misc_RNA (1)...(19): siRNA sense strand
gugaaaugaugaaauguga

SEQ ID NO: 449683 - RNA, 19 nt, Homo sapiens
  misc_RNA (1)...(19): siRNA sense strand
ggacagcaauagggugauu

SEQ ID NO: 449684 - RNA, 19 nt, Homo sapiens
  misc_RNA (1)...(19): siRNA sense strand
gcaaaucaaugaggugcuu

SEQ ID NO: 449685 - RNA, 19 nt, Homo sapiens
  misc_RNA (1)...(19): siRNA sense strand
caccagaaguuuaaaggaa

SEQ ID NO: 449686 - RNA, 19 nt, Homo sapiens
  misc_RNA (1)...(19): siRNA sense strand
gauauggcaucuguguuaa

SEQ ID NO: 449687 - RNA, 19 nt, Homo sapiens
  misc_RNA (1)...(19): siRNA sense strand
uauuaugucucuucucgua

SEQ ID NO: 449688 - RNA, 19 nt, Homo sapiens
  misc_RNA (1)...(19): siRNA sense strand
caacagaaaguguaaauac

SEQ ID NO: 449689 - RNA, 19 nt, Homo sapiens
  misc_RNA (1)...(19): siRNA sense strand
caagcuggcuccuuucuag

SEQ ID NO: 449690 - RNA, 19 nt, Homo sapiens
  misc_RNA (1)...(19): siRNA sense strand
gugcuaaccugcauucugu

SEQ ID NO: 449691 - RNA, 19 nt, Homo sapiens
  misc_RNA (1)...(19): siRNA sense strand
gauaguggcagugauagua

SEQ ID NO: 449692 - RNA, 19 nt, Homo sapiens
  misc_RNA (1)...(19): siRNA sense strand
guacguggcugcaguucau

SEQ ID NO: 449693 - RNA, 19 nt, Homo sapiens
  misc_RNA (1)...(19): siRNA sense strand
ucaaauucaugcacaauca

SEQ ID NO: 449694 - RNA, 19 nt, Homo sapiens
  misc_RNA (1)...(19): siRNA sense strand
agacccagcucaacaaguu

SEQ ID NO: 449695 - RNA, 19 nt, Homo sapiens
  misc_RNA (1)...(19): siRNA sense strand
ccagcgagguggagauuga

SEQ ID NO: 449696 - RNA, 19 nt, Homo sapiens
  misc_RNA (1)...(19): siRNA sense strand
gagcuguacuacuguguga

SEQ ID NO: 449697 - RNA, 19 nt, Homo sapiens
  misc_RNA (1)...(19): siRNA sense strand
guacaugcagggacagaua

SEQ ID NO: 449698 - RNA, 19 nt, Homo sapiens
  misc_RNA (1)...(19): siRNA sense strand
gaagcagacauuuguggua

SEQ ID NO: 449699 - RNA, 19 nt, Homo sapiens
  misc_RNA (1)...(19): siRNA sense strand
gcucugaccuuugcucuuc

SEQ ID NO: 449700 - RNA, 19 nt, Homo sapiens
  misc_RNA (1)...(19): siRNA sense strand
gagaagggauggguaugga

SEQ ID NO: 449701 - RNA, 19 nt, Homo sapiens
  misc_RNA (1)...(19): siRNA sense strand
ugaauuggguggcgaguuc

SEQ ID NO: 449702 - RNA, 19 nt, Homo sapiens
  misc_RNA (1)...(19): siRNA sense strand
agacgaagguguugugcuu

SEQ ID NO: 449703 - RNA, 19 nt, Homo sapiens
  misc_RNA (1)...(19): siRNA sense strand
ugaagaagcagacauuugu

SEQ ID NO: 449704 - RNA, 19 nt, Homo sapiens
  misc_RNA (1)...(19): siRNA sense strand
gaagggaucaaccucaaau

SEQ ID NO: 449705 - RNA, 19 nt, Homo sapiens
  misc_RNA (1)...(19): siRNA sense strand
gcaugagccuucgggauga

SEQ ID NO: 449706 - RNA, 19 nt, Homo sapiens
  misc_RNA (1)...(19): siRNA sense strand
ggaucaaccucaaauucau

SEQ ID NO: 449707 - RNA, 19 nt, Homo sapiens
  misc_RNA (1)...(19): siRNA sense strand
gaaaugaugaaaugugaca

SEQ ID NO: 449708 - RNA, 19 nt, Homo sapiens
  misc_RNA (1)...(19): siRNA sense strand
cagaaucacuagagcugaa

SEQ ID NO: 449709 - RNA, 19 nt, Homo sapiens
  misc_RNA (1)...(19): siRNA sense strand
gcaucuguguuaacuucua

SEQ ID NO: 449710 - RNA, 19 nt, Homo sapiens
  misc_RNA (1)...(19): siRNA sense strand
acacuggagucacgcgaua

SEQ ID NO: 449711 - RNA, 19 nt, Homo sapiens
  misc_RNA (1)...(19): siRNA sense strand
ggcccagacuccugaauug

SEQ ID NO: 449712 - RNA, 19 nt, Homo sapiens
  misc_RNA (1)...(19): siRNA sense strand
ggacugaucaagacucugu

SEQ ID NO: 449713 - RNA, 19 nt, Homo sapiens
  misc_RNA (1)...(19): siRNA sense strand
aguaccagcuucagucuuu

SEQ ID NO: 449714 - RNA, 19 nt, Homo sapiens
  misc_RNA (1)...(19): siRNA sense strand
gcaugaccuucgagagauu

SEQ ID NO: 449715 - RNA, 19 nt, Homo sapiens
  misc_RNA (1)...(19): siRNA sense strand
aaucugcuacuccguauua

SEQ ID NO: 449716 - RNA, 19 nt, Homo sapiens
  misc_RNA (1)...(19): siRNA sense strand
gcccagacccacuacuaua

SEQ ID NO: 449717 - RNA, 19 nt, Homo sapiens
  misc_RNA (1)...(19): siRNA sense strand
cagggucgauccagcaauu

SEQ ID NO: 449718 - RNA, 19 nt, Homo sapiens
  misc_RNA (1)...(19): siRNA sense strand
gaaaagagaaccuccauca

SEQ ID NO: 449719 - RNA, 19 nt, Homo sapiens
  misc_RNA (1)...(19): siRNA sense strand
gauucacccuaguggauuu

SEQ ID NO: 449720 - RNA, 19 nt, Homo sapiens
  misc_RNA (1)...(19): siRNA sense strand
ccagacuccugaauugcua

SEQ ID NO: 449721 - RNA, 19 nt, Homo sapiens
  misc_RNA (1)...(19): siRNA sense strand
agaaugacauccgcaagaa

SEQ ID NO: 449722 - RNA, 19 nt, Homo sapiens
  misc_RNA (1)...(19): siRNA sense strand
cuucuuagaugcugugaug

SEQ ID NO: 449723 - RNA, 19 nt, Homo sapiens
  misc_RNA (1)...(19): siRNA sense strand
gagcagcaaugcaggugau

SEQ ID NO: 449724 - RNA, 19 nt, Homo sapiens
  misc_RNA (1)...(19): siRNA sense strand
gauucaagcucuucuuacu

SEQ ID NO: 449725 - RNA, 19 nt, Homo sapiens
  misc_RNA (1)...(19): siRNA sense strand
ccaacgugcugcagggauu

SEQ ID NO: 449726 - RNA, 19 nt, Homo sapiens
  misc_RNA (1)...(19): siRNA sense strand
ccuggaagaugaugaagau

SEQ ID NO: 449727 - RNA, 19 nt, Homo sapiens
  misc_RNA (1)...(19): siRNA sense strand
gaaguaaucaaaccugucu

SEQ ID NO: 449728 - RNA, 19 nt, Homo sapiens
  misc_RNA (1)...(19): siRNA sense strand
gaagaggguggcacugaga

SEQ ID NO: 449729 - RNA, 19 nt, Homo sapiens
  misc_RNA (1)...(19): siRNA sense strand
caucaaacccggaccugaa

SEQ ID NO: 449730 - RNA, 19 nt, Homo sapiens
  misc_RNA (1)...(19): siRNA sense strand
acgagaagcucaucaacau

SEQ ID NO: 449731 - RNA, 19 nt, Homo sapiens
  misc_RNA (1)...(19): siRNA sense strand
ccagaggacugaucaagac

SEQ ID NO: 449732 - RNA, 19 nt, Homo sapiens
  misc_RNA (1)...(19): siRNA sense strand
ggugugagccugacgucua

SEQ ID NO: 449733 - RNA, 19 nt, Homo sapiens
  misc_RNA (1)...(19): siRNA sense strand
guacaaagggacaccaugu

SEQ ID NO: 449734 - RNA, 19 nt, Homo sapiens
  misc_RNA (1)...(19): siRNA sense strand
ggagggcguuaguggauca

SEQ ID NO: 449735 - RNA, 19 nt, Homo sapiens
  misc_RNA (1)...(19): siRNA sense strand
gggaucaaccucaaauuca

SEQ ID NO: 449736 - RNA, 19 nt, Homo sapiens
  misc_RNA (1)...(19): siRNA sense strand
gaugauaccucuuuugucu

SEQ ID NO: 449737 - RNA, 19 nt, Homo sapiens
  misc_RNA (1)...(19): siRNA sense strand
gaguccagcuguuaugauc

SEQ ID NO: 449738 - RNA, 19 nt, Homo sapiens
  misc_RNA (1)...(19): siRNA sense strand
ccagccagcucugaccuuu

SEQ ID NO: 449739 - RNA, 19 nt, Homo sapiens
  misc_RNA (1)...(19): siRNA sense strand
uaacaucggaacaguguau

SEQ ID NO: 449740 - RNA, 19 nt, Homo sapiens
  misc_RNA (1)...(19): siRNA sense strand
caaaggcuauggcacaacu

SEQ ID NO: 449741 - RNA, 19 nt, Homo sapiens
  misc_RNA (1)...(19): siRNA sense strand
ggaagagaaguccaacaga

SEQ ID NO: 449742 - RNA, 19 nt, Homo sapiens
  misc_RNA (1)...(19): siRNA sense strand
gguguacaagggaauguua

SEQ ID NO: 449743 - RNA, 19 nt, Homo sapiens
  misc_RNA (1)...(19): siRNA sense strand
ccacggagccaacucugaa

SEQ ID NO: 449744 - RNA, 19 nt, Homo sapiens
  misc_RNA (1)...(19): siRNA sense strand
uugacgagcugcagaauca

SEQ ID NO: 449745 - RNA, 19 nt, Homo sapiens
  misc_RNA (1)...(19): siRNA sense strand
gaauucaacccacucaucu

SEQ ID NO: 449746 - RNA, 19 nt, Homo sapiens
  misc_RNA (1)...(19): siRNA sense strand
cucaacaaguucuauacua

SEQ ID NO: 449747 - RNA, 19 nt, Homo sapiens
  misc_RNA (1)...(19): siRNA sense strand
gaaggugaggcgccuaaug

SEQ ID NO: 449748 - RNA, 19 nt, Homo sapiens
  misc_RNA (1)...(19): siRNA sense strand
aggaaaugaucgacaggua

SEQ ID NO: 449749 - RNA, 19 nt, Homo sapiens
  misc_RNA (1)...(19): siRNA sense strand
ccagaaguuuaaaggaaga

SEQ ID NO: 449750 - RNA, 19 nt, Homo sapiens
  misc_RNA (1)...(19): siRNA sense strand
gccagcaucuuugggcuuu

SEQ ID NO: 449751 - RNA, 19 nt, Homo sapiens
  misc_RNA (1)...(19): siRNA sense strand
guacaguccucagcuugga

SEQ ID NO: 449752 - RNA, 19 nt, Homo sapiens
  misc_RNA (1)...(19): siRNA sense strand
gugacaagccaaaguggua

SEQ ID NO: 449753 - RNA, 19 nt, Homo sapiens
  misc_RNA (1)...(19): siRNA sense strand
uggcggaucuuuacuggau

SEQ ID NO: 449754 - RNA, 19 nt, Homo sapiens
  misc_RNA (1)...(19): siRNA sense strand
gaagguaaauaagaaugac

SEQ ID NO: 449755 - RNA, 19 nt, Homo sapiens
  misc_RNA (1)...(19): siRNA sense strand
uggcaucuguguuaacuuc

SEQ ID NO: 449756 - RNA, 19 nt, Homo sapiens
  misc_RNA (1)...(19): siRNA sense strand
uguuagaccuccucaagug

SEQ ID NO: 449757 - RNA, 19 nt, Homo sapiens
  misc_RNA (1)...(19): siRNA sense strand
ccagacccaucucgauuca

SEQ ID NO: 449758 - RNA, 19 nt, Homo sapiens
  misc_RNA (1)...(19): siRNA sense strand
gucgggagcuguacuacug

SEQ ID NO: 449759 - RNA, 19 nt, Homo sapiens
  misc_RNA (1)...(19): siRNA sense strand
guaguaacaucggaacagu

SEQ ID NO: 449760 - RNA, 19 nt, Homo sapiens
  misc_RNA (1)...(19): siRNA sense strand
cgaauucacaacaauaugu

SEQ ID NO: 449761 - RNA, 19 nt, Homo sapiens
  misc_RNA (1)...(19): siRNA sense strand
cagcgaauucacaacaaua

SEQ ID NO: 449762 - RNA, 19 nt, Homo sapiens
  misc_RNA (1)...(19): siRNA sense strand
ucuacaaacuggacuucaa

SEQ ID NO: 449763 - RNA, 19 nt, Homo sapiens
  misc_RNA (1)...(19): siRNA sense strand
uacaaacggagauaucuuu

SEQ ID NO: 449764 - RNA, 19 nt, Homo sapiens
  misc_RNA (1)...(19): siRNA sense strand
ggaagggaucaaccucaaa

SEQ ID NO: 449765 - RNA, 19 nt, Homo sapiens
  misc_RNA (1)...(19): siRNA sense strand
ugugugguguugcguagua

SEQ ID NO: 449766 - RNA, 19 nt, Homo sapiens
  misc_RNA (1)...(19): siRNA sense strand
gaagucaucugucauuaaa

SEQ ID NO: 449767 - RNA, 19 nt, Homo sapiens
  misc_RNA (1)...(19): siRNA sense strand
gaagagaaguccaacagaa

SEQ ID NO: 449768 - RNA, 19 nt, Homo sapiens
  misc_RNA (1)...(19): siRNA sense strand
gaaguucuguccucgguua

SEQ ID NO: 449769 - RNA, 19 nt, Homo sapiens
  misc_RNA (1)...(19): siRNA sense strand
cuacggagauggaugauaa

SEQ ID NO: 449770 - RNA, 19 nt, Homo sapiens
  misc_RNA (1)...(19): siRNA sense strand
gcagugauaguauggauua

SEQ ID NO: 449771 - RNA, 19 nt, Homo sapiens
  misc_RNA (1)...(19): siRNA sense strand
ggaagcgccuggaagauga

SEQ ID NO: 449772 - RNA, 19 nt, Homo sapiens
  misc_RNA (1)...(19): siRNA sense strand
caagugcccuucugcauga

SEQ ID NO: 449773 - RNA, 19 nt, Homo sapiens
  misc_RNA (1)...(19): siRNA sense strand
ggacagacgucaggcagaa

SEQ ID NO: 449774 - RNA, 19 nt, Homo sapiens
  misc_RNA (1)...(19): siRNA sense strand
caaaaugccugaugaugua

SEQ ID NO: 449775 - RNA, 19 nt, Homo sapiens
  misc_RNA (1)...(19): siRNA sense strand
aaacacagcccaacaguga

SEQ ID NO: 449776 - RNA, 19 nt, Homo sapiens
  misc_RNA (1)...(19): siRNA sense strand
gaaaucugcuacuccguau

SEQ ID NO: 449777 - RNA, 19 nt, Homo sapiens
  misc_RNA (1)...(19): siRNA sense strand
ucagugaaaugaugaaaug

SEQ ID NO: 449778 - RNA, 19 nt, Homo sapiens
  misc_RNA (1)...(19): siRNA sense strand
cgauauggcaucuguguua

SEQ ID NO: 449779 - RNA, 19 nt, Homo sapiens
  misc_RNA (1)...(19): siRNA sense strand
gugauaguauggauuauga

SEQ ID NO: 449780 - RNA, 19 nt, Homo sapiens
  misc_RNA (1)...(19): siRNA sense strand
gaugauaguggcagugaua

SEQ ID NO: 449781 - RNA, 19 nt, Homo sapiens
  misc_RNA (1)...(19): siRNA sense strand
ccacugcgcuccagcucua

SEQ ID NO: 449782 - RNA, 19 nt, Homo sapiens
  misc_RNA (1)...(19): siRNA sense strand
gugaaaugaugaaauguga

SEQ ID NO: 449783 - RNA, 19 nt, Homo sapiens
  misc_RNA (1)...(19): siRNA sense strand
ggacagcaauagggugauu

SEQ ID NO: 449784 - RNA, 19 nt, Homo sapiens
  misc_RNA (1)...(19): siRNA sense strand
gcaaaucaaugaggugcuu

SEQ ID NO: 449785 - RNA, 19 nt, Homo sapiens
  misc_RNA (1)...(19): siRNA sense strand
caccagaaguuuaaaggaa

SEQ ID NO: 449786 - RNA, 19 nt, Homo sapiens
  misc_RNA (1)...(19): siRNA sense strand
gauauggcaucuguguuaa

SEQ ID NO: 449787 - RNA, 19 nt, Homo sapiens
  misc_RNA (1)...(19): siRNA sense strand
uauuaugucucuucucgua

SEQ ID NO: 449788 - RNA, 19 nt, Homo sapiens
  misc_RNA (1)...(19): siRNA sense strand
caacagaaaguguaaauac

SEQ ID NO: 449789 - RNA, 19 nt, Homo sapiens
  misc_RNA (1)...(19): siRNA sense strand
caagcuggcuccuuucuag

SEQ ID NO: 449790 - RNA, 19 nt, Homo sapiens
  misc_RNA (1)...(19): siRNA sense strand
gugcuaaccugcauucugu

SEQ ID NO: 449791 - RNA, 19 nt, Homo sapiens
  misc_RNA (1)...(19): siRNA sense strand
gauaguggcagugauagua

SEQ ID NO: 449792 - RNA, 19 nt, Homo sapiens
  misc_RNA (1)...(19): siRNA sense strand
guacguggcugcaguucau

SEQ ID NO: 449793 - RNA, 19 nt, Homo sapiens
  misc_RNA (1)...(19): siRNA sense strand
ucaaauucaugcacaauca

SEQ ID NO: 449794 - RNA, 19 nt, Homo sapiens
  misc_RNA (1)...(19): siRNA sense strand
agacccagcucaacaaguu

SEQ ID NO: 449795 - RNA, 19 nt, Homo sapiens
  misc_RNA (1)...(19): siRNA sense strand
ccagcgagguggagauuga

SEQ ID NO: 449796 - RNA, 19 nt, Homo sapiens
  misc_RNA (1)...(19): siRNA sense strand
gagcuguacuacuguguga

SEQ ID NO: 449797 - RNA, 19 nt, Homo sapiens
  misc_RNA (1)...(19): siRNA sense strand
guacaugcagggacagaua

SEQ ID NO: 449798 - RNA, 19 nt, Homo sapiens
  misc_RNA (1)...(19): siRNA sense strand
gaagcagacauuuguggua

SEQ ID NO: 449799 - RNA, 19 nt, Homo sapiens
  misc_RNA (1)...(19): siRNA sense strand
gcucugaccuuugcucuuc

SEQ ID NO: 449800 - RNA, 19 nt, Homo sapiens
  misc_RNA (1)...(19): siRNA sense strand
gagaagggauggguaugga

SEQ ID NO: 449801 - RNA, 19 nt, Homo sapiens
  misc_RNA (1)...(19): siRNA sense strand
ugaauuggguggcgaguuc

SEQ ID NO: 449802 - RNA, 19 nt, Homo sapiens
  misc_RNA (1)...(19): siRNA sense strand
agacgaagguguugugcuu

SEQ ID NO: 449803 - RNA, 19 nt, Homo sapiens
  misc_RNA (1)...(19): siRNA sense strand
ugaagaagcagacauuugu

SEQ ID NO: 449804 - RNA, 19 nt, Homo sapiens
  misc_RNA (1)...(19): siRNA sense strand
gaagggaucaaccucaaau

SEQ ID NO: 449805 - RNA, 19 nt, Homo sapiens
  misc_RNA (1)...(19): siRNA sense strand
gcaugagccuucgggauga

SEQ ID NO: 449806 - RNA, 19 nt, Homo sapiens
  misc_RNA (1)...(19): siRNA sense strand
ggaucaaccucaaauucau

SEQ ID NO: 449807 - RNA, 19 nt, Homo sapiens
  misc_RNA (1)...(19): siRNA sense strand
gaaaugaugaaaugugaca

SEQ ID NO: 449808 - RNA, 19 nt, Homo sapiens
  misc_RNA (1)...(19): siRNA sense strand
cagaaucacuagagcugaa

SEQ ID NO: 449809 - RNA, 19 nt, Homo sapiens
  misc_RNA (1)...(19): siRNA sense strand
gcaucuguguuaacuucua

SEQ ID NO: 449810 - RNA, 19 nt, Homo sapiens
  misc_RNA (1)...(19): siRNA sense strand
acacuggagucacgcgaua

SEQ ID NO: 449811 - RNA, 19 nt, Homo sapiens
  misc_RNA (1)...(19): siRNA sense strand
ggcccagacuccugaauug

SEQ ID NO: 449812 - RNA, 19 nt, Homo sapiens
  misc_RNA (1)...(19): siRNA sense strand
ggacugaucaagacucugu

SEQ ID NO: 449813 - RNA, 19 nt, Homo sapiens
  misc_RNA (1)...(19): siRNA sense strand
aguaccagcuucagucuuu

SEQ ID NO: 449814 - RNA, 19 nt, Homo sapiens
  misc_RNA (1)...(19): siRNA sense strand
gcaugaccuucgagagauu

SEQ ID NO: 449815 - RNA, 19 nt, Homo sapiens
  misc_RNA (1)...(19): siRNA sense strand
aaucugcuacuccguauua

SEQ ID NO: 449816 - RNA, 19 nt, Homo sapiens
  misc_RNA (1)...(19): siRNA sense strand
gcccagacccacuacuaua

SEQ ID NO: 449817 - RNA, 19 nt, Homo sapiens
  misc_RNA (1)...(19): siRNA sense strand
cagggucgauccagcaauu

SEQ ID NO: 449818 - RNA, 19 nt, Homo sapiens
  misc_RNA (1)...(19): siRNA sense strand
gaaaagagaaccuccauca

SEQ ID NO: 449819 - RNA, 19 nt, Homo sapiens
  misc_RNA (1)...(19): siRNA sense strand
gauucacccuaguggauuu

SEQ ID NO: 449820 - RNA, 19 nt, Homo sapiens
  misc_RNA (1)...(19): siRNA sense strand
ccagacuccugaauugcua

SEQ ID NO: 449821 - RNA, 19 nt, Homo sapiens
  misc_RNA (1)...(19): siRNA sense strand
agaaugacauccgcaagaa

SEQ ID NO: 449822 - RNA, 19 nt, Homo sapiens
  misc_RNA (1)...(19): siRNA sense strand
cuucuuagaugcugugaug

SEQ ID NO: 449823 - RNA, 19 nt, Homo sapiens
  misc_RNA (1)...(19): siRNA sense strand
gagcagcaaugcaggugau

SEQ ID NO: 449824 - RNA, 19 nt, Homo sapiens
  misc_RNA (1)...(19): siRNA sense strand
gauucaagcucuucuuacu

SEQ ID NO: 449825 - RNA, 19 nt, Homo sapiens
  misc_RNA (1)...(19): siRNA sense strand
ccaacgugcugcagggauu

SEQ ID NO: 449826 - RNA, 19 nt, Homo sapiens
  misc_RNA (1)...(19): siRNA sense strand
ccuggaagaugaugaagau

SEQ ID NO: 449827 - RNA, 19 nt, Homo sapiens
  misc_RNA (1)...(19): siRNA sense strand
gaaguaaucaaaccugucu

SEQ ID NO: 449828 - RNA, 19 nt, Homo sapiens
  misc_RNA (1)...(19): siRNA sense strand
gaagaggguggcacugaga

SEQ ID NO: 449829 - RNA, 19 nt, Homo sapiens
  misc_RNA (1)...(19): siRNA sense strand
caucaaacccggaccugaa

SEQ ID NO: 449830 - RNA, 19 nt, Homo sapiens
  misc_RNA (1)...(19): siRNA sense strand
acgagaagcucaucaacau

SEQ ID NO: 449831 - RNA, 19 nt, Homo sapiens
  misc_RNA (1)...(19): siRNA sense strand
ccagaggacugaucaagac

SEQ ID NO: 449832 - RNA, 19 nt, Homo sapiens
  misc_RNA (1)...(19): siRNA sense strand
ggugugagccugacgucua

SEQ ID NO: 449833 - RNA, 19 nt, Homo sapiens
  misc_RNA (1)...(19): siRNA sense strand
guacaaagggacaccaugu

SEQ ID NO: 449834 - RNA, 19 nt, Homo sapiens
  misc_RNA (1)...(19): siRNA sense strand
ggagggcguuaguggauca

SEQ ID NO: 449835 - RNA, 19 nt, Homo sapiens
  misc_RNA (1)...(19): siRNA sense strand
gggaucaaccucaaauuca

SEQ ID NO: 449836 - RNA, 19 nt, Homo sapiens
  misc_RNA (1)...(19): siRNA sense strand
gaugauaccucuuuugucu

SEQ ID NO: 449837 - RNA, 19 nt, Homo sapiens
  misc_RNA (1)...(19): siRNA sense strand
gaguccagcuguuaugauc

SEQ ID NO: 449838 - RNA, 19 nt, Homo sapiens
  misc_RNA (1)...(19): siRNA sense strand
ccagccagcucugaccuuu

SEQ ID NO: 449839 - RNA, 19 nt, Homo sapiens
  misc_RNA (1)...(19): siRNA sense strand
uaacaucggaacaguguau

SEQ ID NO: 449840 - RNA, 19 nt, Homo sapiens
  misc_RNA (1)...(19): siRNA sense strand
caaaggcuauggcacaacu

SEQ ID NO: 449841 - RNA, 19 nt, Homo sapiens
  misc_RNA (1)...(19): siRNA sense strand
ggaagagaaguccaacaga

SEQ ID NO: 449842 - RNA, 19 nt, Homo sapiens
  misc_RNA (1)...(19): siRNA sense strand
gguguacaagggaauguua

SEQ ID NO: 449843 - RNA, 19 nt, Homo sapiens
  misc_RNA (1)...(19): siRNA sense strand
ccacggagccaacucugaa

SEQ ID NO: 449844 - RNA, 19 nt, Homo sapiens
  misc_RNA (1)...(19): siRNA sense strand
uugacgagcugcagaauca

SEQ ID NO: 449845 - RNA, 19 nt, Homo sapiens
  misc_RNA (1)...(19): siRNA sense strand
gaauucaacccacucaucu

SEQ ID NO: 449846 - RNA, 19 nt, Homo sapiens
  misc_RNA (1)...(19): siRNA sense strand
cucaacaaguucuauacua

SEQ ID NO: 449847 - RNA, 19 nt, Homo sapiens
  misc_RNA (1)...(19): siRNA sense strand
gaaggugaggcgccuaaug

SEQ ID NO: 449848 - RNA, 19 nt, Homo sapiens
  misc_RNA (1)...(19): siRNA sense strand
aggaaaugaucgacaggua

SEQ ID NO: 449849 - RNA, 19 nt, Homo sapiens
  misc_RNA (1)...(19): siRNA sense strand
ccagaaguuuaaaggaaga

SEQ ID NO: 449850 - RNA, 19 nt, Homo sapiens
  misc_RNA (1)...(19): siRNA sense strand
gccagcaucuuugggcuuu

SEQ ID NO: 449851 - RNA, 19 nt, Homo sapiens
  misc_RNA (1)...(19): siRNA sense strand
guacaguccucagcuugga

SEQ ID NO: 449852 - RNA, 19 nt, Homo sapiens
  misc_RNA (1)...(19): siRNA sense strand
gugacaagccaaaguggua

SEQ ID NO: 449853 - RNA, 19 nt, Homo sapiens
  misc_RNA (1)...(19): siRNA sense strand
uggcggaucuuuacuggau

SEQ ID NO: 449854 - RNA, 19 nt, Homo sapiens
  misc_RNA (1)...(19): siRNA sense strand
gaagguaaauaagaaugac

SEQ ID NO: 449855 - RNA, 19 nt, Homo sapiens
  misc_RNA (1)...(19): siRNA sense strand
uggcaucuguguuaacuuc

SEQ ID NO: 449856 - RNA, 19 nt, Homo sapiens
  misc_RNA (1)...(19): siRNA sense strand
uguuagaccuccucaagug

SEQ ID NO: 449857 - RNA, 19 nt, Homo sapiens
  misc_RNA (1)...(19): siRNA sense strand
ccagacccaucucgauuca

SEQ ID NO: 449858 - RNA, 19 nt, Homo sapiens
  misc_RNA (1)...(19): siRNA sense strand
gucgggagcuguacuacug

SEQ ID NO: 449859 - RNA, 19 nt, Homo sapiens
  misc_RNA (1)...(19): siRNA sense strand
guaguaacaucggaacagu

SEQ ID NO: 449860 - RNA, 19 nt, Homo sapiens
  misc_RNA (1)...(19): siRNA sense strand
cgaauucacaacaauaugu

SEQ ID NO: 449861 - RNA, 19 nt, Homo sapiens
  misc_RNA (1)...(19): siRNA sense strand
cagcgaauucacaacaaua

SEQ ID NO: 449862 - RNA, 19 nt, Homo sapiens
  misc_RNA (1)...(19): siRNA sense strand
ucuacaaacuggacuucaa

SEQ ID NO: 449863 - RNA, 19 nt, Homo sapiens
  misc_RNA (1)...(19): siRNA sense strand
uacaaacggagauaucuuu

SEQ ID NO: 449864 - RNA, 19 nt, Homo sapiens
  misc_RNA (1)...(19): siRNA sense strand
ggaagggaucaaccucaaa

SEQ ID NO: 449865 - RNA, 19 nt, Homo sapiens
  misc_RNA (1)...(19): siRNA sense strand
ugugugguguugcguagua

SEQ ID NO: 449866 - RNA, 19 nt, Homo sapiens
  misc_RNA (1)...(19): siRNA sense strand
gaagucaucugucauuaaa

SEQ ID NO: 449867 - RNA, 19 nt, Homo sapiens
  misc_RNA (1)...(19): siRNA sense strand
gaagagaaguccaacagaa

SEQ ID NO: 449868 - RNA, 19 nt, Homo sapiens
  misc_RNA (1)...(19): siRNA sense strand
gaaguucuguccucgguua

SEQ ID NO: 449869 - RNA, 19 nt, Homo sapiens
  misc_RNA (1)...(19): siRNA sense strand
cuacggagauggaugauaa

SEQ ID NO: 449870 - RNA, 19 nt, Homo sapiens
  misc_RNA (1)...(19): siRNA sense strand
gcagugauaguauggauua

SEQ ID NO: 449871 - RNA, 19 nt, Homo sapiens
  misc_RNA (1)...(19): siRNA sense strand
ggaagcgccuggaagauga

SEQ ID NO: 449872 - RNA, 19 nt, Homo sapiens
  misc_RNA (1)...(19): siRNA sense strand
caagugcccuucugcauga

SEQ ID NO: 449873 - RNA, 19 nt, Homo sapiens
  misc_RNA (1)...(19): siRNA sense strand
ggacagacgucaggcagaa

SEQ ID NO: 449874 - RNA, 19 nt, Homo sapiens
  misc_RNA (1)...(19): siRNA sense strand
caaaaugccugaugaugua

SEQ ID NO: 449875 - RNA, 19 nt, Homo sapiens
  misc_RNA (1)...(19): siRNA sense strand
aaacacagcccaacaguga

SEQ ID NO: 449876 - RNA, 19 nt, Homo sapiens
  misc_RNA (1)...(19): siRNA sense strand
ucagugaaaugaugaaaug

SEQ ID NO: 449877 - RNA, 19 nt, Homo sapiens
  misc_RNA (1)...(19): siRNA sense strand
cgauauggcaucuguguua

SEQ ID NO: 449878 - RNA, 19 nt, Homo sapiens
  misc_RNA (1)...(19): siRNA sense strand
gugauaguauggauuauga

SEQ ID NO: 449879 - RNA, 19 nt, Homo sapiens
  misc_RNA (1)...(19): siRNA sense strand
gaugauaguggcagugaua

SEQ ID NO: 449880 - RNA, 19 nt, Homo sapiens
  misc_RNA (1)...(19): siRNA sense strand
ccacugcgcuccagcucua

SEQ ID NO: 449881 - RNA, 19 nt, Homo sapiens
  misc_RNA (1)...(19): siRNA sense strand
gugaaaugaugaaauguga

SEQ ID NO: 449882 - RNA, 19 nt, Homo sapiens
  misc_RNA (1)...(19): siRNA sense strand
ggacagcaauagggugauu

SEQ ID NO: 449883 - RNA, 19 nt, Homo sapiens
  misc_RNA (1)...(19): siRNA sense strand
gcaaaucaaugaggugcuu

SEQ ID NO: 449884 - RNA, 19 nt, Homo sapiens
  misc_RNA (1)...(19): siRNA sense strand
caccagaaguuuaaaggaa

SEQ ID NO: 449885 - RNA, 19 nt, Homo sapiens
  misc_RNA (1)...(19): siRNA sense strand
gauauggcaucuguguuaa

SEQ ID NO: 449886 - RNA, 19 nt, Homo sapiens
  misc_RNA (1)...(19): siRNA sense strand
caacagaaaguguaaauac

SEQ ID NO: 449887 - RNA, 19 nt, Homo sapiens
  misc_RNA (1)...(19): siRNA sense strand
caagcuggcuccuuucuag

SEQ ID NO: 449888 - RNA, 19 nt, Homo sapiens
  misc_RNA (1)...(19): siRNA sense strand
gugcuaaccugcauucugu

SEQ ID NO: 449889 - RNA, 19 nt, Homo sapiens
  misc_RNA (1)...(19): siRNA sense strand
gauaguggcagugauagua

SEQ ID NO: 449890 - RNA, 19 nt, Homo sapiens
  misc_RNA (1)...(19): siRNA sense strand
ucaaauucaugcacaauca

SEQ ID NO: 449891 - RNA, 19 nt, Homo sapiens
  misc_RNA (1)...(19): siRNA sense strand
agacccagcucaacaaguu

SEQ ID NO: 449892 - RNA, 19 nt, Homo sapiens
  misc_RNA (1)...(19): siRNA sense strand
ccagcgagguggagauuga

SEQ ID NO: 449893 - RNA, 19 nt, Homo sapiens
  misc_RNA (1)...(19): siRNA sense strand
gagcuguacuacuguguga

SEQ ID NO: 449894 - RNA, 19 nt, Homo sapiens
  misc_RNA (1)...(19): siRNA sense strand
guacaugcagggacagaua

SEQ ID NO: 449895 - RNA, 19 nt, Homo sapiens
  misc_RNA (1)...(19): siRNA sense strand
gaagcagacauuuguggua

SEQ ID NO: 449896 - RNA, 19 nt, Homo sapiens
  misc_RNA (1)...(19): siRNA sense strand
gcucugaccuuugcucuuc

SEQ ID NO: 449897 - RNA, 19 nt, Homo sapiens
  misc_RNA (1)...(19): siRNA sense strand
gagaagggauggguaugga

SEQ ID NO: 449898 - RNA, 19 nt, Homo sapiens
  misc_RNA (1)...(19): siRNA sense strand
ugaauuggguggcgaguuc

SEQ ID NO: 449899 - RNA, 19 nt, Homo sapiens
  misc_RNA (1)...(19): siRNA sense strand
agacgaagguguugugcuu

SEQ ID NO: 449900 - RNA, 19 nt, Homo sapiens
  misc_RNA (1)...(19): siRNA sense strand
ugaagaagcagacauuugu

SEQ ID NO: 449901 - RNA, 19 nt, Homo sapiens
  misc_RNA (1)...(19): siRNA sense strand
gaagggaucaaccucaaau

SEQ ID NO: 449902 - RNA, 19 nt, Homo sapiens
  misc_RNA (1)...(19): siRNA sense strand
gcaugagccuucgggauga

SEQ ID NO: 449903 - RNA, 19 nt, Homo sapiens
  misc_RNA (1)...(19): siRNA sense strand
ggaucaaccucaaauucau

SEQ ID NO: 449904 - RNA, 19 nt, Homo sapiens
  misc_RNA (1)...(19): siRNA sense strand
gaaaugaugaaaugugaca

SEQ ID NO: 449905 - RNA, 19 nt, Homo sapiens
  misc_RNA (1)...(19): siRNA sense strand
cagaaucacuagagcugaa

SEQ ID NO: 449906 - RNA, 19 nt, Homo sapiens
  misc_RNA (1)...(19): siRNA sense strand
gcaucuguguuaacuucua

SEQ ID NO: 449907 - RNA, 19 nt, Homo sapiens
  misc_RNA (1)...(19): siRNA sense strand
acacuggagucacgcgaua

SEQ ID NO: 449908 - RNA, 19 nt, Homo sapiens
  misc_RNA (1)...(19): siRNA sense strand
ggacugaucaagacucugu

SEQ ID NO: 449909 - RNA, 19 nt, Homo sapiens
  misc_RNA (1)...(19): siRNA sense strand
aguaccagcuucagucuuu

SEQ ID NO: 449910 - RNA, 19 nt, Homo sapiens
  misc_RNA (1)...(19): siRNA sense strand
ggcccagacuccugaauug

SEQ ID NO: 449911 - RNA, 19 nt, Homo sapiens
  misc_RNA (1)...(19): siRNA sense strand
gcaugaccuucgagagauu

SEQ ID NO: 449912 - RNA, 19 nt, Homo sapiens
  misc_RNA (1)...(19): siRNA sense strand
gcccagacccacuacuaua

SEQ ID NO: 449913 - RNA, 19 nt, Homo sapiens
  misc_RNA (1)...(19): siRNA sense strand
cagggucgauccagcaauu

SEQ ID NO: 449914 - RNA, 19 nt, Homo sapiens
  misc_RNA (1)...(19): siRNA sense strand
gaaaagagaaccuccauca

SEQ ID NO: 449915 - RNA, 19 nt, Homo sapiens
  misc_RNA (1)...(19): siRNA sense strand
gauucacccuaguggauuu

SEQ ID NO: 449916 - RNA, 19 nt, Homo sapiens
  misc_RNA (1)...(19): siRNA sense strand
gauucaagcucuucuuacu

SEQ ID NO: 449917 - RNA, 19 nt, Homo sapiens
  misc_RNA (1)...(19): siRNA sense strand
ccagacuccugaauugcua

SEQ ID NO: 449918 - RNA, 19 nt, Homo sapiens
  misc_RNA (1)...(19): siRNA sense strand
agaaugacauccgcaagaa

SEQ ID NO: 449919 - RNA, 19 nt, Homo sapiens
  misc_RNA (1)...(19): siRNA sense strand
cuucuuagaugcugugaug

SEQ ID NO: 449920 - RNA, 19 nt, Homo sapiens
  misc_RNA (1)...(19): siRNA sense strand
gagcagcaaugcaggugau

SEQ ID NO: 449921 - RNA, 19 nt, Homo sapiens
  misc_RNA (1)...(19): siRNA sense strand
ccaacgugcugcagggauu

SEQ ID NO: 449922 - RNA, 19 nt, Homo sapiens
  misc_RNA (1)...(19): siRNA sense strand
ccuggaagaugaugaagau

SEQ ID NO: 449923 - RNA, 19 nt, Homo sapiens
  misc_RNA (1)...(19): siRNA sense strand
gaaguaaucaaaccugucu

SEQ ID NO: 449924 - RNA, 19 nt, Homo sapiens
  misc_RNA (1)...(19): siRNA sense strand
gaagaggguggcacugaga

SEQ ID NO: 449925 - RNA, 19 nt, Homo sapiens
  misc_RNA (1)...(19): siRNA sense strand
caucaaacccggaccugaa

SEQ ID NO: 449926 - RNA, 19 nt, Homo sapiens
  misc_RNA (1)...(19): siRNA sense strand
acgagaagcucaucaacau

SEQ ID NO: 449927 - RNA, 19 nt, Homo sapiens
  misc_RNA (1)...(19): siRNA sense strand
ccagaggacugaucaagac

SEQ ID NO: 449928 - RNA, 19 nt, Homo sapiens
  misc_RNA (1)...(19): siRNA sense strand
ggugugagccugacgucua

SEQ ID NO: 449929 - RNA, 19 nt, Homo sapiens
  misc_RNA (1)...(19): siRNA sense strand
guacaaagggacaccaugu

SEQ ID NO: 449930 - RNA, 19 nt, Homo sapiens
  misc_RNA (1)...(19): siRNA sense strand
gaugauaccucuuuugucu

SEQ ID NO: 449931 - RNA, 19 nt, Homo sapiens
  misc_RNA (1)...(19): siRNA sense strand
gggaucaaccucaaauuca

SEQ ID NO: 449932 - RNA, 19 nt, Homo sapiens
  misc_RNA (1)...(19): siRNA sense strand
gaguccagcuguuaugauc

SEQ ID NO: 449933 - RNA, 19 nt, Homo sapiens
  misc_RNA (1)...(19): siRNA sense strand
ggagggcguuaguggauca

SEQ ID NO: 449934 - RNA, 19 nt, Homo sapiens
  misc_RNA (1)...(19): siRNA sense strand
ccagccagcucugaccuuu

SEQ ID NO: 449935 - RNA, 19 nt, Homo sapiens
  misc_RNA (1)...(19): siRNA sense strand
uaacaucggaacaguguau

SEQ ID NO: 449936 - RNA, 19 nt, Homo sapiens
  misc_RNA (1)...(19): siRNA sense strand
caaaggcuauggcacaacu

SEQ ID NO: 449937 - RNA, 19 nt, Homo sapiens
  misc_RNA (1)...(19): siRNA sense strand
ggaagagaaguccaacaga

SEQ ID NO: 449938 - RNA, 19 nt, Homo sapiens
  misc_RNA (1)...(19): siRNA sense strand
gguguacaagggaauguua

SEQ ID NO: 449939 - RNA, 19 nt, Homo sapiens
  misc_RNA (1)...(19): siRNA sense strand
ccacggagccaacucugaa

SEQ ID NO: 449940 - RNA, 19 nt, Homo sapiens
  misc_RNA (1)...(19): siRNA sense strand
uugacgagcugcagaauca

SEQ ID NO: 449941 - RNA, 19 nt, Homo sapiens
  misc_RNA (1)...(19): siRNA sense strand
gaauucaacccacucaucu

SEQ ID NO: 449942 - RNA, 19 nt, Homo sapiens
  misc_RNA (1)...(19): siRNA sense strand
cucaacaaguucuauacua

SEQ ID NO: 449943 - RNA, 19 nt, Homo sapiens
  misc_RNA (1)...(19): siRNA sense strand
gaaggugaggcgccuaaug

SEQ ID NO: 449944 - RNA, 19 nt, Homo sapiens
  misc_RNA (1)...(19): siRNA sense strand
aggaaaugaucgacaggua

SEQ ID NO: 449945 - RNA, 19 nt, Homo sapiens
  misc_RNA (1)...(19): siRNA sense strand
ccagaaguuuaaaggaaga

SEQ ID NO: 449946 - RNA, 19 nt, Homo sapiens
  misc_RNA (1)...(19): siRNA sense strand
gccagcaucuuugggcuuu

SEQ ID NO: 449947 - RNA, 19 nt, Homo sapiens
  misc_RNA (1)...(19): siRNA sense strand
guacaguccucagcuugga

SEQ ID NO: 449948 - RNA, 19 nt, Homo sapiens
  misc_RNA (1)...(19): siRNA sense strand
gugacaagccaaaguggua

SEQ ID NO: 449949 - RNA, 19 nt, Homo sapiens
  misc_RNA (1)...(19): siRNA sense strand
uggcggaucuuuacuggau

SEQ ID NO: 449950 - RNA, 19 nt, Homo sapiens
  misc_RNA (1)...(19): siRNA sense strand
gaagguaaauaagaaugac

SEQ ID NO: 449951 - RNA, 19 nt, Homo sapiens
  misc_RNA (1)...(19): siRNA sense strand
uguuagaccuccucaagug

SEQ ID NO: 449952 - RNA, 19 nt, Homo sapiens
  misc_RNA (1)...(19): siRNA sense strand
uggcaucuguguuaacuuc

SEQ ID NO: 449953 - RNA, 19 nt, Homo sapiens
  misc_RNA (1)...(19): siRNA sense strand
ccagacccaucucgauuca

SEQ ID NO: 449954 - RNA, 19 nt, Homo sapiens
  misc_RNA (1)...(19): siRNA sense strand
gucgggagcuguacuacug

SEQ ID NO: 449955 - RNA, 19 nt, Homo sapiens
  misc_RNA (1)...(19): siRNA sense strand
guaguaacaucggaacagu

SEQ ID NO: 449956 - RNA, 19 nt, Homo sapiens
  misc_RNA (1)...(19): siRNA sense strand
cgaauucacaacaauaugu

SEQ ID NO: 449957 - RNA, 19 nt, Homo sapiens
  misc_RNA (1)...(19): siRNA sense strand
cagcgaauucacaacaaua

SEQ ID NO: 449958 - RNA, 19 nt, Homo sapiens
  misc_RNA (1)...(19): siRNA sense strand
ucuacaaacuggacuucaa

SEQ ID NO: 449959 - RNA, 19 nt, Homo sapiens
  misc_RNA (1)...(19): siRNA sense strand
cagcgagucuaucucuaug

SEQ ID NO: 449960 - RNA, 19 nt, Homo sapiens
  misc_RNA (1)...(19): siRNA sense strand
ggaagggaucaaccucaaa

SEQ ID NO: 449961 - RNA, 19 nt, Homo sapiens
  misc_RNA (1)...(19): siRNA sense strand
ugugugguguugcguagua

SEQ ID NO: 449962 - RNA, 19 nt, Homo sapiens
  misc_RNA (1)...(19): siRNA sense strand
uacaaacggagauaucuuu

SEQ ID NO: 449963 - RNA, 19 nt, Homo sapiens
  misc_RNA (1)...(19): siRNA sense strand
gcagacauuugugguacau

SEQ ID NO: 449964 - RNA, 19 nt, Homo sapiens
  misc_RNA (1)...(19): siRNA sense strand
guacagccagcaaaucaau

SEQ ID NO: 449965 - RNA, 19 nt, Homo sapiens
  misc_RNA (1)...(19): siRNA sense strand
guaccugucccuuggagaa

SEQ ID NO: 449966 - RNA, 19 nt, Homo sapiens
  misc_RNA (1)...(19): siRNA sense strand
gaagucaucugucauuaaa

SEQ ID NO: 449967 - RNA, 19 nt, Homo sapiens
  misc_RNA (1)...(19): siRNA sense strand
gaagagaaguccaacagaa

SEQ ID NO: 449968 - RNA, 19 nt, Homo sapiens
  misc_RNA (1)...(19): siRNA sense strand
gaaguucuguccucgguua

SEQ ID NO: 449969 - RNA, 19 nt, Homo sapiens
  misc_RNA (1)...(19): siRNA sense strand
cuacggagauggaugauaa

SEQ ID NO: 449970 - RNA, 19 nt, Homo sapiens
  misc_RNA (1)...(19): siRNA sense strand
gcagugauaguauggauua

SEQ ID NO: 449971 - RNA, 19 nt, Homo sapiens
  misc_RNA (1)...(19): siRNA sense strand
ggaagcgccuggaagauga

SEQ ID NO: 449972 - RNA, 19 nt, Homo sapiens
  misc_RNA (1)...(19): siRNA sense strand
caagugcccuucugcauga

SEQ ID NO: 449973 - RNA, 19 nt, Homo sapiens
  misc_RNA (1)...(19): siRNA sense strand
ggacagacgucaggcagaa

SEQ ID NO: 449974 - RNA, 19 nt, Homo sapiens
  misc_RNA (1)...(19): siRNA sense strand
caaaaugccugaugaugua

SEQ ID NO: 449975 - RNA, 19 nt, Homo sapiens
  misc_RNA (1)...(19): siRNA sense strand
aaacacagcccaacaguga

SEQ ID NO: 449976 - RNA, 19 nt, Homo sapiens
  misc_RNA (1)...(19): siRNA sense strand
ucagugaaaugaugaaaug

SEQ ID NO: 449977 - RNA, 19 nt, Homo sapiens
  misc_RNA (1)...(19): siRNA sense strand
cgauauggcaucuguguua

SEQ ID NO: 449978 - RNA, 19 nt, Homo sapiens
  misc_RNA (1)...(19): siRNA sense strand
gugauaguauggauuauga

SEQ ID NO: 449979 - RNA, 19 nt, Homo sapiens
  misc_RNA (1)...(19): siRNA sense strand
gaugauaguggcagugaua

SEQ ID NO: 449980 - RNA, 19 nt, Homo sapiens
  misc_RNA (1)...(19): siRNA sense strand
ccacugcgcuccagcucua

SEQ ID NO: 449981 - RNA, 19 nt, Homo sapiens
  misc_RNA (1)...(19): siRNA sense strand
gugaaaugaugaaauguga

SEQ ID NO: 449982 - RNA, 19 nt, Homo sapiens
  misc_RNA (1)...(19): siRNA sense strand
ggacagcaauagggugauu

SEQ ID NO: 449983 - RNA, 19 nt, Homo sapiens
  misc_RNA (1)...(19): siRNA sense strand
gcaaaucaaugaggugcuu

SEQ ID NO: 449984 - RNA, 19 nt, Homo sapiens
  misc_RNA (1)...(19): siRNA sense strand
caccagaaguuuaaaggaa

SEQ ID NO: 449985 - RNA, 19 nt, Homo sapiens
  misc_RNA (1)...(19): siRNA sense strand
gauauggcaucuguguuaa

SEQ ID NO: 449986 - RNA, 19 nt, Homo sapiens
  misc_RNA (1)...(19): siRNA sense strand
caacagaaaguguaaauac

SEQ ID NO: 449987 - RNA, 19 nt, Homo sapiens
  misc_RNA (1)...(19): siRNA sense strand
caagcuggcuccuuucuag

SEQ ID NO: 449988 - RNA, 19 nt, Homo sapiens
  misc_RNA (1)...(19): siRNA sense strand
gugcuaaccugcauucugu

SEQ ID NO: 449989 - RNA, 19 nt, Homo sapiens
  misc_RNA (1)...(19): siRNA sense strand
gauaguggcagugauagua

SEQ ID NO: 449990 - RNA, 19 nt, Homo sapiens
  misc_RNA (1)...(19): siRNA sense strand
ucaaauucaugcacaauca

SEQ ID NO: 449991 - RNA, 19 nt, Homo sapiens
  misc_RNA (1)...(19): siRNA sense strand
agacccagcucaacaaguu

SEQ ID NO: 449992 - RNA, 19 nt, Homo sapiens
  misc_RNA (1)...(19): siRNA sense strand
ccagcgagguggagauuga

SEQ ID NO: 449993 - RNA, 19 nt, Homo sapiens
  misc_RNA (1)...(19): siRNA sense strand
gagcuguacuacuguguga

SEQ ID NO: 449994 - RNA, 19 nt, Homo sapiens
  misc_RNA (1)...(19): siRNA sense strand
guacaugcagggacagaua

SEQ ID NO: 449995 - RNA, 19 nt, Homo sapiens
  misc_RNA (1)...(19): siRNA sense strand
gaagcagacauuuguggua

SEQ ID NO: 449996 - RNA, 19 nt, Homo sapiens
  misc_RNA (1)...(19): siRNA sense strand
gcucugaccuuugcucuuc

SEQ ID NO: 449997 - RNA, 19 nt, Homo sapiens
  misc_RNA (1)...(19): siRNA sense strand
gagaagggauggguaugga

SEQ ID NO: 449998 - RNA, 19 nt, Homo sapiens
  misc_RNA (1)...(19): siRNA sense strand
ugaauuggguggcgaguuc

SEQ ID NO: 449999 - RNA, 19 nt, Homo sapiens
  misc_RNA (1)...(19): siRNA sense strand
agacgaagguguugugcuu

SEQ ID NO: 450000 - RNA, 19 nt, Homo sapiens
  misc_RNA (1)...(19): siRNA sense strand
ugaagaagcagacauuugu

SEQ ID NO: 450001 - RNA, 19 nt, Homo sapiens
  misc_RNA (1)...(19): siRNA sense strand
gaagggaucaaccucaaau

SEQ ID NO: 450002 - RNA, 19 nt, Homo sapiens
  misc_RNA (1)...(19): siRNA sense strand
gcaugagccuucgggauga

SEQ ID NO: 450003 - RNA, 19 nt, Homo sapiens
  misc_RNA (1)...(19): siRNA sense strand
ggaucaaccucaaauucau

SEQ ID NO: 450004 - RNA, 19 nt, Homo sapiens
  misc_RNA (1)...(19): siRNA sense strand
gaaaugaugaaaugugaca

SEQ ID NO: 450005 - RNA, 19 nt, Homo sapiens
  misc_RNA (1)...(19): siRNA sense strand
cagaaucacuagagcugaa

SEQ ID NO: 450006 - RNA, 19 nt, Homo sapiens
  misc_RNA (1)...(19): siRNA sense strand
gcaucuguguuaacuucua

SEQ ID NO: 450007 - RNA, 19 nt, Homo sapiens
  misc_RNA (1)...(19): siRNA sense strand
acacuggagucacgcgaua

SEQ ID NO: 450008 - RNA, 19 nt, Homo sapiens
  misc_RNA (1)...(19): siRNA sense strand
ggacugaucaagacucugu

SEQ ID NO: 450009 - RNA, 19 nt, Homo sapiens
  misc_RNA (1)...(19): siRNA sense strand
aguaccagcuucagucuuu

SEQ ID NO: 450010 - RNA, 19 nt, Homo sapiens
  misc_RNA (1)...(19): siRNA sense strand
ggcccagacuccugaauug

SEQ ID NO: 450011 - RNA, 19 nt, Homo sapiens
  misc_RNA (1)...(19): siRNA sense strand
gcaugaccuucgagagauu

SEQ ID NO: 450012 - RNA, 19 nt, Homo sapiens
  misc_RNA (1)...(19): siRNA sense strand
gcccagacccacuacuaua

SEQ ID NO: 450013 - RNA, 19 nt, Homo sapiens
  misc_RNA (1)...(19): siRNA sense strand
cagggucgauccagcaauu

SEQ ID NO: 450014 - RNA, 19 nt, Homo sapiens
  misc_RNA (1)...(19): siRNA sense strand
gaaaagagaaccuccauca

SEQ ID NO: 450015 - RNA, 19 nt, Homo sapiens
  misc_RNA (1)...(19): siRNA sense strand
gauucacccuaguggauuu

SEQ ID NO: 450016 - RNA, 19 nt, Homo sapiens
  misc_RNA (1)...(19): siRNA sense strand
gauucaagcucuucuuacu

SEQ ID NO: 450017 - RNA, 19 nt, Homo sapiens
  misc_RNA (1)...(19): siRNA sense strand
ccagacuccugaauugcua

SEQ ID NO: 450018 - RNA, 19 nt, Homo sapiens
  misc_RNA (1)...(19): siRNA sense strand
agaaugacauccgcaagaa

SEQ ID NO: 450019 - RNA, 19 nt, Homo sapiens
  misc_RNA (1)...(19): siRNA sense strand
cuucuuagaugcugugaug

SEQ ID NO: 450020 - RNA, 19 nt, Homo sapiens
  misc_RNA (1)...(19): siRNA sense strand
gagcagcaaugcaggugau

SEQ ID NO: 450021 - RNA, 19 nt, Homo sapiens
  misc_RNA (1)...(19): siRNA sense strand
ccaacgugcugcagggauu

SEQ ID NO: 450022 - RNA, 19 nt, Homo sapiens
  misc_RNA (1)...(19): siRNA sense strand
ccuggaagaugaugaagau

SEQ ID NO: 450023 - RNA, 19 nt, Homo sapiens
  misc_RNA (1)...(19): siRNA sense strand
gaaguaaucaaaccugucu

SEQ ID NO: 450024 - RNA, 19 nt, Homo sapiens
  misc_RNA (1)...(19): siRNA sense strand
gaagaggguggcacugaga

SEQ ID NO: 450025 - RNA, 19 nt, Homo sapiens
  misc_RNA (1)...(19): siRNA sense strand
caucaaacccggaccugaa

SEQ ID NO: 450026 - RNA, 19 nt, Homo sapiens
  misc_RNA (1)...(19): siRNA sense strand
acgagaagcucaucaacau

SEQ ID NO: 450027 - RNA, 19 nt, Homo sapiens
  misc_RNA (1)...(19): siRNA sense strand
ccagaggacugaucaagac

SEQ ID NO: 450028 - RNA, 19 nt, Homo sapiens
  misc_RNA (1)...(19): siRNA sense strand
ggugugagccugacgucua

SEQ ID NO: 450029 - RNA, 19 nt, Homo sapiens
  misc_RNA (1)...(19): siRNA sense strand
guacaaagggacaccaugu

SEQ ID NO: 450030 - RNA, 19 nt, Homo sapiens
  misc_RNA (1)...(19): siRNA sense strand
gaugauaccucuuuugucu

SEQ ID NO: 450031 - RNA, 19 nt, Homo sapiens
  misc_RNA (1)...(19): siRNA sense strand
gggaucaaccucaaauuca

SEQ ID NO: 450032 - RNA, 19 nt, Homo sapiens
  misc_RNA (1)...(19): siRNA sense strand
gaguccagcuguuaugauc

SEQ ID NO: 450033 - RNA, 19 nt, Homo sapiens
  misc_RNA (1)...(19): siRNA sense strand
ggagggcguuaguggauca

SEQ ID NO: 450034 - RNA, 19 nt, Homo sapiens
  misc_RNA (1)...(19): siRNA sense strand
ccagccagcucugaccuuu

SEQ ID NO: 450035 - RNA, 19 nt, Homo sapiens
  misc_RNA (1)...(19): siRNA sense strand
uaacaucggaacaguguau

SEQ ID NO: 450036 - RNA, 19 nt, Homo sapiens
  misc_RNA (1)...(19): siRNA sense strand
caaaggcuauggcacaacu

SEQ ID NO: 450037 - RNA, 19 nt, Homo sapiens
  misc_RNA (1)...(19): siRNA sense strand
ggaagagaaguccaacaga

SEQ ID NO: 450038 - RNA, 19 nt, Homo sapiens
  misc_RNA (1)...(19): siRNA sense strand
gguguacaagggaauguua

SEQ ID NO: 450039 - RNA, 19 nt, Homo sapiens
  misc_RNA (1)...(19): siRNA sense strand
ccacggagccaacucugaa

SEQ ID NO: 450040 - RNA, 19 nt, Homo sapiens
  misc_RNA (1)...(19): siRNA sense strand
uugacgagcugcagaauca

SEQ ID NO: 450041 - RNA, 19 nt, Homo sapiens
  misc_RNA (1)...(19): siRNA sense strand
gaauucaacccacucaucu

SEQ ID NO: 450042 - RNA, 19 nt, Homo sapiens
  misc_RNA (1)...(19): siRNA sense strand
cucaacaaguucuauacua

SEQ ID NO: 450043 - RNA, 19 nt, Homo sapiens
  misc_RNA (1)...(19): siRNA sense strand
gaaggugaggcgccuaaug

SEQ ID NO: 450044 - RNA, 19 nt, Homo sapiens
  misc_RNA (1)...(19): siRNA sense strand
aggaaaugaucgacaggua

SEQ ID NO: 450045 - RNA, 19 nt, Homo sapiens
  misc_RNA (1)...(19): siRNA sense strand
ccagaaguuuaaaggaaga

SEQ ID NO: 450046 - RNA, 19 nt, Homo sapiens
  misc_RNA (1)...(19): siRNA sense strand
gccagcaucuuugggcuuu

SEQ ID NO: 450047 - RNA, 19 nt, Homo sapiens
  misc_RNA (1)...(19): siRNA sense strand
guacaguccucagcuugga

SEQ ID NO: 450048 - RNA, 19 nt, Homo sapiens
  misc_RNA (1)...(19): siRNA sense strand
gugacaagccaaaguggua

SEQ ID NO: 450049 - RNA, 19 nt, Homo sapiens
  misc_RNA (1)...(19): siRNA sense strand
uggcggaucuuuacuggau

SEQ ID NO: 450050 - RNA, 19 nt, Homo sapiens
  misc_RNA (1)...(19): siRNA sense strand
gaagguaaauaagaaugac

SEQ ID NO: 450051 - RNA, 19 nt, Homo sapiens
  misc_RNA (1)...(19): siRNA sense strand
uguuagaccuccucaagug

SEQ ID NO: 450052 - RNA, 19 nt, Homo sapiens
  misc_RNA (1)...(19): siRNA sense strand
uggcaucuguguuaacuuc

SEQ ID NO: 450053 - RNA, 19 nt, Homo sapiens
  misc_RNA (1)...(19): siRNA sense strand
ccagacccaucucgauuca

SEQ ID NO: 450054 - RNA, 19 nt, Homo sapiens
  misc_RNA (1)...(19): siRNA sense strand
gucgggagcuguacuacug

SEQ ID NO: 450055 - RNA, 19 nt, Homo sapiens
  misc_RNA (1)...(19): siRNA sense strand
guaguaacaucggaacagu

SEQ ID NO: 450056 - RNA, 19 nt, Homo sapiens
  misc_RNA (1)...(19): siRNA sense strand
cgaauucacaacaauaugu

SEQ ID NO: 450057 - RNA, 19 nt, Homo sapiens
  misc_RNA (1)...(19): siRNA sense strand
cagcgaauucacaacaaua

SEQ ID NO: 450058 - RNA, 19 nt, Homo sapiens
  misc_RNA (1)...(19): siRNA sense strand
ucuacaaacuggacuucaa

SEQ ID NO: 450059 - RNA, 19 nt, Homo sapiens
  misc_RNA (1)...(19): siRNA sense strand
cagcgagucuaucucuaug

SEQ ID NO: 450060 - RNA, 19 nt, Homo sapiens
  misc_RNA (1)...(19): siRNA sense strand
ggaagggaucaaccucaaa

SEQ ID NO: 450061 - RNA, 19 nt, Homo sapiens
  misc_RNA (1)...(19): siRNA sense strand
ugugugguguugcguagua

SEQ ID NO: 450062 - RNA, 19 nt, Homo sapiens
  misc_RNA (1)...(19): siRNA sense strand
uacaaacggagauaucuuu

SEQ ID NO: 450063 - RNA, 19 nt, Homo sapiens
  misc_RNA (1)...(19): siRNA sense strand
gcagacauuugugguacau

SEQ ID NO: 450064 - RNA, 19 nt, Homo sapiens
  misc_RNA (1)...(19): siRNA sense strand
guacagccagcaaaucaau

SEQ ID NO: 450065 - RNA, 19 nt, Homo sapiens
  misc_RNA (1)...(19): siRNA sense strand
guaccugucccuuggagaa

SEQ ID NO: 450066 - RNA, 19 nt, Homo sapiens
  misc_RNA (1)...(19): siRNA sense strand
gaagucaucugucauuaaa

SEQ ID NO: 450067 - RNA, 19 nt, Homo sapiens
  misc_RNA (1)...(19): siRNA sense strand
gaagagaaguccaacagaa

SEQ ID NO: 450068 - RNA, 19 nt, Homo sapiens
  misc_RNA (1)...(19): siRNA sense strand
gaaguucuguccucgguua

SEQ ID NO: 450069 - RNA, 19 nt, Homo sapiens
  misc_RNA (1)...(19): siRNA sense strand
cuacggagauggaugauaa

SEQ ID NO: 450070 - RNA, 19 nt, Homo sapiens
  misc_RNA (1)...(19): siRNA sense strand
gcagugauaguauggauua

SEQ ID NO: 450071 - RNA, 19 nt, Homo sapiens
  misc_RNA (1)...(19): siRNA sense strand
ggaagcgccuggaagauga

SEQ ID NO: 450072 - RNA, 19 nt, Homo sapiens
  misc_RNA (1)...(19): siRNA sense strand
caagugcccuucugcauga

SEQ ID NO: 450073 - RNA, 19 nt, Homo sapiens
  misc_RNA (1)...(19): siRNA sense strand
ggacagacgucaggcagaa

SEQ ID NO: 450074 - RNA, 19 nt, Homo sapiens
  misc_RNA (1)...(19): siRNA sense strand
caaaaugccugaugaugua

SEQ ID NO: 450075 - RNA, 19 nt, Homo sapiens
  misc_RNA (1)...(19): siRNA sense strand
aaacacagcccaacaguga

SEQ ID NO: 450076 - RNA, 19 nt, Homo sapiens
  misc_RNA (1)...(19): siRNA sense strand
gaaaucugcuacuccguau

SEQ ID NO: 450077 - RNA, 19 nt, Homo sapiens
  misc_RNA (1)...(19): siRNA sense strand
ucagugaaaugaugaaaug

SEQ ID NO: 450078 - RNA, 19 nt, Homo sapiens
  misc_RNA (1)...(19): siRNA sense strand
cgauauggcaucuguguua

SEQ ID NO: 450079 - RNA, 19 nt, Homo sapiens
  misc_RNA (1)...(19): siRNA sense strand
gugauaguauggauuauga

SEQ ID NO: 450080 - RNA, 19 nt, Homo sapiens
  misc_RNA (1)...(19): siRNA sense strand
gaugauaguggcagugaua

SEQ ID NO: 450081 - RNA, 19 nt, Homo sapiens
  misc_RNA (1)...(19): siRNA sense strand
ccacugcgcuccagcucua

SEQ ID NO: 450082 - RNA, 19 nt, Homo sapiens
  misc_RNA (1)...(19): siRNA sense strand
gugaaaugaugaaauguga

SEQ ID NO: 450083 - RNA, 19 nt, Homo sapiens
  misc_RNA (1)...(19): siRNA sense strand
ggacagcaauagggugauu

SEQ ID NO: 450084 - RNA, 19 nt, Homo sapiens
  misc_RNA (1)...(19): siRNA sense strand
gcaaaucaaugaggugcuu

SEQ ID NO: 450085 - RNA, 19 nt, Homo sapiens
  misc_RNA (1)...(19): siRNA sense strand
caccagaaguuuaaaggaa

SEQ ID NO: 450086 - RNA, 19 nt, Homo sapiens
  misc_RNA (1)...(19): siRNA sense strand
gauauggcaucuguguuaa

SEQ ID NO: 450087 - RNA, 19 nt, Homo sapiens
  misc_RNA (1)...(19): siRNA sense strand
uauuaugucucuucucgua

SEQ ID NO: 450088 - RNA, 19 nt, Homo sapiens
  misc_RNA (1)...(19): siRNA sense strand
caacagaaaguguaaauac

SEQ ID NO: 450089 - RNA, 19 nt, Homo sapiens
  misc_RNA (1)...(19): siRNA sense strand
caagcuggcuccuuucuag

SEQ ID NO: 450090 - RNA, 19 nt, Homo sapiens
  misc_RNA (1)...(19): siRNA sense strand
gugcuaaccugcauucugu

SEQ ID NO: 450091 - RNA, 19 nt, Homo sapiens
  misc_RNA (1)...(19): siRNA sense strand
gauaguggcagugauagua

SEQ ID NO: 450092 - RNA, 19 nt, Homo sapiens
  misc_RNA (1)...(19): siRNA sense strand
guacguggcugcaguucau

SEQ ID NO: 450093 - RNA, 19 nt, Homo sapiens
  misc_RNA (1)...(19): siRNA sense strand
ucaaauucaugcacaauca

SEQ ID NO: 450094 - RNA, 19 nt, Homo sapiens
  misc_RNA (1)...(19): siRNA sense strand
agacccagcucaacaaguu

SEQ ID NO: 450095 - RNA, 19 nt, Homo sapiens
  misc_RNA (1)...(19): siRNA sense strand
ccagcgagguggagauuga

SEQ ID NO: 450096 - RNA, 19 nt, Homo sapiens
  misc_RNA (1)...(19): siRNA sense strand
gagcuguacuacuguguga

SEQ ID NO: 450097 - RNA, 19 nt, Homo sapiens
  misc_RNA (1)...(19): siRNA sense strand
guacaugcagggacagaua

SEQ ID NO: 450098 - RNA, 19 nt, Homo sapiens
  misc_RNA (1)...(19): siRNA sense strand
gaagcagacauuuguggua

SEQ ID NO: 450099 - RNA, 19 nt, Homo sapiens
  misc_RNA (1)...(19): siRNA sense strand
gcucugaccuuugcucuuc

SEQ ID NO: 450100 - RNA, 19 nt, Homo sapiens
  misc_RNA (1)...(19): siRNA sense strand
gagaagggauggguaugga

SEQ ID NO: 450101 - RNA, 19 nt, Homo sapiens
  misc_RNA (1)...(19): siRNA sense strand
ugaauuggguggcgaguuc

SEQ ID NO: 450102 - RNA, 19 nt, Homo sapiens
  misc_RNA (1)...(19): siRNA sense strand
agacgaagguguugugcuu

SEQ ID NO: 450103 - RNA, 19 nt, Homo sapiens
  misc_RNA (1)...(19): siRNA sense strand
ugaagaagcagacauuugu

SEQ ID NO: 450104 - RNA, 19 nt, Homo sapiens
  misc_RNA (1)...(19): siRNA sense strand
gaagggaucaaccucaaau

SEQ ID NO: 450105 - RNA, 19 nt, Homo sapiens
  misc_RNA (1)...(19): siRNA sense strand
gcaugagccuucgggauga

SEQ ID NO: 450106 - RNA, 19 nt, Homo sapiens
  misc_RNA (1)...(19): siRNA sense strand
ggaucaaccucaaauucau

SEQ ID NO: 450107 - RNA, 19 nt, Homo sapiens
  misc_RNA (1)...(19): siRNA sense strand
gaaaugaugaaaugugaca

SEQ ID NO: 450108 - RNA, 19 nt, Homo sapiens
  misc_RNA (1)...(19): siRNA sense strand
cagaaucacuagagcugaa

SEQ ID NO: 450109 - RNA, 19 nt, Homo sapiens
  misc_RNA (1)...(19): siRNA sense strand
gcaucuguguuaacuucua

SEQ ID NO: 450110 - RNA, 19 nt, Homo sapiens
  misc_RNA (1)...(19): siRNA sense strand
acacuggagucacgcgaua

SEQ ID NO: 450111 - RNA, 19 nt, Homo sapiens
  misc_RNA (1)...(19): siRNA sense strand
ggcccagacuccugaauug

SEQ ID NO: 450112 - RNA, 19 nt, Homo sapiens
  misc_RNA (1)...(19): siRNA sense strand
ggacugaucaagacucugu

SEQ ID NO: 450113 - RNA, 19 nt, Homo sapiens
  misc_RNA (1)...(19): siRNA sense strand
aguaccagcuucagucuuu

SEQ ID NO: 450114 - RNA, 19 nt, Homo sapiens
  misc_RNA (1)...(19): siRNA sense strand
gcaugaccuucgagagauu

SEQ ID NO: 450115 - RNA, 19 nt, Homo sapiens
  misc_RNA (1)...(19): siRNA sense strand
aaucugcuacuccguauua

SEQ ID NO: 450116 - RNA, 19 nt, Homo sapiens
  misc_RNA (1)...(19): siRNA sense strand
gcccagacccacuacuaua

SEQ ID NO: 450117 - RNA, 19 nt, Homo sapiens
  misc_RNA (1)...(19): siRNA sense strand
cagggucgauccagcaauu

SEQ ID NO: 450118 - RNA, 19 nt, Homo sapiens
  misc_RNA (1)...(19): siRNA sense strand
gaaaagagaaccuccauca

SEQ ID NO: 450119 - RNA, 19 nt, Homo sapiens
  misc_RNA (1)...(19): siRNA sense strand
gauucacccuaguggauuu

SEQ ID NO: 450120 - RNA, 19 nt, Homo sapiens
  misc_RNA (1)...(19): siRNA sense strand
ccagacuccugaauugcua

SEQ ID NO: 450121 - RNA, 19 nt, Homo sapiens
  misc_RNA (1)...(19): siRNA sense strand
agaaugacauccgcaagaa

SEQ ID NO: 450122 - RNA, 19 nt, Homo sapiens
  misc_RNA (1)...(19): siRNA sense strand
cuucuuagaugcugugaug

SEQ ID NO: 450123 - RNA, 19 nt, Homo sapiens
  misc_RNA (1)...(19): siRNA sense strand
gagcagcaaugcaggugau

SEQ ID NO: 450124 - RNA, 19 nt, Homo sapiens
  misc_RNA (1)...(19): siRNA sense strand
gauucaagcucuucuuacu

SEQ ID NO: 450125 - RNA, 19 nt, Homo sapiens
  misc_RNA (1)...(19): siRNA sense strand
ccaacgugcugcagggauu

SEQ ID NO: 450126 - RNA, 19 nt, Homo sapiens
  misc_RNA (1)...(19): siRNA sense strand
ccuggaagaugaugaagau

SEQ ID NO: 450127 - RNA, 19 nt, Homo sapiens
  misc_RNA (1)...(19): siRNA sense strand
gaaguaaucaaaccugucu

SEQ ID NO: 450128 - RNA, 19 nt, Homo sapiens
  misc_RNA (1)...(19): siRNA sense strand
gaagaggguggcacugaga

SEQ ID NO: 450129 - RNA, 19 nt, Homo sapiens
  misc_RNA (1)...(19): siRNA sense strand
caucaaacccggaccugaa

SEQ ID NO: 450130 - RNA, 19 nt, Homo sapiens
  misc_RNA (1)...(19): siRNA sense strand
acgagaagcucaucaacau

SEQ ID NO: 450131 - RNA, 19 nt, Homo sapiens
  misc_RNA (1)...(19): siRNA sense strand
ccagaggacugaucaagac

SEQ ID NO: 450132 - RNA, 19 nt, Homo sapiens
  misc_RNA (1)...(19): siRNA sense strand
ggugugagccugacgucua

SEQ ID NO: 450133 - RNA, 19 nt, Homo sapiens
  misc_RNA (1)...(19): siRNA sense strand
guacaaagggacaccaugu

SEQ ID NO: 450134 - RNA, 19 nt, Homo sapiens
  misc_RNA (1)...(19): siRNA sense strand
ggagggcguuaguggauca

SEQ ID NO: 450135 - RNA, 19 nt, Homo sapiens
  misc_RNA (1)...(19): siRNA sense strand
gggaucaaccucaaauuca

SEQ ID NO: 450136 - RNA, 19 nt, Homo sapiens
  misc_RNA (1)...(19): siRNA sense strand
gaugauaccucuuuugucu

SEQ ID NO: 450137 - RNA, 19 nt, Homo sapiens
  misc_RNA (1)...(19): siRNA sense strand
gaguccagcuguuaugauc

SEQ ID NO: 450138 - RNA, 19 nt, Homo sapiens
  misc_RNA (1)...(19): siRNA sense strand
ccagccagcucugaccuuu

SEQ ID NO: 450139 - RNA, 19 nt, Homo sapiens
  misc_RNA (1)...(19): siRNA sense strand
uaacaucggaacaguguau

SEQ ID NO: 450140 - RNA, 19 nt, Homo sapiens
  misc_RNA (1)...(19): siRNA sense strand
caaaggcuauggcacaacu

SEQ ID NO: 450141 - RNA, 19 nt, Homo sapiens
  misc_RNA (1)...(19): siRNA sense strand
ggaagagaaguccaacaga

SEQ ID NO: 450142 - RNA, 19 nt, Homo sapiens
  misc_RNA (1)...(19): siRNA sense strand
gguguacaagggaauguua

SEQ ID NO: 450143 - RNA, 19 nt, Homo sapiens
  misc_RNA (1)...(19): siRNA sense strand
ccacggagccaacucugaa

SEQ ID NO: 450144 - RNA, 19 nt, Homo sapiens
  misc_RNA (1)...(19): siRNA sense strand
uugacgagcugcagaauca

SEQ ID NO: 450145 - RNA, 19 nt, Homo sapiens
  misc_RNA (1)...(19): siRNA sense strand
gaauucaacccacucaucu

SEQ ID NO: 450146 - RNA, 19 nt, Homo sapiens
  misc_RNA (1)...(19): siRNA sense strand
cucaacaaguucuauacua

SEQ ID NO: 450147 - RNA, 19 nt, Homo sapiens
  misc_RNA (1)...(19): siRNA sense strand
gaaggugaggcgccuaaug

SEQ ID NO: 450148 - RNA, 19 nt, Homo sapiens
  misc_RNA (1)...(19): siRNA sense strand
aggaaaugaucgacaggua

SEQ ID NO: 450149 - RNA, 19 nt, Homo sapiens
  misc_RNA (1)...(19): siRNA sense strand
ccagaaguuuaaaggaaga

SEQ ID NO: 450150 - RNA, 19 nt, Homo sapiens
  misc_RNA (1)...(19): siRNA sense strand
gccagcaucuuugggcuuu

SEQ ID NO: 450151 - RNA, 19 nt, Homo sapiens
  misc_RNA (1)...(19): siRNA sense strand
guacaguccucagcuugga

SEQ ID NO: 450152 - RNA, 19 nt, Homo sapiens
  misc_RNA (1)...(19): siRNA sense strand
gugacaagccaaaguggua

SEQ ID NO: 450153 - RNA, 19 nt, Homo sapiens
  misc_RNA (1)...(19): siRNA sense strand
uggcggaucuuuacuggau

SEQ ID NO: 450154 - RNA, 19 nt, Homo sapiens
  misc_RNA (1)...(19): siRNA sense strand
gaagguaaauaagaaugac

SEQ ID NO: 450155 - RNA, 19 nt, Homo sapiens
  misc_RNA (1)...(19): siRNA sense strand
uggcaucuguguuaacuuc

SEQ ID NO: 450156 - RNA, 19 nt, Homo sapiens
  misc_RNA (1)...(19): siRNA sense strand
uguuagaccuccucaagug

SEQ ID NO: 450157 - RNA, 19 nt, Homo sapiens
  misc_RNA (1)...(19): siRNA sense strand
ccagacccaucucgauuca

SEQ ID NO: 450158 - RNA, 19 nt, Homo sapiens
  misc_RNA (1)...(19): siRNA sense strand
gucgggagcuguacuacug

SEQ ID NO: 450159 - RNA, 19 nt, Homo sapiens
  misc_RNA (1)...(19): siRNA sense strand
guaguaacaucggaacagu

SEQ ID NO: 450160 - RNA, 19 nt, Homo sapiens
  misc_RNA (1)...(19): siRNA sense strand
cgaauucacaacaauaugu

SEQ ID NO: 450161 - RNA, 19 nt, Homo sapiens
  misc_RNA (1)...(19): siRNA sense strand
cagcgaauucacaacaaua

SEQ ID NO: 450162 - RNA, 19 nt, Homo sapiens
  misc_RNA (1)...(19): siRNA sense strand
ucuacaaacuggacuucaa

SEQ ID NO: 450163 - RNA, 19 nt, Homo sapiens
  misc_RNA (1)...(19): siRNA sense strand
uacaaacggagauaucuuu

SEQ ID NO: 450164 - RNA, 19 nt, Homo sapiens
  misc_RNA (1)...(19): siRNA sense strand
ggaagggaucaaccucaaa

SEQ ID NO: 450165 - RNA, 19 nt, Homo sapiens
  misc_RNA (1)...(19): siRNA sense strand
ugugugguguugcguagua

SEQ ID NO: 450166 - RNA, 19 nt, Homo sapiens
  misc_RNA (1)...(19): siRNA sense strand
gaagucaucugucauuaaa

SEQ ID NO: 450167 - RNA, 19 nt, Homo sapiens
  misc_RNA (1)...(19): siRNA sense strand
gaagagaaguccaacagaa

SEQ ID NO: 450168 - RNA, 19 nt, Homo sapiens
  misc_RNA (1)...(19): siRNA sense strand
gaaguucuguccucgguua

SEQ ID NO: 450169 - RNA, 19 nt, Homo sapiens
  misc_RNA (1)...(19): siRNA sense strand
cuacggagauggaugauaa

SEQ ID NO: 450170 - RNA, 19 nt, Homo sapiens
  misc_RNA (1)...(19): siRNA sense strand
gcagugauaguauggauua

SEQ ID NO: 450171 - RNA, 19 nt, Homo sapiens
  misc_RNA (1)...(19): siRNA sense strand
ggaagcgccuggaagauga

SEQ ID NO: 450172 - RNA, 19 nt, Homo sapiens
  misc_RNA (1)...(19): siRNA sense strand
caagugcccuucugcauga

SEQ ID NO: 450173 - RNA, 19 nt, Homo sapiens
  misc_RNA (1)...(19): siRNA sense strand
ggacagacgucaggcagaa

SEQ ID NO: 450174 - RNA, 19 nt, Homo sapiens
  misc_RNA (1)...(19): siRNA sense strand
caaaaugccugaugaugua

SEQ ID NO: 450175 - RNA, 19 nt, Homo sapiens
  misc_RNA (1)...(19): siRNA sense strand
aaacacagcccaacaguga

SEQ ID NO: 450176 - RNA, 19 nt, Homo sapiens
  misc_RNA (1)...(19): siRNA sense strand
gaaaucugcuacuccguau

SEQ ID NO: 450177 - RNA, 19 nt, Homo sapiens
  misc_RNA (1)...(19): siRNA sense strand
ucagugaaaugaugaaaug

SEQ ID NO: 450178 - RNA, 19 nt, Homo sapiens
  misc_RNA (1)...(19): siRNA sense strand
cgauauggcaucuguguua

SEQ ID NO: 450179 - RNA, 19 nt, Homo sapiens
  misc_RNA (1)...(19): siRNA sense strand
gugauaguauggauuauga

SEQ ID NO: 450180 - RNA, 19 nt, Homo sapiens
  misc_RNA (1)...(19): siRNA sense strand
gaugauaguggcagugaua

SEQ ID NO: 450181 - RNA, 19 nt, Homo sapiens
  misc_RNA (1)...(19): siRNA sense strand
ccacugcgcuccagcucua

SEQ ID NO: 450182 - RNA, 19 nt, Homo sapiens
  misc_RNA (1)...(19): siRNA sense strand
gugaaaugaugaaauguga

SEQ ID NO: 450183 - RNA, 19 nt, Homo sapiens
  misc_RNA (1)...(19): siRNA sense strand
ggacagcaauagggugauu

SEQ ID NO: 450184 - RNA, 19 nt, Homo sapiens
  misc_RNA (1)...(19): siRNA sense strand
gcaaaucaaugaggugcuu

SEQ ID NO: 450185 - RNA, 19 nt, Homo sapiens
  misc_RNA (1)...(19): siRNA sense strand
caccagaaguuuaaaggaa

SEQ ID NO: 450186 - RNA, 19 nt, Homo sapiens
  misc_RNA (1)...(19): siRNA sense strand
gauauggcaucuguguuaa

SEQ ID NO: 450187 - RNA, 19 nt, Homo sapiens
  misc_RNA (1)...(19): siRNA sense strand
uauuaugucucuucucgua

SEQ ID NO: 450188 - RNA, 19 nt, Homo sapiens
  misc_RNA (1)...(19): siRNA sense strand
caacagaaaguguaaauac

SEQ ID NO: 450189 - RNA, 19 nt, Homo sapiens
  misc_RNA (1)...(19): siRNA sense strand
caagcuggcuccuuucuag

SEQ ID NO: 450190 - RNA, 19 nt, Homo sapiens
  misc_RNA (1)...(19): siRNA sense strand
gugcuaaccugcauucugu

SEQ ID NO: 450191 - RNA, 19 nt, Homo sapiens
  misc_RNA (1)...(19): siRNA sense strand
gauaguggcagugauagua

SEQ ID NO: 450192 - RNA, 19 nt, Homo sapiens
  misc_RNA (1)...(19): siRNA sense strand
guacguggcugcaguucau

SEQ ID NO: 450193 - RNA, 19 nt, Homo sapiens
  misc_RNA (1)...(19): siRNA sense strand
ucaaauucaugcacaauca

SEQ ID NO: 450194 - RNA, 19 nt, Homo sapiens
  misc_RNA (1)...(19): siRNA sense strand
agacccagcucaacaaguu

SEQ ID NO: 450195 - RNA, 19 nt, Homo sapiens
  misc_RNA (1)...(19): siRNA sense strand
ccagcgagguggagauuga

SEQ ID NO: 450196 - RNA, 19 nt, Homo sapiens
  misc_RNA (1)...(19): siRNA sense strand
gagcuguacuacuguguga

SEQ ID NO: 450197 - RNA, 19 nt, Homo sapiens
  misc_RNA (1)...(19): siRNA sense strand
guacaugcagggacagaua

SEQ ID NO: 450198 - RNA, 19 nt, Homo sapiens
  misc_RNA (1)...(19): siRNA sense strand
gaagcagacauuuguggua

SEQ ID NO: 450199 - RNA, 19 nt, Homo sapiens
  misc_RNA (1)...(19): siRNA sense strand
gcucugaccuuugcucuuc

SEQ ID NO: 450200 - RNA, 19 nt, Homo sapiens
  misc_RNA (1)...(19): siRNA sense strand
gagaagggauggguaugga

SEQ ID NO: 450201 - RNA, 19 nt, Homo sapiens
  misc_RNA (1)...(19): siRNA sense strand
ugaauuggguggcgaguuc

SEQ ID NO: 450202 - RNA, 19 nt, Homo sapiens
  misc_RNA (1)...(19): siRNA sense strand
agacgaagguguugugcuu

SEQ ID NO: 450203 - RNA, 19 nt, Homo sapiens
  misc_RNA (1)...(19): siRNA sense strand
ugaagaagcagacauuugu

SEQ ID NO: 450204 - RNA, 19 nt, Homo sapiens
  misc_RNA (1)...(19): siRNA sense strand
gaagggaucaaccucaaau

SEQ ID NO: 450205 - RNA, 19 nt, Homo sapiens
  misc_RNA (1)...(19): siRNA sense strand
gcaugagccuucgggauga

SEQ ID NO: 450206 - RNA, 19 nt, Homo sapiens
  misc_RNA (1)...(19): siRNA sense strand
ggaucaaccucaaauucau

SEQ ID NO: 450207 - RNA, 19 nt, Homo sapiens
  misc_RNA (1)...(19): siRNA sense strand
gaaaugaugaaaugugaca

SEQ ID NO: 450208 - RNA, 19 nt, Homo sapiens
  misc_RNA (1)...(19): siRNA sense strand
cagaaucacuagagcugaa

SEQ ID NO: 450209 - RNA, 19 nt, Homo sapiens
  misc_RNA (1)...(19): siRNA sense strand
gcaucuguguuaacuucua

SEQ ID NO: 450210 - RNA, 19 nt, Homo sapiens
  misc_RNA (1)...(19): siRNA sense strand
acacuggagucacgcgaua

SEQ ID NO: 450211 - RNA, 19 nt, Homo sapiens
  misc_RNA (1)...(19): siRNA sense strand
ggcccagacuccugaauug

SEQ ID NO: 450212 - RNA, 19 nt, Homo sapiens
  misc_RNA (1)...(19): siRNA sense strand
ggacugaucaagacucugu

SEQ ID NO: 450213 - RNA, 19 nt, Homo sapiens
  misc_RNA (1)...(19): siRNA sense strand
aguaccagcuucagucuuu

SEQ ID NO: 450214 - RNA, 19 nt, Homo sapiens
  misc_RNA (1)...(19): siRNA sense strand
gcaugaccuucgagagauu

SEQ ID NO: 450215 - RNA, 19 nt, Homo sapiens
  misc_RNA (1)...(19): siRNA sense strand
aaucugcuacuccguauua

SEQ ID NO: 450216 - RNA, 19 nt, Homo sapiens
  misc_RNA (1)...(19): siRNA sense strand
gcccagacccacuacuaua

SEQ ID NO: 450217 - RNA, 19 nt, Homo sapiens
  misc_RNA (1)...(19): siRNA sense strand
cagggucgauccagcaauu

SEQ ID NO: 450218 - RNA, 19 nt, Homo sapiens
  misc_RNA (1)...(19): siRNA sense strand
gaaaagagaaccuccauca

SEQ ID NO: 450219 - RNA, 19 nt, Homo sapiens
  misc_RNA (1)...(19): siRNA sense strand
gauucacccuaguggauuu

SEQ ID NO: 450220 - RNA, 19 nt, Homo sapiens
  misc_RNA (1)...(19): siRNA sense strand
ccagacuccugaauugcua

SEQ ID NO: 450221 - RNA, 19 nt, Homo sapiens
  misc_RNA (1)...(19): siRNA sense strand
agaaugacauccgcaagaa

SEQ ID NO: 450222 - RNA, 19 nt, Homo sapiens
  misc_RNA (1)...(19): siRNA sense strand
cuucuuagaugcugugaug

SEQ ID NO: 450223 - RNA, 19 nt, Homo sapiens
  misc_RNA (1)...(19): siRNA sense strand
gagcagcaaugcaggugau

SEQ ID NO: 450224 - RNA, 19 nt, Homo sapiens
  misc_RNA (1)...(19): siRNA sense strand
gauucaagcucuucuuacu

SEQ ID NO: 450225 - RNA, 19 nt, Homo sapiens
  misc_RNA (1)...(19): siRNA sense strand
ccaacgugcugcagggauu

SEQ ID NO: 450226 - RNA, 19 nt, Homo sapiens
  misc_RNA (1)...(19): siRNA sense strand
ccuggaagaugaugaagau

SEQ ID NO: 450227 - RNA, 19 nt, Homo sapiens
  misc_RNA (1)...(19): siRNA sense strand
gaaguaaucaaaccugucu

SEQ ID NO: 450228 - RNA, 19 nt, Homo sapiens
  misc_RNA (1)...(19): siRNA sense strand
gaagaggguggcacugaga

SEQ ID NO: 450229 - RNA, 19 nt, Homo sapiens
  misc_RNA (1)...(19): siRNA sense strand
caucaaacccggaccugaa

SEQ ID NO: 450230 - RNA, 19 nt, Homo sapiens
  misc_RNA (1)...(19): siRNA sense strand
acgagaagcucaucaacau

SEQ ID NO: 450231 - RNA, 19 nt, Homo sapiens
  misc_RNA (1)...(19): siRNA sense strand
ccagaggacugaucaagac

SEQ ID NO: 450232 - RNA, 19 nt, Homo sapiens
  misc_RNA (1)...(19): siRNA sense strand
ggugugagccugacgucua

SEQ ID NO: 450233 - RNA, 19 nt, Homo sapiens
  misc_RNA (1)...(19): siRNA sense strand
guacaaagggacaccaugu

SEQ ID NO: 450234 - RNA, 19 nt, Homo sapiens
  misc_RNA (1)...(19): siRNA sense strand
ggagggcguuaguggauca

SEQ ID NO: 450235 - RNA, 19 nt, Homo sapiens
  misc_RNA (1)...(19): siRNA sense strand
gggaucaaccucaaauuca

SEQ ID NO: 450236 - RNA, 19 nt, Homo sapiens
  misc_RNA (1)...(19): siRNA sense strand
gaugauaccucuuuugucu

SEQ ID NO: 450237 - RNA, 19 nt, Homo sapiens
  misc_RNA (1)...(19): siRNA sense strand
gaguccagcuguuaugauc

SEQ ID NO: 450238 - RNA, 19 nt, Homo sapiens
  misc_RNA (1)...(19): siRNA sense strand
ccagccagcucugaccuuu

SEQ ID NO: 450239 - RNA, 19 nt, Homo sapiens
  misc_RNA (1)...(19): siRNA sense strand
uaacaucggaacaguguau

SEQ ID NO: 450240 - RNA, 19 nt, Homo sapiens
  misc_RNA (1)...(19): siRNA sense strand
caaaggcuauggcacaacu

SEQ ID NO: 450241 - RNA, 19 nt, Homo sapiens
  misc_RNA (1)...(19): siRNA sense strand
ggaagagaaguccaacaga

SEQ ID NO: 450242 - RNA, 19 nt, Homo sapiens
  misc_RNA (1)...(19): siRNA sense strand
gguguacaagggaauguua

SEQ ID NO: 450243 - RNA, 19 nt, Homo sapiens
  misc_RNA (1)...(19): siRNA sense strand
ccacggagccaacucugaa

SEQ ID NO: 450244 - RNA, 19 nt, Homo sapiens
  misc_RNA (1)...(19): siRNA sense strand
uugacgagcugcagaauca

SEQ ID NO: 450245 - RNA, 19 nt, Homo sapiens
  misc_RNA (1)...(19): siRNA sense strand
gaauucaacccacucaucu

SEQ ID NO: 450246 - RNA, 19 nt, Homo sapiens
  misc_RNA (1)...(19): siRNA sense strand
cucaacaaguucuauacua

SEQ ID NO: 450247 - RNA, 19 nt, Homo sapiens
  misc_RNA (1)...(19): siRNA sense strand
gaaggugaggcgccuaaug

SEQ ID NO: 450248 - RNA, 19 nt, Homo sapiens
  misc_RNA (1)...(19): siRNA sense strand
aggaaaugaucgacaggua

SEQ ID NO: 450249 - RNA, 19 nt, Homo sapiens
  misc_RNA (1)...(19): siRNA sense strand
ccagaaguuuaaaggaaga

SEQ ID NO: 450250 - RNA, 19 nt, Homo sapiens
  misc_RNA (1)...(19): siRNA sense strand
gccagcaucuuugggcuuu

SEQ ID NO: 450251 - RNA, 19 nt, Homo sapiens
  misc_RNA (1)...(19): siRNA sense strand
guacaguccucagcuugga

SEQ ID NO: 450252 - RNA, 19 nt, Homo sapiens
  misc_RNA (1)...(19): siRNA sense strand
gugacaagccaaaguggua

SEQ ID NO: 450253 - RNA, 19 nt, Homo sapiens
  misc_RNA (1)...(19): siRNA sense strand
uggcggaucuuuacuggau

SEQ ID NO: 450254 - RNA, 19 nt, Homo sapiens
  misc_RNA (1)...(19): siRNA sense strand
gaagguaaauaagaaugac

SEQ ID NO: 450255 - RNA, 19 nt, Homo sapiens
  misc_RNA (1)...(19): siRNA sense strand
uggcaucuguguuaacuuc

SEQ ID NO: 450256 - RNA, 19 nt, Homo sapiens
  misc_RNA (1)...(19): siRNA sense strand
uguuagaccuccucaagug

SEQ ID NO: 450257 - RNA, 19 nt, Homo sapiens
  misc_RNA (1)...(19): siRNA sense strand
ccagacccaucucgauuca

SEQ ID NO: 450258 - RNA, 19 nt, Homo sapiens
  misc_RNA (1)...(19): siRNA sense strand
gucgggagcuguacuacug

SEQ ID NO: 450259 - RNA, 19 nt, Homo sapiens
  misc_RNA (1)...(19): siRNA sense strand
guaguaacaucggaacagu

SEQ ID NO: 450260 - RNA, 19 nt, Homo sapiens
  misc_RNA (1)...(19): siRNA sense strand
cgaauucacaacaauaugu

SEQ ID NO: 450261 - RNA, 19 nt, Homo sapiens
  misc_RNA (1)...(19): siRNA sense strand
cagcgaauucacaacaaua

SEQ ID NO: 450262 - RNA, 19 nt, Homo sapiens
  misc_RNA (1)...(19): siRNA sense strand
ucuacaaacuggacuucaa

SEQ ID NO: 450263 - RNA, 19 nt, Homo sapiens
  misc_RNA (1)...(19): siRNA sense strand
uacaaacggagauaucuuu

SEQ ID NO: 450264 - RNA, 19 nt, Homo sapiens
  misc_RNA (1)...(19): siRNA sense strand
ggaagggaucaaccucaaa

SEQ ID NO: 450265 - RNA, 19 nt, Homo sapiens
  misc_RNA (1)...(19): siRNA sense strand
ugugugguguugcguagua

SEQ ID NO: 450266 - RNA, 19 nt, Homo sapiens
  misc_RNA (1)...(19): siRNA sense strand
gaagucaucugucauuaaa

SEQ ID NO: 450267 - RNA, 19 nt, Homo sapiens
  misc_RNA (1)...(19): siRNA sense strand
gaagagaaguccaacagaa

SEQ ID NO: 450268 - RNA, 19 nt, Homo sapiens
  misc_RNA (1)...(19): siRNA sense strand
gaaguucuguccucgguua

SEQ ID NO: 450269 - RNA, 19 nt, Homo sapiens
  misc_RNA (1)...(19): siRNA sense strand
cuacggagauggaugauaa

SEQ ID NO: 450270 - RNA, 19 nt, Homo sapiens
  misc_RNA (1)...(19): siRNA sense strand
gcagugauaguauggauua

SEQ ID NO: 450271 - RNA, 19 nt, Homo sapiens
  misc_RNA (1)...(19): siRNA sense strand
ggaagcgccuggaagauga

SEQ ID NO: 450272 - RNA, 19 nt, Homo sapiens
  misc_RNA (1)...(19): siRNA sense strand
caagugcccuucugcauga

SEQ ID NO: 450273 - RNA, 19 nt, Homo sapiens
  misc_RNA (1)...(19): siRNA sense strand
ggacagacgucaggcagaa

SEQ ID NO: 450274 - RNA, 19 nt, Homo sapiens
  misc_RNA (1)...(19): siRNA sense strand
caaaaugccugaugaugua

SEQ ID NO: 450275 - RNA, 19 nt, Homo sapiens
  misc_RNA (1)...(19): siRNA sense strand
aaacacagcccaacaguga

SEQ ID NO: 450276 - RNA, 19 nt, Homo sapiens
  misc_RNA (1)...(19): siRNA sense strand
gaaaucugcuacuccguau

SEQ ID NO: 450277 - RNA, 19 nt, Homo sapiens
  misc_RNA (1)...(19): siRNA sense strand
ucagugaaaugaugaaaug

SEQ ID NO: 450278 - RNA, 19 nt, Homo sapiens
  misc_RNA (1)...(19): siRNA sense strand
cgauauggcaucuguguua

SEQ ID NO: 450279 - RNA, 19 nt, Homo sapiens
  misc_RNA (1)...(19): siRNA sense strand
gugauaguauggauuauga

SEQ ID NO: 450280 - RNA, 19 nt, Homo sapiens
  misc_RNA (1)...(19): siRNA sense strand
gaugauaguggcagugaua

SEQ ID NO: 450281 - RNA, 19 nt, Homo sapiens
  misc_RNA (1)...(19): siRNA sense strand
ccacugcgcuccagcucua

SEQ ID NO: 450282 - RNA, 19 nt, Homo sapiens
  misc_RNA (1)...(19): siRNA sense strand
gugaaaugaugaaauguga

SEQ ID NO: 450283 - RNA, 19 nt, Homo sapiens
  misc_RNA (1)...(19): siRNA sense strand
ggacagcaauagggugauu

SEQ ID NO: 450284 - RNA, 19 nt, Homo sapiens
  misc_RNA (1)...(19): siRNA sense strand
gcaaaucaaugaggugcuu

SEQ ID NO: 450285 - RNA, 19 nt, Homo sapiens
  misc_RNA (1)...(19): siRNA sense strand
caccagaaguuuaaaggaa

SEQ ID NO: 450286 - RNA, 19 nt, Homo sapiens
  misc_RNA (1)...(19): siRNA sense strand
gauauggcaucuguguuaa

SEQ ID NO: 450287 - RNA, 19 nt, Homo sapiens
  misc_RNA (1)...(19): siRNA sense strand
uauuaugucucuucucgua

SEQ ID NO: 450288 - RNA, 19 nt, Homo sapiens
  misc_RNA (1)...(19): siRNA sense strand
caacagaaaguguaaauac

SEQ ID NO: 450289 - RNA, 19 nt, Homo sapiens
  misc_RNA (1)...(19): siRNA sense strand
caagcuggcuccuuucuag

SEQ ID NO: 450290 - RNA, 19 nt, Homo sapiens
  misc_RNA (1)...(19): siRNA sense strand
gugcuaaccugcauucugu

SEQ ID NO: 450291 - RNA, 19 nt, Homo sapiens
  misc_RNA (1)...(19): siRNA sense strand
gauaguggcagugauagua

SEQ ID NO: 450292 - RNA, 19 nt, Homo sapiens
  misc_RNA (1)...(19): siRNA sense strand
guacguggcugcaguucau

SEQ ID NO: 450293 - RNA, 19 nt, Homo sapiens
  misc_RNA (1)...(19): siRNA sense strand
ucaaauucaugcacaauca

SEQ ID NO: 450294 - RNA, 19 nt, Homo sapiens
  misc_RNA (1)...(19): siRNA sense strand
agacccagcucaacaaguu

SEQ ID NO: 450295 - RNA, 19 nt, Homo sapiens
  misc_RNA (1)...(19): siRNA sense strand
ccagcgagguggagauuga

SEQ ID NO: 450296 - RNA, 19 nt, Homo sapiens
  misc_RNA (1)...(19): siRNA sense strand
gagcuguacuacuguguga

SEQ ID NO: 450297 - RNA, 19 nt, Homo sapiens
  misc_RNA (1)...(19): siRNA sense strand
guacaugcagggacagaua

SEQ ID NO: 450298 - RNA, 19 nt, Homo sapiens
  misc_RNA (1)...(19): siRNA sense strand
gaagcagacauuuguggua

SEQ ID NO: 450299 - RNA, 19 nt, Homo sapiens
  misc_RNA (1)...(19): siRNA sense strand
gcucugaccuuugcucuuc

SEQ ID NO: 450300 - RNA, 19 nt, Homo sapiens
  misc_RNA (1)...(19): siRNA sense strand
gagaagggauggguaugga

SEQ ID NO: 450301 - RNA, 19 nt, Homo sapiens
  misc_RNA (1)...(19): siRNA sense strand
ugaauuggguggcgaguuc

SEQ ID NO: 450302 - RNA, 19 nt, Homo sapiens
  misc_RNA (1)...(19): siRNA sense strand
agacgaagguguugugcuu

SEQ ID NO: 450303 - RNA, 19 nt, Homo sapiens
  misc_RNA (1)...(19): siRNA sense strand
ugaagaagcagacauuugu

SEQ ID NO: 450304 - RNA, 19 nt, Homo sapiens
  misc_RNA (1)...(19): siRNA sense strand
gaagggaucaaccucaaau

SEQ ID NO: 450305 - RNA, 19 nt, Homo sapiens
  misc_RNA (1)...(19): siRNA sense strand
gcaugagccuucgggauga

SEQ ID NO: 450306 - RNA, 19 nt, Homo sapiens
  misc_RNA (1)...(19): siRNA sense strand
ggaucaaccucaaauucau

SEQ ID NO: 450307 - RNA, 19 nt, Homo sapiens
  misc_RNA (1)...(19): siRNA sense strand
gaaaugaugaaaugugaca

SEQ ID NO: 450308 - RNA, 19 nt, Homo sapiens
  misc_RNA (1)...(19): siRNA sense strand
cagaaucacuagagcugaa

SEQ ID NO: 450309 - RNA, 19 nt, Homo sapiens
  misc_RNA (1)...(19): siRNA sense strand
gcaucuguguuaacuucua

SEQ ID NO: 450310 - RNA, 19 nt, Homo sapiens
  misc_RNA (1)...(19): siRNA sense strand
acacuggagucacgcgaua

SEQ ID NO: 450311 - RNA, 19 nt, Homo sapiens
  misc_RNA (1)...(19): siRNA sense strand
ggcccagacuccugaauug

SEQ ID NO: 450312 - RNA, 19 nt, Homo sapiens
  misc_RNA (1)...(19): siRNA sense strand
ggacugaucaagacucugu

SEQ ID NO: 450313 - RNA, 19 nt, Homo sapiens
  misc_RNA (1)...(19): siRNA sense strand
aguaccagcuucagucuuu

SEQ ID NO: 450314 - RNA, 19 nt, Homo sapiens
  misc_RNA (1)...(19): siRNA sense strand
gcaugaccuucgagagauu

SEQ ID NO: 450315 - RNA, 19 nt, Homo sapiens
  misc_RNA (1)...(19): siRNA sense strand
aaucugcuacuccguauua

SEQ ID NO: 450316 - RNA, 19 nt, Homo sapiens
  misc_RNA (1)...(19): siRNA sense strand
gcccagacccacuacuaua

SEQ ID NO: 450317 - RNA, 19 nt, Homo sapiens
  misc_RNA (1)...(19): siRNA sense strand
cagggucgauccagcaauu

SEQ ID NO: 450318 - RNA, 19 nt, Homo sapiens
  misc_RNA (1)...(19): siRNA sense strand
gaaaagagaaccuccauca

SEQ ID NO: 450319 - RNA, 19 nt, Homo sapiens
  misc_RNA (1)...(19): siRNA sense strand
gauucacccuaguggauuu

SEQ ID NO: 450320 - RNA, 19 nt, Homo sapiens
  misc_RNA (1)...(19): siRNA sense strand
ccagacuccugaauugcua

SEQ ID NO: 450321 - RNA, 19 nt, Homo sapiens
  misc_RNA (1)...(19): siRNA sense strand
agaaugacauccgcaagaa

SEQ ID NO: 450322 - RNA, 19 nt, Homo sapiens
  misc_RNA (1)...(19): siRNA sense strand
cuucuuagaugcugugaug

SEQ ID NO: 450323 - RNA, 19 nt, Homo sapiens
  misc_RNA (1)...(19): siRNA sense strand
gagcagcaaugcaggugau

SEQ ID NO: 450324 - RNA, 19 nt, Homo sapiens
  misc_RNA (1)...(19): siRNA sense strand
gauucaagcucuucuuacu

SEQ ID NO: 450325 - RNA, 19 nt, Homo sapiens
  misc_RNA (1)...(19): siRNA sense strand
ccaacgugcugcagggauu

SEQ ID NO: 450326 - RNA, 19 nt, Homo sapiens
  misc_RNA (1)...(19): siRNA sense strand
ccuggaagaugaugaagau

SEQ ID NO: 450327 - RNA, 19 nt, Homo sapiens
  misc_RNA (1)...(19): siRNA sense strand
gaaguaaucaaaccugucu

SEQ ID NO: 450328 - RNA, 19 nt, Homo sapiens
  misc_RNA (1)...(19): siRNA sense strand
gaagaggguggcacugaga

SEQ ID NO: 450329 - RNA, 19 nt, Homo sapiens
  misc_RNA (1)...(19): siRNA sense strand
caucaaacccggaccugaa

SEQ ID NO: 450330 - RNA, 19 nt, Homo sapiens
  misc_RNA (1)...(19): siRNA sense strand
acgagaagcucaucaacau

SEQ ID NO: 450331 - RNA, 19 nt, Homo sapiens
  misc_RNA (1)...(19): siRNA sense strand
ccagaggacugaucaagac

SEQ ID NO: 450332 - RNA, 19 nt, Homo sapiens
  misc_RNA (1)...(19): siRNA sense strand
ggugugagccugacgucua

SEQ ID NO: 450333 - RNA, 19 nt, Homo sapiens
  misc_RNA (1)...(19): siRNA sense strand
guacaaagggacaccaugu

SEQ ID NO: 450334 - RNA, 19 nt, Homo sapiens
  misc_RNA (1)...(19): siRNA sense strand
ggagggcguuaguggauca

SEQ ID NO: 450335 - RNA, 19 nt, Homo sapiens
  misc_RNA (1)...(19): siRNA sense strand
gggaucaaccucaaauuca

SEQ ID NO: 450336 - RNA, 19 nt, Homo sapiens
  misc_RNA (1)...(19): siRNA sense strand
gaugauaccucuuuugucu

SEQ ID NO: 450337 - RNA, 19 nt, Homo sapiens
  misc_RNA (1)...(19): siRNA sense strand
gaguccagcuguuaugauc

SEQ ID NO: 450338 - RNA, 19 nt, Homo sapiens
  misc_RNA (1)...(19): siRNA sense strand
ccagccagcucugaccuuu

SEQ ID NO: 450339 - RNA, 19 nt, Homo sapiens
  misc_RNA (1)...(19): siRNA sense strand
uaacaucggaacaguguau

SEQ ID NO: 450340 - RNA, 19 nt, Homo sapiens
  misc_RNA (1)...(19): siRNA sense strand
caaaggcuauggcacaacu

SEQ ID NO: 450341 - RNA, 19 nt, Homo sapiens
  misc_RNA (1)...(19): siRNA sense strand
ggaagagaaguccaacaga

SEQ ID NO: 450342 - RNA, 19 nt, Homo sapiens
  misc_RNA (1)...(19): siRNA sense strand
gguguacaagggaauguua

SEQ ID NO: 450343 - RNA, 19 nt, Homo sapiens
  misc_RNA (1)...(19): siRNA sense strand
ccacggagccaacucugaa

SEQ ID NO: 450344 - RNA, 19 nt, Homo sapiens
  misc_RNA (1)...(19): siRNA sense strand
uugacgagcugcagaauca

SEQ ID NO: 450345 - RNA, 19 nt, Homo sapiens
  misc_RNA (1)...(19): siRNA sense strand
gaauucaacccacucaucu

SEQ ID NO: 450346 - RNA, 19 nt, Homo sapiens
  misc_RNA (1)...(19): siRNA sense strand
cucaacaaguucuauacua

SEQ ID NO: 450347 - RNA, 19 nt, Homo sapiens
  misc_RNA (1)...(19): siRNA sense strand
gaaggugaggcgccuaaug

SEQ ID NO: 450348 - RNA, 19 nt, Homo sapiens
  misc_RNA (1)...(19): siRNA sense strand
aggaaaugaucgacaggua

SEQ ID NO: 450349 - RNA, 19 nt, Homo sapiens
  misc_RNA (1)...(19): siRNA sense strand
ccagaaguuuaaaggaaga

SEQ ID NO: 450350 - RNA, 19 nt, Homo sapiens
  misc_RNA (1)...(19): siRNA sense strand
gccagcaucuuugggcuuu

SEQ ID NO: 450351 - RNA, 19 nt, Homo sapiens
  misc_RNA (1)...(19): siRNA sense strand
guacaguccucagcuugga

SEQ ID NO: 450352 - RNA, 19 nt, Homo sapiens
  misc_RNA (1)...(19): siRNA sense strand
gugacaagccaaaguggua

SEQ ID NO: 450353 - RNA, 19 nt, Homo sapiens
  misc_RNA (1)...(19): siRNA sense strand
uggcggaucuuuacuggau

SEQ ID NO: 450354 - RNA, 19 nt, Homo sapiens
  misc_RNA (1)...(19): siRNA sense strand
gaagguaaauaagaaugac

SEQ ID NO: 450355 - RNA, 19 nt, Homo sapiens
  misc_RNA (1)...(19): siRNA sense strand
uggcaucuguguuaacuuc

SEQ ID NO: 450356 - RNA, 19 nt, Homo sapiens
  misc_RNA (1)...(19): siRNA sense strand
uguuagaccuccucaagug

SEQ ID NO: 450357 - RNA, 19 nt, Homo sapiens
  misc_RNA (1)...(19): siRNA sense strand
ccagacccaucucgauuca

SEQ ID NO: 450358 - RNA, 19 nt, Homo sapiens
  misc_RNA (1)...(19): siRNA sense strand
gucgggagcuguacuacug

SEQ ID NO: 450359 - RNA, 19 nt, Homo sapiens
  misc_RNA (1)...(19): siRNA sense strand
guaguaacaucggaacagu

SEQ ID NO: 450360 - RNA, 19 nt, Homo sapiens
  misc_RNA (1)...(19): siRNA sense strand
cgaauucacaacaauaugu

SEQ ID NO: 450361 - RNA, 19 nt, Homo sapiens
  misc_RNA (1)...(19): siRNA sense strand
cagcgaauucacaacaaua

SEQ ID NO: 450362 - RNA, 19 nt, Homo sapiens
  misc_RNA (1)...(19): siRNA sense strand
ucuacaaacuggacuucaa

SEQ ID NO: 450363 - RNA, 19 nt, Homo sapiens
  misc_RNA (1)...(19): siRNA sense strand
uacaaacggagauaucuuu

SEQ ID NO: 450364 - RNA, 19 nt, Homo sapiens
  misc_RNA (1)...(19): siRNA sense strand
ggaagggaucaaccucaaa

SEQ ID NO: 450365 - RNA, 19 nt, Homo sapiens
  misc_RNA (1)...(19): siRNA sense strand
ugugugguguugcguagua

SEQ ID NO: 450366 - RNA, 19 nt, Homo sapiens
  misc_RNA (1)...(19): siRNA sense strand
gaagucaucugucauuaaa

SEQ ID NO: 450367 - RNA, 19 nt, Homo sapiens
  misc_RNA (1)...(19): siRNA sense strand
gaagagaaguccaacagaa

SEQ ID NO: 450368 - RNA, 19 nt, Homo sapiens
  misc_RNA (1)...(19): siRNA sense strand
gaaguucuguccucgguua

SEQ ID NO: 450369 - RNA, 19 nt, Homo sapiens
  misc_RNA (1)...(19): siRNA sense strand
cuacggagauggaugauaa

SEQ ID NO: 450370 - RNA, 19 nt, Homo sapiens
  misc_RNA (1)...(19): siRNA sense strand
gcagugauaguauggauua

SEQ ID NO: 450371 - RNA, 19 nt, Homo sapiens
  misc_RNA (1)...(19): siRNA sense strand
ggaagcgccuggaagauga

SEQ ID NO: 450372 - RNA, 19 nt, Homo sapiens
  misc_RNA (1)...(19): siRNA sense strand
caagugcccuucugcauga

SEQ ID NO: 450373 - RNA, 19 nt, Homo sapiens
  misc_RNA (1)...(19): siRNA sense strand
ggacagacgucaggcagaa

SEQ ID NO: 450374 - RNA, 19 nt, Homo sapiens
  misc_RNA (1)...(19): siRNA sense strand
caaaaugccugaugaugua

SEQ ID NO: 450375 - RNA, 19 nt, Homo sapiens
  misc_RNA (1)...(19): siRNA sense strand
aaacacagcccaacaguga

SEQ ID NO: 450376 - RNA, 19 nt, Homo sapiens
  misc_RNA (1)...(19): siRNA sense strand
gaaaucugcuacuccguau

SEQ ID NO: 450377 - RNA, 19 nt, Homo sapiens
  misc_RNA (1)...(19): siRNA sense strand
ucagugaaaugaugaaaug

SEQ ID NO: 450378 - RNA, 19 nt, Homo sapiens
  misc_RNA (1)...(19): siRNA sense strand
cgauauggcaucuguguua

SEQ ID NO: 450379 - RNA, 19 nt, Homo sapiens
  misc_RNA (1)...(19): siRNA sense strand
gugauaguauggauuauga

SEQ ID NO: 450380 - RNA, 19 nt, Homo sapiens
  misc_RNA (1)...(19): siRNA sense strand
gaugauaguggcagugaua

SEQ ID NO: 450381 - RNA, 19 nt, Homo sapiens
  misc_RNA (1)...(19): siRNA sense strand
ccacugcgcuccagcucua

SEQ ID NO: 450382 - RNA, 19 nt, Homo sapiens
  misc_RNA (1)...(19): siRNA sense strand
gugaaaugaugaaauguga

SEQ ID NO: 450383 - RNA, 19 nt, Homo sapiens
  misc_RNA (1)...(19): siRNA sense strand
ggacagcaauagggugauu

SEQ ID NO: 450384 - RNA, 19 nt, Homo sapiens
  misc_RNA (1)...(19): siRNA sense strand
gcaaaucaaugaggugcuu

SEQ ID NO: 450385 - RNA, 19 nt, Homo sapiens
  misc_RNA (1)...(19): siRNA sense strand
caccagaaguuuaaaggaa

SEQ ID NO: 450386 - RNA, 19 nt, Homo sapiens
  misc_RNA (1)...(19): siRNA sense strand
gauauggcaucuguguuaa

SEQ ID NO: 450387 - RNA, 19 nt, Homo sapiens
  misc_RNA (1)...(19): siRNA sense strand
uauuaugucucuucucgua

SEQ ID NO: 450388 - RNA, 19 nt, Homo sapiens
  misc_RNA (1)...(19): siRNA sense strand
caacagaaaguguaaauac

SEQ ID NO: 450389 - RNA, 19 nt, Homo sapiens
  misc_RNA (1)...(19): siRNA sense strand
caagcuggcuccuuucuag

SEQ ID NO: 450390 - RNA, 19 nt, Homo sapiens
  misc_RNA (1)...(19): siRNA sense strand
gugcuaaccugcauucugu

SEQ ID NO: 450391 - RNA, 19 nt, Homo sapiens
  misc_RNA (1)...(19): siRNA sense strand
gauaguggcagugauagua

SEQ ID NO: 450392 - RNA, 19 nt, Homo sapiens
  misc_RNA (1)...(19): siRNA sense strand
guacguggcugcaguucau

SEQ ID NO: 450393 - RNA, 19 nt, Homo sapiens
  misc_RNA (1)...(19): siRNA sense strand
ucaaauucaugcacaauca

SEQ ID NO: 450394 - RNA, 19 nt, Homo sapiens
  misc_RNA (1)...(19): siRNA sense strand
agacccagcucaacaaguu

SEQ ID NO: 450395 - RNA, 19 nt, Homo sapiens
  misc_RNA (1)...(19): siRNA sense strand
ccagcgagguggagauuga

SEQ ID NO: 450396 - RNA, 19 nt, Homo sapiens
  misc_RNA (1)...(19): siRNA sense strand
gagcuguacuacuguguga

SEQ ID NO: 450397 - RNA, 19 nt, Homo sapiens
  misc_RNA (1)...(19): siRNA sense strand
guacaugcagggacagaua

SEQ ID NO: 450398 - RNA, 19 nt, Homo sapiens
  misc_RNA (1)...(19): siRNA sense strand
gaagcagacauuuguggua

SEQ ID NO: 450399 - RNA, 19 nt, Homo sapiens
  misc_RNA (1)...(19): siRNA sense strand
gcucugaccuuugcucuuc

SEQ ID NO: 450400 - RNA, 19 nt, Homo sapiens
  misc_RNA (1)...(19): siRNA sense strand
gagaagggauggguaugga

SEQ ID NO: 450401 - RNA, 19 nt, Homo sapiens
  misc_RNA (1)...(19): siRNA sense strand
ugaauuggguggcgaguuc

SEQ ID NO: 450402 - RNA, 19 nt, Homo sapiens
  misc_RNA (1)...(19): siRNA sense strand
agacgaagguguugugcuu

SEQ ID NO: 450403 - RNA, 19 nt, Homo sapiens
  misc_RNA (1)...(19): siRNA sense strand
ugaagaagcagacauuugu

SEQ ID NO: 450404 - RNA, 19 nt, Homo sapiens
  misc_RNA (1)...(19): siRNA sense strand
gaagggaucaaccucaaau

SEQ ID NO: 450405 - RNA, 19 nt, Homo sapiens
  misc_RNA (1)...(19): siRNA sense strand
gcaugagccuucgggauga

SEQ ID NO: 450406 - RNA, 19 nt, Homo sapiens
  misc_RNA (1)...(19): siRNA sense strand
ggaucaaccucaaauucau

SEQ ID NO: 450407 - RNA, 19 nt, Homo sapiens
  misc_RNA (1)...(19): siRNA sense strand
gaaaugaugaaaugugaca

SEQ ID NO: 450408 - RNA, 19 nt, Homo sapiens
  misc_RNA (1)...(19): siRNA sense strand
cagaaucacuagagcugaa

SEQ ID NO: 450409 - RNA, 19 nt, Homo sapiens
  misc_RNA (1)...(19): siRNA sense strand
gcaucuguguuaacuucua

SEQ ID NO: 450410 - RNA, 19 nt, Homo sapiens
  misc_RNA (1)...(19): siRNA sense strand
acacuggagucacgcgaua

SEQ ID NO: 450411 - RNA, 19 nt, Homo sapiens
  misc_RNA (1)...(19): siRNA sense strand
ggcccagacuccugaauug

SEQ ID NO: 450412 - RNA, 19 nt, Homo sapiens
  misc_RNA (1)...(19): siRNA sense strand
ggacugaucaagacucugu

SEQ ID NO: 450413 - RNA, 19 nt, Homo sapiens
  misc_RNA (1)...(19): siRNA sense strand
aguaccagcuucagucuuu

SEQ ID NO: 450414 - RNA, 19 nt, Homo sapiens
  misc_RNA (1)...(19): siRNA sense strand
gcaugaccuucgagagauu

SEQ ID NO: 450415 - RNA, 19 nt, Homo sapiens
  misc_RNA (1)...(19): siRNA sense strand
aaucugcuacuccguauua

SEQ ID NO: 450416 - RNA, 19 nt, Homo sapiens
  misc_RNA (1)...(19): siRNA sense strand
gcccagacccacuacuaua

SEQ ID NO: 450417 - RNA, 19 nt, Homo sapiens
  misc_RNA (1)...(19): siRNA sense strand
cagggucgauccagcaauu

SEQ ID NO: 450418 - RNA, 19 nt, Homo sapiens
  misc_RNA (1)...(19): siRNA sense strand
gaaaagagaaccuccauca

SEQ ID NO: 450419 - RNA, 19 nt, Homo sapiens
  misc_RNA (1)...(19): siRNA sense strand
gauucacccuaguggauuu

SEQ ID NO: 450420 - RNA, 19 nt, Homo sapiens
  misc_RNA (1)...(19): siRNA sense strand
ccagacuccugaauugcua

SEQ ID NO: 450421 - RNA, 19 nt, Homo sapiens
  misc_RNA (1)...(19): siRNA sense strand
agaaugacauccgcaagaa

SEQ ID NO: 450422 - RNA, 19 nt, Homo sapiens
  misc_RNA (1)...(19): siRNA sense strand
cuucuuagaugcugugaug

SEQ ID NO: 450423 - RNA, 19 nt, Homo sapiens
  misc_RNA (1)...(19): siRNA sense strand
gagcagcaaugcaggugau

SEQ ID NO: 450424 - RNA, 19 nt, Homo sapiens
  misc_RNA (1)...(19): siRNA sense strand
gauucaagcucuucuuacu

SEQ ID NO: 450425 - RNA, 19 nt, Homo sapiens
  misc_RNA (1)...(19): siRNA sense strand
ccaacgugcugcagggauu

SEQ ID NO: 450426 - RNA, 19 nt, Homo sapiens
  misc_RNA (1)...(19): siRNA sense strand
ccuggaagaugaugaagau

SEQ ID NO: 450427 - RNA, 19 nt, Homo sapiens
  misc_RNA (1)...(19): siRNA sense strand
gaaguaaucaaaccugucu

SEQ ID NO: 450428 - RNA, 19 nt, Homo sapiens
  misc_RNA (1)...(19): siRNA sense strand
gaagaggguggcacugaga

SEQ ID NO: 450429 - RNA, 19 nt, Homo sapiens
  misc_RNA (1)...(19): siRNA sense strand
caucaaacccggaccugaa

SEQ ID NO: 450430 - RNA, 19 nt, Homo sapiens
  misc_RNA (1)...(19): siRNA sense strand
acgagaagcucaucaacau

SEQ ID NO: 450431 - RNA, 19 nt, Homo sapiens
  misc_RNA (1)...(19): siRNA sense strand
ccagaggacugaucaagac

SEQ ID NO: 450432 - RNA, 19 nt, Homo sapiens
  misc_RNA (1)...(19): siRNA sense strand
ggugugagccugacgucua

SEQ ID NO: 450433 - RNA, 19 nt, Homo sapiens
  misc_RNA (1)...(19): siRNA sense strand
guacaaagggacaccaugu

SEQ ID NO: 450434 - RNA, 19 nt, Homo sapiens
  misc_RNA (1)...(19): siRNA sense strand
ggagggcguuaguggauca

SEQ ID NO: 450435 - RNA, 19 nt, Homo sapiens
  misc_RNA (1)...(19): siRNA sense strand
gggaucaaccucaaauuca

SEQ ID NO: 450436 - RNA, 19 nt, Homo sapiens
  misc_RNA (1)...(19): siRNA sense strand
gaugauaccucuuuugucu

SEQ ID NO: 450437 - RNA, 19 nt, Homo sapiens
  misc_RNA (1)...(19): siRNA sense strand
gaguccagcuguuaugauc

SEQ ID NO: 450438 - RNA, 19 nt, Homo sapiens
  misc_RNA (1)...(19): siRNA sense strand
ccagccagcucugaccuuu

SEQ ID NO: 450439 - RNA, 19 nt, Homo sapiens
  misc_RNA (1)...(19): siRNA sense strand
uaacaucggaacaguguau

SEQ ID NO: 450440 - RNA, 19 nt, Homo sapiens
  misc_RNA (1)...(19): siRNA sense strand
caaaggcuauggcacaacu

SEQ ID NO: 450441 - RNA, 19 nt, Homo sapiens
  misc_RNA (1)...(19): siRNA sense strand
ggaagagaaguccaacaga

SEQ ID NO: 450442 - RNA, 19 nt, Homo sapiens
  misc_RNA (1)...(19): siRNA sense strand
gguguacaagggaauguua

SEQ ID NO: 450443 - RNA, 19 nt, Homo sapiens
  misc_RNA (1)...(19): siRNA sense strand
ccacggagccaacucugaa

SEQ ID NO: 450444 - RNA, 19 nt, Homo sapiens
  misc_RNA (1)...(19): siRNA sense strand
uugacgagcugcagaauca

SEQ ID NO: 450445 - RNA, 19 nt, Homo sapiens
  misc_RNA (1)...(19): siRNA sense strand
gaauucaacccacucaucu

SEQ ID NO: 450446 - RNA, 19 nt, Homo sapiens
  misc_RNA (1)...(19): siRNA sense strand
cucaacaaguucuauacua

SEQ ID NO: 450447 - RNA, 19 nt, Homo sapiens
  misc_RNA (1)...(19): siRNA sense strand
gaaggugaggcgccuaaug

SEQ ID NO: 450448 - RNA, 19 nt, Homo sapiens
  misc_RNA (1)...(19): siRNA sense strand
aggaaaugaucgacaggua

SEQ ID NO: 450449 - RNA, 19 nt, Homo sapiens
  misc_RNA (1)...(19): siRNA sense strand
ccagaaguuuaaaggaaga

SEQ ID NO: 450450 - RNA, 19 nt, Homo sapiens
  misc_RNA (1)...(19): siRNA sense strand
gccagcaucuuugggcuuu

SEQ ID NO: 450451 - RNA, 19 nt, Homo sapiens
  misc_RNA (1)...(19): siRNA sense strand
guacaguccucagcuugga

SEQ ID NO: 450452 - RNA, 19 nt, Homo sapiens
  misc_RNA (1)...(19): siRNA sense strand
gugacaagccaaaguggua

SEQ ID NO: 450453 - RNA, 19 nt, Homo sapiens
  misc_RNA (1)...(19): siRNA sense strand
uggcggaucuuuacuggau

SEQ ID NO: 450454 - RNA, 19 nt, Homo sapiens
  misc_RNA (1)...(19): siRNA sense strand
gaagguaaauaagaaugac

SEQ ID NO: 450455 - RNA, 19 nt, Homo sapiens
  misc_RNA (1)...(19): siRNA sense strand
uggcaucuguguuaacuuc

SEQ ID NO: 450456 - RNA, 19 nt, Homo sapiens
  misc_RNA (1)...(19): siRNA sense strand
uguuagaccuccucaagug

SEQ ID NO: 450457 - RNA, 19 nt, Homo sapiens
  misc_RNA (1)...(19): siRNA sense strand
ccagacccaucucgauuca

SEQ ID NO: 450458 - RNA, 19 nt, Homo sapiens
  misc_RNA (1)...(19): siRNA sense strand
gucgggagcuguacuacug

SEQ ID NO: 450459 - RNA, 19 nt, Homo sapiens
  misc_RNA (1)...(19): siRNA sense strand
guaguaacaucggaacagu

SEQ ID NO: 450460 - RNA, 19 nt, Homo sapiens
  misc_RNA (1)...(19): siRNA sense strand
cgaauucacaacaauaugu

SEQ ID NO: 450461 - RNA, 19 nt, Homo sapiens
  misc_RNA (1)...(19): siRNA sense strand
cagcgaauucacaacaaua

SEQ ID NO: 450462 - RNA, 19 nt, Homo sapiens
  misc_RNA (1)...(19): siRNA sense strand
ucuacaaacuggacuucaa

SEQ ID NO: 450463 - RNA, 19 nt, Homo sapiens
  misc_RNA (1)...(19): siRNA sense strand
uacaaacggagauaucuuu

SEQ ID NO: 450464 - RNA, 19 nt, Homo sapiens
  misc_RNA (1)...(19): siRNA sense strand
ggaagggaucaaccucaaa

SEQ ID NO: 450465 - RNA, 19 nt, Homo sapiens
  misc_RNA (1)...(19): siRNA sense strand
ugugugguguugcguagua

SEQ ID NO: 450466 - RNA, 19 nt, Homo sapiens
  misc_RNA (1)...(19): siRNA sense strand
gaagucaucugucauuaaa

SEQ ID NO: 450467 - RNA, 19 nt, Homo sapiens
  misc_RNA (1)...(19): siRNA sense strand
gaagagaaguccaacagaa

SEQ ID NO: 450468 - RNA, 19 nt, Homo sapiens
  misc_RNA (1)...(19): siRNA sense strand
gaaguucuguccucgguua

SEQ ID NO: 450469 - RNA, 19 nt, Homo sapiens
  misc_RNA (1)...(19): siRNA sense strand
cuacggagauggaugauaa

SEQ ID NO: 450470 - RNA, 19 nt, Homo sapiens
  misc_RNA (1)...(19): siRNA sense strand
gcagugauaguauggauua

SEQ ID NO: 450471 - RNA, 19 nt, Homo sapiens
  misc_RNA (1)...(19): siRNA sense strand
ggaagcgccuggaagauga

SEQ ID NO: 450472 - RNA, 19 nt, Homo sapiens
  misc_RNA (1)...(19): siRNA sense strand
caagugcccuucugcauga

SEQ ID NO: 450473 - RNA, 19 nt, Homo sapiens
  misc_RNA (1)...(19): siRNA sense strand
ggacagacgucaggcagaa

SEQ ID NO: 450474 - RNA, 19 nt, Homo sapiens
  misc_RNA (1)...(19): siRNA sense strand
caaaaugccugaugaugua

SEQ ID NO: 450475 - RNA, 19 nt, Homo sapiens
  misc_RNA (1)...(19): siRNA sense strand
aaacacagcccaacaguga

SEQ ID NO: 450476 - RNA, 19 nt, Homo sapiens
  misc_RNA (1)...(19): siRNA sense strand
gaaaucugcuacuccguau

SEQ ID NO: 450477 - RNA, 19 nt, Homo sapiens
  misc_RNA (1)...(19): siRNA sense strand
ucagugaaaugaugaaaug

SEQ ID NO: 450478 - RNA, 19 nt, Homo sapiens
  misc_RNA (1)...(19): siRNA sense strand
cgauauggcaucuguguua

SEQ ID NO: 450479 - RNA, 19 nt, Homo sapiens
  misc_RNA (1)...(19): siRNA sense strand
gugauaguauggauuauga

SEQ ID NO: 450480 - RNA, 19 nt, Homo sapiens
  misc_RNA (1)...(19): siRNA sense strand
gaugauaguggcagugaua

SEQ ID NO: 450481 - RNA, 19 nt, Homo sapiens
  misc_RNA (1)...(19): siRNA sense strand
ccacugcgcuccagcucua

SEQ ID NO: 450482 - RNA, 19 nt, Homo sapiens
  misc_RNA (1)...(19): siRNA sense strand
gugaaaugaugaaauguga

SEQ ID NO: 450483 - RNA, 19 nt, Homo sapiens
  misc_RNA (1)...(19): siRNA sense strand
ggacagcaauagggugauu

SEQ ID NO: 450484 - RNA, 19 nt, Homo sapiens
  misc_RNA (1)...(19): siRNA sense strand
gcaaaucaaugaggugcuu

SEQ ID NO: 450485 - RNA, 19 nt, Homo sapiens
  misc_RNA (1)...(19): siRNA sense strand
caccagaaguuuaaaggaa

SEQ ID NO: 450486 - RNA, 19 nt, Homo sapiens
  misc_RNA (1)...(19): siRNA sense strand
gauauggcaucuguguuaa

SEQ ID NO: 450487 - RNA, 19 nt, Homo sapiens
  misc_RNA (1)...(19): siRNA sense strand
uauuaugucucuucucgua

SEQ ID NO: 450488 - RNA, 19 nt, Homo sapiens
  misc_RNA (1)...(19): siRNA sense strand
caacagaaaguguaaauac

SEQ ID NO: 450489 - RNA, 19 nt, Homo sapiens
  misc_RNA (1)...(19): siRNA sense strand
caagcuggcuccuuucuag

SEQ ID NO: 450490 - RNA, 19 nt, Homo sapiens
  misc_RNA (1)...(19): siRNA sense strand
gugcuaaccugcauucugu

SEQ ID NO: 450491 - RNA, 19 nt, Homo sapiens
  misc_RNA (1)...(19): siRNA sense strand
gauaguggcagugauagua

SEQ ID NO: 450492 - RNA, 19 nt, Homo sapiens
  misc_RNA (1)...(19): siRNA sense strand
guacguggcugcaguucau

SEQ ID NO: 450493 - RNA, 19 nt, Homo sapiens
  misc_RNA (1)...(19): siRNA sense strand
ucaaauucaugcacaauca

SEQ ID NO: 450494 - RNA, 19 nt, Homo sapiens
  misc_RNA (1)...(19): siRNA sense strand
agacccagcucaacaaguu

SEQ ID NO: 450495 - RNA, 19 nt, Homo sapiens
  misc_RNA (1)...(19): siRNA sense strand
ccagcgagguggagauuga

SEQ ID NO: 450496 - RNA, 19 nt, Homo sapiens
  misc_RNA (1)...(19): siRNA sense strand
gagcuguacuacuguguga

SEQ ID NO: 450497 - RNA, 19 nt, Homo sapiens
  misc_RNA (1)...(19): siRNA sense strand
guacaugcagggacagaua

SEQ ID NO: 450498 - RNA, 19 nt, Homo sapiens
  misc_RNA (1)...(19): siRNA sense strand
gaagcagacauuuguggua

SEQ ID NO: 450499 - RNA, 19 nt, Homo sapiens
  misc_RNA (1)...(19): siRNA sense strand
gcucugaccuuugcucuuc

SEQ ID NO: 450500 - RNA, 19 nt, Homo sapiens
  misc_RNA (1)...(19): siRNA sense strand
gagaagggauggguaugga

SEQ ID NO: 450501 - RNA, 19 nt, Homo sapiens
  misc_RNA (1)...(19): siRNA sense strand
ugaauuggguggcgaguuc

SEQ ID NO: 450502 - RNA, 19 nt, Homo sapiens
  misc_RNA (1)...(19): siRNA sense strand
agacgaagguguugugcuu

SEQ ID NO: 450503 - RNA, 19 nt, Homo sapiens
  misc_RNA (1)...(19): siRNA sense strand
ugaagaagcagacauuugu

SEQ ID NO: 450504 - RNA, 19 nt, Homo sapiens
  misc_RNA (1)...(19): siRNA sense strand
gaagggaucaaccucaaau

SEQ ID NO: 450505 - RNA, 19 nt, Homo sapiens
  misc_RNA (1)...(19): siRNA sense strand
gcaugagccuucgggauga

SEQ ID NO: 450506 - RNA, 19 nt, Homo sapiens
  misc_RNA (1)...(19): siRNA sense strand
ggaucaaccucaaauucau

SEQ ID NO: 450507 - RNA, 19 nt, Homo sapiens
  misc_RNA (1)...(19): siRNA sense strand
gaaaugaugaaaugugaca

SEQ ID NO: 450508 - RNA, 19 nt, Homo sapiens
  misc_RNA (1)...(19): siRNA sense strand
cagaaucacuagagcugaa

SEQ ID NO: 450509 - RNA, 19 nt, Homo sapiens
  misc_RNA (1)...(19): siRNA sense strand
gcaucuguguuaacuucua

SEQ ID NO: 450510 - RNA, 19 nt, Homo sapiens
  misc_RNA (1)...(19): siRNA sense strand
acacuggagucacgcgaua

SEQ ID NO: 450511 - RNA, 19 nt, Homo sapiens
  misc_RNA (1)...(19): siRNA sense strand
ggcccagacuccugaauug

SEQ ID NO: 450512 - RNA, 19 nt, Homo sapiens
  misc_RNA (1)...(19): siRNA sense strand
ggacugaucaagacucugu

SEQ ID NO: 450513 - RNA, 19 nt, Homo sapiens
  misc_RNA (1)...(19): siRNA sense strand
aguaccagcuucagucuuu

SEQ ID NO: 450514 - RNA, 19 nt, Homo sapiens
  misc_RNA (1)...(19): siRNA sense strand
gcaugaccuucgagagauu

SEQ ID NO: 450515 - RNA, 19 nt, Homo sapiens
  misc_RNA (1)...(19): siRNA sense strand
aaucugcuacuccguauua

SEQ ID NO: 450516 - RNA, 19 nt, Homo sapiens
  misc_RNA (1)...(19): siRNA sense strand
gcccagacccacuacuaua

SEQ ID NO: 450517 - RNA, 19 nt, Homo sapiens
  misc_RNA (1)...(19): siRNA sense strand
cagggucgauccagcaauu

SEQ ID NO: 450518 - RNA, 19 nt, Homo sapiens
  misc_RNA (1)...(19): siRNA sense strand
gaaaagagaaccuccauca

SEQ ID NO: 450519 - RNA, 19 nt, Homo sapiens
  misc_RNA (1)...(19): siRNA sense strand
gauucacccuaguggauuu

SEQ ID NO: 450520 - RNA, 19 nt, Homo sapiens
  misc_RNA (1)...(19): siRNA sense strand
ccagacuccugaauugcua

SEQ ID NO: 450521 - RNA, 19 nt, Homo sapiens
  misc_RNA (1)...(19): siRNA sense strand
agaaugacauccgcaagaa

SEQ ID NO: 450522 - RNA, 19 nt, Homo sapiens
  misc_RNA (1)...(19): siRNA sense strand
cuucuuagaugcugugaug

SEQ ID NO: 450523 - RNA, 19 nt, Homo sapiens
  misc_RNA (1)...(19): siRNA sense strand
gagcagcaaugcaggugau

SEQ ID NO: 450524 - RNA, 19 nt, Homo sapiens
  misc_RNA (1)...(19): siRNA sense strand
gauucaagcucuucuuacu

SEQ ID NO: 450525 - RNA, 19 nt, Homo sapiens
  misc_RNA (1)...(19): siRNA sense strand
ccaacgugcugcagggauu

SEQ ID NO: 450526 - RNA, 19 nt, Homo sapiens
  misc_RNA (1)...(19): siRNA sense strand
ccuggaagaugaugaagau

SEQ ID NO: 450527 - RNA, 19 nt, Homo sapiens
  misc_RNA (1)...(19): siRNA sense strand
gaaguaaucaaaccugucu

SEQ ID NO: 450528 - RNA, 19 nt, Homo sapiens
  misc_RNA (1)...(19): siRNA sense strand
gaagaggguggcacugaga

SEQ ID NO: 450529 - RNA, 19 nt, Homo sapiens
  misc_RNA (1)...(19): siRNA sense strand
caucaaacccggaccugaa

SEQ ID NO: 450530 - RNA, 19 nt, Homo sapiens
  misc_RNA (1)...(19): siRNA sense strand
acgagaagcucaucaacau

SEQ ID NO: 450531 - RNA, 19 nt, Homo sapiens
  misc_RNA (1)...(19): siRNA sense strand
ccagaggacugaucaagac

SEQ ID NO: 450532 - RNA, 19 nt, Homo sapiens
  misc_RNA (1)...(19): siRNA sense strand
ggugugagccugacgucua

SEQ ID NO: 450533 - RNA, 19 nt, Homo sapiens
  misc_RNA (1)...(19): siRNA sense strand
guacaaagggacaccaugu

SEQ ID NO: 450534 - RNA, 19 nt, Homo sapiens
  misc_RNA (1)...(19): siRNA sense strand
ggagggcguuaguggauca

SEQ ID NO: 450535 - RNA, 19 nt, Homo sapiens
  misc_RNA (1)...(19): siRNA sense strand
gggaucaaccucaaauuca

SEQ ID NO: 450536 - RNA, 19 nt, Homo sapiens
  misc_RNA (1)...(19): siRNA sense strand
gaugauaccucuuuugucu

SEQ ID NO: 450537 - RNA, 19 nt, Homo sapiens
  misc_RNA (1)...(19): siRNA sense strand
gaguccagcuguuaugauc

SEQ ID NO: 450538 - RNA, 19 nt, Homo sapiens
  misc_RNA (1)...(19): siRNA sense strand
ccagccagcucugaccuuu

SEQ ID NO: 450539 - RNA, 19 nt, Homo sapiens
  misc_RNA (1)...(19): siRNA sense strand
uaacaucggaacaguguau

SEQ ID NO: 450540 - RNA, 19 nt, Homo sapiens
  misc_RNA (1)...(19): siRNA sense strand
caaaggcuauggcacaacu

SEQ ID NO: 450541 - RNA, 19 nt, Homo sapiens
  misc_RNA (1)...(19): siRNA sense strand
ggaagagaaguccaacaga

SEQ ID NO: 450542 - RNA, 19 nt, Homo sapiens
  misc_RNA (1)...(19): siRNA sense strand
gguguacaagggaauguua

SEQ ID NO: 450543 - RNA, 19 nt, Homo sapiens
  misc_RNA (1)...(19): siRNA sense strand
ccacggagccaacucugaa

SEQ ID NO: 450544 - RNA, 19 nt, Homo sapiens
  misc_RNA (1)...(19): siRNA sense strand
uugacgagcugcagaauca

SEQ ID NO: 450545 - RNA, 19 nt, Homo sapiens
  misc_RNA (1)...(19): siRNA sense strand
gaauucaacccacucaucu

SEQ ID NO: 450546 - RNA, 19 nt, Homo sapiens
  misc_RNA (1)...(19): siRNA sense strand
cucaacaaguucuauacua

SEQ ID NO: 450547 - RNA, 19 nt, Homo sapiens
  misc_RNA (1)...(19): siRNA sense strand
gaaggugaggcgccuaaug

SEQ ID NO: 450548 - RNA, 19 nt, Homo sapiens
  misc_RNA (1)...(19): siRNA sense strand
aggaaaugaucgacaggua

SEQ ID NO: 450549 - RNA, 19 nt, Homo sapiens
  misc_RNA (1)...(19): siRNA sense strand
ccagaaguuuaaaggaaga

SEQ ID NO: 450550 - RNA, 19 nt, Homo sapiens
  misc_RNA (1)...(19): siRNA sense strand
gccagcaucuuugggcuuu

SEQ ID NO: 450551 - RNA, 19 nt, Homo sapiens
  misc_RNA (1)...(19): siRNA sense strand
guacaguccucagcuugga

SEQ ID NO: 450552 - RNA, 19 nt, Homo sapiens
  misc_RNA (1)...(19): siRNA sense strand
gugacaagccaaaguggua

SEQ ID NO: 450553 - RNA, 19 nt, Homo sapiens
  misc_RNA (1)...(19): siRNA sense strand
uggcggaucuuuacuggau

SEQ ID NO: 450554 - RNA, 19 nt, Homo sapiens
  misc_RNA (1)...(19): siRNA sense strand
gaagguaaauaagaaugac

SEQ ID NO: 450555 - RNA, 19 nt, Homo sapiens
  misc_RNA (1)...(19): siRNA sense strand
uggcaucuguguuaacuuc

SEQ ID NO: 450556 - RNA, 19 nt, Homo sapiens
  misc_RNA (1)...(19): siRNA sense strand
uguuagaccuccucaagug

SEQ ID NO: 450557 - RNA, 19 nt, Homo sapiens
  misc_RNA (1)...(19): siRNA sense strand
ccagacccaucucgauuca

SEQ ID NO: 450558 - RNA, 19 nt, Homo sapiens
  misc_RNA (1)...(19): siRNA sense strand
gucgggagcuguacuacug

SEQ ID NO: 450559 - RNA, 19 nt, Homo sapiens
  misc_RNA (1)...(19): siRNA sense strand
guaguaacaucggaacagu

SEQ ID NO: 450560 - RNA, 19 nt, Homo sapiens
  misc_RNA (1)...(19): siRNA sense strand
cgaauucacaacaauaugu

SEQ ID NO: 450561 - RNA, 19 nt, Homo sapiens
  misc_RNA (1)...(19): siRNA sense strand
cagcgaauucacaacaaua

SEQ ID NO: 450562 - RNA, 19 nt, Homo sapiens
  misc_RNA (1)...(19): siRNA sense strand
ucuacaaacuggacuucaa

SEQ ID NO: 450563 - RNA, 19 nt, Homo sapiens
  misc_RNA (1)...(19): siRNA sense strand
uacaaacggagauaucuuu

SEQ ID NO: 450564 - RNA, 19 nt, Homo sapiens
  misc_RNA (1)...(19): siRNA sense strand
ggaagggaucaaccucaaa

SEQ ID NO: 450565 - RNA, 19 nt, Homo sapiens
  misc_RNA (1)...(19): siRNA sense strand
ugugugguguugcguagua

SEQ ID NO: 450566 - RNA, 19 nt, Homo sapiens
  misc_RNA (1)...(19): siRNA sense strand
gaagucaucugucauuaaa

SEQ ID NO: 450567 - RNA, 19 nt, Homo sapiens
  misc_RNA (1)...(19): siRNA sense strand
gaagagaaguccaacagaa

SEQ ID NO: 450568 - RNA, 19 nt, Homo sapiens
  misc_RNA (1)...(19): siRNA sense strand
gaaguucuguccucgguua

SEQ ID NO: 450569 - RNA, 19 nt, Homo sapiens
  misc_RNA (1)...(19): siRNA sense strand
cuacggagauggaugauaa

SEQ ID NO: 450570 - RNA, 19 nt, Homo sapiens
  misc_RNA (1)...(19): siRNA sense strand
gcagugauaguauggauua

SEQ ID NO: 450571 - RNA, 19 nt, Homo sapiens
  misc_RNA (1)...(19): siRNA sense strand
ggaagcgccuggaagauga

SEQ ID NO: 450572 - RNA, 19 nt, Homo sapiens
  misc_RNA (1)...(19): siRNA sense strand
caagugcccuucugcauga

SEQ ID NO: 450573 - RNA, 19 nt, Homo sapiens
  misc_RNA (1)...(19): siRNA sense strand
ggacagacgucaggcagaa

SEQ ID NO: 450574 - RNA, 19 nt, Homo sapiens
  misc_RNA (1)...(19): siRNA sense strand
caaaaugccugaugaugua

SEQ ID NO: 450575 - RNA, 19 nt, Homo sapiens
  misc_RNA (1)...(19): siRNA sense strand
aaacacagcccaacaguga

SEQ ID NO: 450576 - RNA, 19 nt, Homo sapiens
  misc_RNA (1)...(19): siRNA sense strand
gaaaucugcuacuccguau

SEQ ID NO: 450577 - RNA, 19 nt, Homo sapiens
  misc_RNA (1)...(19): siRNA sense strand
ucagugaaaugaugaaaug

SEQ ID NO: 450578 - RNA, 19 nt, Homo sapiens
  misc_RNA (1)...(19): siRNA sense strand
cgauauggcaucuguguua

SEQ ID NO: 450579 - RNA, 19 nt, Homo sapiens
  misc_RNA (1)...(19): siRNA sense strand
gugauaguauggauuauga

SEQ ID NO: 450580 - RNA, 19 nt, Homo sapiens
  misc_RNA (1)...(19): siRNA sense strand
gaugauaguggcagugaua

SEQ ID NO: 450581 - RNA, 19 nt, Homo sapiens
  misc_RNA (1)...(19): siRNA sense strand
ccacugcgcuccagcucua

SEQ ID NO: 450582 - RNA, 19 nt, Homo sapiens
  misc_RNA (1)...(19): siRNA sense strand
gugaaaugaugaaauguga

SEQ ID NO: 450583 - RNA, 19 nt, Homo sapiens
  misc_RNA (1)...(19): siRNA sense strand
ggacagcaauagggugauu

SEQ ID NO: 450584 - RNA, 19 nt, Homo sapiens
  misc_RNA (1)...(19): siRNA sense strand
gcaaaucaaugaggugcuu

SEQ ID NO: 450585 - RNA, 19 nt, Homo sapiens
  misc_RNA (1)...(19): siRNA sense strand
caccagaaguuuaaaggaa

SEQ ID NO: 450586 - RNA, 19 nt, Homo sapiens
  misc_RNA (1)...(19): siRNA sense strand
gauauggcaucuguguuaa

SEQ ID NO: 450587 - RNA, 19 nt, Homo sapiens
  misc_RNA (1)...(19): siRNA sense strand
uauuaugucucuucucgua

SEQ ID NO: 450588 - RNA, 19 nt, Homo sapiens
  misc_RNA (1)...(19): siRNA sense strand
caacagaaaguguaaauac

SEQ ID NO: 450589 - RNA, 19 nt, Homo sapiens
  misc_RNA (1)...(19): siRNA sense strand
caagcuggcuccuuucuag

SEQ ID NO: 450590 - RNA, 19 nt, Homo sapiens
  misc_RNA (1)...(19): siRNA sense strand
gugcuaaccugcauucugu

SEQ ID NO: 450591 - RNA, 19 nt, Homo sapiens
  misc_RNA (1)...(19): siRNA sense strand
gauaguggcagugauagua

SEQ ID NO: 450592 - RNA, 19 nt, Homo sapiens
  misc_RNA (1)...(19): siRNA sense strand
guacguggcugcaguucau

SEQ ID NO: 450593 - RNA, 19 nt, Homo sapiens
  misc_RNA (1)...(19): siRNA sense strand
ucaaauucaugcacaauca

SEQ ID NO: 450594 - RNA, 19 nt, Homo sapiens
  misc_RNA (1)...(19): siRNA sense strand
agacccagcucaacaaguu

SEQ ID NO: 450595 - RNA, 19 nt, Homo sapiens
  misc_RNA (1)...(19): siRNA sense strand
ccagcgagguggagauuga

SEQ ID NO: 450596 - RNA, 19 nt, Homo sapiens
  misc_RNA (1)...(19): siRNA sense strand
gagcuguacuacuguguga

SEQ ID NO: 450597 - RNA, 19 nt, Homo sapiens
  misc_RNA (1)...(19): siRNA sense strand
guacaugcagggacagaua

SEQ ID NO: 450598 - RNA, 19 nt, Homo sapiens
  misc_RNA (1)...(19): siRNA sense strand
gaagcagacauuuguggua

SEQ ID NO: 450599 - RNA, 19 nt, Homo sapiens
  misc_RNA (1)...(19): siRNA sense strand
gcucugaccuuugcucuuc

SEQ ID NO: 450600 - RNA, 19 nt, Homo sapiens
  misc_RNA (1)...(19): siRNA sense strand
gagaagggauggguaugga

SEQ ID NO: 450601 - RNA, 19 nt, Homo sapiens
  misc_RNA (1)...(19): siRNA sense strand
ugaauuggguggcgaguuc

SEQ ID NO: 450602 - RNA, 19 nt, Homo sapiens
  misc_RNA (1)...(19): siRNA sense strand
agacgaagguguugugcuu

SEQ ID NO: 450603 - RNA, 19 nt, Homo sapiens
  misc_RNA (1)...(19): siRNA sense strand
ugaagaagcagacauuugu

SEQ ID NO: 450604 - RNA, 19 nt, Homo sapiens
  misc_RNA (1)...(19): siRNA sense strand
gaagggaucaaccucaaau

SEQ ID NO: 450605 - RNA, 19 nt, Homo sapiens
  misc_RNA (1)...(19): siRNA sense strand
gcaugagccuucgggauga

SEQ ID NO: 450606 - RNA, 19 nt, Homo sapiens
  misc_RNA (1)...(19): siRNA sense strand
ggaucaaccucaaauucau

SEQ ID NO: 450607 - RNA, 19 nt, Homo sapiens
  misc_RNA (1)...(19): siRNA sense strand
gaaaugaugaaaugugaca

SEQ ID NO: 450608 - RNA, 19 nt, Homo sapiens
  misc_RNA (1)...(19): siRNA sense strand
cagaaucacuagagcugaa

SEQ ID NO: 450609 - RNA, 19 nt, Homo sapiens
  misc_RNA (1)...(19): siRNA sense strand
gcaucuguguuaacuucua

SEQ ID NO: 450610 - RNA, 19 nt, Homo sapiens
  misc_RNA (1)...(19): siRNA sense strand
acacuggagucacgcgaua

SEQ ID NO: 450611 - RNA, 19 nt, Homo sapiens
  misc_RNA (1)...(19): siRNA sense strand
ggcccagacuccugaauug

SEQ ID NO: 450612 - RNA, 19 nt, Homo sapiens
  misc_RNA (1)...(19): siRNA sense strand
ggacugaucaagacucugu

SEQ ID NO: 450613 - RNA, 19 nt, Homo sapiens
  misc_RNA (1)...(19): siRNA sense strand
aguaccagcuucagucuuu

SEQ ID NO: 450614 - RNA, 19 nt, Homo sapiens
  misc_RNA (1)...(19): siRNA sense strand
gcaugaccuucgagagauu

SEQ ID NO: 450615 - RNA, 19 nt, Homo sapiens
  misc_RNA (1)...(19): siRNA sense strand
aaucugcuacuccguauua

SEQ ID NO: 450616 - RNA, 19 nt, Homo sapiens
  misc_RNA (1)...(19): siRNA sense strand
gcccagacccacuacuaua

SEQ ID NO: 450617 - RNA, 19 nt, Homo sapiens
  misc_RNA (1)...(19): siRNA sense strand
cagggucgauccagcaauu

SEQ ID NO: 450618 - RNA, 19 nt, Homo sapiens
  misc_RNA (1)...(19): siRNA sense strand
gaaaagagaaccuccauca

SEQ ID NO: 450619 - RNA, 19 nt, Homo sapiens
  misc_RNA (1)...(19): siRNA sense strand
gauucacccuaguggauuu

SEQ ID NO: 450620 - RNA, 19 nt, Homo sapiens
  misc_RNA (1)...(19): siRNA sense strand
ccagacuccugaauugcua

SEQ ID NO: 450621 - RNA, 19 nt, Homo sapiens
  misc_RNA (1)...(19): siRNA sense strand
agaaugacauccgcaagaa

SEQ ID NO: 450622 - RNA, 19 nt, Homo sapiens
  misc_RNA (1)...(19): siRNA sense strand
cuucuuagaugcugugaug

SEQ ID NO: 450623 - RNA, 19 nt, Homo sapiens
  misc_RNA (1)...(19): siRNA sense strand
gagcagcaaugcaggugau

SEQ ID NO: 450624 - RNA, 19 nt, Homo sapiens
  misc_RNA (1)...(19): siRNA sense strand
gauucaagcucuucuuacu

SEQ ID NO: 450625 - RNA, 19 nt, Homo sapiens
  misc_RNA (1)...(19): siRNA sense strand
ccaacgugcugcagggauu

SEQ ID NO: 450626 - RNA, 19 nt, Homo sapiens
  misc_RNA (1)...(19): siRNA sense strand
ccuggaagaugaugaagau

SEQ ID NO: 450627 - RNA, 19 nt, Homo sapiens
  misc_RNA (1)...(19): siRNA sense strand
gaaguaaucaaaccugucu

SEQ ID NO: 450628 - RNA, 19 nt, Homo sapiens
  misc_RNA (1)...(19): siRNA sense strand
gaagaggguggcacugaga

SEQ ID NO: 450629 - RNA, 19 nt, Homo sapiens
  misc_RNA (1)...(19): siRNA sense strand
caucaaacccggaccugaa

SEQ ID NO: 450630 - RNA, 19 nt, Homo sapiens
  misc_RNA (1)...(19): siRNA sense strand
acgagaagcucaucaacau

SEQ ID NO: 450631 - RNA, 19 nt, Homo sapiens
  misc_RNA (1)...(19): siRNA sense strand
ccagaggacugaucaagac

SEQ ID NO: 450632 - RNA, 19 nt, Homo sapiens
  misc_RNA (1)...(19): siRNA sense strand
ggugugagccugacgucua

SEQ ID NO: 450633 - RNA, 19 nt, Homo sapiens
  misc_RNA (1)...(19): siRNA sense strand
guacaaagggacaccaugu

SEQ ID NO: 450634 - RNA, 19 nt, Homo sapiens
  misc_RNA (1)...(19): siRNA sense strand
ggagggcguuaguggauca

SEQ ID NO: 450635 - RNA, 19 nt, Homo sapiens
  misc_RNA (1)...(19): siRNA sense strand
gggaucaaccucaaauuca

SEQ ID NO: 450636 - RNA, 19 nt, Homo sapiens
  misc_RNA (1)...(19): siRNA sense strand
gaugauaccucuuuugucu

SEQ ID NO: 450637 - RNA, 19 nt, Homo sapiens
  misc_RNA (1)...(19): siRNA sense strand
gaguccagcuguuaugauc

SEQ ID NO: 450638 - RNA, 19 nt, Homo sapiens
  misc_RNA (1)...(19): siRNA sense strand
ccagccagcucugaccuuu

SEQ ID NO: 450639 - RNA, 19 nt, Homo sapiens
  misc_RNA (1)...(19): siRNA sense strand
uaacaucggaacaguguau

SEQ ID NO: 450640 - RNA, 19 nt, Homo sapiens
  misc_RNA (1)...(19): siRNA sense strand
caaaggcuauggcacaacu

SEQ ID NO: 450641 - RNA, 19 nt, Homo sapiens
  misc_RNA (1)...(19): siRNA sense strand
ggaagagaaguccaacaga

SEQ ID NO: 450642 - RNA, 19 nt, Homo sapiens
  misc_RNA (1)...(19): siRNA sense strand
gguguacaagggaauguua

SEQ ID NO: 450643 - RNA, 19 nt, Homo sapiens
  misc_RNA (1)...(19): siRNA sense strand
ccacggagccaacucugaa

SEQ ID NO: 450644 - RNA, 19 nt, Homo sapiens
  misc_RNA (1)...(19): siRNA sense strand
uugacgagcugcagaauca

SEQ ID NO: 450645 - RNA, 19 nt, Homo sapiens
  misc_RNA (1)...(19): siRNA sense strand
gaauucaacccacucaucu

SEQ ID NO: 450646 - RNA, 19 nt, Homo sapiens
  misc_RNA (1)...(19): siRNA sense strand
cucaacaaguucuauacua

SEQ ID NO: 450647 - RNA, 19 nt, Homo sapiens
  misc_RNA (1)...(19): siRNA sense strand
gaaggugaggcgccuaaug

SEQ ID NO: 450648 - RNA, 19 nt, Homo sapiens
  misc_RNA (1)...(19): siRNA sense strand
aggaaaugaucgacaggua

SEQ ID NO: 450649 - RNA, 19 nt, Homo sapiens
  misc_RNA (1)...(19): siRNA sense strand
ccagaaguuuaaaggaaga

SEQ ID NO: 450650 - RNA, 19 nt, Homo sapiens
  misc_RNA (1)...(19): siRNA sense strand
gccagcaucuuugggcuuu

SEQ ID NO: 450651 - RNA, 19 nt, Homo sapiens
  misc_RNA (1)...(19): siRNA sense strand
guacaguccucagcuugga

SEQ ID NO: 450652 - RNA, 19 nt, Homo sapiens
  misc_RNA (1)...(19): siRNA sense strand
gugacaagccaaaguggua

SEQ ID NO: 450653 - RNA, 19 nt, Homo sapiens
  misc_RNA (1)...(19): siRNA sense strand
uggcggaucuuuacuggau

SEQ ID NO: 450654 - RNA, 19 nt, Homo sapiens
  misc_RNA (1)...(19): siRNA sense strand
gaagguaaauaagaaugac

SEQ ID NO: 450655 - RNA, 19 nt, Homo sapiens
  misc_RNA (1)...(19): siRNA sense strand
uggcaucuguguuaacuuc

SEQ ID NO: 450656 - RNA, 19 nt, Homo sapiens
  misc_RNA (1)...(19): siRNA sense strand
uguuagaccuccucaagug

SEQ ID NO: 450657 - RNA, 19 nt, Homo sapiens
  misc_RNA (1)...(19): siRNA sense strand
ccagacccaucucgauuca

SEQ ID NO: 450658 - RNA, 19 nt, Homo sapiens
  misc_RNA (1)...(19): siRNA sense strand
gucgggagcuguacuacug

SEQ ID NO: 450659 - RNA, 19 nt, Homo sapiens
  misc_RNA (1)...(19): siRNA sense strand
guaguaacaucggaacagu

SEQ ID NO: 450660 - RNA, 19 nt, Homo sapiens
  misc_RNA (1)...(19): siRNA sense strand
cgaauucacaacaauaugu

SEQ ID NO: 450661 - RNA, 19 nt, Homo sapiens
  misc_RNA (1)...(19): siRNA sense strand
cagcgaauucacaacaaua

SEQ ID NO: 450662 - RNA, 19 nt, Homo sapiens
  misc_RNA (1)...(19): siRNA sense strand
ucuacaaacuggacuucaa

SEQ ID NO: 450663 - RNA, 19 nt, Homo sapiens
  misc_RNA (1)...(19): siRNA sense strand
uacaaacggagauaucuuu

SEQ ID NO: 450664 - RNA, 19 nt, Homo sapiens
  misc_RNA (1)...(19): siRNA sense strand
ggaagggaucaaccucaaa

SEQ ID NO: 450665 - RNA, 19 nt, Homo sapiens
  misc_RNA (1)...(19): siRNA sense strand
ugugugguguugcguagua

SEQ ID NO: 450666 - RNA, 19 nt, Homo sapiens
  misc_RNA (1)...(19): siRNA sense strand
gaagucaucugucauuaaa

SEQ ID NO: 450667 - RNA, 19 nt, Homo sapiens
  misc_RNA (1)...(19): siRNA sense strand
gaagagaaguccaacagaa

SEQ ID NO: 450668 - RNA, 19 nt, Homo sapiens
  misc_RNA (1)...(19): siRNA sense strand
gaaguucuguccucgguua

SEQ ID NO: 450669 - RNA, 19 nt, Homo sapiens
  misc_RNA (1)...(19): siRNA sense strand
cuacggagauggaugauaa

SEQ ID NO: 450670 - RNA, 19 nt, Homo sapiens
  misc_RNA (1)...(19): siRNA sense strand
gcagugauaguauggauua

SEQ ID NO: 450671 - RNA, 19 nt, Homo sapiens
  misc_RNA (1)...(19): siRNA sense strand
ggaagcgccuggaagauga

SEQ ID NO: 450672 - RNA, 19 nt, Homo sapiens
  misc_RNA (1)...(19): siRNA sense strand
caagugcccuucugcauga

SEQ ID NO: 450673 - RNA, 19 nt, Homo sapiens
  misc_RNA (1)...(19): siRNA sense strand
ggacagacgucaggcagaa

SEQ ID NO: 450674 - RNA, 19 nt, Homo sapiens
  misc_RNA (1)...(19): siRNA sense strand
caaaaugccugaugaugua

SEQ ID NO: 450675 - RNA, 19 nt, Homo sapiens
  misc_RNA (1)...(19): siRNA sense strand
aaacacagcccaacaguga

SEQ ID NO: 450676 - RNA, 19 nt, Homo sapiens
  misc_RNA (1)...(19): siRNA sense strand
ucagugaaaugaugaaaug

SEQ ID NO: 450677 - RNA, 19 nt, Homo sapiens
  misc_RNA (1)...(19): siRNA sense strand
cgauauggcaucuguguua

SEQ ID NO: 450678 - RNA, 19 nt, Homo sapiens
  misc_RNA (1)...(19): siRNA sense strand
gugauaguauggauuauga

SEQ ID NO: 450679 - RNA, 19 nt, Homo sapiens
  misc_RNA (1)...(19): siRNA sense strand
gaugauaguggcagugaua

SEQ ID NO: 450680 - RNA, 19 nt, Homo sapiens
  misc_RNA (1)...(19): siRNA sense strand
ccacugcgcuccagcucua

SEQ ID NO: 450681 - RNA, 19 nt, Homo sapiens
  misc_RNA (1)...(19): siRNA sense strand
gugaaaugaugaaauguga

SEQ ID NO: 450682 - RNA, 19 nt, Homo sapiens
  misc_RNA (1)...(19): siRNA sense strand
ggacagcaauagggugauu

SEQ ID NO: 450683 - RNA, 19 nt, Homo sapiens
  misc_RNA (1)...(19): siRNA sense strand
gcaaaucaaugaggugcuu

SEQ ID NO: 450684 - RNA, 19 nt, Homo sapiens
  misc_RNA (1)...(19): siRNA sense strand
caccagaaguuuaaaggaa

SEQ ID NO: 450685 - RNA, 19 nt, Homo sapiens
  misc_RNA (1)...(19): siRNA sense strand
gauauggcaucuguguuaa

SEQ ID NO: 450686 - RNA, 19 nt, Homo sapiens
  misc_RNA (1)...(19): siRNA sense strand
caacagaaaguguaaauac

SEQ ID NO: 450687 - RNA, 19 nt, Homo sapiens
  misc_RNA (1)...(19): siRNA sense strand
caagcuggcuccuuucuag

SEQ ID NO: 450688 - RNA, 19 nt, Homo sapiens
  misc_RNA (1)...(19): siRNA sense strand
gugcuaaccugcauucugu

SEQ ID NO: 450689 - RNA, 19 nt, Homo sapiens
  misc_RNA (1)...(19): siRNA sense strand
gauaguggcagugauagua

SEQ ID NO: 450690 - RNA, 19 nt, Homo sapiens
  misc_RNA (1)...(19): siRNA sense strand
ucaaauucaugcacaauca

SEQ ID NO: 450691 - RNA, 19 nt, Homo sapiens
  misc_RNA (1)...(19): siRNA sense strand
agacccagcucaacaaguu

SEQ ID NO: 450692 - RNA, 19 nt, Homo sapiens
  misc_RNA (1)...(19): siRNA sense strand
ccagcgagguggagauuga

SEQ ID NO: 450693 - RNA, 19 nt, Homo sapiens
  misc_RNA (1)...(19): siRNA sense strand
gagcuguacuacuguguga

SEQ ID NO: 450694 - RNA, 19 nt, Homo sapiens
  misc_RNA (1)...(19): siRNA sense strand
guacaugcagggacagaua

SEQ ID NO: 450695 - RNA, 19 nt, Homo sapiens
  misc_RNA (1)...(19): siRNA sense strand
gaagcagacauuuguggua

SEQ ID NO: 450696 - RNA, 19 nt, Homo sapiens
  misc_RNA (1)...(19): siRNA sense strand
gcucugaccuuugcucuuc

SEQ ID NO: 450697 - RNA, 19 nt, Homo sapiens
  misc_RNA (1)...(19): siRNA sense strand
gagaagggauggguaugga

SEQ ID NO: 450698 - RNA, 19 nt, Homo sapiens
  misc_RNA (1)...(19): siRNA sense strand
ugaauuggguggcgaguuc

SEQ ID NO: 450699 - RNA, 19 nt, Homo sapiens
  misc_RNA (1)...(19): siRNA sense strand
agacgaagguguugugcuu

SEQ ID NO: 450700 - RNA, 19 nt, Homo sapiens
  misc_RNA (1)...(19): siRNA sense strand
ugaagaagcagacauuugu

SEQ ID NO: 450701 - RNA, 19 nt, Homo sapiens
  misc_RNA (1)...(19): siRNA sense strand
gaagggaucaaccucaaau

SEQ ID NO: 450702 - RNA, 19 nt, Homo sapiens
  misc_RNA (1)...(19): siRNA sense strand
gcaugagccuucgggauga

SEQ ID NO: 450703 - RNA, 19 nt, Homo sapiens
  misc_RNA (1)...(19): siRNA sense strand
ggaucaaccucaaauucau

SEQ ID NO: 450704 - RNA, 19 nt, Homo sapiens
  misc_RNA (1)...(19): siRNA sense strand
gaaaugaugaaaugugaca

SEQ ID NO: 450705 - RNA, 19 nt, Homo sapiens
  misc_RNA (1)...(19): siRNA sense strand
cagaaucacuagagcugaa

SEQ ID NO: 450706 - RNA, 19 nt, Homo sapiens
  misc_RNA (1)...(19): siRNA sense strand
gcaucuguguuaacuucua

SEQ ID NO: 450707 - RNA, 19 nt, Homo sapiens
  misc_RNA (1)...(19): siRNA sense strand
acacuggagucacgcgaua

SEQ ID NO: 450708 - RNA, 19 nt, Homo sapiens
  misc_RNA (1)...(19): siRNA sense strand
ggacugaucaagacucugu

SEQ ID NO: 450709 - RNA, 19 nt, Homo sapiens
  misc_RNA (1)...(19): siRNA sense strand
aguaccagcuucagucuuu

SEQ ID NO: 450710 - RNA, 19 nt, Homo sapiens
  misc_RNA (1)...(19): siRNA sense strand
ggcccagacuccugaauug

SEQ ID NO: 450711 - RNA, 19 nt, Homo sapiens
  misc_RNA (1)...(19): siRNA sense strand
gcaugaccuucgagagauu

SEQ ID NO: 450712 - RNA, 19 nt, Homo sapiens
  misc_RNA (1)...(19): siRNA sense strand
gcccagacccacuacuaua

SEQ ID NO: 450713 - RNA, 19 nt, Homo sapiens
  misc_RNA (1)...(19): siRNA sense strand
cagggucgauccagcaauu

SEQ ID NO: 450714 - RNA, 19 nt, Homo sapiens
  misc_RNA (1)...(19): siRNA sense strand
gaaaagagaaccuccauca

SEQ ID NO: 450715 - RNA, 19 nt, Homo sapiens
  misc_RNA (1)...(19): siRNA sense strand
gauucacccuaguggauuu

SEQ ID NO: 450716 - RNA, 19 nt, Homo sapiens
  misc_RNA (1)...(19): siRNA sense strand
gauucaagcucuucuuacu

SEQ ID NO: 450717 - RNA, 19 nt, Homo sapiens
  misc_RNA (1)...(19): siRNA sense strand
ccagacuccugaauugcua

SEQ ID NO: 450718 - RNA, 19 nt, Homo sapiens
  misc_RNA (1)...(19): siRNA sense strand
agaaugacauccgcaagaa

SEQ ID NO: 450719 - RNA, 19 nt, Homo sapiens
  misc_RNA (1)...(19): siRNA sense strand
cuucuuagaugcugugaug

SEQ ID NO: 450720 - RNA, 19 nt, Homo sapiens
  misc_RNA (1)...(19): siRNA sense strand
gagcagcaaugcaggugau

SEQ ID NO: 450721 - RNA, 19 nt, Homo sapiens
  misc_RNA (1)...(19): siRNA sense strand
ccaacgugcugcagggauu

SEQ ID NO: 450722 - RNA, 19 nt, Homo sapiens
  misc_RNA (1)...(19): siRNA sense strand
ccuggaagaugaugaagau

SEQ ID NO: 450723 - RNA, 19 nt, Homo sapiens
  misc_RNA (1)...(19): siRNA sense strand
gaaguaaucaaaccugucu

SEQ ID NO: 450724 - RNA, 19 nt, Homo sapiens
  misc_RNA (1)...(19): siRNA sense strand
gaagaggguggcacugaga

SEQ ID NO: 450725 - RNA, 19 nt, Homo sapiens
  misc_RNA (1)...(19): siRNA sense strand
caucaaacccggaccugaa

SEQ ID NO: 450726 - RNA, 19 nt, Homo sapiens
  misc_RNA (1)...(19): siRNA sense strand
acgagaagcucaucaacau

SEQ ID NO: 450727 - RNA, 19 nt, Homo sapiens
  misc_RNA (1)...(19): siRNA sense strand
ccagaggacugaucaagac

SEQ ID NO: 450728 - RNA, 19 nt, Homo sapiens
  misc_RNA (1)...(19): siRNA sense strand
ggugugagccugacgucua

SEQ ID NO: 450729 - RNA, 19 nt, Homo sapiens
  misc_RNA (1)...(19): siRNA sense strand
guacaaagggacaccaugu

SEQ ID NO: 450730 - RNA, 19 nt, Homo sapiens
  misc_RNA (1)...(19): siRNA sense strand
gaugauaccucuuuugucu

SEQ ID NO: 450731 - RNA, 19 nt, Homo sapiens
  misc_RNA (1)...(19): siRNA sense strand
gggaucaaccucaaauuca

SEQ ID NO: 450732 - RNA, 19 nt, Homo sapiens
  misc_RNA (1)...(19): siRNA sense strand
gaguccagcuguuaugauc

SEQ ID NO: 450733 - RNA, 19 nt, Homo sapiens
  misc_RNA (1)...(19): siRNA sense strand
ggagggcguuaguggauca

SEQ ID NO: 450734 - RNA, 19 nt, Homo sapiens
  misc_RNA (1)...(19): siRNA sense strand
ccagccagcucugaccuuu

SEQ ID NO: 450735 - RNA, 19 nt, Homo sapiens
  misc_RNA (1)...(19): siRNA sense strand
uaacaucggaacaguguau

SEQ ID NO: 450736 - RNA, 19 nt, Homo sapiens
  misc_RNA (1)...(19): siRNA sense strand
caaaggcuauggcacaacu

SEQ ID NO: 450737 - RNA, 19 nt, Homo sapiens
  misc_RNA (1)...(19): siRNA sense strand
ggaagagaaguccaacaga

SEQ ID NO: 450738 - RNA, 19 nt, Homo sapiens
  misc_RNA (1)...(19): siRNA sense strand
gguguacaagggaauguua

SEQ ID NO: 450739 - RNA, 19 nt, Homo sapiens
  misc_RNA (1)...(19): siRNA sense strand
ccacggagccaacucugaa

SEQ ID NO: 450740 - RNA, 19 nt, Homo sapiens
  misc_RNA (1)...(19): siRNA sense strand
uugacgagcugcagaauca

SEQ ID NO: 450741 - RNA, 19 nt, Homo sapiens
  misc_RNA (1)...(19): siRNA sense strand
gaauucaacccacucaucu

SEQ ID NO: 450742 - RNA, 19 nt, Homo sapiens
  misc_RNA (1)...(19): siRNA sense strand
cucaacaaguucuauacua

SEQ ID NO: 450743 - RNA, 19 nt, Homo sapiens
  misc_RNA (1)...(19): siRNA sense strand
gaaggugaggcgccuaaug

SEQ ID NO: 450744 - RNA, 19 nt, Homo sapiens
  misc_RNA (1)...(19): siRNA sense strand
aggaaaugaucgacaggua

SEQ ID NO: 450745 - RNA, 19 nt, Homo sapiens
  misc_RNA (1)...(19): siRNA sense strand
ccagaaguuuaaaggaaga

SEQ ID NO: 450746 - RNA, 19 nt, Homo sapiens
  misc_RNA (1)...(19): siRNA sense strand
gccagcaucuuugggcuuu

SEQ ID NO: 450747 - RNA, 19 nt, Homo sapiens
  misc_RNA (1)...(19): siRNA sense strand
guacaguccucagcuugga

SEQ ID NO: 450748 - RNA, 19 nt, Homo sapiens
  misc_RNA (1)...(19): siRNA sense strand
gugacaagccaaaguggua

SEQ ID NO: 450749 - RNA, 19 nt, Homo sapiens
  misc_RNA (1)...(19): siRNA sense strand
uggcggaucuuuacuggau

SEQ ID NO: 450750 - RNA, 19 nt, Homo sapiens
  misc_RNA (1)...(19): siRNA sense strand
gaagguaaauaagaaugac

SEQ ID NO: 450751 - RNA, 19 nt, Homo sapiens
  misc_RNA (1)...(19): siRNA sense strand
uguuagaccuccucaagug

SEQ ID NO: 450752 - RNA, 19 nt, Homo sapiens
  misc_RNA (1)...(19): siRNA sense strand
uggcaucuguguuaacuuc

SEQ ID NO: 450753 - RNA, 19 nt, Homo sapiens
  misc_RNA (1)...(19): siRNA sense strand
ccagacccaucucgauuca

SEQ ID NO: 450754 - RNA, 19 nt, Homo sapiens
  misc_RNA (1)...(19): siRNA sense strand
gucgggagcuguacuacug

SEQ ID NO: 450755 - RNA, 19 nt, Homo sapiens
  misc_RNA (1)...(19): siRNA sense strand
guaguaacaucggaacagu

SEQ ID NO: 450756 - RNA, 19 nt, Homo sapiens
  misc_RNA (1)...(19): siRNA sense strand
cgaauucacaacaauaugu

SEQ ID NO: 450757 - RNA, 19 nt, Homo sapiens
  misc_RNA (1)...(19): siRNA sense strand
cagcgaauucacaacaaua

SEQ ID NO: 450758 - RNA, 19 nt, Homo sapiens
  misc_RNA (1)...(19): siRNA sense strand
ucuacaaacuggacuucaa

SEQ ID NO: 450759 - RNA, 19 nt, Homo sapiens
  misc_RNA (1)...(19): siRNA sense strand
cagcgagucuaucucuaug

SEQ ID NO: 450760 - RNA, 19 nt, Homo sapiens
  misc_RNA (1)...(19): siRNA sense strand
ggaagggaucaaccucaaa

SEQ ID NO: 450761 - RNA, 19 nt, Homo sapiens
  misc_RNA (1)...(19): siRNA sense strand
ugugugguguugcguagua

SEQ ID NO: 450762 - RNA, 19 nt, Homo sapiens
  misc_RNA (1)...(19): siRNA sense strand
uacaaacggagauaucuuu

SEQ ID NO: 450763 - RNA, 19 nt, Homo sapiens
  misc_RNA (1)...(19): siRNA sense strand
gcagacauuugugguacau

SEQ ID NO: 450764 - RNA, 19 nt, Homo sapiens
  misc_RNA (1)...(19): siRNA sense strand
guacagccagcaaaucaau

SEQ ID NO: 450765 - RNA, 19 nt, Homo sapiens
  misc_RNA (1)...(19): siRNA sense strand
guaccugucccuuggagaa

SEQ ID NO: 450766 - RNA, 19 nt, Homo sapiens
  misc_RNA (1)...(19): siRNA sense strand
gaagucaucugucauuaaa

SEQ ID NO: 450767 - RNA, 19 nt, Homo sapiens
  misc_RNA (1)...(19): siRNA sense strand
gaagagaaguccaacagaa

SEQ ID NO: 450768 - RNA, 19 nt, Homo sapiens
  misc_RNA (1)...(19): siRNA sense strand
gaaguucuguccucgguua

SEQ ID NO: 450769 - RNA, 19 nt, Homo sapiens
  misc_RNA (1)...(19): siRNA sense strand
cuacggagauggaugauaa

SEQ ID NO: 450770 - RNA, 19 nt, Homo sapiens
  misc_RNA (1)...(19): siRNA sense strand
gcagugauaguauggauua

SEQ ID NO: 450771 - RNA, 19 nt, Homo sapiens
  misc_RNA (1)...(19): siRNA sense strand
ggaagcgccuggaagauga

SEQ ID NO: 450772 - RNA, 19 nt, Homo sapiens
  misc_RNA (1)...(19): siRNA sense strand
caagugcccuucugcauga

SEQ ID NO: 450773 - RNA, 19 nt, Homo sapiens
  misc_RNA (1)...(19): siRNA sense strand
ggacagacgucaggcagaa

SEQ ID NO: 450774 - RNA, 19 nt, Homo sapiens
  misc_RNA (1)...(19): siRNA sense strand
caaaaugccugaugaugua

SEQ ID NO: 450775 - RNA, 19 nt, Homo sapiens
  misc_RNA (1)...(19): siRNA sense strand
aaacacagcccaacaguga

SEQ ID NO: 450776 - RNA, 19 nt, Homo sapiens
  misc_RNA (1)...(19): siRNA sense strand
ucagugaaaugaugaaaug

SEQ ID NO: 450777 - RNA, 19 nt, Homo sapiens
  misc_RNA (1)...(19): siRNA sense strand
cgauauggcaucuguguua

SEQ ID NO: 450778 - RNA, 19 nt, Homo sapiens
  misc_RNA (1)...(19): siRNA sense strand
gugauaguauggauuauga

SEQ ID NO: 450779 - RNA, 19 nt, Homo sapiens
  misc_RNA (1)...(19): siRNA sense strand
gaugauaguggcagugaua

SEQ ID NO: 450780 - RNA, 19 nt, Homo sapiens
  misc_RNA (1)...(19): siRNA sense strand
ccacugcgcuccagcucua

SEQ ID NO: 450781 - RNA, 19 nt, Homo sapiens
  misc_RNA (1)...(19): siRNA sense strand
gugaaaugaugaaauguga

SEQ ID NO: 450782 - RNA, 19 nt, Homo sapiens
  misc_RNA (1)...(19): siRNA sense strand
ggacagcaauagggugauu

SEQ ID NO: 450783 - RNA, 19 nt, Homo sapiens
  misc_RNA (1)...(19): siRNA sense strand
gcaaaucaaugaggugcuu

SEQ ID NO: 450784 - RNA, 19 nt, Homo sapiens
  misc_RNA (1)...(19): siRNA sense strand
caccagaaguuuaaaggaa

SEQ ID NO: 450785 - RNA, 19 nt, Homo sapiens
  misc_RNA (1)...(19): siRNA sense strand
gauauggcaucuguguuaa

SEQ ID NO: 450786 - RNA, 19 nt, Homo sapiens
  misc_RNA (1)...(19): siRNA sense strand
caacagaaaguguaaauac

SEQ ID NO: 450787 - RNA, 19 nt, Homo sapiens
  misc_RNA (1)...(19): siRNA sense strand
caagcuggcuccuuucuag

SEQ ID NO: 450788 - RNA, 19 nt, Homo sapiens
  misc_RNA (1)...(19): siRNA sense strand
gugcuaaccugcauucugu

SEQ ID NO: 450789 - RNA, 19 nt, Homo sapiens
  misc_RNA (1)...(19): siRNA sense strand
gauaguggcagugauagua

SEQ ID NO: 450790 - RNA, 19 nt, Homo sapiens
  misc_RNA (1)...(19): siRNA sense strand
ucaaauucaugcacaauca

SEQ ID NO: 450791 - RNA, 19 nt, Homo sapiens
  misc_RNA (1)...(19): siRNA sense strand
agacccagcucaacaaguu

SEQ ID NO: 450792 - RNA, 19 nt, Homo sapiens
  misc_RNA (1)...(19): siRNA sense strand
ccagcgagguggagauuga

SEQ ID NO: 450793 - RNA, 19 nt, Homo sapiens
  misc_RNA (1)...(19): siRNA sense strand
gagcuguacuacuguguga

SEQ ID NO: 450794 - RNA, 19 nt, Homo sapiens
  misc_RNA (1)...(19): siRNA sense strand
guacaugcagggacagaua

SEQ ID NO: 450795 - RNA, 19 nt, Homo sapiens
  misc_RNA (1)...(19): siRNA sense strand
gaagcagacauuuguggua

SEQ ID NO: 450796 - RNA, 19 nt, Homo sapiens
  misc_RNA (1)...(19): siRNA sense strand
gcucugaccuuugcucuuc

SEQ ID NO: 450797 - RNA, 19 nt, Homo sapiens
  misc_RNA (1)...(19): siRNA sense strand
gagaagggauggguaugga

SEQ ID NO: 450798 - RNA, 19 nt, Homo sapiens
  misc_RNA (1)...(19): siRNA sense strand
ugaauuggguggcgaguuc

SEQ ID NO: 450799 - RNA, 19 nt, Homo sapiens
  misc_RNA (1)...(19): siRNA sense strand
agacgaagguguugugcuu

SEQ ID NO: 450800 - RNA, 19 nt, Homo sapiens
  misc_RNA (1)...(19): siRNA sense strand
ugaagaagcagacauuugu

SEQ ID NO: 450801 - RNA, 19 nt, Homo sapiens
  misc_RNA (1)...(19): siRNA sense strand
gaagggaucaaccucaaau

SEQ ID NO: 450802 - RNA, 19 nt, Homo sapiens
  misc_RNA (1)...(19): siRNA sense strand
gcaugagccuucgggauga

SEQ ID NO: 450803 - RNA, 19 nt, Homo sapiens
  misc_RNA (1)...(19): siRNA sense strand
ggaucaaccucaaauucau

SEQ ID NO: 450804 - RNA, 19 nt, Homo sapiens
  misc_RNA (1)...(19): siRNA sense strand
gaaaugaugaaaugugaca

SEQ ID NO: 450805 - RNA, 19 nt, Homo sapiens
  misc_RNA (1)...(19): siRNA sense strand
cagaaucacuagagcugaa

SEQ ID NO: 450806 - RNA, 19 nt, Homo sapiens
  misc_RNA (1)...(19): siRNA sense strand
gcaucuguguuaacuucua

SEQ ID NO: 450807 - RNA, 19 nt, Homo sapiens
  misc_RNA (1)...(19): siRNA sense strand
acacuggagucacgcgaua

SEQ ID NO: 450808 - RNA, 19 nt, Homo sapiens
  misc_RNA (1)...(19): siRNA sense strand
ggacugaucaagacucugu

SEQ ID NO: 450809 - RNA, 19 nt, Homo sapiens
  misc_RNA (1)...(19): siRNA sense strand
aguaccagcuucagucuuu

SEQ ID NO: 450810 - RNA, 19 nt, Homo sapiens
  misc_RNA (1)...(19): siRNA sense strand
ggcccagacuccugaauug

SEQ ID NO: 450811 - RNA, 19 nt, Homo sapiens
  misc_RNA (1)...(19): siRNA sense strand
gcaugaccuucgagagauu

SEQ ID NO: 450812 - RNA, 19 nt, Homo sapiens
  misc_RNA (1)...(19): siRNA sense strand
gcccagacccacuacuaua

SEQ ID NO: 450813 - RNA, 19 nt, Homo sapiens
  misc_RNA (1)...(19): siRNA sense strand
cagggucgauccagcaauu

SEQ ID NO: 450814 - RNA, 19 nt, Homo sapiens
  misc_RNA (1)...(19): siRNA sense strand
gaaaagagaaccuccauca

SEQ ID NO: 450815 - RNA, 19 nt, Homo sapiens
  misc_RNA (1)...(19): siRNA sense strand
gauucacccuaguggauuu

SEQ ID NO: 450816 - RNA, 19 nt, Homo sapiens
  misc_RNA (1)...(19): siRNA sense strand
gauucaagcucuucuuacu

SEQ ID NO: 450817 - RNA, 19 nt, Homo sapiens
  misc_RNA (1)...(19): siRNA sense strand
ccagacuccugaauugcua

SEQ ID NO: 450818 - RNA, 19 nt, Homo sapiens
  misc_RNA (1)...(19): siRNA sense strand
agaaugacauccgcaagaa

SEQ ID NO: 450819 - RNA, 19 nt, Homo sapiens
  misc_RNA (1)...(19): siRNA sense strand
cuucuuagaugcugugaug

SEQ ID NO: 450820 - RNA, 19 nt, Homo sapiens
  misc_RNA (1)...(19): siRNA sense strand
gagcagcaaugcaggugau

SEQ ID NO: 450821 - RNA, 19 nt, Homo sapiens
  misc_RNA (1)...(19): siRNA sense strand
ccaacgugcugcagggauu

SEQ ID NO: 450822 - RNA, 19 nt, Homo sapiens
  misc_RNA (1)...(19): siRNA sense strand
ccuggaagaugaugaagau

SEQ ID NO: 450823 - RNA, 19 nt, Homo sapiens
  misc_RNA (1)...(19): siRNA sense strand
gaaguaaucaaaccugucu

SEQ ID NO: 450824 - RNA, 19 nt, Homo sapiens
  misc_RNA (1)...(19): siRNA sense strand
gaagaggguggcacugaga

SEQ ID NO: 450825 - RNA, 19 nt, Homo sapiens
  misc_RNA (1)...(19): siRNA sense strand
caucaaacccggaccugaa

SEQ ID NO: 450826 - RNA, 19 nt, Homo sapiens
  misc_RNA (1)...(19): siRNA sense strand
acgagaagcucaucaacau

SEQ ID NO: 450827 - RNA, 19 nt, Homo sapiens
  misc_RNA (1)...(19): siRNA sense strand
ccagaggacugaucaagac

SEQ ID NO: 450828 - RNA, 19 nt, Homo sapiens
  misc_RNA (1)...(19): siRNA sense strand
ggugugagccugacgucua

SEQ ID NO: 450829 - RNA, 19 nt, Homo sapiens
  misc_RNA (1)...(19): siRNA sense strand
guacaaagggacaccaugu

SEQ ID NO: 450830 - RNA, 19 nt, Homo sapiens
  misc_RNA (1)...(19): siRNA sense strand
gaugauaccucuuuugucu

SEQ ID NO: 450831 - RNA, 19 nt, Homo sapiens
  misc_RNA (1)...(19): siRNA sense strand
gggaucaaccucaaauuca

SEQ ID NO: 450832 - RNA, 19 nt, Homo sapiens
  misc_RNA (1)...(19): siRNA sense strand
gaguccagcuguuaugauc

SEQ ID NO: 450833 - RNA, 19 nt, Homo sapiens
  misc_RNA (1)...(19): siRNA sense strand
ggagggcguuaguggauca

SEQ ID NO: 450834 - RNA, 19 nt, Homo sapiens
  misc_RNA (1)...(19): siRNA sense strand
ccagccagcucugaccuuu

SEQ ID NO: 450835 - RNA, 19 nt, Homo sapiens
  misc_RNA (1)...(19): siRNA sense strand
uaacaucggaacaguguau

SEQ ID NO: 450836 - RNA, 19 nt, Homo sapiens
  misc_RNA (1)...(19): siRNA sense strand
caaaggcuauggcacaacu

SEQ ID NO: 450837 - RNA, 19 nt, Homo sapiens
  misc_RNA (1)...(19): siRNA sense strand
ggaagagaaguccaacaga

SEQ ID NO: 450838 - RNA, 19 nt, Homo sapiens
  misc_RNA (1)...(19): siRNA sense strand
gguguacaagggaauguua

SEQ ID NO: 450839 - RNA, 19 nt, Homo sapiens
  misc_RNA (1)...(19): siRNA sense strand
ccacggagccaacucugaa

SEQ ID NO: 450840 - RNA, 19 nt, Homo sapiens
  misc_RNA (1)...(19): siRNA sense strand
uugacgagcugcagaauca

SEQ ID NO: 450841 - RNA, 19 nt, Homo sapiens
  misc_RNA (1)...(19): siRNA sense strand
gaauucaacccacucaucu

SEQ ID NO: 450842 - RNA, 19 nt, Homo sapiens
  misc_RNA (1)...(19): siRNA sense strand
cucaacaaguucuauacua

SEQ ID NO: 450843 - RNA, 19 nt, Homo sapiens
  misc_RNA (1)...(19): siRNA sense strand
gaaggugaggcgccuaaug

SEQ ID NO: 450844 - RNA, 19 nt, Homo sapiens
  misc_RNA (1)...(19): siRNA sense strand
aggaaaugaucgacaggua

SEQ ID NO: 450845 - RNA, 19 nt, Homo sapiens
  misc_RNA (1)...(19): siRNA sense strand
ccagaaguuuaaaggaaga

SEQ ID NO: 450846 - RNA, 19 nt, Homo sapiens
  misc_RNA (1)...(19): siRNA sense strand
gccagcaucuuugggcuuu

SEQ ID NO: 450847 - RNA, 19 nt, Homo sapiens
  misc_RNA (1)...(19): siRNA sense strand
guacaguccucagcuugga

SEQ ID NO: 450848 - RNA, 19 nt, Homo sapiens
  misc_RNA (1)...(19): siRNA sense strand
gugacaagccaaaguggua

SEQ ID NO: 450849 - RNA, 19 nt, Homo sapiens
  misc_RNA (1)...(19): siRNA sense strand
uggcggaucuuuacuggau

SEQ ID NO: 450850 - RNA, 19 nt, Homo sapiens
  misc_RNA (1)...(19): siRNA sense strand
gaagguaaauaagaaugac

SEQ ID NO: 450851 - RNA, 19 nt, Homo sapiens
  misc_RNA (1)...(19): siRNA sense strand
uguuagaccuccucaagug

SEQ ID NO: 450852 - RNA, 19 nt, Homo sapiens
  misc_RNA (1)...(19): siRNA sense strand
uggcaucuguguuaacuuc

SEQ ID NO: 450853 - RNA, 19 nt, Homo sapiens
  misc_RNA (1)...(19): siRNA sense strand
ccagacccaucucgauuca

SEQ ID NO: 450854 - RNA, 19 nt, Homo sapiens
  misc_RNA (1)...(19): siRNA sense strand
gucgggagcuguacuacug

SEQ ID NO: 450855 - RNA, 19 nt, Homo sapiens
  misc_RNA (1)...(19): siRNA sense strand
guaguaacaucggaacagu

SEQ ID NO: 450856 - RNA, 19 nt, Homo sapiens
  misc_RNA (1)...(19): siRNA sense strand
cgaauucacaacaauaugu

SEQ ID NO: 450857 - RNA, 19 nt, Homo sapiens
  misc_RNA (1)...(19): siRNA sense strand
cagcgaauucacaacaaua

SEQ ID NO: 450858 - RNA, 19 nt, Homo sapiens
  misc_RNA (1)...(19): siRNA sense strand
ucuacaaacuggacuucaa

SEQ ID NO: 450859 - RNA, 19 nt, Homo sapiens
  misc_RNA (1)...(19): siRNA sense strand
cagcgagucuaucucuaug

SEQ ID NO: 450860 - RNA, 19 nt, Homo sapiens
  misc_RNA (1)...(19): siRNA sense strand
ggaagggaucaaccucaaa

SEQ ID NO: 450861 - RNA, 19 nt, Homo sapiens
  misc_RNA (1)...(19): siRNA sense strand
ugugugguguugcguagua

SEQ ID NO: 450862 - RNA, 19 nt, Homo sapiens
  misc_RNA (1)...(19): siRNA sense strand
uacaaacggagauaucuuu

SEQ ID NO: 450863 - RNA, 19 nt, Homo sapiens
  misc_RNA (1)...(19): siRNA sense strand
gcagacauuugugguacau

SEQ ID NO: 450864 - RNA, 19 nt, Homo sapiens
  misc_RNA (1)...(19): siRNA sense strand
guacagccagcaaaucaau

SEQ ID NO: 450865 - RNA, 19 nt, Homo sapiens
  misc_RNA (1)...(19): siRNA sense strand
guaccugucccuuggagaa

SEQ ID NO: 450866 - RNA, 19 nt, Homo sapiens
  misc_RNA (1)...(19): siRNA sense strand
gaagucaucugucauuaaa

SEQ ID NO: 450867 - RNA, 19 nt, Homo sapiens
  misc_RNA (1)...(19): siRNA sense strand
gaagagaaguccaacagaa

SEQ ID NO: 450868 - RNA, 19 nt, Homo sapiens
  misc_RNA (1)...(19): siRNA sense strand
gaaguucuguccucgguua

SEQ ID NO: 450869 - RNA, 19 nt, Homo sapiens
  misc_RNA (1)...(19): siRNA sense strand
cuacggagauggaugauaa

SEQ ID NO: 450870 - RNA, 19 nt, Homo sapiens
  misc_RNA (1)...(19): siRNA sense strand
gcagugauaguauggauua

SEQ ID NO: 450871 - RNA, 19 nt, Homo sapiens
  misc_RNA (1)...(19): siRNA sense strand
ggaagcgccuggaagauga

SEQ ID NO: 450872 - RNA, 19 nt, Homo sapiens
  misc_RNA (1)...(19): siRNA sense strand
caagugcccuucugcauga

SEQ ID NO: 450873 - RNA, 19 nt, Homo sapiens
  misc_RNA (1)...(19): siRNA sense strand
ggacagacgucaggcagaa

SEQ ID NO: 450874 - RNA, 19 nt, Homo sapiens
  misc_RNA (1)...(19): siRNA sense strand
caaaaugccugaugaugua

SEQ ID NO: 450875 - RNA, 19 nt, Homo sapiens
  misc_RNA (1)...(19): siRNA sense strand
aaacacagcccaacaguga

SEQ ID NO: 450876 - RNA, 19 nt, Homo sapiens
  misc_RNA (1)...(19): siRNA sense strand
gaaaucugcuacuccguau

SEQ ID NO: 450877 - RNA, 19 nt, Homo sapiens
  misc_RNA (1)...(19): siRNA sense strand
ucagugaaaugaugaaaug

SEQ ID NO: 450878 - RNA, 19 nt, Homo sapiens
  misc_RNA (1)...(19): siRNA sense strand
cgauauggcaucuguguua

SEQ ID NO: 450879 - RNA, 19 nt, Homo sapiens
  misc_RNA (1)...(19): siRNA sense strand
gugauaguauggauuauga

SEQ ID NO: 450880 - RNA, 19 nt, Homo sapiens
  misc_RNA (1)...(19): siRNA sense strand
gaugauaguggcagugaua

SEQ ID NO: 450881 - RNA, 19 nt, Homo sapiens
  misc_RNA (1)...(19): siRNA sense strand
ccacugcgcuccagcucua

SEQ ID NO: 450882 - RNA, 19 nt, Homo sapiens
  misc_RNA (1)...(19): siRNA sense strand
gugaaaugaugaaauguga

SEQ ID NO: 450883 - RNA, 19 nt, Homo sapiens
  misc_RNA (1)...(19): siRNA sense strand
ggacagcaauagggugauu

SEQ ID NO: 450884 - RNA, 19 nt, Homo sapiens
  misc_RNA (1)...(19): siRNA sense strand
gcaaaucaaugaggugcuu

SEQ ID NO: 450885 - RNA, 19 nt, Homo sapiens
  misc_RNA (1)...(19): siRNA sense strand
caccagaaguuuaaaggaa

SEQ ID NO: 450886 - RNA, 19 nt, Homo sapiens
  misc_RNA (1)...(19): siRNA sense strand
gauauggcaucuguguuaa

SEQ ID NO: 450887 - RNA, 19 nt, Homo sapiens
  misc_RNA (1)...(19): siRNA sense strand
uauuaugucucuucucgua

SEQ ID NO: 450888 - RNA, 19 nt, Homo sapiens
  misc_RNA (1)...(19): siRNA sense strand
caacagaaaguguaaauac

SEQ ID NO: 450889 - RNA, 19 nt, Homo sapiens
  misc_RNA (1)...(19): siRNA sense strand
caagcuggcuccuuucuag

SEQ ID NO: 450890 - RNA, 19 nt, Homo sapiens
  misc_RNA (1)...(19): siRNA sense strand
gugcuaaccugcauucugu

SEQ ID NO: 450891 - RNA, 19 nt, Homo sapiens
  misc_RNA (1)...(19): siRNA sense strand
gauaguggcagugauagua

SEQ ID NO: 450892 - RNA, 19 nt, Homo sapiens
  misc_RNA (1)...(19): siRNA sense strand
guacguggcugcaguucau

SEQ ID NO: 450893 - RNA, 19 nt, Homo sapiens
  misc_RNA (1)...(19): siRNA sense strand
ucaaauucaugcacaauca

SEQ ID NO: 450894 - RNA, 19 nt, Homo sapiens
  misc_RNA (1)...(19): siRNA sense strand
agacccagcucaacaaguu

SEQ ID NO: 450895 - RNA, 19 nt, Homo sapiens
  misc_RNA (1)...(19): siRNA sense strand
ccagcgagguggagauuga

SEQ ID NO: 450896 - RNA, 19 nt, Homo sapiens
  misc_RNA (1)...(19): siRNA sense strand
gagcuguacuacuguguga

SEQ ID NO: 450897 - RNA, 19 nt, Homo sapiens
  misc_RNA (1)...(19): siRNA sense strand
guacaugcagggacagaua

SEQ ID NO: 450898 - RNA, 19 nt, Homo sapiens
  misc_RNA (1)...(19): siRNA sense strand
gaagcagacauuuguggua

SEQ ID NO: 450899 - RNA, 19 nt, Homo sapiens
  misc_RNA (1)...(19): siRNA sense strand
gcucugaccuuugcucuuc

SEQ ID NO: 450900 - RNA, 19 nt, Homo sapiens
  misc_RNA (1)...(19): siRNA sense strand
gagaagggauggguaugga

SEQ ID NO: 450901 - RNA, 19 nt, Homo sapiens
  misc_RNA (1)...(19): siRNA sense strand
ugaauuggguggcgaguuc

SEQ ID NO: 450902 - RNA, 19 nt, Homo sapiens
  misc_RNA (1)...(19): siRNA sense strand
agacgaagguguugugcuu

SEQ ID NO: 450903 - RNA, 19 nt, Homo sapiens
  misc_RNA (1)...(19): siRNA sense strand
ugaagaagcagacauuugu

SEQ ID NO: 450904 - RNA, 19 nt, Homo sapiens
  misc_RNA (1)...(19): siRNA sense strand
gaagggaucaaccucaaau

SEQ ID NO: 450905 - RNA, 19 nt, Homo sapiens
  misc_RNA (1)...(19): siRNA sense strand
gcaugagccuucgggauga

SEQ ID NO: 450906 - RNA, 19 nt, Homo sapiens
  misc_RNA (1)...(19): siRNA sense strand
ggaucaaccucaaauucau

SEQ ID NO: 450907 - RNA, 19 nt, Homo sapiens
  misc_RNA (1)...(19): siRNA sense strand
gaaaugaugaaaugugaca

SEQ ID NO: 450908 - RNA, 19 nt, Homo sapiens
  misc_RNA (1)...(19): siRNA sense strand
cagaaucacuagagcugaa

SEQ ID NO: 450909 - RNA, 19 nt, Homo sapiens
  misc_RNA (1)...(19): siRNA sense strand
gcaucuguguuaacuucua

SEQ ID NO: 450910 - RNA, 19 nt, Homo sapiens
  misc_RNA (1)...(19): siRNA sense strand
acacuggagucacgcgaua

SEQ ID NO: 450911 - RNA, 19 nt, Homo sapiens
  misc_RNA (1)...(19): siRNA sense strand
ggcccagacuccugaauug

SEQ ID NO: 450912 - RNA, 19 nt, Homo sapiens
  misc_RNA (1)...(19): siRNA sense strand
ggacugaucaagacucugu

SEQ ID NO: 450913 - RNA, 19 nt, Homo sapiens
  misc_RNA (1)...(19): siRNA sense strand
aguaccagcuucagucuuu

SEQ ID NO: 450914 - RNA, 19 nt, Homo sapiens
  misc_RNA (1)...(19): siRNA sense strand
gcaugaccuucgagagauu

SEQ ID NO: 450915 - RNA, 19 nt, Homo sapiens
  misc_RNA (1)...(19): siRNA sense strand
aaucugcuacuccguauua

SEQ ID NO: 450916 - RNA, 19 nt, Homo sapiens
  misc_RNA (1)...(19): siRNA sense strand
gcccagacccacuacuaua

SEQ ID NO: 450917 - RNA, 19 nt, Homo sapiens
  misc_RNA (1)...(19): siRNA sense strand
cagggucgauccagcaauu

SEQ ID NO: 450918 - RNA, 19 nt, Homo sapiens
  misc_RNA (1)...(19): siRNA sense strand
gaaaagagaaccuccauca

SEQ ID NO: 450919 - RNA, 19 nt, Homo sapiens
  misc_RNA (1)...(19): siRNA sense strand
gauucacccuaguggauuu

SEQ ID NO: 450920 - RNA, 19 nt, Homo sapiens
  misc_RNA (1)...(19): siRNA sense strand
ccagacuccugaauugcua

SEQ ID NO: 450921 - RNA, 19 nt, Homo sapiens
  misc_RNA (1)...(19): siRNA sense strand
agaaugacauccgcaagaa

SEQ ID NO: 450922 - RNA, 19 nt, Homo sapiens
  misc_RNA (1)...(19): siRNA sense strand
cuucuuagaugcugugaug

SEQ ID NO: 450923 - RNA, 19 nt, Homo sapiens
  misc_RNA (1)...(19): siRNA sense strand
gagcagcaaugcaggugau

SEQ ID NO: 450924 - RNA, 19 nt, Homo sapiens
  misc_RNA (1)...(19): siRNA sense strand
gauucaagcucuucuuacu

SEQ ID NO: 450925 - RNA, 19 nt, Homo sapiens
  misc_RNA (1)...(19): siRNA sense strand
ccaacgugcugcagggauu

SEQ ID NO: 450926 - RNA, 19 nt, Homo sapiens
  misc_RNA (1)...(19): siRNA sense strand
ccuggaagaugaugaagau

SEQ ID NO: 450927 - RNA, 19 nt, Homo sapiens
  misc_RNA (1)...(19): siRNA sense strand
gaaguaaucaaaccugucu

SEQ ID NO: 450928 - RNA, 19 nt, Homo sapiens
  misc_RNA (1)...(19): siRNA sense strand
gaagaggguggcacugaga

SEQ ID NO: 450929 - RNA, 19 nt, Homo sapiens
  misc_RNA (1)...(19): siRNA sense strand
caucaaacccggaccugaa

SEQ ID NO: 450930 - RNA, 19 nt, Homo sapiens
  misc_RNA (1)...(19): siRNA sense strand
acgagaagcucaucaacau

SEQ ID NO: 450931 - RNA, 19 nt, Homo sapiens
  misc_RNA (1)...(19): siRNA sense strand
ccagaggacugaucaagac

SEQ ID NO: 450932 - RNA, 19 nt, Homo sapiens
  misc_RNA (1)...(19): siRNA sense strand
ggugugagccugacgucua

SEQ ID NO: 450933 - RNA, 19 nt, Homo sapiens
  misc_RNA (1)...(19): siRNA sense strand
guacaaagggacaccaugu

SEQ ID NO: 450934 - RNA, 19 nt, Homo sapiens
  misc_RNA (1)...(19): siRNA sense strand
ggagggcguuaguggauca

SEQ ID NO: 450935 - RNA, 19 nt, Homo sapiens
  misc_RNA (1)...(19): siRNA sense strand
gggaucaaccucaaauuca

SEQ ID NO: 450936 - RNA, 19 nt, Homo sapiens
  misc_RNA (1)...(19): siRNA sense strand
gaugauaccucuuuugucu

SEQ ID NO: 450937 - RNA, 19 nt, Homo sapiens
  misc_RNA (1)...(19): siRNA sense strand
gaguccagcuguuaugauc

SEQ ID NO: 450938 - RNA, 19 nt, Homo sapiens
  misc_RNA (1)...(19): siRNA sense strand
ccagccagcucugaccuuu

SEQ ID NO: 450939 - RNA, 19 nt, Homo sapiens
  misc_RNA (1)...(19): siRNA sense strand
uaacaucggaacaguguau

SEQ ID NO: 450940 - RNA, 19 nt, Homo sapiens
  misc_RNA (1)...(19): siRNA sense strand
caaaggcuauggcacaacu

SEQ ID NO: 450941 - RNA, 19 nt, Homo sapiens
  misc_RNA (1)...(19): siRNA sense strand
ggaagagaaguccaacaga

SEQ ID NO: 450942 - RNA, 19 nt, Homo sapiens
  misc_RNA (1)...(19): siRNA sense strand
gguguacaagggaauguua

SEQ ID NO: 450943 - RNA, 19 nt, Homo sapiens
  misc_RNA (1)...(19): siRNA sense strand
ccacggagccaacucugaa

SEQ ID NO: 450944 - RNA, 19 nt, Homo sapiens
  misc_RNA (1)...(19): siRNA sense strand
uugacgagcugcagaauca

SEQ ID NO: 450945 - RNA, 19 nt, Homo sapiens
  misc_RNA (1)...(19): siRNA sense strand
gaauucaacccacucaucu

SEQ ID NO: 450946 - RNA, 19 nt, Homo sapiens
  misc_RNA (1)...(19): siRNA sense strand
cucaacaaguucuauacua

SEQ ID NO: 450947 - RNA, 19 nt, Homo sapiens
  misc_RNA (1)...(19): siRNA sense strand
gaaggugaggcgccuaaug

SEQ ID NO: 450948 - RNA, 19 nt, Homo sapiens
  misc_RNA (1)...(19): siRNA sense strand
aggaaaugaucgacaggua

SEQ ID NO: 450949 - RNA, 19 nt, Homo sapiens
  misc_RNA (1)...(19): siRNA sense strand
ccagaaguuuaaaggaaga

SEQ ID NO: 450950 - RNA, 19 nt, Homo sapiens
  misc_RNA (1)...(19): siRNA sense strand
gccagcaucuuugggcuuu

SEQ ID NO: 450951 - RNA, 19 nt, Homo sapiens
  misc_RNA (1)...(19): siRNA sense strand
guacaguccucagcuugga

SEQ ID NO: 450952 - RNA, 19 nt, Homo sapiens
  misc_RNA (1)...(19): siRNA sense strand
gugacaagccaaaguggua

SEQ ID NO: 450953 - RNA, 19 nt, Homo sapiens
  misc_RNA (1)...(19): siRNA sense strand
uggcggaucuuuacuggau

SEQ ID NO: 450954 - RNA, 19 nt, Homo sapiens
  misc_RNA (1)...(19): siRNA sense strand
gaagguaaauaagaaugac

SEQ ID NO: 450955 - RNA, 19 nt, Homo sapiens
  misc_RNA (1)...(19): siRNA sense strand
uggcaucuguguuaacuuc

SEQ ID NO: 450956 - RNA, 19 nt, Homo sapiens
  misc_RNA (1)...(19): siRNA sense strand
uguuagaccuccucaagug

SEQ ID NO: 450957 - RNA, 19 nt, Homo sapiens
  misc_RNA (1)...(19): siRNA sense strand
ccagacccaucucgauuca

SEQ ID NO: 450958 - RNA, 19 nt, Homo sapiens
  misc_RNA (1)...(19): siRNA sense strand
gucgggagcuguacuacug

SEQ ID NO: 450959 - RNA, 19 nt, Homo sapiens
  misc_RNA (1)...(19): siRNA sense strand
guaguaacaucggaacagu

SEQ ID NO: 450960 - RNA, 19 nt, Homo sapiens
  misc_RNA (1)...(19): siRNA sense strand
cgaauucacaacaauaugu

SEQ ID NO: 450961 - RNA, 19 nt, Homo sapiens
  misc_RNA (1)...(19): siRNA sense strand
cagcgaauucacaacaaua

SEQ ID NO: 450962 - RNA, 19 nt, Homo sapiens
  misc_RNA (1)...(19): siRNA sense strand
ucuacaaacuggacuucaa

SEQ ID NO: 450963 - RNA, 19 nt, Homo sapiens
  misc_RNA (1)...(19): siRNA sense strand
uacaaacggagauaucuuu

SEQ ID NO: 450964 - RNA, 19 nt, Homo sapiens
  misc_RNA (1)...(19): siRNA sense strand
ggaagggaucaaccucaaa

SEQ ID NO: 450965 - RNA, 19 nt, Homo sapiens
  misc_RNA (1)...(19): siRNA sense strand
ugugugguguugcguagua

SEQ ID NO: 450966 - RNA, 19 nt, Homo sapiens
  misc_RNA (1)...(19): siRNA sense strand
gaacagcucuugaaauuug

SEQ ID NO: 450967 - RNA, 19 nt, Homo sapiens
  misc_RNA (1)...(19): siRNA sense strand
agacagagcuggaauauca

SEQ ID NO: 450968 - RNA, 19 nt, Homo sapiens
  misc_RNA (1)...(19): siRNA sense strand
ugacugagcuggacaaaga

SEQ ID NO: 450969 - RNA, 19 nt, Homo sapiens
  misc_RNA (1)...(19): siRNA sense strand
ggaagaggcugacacauag

SEQ ID NO: 450970 - RNA, 19 nt, Homo sapiens
  misc_RNA (1)...(19): siRNA sense strand
gaaagaagcagaugccauu

SEQ ID NO: 450971 - RNA, 19 nt, Homo sapiens
  misc_RNA (1)...(19): siRNA sense strand
ggaagaggcuggcaaaaua

SEQ ID NO: 450972 - RNA, 19 nt, Homo sapiens
  misc_RNA (1)...(19): siRNA sense strand
gaaauuauccaaugacgaa

SEQ ID NO: 450973 - RNA, 19 nt, Homo sapiens
  misc_RNA (1)...(19): siRNA sense strand
gaaaaucucugcuggcuuu

SEQ ID NO: 450974 - RNA, 19 nt, Homo sapiens
  misc_RNA (1)...(19): siRNA sense strand
uggaacagcucuugaaauu

SEQ ID NO: 450975 - RNA, 19 nt, Homo sapiens
  misc_RNA (1)...(19): siRNA sense strand
gaaggaagaagaagaagaa

SEQ ID NO: 450976 - RNA, 19 nt, Homo sapiens
  misc_RNA (1)...(19): siRNA sense strand
ggaagaagaagaagaaaga

SEQ ID NO: 450977 - RNA, 19 nt, Homo sapiens
  misc_RNA (1)...(19): siRNA sense strand
gagaugagccgaauuaauc

SEQ ID NO: 450978 - RNA, 19 nt, Homo sapiens
  misc_RNA (1)...(19): siRNA sense strand
gagauaaguuugugucugu

SEQ ID NO: 450979 - RNA, 19 nt, Homo sapiens
  misc_RNA (1)...(19): siRNA sense strand
caaauauacuguagcaaga

SEQ ID NO: 450980 - RNA, 19 nt, Homo sapiens
  misc_RNA (1)...(19): siRNA sense strand
gaacgagaaugugaugcua

SEQ ID NO: 450981 - RNA, 19 nt, Homo sapiens
  misc_RNA (1)...(19): siRNA sense strand
ggucuaaacugcccgagaa

SEQ ID NO: 450982 - RNA, 19 nt, Homo sapiens
  misc_RNA (1)...(19): siRNA sense strand
caaaugcccugaaauccuu

SEQ ID NO: 450983 - RNA, 19 nt, Homo sapiens
  misc_RNA (1)...(19): siRNA sense strand
gaaauaaguaccuugagaa

SEQ ID NO: 450984 - RNA, 19 nt, Homo sapiens
  misc_RNA (1)...(19): siRNA sense strand
gccaucauguccuucauua

SEQ ID NO: 450985 - RNA, 19 nt, Homo sapiens
  misc_RNA (1)...(19): siRNA sense strand
caagauaucuagccuaaac

SEQ ID NO: 450986 - RNA, 19 nt, Homo sapiens
  misc_RNA (1)...(19): siRNA sense strand
acaaugagcuacaacagaa

SEQ ID NO: 450987 - RNA, 19 nt, Homo sapiens
  misc_RNA (1)...(19): siRNA sense strand
gaagaagaagaaagaagua

SEQ ID NO: 450988 - RNA, 19 nt, Homo sapiens
  misc_RNA (1)...(19): siRNA sense strand
gaagaaagcggagaguuug

SEQ ID NO: 450989 - RNA, 19 nt, Homo sapiens
  misc_RNA (1)...(19): siRNA sense strand
guacgaauguugguuaaug

SEQ ID NO: 450990 - RNA, 19 nt, Homo sapiens
  misc_RNA (1)...(19): siRNA sense strand
gcgaaaugauagcaacuuu

SEQ ID NO: 450991 - RNA, 19 nt, Homo sapiens
  misc_RNA (1)...(19): siRNA sense strand
ggaggaacauaaacacgaa

SEQ ID NO: 450992 - RNA, 19 nt, Homo sapiens
  misc_RNA (1)...(19): siRNA sense strand
cgacuuggauggccuauca

SEQ ID NO: 450993 - RNA, 19 nt, Homo sapiens
  misc_RNA (1)...(19): siRNA sense strand
caaaauugcugacacaaaa

SEQ ID NO: 450994 - RNA, 19 nt, Homo sapiens
  misc_RNA (1)...(19): siRNA sense strand
gaugaguucuuuggcauuu

SEQ ID NO: 450995 - RNA, 19 nt, Homo sapiens
  misc_RNA (1)...(19): siRNA sense strand
gaaaugcuccgaaaugaag

SEQ ID NO: 450996 - RNA, 19 nt, Homo sapiens
  misc_RNA (1)...(19): siRNA sense strand
gagaaaagcuaaagagaau

SEQ ID NO: 450997 - RNA, 19 nt, Homo sapiens
  misc_RNA (1)...(19): siRNA sense strand
ggaccgaaauugaugauac

SEQ ID NO: 450998 - RNA, 19 nt, Homo sapiens
  misc_RNA (1)...(19): siRNA sense strand
gaaaugaagaugaacuaga

SEQ ID NO: 450999 - RNA, 19 nt, Homo sapiens
  misc_RNA (1)...(19): siRNA sense strand
caaguuggccugaauucua

SEQ ID NO: 451000 - RNA, 19 nt, Homo sapiens
  misc_RNA (1)...(19): siRNA sense strand
gcuaugaauuucugauguu

SEQ ID NO: 451001 - RNA, 19 nt, Homo sapiens
  misc_RNA (1)...(19): siRNA sense strand
ggaacaguauggaccgaaa

SEQ ID NO: 451002 - RNA, 19 nt, Homo sapiens
  misc_RNA (1)...(19): siRNA sense strand
gaauucaaccuguaauaga

SEQ ID NO: 451003 - RNA, 19 nt, Homo sapiens
  misc_RNA (1)...(19): siRNA sense strand
gaagaugaacuagaauuug

SEQ ID NO: 451004 - RNA, 19 nt, Homo sapiens
  misc_RNA (1)...(19): siRNA sense strand
cggaaucgcaaacguauua

SEQ ID NO: 451005 - RNA, 19 nt, Homo sapiens
  misc_RNA (1)...(19): siRNA sense strand
agaaauaaguaccuugaga

SEQ ID NO: 451006 - RNA, 19 nt, Homo sapiens
  misc_RNA (1)...(19): siRNA sense strand
aaagugacauugaccuauu

SEQ ID NO: 451007 - RNA, 19 nt, Homo sapiens
  misc_RNA (1)...(19): siRNA sense strand
gaacuggaccucacagaca

SEQ ID NO: 451008 - RNA, 19 nt, Homo sapiens
  misc_RNA (1)...(19): siRNA sense strand
cagcuucucugauguugaa

SEQ ID NO: 451009 - RNA, 19 nt, Homo sapiens
  misc_RNA (1)...(19): siRNA sense strand
uggcagaagugaaaccuaa

SEQ ID NO: 451010 - RNA, 19 nt, Homo sapiens
  misc_RNA (1)...(19): siRNA sense strand
gugcaggaguggagaguuu

SEQ ID NO: 451011 - RNA, 19 nt, Homo sapiens
  misc_RNA (1)...(19): siRNA sense strand
ggagcuggaugucauguuc

SEQ ID NO: 451012 - RNA, 19 nt, Homo sapiens
  misc_RNA (1)...(19): siRNA sense strand
auaaguaccuugagaagug

SEQ ID NO: 451013 - RNA, 19 nt, Homo sapiens
  misc_RNA (1)...(19): siRNA sense strand
aaugaagaauugcgagaua

SEQ ID NO: 451014 - RNA, 19 nt, Homo sapiens
  misc_RNA (1)...(19): siRNA sense strand
acacagagaagccauguuu

SEQ ID NO: 451015 - RNA, 19 nt, Homo sapiens
  misc_RNA (1)...(19): siRNA sense strand
guggagaguuuggacuuua

SEQ ID NO: 451016 - RNA, 19 nt, Homo sapiens
  misc_RNA (1)...(19): siRNA sense strand
gacauuaauuaacgacuug

SEQ ID NO: 451017 - RNA, 19 nt, Homo sapiens
  misc_RNA (1)...(19): siRNA sense strand
auacauacuucucucauug

SEQ ID NO: 451018 - RNA, 19 nt, Homo sapiens
  misc_RNA (1)...(19): siRNA sense strand
gcaaacguauuaccaacca

SEQ ID NO: 451019 - RNA, 19 nt, Homo sapiens
  misc_RNA (1)...(19): siRNA sense strand
gcuccgaaaugaagaugaa

SEQ ID NO: 451020 - RNA, 19 nt, Homo sapiens
  misc_RNA (1)...(19): siRNA sense strand
ugaagaaagcggagaguuu

SEQ ID NO: 451021 - RNA, 19 nt, Homo sapiens
  misc_RNA (1)...(19): siRNA sense strand
cagcaggauuucuuuguga

SEQ ID NO: 451022 - RNA, 19 nt, Homo sapiens
  misc_RNA (1)...(19): siRNA sense strand
gaacaaacuggaaggaaca

SEQ ID NO: 451023 - RNA, 19 nt, Homo sapiens
  misc_RNA (1)...(19): siRNA sense strand
agacagcacugaggacaaa

SEQ ID NO: 451024 - RNA, 19 nt, Homo sapiens
  misc_RNA (1)...(19): siRNA sense strand
gaaaucaaacgggcaauuc

SEQ ID NO: 451025 - RNA, 19 nt, Homo sapiens
  misc_RNA (1)...(19): siRNA sense strand
gcccacaaaugcccugaaa

SEQ ID NO: 451026 - RNA, 19 nt, Homo sapiens
  misc_RNA (1)...(19): siRNA sense strand
agauaggcauuuagacuuu

SEQ ID NO: 451027 - RNA, 19 nt, Homo sapiens
  misc_RNA (1)...(19): siRNA sense strand
uaucauguauccucaacuu

SEQ ID NO: 451028 - RNA, 19 nt, Homo sapiens
  misc_RNA (1)...(19): siRNA sense strand
ggccugaauucuacauuga

SEQ ID NO: 451029 - RNA, 19 nt, Homo sapiens
  misc_RNA (1)...(19): siRNA sense strand
ccacaaaugcccugaaauc

SEQ ID NO: 451030 - RNA, 19 nt, Homo sapiens
  misc_RNA (1)...(19): siRNA sense strand
aaagaaagaacgagaaugu

SEQ ID NO: 451031 - RNA, 19 nt, Homo sapiens
  misc_RNA (1)...(19): siRNA sense strand
ugacacauagugaagcuua

SEQ ID NO: 451032 - RNA, 19 nt, Homo sapiens
  misc_RNA (1)...(19): siRNA sense strand
uaaagaccauggacuacga

SEQ ID NO: 451033 - RNA, 19 nt, Homo sapiens
  misc_RNA (1)...(19): siRNA sense strand
gagcacagagaacauuaaa

SEQ ID NO: 451034 - RNA, 19 nt, Homo sapiens
  misc_RNA (1)...(19): siRNA sense strand
gagagagaccaaucacaaa

SEQ ID NO: 451035 - RNA, 19 nt, Homo sapiens
  misc_RNA (1)...(19): siRNA sense strand
caggagaaguguuugacaa

SEQ ID NO: 451036 - RNA, 19 nt, Homo sapiens
  misc_RNA (1)...(19): siRNA sense strand
ccaguguucucaaucuaaa

SEQ ID NO: 451037 - RNA, 19 nt, Homo sapiens
  misc_RNA (1)...(19): siRNA sense strand
guuaggaauucaaccugua

SEQ ID NO: 451038 - RNA, 19 nt, Homo sapiens
  misc_RNA (1)...(19): siRNA sense strand
gagaugaugcagaccuuaa

SEQ ID NO: 451039 - RNA, 19 nt, Homo sapiens
  misc_RNA (1)...(19): siRNA sense strand
gaaacggaaucgcaaacgu

SEQ ID NO: 451040 - RNA, 19 nt, Homo sapiens
  misc_RNA (1)...(19): siRNA sense strand
aggaagaucugcccaagga

SEQ ID NO: 451041 - RNA, 19 nt, Homo sapiens
  misc_RNA (1)...(19): siRNA sense strand
gccuagcacugaagaagaa

SEQ ID NO: 451042 - RNA, 19 nt, Homo sapiens
  misc_RNA (1)...(19): siRNA sense strand
ugaaagcaguagagacaga

SEQ ID NO: 451043 - RNA, 19 nt, Homo sapiens
  misc_RNA (1)...(19): siRNA sense strand
gagccgaauuaaucacuau

SEQ ID NO: 451044 - RNA, 19 nt, Homo sapiens
  misc_RNA (1)...(19): siRNA sense strand
gaccucagagucucgaaua

SEQ ID NO: 451045 - RNA, 19 nt, Homo sapiens
  misc_RNA (1)...(19): siRNA sense strand
ugaccuuguuucagcuuua

SEQ ID NO: 451046 - RNA, 19 nt, Homo sapiens
  misc_RNA (1)...(19): siRNA sense strand
gaaagggaacguaaaauga

SEQ ID NO: 451047 - RNA, 19 nt, Homo sapiens
  misc_RNA (1)...(19): siRNA sense strand
gaaagaacgagaaugugau

SEQ ID NO: 451048 - RNA, 19 nt, Homo sapiens
  misc_RNA (1)...(19): siRNA sense strand
aggaagaggcugacacaua

SEQ ID NO: 451049 - RNA, 19 nt, Homo sapiens
  misc_RNA (1)...(19): siRNA sense strand
uaaauuaagggaacacgaa

SEQ ID NO: 451050 - RNA, 19 nt, Homo sapiens
  misc_RNA (1)...(19): siRNA sense strand
caucauguccuucauuaau

SEQ ID NO: 451051 - RNA, 19 nt, Homo sapiens
  misc_RNA (1)...(19): siRNA sense strand
ucucaagacugccaucaug

SEQ ID NO: 451052 - RNA, 19 nt, Homo sapiens
  misc_RNA (1)...(19): siRNA sense strand
gaagguggccgugcuggaa

SEQ ID NO: 451053 - RNA, 19 nt, Homo sapiens
  misc_RNA (1)...(19): siRNA sense strand
gcuacaaguuggccugaau

SEQ ID NO: 451054 - RNA, 19 nt, Homo sapiens
  misc_RNA (1)...(19): siRNA sense strand
gcucaaagaacaacgugaa

SEQ ID NO: 451055 - RNA, 19 nt, Homo sapiens
  misc_RNA (1)...(19): siRNA sense strand
gguugaaauuauccaauga

SEQ ID NO: 451056 - RNA, 19 nt, Homo sapiens
  misc_RNA (1)...(19): siRNA sense strand
gaccgaaauugaugauaca

SEQ ID NO: 451057 - RNA, 19 nt, Homo sapiens
  misc_RNA (1)...(19): siRNA sense strand
agaaagaacgagaauguga

SEQ ID NO: 451058 - RNA, 19 nt, Homo sapiens
  misc_RNA (1)...(19): siRNA sense strand
ggucggagagcucagaauu

SEQ ID NO: 451059 - RNA, 19 nt, Homo sapiens
  misc_RNA (1)...(19): siRNA sense strand
aaauaaugaucacccagaa

SEQ ID NO: 451060 - RNA, 19 nt, Homo sapiens
  misc_RNA (1)...(19): siRNA sense strand
ucaaagagggaaugcauau

SEQ ID NO: 451061 - RNA, 19 nt, Homo sapiens
  misc_RNA (1)...(19): siRNA sense strand
ggagagcucagaauugcaa

SEQ ID NO: 451062 - RNA, 19 nt, Homo sapiens
  misc_RNA (1)...(19): siRNA sense strand
ucucaucacuauuguggaa

SEQ ID NO: 451063 - RNA, 19 nt, Homo sapiens
  misc_RNA (1)...(19): siRNA sense strand
aaacggaaucgcaaacgua

SEQ ID NO: 451064 - RNA, 19 nt, Homo sapiens
  misc_RNA (1)...(19): siRNA sense strand
acaaccagaugaguucuuu

SEQ ID NO: 451065 - RNA, 19 nt, Homo sapiens
  misc_RNA (1)...(19): siRNA sense strand
cuugagaaguggcuugaaa

SEQ ID NO: 451066 - RNA, 19 nt, Homo sapiens
  misc_RNA (1)...(19): siRNA sense strand
gaacuugacugccuuguaa

SEQ ID NO: 451067 - RNA, 19 nt, Homo sapiens
  misc_RNA (1)...(19): siRNA sense strand
gaucaaagaugccaagaaa

SEQ ID NO: 451068 - RNA, 19 nt, Homo sapiens
  misc_RNA (1)...(19): siRNA sense strand
guaaagggcuugcuguaua

SEQ ID NO: 451069 - RNA, 19 nt, Homo sapiens
  misc_RNA (1)...(19): siRNA sense strand
gcgagaaucuguuaguaaa

SEQ ID NO: 451070 - RNA, 19 nt, Homo sapiens
  misc_RNA (1)...(19): siRNA sense strand
ggcaagagcuacuuuaguu

SEQ ID NO: 451071 - RNA, 19 nt, Homo sapiens
  misc_RNA (1)...(19): siRNA sense strand
agagggaacuugcacuuua

SEQ ID NO: 451072 - RNA, 19 nt, Homo sapiens
  misc_RNA (1)...(19): siRNA sense strand
aagaagaaguugagaguuu

SEQ ID NO: 451073 - RNA, 19 nt, Homo sapiens
  misc_RNA (1)...(19): siRNA sense strand
gagaaucuguuaguaaaga

SEQ ID NO: 451074 - RNA, 19 nt, Homo sapiens
  misc_RNA (1)...(19): siRNA sense strand
uaaagaagaucuggcaaga

SEQ ID NO: 451075 - RNA, 19 nt, Homo sapiens
  misc_RNA (1)...(19): siRNA sense strand
gagaagcgagaaucuguua

SEQ ID NO: 451076 - RNA, 19 nt, Homo sapiens
  misc_RNA (1)...(19): siRNA sense strand
ucaauacccucucaaugaa

SEQ ID NO: 451077 - RNA, 19 nt, Homo sapiens
  misc_RNA (1)...(19): siRNA sense strand
agaagaaguugagaguuua

SEQ ID NO: 451078 - RNA, 19 nt, Homo sapiens
  misc_RNA (1)...(19): siRNA sense strand
gcaagagcuacuuuaguua

SEQ ID NO: 451079 - RNA, 19 nt, Homo sapiens
  misc_RNA (1)...(19): siRNA sense strand
uaaagggcuugcuguauau

SEQ ID NO: 451080 - RNA, 19 nt, Homo sapiens
  misc_RNA (1)...(19): siRNA sense strand
gaacaugaggguuacuuug

SEQ ID NO: 451081 - RNA, 19 nt, Homo sapiens
  misc_RNA (1)...(19): siRNA sense strand
uggaggagauuaugaaaga

SEQ ID NO: 451082 - RNA, 19 nt, Homo sapiens
  misc_RNA (1)...(19): siRNA sense strand
gaaugugugcuguuaauga

SEQ ID NO: 451083 - RNA, 19 nt, Homo sapiens
  misc_RNA (1)...(19): siRNA sense strand
gagggaacuugcacuuuau

SEQ ID NO: 451084 - RNA, 19 nt, Homo sapiens
  misc_RNA (1)...(19): siRNA sense strand
gucaauacccucucaauga

SEQ ID NO: 451085 - RNA, 19 nt, Homo sapiens
  misc_RNA (1)...(19): siRNA sense strand
caaugaaacuuuuggcaua

SEQ ID NO: 451086 - RNA, 19 nt, Homo sapiens
  misc_RNA (1)...(19): siRNA sense strand
gaagaucuggcaagagcua

SEQ ID NO: 451087 - RNA, 19 nt, Homo sapiens
  misc_RNA (1)...(19): siRNA sense strand
gcaagaagaaguugagagu

SEQ ID NO: 451088 - RNA, 19 nt, Homo sapiens
  misc_RNA (1)...(19): siRNA sense strand
gcacaaacuggaugaacuu

SEQ ID NO: 451089 - RNA, 19 nt, Homo sapiens
  misc_RNA (1)...(19): siRNA sense strand
gaagaaguugagaguuuaa

SEQ ID NO: 451090 - RNA, 19 nt, Homo sapiens
  misc_RNA (1)...(19): siRNA sense strand
gaagagggaacuugcacuu

SEQ ID NO: 451091 - RNA, 19 nt, Homo sapiens
  misc_RNA (1)...(19): siRNA sense strand
cauaugcacuggauuacug

SEQ ID NO: 451092 - RNA, 19 nt, Homo sapiens
  misc_RNA (1)...(19): siRNA sense strand
ggaagagcaagaagaaguu

SEQ ID NO: 451093 - RNA, 19 nt, Homo sapiens
  misc_RNA (1)...(19): siRNA sense strand
uaaacagaguugucuuugu

SEQ ID NO: 451094 - RNA, 19 nt, Homo sapiens
  misc_RNA (1)...(19): siRNA sense strand
gucaaaaggucaacuaaaa

SEQ ID NO: 451095 - RNA, 19 nt, Homo sapiens
  misc_RNA (1)...(19): siRNA sense strand
gcugguccgugauauuuau

SEQ ID NO: 451096 - RNA, 19 nt, Homo sapiens
  misc_RNA (1)...(19): siRNA sense strand
uauagacucugucaguuuc

SEQ ID NO: 451097 - RNA, 19 nt, Homo sapiens
  misc_RNA (1)...(19): siRNA sense strand
gaggagauuaugaaagauu

SEQ ID NO: 451098 - RNA, 19 nt, Homo sapiens
  misc_RNA (1)...(19): siRNA sense strand
ggacaagccgagugcuauu

SEQ ID NO: 451099 - RNA, 19 nt, Homo sapiens
  misc_RNA (1)...(19): siRNA sense strand
gaaccugagcgaugccaaa

SEQ ID NO: 451100 - RNA, 19 nt, Homo sapiens
  misc_RNA (1)...(19): siRNA sense strand
caaaggugauagcacacaa

SEQ ID NO: 451101 - RNA, 19 nt, Homo sapiens
  misc_RNA (1)...(19): siRNA sense strand
caaagacaacuauaaacga

SEQ ID NO: 451102 - RNA, 19 nt, Homo sapiens
  misc_RNA (1)...(19): siRNA sense strand
ccaaaugggaagagauaaa

SEQ ID NO: 451103 - RNA, 19 nt, Homo sapiens
  misc_RNA (1)...(19): siRNA sense strand
uggcauaugcacuggauua

SEQ ID NO: 451104 - RNA, 19 nt, Homo sapiens
  misc_RNA (1)...(19): siRNA sense strand
gacaagccgagugcuauua

SEQ ID NO: 451105 - RNA, 19 nt, Homo sapiens
  misc_RNA (1)...(19): siRNA sense strand
guauauagacucugucagu

SEQ ID NO: 451106 - RNA, 19 nt, Homo sapiens
  misc_RNA (1)...(19): siRNA sense strand
gacaagcugguccgugaua

SEQ ID NO: 451107 - RNA, 19 nt, Homo sapiens
  misc_RNA (1)...(19): siRNA sense strand
uauauagacucugucaguu

SEQ ID NO: 451108 - RNA, 19 nt, Homo sapiens
  misc_RNA (1)...(19): siRNA sense strand
caagccgagugcuauuauu

SEQ ID NO: 451109 - RNA, 19 nt, Homo sapiens
  misc_RNA (1)...(19): siRNA sense strand
gaagcgagaaucuguuagu

SEQ ID NO: 451110 - RNA, 19 nt, Homo sapiens
  misc_RNA (1)...(19): siRNA sense strand
gauguacaccuugaacuga

SEQ ID NO: 451111 - RNA, 19 nt, Homo sapiens
  misc_RNA (1)...(19): siRNA sense strand
aagcgagaaucuguuagua

SEQ ID NO: 451112 - RNA, 19 nt, Homo sapiens
  misc_RNA (1)...(19): siRNA sense strand
gggaauaugauuuauaagg

SEQ ID NO: 451113 - RNA, 19 nt, Homo sapiens
  misc_RNA (1)...(19): siRNA sense strand
ugaaauggcauccaaaggu

SEQ ID NO: 451114 - RNA, 19 nt, Homo sapiens
  misc_RNA (1)...(19): siRNA sense strand
caaacuggaugaacuugac

SEQ ID NO: 451115 - RNA, 19 nt, Homo sapiens
  misc_RNA (1)...(19): siRNA sense strand
ugucuuuguuggaaacuuu

SEQ ID NO: 451116 - RNA, 19 nt, Homo sapiens
  misc_RNA (1)...(19): siRNA sense strand
accuugaacugaaagauuu

SEQ ID NO: 451117 - RNA, 19 nt, Homo sapiens
  misc_RNA (1)...(19): siRNA sense strand
gcaguuggugcacuucuug

SEQ ID NO: 451118 - RNA, 19 nt, Homo sapiens
  misc_RNA (1)...(19): siRNA sense strand
gagguggugcuuacaaguu

SEQ ID NO: 451119 - RNA, 19 nt, Homo sapiens
  misc_RNA (1)...(19): siRNA sense strand
agaguugucuuuguuggaa

SEQ ID NO: 451120 - RNA, 19 nt, Homo sapiens
  misc_RNA (1)...(19): siRNA sense strand
gcacuggauuacuggucaa

SEQ ID NO: 451121 - RNA, 19 nt, Homo sapiens
  misc_RNA (1)...(19): siRNA sense strand
gaagagcaagaagaaguug

SEQ ID NO: 451122 - RNA, 19 nt, Homo sapiens
  misc_RNA (1)...(19): siRNA sense strand
ggauguacaccuugaacug

SEQ ID NO: 451123 - RNA, 19 nt, Homo sapiens
  misc_RNA (1)...(19): siRNA sense strand
agaggaagagcaagaagaa

SEQ ID NO: 451124 - RNA, 19 nt, Homo sapiens
  misc_RNA (1)...(19): siRNA sense strand
guaccuuucuggguuuaug

SEQ ID NO: 451125 - RNA, 19 nt, Homo sapiens
  misc_RNA (1)...(19): siRNA sense strand
gaacugaaagauuuaacac

SEQ ID NO: 451126 - RNA, 19 nt, Homo sapiens
  misc_RNA (1)...(19): siRNA sense strand
cggaaauauuugacuucua

SEQ ID NO: 451127 - RNA, 19 nt, Homo sapiens
  misc_RNA (1)...(19): siRNA sense strand
gcaguccauuccaaagaca

SEQ ID NO: 451128 - RNA, 19 nt, Homo sapiens
  misc_RNA (1)...(19): siRNA sense strand
ggagaagcgagaaucuguu

SEQ ID NO: 451129 - RNA, 19 nt, Homo sapiens
  misc_RNA (1)...(19): siRNA sense strand
uaugaaagauuugguuugc

SEQ ID NO: 451130 - RNA, 19 nt, Homo sapiens
  misc_RNA (1)...(19): siRNA sense strand
ggguuuaugcaguuuauug

SEQ ID NO: 451131 - RNA, 19 nt, Homo sapiens
  misc_RNA (1)...(19): siRNA sense strand
ucucguacuuugaaccuau

SEQ ID NO: 451132 - RNA, 19 nt, Homo sapiens
  misc_RNA (1)...(19): siRNA sense strand
ugacuucuaacguggcaua

SEQ ID NO: 451133 - RNA, 19 nt, Homo sapiens
  misc_RNA (1)...(19): siRNA sense strand
cuucuaacguggcauaugg

SEQ ID NO: 451134 - RNA, 19 nt, Homo sapiens
  misc_RNA (1)...(19): siRNA sense strand
acgaaugugugcuguuaau

SEQ ID NO: 451135 - RNA, 19 nt, Homo sapiens
  misc_RNA (1)...(19): siRNA sense strand
caagagcuacuuuaguuac

SEQ ID NO: 451136 - RNA, 19 nt, Homo sapiens
  misc_RNA (1)...(19): siRNA sense strand
ccaaagacaacuauaaacg

SEQ ID NO: 451137 - RNA, 19 nt, Homo sapiens
  misc_RNA (1)...(19): siRNA sense strand
gaaaauaaacagaguuguc

SEQ ID NO: 451138 - RNA, 19 nt, Homo sapiens
  misc_RNA (1)...(19): siRNA sense strand
cagcagaggaagagcaaga

SEQ ID NO: 451139 - RNA, 19 nt, Homo sapiens
  misc_RNA (1)...(19): siRNA sense strand
aagcugguccgugauauuu

SEQ ID NO: 451140 - RNA, 19 nt, Homo sapiens
  misc_RNA (1)...(19): siRNA sense strand
gcucaggagucaguauuuu

SEQ ID NO: 451141 - RNA, 19 nt, Homo sapiens
  misc_RNA (1)...(19): siRNA sense strand
gcaucuaguuuugggaaua

SEQ ID NO: 451142 - RNA, 19 nt, Homo sapiens
  misc_RNA (1)...(19): siRNA sense strand
ggaggagauuaugaaagau

SEQ ID NO: 451143 - RNA, 19 nt, Homo sapiens
  misc_RNA (1)...(19): siRNA sense strand
caagcugguccgugauauu

SEQ ID NO: 451144 - RNA, 19 nt, Homo sapiens
  misc_RNA (1)...(19): siRNA sense strand
agguggugcuuacaaguuu

SEQ ID NO: 451145 - RNA, 19 nt, Homo sapiens
  misc_RNA (1)...(19): siRNA sense strand
acaugaggguuacuuugga

SEQ ID NO: 451146 - RNA, 19 nt, Homo sapiens
  misc_RNA (1)...(19): siRNA sense strand
uuuauugacuggcugugaa

SEQ ID NO: 451147 - RNA, 19 nt, Homo sapiens
  misc_RNA (1)...(19): siRNA sense strand
gguuuaugcaguuuauuga

SEQ ID NO: 451148 - RNA, 19 nt, Homo sapiens
  misc_RNA (1)...(19): siRNA sense strand
aagccgagugcuauuauuu

SEQ ID NO: 451149 - RNA, 19 nt, Homo sapiens
  misc_RNA (1)...(19): siRNA sense strand
ugaacuugacugccuugua

SEQ ID NO: 451150 - RNA, 19 nt, Homo sapiens
  misc_RNA (1)...(19): siRNA sense strand
ugugugcuguuaaugagaa

SEQ ID NO: 451151 - RNA, 19 nt, Homo sapiens
  misc_RNA (1)...(19): siRNA sense strand
cagaggaagagcaagaaga

SEQ ID NO: 451152 - RNA, 19 nt, Homo sapiens
  misc_RNA (1)...(19): siRNA sense strand
cuaaaagcauuguuucuag

SEQ ID NO: 451153 - RNA, 19 nt, Homo sapiens
  misc_RNA (1)...(19): siRNA sense strand
caauacccucucaaugaaa

SEQ ID NO: 451154 - RNA, 19 nt, Homo sapiens
  misc_RNA (1)...(19): siRNA sense strand
gaguugucuuuguuggaaa

SEQ ID NO: 451155 - RNA, 19 nt, Homo sapiens
  misc_RNA (1)...(19): siRNA sense strand
caagaagaaguugagaguu

SEQ ID NO: 451156 - RNA, 19 nt, Homo sapiens
  misc_RNA (1)...(19): siRNA sense strand
caccuugaacugaaagauu

SEQ ID NO: 451157 - RNA, 19 nt, Homo sapiens
  misc_RNA (1)...(19): siRNA sense strand
ugacuggcugugaaaguuu

SEQ ID NO: 451158 - RNA, 19 nt, Homo sapiens
  misc_RNA (1)...(19): siRNA sense strand
uacaggagguggugcuuac

SEQ ID NO: 451159 - RNA, 19 nt, Homo sapiens
  misc_RNA (1)...(19): siRNA sense strand
agauuugguuugccagguu

SEQ ID NO: 451160 - RNA, 19 nt, Homo sapiens
  misc_RNA (1)...(19): siRNA sense strand
ggagauuaugaaagauuug

SEQ ID NO: 451161 - RNA, 19 nt, Homo sapiens
  misc_RNA (1)...(19): siRNA sense strand
uagcaguccauuccaaaga

SEQ ID NO: 451162 - RNA, 19 nt, Homo sapiens
  misc_RNA (1)...(19): siRNA sense strand
aacauuggcucaggaguca

SEQ ID NO: 451163 - RNA, 19 nt, Homo sapiens
  misc_RNA (1)...(19): siRNA sense strand
ggguaccuuucuggguuua

SEQ ID NO: 451164 - RNA, 19 nt, Homo sapiens
  misc_RNA (1)...(19): siRNA sense strand
gagaaaauaaacagaguug

SEQ ID NO: 451165 - RNA, 19 nt, Homo sapiens
  misc_RNA (1)...(19): siRNA sense strand
gguccgugauauuuaugga

SEQ ID NO: 451166 - RNA, 19 nt, Homo sapiens
  misc_RNA (1)...(19): siRNA sense strand
gcacgggacuuuguaguga

SEQ ID NO: 451167 - RNA, 19 nt, Homo sapiens
  misc_RNA (1)...(19): siRNA sense strand
ggaaccagcugcuaucauc

SEQ ID NO: 451168 - RNA, 19 nt, Homo sapiens
  misc_RNA (1)...(19): siRNA sense strand
caugaccagugccaaauua

SEQ ID NO: 451169 - RNA, 19 nt, Homo sapiens
  misc_RNA (1)...(19): siRNA sense strand
gcaggaaacaccucaguga

SEQ ID NO: 451170 - RNA, 19 nt, Homo sapiens
  misc_RNA (1)...(19): siRNA sense strand
gcacugaccccuccaauuu

SEQ ID NO: 451171 - RNA, 19 nt, Homo sapiens
  misc_RNA (1)...(19): siRNA sense strand
cacggaagcucgguagaua

SEQ ID NO: 451172 - RNA, 19 nt, Homo sapiens
  misc_RNA (1)...(19): siRNA sense strand
caacggugcuggugacaca

SEQ ID NO: 451173 - RNA, 19 nt, Homo sapiens
  misc_RNA (1)...(19): siRNA sense strand
ggacggaggaggaguuuca

SEQ ID NO: 451174 - RNA, 19 nt, Homo sapiens
  misc_RNA (1)...(19): siRNA sense strand
gaaggcaugcccuggauga

SEQ ID NO: 451175 - RNA, 19 nt, Homo sapiens
  misc_RNA (1)...(19): siRNA sense strand
gaucugcgguuucucugau

SEQ ID NO: 451176 - RNA, 19 nt, Homo sapiens
  misc_RNA (1)...(19): siRNA sense strand
guucuggacugguguuaug

SEQ ID NO: 451177 - RNA, 19 nt, Homo sapiens
  misc_RNA (1)...(19): siRNA sense strand
gagaggaggacuacuacaa

SEQ ID NO: 451178 - RNA, 19 nt, Homo sapiens
  misc_RNA (1)...(19): siRNA sense strand
cuacaacgaugauguucug

SEQ ID NO: 451179 - RNA, 19 nt, Homo sapiens
  misc_RNA (1)...(19): siRNA sense strand
ggccuugucucagcucuuu

SEQ ID NO: 451180 - RNA, 19 nt, Homo sapiens
  misc_RNA (1)...(19): siRNA sense strand
gggcagacccuuacaagca

SEQ ID NO: 451181 - RNA, 19 nt, Homo sapiens
  misc_RNA (1)...(19): siRNA sense strand
gcacacuccugccugucuu

SEQ ID NO: 451182 - RNA, 19 nt, Homo sapiens
  misc_RNA (1)...(19): siRNA sense strand
ucaaccugcugcgcaaaua

SEQ ID NO: 451183 - RNA, 19 nt, Homo sapiens
  misc_RNA (1)...(19): siRNA sense strand
gcaggcaccuucguguuca

SEQ ID NO: 451184 - RNA, 19 nt, Homo sapiens
  misc_RNA (1)...(19): siRNA sense strand
ggucccaccuccucuuugu

SEQ ID NO: 451185 - RNA, 19 nt, Homo sapiens
  misc_RNA (1)...(19): siRNA sense strand
ggugagaucugcgguuucu

SEQ ID NO: 451186 - RNA, 19 nt, Homo sapiens
  misc_RNA (1)...(19): siRNA sense strand
gcaagaccuacuucucuga

SEQ ID NO: 451187 - RNA, 19 nt, Homo sapiens
  misc_RNA (1)...(19): siRNA sense strand
ccauggugcuggagauguu

SEQ ID NO: 451188 - RNA, 19 nt, Homo sapiens
  misc_RNA (1)...(19): siRNA sense strand
gcaggcacgggacuuugua

SEQ ID NO: 451189 - RNA, 19 nt, Homo sapiens
  misc_RNA (1)...(19): siRNA sense strand
gcaugaccagugccaaauu

SEQ ID NO: 451190 - RNA, 19 nt, Homo sapiens
  misc_RNA (1)...(19): siRNA sense strand
gugcuggguuugcgcaaga

SEQ ID NO: 451191 - RNA, 19 nt, Homo sapiens
  misc_RNA (1)...(19): siRNA sense strand
uagacacgguccacguuga

SEQ ID NO: 451192 - RNA, 19 nt, Homo sapiens
  misc_RNA (1)...(19): siRNA sense strand
ggaggacgucagccuggua

SEQ ID NO: 451193 - RNA, 19 nt, Homo sapiens
  misc_RNA (1)...(19): siRNA sense strand
cagcgccucugcaacugaa

SEQ ID NO: 451194 - RNA, 19 nt, Homo sapiens
  misc_RNA (1)...(19): siRNA sense strand
gcaagacgacccugcaaaa

SEQ ID NO: 451195 - RNA, 19 nt, Homo sapiens
  misc_RNA (1)...(19): siRNA sense strand
uggcugcccucuacauugu

SEQ ID NO: 451196 - RNA, 19 nt, Homo sapiens
  misc_RNA (1)...(19): siRNA sense strand
gcgaccagaugaucguauc

SEQ ID NO: 451197 - RNA, 19 nt, Homo sapiens
  misc_RNA (1)...(19): siRNA sense strand
ggcagacccuuacaagcau

SEQ ID NO: 451198 - RNA, 19 nt, Homo sapiens
  misc_RNA (1)...(19): siRNA sense strand
gagaccuguugcugcauga

SEQ ID NO: 451199 - RNA, 19 nt, Homo sapiens
  misc_RNA (1)...(19): siRNA sense strand
ggacuacuacaacgaugau

SEQ ID NO: 451200 - RNA, 19 nt, Homo sapiens
  misc_RNA (1)...(19): siRNA sense strand
ggaggacuacuacaacgau

SEQ ID NO: 451201 - RNA, 19 nt, Homo sapiens
  misc_RNA (1)...(19): siRNA sense strand
ugggcaaguuggccuauga

SEQ ID NO: 451202 - RNA, 19 nt, Homo sapiens
  misc_RNA (1)...(19): siRNA sense strand
cagcugcuaucaucgucaa

SEQ ID NO: 451203 - RNA, 19 nt, Homo sapiens
  misc_RNA (1)...(19): siRNA sense strand
gcacuccagcgaccagaug

SEQ ID NO: 451204 - RNA, 19 nt, Homo sapiens
  misc_RNA (1)...(19): siRNA sense strand
caagaccuacuucucugaa

SEQ ID NO: 451205 - RNA, 19 nt, Homo sapiens
  misc_RNA (1)...(19): siRNA sense strand
cccaggccaucaagaagaa

SEQ ID NO: 451206 - RNA, 19 nt, Homo sapiens
  misc_RNA (1)...(19): siRNA sense strand
cuacuacaacgaugauguu

SEQ ID NO: 451207 - RNA, 19 nt, Homo sapiens
  misc_RNA (1)...(19): siRNA sense strand
ggaccuccgagaccuguug

SEQ ID NO: 451208 - RNA, 19 nt, Homo sapiens
  misc_RNA (1)...(19): siRNA sense strand
gcccaaccuuugcccuaga

SEQ ID NO: 451209 - RNA, 19 nt, Homo sapiens
  misc_RNA (1)...(19): siRNA sense strand
gagaaugcccaggccauca

SEQ ID NO: 451210 - RNA, 19 nt, Homo sapiens
  misc_RNA (1)...(19): siRNA sense strand
gcccaggccaucaagaaga

SEQ ID NO: 451211 - RNA, 19 nt, Homo sapiens
  misc_RNA (1)...(19): siRNA sense strand
cggaaggcaugcccuggau

SEQ ID NO: 451212 - RNA, 19 nt, Homo sapiens
  misc_RNA (1)...(19): siRNA sense strand
uccuauugcuggcucguuu

SEQ ID NO: 451213 - RNA, 19 nt, Homo sapiens
  misc_RNA (1)...(19): siRNA sense strand
uggaugcccuggagaaugc

SEQ ID NO: 451214 - RNA, 19 nt, Homo sapiens
  misc_RNA (1)...(19): siRNA sense strand
auaccuggcugcccucuac

SEQ ID NO: 451215 - RNA, 19 nt, Homo sapiens
  misc_RNA (1)...(19): siRNA sense strand
auaccaaccugcagaagcu

SEQ ID NO: 451216 - RNA, 19 nt, Homo sapiens
  misc_RNA (1)...(19): siRNA sense strand
cagggaggagcgccaguuu

SEQ ID NO: 451217 - RNA, 19 nt, Homo sapiens
  misc_RNA (1)...(19): siRNA sense strand
ccugugauccgcgagagua

SEQ ID NO: 451218 - RNA, 19 nt, Homo sapiens
  misc_RNA (1)...(19): siRNA sense strand
gaccagugccaaauuacca

SEQ ID NO: 451219 - RNA, 19 nt, Homo sapiens
  misc_RNA (1)...(19): siRNA sense strand
cucugcaacugaagcuaua

SEQ ID NO: 451220 - RNA, 19 nt, Homo sapiens
  misc_RNA (1)...(19): siRNA sense strand
ccgcaagaccuacuucucu

SEQ ID NO: 451221 - RNA, 19 nt, Homo sapiens
  misc_RNA (1)...(19): siRNA sense strand
ccacggaagcucgguagau

SEQ ID NO: 451222 - RNA, 19 nt, Homo sapiens
  misc_RNA (1)...(19): siRNA sense strand
gaguaccccugaugagcua

SEQ ID NO: 451223 - RNA, 19 nt, Homo sapiens
  misc_RNA (1)...(19): siRNA sense strand
ggaggggcaccaccagaua

SEQ ID NO: 451224 - RNA, 19 nt, Homo sapiens
  misc_RNA (1)...(19): siRNA sense strand
cacugcggcuguccaacaa

SEQ ID NO: 451225 - RNA, 19 nt, Homo sapiens
  misc_RNA (1)...(19): siRNA sense strand
ggacgucagccugguacug

SEQ ID NO: 451226 - RNA, 19 nt, Homo sapiens
  misc_RNA (1)...(19): siRNA sense strand
gcaucucaaccucgacuuc

SEQ ID NO: 451227 - RNA, 19 nt, Homo sapiens
  misc_RNA (1)...(19): siRNA sense strand
ccaccucuucuuccacuau

SEQ ID NO: 451228 - RNA, 19 nt, Homo sapiens
  misc_RNA (1)...(19): siRNA sense strand
ccacguugacccugugauc

SEQ ID NO: 451229 - RNA, 19 nt, Homo sapiens
  misc_RNA (1)...(19): siRNA sense strand
acucggcccucugccauug

SEQ ID NO: 451230 - RNA, 19 nt, Homo sapiens
  misc_RNA (1)...(19): siRNA sense strand
gagcugaacguggcguaca

SEQ ID NO: 451231 - RNA, 19 nt, Homo sapiens
  misc_RNA (1)...(19): siRNA sense strand
gguguugccgugcuaaugg

SEQ ID NO: 451232 - RNA, 19 nt, Homo sapiens
  misc_RNA (1)...(19): siRNA sense strand
ccacacugcggcuguccaa

SEQ ID NO: 451233 - RNA, 19 nt, Homo sapiens
  misc_RNA (1)...(19): siRNA sense strand
gcaaaaggugggcaaggaa

SEQ ID NO: 451234 - RNA, 19 nt, Homo sapiens
  misc_RNA (1)...(19): siRNA sense strand
gcgcaagacgacccugcaa

SEQ ID NO: 451235 - RNA, 19 nt, Homo sapiens
  misc_RNA (1)...(19): siRNA sense strand
gcacgggacuuuguaguga

SEQ ID NO: 451236 - RNA, 19 nt, Homo sapiens
  misc_RNA (1)...(19): siRNA sense strand
ggaaccagcugcuaucauc

SEQ ID NO: 451237 - RNA, 19 nt, Homo sapiens
  misc_RNA (1)...(19): siRNA sense strand
caugaccagugccaaauua

SEQ ID NO: 451238 - RNA, 19 nt, Homo sapiens
  misc_RNA (1)...(19): siRNA sense strand
gcaggaaacaccucaguga

SEQ ID NO: 451239 - RNA, 19 nt, Homo sapiens
  misc_RNA (1)...(19): siRNA sense strand
gcacugaccccuccaauuu

SEQ ID NO: 451240 - RNA, 19 nt, Homo sapiens
  misc_RNA (1)...(19): siRNA sense strand
cacggaagcucgguagaua

SEQ ID NO: 451241 - RNA, 19 nt, Homo sapiens
  misc_RNA (1)...(19): siRNA sense strand
caacggugcuggugacaca

SEQ ID NO: 451242 - RNA, 19 nt, Homo sapiens
  misc_RNA (1)...(19): siRNA sense strand
ggacggaggaggaguuuca

SEQ ID NO: 451243 - RNA, 19 nt, Homo sapiens
  misc_RNA (1)...(19): siRNA sense strand
gaaggcaugcccuggauga

SEQ ID NO: 451244 - RNA, 19 nt, Homo sapiens
  misc_RNA (1)...(19): siRNA sense strand
gaucugcgguuucucugau

SEQ ID NO: 451245 - RNA, 19 nt, Homo sapiens
  misc_RNA (1)...(19): siRNA sense strand
guucuggacugguguuaug

SEQ ID NO: 451246 - RNA, 19 nt, Homo sapiens
  misc_RNA (1)...(19): siRNA sense strand
gagaggaggacuacuacaa

SEQ ID NO: 451247 - RNA, 19 nt, Homo sapiens
  misc_RNA (1)...(19): siRNA sense strand
cuacaacgaugauguucug

SEQ ID NO: 451248 - RNA, 19 nt, Homo sapiens
  misc_RNA (1)...(19): siRNA sense strand
ggccuugucucagcucuuu

SEQ ID NO: 451249 - RNA, 19 nt, Homo sapiens
  misc_RNA (1)...(19): siRNA sense strand
gggcagacccuuacaagca

SEQ ID NO: 451250 - RNA, 19 nt, Homo sapiens
  misc_RNA (1)...(19): siRNA sense strand
gcacacuccugccugucuu

SEQ ID NO: 451251 - RNA, 19 nt, Homo sapiens
  misc_RNA (1)...(19): siRNA sense strand
ucaaccugcugcgcaaaua

SEQ ID NO: 451252 - RNA, 19 nt, Homo sapiens
  misc_RNA (1)...(19): siRNA sense strand
gcaggcaccuucguguuca

SEQ ID NO: 451253 - RNA, 19 nt, Homo sapiens
  misc_RNA (1)...(19): siRNA sense strand
ggucccaccuccucuuugu

SEQ ID NO: 451254 - RNA, 19 nt, Homo sapiens
  misc_RNA (1)...(19): siRNA sense strand
ggugagaucugcgguuucu

SEQ ID NO: 451255 - RNA, 19 nt, Homo sapiens
  misc_RNA (1)...(19): siRNA sense strand
gcaagaccuacuucucuga

SEQ ID NO: 451256 - RNA, 19 nt, Homo sapiens
  misc_RNA (1)...(19): siRNA sense strand
ccauggugcuggagauguu

SEQ ID NO: 451257 - RNA, 19 nt, Homo sapiens
  misc_RNA (1)...(19): siRNA sense strand
gcaggcacgggacuuugua

SEQ ID NO: 451258 - RNA, 19 nt, Homo sapiens
  misc_RNA (1)...(19): siRNA sense strand
gcaugaccagugccaaauu

SEQ ID NO: 451259 - RNA, 19 nt, Homo sapiens
  misc_RNA (1)...(19): siRNA sense strand
gugcuggguuugcgcaaga

SEQ ID NO: 451260 - RNA, 19 nt, Homo sapiens
  misc_RNA (1)...(19): siRNA sense strand
uagacacgguccacguuga

SEQ ID NO: 451261 - RNA, 19 nt, Homo sapiens
  misc_RNA (1)...(19): siRNA sense strand
ggaggacgucagccuggua

SEQ ID NO: 451262 - RNA, 19 nt, Homo sapiens
  misc_RNA (1)...(19): siRNA sense strand
cagcgccucugcaacugaa

SEQ ID NO: 451263 - RNA, 19 nt, Homo sapiens
  misc_RNA (1)...(19): siRNA sense strand
ccagauguguuggaagcuu

SEQ ID NO: 451264 - RNA, 19 nt, Homo sapiens
  misc_RNA (1)...(19): siRNA sense strand
gcaagacgacccugcaaaa

SEQ ID NO: 451265 - RNA, 19 nt, Homo sapiens
  misc_RNA (1)...(19): siRNA sense strand
uggcugcccucuacauugu

SEQ ID NO: 451266 - RNA, 19 nt, Homo sapiens
  misc_RNA (1)...(19): siRNA sense strand
gcgaccagaugaucguauc

SEQ ID NO: 451267 - RNA, 19 nt, Homo sapiens
  misc_RNA (1)...(19): siRNA sense strand
ggcagacccuuacaagcau

SEQ ID NO: 451268 - RNA, 19 nt, Homo sapiens
  misc_RNA (1)...(19): siRNA sense strand
gagaccuguugcugcauga

SEQ ID NO: 451269 - RNA, 19 nt, Homo sapiens
  misc_RNA (1)...(19): siRNA sense strand
ggacuacuacaacgaugau

SEQ ID NO: 451270 - RNA, 19 nt, Homo sapiens
  misc_RNA (1)...(19): siRNA sense strand
ggaggacuacuacaacgau

SEQ ID NO: 451271 - RNA, 19 nt, Homo sapiens
  misc_RNA (1)...(19): siRNA sense strand
ugggcaaguuggccuauga

SEQ ID NO: 451272 - RNA, 19 nt, Homo sapiens
  misc_RNA (1)...(19): siRNA sense strand
cagcugcuaucaucgucaa

SEQ ID NO: 451273 - RNA, 19 nt, Homo sapiens
  misc_RNA (1)...(19): siRNA sense strand
gcccucacauuggugcuuu

SEQ ID NO: 451274 - RNA, 19 nt, Homo sapiens
  misc_RNA (1)...(19): siRNA sense strand
gcacuccagcgaccagaug

SEQ ID NO: 451275 - RNA, 19 nt, Homo sapiens
  misc_RNA (1)...(19): siRNA sense strand
caagaccuacuucucugaa

SEQ ID NO: 451276 - RNA, 19 nt, Homo sapiens
  misc_RNA (1)...(19): siRNA sense strand
cccaggccaucaagaagaa

SEQ ID NO: 451277 - RNA, 19 nt, Homo sapiens
  misc_RNA (1)...(19): siRNA sense strand
cuacuacaacgaugauguu

SEQ ID NO: 451278 - RNA, 19 nt, Homo sapiens
  misc_RNA (1)...(19): siRNA sense strand
ggaccuccgagaccuguug

SEQ ID NO: 451279 - RNA, 19 nt, Homo sapiens
  misc_RNA (1)...(19): siRNA sense strand
gcccaaccuuugcccuaga

SEQ ID NO: 451280 - RNA, 19 nt, Homo sapiens
  misc_RNA (1)...(19): siRNA sense strand
gagaaugcccaggccauca

SEQ ID NO: 451281 - RNA, 19 nt, Homo sapiens
  misc_RNA (1)...(19): siRNA sense strand
gcccaggccaucaagaaga

SEQ ID NO: 451282 - RNA, 19 nt, Homo sapiens
  misc_RNA (1)...(19): siRNA sense strand
cggaaggcaugcccuggau

SEQ ID NO: 451283 - RNA, 19 nt, Homo sapiens
  misc_RNA (1)...(19): siRNA sense strand
uccuauugcuggcucguuu

SEQ ID NO: 451284 - RNA, 19 nt, Homo sapiens
  misc_RNA (1)...(19): siRNA sense strand
uggaugcccuggagaaugc

SEQ ID NO: 451285 - RNA, 19 nt, Homo sapiens
  misc_RNA (1)...(19): siRNA sense strand
auaccuggcugcccucuac

SEQ ID NO: 451286 - RNA, 19 nt, Homo sapiens
  misc_RNA (1)...(19): siRNA sense strand
auaccaaccugcagaagcu

SEQ ID NO: 451287 - RNA, 19 nt, Homo sapiens
  misc_RNA (1)...(19): siRNA sense strand
cagggaggagcgccaguuu

SEQ ID NO: 451288 - RNA, 19 nt, Homo sapiens
  misc_RNA (1)...(19): siRNA sense strand
ccugugauccgcgagagua

SEQ ID NO: 451289 - RNA, 19 nt, Homo sapiens
  misc_RNA (1)...(19): siRNA sense strand
gaccagugccaaauuacca

SEQ ID NO: 451290 - RNA, 19 nt, Homo sapiens
  misc_RNA (1)...(19): siRNA sense strand
cucugcaacugaagcuaua

SEQ ID NO: 451291 - RNA, 19 nt, Homo sapiens
  misc_RNA (1)...(19): siRNA sense strand
ccacggaagcucgguagau

SEQ ID NO: 451292 - RNA, 19 nt, Homo sapiens
  misc_RNA (1)...(19): siRNA sense strand
ccgcaagaccuacuucucu

SEQ ID NO: 451293 - RNA, 19 nt, Homo sapiens
  misc_RNA (1)...(19): siRNA sense strand
gaguaccccugaugagcua

SEQ ID NO: 451294 - RNA, 19 nt, Homo sapiens
  misc_RNA (1)...(19): siRNA sense strand
ggaggggcaccaccagaua

SEQ ID NO: 451295 - RNA, 19 nt, Homo sapiens
  misc_RNA (1)...(19): siRNA sense strand
cacugcggcuguccaacaa

SEQ ID NO: 451296 - RNA, 19 nt, Homo sapiens
  misc_RNA (1)...(19): siRNA sense strand
ggacgucagccugguacug

SEQ ID NO: 451297 - RNA, 19 nt, Homo sapiens
  misc_RNA (1)...(19): siRNA sense strand
gcaucucaaccucgacuuc

SEQ ID NO: 451298 - RNA, 19 nt, Homo sapiens
  misc_RNA (1)...(19): siRNA sense strand
ccaccucuucuuccacuau

SEQ ID NO: 451299 - RNA, 19 nt, Homo sapiens
  misc_RNA (1)...(19): siRNA sense strand
ccacguugacccugugauc

SEQ ID NO: 451300 - RNA, 19 nt, Homo sapiens
  misc_RNA (1)...(19): siRNA sense strand
acucggcccucugccauug

SEQ ID NO: 451301 - RNA, 19 nt, Homo sapiens
  misc_RNA (1)...(19): siRNA sense strand
gagcugaacguggcguaca

SEQ ID NO: 451302 - RNA, 19 nt, Homo sapiens
  misc_RNA (1)...(19): siRNA sense strand
gguguugccgugcuaaugg

SEQ ID NO: 451303 - RNA, 19 nt, Homo sapiens
  misc_RNA (1)...(19): siRNA sense strand
ccacacugcggcuguccaa

SEQ ID NO: 451304 - RNA, 19 nt, Homo sapiens
  misc_RNA (1)...(19): siRNA sense strand
gcaaaaggugggcaaggaa

SEQ ID NO: 451305 - RNA, 19 nt, Homo sapiens
  misc_RNA (1)...(19): siRNA sense strand
gcgcaagacgacccugcaa

SEQ ID NO: 451306 - RNA, 19 nt, Homo sapiens
  misc_RNA (1)...(19): siRNA sense strand
cgacaugacuuuaaagaua

SEQ ID NO: 451307 - RNA, 19 nt, Homo sapiens
  misc_RNA (1)...(19): siRNA sense strand
ggacaagacagaccuauua

SEQ ID NO: 451308 - RNA, 19 nt, Homo sapiens
  misc_RNA (1)...(19): siRNA sense strand
uaauaaagcuguuguguug

SEQ ID NO: 451309 - RNA, 19 nt, Homo sapiens
  misc_RNA (1)...(19): siRNA sense strand
gggaacagguggaauauuu

SEQ ID NO: 451310 - RNA, 19 nt, Homo sapiens
  misc_RNA (1)...(19): siRNA sense strand
gcauaaaggcccuauauuu

SEQ ID NO: 451311 - RNA, 19 nt, Homo sapiens
  misc_RNA (1)...(19): siRNA sense strand
ugaaaucccuccuaauaaa

SEQ ID NO: 451312 - RNA, 19 nt, Homo sapiens
  misc_RNA (1)...(19): siRNA sense strand
gcagacaggugcucuaguu

SEQ ID NO: 451313 - RNA, 19 nt, Homo sapiens
  misc_RNA (1)...(19): siRNA sense strand
ccagaaaggucuacaguau

SEQ ID NO: 451314 - RNA, 19 nt, Homo sapiens
  misc_RNA (1)...(19): siRNA sense strand
gcaagugcauccuuugauu

SEQ ID NO: 451315 - RNA, 19 nt, Homo sapiens
  misc_RNA (1)...(19): siRNA sense strand
caacaagcuuauagagaua

SEQ ID NO: 451316 - RNA, 19 nt, Homo sapiens
  misc_RNA (1)...(19): siRNA sense strand
gaauggagcacauacuaua

SEQ ID NO: 451317 - RNA, 19 nt, Homo sapiens
  misc_RNA (1)...(19): siRNA sense strand
gaugguaccuuguuugaug

SEQ ID NO: 451318 - RNA, 19 nt, Homo sapiens
  misc_RNA (1)...(19): siRNA sense strand
gcaagcacauaauaaagaa

SEQ ID NO: 451319 - RNA, 19 nt, Homo sapiens
  misc_RNA (1)...(19): siRNA sense strand
cguaaugccugauguagua

SEQ ID NO: 451320 - RNA, 19 nt, Homo sapiens
  misc_RNA (1)...(19): siRNA sense strand
gaagcagaaguuaguauua

SEQ ID NO: 451321 - RNA, 19 nt, Homo sapiens
  misc_RNA (1)...(19): siRNA sense strand
guugaaaucccuccuaaua

SEQ ID NO: 451322 - RNA, 19 nt, Homo sapiens
  misc_RNA (1)...(19): siRNA sense strand
gcacauacuauagcaaaua

SEQ ID NO: 451323 - RNA, 19 nt, Homo sapiens
  misc_RNA (1)...(19): siRNA sense strand
guacagauaugugcauuca

SEQ ID NO: 451324 - RNA, 19 nt, Homo sapiens
  misc_RNA (1)...(19): siRNA sense strand
gaauauggaaucuuaguga

SEQ ID NO: 451325 - RNA, 19 nt, Homo sapiens
  misc_RNA (1)...(19): siRNA sense strand
cauaaaggcccuauauuug

SEQ ID NO: 451326 - RNA, 19 nt, Homo sapiens
  misc_RNA (1)...(19): siRNA sense strand
uaaccuugcuagcaccuua

SEQ ID NO: 451327 - RNA, 19 nt, Homo sapiens
  misc_RNA (1)...(19): siRNA sense strand
acaauuguguccaugauuu

SEQ ID NO: 451328 - RNA, 19 nt, Homo sapiens
  misc_RNA (1)...(19): siRNA sense strand
gagaauggagcacauacua

SEQ ID NO: 451329 - RNA, 19 nt, Homo sapiens
  misc_RNA (1)...(19): siRNA sense strand
gaggucaacuucuugguau

SEQ ID NO: 451330 - RNA, 19 nt, Homo sapiens
  misc_RNA (1)...(19): siRNA sense strand
ccugauagaugccguaaug

SEQ ID NO: 451331 - RNA, 19 nt, Homo sapiens
  misc_RNA (1)...(19): siRNA sense strand
gguggaauauuugaaguuu

SEQ ID NO: 451332 - RNA, 19 nt, Homo sapiens
  misc_RNA (1)...(19): siRNA sense strand
gaacagguggaauauuuga

SEQ ID NO: 451333 - RNA, 19 nt, Homo sapiens
  misc_RNA (1)...(19): siRNA sense strand
acaacaagcuuauagagau

SEQ ID NO: 451334 - RNA, 19 nt, Homo sapiens
  misc_RNA (1)...(19): siRNA sense strand
cgaaugaaguaaaugcuau

SEQ ID NO: 451335 - RNA, 19 nt, Homo sapiens
  misc_RNA (1)...(19): siRNA sense strand
agaaaggucuacaguaugu

SEQ ID NO: 451336 - RNA, 19 nt, Homo sapiens
  misc_RNA (1)...(19): siRNA sense strand
ggauguagaccgagggaua

SEQ ID NO: 451337 - RNA, 19 nt, Homo sapiens
  misc_RNA (1)...(19): siRNA sense strand
gcaacugguuccuaugaug

SEQ ID NO: 451338 - RNA, 19 nt, Homo sapiens
  misc_RNA (1)...(19): siRNA sense strand
gcauucaugucuguaaauu

SEQ ID NO: 451339 - RNA, 19 nt, Homo sapiens
  misc_RNA (1)...(19): siRNA sense strand
gaaugcagcaggagacaaa

SEQ ID NO: 451340 - RNA, 19 nt, Homo sapiens
  misc_RNA (1)...(19): siRNA sense strand
aaacaagacaacaagcuua

SEQ ID NO: 451341 - RNA, 19 nt, Homo sapiens
  misc_RNA (1)...(19): siRNA sense strand
acagauaugugcauucaug

SEQ ID NO: 451342 - RNA, 19 nt, Homo sapiens
  misc_RNA (1)...(19): siRNA sense strand
gacuaaagaugguaaccuu

SEQ ID NO: 451343 - RNA, 19 nt, Homo sapiens
  misc_RNA (1)...(19): siRNA sense strand
uaaauuaggacaagacaga

SEQ ID NO: 451344 - RNA, 19 nt, Homo sapiens
  misc_RNA (1)...(19): siRNA sense strand
gagcacauacuauagcaaa

SEQ ID NO: 451345 - RNA, 19 nt, Homo sapiens
  misc_RNA (1)...(19): siRNA sense strand
ggacauacgaaugaaguaa

SEQ ID NO: 451346 - RNA, 19 nt, Homo sapiens
  misc_RNA (1)...(19): siRNA sense strand
cauccuaagugcuggagua

SEQ ID NO: 451347 - RNA, 19 nt, Homo sapiens
  misc_RNA (1)...(19): siRNA sense strand
gugaugaggucaacuucuu

SEQ ID NO: 451348 - RNA, 19 nt, Homo sapiens
  misc_RNA (1)...(19): siRNA sense strand
ggaaauuucauccuaagug

SEQ ID NO: 451349 - RNA, 19 nt, Homo sapiens
  misc_RNA (1)...(19): siRNA sense strand
guacuuagacauuguauac

SEQ ID NO: 451350 - RNA, 19 nt, Homo sapiens
  misc_RNA (1)...(19): siRNA sense strand
ggcaagauguuccaagcaa

SEQ ID NO: 451351 - RNA, 19 nt, Homo sapiens
  misc_RNA (1)...(19): siRNA sense strand
ggccaugaaucugaaguuu

SEQ ID NO: 451352 - RNA, 19 nt, Homo sapiens
  misc_RNA (1)...(19): siRNA sense strand
caguggcucuacacaguua

SEQ ID NO: 451353 - RNA, 19 nt, Homo sapiens
  misc_RNA (1)...(19): siRNA sense strand
gccagaauauggacuaaag

SEQ ID NO: 451354 - RNA, 19 nt, Homo sapiens
  misc_RNA (1)...(19): siRNA sense strand
ugguucaguuuguguauua

SEQ ID NO: 451355 - RNA, 19 nt, Homo sapiens
  misc_RNA (1)...(19): siRNA sense strand
guuagcaagugcauccuuu

SEQ ID NO: 451356 - RNA, 19 nt, Homo sapiens
  misc_RNA (1)...(19): siRNA sense strand
ggacgcacauacuggugaa

SEQ ID NO: 451357 - RNA, 19 nt, Homo sapiens
  misc_RNA (1)...(19): siRNA sense strand
gcaccagcauuggauguug

SEQ ID NO: 451358 - RNA, 19 nt, Homo sapiens
  misc_RNA (1)...(19): siRNA sense strand
caacaggaccagggacuaa

SEQ ID NO: 451359 - RNA, 19 nt, Homo sapiens
  misc_RNA (1)...(19): siRNA sense strand
gacaagacagaccuauuaa

SEQ ID NO: 451360 - RNA, 19 nt, Homo sapiens
  misc_RNA (1)...(19): siRNA sense strand
gcagaaguuaguauuaaug

SEQ ID NO: 451361 - RNA, 19 nt, Homo sapiens
  misc_RNA (1)...(19): siRNA sense strand
ggacuaauaauccaaaugc

SEQ ID NO: 451362 - RNA, 19 nt, Homo sapiens
  misc_RNA (1)...(19): siRNA sense strand
gcagagcaacaacaccuuu

SEQ ID NO: 451363 - RNA, 19 nt, Homo sapiens
  misc_RNA (1)...(19): siRNA sense strand
ccaagcaacaguuuccuuu

SEQ ID NO: 451364 - RNA, 19 nt, Homo sapiens
  misc_RNA (1)...(19): siRNA sense strand
uaaaggcccuauauuugca

SEQ ID NO: 451365 - RNA, 19 nt, Homo sapiens
  misc_RNA (1)...(19): siRNA sense strand
cagcauaaaggcccuauau

SEQ ID NO: 451366 - RNA, 19 nt, Homo sapiens
  misc_RNA (1)...(19): siRNA sense strand
agacucaacagcaagaaua

SEQ ID NO: 451367 - RNA, 19 nt, Homo sapiens
  misc_RNA (1)...(19): siRNA sense strand
uauggaaucuuagugagaa

SEQ ID NO: 451368 - RNA, 19 nt, Homo sapiens
  misc_RNA (1)...(19): siRNA sense strand
gauuugcaagcacauaaua

SEQ ID NO: 451369 - RNA, 19 nt, Homo sapiens
  misc_RNA (1)...(19): siRNA sense strand
caacaacaccuuugcuucu

SEQ ID NO: 451370 - RNA, 19 nt, Homo sapiens
  misc_RNA (1)...(19): siRNA sense strand
ggcccuauauuugcauuaa

SEQ ID NO: 451371 - RNA, 19 nt, Homo sapiens
  misc_RNA (1)...(19): siRNA sense strand
gacaacaagcuuauagaga

SEQ ID NO: 451372 - RNA, 19 nt, Homo sapiens
  misc_RNA (1)...(19): siRNA sense strand
ugauucuacuguuagguua

SEQ ID NO: 451373 - RNA, 19 nt, Homo sapiens
  misc_RNA (1)...(19): siRNA sense strand
guaugaaacaagacaauug

SEQ ID NO: 451374 - RNA, 19 nt, Homo sapiens
  misc_RNA (1)...(19): siRNA sense strand
guacaaacaagacaacaag

SEQ ID NO: 451375 - RNA, 19 nt, Homo sapiens
  misc_RNA (1)...(19): siRNA sense strand
gauauggaguaugaaacaa

SEQ ID NO: 451376 - RNA, 19 nt, Homo sapiens
  misc_RNA (1)...(19): siRNA sense strand
caagacagaccuauuaaaa

SEQ ID NO: 451377 - RNA, 19 nt, Homo sapiens
  misc_RNA (1)...(19): siRNA sense strand
caacaccuuugcuucuugu

SEQ ID NO: 451378 - RNA, 19 nt, Homo sapiens
  misc_RNA (1)...(19): siRNA sense strand
caagacaacaagcuuauag

SEQ ID NO: 451379 - RNA, 19 nt, Homo sapiens
  misc_RNA (1)...(19): siRNA sense strand
guauguagaagcagaaguu

SEQ ID NO: 451380 - RNA, 19 nt, Homo sapiens
  misc_RNA (1)...(19): siRNA sense strand
ggacccaacuggcaaucuc

SEQ ID NO: 451381 - RNA, 19 nt, Homo sapiens
  misc_RNA (1)...(19): siRNA sense strand
ccaaggacauacgaaugaa

SEQ ID NO: 451382 - RNA, 19 nt, Homo sapiens
  misc_RNA (1)...(19): siRNA sense strand
ugaggaugguaccuuguuu

SEQ ID NO: 451383 - RNA, 19 nt, Homo sapiens
  misc_RNA (1)...(19): siRNA sense strand
gugcauucaugucuguaaa

SEQ ID NO: 451384 - RNA, 19 nt, Homo sapiens
  misc_RNA (1)...(19): siRNA sense strand
gcagugaugaggucaacuu

SEQ ID NO: 451385 - RNA, 19 nt, Homo sapiens
  misc_RNA (1)...(19): siRNA sense strand
caaacaagacaacaagcuu

SEQ ID NO: 451386 - RNA, 19 nt, Homo sapiens
  misc_RNA (1)...(19): siRNA sense strand
ggaacagguggaauauuug

SEQ ID NO: 451387 - RNA, 19 nt, Homo sapiens
  misc_RNA (1)...(19): siRNA sense strand
ccaaaugccaaccuuaugu

SEQ ID NO: 451388 - RNA, 19 nt, Homo sapiens
  misc_RNA (1)...(19): siRNA sense strand
gaaaucccuccuaauaaag

SEQ ID NO: 451389 - RNA, 19 nt, Homo sapiens
  misc_RNA (1)...(19): siRNA sense strand
ggaggagaauggagcacau

SEQ ID NO: 451390 - RNA, 19 nt, Homo sapiens
  misc_RNA (1)...(19): siRNA sense strand
caacagcaagaauauggaa

SEQ ID NO: 451391 - RNA, 19 nt, Homo sapiens
  misc_RNA (1)...(19): siRNA sense strand
ugauggguuugccagaaua

SEQ ID NO: 451392 - RNA, 19 nt, Homo sapiens
  misc_RNA (1)...(19): siRNA sense strand
ucuagcaacugguuccuau

SEQ ID NO: 451393 - RNA, 19 nt, Homo sapiens
  misc_RNA (1)...(19): siRNA sense strand
auacugauaugauggaagu

SEQ ID NO: 451394 - RNA, 19 nt, Homo sapiens
  misc_RNA (1)...(19): siRNA sense strand
caaaugccaaccuuauguu

SEQ ID NO: 451395 - RNA, 19 nt, Homo sapiens
  misc_RNA (1)...(19): siRNA sense strand
ggaccagggacuaauaauc

SEQ ID NO: 451396 - RNA, 19 nt, Homo sapiens
  misc_RNA (1)...(19): siRNA sense strand
uauggaguaugaaacaaga

SEQ ID NO: 451397 - RNA, 19 nt, Homo sapiens
  misc_RNA (1)...(19): siRNA sense strand
gacauacgaaugaaguaaa

SEQ ID NO: 451398 - RNA, 19 nt, Homo sapiens
  misc_RNA (1)...(19): siRNA sense strand
gucaacuucuugguauaua

SEQ ID NO: 451399 - RNA, 19 nt, Homo sapiens
  misc_RNA (1)...(19): siRNA sense strand
guucugacgacaugacuuu

SEQ ID NO: 451400 - RNA, 19 nt, Homo sapiens
  misc_RNA (1)...(19): siRNA sense strand
cauaucagucaguccaaua

SEQ ID NO: 451401 - RNA, 19 nt, Homo sapiens
  misc_RNA (1)...(19): siRNA sense strand
ucuacacaguuaguacuua

SEQ ID NO: 451402 - RNA, 19 nt, Homo sapiens
  misc_RNA (1)...(19): siRNA sense strand
cuacacaguuaguacuuag

SEQ ID NO: 451403 - RNA, 19 nt, Homo sapiens
  misc_RNA (1)...(19): siRNA sense strand
cugacgacaugacuuuaaa

SEQ ID NO: 451404 - RNA, 19 nt, Homo sapiens
  misc_RNA (1)...(19): siRNA sense strand
agacagaccuauuaaaaca

SEQ ID NO: 451405 - RNA, 19 nt, Homo sapiens
  misc_RNA (1)...(19): siRNA sense strand
ucauucagcauuuaccuuu

SEQ ID NO: 451406 - RNA, 19 nt, Homo sapiens
  misc_RNA (1)...(19): siRNA sense strand
gaagcaaccucuccucuuu

SEQ ID NO: 451407 - RNA, 19 nt, Homo sapiens
  misc_RNA (1)...(19): siRNA sense strand
ggaaagagccgguuguaaa

SEQ ID NO: 451408 - RNA, 19 nt, Homo sapiens
  misc_RNA (1)...(19): siRNA sense strand
uaaaugaacucaccuacaa

SEQ ID NO: 451409 - RNA, 19 nt, Homo sapiens
  misc_RNA (1)...(19): siRNA sense strand
gauaaugacuugucuagga

SEQ ID NO: 451410 - RNA, 19 nt, Homo sapiens
  misc_RNA (1)...(19): siRNA sense strand
gaaauaagaacucaccuuu

SEQ ID NO: 451411 - RNA, 19 nt, Homo sapiens
  misc_RNA (1)...(19): siRNA sense strand
gcagugaacuuacuacuca

SEQ ID NO: 451412 - RNA, 19 nt, Homo sapiens
  misc_RNA (1)...(19): siRNA sense strand
gaagucaccucacacaaau

SEQ ID NO: 451413 - RNA, 19 nt, Homo sapiens
  misc_RNA (1)...(19): siRNA sense strand
gcccacaaguucuaauuua

SEQ ID NO: 451414 - RNA, 19 nt, Homo sapiens
  misc_RNA (1)...(19): siRNA sense strand
ccaaagagcugaaaagauu

SEQ ID NO: 451415 - RNA, 19 nt, Homo sapiens
  misc_RNA (1)...(19): siRNA sense strand
acaauugguuucagaguua

SEQ ID NO: 451416 - RNA, 19 nt, Homo sapiens
  misc_RNA (1)...(19): siRNA sense strand
gcauaaacauuccgucgaa

SEQ ID NO: 451417 - RNA, 19 nt, Homo sapiens
  misc_RNA (1)...(19): siRNA sense strand
gaagaaagaagcagcagaa

SEQ ID NO: 451418 - RNA, 19 nt, Homo sapiens
  misc_RNA (1)...(19): siRNA sense strand
aaagagccauguaucauaa

SEQ ID NO: 451419 - RNA, 19 nt, Homo sapiens
  misc_RNA (1)...(19): siRNA sense strand
gaagaggaccuuauuguuc

SEQ ID NO: 451420 - RNA, 19 nt, Homo sapiens
  misc_RNA (1)...(19): siRNA sense strand
cagaagaggacauuuauuu

SEQ ID NO: 451421 - RNA, 19 nt, Homo sapiens
  misc_RNA (1)...(19): siRNA sense strand
ccucaaggcuccuaugaaa

SEQ ID NO: 451422 - RNA, 19 nt, Homo sapiens
  misc_RNA (1)...(19): siRNA sense strand
gaacucaccuacaauaacu

SEQ ID NO: 451423 - RNA, 19 nt, Homo sapiens
  misc_RNA (1)...(19): siRNA sense strand
cagauaaccuccuuguaaa

SEQ ID NO: 451424 - RNA, 19 nt, Homo sapiens
  misc_RNA (1)...(19): siRNA sense strand
gaaagaagcagcagaagag

SEQ ID NO: 451425 - RNA, 19 nt, Homo sapiens
  misc_RNA (1)...(19): siRNA sense strand
gaacagaugacacccaaga

SEQ ID NO: 451426 - RNA, 19 nt, Homo sapiens
  misc_RNA (1)...(19): siRNA sense strand
cuacugaagucuggaaaua

SEQ ID NO: 451427 - RNA, 19 nt, Homo sapiens
  misc_RNA (1)...(19): siRNA sense strand
uaucacagacuuucaguua

SEQ ID NO: 451428 - RNA, 19 nt, Homo sapiens
  misc_RNA (1)...(19): siRNA sense strand
aaagugagauucuaaguca

SEQ ID NO: 451429 - RNA, 19 nt, Homo sapiens
  misc_RNA (1)...(19): siRNA sense strand
gaagaggacauuuauuuca

SEQ ID NO: 451430 - RNA, 19 nt, Homo sapiens
  misc_RNA (1)...(19): siRNA sense strand
acaaagaggaggcuaguua

SEQ ID NO: 451431 - RNA, 19 nt, Homo sapiens
  misc_RNA (1)...(19): siRNA sense strand
gauaaccuccuuguaaaua

SEQ ID NO: 451432 - RNA, 19 nt, Homo sapiens
  misc_RNA (1)...(19): siRNA sense strand
guugauacauuccuaagaa

SEQ ID NO: 451433 - RNA, 19 nt, Homo sapiens
  misc_RNA (1)...(19): siRNA sense strand
ucacaaagccuauucugaa

SEQ ID NO: 451434 - RNA, 19 nt, Homo sapiens
  misc_RNA (1)...(19): siRNA sense strand
gccaggagcugcauaaaca

SEQ ID NO: 451435 - RNA, 19 nt, Homo sapiens
  misc_RNA (1)...(19): siRNA sense strand
gcaaauauuucauguucuc

SEQ ID NO: 451436 - RNA, 19 nt, Homo sapiens
  misc_RNA (1)...(19): siRNA sense strand
gaacaggaagaaaucagua

SEQ ID NO: 451437 - RNA, 19 nt, Homo sapiens
  misc_RNA (1)...(19): siRNA sense strand
ccaacuugcucauuugaaa

SEQ ID NO: 451438 - RNA, 19 nt, Homo sapiens
  misc_RNA (1)...(19): siRNA sense strand
gaagacaguguauuaauuc

SEQ ID NO: 451439 - RNA, 19 nt, Homo sapiens
  misc_RNA (1)...(19): siRNA sense strand
gguagaagauacacaggaa

SEQ ID NO: 451440 - RNA, 19 nt, Homo sapiens
  misc_RNA (1)...(19): siRNA sense strand
caaagccuauucugaaaug

SEQ ID NO: 451441 - RNA, 19 nt, Homo sapiens
  misc_RNA (1)...(19): siRNA sense strand
uaaagagccauguaucaua

SEQ ID NO: 451442 - RNA, 19 nt, Homo sapiens
  misc_RNA (1)...(19): siRNA sense strand
gggauggaaugcugaguuu

SEQ ID NO: 451443 - RNA, 19 nt, Homo sapiens
  misc_RNA (1)...(19): siRNA sense strand
acagauaaccuccuuguaa

SEQ ID NO: 451444 - RNA, 19 nt, Homo sapiens
  misc_RNA (1)...(19): siRNA sense strand
gcacauugaugauucuuac

SEQ ID NO: 451445 - RNA, 19 nt, Homo sapiens
  misc_RNA (1)...(19): siRNA sense strand
ccaagcaccugguagaaga

SEQ ID NO: 451446 - RNA, 19 nt, Homo sapiens
  misc_RNA (1)...(19): siRNA sense strand
gaaacugaccaaagugaaa

SEQ ID NO: 451447 - RNA, 19 nt, Homo sapiens
  misc_RNA (1)...(19): siRNA sense strand
gauggaaugcugaguuuaa

SEQ ID NO: 451448 - RNA, 19 nt, Homo sapiens
  misc_RNA (1)...(19): siRNA sense strand
gaacaccuccacccauuga

SEQ ID NO: 451449 - RNA, 19 nt, Homo sapiens
  misc_RNA (1)...(19): siRNA sense strand
cagcagaagaggacauuua

SEQ ID NO: 451450 - RNA, 19 nt, Homo sapiens
  misc_RNA (1)...(19): siRNA sense strand
aaagguagcagugaacuua

SEQ ID NO: 451451 - RNA, 19 nt, Homo sapiens
  misc_RNA (1)...(19): siRNA sense strand
acugaagucuggaaauaua

SEQ ID NO: 451452 - RNA, 19 nt, Homo sapiens
  misc_RNA (1)...(19): siRNA sense strand
ggacaaccaaguucaagaa

SEQ ID NO: 451453 - RNA, 19 nt, Homo sapiens
  misc_RNA (1)...(19): siRNA sense strand
ugaggaaacugaccaaagu

SEQ ID NO: 451454 - RNA, 19 nt, Homo sapiens
  misc_RNA (1)...(19): siRNA sense strand
uacaauaacuuaccagcaa

SEQ ID NO: 451455 - RNA, 19 nt, Homo sapiens
  misc_RNA (1)...(19): siRNA sense strand
ggagagagacaucuuaaag

SEQ ID NO: 451456 - RNA, 19 nt, Homo sapiens
  misc_RNA (1)...(19): siRNA sense strand
gcagcaaucuugacuucug

SEQ ID NO: 451457 - RNA, 19 nt, Homo sapiens
  misc_RNA (1)...(19): siRNA sense strand
uaacuuaccagcaaaugaa

SEQ ID NO: 451458 - RNA, 19 nt, Homo sapiens
  misc_RNA (1)...(19): siRNA sense strand
gaaauggggcuucucuuua

SEQ ID NO: 451459 - RNA, 19 nt, Homo sapiens
  misc_RNA (1)...(19): siRNA sense strand
gaaagagccgguuguaaag

SEQ ID NO: 451460 - RNA, 19 nt, Homo sapiens
  misc_RNA (1)...(19): siRNA sense strand
agacaucuaucacacuuga

SEQ ID NO: 451461 - RNA, 19 nt, Homo sapiens
  misc_RNA (1)...(19): siRNA sense strand
cacaaagccuauucugaaa

SEQ ID NO: 451462 - RNA, 19 nt, Homo sapiens
  misc_RNA (1)...(19): siRNA sense strand
uuaccaagcuucagucugu

SEQ ID NO: 451463 - RNA, 19 nt, Homo sapiens
  misc_RNA (1)...(19): siRNA sense strand
cgcagagguuccaguauua

SEQ ID NO: 451464 - RNA, 19 nt, Homo sapiens
  misc_RNA (1)...(19): siRNA sense strand
gaagaaaagucgucaucaa

SEQ ID NO: 451465 - RNA, 19 nt, Homo sapiens
  misc_RNA (1)...(19): siRNA sense strand
gaacacauuccuccuaaag

SEQ ID NO: 451466 - RNA, 19 nt, Homo sapiens
  misc_RNA (1)...(19): siRNA sense strand
gaagaaaucaguagcaaaa

SEQ ID NO: 451467 - RNA, 19 nt, Homo sapiens
  misc_RNA (1)...(19): siRNA sense strand
gaaccaguuacagaaauua

SEQ ID NO: 451468 - RNA, 19 nt, Homo sapiens
  misc_RNA (1)...(19): siRNA sense strand
ucgcagagguuccaguauu

SEQ ID NO: 451469 - RNA, 19 nt, Homo sapiens
  misc_RNA (1)...(19): siRNA sense strand
aaagagggaagcuguauuu

SEQ ID NO: 451470 - RNA, 19 nt, Homo sapiens
  misc_RNA (1)...(19): siRNA sense strand
ucauuuggaugucaagaaa

SEQ ID NO: 451471 - RNA, 19 nt, Homo sapiens
  misc_RNA (1)...(19): siRNA sense strand
ccaaagagagugagucguu

SEQ ID NO: 451472 - RNA, 19 nt, Homo sapiens
  misc_RNA (1)...(19): siRNA sense strand
aaucagcucuguagaaaca

SEQ ID NO: 451473 - RNA, 19 nt, Homo sapiens
  misc_RNA (1)...(19): siRNA sense strand
gugaaguccugcucagaaa

SEQ ID NO: 451474 - RNA, 19 nt, Homo sapiens
  misc_RNA (1)...(19): siRNA sense strand
ucaagaaccucucagaaac

SEQ ID NO: 451475 - RNA, 19 nt, Homo sapiens
  misc_RNA (1)...(19): siRNA sense strand
uaaaggaacaggaagaaau

SEQ ID NO: 451476 - RNA, 19 nt, Homo sapiens
  misc_RNA (1)...(19): siRNA sense strand
gcagugggacccuuucuga

SEQ ID NO: 451477 - RNA, 19 nt, Homo sapiens
  misc_RNA (1)...(19): siRNA sense strand
uguauaaucucgugugugu

SEQ ID NO: 451478 - RNA, 19 nt, Homo sapiens
  misc_RNA (1)...(19): siRNA sense strand
aaagacaucuaucacacuu

SEQ ID NO: 451479 - RNA, 19 nt, Homo sapiens
  misc_RNA (1)...(19): siRNA sense strand
cagcagcaaucuugacuuc

SEQ ID NO: 451480 - RNA, 19 nt, Homo sapiens
  misc_RNA (1)...(19): siRNA sense strand
ucagagagaucagggcauu

SEQ ID NO: 451481 - RNA, 19 nt, Homo sapiens
  misc_RNA (1)...(19): siRNA sense strand
ccagugauacuaaacaauu

SEQ ID NO: 451482 - RNA, 19 nt, Homo sapiens
  misc_RNA (1)...(19): siRNA sense strand
acacaaauaucagcacgaa

SEQ ID NO: 451483 - RNA, 19 nt, Homo sapiens
  misc_RNA (1)...(19): siRNA sense strand
gaagaagucaccucacaca

SEQ ID NO: 451484 - RNA, 19 nt, Homo sapiens
  misc_RNA (1)...(19): siRNA sense strand
acacgaagcauguccaauu

SEQ ID NO: 451485 - RNA, 19 nt, Homo sapiens
  misc_RNA (1)...(19): siRNA sense strand
gaacucaccuuuuaagucu

SEQ ID NO: 451486 - RNA, 19 nt, Homo sapiens
  misc_RNA (1)...(19): siRNA sense strand
ccaggaggauuaccuauac

SEQ ID NO: 451487 - RNA, 19 nt, Homo sapiens
  misc_RNA (1)...(19): siRNA sense strand
caacauuggucuuuuguga

SEQ ID NO: 451488 - RNA, 19 nt, Homo sapiens
  misc_RNA (1)...(19): siRNA sense strand
ccuggaaggugacgugaaa

SEQ ID NO: 451489 - RNA, 19 nt, Homo sapiens
  misc_RNA (1)...(19): siRNA sense strand
gggccuuucuucauccaua

SEQ ID NO: 451490 - RNA, 19 nt, Homo sapiens
  misc_RNA (1)...(19): siRNA sense strand
ccugcuagaucaccaguaa

SEQ ID NO: 451491 - RNA, 19 nt, Homo sapiens
  misc_RNA (1)...(19): siRNA sense strand
aggauuaccuauacaaaga

SEQ ID NO: 451492 - RNA, 19 nt, Homo sapiens
  misc_RNA (1)...(19): siRNA sense strand
gcgaagauguaguuucucu

SEQ ID NO: 451493 - RNA, 19 nt, Homo sapiens
  misc_RNA (1)...(19): siRNA sense strand
aggcaaauauuucauguuc

SEQ ID NO: 451494 - RNA, 19 nt, Homo sapiens
  misc_RNA (1)...(19): siRNA sense strand
cuaagaagaccuaauuuca

SEQ ID NO: 451495 - RNA, 19 nt, Homo sapiens
  misc_RNA (1)...(19): siRNA sense strand
uagauuuacuucaccugua

SEQ ID NO: 451496 - RNA, 19 nt, Homo sapiens
  misc_RNA (1)...(19): siRNA sense strand
cauaacugcuugcgaagau

SEQ ID NO: 451497 - RNA, 19 nt, Homo sapiens
  misc_RNA (1)...(19): siRNA sense strand
gaaaaucagcucuguagaa

SEQ ID NO: 451498 - RNA, 19 nt, Homo sapiens
  misc_RNA (1)...(19): siRNA sense strand
gaauacagcaagacacuag

SEQ ID NO: 451499 - RNA, 19 nt, Homo sapiens
  misc_RNA (1)...(19): siRNA sense strand
ggaagaaaucaguagcaaa

SEQ ID NO: 451500 - RNA, 19 nt, Homo sapiens
  misc_RNA (1)...(19): siRNA sense strand
cuaaacaauucgacaguuc

SEQ ID NO: 451501 - RNA, 19 nt, Homo sapiens
  misc_RNA (1)...(19): siRNA sense strand
gaaagugagauucuaaguc

SEQ ID NO: 451502 - RNA, 19 nt, Homo sapiens
  misc_RNA (1)...(19): siRNA sense strand
cgacuacaguuccuuuaca

SEQ ID NO: 451503 - RNA, 19 nt, Homo sapiens
  misc_RNA (1)...(19): siRNA sense strand
gcacaggacaaccaaguuc

SEQ ID NO: 451504 - RNA, 19 nt, Homo sapiens
  misc_RNA (1)...(19): siRNA sense strand
auacagaaauggaggacuu

SEQ ID NO: 451505 - RNA, 19 nt, Homo sapiens
  misc_RNA (1)...(19): siRNA sense strand
gaagauaaugacuugucua

SEQ ID NO: 451506 - RNA, 19 nt, Homo sapiens
  misc_RNA (1)...(19): siRNA sense strand
ggagaagauugccaaguua

SEQ ID NO: 451507 - RNA, 19 nt, Homo sapiens
  misc_RNA (1)...(19): siRNA sense strand
ggaagaagccgucugacua

SEQ ID NO: 451508 - RNA, 19 nt, Homo sapiens
  misc_RNA (1)...(19): siRNA sense strand
gaaugugugaggcuucuua

SEQ ID NO: 451509 - RNA, 19 nt, Homo sapiens
  misc_RNA (1)...(19): siRNA sense strand
uggagaagauugccaaguu

SEQ ID NO: 451510 - RNA, 19 nt, Homo sapiens
  misc_RNA (1)...(19): siRNA sense strand
gagcgggaguuccgaaugu

SEQ ID NO: 451511 - RNA, 19 nt, Homo sapiens
  misc_RNA (1)...(19): siRNA sense strand
ccaagugcuucgaguacua

SEQ ID NO: 451512 - RNA, 19 nt, Homo sapiens
  misc_RNA (1)...(19): siRNA sense strand
gagaagauugccaaguuaa

SEQ ID NO: 451513 - RNA, 19 nt, Homo sapiens
  misc_RNA (1)...(19): siRNA sense strand
gggagcaucuggacugugu

SEQ ID NO: 451514 - RNA, 19 nt, Homo sapiens
  misc_RNA (1)...(19): siRNA sense strand
ucaaagugcugcucaaugc

SEQ ID NO: 451515 - RNA, 19 nt, Homo sapiens
  misc_RNA (1)...(19): siRNA sense strand
gugugaggcuucuuauuga

SEQ ID NO: 451516 - RNA, 19 nt, Homo sapiens
  misc_RNA (1)...(19): siRNA sense strand
cgagaugcuuaucgaguuu

SEQ ID NO: 451517 - RNA, 19 nt, Homo sapiens
  misc_RNA (1)...(19): siRNA sense strand
gaagaagccgucugacuac

SEQ ID NO: 451518 - RNA, 19 nt, Homo sapiens
  misc_RNA (1)...(19): siRNA sense strand
caagaauguugaccucauc

SEQ ID NO: 451519 - RNA, 19 nt, Homo sapiens
  misc_RNA (1)...(19): siRNA sense strand
cggccaaggucaagaaugu

SEQ ID NO: 451520 - RNA, 19 nt, Homo sapiens
  misc_RNA (1)...(19): siRNA sense strand
uugauuaccucuccuacaa

SEQ ID NO: 451521 - RNA, 19 nt, Homo sapiens
  misc_RNA (1)...(19): siRNA sense strand
gcaucuggacugugucaaa

SEQ ID NO: 451522 - RNA, 19 nt, Homo sapiens
  misc_RNA (1)...(19): siRNA sense strand
ugugugaggcuucuuauug

SEQ ID NO: 451523 - RNA, 19 nt, Homo sapiens
  misc_RNA (1)...(19): siRNA sense strand
gaagauugccaaguuaaac

SEQ ID NO: 451524 - RNA, 19 nt, Homo sapiens
  misc_RNA (1)...(19): siRNA sense strand
caacgugaaugcggcaaag

SEQ ID NO: 451525 - RNA, 19 nt, Homo sapiens
  misc_RNA (1)...(19): siRNA sense strand
gauuaccucuccuacaacu

SEQ ID NO: 451526 - RNA, 19 nt, Homo sapiens
  misc_RNA (1)...(19): siRNA sense strand
gcgggaagaagccgucuga

SEQ ID NO: 451527 - RNA, 19 nt, Homo sapiens
  misc_RNA (1)...(19): siRNA sense strand
caucuggacugugucaaag

SEQ ID NO: 451528 - RNA, 19 nt, Homo sapiens
  misc_RNA (1)...(19): siRNA sense strand
gaagcgcacgauugccauu

SEQ ID NO: 451529 - RNA, 19 nt, Homo sapiens
  misc_RNA (1)...(19): siRNA sense strand
gccaaggucaagaauguug

SEQ ID NO: 451530 - RNA, 19 nt, Homo sapiens
  misc_RNA (1)...(19): siRNA sense strand
uuaccucuccuacaacuga

SEQ ID NO: 451531 - RNA, 19 nt, Homo sapiens
  misc_RNA (1)...(19): siRNA sense strand
uccgagggcuggagaagau

SEQ ID NO: 451532 - RNA, 19 nt, Homo sapiens
  misc_RNA (1)...(19): siRNA sense strand
gcagggugaacuugaggaa

SEQ ID NO: 451533 - RNA, 19 nt, Homo sapiens
  misc_RNA (1)...(19): siRNA sense strand
gagcaucuggacuguguca

SEQ ID NO: 451534 - RNA, 19 nt, Homo sapiens
  misc_RNA (1)...(19): siRNA sense strand
gggaagaagccgucugacu

SEQ ID NO: 451535 - RNA, 19 nt, Homo sapiens
  misc_RNA (1)...(19): siRNA sense strand
agaagauugccaaguuaaa

SEQ ID NO: 451536 - RNA, 19 nt, Homo sapiens
  misc_RNA (1)...(19): siRNA sense strand
gcggcaaagcuucaugaga

SEQ ID NO: 451537 - RNA, 19 nt, Homo sapiens
  misc_RNA (1)...(19): siRNA sense strand
cagcaucgagugugugaag

SEQ ID NO: 451538 - RNA, 19 nt, Homo sapiens
  misc_RNA (1)...(19): siRNA sense strand
ggcaaagcuucaugagacu

SEQ ID NO: 451539 - RNA, 19 nt, Homo sapiens
  misc_RNA (1)...(19): siRNA sense strand
ucuggacugugucaaagug

SEQ ID NO: 451540 - RNA, 19 nt, Homo sapiens
  misc_RNA (1)...(19): siRNA sense strand
ggucaacccuccccuguac

SEQ ID NO: 451541 - RNA, 19 nt, Homo sapiens
  misc_RNA (1)...(19): siRNA sense strand
ugaagcucuugcuguccua

SEQ ID NO: 451542 - RNA, 19 nt, Homo sapiens
  misc_RNA (1)...(19): siRNA sense strand
gucaaagugcugcucaaug

SEQ ID NO: 451543 - RNA, 19 nt, Homo sapiens
  misc_RNA (1)...(19): siRNA sense strand
gaguuuggcggcaacaucu

SEQ ID NO: 451544 - RNA, 19 nt, Homo sapiens
  misc_RNA (1)...(19): siRNA sense strand
gggaguuccgaauguguga

SEQ ID NO: 451545 - RNA, 19 nt, Homo sapiens
  misc_RNA (1)...(19): siRNA sense strand
gcacggauguuauauaauu

SEQ ID NO: 451546 - RNA, 19 nt, Homo sapiens
  misc_RNA (1)...(19): siRNA sense strand
gugcacggauguuauauaa

SEQ ID NO: 451547 - RNA, 19 nt, Homo sapiens
  misc_RNA (1)...(19): siRNA sense strand
gagcugauccuacaguuaa

SEQ ID NO: 451548 - RNA, 19 nt, Homo sapiens
  misc_RNA (1)...(19): siRNA sense strand
aaacuugggucgcuuagaa

SEQ ID NO: 451549 - RNA, 19 nt, Homo sapiens
  misc_RNA (1)...(19): siRNA sense strand
gcuggacucugcuucauuu

SEQ ID NO: 451550 - RNA, 19 nt, Homo sapiens
  misc_RNA (1)...(19): siRNA sense strand
acagacuccuuuacacuua

SEQ ID NO: 451551 - RNA, 19 nt, Homo sapiens
  misc_RNA (1)...(19): siRNA sense strand
ggaaguagucgaccauguu

SEQ ID NO: 451552 - RNA, 19 nt, Homo sapiens
  misc_RNA (1)...(19): siRNA sense strand
gaaguagucgaccauguuu

SEQ ID NO: 451553 - RNA, 19 nt, Homo sapiens
  misc_RNA (1)...(19): siRNA sense strand
ucagaaugguuuccuguug

SEQ ID NO: 451554 - RNA, 19 nt, Homo sapiens
  misc_RNA (1)...(19): siRNA sense strand
acacggagcugauccuaca

SEQ ID NO: 451555 - RNA, 19 nt, Homo sapiens
  misc_RNA (1)...(19): siRNA sense strand
ggaaaggaaagauguguuc

SEQ ID NO: 451556 - RNA, 19 nt, Homo sapiens
  misc_RNA (1)...(19): siRNA sense strand
ggagcgacaucauuaaugc

SEQ ID NO: 451557 - RNA, 19 nt, Homo sapiens
  misc_RNA (1)...(19): siRNA sense strand
gaacacacggaacuaugaa

SEQ ID NO: 451558 - RNA, 19 nt, Homo sapiens
  misc_RNA (1)...(19): siRNA sense strand
ggaccacaaugccaacauc

SEQ ID NO: 451559 - RNA, 19 nt, Homo sapiens
  misc_RNA (1)...(19): siRNA sense strand
gaaagauguguucggguuu

SEQ ID NO: 451560 - RNA, 19 nt, Homo sapiens
  misc_RNA (1)...(19): siRNA sense strand
ggagcugauccuacaguua

SEQ ID NO: 451561 - RNA, 19 nt, Homo sapiens
  misc_RNA (1)...(19): siRNA sense strand
uacaggagcgacaucauua

SEQ ID NO: 451562 - RNA, 19 nt, Homo sapiens
  misc_RNA (1)...(19): siRNA sense strand
gauguuagaaucugaauac

SEQ ID NO: 451563 - RNA, 19 nt, Homo sapiens
  misc_RNA (1)...(19): siRNA sense strand
ggacucugcuucauuucuc

SEQ ID NO: 451564 - RNA, 19 nt, Homo sapiens
  misc_RNA (1)...(19): siRNA sense strand
gaccauguuuggauuucuu

SEQ ID NO: 451565 - RNA, 19 nt, Homo sapiens
  misc_RNA (1)...(19): siRNA sense strand
cuucacggcucuucacuau

SEQ ID NO: 451566 - RNA, 19 nt, Homo sapiens
  misc_RNA (1)...(19): siRNA sense strand
ucacggcucuucacuaugc

SEQ ID NO: 451567 - RNA, 19 nt, Homo sapiens
  misc_RNA (1)...(19): siRNA sense strand
acacuuaucugcccuuagg

SEQ ID NO: 451568 - RNA, 19 nt, Homo sapiens
  misc_RNA (1)...(19): siRNA sense strand
caaaagcaaucacucuuau

SEQ ID NO: 451569 - RNA, 19 nt, Homo sapiens
  misc_RNA (1)...(19): siRNA sense strand
ucauuucucugcagcaaga

SEQ ID NO: 451570 - RNA, 19 nt, Homo sapiens
  misc_RNA (1)...(19): siRNA sense strand
caggaagaguugcagauuc

SEQ ID NO: 451571 - RNA, 19 nt, Homo sapiens
  misc_RNA (1)...(19): siRNA sense strand
gaacacggagcugauccua

SEQ ID NO: 451572 - RNA, 19 nt, Homo sapiens
  misc_RNA (1)...(19): siRNA sense strand
gcagcaagaggaaaggaaa

SEQ ID NO: 451573 - RNA, 19 nt, Homo sapiens
  misc_RNA (1)...(19): siRNA sense strand
aggaagaguugcagauuca

SEQ ID NO: 451574 - RNA, 19 nt, Homo sapiens
  misc_RNA (1)...(19): siRNA sense strand
cgaacacacggaacuauga

SEQ ID NO: 451575 - RNA, 19 nt, Homo sapiens
  misc_RNA (1)...(19): siRNA sense strand
gcgauacgccgugaucaaa

SEQ ID NO: 451576 - RNA, 19 nt, Homo sapiens
  misc_RNA (1)...(19): siRNA sense strand
ggacagacuccuuuacacu

SEQ ID NO: 451577 - RNA, 19 nt, Homo sapiens
  misc_RNA (1)...(19): siRNA sense strand
gaggucaagcugugugaaa

SEQ ID NO: 451578 - RNA, 19 nt, Homo sapiens
  misc_RNA (1)...(19): siRNA sense strand
caagaggaaaggaaagaug

SEQ ID NO: 451579 - RNA, 19 nt, Homo sapiens
  misc_RNA (1)...(19): siRNA sense strand
gacagacuccuuuacacuu

SEQ ID NO: 451580 - RNA, 19 nt, Homo sapiens
  misc_RNA (1)...(19): siRNA sense strand
gaagacggacagacuccuu

SEQ ID NO: 451581 - RNA, 19 nt, Homo sapiens
  misc_RNA (1)...(19): siRNA sense strand
gcgacaucauuaaugcaaa

SEQ ID NO: 451582 - RNA, 19 nt, Homo sapiens
  misc_RNA (1)...(19): siRNA sense strand
gcauugcacgcuugauguu

SEQ ID NO: 451583 - RNA, 19 nt, Homo sapiens
  misc_RNA (1)...(19): siRNA sense strand
caccaucauugucgaagga

SEQ ID NO: 451584 - RNA, 19 nt, Homo sapiens
  misc_RNA (1)...(19): siRNA sense strand
ugcgaaagaugcuagaaca

SEQ ID NO: 451585 - RNA, 19 nt, Homo sapiens
  misc_RNA (1)...(19): siRNA sense strand
gaauacaggagcgacauca

SEQ ID NO: 451586 - RNA, 19 nt, Homo sapiens
  misc_RNA (1)...(19): siRNA sense strand
gaugcuagaacaaggcuau

SEQ ID NO: 451587 - RNA, 19 nt, Homo sapiens
  misc_RNA (1)...(19): siRNA sense strand
uuacacuuaucugcccuua

SEQ ID NO: 451588 - RNA, 19 nt, Homo sapiens
  misc_RNA (1)...(19): siRNA sense strand
uccuacaguuaaagacuua

SEQ ID NO: 451589 - RNA, 19 nt, Homo sapiens
  misc_RNA (1)...(19): siRNA sense strand
ccacacagugcgaaagaug

SEQ ID NO: 451590 - RNA, 19 nt, Homo sapiens
  misc_RNA (1)...(19): siRNA sense strand
cgaaagaugcuagaacaag

SEQ ID NO: 451591 - RNA, 19 nt, Homo sapiens
  misc_RNA (1)...(19): siRNA sense strand
ggaguucaaggcugagguu

SEQ ID NO: 451592 - RNA, 19 nt, Homo sapiens
  misc_RNA (1)...(19): siRNA sense strand
agacggacagacuccuuua

SEQ ID NO: 451593 - RNA, 19 nt, Homo sapiens
  misc_RNA (1)...(19): siRNA sense strand
ucaaaagcaaucacucuua

SEQ ID NO: 451594 - RNA, 19 nt, Homo sapiens
  misc_RNA (1)...(19): siRNA sense strand
ccaggaagaguugcagauu

SEQ ID NO: 451595 - RNA, 19 nt, Homo sapiens
  misc_RNA (1)...(19): siRNA sense strand
gcugugugcacggauguua

SEQ ID NO: 451596 - RNA, 19 nt, Homo sapiens
  misc_RNA (1)...(19): siRNA sense strand
ugccgaauguuccuucaga

SEQ ID NO: 451597 - RNA, 19 nt, Homo sapiens
  misc_RNA (1)...(19): siRNA sense strand
cgacaucauuaaugcaaaa

SEQ ID NO: 451598 - RNA, 19 nt, Homo sapiens
  misc_RNA (1)...(19): siRNA sense strand
auacaggagcgacaucauu

SEQ ID NO: 451599 - RNA, 19 nt, Homo sapiens
  misc_RNA (1)...(19): siRNA sense strand
ucacucuuauugccgaaug

SEQ ID NO: 451600 - RNA, 19 nt, Homo sapiens
  misc_RNA (1)...(19): siRNA sense strand
cgcuucagcucgccauuau

SEQ ID NO: 451601 - RNA, 19 nt, Homo sapiens
  misc_RNA (1)...(19): siRNA sense strand
cagacuccuuuacacuuau

SEQ ID NO: 451602 - RNA, 19 nt, Homo sapiens
  misc_RNA (1)...(19): siRNA sense strand
cuacggcagggacucauuu

SEQ ID NO: 451603 - RNA, 19 nt, Homo sapiens
  misc_RNA (1)...(19): siRNA sense strand
agucgaccauguuuggauu

SEQ ID NO: 451604 - RNA, 19 nt, Homo sapiens
  misc_RNA (1)...(19): siRNA sense strand
gaggaaaggaaagaugugu

SEQ ID NO: 451605 - RNA, 19 nt, Homo sapiens
  misc_RNA (1)...(19): siRNA sense strand
gcgaaagaugcuagaacaa

SEQ ID NO: 451606 - RNA, 19 nt, Homo sapiens
  misc_RNA (1)...(19): siRNA sense strand
gcuugauguuagaaucuga

SEQ ID NO: 451607 - RNA, 19 nt, Homo sapiens
  misc_RNA (1)...(19): siRNA sense strand
gcaagaggaaaggaaagau

SEQ ID NO: 451608 - RNA, 19 nt, Homo sapiens
  misc_RNA (1)...(19): siRNA sense strand
gagaggucaagcuguguga

SEQ ID NO: 451609 - RNA, 19 nt, Homo sapiens
  misc_RNA (1)...(19): siRNA sense strand
ugugugcacggauguuaua

SEQ ID NO: 451610 - RNA, 19 nt, Homo sapiens
  misc_RNA (1)...(19): siRNA sense strand
cacaaacuugggucgcuua

SEQ ID NO: 451611 - RNA, 19 nt, Homo sapiens
  misc_RNA (1)...(19): siRNA sense strand
gccaacaucgacauucaga

SEQ ID NO: 451612 - RNA, 19 nt, Homo sapiens
  misc_RNA (1)...(19): siRNA sense strand
caggagcgacaucauuaau

SEQ ID NO: 451613 - RNA, 19 nt, Homo sapiens
  misc_RNA (1)...(19): siRNA sense strand
uggaaguagucgaccaugu

SEQ ID NO: 451614 - RNA, 19 nt, Homo sapiens
  misc_RNA (1)...(19): siRNA sense strand
acaggagcgacaucauuaa

SEQ ID NO: 451615 - RNA, 19 nt, Homo sapiens
  misc_RNA (1)...(19): siRNA sense strand
ccgcuucagcucgccauua

SEQ ID NO: 451616 - RNA, 19 nt, Homo sapiens
  misc_RNA (1)...(19): siRNA sense strand
cauugcacgcuugauguua

SEQ ID NO: 451617 - RNA, 19 nt, Homo sapiens
  misc_RNA (1)...(19): siRNA sense strand
cggagcugauccuacaguu

SEQ ID NO: 451618 - RNA, 19 nt, Homo sapiens
  misc_RNA (1)...(19): siRNA sense strand
gauccuacaguuaaagacu

SEQ ID NO: 451619 - RNA, 19 nt, Homo sapiens
  misc_RNA (1)...(19): siRNA sense strand
ccgcauugcacgcuugaug

SEQ ID NO: 451620 - RNA, 19 nt, Homo sapiens
  misc_RNA (1)...(19): siRNA sense strand
acacgaacacacggaacua

SEQ ID NO: 451621 - RNA, 19 nt, Homo sapiens
  misc_RNA (1)...(19): siRNA sense strand
gaauggccgagaugcgaau

SEQ ID NO: 451622 - RNA, 19 nt, Homo sapiens
  misc_RNA (1)...(19): siRNA sense strand
gcacgcuugauguuagaau

SEQ ID NO: 451623 - RNA, 19 nt, Homo sapiens
  misc_RNA (1)...(19): siRNA sense strand
gcacggauguuauauaauu

SEQ ID NO: 451624 - RNA, 19 nt, Homo sapiens
  misc_RNA (1)...(19): siRNA sense strand
gugcacggauguuauauaa

SEQ ID NO: 451625 - RNA, 19 nt, Homo sapiens
  misc_RNA (1)...(19): siRNA sense strand
gagcugauccuacaguuaa

SEQ ID NO: 451626 - RNA, 19 nt, Homo sapiens
  misc_RNA (1)...(19): siRNA sense strand
aaacuugggucgcuuagaa

SEQ ID NO: 451627 - RNA, 19 nt, Homo sapiens
  misc_RNA (1)...(19): siRNA sense strand
gcuggacucugcuucauuu

SEQ ID NO: 451628 - RNA, 19 nt, Homo sapiens
  misc_RNA (1)...(19): siRNA sense strand
acagacuccuuuacacuua

SEQ ID NO: 451629 - RNA, 19 nt, Homo sapiens
  misc_RNA (1)...(19): siRNA sense strand
ggaaguagucgaccauguu

SEQ ID NO: 451630 - RNA, 19 nt, Homo sapiens
  misc_RNA (1)...(19): siRNA sense strand
gaaguagucgaccauguuu

SEQ ID NO: 451631 - RNA, 19 nt, Homo sapiens
  misc_RNA (1)...(19): siRNA sense strand
ucagaaugguuuccuguug

SEQ ID NO: 451632 - RNA, 19 nt, Homo sapiens
  misc_RNA (1)...(19): siRNA sense strand
acacggagcugauccuaca

SEQ ID NO: 451633 - RNA, 19 nt, Homo sapiens
  misc_RNA (1)...(19): siRNA sense strand
ggaaaggaaagauguguuc

SEQ ID NO: 451634 - RNA, 19 nt, Homo sapiens
  misc_RNA (1)...(19): siRNA sense strand
ggagcgacaucauuaaugc

SEQ ID NO: 451635 - RNA, 19 nt, Homo sapiens
  misc_RNA (1)...(19): siRNA sense strand
gaacacacggaacuaugaa

SEQ ID NO: 451636 - RNA, 19 nt, Homo sapiens
  misc_RNA (1)...(19): siRNA sense strand
ggaccacaaugccaacauc

SEQ ID NO: 451637 - RNA, 19 nt, Homo sapiens
  misc_RNA (1)...(19): siRNA sense strand
gaaagauguguucggguuu

SEQ ID NO: 451638 - RNA, 19 nt, Homo sapiens
  misc_RNA (1)...(19): siRNA sense strand
ggagcugauccuacaguua

SEQ ID NO: 451639 - RNA, 19 nt, Homo sapiens
  misc_RNA (1)...(19): siRNA sense strand
uacaggagcgacaucauua

SEQ ID NO: 451640 - RNA, 19 nt, Homo sapiens
  misc_RNA (1)...(19): siRNA sense strand
gauguuagaaucugaauac

SEQ ID NO: 451641 - RNA, 19 nt, Homo sapiens
  misc_RNA (1)...(19): siRNA sense strand
ggacucugcuucauuucuc

SEQ ID NO: 451642 - RNA, 19 nt, Homo sapiens
  misc_RNA (1)...(19): siRNA sense strand
gaccauguuuggauuucuu

SEQ ID NO: 451643 - RNA, 19 nt, Homo sapiens
  misc_RNA (1)...(19): siRNA sense strand
cuucacggcucuucacuau

SEQ ID NO: 451644 - RNA, 19 nt, Homo sapiens
  misc_RNA (1)...(19): siRNA sense strand
ucacggcucuucacuaugc

SEQ ID NO: 451645 - RNA, 19 nt, Homo sapiens
  misc_RNA (1)...(19): siRNA sense strand
acacuuaucugcccuuagg

SEQ ID NO: 451646 - RNA, 19 nt, Homo sapiens
  misc_RNA (1)...(19): siRNA sense strand
caaaagcaaucacucuuau

SEQ ID NO: 451647 - RNA, 19 nt, Homo sapiens
  misc_RNA (1)...(19): siRNA sense strand
ucauuucucugcagcaaga

SEQ ID NO: 451648 - RNA, 19 nt, Homo sapiens
  misc_RNA (1)...(19): siRNA sense strand
caggaagaguugcagauuc

SEQ ID NO: 451649 - RNA, 19 nt, Homo sapiens
  misc_RNA (1)...(19): siRNA sense strand
gaacacggagcugauccua

SEQ ID NO: 451650 - RNA, 19 nt, Homo sapiens
  misc_RNA (1)...(19): siRNA sense strand
gcagcaagaggaaaggaaa

SEQ ID NO: 451651 - RNA, 19 nt, Homo sapiens
  misc_RNA (1)...(19): siRNA sense strand
aggaagaguugcagauuca

SEQ ID NO: 451652 - RNA, 19 nt, Homo sapiens
  misc_RNA (1)...(19): siRNA sense strand
cgaacacacggaacuauga

SEQ ID NO: 451653 - RNA, 19 nt, Homo sapiens
  misc_RNA (1)...(19): siRNA sense strand
gcgauacgccgugaucaaa

SEQ ID NO: 451654 - RNA, 19 nt, Homo sapiens
  misc_RNA (1)...(19): siRNA sense strand
ggacagacuccuuuacacu

SEQ ID NO: 451655 - RNA, 19 nt, Homo sapiens
  misc_RNA (1)...(19): siRNA sense strand
gaggucaagcugugugaaa

SEQ ID NO: 451656 - RNA, 19 nt, Homo sapiens
  misc_RNA (1)...(19): siRNA sense strand
caagaggaaaggaaagaug

SEQ ID NO: 451657 - RNA, 19 nt, Homo sapiens
  misc_RNA (1)...(19): siRNA sense strand
gacagacuccuuuacacuu

SEQ ID NO: 451658 - RNA, 19 nt, Homo sapiens
  misc_RNA (1)...(19): siRNA sense strand
gaagacggacagacuccuu

SEQ ID NO: 451659 - RNA, 19 nt, Homo sapiens
  misc_RNA (1)...(19): siRNA sense strand
gcgacaucauuaaugcaaa

SEQ ID NO: 451660 - RNA, 19 nt, Homo sapiens
  misc_RNA (1)...(19): siRNA sense strand
gcauugcacgcuugauguu

SEQ ID NO: 451661 - RNA, 19 nt, Homo sapiens
  misc_RNA (1)...(19): siRNA sense strand
caccaucauugucgaagga

SEQ ID NO: 451662 - RNA, 19 nt, Homo sapiens
  misc_RNA (1)...(19): siRNA sense strand
ugcgaaagaugcuagaaca

SEQ ID NO: 451663 - RNA, 19 nt, Homo sapiens
  misc_RNA (1)...(19): siRNA sense strand
gaauacaggagcgacauca

SEQ ID NO: 451664 - RNA, 19 nt, Homo sapiens
  misc_RNA (1)...(19): siRNA sense strand
gaugcuagaacaaggcuau

SEQ ID NO: 451665 - RNA, 19 nt, Homo sapiens
  misc_RNA (1)...(19): siRNA sense strand
uuacacuuaucugcccuua

SEQ ID NO: 451666 - RNA, 19 nt, Homo sapiens
  misc_RNA (1)...(19): siRNA sense strand
uccuacaguuaaagacuua

SEQ ID NO: 451667 - RNA, 19 nt, Homo sapiens
  misc_RNA (1)...(19): siRNA sense strand
ccacacagugcgaaagaug

SEQ ID NO: 451668 - RNA, 19 nt, Homo sapiens
  misc_RNA (1)...(19): siRNA sense strand
cgaaagaugcuagaacaag

SEQ ID NO: 451669 - RNA, 19 nt, Homo sapiens
  misc_RNA (1)...(19): siRNA sense strand
ggaguucaaggcugagguu

SEQ ID NO: 451670 - RNA, 19 nt, Homo sapiens
  misc_RNA (1)...(19): siRNA sense strand
agacggacagacuccuuua

SEQ ID NO: 451671 - RNA, 19 nt, Homo sapiens
  misc_RNA (1)...(19): siRNA sense strand
ucaaaagcaaucacucuua

SEQ ID NO: 451672 - RNA, 19 nt, Homo sapiens
  misc_RNA (1)...(19): siRNA sense strand
ccaggaagaguugcagauu

SEQ ID NO: 451673 - RNA, 19 nt, Homo sapiens
  misc_RNA (1)...(19): siRNA sense strand
gcugugugcacggauguua

SEQ ID NO: 451674 - RNA, 19 nt, Homo sapiens
  misc_RNA (1)...(19): siRNA sense strand
ugccgaauguuccuucaga

SEQ ID NO: 451675 - RNA, 19 nt, Homo sapiens
  misc_RNA (1)...(19): siRNA sense strand
cgacaucauuaaugcaaaa

SEQ ID NO: 451676 - RNA, 19 nt, Homo sapiens
  misc_RNA (1)...(19): siRNA sense strand
auacaggagcgacaucauu

SEQ ID NO: 451677 - RNA, 19 nt, Homo sapiens
  misc_RNA (1)...(19): siRNA sense strand
ucacucuuauugccgaaug

SEQ ID NO: 451678 - RNA, 19 nt, Homo sapiens
  misc_RNA (1)...(19): siRNA sense strand
cgcuucagcucgccauuau

SEQ ID NO: 451679 - RNA, 19 nt, Homo sapiens
  misc_RNA (1)...(19): siRNA sense strand
cagacuccuuuacacuuau

SEQ ID NO: 451680 - RNA, 19 nt, Homo sapiens
  misc_RNA (1)...(19): siRNA sense strand
cuacggcagggacucauuu

SEQ ID NO: 451681 - RNA, 19 nt, Homo sapiens
  misc_RNA (1)...(19): siRNA sense strand
agucgaccauguuuggauu

SEQ ID NO: 451682 - RNA, 19 nt, Homo sapiens
  misc_RNA (1)...(19): siRNA sense strand
gaggaaaggaaagaugugu

SEQ ID NO: 451683 - RNA, 19 nt, Homo sapiens
  misc_RNA (1)...(19): siRNA sense strand
gcgaaagaugcuagaacaa

SEQ ID NO: 451684 - RNA, 19 nt, Homo sapiens
  misc_RNA (1)...(19): siRNA sense strand
gcuugauguuagaaucuga

SEQ ID NO: 451685 - RNA, 19 nt, Homo sapiens
  misc_RNA (1)...(19): siRNA sense strand
gcaagaggaaaggaaagau

SEQ ID NO: 451686 - RNA, 19 nt, Homo sapiens
  misc_RNA (1)...(19): siRNA sense strand
gagaggucaagcuguguga

SEQ ID NO: 451687 - RNA, 19 nt, Homo sapiens
  misc_RNA (1)...(19): siRNA sense strand
ugugugcacggauguuaua

SEQ ID NO: 451688 - RNA, 19 nt, Homo sapiens
  misc_RNA (1)...(19): siRNA sense strand
cacaaacuugggucgcuua

SEQ ID NO: 451689 - RNA, 19 nt, Homo sapiens
  misc_RNA (1)...(19): siRNA sense strand
gccaacaucgacauucaga

SEQ ID NO: 451690 - RNA, 19 nt, Homo sapiens
  misc_RNA (1)...(19): siRNA sense strand
caggagcgacaucauuaau

SEQ ID NO: 451691 - RNA, 19 nt, Homo sapiens
  misc_RNA (1)...(19): siRNA sense strand
uggaaguagucgaccaugu

SEQ ID NO: 451692 - RNA, 19 nt, Homo sapiens
  misc_RNA (1)...(19): siRNA sense strand
acaggagcgacaucauuaa

SEQ ID NO: 451693 - RNA, 19 nt, Homo sapiens
  misc_RNA (1)...(19): siRNA sense strand
ccgcuucagcucgccauua

SEQ ID NO: 451694 - RNA, 19 nt, Homo sapiens
  misc_RNA (1)...(19): siRNA sense strand
cauugcacgcuugauguua

SEQ ID NO: 451695 - RNA, 19 nt, Homo sapiens
  misc_RNA (1)...(19): siRNA sense strand
cggagcugauccuacaguu

SEQ ID NO: 451696 - RNA, 19 nt, Homo sapiens
  misc_RNA (1)...(19): siRNA sense strand
gauccuacaguuaaagacu

SEQ ID NO: 451697 - RNA, 19 nt, Homo sapiens
  misc_RNA (1)...(19): siRNA sense strand
ccgcauugcacgcuugaug

SEQ ID NO: 451698 - RNA, 19 nt, Homo sapiens
  misc_RNA (1)...(19): siRNA sense strand
acacgaacacacggaacua

SEQ ID NO: 451699 - RNA, 19 nt, Homo sapiens
  misc_RNA (1)...(19): siRNA sense strand
gaauggccgagaugcgaau

SEQ ID NO: 451700 - RNA, 19 nt, Homo sapiens
  misc_RNA (1)...(19): siRNA sense strand
gcacgcuugauguuagaau

SEQ ID NO: 451701 - RNA, 19 nt, Homo sapiens
  misc_RNA (1)...(19): siRNA sense strand
ggaaaggacugcccucaua

SEQ ID NO: 451702 - RNA, 19 nt, Homo sapiens
  misc_RNA (1)...(19): siRNA sense strand
gaagggaccugcuuuagga

SEQ ID NO: 451703 - RNA, 19 nt, Homo sapiens
  misc_RNA (1)...(19): siRNA sense strand
ggacugcccucauaugaaa

SEQ ID NO: 451704 - RNA, 19 nt, Homo sapiens
  misc_RNA (1)...(19): siRNA sense strand
ggaugaaccaggaagauuu

SEQ ID NO: 451705 - RNA, 19 nt, Homo sapiens
  misc_RNA (1)...(19): siRNA sense strand
gaacuaaaggagaagauuc

SEQ ID NO: 451706 - RNA, 19 nt, Homo sapiens
  misc_RNA (1)...(19): siRNA sense strand
ugagagcacuuacaaccaa

SEQ ID NO: 451707 - RNA, 19 nt, Homo sapiens
  misc_RNA (1)...(19): siRNA sense strand
ccaaggagcccagcaacua

SEQ ID NO: 451708 - RNA, 19 nt, Homo sapiens
  misc_RNA (1)...(19): siRNA sense strand
gaaaggacugcccucauau

SEQ ID NO: 451709 - RNA, 19 nt, Homo sapiens
  misc_RNA (1)...(19): siRNA sense strand
ucuuagagcugaucaaaca

SEQ ID NO: 451710 - RNA, 19 nt, Homo sapiens
  misc_RNA (1)...(19): siRNA sense strand
gacucaaacugccaacuga

SEQ ID NO: 451711 - RNA, 19 nt, Homo sapiens
  misc_RNA (1)...(19): siRNA sense strand
gagaagauucagccagaaa

SEQ ID NO: 451712 - RNA, 19 nt, Homo sapiens
  misc_RNA (1)...(19): siRNA sense strand
caacuaugacuucgucuau

SEQ ID NO: 451713 - RNA, 19 nt, Homo sapiens
  misc_RNA (1)...(19): siRNA sense strand
ggagaagauucagccagaa

SEQ ID NO: 451714 - RNA, 19 nt, Homo sapiens
  misc_RNA (1)...(19): siRNA sense strand
uaaugcagguggugaagga

SEQ ID NO: 451715 - RNA, 19 nt, Homo sapiens
  misc_RNA (1)...(19): siRNA sense strand
gaacucgcuuucuccaucu

SEQ ID NO: 451716 - RNA, 19 nt, Homo sapiens
  misc_RNA (1)...(19): siRNA sense strand
gcccucauaugaaagagaa

SEQ ID NO: 451717 - RNA, 19 nt, Homo sapiens
  misc_RNA (1)...(19): siRNA sense strand
acuaugacuucgucuauga

SEQ ID NO: 451718 - RNA, 19 nt, Homo sapiens
  misc_RNA (1)...(19): siRNA sense strand
gaaggagcagguuaugaga

SEQ ID NO: 451719 - RNA, 19 nt, Homo sapiens
  misc_RNA (1)...(19): siRNA sense strand
aaccugagcuacacugaga

SEQ ID NO: 451720 - RNA, 19 nt, Homo sapiens
  misc_RNA (1)...(19): siRNA sense strand
gcauuacggagacuuagaa

SEQ ID NO: 451721 - RNA, 19 nt, Homo sapiens
  misc_RNA (1)...(19): siRNA sense strand
ugacaagcaugaguacugu

SEQ ID NO: 451722 - RNA, 19 nt, Homo sapiens
  misc_RNA (1)...(19): siRNA sense strand
gcaacuaugacuucgucua

SEQ ID NO: 451723 - RNA, 19 nt, Homo sapiens
  misc_RNA (1)...(19): siRNA sense strand
ggaacuaaaggagaagauu

SEQ ID NO: 451724 - RNA, 19 nt, Homo sapiens
  misc_RNA (1)...(19): siRNA sense strand
cuucaucgcuccugacaag

SEQ ID NO: 451725 - RNA, 19 nt, Homo sapiens
  misc_RNA (1)...(19): siRNA sense strand
caagacaaguuuugguauu

SEQ ID NO: 451726 - RNA, 19 nt, Homo sapiens
  misc_RNA (1)...(19): siRNA sense strand
acacugagauccugaaaau

SEQ ID NO: 451727 - RNA, 19 nt, Homo sapiens
  misc_RNA (1)...(19): siRNA sense strand
ggaagggaccugcuuuagg

SEQ ID NO: 451728 - RNA, 19 nt, Homo sapiens
  misc_RNA (1)...(19): siRNA sense strand
guuaugagagcacuuacaa

SEQ ID NO: 451729 - RNA, 19 nt, Homo sapiens
  misc_RNA (1)...(19): siRNA sense strand
caaggagcccagcaacuau

SEQ ID NO: 451730 - RNA, 19 nt, Homo sapiens
  misc_RNA (1)...(19): siRNA sense strand
guggaagggaccugcuuua

SEQ ID NO: 451731 - RNA, 19 nt, Homo sapiens
  misc_RNA (1)...(19): siRNA sense strand
ugacgcaccuccgccgauu

SEQ ID NO: 451732 - RNA, 19 nt, Homo sapiens
  misc_RNA (1)...(19): siRNA sense strand
gaugaaccaggaagauuuc

SEQ ID NO: 451733 - RNA, 19 nt, Homo sapiens
  misc_RNA (1)...(19): siRNA sense strand
gcggaggcaagacaaguuu

SEQ ID NO: 451734 - RNA, 19 nt, Homo sapiens
  misc_RNA (1)...(19): siRNA sense strand
caucuuguaugacucaaac

SEQ ID NO: 451735 - RNA, 19 nt, Homo sapiens
  misc_RNA (1)...(19): siRNA sense strand
aucacaaaguccugcauua

SEQ ID NO: 451736 - RNA, 19 nt, Homo sapiens
  misc_RNA (1)...(19): siRNA sense strand
ugaaggagcagguuaugag

SEQ ID NO: 451737 - RNA, 19 nt, Homo sapiens
  misc_RNA (1)...(19): siRNA sense strand
cagguuaugagagcacuua

SEQ ID NO: 451738 - RNA, 19 nt, Homo sapiens
  misc_RNA (1)...(19): siRNA sense strand
uuacggagacuuagaagag

SEQ ID NO: 451739 - RNA, 19 nt, Homo sapiens
  misc_RNA (1)...(19): siRNA sense strand
aagcaugaguacuguaucu

SEQ ID NO: 451740 - RNA, 19 nt, Homo sapiens
  misc_RNA (1)...(19): siRNA sense strand
gccgguggcagauaucaaa

SEQ ID NO: 451741 - RNA, 19 nt, Homo sapiens
  misc_RNA (1)...(19): siRNA sense strand
ugacuucgucuaugacugu

SEQ ID NO: 451742 - RNA, 19 nt, Homo sapiens
  misc_RNA (1)...(19): siRNA sense strand
caaacugccaacugaacuu

SEQ ID NO: 451743 - RNA, 19 nt, Homo sapiens
  misc_RNA (1)...(19): siRNA sense strand
gcccagcaacuaugacuuc

SEQ ID NO: 451744 - RNA, 19 nt, Homo sapiens
  misc_RNA (1)...(19): siRNA sense strand
ggacggauggacugaaugc

SEQ ID NO: 451745 - RNA, 19 nt, Homo sapiens
  misc_RNA (1)...(19): siRNA sense strand
aaucuuagagcugaucaaa

SEQ ID NO: 451746 - RNA, 19 nt, Homo sapiens
  misc_RNA (1)...(19): siRNA sense strand
cgucuaugacuguaacuga

SEQ ID NO: 451747 - RNA, 19 nt, Homo sapiens
  misc_RNA (1)...(19): siRNA sense strand
ucacaaaguccugcauuac

SEQ ID NO: 451748 - RNA, 19 nt, Homo sapiens
  misc_RNA (1)...(19): siRNA sense strand
aaggacugcccucauauga

SEQ ID NO: 451749 - RNA, 19 nt, Homo sapiens
  misc_RNA (1)...(19): siRNA sense strand
agagaguccucagggagaa

SEQ ID NO: 451750 - RNA, 19 nt, Homo sapiens
  misc_RNA (1)...(19): siRNA sense strand
gaaaucuuagagcugauca

SEQ ID NO: 451751 - RNA, 19 nt, Homo sapiens
  misc_RNA (1)...(19): siRNA sense strand
ggaccugcuuuaggaaacu

SEQ ID NO: 451752 - RNA, 19 nt, Homo sapiens
  misc_RNA (1)...(19): siRNA sense strand
gaggaugaaccaggaagau

SEQ ID NO: 451753 - RNA, 19 nt, Homo sapiens
  misc_RNA (1)...(19): siRNA sense strand
acaagcaugaguacuguau

SEQ ID NO: 451754 - RNA, 19 nt, Homo sapiens
  misc_RNA (1)...(19): siRNA sense strand
aaaggacugcccucauaug

SEQ ID NO: 451755 - RNA, 19 nt, Homo sapiens
  misc_RNA (1)...(19): siRNA sense strand
ugacucaaacugccaacug

SEQ ID NO: 451756 - RNA, 19 nt, Homo sapiens
  misc_RNA (1)...(19): siRNA sense strand
guggugaaggagcagguua

SEQ ID NO: 451757 - RNA, 19 nt, Homo sapiens
  misc_RNA (1)...(19): siRNA sense strand
gagaagugccccacgauuc

SEQ ID NO: 451758 - RNA, 19 nt, Homo sapiens
  misc_RNA (1)...(19): siRNA sense strand
uacggagacuuagaagaga

SEQ ID NO: 451759 - RNA, 19 nt, Homo sapiens
  misc_RNA (1)...(19): siRNA sense strand
gggaccugcuuuaggaaac

SEQ ID NO: 451760 - RNA, 19 nt, Homo sapiens
  misc_RNA (1)...(19): siRNA sense strand
gugaaggagcagguuauga

SEQ ID NO: 451761 - RNA, 19 nt, Homo sapiens
  misc_RNA (1)...(19): siRNA sense strand
gggaaaggacugcccucau

SEQ ID NO: 451762 - RNA, 19 nt, Homo sapiens
  misc_RNA (1)...(19): siRNA sense strand
agagcaaacugcagaaccu

SEQ ID NO: 451763 - RNA, 19 nt, Homo sapiens
  misc_RNA (1)...(19): siRNA sense strand
gacaagcaugaguacugua

SEQ ID NO: 451764 - RNA, 19 nt, Homo sapiens
  misc_RNA (1)...(19): siRNA sense strand
aaucacaaaguccugcauu

SEQ ID NO: 451765 - RNA, 19 nt, Homo sapiens
  misc_RNA (1)...(19): siRNA sense strand
ggaaaggacugcccucaua

SEQ ID NO: 451766 - RNA, 19 nt, Homo sapiens
  misc_RNA (1)...(19): siRNA sense strand
gaagggaccugcuuuagga

SEQ ID NO: 451767 - RNA, 19 nt, Homo sapiens
  misc_RNA (1)...(19): siRNA sense strand
ggacugcccucauaugaaa

SEQ ID NO: 451768 - RNA, 19 nt, Homo sapiens
  misc_RNA (1)...(19): siRNA sense strand
ggaugaaccaggaagauuu

SEQ ID NO: 451769 - RNA, 19 nt, Homo sapiens
  misc_RNA (1)...(19): siRNA sense strand
gaacuaaaggagaagauuc

SEQ ID NO: 451770 - RNA, 19 nt, Homo sapiens
  misc_RNA (1)...(19): siRNA sense strand
ugagagcacuuacaaccaa

SEQ ID NO: 451771 - RNA, 19 nt, Homo sapiens
  misc_RNA (1)...(19): siRNA sense strand
ccaaggagcccagcaacua

SEQ ID NO: 451772 - RNA, 19 nt, Homo sapiens
  misc_RNA (1)...(19): siRNA sense strand
gaaaggacugcccucauau

SEQ ID NO: 451773 - RNA, 19 nt, Homo sapiens
  misc_RNA (1)...(19): siRNA sense strand
ucuuagagcugaucaaaca

SEQ ID NO: 451774 - RNA, 19 nt, Homo sapiens
  misc_RNA (1)...(19): siRNA sense strand
gacucaaacugccaacuga

SEQ ID NO: 451775 - RNA, 19 nt, Homo sapiens
  misc_RNA (1)...(19): siRNA sense strand
gagaagauucagccagaaa

SEQ ID NO: 451776 - RNA, 19 nt, Homo sapiens
  misc_RNA (1)...(19): siRNA sense strand
caacuaugacuucgucuau

SEQ ID NO: 451777 - RNA, 19 nt, Homo sapiens
  misc_RNA (1)...(19): siRNA sense strand
ggagaagauucagccagaa

SEQ ID NO: 451778 - RNA, 19 nt, Homo sapiens
  misc_RNA (1)...(19): siRNA sense strand
gaacucgcuuucuccaucu

SEQ ID NO: 451779 - RNA, 19 nt, Homo sapiens
  misc_RNA (1)...(19): siRNA sense strand
gcccucauaugaaagagaa

SEQ ID NO: 451780 - RNA, 19 nt, Homo sapiens
  misc_RNA (1)...(19): siRNA sense strand
acuaugacuucgucuauga

SEQ ID NO: 451781 - RNA, 19 nt, Homo sapiens
  misc_RNA (1)...(19): siRNA sense strand
gaaggagcagguuaugaga

SEQ ID NO: 451782 - RNA, 19 nt, Homo sapiens
  misc_RNA (1)...(19): siRNA sense strand
aaccugagcuacacugaga

SEQ ID NO: 451783 - RNA, 19 nt, Homo sapiens
  misc_RNA (1)...(19): siRNA sense strand
gcauuacggagacuuagaa

SEQ ID NO: 451784 - RNA, 19 nt, Homo sapiens
  misc_RNA (1)...(19): siRNA sense strand
ugacaagcaugaguacugu

SEQ ID NO: 451785 - RNA, 19 nt, Homo sapiens
  misc_RNA (1)...(19): siRNA sense strand
gcaacuaugacuucgucua

SEQ ID NO: 451786 - RNA, 19 nt, Homo sapiens
  misc_RNA (1)...(19): siRNA sense strand
ggaacuaaaggagaagauu

SEQ ID NO: 451787 - RNA, 19 nt, Homo sapiens
  misc_RNA (1)...(19): siRNA sense strand
cuucaucgcuccugacaag

SEQ ID NO: 451788 - RNA, 19 nt, Homo sapiens
  misc_RNA (1)...(19): siRNA sense strand
caagacaaguuuugguauu

SEQ ID NO: 451789 - RNA, 19 nt, Homo sapiens
  misc_RNA (1)...(19): siRNA sense strand
acacugagauccugaaaau

SEQ ID NO: 451790 - RNA, 19 nt, Homo sapiens
  misc_RNA (1)...(19): siRNA sense strand
ggaagggaccugcuuuagg

SEQ ID NO: 451791 - RNA, 19 nt, Homo sapiens
  misc_RNA (1)...(19): siRNA sense strand
guuaugagagcacuuacaa

SEQ ID NO: 451792 - RNA, 19 nt, Homo sapiens
  misc_RNA (1)...(19): siRNA sense strand
caaggagcccagcaacuau

SEQ ID NO: 451793 - RNA, 19 nt, Homo sapiens
  misc_RNA (1)...(19): siRNA sense strand
guggaagggaccugcuuua

SEQ ID NO: 451794 - RNA, 19 nt, Homo sapiens
  misc_RNA (1)...(19): siRNA sense strand
ugacgcaccuccgccgauu

SEQ ID NO: 451795 - RNA, 19 nt, Homo sapiens
  misc_RNA (1)...(19): siRNA sense strand
gaugaaccaggaagauuuc

SEQ ID NO: 451796 - RNA, 19 nt, Homo sapiens
  misc_RNA (1)...(19): siRNA sense strand
gcggaggcaagacaaguuu

SEQ ID NO: 451797 - RNA, 19 nt, Homo sapiens
  misc_RNA (1)...(19): siRNA sense strand
caucuuguaugacucaaac

SEQ ID NO: 451798 - RNA, 19 nt, Homo sapiens
  misc_RNA (1)...(19): siRNA sense strand
aucacaaaguccugcauua

SEQ ID NO: 451799 - RNA, 19 nt, Homo sapiens
  misc_RNA (1)...(19): siRNA sense strand
ugaaggagcagguuaugag

SEQ ID NO: 451800 - RNA, 19 nt, Homo sapiens
  misc_RNA (1)...(19): siRNA sense strand
cagguuaugagagcacuua

SEQ ID NO: 451801 - RNA, 19 nt, Homo sapiens
  misc_RNA (1)...(19): siRNA sense strand
uuacggagacuuagaagag

SEQ ID NO: 451802 - RNA, 19 nt, Homo sapiens
  misc_RNA (1)...(19): siRNA sense strand
aagcaugaguacuguaucu

SEQ ID NO: 451803 - RNA, 19 nt, Homo sapiens
  misc_RNA (1)...(19): siRNA sense strand
gccgguggcagauaucaaa

SEQ ID NO: 451804 - RNA, 19 nt, Homo sapiens
  misc_RNA (1)...(19): siRNA sense strand
ugacuucgucuaugacugu

SEQ ID NO: 451805 - RNA, 19 nt, Homo sapiens
  misc_RNA (1)...(19): siRNA sense strand
caaacugccaacugaacuu

SEQ ID NO: 451806 - RNA, 19 nt, Homo sapiens
  misc_RNA (1)...(19): siRNA sense strand
gcccagcaacuaugacuuc

SEQ ID NO: 451807 - RNA, 19 nt, Homo sapiens
  misc_RNA (1)...(19): siRNA sense strand
ggacggauggacugaaugc

SEQ ID NO: 451808 - RNA, 19 nt, Homo sapiens
  misc_RNA (1)...(19): siRNA sense strand
aaucuuagagcugaucaaa

SEQ ID NO: 451809 - RNA, 19 nt, Homo sapiens
  misc_RNA (1)...(19): siRNA sense strand
cgucuaugacuguaacuga

SEQ ID NO: 451810 - RNA, 19 nt, Homo sapiens
  misc_RNA (1)...(19): siRNA sense strand
ucacaaaguccugcauuac

SEQ ID NO: 451811 - RNA, 19 nt, Homo sapiens
  misc_RNA (1)...(19): siRNA sense strand
aaggacugcccucauauga

SEQ ID NO: 451812 - RNA, 19 nt, Homo sapiens
  misc_RNA (1)...(19): siRNA sense strand
agagaguccucagggagaa

SEQ ID NO: 451813 - RNA, 19 nt, Homo sapiens
  misc_RNA (1)...(19): siRNA sense strand
gaaaucuuagagcugauca

SEQ ID NO: 451814 - RNA, 19 nt, Homo sapiens
  misc_RNA (1)...(19): siRNA sense strand
ggaccugcuuuaggaaacu

SEQ ID NO: 451815 - RNA, 19 nt, Homo sapiens
  misc_RNA (1)...(19): siRNA sense strand
gaggaugaaccaggaagau

SEQ ID NO: 451816 - RNA, 19 nt, Homo sapiens
  misc_RNA (1)...(19): siRNA sense strand
acaagcaugaguacuguau

SEQ ID NO: 451817 - RNA, 19 nt, Homo sapiens
  misc_RNA (1)...(19): siRNA sense strand
aaaggacugcccucauaug

SEQ ID NO: 451818 - RNA, 19 nt, Homo sapiens
  misc_RNA (1)...(19): siRNA sense strand
ugacucaaacugccaacug

SEQ ID NO: 451819 - RNA, 19 nt, Homo sapiens
  misc_RNA (1)...(19): siRNA sense strand
guggugaaggagcagguua

SEQ ID NO: 451820 - RNA, 19 nt, Homo sapiens
  misc_RNA (1)...(19): siRNA sense strand
gagaagugccccacgauuc

SEQ ID NO: 451821 - RNA, 19 nt, Homo sapiens
  misc_RNA (1)...(19): siRNA sense strand
uacggagacuuagaagaga

SEQ ID NO: 451822 - RNA, 19 nt, Homo sapiens
  misc_RNA (1)...(19): siRNA sense strand
gugaaggagcagguuauga

SEQ ID NO: 451823 - RNA, 19 nt, Homo sapiens
  misc_RNA (1)...(19): siRNA sense strand
gggaaaggacugcccucau

SEQ ID NO: 451824 - RNA, 19 nt, Homo sapiens
  misc_RNA (1)...(19): siRNA sense strand
gggaccugcuuuaggaaac

SEQ ID NO: 451825 - RNA, 19 nt, Homo sapiens
  misc_RNA (1)...(19): siRNA sense strand
aaucacaaaguccugcauu

SEQ ID NO: 451826 - RNA, 19 nt, Homo sapiens
  misc_RNA (1)...(19): siRNA sense strand
gacaagcaugaguacugua

SEQ ID NO: 451827 - RNA, 19 nt, Homo sapiens
  misc_RNA (1)...(19): siRNA sense strand
agagcaaacugcagaaccu

SEQ ID NO: 451828 - RNA, 19 nt, Homo sapiens
  misc_RNA (1)...(19): siRNA sense strand
gauugugccuggaguguua

SEQ ID NO: 451829 - RNA, 19 nt, Homo sapiens
  misc_RNA (1)...(19): siRNA sense strand
ccacaaagaacauucauuu

SEQ ID NO: 451830 - RNA, 19 nt, Homo sapiens
  misc_RNA (1)...(19): siRNA sense strand
gaggagagacagugcauua

SEQ ID NO: 451831 - RNA, 19 nt, Homo sapiens
  misc_RNA (1)...(19): siRNA sense strand
gagagacagugcauuaaga

SEQ ID NO: 451832 - RNA, 19 nt, Homo sapiens
  misc_RNA (1)...(19): siRNA sense strand
gcaaaguauuccuguguug

SEQ ID NO: 451833 - RNA, 19 nt, Homo sapiens
  misc_RNA (1)...(19): siRNA sense strand
caagagccaugaccaguug

SEQ ID NO: 451834 - RNA, 19 nt, Homo sapiens
  misc_RNA (1)...(19): siRNA sense strand
guaaaacucuugccuauug

SEQ ID NO: 451835 - RNA, 19 nt, Homo sapiens
  misc_RNA (1)...(19): siRNA sense strand
ccaaagaagcauucgguua

SEQ ID NO: 451836 - RNA, 19 nt, Homo sapiens
  misc_RNA (1)...(19): siRNA sense strand
cacaauaaauacggucuua

SEQ ID NO: 451837 - RNA, 19 nt, Homo sapiens
  misc_RNA (1)...(19): siRNA sense strand
agaaacugcuuaagccuuu

SEQ ID NO: 451838 - RNA, 19 nt, Homo sapiens
  misc_RNA (1)...(19): siRNA sense strand
uaacgcggcuagcugauau

SEQ ID NO: 451839 - RNA, 19 nt, Homo sapiens
  misc_RNA (1)...(19): siRNA sense strand
caaagaagcauucgguuag

SEQ ID NO: 451840 - RNA, 19 nt, Homo sapiens
  misc_RNA (1)...(19): siRNA sense strand
gaaaugcaaguuugaggaa

SEQ ID NO: 451841 - RNA, 19 nt, Homo sapiens
  misc_RNA (1)...(19): siRNA sense strand
ggacagcuuugcaauacca

SEQ ID NO: 451842 - RNA, 19 nt, Homo sapiens
  misc_RNA (1)...(19): siRNA sense strand
gacagugcauuaagacuuc

SEQ ID NO: 451843 - RNA, 19 nt, Homo sapiens
  misc_RNA (1)...(19): siRNA sense strand
gaggaacgaaacuucauuu

SEQ ID NO: 451844 - RNA, 19 nt, Homo sapiens
  misc_RNA (1)...(19): siRNA sense strand
cagcaguguuucaggaauu

SEQ ID NO: 451845 - RNA, 19 nt, Homo sapiens
  misc_RNA (1)...(19): siRNA sense strand
cuucagaaaugcaaguuug

SEQ ID NO: 451846 - RNA, 19 nt, Homo sapiens
  misc_RNA (1)...(19): siRNA sense strand
guaaagcaggugcaagaaa

SEQ ID NO: 451847 - RNA, 19 nt, Homo sapiens
  misc_RNA (1)...(19): siRNA sense strand
aaacaacccugacauucca

SEQ ID NO: 451848 - RNA, 19 nt, Homo sapiens
  misc_RNA (1)...(19): siRNA sense strand
ggugguugguguuugauga

SEQ ID NO: 451849 - RNA, 19 nt, Homo sapiens
  misc_RNA (1)...(19): siRNA sense strand
uaaagcaggugcaagaaaa

SEQ ID NO: 451850 - RNA, 19 nt, Homo sapiens
  misc_RNA (1)...(19): siRNA sense strand
guugcgagcugguggaguu

SEQ ID NO: 451851 - RNA, 19 nt, Homo sapiens
  misc_RNA (1)...(19): siRNA sense strand
gcaagcaaaggcuacgaaa

SEQ ID NO: 451852 - RNA, 19 nt, Homo sapiens
  misc_RNA (1)...(19): siRNA sense strand
ucgguuagcacaagugaua

SEQ ID NO: 451853 - RNA, 19 nt, Homo sapiens
  misc_RNA (1)...(19): siRNA sense strand
ggaggaacgaaacuucauu

SEQ ID NO: 451854 - RNA, 19 nt, Homo sapiens
  misc_RNA (1)...(19): siRNA sense strand
caugauccagucaguauuu

SEQ ID NO: 451855 - RNA, 19 nt, Homo sapiens
  misc_RNA (1)...(19): siRNA sense strand
cagaaugucuugcuaucag

SEQ ID NO: 451856 - RNA, 19 nt, Homo sapiens
  misc_RNA (1)...(19): siRNA sense strand
ggagagacagugcauuaag

SEQ ID NO: 451857 - RNA, 19 nt, Homo sapiens
  misc_RNA (1)...(19): siRNA sense strand
guucagaagcaaaguauuc

SEQ ID NO: 451858 - RNA, 19 nt, Homo sapiens
  misc_RNA (1)...(19): siRNA sense strand
gggccuccacccacauuua

SEQ ID NO: 451859 - RNA, 19 nt, Homo sapiens
  misc_RNA (1)...(19): siRNA sense strand
gcgaaacggaggaacgaaa

SEQ ID NO: 451860 - RNA, 19 nt, Homo sapiens
  misc_RNA (1)...(19): siRNA sense strand
guaacgcggcuagcugaua

SEQ ID NO: 451861 - RNA, 19 nt, Homo sapiens
  misc_RNA (1)...(19): siRNA sense strand
uaagacuucaucacuguuu

SEQ ID NO: 451862 - RNA, 19 nt, Homo sapiens
  misc_RNA (1)...(19): siRNA sense strand
gcauuaagacuucaucacu

SEQ ID NO: 451863 - RNA, 19 nt, Homo sapiens
  misc_RNA (1)...(19): siRNA sense strand
gaaacucagaggacuuuua

SEQ ID NO: 451864 - RNA, 19 nt, Homo sapiens
  misc_RNA (1)...(19): siRNA sense strand
gaaaccaggaggagagaca

SEQ ID NO: 451865 - RNA, 19 nt, Homo sapiens
  misc_RNA (1)...(19): siRNA sense strand
gcauggagcaggaggaaag

SEQ ID NO: 451866 - RNA, 19 nt, Homo sapiens
  misc_RNA (1)...(19): siRNA sense strand
ugaagcagacagaaucuug

SEQ ID NO: 451867 - RNA, 19 nt, Homo sapiens
  misc_RNA (1)...(19): siRNA sense strand
cgccggaucucgcuucuca

SEQ ID NO: 451868 - RNA, 19 nt, Homo sapiens
  misc_RNA (1)...(19): siRNA sense strand
ucaagcagcaugugacugu

SEQ ID NO: 451869 - RNA, 19 nt, Homo sapiens
  misc_RNA (1)...(19): siRNA sense strand
ccacuacagccucuuccua

SEQ ID NO: 451870 - RNA, 19 nt, Homo sapiens
  misc_RNA (1)...(19): siRNA sense strand
aagacuucaucacuguuua

SEQ ID NO: 451871 - RNA, 19 nt, Homo sapiens
  misc_RNA (1)...(19): siRNA sense strand
ugacugugguucccagcaa

SEQ ID NO: 451872 - RNA, 19 nt, Homo sapiens
  misc_RNA (1)...(19): siRNA sense strand
uagcacaagugauagaaac

SEQ ID NO: 451873 - RNA, 19 nt, Homo sapiens
  misc_RNA (1)...(19): siRNA sense strand
gaagagaaaaucagaaaag

SEQ ID NO: 451874 - RNA, 19 nt, Homo sapiens
  misc_RNA (1)...(19): siRNA sense strand
gagaagagaaaaucagaaa

SEQ ID NO: 451875 - RNA, 19 nt, Homo sapiens
  misc_RNA (1)...(19): siRNA sense strand
ggccuccacccacauuuaa

SEQ ID NO: 451876 - RNA, 19 nt, Homo sapiens
  misc_RNA (1)...(19): siRNA sense strand
gaggaaagaacagcagugu

SEQ ID NO: 451877 - RNA, 19 nt, Homo sapiens
  misc_RNA (1)...(19): siRNA sense strand
gccaagaaaacuaguguua

SEQ ID NO: 451878 - RNA, 19 nt, Homo sapiens
  misc_RNA (1)...(19): siRNA sense strand
ccagcaaacugaggcuugu

SEQ ID NO: 451879 - RNA, 19 nt, Homo sapiens
  misc_RNA (1)...(19): siRNA sense strand
aaugcaaguuugaggaaga

SEQ ID NO: 451880 - RNA, 19 nt, Homo sapiens
  misc_RNA (1)...(19): siRNA sense strand
ugucuaguaugaccagugu

SEQ ID NO: 451881 - RNA, 19 nt, Homo sapiens
  misc_RNA (1)...(19): siRNA sense strand
uacagccucuuccuacaga

SEQ ID NO: 451882 - RNA, 19 nt, Homo sapiens
  misc_RNA (1)...(19): siRNA sense strand
gacugugguucccagcaaa

SEQ ID NO: 451883 - RNA, 19 nt, Homo sapiens
  misc_RNA (1)...(19): siRNA sense strand
ggacgccugguggaucaua

SEQ ID NO: 451884 - RNA, 19 nt, Homo sapiens
  misc_RNA (1)...(19): siRNA sense strand
uucaagcaauggagucaaa

SEQ ID NO: 451885 - RNA, 19 nt, Homo sapiens
  misc_RNA (1)...(19): siRNA sense strand
ugaccaguguucagaagca

SEQ ID NO: 451886 - RNA, 19 nt, Homo sapiens
  misc_RNA (1)...(19): siRNA sense strand
agacagugcauuaagacuu

SEQ ID NO: 451887 - RNA, 19 nt, Homo sapiens
  misc_RNA (1)...(19): siRNA sense strand
gccagacuccgcaaaggaa

SEQ ID NO: 451888 - RNA, 19 nt, Homo sapiens
  misc_RNA (1)...(19): siRNA sense strand
ccagacgggcucagguaaa

SEQ ID NO: 451889 - RNA, 19 nt, Homo sapiens
  misc_RNA (1)...(19): siRNA sense strand
aagaaacucagaggacuuu

SEQ ID NO: 451890 - RNA, 19 nt, Homo sapiens
  misc_RNA (1)...(19): siRNA sense strand
cuggacagcuuugcaauac

SEQ ID NO: 451891 - RNA, 19 nt, Homo sapiens
  misc_RNA (1)...(19): siRNA sense strand
guaaaugcugaaugccaaa

SEQ ID NO: 451892 - RNA, 19 nt, Homo sapiens
  misc_RNA (1)...(19): siRNA sense strand
agugauacuuaaugcugua

SEQ ID NO: 451893 - RNA, 19 nt, Homo sapiens
  misc_RNA (1)...(19): siRNA sense strand
ugaugaagcagacagaauc

SEQ ID NO: 451894 - RNA, 19 nt, Homo sapiens
  misc_RNA (1)...(19): siRNA sense strand
auuaagacuucaucacugu

SEQ ID NO: 451895 - RNA, 19 nt, Homo sapiens
  misc_RNA (1)...(19): siRNA sense strand
ccugguggaucauauaaaa

SEQ ID NO: 451896 - RNA, 19 nt, Homo sapiens
  misc_RNA (1)...(19): siRNA sense strand
caaaggcuacgaaaagaaa

SEQ ID NO: 451897 - RNA, 19 nt, Homo sapiens
  misc_RNA (1)...(19): siRNA sense strand
uaucagcgacacucacaga

SEQ ID NO: 451898 - RNA, 19 nt, Homo sapiens
  misc_RNA (1)...(19): siRNA sense strand
acgguucgcucuucgacaa

SEQ ID NO: 451899 - RNA, 19 nt, Homo sapiens
  misc_RNA (1)...(19): siRNA sense strand
agacuucaucacuguuuaa

SEQ ID NO: 451900 - RNA, 19 nt, Homo sapiens
  misc_RNA (1)...(19): siRNA sense strand
ugaggaagaccagaagaug

SEQ ID NO: 451901 - RNA, 19 nt, Homo sapiens
  misc_RNA (1)...(19): siRNA sense strand
gaccaguguucagaagcaa

SEQ ID NO: 451902 - RNA, 19 nt, Homo sapiens
  misc_RNA (1)...(19): siRNA sense strand
ccacauuuaauuuccacaa

SEQ ID NO: 451903 - RNA, 19 nt, Homo sapiens
  misc_RNA (1)...(19): siRNA sense strand
gguaaagcaggugcaagaa

SEQ ID NO: 451904 - RNA, 19 nt, Homo sapiens
  misc_RNA (1)...(19): siRNA sense strand
ccuccacccacauuuaauu

SEQ ID NO: 451905 - RNA, 19 nt, Homo sapiens
  misc_RNA (1)...(19): siRNA sense strand
acaagagccaugaccaguu

SEQ ID NO: 451906 - RNA, 19 nt, Homo sapiens
  misc_RNA (1)...(19): siRNA sense strand
gcaugauccagucaguauu

SEQ ID NO: 451907 - RNA, 19 nt, Homo sapiens
  misc_RNA (1)...(19): siRNA sense strand
ccagucccuucaagcaaug

SEQ ID NO: 451908 - RNA, 19 nt, Homo sapiens
  misc_RNA (1)...(19): siRNA sense strand
aagcaaaguauuccugugu

SEQ ID NO: 451909 - RNA, 19 nt, Homo sapiens
  misc_RNA (1)...(19): siRNA sense strand
gcacaagugauagaaacca

SEQ ID NO: 451910 - RNA, 19 nt, Homo sapiens
  misc_RNA (1)...(19): siRNA sense strand
gcuaucagcgacacucaca

SEQ ID NO: 451911 - RNA, 19 nt, Homo sapiens
  misc_RNA (1)...(19): siRNA sense strand
ccgcaaaggaauaaauauc

SEQ ID NO: 451912 - RNA, 19 nt, Homo sapiens
  misc_RNA (1)...(19): siRNA sense strand
ggccagacuccgcaaagga

SEQ ID NO: 451913 - RNA, 19 nt, Homo sapiens
  misc_RNA (1)...(19): siRNA sense strand
aaacucagaggacuuuuaa

SEQ ID NO: 451914 - RNA, 19 nt, Homo sapiens
  misc_RNA (1)...(19): siRNA sense strand
ugguaaagcaggugcaaga

SEQ ID NO: 451915 - RNA, 19 nt, Homo sapiens
  misc_RNA (1)...(19): siRNA sense strand
ggagcaggaggaaagaaca

SEQ ID NO: 451916 - RNA, 19 nt, Homo sapiens
  misc_RNA (1)...(19): siRNA sense strand
agacuccgcaaaggaauaa

SEQ ID NO: 451917 - RNA, 19 nt, Homo sapiens
  misc_RNA (1)...(19): siRNA sense strand
cagacuccgcaaaggaaua

SEQ ID NO: 451918 - RNA, 19 nt, Homo sapiens
  misc_RNA (1)...(19): siRNA sense strand
ccacccacauuuaauuucc

SEQ ID NO: 451919 - RNA, 19 nt, Homo sapiens
  misc_RNA (1)...(19): siRNA sense strand
ugaacucucggccgaaugu

SEQ ID NO: 451920 - RNA, 19 nt, Homo sapiens
  misc_RNA (1)...(19): siRNA sense strand
gaacucucggccgaaugua

SEQ ID NO: 451921 - RNA, 19 nt, Homo sapiens
  misc_RNA (1)...(19): siRNA sense strand
gcauucgguuagcacaagu

SEQ ID NO: 451922 - RNA, 19 nt, Homo sapiens
  misc_RNA (1)...(19): siRNA sense strand
gauccagucaguauuucug

SEQ ID NO: 451923 - RNA, 19 nt, Homo sapiens
  misc_RNA (1)...(19): siRNA sense strand
cagacgggcucagguaaaa

SEQ ID NO: 451924 - RNA, 19 nt, Homo sapiens
  misc_RNA (1)...(19): siRNA sense strand
ggccuucauccuucagaaa

SEQ ID NO: 451925 - RNA, 19 nt, Homo sapiens
  misc_RNA (1)...(19): siRNA sense strand
gugguucccagcaaacuga

SEQ ID NO: 451926 - RNA, 19 nt, Homo sapiens
  misc_RNA (1)...(19): siRNA sense strand
gcaaaggcuacgaaaagaa

SEQ ID NO: 451927 - RNA, 19 nt, Homo sapiens
  misc_RNA (1)...(19): siRNA sense strand
uccagucccuucaagcaau

SEQ ID NO: 451928 - RNA, 19 nt, Homo sapiens
  misc_RNA (1)...(19): siRNA sense strand
gauugugccuggaguguua

SEQ ID NO: 451929 - RNA, 19 nt, Homo sapiens
  misc_RNA (1)...(19): siRNA sense strand
ccacaaagaacauucauuu

SEQ ID NO: 451930 - RNA, 19 nt, Homo sapiens
  misc_RNA (1)...(19): siRNA sense strand
gaggagagacagugcauua

SEQ ID NO: 451931 - RNA, 19 nt, Homo sapiens
  misc_RNA (1)...(19): siRNA sense strand
gagagacagugcauuaaga

SEQ ID NO: 451932 - RNA, 19 nt, Homo sapiens
  misc_RNA (1)...(19): siRNA sense strand
gcaaaguauuccuguguug

SEQ ID NO: 451933 - RNA, 19 nt, Homo sapiens
  misc_RNA (1)...(19): siRNA sense strand
caagagccaugaccaguug

SEQ ID NO: 451934 - RNA, 19 nt, Homo sapiens
  misc_RNA (1)...(19): siRNA sense strand
guaaaacucuugccuauug

SEQ ID NO: 451935 - RNA, 19 nt, Homo sapiens
  misc_RNA (1)...(19): siRNA sense strand
ccaaagaagcauucgguua

SEQ ID NO: 451936 - RNA, 19 nt, Homo sapiens
  misc_RNA (1)...(19): siRNA sense strand
cacaauaaauacggucuua

SEQ ID NO: 451937 - RNA, 19 nt, Homo sapiens
  misc_RNA (1)...(19): siRNA sense strand
agaaacugcuuaagccuuu

SEQ ID NO: 451938 - RNA, 19 nt, Homo sapiens
  misc_RNA (1)...(19): siRNA sense strand
uaacgcggcuagcugauau

SEQ ID NO: 451939 - RNA, 19 nt, Homo sapiens
  misc_RNA (1)...(19): siRNA sense strand
caaagaagcauucgguuag

SEQ ID NO: 451940 - RNA, 19 nt, Homo sapiens
  misc_RNA (1)...(19): siRNA sense strand
gaaaugcaaguuugaggaa

SEQ ID NO: 451941 - RNA, 19 nt, Homo sapiens
  misc_RNA (1)...(19): siRNA sense strand
ggacagcuuugcaauacca

SEQ ID NO: 451942 - RNA, 19 nt, Homo sapiens
  misc_RNA (1)...(19): siRNA sense strand
gacagugcauuaagacuuc

SEQ ID NO: 451943 - RNA, 19 nt, Homo sapiens
  misc_RNA (1)...(19): siRNA sense strand
gaggaacgaaacuucauuu

SEQ ID NO: 451944 - RNA, 19 nt, Homo sapiens
  misc_RNA (1)...(19): siRNA sense strand
cagcaguguuucaggaauu

SEQ ID NO: 451945 - RNA, 19 nt, Homo sapiens
  misc_RNA (1)...(19): siRNA sense strand
cuucagaaaugcaaguuug

SEQ ID NO: 451946 - RNA, 19 nt, Homo sapiens
  misc_RNA (1)...(19): siRNA sense strand
guaaagcaggugcaagaaa

SEQ ID NO: 451947 - RNA, 19 nt, Homo sapiens
  misc_RNA (1)...(19): siRNA sense strand
aaacaacccugacauucca

SEQ ID NO: 451948 - RNA, 19 nt, Homo sapiens
  misc_RNA (1)...(19): siRNA sense strand
ggugguugguguuugauga

SEQ ID NO: 451949 - RNA, 19 nt, Homo sapiens
  misc_RNA (1)...(19): siRNA sense strand
uaaagcaggugcaagaaaa

SEQ ID NO: 451950 - RNA, 19 nt, Homo sapiens
  misc_RNA (1)...(19): siRNA sense strand
guugcgagcugguggaguu

SEQ ID NO: 451951 - RNA, 19 nt, Homo sapiens
  misc_RNA (1)...(19): siRNA sense strand
gcaagcaaaggcuacgaaa

SEQ ID NO: 451952 - RNA, 19 nt, Homo sapiens
  misc_RNA (1)...(19): siRNA sense strand
ucgguuagcacaagugaua

SEQ ID NO: 451953 - RNA, 19 nt, Homo sapiens
  misc_RNA (1)...(19): siRNA sense strand
ggaggaacgaaacuucauu

SEQ ID NO: 451954 - RNA, 19 nt, Homo sapiens
  misc_RNA (1)...(19): siRNA sense strand
caugauccagucaguauuu

SEQ ID NO: 451955 - RNA, 19 nt, Homo sapiens
  misc_RNA (1)...(19): siRNA sense strand
cagaaugucuugcuaucag

SEQ ID NO: 451956 - RNA, 19 nt, Homo sapiens
  misc_RNA (1)...(19): siRNA sense strand
ggagagacagugcauuaag

SEQ ID NO: 451957 - RNA, 19 nt, Homo sapiens
  misc_RNA (1)...(19): siRNA sense strand
guucagaagcaaaguauuc

SEQ ID NO: 451958 - RNA, 19 nt, Homo sapiens
  misc_RNA (1)...(19): siRNA sense strand
gggccuccacccacauuua

SEQ ID NO: 451959 - RNA, 19 nt, Homo sapiens
  misc_RNA (1)...(19): siRNA sense strand
gcgaaacggaggaacgaaa

SEQ ID NO: 451960 - RNA, 19 nt, Homo sapiens
  misc_RNA (1)...(19): siRNA sense strand
guaacgcggcuagcugaua

SEQ ID NO: 451961 - RNA, 19 nt, Homo sapiens
  misc_RNA (1)...(19): siRNA sense strand
uaagacuucaucacuguuu

SEQ ID NO: 451962 - RNA, 19 nt, Homo sapiens
  misc_RNA (1)...(19): siRNA sense strand
gcauuaagacuucaucacu

SEQ ID NO: 451963 - RNA, 19 nt, Homo sapiens
  misc_RNA (1)...(19): siRNA sense strand
gaaacucagaggacuuuua

SEQ ID NO: 451964 - RNA, 19 nt, Homo sapiens
  misc_RNA (1)...(19): siRNA sense strand
gaaaccaggaggagagaca

SEQ ID NO: 451965 - RNA, 19 nt, Homo sapiens
  misc_RNA (1)...(19): siRNA sense strand
gcauggagcaggaggaaag

SEQ ID NO: 451966 - RNA, 19 nt, Homo sapiens
  misc_RNA (1)...(19): siRNA sense strand
ugaagcagacagaaucuug

SEQ ID NO: 451967 - RNA, 19 nt, Homo sapiens
  misc_RNA (1)...(19): siRNA sense strand
cgccggaucucgcuucuca

SEQ ID NO: 451968 - RNA, 19 nt, Homo sapiens
  misc_RNA (1)...(19): siRNA sense strand
ucaagcagcaugugacugu

SEQ ID NO: 451969 - RNA, 19 nt, Homo sapiens
  misc_RNA (1)...(19): siRNA sense strand
ccacuacagccucuuccua

SEQ ID NO: 451970 - RNA, 19 nt, Homo sapiens
  misc_RNA (1)...(19): siRNA sense strand
aagacuucaucacuguuua

SEQ ID NO: 451971 - RNA, 19 nt, Homo sapiens
  misc_RNA (1)...(19): siRNA sense strand
ugacugugguucccagcaa

SEQ ID NO: 451972 - RNA, 19 nt, Homo sapiens
  misc_RNA (1)...(19): siRNA sense strand
uagcacaagugauagaaac

SEQ ID NO: 451973 - RNA, 19 nt, Homo sapiens
  misc_RNA (1)...(19): siRNA sense strand
gaagagaaaaucagaaaag

SEQ ID NO: 451974 - RNA, 19 nt, Homo sapiens
  misc_RNA (1)...(19): siRNA sense strand
gagaagagaaaaucagaaa

SEQ ID NO: 451975 - RNA, 19 nt, Homo sapiens
  misc_RNA (1)...(19): siRNA sense strand
ggccuccacccacauuuaa

SEQ ID NO: 451976 - RNA, 19 nt, Homo sapiens
  misc_RNA (1)...(19): siRNA sense strand
gaggaaagaacagcagugu

SEQ ID NO: 451977 - RNA, 19 nt, Homo sapiens
  misc_RNA (1)...(19): siRNA sense strand
gccaagaaaacuaguguua

SEQ ID NO: 451978 - RNA, 19 nt, Homo sapiens
  misc_RNA (1)...(19): siRNA sense strand
ccagcaaacugaggcuugu

SEQ ID NO: 451979 - RNA, 19 nt, Homo sapiens
  misc_RNA (1)...(19): siRNA sense strand
aaugcaaguuugaggaaga

SEQ ID NO: 451980 - RNA, 19 nt, Homo sapiens
  misc_RNA (1)...(19): siRNA sense strand
ugucuaguaugaccagugu

SEQ ID NO: 451981 - RNA, 19 nt, Homo sapiens
  misc_RNA (1)...(19): siRNA sense strand
uacagccucuuccuacaga

SEQ ID NO: 451982 - RNA, 19 nt, Homo sapiens
  misc_RNA (1)...(19): siRNA sense strand
gacugugguucccagcaaa

SEQ ID NO: 451983 - RNA, 19 nt, Homo sapiens
  misc_RNA (1)...(19): siRNA sense strand
ggacgccugguggaucaua

SEQ ID NO: 451984 - RNA, 19 nt, Homo sapiens
  misc_RNA (1)...(19): siRNA sense strand
uucaagcaauggagucaaa

SEQ ID NO: 451985 - RNA, 19 nt, Homo sapiens
  misc_RNA (1)...(19): siRNA sense strand
ugaccaguguucagaagca

SEQ ID NO: 451986 - RNA, 19 nt, Homo sapiens
  misc_RNA (1)...(19): siRNA sense strand
agacagugcauuaagacuu

SEQ ID NO: 451987 - RNA, 19 nt, Homo sapiens
  misc_RNA (1)...(19): siRNA sense strand
gccagacuccgcaaaggaa

SEQ ID NO: 451988 - RNA, 19 nt, Homo sapiens
  misc_RNA (1)...(19): siRNA sense strand
ccagacgggcucagguaaa

SEQ ID NO: 451989 - RNA, 19 nt, Homo sapiens
  misc_RNA (1)...(19): siRNA sense strand
aagaaacucagaggacuuu

SEQ ID NO: 451990 - RNA, 19 nt, Homo sapiens
  misc_RNA (1)...(19): siRNA sense strand
cuggacagcuuugcaauac

SEQ ID NO: 451991 - RNA, 19 nt, Homo sapiens
  misc_RNA (1)...(19): siRNA sense strand
guaaaugcugaaugccaaa

SEQ ID NO: 451992 - RNA, 19 nt, Homo sapiens
  misc_RNA (1)...(19): siRNA sense strand
agugauacuuaaugcugua

SEQ ID NO: 451993 - RNA, 19 nt, Homo sapiens
  misc_RNA (1)...(19): siRNA sense strand
ugaugaagcagacagaauc

SEQ ID NO: 451994 - RNA, 19 nt, Homo sapiens
  misc_RNA (1)...(19): siRNA sense strand
auuaagacuucaucacugu

SEQ ID NO: 451995 - RNA, 19 nt, Homo sapiens
  misc_RNA (1)...(19): siRNA sense strand
ccugguggaucauauaaaa

SEQ ID NO: 451996 - RNA, 19 nt, Homo sapiens
  misc_RNA (1)...(19): siRNA sense strand
caaaggcuacgaaaagaaa

SEQ ID NO: 451997 - RNA, 19 nt, Homo sapiens
  misc_RNA (1)...(19): siRNA sense strand
uaucagcgacacucacaga

SEQ ID NO: 451998 - RNA, 19 nt, Homo sapiens
  misc_RNA (1)...(19): siRNA sense strand
acgguucgcucuucgacaa

SEQ ID NO: 451999 - RNA, 19 nt, Homo sapiens
  misc_RNA (1)...(19): siRNA sense strand
agacuucaucacuguuuaa

SEQ ID NO: 452000 - RNA, 19 nt, Homo sapiens
  misc_RNA (1)...(19): siRNA sense strand
ugaggaagaccagaagaug

SEQ ID NO: 452001 - RNA, 19 nt, Homo sapiens
  misc_RNA (1)...(19): siRNA sense strand
gaccaguguucagaagcaa

SEQ ID NO: 452002 - RNA, 19 nt, Homo sapiens
  misc_RNA (1)...(19): siRNA sense strand
ccacauuuaauuuccacaa

SEQ ID NO: 452003 - RNA, 19 nt, Homo sapiens
  misc_RNA (1)...(19): siRNA sense strand
gguaaagcaggugcaagaa

SEQ ID NO: 452004 - RNA, 19 nt, Homo sapiens
  misc_RNA (1)...(19): siRNA sense strand
ccuccacccacauuuaauu

SEQ ID NO: 452005 - RNA, 19 nt, Homo sapiens
  misc_RNA (1)...(19): siRNA sense strand
acaagagccaugaccaguu

SEQ ID NO: 452006 - RNA, 19 nt, Homo sapiens
  misc_RNA (1)...(19): siRNA sense strand
gcaugauccagucaguauu

SEQ ID NO: 452007 - RNA, 19 nt, Homo sapiens
  misc_RNA (1)...(19): siRNA sense strand
ccagucccuucaagcaaug

SEQ ID NO: 452008 - RNA, 19 nt, Homo sapiens
  misc_RNA (1)...(19): siRNA sense strand
aagcaaaguauuccugugu

SEQ ID NO: 452009 - RNA, 19 nt, Homo sapiens
  misc_RNA (1)...(19): siRNA sense strand
gcacaagugauagaaacca

SEQ ID NO: 452010 - RNA, 19 nt, Homo sapiens
  misc_RNA (1)...(19): siRNA sense strand
gcuaucagcgacacucaca

SEQ ID NO: 452011 - RNA, 19 nt, Homo sapiens
  misc_RNA (1)...(19): siRNA sense strand
ccgcaaaggaauaaauauc

SEQ ID NO: 452012 - RNA, 19 nt, Homo sapiens
  misc_RNA (1)...(19): siRNA sense strand
ggccagacuccgcaaagga

SEQ ID NO: 452013 - RNA, 19 nt, Homo sapiens
  misc_RNA (1)...(19): siRNA sense strand
aaacucagaggacuuuuaa

SEQ ID NO: 452014 - RNA, 19 nt, Homo sapiens
  misc_RNA (1)...(19): siRNA sense strand
ugguaaagcaggugcaaga

SEQ ID NO: 452015 - RNA, 19 nt, Homo sapiens
  misc_RNA (1)...(19): siRNA sense strand
ggagcaggaggaaagaaca

SEQ ID NO: 452016 - RNA, 19 nt, Homo sapiens
  misc_RNA (1)...(19): siRNA sense strand
agacuccgcaaaggaauaa

SEQ ID NO: 452017 - RNA, 19 nt, Homo sapiens
  misc_RNA (1)...(19): siRNA sense strand
cagacuccgcaaaggaaua

SEQ ID NO: 452018 - RNA, 19 nt, Homo sapiens
  misc_RNA (1)...(19): siRNA sense strand
ccacccacauuuaauuucc

SEQ ID NO: 452019 - RNA, 19 nt, Homo sapiens
  misc_RNA (1)...(19): siRNA sense strand
ugaacucucggccgaaugu

SEQ ID NO: 452020 - RNA, 19 nt, Homo sapiens
  misc_RNA (1)...(19): siRNA sense strand
gaacucucggccgaaugua

SEQ ID NO: 452021 - RNA, 19 nt, Homo sapiens
  misc_RNA (1)...(19): siRNA sense strand
gcauucgguuagcacaagu

SEQ ID NO: 452022 - RNA, 19 nt, Homo sapiens
  misc_RNA (1)...(19): siRNA sense strand
gauccagucaguauuucug

SEQ ID NO: 452023 - RNA, 19 nt, Homo sapiens
  misc_RNA (1)...(19): siRNA sense strand
cagacgggcucagguaaaa

SEQ ID NO: 452024 - RNA, 19 nt, Homo sapiens
  misc_RNA (1)...(19): siRNA sense strand
ggccuucauccuucagaaa

SEQ ID NO: 452025 - RNA, 19 nt, Homo sapiens
  misc_RNA (1)...(19): siRNA sense strand
gugguucccagcaaacuga

SEQ ID NO: 452026 - RNA, 19 nt, Homo sapiens
  misc_RNA (1)...(19): siRNA sense strand
gcaaaggcuacgaaaagaa

SEQ ID NO: 452027 - RNA, 19 nt, Homo sapiens
  misc_RNA (1)...(19): siRNA sense strand
uccagucccuucaagcaau

SEQ ID NO: 452028 - RNA, 19 nt, Homo sapiens
  misc_RNA (1)...(19): siRNA sense strand
caacaaaggcccugucuug

SEQ ID NO: 452029 - RNA, 19 nt, Homo sapiens
  misc_RNA (1)...(19): siRNA sense strand
gaacagaaccagauaugau

SEQ ID NO: 452030 - RNA, 19 nt, Homo sapiens
  misc_RNA (1)...(19): siRNA sense strand
agaaauaguuccaacaaga

SEQ ID NO: 452031 - RNA, 19 nt, Homo sapiens
  misc_RNA (1)...(19): siRNA sense strand
gagaaagucuuccaguaca

SEQ ID NO: 452032 - RNA, 19 nt, Homo sapiens
  misc_RNA (1)...(19): siRNA sense strand
uagagaaagucuuccagua

SEQ ID NO: 452033 - RNA, 19 nt, Homo sapiens
  misc_RNA (1)...(19): siRNA sense strand
guacccaucucuuucuauu

SEQ ID NO: 452034 - RNA, 19 nt, Homo sapiens
  misc_RNA (1)...(19): siRNA sense strand
ggacuacacccguggauug

SEQ ID NO: 452035 - RNA, 19 nt, Homo sapiens
  misc_RNA (1)...(19): siRNA sense strand
gaagauguguucuccaaaa

SEQ ID NO: 452036 - RNA, 19 nt, Homo sapiens
  misc_RNA (1)...(19): siRNA sense strand
gaugaagugguuccucuua

SEQ ID NO: 452037 - RNA, 19 nt, Homo sapiens
  misc_RNA (1)...(19): siRNA sense strand
gcugggagcuguugaugau

SEQ ID NO: 452038 - RNA, 19 nt, Homo sapiens
  misc_RNA (1)...(19): siRNA sense strand
gcagccggguugagaaauu

SEQ ID NO: 452039 - RNA, 19 nt, Homo sapiens
  misc_RNA (1)...(19): siRNA sense strand
cuagaagaauaccggaaua

SEQ ID NO: 452040 - RNA, 19 nt, Homo sapiens
  misc_RNA (1)...(19): siRNA sense strand
ggaagccagcaaucacuua

SEQ ID NO: 452041 - RNA, 19 nt, Homo sapiens
  misc_RNA (1)...(19): siRNA sense strand
gaaauaguuccaacaagau

SEQ ID NO: 452042 - RNA, 19 nt, Homo sapiens
  misc_RNA (1)...(19): siRNA sense strand
gaaugugucugcgguggaa

SEQ ID NO: 452043 - RNA, 19 nt, Homo sapiens
  misc_RNA (1)...(19): siRNA sense strand
ucagagcccuggagcaaga

SEQ ID NO: 452044 - RNA, 19 nt, Homo sapiens
  misc_RNA (1)...(19): siRNA sense strand
caacagguggaacuacaua

SEQ ID NO: 452045 - RNA, 19 nt, Homo sapiens
  misc_RNA (1)...(19): siRNA sense strand
gaagaauaccggaauagca

SEQ ID NO: 452046 - RNA, 19 nt, Homo sapiens
  misc_RNA (1)...(19): siRNA sense strand
ucagauaaccuguggauca

SEQ ID NO: 452047 - RNA, 19 nt, Homo sapiens
  misc_RNA (1)...(19): siRNA sense strand
cauagagggaaccaaauua

SEQ ID NO: 452048 - RNA, 19 nt, Homo sapiens
  misc_RNA (1)...(19): siRNA sense strand
agucauaccuggccgaguu

SEQ ID NO: 452049 - RNA, 19 nt, Homo sapiens
  misc_RNA (1)...(19): siRNA sense strand
gagguagacgggaaacuuu

SEQ ID NO: 452050 - RNA, 19 nt, Homo sapiens
  misc_RNA (1)...(19): siRNA sense strand
auacaaagccauccaucua

SEQ ID NO: 452051 - RNA, 19 nt, Homo sapiens
  misc_RNA (1)...(19): siRNA sense strand
gagcaagaucuuccuguga

SEQ ID NO: 452052 - RNA, 19 nt, Homo sapiens
  misc_RNA (1)...(19): siRNA sense strand
cuacauagagggaaccaaa

SEQ ID NO: 452053 - RNA, 19 nt, Homo sapiens
  misc_RNA (1)...(19): siRNA sense strand
gaaagucuuccaguacauu

SEQ ID NO: 452054 - RNA, 19 nt, Homo sapiens
  misc_RNA (1)...(19): siRNA sense strand
gcaagaucuuccugugaau

SEQ ID NO: 452055 - RNA, 19 nt, Homo sapiens
  misc_RNA (1)...(19): siRNA sense strand
ggucagagucuuccaauac

SEQ ID NO: 452056 - RNA, 19 nt, Homo sapiens
  misc_RNA (1)...(19): siRNA sense strand
acaaagccauccaucuaga

SEQ ID NO: 452057 - RNA, 19 nt, Homo sapiens
  misc_RNA (1)...(19): siRNA sense strand
cccaguaucucgcagcaaa

SEQ ID NO: 452058 - RNA, 19 nt, Homo sapiens
  misc_RNA (1)...(19): siRNA sense strand
caaaggaagccagcaauca

SEQ ID NO: 452059 - RNA, 19 nt, Homo sapiens
  misc_RNA (1)...(19): siRNA sense strand
ggagguagacgggaaacuu

SEQ ID NO: 452060 - RNA, 19 nt, Homo sapiens
  misc_RNA (1)...(19): siRNA sense strand
ggaacagaaccagauauga

SEQ ID NO: 452061 - RNA, 19 nt, Homo sapiens
  misc_RNA (1)...(19): siRNA sense strand
ugaugagccuggaacuaaa

SEQ ID NO: 452062 - RNA, 19 nt, Homo sapiens
  misc_RNA (1)...(19): siRNA sense strand
ggagguacccaucucuuuc

SEQ ID NO: 452063 - RNA, 19 nt, Homo sapiens
  misc_RNA (1)...(19): siRNA sense strand
uggaaucuaugaugaagug

SEQ ID NO: 452064 - RNA, 19 nt, Homo sapiens
  misc_RNA (1)...(19): siRNA sense strand
caagaucuuccugugaaua

SEQ ID NO: 452065 - RNA, 19 nt, Homo sapiens
  misc_RNA (1)...(19): siRNA sense strand
gaggagcgaccgacaacaa

SEQ ID NO: 452066 - RNA, 19 nt, Homo sapiens
  misc_RNA (1)...(19): siRNA sense strand
ugaagugguuccucuuaca

SEQ ID NO: 452067 - RNA, 19 nt, Homo sapiens
  misc_RNA (1)...(19): siRNA sense strand
gaagccagcaaucacuuau

SEQ ID NO: 452068 - RNA, 19 nt, Homo sapiens
  misc_RNA (1)...(19): siRNA sense strand
ggauugcaaauauugauga

SEQ ID NO: 452069 - RNA, 19 nt, Homo sapiens
  misc_RNA (1)...(19): siRNA sense strand
agcaagaucuuccugugaa

SEQ ID NO: 452070 - RNA, 19 nt, Homo sapiens
  misc_RNA (1)...(19): siRNA sense strand
ucuagucccucacaugaau

SEQ ID NO: 452071 - RNA, 19 nt, Homo sapiens
  misc_RNA (1)...(19): siRNA sense strand
cagccggguugagaaauuu

SEQ ID NO: 452072 - RNA, 19 nt, Homo sapiens
  misc_RNA (1)...(19): siRNA sense strand
ccuggucccuggaaucuau

SEQ ID NO: 452073 - RNA, 19 nt, Homo sapiens
  misc_RNA (1)...(19): siRNA sense strand
gaaaugcagagaccaggau

SEQ ID NO: 452074 - RNA, 19 nt, Homo sapiens
  misc_RNA (1)...(19): siRNA sense strand
uccaauaccucccgucauc

SEQ ID NO: 452075 - RNA, 19 nt, Homo sapiens
  misc_RNA (1)...(19): siRNA sense strand
cagaagaggaaauaaauac

SEQ ID NO: 452076 - RNA, 19 nt, Homo sapiens
  misc_RNA (1)...(19): siRNA sense strand
aaucuaugaugaagugguu

SEQ ID NO: 452077 - RNA, 19 nt, Homo sapiens
  misc_RNA (1)...(19): siRNA sense strand
ggauccaccauuccaauug

SEQ ID NO: 452078 - RNA, 19 nt, Homo sapiens
  misc_RNA (1)...(19): siRNA sense strand
aaagagcgaucagaacagu

SEQ ID NO: 452079 - RNA, 19 nt, Homo sapiens
  misc_RNA (1)...(19): siRNA sense strand
acccaucucuuucuauuca

SEQ ID NO: 452080 - RNA, 19 nt, Homo sapiens
  misc_RNA (1)...(19): siRNA sense strand
cacaagagcguggugcuaa

SEQ ID NO: 452081 - RNA, 19 nt, Homo sapiens
  misc_RNA (1)...(19): siRNA sense strand
caggagaucguccacaaga

SEQ ID NO: 452082 - RNA, 19 nt, Homo sapiens
  misc_RNA (1)...(19): siRNA sense strand
uugaagauguguucuccaa

SEQ ID NO: 452083 - RNA, 19 nt, Homo sapiens
  misc_RNA (1)...(19): siRNA sense strand
ugucuuggcuuggaucaau

SEQ ID NO: 452084 - RNA, 19 nt, Homo sapiens
  misc_RNA (1)...(19): siRNA sense strand
ggagcgaucccacgaaagg

SEQ ID NO: 452085 - RNA, 19 nt, Homo sapiens
  misc_RNA (1)...(19): siRNA sense strand
acccguggauugcaaauau

SEQ ID NO: 452086 - RNA, 19 nt, Homo sapiens
  misc_RNA (1)...(19): siRNA sense strand
uuccaugacucuaggacua

SEQ ID NO: 452087 - RNA, 19 nt, Homo sapiens
  misc_RNA (1)...(19): siRNA sense strand
gugccucgcuucagacaag

SEQ ID NO: 452088 - RNA, 19 nt, Homo sapiens
  misc_RNA (1)...(19): siRNA sense strand
gaucuuccugugaauauca

SEQ ID NO: 452089 - RNA, 19 nt, Homo sapiens
  misc_RNA (1)...(19): siRNA sense strand
ccagcaaucacuuauggaa

SEQ ID NO: 452090 - RNA, 19 nt, Homo sapiens
  misc_RNA (1)...(19): siRNA sense strand
caagagcguggugcuaauu

SEQ ID NO: 452091 - RNA, 19 nt, Homo sapiens
  misc_RNA (1)...(19): siRNA sense strand
cgucuagucccucacauga

SEQ ID NO: 452092 - RNA, 19 nt, Homo sapiens
  misc_RNA (1)...(19): siRNA sense strand
uugaugagccuggaacuaa

SEQ ID NO: 452093 - RNA, 19 nt, Homo sapiens
  misc_RNA (1)...(19): siRNA sense strand
uagagggaaccaaauuauu

SEQ ID NO: 452094 - RNA, 19 nt, Homo sapiens
  misc_RNA (1)...(19): siRNA sense strand
gauccaccauuccaauugc

SEQ ID NO: 452095 - RNA, 19 nt, Homo sapiens
  misc_RNA (1)...(19): siRNA sense strand
cuacacccguggauugcaa

SEQ ID NO: 452096 - RNA, 19 nt, Homo sapiens
  misc_RNA (1)...(19): siRNA sense strand
gaaaaggaccgauucuucu

SEQ ID NO: 452097 - RNA, 19 nt, Homo sapiens
  misc_RNA (1)...(19): siRNA sense strand
acauagagggaaccaaauu

SEQ ID NO: 452098 - RNA, 19 nt, Homo sapiens
  misc_RNA (1)...(19): siRNA sense strand
caggugacacgacaucuug

SEQ ID NO: 452099 - RNA, 19 nt, Homo sapiens
  misc_RNA (1)...(19): siRNA sense strand
uaaggaggagauucuaaug

SEQ ID NO: 452100 - RNA, 19 nt, Homo sapiens
  misc_RNA (1)...(19): siRNA sense strand
uggaggaacuuguggaaaa

SEQ ID NO: 452101 - RNA, 19 nt, Homo sapiens
  misc_RNA (1)...(19): siRNA sense strand
acaagagcguggugcuaau

SEQ ID NO: 452102 - RNA, 19 nt, Homo sapiens
  misc_RNA (1)...(19): siRNA sense strand
aggaggagauucuaaugca

SEQ ID NO: 452103 - RNA, 19 nt, Homo sapiens
  misc_RNA (1)...(19): siRNA sense strand
ucccuggaaucuaugauga

SEQ ID NO: 452104 - RNA, 19 nt, Homo sapiens
  misc_RNA (1)...(19): siRNA sense strand
gcagagaccaggauuuuca

SEQ ID NO: 452105 - RNA, 19 nt, Homo sapiens
  misc_RNA (1)...(19): siRNA sense strand
cuaaggaggagauucuaau

SEQ ID NO: 452106 - RNA, 19 nt, Homo sapiens
  misc_RNA (1)...(19): siRNA sense strand
uccaggagaucguccacaa

SEQ ID NO: 452107 - RNA, 19 nt, Homo sapiens
  misc_RNA (1)...(19): siRNA sense strand
gcuguuagagaaagucuuc

SEQ ID NO: 452108 - RNA, 19 nt, Homo sapiens
  misc_RNA (1)...(19): siRNA sense strand
gguagacgggaaacuuuau

SEQ ID NO: 452109 - RNA, 19 nt, Homo sapiens
  misc_RNA (1)...(19): siRNA sense strand
cagauaaccuguggaucag

SEQ ID NO: 452110 - RNA, 19 nt, Homo sapiens
  misc_RNA (1)...(19): siRNA sense strand
gccugugccucgcuucaga

SEQ ID NO: 452111 - RNA, 19 nt, Homo sapiens
  misc_RNA (1)...(19): siRNA sense strand
aagaaauaguuccaacaag

SEQ ID NO: 452112 - RNA, 19 nt, Homo sapiens
  misc_RNA (1)...(19): siRNA sense strand
ccaaaggaagccagcaauc

SEQ ID NO: 452113 - RNA, 19 nt, Homo sapiens
  misc_RNA (1)...(19): siRNA sense strand
agagaaagucuuccaguac

SEQ ID NO: 452114 - RNA, 19 nt, Homo sapiens
  misc_RNA (1)...(19): siRNA sense strand
agccauccaucuagaccua

SEQ ID NO: 452115 - RNA, 19 nt, Homo sapiens
  misc_RNA (1)...(19): siRNA sense strand
cauccuucaugaaccaaug

SEQ ID NO: 452116 - RNA, 19 nt, Homo sapiens
  misc_RNA (1)...(19): siRNA sense strand
gaagugguuccucuuacag

SEQ ID NO: 452117 - RNA, 19 nt, Homo sapiens
  misc_RNA (1)...(19): siRNA sense strand
agaaagucuuccaguacau

SEQ ID NO: 452118 - RNA, 19 nt, Homo sapiens
  misc_RNA (1)...(19): siRNA sense strand
ggugacacgacaucuugaa

SEQ ID NO: 452119 - RNA, 19 nt, Homo sapiens
  misc_RNA (1)...(19): siRNA sense strand
ccaucucuuucuauucaug

SEQ ID NO: 452120 - RNA, 19 nt, Homo sapiens
  misc_RNA (1)...(19): siRNA sense strand
ggaauagcagccggguuga

SEQ ID NO: 452121 - RNA, 19 nt, Homo sapiens
  misc_RNA (1)...(19): siRNA sense strand
uagcagccggguugagaaa

SEQ ID NO: 452122 - RNA, 19 nt, Homo sapiens
  misc_RNA (1)...(19): siRNA sense strand
auagagggaaccaaauuau

SEQ ID NO: 452123 - RNA, 19 nt, Homo sapiens
  misc_RNA (1)...(19): siRNA sense strand
gugcuucuacggccacuug

SEQ ID NO: 452124 - RNA, 19 nt, Homo sapiens
  misc_RNA (1)...(19): siRNA sense strand
aaacaggugacacgacauc

SEQ ID NO: 452125 - RNA, 19 nt, Homo sapiens
  misc_RNA (1)...(19): siRNA sense strand
uggagguacccaucucuuu

SEQ ID NO: 452126 - RNA, 19 nt, Homo sapiens
  misc_RNA (1)...(19): siRNA sense strand
gagguacccaucucuuucu

SEQ ID NO: 452127 - RNA, 19 nt, Homo sapiens
  misc_RNA (1)...(19): siRNA sense strand
guagacgggaaacuuuaug

SEQ ID NO: 452128 - RNA, 19 nt, Homo sapiens
  misc_RNA (1)...(19): siRNA sense strand
aaacagauaucccaaagua

SEQ ID NO: 452129 - RNA, 19 nt, Homo sapiens
  misc_RNA (1)...(19): siRNA sense strand
gcacacagaccagcuauua

SEQ ID NO: 452130 - RNA, 19 nt, Homo sapiens
  misc_RNA (1)...(19): siRNA sense strand
gaccagcuauuagaaauua

SEQ ID NO: 452131 - RNA, 19 nt, Homo sapiens
  misc_RNA (1)...(19): siRNA sense strand
gagcaagacuuuaaagaag

SEQ ID NO: 452132 - RNA, 19 nt, Homo sapiens
  misc_RNA (1)...(19): siRNA sense strand
aaagagaugucaaauccua

SEQ ID NO: 452133 - RNA, 19 nt, Homo sapiens
  misc_RNA (1)...(19): siRNA sense strand
gcaaagaugcauagaagaa

SEQ ID NO: 452134 - RNA, 19 nt, Homo sapiens
  misc_RNA (1)...(19): siRNA sense strand
guacagggcauccauauug

SEQ ID NO: 452135 - RNA, 19 nt, Homo sapiens
  misc_RNA (1)...(19): siRNA sense strand
uggaagaagucauugauaa

SEQ ID NO: 452136 - RNA, 19 nt, Homo sapiens
  misc_RNA (1)...(19): siRNA sense strand
gagaacacguaacaacaaa

SEQ ID NO: 452137 - RNA, 19 nt, Homo sapiens
  misc_RNA (1)...(19): siRNA sense strand
gauuggagcugcuggagaa

SEQ ID NO: 452138 - RNA, 19 nt, Homo sapiens
  misc_RNA (1)...(19): siRNA sense strand
gggcaaagaugcauagaag

SEQ ID NO: 452139 - RNA, 19 nt, Homo sapiens
  misc_RNA (1)...(19): siRNA sense strand
gaaaugcccuuugcugaca

SEQ ID NO: 452140 - RNA, 19 nt, Homo sapiens
  misc_RNA (1)...(19): siRNA sense strand
gaacuuggaauuaccuuga

SEQ ID NO: 452141 - RNA, 19 nt, Homo sapiens
  misc_RNA (1)...(19): siRNA sense strand
ggaaucagcuaucucuucu

SEQ ID NO: 452142 - RNA, 19 nt, Homo sapiens
  misc_RNA (1)...(19): siRNA sense strand
ucaguuagcugggcaaaga

SEQ ID NO: 452143 - RNA, 19 nt, Homo sapiens
  misc_RNA (1)...(19): siRNA sense strand
agaauaaggucaucaucaa

SEQ ID NO: 452144 - RNA, 19 nt, Homo sapiens
  misc_RNA (1)...(19): siRNA sense strand
ugaagaagguggaaaugau

SEQ ID NO: 452145 - RNA, 19 nt, Homo sapiens
  misc_RNA (1)...(19): siRNA sense strand
gcaaagaacagaagagucu

SEQ ID NO: 452146 - RNA, 19 nt, Homo sapiens
  misc_RNA (1)...(19): siRNA sense strand
uagaagagcaagacuuuaa

SEQ ID NO: 452147 - RNA, 19 nt, Homo sapiens
  misc_RNA (1)...(19): siRNA sense strand
gaacacguaacaacaaaug

SEQ ID NO: 452148 - RNA, 19 nt, Homo sapiens
  misc_RNA (1)...(19): siRNA sense strand
guuaaaggaugaauuacug

SEQ ID NO: 452149 - RNA, 19 nt, Homo sapiens
  misc_RNA (1)...(19): siRNA sense strand
gaugucaaauccuagaaga

SEQ ID NO: 452150 - RNA, 19 nt, Homo sapiens
  misc_RNA (1)...(19): siRNA sense strand
gcacaauucuuugaacagu

SEQ ID NO: 452151 - RNA, 19 nt, Homo sapiens
  misc_RNA (1)...(19): siRNA sense strand
guaaaguuaugcaauccaa

SEQ ID NO: 452152 - RNA, 19 nt, Homo sapiens
  misc_RNA (1)...(19): siRNA sense strand
gagaauagaagacaauagu

SEQ ID NO: 452153 - RNA, 19 nt, Homo sapiens
  misc_RNA (1)...(19): siRNA sense strand
caaggcauauucaauugga

SEQ ID NO: 452154 - RNA, 19 nt, Homo sapiens
  misc_RNA (1)...(19): siRNA sense strand
aaagagaacuuggaauuac

SEQ ID NO: 452155 - RNA, 19 nt, Homo sapiens
  misc_RNA (1)...(19): siRNA sense strand
gcaaggccuuaauagaguu

SEQ ID NO: 452156 - RNA, 19 nt, Homo sapiens
  misc_RNA (1)...(19): siRNA sense strand
uggcauaucuaguauuugu

SEQ ID NO: 452157 - RNA, 19 nt, Homo sapiens
  misc_RNA (1)...(19): siRNA sense strand
gaagaagucauugauaaca

SEQ ID NO: 452158 - RNA, 19 nt, Homo sapiens
  misc_RNA (1)...(19): siRNA sense strand
ggaacuucagucuauaaua

SEQ ID NO: 452159 - RNA, 19 nt, Homo sapiens
  misc_RNA (1)...(19): siRNA sense strand
acagauaucccaaaguauu

SEQ ID NO: 452160 - RNA, 19 nt, Homo sapiens
  misc_RNA (1)...(19): siRNA sense strand
gaaaacagauaucccaaag

SEQ ID NO: 452161 - RNA, 19 nt, Homo sapiens
  misc_RNA (1)...(19): siRNA sense strand
aaagaaaacucacuggaaa

SEQ ID NO: 452162 - RNA, 19 nt, Homo sapiens
  misc_RNA (1)...(19): siRNA sense strand
aaacagugauucagaaacu

SEQ ID NO: 452163 - RNA, 19 nt, Homo sapiens
  misc_RNA (1)...(19): siRNA sense strand
ucuggcauaucuaguauuu

SEQ ID NO: 452164 - RNA, 19 nt, Homo sapiens
  misc_RNA (1)...(19): siRNA sense strand
ucaagaauaugggcuggaa

SEQ ID NO: 452165 - RNA, 19 nt, Homo sapiens
  misc_RNA (1)...(19): siRNA sense strand
auaaagagaugucaaaucc

SEQ ID NO: 452166 - RNA, 19 nt, Homo sapiens
  misc_RNA (1)...(19): siRNA sense strand
gaggaacuucagucuauaa

SEQ ID NO: 452167 - RNA, 19 nt, Homo sapiens
  misc_RNA (1)...(19): siRNA sense strand
ggaugacuauggccuuugu

SEQ ID NO: 452168 - RNA, 19 nt, Homo sapiens
  misc_RNA (1)...(19): siRNA sense strand
ucagaaacuucauaacaag

SEQ ID NO: 452169 - RNA, 19 nt, Homo sapiens
  misc_RNA (1)...(19): siRNA sense strand
guuaugcaauccaaaggaa

SEQ ID NO: 452170 - RNA, 19 nt, Homo sapiens
  misc_RNA (1)...(19): siRNA sense strand
cagaccagcuauuagaaau

SEQ ID NO: 452171 - RNA, 19 nt, Homo sapiens
  misc_RNA (1)...(19): siRNA sense strand
gaagaagguggaaaugauc

SEQ ID NO: 452172 - RNA, 19 nt, Homo sapiens
  misc_RNA (1)...(19): siRNA sense strand
gcaagacuuuaaagaagag

SEQ ID NO: 452173 - RNA, 19 nt, Homo sapiens
  misc_RNA (1)...(19): siRNA sense strand
acacagaccagcuauuaga

SEQ ID NO: 452174 - RNA, 19 nt, Homo sapiens
  misc_RNA (1)...(19): siRNA sense strand
aaucagcuaucucuucuuc

SEQ ID NO: 452175 - RNA, 19 nt, Homo sapiens
  misc_RNA (1)...(19): siRNA sense strand
uacaaacagugauucagaa

SEQ ID NO: 452176 - RNA, 19 nt, Homo sapiens
  misc_RNA (1)...(19): siRNA sense strand
gcaauccaaaggaauuauu

SEQ ID NO: 452177 - RNA, 19 nt, Homo sapiens
  misc_RNA (1)...(19): siRNA sense strand
guaaagauaaagaggauag

SEQ ID NO: 452178 - RNA, 19 nt, Homo sapiens
  misc_RNA (1)...(19): siRNA sense strand
ccuagaagagcaagacuuu

SEQ ID NO: 452179 - RNA, 19 nt, Homo sapiens
  misc_RNA (1)...(19): siRNA sense strand
aaaacucacuggaaaauga

SEQ ID NO: 452180 - RNA, 19 nt, Homo sapiens
  misc_RNA (1)...(19): siRNA sense strand
cguaacaacaaaugguuua

SEQ ID NO: 452181 - RNA, 19 nt, Homo sapiens
  misc_RNA (1)...(19): siRNA sense strand
ugcuucagcuguauauuaa

SEQ ID NO: 452182 - RNA, 19 nt, Homo sapiens
  misc_RNA (1)...(19): siRNA sense strand
gaaucucguugguccuguu

SEQ ID NO: 452183 - RNA, 19 nt, Homo sapiens
  misc_RNA (1)...(19): siRNA sense strand
gaagagcaagacuuuaaag

SEQ ID NO: 452184 - RNA, 19 nt, Homo sapiens
  misc_RNA (1)...(19): siRNA sense strand
aacaaggcauauucaauug

SEQ ID NO: 452185 - RNA, 19 nt, Homo sapiens
  misc_RNA (1)...(19): siRNA sense strand
ugaacagucugaagaaggu

SEQ ID NO: 452186 - RNA, 19 nt, Homo sapiens
  misc_RNA (1)...(19): siRNA sense strand
cagcacaauucuuugaaca

SEQ ID NO: 452187 - RNA, 19 nt, Homo sapiens
  misc_RNA (1)...(19): siRNA sense strand
ugacagcacaauucuuuga

SEQ ID NO: 452188 - RNA, 19 nt, Homo sapiens
  misc_RNA (1)...(19): siRNA sense strand
agagcaagacuuuaaagaa

SEQ ID NO: 452189 - RNA, 19 nt, Homo sapiens
  misc_RNA (1)...(19): siRNA sense strand
uuaagcccauuguaccuuu

SEQ ID NO: 452190 - RNA, 19 nt, Homo sapiens
  misc_RNA (1)...(19): siRNA sense strand
guguaaagauaaagaggau

SEQ ID NO: 452191 - RNA, 19 nt, Homo sapiens
  misc_RNA (1)...(19): siRNA sense strand
ggauucacaaggcaaauau

SEQ ID NO: 452192 - RNA, 19 nt, Homo sapiens
  misc_RNA (1)...(19): siRNA sense strand
guacuuagaaaucaagagu

SEQ ID NO: 452193 - RNA, 19 nt, Homo sapiens
  misc_RNA (1)...(19): siRNA sense strand
ucuguuaucuccaaaggau

SEQ ID NO: 452194 - RNA, 19 nt, Homo sapiens
  misc_RNA (1)...(19): siRNA sense strand
acaguuagcagacucaaug

SEQ ID NO: 452195 - RNA, 19 nt, Homo sapiens
  misc_RNA (1)...(19): siRNA sense strand
ggaagaagucauugauaac

SEQ ID NO: 452196 - RNA, 19 nt, Homo sapiens
  misc_RNA (1)...(19): siRNA sense strand
uuacaaacagugauucaga

SEQ ID NO: 452197 - RNA, 19 nt, Homo sapiens
  misc_RNA (1)...(19): siRNA sense strand
uuaacaaguuggauucaca

SEQ ID NO: 452198 - RNA, 19 nt, Homo sapiens
  misc_RNA (1)...(19): siRNA sense strand
ccucagggcuuagugaaag

SEQ ID NO: 452199 - RNA, 19 nt, Homo sapiens
  misc_RNA (1)...(19): siRNA sense strand
uacagggcauccauauuga

SEQ ID NO: 452200 - RNA, 19 nt, Homo sapiens
  misc_RNA (1)...(19): siRNA sense strand
guggaagaagucauugaua

SEQ ID NO: 452201 - RNA, 19 nt, Homo sapiens
  misc_RNA (1)...(19): siRNA sense strand
acaauagucuacuuuacca

SEQ ID NO: 452202 - RNA, 19 nt, Homo sapiens
  misc_RNA (1)...(19): siRNA sense strand
agaggaacuucagucuaua

SEQ ID NO: 452203 - RNA, 19 nt, Homo sapiens
  misc_RNA (1)...(19): siRNA sense strand
aaaugauccuuucagguau

SEQ ID NO: 452204 - RNA, 19 nt, Homo sapiens
  misc_RNA (1)...(19): siRNA sense strand
ggaauuauuguuggguuug

SEQ ID NO: 452205 - RNA, 19 nt, Homo sapiens
  misc_RNA (1)...(19): siRNA sense strand
ucacaaggcaaauauacau

SEQ ID NO: 452206 - RNA, 19 nt, Homo sapiens
  misc_RNA (1)...(19): siRNA sense strand
ccuugaauuugaagaagaa

SEQ ID NO: 452207 - RNA, 19 nt, Homo sapiens
  misc_RNA (1)...(19): siRNA sense strand
ggcauauucaauuggauua

SEQ ID NO: 452208 - RNA, 19 nt, Homo sapiens
  misc_RNA (1)...(19): siRNA sense strand
gaauaaggucaucaucaag

SEQ ID NO: 452209 - RNA, 19 nt, Homo sapiens
  misc_RNA (1)...(19): siRNA sense strand
uacuguaccucagggcuua

SEQ ID NO: 452210 - RNA, 19 nt, Homo sapiens
  misc_RNA (1)...(19): siRNA sense strand
auaaggucaucaucaagaa

SEQ ID NO: 452211 - RNA, 19 nt, Homo sapiens
  misc_RNA (1)...(19): siRNA sense strand
uaccaguacuuagaaauca

SEQ ID NO: 452212 - RNA, 19 nt, Homo sapiens
  misc_RNA (1)...(19): siRNA sense strand
uggcuucucuggcauaucu

SEQ ID NO: 452213 - RNA, 19 nt, Homo sapiens
  misc_RNA (1)...(19): siRNA sense strand
ugucuacccuuuggaauca

SEQ ID NO: 452214 - RNA, 19 nt, Homo sapiens
  misc_RNA (1)...(19): siRNA sense strand
ggguuugcuugaacugauu

SEQ ID NO: 452215 - RNA, 19 nt, Homo sapiens
  misc_RNA (1)...(19): siRNA sense strand
gggcuuagugaaaguaaug

SEQ ID NO: 452216 - RNA, 19 nt, Homo sapiens
  misc_RNA (1)...(19): siRNA sense strand
aauaaggucaucaucaaga

SEQ ID NO: 452217 - RNA, 19 nt, Homo sapiens
  misc_RNA (1)...(19): siRNA sense strand
augcuucagcuguauauua

SEQ ID NO: 452218 - RNA, 19 nt, Homo sapiens
  misc_RNA (1)...(19): siRNA sense strand
aaggucaucaucaagaaua

SEQ ID NO: 452219 - RNA, 19 nt, Homo sapiens
  misc_RNA (1)...(19): siRNA sense strand
ggucuuaagcccauuguac

SEQ ID NO: 452220 - RNA, 19 nt, Homo sapiens
  misc_RNA (1)...(19): siRNA sense strand
ggacacccuuuccccaaaa

SEQ ID NO: 452221 - RNA, 19 nt, Homo sapiens
  misc_RNA (1)...(19): siRNA sense strand
agcaagacuuuaaagaaga

SEQ ID NO: 452222 - RNA, 19 nt, Homo sapiens
  misc_RNA (1)...(19): siRNA sense strand
ugcaaggccuuaauagagu

SEQ ID NO: 452223 - RNA, 19 nt, Homo sapiens
  misc_RNA (1)...(19): siRNA sense strand
agagaacacguaacaacaa

SEQ ID NO: 452224 - RNA, 19 nt, Homo sapiens
  misc_RNA (1)...(19): siRNA sense strand
aagagucuguuaucuccaa

SEQ ID NO: 452225 - RNA, 19 nt, Homo sapiens
  misc_RNA (1)...(19): siRNA sense strand
gcauaucuaguauuuguac

SEQ ID NO: 452226 - RNA, 19 nt, Homo sapiens
  misc_RNA (1)...(19): siRNA sense strand
uaacaaguuggauucacaa

SEQ ID NO: 452227 - RNA, 19 nt, Homo sapiens
  misc_RNA (1)...(19): siRNA sense strand
aagaauaaggucaucauca

SEQ ID NO: 452228 - RNA, 19 nt, Homo sapiens
  misc_RNA (1)...(19): siRNA sense strand
gagaagagaucccuaauau

SEQ ID NO: 452229 - RNA, 19 nt, Homo sapiens
  misc_RNA (1)...(19): siRNA sense strand
ggacagaacuuggaaauau

SEQ ID NO: 452230 - RNA, 19 nt, Homo sapiens
  misc_RNA (1)...(19): siRNA sense strand
aaacagauaucccaaagua

SEQ ID NO: 452231 - RNA, 19 nt, Homo sapiens
  misc_RNA (1)...(19): siRNA sense strand
gcacacagaccagcuauua

SEQ ID NO: 452232 - RNA, 19 nt, Homo sapiens
  misc_RNA (1)...(19): siRNA sense strand
gaccagcuauuagaaauua

SEQ ID NO: 452233 - RNA, 19 nt, Homo sapiens
  misc_RNA (1)...(19): siRNA sense strand
gagcaagacuuuaaagaag

SEQ ID NO: 452234 - RNA, 19 nt, Homo sapiens
  misc_RNA (1)...(19): siRNA sense strand
ggaagaacucauugaaaua

SEQ ID NO: 452235 - RNA, 19 nt, Homo sapiens
  misc_RNA (1)...(19): siRNA sense strand
aaagagaugucaaauccua

SEQ ID NO: 452236 - RNA, 19 nt, Homo sapiens
  misc_RNA (1)...(19): siRNA sense strand
gaagagaucccuaauaugc

SEQ ID NO: 452237 - RNA, 19 nt, Homo sapiens
  misc_RNA (1)...(19): siRNA sense strand
gcaaagaugcauagaagaa

SEQ ID NO: 452238 - RNA, 19 nt, Homo sapiens
  misc_RNA (1)...(19): siRNA sense strand
guacagggcauccauauug

SEQ ID NO: 452239 - RNA, 19 nt, Homo sapiens
  misc_RNA (1)...(19): siRNA sense strand
uggaagaagucauugauaa

SEQ ID NO: 452240 - RNA, 19 nt, Homo sapiens
  misc_RNA (1)...(19): siRNA sense strand
gagaacacguaacaacaaa

SEQ ID NO: 452241 - RNA, 19 nt, Homo sapiens
  misc_RNA (1)...(19): siRNA sense strand
gauuggagcugcuggagaa

SEQ ID NO: 452242 - RNA, 19 nt, Homo sapiens
  misc_RNA (1)...(19): siRNA sense strand
gggcaaagaugcauagaag

SEQ ID NO: 452243 - RNA, 19 nt, Homo sapiens
  misc_RNA (1)...(19): siRNA sense strand
uaauaugccuccugaaaug

SEQ ID NO: 452244 - RNA, 19 nt, Homo sapiens
  misc_RNA (1)...(19): siRNA sense strand
gaaacagauuuacugcaaa

SEQ ID NO: 452245 - RNA, 19 nt, Homo sapiens
  misc_RNA (1)...(19): siRNA sense strand
ggagaagagaucccuaaua

SEQ ID NO: 452246 - RNA, 19 nt, Homo sapiens
  misc_RNA (1)...(19): siRNA sense strand
gaaaugcccuuugcugaca

SEQ ID NO: 452247 - RNA, 19 nt, Homo sapiens
  misc_RNA (1)...(19): siRNA sense strand
gaacuuggaauuaccuuga

SEQ ID NO: 452248 - RNA, 19 nt, Homo sapiens
  misc_RNA (1)...(19): siRNA sense strand
gacagaacuuggaaauauu

SEQ ID NO: 452249 - RNA, 19 nt, Homo sapiens
  misc_RNA (1)...(19): siRNA sense strand
ggaaucagcuaucucuucu

SEQ ID NO: 452250 - RNA, 19 nt, Homo sapiens
  misc_RNA (1)...(19): siRNA sense strand
uggaagaacucauugaaau

SEQ ID NO: 452251 - RNA, 19 nt, Homo sapiens
  misc_RNA (1)...(19): siRNA sense strand
ucaguuagcugggcaaaga

SEQ ID NO: 452252 - RNA, 19 nt, Homo sapiens
  misc_RNA (1)...(19): siRNA sense strand
aaacaaagucuaccucuga

SEQ ID NO: 452253 - RNA, 19 nt, Homo sapiens
  misc_RNA (1)...(19): siRNA sense strand
ugauuucccuucuugauuu

SEQ ID NO: 452254 - RNA, 19 nt, Homo sapiens
  misc_RNA (1)...(19): siRNA sense strand
agaauaaggucaucaucaa

SEQ ID NO: 452255 - RNA, 19 nt, Homo sapiens
  misc_RNA (1)...(19): siRNA sense strand
ugaagaagguggaaaugau

SEQ ID NO: 452256 - RNA, 19 nt, Homo sapiens
  misc_RNA (1)...(19): siRNA sense strand
agaaacagauuuacugcaa

SEQ ID NO: 452257 - RNA, 19 nt, Homo sapiens
  misc_RNA (1)...(19): siRNA sense strand
gcaaagaacagaagagucu

SEQ ID NO: 452258 - RNA, 19 nt, Homo sapiens
  misc_RNA (1)...(19): siRNA sense strand
uagaagagcaagacuuuaa

SEQ ID NO: 452259 - RNA, 19 nt, Homo sapiens
  misc_RNA (1)...(19): siRNA sense strand
gaacacguaacaacaaaug

SEQ ID NO: 452260 - RNA, 19 nt, Homo sapiens
  misc_RNA (1)...(19): siRNA sense strand
guuaaaggaugaauuacug

SEQ ID NO: 452261 - RNA, 19 nt, Homo sapiens
  misc_RNA (1)...(19): siRNA sense strand
gcacaauucuuugaacagu

SEQ ID NO: 452262 - RNA, 19 nt, Homo sapiens
  misc_RNA (1)...(19): siRNA sense strand
gaacuuggaaauauugaga

SEQ ID NO: 452263 - RNA, 19 nt, Homo sapiens
  misc_RNA (1)...(19): siRNA sense strand
gaugucaaauccuagaaga

SEQ ID NO: 452264 - RNA, 19 nt, Homo sapiens
  misc_RNA (1)...(19): siRNA sense strand
guaaaguuaugcaauccaa

SEQ ID NO: 452265 - RNA, 19 nt, Homo sapiens
  misc_RNA (1)...(19): siRNA sense strand
gagaauagaagacaauagu

SEQ ID NO: 452266 - RNA, 19 nt, Homo sapiens
  misc_RNA (1)...(19): siRNA sense strand
caaggcauauucaauugga

SEQ ID NO: 452267 - RNA, 19 nt, Homo sapiens
  misc_RNA (1)...(19): siRNA sense strand
aaagagaacuuggaauuac

SEQ ID NO: 452268 - RNA, 19 nt, Homo sapiens
  misc_RNA (1)...(19): siRNA sense strand
gcaaggccuuaauagaguu

SEQ ID NO: 452269 - RNA, 19 nt, Homo sapiens
  misc_RNA (1)...(19): siRNA sense strand
uggcauaucuaguauuugu

SEQ ID NO: 452270 - RNA, 19 nt, Homo sapiens
  misc_RNA (1)...(19): siRNA sense strand
gaagaagucauugauaaca

SEQ ID NO: 452271 - RNA, 19 nt, Homo sapiens
  misc_RNA (1)...(19): siRNA sense strand
ggaacuucagucuauaaua

SEQ ID NO: 452272 - RNA, 19 nt, Homo sapiens
  misc_RNA (1)...(19): siRNA sense strand
acagauaucccaaaguauu

SEQ ID NO: 452273 - RNA, 19 nt, Homo sapiens
  misc_RNA (1)...(19): siRNA sense strand
gaaaacagauaucccaaag

SEQ ID NO: 452274 - RNA, 19 nt, Homo sapiens
  misc_RNA (1)...(19): siRNA sense strand
aaagaaaacucacuggaaa

SEQ ID NO: 452275 - RNA, 19 nt, Homo sapiens
  misc_RNA (1)...(19): siRNA sense strand
aaacagugauucagaaacu

SEQ ID NO: 452276 - RNA, 19 nt, Homo sapiens
  misc_RNA (1)...(19): siRNA sense strand
ucuggcauaucuaguauuu

SEQ ID NO: 452277 - RNA, 19 nt, Homo sapiens
  misc_RNA (1)...(19): siRNA sense strand
gaucuuuguucuauaacug

SEQ ID NO: 452278 - RNA, 19 nt, Homo sapiens
  misc_RNA (1)...(19): siRNA sense strand
gaggaacuucagucuauaa

SEQ ID NO: 452279 - RNA, 19 nt, Homo sapiens
  misc_RNA (1)...(19): siRNA sense strand
caaagucuaccucugaaga

SEQ ID NO: 452280 - RNA, 19 nt, Homo sapiens
  misc_RNA (1)...(19): siRNA sense strand
auaaagagaugucaaaucc

SEQ ID NO: 452281 - RNA, 19 nt, Homo sapiens
  misc_RNA (1)...(19): siRNA sense strand
caagaggcccagaaaucua

SEQ ID NO: 452282 - RNA, 19 nt, Homo sapiens
  misc_RNA (1)...(19): siRNA sense strand
ggaugacuauggccuuugu

SEQ ID NO: 452283 - RNA, 19 nt, Homo sapiens
  misc_RNA (1)...(19): siRNA sense strand
ucagaaacuucauaacaag

SEQ ID NO: 452284 - RNA, 19 nt, Homo sapiens
  misc_RNA (1)...(19): siRNA sense strand
guuaugcaauccaaaggaa

SEQ ID NO: 452285 - RNA, 19 nt, Homo sapiens
  misc_RNA (1)...(19): siRNA sense strand
ucaagaauaugggcuggaa

SEQ ID NO: 452286 - RNA, 19 nt, Homo sapiens
  misc_RNA (1)...(19): siRNA sense strand
cagaccagcuauuagaaau

SEQ ID NO: 452287 - RNA, 19 nt, Homo sapiens
  misc_RNA (1)...(19): siRNA sense strand
gaagaagguggaaaugauc

SEQ ID NO: 452288 - RNA, 19 nt, Homo sapiens
  misc_RNA (1)...(19): siRNA sense strand
gcaagacuuuaaagaagag

SEQ ID NO: 452289 - RNA, 19 nt, Homo sapiens
  misc_RNA (1)...(19): siRNA sense strand
acacagaccagcuauuaga

SEQ ID NO: 452290 - RNA, 19 nt, Homo sapiens
  misc_RNA (1)...(19): siRNA sense strand
ccuaauaugccuccugaaa

SEQ ID NO: 452291 - RNA, 19 nt, Homo sapiens
  misc_RNA (1)...(19): siRNA sense strand
uaaagccacuucauauagg

SEQ ID NO: 452292 - RNA, 19 nt, Homo sapiens
  misc_RNA (1)...(19): siRNA sense strand
aaucagcuaucucuucuuc

SEQ ID NO: 452293 - RNA, 19 nt, Homo sapiens
  misc_RNA (1)...(19): siRNA sense strand
uacaaacagugauucagaa

SEQ ID NO: 452294 - RNA, 19 nt, Homo sapiens
  misc_RNA (1)...(19): siRNA sense strand
gcaauccaaaggaauuauu

SEQ ID NO: 452295 - RNA, 19 nt, Homo sapiens
  misc_RNA (1)...(19): siRNA sense strand
guaaagauaaagaggauag

SEQ ID NO: 452296 - RNA, 19 nt, Homo sapiens
  misc_RNA (1)...(19): siRNA sense strand
ccuagaagagcaagacuuu

SEQ ID NO: 452297 - RNA, 19 nt, Homo sapiens
  misc_RNA (1)...(19): siRNA sense strand
ggauuauggcuucauuaaa

SEQ ID NO: 452298 - RNA, 19 nt, Homo sapiens
  misc_RNA (1)...(19): siRNA sense strand
aaaacucacuggaaaauga

SEQ ID NO: 452299 - RNA, 19 nt, Homo sapiens
  misc_RNA (1)...(19): siRNA sense strand
cguaacaacaaaugguuua

SEQ ID NO: 452300 - RNA, 19 nt, Homo sapiens
  misc_RNA (1)...(19): siRNA sense strand
ugcuucagcuguauauuaa

SEQ ID NO: 452301 - RNA, 19 nt, Homo sapiens
  misc_RNA (1)...(19): siRNA sense strand
gaaucucguugguccuguu

SEQ ID NO: 452302 - RNA, 19 nt, Homo sapiens
  misc_RNA (1)...(19): siRNA sense strand
gccaagaggcccagaaauc

SEQ ID NO: 452303 - RNA, 19 nt, Homo sapiens
  misc_RNA (1)...(19): siRNA sense strand
ugagguauuugguuaucaa

SEQ ID NO: 452304 - RNA, 19 nt, Homo sapiens
  misc_RNA (1)...(19): siRNA sense strand
aaacucagauaggauuaug

SEQ ID NO: 452305 - RNA, 19 nt, Homo sapiens
  misc_RNA (1)...(19): siRNA sense strand
gaagagcaagacuuuaaag

SEQ ID NO: 452306 - RNA, 19 nt, Homo sapiens
  misc_RNA (1)...(19): siRNA sense strand
aacaaggcauauucaauug

SEQ ID NO: 452307 - RNA, 19 nt, Homo sapiens
  misc_RNA (1)...(19): siRNA sense strand
cuuaaagccacuucauaua

SEQ ID NO: 452308 - RNA, 19 nt, Homo sapiens
  misc_RNA (1)...(19): siRNA sense strand
ugaacagucugaagaaggu

SEQ ID NO: 452309 - RNA, 19 nt, Homo sapiens
  misc_RNA (1)...(19): siRNA sense strand
cagcacaauucuuugaaca

SEQ ID NO: 452310 - RNA, 19 nt, Homo sapiens
  misc_RNA (1)...(19): siRNA sense strand
ugacagcacaauucuuuga

SEQ ID NO: 452311 - RNA, 19 nt, Homo sapiens
  misc_RNA (1)...(19): siRNA sense strand
agagcaagacuuuaaagaa

SEQ ID NO: 452312 - RNA, 19 nt, Homo sapiens
  misc_RNA (1)...(19): siRNA sense strand
uuaagcccauuguaccuuu

SEQ ID NO: 452313 - RNA, 19 nt, Homo sapiens
  misc_RNA (1)...(19): siRNA sense strand
guguaaagauaaagaggau

SEQ ID NO: 452314 - RNA, 19 nt, Homo sapiens
  misc_RNA (1)...(19): siRNA sense strand
gauugaaaguguucuagcu

SEQ ID NO: 452315 - RNA, 19 nt, Homo sapiens
  misc_RNA (1)...(19): siRNA sense strand
ggauucacaaggcaaauau

SEQ ID NO: 452316 - RNA, 19 nt, Homo sapiens
  misc_RNA (1)...(19): siRNA sense strand
guacuuagaaaucaagagu

SEQ ID NO: 452317 - RNA, 19 nt, Homo sapiens
  misc_RNA (1)...(19): siRNA sense strand
ucuguuaucuccaaaggau

SEQ ID NO: 452318 - RNA, 19 nt, Homo sapiens
  misc_RNA (1)...(19): siRNA sense strand
acaguuagcagacucaaug

SEQ ID NO: 452319 - RNA, 19 nt, Homo sapiens
  misc_RNA (1)...(19): siRNA sense strand
ggaagaagucauugauaac

SEQ ID NO: 452320 - RNA, 19 nt, Homo sapiens
  misc_RNA (1)...(19): siRNA sense strand
uuacaaacagugauucaga

SEQ ID NO: 452321 - RNA, 19 nt, Homo sapiens
  misc_RNA (1)...(19): siRNA sense strand
uuaaagccacuucauauag

SEQ ID NO: 452322 - RNA, 19 nt, Homo sapiens
  misc_RNA (1)...(19): siRNA sense strand
caguugauuucccuucuug

SEQ ID NO: 452323 - RNA, 19 nt, Homo sapiens
  misc_RNA (1)...(19): siRNA sense strand
uuaacaaguuggauucaca

SEQ ID NO: 452324 - RNA, 19 nt, Homo sapiens
  misc_RNA (1)...(19): siRNA sense strand
ccucagggcuuagugaaag

SEQ ID NO: 452325 - RNA, 19 nt, Homo sapiens
  misc_RNA (1)...(19): siRNA sense strand
uacagggcauccauauuga

SEQ ID NO: 452326 - RNA, 19 nt, Homo sapiens
  misc_RNA (1)...(19): siRNA sense strand
gcaaaacucagauaggauu

SEQ ID NO: 452327 - RNA, 19 nt, Homo sapiens
  misc_RNA (1)...(19): siRNA sense strand
gcauucagcucuuuucaca

SEQ ID NO: 452328 - RNA, 19 nt, Homo sapiens
  misc_RNA (1)...(19): siRNA sense strand
gaucaagacuggagacaaa

SEQ ID NO: 452329 - RNA, 19 nt, Homo sapiens
  misc_RNA (1)...(19): siRNA sense strand
gauuacaccuucccacuug

SEQ ID NO: 452330 - RNA, 19 nt, Homo sapiens
  misc_RNA (1)...(19): siRNA sense strand
ggacgaggauaugggauuu

SEQ ID NO: 452331 - RNA, 19 nt, Homo sapiens
  misc_RNA (1)...(19): siRNA sense strand
gagaaacugcugccucaua

SEQ ID NO: 452332 - RNA, 19 nt, Homo sapiens
  misc_RNA (1)...(19): siRNA sense strand
gauuuggucucuuugacua

SEQ ID NO: 452333 - RNA, 19 nt, Homo sapiens
  misc_RNA (1)...(19): siRNA sense strand
ccauugaaauccugaguga

SEQ ID NO: 452334 - RNA, 19 nt, Homo sapiens
  misc_RNA (1)...(19): siRNA sense strand
cuacaacccugaagugcuu

SEQ ID NO: 452335 - RNA, 19 nt, Homo sapiens
  misc_RNA (1)...(19): siRNA sense strand
acauguugcuggccaauaa

SEQ ID NO: 452336 - RNA, 19 nt, Homo sapiens
  misc_RNA (1)...(19): siRNA sense strand
agaaacugcugccucauau

SEQ ID NO: 452337 - RNA, 19 nt, Homo sapiens
  misc_RNA (1)...(19): siRNA sense strand
ccaagcagaugcagcagau

SEQ ID NO: 452338 - RNA, 19 nt, Homo sapiens
  misc_RNA (1)...(19): siRNA sense strand
uaagaucauccaacuauug

SEQ ID NO: 452339 - RNA, 19 nt, Homo sapiens
  misc_RNA (1)...(19): siRNA sense strand
uaugggauuuggucucuuu

SEQ ID NO: 452340 - RNA, 19 nt, Homo sapiens
  misc_RNA (1)...(19): siRNA sense strand
gaaugugggcuuuguguuc

SEQ ID NO: 452341 - RNA, 19 nt, Homo sapiens
  misc_RNA (1)...(19): siRNA sense strand
ccaacuacuuccuuaagau

SEQ ID NO: 452342 - RNA, 19 nt, Homo sapiens
  misc_RNA (1)...(19): siRNA sense strand
ggaaggcuguggugcugau

SEQ ID NO: 452343 - RNA, 19 nt, Homo sapiens
  misc_RNA (1)...(19): siRNA sense strand
gauaugggauuuggucucu

SEQ ID NO: 452344 - RNA, 19 nt, Homo sapiens
  misc_RNA (1)...(19): siRNA sense strand
gaggguguccgcaauguug

SEQ ID NO: 452345 - RNA, 19 nt, Homo sapiens
  misc_RNA (1)...(19): siRNA sense strand
cuuaagaucauccaacuau

SEQ ID NO: 452346 - RNA, 19 nt, Homo sapiens
  misc_RNA (1)...(19): siRNA sense strand
ugaagugcuugauaucaca

SEQ ID NO: 452347 - RNA, 19 nt, Homo sapiens
  misc_RNA (1)...(19): siRNA sense strand
ggauuacaccuucccacuu

SEQ ID NO: 452348 - RNA, 19 nt, Homo sapiens
  misc_RNA (1)...(19): siRNA sense strand
cagcagguguucgacaaug

SEQ ID NO: 452349 - RNA, 19 nt, Homo sapiens
  misc_RNA (1)...(19): siRNA sense strand
gacaauggcagcaucuaca

SEQ ID NO: 452350 - RNA, 19 nt, Homo sapiens
  misc_RNA (1)...(19): siRNA sense strand
gcugauccaucugccuuug

SEQ ID NO: 452351 - RNA, 19 nt, Homo sapiens
  misc_RNA (1)...(19): siRNA sense strand
gaugugcagcugaucaaga

SEQ ID NO: 452352 - RNA, 19 nt, Homo sapiens
  misc_RNA (1)...(19): siRNA sense strand
caacuacuuccuuaagauc

SEQ ID NO: 452353 - RNA, 19 nt, Homo sapiens
  misc_RNA (1)...(19): siRNA sense strand
cuucuuggcugauccaucu

SEQ ID NO: 452354 - RNA, 19 nt, Homo sapiens
  misc_RNA (1)...(19): siRNA sense strand
ggaaugugggcuuuguguu

SEQ ID NO: 452355 - RNA, 19 nt, Homo sapiens
  misc_RNA (1)...(19): siRNA sense strand
ugagugaugugcagcugau

SEQ ID NO: 452356 - RNA, 19 nt, Homo sapiens
  misc_RNA (1)...(19): siRNA sense strand
gagggcaccuggaaaacaa

SEQ ID NO: 452357 - RNA, 19 nt, Homo sapiens
  misc_RNA (1)...(19): siRNA sense strand
uccaacuacuuccuuaaga

SEQ ID NO: 452358 - RNA, 19 nt, Homo sapiens
  misc_RNA (1)...(19): siRNA sense strand
acccugaagugcuugauau

SEQ ID NO: 452359 - RNA, 19 nt, Homo sapiens
  misc_RNA (1)...(19): siRNA sense strand
caucaacggguacaaacga

SEQ ID NO: 452360 - RNA, 19 nt, Homo sapiens
  misc_RNA (1)...(19): siRNA sense strand
ugagaucagggacauguug

SEQ ID NO: 452361 - RNA, 19 nt, Homo sapiens
  misc_RNA (1)...(19): siRNA sense strand
gaugauuauccgaaauguu

SEQ ID NO: 452362 - RNA, 19 nt, Homo sapiens
  misc_RNA (1)...(19): siRNA sense strand
ugaacaugcucaacaucuc

SEQ ID NO: 452363 - RNA, 19 nt, Homo sapiens
  misc_RNA (1)...(19): siRNA sense strand
aagccacgcugcugaacau

SEQ ID NO: 452364 - RNA, 19 nt, Homo sapiens
  misc_RNA (1)...(19): siRNA sense strand
gggcaagaacaccaugaug

SEQ ID NO: 452365 - RNA, 19 nt, Homo sapiens
  misc_RNA (1)...(19): siRNA sense strand
gggaaugugggcuuugugu

SEQ ID NO: 452366 - RNA, 19 nt, Homo sapiens
  misc_RNA (1)...(19): siRNA sense strand
ggaggagucggacgaggau

SEQ ID NO: 452367 - RNA, 19 nt, Homo sapiens
  misc_RNA (1)...(19): siRNA sense strand
gaagccacgcugcugaaca

SEQ ID NO: 452368 - RNA, 19 nt, Homo sapiens
  misc_RNA (1)...(19): siRNA sense strand
gcgaagccacgcugcugaa

SEQ ID NO: 452369 - RNA, 19 nt, Homo sapiens
  misc_RNA (1)...(19): siRNA sense strand
uaucaucaacggguacaaa

SEQ ID NO: 452370 - RNA, 19 nt, Homo sapiens
  misc_RNA (1)...(19): siRNA sense strand
caucuacaacccugaagug

SEQ ID NO: 452371 - RNA, 19 nt, Homo sapiens
  misc_RNA (1)...(19): siRNA sense strand
aaugugggcuuuguguuca

SEQ ID NO: 452372 - RNA, 19 nt, Homo sapiens
  misc_RNA (1)...(19): siRNA sense strand
gggauuuggucucuuugac

SEQ ID NO: 452373 - RNA, 19 nt, Homo sapiens
  misc_RNA (1)...(19): siRNA sense strand
ggaggguguccgcaauguu

SEQ ID NO: 452374 - RNA, 19 nt, Homo sapiens
  misc_RNA (1)...(19): siRNA sense strand
ugauccaucugccuuugug

SEQ ID NO: 452375 - RNA, 19 nt, Homo sapiens
  misc_RNA (1)...(19): siRNA sense strand
gaaacugcugccucauauc

SEQ ID NO: 452376 - RNA, 19 nt, Homo sapiens
  misc_RNA (1)...(19): siRNA sense strand
gcuuuguguucaccaagga

SEQ ID NO: 452377 - RNA, 19 nt, Homo sapiens
  misc_RNA (1)...(19): siRNA sense strand
gacauguugcuggccaaua

SEQ ID NO: 452378 - RNA, 19 nt, Homo sapiens
  misc_RNA (1)...(19): siRNA sense strand
cagacaaugugggcuccaa

SEQ ID NO: 452379 - RNA, 19 nt, Homo sapiens
  misc_RNA (1)...(19): siRNA sense strand
caagacuggagacaaagug

SEQ ID NO: 452380 - RNA, 19 nt, Homo sapiens
  misc_RNA (1)...(19): siRNA sense strand
ucacugugccagcccagaa

SEQ ID NO: 452381 - RNA, 19 nt, Homo sapiens
  misc_RNA (1)...(19): siRNA sense strand
auugaaauccugagugaug

SEQ ID NO: 452382 - RNA, 19 nt, Homo sapiens
  misc_RNA (1)...(19): siRNA sense strand
ggagucggacgaggauaug

SEQ ID NO: 452383 - RNA, 19 nt, Homo sapiens
  misc_RNA (1)...(19): siRNA sense strand
uaagguugaagccaaggaa

SEQ ID NO: 452384 - RNA, 19 nt, Homo sapiens
  misc_RNA (1)...(19): siRNA sense strand
caauguugccagugucugu

SEQ ID NO: 452385 - RNA, 19 nt, Homo sapiens
  misc_RNA (1)...(19): siRNA sense strand
gaggaaacucugcauucuc

SEQ ID NO: 452386 - RNA, 19 nt, Homo sapiens
  misc_RNA (1)...(19): siRNA sense strand
ccacgcugcugaacaugcu

SEQ ID NO: 452387 - RNA, 19 nt, Homo sapiens
  misc_RNA (1)...(19): siRNA sense strand
uccagcagguguucgacaa

SEQ ID NO: 452388 - RNA, 19 nt, Homo sapiens
  misc_RNA (1)...(19): siRNA sense strand
ccuggaggguguccgcaau

SEQ ID NO: 452389 - RNA, 19 nt, Homo sapiens
  misc_RNA (1)...(19): siRNA sense strand
gaucaagacuggagacaaa

SEQ ID NO: 452390 - RNA, 19 nt, Homo sapiens
  misc_RNA (1)...(19): siRNA sense strand
gauuacaccuucccacuug

SEQ ID NO: 452391 - RNA, 19 nt, Homo sapiens
  misc_RNA (1)...(19): siRNA sense strand
ggacgaggauaugggauuu

SEQ ID NO: 452392 - RNA, 19 nt, Homo sapiens
  misc_RNA (1)...(19): siRNA sense strand
gagaaacugcugccucaua

SEQ ID NO: 452393 - RNA, 19 nt, Homo sapiens
  misc_RNA (1)...(19): siRNA sense strand
gauuuggucucuuugacua

SEQ ID NO: 452394 - RNA, 19 nt, Homo sapiens
  misc_RNA (1)...(19): siRNA sense strand
ccauugaaauccugaguga

SEQ ID NO: 452395 - RNA, 19 nt, Homo sapiens
  misc_RNA (1)...(19): siRNA sense strand
cuacaacccugaagugcuu

SEQ ID NO: 452396 - RNA, 19 nt, Homo sapiens
  misc_RNA (1)...(19): siRNA sense strand
acauguugcuggccaauaa

SEQ ID NO: 452397 - RNA, 19 nt, Homo sapiens
  misc_RNA (1)...(19): siRNA sense strand
agaaacugcugccucauau

SEQ ID NO: 452398 - RNA, 19 nt, Homo sapiens
  misc_RNA (1)...(19): siRNA sense strand
ccaagcagaugcagcagau

SEQ ID NO: 452399 - RNA, 19 nt, Homo sapiens
  misc_RNA (1)...(19): siRNA sense strand
uaagaucauccaacuauug

SEQ ID NO: 452400 - RNA, 19 nt, Homo sapiens
  misc_RNA (1)...(19): siRNA sense strand
uaugggauuuggucucuuu

SEQ ID NO: 452401 - RNA, 19 nt, Homo sapiens
  misc_RNA (1)...(19): siRNA sense strand
gaaugugggcuuuguguuc

SEQ ID NO: 452402 - RNA, 19 nt, Homo sapiens
  misc_RNA (1)...(19): siRNA sense strand
ccaacuacuuccuuaagau

SEQ ID NO: 452403 - RNA, 19 nt, Homo sapiens
  misc_RNA (1)...(19): siRNA sense strand
ggaaggcuguggugcugau

SEQ ID NO: 452404 - RNA, 19 nt, Homo sapiens
  misc_RNA (1)...(19): siRNA sense strand
gauaugggauuuggucucu

SEQ ID NO: 452405 - RNA, 19 nt, Homo sapiens
  misc_RNA (1)...(19): siRNA sense strand
gaggguguccgcaauguug

SEQ ID NO: 452406 - RNA, 19 nt, Homo sapiens
  misc_RNA (1)...(19): siRNA sense strand
cuuaagaucauccaacuau

SEQ ID NO: 452407 - RNA, 19 nt, Homo sapiens
  misc_RNA (1)...(19): siRNA sense strand
ugaagugcuugauaucaca

SEQ ID NO: 452408 - RNA, 19 nt, Homo sapiens
  misc_RNA (1)...(19): siRNA sense strand
ggauuacaccuucccacuu

SEQ ID NO: 452409 - RNA, 19 nt, Homo sapiens
  misc_RNA (1)...(19): siRNA sense strand
cagcagguguucgacaaug

SEQ ID NO: 452410 - RNA, 19 nt, Homo sapiens
  misc_RNA (1)...(19): siRNA sense strand
gacaauggcagcaucuaca

SEQ ID NO: 452411 - RNA, 19 nt, Homo sapiens
  misc_RNA (1)...(19): siRNA sense strand
gcugauccaucugccuuug

SEQ ID NO: 452412 - RNA, 19 nt, Homo sapiens
  misc_RNA (1)...(19): siRNA sense strand
gaugugcagcugaucaaga

SEQ ID NO: 452413 - RNA, 19 nt, Homo sapiens
  misc_RNA (1)...(19): siRNA sense strand
caacuacuuccuuaagauc

SEQ ID NO: 452414 - RNA, 19 nt, Homo sapiens
  misc_RNA (1)...(19): siRNA sense strand
cuucuuggcugauccaucu

SEQ ID NO: 452415 - RNA, 19 nt, Homo sapiens
  misc_RNA (1)...(19): siRNA sense strand
ggaaugugggcuuuguguu

SEQ ID NO: 452416 - RNA, 19 nt, Homo sapiens
  misc_RNA (1)...(19): siRNA sense strand
ugagugaugugcagcugau

SEQ ID NO: 452417 - RNA, 19 nt, Homo sapiens
  misc_RNA (1)...(19): siRNA sense strand
gagggcaccuggaaaacaa

SEQ ID NO: 452418 - RNA, 19 nt, Homo sapiens
  misc_RNA (1)...(19): siRNA sense strand
uccaacuacuuccuuaaga

SEQ ID NO: 452419 - RNA, 19 nt, Homo sapiens
  misc_RNA (1)...(19): siRNA sense strand
acccugaagugcuugauau

SEQ ID NO: 452420 - RNA, 19 nt, Homo sapiens
  misc_RNA (1)...(19): siRNA sense strand
caucaacggguacaaacga

SEQ ID NO: 452421 - RNA, 19 nt, Homo sapiens
  misc_RNA (1)...(19): siRNA sense strand
ugagaucagggacauguug

SEQ ID NO: 452422 - RNA, 19 nt, Homo sapiens
  misc_RNA (1)...(19): siRNA sense strand
gaugauuauccgaaauguu

SEQ ID NO: 452423 - RNA, 19 nt, Homo sapiens
  misc_RNA (1)...(19): siRNA sense strand
ugaacaugcucaacaucuc

SEQ ID NO: 452424 - RNA, 19 nt, Homo sapiens
  misc_RNA (1)...(19): siRNA sense strand
aagccacgcugcugaacau

SEQ ID NO: 452425 - RNA, 19 nt, Homo sapiens
  misc_RNA (1)...(19): siRNA sense strand
gggcaagaacaccaugaug

SEQ ID NO: 452426 - RNA, 19 nt, Homo sapiens
  misc_RNA (1)...(19): siRNA sense strand
gggaaugugggcuuugugu

SEQ ID NO: 452427 - RNA, 19 nt, Homo sapiens
  misc_RNA (1)...(19): siRNA sense strand
ggaggagucggacgaggau

SEQ ID NO: 452428 - RNA, 19 nt, Homo sapiens
  misc_RNA (1)...(19): siRNA sense strand
gaagccacgcugcugaaca

SEQ ID NO: 452429 - RNA, 19 nt, Homo sapiens
  misc_RNA (1)...(19): siRNA sense strand
gcgaagccacgcugcugaa

SEQ ID NO: 452430 - RNA, 19 nt, Homo sapiens
  misc_RNA (1)...(19): siRNA sense strand
uaucaucaacggguacaaa

SEQ ID NO: 452431 - RNA, 19 nt, Homo sapiens
  misc_RNA (1)...(19): siRNA sense strand
caucuacaacccugaagug

SEQ ID NO: 452432 - RNA, 19 nt, Homo sapiens
  misc_RNA (1)...(19): siRNA sense strand
aaugugggcuuuguguuca

SEQ ID NO: 452433 - RNA, 19 nt, Homo sapiens
  misc_RNA (1)...(19): siRNA sense strand
gggauuuggucucuuugac

SEQ ID NO: 452434 - RNA, 19 nt, Homo sapiens
  misc_RNA (1)...(19): siRNA sense strand
ggaggguguccgcaauguu

SEQ ID NO: 452435 - RNA, 19 nt, Homo sapiens
  misc_RNA (1)...(19): siRNA sense strand
ugauccaucugccuuugug

SEQ ID NO: 452436 - RNA, 19 nt, Homo sapiens
  misc_RNA (1)...(19): siRNA sense strand
gaaacugcugccucauauc

SEQ ID NO: 452437 - RNA, 19 nt, Homo sapiens
  misc_RNA (1)...(19): siRNA sense strand
gcuuuguguucaccaagga

SEQ ID NO: 452438 - RNA, 19 nt, Homo sapiens
  misc_RNA (1)...(19): siRNA sense strand
gacauguugcuggccaaua

SEQ ID NO: 452439 - RNA, 19 nt, Homo sapiens
  misc_RNA (1)...(19): siRNA sense strand
cagacaaugugggcuccaa

SEQ ID NO: 452440 - RNA, 19 nt, Homo sapiens
  misc_RNA (1)...(19): siRNA sense strand
caagacuggagacaaagug

SEQ ID NO: 452441 - RNA, 19 nt, Homo sapiens
  misc_RNA (1)...(19): siRNA sense strand
ucacugugccagcccagaa

SEQ ID NO: 452442 - RNA, 19 nt, Homo sapiens
  misc_RNA (1)...(19): siRNA sense strand
auugaaauccugagugaug

SEQ ID NO: 452443 - RNA, 19 nt, Homo sapiens
  misc_RNA (1)...(19): siRNA sense strand
ggagucggacgaggauaug

SEQ ID NO: 452444 - RNA, 19 nt, Homo sapiens
  misc_RNA (1)...(19): siRNA sense strand
uaagguugaagccaaggaa

SEQ ID NO: 452445 - RNA, 19 nt, Homo sapiens
  misc_RNA (1)...(19): siRNA sense strand
caauguugccagugucugu

SEQ ID NO: 452446 - RNA, 19 nt, Homo sapiens
  misc_RNA (1)...(19): siRNA sense strand
gaggaaacucugcauucuc

SEQ ID NO: 452447 - RNA, 19 nt, Homo sapiens
  misc_RNA (1)...(19): siRNA sense strand
ccacgcugcugaacaugcu

SEQ ID NO: 452448 - RNA, 19 nt, Homo sapiens
  misc_RNA (1)...(19): siRNA sense strand
uccagcagguguucgacaa

SEQ ID NO: 452449 - RNA, 19 nt, Homo sapiens
  misc_RNA (1)...(19): siRNA sense strand
ccuggaggguguccgcaau

SEQ ID NO: 452450 - RNA, 19 nt, Homo sapiens
  misc_RNA (1)...(19): siRNA sense strand
gaucaagacuggagacaaa

SEQ ID NO: 452451 - RNA, 19 nt, Homo sapiens
  misc_RNA (1)...(19): siRNA sense strand
gauuacaccuucccacuug

SEQ ID NO: 452452 - RNA, 19 nt, Homo sapiens
  misc_RNA (1)...(19): siRNA sense strand
ggacgaggauaugggauuu

SEQ ID NO: 452453 - RNA, 19 nt, Homo sapiens
  misc_RNA (1)...(19): siRNA sense strand
gagaaacugcugccucaua

SEQ ID NO: 452454 - RNA, 19 nt, Homo sapiens
  misc_RNA (1)...(19): siRNA sense strand
gauuuggucucuuugacua

SEQ ID NO: 452455 - RNA, 19 nt, Homo sapiens
  misc_RNA (1)...(19): siRNA sense strand
ccauugaaauccugaguga

SEQ ID NO: 452456 - RNA, 19 nt, Homo sapiens
  misc_RNA (1)...(19): siRNA sense strand
cuacaacccugaagugcuu

SEQ ID NO: 452457 - RNA, 19 nt, Homo sapiens
  misc_RNA (1)...(19): siRNA sense strand
acauguugcuggccaauaa

SEQ ID NO: 452458 - RNA, 19 nt, Homo sapiens
  misc_RNA (1)...(19): siRNA sense strand
agaaacugcugccucauau

SEQ ID NO: 452459 - RNA, 19 nt, Homo sapiens
  misc_RNA (1)...(19): siRNA sense strand
ccaagcagaugcagcagau

SEQ ID NO: 452460 - RNA, 19 nt, Homo sapiens
  misc_RNA (1)...(19): siRNA sense strand
uaagaucauccaacuauug

SEQ ID NO: 452461 - RNA, 19 nt, Homo sapiens
  misc_RNA (1)...(19): siRNA sense strand
uaugggauuuggucucuuu

SEQ ID NO: 452462 - RNA, 19 nt, Homo sapiens
  misc_RNA (1)...(19): siRNA sense strand
gaaugugggcuuuguguuc

SEQ ID NO: 452463 - RNA, 19 nt, Homo sapiens
  misc_RNA (1)...(19): siRNA sense strand
ccaacuacuuccuuaagau

SEQ ID NO: 452464 - RNA, 19 nt, Homo sapiens
  misc_RNA (1)...(19): siRNA sense strand
ggaaggcuguggugcugau

SEQ ID NO: 452465 - RNA, 19 nt, Homo sapiens
  misc_RNA (1)...(19): siRNA sense strand
gauaugggauuuggucucu

SEQ ID NO: 452466 - RNA, 19 nt, Homo sapiens
  misc_RNA (1)...(19): siRNA sense strand
gaggguguccgcaauguug

SEQ ID NO: 452467 - RNA, 19 nt, Homo sapiens
  misc_RNA (1)...(19): siRNA sense strand
cuuaagaucauccaacuau

SEQ ID NO: 452468 - RNA, 19 nt, Homo sapiens
  misc_RNA (1)...(19): siRNA sense strand
ugaagugcuugauaucaca

SEQ ID NO: 452469 - RNA, 19 nt, Homo sapiens
  misc_RNA (1)...(19): siRNA sense strand
ggauuacaccuucccacuu

SEQ ID NO: 452470 - RNA, 19 nt, Homo sapiens
  misc_RNA (1)...(19): siRNA sense strand
cagcagguguucgacaaug

SEQ ID NO: 452471 - RNA, 19 nt, Homo sapiens
  misc_RNA (1)...(19): siRNA sense strand
gacaauggcagcaucuaca

SEQ ID NO: 452472 - RNA, 19 nt, Homo sapiens
  misc_RNA (1)...(19): siRNA sense strand
gcugauccaucugccuuug

SEQ ID NO: 452473 - RNA, 19 nt, Homo sapiens
  misc_RNA (1)...(19): siRNA sense strand
gaugugcagcugaucaaga

SEQ ID NO: 452474 - RNA, 19 nt, Homo sapiens
  misc_RNA (1)...(19): siRNA sense strand
caacuacuuccuuaagauc

SEQ ID NO: 452475 - RNA, 19 nt, Homo sapiens
  misc_RNA (1)...(19): siRNA sense strand
cuucuuggcugauccaucu

SEQ ID NO: 452476 - RNA, 19 nt, Homo sapiens
  misc_RNA (1)...(19): siRNA sense strand
ggaaugugggcuuuguguu

SEQ ID NO: 452477 - RNA, 19 nt, Homo sapiens
  misc_RNA (1)...(19): siRNA sense strand
ugagugaugugcagcugau

SEQ ID NO: 452478 - RNA, 19 nt, Homo sapiens
  misc_RNA (1)...(19): siRNA sense strand
gagggcaccuggaaaacaa

SEQ ID NO: 452479 - RNA, 19 nt, Homo sapiens
  misc_RNA (1)...(19): siRNA sense strand
uccaacuacuuccuuaaga

SEQ ID NO: 452480 - RNA, 19 nt, Homo sapiens
  misc_RNA (1)...(19): siRNA sense strand
acccugaagugcuugauau

SEQ ID NO: 452481 - RNA, 19 nt, Homo sapiens
  misc_RNA (1)...(19): siRNA sense strand
caucaacggguacaaacga

SEQ ID NO: 452482 - RNA, 19 nt, Homo sapiens
  misc_RNA (1)...(19): siRNA sense strand
ugagaucagggacauguug

SEQ ID NO: 452483 - RNA, 19 nt, Homo sapiens
  misc_RNA (1)...(19): siRNA sense strand
gaugauuauccgaaauguu

SEQ ID NO: 452484 - RNA, 19 nt, Homo sapiens
  misc_RNA (1)...(19): siRNA sense strand
ugaacaugcucaacaucuc

SEQ ID NO: 452485 - RNA, 19 nt, Homo sapiens
  misc_RNA (1)...(19): siRNA sense strand
aagccacgcugcugaacau

SEQ ID NO: 452486 - RNA, 19 nt, Homo sapiens
  misc_RNA (1)...(19): siRNA sense strand
gggcaagaacaccaugaug

SEQ ID NO: 452487 - RNA, 19 nt, Homo sapiens
  misc_RNA (1)...(19): siRNA sense strand
gggaaugugggcuuugugu

SEQ ID NO: 452488 - RNA, 19 nt, Homo sapiens
  misc_RNA (1)...(19): siRNA sense strand
ggaggagucggacgaggau

SEQ ID NO: 452489 - RNA, 19 nt, Homo sapiens
  misc_RNA (1)...(19): siRNA sense strand
gaagccacgcugcugaaca

SEQ ID NO: 452490 - RNA, 19 nt, Homo sapiens
  misc_RNA (1)...(19): siRNA sense strand
gcgaagccacgcugcugaa

SEQ ID NO: 452491 - RNA, 19 nt, Homo sapiens
  misc_RNA (1)...(19): siRNA sense strand
uaucaucaacggguacaaa

SEQ ID NO: 452492 - RNA, 19 nt, Homo sapiens
  misc_RNA (1)...(19): siRNA sense strand
caucuacaacccugaagug

SEQ ID NO: 452493 - RNA, 19 nt, Homo sapiens
  misc_RNA (1)...(19): siRNA sense strand
aaugugggcuuuguguuca

SEQ ID NO: 452494 - RNA, 19 nt, Homo sapiens
  misc_RNA (1)...(19): siRNA sense strand
gggauuuggucucuuugac

SEQ ID NO: 452495 - RNA, 19 nt, Homo sapiens
  misc_RNA (1)...(19): siRNA sense strand
ggaggguguccgcaauguu

SEQ ID NO: 452496 - RNA, 19 nt, Homo sapiens
  misc_RNA (1)...(19): siRNA sense strand
ugauccaucugccuuugug

SEQ ID NO: 452497 - RNA, 19 nt, Homo sapiens
  misc_RNA (1)...(19): siRNA sense strand
gaaacugcugccucauauc

SEQ ID NO: 452498 - RNA, 19 nt, Homo sapiens
  misc_RNA (1)...(19): siRNA sense strand
gcuuuguguucaccaagga

SEQ ID NO: 452499 - RNA, 19 nt, Homo sapiens
  misc_RNA (1)...(19): siRNA sense strand
gacauguugcuggccaaua

SEQ ID NO: 452500 - RNA, 19 nt, Homo sapiens
  misc_RNA (1)...(19): siRNA sense strand
cagacaaugugggcuccaa

SEQ ID NO: 452501 - RNA, 19 nt, Homo sapiens
  misc_RNA (1)...(19): siRNA sense strand
caagacuggagacaaagug

SEQ ID NO: 452502 - RNA, 19 nt, Homo sapiens
  misc_RNA (1)...(19): siRNA sense strand
ucacugugccagcccagaa

SEQ ID NO: 452503 - RNA, 19 nt, Homo sapiens
  misc_RNA (1)...(19): siRNA sense strand
auugaaauccugagugaug

SEQ ID NO: 452504 - RNA, 19 nt, Homo sapiens
  misc_RNA (1)...(19): siRNA sense strand
ggagucggacgaggauaug

SEQ ID NO: 452505 - RNA, 19 nt, Homo sapiens
  misc_RNA (1)...(19): siRNA sense strand
uaagguugaagccaaggaa

SEQ ID NO: 452506 - RNA, 19 nt, Homo sapiens
  misc_RNA (1)...(19): siRNA sense strand
caauguugccagugucugu

SEQ ID NO: 452507 - RNA, 19 nt, Homo sapiens
  misc_RNA (1)...(19): siRNA sense strand
gaggaaacucugcauucuc

SEQ ID NO: 452508 - RNA, 19 nt, Homo sapiens
  misc_RNA (1)...(19): siRNA sense strand
ccacgcugcugaacaugcu

SEQ ID NO: 452509 - RNA, 19 nt, Homo sapiens
  misc_RNA (1)...(19): siRNA sense strand
uccagcagguguucgacaa

SEQ ID NO: 452510 - RNA, 19 nt, Homo sapiens
  misc_RNA (1)...(19): siRNA sense strand
ccuggaggguguccgcaau

SEQ ID NO: 452511 - RNA, 19 nt, Homo sapiens
  misc_RNA (1)...(19): siRNA sense strand
gaucaagacuggagacaaa

SEQ ID NO: 452512 - RNA, 19 nt, Homo sapiens
  misc_RNA (1)...(19): siRNA sense strand
gauuacaccuucccacuug

SEQ ID NO: 452513 - RNA, 19 nt, Homo sapiens
  misc_RNA (1)...(19): siRNA sense strand
ggacgaggauaugggauuu

SEQ ID NO: 452514 - RNA, 19 nt, Homo sapiens
  misc_RNA (1)...(19): siRNA sense strand
gagaaacugcugccucaua

SEQ ID NO: 452515 - RNA, 19 nt, Homo sapiens
  misc_RNA (1)...(19): siRNA sense strand
gauuuggucucuuugacua

SEQ ID NO: 452516 - RNA, 19 nt, Homo sapiens
  misc_RNA (1)...(19): siRNA sense strand
ccauugaaauccugaguga

SEQ ID NO: 452517 - RNA, 19 nt, Homo sapiens
  misc_RNA (1)...(19): siRNA sense strand
cuacaacccugaagugcuu

SEQ ID NO: 452518 - RNA, 19 nt, Homo sapiens
  misc_RNA (1)...(19): siRNA sense strand
acauguugcuggccaauaa

SEQ ID NO: 452519 - RNA, 19 nt, Homo sapiens
  misc_RNA (1)...(19): siRNA sense strand
agaaacugcugccucauau

SEQ ID NO: 452520 - RNA, 19 nt, Homo sapiens
  misc_RNA (1)...(19): siRNA sense strand
ccaagcagaugcagcagau

SEQ ID NO: 452521 - RNA, 19 nt, Homo sapiens
  misc_RNA (1)...(19): siRNA sense strand
uaagaucauccaacuauug

SEQ ID NO: 452522 - RNA, 19 nt, Homo sapiens
  misc_RNA (1)...(19): siRNA sense strand
uaugggauuuggucucuuu

SEQ ID NO: 452523 - RNA, 19 nt, Homo sapiens
  misc_RNA (1)...(19): siRNA sense strand
gaaugugggcuuuguguuc

SEQ ID NO: 452524 - RNA, 19 nt, Homo sapiens
  misc_RNA (1)...(19): siRNA sense strand
ccaacuacuuccuuaagau

SEQ ID NO: 452525 - RNA, 19 nt, Homo sapiens
  misc_RNA (1)...(19): siRNA sense strand
ggaaggcuguggugcugau

SEQ ID NO: 452526 - RNA, 19 nt, Homo sapiens
  misc_RNA (1)...(19): siRNA sense strand
gauaugggauuuggucucu

SEQ ID NO: 452527 - RNA, 19 nt, Homo sapiens
  misc_RNA (1)...(19): siRNA sense strand
gaggguguccgcaauguug

SEQ ID NO: 452528 - RNA, 19 nt, Homo sapiens
  misc_RNA (1)...(19): siRNA sense strand
cuuaagaucauccaacuau

SEQ ID NO: 452529 - RNA, 19 nt, Homo sapiens
  misc_RNA (1)...(19): siRNA sense strand
ugaagugcuugauaucaca

SEQ ID NO: 452530 - RNA, 19 nt, Homo sapiens
  misc_RNA (1)...(19): siRNA sense strand
ggauuacaccuucccacuu

SEQ ID NO: 452531 - RNA, 19 nt, Homo sapiens
  misc_RNA (1)...(19): siRNA sense strand
cagcagguguucgacaaug

SEQ ID NO: 452532 - RNA, 19 nt, Homo sapiens
  misc_RNA (1)...(19): siRNA sense strand
gacaauggcagcaucuaca

SEQ ID NO: 452533 - RNA, 19 nt, Homo sapiens
  misc_RNA (1)...(19): siRNA sense strand
gcugauccaucugccuuug

SEQ ID NO: 452534 - RNA, 19 nt, Homo sapiens
  misc_RNA (1)...(19): siRNA sense strand
gaugugcagcugaucaaga

SEQ ID NO: 452535 - RNA, 19 nt, Homo sapiens
  misc_RNA (1)...(19): siRNA sense strand
caacuacuuccuuaagauc

SEQ ID NO: 452536 - RNA, 19 nt, Homo sapiens
  misc_RNA (1)...(19): siRNA sense strand
cuucuuggcugauccaucu

SEQ ID NO: 452537 - RNA, 19 nt, Homo sapiens
  misc_RNA (1)...(19): siRNA sense strand
ggaaugugggcuuuguguu

SEQ ID NO: 452538 - RNA, 19 nt, Homo sapiens
  misc_RNA (1)...(19): siRNA sense strand
ugagugaugugcagcugau

SEQ ID NO: 452539 - RNA, 19 nt, Homo sapiens
  misc_RNA (1)...(19): siRNA sense strand
gagggcaccuggaaaacaa

SEQ ID NO: 452540 - RNA, 19 nt, Homo sapiens
  misc_RNA (1)...(19): siRNA sense strand
uccaacuacuuccuuaaga

SEQ ID NO: 452541 - RNA, 19 nt, Homo sapiens
  misc_RNA (1)...(19): siRNA sense strand
acccugaagugcuugauau

SEQ ID NO: 452542 - RNA, 19 nt, Homo sapiens
  misc_RNA (1)...(19): siRNA sense strand
caucaacggguacaaacga

SEQ ID NO: 452543 - RNA, 19 nt, Homo sapiens
  misc_RNA (1)...(19): siRNA sense strand
ugagaucagggacauguug

SEQ ID NO: 452544 - RNA, 19 nt, Homo sapiens
  misc_RNA (1)...(19): siRNA sense strand
gaugauuauccgaaauguu

SEQ ID NO: 452545 - RNA, 19 nt, Homo sapiens
  misc_RNA (1)...(19): siRNA sense strand
ugaacaugcucaacaucuc

SEQ ID NO: 452546 - RNA, 19 nt, Homo sapiens
  misc_RNA (1)...(19): siRNA sense strand
aagccacgcugcugaacau

SEQ ID NO: 452547 - RNA, 19 nt, Homo sapiens
  misc_RNA (1)...(19): siRNA sense strand
gggcaagaacaccaugaug

SEQ ID NO: 452548 - RNA, 19 nt, Homo sapiens
  misc_RNA (1)...(19): siRNA sense strand
gggaaugugggcuuugugu

SEQ ID NO: 452549 - RNA, 19 nt, Homo sapiens
  misc_RNA (1)...(19): siRNA sense strand
ggaggagucggacgaggau

SEQ ID NO: 452550 - RNA, 19 nt, Homo sapiens
  misc_RNA (1)...(19): siRNA sense strand
gaagccacgcugcugaaca

SEQ ID NO: 452551 - RNA, 19 nt, Homo sapiens
  misc_RNA (1)...(19): siRNA sense strand
gcgaagccacgcugcugaa

SEQ ID NO: 452552 - RNA, 19 nt, Homo sapiens
  misc_RNA (1)...(19): siRNA sense strand
uaucaucaacggguacaaa

SEQ ID NO: 452553 - RNA, 19 nt, Homo sapiens
  misc_RNA (1)...(19): siRNA sense strand
caucuacaacccugaagug

SEQ ID NO: 452554 - RNA, 19 nt, Homo sapiens
  misc_RNA (1)...(19): siRNA sense strand
aaugugggcuuuguguuca

SEQ ID NO: 452555 - RNA, 19 nt, Homo sapiens
  misc_RNA (1)...(19): siRNA sense strand
gggauuuggucucuuugac

SEQ ID NO: 452556 - RNA, 19 nt, Homo sapiens
  misc_RNA (1)...(19): siRNA sense strand
ggaggguguccgcaauguu

SEQ ID NO: 452557 - RNA, 19 nt, Homo sapiens
  misc_RNA (1)...(19): siRNA sense strand
ugauccaucugccuuugug

SEQ ID NO: 452558 - RNA, 19 nt, Homo sapiens
  misc_RNA (1)...(19): siRNA sense strand
gaaacugcugccucauauc

SEQ ID NO: 452559 - RNA, 19 nt, Homo sapiens
  misc_RNA (1)...(19): siRNA sense strand
gcuuuguguucaccaagga

SEQ ID NO: 452560 - RNA, 19 nt, Homo sapiens
  misc_RNA (1)...(19): siRNA sense strand
gacauguugcuggccaaua

SEQ ID NO: 452561 - RNA, 19 nt, Homo sapiens
  misc_RNA (1)...(19): siRNA sense strand
cagacaaugugggcuccaa

SEQ ID NO: 452562 - RNA, 19 nt, Homo sapiens
  misc_RNA (1)...(19): siRNA sense strand
caagacuggagacaaagug

SEQ ID NO: 452563 - RNA, 19 nt, Homo sapiens
  misc_RNA (1)...(19): siRNA sense strand
ucacugugccagcccagaa

SEQ ID NO: 452564 - RNA, 19 nt, Homo sapiens
  misc_RNA (1)...(19): siRNA sense strand
auugaaauccugagugaug

SEQ ID NO: 452565 - RNA, 19 nt, Homo sapiens
  misc_RNA (1)...(19): siRNA sense strand
ggagucggacgaggauaug

SEQ ID NO: 452566 - RNA, 19 nt, Homo sapiens
  misc_RNA (1)...(19): siRNA sense strand
uaagguugaagccaaggaa

SEQ ID NO: 452567 - RNA, 19 nt, Homo sapiens
  misc_RNA (1)...(19): siRNA sense strand
caauguugccagugucugu

SEQ ID NO: 452568 - RNA, 19 nt, Homo sapiens
  misc_RNA (1)...(19): siRNA sense strand
gaggaaacucugcauucuc

SEQ ID NO: 452569 - RNA, 19 nt, Homo sapiens
  misc_RNA (1)...(19): siRNA sense strand
ccacgcugcugaacaugcu

SEQ ID NO: 452570 - RNA, 19 nt, Homo sapiens
  misc_RNA (1)...(19): siRNA sense strand
uccagcagguguucgacaa

SEQ ID NO: 452571 - RNA, 19 nt, Homo sapiens
  misc_RNA (1)...(19): siRNA sense strand
ccuggaggguguccgcaau

SEQ ID NO: 452572 - RNA, 19 nt, Homo sapiens
  misc_RNA (1)...(19): siRNA sense strand
gcaaugaccugauggagua

SEQ ID NO: 452573 - RNA, 19 nt, Homo sapiens
  misc_RNA (1)...(19): siRNA sense strand
ggaaugaagucccgaggua

SEQ ID NO: 452574 - RNA, 19 nt, Homo sapiens
  misc_RNA (1)...(19): siRNA sense strand
gagaaccgcuucauuggaa

SEQ ID NO: 452575 - RNA, 19 nt, Homo sapiens
  misc_RNA (1)...(19): siRNA sense strand
caaggucacugccaaauag

SEQ ID NO: 452576 - RNA, 19 nt, Homo sapiens
  misc_RNA (1)...(19): siRNA sense strand
gcaaggucacugccaaaua

SEQ ID NO: 452577 - RNA, 19 nt, Homo sapiens
  misc_RNA (1)...(19): siRNA sense strand
gaggaugccugaauucuac

SEQ ID NO: 452578 - RNA, 19 nt, Homo sapiens
  misc_RNA (1)...(19): siRNA sense strand
ccuuggagcucuucaugua

SEQ ID NO: 452579 - RNA, 19 nt, Homo sapiens
  misc_RNA (1)...(19): siRNA sense strand
guauugacaucguggagaa

SEQ ID NO: 452580 - RNA, 19 nt, Homo sapiens
  misc_RNA (1)...(19): siRNA sense strand
ggaggaugccugaauucua

SEQ ID NO: 452581 - RNA, 19 nt, Homo sapiens
  misc_RNA (1)...(19): siRNA sense strand
gaacgugcagggugauuau

SEQ ID NO: 452582 - RNA, 19 nt, Homo sapiens
  misc_RNA (1)...(19): siRNA sense strand
gaagaaggcacugaagcuu

SEQ ID NO: 452583 - RNA, 19 nt, Homo sapiens
  misc_RNA (1)...(19): siRNA sense strand
cagcaggcaccauccuuua

SEQ ID NO: 452584 - RNA, 19 nt, Homo sapiens
  misc_RNA (1)...(19): siRNA sense strand
cagcaaaggcuccgugguu

SEQ ID NO: 452585 - RNA, 19 nt, Homo sapiens
  misc_RNA (1)...(19): siRNA sense strand
guggagaaccgcuucauug

SEQ ID NO: 452586 - RNA, 19 nt, Homo sapiens
  misc_RNA (1)...(19): siRNA sense strand
ccaggucucuacacgaaga

SEQ ID NO: 452587 - RNA, 19 nt, Homo sapiens
  misc_RNA (1)...(19): siRNA sense strand
uugcugagcugguguauac

SEQ ID NO: 452588 - RNA, 19 nt, Homo sapiens
  misc_RNA (1)...(19): siRNA sense strand
cacugucucucuacaauga

SEQ ID NO: 452589 - RNA, 19 nt, Homo sapiens
  misc_RNA (1)...(19): siRNA sense strand
ucauguaccugaacgaagu

SEQ ID NO: 452590 - RNA, 19 nt, Homo sapiens
  misc_RNA (1)...(19): siRNA sense strand
gaacgaucagguccgguuu

SEQ ID NO: 452591 - RNA, 19 nt, Homo sapiens
  misc_RNA (1)...(19): siRNA sense strand
ggagaaccgcuucauugga

SEQ ID NO: 452592 - RNA, 19 nt, Homo sapiens
  misc_RNA (1)...(19): siRNA sense strand
ccuggaggaugccugaauu

SEQ ID NO: 452593 - RNA, 19 nt, Homo sapiens
  misc_RNA (1)...(19): siRNA sense strand
gagaaccucaugcacauca

SEQ ID NO: 452594 - RNA, 19 nt, Homo sapiens
  misc_RNA (1)...(19): siRNA sense strand
ggaagaaggcacugaagcu

SEQ ID NO: 452595 - RNA, 19 nt, Homo sapiens
  misc_RNA (1)...(19): siRNA sense strand
gggaguuuguggaggaguu

SEQ ID NO: 452596 - RNA, 19 nt, Homo sapiens
  misc_RNA (1)...(19): siRNA sense strand
gagcaaggucacugccaaa

SEQ ID NO: 452597 - RNA, 19 nt, Homo sapiens
  misc_RNA (1)...(19): siRNA sense strand
caacauuggccagaaggaa

SEQ ID NO: 452598 - RNA, 19 nt, Homo sapiens
  misc_RNA (1)...(19): siRNA sense strand
gcagguguccguccucaag

SEQ ID NO: 452599 - RNA, 19 nt, Homo sapiens
  misc_RNA (1)...(19): siRNA sense strand
gaggagcuggugagcauga

SEQ ID NO: 452600 - RNA, 19 nt, Homo sapiens
  misc_RNA (1)...(19): siRNA sense strand
gaaugaagucccgagguau

SEQ ID NO: 452601 - RNA, 19 nt, Homo sapiens
  misc_RNA (1)...(19): siRNA sense strand
gauuaugagccaacugaug

SEQ ID NO: 452602 - RNA, 19 nt, Homo sapiens
  misc_RNA (1)...(19): siRNA sense strand
gugauuaugagccaacuga

SEQ ID NO: 452603 - RNA, 19 nt, Homo sapiens
  misc_RNA (1)...(19): siRNA sense strand
ugaaggaacaaggcuauga

SEQ ID NO: 452604 - RNA, 19 nt, Homo sapiens
  misc_RNA (1)...(19): siRNA sense strand
cuccaggucucuacacgaa

SEQ ID NO: 452605 - RNA, 19 nt, Homo sapiens
  misc_RNA (1)...(19): siRNA sense strand
ccaccggguucaucaacau

SEQ ID NO: 452606 - RNA, 19 nt, Homo sapiens
  misc_RNA (1)...(19): siRNA sense strand
gcugaaggaacaaggcuau

SEQ ID NO: 452607 - RNA, 19 nt, Homo sapiens
  misc_RNA (1)...(19): siRNA sense strand
ggagcgaguggaagggaaa

SEQ ID NO: 452608 - RNA, 19 nt, Homo sapiens
  misc_RNA (1)...(19): siRNA sense strand
ccagcaggcaccauccuuu

SEQ ID NO: 452609 - RNA, 19 nt, Homo sapiens
  misc_RNA (1)...(19): siRNA sense strand
ccaggaagaaggcacugaa

SEQ ID NO: 452610 - RNA, 19 nt, Homo sapiens
  misc_RNA (1)...(19): siRNA sense strand
gaaggaacaaggcuaugac

SEQ ID NO: 452611 - RNA, 19 nt, Homo sapiens
  misc_RNA (1)...(19): siRNA sense strand
ugaacgugcagggugauua

SEQ ID NO: 452612 - RNA, 19 nt, Homo sapiens
  misc_RNA (1)...(19): siRNA sense strand
gauggaguacgcaaagcaa

SEQ ID NO: 452613 - RNA, 19 nt, Homo sapiens
  misc_RNA (1)...(19): siRNA sense strand
cguggagcauggaugagaa

SEQ ID NO: 452614 - RNA, 19 nt, Homo sapiens
  misc_RNA (1)...(19): siRNA sense strand
ugacgucauugccuaucug

SEQ ID NO: 452615 - RNA, 19 nt, Homo sapiens
  misc_RNA (1)...(19): siRNA sense strand
gcaaaggcuccgugguucu

SEQ ID NO: 452616 - RNA, 19 nt, Homo sapiens
  misc_RNA (1)...(19): siRNA sense strand
cccacugucucucuacaau

SEQ ID NO: 452617 - RNA, 19 nt, Homo sapiens
  misc_RNA (1)...(19): siRNA sense strand
acgaucagguccgguuuga

SEQ ID NO: 452618 - RNA, 19 nt, Homo sapiens
  misc_RNA (1)...(19): siRNA sense strand
augaggagcuggugagcau

SEQ ID NO: 452619 - RNA, 19 nt, Homo sapiens
  misc_RNA (1)...(19): siRNA sense strand
aggcuggaauccuggagaa

SEQ ID NO: 452620 - RNA, 19 nt, Homo sapiens
  misc_RNA (1)...(19): siRNA sense strand
gacccaggacccagccaaa

SEQ ID NO: 452621 - RNA, 19 nt, Homo sapiens
  misc_RNA (1)...(19): siRNA sense strand
caaaggcuccgugguucug

SEQ ID NO: 452622 - RNA, 19 nt, Homo sapiens
  misc_RNA (1)...(19): siRNA sense strand
gcccugagugugaauuugu

SEQ ID NO: 452623 - RNA, 19 nt, Homo sapiens
  misc_RNA (1)...(19): siRNA sense strand
ggaagugcgcaaaaucaaa

SEQ ID NO: 452624 - RNA, 19 nt, Homo sapiens
  misc_RNA (1)...(19): siRNA sense strand
ucguguggcugaaggaaca

SEQ ID NO: 452625 - RNA, 19 nt, Homo sapiens
  misc_RNA (1)...(19): siRNA sense strand
ccaagaacccguggagcau

SEQ ID NO: 452626 - RNA, 19 nt, Homo sapiens
  misc_RNA (1)...(19): siRNA sense strand
uugccuaucuggccaacau

SEQ ID NO: 452627 - RNA, 19 nt, Homo sapiens
  misc_RNA (1)...(19): siRNA sense strand
ggguucaucaacaucaauu

SEQ ID NO: 452628 - RNA, 19 nt, Homo sapiens
  misc_RNA (1)...(19): siRNA sense strand
ggaccgggaagugcgcaaa

SEQ ID NO: 452629 - RNA, 19 nt, Homo sapiens
  misc_RNA (1)...(19): siRNA sense strand
gaagucccgagguaucuac

SEQ ID NO: 452630 - RNA, 19 nt, Homo sapiens
  misc_RNA (1)...(19): siRNA sense strand
gcaaugaccugauggagua

SEQ ID NO: 452631 - RNA, 19 nt, Homo sapiens
  misc_RNA (1)...(19): siRNA sense strand
ggaaugaagucccgaggua

SEQ ID NO: 452632 - RNA, 19 nt, Homo sapiens
  misc_RNA (1)...(19): siRNA sense strand
gagaaccgcuucauuggaa

SEQ ID NO: 452633 - RNA, 19 nt, Homo sapiens
  misc_RNA (1)...(19): siRNA sense strand
caaggucacugccaaauag

SEQ ID NO: 452634 - RNA, 19 nt, Homo sapiens
  misc_RNA (1)...(19): siRNA sense strand
gcaaggucacugccaaaua

SEQ ID NO: 452635 - RNA, 19 nt, Homo sapiens
  misc_RNA (1)...(19): siRNA sense strand
gaggaugccugaauucuac

SEQ ID NO: 452636 - RNA, 19 nt, Homo sapiens
  misc_RNA (1)...(19): siRNA sense strand
ccuuggagcucuucaugua

SEQ ID NO: 452637 - RNA, 19 nt, Homo sapiens
  misc_RNA (1)...(19): siRNA sense strand
guauugacaucguggagaa

SEQ ID NO: 452638 - RNA, 19 nt, Homo sapiens
  misc_RNA (1)...(19): siRNA sense strand
ggaggaugccugaauucua

SEQ ID NO: 452639 - RNA, 19 nt, Homo sapiens
  misc_RNA (1)...(19): siRNA sense strand
gaacgugcagggugauuau

SEQ ID NO: 452640 - RNA, 19 nt, Homo sapiens
  misc_RNA (1)...(19): siRNA sense strand
gaagaaggcacugaagcuu

SEQ ID NO: 452641 - RNA, 19 nt, Homo sapiens
  misc_RNA (1)...(19): siRNA sense strand
cagcaggcaccauccuuua

SEQ ID NO: 452642 - RNA, 19 nt, Homo sapiens
  misc_RNA (1)...(19): siRNA sense strand
cagcaaaggcuccgugguu

SEQ ID NO: 452643 - RNA, 19 nt, Homo sapiens
  misc_RNA (1)...(19): siRNA sense strand
guggagaaccgcuucauug

SEQ ID NO: 452644 - RNA, 19 nt, Homo sapiens
  misc_RNA (1)...(19): siRNA sense strand
ccaggucucuacacgaaga

SEQ ID NO: 452645 - RNA, 19 nt, Homo sapiens
  misc_RNA (1)...(19): siRNA sense strand
uugcugagcugguguauac

SEQ ID NO: 452646 - RNA, 19 nt, Homo sapiens
  misc_RNA (1)...(19): siRNA sense strand
cacugucucucuacaauga

SEQ ID NO: 452647 - RNA, 19 nt, Homo sapiens
  misc_RNA (1)...(19): siRNA sense strand
ucauguaccugaacgaagu

SEQ ID NO: 452648 - RNA, 19 nt, Homo sapiens
  misc_RNA (1)...(19): siRNA sense strand
gaacgaucagguccgguuu

SEQ ID NO: 452649 - RNA, 19 nt, Homo sapiens
  misc_RNA (1)...(19): siRNA sense strand
ggagaaccgcuucauugga

SEQ ID NO: 452650 - RNA, 19 nt, Homo sapiens
  misc_RNA (1)...(19): siRNA sense strand
ccuggaggaugccugaauu

SEQ ID NO: 452651 - RNA, 19 nt, Homo sapiens
  misc_RNA (1)...(19): siRNA sense strand
gagaaccucaugcacauca

SEQ ID NO: 452652 - RNA, 19 nt, Homo sapiens
  misc_RNA (1)...(19): siRNA sense strand
ggaagaaggcacugaagcu

SEQ ID NO: 452653 - RNA, 19 nt, Homo sapiens
  misc_RNA (1)...(19): siRNA sense strand
gggaguuuguggaggaguu

SEQ ID NO: 452654 - RNA, 19 nt, Homo sapiens
  misc_RNA (1)...(19): siRNA sense strand
gagcaaggucacugccaaa

SEQ ID NO: 452655 - RNA, 19 nt, Homo sapiens
  misc_RNA (1)...(19): siRNA sense strand
caacauuggccagaaggaa

SEQ ID NO: 452656 - RNA, 19 nt, Homo sapiens
  misc_RNA (1)...(19): siRNA sense strand
gcagguguccguccucaag

SEQ ID NO: 452657 - RNA, 19 nt, Homo sapiens
  misc_RNA (1)...(19): siRNA sense strand
gaggagcuggugagcauga

SEQ ID NO: 452658 - RNA, 19 nt, Homo sapiens
  misc_RNA (1)...(19): siRNA sense strand
gaaugaagucccgagguau

SEQ ID NO: 452659 - RNA, 19 nt, Homo sapiens
  misc_RNA (1)...(19): siRNA sense strand
gauuaugagccaacugaug

SEQ ID NO: 452660 - RNA, 19 nt, Homo sapiens
  misc_RNA (1)...(19): siRNA sense strand
gugauuaugagccaacuga

SEQ ID NO: 452661 - RNA, 19 nt, Homo sapiens
  misc_RNA (1)...(19): siRNA sense strand
ugaaggaacaaggcuauga

SEQ ID NO: 452662 - RNA, 19 nt, Homo sapiens
  misc_RNA (1)...(19): siRNA sense strand
cuccaggucucuacacgaa

SEQ ID NO: 452663 - RNA, 19 nt, Homo sapiens
  misc_RNA (1)...(19): siRNA sense strand
ccaccggguucaucaacau

SEQ ID NO: 452664 - RNA, 19 nt, Homo sapiens
  misc_RNA (1)...(19): siRNA sense strand
gcugaaggaacaaggcuau

SEQ ID NO: 452665 - RNA, 19 nt, Homo sapiens
  misc_RNA (1)...(19): siRNA sense strand
ggagcgaguggaagggaaa

SEQ ID NO: 452666 - RNA, 19 nt, Homo sapiens
  misc_RNA (1)...(19): siRNA sense strand
ccagcaggcaccauccuuu

SEQ ID NO: 452667 - RNA, 19 nt, Homo sapiens
  misc_RNA (1)...(19): siRNA sense strand
ccaggaagaaggcacugaa

SEQ ID NO: 452668 - RNA, 19 nt, Homo sapiens
  misc_RNA (1)...(19): siRNA sense strand
gaaggaacaaggcuaugac

SEQ ID NO: 452669 - RNA, 19 nt, Homo sapiens
  misc_RNA (1)...(19): siRNA sense strand
ugaacgugcagggugauua

SEQ ID NO: 452670 - RNA, 19 nt, Homo sapiens
  misc_RNA (1)...(19): siRNA sense strand
gauggaguacgcaaagcaa

SEQ ID NO: 452671 - RNA, 19 nt, Homo sapiens
  misc_RNA (1)...(19): siRNA sense strand
cguggagcauggaugagaa

SEQ ID NO: 452672 - RNA, 19 nt, Homo sapiens
  misc_RNA (1)...(19): siRNA sense strand
ugacgucauugccuaucug

SEQ ID NO: 452673 - RNA, 19 nt, Homo sapiens
  misc_RNA (1)...(19): siRNA sense strand
gcaaaggcuccgugguucu

SEQ ID NO: 452674 - RNA, 19 nt, Homo sapiens
  misc_RNA (1)...(19): siRNA sense strand
cccacugucucucuacaau

SEQ ID NO: 452675 - RNA, 19 nt, Homo sapiens
  misc_RNA (1)...(19): siRNA sense strand
acgaucagguccgguuuga

SEQ ID NO: 452676 - RNA, 19 nt, Homo sapiens
  misc_RNA (1)...(19): siRNA sense strand
augaggagcuggugagcau

SEQ ID NO: 452677 - RNA, 19 nt, Homo sapiens
  misc_RNA (1)...(19): siRNA sense strand
aggcuggaauccuggagaa

SEQ ID NO: 452678 - RNA, 19 nt, Homo sapiens
  misc_RNA (1)...(19): siRNA sense strand
gacccaggacccagccaaa

SEQ ID NO: 452679 - RNA, 19 nt, Homo sapiens
  misc_RNA (1)...(19): siRNA sense strand
caaaggcuccgugguucug

SEQ ID NO: 452680 - RNA, 19 nt, Homo sapiens
  misc_RNA (1)...(19): siRNA sense strand
gcccugagugugaauuugu

SEQ ID NO: 452681 - RNA, 19 nt, Homo sapiens
  misc_RNA (1)...(19): siRNA sense strand
ggaagugcgcaaaaucaaa

SEQ ID NO: 452682 - RNA, 19 nt, Homo sapiens
  misc_RNA (1)...(19): siRNA sense strand
ucguguggcugaaggaaca

SEQ ID NO: 452683 - RNA, 19 nt, Homo sapiens
  misc_RNA (1)...(19): siRNA sense strand
ccaagaacccguggagcau

SEQ ID NO: 452684 - RNA, 19 nt, Homo sapiens
  misc_RNA (1)...(19): siRNA sense strand
uugccuaucuggccaacau

SEQ ID NO: 452685 - RNA, 19 nt, Homo sapiens
  misc_RNA (1)...(19): siRNA sense strand
ggguucaucaacaucaauu

SEQ ID NO: 452686 - RNA, 19 nt, Homo sapiens
  misc_RNA (1)...(19): siRNA sense strand
ggaccgggaagugcgcaaa

SEQ ID NO: 452687 - RNA, 19 nt, Homo sapiens
  misc_RNA (1)...(19): siRNA sense strand
gaagucccgagguaucuac

SEQ ID NO: 452688 - RNA, 19 nt, Homo sapiens
  misc_RNA (1)...(19): siRNA sense strand
gaagaaagcuguugaugaa

SEQ ID NO: 452689 - RNA, 19 nt, Homo sapiens
  misc_RNA (1)...(19): siRNA sense strand
gaagcaaagugucgaguua

SEQ ID NO: 452690 - RNA, 19 nt, Homo sapiens
  misc_RNA (1)...(19): siRNA sense strand
gaagaacucucaaagaaga

SEQ ID NO: 452691 - RNA, 19 nt, Homo sapiens
  misc_RNA (1)...(19): siRNA sense strand
gaacagcuauuacgaguug

SEQ ID NO: 452692 - RNA, 19 nt, Homo sapiens
  misc_RNA (1)...(19): siRNA sense strand
caacucagauggauuaauu

SEQ ID NO: 452693 - RNA, 19 nt, Homo sapiens
  misc_RNA (1)...(19): siRNA sense strand
cgaguuagcuacaaacaua

SEQ ID NO: 452694 - RNA, 19 nt, Homo sapiens
  misc_RNA (1)...(19): siRNA sense strand
cgaaaggucugugauaaua

SEQ ID NO: 452695 - RNA, 19 nt, Homo sapiens
  misc_RNA (1)...(19): siRNA sense strand
gcauuaaucuugcugcuaa

SEQ ID NO: 452696 - RNA, 19 nt, Homo sapiens
  misc_RNA (1)...(19): siRNA sense strand
ggaaauggauauuguugaa

SEQ ID NO: 452697 - RNA, 19 nt, Homo sapiens
  misc_RNA (1)...(19): siRNA sense strand
ggaauaagaugguacaagu

SEQ ID NO: 452698 - RNA, 19 nt, Homo sapiens
  misc_RNA (1)...(19): siRNA sense strand
gaauuugugugucagauaa

SEQ ID NO: 452699 - RNA, 19 nt, Homo sapiens
  misc_RNA (1)...(19): siRNA sense strand
gcuaaaugcucaacaagaa

SEQ ID NO: 452700 - RNA, 19 nt, Homo sapiens
  misc_RNA (1)...(19): siRNA sense strand
aagaagaacucucaaagaa

SEQ ID NO: 452701 - RNA, 19 nt, Homo sapiens
  misc_RNA (1)...(19): siRNA sense strand
gaaggugguugaagaaugu

SEQ ID NO: 452702 - RNA, 19 nt, Homo sapiens
  misc_RNA (1)...(19): siRNA sense strand
caaggaaggugguugaaga

SEQ ID NO: 452703 - RNA, 19 nt, Homo sapiens
  misc_RNA (1)...(19): siRNA sense strand
gaauggagauugaugaagu

SEQ ID NO: 452704 - RNA, 19 nt, Homo sapiens
  misc_RNA (1)...(19): siRNA sense strand
gaagaggaguuugugauug

SEQ ID NO: 452705 - RNA, 19 nt, Homo sapiens
  misc_RNA (1)...(19): siRNA sense strand
uaaugaagaugcuguuuga

SEQ ID NO: 452706 - RNA, 19 nt, Homo sapiens
  misc_RNA (1)...(19): siRNA sense strand
cauaaucccugcacucauu

SEQ ID NO: 452707 - RNA, 19 nt, Homo sapiens
  misc_RNA (1)...(19): siRNA sense strand
gaaccgccgugauucauug

SEQ ID NO: 452708 - RNA, 19 nt, Homo sapiens
  misc_RNA (1)...(19): siRNA sense strand
caagagacgucauaaucaa

SEQ ID NO: 452709 - RNA, 19 nt, Homo sapiens
  misc_RNA (1)...(19): siRNA sense strand
gaaaugggcugaagaugcu

SEQ ID NO: 452710 - RNA, 19 nt, Homo sapiens
  misc_RNA (1)...(19): siRNA sense strand
ggagcucuguguaugaaua

SEQ ID NO: 452711 - RNA, 19 nt, Homo sapiens
  misc_RNA (1)...(19): siRNA sense strand
gcccagaucucuaaugaug

SEQ ID NO: 452712 - RNA, 19 nt, Homo sapiens
  misc_RNA (1)...(19): siRNA sense strand
acacaggacugaggaauaa

SEQ ID NO: 452713 - RNA, 19 nt, Homo sapiens
  misc_RNA (1)...(19): siRNA sense strand
gaugaccgcuuuaaaucaa

SEQ ID NO: 452714 - RNA, 19 nt, Homo sapiens
  misc_RNA (1)...(19): siRNA sense strand
gaagaacuacuauugaaug

SEQ ID NO: 452715 - RNA, 19 nt, Homo sapiens
  misc_RNA (1)...(19): siRNA sense strand
ggaaggugguugaagaaug

SEQ ID NO: 452716 - RNA, 19 nt, Homo sapiens
  misc_RNA (1)...(19): siRNA sense strand
gacaugagcuuuggcaaga

SEQ ID NO: 452717 - RNA, 19 nt, Homo sapiens
  misc_RNA (1)...(19): siRNA sense strand
cuacaacucagauggauua

SEQ ID NO: 452718 - RNA, 19 nt, Homo sapiens
  misc_RNA (1)...(19): siRNA sense strand
gaaugaaacugcccuuggu

SEQ ID NO: 452719 - RNA, 19 nt, Homo sapiens
  misc_RNA (1)...(19): siRNA sense strand
ugaugaaccuuacuacuau

SEQ ID NO: 452720 - RNA, 19 nt, Homo sapiens
  misc_RNA (1)...(19): siRNA sense strand
ggacuuauuacucacuaua

SEQ ID NO: 452721 - RNA, 19 nt, Homo sapiens
  misc_RNA (1)...(19): siRNA sense strand
ccagaucucuaaugaugaa

SEQ ID NO: 452722 - RNA, 19 nt, Homo sapiens
  misc_RNA (1)...(19): siRNA sense strand
ugaagaugcuguuugaaug

SEQ ID NO: 452723 - RNA, 19 nt, Homo sapiens
  misc_RNA (1)...(19): siRNA sense strand
aaacacaggcuccagcaua

SEQ ID NO: 452724 - RNA, 19 nt, Homo sapiens
  misc_RNA (1)...(19): siRNA sense strand
uggaagaacuacuauugaa

SEQ ID NO: 452725 - RNA, 19 nt, Homo sapiens
  misc_RNA (1)...(19): siRNA sense strand
uuccauaccucaaggauaa

SEQ ID NO: 452726 - RNA, 19 nt, Homo sapiens
  misc_RNA (1)...(19): siRNA sense strand
cagcccagaucucuaauga

SEQ ID NO: 452727 - RNA, 19 nt, Homo sapiens
  misc_RNA (1)...(19): siRNA sense strand
cuacagaaccgccgugauu

SEQ ID NO: 452728 - RNA, 19 nt, Homo sapiens
  misc_RNA (1)...(19): siRNA sense strand
caagcucacugcacuccua

SEQ ID NO: 452729 - RNA, 19 nt, Homo sapiens
  misc_RNA (1)...(19): siRNA sense strand
gaagaccugcugaauauca

SEQ ID NO: 452730 - RNA, 19 nt, Homo sapiens
  misc_RNA (1)...(19): siRNA sense strand
augaagaccugcugaauau

SEQ ID NO: 452731 - RNA, 19 nt, Homo sapiens
  misc_RNA (1)...(19): siRNA sense strand
caugaagaccugcugaaua

SEQ ID NO: 452732 - RNA, 19 nt, Homo sapiens
  misc_RNA (1)...(19): siRNA sense strand
agaaagcuguugaugaaga

SEQ ID NO: 452733 - RNA, 19 nt, Homo sapiens
  misc_RNA (1)...(19): siRNA sense strand
caagaagaacucucaaaga

SEQ ID NO: 452734 - RNA, 19 nt, Homo sapiens
  misc_RNA (1)...(19): siRNA sense strand
agagaagacuggaagcaaa

SEQ ID NO: 452735 - RNA, 19 nt, Homo sapiens
  misc_RNA (1)...(19): siRNA sense strand
gaugaaguugcuaacauua

SEQ ID NO: 452736 - RNA, 19 nt, Homo sapiens
  misc_RNA (1)...(19): siRNA sense strand
uaacuuggaagaacuacua

SEQ ID NO: 452737 - RNA, 19 nt, Homo sapiens
  misc_RNA (1)...(19): siRNA sense strand
gaugaagaaugggcuaaga

SEQ ID NO: 452738 - RNA, 19 nt, Homo sapiens
  misc_RNA (1)...(19): siRNA sense strand
gaauauaaguugguuccau

SEQ ID NO: 452739 - RNA, 19 nt, Homo sapiens
  misc_RNA (1)...(19): siRNA sense strand
cagcuuaucugugaaggaa

SEQ ID NO: 452740 - RNA, 19 nt, Homo sapiens
  misc_RNA (1)...(19): siRNA sense strand
gcaaugacaacuacaaaca

SEQ ID NO: 452741 - RNA, 19 nt, Homo sapiens
  misc_RNA (1)...(19): siRNA sense strand
ugaugaaguugcuaacauu

SEQ ID NO: 452742 - RNA, 19 nt, Homo sapiens
  misc_RNA (1)...(19): siRNA sense strand
aagaggaguuugugauuga

SEQ ID NO: 452743 - RNA, 19 nt, Homo sapiens
  misc_RNA (1)...(19): siRNA sense strand
gcaagaagaacucucaaag

SEQ ID NO: 452744 - RNA, 19 nt, Homo sapiens
  misc_RNA (1)...(19): siRNA sense strand
guacuuguauggugaugau

SEQ ID NO: 452745 - RNA, 19 nt, Homo sapiens
  misc_RNA (1)...(19): siRNA sense strand
gaucucuaaugaugaagaa

SEQ ID NO: 452746 - RNA, 19 nt, Homo sapiens
  misc_RNA (1)...(19): siRNA sense strand
cgaauugacuuggaacuca

SEQ ID NO: 452747 - RNA, 19 nt, Homo sapiens
  misc_RNA (1)...(19): siRNA sense strand
uagcaaggguccugagaga

SEQ ID NO: 452748 - RNA, 19 nt, Homo sapiens
  misc_RNA (1)...(19): siRNA sense strand
caaaagaaauguacagcuu

SEQ ID NO: 452749 - RNA, 19 nt, Homo sapiens
  misc_RNA (1)...(19): siRNA sense strand
gaauaucacccuccgacuu

SEQ ID NO: 452750 - RNA, 19 nt, Homo sapiens
  misc_RNA (1)...(19): siRNA sense strand
uaaucuugcugcuaacaaa

SEQ ID NO: 452751 - RNA, 19 nt, Homo sapiens
  misc_RNA (1)...(19): siRNA sense strand
gaagaagaggaguuuguga

SEQ ID NO: 452752 - RNA, 19 nt, Homo sapiens
  misc_RNA (1)...(19): siRNA sense strand
gcucuguguaugaauauua

SEQ ID NO: 452753 - RNA, 19 nt, Homo sapiens
  misc_RNA (1)...(19): siRNA sense strand
gaagaugcuguuugaaugu

SEQ ID NO: 452754 - RNA, 19 nt, Homo sapiens
  misc_RNA (1)...(19): siRNA sense strand
ucgaaauccugauaacuug

SEQ ID NO: 452755 - RNA, 19 nt, Homo sapiens
  misc_RNA (1)...(19): siRNA sense strand
guauggugaugaucgaauu

SEQ ID NO: 452756 - RNA, 19 nt, Homo sapiens
  misc_RNA (1)...(19): siRNA sense strand
ccuaaugcaugauaagaau

SEQ ID NO: 452757 - RNA, 19 nt, Homo sapiens
  misc_RNA (1)...(19): siRNA sense strand
ccagauaccucaaaaggaa

SEQ ID NO: 452758 - RNA, 19 nt, Homo sapiens
  misc_RNA (1)...(19): siRNA sense strand
guugaagaauguaaacuca

SEQ ID NO: 452759 - RNA, 19 nt, Homo sapiens
  misc_RNA (1)...(19): siRNA sense strand
ccgauuucuucaaugauua

SEQ ID NO: 452760 - RNA, 19 nt, Homo sapiens
  misc_RNA (1)...(19): siRNA sense strand
agagugagcaguacuugua

SEQ ID NO: 452761 - RNA, 19 nt, Homo sapiens
  misc_RNA (1)...(19): siRNA sense strand
gguagagagucgucagaug

SEQ ID NO: 452762 - RNA, 19 nt, Homo sapiens
  misc_RNA (1)...(19): siRNA sense strand
gaagugguuauaaugauug

SEQ ID NO: 452763 - RNA, 19 nt, Homo sapiens
  misc_RNA (1)...(19): siRNA sense strand
ugaagaugcucaugaagag

SEQ ID NO: 452764 - RNA, 19 nt, Homo sapiens
  misc_RNA (1)...(19): siRNA sense strand
acuuggaacucauuucuuu

SEQ ID NO: 452765 - RNA, 19 nt, Homo sapiens
  misc_RNA (1)...(19): siRNA sense strand
ggaagaacuacuauugaau

SEQ ID NO: 452766 - RNA, 19 nt, Homo sapiens
  misc_RNA (1)...(19): siRNA sense strand
uuacuaaaccuauccuuug

SEQ ID NO: 452767 - RNA, 19 nt, Homo sapiens
  misc_RNA (1)...(19): siRNA sense strand
aaacugcccuuggugcauu

SEQ ID NO: 452768 - RNA, 19 nt, Homo sapiens
  misc_RNA (1)...(19): siRNA sense strand
gaauaagaugguacaaguu

SEQ ID NO: 452769 - RNA, 19 nt, Homo sapiens
  misc_RNA (1)...(19): siRNA sense strand
gacacaggacugaggaaua

SEQ ID NO: 452770 - RNA, 19 nt, Homo sapiens
  misc_RNA (1)...(19): siRNA sense strand
agaagaaagcuguugauga

SEQ ID NO: 452771 - RNA, 19 nt, Homo sapiens
  misc_RNA (1)...(19): siRNA sense strand
gaaggaauggagauugaug

SEQ ID NO: 452772 - RNA, 19 nt, Homo sapiens
  misc_RNA (1)...(19): siRNA sense strand
ugaacgaauugacuuggaa

SEQ ID NO: 452773 - RNA, 19 nt, Homo sapiens
  misc_RNA (1)...(19): siRNA sense strand
ugaagaaacucagcauuuu

SEQ ID NO: 452774 - RNA, 19 nt, Homo sapiens
  misc_RNA (1)...(19): siRNA sense strand
gcaaggguccugagagaag

SEQ ID NO: 452775 - RNA, 19 nt, Homo sapiens
  misc_RNA (1)...(19): siRNA sense strand
agauauuccugacaaaguu

SEQ ID NO: 452776 - RNA, 19 nt, Homo sapiens
  misc_RNA (1)...(19): siRNA sense strand
gaagaagaaagcuguugau

SEQ ID NO: 452777 - RNA, 19 nt, Homo sapiens
  misc_RNA (1)...(19): siRNA sense strand
cacaagagacgucauaauc

SEQ ID NO: 452778 - RNA, 19 nt, Homo sapiens
  misc_RNA (1)...(19): siRNA sense strand
gacugggaauugguucuua

SEQ ID NO: 452779 - RNA, 19 nt, Homo sapiens
  misc_RNA (1)...(19): siRNA sense strand
gaaggaaaugggcugaaga

SEQ ID NO: 452780 - RNA, 19 nt, Homo sapiens
  misc_RNA (1)...(19): siRNA sense strand
gguacaaguuggacugcuu

SEQ ID NO: 452781 - RNA, 19 nt, Homo sapiens
  misc_RNA (1)...(19): siRNA sense strand
uacuaaaccuauccuuuga

SEQ ID NO: 452782 - RNA, 19 nt, Homo sapiens
  misc_RNA (1)...(19): siRNA sense strand
gcucuuuauuugcuucuga

SEQ ID NO: 452783 - RNA, 19 nt, Homo sapiens
  misc_RNA (1)...(19): siRNA sense strand
gaaguuuaaggauccauug

SEQ ID NO: 452784 - RNA, 19 nt, Homo sapiens
  misc_RNA (1)...(19): siRNA sense strand
cugaugaaccuuacuacua

SEQ ID NO: 452785 - RNA, 19 nt, Homo sapiens
  misc_RNA (1)...(19): siRNA sense strand
gaccugaccuuuucuacaa

SEQ ID NO: 452786 - RNA, 19 nt, Homo sapiens
  misc_RNA (1)...(19): siRNA sense strand
ugaagaaugggcuaagaaa

SEQ ID NO: 452787 - RNA, 19 nt, Homo sapiens
  misc_RNA (1)...(19): siRNA sense strand
agacuuagacugggaauug

SEQ ID NO: 452788 - RNA, 19 nt, Homo sapiens
  misc_RNA (1)...(19): siRNA sense strand
ggagacagaucuuugauga

SEQ ID NO: 452789 - RNA, 19 nt, Homo sapiens
  misc_RNA (1)...(19): siRNA sense strand
ggacaaacauccagcuuga

SEQ ID NO: 452790 - RNA, 19 nt, Homo sapiens
  misc_RNA (1)...(19): siRNA sense strand
agauaaagcugccuaagua

SEQ ID NO: 452791 - RNA, 19 nt, Homo sapiens
  misc_RNA (1)...(19): siRNA sense strand
caacugcacuaguguuuaa

SEQ ID NO: 452792 - RNA, 19 nt, Homo sapiens
  misc_RNA (1)...(19): siRNA sense strand
ggucaaagcuaccuuaaca

SEQ ID NO: 452793 - RNA, 19 nt, Homo sapiens
  misc_RNA (1)...(19): siRNA sense strand
ugacgaagcuguaugacuu

SEQ ID NO: 452794 - RNA, 19 nt, Homo sapiens
  misc_RNA (1)...(19): siRNA sense strand
ggaagacgguggcaacuca

SEQ ID NO: 452795 - RNA, 19 nt, Homo sapiens
  misc_RNA (1)...(19): siRNA sense strand
agacauacaucacuuacaa

SEQ ID NO: 452796 - RNA, 19 nt, Homo sapiens
  misc_RNA (1)...(19): siRNA sense strand
gaaaguggacuacaaaucu

SEQ ID NO: 452797 - RNA, 19 nt, Homo sapiens
  misc_RNA (1)...(19): siRNA sense strand
ggaggagggugaucuacaa

SEQ ID NO: 452798 - RNA, 19 nt, Homo sapiens
  misc_RNA (1)...(19): siRNA sense strand
gcaucaagcacguguauaa

SEQ ID NO: 452799 - RNA, 19 nt, Homo sapiens
  misc_RNA (1)...(19): siRNA sense strand
caagcgagcucugguuaaa

SEQ ID NO: 452800 - RNA, 19 nt, Homo sapiens
  misc_RNA (1)...(19): siRNA sense strand
gguaacaacuaguggaaga

SEQ ID NO: 452801 - RNA, 19 nt, Homo sapiens
  misc_RNA (1)...(19): siRNA sense strand
ggauauuucuggcaaacaa

SEQ ID NO: 452802 - RNA, 19 nt, Homo sapiens
  misc_RNA (1)...(19): siRNA sense strand
gaaauaaggaggucaacau

SEQ ID NO: 452803 - RNA, 19 nt, Homo sapiens
  misc_RNA (1)...(19): siRNA sense strand
uaacaucuaugcucaaguc

SEQ ID NO: 452804 - RNA, 19 nt, Homo sapiens
  misc_RNA (1)...(19): siRNA sense strand
gcccggagcucucauauac

SEQ ID NO: 452805 - RNA, 19 nt, Homo sapiens
  misc_RNA (1)...(19): siRNA sense strand
ggacaaguaugguuucacu

SEQ ID NO: 452806 - RNA, 19 nt, Homo sapiens
  misc_RNA (1)...(19): siRNA sense strand
gauugcaguucaugaauau

SEQ ID NO: 452807 - RNA, 19 nt, Homo sapiens
  misc_RNA (1)...(19): siRNA sense strand
gcuauuaucagugguauuu

SEQ ID NO: 452808 - RNA, 19 nt, Homo sapiens
  misc_RNA (1)...(19): siRNA sense strand
caaaggacaugcacaucau

SEQ ID NO: 452809 - RNA, 19 nt, Homo sapiens
  misc_RNA (1)...(19): siRNA sense strand
caaaagagauugcaguuca

SEQ ID NO: 452810 - RNA, 19 nt, Homo sapiens
  misc_RNA (1)...(19): siRNA sense strand
gggagagccuugugucaug

SEQ ID NO: 452811 - RNA, 19 nt, Homo sapiens
  misc_RNA (1)...(19): siRNA sense strand
ugacaucaguucccugguu

SEQ ID NO: 452812 - RNA, 19 nt, Homo sapiens
  misc_RNA (1)...(19): siRNA sense strand
aaaguggacuacaaaucua

SEQ ID NO: 452813 - RNA, 19 nt, Homo sapiens
  misc_RNA (1)...(19): siRNA sense strand
gcaaacagcgaaagcacaa

SEQ ID NO: 452814 - RNA, 19 nt, Homo sapiens
  misc_RNA (1)...(19): siRNA sense strand
gcacaaagccucucaucac

SEQ ID NO: 452815 - RNA, 19 nt, Homo sapiens
  misc_RNA (1)...(19): siRNA sense strand
caaugcaacuuucaucauc

SEQ ID NO: 452816 - RNA, 19 nt, Homo sapiens
  misc_RNA (1)...(19): siRNA sense strand
ggacuucgagugugacuau

SEQ ID NO: 452817 - RNA, 19 nt, Homo sapiens
  misc_RNA (1)...(19): siRNA sense strand
ucaguuaccucuaugucaa

SEQ ID NO: 452818 - RNA, 19 nt, Homo sapiens
  misc_RNA (1)...(19): siRNA sense strand
gauccucauugccguguuu

SEQ ID NO: 452819 - RNA, 19 nt, Homo sapiens
  misc_RNA (1)...(19): siRNA sense strand
gagagcagcauauugauca

SEQ ID NO: 452820 - RNA, 19 nt, Homo sapiens
  misc_RNA (1)...(19): siRNA sense strand
agacagaucuuugaugaag

SEQ ID NO: 452821 - RNA, 19 nt, Homo sapiens
  misc_RNA (1)...(19): siRNA sense strand
gcaccaaggaggacuauca

SEQ ID NO: 452822 - RNA, 19 nt, Homo sapiens
  misc_RNA (1)...(19): siRNA sense strand
ggauggauaugcucacuac

SEQ ID NO: 452823 - RNA, 19 nt, Homo sapiens
  misc_RNA (1)...(19): siRNA sense strand
ugagguagcagguaucaaa

SEQ ID NO: 452824 - RNA, 19 nt, Homo sapiens
  misc_RNA (1)...(19): siRNA sense strand
ggaaccagaaugacacgua

SEQ ID NO: 452825 - RNA, 19 nt, Homo sapiens
  misc_RNA (1)...(19): siRNA sense strand
cuauggaggucgacagauu

SEQ ID NO: 452826 - RNA, 19 nt, Homo sapiens
  misc_RNA (1)...(19): siRNA sense strand
ucagugagccaaagugaaa

SEQ ID NO: 452827 - RNA, 19 nt, Homo sapiens
  misc_RNA (1)...(19): siRNA sense strand
caacagcagcgucauacuu

SEQ ID NO: 452828 - RNA, 19 nt, Homo sapiens
  misc_RNA (1)...(19): siRNA sense strand
gagcucucauauacugaua

SEQ ID NO: 452829 - RNA, 19 nt, Homo sapiens
  misc_RNA (1)...(19): siRNA sense strand
gaacgcaucacacccaaca

SEQ ID NO: 452830 - RNA, 19 nt, Homo sapiens
  misc_RNA (1)...(19): siRNA sense strand
caucuaugcucaaguccaa

SEQ ID NO: 452831 - RNA, 19 nt, Homo sapiens
  misc_RNA (1)...(19): siRNA sense strand
agauugcaguucaugaaua

SEQ ID NO: 452832 - RNA, 19 nt, Homo sapiens
  misc_RNA (1)...(19): siRNA sense strand
gaaggaaccgacaccauca

SEQ ID NO: 452833 - RNA, 19 nt, Homo sapiens
  misc_RNA (1)...(19): siRNA sense strand
aaacauccagcuugacuuu

SEQ ID NO: 452834 - RNA, 19 nt, Homo sapiens
  misc_RNA (1)...(19): siRNA sense strand
ucacacagcugacguuagc

SEQ ID NO: 452835 - RNA, 19 nt, Homo sapiens
  misc_RNA (1)...(19): siRNA sense strand
agacgagaaccaaguauuu

SEQ ID NO: 452836 - RNA, 19 nt, Homo sapiens
  misc_RNA (1)...(19): siRNA sense strand
ggacuacaaaucuaucuuc

SEQ ID NO: 452837 - RNA, 19 nt, Homo sapiens
  misc_RNA (1)...(19): siRNA sense strand
ggcaacacauggagacaga

SEQ ID NO: 452838 - RNA, 19 nt, Homo sapiens
  misc_RNA (1)...(19): siRNA sense strand
gggaacaucauuauugaau

SEQ ID NO: 452839 - RNA, 19 nt, Homo sapiens
  misc_RNA (1)...(19): siRNA sense strand
gcauauugaucagcucaga

SEQ ID NO: 452840 - RNA, 19 nt, Homo sapiens
  misc_RNA (1)...(19): siRNA sense strand
gaauggaaccagaaugaca

SEQ ID NO: 452841 - RNA, 19 nt, Homo sapiens
  misc_RNA (1)...(19): siRNA sense strand
gacaugcacaucaucagua

SEQ ID NO: 452842 - RNA, 19 nt, Homo sapiens
  misc_RNA (1)...(19): siRNA sense strand
agauuaugcuucucaguga

SEQ ID NO: 452843 - RNA, 19 nt, Homo sapiens
  misc_RNA (1)...(19): siRNA sense strand
gaaccgacaccaucacagu

SEQ ID NO: 452844 - RNA, 19 nt, Homo sapiens
  misc_RNA (1)...(19): siRNA sense strand
ggagggugaucuacaaagg

SEQ ID NO: 452845 - RNA, 19 nt, Homo sapiens
  misc_RNA (1)...(19): siRNA sense strand
ggacucggcccacaaccaa

SEQ ID NO: 452846 - RNA, 19 nt, Homo sapiens
  misc_RNA (1)...(19): siRNA sense strand
ccaaaggacaugcacauca

SEQ ID NO: 452847 - RNA, 19 nt, Homo sapiens
  misc_RNA (1)...(19): siRNA sense strand
cagccaugcuuaugcuauu

SEQ ID NO: 452848 - RNA, 19 nt, Homo sapiens
  misc_RNA (1)...(19): siRNA sense strand
ggugaaaguggacuacaaa

SEQ ID NO: 452849 - RNA, 19 nt, Homo sapiens
  misc_RNA (1)...(19): siRNA sense strand
gaaugugccgagacaacua

SEQ ID NO: 452850 - RNA, 19 nt, Homo sapiens
  misc_RNA (1)...(19): siRNA sense strand
cugaggagcugcuggacaa

SEQ ID NO: 452851 - RNA, 19 nt, Homo sapiens
  misc_RNA (1)...(19): siRNA sense strand
gcacaaugcaacuuucauc

SEQ ID NO: 452852 - RNA, 19 nt, Homo sapiens
  misc_RNA (1)...(19): siRNA sense strand
gaugaagaguacaaugucu

SEQ ID NO: 452853 - RNA, 19 nt, Homo sapiens
  misc_RNA (1)...(19): siRNA sense strand
ugaagacauacaucacuua

SEQ ID NO: 452854 - RNA, 19 nt, Homo sapiens
  misc_RNA (1)...(19): siRNA sense strand
ccaggaaugugccgagaca

SEQ ID NO: 452855 - RNA, 19 nt, Homo sapiens
  misc_RNA (1)...(19): siRNA sense strand
cagcagagcuuuucauucu

SEQ ID NO: 452856 - RNA, 19 nt, Homo sapiens
  misc_RNA (1)...(19): siRNA sense strand
gccagugugucccagcuuu

SEQ ID NO: 452857 - RNA, 19 nt, Homo sapiens
  misc_RNA (1)...(19): siRNA sense strand
caggaucaguggucucaga

SEQ ID NO: 452858 - RNA, 19 nt, Homo sapiens
  misc_RNA (1)...(19): siRNA sense strand
ucacuucgguuccucucuu

SEQ ID NO: 452859 - RNA, 19 nt, Homo sapiens
  misc_RNA (1)...(19): siRNA sense strand
gagcagcagaggucuaaug

SEQ ID NO: 452860 - RNA, 19 nt, Homo sapiens
  misc_RNA (1)...(19): siRNA sense strand
caucacacccaacagguuu

SEQ ID NO: 452861 - RNA, 19 nt, Homo sapiens
  misc_RNA (1)...(19): siRNA sense strand
caaaggagauccccaacug

SEQ ID NO: 452862 - RNA, 19 nt, Homo sapiens
  misc_RNA (1)...(19): siRNA sense strand
gagaugauugggucaguga

SEQ ID NO: 452863 - RNA, 19 nt, Homo sapiens
  misc_RNA (1)...(19): siRNA sense strand
aacagcagcgucauacuua

SEQ ID NO: 452864 - RNA, 19 nt, Homo sapiens
  misc_RNA (1)...(19): siRNA sense strand
gaauggagacccacaucau

SEQ ID NO: 452865 - RNA, 19 nt, Homo sapiens
  misc_RNA (1)...(19): siRNA sense strand
caggaagaaucucuagcaa

SEQ ID NO: 452866 - RNA, 19 nt, Homo sapiens
  misc_RNA (1)...(19): siRNA sense strand
gauguggaccugagaggaa

SEQ ID NO: 452867 - RNA, 19 nt, Homo sapiens
  misc_RNA (1)...(19): siRNA sense strand
aagaauggaaccagaauga

SEQ ID NO: 452868 - RNA, 19 nt, Homo sapiens
  misc_RNA (1)...(19): siRNA sense strand
ucaagcacguguauaagag

SEQ ID NO: 452869 - RNA, 19 nt, Homo sapiens
  misc_RNA (1)...(19): siRNA sense strand
gacuacaaaucuaucuuca

SEQ ID NO: 452870 - RNA, 19 nt, Homo sapiens
  misc_RNA (1)...(19): siRNA sense strand
guacaaccucuacaucuca

SEQ ID NO: 452871 - RNA, 19 nt, Homo sapiens
  misc_RNA (1)...(19): siRNA sense strand
gcuacuacgugucuuaucg

SEQ ID NO: 452872 - RNA, 19 nt, Homo sapiens
  misc_RNA (1)...(19): siRNA sense strand
gcauguucaucuccgaguu

SEQ ID NO: 452873 - RNA, 19 nt, Homo sapiens
  misc_RNA (1)...(19): siRNA sense strand
agaacaaccuuggcucaga

SEQ ID NO: 452874 - RNA, 19 nt, Homo sapiens
  misc_RNA (1)...(19): siRNA sense strand
acgaccaggugaagacaua

SEQ ID NO: 452875 - RNA, 19 nt, Homo sapiens
  misc_RNA (1)...(19): siRNA sense strand
ggacaugcacaucaucagu

SEQ ID NO: 452876 - RNA, 19 nt, Homo sapiens
  misc_RNA (1)...(19): siRNA sense strand
guuuaaugcucucaaccaa

SEQ ID NO: 452877 - RNA, 19 nt, Homo sapiens
  misc_RNA (1)...(19): siRNA sense strand
uuaccacaauccugacauu

SEQ ID NO: 452878 - RNA, 19 nt, Homo sapiens
  misc_RNA (1)...(19): siRNA sense strand
cagaugggcuaagggagaa

SEQ ID NO: 452879 - RNA, 19 nt, Homo sapiens
  misc_RNA (1)...(19): siRNA sense strand
uccaacaacugcacagaug

SEQ ID NO: 452880 - RNA, 19 nt, Homo sapiens
  misc_RNA (1)...(19): siRNA sense strand
ccuggcaccugcucaauca

SEQ ID NO: 452881 - RNA, 19 nt, Homo sapiens
  misc_RNA (1)...(19): siRNA sense strand
gaauggcaauuggugaaag

SEQ ID NO: 452882 - RNA, 19 nt, Homo sapiens
  misc_RNA (1)...(19): siRNA sense strand
uguaugagguagcagguau

SEQ ID NO: 452883 - RNA, 19 nt, Homo sapiens
  misc_RNA (1)...(19): siRNA sense strand
guacagacgagaaccaagu

SEQ ID NO: 452884 - RNA, 19 nt, Homo sapiens
  misc_RNA (1)...(19): siRNA sense strand
ggaauggagacccacauca

SEQ ID NO: 452885 - RNA, 19 nt, Homo sapiens
  misc_RNA (1)...(19): siRNA sense strand
acacaacagcagcgucaua

SEQ ID NO: 452886 - RNA, 19 nt, Homo sapiens
  misc_RNA (1)...(19): siRNA sense strand
ucccuuggauuaacaucua

SEQ ID NO: 452887 - RNA, 19 nt, Homo sapiens
  misc_RNA (1)...(19): siRNA sense strand
aaagcugaaugacaaagug

SEQ ID NO: 452888 - RNA, 19 nt, Homo sapiens
  misc_RNA (1)...(19): siRNA sense strand
caacaaggcuuaccaauau

SEQ ID NO: 452889 - RNA, 19 nt, Homo sapiens
  misc_RNA (1)...(19): siRNA sense strand
ggagaaaguugaagccauu

SEQ ID NO: 452890 - RNA, 19 nt, Homo sapiens
  misc_RNA (1)...(19): siRNA sense strand
ggaaggagcuugaggugau

SEQ ID NO: 452891 - RNA, 19 nt, Homo sapiens
  misc_RNA (1)...(19): siRNA sense strand
gcaacaaggcuuaccaaua

SEQ ID NO: 452892 - RNA, 19 nt, Homo sapiens
  misc_RNA (1)...(19): siRNA sense strand
ggaagaagaauaugaacaa

SEQ ID NO: 452893 - RNA, 19 nt, Homo sapiens
  misc_RNA (1)...(19): siRNA sense strand
ugaaagaacuacaggaaag

SEQ ID NO: 452894 - RNA, 19 nt, Homo sapiens
  misc_RNA (1)...(19): siRNA sense strand
gcagcucccuggaagacua

SEQ ID NO: 452895 - RNA, 19 nt, Homo sapiens
  misc_RNA (1)...(19): siRNA sense strand
ggaggaagaagaauaugaa

SEQ ID NO: 452896 - RNA, 19 nt, Homo sapiens
  misc_RNA (1)...(19): siRNA sense strand
gaaggagcuugaggugauu

SEQ ID NO: 452897 - RNA, 19 nt, Homo sapiens
  misc_RNA (1)...(19): siRNA sense strand
gaaaguugaagccauuaug

SEQ ID NO: 452898 - RNA, 19 nt, Homo sapiens
  misc_RNA (1)...(19): siRNA sense strand
ugcgagagcucauggagaa

SEQ ID NO: 452899 - RNA, 19 nt, Homo sapiens
  misc_RNA (1)...(19): siRNA sense strand
gcugaaagaacuacaggaa

SEQ ID NO: 452900 - RNA, 19 nt, Homo sapiens
  misc_RNA (1)...(19): siRNA sense strand
gaccaagaccucccagaga

SEQ ID NO: 452901 - RNA, 19 nt, Homo sapiens
  misc_RNA (1)...(19): siRNA sense strand
ggaagagugcaacaggaaa

SEQ ID NO: 452902 - RNA, 19 nt, Homo sapiens
  misc_RNA (1)...(19): siRNA sense strand
gggaagagugcaacaggaa

SEQ ID NO: 452903 - RNA, 19 nt, Homo sapiens
  misc_RNA (1)...(19): siRNA sense strand
cuacaggaaaggcaaguaa

SEQ ID NO: 452904 - RNA, 19 nt, Homo sapiens
  misc_RNA (1)...(19): siRNA sense strand
gccaagccaucgucuuauc

SEQ ID NO: 452905 - RNA, 19 nt, Homo sapiens
  misc_RNA (1)...(19): siRNA sense strand
aaacgaaggagauuauuac

SEQ ID NO: 452906 - RNA, 19 nt, Homo sapiens
  misc_RNA (1)...(19): siRNA sense strand
cugccaagccaucgucuua

SEQ ID NO: 452907 - RNA, 19 nt, Homo sapiens
  misc_RNA (1)...(19): siRNA sense strand
gagaaaguugaagccauua

SEQ ID NO: 452908 - RNA, 19 nt, Homo sapiens
  misc_RNA (1)...(19): siRNA sense strand
gcaccagacccgugaccaa

SEQ ID NO: 452909 - RNA, 19 nt, Homo sapiens
  misc_RNA (1)...(19): siRNA sense strand
ggagauuauuacagcaaca

SEQ ID NO: 452910 - RNA, 19 nt, Homo sapiens
  misc_RNA (1)...(19): siRNA sense strand
ggaaaacgaaggagauuau

SEQ ID NO: 452911 - RNA, 19 nt, Homo sapiens
  misc_RNA (1)...(19): siRNA sense strand
gaacagaagaccccaagga

SEQ ID NO: 452912 - RNA, 19 nt, Homo sapiens
  misc_RNA (1)...(19): siRNA sense strand
aacaaggcuuaccaauaua

SEQ ID NO: 452913 - RNA, 19 nt, Homo sapiens
  misc_RNA (1)...(19): siRNA sense strand
uaagggagaaagaacagaa

SEQ ID NO: 452914 - RNA, 19 nt, Homo sapiens
  misc_RNA (1)...(19): siRNA sense strand
gcucauggagaaaguugaa

SEQ ID NO: 452915 - RNA, 19 nt, Homo sapiens
  misc_RNA (1)...(19): siRNA sense strand
ugaggagucuuggcuggaa

SEQ ID NO: 452916 - RNA, 19 nt, Homo sapiens
  misc_RNA (1)...(19): siRNA sense strand
gauugacacacccaacauu

SEQ ID NO: 452917 - RNA, 19 nt, Homo sapiens
  misc_RNA (1)...(19): siRNA sense strand
gagagcucauggagaaagu

SEQ ID NO: 452918 - RNA, 19 nt, Homo sapiens
  misc_RNA (1)...(19): siRNA sense strand
gggacgucuucgagucuaa

SEQ ID NO: 452919 - RNA, 19 nt, Homo sapiens
  misc_RNA (1)...(19): siRNA sense strand
gaagagugcaacaggaaac

SEQ ID NO: 452920 - RNA, 19 nt, Homo sapiens
  misc_RNA (1)...(19): siRNA sense strand
caggaggucuaagggagaa

SEQ ID NO: 452921 - RNA, 19 nt, Homo sapiens
  misc_RNA (1)...(19): siRNA sense strand
gaaagaacuacaggaaagg

SEQ ID NO: 452922 - RNA, 19 nt, Homo sapiens
  misc_RNA (1)...(19): siRNA sense strand
gagcucauggagaaaguug

SEQ ID NO: 452923 - RNA, 19 nt, Homo sapiens
  misc_RNA (1)...(19): siRNA sense strand
cauugcggcuucaacaaca

SEQ ID NO: 452924 - RNA, 19 nt, Homo sapiens
  misc_RNA (1)...(19): siRNA sense strand
ggacgucuucgagucuaaa

SEQ ID NO: 452925 - RNA, 19 nt, Homo sapiens
  misc_RNA (1)...(19): siRNA sense strand
gagauuauuacagcaacaa

SEQ ID NO: 452926 - RNA, 19 nt, Homo sapiens
  misc_RNA (1)...(19): siRNA sense strand
gagagugggcugggaagga

SEQ ID NO: 452927 - RNA, 19 nt, Homo sapiens
  misc_RNA (1)...(19): siRNA sense strand
aaaguugaagccauuaugu

SEQ ID NO: 452928 - RNA, 19 nt, Homo sapiens
  misc_RNA (1)...(19): siRNA sense strand
ugucccagauccagaagga

SEQ ID NO: 452929 - RNA, 19 nt, Homo sapiens
  misc_RNA (1)...(19): siRNA sense strand
uuaccaauauacccagcaa

SEQ ID NO: 452930 - RNA, 19 nt, Homo sapiens
  misc_RNA (1)...(19): siRNA sense strand
gaagccauuaugugggaaa

SEQ ID NO: 452931 - RNA, 19 nt, Homo sapiens
  misc_RNA (1)...(19): siRNA sense strand
ggagcugucaggaggucua

SEQ ID NO: 452932 - RNA, 19 nt, Homo sapiens
  misc_RNA (1)...(19): siRNA sense strand
gggcugggaaggagcuuga

SEQ ID NO: 452933 - RNA, 19 nt, Homo sapiens
  misc_RNA (1)...(19): siRNA sense strand
gagcuugaggugauugaca

SEQ ID NO: 452934 - RNA, 19 nt, Homo sapiens
  misc_RNA (1)...(19): siRNA sense strand
ugacacacccaacauucug

SEQ ID NO: 452935 - RNA, 19 nt, Homo sapiens
  misc_RNA (1)...(19): siRNA sense strand
cugaaagaacuacaggaaa

SEQ ID NO: 452936 - RNA, 19 nt, Homo sapiens
  misc_RNA (1)...(19): siRNA sense strand
gaagacuaugugcgagaga

SEQ ID NO: 452937 - RNA, 19 nt, Homo sapiens
  misc_RNA (1)...(19): siRNA sense strand
cagcaacaaggcuuaccaa

SEQ ID NO: 452938 - RNA, 19 nt, Homo sapiens
  misc_RNA (1)...(19): siRNA sense strand
ccagacccgugaccaagac

SEQ ID NO: 452939 - RNA, 19 nt, Homo sapiens
  misc_RNA (1)...(19): siRNA sense strand
gaaaacgaaggagauuauu

SEQ ID NO: 452940 - RNA, 19 nt, Homo sapiens
  misc_RNA (1)...(19): siRNA sense strand
gcauccagcuguugaauaa

SEQ ID NO: 452941 - RNA, 19 nt, Homo sapiens
  misc_RNA (1)...(19): siRNA sense strand
acaaggaccucuaugaguu

SEQ ID NO: 452942 - RNA, 19 nt, Homo sapiens
  misc_RNA (1)...(19): siRNA sense strand
ugaaugcgcucacuuaugg

SEQ ID NO: 452943 - RNA, 19 nt, Homo sapiens
  misc_RNA (1)...(19): siRNA sense strand
gcacaugcuugacuaucuu

SEQ ID NO: 452944 - RNA, 19 nt, Homo sapiens
  misc_RNA (1)...(19): siRNA sense strand
ugaggaagguggugugcua

SEQ ID NO: 452945 - RNA, 19 nt, Homo sapiens
  misc_RNA (1)...(19): siRNA sense strand
guaaugggcuccagauacu

SEQ ID NO: 452946 - RNA, 19 nt, Homo sapiens
  misc_RNA (1)...(19): siRNA sense strand
gaacaaggaccucuaugag

SEQ ID NO: 452947 - RNA, 19 nt, Homo sapiens
  misc_RNA (1)...(19): siRNA sense strand
ugacggugcugcuguguga

SEQ ID NO: 452948 - RNA, 19 nt, Homo sapiens
  misc_RNA (1)...(19): siRNA sense strand
gaguuggccuucucaauca

SEQ ID NO: 452949 - RNA, 19 nt, Homo sapiens
  misc_RNA (1)...(19): siRNA sense strand
ggacuucucacccauguuc

SEQ ID NO: 452950 - RNA, 19 nt, Homo sapiens
  misc_RNA (1)...(19): siRNA sense strand
gauacuaggcaccaucauu

SEQ ID NO: 452951 - RNA, 19 nt, Homo sapiens
  misc_RNA (1)...(19): siRNA sense strand
caacuucaacuucugcuau

SEQ ID NO: 452952 - RNA, 19 nt, Homo sapiens
  misc_RNA (1)...(19): siRNA sense strand
ccacuucccuggagcucuu

SEQ ID NO: 452953 - RNA, 19 nt, Homo sapiens
  misc_RNA (1)...(19): siRNA sense strand
gcagaacaaggaccucuau

SEQ ID NO: 452954 - RNA, 19 nt, Homo sapiens
  misc_RNA (1)...(19): siRNA sense strand
aaacugggcuuuucuaaca

SEQ ID NO: 452955 - RNA, 19 nt, Homo sapiens
  misc_RNA (1)...(19): siRNA sense strand
guacagccgguuuguguug

SEQ ID NO: 452956 - RNA, 19 nt, Homo sapiens
  misc_RNA (1)...(19): siRNA sense strand
gccaguucaucuauaagaa

SEQ ID NO: 452957 - RNA, 19 nt, Homo sapiens
  misc_RNA (1)...(19): siRNA sense strand
agaacaaggaccucuauga

SEQ ID NO: 452958 - RNA, 19 nt, Homo sapiens
  misc_RNA (1)...(19): siRNA sense strand
agaggaaccuucgccaguu

SEQ ID NO: 452959 - RNA, 19 nt, Homo sapiens
  misc_RNA (1)...(19): siRNA sense strand
gaggucaucagccguaaug

SEQ ID NO: 452960 - RNA, 19 nt, Homo sapiens
  misc_RNA (1)...(19): siRNA sense strand
aagcguaccucaacuucau

SEQ ID NO: 452961 - RNA, 19 nt, Homo sapiens
  misc_RNA (1)...(19): siRNA sense strand
ugaauaagaccuggaagga

SEQ ID NO: 452962 - RNA, 19 nt, Homo sapiens
  misc_RNA (1)...(19): siRNA sense strand
gcguacagccgguuugugu

SEQ ID NO: 452963 - RNA, 19 nt, Homo sapiens
  misc_RNA (1)...(19): siRNA sense strand
caaggaccucuaugaguug

SEQ ID NO: 452964 - RNA, 19 nt, Homo sapiens
  misc_RNA (1)...(19): siRNA sense strand
uccacgagcucuucugugu

SEQ ID NO: 452965 - RNA, 19 nt, Homo sapiens
  misc_RNA (1)...(19): siRNA sense strand
ggacuucgacaaggucaug

SEQ ID NO: 452966 - RNA, 19 nt, Homo sapiens
  misc_RNA (1)...(19): siRNA sense strand
auacuaggcaccaucauug

SEQ ID NO: 452967 - RNA, 19 nt, Homo sapiens
  misc_RNA (1)...(19): siRNA sense strand
ccaccaacuucaacuucug

SEQ ID NO: 452968 - RNA, 19 nt, Homo sapiens
  misc_RNA (1)...(19): siRNA sense strand
ggaagguggugugcuacgu

SEQ ID NO: 452969 - RNA, 19 nt, Homo sapiens
  misc_RNA (1)...(19): siRNA sense strand
ggcauccagcuguugaaua

SEQ ID NO: 452970 - RNA, 19 nt, Homo sapiens
  misc_RNA (1)...(19): siRNA sense strand
cuucgccaguucaucuaua

SEQ ID NO: 452971 - RNA, 19 nt, Homo sapiens
  misc_RNA (1)...(19): siRNA sense strand
ugagacagcccaggacuuc

SEQ ID NO: 452972 - RNA, 19 nt, Homo sapiens
  misc_RNA (1)...(19): siRNA sense strand
gggaggucaucagccguaa

SEQ ID NO: 452973 - RNA, 19 nt, Homo sapiens
  misc_RNA (1)...(19): siRNA sense strand
caggacuucucacccaugu

SEQ ID NO: 452974 - RNA, 19 nt, Homo sapiens
  misc_RNA (1)...(19): siRNA sense strand
aggauaagcugugguucug

SEQ ID NO: 452975 - RNA, 19 nt, Homo sapiens
  misc_RNA (1)...(19): siRNA sense strand
ccgggaagcagaacaagga

SEQ ID NO: 452976 - RNA, 19 nt, Homo sapiens
  misc_RNA (1)...(19): siRNA sense strand
ugugcuacgugaacaugaa

SEQ ID NO: 452977 - RNA, 19 nt, Homo sapiens
  misc_RNA (1)...(19): siRNA sense strand
gcaaacugggcuuuucuaa

SEQ ID NO: 452978 - RNA, 19 nt, Homo sapiens
  misc_RNA (1)...(19): siRNA sense strand
auccagcuguugaauaaga

SEQ ID NO: 452979 - RNA, 19 nt, Homo sapiens
  misc_RNA (1)...(19): siRNA sense strand
uaggcaccaucauugaaga

SEQ ID NO: 452980 - RNA, 19 nt, Homo sapiens
  misc_RNA (1)...(19): siRNA sense strand
caugagggcacuccugaca

SEQ ID NO: 452981 - RNA, 19 nt, Homo sapiens
  misc_RNA (1)...(19): siRNA sense strand
gggcuacacaggaggacuu

SEQ ID NO: 452982 - RNA, 19 nt, Homo sapiens
  misc_RNA (1)...(19): siRNA sense strand
cguaaugggcuccagauac

SEQ ID NO: 452983 - RNA, 19 nt, Homo sapiens
  misc_RNA (1)...(19): siRNA sense strand
uacuggagcugcgggagaa

SEQ ID NO: 452984 - RNA, 19 nt, Homo sapiens
  misc_RNA (1)...(19): siRNA sense strand
gccaggauaagcugugguu

SEQ ID NO: 452985 - RNA, 19 nt, Homo sapiens
  misc_RNA (1)...(19): siRNA sense strand
gccgguuuguguuggagaa

SEQ ID NO: 452986 - RNA, 19 nt, Homo sapiens
  misc_RNA (1)...(19): siRNA sense strand
guggacagaugggcucagu

SEQ ID NO: 452987 - RNA, 19 nt, Homo sapiens
  misc_RNA (1)...(19): siRNA sense strand
ucuaugaguuggccuucuc

SEQ ID NO: 452988 - RNA, 19 nt, Homo sapiens
  misc_RNA (1)...(19): siRNA sense strand
gaacugaccucuacacuaa

SEQ ID NO: 452989 - RNA, 19 nt, Homo sapiens
  misc_RNA (1)...(19): siRNA sense strand
gaacgagucuuuccuuuaa

SEQ ID NO: 452990 - RNA, 19 nt, Homo sapiens
  misc_RNA (1)...(19): siRNA sense strand
gcagacagcuucuuuauga

SEQ ID NO: 452991 - RNA, 19 nt, Homo sapiens
  misc_RNA (1)...(19): siRNA sense strand
gaacaguugucuaucaauu

SEQ ID NO: 452992 - RNA, 19 nt, Homo sapiens
  misc_RNA (1)...(19): siRNA sense strand
gaaaugagcaguaucagaa

SEQ ID NO: 452993 - RNA, 19 nt, Homo sapiens
  misc_RNA (1)...(19): siRNA sense strand
aaagagagguucuguugua

SEQ ID NO: 452994 - RNA, 19 nt, Homo sapiens
  misc_RNA (1)...(19): siRNA sense strand
gaacucaccuugcgaacug

SEQ ID NO: 452995 - RNA, 19 nt, Homo sapiens
  misc_RNA (1)...(19): siRNA sense strand
gaaaucaaguacuacaaga

SEQ ID NO: 452996 - RNA, 19 nt, Homo sapiens
  misc_RNA (1)...(19): siRNA sense strand
gcacacuucuacccauaua

SEQ ID NO: 452997 - RNA, 19 nt, Homo sapiens
  misc_RNA (1)...(19): siRNA sense strand
gagagguucuguuguauug

SEQ ID NO: 452998 - RNA, 19 nt, Homo sapiens
  misc_RNA (1)...(19): siRNA sense strand
gaucugaaguccuuagguu

SEQ ID NO: 452999 - RNA, 19 nt, Homo sapiens
  misc_RNA (1)...(19): siRNA sense strand
gaaggaaguuggagugaca

SEQ ID NO: 453000 - RNA, 19 nt, Homo sapiens
  misc_RNA (1)...(19): siRNA sense strand
gcuccaagauggccaauug

SEQ ID NO: 453001 - RNA, 19 nt, Homo sapiens
  misc_RNA (1)...(19): siRNA sense strand
uggacaagauguagauuua

SEQ ID NO: 453002 - RNA, 19 nt, Homo sapiens
  misc_RNA (1)...(19): siRNA sense strand
ccaggacacuugcuucuuu

SEQ ID NO: 453003 - RNA, 19 nt, Homo sapiens
  misc_RNA (1)...(19): siRNA sense strand
aguaauggcuccuggguua

SEQ ID NO: 453004 - RNA, 19 nt, Homo sapiens
  misc_RNA (1)...(19): siRNA sense strand
gacaggaaauccacaagaa

SEQ ID NO: 453005 - RNA, 19 nt, Homo sapiens
  misc_RNA (1)...(19): siRNA sense strand
caaggugcuucccauguua

SEQ ID NO: 453006 - RNA, 19 nt, Homo sapiens
  misc_RNA (1)...(19): siRNA sense strand
uaacaacaaucgcaaauac

SEQ ID NO: 453007 - RNA, 19 nt, Homo sapiens
  misc_RNA (1)...(19): siRNA sense strand
gauuacagauucacauaug

SEQ ID NO: 453008 - RNA, 19 nt, Homo sapiens
  misc_RNA (1)...(19): siRNA sense strand
gacaagauguagauuuaga

SEQ ID NO: 453009 - RNA, 19 nt, Homo sapiens
  misc_RNA (1)...(19): siRNA sense strand
ccaauauuauggcuacuuu

SEQ ID NO: 453010 - RNA, 19 nt, Homo sapiens
  misc_RNA (1)...(19): siRNA sense strand
gauagaagccaucaacaga

SEQ ID NO: 453011 - RNA, 19 nt, Homo sapiens
  misc_RNA (1)...(19): siRNA sense strand
ggaugaagccacucuugua

SEQ ID NO: 453012 - RNA, 19 nt, Homo sapiens
  misc_RNA (1)...(19): siRNA sense strand
ggagaaugcagaauaagaa

SEQ ID NO: 453013 - RNA, 19 nt, Homo sapiens
  misc_RNA (1)...(19): siRNA sense strand
gcaaauacuggcuucauga

SEQ ID NO: 453014 - RNA, 19 nt, Homo sapiens
  misc_RNA (1)...(19): siRNA sense strand
gcaaggaccagaagauaau

SEQ ID NO: 453015 - RNA, 19 nt, Homo sapiens
  misc_RNA (1)...(19): siRNA sense strand
agaggcagcugcaaagaaa

SEQ ID NO: 453016 - RNA, 19 nt, Homo sapiens
  misc_RNA (1)...(19): siRNA sense strand
gaaaacauccaucauauug

SEQ ID NO: 453017 - RNA, 19 nt, Homo sapiens
  misc_RNA (1)...(19): siRNA sense strand
uagcaaacauagcagauga

SEQ ID NO: 453018 - RNA, 19 nt, Homo sapiens
  misc_RNA (1)...(19): siRNA sense strand
gauuugaacaggcauuaua

SEQ ID NO: 453019 - RNA, 19 nt, Homo sapiens
  misc_RNA (1)...(19): siRNA sense strand
ccauauacauacacugauu

SEQ ID NO: 453020 - RNA, 19 nt, Homo sapiens
  misc_RNA (1)...(19): siRNA sense strand
gauaauacucuacuguuug

SEQ ID NO: 453021 - RNA, 19 nt, Homo sapiens
  misc_RNA (1)...(19): siRNA sense strand
ucugcaagcuccaaacuuu

SEQ ID NO: 453022 - RNA, 19 nt, Homo sapiens
  misc_RNA (1)...(19): siRNA sense strand
gaaauaccguuuacuugcu

SEQ ID NO: 453023 - RNA, 19 nt, Homo sapiens
  misc_RNA (1)...(19): siRNA sense strand
gcaggagccuagcaggaaa

SEQ ID NO: 453024 - RNA, 19 nt, Homo sapiens
  misc_RNA (1)...(19): siRNA sense strand
caagauggccaauugaaug

SEQ ID NO: 453025 - RNA, 19 nt, Homo sapiens
  misc_RNA (1)...(19): siRNA sense strand
gaaggaacaggacgaguug

SEQ ID NO: 453026 - RNA, 19 nt, Homo sapiens
  misc_RNA (1)...(19): siRNA sense strand
ccauucaguuuccauauga

SEQ ID NO: 453027 - RNA, 19 nt, Homo sapiens
  misc_RNA (1)...(19): siRNA sense strand
gaagauaauacucuacugu

SEQ ID NO: 453028 - RNA, 19 nt, Homo sapiens
  misc_RNA (1)...(19): siRNA sense strand
gagcagacagcuucuuuau

SEQ ID NO: 453029 - RNA, 19 nt, Homo sapiens
  misc_RNA (1)...(19): siRNA sense strand
aaagggagaaugcagaaua

SEQ ID NO: 453030 - RNA, 19 nt, Homo sapiens
  misc_RNA (1)...(19): siRNA sense strand
ggaagaauaacccucaaug

SEQ ID NO: 453031 - RNA, 19 nt, Homo sapiens
  misc_RNA (1)...(19): siRNA sense strand
ucgaagaucugaaguccuu

SEQ ID NO: 453032 - RNA, 19 nt, Homo sapiens
  misc_RNA (1)...(19): siRNA sense strand
ucaaggugcuucccauguu

SEQ ID NO: 453033 - RNA, 19 nt, Homo sapiens
  misc_RNA (1)...(19): siRNA sense strand
gaguagacaccuaugagua

SEQ ID NO: 453034 - RNA, 19 nt, Homo sapiens
  misc_RNA (1)...(19): siRNA sense strand
ucuauggccuaucaguuua

SEQ ID NO: 453035 - RNA, 19 nt, Homo sapiens
  misc_RNA (1)...(19): siRNA sense strand
gaggagagaaggaaaugaa

SEQ ID NO: 453036 - RNA, 19 nt, Homo sapiens
  misc_RNA (1)...(19): siRNA sense strand
gacagcuucuuuaugauga

SEQ ID NO: 453037 - RNA, 19 nt, Homo sapiens
  misc_RNA (1)...(19): siRNA sense strand
uaacagaagauaccucaga

SEQ ID NO: 453038 - RNA, 19 nt, Homo sapiens
  misc_RNA (1)...(19): siRNA sense strand
agauguagauuuagaagga

SEQ ID NO: 453039 - RNA, 19 nt, Homo sapiens
  misc_RNA (1)...(19): siRNA sense strand
caagaaauuccaugaacuu

SEQ ID NO: 453040 - RNA, 19 nt, Homo sapiens
  misc_RNA (1)...(19): siRNA sense strand
gcccagcuccucagagaua

SEQ ID NO: 453041 - RNA, 19 nt, Homo sapiens
  misc_RNA (1)...(19): siRNA sense strand
acacugauuugcaaugcua

SEQ ID NO: 453042 - RNA, 19 nt, Homo sapiens
  misc_RNA (1)...(19): siRNA sense strand
gauggccaauugaauguga

SEQ ID NO: 453043 - RNA, 19 nt, Homo sapiens
  misc_RNA (1)...(19): siRNA sense strand
ggagcagacagcuucuuua

SEQ ID NO: 453044 - RNA, 19 nt, Homo sapiens
  misc_RNA (1)...(19): siRNA sense strand
ugaacgagucuuuccuuua

SEQ ID NO: 453045 - RNA, 19 nt, Homo sapiens
  misc_RNA (1)...(19): siRNA sense strand
gccaacacccgcaauauug

SEQ ID NO: 453046 - RNA, 19 nt, Homo sapiens
  misc_RNA (1)...(19): siRNA sense strand
agaaggaaaugaaaucaag

SEQ ID NO: 453047 - RNA, 19 nt, Homo sapiens
  misc_RNA (1)...(19): siRNA sense strand
uagaagccaucaacagaga

SEQ ID NO: 453048 - RNA, 19 nt, Homo sapiens
  misc_RNA (1)...(19): siRNA sense strand
aagggagaaugcagaauaa

SEQ ID NO: 453049 - RNA, 19 nt, Homo sapiens
  misc_RNA (1)...(19): siRNA sense strand
accgucaccuccaauauua

SEQ ID NO: 453050 - RNA, 19 nt, Homo sapiens
  misc_RNA (1)...(19): siRNA sense strand
aaacaacccuauccagucu

SEQ ID NO: 453051 - RNA, 19 nt, Homo sapiens
  misc_RNA (1)...(19): siRNA sense strand
aaacauccaucauauugag

SEQ ID NO: 453052 - RNA, 19 nt, Homo sapiens
  misc_RNA (1)...(19): siRNA sense strand
uagcugggauuacagauuc

SEQ ID NO: 453053 - RNA, 19 nt, Homo sapiens
  misc_RNA (1)...(19): siRNA sense strand
ggucuugagugccagaguu

SEQ ID NO: 453054 - RNA, 19 nt, Homo sapiens
  misc_RNA (1)...(19): siRNA sense strand
guaucaugcucuccaaaga

SEQ ID NO: 453055 - RNA, 19 nt, Homo sapiens
  misc_RNA (1)...(19): siRNA sense strand
ugccucagcuuuccgagua

SEQ ID NO: 453056 - RNA, 19 nt, Homo sapiens
  misc_RNA (1)...(19): siRNA sense strand
gaagauaccucagaaaagg

SEQ ID NO: 453057 - RNA, 19 nt, Homo sapiens
  misc_RNA (1)...(19): siRNA sense strand
gaugcagaaguuaaaguua

SEQ ID NO: 453058 - RNA, 19 nt, Homo sapiens
  misc_RNA (1)...(19): siRNA sense strand
cagauggucuuccuguuca

SEQ ID NO: 453059 - RNA, 19 nt, Homo sapiens
  misc_RNA (1)...(19): siRNA sense strand
ugacaguucucucucagau

SEQ ID NO: 453060 - RNA, 19 nt, Homo sapiens
  misc_RNA (1)...(19): siRNA sense strand
ggccacagucguaagaaua

SEQ ID NO: 453061 - RNA, 19 nt, Homo sapiens
  misc_RNA (1)...(19): siRNA sense strand
gagguucuguuguauugug

SEQ ID NO: 453062 - RNA, 19 nt, Homo sapiens
  misc_RNA (1)...(19): siRNA sense strand
gggauuacagauucacaua

SEQ ID NO: 453063 - RNA, 19 nt, Homo sapiens
  misc_RNA (1)...(19): siRNA sense strand
aaugugaggucaucaagga

SEQ ID NO: 453064 - RNA, 19 nt, Homo sapiens
  misc_RNA (1)...(19): siRNA sense strand
ccaaagagaaccauaaacu

SEQ ID NO: 453065 - RNA, 19 nt, Homo sapiens
  misc_RNA (1)...(19): siRNA sense strand
ggaaauccacaagaaauuc

SEQ ID NO: 453066 - RNA, 19 nt, Homo sapiens
  misc_RNA (1)...(19): siRNA sense strand
gcaaugcuaccuccuguca

SEQ ID NO: 453067 - RNA, 19 nt, Homo sapiens
  misc_RNA (1)...(19): siRNA sense strand
gagagaaggaaaugaaauc

SEQ ID NO: 453068 - RNA, 19 nt, Homo sapiens
  misc_RNA (1)...(19): siRNA sense strand
agacuauuccugauccuua

SEQ ID NO: 453069 - RNA, 19 nt, Homo sapiens
  misc_RNA (1)...(19): siRNA sense strand
cagaaaagaugcuaccuau

SEQ ID NO: 453070 - RNA, 19 nt, Homo sapiens
  misc_RNA (1)...(19): siRNA sense strand
cagcauguucggaagaaua

SEQ ID NO: 453071 - RNA, 19 nt, Homo sapiens
  misc_RNA (1)...(19): siRNA sense strand
cauaugaccaggacacuug

SEQ ID NO: 453072 - RNA, 19 nt, Homo sapiens
  misc_RNA (1)...(19): siRNA sense strand
ggaccauucaguuuccaua

SEQ ID NO: 453073 - RNA, 19 nt, Homo sapiens
  misc_RNA (1)...(19): siRNA sense strand
ggagagaaggaaaugaaau

SEQ ID NO: 453074 - RNA, 19 nt, Homo sapiens
  misc_RNA (1)...(19): siRNA sense strand
gaugcuaccuaucgcuuca

SEQ ID NO: 453075 - RNA, 19 nt, Homo sapiens
  misc_RNA (1)...(19): siRNA sense strand
ugaguuggaugaaguaaac

SEQ ID NO: 453076 - RNA, 19 nt, Homo sapiens
  misc_RNA (1)...(19): siRNA sense strand
caccagauaaguucucuuu

SEQ ID NO: 453077 - RNA, 19 nt, Homo sapiens
  misc_RNA (1)...(19): siRNA sense strand
gaaagagagguucuguugu

SEQ ID NO: 453078 - RNA, 19 nt, Homo sapiens
  misc_RNA (1)...(19): siRNA sense strand
uagauucagugccuauaga

SEQ ID NO: 453079 - RNA, 19 nt, Homo sapiens
  misc_RNA (1)...(19): siRNA sense strand
auucacauaugcugaguuu

SEQ ID NO: 453080 - RNA, 19 nt, Homo sapiens
  misc_RNA (1)...(19): siRNA sense strand
gggagaaugcagaauaaga

SEQ ID NO: 453081 - RNA, 19 nt, Homo sapiens
  misc_RNA (1)...(19): siRNA sense strand
aaggaacaguugucuauca

SEQ ID NO: 453082 - RNA, 19 nt, Homo sapiens
  misc_RNA (1)...(19): siRNA sense strand
guagacaccuaugaguaug

SEQ ID NO: 453083 - RNA, 19 nt, Homo sapiens
  misc_RNA (1)...(19): siRNA sense strand
acucagagaauuccaguuu

SEQ ID NO: 453084 - RNA, 19 nt, Homo sapiens
  misc_RNA (1)...(19): siRNA sense strand
cacaagaaauuccaugaac

SEQ ID NO: 453085 - RNA, 19 nt, Homo sapiens
  misc_RNA (1)...(19): siRNA sense strand
caaauacuggcuucaugaa

SEQ ID NO: 453086 - RNA, 19 nt, Homo sapiens
  misc_RNA (1)...(19): siRNA sense strand
uacauacacugauuugcaa

SEQ ID NO: 453087 - RNA, 19 nt, Homo sapiens
  misc_RNA (1)...(19): siRNA sense strand
gagaaggaaaugaaaucaa

SEQ ID NO: 453088 - RNA, 19 nt, Homo sapiens
  misc_RNA (1)...(19): siRNA sense strand
gaaauuagcagauugguaa

SEQ ID NO: 453089 - RNA, 19 nt, Homo sapiens
  misc_RNA (1)...(19): siRNA sense strand
ggaaauaccguguuuguaa

SEQ ID NO: 453090 - RNA, 19 nt, Homo sapiens
  misc_RNA (1)...(19): siRNA sense strand
gguaagaagugcaaauuau

SEQ ID NO: 453091 - RNA, 19 nt, Homo sapiens
  misc_RNA (1)...(19): siRNA sense strand
caagauaccuuacgcacaa

SEQ ID NO: 453092 - RNA, 19 nt, Homo sapiens
  misc_RNA (1)...(19): siRNA sense strand
guucaggaguuucaauuua

SEQ ID NO: 453093 - RNA, 19 nt, Homo sapiens
  misc_RNA (1)...(19): siRNA sense strand
ucaaagaccuucuguguuc

SEQ ID NO: 453094 - RNA, 19 nt, Homo sapiens
  misc_RNA (1)...(19): siRNA sense strand
gaugauaacugcuuuacug

SEQ ID NO: 453095 - RNA, 19 nt, Homo sapiens
  misc_RNA (1)...(19): siRNA sense strand
gaacaguagcgcaguauuu

SEQ ID NO: 453096 - RNA, 19 nt, Homo sapiens
  misc_RNA (1)...(19): siRNA sense strand
cuagaagucuguaauauug

SEQ ID NO: 453097 - RNA, 19 nt, Homo sapiens
  misc_RNA (1)...(19): siRNA sense strand
gaaauaccguguuuguaau

SEQ ID NO: 453098 - RNA, 19 nt, Homo sapiens
  misc_RNA (1)...(19): siRNA sense strand
gggcaacgauguaucaaga

SEQ ID NO: 453099 - RNA, 19 nt, Homo sapiens
  misc_RNA (1)...(19): siRNA sense strand
caucaaaccuuuccuuuac

SEQ ID NO: 453100 - RNA, 19 nt, Homo sapiens
  misc_RNA (1)...(19): siRNA sense strand
ccauuaaacugcuggcuaa

SEQ ID NO: 453101 - RNA, 19 nt, Homo sapiens
  misc_RNA (1)...(19): siRNA sense strand
ugaaauggcucauguaacu

SEQ ID NO: 453102 - RNA, 19 nt, Homo sapiens
  misc_RNA (1)...(19): siRNA sense strand
ucaagaagcuaacagacaa

SEQ ID NO: 453103 - RNA, 19 nt, Homo sapiens
  misc_RNA (1)...(19): siRNA sense strand
caagaccucugacugauuc

SEQ ID NO: 453104 - RNA, 19 nt, Homo sapiens
  misc_RNA (1)...(19): siRNA sense strand
gggaacuucuuauucaauu

SEQ ID NO: 453105 - RNA, 19 nt, Homo sapiens
  misc_RNA (1)...(19): siRNA sense strand
cgagaagccugcaucaguu

SEQ ID NO: 453106 - RNA, 19 nt, Homo sapiens
  misc_RNA (1)...(19): siRNA sense strand
guauuaugcucaccuggua

SEQ ID NO: 453107 - RNA, 19 nt, Homo sapiens
  misc_RNA (1)...(19): siRNA sense strand
ggacaaagaacaugacagu

SEQ ID NO: 453108 - RNA, 19 nt, Homo sapiens
  misc_RNA (1)...(19): siRNA sense strand
guacagauucaccaagaua

SEQ ID NO: 453109 - RNA, 19 nt, Homo sapiens
  misc_RNA (1)...(19): siRNA sense strand
gaacaaugagacggaaaua

SEQ ID NO: 453110 - RNA, 19 nt, Homo sapiens
  misc_RNA (1)...(19): siRNA sense strand
gaacuucagcugcuaacuu

SEQ ID NO: 453111 - RNA, 19 nt, Homo sapiens
  misc_RNA (1)...(19): siRNA sense strand
aaucagacuuccacuauga

SEQ ID NO: 453112 - RNA, 19 nt, Homo sapiens
  misc_RNA (1)...(19): siRNA sense strand
gcagugcagagaagaaaua

SEQ ID NO: 453113 - RNA, 19 nt, Homo sapiens
  misc_RNA (1)...(19): siRNA sense strand
gugcagagaagaaauauug

SEQ ID NO: 453114 - RNA, 19 nt, Homo sapiens
  misc_RNA (1)...(19): siRNA sense strand
gcacaauguacuucgcuua

SEQ ID NO: 453115 - RNA, 19 nt, Homo sapiens
  misc_RNA (1)...(19): siRNA sense strand
ccaaagagauaaaagguuu

SEQ ID NO: 453116 - RNA, 19 nt, Homo sapiens
  misc_RNA (1)...(19): siRNA sense strand
uacacgaucuguuucuaua

SEQ ID NO: 453117 - RNA, 19 nt, Homo sapiens
  misc_RNA (1)...(19): siRNA sense strand
ccacuagaagucuguaaua

SEQ ID NO: 453118 - RNA, 19 nt, Homo sapiens
  misc_RNA (1)...(19): siRNA sense strand
aaacuugugccuaaagaua

SEQ ID NO: 453119 - RNA, 19 nt, Homo sapiens
  misc_RNA (1)...(19): siRNA sense strand
caaggugucaaucaaauuu

SEQ ID NO: 453120 - RNA, 19 nt, Homo sapiens
  misc_RNA (1)...(19): siRNA sense strand
uaauucaguucauguguga

SEQ ID NO: 453121 - RNA, 19 nt, Homo sapiens
  misc_RNA (1)...(19): siRNA sense strand
ggguauggcuacacaaugu

SEQ ID NO: 453122 - RNA, 19 nt, Homo sapiens
  misc_RNA (1)...(19): siRNA sense strand
aaccuuuccuuuacaguua

SEQ ID NO: 453123 - RNA, 19 nt, Homo sapiens
  misc_RNA (1)...(19): siRNA sense strand
ugccaaggcuguacagauu

SEQ ID NO: 453124 - RNA, 19 nt, Homo sapiens
  misc_RNA (1)...(19): siRNA sense strand
ugacagugcugaaggaagu

SEQ ID NO: 453125 - RNA, 19 nt, Homo sapiens
  misc_RNA (1)...(19): siRNA sense strand
aacuucagcugcuaacuua

SEQ ID NO: 453126 - RNA, 19 nt, Homo sapiens
  misc_RNA (1)...(19): siRNA sense strand
ucggagggaucaauaauau

SEQ ID NO: 453127 - RNA, 19 nt, Homo sapiens
  misc_RNA (1)...(19): siRNA sense strand
ucacagaccagcugcguaa

SEQ ID NO: 453128 - RNA, 19 nt, Homo sapiens
  misc_RNA (1)...(19): siRNA sense strand
ggaaauuagcagauuggua

SEQ ID NO: 453129 - RNA, 19 nt, Homo sapiens
  misc_RNA (1)...(19): siRNA sense strand
caaagcacaaccuguaauu

SEQ ID NO: 453130 - RNA, 19 nt, Homo sapiens
  misc_RNA (1)...(19): siRNA sense strand
acaucacacucgauuauuu

SEQ ID NO: 453131 - RNA, 19 nt, Homo sapiens
  misc_RNA (1)...(19): siRNA sense strand
caucaaagaccuucugugu

SEQ ID NO: 453132 - RNA, 19 nt, Homo sapiens
  misc_RNA (1)...(19): siRNA sense strand
gcaacgauguaucaagaag

SEQ ID NO: 453133 - RNA, 19 nt, Homo sapiens
  misc_RNA (1)...(19): siRNA sense strand
gauaaaagguuugaagguu

SEQ ID NO: 453134 - RNA, 19 nt, Homo sapiens
  misc_RNA (1)...(19): siRNA sense strand
gaccagcugcguaagauuu

SEQ ID NO: 453135 - RNA, 19 nt, Homo sapiens
  misc_RNA (1)...(19): siRNA sense strand
uaacagacaaucagacuuc

SEQ ID NO: 453136 - RNA, 19 nt, Homo sapiens
  misc_RNA (1)...(19): siRNA sense strand
gaucaaggcaacagcaaga

SEQ ID NO: 453137 - RNA, 19 nt, Homo sapiens
  misc_RNA (1)...(19): siRNA sense strand
gcagagaagaaauauugaa

SEQ ID NO: 453138 - RNA, 19 nt, Homo sapiens
  misc_RNA (1)...(19): siRNA sense strand
ucccaaagauugaugucua

SEQ ID NO: 453139 - RNA, 19 nt, Homo sapiens
  misc_RNA (1)...(19): siRNA sense strand
guaagaagugcaaauuaug

SEQ ID NO: 453140 - RNA, 19 nt, Homo sapiens
  misc_RNA (1)...(19): siRNA sense strand
caaacucugucaaacuugu

SEQ ID NO: 453141 - RNA, 19 nt, Homo sapiens
  misc_RNA (1)...(19): siRNA sense strand
ucaucaaaccuuuccuuua

SEQ ID NO: 453142 - RNA, 19 nt, Homo sapiens
  misc_RNA (1)...(19): siRNA sense strand
gauagacaagaggaaauua

SEQ ID NO: 453143 - RNA, 19 nt, Homo sapiens
  misc_RNA (1)...(19): siRNA sense strand
gugugaaguucuugauauu

SEQ ID NO: 453144 - RNA, 19 nt, Homo sapiens
  misc_RNA (1)...(19): siRNA sense strand
ggagaaagacuaucaaccu

SEQ ID NO: 453145 - RNA, 19 nt, Homo sapiens
  misc_RNA (1)...(19): siRNA sense strand
ucaaacuugugccuaaaga

SEQ ID NO: 453146 - RNA, 19 nt, Homo sapiens
  misc_RNA (1)...(19): siRNA sense strand
cgacaucugcccuccauga

SEQ ID NO: 453147 - RNA, 19 nt, Homo sapiens
  misc_RNA (1)...(19): siRNA sense strand
caaggaggccugccaguca

SEQ ID NO: 453148 - RNA, 19 nt, Homo sapiens
  misc_RNA (1)...(19): siRNA sense strand
gaagugacucauuguggaa

SEQ ID NO: 453149 - RNA, 19 nt, Homo sapiens
  misc_RNA (1)...(19): siRNA sense strand
gagcaaccaagaccucuga

SEQ ID NO: 453150 - RNA, 19 nt, Homo sapiens
  misc_RNA (1)...(19): siRNA sense strand
gaacaugacagugcugaag

SEQ ID NO: 453151 - RNA, 19 nt, Homo sapiens
  misc_RNA (1)...(19): siRNA sense strand
gggcaaacccauuaaacug

SEQ ID NO: 453152 - RNA, 19 nt, Homo sapiens
  misc_RNA (1)...(19): siRNA sense strand
gagaagccugcaucaguuu

SEQ ID NO: 453153 - RNA, 19 nt, Homo sapiens
  misc_RNA (1)...(19): siRNA sense strand
guucaagucaagaauguaa

SEQ ID NO: 453154 - RNA, 19 nt, Homo sapiens
  misc_RNA (1)...(19): siRNA sense strand
gcagggcaacgauguauca

SEQ ID NO: 453155 - RNA, 19 nt, Homo sapiens
  misc_RNA (1)...(19): siRNA sense strand
gaauuagacaagccaauca

SEQ ID NO: 453156 - RNA, 19 nt, Homo sapiens
  misc_RNA (1)...(19): siRNA sense strand
aaacaucuccucaaacucu

SEQ ID NO: 453157 - RNA, 19 nt, Homo sapiens
  misc_RNA (1)...(19): siRNA sense strand
acaccuaccugccacuaga

SEQ ID NO: 453158 - RNA, 19 nt, Homo sapiens
  misc_RNA (1)...(19): siRNA sense strand
ugugugaaguucuugauau

SEQ ID NO: 453159 - RNA, 19 nt, Homo sapiens
  misc_RNA (1)...(19): siRNA sense strand
ugagguagauauuaaacca

SEQ ID NO: 453160 - RNA, 19 nt, Homo sapiens
  misc_RNA (1)...(19): siRNA sense strand
ccaaggcuguacagauuca

SEQ ID NO: 453161 - RNA, 19 nt, Homo sapiens
  misc_RNA (1)...(19): siRNA sense strand
uggaagaaguggcaauauc

SEQ ID NO: 453162 - RNA, 19 nt, Homo sapiens
  misc_RNA (1)...(19): siRNA sense strand
agaaaggguuggaagaagu

SEQ ID NO: 453163 - RNA, 19 nt, Homo sapiens
  misc_RNA (1)...(19): siRNA sense strand
gcaucaguuuggagaaaga

SEQ ID NO: 453164 - RNA, 19 nt, Homo sapiens
  misc_RNA (1)...(19): siRNA sense strand
ggaagugaaacguguagga

SEQ ID NO: 453165 - RNA, 19 nt, Homo sapiens
  misc_RNA (1)...(19): siRNA sense strand
ccacacaggaguugaaauc

SEQ ID NO: 453166 - RNA, 19 nt, Homo sapiens
  misc_RNA (1)...(19): siRNA sense strand
ggacggaaucggacaguag

SEQ ID NO: 453167 - RNA, 19 nt, Homo sapiens
  misc_RNA (1)...(19): siRNA sense strand
aagaggaaauuagcagauu

SEQ ID NO: 453168 - RNA, 19 nt, Homo sapiens
  misc_RNA (1)...(19): siRNA sense strand
agagaacaguagcgcagua

SEQ ID NO: 453169 - RNA, 19 nt, Homo sapiens
  misc_RNA (1)...(19): siRNA sense strand
ggaauuagacaagccaauc

SEQ ID NO: 453170 - RNA, 19 nt, Homo sapiens
  misc_RNA (1)...(19): siRNA sense strand
gaaaggguuggaagaagug

SEQ ID NO: 453171 - RNA, 19 nt, Homo sapiens
  misc_RNA (1)...(19): siRNA sense strand
gcaguuuaggcagguauua

SEQ ID NO: 453172 - RNA, 19 nt, Homo sapiens
  misc_RNA (1)...(19): siRNA sense strand
aaacucggagggaucaaua

SEQ ID NO: 453173 - RNA, 19 nt, Homo sapiens
  misc_RNA (1)...(19): siRNA sense strand
caaucagacuuccacuaug

SEQ ID NO: 453174 - RNA, 19 nt, Homo sapiens
  misc_RNA (1)...(19): siRNA sense strand
uaccguguuuguaauguaa

SEQ ID NO: 453175 - RNA, 19 nt, Homo sapiens
  misc_RNA (1)...(19): siRNA sense strand
ggaacaaugagacggaaau

SEQ ID NO: 453176 - RNA, 19 nt, Homo sapiens
  misc_RNA (1)...(19): siRNA sense strand
agacaucacacucgauuau

SEQ ID NO: 453177 - RNA, 19 nt, Homo sapiens
  misc_RNA (1)...(19): siRNA sense strand
gcaccuaugcuccaguaug

SEQ ID NO: 453178 - RNA, 19 nt, Homo sapiens
  misc_RNA (1)...(19): siRNA sense strand
acaaucagacuuccacuau

SEQ ID NO: 453179 - RNA, 19 nt, Homo sapiens
  misc_RNA (1)...(19): siRNA sense strand
cucaaacucugucaaacuu

SEQ ID NO: 453180 - RNA, 19 nt, Homo sapiens
  misc_RNA (1)...(19): siRNA sense strand
caaguugaaaucccaaaga

SEQ ID NO: 453181 - RNA, 19 nt, Homo sapiens
  misc_RNA (1)...(19): siRNA sense strand
gcugaaggaagucacguuu

SEQ ID NO: 453182 - RNA, 19 nt, Homo sapiens
  misc_RNA (1)...(19): siRNA sense strand
uaccugcaccagcguauua

SEQ ID NO: 453183 - RNA, 19 nt, Homo sapiens
  misc_RNA (1)...(19): siRNA sense strand
uaucccagcuggaacaaca

SEQ ID NO: 453184 - RNA, 19 nt, Homo sapiens
  misc_RNA (1)...(19): siRNA sense strand
aggcagguauuauauuaug

SEQ ID NO: 453185 - RNA, 19 nt, Homo sapiens
  misc_RNA (1)...(19): siRNA sense strand
cacuagaagucuguaauau

SEQ ID NO: 453186 - RNA, 19 nt, Homo sapiens
  misc_RNA (1)...(19): siRNA sense strand
gcauuuagagccagauauc

SEQ ID NO: 453187 - RNA, 19 nt, Homo sapiens
  misc_RNA (1)...(19): siRNA sense strand
cagccaugcuucugcaaau

SEQ ID NO: 453188 - RNA, 19 nt, Homo sapiens
  misc_RNA (1)...(19): siRNA sense strand
gaaauuagcagauugguaa

SEQ ID NO: 453189 - RNA, 19 nt, Homo sapiens
  misc_RNA (1)...(19): siRNA sense strand
ggaaauaccguguuuguaa

SEQ ID NO: 453190 - RNA, 19 nt, Homo sapiens
  misc_RNA (1)...(19): siRNA sense strand
gguaagaagugcaaauuau

SEQ ID NO: 453191 - RNA, 19 nt, Homo sapiens
  misc_RNA (1)...(19): siRNA sense strand
caagauaccuuacgcacaa

SEQ ID NO: 453192 - RNA, 19 nt, Homo sapiens
  misc_RNA (1)...(19): siRNA sense strand
guucaggaguuucaauuua

SEQ ID NO: 453193 - RNA, 19 nt, Homo sapiens
  misc_RNA (1)...(19): siRNA sense strand
ucaaagaccuucuguguuc

SEQ ID NO: 453194 - RNA, 19 nt, Homo sapiens
  misc_RNA (1)...(19): siRNA sense strand
gaugauaacugcuuuacug

SEQ ID NO: 453195 - RNA, 19 nt, Homo sapiens
  misc_RNA (1)...(19): siRNA sense strand
gaacaguagcgcaguauuu

SEQ ID NO: 453196 - RNA, 19 nt, Homo sapiens
  misc_RNA (1)...(19): siRNA sense strand
cuagaagucuguaauauug

SEQ ID NO: 453197 - RNA, 19 nt, Homo sapiens
  misc_RNA (1)...(19): siRNA sense strand
gaaauaccguguuuguaau

SEQ ID NO: 453198 - RNA, 19 nt, Homo sapiens
  misc_RNA (1)...(19): siRNA sense strand
gggcaacgauguaucaaga

SEQ ID NO: 453199 - RNA, 19 nt, Homo sapiens
  misc_RNA (1)...(19): siRNA sense strand
caucaaaccuuuccuuuac

SEQ ID NO: 453200 - RNA, 19 nt, Homo sapiens
  misc_RNA (1)...(19): siRNA sense strand
ugaaauggcucauguaacu

SEQ ID NO: 453201 - RNA, 19 nt, Homo sapiens
  misc_RNA (1)...(19): siRNA sense strand
ucaagaagcuaacagacaa

SEQ ID NO: 453202 - RNA, 19 nt, Homo sapiens
  misc_RNA (1)...(19): siRNA sense strand
caagaccucugacugauuc

SEQ ID NO: 453203 - RNA, 19 nt, Homo sapiens
  misc_RNA (1)...(19): siRNA sense strand
gggaacuucuuauucaauu

SEQ ID NO: 453204 - RNA, 19 nt, Homo sapiens
  misc_RNA (1)...(19): siRNA sense strand
cgagaagccugcaucaguu

SEQ ID NO: 453205 - RNA, 19 nt, Homo sapiens
  misc_RNA (1)...(19): siRNA sense strand
guauuaugcucaccuggua

SEQ ID NO: 453206 - RNA, 19 nt, Homo sapiens
  misc_RNA (1)...(19): siRNA sense strand
ggacaaagaacaugacagu

SEQ ID NO: 453207 - RNA, 19 nt, Homo sapiens
  misc_RNA (1)...(19): siRNA sense strand
guacagauucaccaagaua

SEQ ID NO: 453208 - RNA, 19 nt, Homo sapiens
  misc_RNA (1)...(19): siRNA sense strand
gaacaaugagacggaaaua

SEQ ID NO: 453209 - RNA, 19 nt, Homo sapiens
  misc_RNA (1)...(19): siRNA sense strand
gaacuucagcugcuaacuu

SEQ ID NO: 453210 - RNA, 19 nt, Homo sapiens
  misc_RNA (1)...(19): siRNA sense strand
aaucagacuuccacuauga

SEQ ID NO: 453211 - RNA, 19 nt, Homo sapiens
  misc_RNA (1)...(19): siRNA sense strand
gcagugcagagaagaaaua

SEQ ID NO: 453212 - RNA, 19 nt, Homo sapiens
  misc_RNA (1)...(19): siRNA sense strand
gugcagagaagaaauauug

SEQ ID NO: 453213 - RNA, 19 nt, Homo sapiens
  misc_RNA (1)...(19): siRNA sense strand
gcacaauguacuucgcuua

SEQ ID NO: 453214 - RNA, 19 nt, Homo sapiens
  misc_RNA (1)...(19): siRNA sense strand
ccaaagagauaaaagguuu

SEQ ID NO: 453215 - RNA, 19 nt, Homo sapiens
  misc_RNA (1)...(19): siRNA sense strand
uacacgaucuguuucuaua

SEQ ID NO: 453216 - RNA, 19 nt, Homo sapiens
  misc_RNA (1)...(19): siRNA sense strand
ccacuagaagucuguaaua

SEQ ID NO: 453217 - RNA, 19 nt, Homo sapiens
  misc_RNA (1)...(19): siRNA sense strand
aaacuugugccuaaagaua

SEQ ID NO: 453218 - RNA, 19 nt, Homo sapiens
  misc_RNA (1)...(19): siRNA sense strand
ggguauggcuacacaaugu

SEQ ID NO: 453219 - RNA, 19 nt, Homo sapiens
  misc_RNA (1)...(19): siRNA sense strand
aaccuuuccuuuacaguua

SEQ ID NO: 453220 - RNA, 19 nt, Homo sapiens
  misc_RNA (1)...(19): siRNA sense strand
ugccaaggcuguacagauu

SEQ ID NO: 453221 - RNA, 19 nt, Homo sapiens
  misc_RNA (1)...(19): siRNA sense strand
ugacagugcugaaggaagu

SEQ ID NO: 453222 - RNA, 19 nt, Homo sapiens
  misc_RNA (1)...(19): siRNA sense strand
aacuucagcugcuaacuua

SEQ ID NO: 453223 - RNA, 19 nt, Homo sapiens
  misc_RNA (1)...(19): siRNA sense strand
ucggagggaucaauaauau

SEQ ID NO: 453224 - RNA, 19 nt, Homo sapiens
  misc_RNA (1)...(19): siRNA sense strand
ucacagaccagcugcguaa

SEQ ID NO: 453225 - RNA, 19 nt, Homo sapiens
  misc_RNA (1)...(19): siRNA sense strand
ggaaauuagcagauuggua

SEQ ID NO: 453226 - RNA, 19 nt, Homo sapiens
  misc_RNA (1)...(19): siRNA sense strand
gcaacgauguaucaagaag

SEQ ID NO: 453227 - RNA, 19 nt, Homo sapiens
  misc_RNA (1)...(19): siRNA sense strand
acaucacacucgauuauuu

SEQ ID NO: 453228 - RNA, 19 nt, Homo sapiens
  misc_RNA (1)...(19): siRNA sense strand
caucaaagaccuucugugu

SEQ ID NO: 453229 - RNA, 19 nt, Homo sapiens
  misc_RNA (1)...(19): siRNA sense strand
uaacagacaaucagacuuc

SEQ ID NO: 453230 - RNA, 19 nt, Homo sapiens
  misc_RNA (1)...(19): siRNA sense strand
gauaaaagguuugaagguu

SEQ ID NO: 453231 - RNA, 19 nt, Homo sapiens
  misc_RNA (1)...(19): siRNA sense strand
gaccagcugcguaagauuu

SEQ ID NO: 453232 - RNA, 19 nt, Homo sapiens
  misc_RNA (1)...(19): siRNA sense strand
gaucaaggcaacagcaaga

SEQ ID NO: 453233 - RNA, 19 nt, Homo sapiens
  misc_RNA (1)...(19): siRNA sense strand
gcagagaagaaauauugaa

SEQ ID NO: 453234 - RNA, 19 nt, Homo sapiens
  misc_RNA (1)...(19): siRNA sense strand
guaagaagugcaaauuaug

SEQ ID NO: 453235 - RNA, 19 nt, Homo sapiens
  misc_RNA (1)...(19): siRNA sense strand
caaacucugucaaacuugu

SEQ ID NO: 453236 - RNA, 19 nt, Homo sapiens
  misc_RNA (1)...(19): siRNA sense strand
ucaucaaaccuuuccuuua

SEQ ID NO: 453237 - RNA, 19 nt, Homo sapiens
  misc_RNA (1)...(19): siRNA sense strand
gauagacaagaggaaauua

SEQ ID NO: 453238 - RNA, 19 nt, Homo sapiens
  misc_RNA (1)...(19): siRNA sense strand
gugugaaguucuugauauu

SEQ ID NO: 453239 - RNA, 19 nt, Homo sapiens
  misc_RNA (1)...(19): siRNA sense strand
ggagaaagacuaucaaccu

SEQ ID NO: 453240 - RNA, 19 nt, Homo sapiens
  misc_RNA (1)...(19): siRNA sense strand
ucaaacuugugccuaaaga

SEQ ID NO: 453241 - RNA, 19 nt, Homo sapiens
  misc_RNA (1)...(19): siRNA sense strand
caaggaggccugccaguca

SEQ ID NO: 453242 - RNA, 19 nt, Homo sapiens
  misc_RNA (1)...(19): siRNA sense strand
gaagugacucauuguggaa

SEQ ID NO: 453243 - RNA, 19 nt, Homo sapiens
  misc_RNA (1)...(19): siRNA sense strand
gcagggcaacgauguauca

SEQ ID NO: 453244 - RNA, 19 nt, Homo sapiens
  misc_RNA (1)...(19): siRNA sense strand
gaacaugacagugcugaag

SEQ ID NO: 453245 - RNA, 19 nt, Homo sapiens
  misc_RNA (1)...(19): siRNA sense strand
gagaagccugcaucaguuu

SEQ ID NO: 453246 - RNA, 19 nt, Homo sapiens
  misc_RNA (1)...(19): siRNA sense strand
gagcaaccaagaccucuga

SEQ ID NO: 453247 - RNA, 19 nt, Homo sapiens
  misc_RNA (1)...(19): siRNA sense strand
guucaagucaagaauguaa

SEQ ID NO: 453248 - RNA, 19 nt, Homo sapiens
  misc_RNA (1)...(19): siRNA sense strand
acaccuaccugccacuaga

SEQ ID NO: 453249 - RNA, 19 nt, Homo sapiens
  misc_RNA (1)...(19): siRNA sense strand
aaacaucuccucaaacucu

SEQ ID NO: 453250 - RNA, 19 nt, Homo sapiens
  misc_RNA (1)...(19): siRNA sense strand
agagaacaguagcgcagua

SEQ ID NO: 453251 - RNA, 19 nt, Homo sapiens
  misc_RNA (1)...(19): siRNA sense strand
ccaaggcuguacagauuca

SEQ ID NO: 453252 - RNA, 19 nt, Homo sapiens
  misc_RNA (1)...(19): siRNA sense strand
uggaagaaguggcaauauc

SEQ ID NO: 453253 - RNA, 19 nt, Homo sapiens
  misc_RNA (1)...(19): siRNA sense strand
agaaaggguuggaagaagu

SEQ ID NO: 453254 - RNA, 19 nt, Homo sapiens
  misc_RNA (1)...(19): siRNA sense strand
gcaucaguuuggagaaaga

SEQ ID NO: 453255 - RNA, 19 nt, Homo sapiens
  misc_RNA (1)...(19): siRNA sense strand
ggaagugaaacguguagga

SEQ ID NO: 453256 - RNA, 19 nt, Homo sapiens
  misc_RNA (1)...(19): siRNA sense strand
ccacacaggaguugaaauc

SEQ ID NO: 453257 - RNA, 19 nt, Homo sapiens
  misc_RNA (1)...(19): siRNA sense strand
ggacggaaucggacaguag

SEQ ID NO: 453258 - RNA, 19 nt, Homo sapiens
  misc_RNA (1)...(19): siRNA sense strand
aagaggaaauuagcagauu

SEQ ID NO: 453259 - RNA, 19 nt, Homo sapiens
  misc_RNA (1)...(19): siRNA sense strand
caaucagacuuccacuaug

SEQ ID NO: 453260 - RNA, 19 nt, Homo sapiens
  misc_RNA (1)...(19): siRNA sense strand
gaaaggguuggaagaagug

SEQ ID NO: 453261 - RNA, 19 nt, Homo sapiens
  misc_RNA (1)...(19): siRNA sense strand
uaccguguuuguaauguaa

SEQ ID NO: 453262 - RNA, 19 nt, Homo sapiens
  misc_RNA (1)...(19): siRNA sense strand
gcaguuuaggcagguauua

SEQ ID NO: 453263 - RNA, 19 nt, Homo sapiens
  misc_RNA (1)...(19): siRNA sense strand
aaacucggagggaucaaua

SEQ ID NO: 453264 - RNA, 19 nt, Homo sapiens
  misc_RNA (1)...(19): siRNA sense strand
acaaucagacuuccacuau

SEQ ID NO: 453265 - RNA, 19 nt, Homo sapiens
  misc_RNA (1)...(19): siRNA sense strand
ggaacaaugagacggaaau

SEQ ID NO: 453266 - RNA, 19 nt, Homo sapiens
  misc_RNA (1)...(19): siRNA sense strand
agacaucacacucgauuau

SEQ ID NO: 453267 - RNA, 19 nt, Homo sapiens
  misc_RNA (1)...(19): siRNA sense strand
gcaccuaugcuccaguaug

SEQ ID NO: 453268 - RNA, 19 nt, Homo sapiens
  misc_RNA (1)...(19): siRNA sense strand
cucaaacucugucaaacuu

SEQ ID NO: 453269 - RNA, 19 nt, Homo sapiens
  misc_RNA (1)...(19): siRNA sense strand
gcugaaggaagucacguuu

SEQ ID NO: 453270 - RNA, 19 nt, Homo sapiens
  misc_RNA (1)...(19): siRNA sense strand
uaccugcaccagcguauua

SEQ ID NO: 453271 - RNA, 19 nt, Homo sapiens
  misc_RNA (1)...(19): siRNA sense strand
uaucccagcuggaacaaca

SEQ ID NO: 453272 - RNA, 19 nt, Homo sapiens
  misc_RNA (1)...(19): siRNA sense strand
aggcagguauuauauuaug

SEQ ID NO: 453273 - RNA, 19 nt, Homo sapiens
  misc_RNA (1)...(19): siRNA sense strand
cacuagaagucuguaauau

SEQ ID NO: 453274 - RNA, 19 nt, Homo sapiens
  misc_RNA (1)...(19): siRNA sense strand
gcauuuagagccagauauc

SEQ ID NO: 453275 - RNA, 19 nt, Homo sapiens
  misc_RNA (1)...(19): siRNA sense strand
cagccaugcuucugcaaau

SEQ ID NO: 453276 - RNA, 19 nt, Homo sapiens
  misc_RNA (1)...(19): siRNA sense strand
agaggaaauuagcagauug

SEQ ID NO: 453277 - RNA, 19 nt, Homo sapiens
  misc_RNA (1)...(19): siRNA sense strand
guacacgaucuguuucuau

SEQ ID NO: 453278 - RNA, 19 nt, Homo sapiens
  misc_RNA (1)...(19): siRNA sense strand
cagaaaggguuggaagaag

SEQ ID NO: 453279 - RNA, 19 nt, Homo sapiens
  misc_RNA (1)...(19): siRNA sense strand
uaagucaacucgguucaag

SEQ ID NO: 453280 - RNA, 19 nt, Homo sapiens
  misc_RNA (1)...(19): siRNA sense strand
ugcguaagauuucuaagga

SEQ ID NO: 453281 - RNA, 19 nt, Homo sapiens
  misc_RNA (1)...(19): siRNA sense strand
gacaaucagacuuccacua

SEQ ID NO: 453282 - RNA, 19 nt, Homo sapiens
  misc_RNA (1)...(19): siRNA sense strand
cacaauguacuucgcuuaa

SEQ ID NO: 453283 - RNA, 19 nt, Homo sapiens
  misc_RNA (1)...(19): siRNA sense strand
uaccagcucugccacacuu

SEQ ID NO: 453284 - RNA, 19 nt, Homo sapiens
  misc_RNA (1)...(19): siRNA sense strand
caccuaugcuccaguaugg

SEQ ID NO: 453285 - RNA, 19 nt, Homo sapiens
  misc_RNA (1)...(19): siRNA sense strand
cuacucguaucaucuuuua

SEQ ID NO: 453286 - RNA, 19 nt, Homo sapiens
  misc_RNA (1)...(19): siRNA sense strand
ggcaauaucccagcuggaa

SEQ ID NO: 453287 - RNA, 19 nt, Homo sapiens
  misc_RNA (1)...(19): siRNA sense strand
gagacaucacacucgauua

SEQ ID NO: 453288 - RNA, 19 nt, Homo sapiens
  misc_RNA (1)...(19): siRNA sense strand
gaacaugcuuguacuguca

SEQ ID NO: 453289 - RNA, 19 nt, Homo sapiens
  misc_RNA (1)...(19): siRNA sense strand
ggucauaccucgucaguca

SEQ ID NO: 453290 - RNA, 19 nt, Homo sapiens
  misc_RNA (1)...(19): siRNA sense strand
ugacuugccuuguguuauu

SEQ ID NO: 453291 - RNA, 19 nt, Homo sapiens
  misc_RNA (1)...(19): siRNA sense strand
ggaugaaguuccugaugaa

SEQ ID NO: 453292 - RNA, 19 nt, Homo sapiens
  misc_RNA (1)...(19): siRNA sense strand
aaaggucccugaugucaaa

SEQ ID NO: 453293 - RNA, 19 nt, Homo sapiens
  misc_RNA (1)...(19): siRNA sense strand
gaagauggaaccaaggaaa

SEQ ID NO: 453294 - RNA, 19 nt, Homo sapiens
  misc_RNA (1)...(19): siRNA sense strand
ggaagucauugcugaagau

SEQ ID NO: 453295 - RNA, 19 nt, Homo sapiens
  misc_RNA (1)...(19): siRNA sense strand
ccaaggaaauagaaaguca

SEQ ID NO: 453296 - RNA, 19 nt, Homo sapiens
  misc_RNA (1)...(19): siRNA sense strand
ugaaguuccugaugaaguu

SEQ ID NO: 453297 - RNA, 19 nt, Homo sapiens
  misc_RNA (1)...(19): siRNA sense strand
ccaugcaguuguugaagua

SEQ ID NO: 453298 - RNA, 19 nt, Homo sapiens
  misc_RNA (1)...(19): siRNA sense strand
cagcagacauuucucagau

SEQ ID NO: 453299 - RNA, 19 nt, Homo sapiens
  misc_RNA (1)...(19): siRNA sense strand
gaaguugagaaccaguuua

SEQ ID NO: 453300 - RNA, 19 nt, Homo sapiens
  misc_RNA (1)...(19): siRNA sense strand
caagaugaaggauaaacua

SEQ ID NO: 453301 - RNA, 19 nt, Homo sapiens
  misc_RNA (1)...(19): siRNA sense strand
ggcauuacgccaccacuua

SEQ ID NO: 453302 - RNA, 19 nt, Homo sapiens
  misc_RNA (1)...(19): siRNA sense strand
acagaaggaucucaucaug

SEQ ID NO: 453303 - RNA, 19 nt, Homo sapiens
  misc_RNA (1)...(19): siRNA sense strand
gaaauucagaagcagauug

SEQ ID NO: 453304 - RNA, 19 nt, Homo sapiens
  misc_RNA (1)...(19): siRNA sense strand
gugucaagaugaaggauaa

SEQ ID NO: 453305 - RNA, 19 nt, Homo sapiens
  misc_RNA (1)...(19): siRNA sense strand
guugagaaccaguuuauau

SEQ ID NO: 453306 - RNA, 19 nt, Homo sapiens
  misc_RNA (1)...(19): siRNA sense strand
aguagaagaugucccacua

SEQ ID NO: 453307 - RNA, 19 nt, Homo sapiens
  misc_RNA (1)...(19): siRNA sense strand
gcauuacgccaccacuuaa

SEQ ID NO: 453308 - RNA, 19 nt, Homo sapiens
  misc_RNA (1)...(19): siRNA sense strand
cugcuaagcugguugacuu

SEQ ID NO: 453309 - RNA, 19 nt, Homo sapiens
  misc_RNA (1)...(19): siRNA sense strand
cagcuugaguuacaggaaa

SEQ ID NO: 453310 - RNA, 19 nt, Homo sapiens
  misc_RNA (1)...(19): siRNA sense strand
gggaagucauugcugaaga

SEQ ID NO: 453311 - RNA, 19 nt, Homo sapiens
  misc_RNA (1)...(19): siRNA sense strand
gagaaccaguuuauauugc

SEQ ID NO: 453312 - RNA, 19 nt, Homo sapiens
  misc_RNA (1)...(19): siRNA sense strand
gaaccaaggaaauagaaag

SEQ ID NO: 453313 - RNA, 19 nt, Homo sapiens
  misc_RNA (1)...(19): siRNA sense strand
cuacugauccuaauauagu

SEQ ID NO: 453314 - RNA, 19 nt, Homo sapiens
  misc_RNA (1)...(19): siRNA sense strand
ugagaaccaguuuauauug

SEQ ID NO: 453315 - RNA, 19 nt, Homo sapiens
  misc_RNA (1)...(19): siRNA sense strand
aagaaaagguuccggaaaa

SEQ ID NO: 453316 - RNA, 19 nt, Homo sapiens
  misc_RNA (1)...(19): siRNA sense strand
uggagcagcuugaguuaca

SEQ ID NO: 453317 - RNA, 19 nt, Homo sapiens
  misc_RNA (1)...(19): siRNA sense strand
ccugagaacgcuugauaaa

SEQ ID NO: 453318 - RNA, 19 nt, Homo sapiens
  misc_RNA (1)...(19): siRNA sense strand
cgccaccacuuaagaaugu

SEQ ID NO: 453319 - RNA, 19 nt, Homo sapiens
  misc_RNA (1)...(19): siRNA sense strand
aggaacaguugcagcguuu

SEQ ID NO: 453320 - RNA, 19 nt, Homo sapiens
  misc_RNA (1)...(19): siRNA sense strand
ugaaagccaggaugaaguu

SEQ ID NO: 453321 - RNA, 19 nt, Homo sapiens
  misc_RNA (1)...(19): siRNA sense strand
ucauggaaauucagaagca

SEQ ID NO: 453322 - RNA, 19 nt, Homo sapiens
  misc_RNA (1)...(19): siRNA sense strand
agucauugcugaagaugga

SEQ ID NO: 453323 - RNA, 19 nt, Homo sapiens
  misc_RNA (1)...(19): siRNA sense strand
ggucccugaugucaaagaa

SEQ ID NO: 453324 - RNA, 19 nt, Homo sapiens
  misc_RNA (1)...(19): siRNA sense strand
ggaaccaaggaaauagaaa

SEQ ID NO: 453325 - RNA, 19 nt, Homo sapiens
  misc_RNA (1)...(19): siRNA sense strand
ucucaaagugucaagauga

SEQ ID NO: 453326 - RNA, 19 nt, Homo sapiens
  misc_RNA (1)...(19): siRNA sense strand
ccagcugccucuacugauc

SEQ ID NO: 453327 - RNA, 19 nt, Homo sapiens
  misc_RNA (1)...(19): siRNA sense strand
aaacagcagacauuucuca

SEQ ID NO: 453328 - RNA, 19 nt, Homo sapiens
  misc_RNA (1)...(19): siRNA sense strand
agacauuucucagaugcuu

SEQ ID NO: 453329 - RNA, 19 nt, Homo sapiens
  misc_RNA (1)...(19): siRNA sense strand
gaagcucauuucccuacag

SEQ ID NO: 453330 - RNA, 19 nt, Homo sapiens
  misc_RNA (1)...(19): siRNA sense strand
cgucagucauggaaauuca

SEQ ID NO: 453331 - RNA, 19 nt, Homo sapiens
  misc_RNA (1)...(19): siRNA sense strand
ccuagcacguucucaaagu

SEQ ID NO: 453332 - RNA, 19 nt, Homo sapiens
  misc_RNA (1)...(19): siRNA sense strand
ccucgucagucauggaaau

SEQ ID NO: 453333 - RNA, 19 nt, Homo sapiens
  misc_RNA (1)...(19): siRNA sense strand
gccaugcaguuguugaagu

SEQ ID NO: 453334 - RNA, 19 nt, Homo sapiens
  misc_RNA (1)...(19): siRNA sense strand
ucccugaugucaaagaaau

SEQ ID NO: 453335 - RNA, 19 nt, Homo sapiens
  misc_RNA (1)...(19): siRNA sense strand
gcacugcugauggugauau

SEQ ID NO: 453336 - RNA, 19 nt, Homo sapiens
  misc_RNA (1)...(19): siRNA sense strand
agauggaaccaaggaaaua

SEQ ID NO: 453337 - RNA, 19 nt, Homo sapiens
  misc_RNA (1)...(19): siRNA sense strand
gaagaaccagcugccucua

SEQ ID NO: 453338 - RNA, 19 nt, Homo sapiens
  misc_RNA (1)...(19): siRNA sense strand
cucaaagugucaagaugaa

SEQ ID NO: 453339 - RNA, 19 nt, Homo sapiens
  misc_RNA (1)...(19): siRNA sense strand
aaauucagaagcagauuga

SEQ ID NO: 453340 - RNA, 19 nt, Homo sapiens
  misc_RNA (1)...(19): siRNA sense strand
ugacacucaagaaucauuu

SEQ ID NO: 453341 - RNA, 19 nt, Homo sapiens
  misc_RNA (1)...(19): siRNA sense strand
guugacuugccuuguguua

SEQ ID NO: 453342 - RNA, 19 nt, Homo sapiens
  misc_RNA (1)...(19): siRNA sense strand
ggaaauucagaagcagauu

SEQ ID NO: 453343 - RNA, 19 nt, Homo sapiens
  misc_RNA (1)...(19): siRNA sense strand
gauggaaccaaggaaauag

SEQ ID NO: 453344 - RNA, 19 nt, Homo sapiens
  misc_RNA (1)...(19): siRNA sense strand
ugaaguugagaaccaguuu

SEQ ID NO: 453345 - RNA, 19 nt, Homo sapiens
  misc_RNA (1)...(19): siRNA sense strand
ggaaaaugaaguaaagaga

SEQ ID NO: 453346 - RNA, 19 nt, Homo sapiens
  misc_RNA (1)...(19): siRNA sense strand
gugcacugcugauggugau

SEQ ID NO: 453347 - RNA, 19 nt, Homo sapiens
  misc_RNA (1)...(19): siRNA sense strand
cuagcacguucucaaagug

SEQ ID NO: 453348 - RNA, 19 nt, Homo sapiens
  misc_RNA (1)...(19): siRNA sense strand
gacagaaggaucucaucau

SEQ ID NO: 453349 - RNA, 19 nt, Homo sapiens
  misc_RNA (1)...(19): siRNA sense strand
gacuugccuuguguuauug

SEQ ID NO: 453350 - RNA, 19 nt, Homo sapiens
  misc_RNA (1)...(19): siRNA sense strand
aaaccugacacucaagaau

SEQ ID NO: 453351 - RNA, 19 nt, Homo sapiens
  misc_RNA (1)...(19): siRNA sense strand
agacagaaggaucucauca

SEQ ID NO: 453352 - RNA, 19 nt, Homo sapiens
  misc_RNA (1)...(19): siRNA sense strand
cagaauaaagcacaaagac

SEQ ID NO: 453353 - RNA, 19 nt, Homo sapiens
  misc_RNA (1)...(19): siRNA sense strand
gaugucaaagaaauggaaa

SEQ ID NO: 453354 - RNA, 19 nt, Homo sapiens
  misc_RNA (1)...(19): siRNA sense strand
ccucuacugauccuaauau

SEQ ID NO: 453355 - RNA, 19 nt, Homo sapiens
  misc_RNA (1)...(19): siRNA sense strand
agaauaaagcacaaagaca

SEQ ID NO: 453356 - RNA, 19 nt, Homo sapiens
  misc_RNA (1)...(19): siRNA sense strand
ucagaauaaagcacaaaga

SEQ ID NO: 453357 - RNA, 19 nt, Homo sapiens
  misc_RNA (1)...(19): siRNA sense strand
ucagaagcagauugagaaa

SEQ ID NO: 453358 - RNA, 19 nt, Homo sapiens
  misc_RNA (1)...(19): siRNA sense strand
cugaugaaguugagaacca

SEQ ID NO: 453359 - RNA, 19 nt, Homo sapiens
  misc_RNA (1)...(19): siRNA sense strand
caaggaaauagaaagucaa

SEQ ID NO: 453360 - RNA, 19 nt, Homo sapiens
  misc_RNA (1)...(19): siRNA sense strand
cuuaagaaugucagaaaga

SEQ ID NO: 453361 - RNA, 19 nt, Homo sapiens
  misc_RNA (1)...(19): siRNA sense strand
cacuuaagaaugucagaaa

SEQ ID NO: 453362 - RNA, 19 nt, Homo sapiens
  misc_RNA (1)...(19): siRNA sense strand
agaaccagcugccucuacu

SEQ ID NO: 453363 - RNA, 19 nt, Homo sapiens
  misc_RNA (1)...(19): siRNA sense strand
gcagcuugaguuacaggaa

SEQ ID NO: 453364 - RNA, 19 nt, Homo sapiens
  misc_RNA (1)...(19): siRNA sense strand
gaagucauugcugaagaug

SEQ ID NO: 453365 - RNA, 19 nt, Homo sapiens
  misc_RNA (1)...(19): siRNA sense strand
gugaaagccaggaugaagu

SEQ ID NO: 453366 - RNA, 19 nt, Homo sapiens
  misc_RNA (1)...(19): siRNA sense strand
gaaaaccugacacucaaga

SEQ ID NO: 453367 - RNA, 19 nt, Homo sapiens
  misc_RNA (1)...(19): siRNA sense strand
gaaugagcagccacaagca

SEQ ID NO: 453368 - RNA, 19 nt, Homo sapiens
  misc_RNA (1)...(19): siRNA sense strand
uaaaacagcagacauuucu

SEQ ID NO: 453369 - RNA, 19 nt, Homo sapiens
  misc_RNA (1)...(19): siRNA sense strand
agccugagaacgcuugaua

SEQ ID NO: 453370 - RNA, 19 nt, Homo sapiens
  misc_RNA (1)...(19): siRNA sense strand
ugcaguuguugaaguagaa

SEQ ID NO: 453371 - RNA, 19 nt, Homo sapiens
  misc_RNA (1)...(19): siRNA sense strand
aauaaagcacaaagacaga

SEQ ID NO: 453372 - RNA, 19 nt, Homo sapiens
  misc_RNA (1)...(19): siRNA sense strand
uugauauccucgggaauga

SEQ ID NO: 453373 - RNA, 19 nt, Homo sapiens
  misc_RNA (1)...(19): siRNA sense strand
guagaagaugucccacuag

SEQ ID NO: 453374 - RNA, 19 nt, Homo sapiens
  misc_RNA (1)...(19): siRNA sense strand
gaaguuccugaugaaguug

SEQ ID NO: 453375 - RNA, 19 nt, Homo sapiens
  misc_RNA (1)...(19): siRNA sense strand
ccacuuaagaaugucagaa

SEQ ID NO: 453376 - RNA, 19 nt, Homo sapiens
  misc_RNA (1)...(19): siRNA sense strand
guuauugaaagccugagaa

SEQ ID NO: 453377 - RNA, 19 nt, Homo sapiens
  misc_RNA (1)...(19): siRNA sense strand
cugguugacuugccuugug

SEQ ID NO: 453378 - RNA, 19 nt, Homo sapiens
  misc_RNA (1)...(19): siRNA sense strand
uggaaaaccugacacucaa

SEQ ID NO: 453379 - RNA, 19 nt, Homo sapiens
  misc_RNA (1)...(19): siRNA sense strand
gcgccaugcaguuguugaa

SEQ ID NO: 453380 - RNA, 19 nt, Homo sapiens
  misc_RNA (1)...(19): siRNA sense strand
gcacguucucaaaguguca

SEQ ID NO: 453381 - RNA, 19 nt, Homo sapiens
  misc_RNA (1)...(19): siRNA sense strand
gagugaaagccaggaugaa

SEQ ID NO: 453382 - RNA, 19 nt, Homo sapiens
  misc_RNA (1)...(19): siRNA sense strand
uuacgccaccacuuaagaa

SEQ ID NO: 453383 - RNA, 19 nt, Homo sapiens
  misc_RNA (1)...(19): siRNA sense strand
gaaccagcugccucuacug

SEQ ID NO: 453384 - RNA, 19 nt, Homo sapiens
  misc_RNA (1)...(19): siRNA sense strand
gccugagaacgcuugauaa

SEQ ID NO: 453385 - RNA, 19 nt, Homo sapiens
  misc_RNA (1)...(19): siRNA sense strand
uaaagaagcuucguggaaa

SEQ ID NO: 453386 - RNA, 19 nt, Homo sapiens
  misc_RNA (1)...(19): siRNA sense strand
gaaggagacuuaugauugg

SEQ ID NO: 453387 - RNA, 19 nt, Homo sapiens
  misc_RNA (1)...(19): siRNA sense strand
ccaagaagaaggagacuua

SEQ ID NO: 453388 - RNA, 19 nt, Homo sapiens
  misc_RNA (1)...(19): siRNA sense strand
gaaaggagaaaccaaagaa

SEQ ID NO: 453389 - RNA, 19 nt, Homo sapiens
  misc_RNA (1)...(19): siRNA sense strand
gaagucaccaggccuacua

SEQ ID NO: 453390 - RNA, 19 nt, Homo sapiens
  misc_RNA (1)...(19): siRNA sense strand
agaaggagacuuaugauug

SEQ ID NO: 453391 - RNA, 19 nt, Homo sapiens
  misc_RNA (1)...(19): siRNA sense strand
agaagaaggagacuuauga

SEQ ID NO: 453392 - RNA, 19 nt, Homo sapiens
  misc_RNA (1)...(19): siRNA sense strand
ugaaaguggugaaacuguu

SEQ ID NO: 453393 - RNA, 19 nt, Homo sapiens
  misc_RNA (1)...(19): siRNA sense strand
ggagacuuaugauugguau

SEQ ID NO: 453394 - RNA, 19 nt, Homo sapiens
  misc_RNA (1)...(19): siRNA sense strand
ggaaaggagaaaccaaaga

SEQ ID NO: 453395 - RNA, 19 nt, Homo sapiens
  misc_RNA (1)...(19): siRNA sense strand
aaagaaaggagaagggaaa

SEQ ID NO: 453396 - RNA, 19 nt, Homo sapiens
  misc_RNA (1)...(19): siRNA sense strand
cuaaagaagcuucguggaa

SEQ ID NO: 453397 - RNA, 19 nt, Homo sapiens
  misc_RNA (1)...(19): siRNA sense strand
ucaccaggccuacuaauuc

SEQ ID NO: 453398 - RNA, 19 nt, Homo sapiens
  misc_RNA (1)...(19): siRNA sense strand
gaagaaggagacuuaugau

SEQ ID NO: 453399 - RNA, 19 nt, Homo sapiens
  misc_RNA (1)...(19): siRNA sense strand
ucaccacacuuacgcugaa

SEQ ID NO: 453400 - RNA, 19 nt, Homo sapiens
  misc_RNA (1)...(19): siRNA sense strand
ggagaaaccaaagaaagga

SEQ ID NO: 453401 - RNA, 19 nt, Homo sapiens
  misc_RNA (1)...(19): siRNA sense strand
ccgcaugucucgucucagu

SEQ ID NO: 453402 - RNA, 19 nt, Homo sapiens
  misc_RNA (1)...(19): siRNA sense strand
cuacuaauuccaagucuau

SEQ ID NO: 453403 - RNA, 19 nt, Homo sapiens
  misc_RNA (1)...(19): siRNA sense strand
gaaaccaaagaaaggagaa

SEQ ID NO: 453404 - RNA, 19 nt, Homo sapiens
  misc_RNA (1)...(19): siRNA sense strand
cacuuacgcugaacucaug

SEQ ID NO: 453405 - RNA, 19 nt, Homo sapiens
  misc_RNA (1)...(19): siRNA sense strand
guggaaaggagaaaccaaa

SEQ ID NO: 453406 - RNA, 19 nt, Homo sapiens
  misc_RNA (1)...(19): siRNA sense strand
gaaaggagaagggaaaaga

SEQ ID NO: 453407 - RNA, 19 nt, Homo sapiens
  misc_RNA (1)...(19): siRNA sense strand
auccaaaucaccacacuua

SEQ ID NO: 453408 - RNA, 19 nt, Homo sapiens
  misc_RNA (1)...(19): siRNA sense strand
aaagaagcuucguggaaag

SEQ ID NO: 453409 - RNA, 19 nt, Homo sapiens
  misc_RNA (1)...(19): siRNA sense strand
cagacgcuccgauuucuug

SEQ ID NO: 453410 - RNA, 19 nt, Homo sapiens
  misc_RNA (1)...(19): siRNA sense strand
ccuacuaauuccaagucua

SEQ ID NO: 453411 - RNA, 19 nt, Homo sapiens
  misc_RNA (1)...(19): siRNA sense strand
aaaggagaaaccaaagaaa

SEQ ID NO: 453412 - RNA, 19 nt, Homo sapiens
  misc_RNA (1)...(19): siRNA sense strand
cuaugaaaguggugaaacu

SEQ ID NO: 453413 - RNA, 19 nt, Homo sapiens
  misc_RNA (1)...(19): siRNA sense strand
aagaaggagacuuaugauu

SEQ ID NO: 453414 - RNA, 19 nt, Homo sapiens
  misc_RNA (1)...(19): siRNA sense strand
cuaauuccaagucuaugaa

SEQ ID NO: 453415 - RNA, 19 nt, Homo sapiens
  misc_RNA (1)...(19): siRNA sense strand
caagaagaaggagacuuau

SEQ ID NO: 453416 - RNA, 19 nt, Homo sapiens
  misc_RNA (1)...(19): siRNA sense strand
guccucccuuucagaauau

SEQ ID NO: 453417 - RNA, 19 nt, Homo sapiens
  misc_RNA (1)...(19): siRNA sense strand
gucaccaggccuacuaauu

SEQ ID NO: 453418 - RNA, 19 nt, Homo sapiens
  misc_RNA (1)...(19): siRNA sense strand
caugcagacgcuccgauuu

SEQ ID NO: 453419 - RNA, 19 nt, Homo sapiens
  misc_RNA (1)...(19): siRNA sense strand
gcagacgcuccgauuucuu

SEQ ID NO: 453420 - RNA, 19 nt, Homo sapiens
  misc_RNA (1)...(19): siRNA sense strand
ccaaaucaccacacuuacg

SEQ ID NO: 453421 - RNA, 19 nt, Homo sapiens
  misc_RNA (1)...(19): siRNA sense strand
aaggagaaaccaaagaaag

SEQ ID NO: 453422 - RNA, 19 nt, Homo sapiens
  misc_RNA (1)...(19): siRNA sense strand
uaaagaagcuucguggaaa

SEQ ID NO: 453423 - RNA, 19 nt, Homo sapiens
  misc_RNA (1)...(19): siRNA sense strand
gaaggagacuuaugauugg

SEQ ID NO: 453424 - RNA, 19 nt, Homo sapiens
  misc_RNA (1)...(19): siRNA sense strand
ccaagaagaaggagacuua

SEQ ID NO: 453425 - RNA, 19 nt, Homo sapiens
  misc_RNA (1)...(19): siRNA sense strand
gaaaggagaaaccaaagaa

SEQ ID NO: 453426 - RNA, 19 nt, Homo sapiens
  misc_RNA (1)...(19): siRNA sense strand
gaagucaccaggccuacua

SEQ ID NO: 453427 - RNA, 19 nt, Homo sapiens
  misc_RNA (1)...(19): siRNA sense strand
agaaggagacuuaugauug

SEQ ID NO: 453428 - RNA, 19 nt, Homo sapiens
  misc_RNA (1)...(19): siRNA sense strand
agaagaaggagacuuauga

SEQ ID NO: 453429 - RNA, 19 nt, Homo sapiens
  misc_RNA (1)...(19): siRNA sense strand
ugaaaguggugaaacuguu

SEQ ID NO: 453430 - RNA, 19 nt, Homo sapiens
  misc_RNA (1)...(19): siRNA sense strand
ggagacuuaugauugguau

SEQ ID NO: 453431 - RNA, 19 nt, Homo sapiens
  misc_RNA (1)...(19): siRNA sense strand
ggaaaggagaaaccaaaga

SEQ ID NO: 453432 - RNA, 19 nt, Homo sapiens
  misc_RNA (1)...(19): siRNA sense strand
aaagaaaggagaagggaaa

SEQ ID NO: 453433 - RNA, 19 nt, Homo sapiens
  misc_RNA (1)...(19): siRNA sense strand
cuaaagaagcuucguggaa

SEQ ID NO: 453434 - RNA, 19 nt, Homo sapiens
  misc_RNA (1)...(19): siRNA sense strand
ucaccaggccuacuaauuc

SEQ ID NO: 453435 - RNA, 19 nt, Homo sapiens
  misc_RNA (1)...(19): siRNA sense strand
gaagaaggagacuuaugau

SEQ ID NO: 453436 - RNA, 19 nt, Homo sapiens
  misc_RNA (1)...(19): siRNA sense strand
ucaccacacuuacgcugaa

SEQ ID NO: 453437 - RNA, 19 nt, Homo sapiens
  misc_RNA (1)...(19): siRNA sense strand
ggagaaaccaaagaaagga

SEQ ID NO: 453438 - RNA, 19 nt, Homo sapiens
  misc_RNA (1)...(19): siRNA sense strand
ccgcaugucucgucucagu

SEQ ID NO: 453439 - RNA, 19 nt, Homo sapiens
  misc_RNA (1)...(19): siRNA sense strand
cuacuaauuccaagucuau

SEQ ID NO: 453440 - RNA, 19 nt, Homo sapiens
  misc_RNA (1)...(19): siRNA sense strand
gaaaccaaagaaaggagaa

SEQ ID NO: 453441 - RNA, 19 nt, Homo sapiens
  misc_RNA (1)...(19): siRNA sense strand
cacuuacgcugaacucaug

SEQ ID NO: 453442 - RNA, 19 nt, Homo sapiens
  misc_RNA (1)...(19): siRNA sense strand
guggaaaggagaaaccaaa

SEQ ID NO: 453443 - RNA, 19 nt, Homo sapiens
  misc_RNA (1)...(19): siRNA sense strand
gaaaggagaagggaaaaga

SEQ ID NO: 453444 - RNA, 19 nt, Homo sapiens
  misc_RNA (1)...(19): siRNA sense strand
auccaaaucaccacacuua

SEQ ID NO: 453445 - RNA, 19 nt, Homo sapiens
  misc_RNA (1)...(19): siRNA sense strand
aaagaagcuucguggaaag

SEQ ID NO: 453446 - RNA, 19 nt, Homo sapiens
  misc_RNA (1)...(19): siRNA sense strand
cagacgcuccgauuucuug

SEQ ID NO: 453447 - RNA, 19 nt, Homo sapiens
  misc_RNA (1)...(19): siRNA sense strand
ccuacuaauuccaagucua

SEQ ID NO: 453448 - RNA, 19 nt, Homo sapiens
  misc_RNA (1)...(19): siRNA sense strand
aaaggagaaaccaaagaaa

SEQ ID NO: 453449 - RNA, 19 nt, Homo sapiens
  misc_RNA (1)...(19): siRNA sense strand
cuaugaaaguggugaaacu

SEQ ID NO: 453450 - RNA, 19 nt, Homo sapiens
  misc_RNA (1)...(19): siRNA sense strand
aagaaggagacuuaugauu

SEQ ID NO: 453451 - RNA, 19 nt, Homo sapiens
  misc_RNA (1)...(19): siRNA sense strand
cuaauuccaagucuaugaa

SEQ ID NO: 453452 - RNA, 19 nt, Homo sapiens
  misc_RNA (1)...(19): siRNA sense strand
caagaagaaggagacuuau

SEQ ID NO: 453453 - RNA, 19 nt, Homo sapiens
  misc_RNA (1)...(19): siRNA sense strand
guccucccuuucagaauau

SEQ ID NO: 453454 - RNA, 19 nt, Homo sapiens
  misc_RNA (1)...(19): siRNA sense strand
gucaccaggccuacuaauu

SEQ ID NO: 453455 - RNA, 19 nt, Homo sapiens
  misc_RNA (1)...(19): siRNA sense strand
caugcagacgcuccgauuu

SEQ ID NO: 453456 - RNA, 19 nt, Homo sapiens
  misc_RNA (1)...(19): siRNA sense strand
gcagacgcuccgauuucuu

SEQ ID NO: 453457 - RNA, 19 nt, Homo sapiens
  misc_RNA (1)...(19): siRNA sense strand
ccaaaucaccacacuuacg

SEQ ID NO: 453458 - RNA, 19 nt, Homo sapiens
  misc_RNA (1)...(19): siRNA sense strand
aaggagaaaccaaagaaag

SEQ ID NO: 453459 - RNA, 19 nt, Homo sapiens
  misc_RNA (1)...(19): siRNA sense strand
aaucagaacugggacguua

SEQ ID NO: 453460 - RNA, 19 nt, Homo sapiens
  misc_RNA (1)...(19): siRNA sense strand
gcaucaccuguaucuauua

SEQ ID NO: 453461 - RNA, 19 nt, Homo sapiens
  misc_RNA (1)...(19): siRNA sense strand
ugcaucaccuguaucuauu

SEQ ID NO: 453462 - RNA, 19 nt, Homo sapiens
  misc_RNA (1)...(19): siRNA sense strand
cugcaucaccuguaucuau

SEQ ID NO: 453463 - RNA, 19 nt, Homo sapiens
  misc_RNA (1)...(19): siRNA sense strand
uaaggcacguugacaaucc

SEQ ID NO: 453464 - RNA, 19 nt, Homo sapiens
  misc_RNA (1)...(19): siRNA sense strand
caucaccuguaucuauuac

SEQ ID NO: 453465 - RNA, 19 nt, Homo sapiens
  misc_RNA (1)...(19): siRNA sense strand
caacgggcucggguacgua

SEQ ID NO: 453466 - RNA, 19 nt, Homo sapiens
  misc_RNA (1)...(19): siRNA sense strand
cguaaggcacguugacaau

SEQ ID NO: 453467 - RNA, 19 nt, Homo sapiens
  misc_RNA (1)...(19): siRNA sense strand
guaaggcacguugacaauc

SEQ ID NO: 453468 - RNA, 19 nt, Homo sapiens
  misc_RNA (1)...(19): siRNA sense strand
ggcgcugcaucaccuguau

SEQ ID NO: 453469 - RNA, 19 nt, Homo sapiens
  misc_RNA (1)...(19): siRNA sense strand
cuguaucuauuaccugaau

SEQ ID NO: 453470 - RNA, 19 nt, Homo sapiens
  misc_RNA (1)...(19): siRNA sense strand
acagaaagguguccaagua

SEQ ID NO: 453471 - RNA, 19 nt, Homo sapiens
  misc_RNA (1)...(19): siRNA sense strand
aaucagaacugggacguua

SEQ ID NO: 453472 - RNA, 19 nt, Homo sapiens
  misc_RNA (1)...(19): siRNA sense strand
caacaucgagccacucuuu

SEQ ID NO: 453473 - RNA, 19 nt, Homo sapiens
  misc_RNA (1)...(19): siRNA sense strand
caaagacaaguaucagcua

SEQ ID NO: 453474 - RNA, 19 nt, Homo sapiens
  misc_RNA (1)...(19): siRNA sense strand
gcaucaccuguaucuauua

SEQ ID NO: 453475 - RNA, 19 nt, Homo sapiens
  misc_RNA (1)...(19): siRNA sense strand
gcuagcaucaggacagaaa

SEQ ID NO: 453476 - RNA, 19 nt, Homo sapiens
  misc_RNA (1)...(19): siRNA sense strand
cgccaucacugucugguau

SEQ ID NO: 453477 - RNA, 19 nt, Homo sapiens
  misc_RNA (1)...(19): siRNA sense strand
ugcaucaccuguaucuauu

SEQ ID NO: 453478 - RNA, 19 nt, Homo sapiens
  misc_RNA (1)...(19): siRNA sense strand
ccaucacugucugguauuu

SEQ ID NO: 453479 - RNA, 19 nt, Homo sapiens
  misc_RNA (1)...(19): siRNA sense strand
uuugaccgguugcucauuu

SEQ ID NO: 453480 - RNA, 19 nt, Homo sapiens
  misc_RNA (1)...(19): siRNA sense strand
cugcaucaccuguaucuau

SEQ ID NO: 453481 - RNA, 19 nt, Homo sapiens
  misc_RNA (1)...(19): siRNA sense strand
cagcagccaaagacaagua

SEQ ID NO: 453482 - RNA, 19 nt, Homo sapiens
  misc_RNA (1)...(19): siRNA sense strand
cagccuaugccaccaggua

SEQ ID NO: 453483 - RNA, 19 nt, Homo sapiens
  misc_RNA (1)...(19): siRNA sense strand
agacaaguaucagcuagca

SEQ ID NO: 453484 - RNA, 19 nt, Homo sapiens
  misc_RNA (1)...(19): siRNA sense strand
uaaggcacguugacaaucc

SEQ ID NO: 453485 - RNA, 19 nt, Homo sapiens
  misc_RNA (1)...(19): siRNA sense strand
cagcuagcaucaggacaga

SEQ ID NO: 453486 - RNA, 19 nt, Homo sapiens
  misc_RNA (1)...(19): siRNA sense strand
gggcagcagccaaagacaa

SEQ ID NO: 453487 - RNA, 19 nt, Homo sapiens
  misc_RNA (1)...(19): siRNA sense strand
ccagguacgccaucacugu

SEQ ID NO: 453488 - RNA, 19 nt, Homo sapiens
  misc_RNA (1)...(19): siRNA sense strand
caucaccuguaucuauuac

SEQ ID NO: 453489 - RNA, 19 nt, Homo sapiens
  misc_RNA (1)...(19): siRNA sense strand
cagccaaagacaaguauca

SEQ ID NO: 453490 - RNA, 19 nt, Homo sapiens
  misc_RNA (1)...(19): siRNA sense strand
caacgggcucggguacgua

SEQ ID NO: 453491 - RNA, 19 nt, Homo sapiens
  misc_RNA (1)...(19): siRNA sense strand
acaucgagccacucuuuga

SEQ ID NO: 453492 - RNA, 19 nt, Homo sapiens
  misc_RNA (1)...(19): siRNA sense strand
guaaggcacguugacaauc

SEQ ID NO: 453493 - RNA, 19 nt, Homo sapiens
  misc_RNA (1)...(19): siRNA sense strand
cguaaggcacguugacaau

SEQ ID NO: 453494 - RNA, 19 nt, Homo sapiens
  misc_RNA (1)...(19): siRNA sense strand
ggcgcugcaucaccuguau

SEQ ID NO: 453495 - RNA, 19 nt, Homo sapiens
  misc_RNA (1)...(19): siRNA sense strand
cuguaucuauuaccugaau

SEQ ID NO: 453496 - RNA, 19 nt, Homo sapiens
  misc_RNA (1)...(19): siRNA sense strand
acagaaagguguccaagua

SEQ ID NO: 453497 - RNA, 19 nt, Homo sapiens
  misc_RNA (1)...(19): siRNA sense strand
aaucagaacugggacguua

SEQ ID NO: 453498 - RNA, 19 nt, Homo sapiens
  misc_RNA (1)...(19): siRNA sense strand
caacaucgagccacucuuu

SEQ ID NO: 453499 - RNA, 19 nt, Homo sapiens
  misc_RNA (1)...(19): siRNA sense strand
caaagacaaguaucagcua

SEQ ID NO: 453500 - RNA, 19 nt, Homo sapiens
  misc_RNA (1)...(19): siRNA sense strand
gcaucaccuguaucuauua

SEQ ID NO: 453501 - RNA, 19 nt, Homo sapiens
  misc_RNA (1)...(19): siRNA sense strand
gcuagcaucaggacagaaa

SEQ ID NO: 453502 - RNA, 19 nt, Homo sapiens
  misc_RNA (1)...(19): siRNA sense strand
cgccaucacugucugguau

SEQ ID NO: 453503 - RNA, 19 nt, Homo sapiens
  misc_RNA (1)...(19): siRNA sense strand
ugcaucaccuguaucuauu

SEQ ID NO: 453504 - RNA, 19 nt, Homo sapiens
  misc_RNA (1)...(19): siRNA sense strand
ccaucacugucugguauuu

SEQ ID NO: 453505 - RNA, 19 nt, Homo sapiens
  misc_RNA (1)...(19): siRNA sense strand
uuugaccgguugcucauuu

SEQ ID NO: 453506 - RNA, 19 nt, Homo sapiens
  misc_RNA (1)...(19): siRNA sense strand
cugcaucaccuguaucuau

SEQ ID NO: 453507 - RNA, 19 nt, Homo sapiens
  misc_RNA (1)...(19): siRNA sense strand
cagcagccaaagacaagua

SEQ ID NO: 453508 - RNA, 19 nt, Homo sapiens
  misc_RNA (1)...(19): siRNA sense strand
cagccuaugccaccaggua

SEQ ID NO: 453509 - RNA, 19 nt, Homo sapiens
  misc_RNA (1)...(19): siRNA sense strand
agacaaguaucagcuagca

SEQ ID NO: 453510 - RNA, 19 nt, Homo sapiens
  misc_RNA (1)...(19): siRNA sense strand
uaaggcacguugacaaucc

SEQ ID NO: 453511 - RNA, 19 nt, Homo sapiens
  misc_RNA (1)...(19): siRNA sense strand
cagcuagcaucaggacaga

SEQ ID NO: 453512 - RNA, 19 nt, Homo sapiens
  misc_RNA (1)...(19): siRNA sense strand
gggcagcagccaaagacaa

SEQ ID NO: 453513 - RNA, 19 nt, Homo sapiens
  misc_RNA (1)...(19): siRNA sense strand
ccagguacgccaucacugu

SEQ ID NO: 453514 - RNA, 19 nt, Homo sapiens
  misc_RNA (1)...(19): siRNA sense strand
caucaccuguaucuauuac

SEQ ID NO: 453515 - RNA, 19 nt, Homo sapiens
  misc_RNA (1)...(19): siRNA sense strand
cagccaaagacaaguauca

SEQ ID NO: 453516 - RNA, 19 nt, Homo sapiens
  misc_RNA (1)...(19): siRNA sense strand
caacgggcucggguacgua

SEQ ID NO: 453517 - RNA, 19 nt, Homo sapiens
  misc_RNA (1)...(19): siRNA sense strand
acaucgagccacucuuuga

SEQ ID NO: 453518 - RNA, 19 nt, Homo sapiens
  misc_RNA (1)...(19): siRNA sense strand
guaaggcacguugacaauc

SEQ ID NO: 453519 - RNA, 19 nt, Homo sapiens
  misc_RNA (1)...(19): siRNA sense strand
cguaaggcacguugacaau

SEQ ID NO: 453520 - RNA, 19 nt, Homo sapiens
  misc_RNA (1)...(19): siRNA sense strand
ggcgcugcaucaccuguau

SEQ ID NO: 453521 - RNA, 19 nt, Homo sapiens
  misc_RNA (1)...(19): siRNA sense strand
cuguaucuauuaccugaau

SEQ ID NO: 453522 - RNA, 19 nt, Homo sapiens
  misc_RNA (1)...(19): siRNA sense strand
gagaagguccgcuccacua

SEQ ID NO: 453523 - RNA, 19 nt, Homo sapiens
  misc_RNA (1)...(19): siRNA sense strand
ucaaacagguucggguuca

SEQ ID NO: 453524 - RNA, 19 nt, Homo sapiens
  misc_RNA (1)...(19): siRNA sense strand
agacgggcaucgccugauu

SEQ ID NO: 453525 - RNA, 19 nt, Homo sapiens
  misc_RNA (1)...(19): siRNA sense strand
gaagguccgcuccacuaau

SEQ ID NO: 453526 - RNA, 19 nt, Homo sapiens
  misc_RNA (1)...(19): siRNA sense strand
ucucaccgcucuggaaaug

SEQ ID NO: 453527 - RNA, 19 nt, Homo sapiens
  misc_RNA (1)...(19): siRNA sense strand
gacgggcaucgccugauua

SEQ ID NO: 453528 - RNA, 19 nt, Homo sapiens
  misc_RNA (1)...(19): siRNA sense strand
aagguccgcuccacuaauc

SEQ ID NO: 453529 - RNA, 19 nt, Homo sapiens
  misc_RNA (1)...(19): siRNA sense strand
caucucaccgcucuggaaa

SEQ ID NO: 453530 - RNA, 19 nt, Homo sapiens
  misc_RNA (1)...(19): siRNA sense strand
agaagguccgcuccacuaa

SEQ ID NO: 453531 - RNA, 19 nt, Homo sapiens
  misc_RNA (1)...(19): siRNA sense strand
ucaccgcucuggaaaugcu

SEQ ID NO: 453532 - RNA, 19 nt, Homo sapiens
  misc_RNA (1)...(19): siRNA sense strand
ggaaacguuugccuucaua

SEQ ID NO: 453533 - RNA, 19 nt, Homo sapiens
  misc_RNA (1)...(19): siRNA sense strand
gaaagaagaacaaauguca

SEQ ID NO: 453534 - RNA, 19 nt, Homo sapiens
  misc_RNA (1)...(19): siRNA sense strand
acccaaagcuuaugaaaga

SEQ ID NO: 453535 - RNA, 19 nt, Homo sapiens
  misc_RNA (1)...(19): siRNA sense strand
aaggaugguuugcuuauuu

SEQ ID NO: 453536 - RNA, 19 nt, Homo sapiens
  misc_RNA (1)...(19): siRNA sense strand
ggaaggaccaccuggauuc

SEQ ID NO: 453537 - RNA, 19 nt, Homo sapiens
  misc_RNA (1)...(19): siRNA sense strand
gcccagcucuucaccagaa

SEQ ID NO: 453538 - RNA, 19 nt, Homo sapiens
  misc_RNA (1)...(19): siRNA sense strand
ccaccuggauucauucaug

SEQ ID NO: 453539 - RNA, 19 nt, Homo sapiens
  misc_RNA (1)...(19): siRNA sense strand
caaagcuuaugaaagaaga

SEQ ID NO: 453540 - RNA, 19 nt, Homo sapiens
  misc_RNA (1)...(19): siRNA sense strand
gaggcgacaagcuuauuua

SEQ ID NO: 453541 - RNA, 19 nt, Homo sapiens
  misc_RNA (1)...(19): siRNA sense strand
cugaggaagucauucuuaa

SEQ ID NO: 453542 - RNA, 19 nt, Homo sapiens
  misc_RNA (1)...(19): siRNA sense strand
uugaauacgugauguucua

SEQ ID NO: 453543 - RNA, 19 nt, Homo sapiens
  misc_RNA (1)...(19): siRNA sense strand
agaagacccuauacucaga

SEQ ID NO: 453544 - RNA, 19 nt, Homo sapiens
  misc_RNA (1)...(19): siRNA sense strand
guugguaugugugcaauga

SEQ ID NO: 453545 - RNA, 19 nt, Homo sapiens
  misc_RNA (1)...(19): siRNA sense strand
ggcgacaagcuuauuuaua

SEQ ID NO: 453546 - RNA, 19 nt, Homo sapiens
  misc_RNA (1)...(19): siRNA sense strand
aaacguuugccuucauaua

SEQ ID NO: 453547 - RNA, 19 nt, Homo sapiens
  misc_RNA (1)...(19): siRNA sense strand
ccaaucucaacaucaauua

SEQ ID NO: 453548 - RNA, 19 nt, Homo sapiens
  misc_RNA (1)...(19): siRNA sense strand
gagcugaggucauuuucuu

SEQ ID NO: 453549 - RNA, 19 nt, Homo sapiens
  misc_RNA (1)...(19): siRNA sense strand
gaaaaggaugguuugcuua

SEQ ID NO: 453550 - RNA, 19 nt, Homo sapiens
  misc_RNA (1)...(19): siRNA sense strand
aaacguacaccuacugaau

SEQ ID NO: 453551 - RNA, 19 nt, Homo sapiens
  misc_RNA (1)...(19): siRNA sense strand
ucauauaaacguacaccua

SEQ ID NO: 453552 - RNA, 19 nt, Homo sapiens
  misc_RNA (1)...(19): siRNA sense strand
gaugauggccugggcuuug

SEQ ID NO: 453553 - RNA, 19 nt, Homo sapiens
  misc_RNA (1)...(19): siRNA sense strand
caugauugaugcuacuguu

SEQ ID NO: 453554 - RNA, 19 nt, Homo sapiens
  misc_RNA (1)...(19): siRNA sense strand
aaaggaugguuugcuuauu

SEQ ID NO: 453555 - RNA, 19 nt, Homo sapiens
  misc_RNA (1)...(19): siRNA sense strand
ccuguaauguucagagugu

SEQ ID NO: 453556 - RNA, 19 nt, Homo sapiens
  misc_RNA (1)...(19): siRNA sense strand
aaagcugaauccugcuaaa

SEQ ID NO: 453557 - RNA, 19 nt, Homo sapiens
  misc_RNA (1)...(19): siRNA sense strand
uacgugauguucuacaaug

SEQ ID NO: 453558 - RNA, 19 nt, Homo sapiens
  misc_RNA (1)...(19): siRNA sense strand
agaccuaucccucuuuguu

SEQ ID NO: 453559 - RNA, 19 nt, Homo sapiens
  misc_RNA (1)...(19): siRNA sense strand
gaggaagucauucuuaagg

SEQ ID NO: 453560 - RNA, 19 nt, Homo sapiens
  misc_RNA (1)...(19): siRNA sense strand
gccaaucucaacaucaauu

SEQ ID NO: 453561 - RNA, 19 nt, Homo sapiens
  misc_RNA (1)...(19): siRNA sense strand
uaaaguugaaggaaggaaa

SEQ ID NO: 453562 - RNA, 19 nt, Homo sapiens
  misc_RNA (1)...(19): siRNA sense strand
gauaaauagccaacuugau

SEQ ID NO: 453563 - RNA, 19 nt, Homo sapiens
  misc_RNA (1)...(19): siRNA sense strand
accagaagcuuugaugaug

SEQ ID NO: 453564 - RNA, 19 nt, Homo sapiens
  misc_RNA (1)...(19): siRNA sense strand
ucugaggaagucauucuua

SEQ ID NO: 453565 - RNA, 19 nt, Homo sapiens
  misc_RNA (1)...(19): siRNA sense strand
cugccaaucucaacaucaa

SEQ ID NO: 453566 - RNA, 19 nt, Homo sapiens
  misc_RNA (1)...(19): siRNA sense strand
aacguuugccuucauauaa

SEQ ID NO: 453567 - RNA, 19 nt, Homo sapiens
  misc_RNA (1)...(19): siRNA sense strand
ggaacaaggaccuaagacu

SEQ ID NO: 453568 - RNA, 19 nt, Homo sapiens
  misc_RNA (1)...(19): siRNA sense strand
cgucaugacugccaaucuc

SEQ ID NO: 453569 - RNA, 19 nt, Homo sapiens
  misc_RNA (1)...(19): siRNA sense strand
gaggugccauugcaaccau

SEQ ID NO: 453570 - RNA, 19 nt, Homo sapiens
  misc_RNA (1)...(19): siRNA sense strand
gaaggaccaccuggauuca

SEQ ID NO: 453571 - RNA, 19 nt, Homo sapiens
  misc_RNA (1)...(19): siRNA sense strand
acguuugccuucauauaaa

SEQ ID NO: 453572 - RNA, 19 nt, Homo sapiens
  misc_RNA (1)...(19): siRNA sense strand
guacaccuacugaauggau

SEQ ID NO: 453573 - RNA, 19 nt, Homo sapiens
  misc_RNA (1)...(19): siRNA sense strand
ugauaaauagccaacuuga

SEQ ID NO: 453574 - RNA, 19 nt, Homo sapiens
  misc_RNA (1)...(19): siRNA sense strand
aggaccaccuggauucauu

SEQ ID NO: 453575 - RNA, 19 nt, Homo sapiens
  misc_RNA (1)...(19): siRNA sense strand
aggaggcccuuaccuggaa

SEQ ID NO: 453576 - RNA, 19 nt, Homo sapiens
  misc_RNA (1)...(19): siRNA sense strand
gaaacguuugccuucauau

SEQ ID NO: 453577 - RNA, 19 nt, Homo sapiens
  misc_RNA (1)...(19): siRNA sense strand
uaaagcugaauccugcuaa

SEQ ID NO: 453578 - RNA, 19 nt, Homo sapiens
  misc_RNA (1)...(19): siRNA sense strand
ucagaguguugaugagaag

SEQ ID NO: 453579 - RNA, 19 nt, Homo sapiens
  misc_RNA (1)...(19): siRNA sense strand
aauacgugauguucuacaa

SEQ ID NO: 453580 - RNA, 19 nt, Homo sapiens
  misc_RNA (1)...(19): siRNA sense strand
ccauugcaaccaugauuga

SEQ ID NO: 453581 - RNA, 19 nt, Homo sapiens
  misc_RNA (1)...(19): siRNA sense strand
agaaaaggaugguuugcuu

SEQ ID NO: 453582 - RNA, 19 nt, Homo sapiens
  misc_RNA (1)...(19): siRNA sense strand
gugauguucuacaaugaca

SEQ ID NO: 453583 - RNA, 19 nt, Homo sapiens
  misc_RNA (1)...(19): siRNA sense strand
aggaagucauucuuaagga

SEQ ID NO: 453584 - RNA, 19 nt, Homo sapiens
  misc_RNA (1)...(19): siRNA sense strand
caccagaagcuuugaugau

SEQ ID NO: 453585 - RNA, 19 nt, Homo sapiens
  misc_RNA (1)...(19): siRNA sense strand
uugaugagaagacccuaua

SEQ ID NO: 453586 - RNA, 19 nt, Homo sapiens
  misc_RNA (1)...(19): siRNA sense strand
gauugaugcuacuguuggu

SEQ ID NO: 453587 - RNA, 19 nt, Homo sapiens
  misc_RNA (1)...(19): siRNA sense strand
uugaccaguuuaugaagaa

SEQ ID NO: 453588 - RNA, 19 nt, Homo sapiens
  misc_RNA (1)...(19): siRNA sense strand
gaugagaagacccuauacu

SEQ ID NO: 453589 - RNA, 19 nt, Homo sapiens
  misc_RNA (1)...(19): siRNA sense strand
gcaaccaugauugaugcua

SEQ ID NO: 453590 - RNA, 19 nt, Homo sapiens
  misc_RNA (1)...(19): siRNA sense strand
gacccaaagcuuaugaaag

SEQ ID NO: 453591 - RNA, 19 nt, Homo sapiens
  misc_RNA (1)...(19): siRNA sense strand
ucacaggcccagcucuuca

SEQ ID NO: 453592 - RNA, 19 nt, Homo sapiens
  misc_RNA (1)...(19): siRNA sense strand
aagaagaacaaaugucaca

SEQ ID NO: 453593 - RNA, 19 nt, Homo sapiens
  misc_RNA (1)...(19): siRNA sense strand
gcuuaugaaagaagaacaa

SEQ ID NO: 453594 - RNA, 19 nt, Homo sapiens
  misc_RNA (1)...(19): siRNA sense strand
guaauguucagaguguuga

SEQ ID NO: 453595 - RNA, 19 nt, Homo sapiens
  misc_RNA (1)...(19): siRNA sense strand
ugguaugugugcaaugaug

SEQ ID NO: 453596 - RNA, 19 nt, Homo sapiens
  misc_RNA (1)...(19): siRNA sense strand
uggaaacguuugccuucau

SEQ ID NO: 453597 - RNA, 19 nt, Homo sapiens
  misc_RNA (1)...(19): siRNA sense strand
gaugguuugcuuauuucaa

SEQ ID NO: 453598 - RNA, 19 nt, Homo sapiens
  misc_RNA (1)...(19): siRNA sense strand
ugaaagaagaacaaauguc

SEQ ID NO: 453599 - RNA, 19 nt, Homo sapiens
  misc_RNA (1)...(19): siRNA sense strand
ccaaagcuuaugaaagaag

SEQ ID NO: 453600 - RNA, 19 nt, Homo sapiens
  misc_RNA (1)...(19): siRNA sense strand
acucagaggcgacaagcuu

SEQ ID NO: 453601 - RNA, 19 nt, Homo sapiens
  misc_RNA (1)...(19): siRNA sense strand
guucagaguguugaugaga

SEQ ID NO: 453602 - RNA, 19 nt, Homo sapiens
  misc_RNA (1)...(19): siRNA sense strand
ucaccagaagcuuugauga

SEQ ID NO: 453603 - RNA, 19 nt, Homo sapiens
  misc_RNA (1)...(19): siRNA sense strand
gggcuuugaauacgugaug

SEQ ID NO: 453604 - RNA, 19 nt, Homo sapiens
  misc_RNA (1)...(19): siRNA sense strand
ugaccaguuuaugaagaaa

SEQ ID NO: 453605 - RNA, 19 nt, Homo sapiens
  misc_RNA (1)...(19): siRNA sense strand
gccauugcaaccaugauug

SEQ ID NO: 453606 - RNA, 19 nt, Homo sapiens
  misc_RNA (1)...(19): siRNA sense strand
ggaccaccuggauucauuc

SEQ ID NO: 453607 - RNA, 19 nt, Homo sapiens
  misc_RNA (1)...(19): siRNA sense strand
gaauacgugauguucuaca

SEQ ID NO: 453608 - RNA, 19 nt, Homo sapiens
  misc_RNA (1)...(19): siRNA sense strand
aggaugguuugcuuauuuc

SEQ ID NO: 453609 - RNA, 19 nt, Homo sapiens
  misc_RNA (1)...(19): siRNA sense strand
gcugaauccugcuaaaagu

SEQ ID NO: 453610 - RNA, 19 nt, Homo sapiens
  misc_RNA (1)...(19): siRNA sense strand
aaaguugaaggaaggaaau

SEQ ID NO: 453611 - RNA, 19 nt, Homo sapiens
  misc_RNA (1)...(19): siRNA sense strand
uuuguuuccuguaauguuc

SEQ ID NO: 453612 - RNA, 19 nt, Homo sapiens
  misc_RNA (1)...(19): siRNA sense strand
agaggcgacaagcuuauuu

SEQ ID NO: 453613 - RNA, 19 nt, Homo sapiens
  misc_RNA (1)...(19): siRNA sense strand
uuugaccaguuuaugaaga

SEQ ID NO: 453614 - RNA, 19 nt, Homo sapiens
  misc_RNA (1)...(19): siRNA sense strand
ggaaacguuugccuucaua

SEQ ID NO: 453615 - RNA, 19 nt, Homo sapiens
  misc_RNA (1)...(19): siRNA sense strand
cugaggaagucauucuuaa

SEQ ID NO: 453616 - RNA, 19 nt, Homo sapiens
  misc_RNA (1)...(19): siRNA sense strand
gagcugaggucauuuucuu

SEQ ID NO: 453617 - RNA, 19 nt, Homo sapiens
  misc_RNA (1)...(19): siRNA sense strand
aaacguuugccuucauaua

SEQ ID NO: 453618 - RNA, 19 nt, Homo sapiens
  misc_RNA (1)...(19): siRNA sense strand
aaacguacaccuacugaau

SEQ ID NO: 453619 - RNA, 19 nt, Homo sapiens
  misc_RNA (1)...(19): siRNA sense strand
ucauauaaacguacaccua

SEQ ID NO: 453620 - RNA, 19 nt, Homo sapiens
  misc_RNA (1)...(19): siRNA sense strand
gaggaagucauucuuaagg

SEQ ID NO: 453621 - RNA, 19 nt, Homo sapiens
  misc_RNA (1)...(19): siRNA sense strand
ucugaggaagucauucuua

SEQ ID NO: 453622 - RNA, 19 nt, Homo sapiens
  misc_RNA (1)...(19): siRNA sense strand
ggaacaaggaccuaagacu

SEQ ID NO: 453623 - RNA, 19 nt, Homo sapiens
  misc_RNA (1)...(19): siRNA sense strand
acguuugccuucauauaaa

SEQ ID NO: 453624 - RNA, 19 nt, Homo sapiens
  misc_RNA (1)...(19): siRNA sense strand
aacguuugccuucauauaa

SEQ ID NO: 453625 - RNA, 19 nt, Homo sapiens
  misc_RNA (1)...(19): siRNA sense strand
guacaccuacugaauggau

SEQ ID NO: 453626 - RNA, 19 nt, Homo sapiens
  misc_RNA (1)...(19): siRNA sense strand
gaaacguuugccuucauau

SEQ ID NO: 453627 - RNA, 19 nt, Homo sapiens
  misc_RNA (1)...(19): siRNA sense strand
aggaagucauucuuaagga

SEQ ID NO: 453628 - RNA, 19 nt, Homo sapiens
  misc_RNA (1)...(19): siRNA sense strand
uugaccaguuuaugaagaa

SEQ ID NO: 453629 - RNA, 19 nt, Homo sapiens
  misc_RNA (1)...(19): siRNA sense strand
uggaaacguuugccuucau

SEQ ID NO: 453630 - RNA, 19 nt, Homo sapiens
  misc_RNA (1)...(19): siRNA sense strand
ugaccaguuuaugaagaaa

SEQ ID NO: 453631 - RNA, 19 nt, Homo sapiens
  misc_RNA (1)...(19): siRNA sense strand
uuugaccaguuuaugaaga

SEQ ID NO: 453632 - RNA, 19 nt, Homo sapiens
  misc_RNA (1)...(19): siRNA sense strand
ugaacaagcucaaguggaa

SEQ ID NO: 453633 - RNA, 19 nt, Homo sapiens
  misc_RNA (1)...(19): siRNA sense strand
ucaaaugugugcagaagga

SEQ ID NO: 453634 - RNA, 19 nt, Homo sapiens
  misc_RNA (1)...(19): siRNA sense strand
ccagagugaucaaguguga

SEQ ID NO: 453635 - RNA, 19 nt, Homo sapiens
  misc_RNA (1)...(19): siRNA sense strand
ccgaggagcugcugcaaau

SEQ ID NO: 453636 - RNA, 19 nt, Homo sapiens
  misc_RNA (1)...(19): siRNA sense strand
ccgagaagcugugcaucua

SEQ ID NO: 453637 - RNA, 19 nt, Homo sapiens
  misc_RNA (1)...(19): siRNA sense strand
gagaagcugugcaucuaca

SEQ ID NO: 453638 - RNA, 19 nt, Homo sapiens
  misc_RNA (1)...(19): siRNA sense strand
gcauguucguggccucuaa

SEQ ID NO: 453639 - RNA, 19 nt, Homo sapiens
  misc_RNA (1)...(19): siRNA sense strand
ccaacaacuuccuguccua

SEQ ID NO: 453640 - RNA, 19 nt, Homo sapiens
  misc_RNA (1)...(19): siRNA sense strand
gcaaacacgcgcagaccuu

SEQ ID NO: 453641 - RNA, 19 nt, Homo sapiens
  misc_RNA (1)...(19): siRNA sense strand
gaggagaacaaacagauca

SEQ ID NO: 453642 - RNA, 19 nt, Homo sapiens
  misc_RNA (1)...(19): siRNA sense strand
acaacuuccuguccuacua

SEQ ID NO: 453643 - RNA, 19 nt, Homo sapiens
  misc_RNA (1)...(19): siRNA sense strand
gaccuucguugcccucugu

SEQ ID NO: 453644 - RNA, 19 nt, Homo sapiens
  misc_RNA (1)...(19): siRNA sense strand
guucguggccucuaagaug

SEQ ID NO: 453645 - RNA, 19 nt, Homo sapiens
  misc_RNA (1)...(19): siRNA sense strand
aaacagaucauccgcaaac

SEQ ID NO: 453646 - RNA, 19 nt, Homo sapiens
  misc_RNA (1)...(19): siRNA sense strand
gcaaugaccccgcacgauu

SEQ ID NO: 453647 - RNA, 19 nt, Homo sapiens
  misc_RNA (1)...(19): siRNA sense strand
gaacacuuccucuccaaaa

SEQ ID NO: 453648 - RNA, 19 nt, Homo sapiens
  misc_RNA (1)...(19): siRNA sense strand
gaggagcugcugcaaaugg

SEQ ID NO: 453649 - RNA, 19 nt, Homo sapiens
  misc_RNA (1)...(19): siRNA sense strand
ggaggagaacaaacagauc

SEQ ID NO: 453650 - RNA, 19 nt, Homo sapiens
  misc_RNA (1)...(19): siRNA sense strand
uguccuacuucaaaugugu

SEQ ID NO: 453651 - RNA, 19 nt, Homo sapiens
  misc_RNA (1)...(19): siRNA sense strand
gcugcgaaguggaaaccau

SEQ ID NO: 453652 - RNA, 19 nt, Homo sapiens
  misc_RNA (1)...(19): siRNA sense strand
ggagaacaaacagaucauc

SEQ ID NO: 453653 - RNA, 19 nt, Homo sapiens
  misc_RNA (1)...(19): siRNA sense strand
aguggaaccuggccgcaau

SEQ ID NO: 453654 - RNA, 19 nt, Homo sapiens
  misc_RNA (1)...(19): siRNA sense strand
gguguccuacuucaaaugu

SEQ ID NO: 453655 - RNA, 19 nt, Homo sapiens
  misc_RNA (1)...(19): siRNA sense strand
uucguggccucuaagauga

SEQ ID NO: 453656 - RNA, 19 nt, Homo sapiens
  misc_RNA (1)...(19): siRNA sense strand
ucuccagagugaucaagug

SEQ ID NO: 453657 - RNA, 19 nt, Homo sapiens
  misc_RNA (1)...(19): siRNA sense strand
ccaauccgcccuccauggu

SEQ ID NO: 453658 - RNA, 19 nt, Homo sapiens
  misc_RNA (1)...(19): siRNA sense strand
cagaggcggaggagaacaa

SEQ ID NO: 453659 - RNA, 19 nt, Homo sapiens
  misc_RNA (1)...(19): siRNA sense strand
ugccagaggcggaggagaa

SEQ ID NO: 453660 - RNA, 19 nt, Homo sapiens
  misc_RNA (1)...(19): siRNA sense strand
caaacagaucauccgcaaa

SEQ ID NO: 453661 - RNA, 19 nt, Homo sapiens
  misc_RNA (1)...(19): siRNA sense strand
gaagaaaucucuaaacguu

SEQ ID NO: 453662 - RNA, 19 nt, Homo sapiens
  misc_RNA (1)...(19): siRNA sense strand
gcagaauccugauacacua

SEQ ID NO: 453663 - RNA, 19 nt, Homo sapiens
  misc_RNA (1)...(19): siRNA sense strand
acagagaaauccagaaauu

SEQ ID NO: 453664 - RNA, 19 nt, Homo sapiens
  misc_RNA (1)...(19): siRNA sense strand
guacacagauauucaggaa

SEQ ID NO: 453665 - RNA, 19 nt, Homo sapiens
  misc_RNA (1)...(19): siRNA sense strand
caucaacuccuaauaguaa

SEQ ID NO: 453666 - RNA, 19 nt, Homo sapiens
  misc_RNA (1)...(19): siRNA sense strand
guacuacugcgccaaauuu

SEQ ID NO: 453667 - RNA, 19 nt, Homo sapiens
  misc_RNA (1)...(19): siRNA sense strand
ccacagacuucccagaguu

SEQ ID NO: 453668 - RNA, 19 nt, Homo sapiens
  misc_RNA (1)...(19): siRNA sense strand
caacuucucugaacuacag

SEQ ID NO: 453669 - RNA, 19 nt, Homo sapiens
  misc_RNA (1)...(19): siRNA sense strand
caagagcaguuugguggua

SEQ ID NO: 453670 - RNA, 19 nt, Homo sapiens
  misc_RNA (1)...(19): siRNA sense strand
gaaaaucccuuuguucaga

SEQ ID NO: 453671 - RNA, 19 nt, Homo sapiens
  misc_RNA (1)...(19): siRNA sense strand
ggacaucagcaguuuauuc

SEQ ID NO: 453672 - RNA, 19 nt, Homo sapiens
  misc_RNA (1)...(19): siRNA sense strand
aaauacagcuggaagcaau

SEQ ID NO: 453673 - RNA, 19 nt, Homo sapiens
  misc_RNA (1)...(19): siRNA sense strand
agacaaacguuggaacuug

SEQ ID NO: 453674 - RNA, 19 nt, Homo sapiens
  misc_RNA (1)...(19): siRNA sense strand
cugaugagacaguuaauua

SEQ ID NO: 453675 - RNA, 19 nt, Homo sapiens
  misc_RNA (1)...(19): siRNA sense strand
aaacuugcaagcucuaaua

SEQ ID NO: 453676 - RNA, 19 nt, Homo sapiens
  misc_RNA (1)...(19): siRNA sense strand
ccagauauaaugagacaaa

SEQ ID NO: 453677 - RNA, 19 nt, Homo sapiens
  misc_RNA (1)...(19): siRNA sense strand
cagagaaauccagaaauua

SEQ ID NO: 453678 - RNA, 19 nt, Homo sapiens
  misc_RNA (1)...(19): siRNA sense strand
gaacaacucagugcaaugg

SEQ ID NO: 453679 - RNA, 19 nt, Homo sapiens
  misc_RNA (1)...(19): siRNA sense strand
gaaccaggaccgagcuuug

SEQ ID NO: 453680 - RNA, 19 nt, Homo sapiens
  misc_RNA (1)...(19): siRNA sense strand
ggacuugcaggucugagua

SEQ ID NO: 453681 - RNA, 19 nt, Homo sapiens
  misc_RNA (1)...(19): siRNA sense strand
gaugagacaguuaauuaug

SEQ ID NO: 453682 - RNA, 19 nt, Homo sapiens
  misc_RNA (1)...(19): siRNA sense strand
uaaaucacauacugaccaa

SEQ ID NO: 453683 - RNA, 19 nt, Homo sapiens
  misc_RNA (1)...(19): siRNA sense strand
cugaguagcuuggguuuga

SEQ ID NO: 453684 - RNA, 19 nt, Homo sapiens
  misc_RNA (1)...(19): siRNA sense strand
aauaguaacucuacaucug

SEQ ID NO: 453685 - RNA, 19 nt, Homo sapiens
  misc_RNA (1)...(19): siRNA sense strand
ggaguaggagcuaguaugu

SEQ ID NO: 453686 - RNA, 19 nt, Homo sapiens
  misc_RNA (1)...(19): siRNA sense strand
uggaguaaauccucagcua

SEQ ID NO: 453687 - RNA, 19 nt, Homo sapiens
  misc_RNA (1)...(19): siRNA sense strand
aguaggagcuaguauguuc

SEQ ID NO: 453688 - RNA, 19 nt, Homo sapiens
  misc_RNA (1)...(19): siRNA sense strand
gacaucagcaguuuauuca

SEQ ID NO: 453689 - RNA, 19 nt, Homo sapiens
  misc_RNA (1)...(19): siRNA sense strand
ugauaucaaugcagcuauu

SEQ ID NO: 453690 - RNA, 19 nt, Homo sapiens
  misc_RNA (1)...(19): siRNA sense strand
ccacaaaugcagcaguuga

SEQ ID NO: 453691 - RNA, 19 nt, Homo sapiens
  misc_RNA (1)...(19): siRNA sense strand
gcaaugaugcaggagauga

SEQ ID NO: 453692 - RNA, 19 nt, Homo sapiens
  misc_RNA (1)...(19): siRNA sense strand
gagcaaugcaggccuuguu

SEQ ID NO: 453693 - RNA, 19 nt, Homo sapiens
  misc_RNA (1)...(19): siRNA sense strand
gaaccgugaagcaaacuug

SEQ ID NO: 453694 - RNA, 19 nt, Homo sapiens
  misc_RNA (1)...(19): siRNA sense strand
caucaucaacuccuaauag

SEQ ID NO: 453695 - RNA, 19 nt, Homo sapiens
  misc_RNA (1)...(19): siRNA sense strand
aacaggaggugauaucaau

SEQ ID NO: 453696 - RNA, 19 nt, Homo sapiens
  misc_RNA (1)...(19): siRNA sense strand
ugaccuugcugcacagaug

SEQ ID NO: 453697 - RNA, 19 nt, Homo sapiens
  misc_RNA (1)...(19): siRNA sense strand
gaccugaugagacaguuaa

SEQ ID NO: 453698 - RNA, 19 nt, Homo sapiens
  misc_RNA (1)...(19): siRNA sense strand
caauacauccucuggugaa

SEQ ID NO: 453699 - RNA, 19 nt, Homo sapiens
  misc_RNA (1)...(19): siRNA sense strand
ggaagaaaucucuaaacgu

SEQ ID NO: 453700 - RNA, 19 nt, Homo sapiens
  misc_RNA (1)...(19): siRNA sense strand
ugaaagaucaagauaccuu

SEQ ID NO: 453701 - RNA, 19 nt, Homo sapiens
  misc_RNA (1)...(19): siRNA sense strand
ggaauucaugauggacuua

SEQ ID NO: 453702 - RNA, 19 nt, Homo sapiens
  misc_RNA (1)...(19): siRNA sense strand
caacaggaggugauaucaa

SEQ ID NO: 453703 - RNA, 19 nt, Homo sapiens
  misc_RNA (1)...(19): siRNA sense strand
gaguaaauccucagcuaca

SEQ ID NO: 453704 - RNA, 19 nt, Homo sapiens
  misc_RNA (1)...(19): siRNA sense strand
gucaaacccuagagcaaug

SEQ ID NO: 453705 - RNA, 19 nt, Homo sapiens
  misc_RNA (1)...(19): siRNA sense strand
caaccuucccguacagaaa

SEQ ID NO: 453706 - RNA, 19 nt, Homo sapiens
  misc_RNA (1)...(19): siRNA sense strand
ugcaggagaugaugaggaa

SEQ ID NO: 453707 - RNA, 19 nt, Homo sapiens
  misc_RNA (1)...(19): siRNA sense strand
cagcaaugaugcaggagau

SEQ ID NO: 453708 - RNA, 19 nt, Homo sapiens
  misc_RNA (1)...(19): siRNA sense strand
ccagaaauuagucauaugu

SEQ ID NO: 453709 - RNA, 19 nt, Homo sapiens
  misc_RNA (1)...(19): siRNA sense strand
cagaugcagcgacaacuuu

SEQ ID NO: 453710 - RNA, 19 nt, Homo sapiens
  misc_RNA (1)...(19): siRNA sense strand
ccacugaaccuggacauca

SEQ ID NO: 453711 - RNA, 19 nt, Homo sapiens
  misc_RNA (1)...(19): siRNA sense strand
guaauccauuugcuuccuu

SEQ ID NO: 453712 - RNA, 19 nt, Homo sapiens
  misc_RNA (1)...(19): siRNA sense strand
gcgcauguacacagauauu

SEQ ID NO: 453713 - RNA, 19 nt, Homo sapiens
  misc_RNA (1)...(19): siRNA sense strand
uaaggcgcauguacacaga

SEQ ID NO: 453714 - RNA, 19 nt, Homo sapiens
  misc_RNA (1)...(19): siRNA sense strand
agagaaauccagaaauuag

SEQ ID NO: 453715 - RNA, 19 nt, Homo sapiens
  misc_RNA (1)...(19): siRNA sense strand
caugauggacuuacuguuc

SEQ ID NO: 453716 - RNA, 19 nt, Homo sapiens
  misc_RNA (1)...(19): siRNA sense strand
cguuggaacuugccaggaa

SEQ ID NO: 453717 - RNA, 19 nt, Homo sapiens
  misc_RNA (1)...(19): siRNA sense strand
gaaauccagaaauuaguca

SEQ ID NO: 453718 - RNA, 19 nt, Homo sapiens
  misc_RNA (1)...(19): siRNA sense strand
cuguucaccuugucauuaa

SEQ ID NO: 453719 - RNA, 19 nt, Homo sapiens
  misc_RNA (1)...(19): siRNA sense strand
aaacaggccucaggaucau

SEQ ID NO: 453720 - RNA, 19 nt, Homo sapiens
  misc_RNA (1)...(19): siRNA sense strand
ggaucuaacgccacaccua

SEQ ID NO: 453721 - RNA, 19 nt, Homo sapiens
  misc_RNA (1)...(19): siRNA sense strand
gcaguuuggugguaaucca

SEQ ID NO: 453722 - RNA, 19 nt, Homo sapiens
  misc_RNA (1)...(19): siRNA sense strand
gcauguacacagauauuca

SEQ ID NO: 453723 - RNA, 19 nt, Homo sapiens
  misc_RNA (1)...(19): siRNA sense strand
gagaaauccagaaauuagu

SEQ ID NO: 453724 - RNA, 19 nt, Homo sapiens
  misc_RNA (1)...(19): siRNA sense strand
ucauucagcucagcaaaca

SEQ ID NO: 453725 - RNA, 19 nt, Homo sapiens
  misc_RNA (1)...(19): siRNA sense strand
auacagagaaauccagaaa

SEQ ID NO: 453726 - RNA, 19 nt, Homo sapiens
  misc_RNA (1)...(19): siRNA sense strand
caacaacuggaacaacuca

SEQ ID NO: 453727 - RNA, 19 nt, Homo sapiens
  misc_RNA (1)...(19): siRNA sense strand
uaaauccucagcuacagaa

SEQ ID NO: 453728 - RNA, 19 nt, Homo sapiens
  misc_RNA (1)...(19): siRNA sense strand
gcaggcucuugcuggagua

SEQ ID NO: 453729 - RNA, 19 nt, Homo sapiens
  misc_RNA (1)...(19): siRNA sense strand
cagcaggguuuacagacau

SEQ ID NO: 453730 - RNA, 19 nt, Homo sapiens
  misc_RNA (1)...(19): siRNA sense strand
gggauauaaugcuuuaagg

SEQ ID NO: 453731 - RNA, 19 nt, Homo sapiens
  misc_RNA (1)...(19): siRNA sense strand
gcuuugagcaaccuagaaa

SEQ ID NO: 453732 - RNA, 19 nt, Homo sapiens
  misc_RNA (1)...(19): siRNA sense strand
gcuggaagcaauguuacua

SEQ ID NO: 453733 - RNA, 19 nt, Homo sapiens
  misc_RNA (1)...(19): siRNA sense strand
gcuacagaauccagaaguc

SEQ ID NO: 453734 - RNA, 19 nt, Homo sapiens
  misc_RNA (1)...(19): siRNA sense strand
gucuaacccugaaaugaug

SEQ ID NO: 453735 - RNA, 19 nt, Homo sapiens
  misc_RNA (1)...(19): siRNA sense strand
gauauaaugagacaaacgu

SEQ ID NO: 453736 - RNA, 19 nt, Homo sapiens
  misc_RNA (1)...(19): siRNA sense strand
gaaaauagagauccacuac

SEQ ID NO: 453737 - RNA, 19 nt, Homo sapiens
  misc_RNA (1)...(19): siRNA sense strand
gaucauucagcucagcaaa

SEQ ID NO: 453738 - RNA, 19 nt, Homo sapiens
  misc_RNA (1)...(19): siRNA sense strand
gcaacaggaggugauauca

SEQ ID NO: 453739 - RNA, 19 nt, Homo sapiens
  misc_RNA (1)...(19): siRNA sense strand
cuugcaagcucuaauagca

SEQ ID NO: 453740 - RNA, 19 nt, Homo sapiens
  misc_RNA (1)...(19): siRNA sense strand
guaaauccucagcuacaga

SEQ ID NO: 453741 - RNA, 19 nt, Homo sapiens
  misc_RNA (1)...(19): siRNA sense strand
augcaggccuuguuacaga

SEQ ID NO: 453742 - RNA, 19 nt, Homo sapiens
  misc_RNA (1)...(19): siRNA sense strand
caccaggaaugcagagcuu

SEQ ID NO: 453743 - RNA, 19 nt, Homo sapiens
  misc_RNA (1)...(19): siRNA sense strand
guuacuacaucaucaacuc

SEQ ID NO: 453744 - RNA, 19 nt, Homo sapiens
  misc_RNA (1)...(19): siRNA sense strand
acagcuggaagcaauguua

SEQ ID NO: 453745 - RNA, 19 nt, Homo sapiens
  misc_RNA (1)...(19): siRNA sense strand
ggaacaacucagugcaaug

SEQ ID NO: 453746 - RNA, 19 nt, Homo sapiens
  misc_RNA (1)...(19): siRNA sense strand
guucaacacaccaggaaug

SEQ ID NO: 453747 - RNA, 19 nt, Homo sapiens
  misc_RNA (1)...(19): siRNA sense strand
gagacaaacguuggaacuu

SEQ ID NO: 453748 - RNA, 19 nt, Homo sapiens
  misc_RNA (1)...(19): siRNA sense strand
acaaaugcagcaguugaua

SEQ ID NO: 453749 - RNA, 19 nt, Homo sapiens
  misc_RNA (1)...(19): siRNA sense strand
aggcgcauguacacagaua

SEQ ID NO: 453750 - RNA, 19 nt, Homo sapiens
  misc_RNA (1)...(19): siRNA sense strand
ggccucaucccaggguuua

SEQ ID NO: 453751 - RNA, 19 nt, Homo sapiens
  misc_RNA (1)...(19): siRNA sense strand
ucagcaggguuuacagaca

SEQ ID NO: 453752 - RNA, 19 nt, Homo sapiens
  misc_RNA (1)...(19): siRNA sense strand
ucccagaguucaucagcuu

SEQ ID NO: 453753 - RNA, 19 nt, Homo sapiens
  misc_RNA (1)...(19): siRNA sense strand
ucagcucagcaaacaaaua

SEQ ID NO: 453754 - RNA, 19 nt, Homo sapiens
  misc_RNA (1)...(19): siRNA sense strand
gcaguuuauucagcagaug

SEQ ID NO: 453755 - RNA, 19 nt, Homo sapiens
  misc_RNA (1)...(19): siRNA sense strand
guggguggcacuacuggua

SEQ ID NO: 453756 - RNA, 19 nt, Homo sapiens
  misc_RNA (1)...(19): siRNA sense strand
ucacauacugaccaacuug

SEQ ID NO: 453757 - RNA, 19 nt, Homo sapiens
  misc_RNA (1)...(19): siRNA sense strand
aggaagaaaucucuaaacg

SEQ ID NO: 453758 - RNA, 19 nt, Homo sapiens
  misc_RNA (1)...(19): siRNA sense strand
gagauccacuacccaaucc

SEQ ID NO: 453759 - RNA, 19 nt, Homo sapiens
  misc_RNA (1)...(19): siRNA sense strand
guuuggugguaauccauuu

SEQ ID NO: 453760 - RNA, 19 nt, Homo sapiens
  misc_RNA (1)...(19): siRNA sense strand
aagagcaguuuggugguaa

SEQ ID NO: 453761 - RNA, 19 nt, Homo sapiens
  misc_RNA (1)...(19): siRNA sense strand
gaagaaaucucuaaacguu

SEQ ID NO: 453762 - RNA, 19 nt, Homo sapiens
  misc_RNA (1)...(19): siRNA sense strand
gcagaauccugauacacua

SEQ ID NO: 453763 - RNA, 19 nt, Homo sapiens
  misc_RNA (1)...(19): siRNA sense strand
acagagaaauccagaaauu

SEQ ID NO: 453764 - RNA, 19 nt, Homo sapiens
  misc_RNA (1)...(19): siRNA sense strand
guacacagauauucaggaa

SEQ ID NO: 453765 - RNA, 19 nt, Homo sapiens
  misc_RNA (1)...(19): siRNA sense strand
caucaacuccuaauaguaa

SEQ ID NO: 453766 - RNA, 19 nt, Homo sapiens
  misc_RNA (1)...(19): siRNA sense strand
guacuacugcgccaaauuu

SEQ ID NO: 453767 - RNA, 19 nt, Homo sapiens
  misc_RNA (1)...(19): siRNA sense strand
ccacagacuucccagaguu

SEQ ID NO: 453768 - RNA, 19 nt, Homo sapiens
  misc_RNA (1)...(19): siRNA sense strand
caacuucucugaacuacag

SEQ ID NO: 453769 - RNA, 19 nt, Homo sapiens
  misc_RNA (1)...(19): siRNA sense strand
caagagcaguuugguggua

SEQ ID NO: 453770 - RNA, 19 nt, Homo sapiens
  misc_RNA (1)...(19): siRNA sense strand
gaaaaucccuuuguucaga

SEQ ID NO: 453771 - RNA, 19 nt, Homo sapiens
  misc_RNA (1)...(19): siRNA sense strand
ggacaucagcaguuuauuc

SEQ ID NO: 453772 - RNA, 19 nt, Homo sapiens
  misc_RNA (1)...(19): siRNA sense strand
aaauacagcuggaagcaau

SEQ ID NO: 453773 - RNA, 19 nt, Homo sapiens
  misc_RNA (1)...(19): siRNA sense strand
agacaaacguuggaacuug

SEQ ID NO: 453774 - RNA, 19 nt, Homo sapiens
  misc_RNA (1)...(19): siRNA sense strand
cugaugagacaguuaauua

SEQ ID NO: 453775 - RNA, 19 nt, Homo sapiens
  misc_RNA (1)...(19): siRNA sense strand
aaacuugcaagcucuaaua

SEQ ID NO: 453776 - RNA, 19 nt, Homo sapiens
  misc_RNA (1)...(19): siRNA sense strand
ccagauauaaugagacaaa

SEQ ID NO: 453777 - RNA, 19 nt, Homo sapiens
  misc_RNA (1)...(19): siRNA sense strand
cagagaaauccagaaauua

SEQ ID NO: 453778 - RNA, 19 nt, Homo sapiens
  misc_RNA (1)...(19): siRNA sense strand
gaacaacucagugcaaugg

SEQ ID NO: 453779 - RNA, 19 nt, Homo sapiens
  misc_RNA (1)...(19): siRNA sense strand
gaaccaggaccgagcuuug

SEQ ID NO: 453780 - RNA, 19 nt, Homo sapiens
  misc_RNA (1)...(19): siRNA sense strand
ggacuugcaggucugagua

SEQ ID NO: 453781 - RNA, 19 nt, Homo sapiens
  misc_RNA (1)...(19): siRNA sense strand
gaugagacaguuaauuaug

SEQ ID NO: 453782 - RNA, 19 nt, Homo sapiens
  misc_RNA (1)...(19): siRNA sense strand
uaaaucacauacugaccaa

SEQ ID NO: 453783 - RNA, 19 nt, Homo sapiens
  misc_RNA (1)...(19): siRNA sense strand
cugaguagcuuggguuuga

SEQ ID NO: 453784 - RNA, 19 nt, Homo sapiens
  misc_RNA (1)...(19): siRNA sense strand
aauaguaacucuacaucug

SEQ ID NO: 453785 - RNA, 19 nt, Homo sapiens
  misc_RNA (1)...(19): siRNA sense strand
ggaguaggagcuaguaugu

SEQ ID NO: 453786 - RNA, 19 nt, Homo sapiens
  misc_RNA (1)...(19): siRNA sense strand
uggaguaaauccucagcua

SEQ ID NO: 453787 - RNA, 19 nt, Homo sapiens
  misc_RNA (1)...(19): siRNA sense strand
aguaggagcuaguauguuc

SEQ ID NO: 453788 - RNA, 19 nt, Homo sapiens
  misc_RNA (1)...(19): siRNA sense strand
gacaucagcaguuuauuca

SEQ ID NO: 453789 - RNA, 19 nt, Homo sapiens
  misc_RNA (1)...(19): siRNA sense strand
ugauaucaaugcagcuauu

SEQ ID NO: 453790 - RNA, 19 nt, Homo sapiens
  misc_RNA (1)...(19): siRNA sense strand
ccacaaaugcagcaguuga

SEQ ID NO: 453791 - RNA, 19 nt, Homo sapiens
  misc_RNA (1)...(19): siRNA sense strand
gcaaugaugcaggagauga

SEQ ID NO: 453792 - RNA, 19 nt, Homo sapiens
  misc_RNA (1)...(19): siRNA sense strand
gagcaaugcaggccuuguu

SEQ ID NO: 453793 - RNA, 19 nt, Homo sapiens
  misc_RNA (1)...(19): siRNA sense strand
gaaccgugaagcaaacuug

SEQ ID NO: 453794 - RNA, 19 nt, Homo sapiens
  misc_RNA (1)...(19): siRNA sense strand
caucaucaacuccuaauag

SEQ ID NO: 453795 - RNA, 19 nt, Homo sapiens
  misc_RNA (1)...(19): siRNA sense strand
aacaggaggugauaucaau

SEQ ID NO: 453796 - RNA, 19 nt, Homo sapiens
  misc_RNA (1)...(19): siRNA sense strand
ugaccuugcugcacagaug

SEQ ID NO: 453797 - RNA, 19 nt, Homo sapiens
  misc_RNA (1)...(19): siRNA sense strand
gaccugaugagacaguuaa

SEQ ID NO: 453798 - RNA, 19 nt, Homo sapiens
  misc_RNA (1)...(19): siRNA sense strand
caauacauccucuggugaa

SEQ ID NO: 453799 - RNA, 19 nt, Homo sapiens
  misc_RNA (1)...(19): siRNA sense strand
ggaagaaaucucuaaacgu

SEQ ID NO: 453800 - RNA, 19 nt, Homo sapiens
  misc_RNA (1)...(19): siRNA sense strand
ugaaagaucaagauaccuu

SEQ ID NO: 453801 - RNA, 19 nt, Homo sapiens
  misc_RNA (1)...(19): siRNA sense strand
ggaauucaugauggacuua

SEQ ID NO: 453802 - RNA, 19 nt, Homo sapiens
  misc_RNA (1)...(19): siRNA sense strand
caacaggaggugauaucaa

SEQ ID NO: 453803 - RNA, 19 nt, Homo sapiens
  misc_RNA (1)...(19): siRNA sense strand
gaguaaauccucagcuaca

SEQ ID NO: 453804 - RNA, 19 nt, Homo sapiens
  misc_RNA (1)...(19): siRNA sense strand
gucaaacccuagagcaaug

SEQ ID NO: 453805 - RNA, 19 nt, Homo sapiens
  misc_RNA (1)...(19): siRNA sense strand
caaccuucccguacagaaa

SEQ ID NO: 453806 - RNA, 19 nt, Homo sapiens
  misc_RNA (1)...(19): siRNA sense strand
ugcaggagaugaugaggaa

SEQ ID NO: 453807 - RNA, 19 nt, Homo sapiens
  misc_RNA (1)...(19): siRNA sense strand
cagcaaugaugcaggagau

SEQ ID NO: 453808 - RNA, 19 nt, Homo sapiens
  misc_RNA (1)...(19): siRNA sense strand
ccagaaauuagucauaugu

SEQ ID NO: 453809 - RNA, 19 nt, Homo sapiens
  misc_RNA (1)...(19): siRNA sense strand
cagaugcagcgacaacuuu

SEQ ID NO: 453810 - RNA, 19 nt, Homo sapiens
  misc_RNA (1)...(19): siRNA sense strand
ccacugaaccuggacauca

SEQ ID NO: 453811 - RNA, 19 nt, Homo sapiens
  misc_RNA (1)...(19): siRNA sense strand
guaauccauuugcuuccuu

SEQ ID NO: 453812 - RNA, 19 nt, Homo sapiens
  misc_RNA (1)...(19): siRNA sense strand
gcgcauguacacagauauu

SEQ ID NO: 453813 - RNA, 19 nt, Homo sapiens
  misc_RNA (1)...(19): siRNA sense strand
uaaggcgcauguacacaga

SEQ ID NO: 453814 - RNA, 19 nt, Homo sapiens
  misc_RNA (1)...(19): siRNA sense strand
agagaaauccagaaauuag

SEQ ID NO: 453815 - RNA, 19 nt, Homo sapiens
  misc_RNA (1)...(19): siRNA sense strand
caugauggacuuacuguuc

SEQ ID NO: 453816 - RNA, 19 nt, Homo sapiens
  misc_RNA (1)...(19): siRNA sense strand
cguuggaacuugccaggaa

SEQ ID NO: 453817 - RNA, 19 nt, Homo sapiens
  misc_RNA (1)...(19): siRNA sense strand
gaaauccagaaauuaguca

SEQ ID NO: 453818 - RNA, 19 nt, Homo sapiens
  misc_RNA (1)...(19): siRNA sense strand
cuguucaccuugucauuaa

SEQ ID NO: 453819 - RNA, 19 nt, Homo sapiens
  misc_RNA (1)...(19): siRNA sense strand
aaacaggccucaggaucau

SEQ ID NO: 453820 - RNA, 19 nt, Homo sapiens
  misc_RNA (1)...(19): siRNA sense strand
ggaucuaacgccacaccua

SEQ ID NO: 453821 - RNA, 19 nt, Homo sapiens
  misc_RNA (1)...(19): siRNA sense strand
gcaguuuggugguaaucca

SEQ ID NO: 453822 - RNA, 19 nt, Homo sapiens
  misc_RNA (1)...(19): siRNA sense strand
gcauguacacagauauuca

SEQ ID NO: 453823 - RNA, 19 nt, Homo sapiens
  misc_RNA (1)...(19): siRNA sense strand
gagaaauccagaaauuagu

SEQ ID NO: 453824 - RNA, 19 nt, Homo sapiens
  misc_RNA (1)...(19): siRNA sense strand
ucauucagcucagcaaaca

SEQ ID NO: 453825 - RNA, 19 nt, Homo sapiens
  misc_RNA (1)...(19): siRNA sense strand
auacagagaaauccagaaa

SEQ ID NO: 453826 - RNA, 19 nt, Homo sapiens
  misc_RNA (1)...(19): siRNA sense strand
caacaacuggaacaacuca

SEQ ID NO: 453827 - RNA, 19 nt, Homo sapiens
  misc_RNA (1)...(19): siRNA sense strand
uaaauccucagcuacagaa

SEQ ID NO: 453828 - RNA, 19 nt, Homo sapiens
  misc_RNA (1)...(19): siRNA sense strand
gcaggcucuugcuggagua

SEQ ID NO: 453829 - RNA, 19 nt, Homo sapiens
  misc_RNA (1)...(19): siRNA sense strand
cagcaggguuuacagacau

SEQ ID NO: 453830 - RNA, 19 nt, Homo sapiens
  misc_RNA (1)...(19): siRNA sense strand
gggauauaaugcuuuaagg

SEQ ID NO: 453831 - RNA, 19 nt, Homo sapiens
  misc_RNA (1)...(19): siRNA sense strand
gcuuugagcaaccuagaaa

SEQ ID NO: 453832 - RNA, 19 nt, Homo sapiens
  misc_RNA (1)...(19): siRNA sense strand
gcuggaagcaauguuacua

SEQ ID NO: 453833 - RNA, 19 nt, Homo sapiens
  misc_RNA (1)...(19): siRNA sense strand
gcuacagaauccagaaguc

SEQ ID NO: 453834 - RNA, 19 nt, Homo sapiens
  misc_RNA (1)...(19): siRNA sense strand
gucuaacccugaaaugaug

SEQ ID NO: 453835 - RNA, 19 nt, Homo sapiens
  misc_RNA (1)...(19): siRNA sense strand
gauauaaugagacaaacgu

SEQ ID NO: 453836 - RNA, 19 nt, Homo sapiens
  misc_RNA (1)...(19): siRNA sense strand
gaaaauagagauccacuac

SEQ ID NO: 453837 - RNA, 19 nt, Homo sapiens
  misc_RNA (1)...(19): siRNA sense strand
gaucauucagcucagcaaa

SEQ ID NO: 453838 - RNA, 19 nt, Homo sapiens
  misc_RNA (1)...(19): siRNA sense strand
gcaacaggaggugauauca

SEQ ID NO: 453839 - RNA, 19 nt, Homo sapiens
  misc_RNA (1)...(19): siRNA sense strand
cuugcaagcucuaauagca

SEQ ID NO: 453840 - RNA, 19 nt, Homo sapiens
  misc_RNA (1)...(19): siRNA sense strand
guaaauccucagcuacaga

SEQ ID NO: 453841 - RNA, 19 nt, Homo sapiens
  misc_RNA (1)...(19): siRNA sense strand
augcaggccuuguuacaga

SEQ ID NO: 453842 - RNA, 19 nt, Homo sapiens
  misc_RNA (1)...(19): siRNA sense strand
caccaggaaugcagagcuu

SEQ ID NO: 453843 - RNA, 19 nt, Homo sapiens
  misc_RNA (1)...(19): siRNA sense strand
guuacuacaucaucaacuc

SEQ ID NO: 453844 - RNA, 19 nt, Homo sapiens
  misc_RNA (1)...(19): siRNA sense strand
acagcuggaagcaauguua

SEQ ID NO: 453845 - RNA, 19 nt, Homo sapiens
  misc_RNA (1)...(19): siRNA sense strand
ggaacaacucagugcaaug

SEQ ID NO: 453846 - RNA, 19 nt, Homo sapiens
  misc_RNA (1)...(19): siRNA sense strand
guucaacacaccaggaaug

SEQ ID NO: 453847 - RNA, 19 nt, Homo sapiens
  misc_RNA (1)...(19): siRNA sense strand
gagacaaacguuggaacuu

SEQ ID NO: 453848 - RNA, 19 nt, Homo sapiens
  misc_RNA (1)...(19): siRNA sense strand
acaaaugcagcaguugaua

SEQ ID NO: 453849 - RNA, 19 nt, Homo sapiens
  misc_RNA (1)...(19): siRNA sense strand
aggcgcauguacacagaua

SEQ ID NO: 453850 - RNA, 19 nt, Homo sapiens
  misc_RNA (1)...(19): siRNA sense strand
ggccucaucccaggguuua

SEQ ID NO: 453851 - RNA, 19 nt, Homo sapiens
  misc_RNA (1)...(19): siRNA sense strand
ucagcaggguuuacagaca

SEQ ID NO: 453852 - RNA, 19 nt, Homo sapiens
  misc_RNA (1)...(19): siRNA sense strand
ucccagaguucaucagcuu

SEQ ID NO: 453853 - RNA, 19 nt, Homo sapiens
  misc_RNA (1)...(19): siRNA sense strand
ucagcucagcaaacaaaua

SEQ ID NO: 453854 - RNA, 19 nt, Homo sapiens
  misc_RNA (1)...(19): siRNA sense strand
gcaguuuauucagcagaug

SEQ ID NO: 453855 - RNA, 19 nt, Homo sapiens
  misc_RNA (1)...(19): siRNA sense strand
guggguggcacuacuggua

SEQ ID NO: 453856 - RNA, 19 nt, Homo sapiens
  misc_RNA (1)...(19): siRNA sense strand
ucacauacugaccaacuug

SEQ ID NO: 453857 - RNA, 19 nt, Homo sapiens
  misc_RNA (1)...(19): siRNA sense strand
aggaagaaaucucuaaacg

SEQ ID NO: 453858 - RNA, 19 nt, Homo sapiens
  misc_RNA (1)...(19): siRNA sense strand
gagauccacuacccaaucc

SEQ ID NO: 453859 - RNA, 19 nt, Homo sapiens
  misc_RNA (1)...(19): siRNA sense strand
guuuggugguaauccauuu

SEQ ID NO: 453860 - RNA, 19 nt, Homo sapiens
  misc_RNA (1)...(19): siRNA sense strand
aagagcaguuuggugguaa

SEQ ID NO: 453861 - RNA, 19 nt, Homo sapiens
  misc_RNA (1)...(19): siRNA sense strand
gaagaaaucucuaaacguu

SEQ ID NO: 453862 - RNA, 19 nt, Homo sapiens
  misc_RNA (1)...(19): siRNA sense strand
gcagaauccugauacacua

SEQ ID NO: 453863 - RNA, 19 nt, Homo sapiens
  misc_RNA (1)...(19): siRNA sense strand
acagagaaauccagaaauu

SEQ ID NO: 453864 - RNA, 19 nt, Homo sapiens
  misc_RNA (1)...(19): siRNA sense strand
guacacagauauucaggaa

SEQ ID NO: 453865 - RNA, 19 nt, Homo sapiens
  misc_RNA (1)...(19): siRNA sense strand
caucaacuccuaauaguaa

SEQ ID NO: 453866 - RNA, 19 nt, Homo sapiens
  misc_RNA (1)...(19): siRNA sense strand
guacuacugcgccaaauuu

SEQ ID NO: 453867 - RNA, 19 nt, Homo sapiens
  misc_RNA (1)...(19): siRNA sense strand
ccacagacuucccagaguu

SEQ ID NO: 453868 - RNA, 19 nt, Homo sapiens
  misc_RNA (1)...(19): siRNA sense strand
caacuucucugaacuacag

SEQ ID NO: 453869 - RNA, 19 nt, Homo sapiens
  misc_RNA (1)...(19): siRNA sense strand
caagagcaguuugguggua

SEQ ID NO: 453870 - RNA, 19 nt, Homo sapiens
  misc_RNA (1)...(19): siRNA sense strand
gaaaaucccuuuguucaga

SEQ ID NO: 453871 - RNA, 19 nt, Homo sapiens
  misc_RNA (1)...(19): siRNA sense strand
ggacaucagcaguuuauuc

SEQ ID NO: 453872 - RNA, 19 nt, Homo sapiens
  misc_RNA (1)...(19): siRNA sense strand
aaauacagcuggaagcaau

SEQ ID NO: 453873 - RNA, 19 nt, Homo sapiens
  misc_RNA (1)...(19): siRNA sense strand
agacaaacguuggaacuug

SEQ ID NO: 453874 - RNA, 19 nt, Homo sapiens
  misc_RNA (1)...(19): siRNA sense strand
cugaugagacaguuaauua

SEQ ID NO: 453875 - RNA, 19 nt, Homo sapiens
  misc_RNA (1)...(19): siRNA sense strand
aaacuugcaagcucuaaua

SEQ ID NO: 453876 - RNA, 19 nt, Homo sapiens
  misc_RNA (1)...(19): siRNA sense strand
ccagauauaaugagacaaa

SEQ ID NO: 453877 - RNA, 19 nt, Homo sapiens
  misc_RNA (1)...(19): siRNA sense strand
cagagaaauccagaaauua

SEQ ID NO: 453878 - RNA, 19 nt, Homo sapiens
  misc_RNA (1)...(19): siRNA sense strand
gaacaacucagugcaaugg

SEQ ID NO: 453879 - RNA, 19 nt, Homo sapiens
  misc_RNA (1)...(19): siRNA sense strand
gaaccaggaccgagcuuug

SEQ ID NO: 453880 - RNA, 19 nt, Homo sapiens
  misc_RNA (1)...(19): siRNA sense strand
ggacuugcaggucugagua

SEQ ID NO: 453881 - RNA, 19 nt, Homo sapiens
  misc_RNA (1)...(19): siRNA sense strand
gaugagacaguuaauuaug

SEQ ID NO: 453882 - RNA, 19 nt, Homo sapiens
  misc_RNA (1)...(19): siRNA sense strand
uaaaucacauacugaccaa

SEQ ID NO: 453883 - RNA, 19 nt, Homo sapiens
  misc_RNA (1)...(19): siRNA sense strand
cugaguagcuuggguuuga

SEQ ID NO: 453884 - RNA, 19 nt, Homo sapiens
  misc_RNA (1)...(19): siRNA sense strand
aauaguaacucuacaucug

SEQ ID NO: 453885 - RNA, 19 nt, Homo sapiens
  misc_RNA (1)...(19): siRNA sense strand
ggaguaggagcuaguaugu

SEQ ID NO: 453886 - RNA, 19 nt, Homo sapiens
  misc_RNA (1)...(19): siRNA sense strand
uggaguaaauccucagcua

SEQ ID NO: 453887 - RNA, 19 nt, Homo sapiens
  misc_RNA (1)...(19): siRNA sense strand
aguaggagcuaguauguuc

SEQ ID NO: 453888 - RNA, 19 nt, Homo sapiens
  misc_RNA (1)...(19): siRNA sense strand
gacaucagcaguuuauuca

SEQ ID NO: 453889 - RNA, 19 nt, Homo sapiens
  misc_RNA (1)...(19): siRNA sense strand
ugauaucaaugcagcuauu

SEQ ID NO: 453890 - RNA, 19 nt, Homo sapiens
  misc_RNA (1)...(19): siRNA sense strand
ccacaaaugcagcaguuga

SEQ ID NO: 453891 - RNA, 19 nt, Homo sapiens
  misc_RNA (1)...(19): siRNA sense strand
gcaaugaugcaggagauga

SEQ ID NO: 453892 - RNA, 19 nt, Homo sapiens
  misc_RNA (1)...(19): siRNA sense strand
gagcaaugcaggccuuguu

SEQ ID NO: 453893 - RNA, 19 nt, Homo sapiens
  misc_RNA (1)...(19): siRNA sense strand
gaaccgugaagcaaacuug

SEQ ID NO: 453894 - RNA, 19 nt, Homo sapiens
  misc_RNA (1)...(19): siRNA sense strand
caucaucaacuccuaauag

SEQ ID NO: 453895 - RNA, 19 nt, Homo sapiens
  misc_RNA (1)...(19): siRNA sense strand
aacaggaggugauaucaau

SEQ ID NO: 453896 - RNA, 19 nt, Homo sapiens
  misc_RNA (1)...(19): siRNA sense strand
ugaccuugcugcacagaug

SEQ ID NO: 453897 - RNA, 19 nt, Homo sapiens
  misc_RNA (1)...(19): siRNA sense strand
gaccugaugagacaguuaa

SEQ ID NO: 453898 - RNA, 19 nt, Homo sapiens
  misc_RNA (1)...(19): siRNA sense strand
caauacauccucuggugaa

SEQ ID NO: 453899 - RNA, 19 nt, Homo sapiens
  misc_RNA (1)...(19): siRNA sense strand
ggaagaaaucucuaaacgu

SEQ ID NO: 453900 - RNA, 19 nt, Homo sapiens
  misc_RNA (1)...(19): siRNA sense strand
ugaaagaucaagauaccuu

SEQ ID NO: 453901 - RNA, 19 nt, Homo sapiens
  misc_RNA (1)...(19): siRNA sense strand
ggaauucaugauggacuua

SEQ ID NO: 453902 - RNA, 19 nt, Homo sapiens
  misc_RNA (1)...(19): siRNA sense strand
caacaggaggugauaucaa

SEQ ID NO: 453903 - RNA, 19 nt, Homo sapiens
  misc_RNA (1)...(19): siRNA sense strand
gaguaaauccucagcuaca

SEQ ID NO: 453904 - RNA, 19 nt, Homo sapiens
  misc_RNA (1)...(19): siRNA sense strand
gucaaacccuagagcaaug

SEQ ID NO: 453905 - RNA, 19 nt, Homo sapiens
  misc_RNA (1)...(19): siRNA sense strand
caaccuucccguacagaaa

SEQ ID NO: 453906 - RNA, 19 nt, Homo sapiens
  misc_RNA (1)...(19): siRNA sense strand
ugcaggagaugaugaggaa

SEQ ID NO: 453907 - RNA, 19 nt, Homo sapiens
  misc_RNA (1)...(19): siRNA sense strand
cagcaaugaugcaggagau

SEQ ID NO: 453908 - RNA, 19 nt, Homo sapiens
  misc_RNA (1)...(19): siRNA sense strand
ccagaaauuagucauaugu

SEQ ID NO: 453909 - RNA, 19 nt, Homo sapiens
  misc_RNA (1)...(19): siRNA sense strand
cagaugcagcgacaacuuu

SEQ ID NO: 453910 - RNA, 19 nt, Homo sapiens
  misc_RNA (1)...(19): siRNA sense strand
ccacugaaccuggacauca

SEQ ID NO: 453911 - RNA, 19 nt, Homo sapiens
  misc_RNA (1)...(19): siRNA sense strand
guaauccauuugcuuccuu

SEQ ID NO: 453912 - RNA, 19 nt, Homo sapiens
  misc_RNA (1)...(19): siRNA sense strand
gcgcauguacacagauauu

SEQ ID NO: 453913 - RNA, 19 nt, Homo sapiens
  misc_RNA (1)...(19): siRNA sense strand
uaaggcgcauguacacaga

SEQ ID NO: 453914 - RNA, 19 nt, Homo sapiens
  misc_RNA (1)...(19): siRNA sense strand
agagaaauccagaaauuag

SEQ ID NO: 453915 - RNA, 19 nt, Homo sapiens
  misc_RNA (1)...(19): siRNA sense strand
caugauggacuuacuguuc

SEQ ID NO: 453916 - RNA, 19 nt, Homo sapiens
  misc_RNA (1)...(19): siRNA sense strand
cguuggaacuugccaggaa

SEQ ID NO: 453917 - RNA, 19 nt, Homo sapiens
  misc_RNA (1)...(19): siRNA sense strand
gaaauccagaaauuaguca

SEQ ID NO: 453918 - RNA, 19 nt, Homo sapiens
  misc_RNA (1)...(19): siRNA sense strand
cuguucaccuugucauuaa

SEQ ID NO: 453919 - RNA, 19 nt, Homo sapiens
  misc_RNA (1)...(19): siRNA sense strand
aaacaggccucaggaucau

SEQ ID NO: 453920 - RNA, 19 nt, Homo sapiens
  misc_RNA (1)...(19): siRNA sense strand
ggaucuaacgccacaccua

SEQ ID NO: 453921 - RNA, 19 nt, Homo sapiens
  misc_RNA (1)...(19): siRNA sense strand
gcaguuuggugguaaucca

SEQ ID NO: 453922 - RNA, 19 nt, Homo sapiens
  misc_RNA (1)...(19): siRNA sense strand
gcauguacacagauauuca

SEQ ID NO: 453923 - RNA, 19 nt, Homo sapiens
  misc_RNA (1)...(19): siRNA sense strand
gagaaauccagaaauuagu

SEQ ID NO: 453924 - RNA, 19 nt, Homo sapiens
  misc_RNA (1)...(19): siRNA sense strand
ucauucagcucagcaaaca

SEQ ID NO: 453925 - RNA, 19 nt, Homo sapiens
  misc_RNA (1)...(19): siRNA sense strand
auacagagaaauccagaaa

SEQ ID NO: 453926 - RNA, 19 nt, Homo sapiens
  misc_RNA (1)...(19): siRNA sense strand
caacaacuggaacaacuca

SEQ ID NO: 453927 - RNA, 19 nt, Homo sapiens
  misc_RNA (1)...(19): siRNA sense strand
uaaauccucagcuacagaa

SEQ ID NO: 453928 - RNA, 19 nt, Homo sapiens
  misc_RNA (1)...(19): siRNA sense strand
gcaggcucuugcuggagua

SEQ ID NO: 453929 - RNA, 19 nt, Homo sapiens
  misc_RNA (1)...(19): siRNA sense strand
cagcaggguuuacagacau

SEQ ID NO: 453930 - RNA, 19 nt, Homo sapiens
  misc_RNA (1)...(19): siRNA sense strand
gggauauaaugcuuuaagg

SEQ ID NO: 453931 - RNA, 19 nt, Homo sapiens
  misc_RNA (1)...(19): siRNA sense strand
gcuuugagcaaccuagaaa

SEQ ID NO: 453932 - RNA, 19 nt, Homo sapiens
  misc_RNA (1)...(19): siRNA sense strand
gcuggaagcaauguuacua

SEQ ID NO: 453933 - RNA, 19 nt, Homo sapiens
  misc_RNA (1)...(19): siRNA sense strand
gcuacagaauccagaaguc

SEQ ID NO: 453934 - RNA, 19 nt, Homo sapiens
  misc_RNA (1)...(19): siRNA sense strand
gucuaacccugaaaugaug

SEQ ID NO: 453935 - RNA, 19 nt, Homo sapiens
  misc_RNA (1)...(19): siRNA sense strand
gauauaaugagacaaacgu

SEQ ID NO: 453936 - RNA, 19 nt, Homo sapiens
  misc_RNA (1)...(19): siRNA sense strand
gaaaauagagauccacuac

SEQ ID NO: 453937 - RNA, 19 nt, Homo sapiens
  misc_RNA (1)...(19): siRNA sense strand
gaucauucagcucagcaaa

SEQ ID NO: 453938 - RNA, 19 nt, Homo sapiens
  misc_RNA (1)...(19): siRNA sense strand
gcaacaggaggugauauca

SEQ ID NO: 453939 - RNA, 19 nt, Homo sapiens
  misc_RNA (1)...(19): siRNA sense strand
cuugcaagcucuaauagca

SEQ ID NO: 453940 - RNA, 19 nt, Homo sapiens
  misc_RNA (1)...(19): siRNA sense strand
guaaauccucagcuacaga

SEQ ID NO: 453941 - RNA, 19 nt, Homo sapiens
  misc_RNA (1)...(19): siRNA sense strand
augcaggccuuguuacaga

SEQ ID NO: 453942 - RNA, 19 nt, Homo sapiens
  misc_RNA (1)...(19): siRNA sense strand
caccaggaaugcagagcuu

SEQ ID NO: 453943 - RNA, 19 nt, Homo sapiens
  misc_RNA (1)...(19): siRNA sense strand
guuacuacaucaucaacuc

SEQ ID NO: 453944 - RNA, 19 nt, Homo sapiens
  misc_RNA (1)...(19): siRNA sense strand
acagcuggaagcaauguua

SEQ ID NO: 453945 - RNA, 19 nt, Homo sapiens
  misc_RNA (1)...(19): siRNA sense strand
ggaacaacucagugcaaug

SEQ ID NO: 453946 - RNA, 19 nt, Homo sapiens
  misc_RNA (1)...(19): siRNA sense strand
guucaacacaccaggaaug

SEQ ID NO: 453947 - RNA, 19 nt, Homo sapiens
  misc_RNA (1)...(19): siRNA sense strand
gagacaaacguuggaacuu

SEQ ID NO: 453948 - RNA, 19 nt, Homo sapiens
  misc_RNA (1)...(19): siRNA sense strand
acaaaugcagcaguugaua

SEQ ID NO: 453949 - RNA, 19 nt, Homo sapiens
  misc_RNA (1)...(19): siRNA sense strand
aggcgcauguacacagaua

SEQ ID NO: 453950 - RNA, 19 nt, Homo sapiens
  misc_RNA (1)...(19): siRNA sense strand
ggccucaucccaggguuua

SEQ ID NO: 453951 - RNA, 19 nt, Homo sapiens
  misc_RNA (1)...(19): siRNA sense strand
ucagcaggguuuacagaca

SEQ ID NO: 453952 - RNA, 19 nt, Homo sapiens
  misc_RNA (1)...(19): siRNA sense strand
ucccagaguucaucagcuu

SEQ ID NO: 453953 - RNA, 19 nt, Homo sapiens
  misc_RNA (1)...(19): siRNA sense strand
ucagcucagcaaacaaaua

SEQ ID NO: 453954 - RNA, 19 nt, Homo sapiens
  misc_RNA (1)...(19): siRNA sense strand
gcaguuuauucagcagaug

SEQ ID NO: 453955 - RNA, 19 nt, Homo sapiens
  misc_RNA (1)...(19): siRNA sense strand
guggguggcacuacuggua

SEQ ID NO: 453956 - RNA, 19 nt, Homo sapiens
  misc_RNA (1)...(19): siRNA sense strand
ucacauacugaccaacuug

SEQ ID NO: 453957 - RNA, 19 nt, Homo sapiens
  misc_RNA (1)...(19): siRNA sense strand
aggaagaaaucucuaaacg

SEQ ID NO: 453958 - RNA, 19 nt, Homo sapiens
  misc_RNA (1)...(19): siRNA sense strand
gagauccacuacccaaucc

SEQ ID NO: 453959 - RNA, 19 nt, Homo sapiens
  misc_RNA (1)...(19): siRNA sense strand
guuuggugguaauccauuu

SEQ ID NO: 453960 - RNA, 19 nt, Homo sapiens
  misc_RNA (1)...(19): siRNA sense strand
aagagcaguuuggugguaa

SEQ ID NO: 453961 - RNA, 19 nt, Homo sapiens
  misc_RNA (1)...(19): siRNA sense strand
gaagaaaucucuaaacguu

SEQ ID NO: 453962 - RNA, 19 nt, Homo sapiens
  misc_RNA (1)...(19): siRNA sense strand
gcagaauccugauacacua

SEQ ID NO: 453963 - RNA, 19 nt, Homo sapiens
  misc_RNA (1)...(19): siRNA sense strand
acagagaaauccagaaauu

SEQ ID NO: 453964 - RNA, 19 nt, Homo sapiens
  misc_RNA (1)...(19): siRNA sense strand
guacacagauauucaggaa

SEQ ID NO: 453965 - RNA, 19 nt, Homo sapiens
  misc_RNA (1)...(19): siRNA sense strand
caucaacuccuaauaguaa

SEQ ID NO: 453966 - RNA, 19 nt, Homo sapiens
  misc_RNA (1)...(19): siRNA sense strand
guacuacugcgccaaauuu

SEQ ID NO: 453967 - RNA, 19 nt, Homo sapiens
  misc_RNA (1)...(19): siRNA sense strand
ccacagacuucccagaguu

SEQ ID NO: 453968 - RNA, 19 nt, Homo sapiens
  misc_RNA (1)...(19): siRNA sense strand
caacuucucugaacuacag

SEQ ID NO: 453969 - RNA, 19 nt, Homo sapiens
  misc_RNA (1)...(19): siRNA sense strand
caagagcaguuugguggua

SEQ ID NO: 453970 - RNA, 19 nt, Homo sapiens
  misc_RNA (1)...(19): siRNA sense strand
gaaaaucccuuuguucaga

SEQ ID NO: 453971 - RNA, 19 nt, Homo sapiens
  misc_RNA (1)...(19): siRNA sense strand
ggacaucagcaguuuauuc

SEQ ID NO: 453972 - RNA, 19 nt, Homo sapiens
  misc_RNA (1)...(19): siRNA sense strand
aaauacagcuggaagcaau

SEQ ID NO: 453973 - RNA, 19 nt, Homo sapiens
  misc_RNA (1)...(19): siRNA sense strand
agacaaacguuggaacuug

SEQ ID NO: 453974 - RNA, 19 nt, Homo sapiens
  misc_RNA (1)...(19): siRNA sense strand
cugaugagacaguuaauua

SEQ ID NO: 453975 - RNA, 19 nt, Homo sapiens
  misc_RNA (1)...(19): siRNA sense strand
aaacuugcaagcucuaaua

SEQ ID NO: 453976 - RNA, 19 nt, Homo sapiens
  misc_RNA (1)...(19): siRNA sense strand
ccagauauaaugagacaaa

SEQ ID NO: 453977 - RNA, 19 nt, Homo sapiens
  misc_RNA (1)...(19): siRNA sense strand
cagagaaauccagaaauua

SEQ ID NO: 453978 - RNA, 19 nt, Homo sapiens
  misc_RNA (1)...(19): siRNA sense strand
gaacaacucagugcaaugg

SEQ ID NO: 453979 - RNA, 19 nt, Homo sapiens
  misc_RNA (1)...(19): siRNA sense strand
gaaccaggaccgagcuuug

SEQ ID NO: 453980 - RNA, 19 nt, Homo sapiens
  misc_RNA (1)...(19): siRNA sense strand
ggacuugcaggucugagua

SEQ ID NO: 453981 - RNA, 19 nt, Homo sapiens
  misc_RNA (1)...(19): siRNA sense strand
gaugagacaguuaauuaug

SEQ ID NO: 453982 - RNA, 19 nt, Homo sapiens
  misc_RNA (1)...(19): siRNA sense strand
uaaaucacauacugaccaa

SEQ ID NO: 453983 - RNA, 19 nt, Homo sapiens
  misc_RNA (1)...(19): siRNA sense strand
cugaguagcuuggguuuga

SEQ ID NO: 453984 - RNA, 19 nt, Homo sapiens
  misc_RNA (1)...(19): siRNA sense strand
aauaguaacucuacaucug

SEQ ID NO: 453985 - RNA, 19 nt, Homo sapiens
  misc_RNA (1)...(19): siRNA sense strand
ggaguaggagcuaguaugu

SEQ ID NO: 453986 - RNA, 19 nt, Homo sapiens
  misc_RNA (1)...(19): siRNA sense strand
uggaguaaauccucagcua

SEQ ID NO: 453987 - RNA, 19 nt, Homo sapiens
  misc_RNA (1)...(19): siRNA sense strand
aguaggagcuaguauguuc

SEQ ID NO: 453988 - RNA, 19 nt, Homo sapiens
  misc_RNA (1)...(19): siRNA sense strand
gacaucagcaguuuauuca

SEQ ID NO: 453989 - RNA, 19 nt, Homo sapiens
  misc_RNA (1)...(19): siRNA sense strand
ugauaucaaugcagcuauu

SEQ ID NO: 453990 - RNA, 19 nt, Homo sapiens
  misc_RNA (1)...(19): siRNA sense strand
ccacaaaugcagcaguuga

SEQ ID NO: 453991 - RNA, 19 nt, Homo sapiens
  misc_RNA (1)...(19): siRNA sense strand
gcaaugaugcaggagauga

SEQ ID NO: 453992 - RNA, 19 nt, Homo sapiens
  misc_RNA (1)...(19): siRNA sense strand
gagcaaugcaggccuuguu

SEQ ID NO: 453993 - RNA, 19 nt, Homo sapiens
  misc_RNA (1)...(19): siRNA sense strand
gaaccgugaagcaaacuug

SEQ ID NO: 453994 - RNA, 19 nt, Homo sapiens
  misc_RNA (1)...(19): siRNA sense strand
caucaucaacuccuaauag

SEQ ID NO: 453995 - RNA, 19 nt, Homo sapiens
  misc_RNA (1)...(19): siRNA sense strand
aacaggaggugauaucaau

SEQ ID NO: 453996 - RNA, 19 nt, Homo sapiens
  misc_RNA (1)...(19): siRNA sense strand
ugaccuugcugcacagaug

SEQ ID NO: 453997 - RNA, 19 nt, Homo sapiens
  misc_RNA (1)...(19): siRNA sense strand
gaccugaugagacaguuaa

SEQ ID NO: 453998 - RNA, 19 nt, Homo sapiens
  misc_RNA (1)...(19): siRNA sense strand
caauacauccucuggugaa

SEQ ID NO: 453999 - RNA, 19 nt, Homo sapiens
  misc_RNA (1)...(19): siRNA sense strand
ggaagaaaucucuaaacgu

SEQ ID NO: 454000 - RNA, 19 nt, Homo sapiens
  misc_RNA (1)...(19): siRNA sense strand
ugaaagaucaagauaccuu

SEQ ID NO: 454001 - RNA, 19 nt, Homo sapiens
  misc_RNA (1)...(19): siRNA sense strand
ggaauucaugauggacuua

SEQ ID NO: 454002 - RNA, 19 nt, Homo sapiens
  misc_RNA (1)...(19): siRNA sense strand
caacaggaggugauaucaa

SEQ ID NO: 454003 - RNA, 19 nt, Homo sapiens
  misc_RNA (1)...(19): siRNA sense strand
gaguaaauccucagcuaca

SEQ ID NO: 454004 - RNA, 19 nt, Homo sapiens
  misc_RNA (1)...(19): siRNA sense strand
gucaaacccuagagcaaug

SEQ ID NO: 454005 - RNA, 19 nt, Homo sapiens
  misc_RNA (1)...(19): siRNA sense strand
caaccuucccguacagaaa

SEQ ID NO: 454006 - RNA, 19 nt, Homo sapiens
  misc_RNA (1)...(19): siRNA sense strand
ugcaggagaugaugaggaa

SEQ ID NO: 454007 - RNA, 19 nt, Homo sapiens
  misc_RNA (1)...(19): siRNA sense strand
cagcaaugaugcaggagau

SEQ ID NO: 454008 - RNA, 19 nt, Homo sapiens
  misc_RNA (1)...(19): siRNA sense strand
ccagaaauuagucauaugu

SEQ ID NO: 454009 - RNA, 19 nt, Homo sapiens
  misc_RNA (1)...(19): siRNA sense strand
cagaugcagcgacaacuuu

SEQ ID NO: 454010 - RNA, 19 nt, Homo sapiens
  misc_RNA (1)...(19): siRNA sense strand
ccacugaaccuggacauca

SEQ ID NO: 454011 - RNA, 19 nt, Homo sapiens
  misc_RNA (1)...(19): siRNA sense strand
guaauccauuugcuuccuu

SEQ ID NO: 454012 - RNA, 19 nt, Homo sapiens
  misc_RNA (1)...(19): siRNA sense strand
gcgcauguacacagauauu

SEQ ID NO: 454013 - RNA, 19 nt, Homo sapiens
  misc_RNA (1)...(19): siRNA sense strand
uaaggcgcauguacacaga

SEQ ID NO: 454014 - RNA, 19 nt, Homo sapiens
  misc_RNA (1)...(19): siRNA sense strand
agagaaauccagaaauuag

SEQ ID NO: 454015 - RNA, 19 nt, Homo sapiens
  misc_RNA (1)...(19): siRNA sense strand
caugauggacuuacuguuc

SEQ ID NO: 454016 - RNA, 19 nt, Homo sapiens
  misc_RNA (1)...(19): siRNA sense strand
cguuggaacuugccaggaa

SEQ ID NO: 454017 - RNA, 19 nt, Homo sapiens
  misc_RNA (1)...(19): siRNA sense strand
gaaauccagaaauuaguca

SEQ ID NO: 454018 - RNA, 19 nt, Homo sapiens
  misc_RNA (1)...(19): siRNA sense strand
cuguucaccuugucauuaa

SEQ ID NO: 454019 - RNA, 19 nt, Homo sapiens
  misc_RNA (1)...(19): siRNA sense strand
aaacaggccucaggaucau

SEQ ID NO: 454020 - RNA, 19 nt, Homo sapiens
  misc_RNA (1)...(19): siRNA sense strand
ggaucuaacgccacaccua

SEQ ID NO: 454021 - RNA, 19 nt, Homo sapiens
  misc_RNA (1)...(19): siRNA sense strand
gcaguuuggugguaaucca

SEQ ID NO: 454022 - RNA, 19 nt, Homo sapiens
  misc_RNA (1)...(19): siRNA sense strand
gcauguacacagauauuca

SEQ ID NO: 454023 - RNA, 19 nt, Homo sapiens
  misc_RNA (1)...(19): siRNA sense strand
gagaaauccagaaauuagu

SEQ ID NO: 454024 - RNA, 19 nt, Homo sapiens
  misc_RNA (1)...(19): siRNA sense strand
ucauucagcucagcaaaca

SEQ ID NO: 454025 - RNA, 19 nt, Homo sapiens
  misc_RNA (1)...(19): siRNA sense strand
auacagagaaauccagaaa

SEQ ID NO: 454026 - RNA, 19 nt, Homo sapiens
  misc_RNA (1)...(19): siRNA sense strand
caacaacuggaacaacuca

SEQ ID NO: 454027 - RNA, 19 nt, Homo sapiens
  misc_RNA (1)...(19): siRNA sense strand
uaaauccucagcuacagaa

SEQ ID NO: 454028 - RNA, 19 nt, Homo sapiens
  misc_RNA (1)...(19): siRNA sense strand
gcaggcucuugcuggagua

SEQ ID NO: 454029 - RNA, 19 nt, Homo sapiens
  misc_RNA (1)...(19): siRNA sense strand
cagcaggguuuacagacau

SEQ ID NO: 454030 - RNA, 19 nt, Homo sapiens
  misc_RNA (1)...(19): siRNA sense strand
gggauauaaugcuuuaagg

SEQ ID NO: 454031 - RNA, 19 nt, Homo sapiens
  misc_RNA (1)...(19): siRNA sense strand
gcuuugagcaaccuagaaa

SEQ ID NO: 454032 - RNA, 19 nt, Homo sapiens
  misc_RNA (1)...(19): siRNA sense strand
gcuggaagcaauguuacua

SEQ ID NO: 454033 - RNA, 19 nt, Homo sapiens
  misc_RNA (1)...(19): siRNA sense strand
gcuacagaauccagaaguc

SEQ ID NO: 454034 - RNA, 19 nt, Homo sapiens
  misc_RNA (1)...(19): siRNA sense strand
gucuaacccugaaaugaug

SEQ ID NO: 454035 - RNA, 19 nt, Homo sapiens
  misc_RNA (1)...(19): siRNA sense strand
gauauaaugagacaaacgu

SEQ ID NO: 454036 - RNA, 19 nt, Homo sapiens
  misc_RNA (1)...(19): siRNA sense strand
gaaaauagagauccacuac

SEQ ID NO: 454037 - RNA, 19 nt, Homo sapiens
  misc_RNA (1)...(19): siRNA sense strand
gaucauucagcucagcaaa

SEQ ID NO: 454038 - RNA, 19 nt, Homo sapiens
  misc_RNA (1)...(19): siRNA sense strand
gcaacaggaggugauauca

SEQ ID NO: 454039 - RNA, 19 nt, Homo sapiens
  misc_RNA (1)...(19): siRNA sense strand
cuugcaagcucuaauagca

SEQ ID NO: 454040 - RNA, 19 nt, Homo sapiens
  misc_RNA (1)...(19): siRNA sense strand
guaaauccucagcuacaga

SEQ ID NO: 454041 - RNA, 19 nt, Homo sapiens
  misc_RNA (1)...(19): siRNA sense strand
augcaggccuuguuacaga

SEQ ID NO: 454042 - RNA, 19 nt, Homo sapiens
  misc_RNA (1)...(19): siRNA sense strand
caccaggaaugcagagcuu

SEQ ID NO: 454043 - RNA, 19 nt, Homo sapiens
  misc_RNA (1)...(19): siRNA sense strand
guuacuacaucaucaacuc

SEQ ID NO: 454044 - RNA, 19 nt, Homo sapiens
  misc_RNA (1)...(19): siRNA sense strand
acagcuggaagcaauguua

SEQ ID NO: 454045 - RNA, 19 nt, Homo sapiens
  misc_RNA (1)...(19): siRNA sense strand
ggaacaacucagugcaaug

SEQ ID NO: 454046 - RNA, 19 nt, Homo sapiens
  misc_RNA (1)...(19): siRNA sense strand
guucaacacaccaggaaug

SEQ ID NO: 454047 - RNA, 19 nt, Homo sapiens
  misc_RNA (1)...(19): siRNA sense strand
gagacaaacguuggaacuu

SEQ ID NO: 454048 - RNA, 19 nt, Homo sapiens
  misc_RNA (1)...(19): siRNA sense strand
acaaaugcagcaguugaua

SEQ ID NO: 454049 - RNA, 19 nt, Homo sapiens
  misc_RNA (1)...(19): siRNA sense strand
aggcgcauguacacagaua

SEQ ID NO: 454050 - RNA, 19 nt, Homo sapiens
  misc_RNA (1)...(19): siRNA sense strand
ggccucaucccaggguuua

SEQ ID NO: 454051 - RNA, 19 nt, Homo sapiens
  misc_RNA (1)...(19): siRNA sense strand
ucagcaggguuuacagaca

SEQ ID NO: 454052 - RNA, 19 nt, Homo sapiens
  misc_RNA (1)...(19): siRNA sense strand
ucccagaguucaucagcuu

SEQ ID NO: 454053 - RNA, 19 nt, Homo sapiens
  misc_RNA (1)...(19): siRNA sense strand
ucagcucagcaaacaaaua

SEQ ID NO: 454054 - RNA, 19 nt, Homo sapiens
  misc_RNA (1)...(19): siRNA sense strand
gcaguuuauucagcagaug

SEQ ID NO: 454055 - RNA, 19 nt, Homo sapiens
  misc_RNA (1)...(19): siRNA sense strand
guggguggcacuacuggua

SEQ ID NO: 454056 - RNA, 19 nt, Homo sapiens
  misc_RNA (1)...(19): siRNA sense strand
ucacauacugaccaacuug

SEQ ID NO: 454057 - RNA, 19 nt, Homo sapiens
  misc_RNA (1)...(19): siRNA sense strand
aggaagaaaucucuaaacg

SEQ ID NO: 454058 - RNA, 19 nt, Homo sapiens
  misc_RNA (1)...(19): siRNA sense strand
gagauccacuacccaaucc

SEQ ID NO: 454059 - RNA, 19 nt, Homo sapiens
  misc_RNA (1)...(19): siRNA sense strand
guuuggugguaauccauuu

SEQ ID NO: 454060 - RNA, 19 nt, Homo sapiens
  misc_RNA (1)...(19): siRNA sense strand
aagagcaguuuggugguaa

SEQ ID NO: 454061 - RNA, 19 nt, Homo sapiens
  misc_RNA (1)...(19): siRNA sense strand
gaagauggcugcugauaua

SEQ ID NO: 454062 - RNA, 19 nt, Homo sapiens
  misc_RNA (1)...(19): siRNA sense strand
gcagaucccugaacuuaua

SEQ ID NO: 454063 - RNA, 19 nt, Homo sapiens
  misc_RNA (1)...(19): siRNA sense strand
caacugggcugaaguagaa

SEQ ID NO: 454064 - RNA, 19 nt, Homo sapiens
  misc_RNA (1)...(19): siRNA sense strand
gaaaugcgaugauguucaa

SEQ ID NO: 454065 - RNA, 19 nt, Homo sapiens
  misc_RNA (1)...(19): siRNA sense strand
gcaaugaacucagcuacuu

SEQ ID NO: 454066 - RNA, 19 nt, Homo sapiens
  misc_RNA (1)...(19): siRNA sense strand
gcgaugauguucaauaaug

SEQ ID NO: 454067 - RNA, 19 nt, Homo sapiens
  misc_RNA (1)...(19): siRNA sense strand
ucagauggguccagcaaua

SEQ ID NO: 454068 - RNA, 19 nt, Homo sapiens
  misc_RNA (1)...(19): siRNA sense strand
caauggcccucgaugauuu

SEQ ID NO: 454069 - RNA, 19 nt, Homo sapiens
  misc_RNA (1)...(19): siRNA sense strand
gggcagaucccugaacuua

SEQ ID NO: 454070 - RNA, 19 nt, Homo sapiens
  misc_RNA (1)...(19): siRNA sense strand
gaucuggcguugagcauug

SEQ ID NO: 454071 - RNA, 19 nt, Homo sapiens
  misc_RNA (1)...(19): siRNA sense strand
guaaagaacagguccaaga

SEQ ID NO: 454072 - RNA, 19 nt, Homo sapiens
  misc_RNA (1)...(19): siRNA sense strand
gugccaagauugaacuuaa

SEQ ID NO: 454073 - RNA, 19 nt, Homo sapiens
  misc_RNA (1)...(19): siRNA sense strand
gcaccagcguccagcagua

SEQ ID NO: 454074 - RNA, 19 nt, Homo sapiens
  misc_RNA (1)...(19): siRNA sense strand
gauacuggauggcaaugaa

SEQ ID NO: 454075 - RNA, 19 nt, Homo sapiens
  misc_RNA (1)...(19): siRNA sense strand
gagcuucaguuugugagua

SEQ ID NO: 454076 - RNA, 19 nt, Homo sapiens
  misc_RNA (1)...(19): siRNA sense strand
gauggcugcugauauauuc

SEQ ID NO: 454077 - RNA, 19 nt, Homo sapiens
  misc_RNA (1)...(19): siRNA sense strand
gacaagaucuggcguugag

SEQ ID NO: 454078 - RNA, 19 nt, Homo sapiens
  misc_RNA (1)...(19): siRNA sense strand
ccaaagaaauugugguuuu

SEQ ID NO: 454079 - RNA, 19 nt, Homo sapiens
  misc_RNA (1)...(19): siRNA sense strand
ugacuuggcugcugacaca

SEQ ID NO: 454080 - RNA, 19 nt, Homo sapiens
  misc_RNA (1)...(19): siRNA sense strand
ucgcuaugcugaaauauau

SEQ ID NO: 454081 - RNA, 19 nt, Homo sapiens
  misc_RNA (1)...(19): siRNA sense strand
uuucagugcuccucagaua

SEQ ID NO: 454082 - RNA, 19 nt, Homo sapiens
  misc_RNA (1)...(19): siRNA sense strand
agaauacagugccaagauu

SEQ ID NO: 454083 - RNA, 19 nt, Homo sapiens
  misc_RNA (1)...(19): siRNA sense strand
ucccugaacuuauauucua

SEQ ID NO: 454084 - RNA, 19 nt, Homo sapiens
  misc_RNA (1)...(19): siRNA sense strand
uaaagaacagguccaagaa

SEQ ID NO: 454085 - RNA, 19 nt, Homo sapiens
  misc_RNA (1)...(19): siRNA sense strand
gccagagccuguguuaauu

SEQ ID NO: 454086 - RNA, 19 nt, Homo sapiens
  misc_RNA (1)...(19): siRNA sense strand
gaauacagugccaagauug

SEQ ID NO: 454087 - RNA, 19 nt, Homo sapiens
  misc_RNA (1)...(19): siRNA sense strand
ucugagggauucugcgaua

SEQ ID NO: 454088 - RNA, 19 nt, Homo sapiens
  misc_RNA (1)...(19): siRNA sense strand
gagggauucugcgauauug

SEQ ID NO: 454089 - RNA, 19 nt, Homo sapiens
  misc_RNA (1)...(19): siRNA sense strand
ccaccaguuuguuaugaaa

SEQ ID NO: 454090 - RNA, 19 nt, Homo sapiens
  misc_RNA (1)...(19): siRNA sense strand
gauggcagauguacauuuu

SEQ ID NO: 454091 - RNA, 19 nt, Homo sapiens
  misc_RNA (1)...(19): siRNA sense strand
caaacuggcagggucuuua

SEQ ID NO: 454092 - RNA, 19 nt, Homo sapiens
  misc_RNA (1)...(19): siRNA sense strand
cgaugauguucaauaauga

SEQ ID NO: 454093 - RNA, 19 nt, Homo sapiens
  misc_RNA (1)...(19): siRNA sense strand
gauaaaagaguguucauug

SEQ ID NO: 454094 - RNA, 19 nt, Homo sapiens
  misc_RNA (1)...(19): siRNA sense strand
gaaguucaguguggcaaag

SEQ ID NO: 454095 - RNA, 19 nt, Homo sapiens
  misc_RNA (1)...(19): siRNA sense strand
cagcuacuuuggacaagaa

SEQ ID NO: 454096 - RNA, 19 nt, Homo sapiens
  misc_RNA (1)...(19): siRNA sense strand
caagaaggcaugacagaag

SEQ ID NO: 454097 - RNA, 19 nt, Homo sapiens
  misc_RNA (1)...(19): siRNA sense strand
gaaauccguauaccagaug

SEQ ID NO: 454098 - RNA, 19 nt, Homo sapiens
  misc_RNA (1)...(19): siRNA sense strand
gcucaaagaaagcaaauac

SEQ ID NO: 454099 - RNA, 19 nt, Homo sapiens
  misc_RNA (1)...(19): siRNA sense strand
gcauccaguuugcaguuga

SEQ ID NO: 454100 - RNA, 19 nt, Homo sapiens
  misc_RNA (1)...(19): siRNA sense strand
ccacaauggcccucgauga

SEQ ID NO: 454101 - RNA, 19 nt, Homo sapiens
  misc_RNA (1)...(19): siRNA sense strand
ugaaauccguauaccagau

SEQ ID NO: 454102 - RNA, 19 nt, Homo sapiens
  misc_RNA (1)...(19): siRNA sense strand
gacaagaaggcaugacaga

SEQ ID NO: 454103 - RNA, 19 nt, Homo sapiens
  misc_RNA (1)...(19): siRNA sense strand
gagcaaguacuucucagau

SEQ ID NO: 454104 - RNA, 19 nt, Homo sapiens
  misc_RNA (1)...(19): siRNA sense strand
agagagaaaugcgaugaug

SEQ ID NO: 454105 - RNA, 19 nt, Homo sapiens
  misc_RNA (1)...(19): siRNA sense strand
ccagagccuguguuaauuu

SEQ ID NO: 454106 - RNA, 19 nt, Homo sapiens
  misc_RNA (1)...(19): siRNA sense strand
caaagaugaaauccguaua

SEQ ID NO: 454107 - RNA, 19 nt, Homo sapiens
  misc_RNA (1)...(19): siRNA sense strand
caagaaaagcucaaagaaa

SEQ ID NO: 454108 - RNA, 19 nt, Homo sapiens
  misc_RNA (1)...(19): siRNA sense strand
ggucuuuaucccaccauua

SEQ ID NO: 454109 - RNA, 19 nt, Homo sapiens
  misc_RNA (1)...(19): siRNA sense strand
ccaguuugcaguugauaaa

SEQ ID NO: 454110 - RNA, 19 nt, Homo sapiens
  misc_RNA (1)...(19): siRNA sense strand
aagaaaagcucaaagaaag

SEQ ID NO: 454111 - RNA, 19 nt, Homo sapiens
  misc_RNA (1)...(19): siRNA sense strand
gcagaggacaaagaugaaa

SEQ ID NO: 454112 - RNA, 19 nt, Homo sapiens
  misc_RNA (1)...(19): siRNA sense strand
ccaggacacaaauauguuu

SEQ ID NO: 454113 - RNA, 19 nt, Homo sapiens
  misc_RNA (1)...(19): siRNA sense strand
augcgaugauguucaauaa

SEQ ID NO: 454114 - RNA, 19 nt, Homo sapiens
  misc_RNA (1)...(19): siRNA sense strand
agagaaaugcgaugauguu

SEQ ID NO: 454115 - RNA, 19 nt, Homo sapiens
  misc_RNA (1)...(19): siRNA sense strand
cagagccuguguuaauuuc

SEQ ID NO: 454116 - RNA, 19 nt, Homo sapiens
  misc_RNA (1)...(19): siRNA sense strand
cagcagaaucucaguaaca

SEQ ID NO: 454117 - RNA, 19 nt, Homo sapiens
  misc_RNA (1)...(19): siRNA sense strand
caaugaacucagcuacuuu

SEQ ID NO: 454118 - RNA, 19 nt, Homo sapiens
  misc_RNA (1)...(19): siRNA sense strand
ugaaguagaaugccaacga

SEQ ID NO: 454119 - RNA, 19 nt, Homo sapiens
  misc_RNA (1)...(19): siRNA sense strand
aguuagcucucaagucuga

SEQ ID NO: 454120 - RNA, 19 nt, Homo sapiens
  misc_RNA (1)...(19): siRNA sense strand
aaagaacagguccaagaaa

SEQ ID NO: 454121 - RNA, 19 nt, Homo sapiens
  misc_RNA (1)...(19): siRNA sense strand
gccaccaguuuguuaugaa

SEQ ID NO: 454122 - RNA, 19 nt, Homo sapiens
  misc_RNA (1)...(19): siRNA sense strand
cagaauacagugccaagau

SEQ ID NO: 454123 - RNA, 19 nt, Homo sapiens
  misc_RNA (1)...(19): siRNA sense strand
cagaaucucaguaacaaca

SEQ ID NO: 454124 - RNA, 19 nt, Homo sapiens
  misc_RNA (1)...(19): siRNA sense strand
caaguugccaccaguuugu

SEQ ID NO: 454125 - RNA, 19 nt, Homo sapiens
  misc_RNA (1)...(19): siRNA sense strand
ucaaugagaccaacgacau

SEQ ID NO: 454126 - RNA, 19 nt, Homo sapiens
  misc_RNA (1)...(19): siRNA sense strand
ugccagagccuguguuaau

SEQ ID NO: 454127 - RNA, 19 nt, Homo sapiens
  misc_RNA (1)...(19): siRNA sense strand
gagagaaaugcgaugaugu

SEQ ID NO: 454128 - RNA, 19 nt, Homo sapiens
  misc_RNA (1)...(19): siRNA sense strand
gcucucaacugggcugaag

SEQ ID NO: 454129 - RNA, 19 nt, Homo sapiens
  misc_RNA (1)...(19): siRNA sense strand
aagaaggcaugacagaagu

SEQ ID NO: 454130 - RNA, 19 nt, Homo sapiens
  misc_RNA (1)...(19): siRNA sense strand
gacaucuuccucugguaua

SEQ ID NO: 454131 - RNA, 19 nt, Homo sapiens
  misc_RNA (1)...(19): siRNA sense strand
ucaaagaaagcaaauacca

SEQ ID NO: 454132 - RNA, 19 nt, Homo sapiens
  misc_RNA (1)...(19): siRNA sense strand
guagggaaacucugaaugc

SEQ ID NO: 454133 - RNA, 19 nt, Homo sapiens
  misc_RNA (1)...(19): siRNA sense strand
aagaacagguccaagaaaa

SEQ ID NO: 454134 - RNA, 19 nt, Homo sapiens
  misc_RNA (1)...(19): siRNA sense strand
cgacaucuuccucugguau

SEQ ID NO: 454135 - RNA, 19 nt, Homo sapiens
  misc_RNA (1)...(19): siRNA sense strand
ggguauuaacucucaauga

SEQ ID NO: 454136 - RNA, 19 nt, Homo sapiens
  misc_RNA (1)...(19): siRNA sense strand
ugagggauucugcgauauu

SEQ ID NO: 454137 - RNA, 19 nt, Homo sapiens
  misc_RNA (1)...(19): siRNA sense strand
cacaauggcccucgaugau

SEQ ID NO: 454138 - RNA, 19 nt, Homo sapiens
  misc_RNA (1)...(19): siRNA sense strand
ucugaaugccaaagaaauu

SEQ ID NO: 454139 - RNA, 19 nt, Homo sapiens
  misc_RNA (1)...(19): siRNA sense strand
uccagacacuagaaaguau

SEQ ID NO: 454140 - RNA, 19 nt, Homo sapiens
  misc_RNA (1)...(19): siRNA sense strand
ggacacaaauauguuuuag

SEQ ID NO: 454141 - RNA, 19 nt, Homo sapiens
  misc_RNA (1)...(19): siRNA sense strand
gaaucucaguaacaacaac

SEQ ID NO: 454142 - RNA, 19 nt, Homo sapiens
  misc_RNA (1)...(19): siRNA sense strand
aagaagauggcugcugaua

SEQ ID NO: 454143 - RNA, 19 nt, Homo sapiens
  misc_RNA (1)...(19): siRNA sense strand
guacauugucccucaccuu

SEQ ID NO: 454144 - RNA, 19 nt, Homo sapiens
  misc_RNA (1)...(19): siRNA sense strand
uugcagaggacaaagauga

SEQ ID NO: 454145 - RNA, 19 nt, Homo sapiens
  misc_RNA (1)...(19): siRNA sense strand
gagaaaugcgaugauguuc

SEQ ID NO: 454146 - RNA, 19 nt, Homo sapiens
  misc_RNA (1)...(19): siRNA sense strand
gaaggcaugacagaaguuc

SEQ ID NO: 454147 - RNA, 19 nt, Homo sapiens
  misc_RNA (1)...(19): siRNA sense strand
gcagaauacagugccaaga

SEQ ID NO: 454148 - RNA, 19 nt, Homo sapiens
  misc_RNA (1)...(19): siRNA sense strand
guagaaugccaacgacaag

SEQ ID NO: 454149 - RNA, 19 nt, Homo sapiens
  misc_RNA (1)...(19): siRNA sense strand
ucucaacugggcugaagua

SEQ ID NO: 454150 - RNA, 19 nt, Homo sapiens
  misc_RNA (1)...(19): siRNA sense strand
aaacuggcagggucuuuau

SEQ ID NO: 454151 - RNA, 19 nt, Homo sapiens
  misc_RNA (1)...(19): siRNA sense strand
cagccugagugccaagaau

SEQ ID NO: 454152 - RNA, 19 nt, Homo sapiens
  misc_RNA (1)...(19): siRNA sense strand
acaaagaugaaauccguau

SEQ ID NO: 454153 - RNA, 19 nt, Homo sapiens
  misc_RNA (1)...(19): siRNA sense strand
aaagaugaaauccguauac

SEQ ID NO: 454154 - RNA, 19 nt, Homo sapiens
  misc_RNA (1)...(19): siRNA sense strand
ucaguaacaacaaccuuau

SEQ ID NO: 454155 - RNA, 19 nt, Homo sapiens
  misc_RNA (1)...(19): siRNA sense strand
aacgcaagguucuaggaaa

SEQ ID NO: 454156 - RNA, 19 nt, Homo sapiens
  misc_RNA (1)...(19): siRNA sense strand
aaacgcaagguucuaggaa

SEQ ID NO: 454157 - RNA, 19 nt, Homo sapiens
  misc_RNA (1)...(19): siRNA sense strand
agcagaaucucaguaacaa

SEQ ID NO: 454158 - RNA, 19 nt, Homo sapiens
  misc_RNA (1)...(19): siRNA sense strand
ugucgaaccugcugcuuuu

SEQ ID NO: 454159 - RNA, 19 nt, Homo sapiens
  misc_RNA (1)...(19): siRNA sense strand
cagcauccaguuugcaguu

SEQ ID NO: 454160 - RNA, 19 nt, Homo sapiens
  misc_RNA (1)...(19): siRNA sense strand
caugacagaaguucagugu

SEQ ID NO: 454161 - RNA, 19 nt, Homo sapiens
  misc_RNA (1)...(19): siRNA sense strand
gcagaucccugaacuuaua

SEQ ID NO: 454162 - RNA, 19 nt, Homo sapiens
  misc_RNA (1)...(19): siRNA sense strand
caacugggcugaaguagaa

SEQ ID NO: 454163 - RNA, 19 nt, Homo sapiens
  misc_RNA (1)...(19): siRNA sense strand
gaaaugcgaugauguucaa

SEQ ID NO: 454164 - RNA, 19 nt, Homo sapiens
  misc_RNA (1)...(19): siRNA sense strand
gcaaugaacucagcuacuu

SEQ ID NO: 454165 - RNA, 19 nt, Homo sapiens
  misc_RNA (1)...(19): siRNA sense strand
gcgaugauguucaauaaug

SEQ ID NO: 454166 - RNA, 19 nt, Homo sapiens
  misc_RNA (1)...(19): siRNA sense strand
ucagauggguccagcaaua

SEQ ID NO: 454167 - RNA, 19 nt, Homo sapiens
  misc_RNA (1)...(19): siRNA sense strand
caauggcccucgaugauuu

SEQ ID NO: 454168 - RNA, 19 nt, Homo sapiens
  misc_RNA (1)...(19): siRNA sense strand
gggcagaucccugaacuua

SEQ ID NO: 454169 - RNA, 19 nt, Homo sapiens
  misc_RNA (1)...(19): siRNA sense strand
gaucuggcguugagcauug

SEQ ID NO: 454170 - RNA, 19 nt, Homo sapiens
  misc_RNA (1)...(19): siRNA sense strand
gugccaagauugaacuuaa

SEQ ID NO: 454171 - RNA, 19 nt, Homo sapiens
  misc_RNA (1)...(19): siRNA sense strand
gauacuggauggcaaugaa

SEQ ID NO: 454172 - RNA, 19 nt, Homo sapiens
  misc_RNA (1)...(19): siRNA sense strand
gcaccagcguccagcagua

SEQ ID NO: 454173 - RNA, 19 nt, Homo sapiens
  misc_RNA (1)...(19): siRNA sense strand
gagcuucaguuugugagua

SEQ ID NO: 454174 - RNA, 19 nt, Homo sapiens
  misc_RNA (1)...(19): siRNA sense strand
gacaagaucuggcguugag

SEQ ID NO: 454175 - RNA, 19 nt, Homo sapiens
  misc_RNA (1)...(19): siRNA sense strand
ccaaagaaauugugguuuu

SEQ ID NO: 454176 - RNA, 19 nt, Homo sapiens
  misc_RNA (1)...(19): siRNA sense strand
ugacuuggcugcugacaca

SEQ ID NO: 454177 - RNA, 19 nt, Homo sapiens
  misc_RNA (1)...(19): siRNA sense strand
ucgcuaugcugaaauauau

SEQ ID NO: 454178 - RNA, 19 nt, Homo sapiens
  misc_RNA (1)...(19): siRNA sense strand
uuucagugcuccucagaua

SEQ ID NO: 454179 - RNA, 19 nt, Homo sapiens
  misc_RNA (1)...(19): siRNA sense strand
agaauacagugccaagauu

SEQ ID NO: 454180 - RNA, 19 nt, Homo sapiens
  misc_RNA (1)...(19): siRNA sense strand
ucccugaacuuauauucua

SEQ ID NO: 454181 - RNA, 19 nt, Homo sapiens
  misc_RNA (1)...(19): siRNA sense strand
gccagagccuguguuaauu

SEQ ID NO: 454182 - RNA, 19 nt, Homo sapiens
  misc_RNA (1)...(19): siRNA sense strand
gaauacagugccaagauug

SEQ ID NO: 454183 - RNA, 19 nt, Homo sapiens
  misc_RNA (1)...(19): siRNA sense strand
ucugagggauucugcgaua

SEQ ID NO: 454184 - RNA, 19 nt, Homo sapiens
  misc_RNA (1)...(19): siRNA sense strand
gagggauucugcgauauug

SEQ ID NO: 454185 - RNA, 19 nt, Homo sapiens
  misc_RNA (1)...(19): siRNA sense strand
gauggcagauguacauuuu

SEQ ID NO: 454186 - RNA, 19 nt, Homo sapiens
  misc_RNA (1)...(19): siRNA sense strand
caaacuggcagggucuuua

SEQ ID NO: 454187 - RNA, 19 nt, Homo sapiens
  misc_RNA (1)...(19): siRNA sense strand
cgaugauguucaauaauga

SEQ ID NO: 454188 - RNA, 19 nt, Homo sapiens
  misc_RNA (1)...(19): siRNA sense strand
gauaaaagaguguucauug

SEQ ID NO: 454189 - RNA, 19 nt, Homo sapiens
  misc_RNA (1)...(19): siRNA sense strand
gaaguucaguguggcaaag

SEQ ID NO: 454190 - RNA, 19 nt, Homo sapiens
  misc_RNA (1)...(19): siRNA sense strand
cagcuacuuuggacaagaa

SEQ ID NO: 454191 - RNA, 19 nt, Homo sapiens
  misc_RNA (1)...(19): siRNA sense strand
caagaaggcaugacagaag

SEQ ID NO: 454192 - RNA, 19 nt, Homo sapiens
  misc_RNA (1)...(19): siRNA sense strand
gaaauccguauaccagaug

SEQ ID NO: 454193 - RNA, 19 nt, Homo sapiens
  misc_RNA (1)...(19): siRNA sense strand
gcauccaguuugcaguuga

SEQ ID NO: 454194 - RNA, 19 nt, Homo sapiens
  misc_RNA (1)...(19): siRNA sense strand
ccacaauggcccucgauga

SEQ ID NO: 454195 - RNA, 19 nt, Homo sapiens
  misc_RNA (1)...(19): siRNA sense strand
ugaaauccguauaccagau

SEQ ID NO: 454196 - RNA, 19 nt, Homo sapiens
  misc_RNA (1)...(19): siRNA sense strand
gacaagaaggcaugacaga

SEQ ID NO: 454197 - RNA, 19 nt, Homo sapiens
  misc_RNA (1)...(19): siRNA sense strand
gagcaaguacuucucagau

SEQ ID NO: 454198 - RNA, 19 nt, Homo sapiens
  misc_RNA (1)...(19): siRNA sense strand
agagagaaaugcgaugaug

SEQ ID NO: 454199 - RNA, 19 nt, Homo sapiens
  misc_RNA (1)...(19): siRNA sense strand
ccagagccuguguuaauuu

SEQ ID NO: 454200 - RNA, 19 nt, Homo sapiens
  misc_RNA (1)...(19): siRNA sense strand
caaagaugaaauccguaua

SEQ ID NO: 454201 - RNA, 19 nt, Homo sapiens
  misc_RNA (1)...(19): siRNA sense strand
augcgaugauguucaauaa

SEQ ID NO: 454202 - RNA, 19 nt, Homo sapiens
  misc_RNA (1)...(19): siRNA sense strand
ccaguuugcaguugauaaa

SEQ ID NO: 454203 - RNA, 19 nt, Homo sapiens
  misc_RNA (1)...(19): siRNA sense strand
ggucuuuaucccaccauua

SEQ ID NO: 454204 - RNA, 19 nt, Homo sapiens
  misc_RNA (1)...(19): siRNA sense strand
gcagaggacaaagaugaaa

SEQ ID NO: 454205 - RNA, 19 nt, Homo sapiens
  misc_RNA (1)...(19): siRNA sense strand
ccaggacacaaauauguuu

SEQ ID NO: 454206 - RNA, 19 nt, Homo sapiens
  misc_RNA (1)...(19): siRNA sense strand
agagaaaugcgaugauguu

SEQ ID NO: 454207 - RNA, 19 nt, Homo sapiens
  misc_RNA (1)...(19): siRNA sense strand
cagagccuguguuaauuuc

SEQ ID NO: 454208 - RNA, 19 nt, Homo sapiens
  misc_RNA (1)...(19): siRNA sense strand
aguuagcucucaagucuga

SEQ ID NO: 454209 - RNA, 19 nt, Homo sapiens
  misc_RNA (1)...(19): siRNA sense strand
caaugaacucagcuacuuu

SEQ ID NO: 454210 - RNA, 19 nt, Homo sapiens
  misc_RNA (1)...(19): siRNA sense strand
cagcagaaucucaguaaca

SEQ ID NO: 454211 - RNA, 19 nt, Homo sapiens
  misc_RNA (1)...(19): siRNA sense strand
ugaaguagaaugccaacga

SEQ ID NO: 454212 - RNA, 19 nt, Homo sapiens
  misc_RNA (1)...(19): siRNA sense strand
cagaauacagugccaagau

SEQ ID NO: 454213 - RNA, 19 nt, Homo sapiens
  misc_RNA (1)...(19): siRNA sense strand
cagaaucucaguaacaaca

SEQ ID NO: 454214 - RNA, 19 nt, Homo sapiens
  misc_RNA (1)...(19): siRNA sense strand
ucaaugagaccaacgacau

SEQ ID NO: 454215 - RNA, 19 nt, Homo sapiens
  misc_RNA (1)...(19): siRNA sense strand
gagagaaaugcgaugaugu

SEQ ID NO: 454216 - RNA, 19 nt, Homo sapiens
  misc_RNA (1)...(19): siRNA sense strand
ugccagagccuguguuaau

SEQ ID NO: 454217 - RNA, 19 nt, Homo sapiens
  misc_RNA (1)...(19): siRNA sense strand
gcucucaacugggcugaag

SEQ ID NO: 454218 - RNA, 19 nt, Homo sapiens
  misc_RNA (1)...(19): siRNA sense strand
aagaaggcaugacagaagu

SEQ ID NO: 454219 - RNA, 19 nt, Homo sapiens
  misc_RNA (1)...(19): siRNA sense strand
gacaucuuccucugguaua

SEQ ID NO: 454220 - RNA, 19 nt, Homo sapiens
  misc_RNA (1)...(19): siRNA sense strand
guagggaaacucugaaugc

SEQ ID NO: 454221 - RNA, 19 nt, Homo sapiens
  misc_RNA (1)...(19): siRNA sense strand
cgacaucuuccucugguau

SEQ ID NO: 454222 - RNA, 19 nt, Homo sapiens
  misc_RNA (1)...(19): siRNA sense strand
ggguauuaacucucaauga

SEQ ID NO: 454223 - RNA, 19 nt, Homo sapiens
  misc_RNA (1)...(19): siRNA sense strand
ugagggauucugcgauauu

SEQ ID NO: 454224 - RNA, 19 nt, Homo sapiens
  misc_RNA (1)...(19): siRNA sense strand
cacaauggcccucgaugau

SEQ ID NO: 454225 - RNA, 19 nt, Homo sapiens
  misc_RNA (1)...(19): siRNA sense strand
ucugaaugccaaagaaauu

SEQ ID NO: 454226 - RNA, 19 nt, Homo sapiens
  misc_RNA (1)...(19): siRNA sense strand
uccagacacuagaaaguau

SEQ ID NO: 454227 - RNA, 19 nt, Homo sapiens
  misc_RNA (1)...(19): siRNA sense strand
ggacacaaauauguuuuag

SEQ ID NO: 454228 - RNA, 19 nt, Homo sapiens
  misc_RNA (1)...(19): siRNA sense strand
gaaucucaguaacaacaac

SEQ ID NO: 454229 - RNA, 19 nt, Homo sapiens
  misc_RNA (1)...(19): siRNA sense strand
guacauugucccucaccuu

SEQ ID NO: 454230 - RNA, 19 nt, Homo sapiens
  misc_RNA (1)...(19): siRNA sense strand
uugcagaggacaaagauga

SEQ ID NO: 454231 - RNA, 19 nt, Homo sapiens
  misc_RNA (1)...(19): siRNA sense strand
acaaagaugaaauccguau

SEQ ID NO: 454232 - RNA, 19 nt, Homo sapiens
  misc_RNA (1)...(19): siRNA sense strand
gaaggcaugacagaaguuc

SEQ ID NO: 454233 - RNA, 19 nt, Homo sapiens
  misc_RNA (1)...(19): siRNA sense strand
aaacuggcagggucuuuau

SEQ ID NO: 454234 - RNA, 19 nt, Homo sapiens
  misc_RNA (1)...(19): siRNA sense strand
gcagaauacagugccaaga

SEQ ID NO: 454235 - RNA, 19 nt, Homo sapiens
  misc_RNA (1)...(19): siRNA sense strand
gagaaaugcgaugauguuc

SEQ ID NO: 454236 - RNA, 19 nt, Homo sapiens
  misc_RNA (1)...(19): siRNA sense strand
guagaaugccaacgacaag

SEQ ID NO: 454237 - RNA, 19 nt, Homo sapiens
  misc_RNA (1)...(19): siRNA sense strand
ucucaacugggcugaagua

SEQ ID NO: 454238 - RNA, 19 nt, Homo sapiens
  misc_RNA (1)...(19): siRNA sense strand
cagccugagugccaagaau

SEQ ID NO: 454239 - RNA, 19 nt, Homo sapiens
  misc_RNA (1)...(19): siRNA sense strand
aaagaugaaauccguauac

SEQ ID NO: 454240 - RNA, 19 nt, Homo sapiens
  misc_RNA (1)...(19): siRNA sense strand
aacgcaagguucuaggaaa

SEQ ID NO: 454241 - RNA, 19 nt, Homo sapiens
  misc_RNA (1)...(19): siRNA sense strand
aaacgcaagguucuaggaa

SEQ ID NO: 454242 - RNA, 19 nt, Homo sapiens
  misc_RNA (1)...(19): siRNA sense strand
agcagaaucucaguaacaa

SEQ ID NO: 454243 - RNA, 19 nt, Homo sapiens
  misc_RNA (1)...(19): siRNA sense strand
ucaguaacaacaaccuuau

SEQ ID NO: 454244 - RNA, 19 nt, Homo sapiens
  misc_RNA (1)...(19): siRNA sense strand
ugucgaaccugcugcuuuu

SEQ ID NO: 454245 - RNA, 19 nt, Homo sapiens
  misc_RNA (1)...(19): siRNA sense strand
acaauggcccucgaugauu

SEQ ID NO: 454246 - RNA, 19 nt, Homo sapiens
  misc_RNA (1)...(19): siRNA sense strand
caugacagaaguucagugu

SEQ ID NO: 454247 - RNA, 19 nt, Homo sapiens
  misc_RNA (1)...(19): siRNA sense strand
cagcauccaguuugcaguu

SEQ ID NO: 454248 - RNA, 19 nt, Homo sapiens
  misc_RNA (1)...(19): siRNA sense strand
gccaggacacaaauauguu

SEQ ID NO: 454249 - RNA, 19 nt, Homo sapiens
  misc_RNA (1)...(19): siRNA sense strand
uguguuccaugcgauguuu

SEQ ID NO: 454250 - RNA, 19 nt, Homo sapiens
  misc_RNA (1)...(19): siRNA sense strand
agcaaguacuucucagaug

SEQ ID NO: 454251 - RNA, 19 nt, Homo sapiens
  misc_RNA (1)...(19): siRNA sense strand
gaaugccaacgacaagauc

SEQ ID NO: 454252 - RNA, 19 nt, Homo sapiens
  misc_RNA (1)...(19): siRNA sense strand
gagagagaaaugcgaugau

SEQ ID NO: 454253 - RNA, 19 nt, Homo sapiens
  misc_RNA (1)...(19): siRNA sense strand
cucaguaacaacaaccuua

SEQ ID NO: 454254 - RNA, 19 nt, Homo sapiens
  misc_RNA (1)...(19): siRNA sense strand
gccagacaccuucuacaca

SEQ ID NO: 454255 - RNA, 19 nt, Homo sapiens
  misc_RNA (1)...(19): siRNA sense strand
uaaacgcaagguucuagga

SEQ ID NO: 454256 - RNA, 19 nt, Homo sapiens
  misc_RNA (1)...(19): siRNA sense strand
ccagacacuagaaaguauu

SEQ ID NO: 454257 - RNA, 19 nt, Homo sapiens
  misc_RNA (1)...(19): siRNA sense strand
ugugacagcauccaguuug

SEQ ID NO: 454258 - RNA, 19 nt, Homo sapiens
  misc_RNA (1)...(19): siRNA sense strand
ccucagauagcaccaaugg

SEQ ID NO: 454259 - RNA, 19 nt, Homo sapiens
  misc_RNA (1)...(19): siRNA sense strand
acaagaaggcaugacagaa

SEQ ID NO: 454260 - RNA, 19 nt, Homo sapiens
  misc_RNA (1)...(19): siRNA sense strand
gcaguaccaccagcagaau

SEQ ID NO: 454261 - RNA, 19 nt, Homo sapiens
  misc_RNA (1)...(19): siRNA sense strand
agacuacgcuguuggauuu

SEQ ID NO: 454262 - RNA, 19 nt, Homo sapiens
  misc_RNA (1)...(19): siRNA sense strand
ccuuugagcucuucaguaa

SEQ ID NO: 454263 - RNA, 19 nt, Homo sapiens
  misc_RNA (1)...(19): siRNA sense strand
caagccagcugccuccauu

SEQ ID NO: 454264 - RNA, 19 nt, Homo sapiens
  misc_RNA (1)...(19): siRNA sense strand
gcaaccagaucaccuuugg

SEQ ID NO: 454265 - RNA, 19 nt, Homo sapiens
  misc_RNA (1)...(19): siRNA sense strand
gggaagccaccuccaauga

SEQ ID NO: 454266 - RNA, 19 nt, Homo sapiens
  misc_RNA (1)...(19): siRNA sense strand
gcuguuggauuuaauggau

SEQ ID NO: 454267 - RNA, 19 nt, Homo sapiens
  misc_RNA (1)...(19): siRNA sense strand
ccacugggcccugcaauga

SEQ ID NO: 454268 - RNA, 19 nt, Homo sapiens
  misc_RNA (1)...(19): siRNA sense strand
agaaguggcugagcaggaa

SEQ ID NO: 454269 - RNA, 19 nt, Homo sapiens
  misc_RNA (1)...(19): siRNA sense strand
ccaccaagcccgugucugu

SEQ ID NO: 454270 - RNA, 19 nt, Homo sapiens
  misc_RNA (1)...(19): siRNA sense strand
gaaugaccauggcaagaac

SEQ ID NO: 454271 - RNA, 19 nt, Homo sapiens
  misc_RNA (1)...(19): siRNA sense strand
gugaugaccucagauuaca

SEQ ID NO: 454272 - RNA, 19 nt, Homo sapiens
  misc_RNA (1)...(19): siRNA sense strand
gcaucaaugugcgugagaa

SEQ ID NO: 454273 - RNA, 19 nt, Homo sapiens
  misc_RNA (1)...(19): siRNA sense strand
cccagucccucaacccuuu

SEQ ID NO: 454274 - RNA, 19 nt, Homo sapiens
  misc_RNA (1)...(19): siRNA sense strand
ugaaugaccauggcaagaa

SEQ ID NO: 454275 - RNA, 19 nt, Homo sapiens
  misc_RNA (1)...(19): siRNA sense strand
gaugaccucagauuacaga

SEQ ID NO: 454276 - RNA, 19 nt, Homo sapiens
  misc_RNA (1)...(19): siRNA sense strand
uguggaagcggcugaauga

SEQ ID NO: 454277 - RNA, 19 nt, Homo sapiens
  misc_RNA (1)...(19): siRNA sense strand
caaccaacccuuuccuucu

SEQ ID NO: 454278 - RNA, 19 nt, Homo sapiens
  misc_RNA (1)...(19): siRNA sense strand
gggugaugaccucagauua

SEQ ID NO: 454279 - RNA, 19 nt, Homo sapiens
  misc_RNA (1)...(19): siRNA sense strand
gcaaggaccagggcaucaa

SEQ ID NO: 454280 - RNA, 19 nt, Homo sapiens
  misc_RNA (1)...(19): siRNA sense strand
gaacuggcggcauguguac

SEQ ID NO: 454281 - RNA, 19 nt, Homo sapiens
  misc_RNA (1)...(19): siRNA sense strand
uuugagcucuucaguaauc

SEQ ID NO: 454282 - RNA, 19 nt, Homo sapiens
  misc_RNA (1)...(19): siRNA sense strand
gcagcaaccagaucaccuu

SEQ ID NO: 454283 - RNA, 19 nt, Homo sapiens
  misc_RNA (1)...(19): siRNA sense strand
gccacugguuccucucuga

SEQ ID NO: 454284 - RNA, 19 nt, Homo sapiens
  misc_RNA (1)...(19): siRNA sense strand
ggugggcaguguggguaua

SEQ ID NO: 454285 - RNA, 19 nt, Homo sapiens
  misc_RNA (1)...(19): siRNA sense strand
ggugaugaccucagauuac

SEQ ID NO: 454286 - RNA, 19 nt, Homo sapiens
  misc_RNA (1)...(19): siRNA sense strand
ggaaaacaccugaguccuu

SEQ ID NO: 454287 - RNA, 19 nt, Homo sapiens
  misc_RNA (1)...(19): siRNA sense strand
acagauggcccuggaagaa

SEQ ID NO: 454288 - RNA, 19 nt, Homo sapiens
  misc_RNA (1)...(19): siRNA sense strand
ccgaagggacacaguuaaa

SEQ ID NO: 454289 - RNA, 19 nt, Homo sapiens
  misc_RNA (1)...(19): siRNA sense strand
gcccugcaaugaugaacau

SEQ ID NO: 454290 - RNA, 19 nt, Homo sapiens
  misc_RNA (1)...(19): siRNA sense strand
caagacaggcuccgaacgu

SEQ ID NO: 454291 - RNA, 19 nt, Homo sapiens
  misc_RNA (1)...(19): siRNA sense strand
ccgaaucugugaccucucu

SEQ ID NO: 454292 - RNA, 19 nt, Homo sapiens
  misc_RNA (1)...(19): siRNA sense strand
caaugugcgugagaaguca

SEQ ID NO: 454293 - RNA, 19 nt, Homo sapiens
  misc_RNA (1)...(19): siRNA sense strand
gaagggacacaguuaaaau

SEQ ID NO: 454294 - RNA, 19 nt, Homo sapiens
  misc_RNA (1)...(19): siRNA sense strand
ccaguacauugaccgagau

SEQ ID NO: 454295 - RNA, 19 nt, Homo sapiens
  misc_RNA (1)...(19): siRNA sense strand
gggaccagcacauccuuug

SEQ ID NO: 454296 - RNA, 19 nt, Homo sapiens
  misc_RNA (1)...(19): siRNA sense strand
gcccgucagccuccacuaa

SEQ ID NO: 454297 - RNA, 19 nt, Homo sapiens
  misc_RNA (1)...(19): siRNA sense strand
ucuaucagacggcagauga

SEQ ID NO: 454298 - RNA, 19 nt, Homo sapiens
  misc_RNA (1)...(19): siRNA sense strand
ggaccagggcaucaaugug

SEQ ID NO: 454299 - RNA, 19 nt, Homo sapiens
  misc_RNA (1)...(19): siRNA sense strand
uugccgaccugaccuacaa

SEQ ID NO: 454300 - RNA, 19 nt, Homo sapiens
  misc_RNA (1)...(19): siRNA sense strand
gccgaagggacacaguuaa

SEQ ID NO: 454301 - RNA, 19 nt, Homo sapiens
  misc_RNA (1)...(19): siRNA sense strand
cagauggcccuggaagaaa

SEQ ID NO: 454302 - RNA, 19 nt, Homo sapiens
  misc_RNA (1)...(19): siRNA sense strand
agaacuggcggcaugugua

SEQ ID NO: 454303 - RNA, 19 nt, Homo sapiens
  misc_RNA (1)...(19): siRNA sense strand
cagacuacgcuguuggauu

SEQ ID NO: 454304 - RNA, 19 nt, Homo sapiens
  misc_RNA (1)...(19): siRNA sense strand
ccacuggcaugggcagcaa

SEQ ID NO: 454305 - RNA, 19 nt, Homo sapiens
  misc_RNA (1)...(19): siRNA sense strand
uaucagacggcagaugaaa

SEQ ID NO: 454306 - RNA, 19 nt, Homo sapiens
  misc_RNA (1)...(19): siRNA sense strand
ugacaaccuucggacuuca

SEQ ID NO: 454307 - RNA, 19 nt, Homo sapiens
  misc_RNA (1)...(19): siRNA sense strand
uggacuaccucaucaagac

SEQ ID NO: 454308 - RNA, 19 nt, Homo sapiens
  misc_RNA (1)...(19): siRNA sense strand
ggacuaccucaucaagaca

SEQ ID NO: 454309 - RNA, 19 nt, Homo sapiens
  misc_RNA (1)...(19): siRNA sense strand
cugcuggacuaccucauca

SEQ ID NO: 454310 - RNA, 19 nt, Homo sapiens
  misc_RNA (1)...(19): siRNA sense strand
ccaacccuuuccuucucua

SEQ ID NO: 454311 - RNA, 19 nt, Homo sapiens
  misc_RNA (1)...(19): siRNA sense strand
cuacgcuguuggauuuaau

SEQ ID NO: 454312 - RNA, 19 nt, Homo sapiens
  misc_RNA (1)...(19): siRNA sense strand
cagcaaccagaucaccuuu

SEQ ID NO: 454313 - RNA, 19 nt, Homo sapiens
  misc_RNA (1)...(19): siRNA sense strand
ucaaugugcgugagaaguc

SEQ ID NO: 454314 - RNA, 19 nt, Homo sapiens
  misc_RNA (1)...(19): siRNA sense strand
ggaagccaccuccaaugac

SEQ ID NO: 454315 - RNA, 19 nt, Homo sapiens
  misc_RNA (1)...(19): siRNA sense strand
ggacacaguuaaaauucca

SEQ ID NO: 454316 - RNA, 19 nt, Homo sapiens
  misc_RNA (1)...(19): siRNA sense strand
agauggcccuggaagaaag

SEQ ID NO: 454317 - RNA, 19 nt, Homo sapiens
  misc_RNA (1)...(19): siRNA sense strand
uccagacccugaaggacuu

SEQ ID NO: 454318 - RNA, 19 nt, Homo sapiens
  misc_RNA (1)...(19): siRNA sense strand
gcaagaacuggcggcaugu

SEQ ID NO: 454319 - RNA, 19 nt, Homo sapiens
  misc_RNA (1)...(19): siRNA sense strand
acugggcccugcaaugaug

SEQ ID NO: 454320 - RNA, 19 nt, Homo sapiens
  misc_RNA (1)...(19): siRNA sense strand
caucgugaacaauuacuca

SEQ ID NO: 454321 - RNA, 19 nt, Homo sapiens
  misc_RNA (1)...(19): siRNA sense strand
ggacgaggaacgguugaag

SEQ ID NO: 454322 - RNA, 19 nt, Homo sapiens
  misc_RNA (1)...(19): siRNA sense strand
uuacucagaggcagaaauc

SEQ ID NO: 454323 - RNA, 19 nt, Homo sapiens
  misc_RNA (1)...(19): siRNA sense strand
caaggaccagggcaucaau

SEQ ID NO: 454324 - RNA, 19 nt, Homo sapiens
  misc_RNA (1)...(19): siRNA sense strand
acugguggcucuccucaag

SEQ ID NO: 454325 - RNA, 19 nt, Homo sapiens
  misc_RNA (1)...(19): siRNA sense strand
aaccaacccuuuccuucuc

SEQ ID NO: 454326 - RNA, 19 nt, Homo sapiens
  misc_RNA (1)...(19): siRNA sense strand
cacaaucuguccccaagaa

SEQ ID NO: 454327 - RNA, 19 nt, Homo sapiens
  misc_RNA (1)...(19): siRNA sense strand
ccagacuaguggagaagag

SEQ ID NO: 454328 - RNA, 19 nt, Homo sapiens
  misc_RNA (1)...(19): siRNA sense strand
ggacuuccaguacauugac

SEQ ID NO: 454329 - RNA, 19 nt, Homo sapiens
  misc_RNA (1)...(19): siRNA sense strand
aaacaucgugaacaauuac

SEQ ID NO: 454330 - RNA, 19 nt, Homo sapiens
  misc_RNA (1)...(19): siRNA sense strand
acuacgcuguuggauuuaa

SEQ ID NO: 454331 - RNA, 19 nt, Homo sapiens
  misc_RNA (1)...(19): siRNA sense strand
agacuacgcuguuggauuu

SEQ ID NO: 454332 - RNA, 19 nt, Homo sapiens
  misc_RNA (1)...(19): siRNA sense strand
ccuuugagcucuucaguaa

SEQ ID NO: 454333 - RNA, 19 nt, Homo sapiens
  misc_RNA (1)...(19): siRNA sense strand
caagccagcugccuccauu

SEQ ID NO: 454334 - RNA, 19 nt, Homo sapiens
  misc_RNA (1)...(19): siRNA sense strand
gcaaccagaucaccuuugg

SEQ ID NO: 454335 - RNA, 19 nt, Homo sapiens
  misc_RNA (1)...(19): siRNA sense strand
gggaagccaccuccaauga

SEQ ID NO: 454336 - RNA, 19 nt, Homo sapiens
  misc_RNA (1)...(19): siRNA sense strand
gcuguuggauuuaauggau

SEQ ID NO: 454337 - RNA, 19 nt, Homo sapiens
  misc_RNA (1)...(19): siRNA sense strand
ccacugggcccugcaauga

SEQ ID NO: 454338 - RNA, 19 nt, Homo sapiens
  misc_RNA (1)...(19): siRNA sense strand
agaaguggcugagcaggaa

SEQ ID NO: 454339 - RNA, 19 nt, Homo sapiens
  misc_RNA (1)...(19): siRNA sense strand
ccaccaagcccgugucugu

SEQ ID NO: 454340 - RNA, 19 nt, Homo sapiens
  misc_RNA (1)...(19): siRNA sense strand
gaaugaccauggcaagaac

SEQ ID NO: 454341 - RNA, 19 nt, Homo sapiens
  misc_RNA (1)...(19): siRNA sense strand
gugaugaccucagauuaca

SEQ ID NO: 454342 - RNA, 19 nt, Homo sapiens
  misc_RNA (1)...(19): siRNA sense strand
gcaucaaugugcgugagaa

SEQ ID NO: 454343 - RNA, 19 nt, Homo sapiens
  misc_RNA (1)...(19): siRNA sense strand
cccagucccucaacccuuu

SEQ ID NO: 454344 - RNA, 19 nt, Homo sapiens
  misc_RNA (1)...(19): siRNA sense strand
ugaaugaccauggcaagaa

SEQ ID NO: 454345 - RNA, 19 nt, Homo sapiens
  misc_RNA (1)...(19): siRNA sense strand
gaugaccucagauuacaga

SEQ ID NO: 454346 - RNA, 19 nt, Homo sapiens
  misc_RNA (1)...(19): siRNA sense strand
uguggaagcggcugaauga

SEQ ID NO: 454347 - RNA, 19 nt, Homo sapiens
  misc_RNA (1)...(19): siRNA sense strand
caaccaacccuuuccuucu

SEQ ID NO: 454348 - RNA, 19 nt, Homo sapiens
  misc_RNA (1)...(19): siRNA sense strand
gggugaugaccucagauua

SEQ ID NO: 454349 - RNA, 19 nt, Homo sapiens
  misc_RNA (1)...(19): siRNA sense strand
gcaaggaccagggcaucaa

SEQ ID NO: 454350 - RNA, 19 nt, Homo sapiens
  misc_RNA (1)...(19): siRNA sense strand
gaacuggcggcauguguac

SEQ ID NO: 454351 - RNA, 19 nt, Homo sapiens
  misc_RNA (1)...(19): siRNA sense strand
uuugagcucuucaguaauc

SEQ ID NO: 454352 - RNA, 19 nt, Homo sapiens
  misc_RNA (1)...(19): siRNA sense strand
gcagcaaccagaucaccuu

SEQ ID NO: 454353 - RNA, 19 nt, Homo sapiens
  misc_RNA (1)...(19): siRNA sense strand
gccacugguuccucucuga

SEQ ID NO: 454354 - RNA, 19 nt, Homo sapiens
  misc_RNA (1)...(19): siRNA sense strand
ggugggcaguguggguaua

SEQ ID NO: 454355 - RNA, 19 nt, Homo sapiens
  misc_RNA (1)...(19): siRNA sense strand
ggugaugaccucagauuac

SEQ ID NO: 454356 - RNA, 19 nt, Homo sapiens
  misc_RNA (1)...(19): siRNA sense strand
ggaaaacaccugaguccuu

SEQ ID NO: 454357 - RNA, 19 nt, Homo sapiens
  misc_RNA (1)...(19): siRNA sense strand
acagauggcccuggaagaa

SEQ ID NO: 454358 - RNA, 19 nt, Homo sapiens
  misc_RNA (1)...(19): siRNA sense strand
ccgaagggacacaguuaaa

SEQ ID NO: 454359 - RNA, 19 nt, Homo sapiens
  misc_RNA (1)...(19): siRNA sense strand
gcccugcaaugaugaacau

SEQ ID NO: 454360 - RNA, 19 nt, Homo sapiens
  misc_RNA (1)...(19): siRNA sense strand
caagacaggcuccgaacgu

SEQ ID NO: 454361 - RNA, 19 nt, Homo sapiens
  misc_RNA (1)...(19): siRNA sense strand
ccgaaucugugaccucucu

SEQ ID NO: 454362 - RNA, 19 nt, Homo sapiens
  misc_RNA (1)...(19): siRNA sense strand
caaugugcgugagaaguca

SEQ ID NO: 454363 - RNA, 19 nt, Homo sapiens
  misc_RNA (1)...(19): siRNA sense strand
gaagggacacaguuaaaau

SEQ ID NO: 454364 - RNA, 19 nt, Homo sapiens
  misc_RNA (1)...(19): siRNA sense strand
ccaguacauugaccgagau

SEQ ID NO: 454365 - RNA, 19 nt, Homo sapiens
  misc_RNA (1)...(19): siRNA sense strand
gggaccagcacauccuuug

SEQ ID NO: 454366 - RNA, 19 nt, Homo sapiens
  misc_RNA (1)...(19): siRNA sense strand
gcccgucagccuccacuaa

SEQ ID NO: 454367 - RNA, 19 nt, Homo sapiens
  misc_RNA (1)...(19): siRNA sense strand
ucuaucagacggcagauga

SEQ ID NO: 454368 - RNA, 19 nt, Homo sapiens
  misc_RNA (1)...(19): siRNA sense strand
ggaccagggcaucaaugug

SEQ ID NO: 454369 - RNA, 19 nt, Homo sapiens
  misc_RNA (1)...(19): siRNA sense strand
uugccgaccugaccuacaa

SEQ ID NO: 454370 - RNA, 19 nt, Homo sapiens
  misc_RNA (1)...(19): siRNA sense strand
gccgaagggacacaguuaa

SEQ ID NO: 454371 - RNA, 19 nt, Homo sapiens
  misc_RNA (1)...(19): siRNA sense strand
cagauggcccuggaagaaa

SEQ ID NO: 454372 - RNA, 19 nt, Homo sapiens
  misc_RNA (1)...(19): siRNA sense strand
agaacuggcggcaugugua

SEQ ID NO: 454373 - RNA, 19 nt, Homo sapiens
  misc_RNA (1)...(19): siRNA sense strand
cagacuacgcuguuggauu

SEQ ID NO: 454374 - RNA, 19 nt, Homo sapiens
  misc_RNA (1)...(19): siRNA sense strand
ccacuggcaugggcagcaa

SEQ ID NO: 454375 - RNA, 19 nt, Homo sapiens
  misc_RNA (1)...(19): siRNA sense strand
uaucagacggcagaugaaa

SEQ ID NO: 454376 - RNA, 19 nt, Homo sapiens
  misc_RNA (1)...(19): siRNA sense strand
ugacaaccuucggacuuca

SEQ ID NO: 454377 - RNA, 19 nt, Homo sapiens
  misc_RNA (1)...(19): siRNA sense strand
uggacuaccucaucaagac

SEQ ID NO: 454378 - RNA, 19 nt, Homo sapiens
  misc_RNA (1)...(19): siRNA sense strand
ggacuaccucaucaagaca

SEQ ID NO: 454379 - RNA, 19 nt, Homo sapiens
  misc_RNA (1)...(19): siRNA sense strand
cugcuggacuaccucauca

SEQ ID NO: 454380 - RNA, 19 nt, Homo sapiens
  misc_RNA (1)...(19): siRNA sense strand
ccaacccuuuccuucucua

SEQ ID NO: 454381 - RNA, 19 nt, Homo sapiens
  misc_RNA (1)...(19): siRNA sense strand
cuacgcuguuggauuuaau

SEQ ID NO: 454382 - RNA, 19 nt, Homo sapiens
  misc_RNA (1)...(19): siRNA sense strand
cagcaaccagaucaccuuu

SEQ ID NO: 454383 - RNA, 19 nt, Homo sapiens
  misc_RNA (1)...(19): siRNA sense strand
ucaaugugcgugagaaguc

SEQ ID NO: 454384 - RNA, 19 nt, Homo sapiens
  misc_RNA (1)...(19): siRNA sense strand
ggaagccaccuccaaugac

SEQ ID NO: 454385 - RNA, 19 nt, Homo sapiens
  misc_RNA (1)...(19): siRNA sense strand
ggacacaguuaaaauucca

SEQ ID NO: 454386 - RNA, 19 nt, Homo sapiens
  misc_RNA (1)...(19): siRNA sense strand
agauggcccuggaagaaag

SEQ ID NO: 454387 - RNA, 19 nt, Homo sapiens
  misc_RNA (1)...(19): siRNA sense strand
uccagacccugaaggacuu

SEQ ID NO: 454388 - RNA, 19 nt, Homo sapiens
  misc_RNA (1)...(19): siRNA sense strand
gcaagaacuggcggcaugu

SEQ ID NO: 454389 - RNA, 19 nt, Homo sapiens
  misc_RNA (1)...(19): siRNA sense strand
acugggcccugcaaugaug

SEQ ID NO: 454390 - RNA, 19 nt, Homo sapiens
  misc_RNA (1)...(19): siRNA sense strand
caucgugaacaauuacuca

SEQ ID NO: 454391 - RNA, 19 nt, Homo sapiens
  misc_RNA (1)...(19): siRNA sense strand
ggacgaggaacgguugaag

SEQ ID NO: 454392 - RNA, 19 nt, Homo sapiens
  misc_RNA (1)...(19): siRNA sense strand
uuacucagaggcagaaauc

SEQ ID NO: 454393 - RNA, 19 nt, Homo sapiens
  misc_RNA (1)...(19): siRNA sense strand
caaggaccagggcaucaau

SEQ ID NO: 454394 - RNA, 19 nt, Homo sapiens
  misc_RNA (1)...(19): siRNA sense strand
acugguggcucuccucaag

SEQ ID NO: 454395 - RNA, 19 nt, Homo sapiens
  misc_RNA (1)...(19): siRNA sense strand
aaccaacccuuuccuucuc

SEQ ID NO: 454396 - RNA, 19 nt, Homo sapiens
  misc_RNA (1)...(19): siRNA sense strand
cacaaucuguccccaagaa

SEQ ID NO: 454397 - RNA, 19 nt, Homo sapiens
  misc_RNA (1)...(19): siRNA sense strand
ccagacuaguggagaagag

SEQ ID NO: 454398 - RNA, 19 nt, Homo sapiens
  misc_RNA (1)...(19): siRNA sense strand
ggacuuccaguacauugac

SEQ ID NO: 454399 - RNA, 19 nt, Homo sapiens
  misc_RNA (1)...(19): siRNA sense strand
aaacaucgugaacaauuac

SEQ ID NO: 454400 - RNA, 19 nt, Homo sapiens
  misc_RNA (1)...(19): siRNA sense strand
acuacgcuguuggauuuaa

SEQ ID NO: 454401 - RNA, 19 nt, Homo sapiens
  misc_RNA (1)...(19): siRNA sense strand
gagguuccaugcaucauuu

SEQ ID NO: 454402 - RNA, 19 nt, Homo sapiens
  misc_RNA (1)...(19): siRNA sense strand
gggaagcuguaccuccaua

SEQ ID NO: 454403 - RNA, 19 nt, Homo sapiens
  misc_RNA (1)...(19): siRNA sense strand
ucucagaccuuuauuucau

SEQ ID NO: 454404 - RNA, 19 nt, Homo sapiens
  misc_RNA (1)...(19): siRNA sense strand
ggagugcaguggugcuaug

SEQ ID NO: 454405 - RNA, 19 nt, Homo sapiens
  misc_RNA (1)...(19): siRNA sense strand
gggaaagaaugccagaacu

SEQ ID NO: 454406 - RNA, 19 nt, Homo sapiens
  misc_RNA (1)...(19): siRNA sense strand
gaagcuguaccuccauaau

SEQ ID NO: 454407 - RNA, 19 nt, Homo sapiens
  misc_RNA (1)...(19): siRNA sense strand
gagguuagaagggaaagaa

SEQ ID NO: 454408 - RNA, 19 nt, Homo sapiens
  misc_RNA (1)...(19): siRNA sense strand
ggaaagaaugccagaacuc

SEQ ID NO: 454409 - RNA, 19 nt, Homo sapiens
  misc_RNA (1)...(19): siRNA sense strand
ggaagcuguaccuccauaa

SEQ ID NO: 454410 - RNA, 19 nt, Homo sapiens
  misc_RNA (1)...(19): siRNA sense strand
ggcuagagguuccaugcau

SEQ ID NO: 454411 - RNA, 19 nt, Homo sapiens
  misc_RNA (1)...(19): siRNA sense strand
caucccuucuuuccuccua

SEQ ID NO: 454412 - RNA, 19 nt, Homo sapiens
  misc_RNA (1)...(19): siRNA sense strand
gguuagaagggaaagaaug

SEQ ID NO: 454413 - RNA, 19 nt, Homo sapiens
  misc_RNA (1)...(19): siRNA sense strand
cuucuuuccuccuacauuc

SEQ ID NO: 454414 - RNA, 19 nt, Homo sapiens
  misc_RNA (1)...(19): siRNA sense strand
agcuguaccuccauaauca

SEQ ID NO: 454415 - RNA, 19 nt, Homo sapiens
  misc_RNA (1)...(19): siRNA sense strand
cagacucucagaccuuuau

SEQ ID NO: 454416 - RNA, 19 nt, Homo sapiens
  misc_RNA (1)...(19): siRNA sense strand
cucagacucucagaccuuu

SEQ ID NO: 454417 - RNA, 19 nt, Homo sapiens
  misc_RNA (1)...(19): siRNA sense strand
gacucucagaccuuuauuu

SEQ ID NO: 454418 - RNA, 19 nt, Homo sapiens
  misc_RNA (1)...(19): siRNA sense strand
acucucagaccuuuauuuc

SEQ ID NO: 454419 - RNA, 19 nt, Homo sapiens
  misc_RNA (1)...(19): siRNA sense strand
cgaaaugccuuaaauaugu

SEQ ID NO: 454420 - RNA, 19 nt, Homo sapiens
  misc_RNA (1)...(19): siRNA sense strand
gcagacaucucccaaauca

SEQ ID NO: 454421 - RNA, 19 nt, Homo sapiens
  misc_RNA (1)...(19): siRNA sense strand
ccaaucauguguccuauaa

SEQ ID NO: 454422 - RNA, 19 nt, Homo sapiens
  misc_RNA (1)...(19): siRNA sense strand
ccaaagcuauguuaaagaa

SEQ ID NO: 454423 - RNA, 19 nt, Homo sapiens
  misc_RNA (1)...(19): siRNA sense strand
gagcagacaucucccaaau

SEQ ID NO: 454424 - RNA, 19 nt, Homo sapiens
  misc_RNA (1)...(19): siRNA sense strand
gcaagucugugauugugaa

SEQ ID NO: 454425 - RNA, 19 nt, Homo sapiens
  misc_RNA (1)...(19): siRNA sense strand
gagcgaaaugccuuaaaua

SEQ ID NO: 454426 - RNA, 19 nt, Homo sapiens
  misc_RNA (1)...(19): siRNA sense strand
gaacugagugcuaccgaaa

SEQ ID NO: 454427 - RNA, 19 nt, Homo sapiens
  misc_RNA (1)...(19): siRNA sense strand
gaacagaagaagcuauuag

SEQ ID NO: 454428 - RNA, 19 nt, Homo sapiens
  misc_RNA (1)...(19): siRNA sense strand
ccacaaugacaaccacuua

SEQ ID NO: 454429 - RNA, 19 nt, Homo sapiens
  misc_RNA (1)...(19): siRNA sense strand
caaacucacucuugaaugc

SEQ ID NO: 454430 - RNA, 19 nt, Homo sapiens
  misc_RNA (1)...(19): siRNA sense strand
gaaugcuggugacuugaaa

SEQ ID NO: 454431 - RNA, 19 nt, Homo sapiens
  misc_RNA (1)...(19): siRNA sense strand
gcuggugacuugaaacaga

SEQ ID NO: 454432 - RNA, 19 nt, Homo sapiens
  misc_RNA (1)...(19): siRNA sense strand
gcaggcauuugacuaugaa

SEQ ID NO: 454433 - RNA, 19 nt, Homo sapiens
  misc_RNA (1)...(19): siRNA sense strand
gcagacaguggaacuauug

SEQ ID NO: 454434 - RNA, 19 nt, Homo sapiens
  misc_RNA (1)...(19): siRNA sense strand
gcgaaaugccuuaaauaug

SEQ ID NO: 454435 - RNA, 19 nt, Homo sapiens
  misc_RNA (1)...(19): siRNA sense strand
gguggaagcgaaucugaua

SEQ ID NO: 454436 - RNA, 19 nt, Homo sapiens
  misc_RNA (1)...(19): siRNA sense strand
gaauuugcagcuucuauug

SEQ ID NO: 454437 - RNA, 19 nt, Homo sapiens
  misc_RNA (1)...(19): siRNA sense strand
ggaacagcuugaugucuuc

SEQ ID NO: 454438 - RNA, 19 nt, Homo sapiens
  misc_RNA (1)...(19): siRNA sense strand
caccaaagcuauguuaaag

SEQ ID NO: 454439 - RNA, 19 nt, Homo sapiens
  misc_RNA (1)...(19): siRNA sense strand
gcucauccaugucccuuuc

SEQ ID NO: 454440 - RNA, 19 nt, Homo sapiens
  misc_RNA (1)...(19): siRNA sense strand
caaaguccaaguucuggua

SEQ ID NO: 454441 - RNA, 19 nt, Homo sapiens
  misc_RNA (1)...(19): siRNA sense strand
caacagucgugagcacuug

SEQ ID NO: 454442 - RNA, 19 nt, Homo sapiens
  misc_RNA (1)...(19): siRNA sense strand
gagaagggccaaucaugug

SEQ ID NO: 454443 - RNA, 19 nt, Homo sapiens
  misc_RNA (1)...(19): siRNA sense strand
ugagcgaaaugccuuaaau

SEQ ID NO: 454444 - RNA, 19 nt, Homo sapiens
  misc_RNA (1)...(19): siRNA sense strand
ccaagcaagucugugauug

SEQ ID NO: 454445 - RNA, 19 nt, Homo sapiens
  misc_RNA (1)...(19): siRNA sense strand
ccaccaaagcuauguuaaa

SEQ ID NO: 454446 - RNA, 19 nt, Homo sapiens
  misc_RNA (1)...(19): siRNA sense strand
gcacagucuccagauauaa

SEQ ID NO: 454447 - RNA, 19 nt, Homo sapiens
  misc_RNA (1)...(19): siRNA sense strand
ggucagaacgcccacaaau

SEQ ID NO: 454448 - RNA, 19 nt, Homo sapiens
  misc_RNA (1)...(19): siRNA sense strand
gcuccacggucaucauaug

SEQ ID NO: 454449 - RNA, 19 nt, Homo sapiens
  misc_RNA (1)...(19): siRNA sense strand
gcauuugacuaugaacaga

SEQ ID NO: 454450 - RNA, 19 nt, Homo sapiens
  misc_RNA (1)...(19): siRNA sense strand
caaugacaaccacuuauga

SEQ ID NO: 454451 - RNA, 19 nt, Homo sapiens
  misc_RNA (1)...(19): siRNA sense strand
gucagaacgcccacaaaua

SEQ ID NO: 454452 - RNA, 19 nt, Homo sapiens
  misc_RNA (1)...(19): siRNA sense strand
ucaagugagcguuguguuu

SEQ ID NO: 454453 - RNA, 19 nt, Homo sapiens
  misc_RNA (1)...(19): siRNA sense strand
ucagaacgcccacaaauac

SEQ ID NO: 454454 - RNA, 19 nt, Homo sapiens
  misc_RNA (1)...(19): siRNA sense strand
caugcacagucuccagaua

SEQ ID NO: 454455 - RNA, 19 nt, Homo sapiens
  misc_RNA (1)...(19): siRNA sense strand
uggaagucauagugaauuu

SEQ ID NO: 454456 - RNA, 19 nt, Homo sapiens
  misc_RNA (1)...(19): siRNA sense strand
ggagagaccgaaauggaau

SEQ ID NO: 454457 - RNA, 19 nt, Homo sapiens
  misc_RNA (1)...(19): siRNA sense strand
gcccaagccacauuaacua

SEQ ID NO: 454458 - RNA, 19 nt, Homo sapiens
  misc_RNA (1)...(19): siRNA sense strand
ggaaugcuggugacuugaa

SEQ ID NO: 454459 - RNA, 19 nt, Homo sapiens
  misc_RNA (1)...(19): siRNA sense strand
ugggaaugcuggugacuug

SEQ ID NO: 454460 - RNA, 19 nt, Homo sapiens
  misc_RNA (1)...(19): siRNA sense strand
caaaucaagugagcguugu

SEQ ID NO: 454461 - RNA, 19 nt, Homo sapiens
  misc_RNA (1)...(19): siRNA sense strand
ccacggucaucauauguca

SEQ ID NO: 454462 - RNA, 19 nt, Homo sapiens
  misc_RNA (1)...(19): siRNA sense strand
ccuuaucucugaacacuuc

SEQ ID NO: 454463 - RNA, 19 nt, Homo sapiens
  misc_RNA (1)...(19): siRNA sense strand
ggcagacaguggaacuauu

SEQ ID NO: 454464 - RNA, 19 nt, Homo sapiens
  misc_RNA (1)...(19): siRNA sense strand
ccacugaagguuguaauga

SEQ ID NO: 454465 - RNA, 19 nt, Homo sapiens
  misc_RNA (1)...(19): siRNA sense strand
aaucucugcugcuuuaaau

SEQ ID NO: 454466 - RNA, 19 nt, Homo sapiens
  misc_RNA (1)...(19): siRNA sense strand
gcuauaccacaccuuauga

SEQ ID NO: 454467 - RNA, 19 nt, Homo sapiens
  misc_RNA (1)...(19): siRNA sense strand
cagcugaaacuaucaagga

SEQ ID NO: 454468 - RNA, 19 nt, Homo sapiens
  misc_RNA (1)...(19): siRNA sense strand
ugcacagucuccagauaua

SEQ ID NO: 454469 - RNA, 19 nt, Homo sapiens
  misc_RNA (1)...(19): siRNA sense strand
agaccgaaauggaauugga

SEQ ID NO: 454470 - RNA, 19 nt, Homo sapiens
  misc_RNA (1)...(19): siRNA sense strand
gaagcgaaucugauaacug

SEQ ID NO: 454471 - RNA, 19 nt, Homo sapiens
  misc_RNA (1)...(19): siRNA sense strand
ggaccuggaagucauagug

SEQ ID NO: 454472 - RNA, 19 nt, Homo sapiens
  misc_RNA (1)...(19): siRNA sense strand
gaauuggaccuggaaguca

SEQ ID NO: 454473 - RNA, 19 nt, Homo sapiens
  misc_RNA (1)...(19): siRNA sense strand
caagguuuccugugccaaa

SEQ ID NO: 454474 - RNA, 19 nt, Homo sapiens
  misc_RNA (1)...(19): siRNA sense strand
ugaauuugcagcuucuauu

SEQ ID NO: 454475 - RNA, 19 nt, Homo sapiens
  misc_RNA (1)...(19): siRNA sense strand
ggaauuggaccuggaaguc

SEQ ID NO: 454476 - RNA, 19 nt, Homo sapiens
  misc_RNA (1)...(19): siRNA sense strand
ggaagcgaaucugauaacu

SEQ ID NO: 454477 - RNA, 19 nt, Homo sapiens
  misc_RNA (1)...(19): siRNA sense strand
gggccaaucauguguccua

SEQ ID NO: 454478 - RNA, 19 nt, Homo sapiens
  misc_RNA (1)...(19): siRNA sense strand
aauauccacuucaucacuu

SEQ ID NO: 454479 - RNA, 19 nt, Homo sapiens
  misc_RNA (1)...(19): siRNA sense strand
caagcaagucugugauugu

SEQ ID NO: 454480 - RNA, 19 nt, Homo sapiens
  misc_RNA (1)...(19): siRNA sense strand
ugagaagggccaaucaugu

SEQ ID NO: 454481 - RNA, 19 nt, Homo sapiens
  misc_RNA (1)...(19): siRNA sense strand
agacaucucccaaaucaag

SEQ ID NO: 454482 - RNA, 19 nt, Homo sapiens
  misc_RNA (1)...(19): siRNA sense strand
cccaccaccuuaucucuga

SEQ ID NO: 454483 - RNA, 19 nt, Homo sapiens
  misc_RNA (1)...(19): siRNA sense strand
ugaaaaguguugagcgaaa

SEQ ID NO: 454484 - RNA, 19 nt, Homo sapiens
  misc_RNA (1)...(19): siRNA sense strand
aagcaagucugugauugug

SEQ ID NO: 454485 - RNA, 19 nt, Homo sapiens
  misc_RNA (1)...(19): siRNA sense strand
caugccagcugaaacuauc

SEQ ID NO: 454486 - RNA, 19 nt, Homo sapiens
  misc_RNA (1)...(19): siRNA sense strand
aaauggacaugcacagucu

SEQ ID NO: 454487 - RNA, 19 nt, Homo sapiens
  misc_RNA (1)...(19): siRNA sense strand
gaaaaguguugagcgaaau

SEQ ID NO: 454488 - RNA, 19 nt, Homo sapiens
  misc_RNA (1)...(19): siRNA sense strand
cagccaagcaagucuguga

SEQ ID NO: 454489 - RNA, 19 nt, Homo sapiens
  misc_RNA (1)...(19): siRNA sense strand
gaagucauagugaauuugc

SEQ ID NO: 454490 - RNA, 19 nt, Homo sapiens
  misc_RNA (1)...(19): siRNA sense strand
cacugaagguuguaaugau

SEQ ID NO: 454491 - RNA, 19 nt, Homo sapiens
  misc_RNA (1)...(19): siRNA sense strand
uauuuggguuggaguauca

SEQ ID NO: 454492 - RNA, 19 nt, Homo sapiens
  misc_RNA (1)...(19): siRNA sense strand
ggaagucauagugaauuug

SEQ ID NO: 454493 - RNA, 19 nt, Homo sapiens
  misc_RNA (1)...(19): siRNA sense strand
gaccuggaagucauaguga

SEQ ID NO: 454494 - RNA, 19 nt, Homo sapiens
  misc_RNA (1)...(19): siRNA sense strand
gagagaccgaaauggaauu

SEQ ID NO: 454495 - RNA, 19 nt, Homo sapiens
  misc_RNA (1)...(19): siRNA sense strand
gaaaugucuccucggacuu

SEQ ID NO: 454496 - RNA, 19 nt, Homo sapiens
  misc_RNA (1)...(19): siRNA sense strand
uggcuugacuccuguugau

SEQ ID NO: 454497 - RNA, 19 nt, Homo sapiens
  misc_RNA (1)...(19): siRNA sense strand
cauagugaauuugcagcuu

SEQ ID NO: 454498 - RNA, 19 nt, Homo sapiens
  misc_RNA (1)...(19): siRNA sense strand
ccaaacagccaagcaaguc

SEQ ID NO: 454499 - RNA, 19 nt, Homo sapiens
  misc_RNA (1)...(19): siRNA sense strand
gagguggaagcgaaucuga

SEQ ID NO: 454500 - RNA, 19 nt, Homo sapiens
  misc_RNA (1)...(19): siRNA sense strand
guaaugaugcuuuuguuga

SEQ ID NO: 454501 - RNA, 19 nt, Homo sapiens
  misc_RNA (1)...(19): siRNA sense strand
acugaagguuguaaugaug

SEQ ID NO: 454502 - RNA, 19 nt, Homo sapiens
  misc_RNA (1)...(19): siRNA sense strand
cacagucuccagauauaaa

SEQ ID NO: 454503 - RNA, 19 nt, Homo sapiens
  misc_RNA (1)...(19): siRNA sense strand
acaaugacaaccacuuaug

SEQ ID NO: 454504 - RNA, 19 nt, Homo sapiens
  misc_RNA (1)...(19): siRNA sense strand
uauaagcccacaaugacaa

SEQ ID NO: 454505 - RNA, 19 nt, Homo sapiens
  misc_RNA (1)...(19): siRNA sense strand
aaucauguguccuauaagc

SEQ ID NO: 454506 - RNA, 19 nt, Homo sapiens
  misc_RNA (1)...(19): siRNA sense strand
gaugugucccuccaagguu

SEQ ID NO: 454507 - RNA, 19 nt, Homo sapiens
  misc_RNA (1)...(19): siRNA sense strand
gccaagcaagucugugauu

SEQ ID NO: 454508 - RNA, 19 nt, Homo sapiens
  misc_RNA (1)...(19): siRNA sense strand
ggugcaauauccacuucau

SEQ ID NO: 454509 - RNA, 19 nt, Homo sapiens
  misc_RNA (1)...(19): siRNA sense strand
acucuugaaugcucuuaau

SEQ ID NO: 454510 - RNA, 19 nt, Homo sapiens
  misc_RNA (1)...(19): siRNA sense strand
guaugaagcaaggaaaugu

SEQ ID NO: 454511 - RNA, 19 nt, Homo sapiens
  misc_RNA (1)...(19): siRNA sense strand
ugcaggcauuugacuauga

SEQ ID NO: 454512 - RNA, 19 nt, Homo sapiens
  misc_RNA (1)...(19): siRNA sense strand
gacaguggaacuauugcaa

SEQ ID NO: 454513 - RNA, 19 nt, Homo sapiens
  misc_RNA (1)...(19): siRNA sense strand
ugucuggagugcccaccua

SEQ ID NO: 454514 - RNA, 19 nt, Homo sapiens
  misc_RNA (1)...(19): siRNA sense strand
gcucuuaauagcucaguca

SEQ ID NO: 454515 - RNA, 19 nt, Homo sapiens
  misc_RNA (1)...(19): siRNA sense strand
uaacuggagagaccgaaau

SEQ ID NO: 454516 - RNA, 19 nt, Homo sapiens
  misc_RNA (1)...(19): siRNA sense strand
gccaaucauguguccuaua

SEQ ID NO: 454517 - RNA, 19 nt, Homo sapiens
  misc_RNA (1)...(19): siRNA sense strand
caccuuaugauuccaucua

SEQ ID NO: 454518 - RNA, 19 nt, Homo sapiens
  misc_RNA (1)...(19): siRNA sense strand
ugaacagaagaagcuauua

SEQ ID NO: 454519 - RNA, 19 nt, Homo sapiens
  misc_RNA (1)...(19): siRNA sense strand
gggaacugcucuuuaauua

SEQ ID NO: 454520 - RNA, 19 nt, Homo sapiens
  misc_RNA (1)...(19): siRNA sense strand
ggaaaagccucauguaaaa

SEQ ID NO: 454521 - RNA, 19 nt, Homo sapiens
  misc_RNA (1)...(19): siRNA sense strand
gacgggaacugcucuuuaa

SEQ ID NO: 454522 - RNA, 19 nt, Homo sapiens
  misc_RNA (1)...(19): siRNA sense strand
gaagaugugucccaagcuu

SEQ ID NO: 454523 - RNA, 19 nt, Homo sapiens
  misc_RNA (1)...(19): siRNA sense strand
uaagaccauucgcgauuua

SEQ ID NO: 454524 - RNA, 19 nt, Homo sapiens
  misc_RNA (1)...(19): siRNA sense strand
ggacgggaacugcucuuua

SEQ ID NO: 454525 - RNA, 19 nt, Homo sapiens
  misc_RNA (1)...(19): siRNA sense strand
ggaagacuguccucuaugg

SEQ ID NO: 454526 - RNA, 19 nt, Homo sapiens
  misc_RNA (1)...(19): siRNA sense strand
ggaagaggaagaagaguga

SEQ ID NO: 454527 - RNA, 19 nt, Homo sapiens
  misc_RNA (1)...(19): siRNA sense strand
agauuugacugcaagauug

SEQ ID NO: 454528 - RNA, 19 nt, Homo sapiens
  misc_RNA (1)...(19): siRNA sense strand
ggaugacgaugccaaguac

SEQ ID NO: 454529 - RNA, 19 nt, Homo sapiens
  misc_RNA (1)...(19): siRNA sense strand
gggaugacgaugccaagua

SEQ ID NO: 454530 - RNA, 19 nt, Homo sapiens
  misc_RNA (1)...(19): siRNA sense strand
cuaagaccauucgcgauuu

SEQ ID NO: 454531 - RNA, 19 nt, Homo sapiens
  misc_RNA (1)...(19): siRNA sense strand
guaaaacccuauuucucua

SEQ ID NO: 454532 - RNA, 19 nt, Homo sapiens
  misc_RNA (1)...(19): siRNA sense strand
ggaacugcucuuuaauuau

SEQ ID NO: 454533 - RNA, 19 nt, Homo sapiens
  misc_RNA (1)...(19): siRNA sense strand
acugcaagauugaaggaua

SEQ ID NO: 454534 - RNA, 19 nt, Homo sapiens
  misc_RNA (1)...(19): siRNA sense strand
ugucaacagucuuggagaa

SEQ ID NO: 454535 - RNA, 19 nt, Homo sapiens
  misc_RNA (1)...(19): siRNA sense strand
cauucgcgauuuagaaguu

SEQ ID NO: 454536 - RNA, 19 nt, Homo sapiens
  misc_RNA (1)...(19): siRNA sense strand
ccagauagacuacgaugag

SEQ ID NO: 454537 - RNA, 19 nt, Homo sapiens
  misc_RNA (1)...(19): siRNA sense strand
ccaaccagcccgcucaaug

SEQ ID NO: 454538 - RNA, 19 nt, Homo sapiens
  misc_RNA (1)...(19): siRNA sense strand
gaccauucgcgauuuagaa

SEQ ID NO: 454539 - RNA, 19 nt, Homo sapiens
  misc_RNA (1)...(19): siRNA sense strand
uuggaagacuguccucuau

SEQ ID NO: 454540 - RNA, 19 nt, Homo sapiens
  misc_RNA (1)...(19): siRNA sense strand
ucuaagaccauucgcgauu

SEQ ID NO: 454541 - RNA, 19 nt, Homo sapiens
  misc_RNA (1)...(19): siRNA sense strand
gcugugagagccauuggaa

SEQ ID NO: 454542 - RNA, 19 nt, Homo sapiens
  misc_RNA (1)...(19): siRNA sense strand
cgggaacugcucuuuaauu

SEQ ID NO: 454543 - RNA, 19 nt, Homo sapiens
  misc_RNA (1)...(19): siRNA sense strand
ugugagagccauuggaaga

SEQ ID NO: 454544 - RNA, 19 nt, Homo sapiens
  misc_RNA (1)...(19): siRNA sense strand
uagauuugacugcaagauu

SEQ ID NO: 454545 - RNA, 19 nt, Homo sapiens
  misc_RNA (1)...(19): siRNA sense strand
ucaacagggucaccaacca

SEQ ID NO: 454546 - RNA, 19 nt, Homo sapiens
  misc_RNA (1)...(19): siRNA sense strand
gauuugacugcaagauuga

SEQ ID NO: 454547 - RNA, 19 nt, Homo sapiens
  misc_RNA (1)...(19): siRNA sense strand
caaccagcccgcucaaugc

SEQ ID NO: 454548 - RNA, 19 nt, Homo sapiens
  misc_RNA (1)...(19): siRNA sense strand
aaacccuauuucucuaaga

SEQ ID NO: 454549 - RNA, 19 nt, Homo sapiens
  misc_RNA (1)...(19): siRNA sense strand
cuauuucucuaagaccauu

SEQ ID NO: 454550 - RNA, 19 nt, Homo sapiens
  misc_RNA (1)...(19): siRNA sense strand
aggaaaagccucauguaaa

SEQ ID NO: 454551 - RNA, 19 nt, Homo sapiens
  misc_RNA (1)...(19): siRNA sense strand
gggaacugcucuuuaauua

SEQ ID NO: 454552 - RNA, 19 nt, Homo sapiens
  misc_RNA (1)...(19): siRNA sense strand
ggaaaagccucauguaaaa

SEQ ID NO: 454553 - RNA, 19 nt, Homo sapiens
  misc_RNA (1)...(19): siRNA sense strand
gacgggaacugcucuuuaa

SEQ ID NO: 454554 - RNA, 19 nt, Homo sapiens
  misc_RNA (1)...(19): siRNA sense strand
gaagaugugucccaagcuu

SEQ ID NO: 454555 - RNA, 19 nt, Homo sapiens
  misc_RNA (1)...(19): siRNA sense strand
uaagaccauucgcgauuua

SEQ ID NO: 454556 - RNA, 19 nt, Homo sapiens
  misc_RNA (1)...(19): siRNA sense strand
ggacgggaacugcucuuua

SEQ ID NO: 454557 - RNA, 19 nt, Homo sapiens
  misc_RNA (1)...(19): siRNA sense strand
ggaagacuguccucuaugg

SEQ ID NO: 454558 - RNA, 19 nt, Homo sapiens
  misc_RNA (1)...(19): siRNA sense strand
ggaagaggaagaagaguga

SEQ ID NO: 454559 - RNA, 19 nt, Homo sapiens
  misc_RNA (1)...(19): siRNA sense strand
agauuugacugcaagauug

SEQ ID NO: 454560 - RNA, 19 nt, Homo sapiens
  misc_RNA (1)...(19): siRNA sense strand
ggaugacgaugccaaguac

SEQ ID NO: 454561 - RNA, 19 nt, Homo sapiens
  misc_RNA (1)...(19): siRNA sense strand
gggaugacgaugccaagua

SEQ ID NO: 454562 - RNA, 19 nt, Homo sapiens
  misc_RNA (1)...(19): siRNA sense strand
cuaagaccauucgcgauuu

SEQ ID NO: 454563 - RNA, 19 nt, Homo sapiens
  misc_RNA (1)...(19): siRNA sense strand
guaaaacccuauuucucua

SEQ ID NO: 454564 - RNA, 19 nt, Homo sapiens
  misc_RNA (1)...(19): siRNA sense strand
ggaacugcucuuuaauuau

SEQ ID NO: 454565 - RNA, 19 nt, Homo sapiens
  misc_RNA (1)...(19): siRNA sense strand
acugcaagauugaaggaua

SEQ ID NO: 454566 - RNA, 19 nt, Homo sapiens
  misc_RNA (1)...(19): siRNA sense strand
ugucaacagucuuggagaa

SEQ ID NO: 454567 - RNA, 19 nt, Homo sapiens
  misc_RNA (1)...(19): siRNA sense strand
cauucgcgauuuagaaguu

SEQ ID NO: 454568 - RNA, 19 nt, Homo sapiens
  misc_RNA (1)...(19): siRNA sense strand
ccagauagacuacgaugag

SEQ ID NO: 454569 - RNA, 19 nt, Homo sapiens
  misc_RNA (1)...(19): siRNA sense strand
ccaaccagcccgcucaaug

SEQ ID NO: 454570 - RNA, 19 nt, Homo sapiens
  misc_RNA (1)...(19): siRNA sense strand
gaccauucgcgauuuagaa

SEQ ID NO: 454571 - RNA, 19 nt, Homo sapiens
  misc_RNA (1)...(19): siRNA sense strand
uuggaagacuguccucuau

SEQ ID NO: 454572 - RNA, 19 nt, Homo sapiens
  misc_RNA (1)...(19): siRNA sense strand
ucuaagaccauucgcgauu

SEQ ID NO: 454573 - RNA, 19 nt, Homo sapiens
  misc_RNA (1)...(19): siRNA sense strand
gcugugagagccauuggaa

SEQ ID NO: 454574 - RNA, 19 nt, Homo sapiens
  misc_RNA (1)...(19): siRNA sense strand
cgggaacugcucuuuaauu

SEQ ID NO: 454575 - RNA, 19 nt, Homo sapiens
  misc_RNA (1)...(19): siRNA sense strand
ugugagagccauuggaaga

SEQ ID NO: 454576 - RNA, 19 nt, Homo sapiens
  misc_RNA (1)...(19): siRNA sense strand
uagauuugacugcaagauu

SEQ ID NO: 454577 - RNA, 19 nt, Homo sapiens
  misc_RNA (1)...(19): siRNA sense strand
ucaacagggucaccaacca

SEQ ID NO: 454578 - RNA, 19 nt, Homo sapiens
  misc_RNA (1)...(19): siRNA sense strand
gauuugacugcaagauuga

SEQ ID NO: 454579 - RNA, 19 nt, Homo sapiens
  misc_RNA (1)...(19): siRNA sense strand
caaccagcccgcucaaugc

SEQ ID NO: 454580 - RNA, 19 nt, Homo sapiens
  misc_RNA (1)...(19): siRNA sense strand
aaacccuauuucucuaaga

SEQ ID NO: 454581 - RNA, 19 nt, Homo sapiens
  misc_RNA (1)...(19): siRNA sense strand
cuauuucucuaagaccauu

SEQ ID NO: 454582 - RNA, 19 nt, Homo sapiens
  misc_RNA (1)...(19): siRNA sense strand
aggaaaagccucauguaaa

SEQ ID NO: 454583 - RNA, 19 nt, Homo sapiens
  misc_RNA (1)...(19): siRNA sense strand
gggaacugcucuuuaauua

SEQ ID NO: 454584 - RNA, 19 nt, Homo sapiens
  misc_RNA (1)...(19): siRNA sense strand
ggaaaagccucauguaaaa

SEQ ID NO: 454585 - RNA, 19 nt, Homo sapiens
  misc_RNA (1)...(19): siRNA sense strand
gacgggaacugcucuuuaa

SEQ ID NO: 454586 - RNA, 19 nt, Homo sapiens
  misc_RNA (1)...(19): siRNA sense strand
gaagaugugucccaagcuu

SEQ ID NO: 454587 - RNA, 19 nt, Homo sapiens
  misc_RNA (1)...(19): siRNA sense strand
uaagaccauucgcgauuua

SEQ ID NO: 454588 - RNA, 19 nt, Homo sapiens
  misc_RNA (1)...(19): siRNA sense strand
ggacgggaacugcucuuua

SEQ ID NO: 454589 - RNA, 19 nt, Homo sapiens
  misc_RNA (1)...(19): siRNA sense strand
ggaagacuguccucuaugg

SEQ ID NO: 454590 - RNA, 19 nt, Homo sapiens
  misc_RNA (1)...(19): siRNA sense strand
ggaagaggaagaagaguga

SEQ ID NO: 454591 - RNA, 19 nt, Homo sapiens
  misc_RNA (1)...(19): siRNA sense strand
agauuugacugcaagauug

SEQ ID NO: 454592 - RNA, 19 nt, Homo sapiens
  misc_RNA (1)...(19): siRNA sense strand
ggaugacgaugccaaguac

SEQ ID NO: 454593 - RNA, 19 nt, Homo sapiens
  misc_RNA (1)...(19): siRNA sense strand
gggaugacgaugccaagua

SEQ ID NO: 454594 - RNA, 19 nt, Homo sapiens
  misc_RNA (1)...(19): siRNA sense strand
cuaagaccauucgcgauuu

SEQ ID NO: 454595 - RNA, 19 nt, Homo sapiens
  misc_RNA (1)...(19): siRNA sense strand
guaaaacccuauuucucua

SEQ ID NO: 454596 - RNA, 19 nt, Homo sapiens
  misc_RNA (1)...(19): siRNA sense strand
ggaacugcucuuuaauuau

SEQ ID NO: 454597 - RNA, 19 nt, Homo sapiens
  misc_RNA (1)...(19): siRNA sense strand
acugcaagauugaaggaua

SEQ ID NO: 454598 - RNA, 19 nt, Homo sapiens
  misc_RNA (1)...(19): siRNA sense strand
ugucaacagucuuggagaa

SEQ ID NO: 454599 - RNA, 19 nt, Homo sapiens
  misc_RNA (1)...(19): siRNA sense strand
cauucgcgauuuagaaguu

SEQ ID NO: 454600 - RNA, 19 nt, Homo sapiens
  misc_RNA (1)...(19): siRNA sense strand
ccagauagacuacgaugag

SEQ ID NO: 454601 - RNA, 19 nt, Homo sapiens
  misc_RNA (1)...(19): siRNA sense strand
ccaaccagcccgcucaaug

SEQ ID NO: 454602 - RNA, 19 nt, Homo sapiens
  misc_RNA (1)...(19): siRNA sense strand
gaccauucgcgauuuagaa

SEQ ID NO: 454603 - RNA, 19 nt, Homo sapiens
  misc_RNA (1)...(19): siRNA sense strand
uuggaagacuguccucuau

SEQ ID NO: 454604 - RNA, 19 nt, Homo sapiens
  misc_RNA (1)...(19): siRNA sense strand
ucuaagaccauucgcgauu

SEQ ID NO: 454605 - RNA, 19 nt, Homo sapiens
  misc_RNA (1)...(19): siRNA sense strand
gcugugagagccauuggaa

SEQ ID NO: 454606 - RNA, 19 nt, Homo sapiens
  misc_RNA (1)...(19): siRNA sense strand
cgggaacugcucuuuaauu

SEQ ID NO: 454607 - RNA, 19 nt, Homo sapiens
  misc_RNA (1)...(19): siRNA sense strand
ugugagagccauuggaaga

SEQ ID NO: 454608 - RNA, 19 nt, Homo sapiens
  misc_RNA (1)...(19): siRNA sense strand
uagauuugacugcaagauu

SEQ ID NO: 454609 - RNA, 19 nt, Homo sapiens
  misc_RNA (1)...(19): siRNA sense strand
ucaacagggucaccaacca

SEQ ID NO: 454610 - RNA, 19 nt, Homo sapiens
  misc_RNA (1)...(19): siRNA sense strand
gauuugacugcaagauuga

SEQ ID NO: 454611 - RNA, 19 nt, Homo sapiens
  misc_RNA (1)...(19): siRNA sense strand
caaccagcccgcucaaugc

SEQ ID NO: 454612 - RNA, 19 nt, Homo sapiens
  misc_RNA (1)...(19): siRNA sense strand
aaacccuauuucucuaaga

SEQ ID NO: 454613 - RNA, 19 nt, Homo sapiens
  misc_RNA (1)...(19): siRNA sense strand
cuauuucucuaagaccauu

SEQ ID NO: 454614 - RNA, 19 nt, Homo sapiens
  misc_RNA (1)...(19): siRNA sense strand
aggaaaagccucauguaaa

SEQ ID NO: 454615 - RNA, 19 nt, Homo sapiens
  misc_RNA (1)...(19): siRNA sense strand
gggaacugcucuuuaauua

SEQ ID NO: 454616 - RNA, 19 nt, Homo sapiens
  misc_RNA (1)...(19): siRNA sense strand
ggaaaagccucauguaaaa

SEQ ID NO: 454617 - RNA, 19 nt, Homo sapiens
  misc_RNA (1)...(19): siRNA sense strand
gacgggaacugcucuuuaa

SEQ ID NO: 454618 - RNA, 19 nt, Homo sapiens
  misc_RNA (1)...(19): siRNA sense strand
gaagaugugucccaagcuu

SEQ ID NO: 454619 - RNA, 19 nt, Homo sapiens
  misc_RNA (1)...(19): siRNA sense strand
uaagaccauucgcgauuua

SEQ ID NO: 454620 - RNA, 19 nt, Homo sapiens
  misc_RNA (1)...(19): siRNA sense strand
ggacgggaacugcucuuua

SEQ ID NO: 454621 - RNA, 19 nt, Homo sapiens
  misc_RNA (1)...(19): siRNA sense strand
ggaagacuguccucuaugg

SEQ ID NO: 454622 - RNA, 19 nt, Homo sapiens
  misc_RNA (1)...(19): siRNA sense strand
ggaagaggaagaagaguga

SEQ ID NO: 454623 - RNA, 19 nt, Homo sapiens
  misc_RNA (1)...(19): siRNA sense strand
agauuugacugcaagauug

SEQ ID NO: 454624 - RNA, 19 nt, Homo sapiens
  misc_RNA (1)...(19): siRNA sense strand
ggaugacgaugccaaguac

SEQ ID NO: 454625 - RNA, 19 nt, Homo sapiens
  misc_RNA (1)...(19): siRNA sense strand
gggaugacgaugccaagua

SEQ ID NO: 454626 - RNA, 19 nt, Homo sapiens
  misc_RNA (1)...(19): siRNA sense strand
cuaagaccauucgcgauuu

SEQ ID NO: 454627 - RNA, 19 nt, Homo sapiens
  misc_RNA (1)...(19): siRNA sense strand
guaaaacccuauuucucua

SEQ ID NO: 454628 - RNA, 19 nt, Homo sapiens
  misc_RNA (1)...(19): siRNA sense strand
ggaacugcucuuuaauuau

SEQ ID NO: 454629 - RNA, 19 nt, Homo sapiens
  misc_RNA (1)...(19): siRNA sense strand
acugcaagauugaaggaua

SEQ ID NO: 454630 - RNA, 19 nt, Homo sapiens
  misc_RNA (1)...(19): siRNA sense strand
ugucaacagucuuggagaa

SEQ ID NO: 454631 - RNA, 19 nt, Homo sapiens
  misc_RNA (1)...(19): siRNA sense strand
cauucgcgauuuagaaguu

SEQ ID NO: 454632 - RNA, 19 nt, Homo sapiens
  misc_RNA (1)...(19): siRNA sense strand
ccagauagacuacgaugag

SEQ ID NO: 454633 - RNA, 19 nt, Homo sapiens
  misc_RNA (1)...(19): siRNA sense strand
ccaaccagcccgcucaaug

SEQ ID NO: 454634 - RNA, 19 nt, Homo sapiens
  misc_RNA (1)...(19): siRNA sense strand
gaccauucgcgauuuagaa

SEQ ID NO: 454635 - RNA, 19 nt, Homo sapiens
  misc_RNA (1)...(19): siRNA sense strand
uuggaagacuguccucuau

SEQ ID NO: 454636 - RNA, 19 nt, Homo sapiens
  misc_RNA (1)...(19): siRNA sense strand
ucuaagaccauucgcgauu

SEQ ID NO: 454637 - RNA, 19 nt, Homo sapiens
  misc_RNA (1)...(19): siRNA sense strand
gcugugagagccauuggaa

SEQ ID NO: 454638 - RNA, 19 nt, Homo sapiens
  misc_RNA (1)...(19): siRNA sense strand
cgggaacugcucuuuaauu

SEQ ID NO: 454639 - RNA, 19 nt, Homo sapiens
  misc_RNA (1)...(19): siRNA sense strand
ugugagagccauuggaaga

SEQ ID NO: 454640 - RNA, 19 nt, Homo sapiens
  misc_RNA (1)...(19): siRNA sense strand
uagauuugacugcaagauu

SEQ ID NO: 454641 - RNA, 19 nt, Homo sapiens
  misc_RNA (1)...(19): siRNA sense strand
ucaacagggucaccaacca

SEQ ID NO: 454642 - RNA, 19 nt, Homo sapiens
  misc_RNA (1)...(19): siRNA sense strand
gauuugacugcaagauuga

SEQ ID NO: 454643 - RNA, 19 nt, Homo sapiens
  misc_RNA (1)...(19): siRNA sense strand
caaccagcccgcucaaugc

SEQ ID NO: 454644 - RNA, 19 nt, Homo sapiens
  misc_RNA (1)...(19): siRNA sense strand
aaacccuauuucucuaaga

SEQ ID NO: 454645 - RNA, 19 nt, Homo sapiens
  misc_RNA (1)...(19): siRNA sense strand
cuauuucucuaagaccauu

SEQ ID NO: 454646 - RNA, 19 nt, Homo sapiens
  misc_RNA (1)...(19): siRNA sense strand
aggaaaagccucauguaaa

SEQ ID NO: 454647 - RNA, 19 nt, Homo sapiens
  misc_RNA (1)...(19): siRNA sense strand
gggaacugcucuuuaauua

SEQ ID NO: 454648 - RNA, 19 nt, Homo sapiens
  misc_RNA (1)...(19): siRNA sense strand
ggaaaagccucauguaaaa

SEQ ID NO: 454649 - RNA, 19 nt, Homo sapiens
  misc_RNA (1)...(19): siRNA sense strand
gacgggaacugcucuuuaa

SEQ ID NO: 454650 - RNA, 19 nt, Homo sapiens
  misc_RNA (1)...(19): siRNA sense strand
gaagaugugucccaagcuu

SEQ ID NO: 454651 - RNA, 19 nt, Homo sapiens
  misc_RNA (1)...(19): siRNA sense strand
uaagaccauucgcgauuua

SEQ ID NO: 454652 - RNA, 19 nt, Homo sapiens
  misc_RNA (1)...(19): siRNA sense strand
ggacgggaacugcucuuua

SEQ ID NO: 454653 - RNA, 19 nt, Homo sapiens
  misc_RNA (1)...(19): siRNA sense strand
ggaagacuguccucuaugg

SEQ ID NO: 454654 - RNA, 19 nt, Homo sapiens
  misc_RNA (1)...(19): siRNA sense strand
ggaagaggaagaagaguga

SEQ ID NO: 454655 - RNA, 19 nt, Homo sapiens
  misc_RNA (1)...(19): siRNA sense strand
agauuugacugcaagauug

SEQ ID NO: 454656 - RNA, 19 nt, Homo sapiens
  misc_RNA (1)...(19): siRNA sense strand
ggaugacgaugccaaguac

SEQ ID NO: 454657 - RNA, 19 nt, Homo sapiens
  misc_RNA (1)...(19): siRNA sense strand
gggaugacgaugccaagua

SEQ ID NO: 454658 - RNA, 19 nt, Homo sapiens
  misc_RNA (1)...(19): siRNA sense strand
cuaagaccauucgcgauuu

SEQ ID NO: 454659 - RNA, 19 nt, Homo sapiens
  misc_RNA (1)...(19): siRNA sense strand
guaaaacccuauuucucua

SEQ ID NO: 454660 - RNA, 19 nt, Homo sapiens
  misc_RNA (1)...(19): siRNA sense strand
ggaacugcucuuuaauuau

SEQ ID NO: 454661 - RNA, 19 nt, Homo sapiens
  misc_RNA (1)...(19): siRNA sense strand
acugcaagauugaaggaua

SEQ ID NO: 454662 - RNA, 19 nt, Homo sapiens
  misc_RNA (1)...(19): siRNA sense strand
ugucaacagucuuggagaa

SEQ ID NO: 454663 - RNA, 19 nt, Homo sapiens
  misc_RNA (1)...(19): siRNA sense strand
cauucgcgauuuagaaguu

SEQ ID NO: 454664 - RNA, 19 nt, Homo sapiens
  misc_RNA (1)...(19): siRNA sense strand
ccagauagacuacgaugag

SEQ ID NO: 454665 - RNA, 19 nt, Homo sapiens
  misc_RNA (1)...(19): siRNA sense strand
ccaaccagcccgcucaaug

SEQ ID NO: 454666 - RNA, 19 nt, Homo sapiens
  misc_RNA (1)...(19): siRNA sense strand
gaccauucgcgauuuagaa

SEQ ID NO: 454667 - RNA, 19 nt, Homo sapiens
  misc_RNA (1)...(19): siRNA sense strand
uuggaagacuguccucuau

SEQ ID NO: 454668 - RNA, 19 nt, Homo sapiens
  misc_RNA (1)...(19): siRNA sense strand
ucuaagaccauucgcgauu

SEQ ID NO: 454669 - RNA, 19 nt, Homo sapiens
  misc_RNA (1)...(19): siRNA sense strand
gcugugagagccauuggaa

SEQ ID NO: 454670 - RNA, 19 nt, Homo sapiens
  misc_RNA (1)...(19): siRNA sense strand
cgggaacugcucuuuaauu

SEQ ID NO: 454671 - RNA, 19 nt, Homo sapiens
  misc_RNA (1)...(19): siRNA sense strand
ugugagagccauuggaaga

SEQ ID NO: 454672 - RNA, 19 nt, Homo sapiens
  misc_RNA (1)...(19): siRNA sense strand
uagauuugacugcaagauu

SEQ ID NO: 454673 - RNA, 19 nt, Homo sapiens
  misc_RNA (1)...(19): siRNA sense strand
ucaacagggucaccaacca

SEQ ID NO: 454674 - RNA, 19 nt, Homo sapiens
  misc_RNA (1)...(19): siRNA sense strand
gauuugacugcaagauuga

SEQ ID NO: 454675 - RNA, 19 nt, Homo sapiens
  misc_RNA (1)...(19): siRNA sense strand
caaccagcccgcucaaugc

SEQ ID NO: 454676 - RNA, 19 nt, Homo sapiens
  misc_RNA (1)...(19): siRNA sense strand
aaacccuauuucucuaaga

SEQ ID NO: 454677 - RNA, 19 nt, Homo sapiens
  misc_RNA (1)...(19): siRNA sense strand
cuauuucucuaagaccauu

SEQ ID NO: 454678 - RNA, 19 nt, Homo sapiens
  misc_RNA (1)...(19): siRNA sense strand
aggaaaagccucauguaaa

SEQ ID NO: 454679 - RNA, 19 nt, Homo sapiens
  misc_RNA (1)...(19): siRNA sense strand
gggaacugcucuuuaauua

SEQ ID NO: 454680 - RNA, 19 nt, Homo sapiens
  misc_RNA (1)...(19): siRNA sense strand
ggaaaagccucauguaaaa

SEQ ID NO: 454681 - RNA, 19 nt, Homo sapiens
  misc_RNA (1)...(19): siRNA sense strand
gacgggaacugcucuuuaa

SEQ ID NO: 454682 - RNA, 19 nt, Homo sapiens
  misc_RNA (1)...(19): siRNA sense strand
gaagaugugucccaagcuu

SEQ ID NO: 454683 - RNA, 19 nt, Homo sapiens
  misc_RNA (1)...(19): siRNA sense strand
uaagaccauucgcgauuua

SEQ ID NO: 454684 - RNA, 19 nt, Homo sapiens
  misc_RNA (1)...(19): siRNA sense strand
ggacgggaacugcucuuua

SEQ ID NO: 454685 - RNA, 19 nt, Homo sapiens
  misc_RNA (1)...(19): siRNA sense strand
ggaagacuguccucuaugg

SEQ ID NO: 454686 - RNA, 19 nt, Homo sapiens
  misc_RNA (1)...(19): siRNA sense strand
ggaagaggaagaagaguga

SEQ ID NO: 454687 - RNA, 19 nt, Homo sapiens
  misc_RNA (1)...(19): siRNA sense strand
agauuugacugcaagauug

SEQ ID NO: 454688 - RNA, 19 nt, Homo sapiens
  misc_RNA (1)...(19): siRNA sense strand
ggaugacgaugccaaguac

SEQ ID NO: 454689 - RNA, 19 nt, Homo sapiens
  misc_RNA (1)...(19): siRNA sense strand
gggaugacgaugccaagua

SEQ ID NO: 454690 - RNA, 19 nt, Homo sapiens
  misc_RNA (1)...(19): siRNA sense strand
cuaagaccauucgcgauuu

SEQ ID NO: 454691 - RNA, 19 nt, Homo sapiens
  misc_RNA (1)...(19): siRNA sense strand
guaaaacccuauuucucua

SEQ ID NO: 454692 - RNA, 19 nt, Homo sapiens
  misc_RNA (1)...(19): siRNA sense strand
ggaacugcucuuuaauuau

SEQ ID NO: 454693 - RNA, 19 nt, Homo sapiens
  misc_RNA (1)...(19): siRNA sense strand
acugcaagauugaaggaua

SEQ ID NO: 454694 - RNA, 19 nt, Homo sapiens
  misc_RNA (1)...(19): siRNA sense strand
ugucaacagucuuggagaa

SEQ ID NO: 454695 - RNA, 19 nt, Homo sapiens
  misc_RNA (1)...(19): siRNA sense strand
cauucgcgauuuagaaguu

SEQ ID NO: 454696 - RNA, 19 nt, Homo sapiens
  misc_RNA (1)...(19): siRNA sense strand
ccagauagacuacgaugag

SEQ ID NO: 454697 - RNA, 19 nt, Homo sapiens
  misc_RNA (1)...(19): siRNA sense strand
ccaaccagcccgcucaaug

SEQ ID NO: 454698 - RNA, 19 nt, Homo sapiens
  misc_RNA (1)...(19): siRNA sense strand
gaccauucgcgauuuagaa

SEQ ID NO: 454699 - RNA, 19 nt, Homo sapiens
  misc_RNA (1)...(19): siRNA sense strand
uuggaagacuguccucuau

SEQ ID NO: 454700 - RNA, 19 nt, Homo sapiens
  misc_RNA (1)...(19): siRNA sense strand
ucuaagaccauucgcgauu

SEQ ID NO: 454701 - RNA, 19 nt, Homo sapiens
  misc_RNA (1)...(19): siRNA sense strand
gcugugagagccauuggaa

SEQ ID NO: 454702 - RNA, 19 nt, Homo sapiens
  misc_RNA (1)...(19): siRNA sense strand
cgggaacugcucuuuaauu

SEQ ID NO: 454703 - RNA, 19 nt, Homo sapiens
  misc_RNA (1)...(19): siRNA sense strand
ugugagagccauuggaaga

SEQ ID NO: 454704 - RNA, 19 nt, Homo sapiens
  misc_RNA (1)...(19): siRNA sense strand
uagauuugacugcaagauu

SEQ ID NO: 454705 - RNA, 19 nt, Homo sapiens
  misc_RNA (1)...(19): siRNA sense strand
ucaacagggucaccaacca

SEQ ID NO: 454706 - RNA, 19 nt, Homo sapiens
  misc_RNA (1)...(19): siRNA sense strand
gauuugacugcaagauuga

SEQ ID NO: 454707 - RNA, 19 nt, Homo sapiens
  misc_RNA (1)...(19): siRNA sense strand
caaccagcccgcucaaugc

SEQ ID NO: 454708 - RNA, 19 nt, Homo sapiens
  misc_RNA (1)...(19): siRNA sense strand
aaacccuauuucucuaaga

SEQ ID NO: 454709 - RNA, 19 nt, Homo sapiens
  misc_RNA (1)...(19): siRNA sense strand
cuauuucucuaagaccauu

SEQ ID NO: 454710 - RNA, 19 nt, Homo sapiens
  misc_RNA (1)...(19): siRNA sense strand
aggaaaagccucauguaaa

SEQ ID NO: 454711 - RNA, 19 nt, Homo sapiens
  misc_RNA (1)...(19): siRNA sense strand
gggaacugcucuuuaauua

SEQ ID NO: 454712 - RNA, 19 nt, Homo sapiens
  misc_RNA (1)...(19): siRNA sense strand
ggaaaagccucauguaaaa

SEQ ID NO: 454713 - RNA, 19 nt, Homo sapiens
  misc_RNA (1)...(19): siRNA sense strand
gacgggaacugcucuuuaa

SEQ ID NO: 454714 - RNA, 19 nt, Homo sapiens
  misc_RNA (1)...(19): siRNA sense strand
gaagaugugucccaagcuu

SEQ ID NO: 454715 - RNA, 19 nt, Homo sapiens
  misc_RNA (1)...(19): siRNA sense strand
uaagaccauucgcgauuua

SEQ ID NO: 454716 - RNA, 19 nt, Homo sapiens
  misc_RNA (1)...(19): siRNA sense strand
ggacgggaacugcucuuua

SEQ ID NO: 454717 - RNA, 19 nt, Homo sapiens
  misc_RNA (1)...(19): siRNA sense strand
ggaagacuguccucuaugg

SEQ ID NO: 454718 - RNA, 19 nt, Homo sapiens
  misc_RNA (1)...(19): siRNA sense strand
ggaagaggaagaagaguga

SEQ ID NO: 454719 - RNA, 19 nt, Homo sapiens
  misc_RNA (1)...(19): siRNA sense strand
agauuugacugcaagauug

SEQ ID NO: 454720 - RNA, 19 nt, Homo sapiens
  misc_RNA (1)...(19): siRNA sense strand
ggaugacgaugccaaguac

SEQ ID NO: 454721 - RNA, 19 nt, Homo sapiens
  misc_RNA (1)...(19): siRNA sense strand
gggaugacgaugccaagua

SEQ ID NO: 454722 - RNA, 19 nt, Homo sapiens
  misc_RNA (1)...(19): siRNA sense strand
cuaagaccauucgcgauuu

SEQ ID NO: 454723 - RNA, 19 nt, Homo sapiens
  misc_RNA (1)...(19): siRNA sense strand
guaaaacccuauuucucua

SEQ ID NO: 454724 - RNA, 19 nt, Homo sapiens
  misc_RNA (1)...(19): siRNA sense strand
ggaacugcucuuuaauuau

SEQ ID NO: 454725 - RNA, 19 nt, Homo sapiens
  misc_RNA (1)...(19): siRNA sense strand
acugcaagauugaaggaua

SEQ ID NO: 454726 - RNA, 19 nt, Homo sapiens
  misc_RNA (1)...(19): siRNA sense strand
ugucaacagucuuggagaa

SEQ ID NO: 454727 - RNA, 19 nt, Homo sapiens
  misc_RNA (1)...(19): siRNA sense strand
cauucgcgauuuagaaguu

SEQ ID NO: 454728 - RNA, 19 nt, Homo sapiens
  misc_RNA (1)...(19): siRNA sense strand
ccagauagacuacgaugag

SEQ ID NO: 454729 - RNA, 19 nt, Homo sapiens
  misc_RNA (1)...(19): siRNA sense strand
ccaaccagcccgcucaaug

SEQ ID NO: 454730 - RNA, 19 nt, Homo sapiens
  misc_RNA (1)...(19): siRNA sense strand
gaccauucgcgauuuagaa

SEQ ID NO: 454731 - RNA, 19 nt, Homo sapiens
  misc_RNA (1)...(19): siRNA sense strand
uuggaagacuguccucuau

SEQ ID NO: 454732 - RNA, 19 nt, Homo sapiens
  misc_RNA (1)...(19): siRNA sense strand
ucuaagaccauucgcgauu

SEQ ID NO: 454733 - RNA, 19 nt, Homo sapiens
  misc_RNA (1)...(19): siRNA sense strand
gcugugagagccauuggaa

SEQ ID NO: 454734 - RNA, 19 nt, Homo sapiens
  misc_RNA (1)...(19): siRNA sense strand
cgggaacugcucuuuaauu

SEQ ID NO: 454735 - RNA, 19 nt, Homo sapiens
  misc_RNA (1)...(19): siRNA sense strand
ugugagagccauuggaaga

SEQ ID NO: 454736 - RNA, 19 nt, Homo sapiens
  misc_RNA (1)...(19): siRNA sense strand
uagauuugacugcaagauu

SEQ ID NO: 454737 - RNA, 19 nt, Homo sapiens
  misc_RNA (1)...(19): siRNA sense strand
ucaacagggucaccaacca

SEQ ID NO: 454738 - RNA, 19 nt, Homo sapiens
  misc_RNA (1)...(19): siRNA sense strand
gauuugacugcaagauuga

SEQ ID NO: 454739 - RNA, 19 nt, Homo sapiens
  misc_RNA (1)...(19): siRNA sense strand
caaccagcccgcucaaugc

SEQ ID NO: 454740 - RNA, 19 nt, Homo sapiens
  misc_RNA (1)...(19): siRNA sense strand
aaacccuauuucucuaaga

SEQ ID NO: 454741 - RNA, 19 nt, Homo sapiens
  misc_RNA (1)...(19): siRNA sense strand
cuauuucucuaagaccauu

SEQ ID NO: 454742 - RNA, 19 nt, Homo sapiens
  misc_RNA (1)...(19): siRNA sense strand
aggaaaagccucauguaaa

SEQ ID NO: 454743 - RNA, 19 nt, Homo sapiens
  misc_RNA (1)...(19): siRNA sense strand
gggaacugcucuuuaauua

SEQ ID NO: 454744 - RNA, 19 nt, Homo sapiens
  misc_RNA (1)...(19): siRNA sense strand
ggaaaagccucauguaaaa

SEQ ID NO: 454745 - RNA, 19 nt, Homo sapiens
  misc_RNA (1)...(19): siRNA sense strand
gacgggaacugcucuuuaa

SEQ ID NO: 454746 - RNA, 19 nt, Homo sapiens
  misc_RNA (1)...(19): siRNA sense strand
gaagaugugucccaagcuu

SEQ ID NO: 454747 - RNA, 19 nt, Homo sapiens
  misc_RNA (1)...(19): siRNA sense strand
uaagaccauucgcgauuua

SEQ ID NO: 454748 - RNA, 19 nt, Homo sapiens
  misc_RNA (1)...(19): siRNA sense strand
ggacgggaacugcucuuua

SEQ ID NO: 454749 - RNA, 19 nt, Homo sapiens
  misc_RNA (1)...(19): siRNA sense strand
ggaagaggaagaagaguga

SEQ ID NO: 454750 - RNA, 19 nt, Homo sapiens
  misc_RNA (1)...(19): siRNA sense strand
agauuugacugcaagauug

SEQ ID NO: 454751 - RNA, 19 nt, Homo sapiens
  misc_RNA (1)...(19): siRNA sense strand
ggaugacgaugccaaguac

SEQ ID NO: 454752 - RNA, 19 nt, Homo sapiens
  misc_RNA (1)...(19): siRNA sense strand
gggaugacgaugccaagua

SEQ ID NO: 454753 - RNA, 19 nt, Homo sapiens
  misc_RNA (1)...(19): siRNA sense strand
cuaagaccauucgcgauuu

SEQ ID NO: 454754 - RNA, 19 nt, Homo sapiens
  misc_RNA (1)...(19): siRNA sense strand
guaaaacccuauuucucua

SEQ ID NO: 454755 - RNA, 19 nt, Homo sapiens
  misc_RNA (1)...(19): siRNA sense strand
ggaacugcucuuuaauuau

SEQ ID NO: 454756 - RNA, 19 nt, Homo sapiens
  misc_RNA (1)...(19): siRNA sense strand
acugcaagauugaaggaua

SEQ ID NO: 454757 - RNA, 19 nt, Homo sapiens
  misc_RNA (1)...(19): siRNA sense strand
ugucaacagucuuggagaa

SEQ ID NO: 454758 - RNA, 19 nt, Homo sapiens
  misc_RNA (1)...(19): siRNA sense strand
cauucgcgauuuagaaguu

SEQ ID NO: 454759 - RNA, 19 nt, Homo sapiens
  misc_RNA (1)...(19): siRNA sense strand
ccagauagacuacgaugag

SEQ ID NO: 454760 - RNA, 19 nt, Homo sapiens
  misc_RNA (1)...(19): siRNA sense strand
ccaaccagcccgcucaaug

SEQ ID NO: 454761 - RNA, 19 nt, Homo sapiens
  misc_RNA (1)...(19): siRNA sense strand
gaccauucgcgauuuagaa

SEQ ID NO: 454762 - RNA, 19 nt, Homo sapiens
  misc_RNA (1)...(19): siRNA sense strand
ucuaagaccauucgcgauu

SEQ ID NO: 454763 - RNA, 19 nt, Homo sapiens
  misc_RNA (1)...(19): siRNA sense strand
cgggaacugcucuuuaauu

SEQ ID NO: 454764 - RNA, 19 nt, Homo sapiens
  misc_RNA (1)...(19): siRNA sense strand
uagauuugacugcaagauu

SEQ ID NO: 454765 - RNA, 19 nt, Homo sapiens
  misc_RNA (1)...(19): siRNA sense strand
gauuugacugcaagauuga

SEQ ID NO: 454766 - RNA, 19 nt, Homo sapiens
  misc_RNA (1)...(19): siRNA sense strand
ucaacagggucaccaacca

SEQ ID NO: 454767 - RNA, 19 nt, Homo sapiens
  misc_RNA (1)...(19): siRNA sense strand
caaccagcccgcucaaugc

SEQ ID NO: 454768 - RNA, 19 nt, Homo sapiens
  misc_RNA (1)...(19): siRNA sense strand
aaacccuauuucucuaaga

SEQ ID NO: 454769 - RNA, 19 nt, Homo sapiens
  misc_RNA (1)...(19): siRNA sense strand
cuauuucucuaagaccauu

SEQ ID NO: 454770 - RNA, 19 nt, Homo sapiens
  misc_RNA (1)...(19): siRNA sense strand
aggaaaagccucauguaaa

SEQ ID NO: 454771 - RNA, 19 nt, Homo sapiens
  misc_RNA (1)...(19): siRNA sense strand
gggaacugcucuuuaauua

SEQ ID NO: 454772 - RNA, 19 nt, Homo sapiens
  misc_RNA (1)...(19): siRNA sense strand
ggaaaagccucauguaaaa

SEQ ID NO: 454773 - RNA, 19 nt, Homo sapiens
  misc_RNA (1)...(19): siRNA sense strand
gacgggaacugcucuuuaa

SEQ ID NO: 454774 - RNA, 19 nt, Homo sapiens
  misc_RNA (1)...(19): siRNA sense strand
gaagaugugucccaagcuu

SEQ ID NO: 454775 - RNA, 19 nt, Homo sapiens
  misc_RNA (1)...(19): siRNA sense strand
uaagaccauucgcgauuua

SEQ ID NO: 454776 - RNA, 19 nt, Homo sapiens
  misc_RNA (1)...(19): siRNA sense strand
ggacgggaacugcucuuua

SEQ ID NO: 454777 - RNA, 19 nt, Homo sapiens
  misc_RNA (1)...(19): siRNA sense strand
ggaagaggaagaagaguga

SEQ ID NO: 454778 - RNA, 19 nt, Homo sapiens
  misc_RNA (1)...(19): siRNA sense strand
agauuugacugcaagauug

SEQ ID NO: 454779 - RNA, 19 nt, Homo sapiens
  misc_RNA (1)...(19): siRNA sense strand
ggaugacgaugccaaguac

SEQ ID NO: 454780 - RNA, 19 nt, Homo sapiens
  misc_RNA (1)...(19): siRNA sense strand
gggaugacgaugccaagua

SEQ ID NO: 454781 - RNA, 19 nt, Homo sapiens
  misc_RNA (1)...(19): siRNA sense strand
cuaagaccauucgcgauuu

SEQ ID NO: 454782 - RNA, 19 nt, Homo sapiens
  misc_RNA (1)...(19): siRNA sense strand
guaaaacccuauuucucua

SEQ ID NO: 454783 - RNA, 19 nt, Homo sapiens
  misc_RNA (1)...(19): siRNA sense strand
ggaacugcucuuuaauuau

SEQ ID NO: 454784 - RNA, 19 nt, Homo sapiens
  misc_RNA (1)...(19): siRNA sense strand
acugcaagauugaaggaua

SEQ ID NO: 454785 - RNA, 19 nt, Homo sapiens
  misc_RNA (1)...(19): siRNA sense strand
ugucaacagucuuggagaa

SEQ ID NO: 454786 - RNA, 19 nt, Homo sapiens
  misc_RNA (1)...(19): siRNA sense strand
cauucgcgauuuagaaguu

SEQ ID NO: 454787 - RNA, 19 nt, Homo sapiens
  misc_RNA (1)...(19): siRNA sense strand
ccagauagacuacgaugag

SEQ ID NO: 454788 - RNA, 19 nt, Homo sapiens
  misc_RNA (1)...(19): siRNA sense strand
ccaaccagcccgcucaaug

SEQ ID NO: 454789 - RNA, 19 nt, Homo sapiens
  misc_RNA (1)...(19): siRNA sense strand
gaccauucgcgauuuagaa

SEQ ID NO: 454790 - RNA, 19 nt, Homo sapiens
  misc_RNA (1)...(19): siRNA sense strand
ucuaagaccauucgcgauu

SEQ ID NO: 454791 - RNA, 19 nt, Homo sapiens
  misc_RNA (1)...(19): siRNA sense strand
cgggaacugcucuuuaauu

SEQ ID NO: 454792 - RNA, 19 nt, Homo sapiens
  misc_RNA (1)...(19): siRNA sense strand
uagauuugacugcaagauu

SEQ ID NO: 454793 - RNA, 19 nt, Homo sapiens
  misc_RNA (1)...(19): siRNA sense strand
gauuugacugcaagauuga

SEQ ID NO: 454794 - RNA, 19 nt, Homo sapiens
  misc_RNA (1)...(19): siRNA sense strand
ucaacagggucaccaacca

SEQ ID NO: 454795 - RNA, 19 nt, Homo sapiens
  misc_RNA (1)...(19): siRNA sense strand
caaccagcccgcucaaugc

SEQ ID NO: 454796 - RNA, 19 nt, Homo sapiens
  misc_RNA (1)...(19): siRNA sense strand
aaacccuauuucucuaaga

SEQ ID NO: 454797 - RNA, 19 nt, Homo sapiens
  misc_RNA (1)...(19): siRNA sense strand
cuauuucucuaagaccauu

SEQ ID NO: 454798 - RNA, 19 nt, Homo sapiens
  misc_RNA (1)...(19): siRNA sense strand
aggaaaagccucauguaaa

SEQ ID NO: 454799 - RNA, 19 nt, Homo sapiens
  misc_RNA (1)...(19): siRNA sense strand
gggaacugcucuuuaauua

SEQ ID NO: 454800 - RNA, 19 nt, Homo sapiens
  misc_RNA (1)...(19): siRNA sense strand
ggaaaagccucauguaaaa

SEQ ID NO: 454801 - RNA, 19 nt, Homo sapiens
  misc_RNA (1)...(19): siRNA sense strand
gacgggaacugcucuuuaa

SEQ ID NO: 454802 - RNA, 19 nt, Homo sapiens
  misc_RNA (1)...(19): siRNA sense strand
gaagaugugucccaagcuu

SEQ ID NO: 454803 - RNA, 19 nt, Homo sapiens
  misc_RNA (1)...(19): siRNA sense strand
uaagaccauucgcgauuua

SEQ ID NO: 454804 - RNA, 19 nt, Homo sapiens
  misc_RNA (1)...(19): siRNA sense strand
ggacgggaacugcucuuua

SEQ ID NO: 454805 - RNA, 19 nt, Homo sapiens
  misc_RNA (1)...(19): siRNA sense strand
ggaagacuguccucuaugg

SEQ ID NO: 454806 - RNA, 19 nt, Homo sapiens
  misc_RNA (1)...(19): siRNA sense strand
ggaagaggaagaagaguga

SEQ ID NO: 454807 - RNA, 19 nt, Homo sapiens
  misc_RNA (1)...(19): siRNA sense strand
agauuugacugcaagauug

SEQ ID NO: 454808 - RNA, 19 nt, Homo sapiens
  misc_RNA (1)...(19): siRNA sense strand
ggaugacgaugccaaguac

SEQ ID NO: 454809 - RNA, 19 nt, Homo sapiens
  misc_RNA (1)...(19): siRNA sense strand
gggaugacgaugccaagua

SEQ ID NO: 454810 - RNA, 19 nt, Homo sapiens
  misc_RNA (1)...(19): siRNA sense strand
cuaagaccauucgcgauuu

SEQ ID NO: 454811 - RNA, 19 nt, Homo sapiens
  misc_RNA (1)...(19): siRNA sense strand
guaaaacccuauuucucua

SEQ ID NO: 454812 - RNA, 19 nt, Homo sapiens
  misc_RNA (1)...(19): siRNA sense strand
ggaacugcucuuuaauuau

SEQ ID NO: 454813 - RNA, 19 nt, Homo sapiens
  misc_RNA (1)...(19): siRNA sense strand
acugcaagauugaaggaua

SEQ ID NO: 454814 - RNA, 19 nt, Homo sapiens
  misc_RNA (1)...(19): siRNA sense strand
ugucaacagucuuggagaa

SEQ ID NO: 454815 - RNA, 19 nt, Homo sapiens
  misc_RNA (1)...(19): siRNA sense strand
cauucgcgauuuagaaguu

SEQ ID NO: 454816 - RNA, 19 nt, Homo sapiens
  misc_RNA (1)...(19): siRNA sense strand
ccagauagacuacgaugag

SEQ ID NO: 454817 - RNA, 19 nt, Homo sapiens
  misc_RNA (1)...(19): siRNA sense strand
ccaaccagcccgcucaaug

SEQ ID NO: 454818 - RNA, 19 nt, Homo sapiens
  misc_RNA (1)...(19): siRNA sense strand
gaccauucgcgauuuagaa

SEQ ID NO: 454819 - RNA, 19 nt, Homo sapiens
  misc_RNA (1)...(19): siRNA sense strand
uuggaagacuguccucuau

SEQ ID NO: 454820 - RNA, 19 nt, Homo sapiens
  misc_RNA (1)...(19): siRNA sense strand
ucuaagaccauucgcgauu

SEQ ID NO: 454821 - RNA, 19 nt, Homo sapiens
  misc_RNA (1)...(19): siRNA sense strand
gcugugagagccauuggaa

SEQ ID NO: 454822 - RNA, 19 nt, Homo sapiens
  misc_RNA (1)...(19): siRNA sense strand
cgggaacugcucuuuaauu

SEQ ID NO: 454823 - RNA, 19 nt, Homo sapiens
  misc_RNA (1)...(19): siRNA sense strand
ugugagagccauuggaaga

SEQ ID NO: 454824 - RNA, 19 nt, Homo sapiens
  misc_RNA (1)...(19): siRNA sense strand
uagauuugacugcaagauu

SEQ ID NO: 454825 - RNA, 19 nt, Homo sapiens
  misc_RNA (1)...(19): siRNA sense strand
ucaacagggucaccaacca

SEQ ID NO: 454826 - RNA, 19 nt, Homo sapiens
  misc_RNA (1)...(19): siRNA sense strand
gauuugacugcaagauuga

SEQ ID NO: 454827 - RNA, 19 nt, Homo sapiens
  misc_RNA (1)...(19): siRNA sense strand
caaccagcccgcucaaugc

SEQ ID NO: 454828 - RNA, 19 nt, Homo sapiens
  misc_RNA (1)...(19): siRNA sense strand
aaacccuauuucucuaaga

SEQ ID NO: 454829 - RNA, 19 nt, Homo sapiens
  misc_RNA (1)...(19): siRNA sense strand
cuauuucucuaagaccauu

SEQ ID NO: 454830 - RNA, 19 nt, Homo sapiens
  misc_RNA (1)...(19): siRNA sense strand
aggaaaagccucauguaaa

SEQ ID NO: 454831 - RNA, 19 nt, Homo sapiens
  misc_RNA (1)...(19): siRNA sense strand
gggaacugcucuuuaauua

SEQ ID NO: 454832 - RNA, 19 nt, Homo sapiens
  misc_RNA (1)...(19): siRNA sense strand
ggaaaagccucauguaaaa

SEQ ID NO: 454833 - RNA, 19 nt, Homo sapiens
  misc_RNA (1)...(19): siRNA sense strand
gacgggaacugcucuuuaa

SEQ ID NO: 454834 - RNA, 19 nt, Homo sapiens
  misc_RNA (1)...(19): siRNA sense strand
gaagaugugucccaagcuu

SEQ ID NO: 454835 - RNA, 19 nt, Homo sapiens
  misc_RNA (1)...(19): siRNA sense strand
uaagaccauucgcgauuua

SEQ ID NO: 454836 - RNA, 19 nt, Homo sapiens
  misc_RNA (1)...(19): siRNA sense strand
ggacgggaacugcucuuua

SEQ ID NO: 454837 - RNA, 19 nt, Homo sapiens
  misc_RNA (1)...(19): siRNA sense strand
ggaagacuguccucuaugg

SEQ ID NO: 454838 - RNA, 19 nt, Homo sapiens
  misc_RNA (1)...(19): siRNA sense strand
ggaagaggaagaagaguga

SEQ ID NO: 454839 - RNA, 19 nt, Homo sapiens
  misc_RNA (1)...(19): siRNA sense strand
agauuugacugcaagauug

SEQ ID NO: 454840 - RNA, 19 nt, Homo sapiens
  misc_RNA (1)...(19): siRNA sense strand
ggaugacgaugccaaguac

SEQ ID NO: 454841 - RNA, 19 nt, Homo sapiens
  misc_RNA (1)...(19): siRNA sense strand
gggaugacgaugccaagua

SEQ ID NO: 454842 - RNA, 19 nt, Homo sapiens
  misc_RNA (1)...(19): siRNA sense strand
cuaagaccauucgcgauuu

SEQ ID NO: 454843 - RNA, 19 nt, Homo sapiens
  misc_RNA (1)...(19): siRNA sense strand
guaaaacccuauuucucua

SEQ ID NO: 454844 - RNA, 19 nt, Homo sapiens
  misc_RNA (1)...(19): siRNA sense strand
ggaacugcucuuuaauuau

SEQ ID NO: 454845 - RNA, 19 nt, Homo sapiens
  misc_RNA (1)...(19): siRNA sense strand
acugcaagauugaaggaua

SEQ ID NO: 454846 - RNA, 19 nt, Homo sapiens
  misc_RNA (1)...(19): siRNA sense strand
ugucaacagucuuggagaa

SEQ ID NO: 454847 - RNA, 19 nt, Homo sapiens
  misc_RNA (1)...(19): siRNA sense strand
cauucgcgauuuagaaguu

SEQ ID NO: 454848 - RNA, 19 nt, Homo sapiens
  misc_RNA (1)...(19): siRNA sense strand
ccagauagacuacgaugag

SEQ ID NO: 454849 - RNA, 19 nt, Homo sapiens
  misc_RNA (1)...(19): siRNA sense strand
ccaaccagcccgcucaaug

SEQ ID NO: 454850 - RNA, 19 nt, Homo sapiens
  misc_RNA (1)...(19): siRNA sense strand
gaccauucgcgauuuagaa

SEQ ID NO: 454851 - RNA, 19 nt, Homo sapiens
  misc_RNA (1)...(19): siRNA sense strand
uuggaagacuguccucuau

SEQ ID NO: 454852 - RNA, 19 nt, Homo sapiens
  misc_RNA (1)...(19): siRNA sense strand
ucuaagaccauucgcgauu

SEQ ID NO: 454853 - RNA, 19 nt, Homo sapiens
  misc_RNA (1)...(19): siRNA sense strand
gcugugagagccauuggaa

SEQ ID NO: 454854 - RNA, 19 nt, Homo sapiens
  misc_RNA (1)...(19): siRNA sense strand
cgggaacugcucuuuaauu

SEQ ID NO: 454855 - RNA, 19 nt, Homo sapiens
  misc_RNA (1)...(19): siRNA sense strand
ugugagagccauuggaaga

SEQ ID NO: 454856 - RNA, 19 nt, Homo sapiens
  misc_RNA (1)...(19): siRNA sense strand
uagauuugacugcaagauu

SEQ ID NO: 454857 - RNA, 19 nt, Homo sapiens
  misc_RNA (1)...(19): siRNA sense strand
ucaacagggucaccaacca

SEQ ID NO: 454858 - RNA, 19 nt, Homo sapiens
  misc_RNA (1)...(19): siRNA sense strand
gauuugacugcaagauuga

SEQ ID NO: 454859 - RNA, 19 nt, Homo sapiens
  misc_RNA (1)...(19): siRNA sense strand
caaccagcccgcucaaugc

SEQ ID NO: 454860 - RNA, 19 nt, Homo sapiens
  misc_RNA (1)...(19): siRNA sense strand
aaacccuauuucucuaaga

SEQ ID NO: 454861 - RNA, 19 nt, Homo sapiens
  misc_RNA (1)...(19): siRNA sense strand
cuauuucucuaagaccauu

SEQ ID NO: 454862 - RNA, 19 nt, Homo sapiens
  misc_RNA (1)...(19): siRNA sense strand
aggaaaagccucauguaaa

SEQ ID NO: 454863 - RNA, 19 nt, Homo sapiens
  misc_RNA (1)...(19): siRNA sense strand
gggaacugcucuuuaauua

SEQ ID NO: 454864 - RNA, 19 nt, Homo sapiens
  misc_RNA (1)...(19): siRNA sense strand
ggaaaagccucauguaaaa

SEQ ID NO: 454865 - RNA, 19 nt, Homo sapiens
  misc_RNA (1)...(19): siRNA sense strand
gacgggaacugcucuuuaa

SEQ ID NO: 454866 - RNA, 19 nt, Homo sapiens
  misc_RNA (1)...(19): siRNA sense strand
gaagaugugucccaagcuu

SEQ ID NO: 454867 - RNA, 19 nt, Homo sapiens
  misc_RNA (1)...(19): siRNA sense strand
uaagaccauucgcgauuua

SEQ ID NO: 454868 - RNA, 19 nt, Homo sapiens
  misc_RNA (1)...(19): siRNA sense strand
ggacgggaacugcucuuua

SEQ ID NO: 454869 - RNA, 19 nt, Homo sapiens
  misc_RNA (1)...(19): siRNA sense strand
ggaagacuguccucuaugg

SEQ ID NO: 454870 - RNA, 19 nt, Homo sapiens
  misc_RNA (1)...(19): siRNA sense strand
ggaagaggaagaagaguga

SEQ ID NO: 454871 - RNA, 19 nt, Homo sapiens
  misc_RNA (1)...(19): siRNA sense strand
agauuugacugcaagauug

SEQ ID NO: 454872 - RNA, 19 nt, Homo sapiens
  misc_RNA (1)...(19): siRNA sense strand
ggaugacgaugccaaguac

SEQ ID NO: 454873 - RNA, 19 nt, Homo sapiens
  misc_RNA (1)...(19): siRNA sense strand
gggaugacgaugccaagua

SEQ ID NO: 454874 - RNA, 19 nt, Homo sapiens
  misc_RNA (1)...(19): siRNA sense strand
cuaagaccauucgcgauuu

SEQ ID NO: 454875 - RNA, 19 nt, Homo sapiens
  misc_RNA (1)...(19): siRNA sense strand
guaaaacccuauuucucua

SEQ ID NO: 454876 - RNA, 19 nt, Homo sapiens
  misc_RNA (1)...(19): siRNA sense strand
ggaacugcucuuuaauuau

SEQ ID NO: 454877 - RNA, 19 nt, Homo sapiens
  misc_RNA (1)...(19): siRNA sense strand
acugcaagauugaaggaua

SEQ ID NO: 454878 - RNA, 19 nt, Homo sapiens
  misc_RNA (1)...(19): siRNA sense strand
ugucaacagucuuggagaa

SEQ ID NO: 454879 - RNA, 19 nt, Homo sapiens
  misc_RNA (1)...(19): siRNA sense strand
cauucgcgauuuagaaguu

SEQ ID NO: 454880 - RNA, 19 nt, Homo sapiens
  misc_RNA (1)...(19): siRNA sense strand
ccagauagacuacgaugag

SEQ ID NO: 454881 - RNA, 19 nt, Homo sapiens
  misc_RNA (1)...(19): siRNA sense strand
ccaaccagcccgcucaaug

SEQ ID NO: 454882 - RNA, 19 nt, Homo sapiens
  misc_RNA (1)...(19): siRNA sense strand
gaccauucgcgauuuagaa

SEQ ID NO: 454883 - RNA, 19 nt, Homo sapiens
  misc_RNA (1)...(19): siRNA sense strand
uuggaagacuguccucuau

SEQ ID NO: 454884 - RNA, 19 nt, Homo sapiens
  misc_RNA (1)...(19): siRNA sense strand
ucuaagaccauucgcgauu

SEQ ID NO: 454885 - RNA, 19 nt, Homo sapiens
  misc_RNA (1)...(19): siRNA sense strand
gcugugagagccauuggaa

SEQ ID NO: 454886 - RNA, 19 nt, Homo sapiens
  misc_RNA (1)...(19): siRNA sense strand
cgggaacugcucuuuaauu

SEQ ID NO: 454887 - RNA, 19 nt, Homo sapiens
  misc_RNA (1)...(19): siRNA sense strand
ugugagagccauuggaaga

SEQ ID NO: 454888 - RNA, 19 nt, Homo sapiens
  misc_RNA (1)...(19): siRNA sense strand
uagauuugacugcaagauu

SEQ ID NO: 454889 - RNA, 19 nt, Homo sapiens
  misc_RNA (1)...(19): siRNA sense strand
ucaacagggucaccaacca

SEQ ID NO: 454890 - RNA, 19 nt, Homo sapiens
  misc_RNA (1)...(19): siRNA sense strand
gauuugacugcaagauuga

SEQ ID NO: 454891 - RNA, 19 nt, Homo sapiens
  misc_RNA (1)...(19): siRNA sense strand
caaccagcccgcucaaugc

SEQ ID NO: 454892 - RNA, 19 nt, Homo sapiens
  misc_RNA (1)...(19): siRNA sense strand
aaacccuauuucucuaaga

SEQ ID NO: 454893 - RNA, 19 nt, Homo sapiens
  misc_RNA (1)...(19): siRNA sense strand
cuauuucucuaagaccauu

SEQ ID NO: 454894 - RNA, 19 nt, Homo sapiens
  misc_RNA (1)...(19): siRNA sense strand
aggaaaagccucauguaaa

SEQ ID NO: 454895 - RNA, 19 nt, Homo sapiens
  misc_RNA (1)...(19): siRNA sense strand
gggaacugcucuuuaauua

SEQ ID NO: 454896 - RNA, 19 nt, Homo sapiens
  misc_RNA (1)...(19): siRNA sense strand
ggaaaagccucauguaaaa

SEQ ID NO: 454897 - RNA, 19 nt, Homo sapiens
  misc_RNA (1)...(19): siRNA sense strand
gacgggaacugcucuuuaa

SEQ ID NO: 454898 - RNA, 19 nt, Homo sapiens
  misc_RNA (1)...(19): siRNA sense strand
gaagaugugucccaagcuu

SEQ ID NO: 454899 - RNA, 19 nt, Homo sapiens
  misc_RNA (1)...(19): siRNA sense strand
uaagaccauucgcgauuua

SEQ ID NO: 454900 - RNA, 19 nt, Homo sapiens
  misc_RNA (1)...(19): siRNA sense strand
ggacgggaacugcucuuua

SEQ ID NO: 454901 - RNA, 19 nt, Homo sapiens
  misc_RNA (1)...(19): siRNA sense strand
ggaagacuguccucuaugg

SEQ ID NO: 454902 - RNA, 19 nt, Homo sapiens
  misc_RNA (1)...(19): siRNA sense strand
ggaagaggaagaagaguga

SEQ ID NO: 454903 - RNA, 19 nt, Homo sapiens
  misc_RNA (1)...(19): siRNA sense strand
agauuugacugcaagauug

SEQ ID NO: 454904 - RNA, 19 nt, Homo sapiens
  misc_RNA (1)...(19): siRNA sense strand
ggaugacgaugccaaguac

SEQ ID NO: 454905 - RNA, 19 nt, Homo sapiens
  misc_RNA (1)...(19): siRNA sense strand
gggaugacgaugccaagua

SEQ ID NO: 454906 - RNA, 19 nt, Homo sapiens
  misc_RNA (1)...(19): siRNA sense strand
cuaagaccauucgcgauuu

SEQ ID NO: 454907 - RNA, 19 nt, Homo sapiens
  misc_RNA (1)...(19): siRNA sense strand
guaaaacccuauuucucua

SEQ ID NO: 454908 - RNA, 19 nt, Homo sapiens
  misc_RNA (1)...(19): siRNA sense strand
ggaacugcucuuuaauuau

SEQ ID NO: 454909 - RNA, 19 nt, Homo sapiens
  misc_RNA (1)...(19): siRNA sense strand
acugcaagauugaaggaua

SEQ ID NO: 454910 - RNA, 19 nt, Homo sapiens
  misc_RNA (1)...(19): siRNA sense strand
ugucaacagucuuggagaa

SEQ ID NO: 454911 - RNA, 19 nt, Homo sapiens
  misc_RNA (1)...(19): siRNA sense strand
cauucgcgauuuagaaguu

SEQ ID NO: 454912 - RNA, 19 nt, Homo sapiens
  misc_RNA (1)...(19): siRNA sense strand
ccagauagacuacgaugag

SEQ ID NO: 454913 - RNA, 19 nt, Homo sapiens
  misc_RNA (1)...(19): siRNA sense strand
ccaaccagcccgcucaaug

SEQ ID NO: 454914 - RNA, 19 nt, Homo sapiens
  misc_RNA (1)...(19): siRNA sense strand
gaccauucgcgauuuagaa

SEQ ID NO: 454915 - RNA, 19 nt, Homo sapiens
  misc_RNA (1)...(19): siRNA sense strand
uuggaagacuguccucuau

SEQ ID NO: 454916 - RNA, 19 nt, Homo sapiens
  misc_RNA (1)...(19): siRNA sense strand
ucuaagaccauucgcgauu

SEQ ID NO: 454917 - RNA, 19 nt, Homo sapiens
  misc_RNA (1)...(19): siRNA sense strand
gcugugagagccauuggaa

SEQ ID NO: 454918 - RNA, 19 nt, Homo sapiens
  misc_RNA (1)...(19): siRNA sense strand
cgggaacugcucuuuaauu

SEQ ID NO: 454919 - RNA, 19 nt, Homo sapiens
  misc_RNA (1)...(19): siRNA sense strand
ugugagagccauuggaaga

SEQ ID NO: 454920 - RNA, 19 nt, Homo sapiens
  misc_RNA (1)...(19): siRNA sense strand
uagauuugacugcaagauu

SEQ ID NO: 454921 - RNA, 19 nt, Homo sapiens
  misc_RNA (1)...(19): siRNA sense strand
ucaacagggucaccaacca

SEQ ID NO: 454922 - RNA, 19 nt, Homo sapiens
  misc_RNA (1)...(19): siRNA sense strand
gauuugacugcaagauuga

SEQ ID NO: 454923 - RNA, 19 nt, Homo sapiens
  misc_RNA (1)...(19): siRNA sense strand
caaccagcccgcucaaugc

SEQ ID NO: 454924 - RNA, 19 nt, Homo sapiens
  misc_RNA (1)...(19): siRNA sense strand
aaacccuauuucucuaaga

SEQ ID NO: 454925 - RNA, 19 nt, Homo sapiens
  misc_RNA (1)...(19): siRNA sense strand
cuauuucucuaagaccauu

SEQ ID NO: 454926 - RNA, 19 nt, Homo sapiens
  misc_RNA (1)...(19): siRNA sense strand
aggaaaagccucauguaaa

SEQ ID NO: 454927 - RNA, 19 nt, Homo sapiens
  misc_RNA (1)...(19): siRNA sense strand
gggaacugcucuuuaauua

SEQ ID NO: 454928 - RNA, 19 nt, Homo sapiens
  misc_RNA (1)...(19): siRNA sense strand
ggaaaagccucauguaaaa

SEQ ID NO: 454929 - RNA, 19 nt, Homo sapiens
  misc_RNA (1)...(19): siRNA sense strand
gacgggaacugcucuuuaa

SEQ ID NO: 454930 - RNA, 19 nt, Homo sapiens
  misc_RNA (1)...(19): siRNA sense strand
gaagaugugucccaagcuu

SEQ ID NO: 454931 - RNA, 19 nt, Homo sapiens
  misc_RNA (1)...(19): siRNA sense strand
uaagaccauucgcgauuua

SEQ ID NO: 454932 - RNA, 19 nt, Homo sapiens
  misc_RNA (1)...(19): siRNA sense strand
ggacgggaacugcucuuua

SEQ ID NO: 454933 - RNA, 19 nt, Homo sapiens
  misc_RNA (1)...(19): siRNA sense strand
ggaagacuguccucuaugg

SEQ ID NO: 454934 - RNA, 19 nt, Homo sapiens
  misc_RNA (1)...(19): siRNA sense strand
ggaagaggaagaagaguga

SEQ ID NO: 454935 - RNA, 19 nt, Homo sapiens
  misc_RNA (1)...(19): siRNA sense strand
agauuugacugcaagauug

SEQ ID NO: 454936 - RNA, 19 nt, Homo sapiens
  misc_RNA (1)...(19): siRNA sense strand
ggaugacgaugccaaguac

SEQ ID NO: 454937 - RNA, 19 nt, Homo sapiens
  misc_RNA (1)...(19): siRNA sense strand
gggaugacgaugccaagua

SEQ ID NO: 454938 - RNA, 19 nt, Homo sapiens
  misc_RNA (1)...(19): siRNA sense strand
cuaagaccauucgcgauuu

SEQ ID NO: 454939 - RNA, 19 nt, Homo sapiens
  misc_RNA (1)...(19): siRNA sense strand
guaaaacccuauuucucua

SEQ ID NO: 454940 - RNA, 19 nt, Homo sapiens
  misc_RNA (1)...(19): siRNA sense strand
ggaacugcucuuuaauuau

SEQ ID NO: 454941 - RNA, 19 nt, Homo sapiens
  misc_RNA (1)...(19): siRNA sense strand
acugcaagauugaaggaua

SEQ ID NO: 454942 - RNA, 19 nt, Homo sapiens
  misc_RNA (1)...(19): siRNA sense strand
ugucaacagucuuggagaa

SEQ ID NO: 454943 - RNA, 19 nt, Homo sapiens
  misc_RNA (1)...(19): siRNA sense strand
cauucgcgauuuagaaguu

SEQ ID NO: 454944 - RNA, 19 nt, Homo sapiens
  misc_RNA (1)...(19): siRNA sense strand
ccagauagacuacgaugag

SEQ ID NO: 454945 - RNA, 19 nt, Homo sapiens
  misc_RNA (1)...(19): siRNA sense strand
ccaaccagcccgcucaaug

SEQ ID NO: 454946 - RNA, 19 nt, Homo sapiens
  misc_RNA (1)...(19): siRNA sense strand
gaccauucgcgauuuagaa

SEQ ID NO: 454947 - RNA, 19 nt, Homo sapiens
  misc_RNA (1)...(19): siRNA sense strand
uuggaagacuguccucuau

SEQ ID NO: 454948 - RNA, 19 nt, Homo sapiens
  misc_RNA (1)...(19): siRNA sense strand
ucuaagaccauucgcgauu

SEQ ID NO: 454949 - RNA, 19 nt, Homo sapiens
  misc_RNA (1)...(19): siRNA sense strand
gcugugagagccauuggaa

SEQ ID NO: 454950 - RNA, 19 nt, Homo sapiens
  misc_RNA (1)...(19): siRNA sense strand
cgggaacugcucuuuaauu

SEQ ID NO: 454951 - RNA, 19 nt, Homo sapiens
  misc_RNA (1)...(19): siRNA sense strand
ugugagagccauuggaaga

SEQ ID NO: 454952 - RNA, 19 nt, Homo sapiens
  misc_RNA (1)...(19): siRNA sense strand
uagauuugacugcaagauu

SEQ ID NO: 454953 - RNA, 19 nt, Homo sapiens
  misc_RNA (1)...(19): siRNA sense strand
ucaacagggucaccaacca

SEQ ID NO: 454954 - RNA, 19 nt, Homo sapiens
  misc_RNA (1)...(19): siRNA sense strand
gauuugacugcaagauuga

SEQ ID NO: 454955 - RNA, 19 nt, Homo sapiens
  misc_RNA (1)...(19): siRNA sense strand
caaccagcccgcucaaugc

SEQ ID NO: 454956 - RNA, 19 nt, Homo sapiens
  misc_RNA (1)...(19): siRNA sense strand
aaacccuauuucucuaaga

SEQ ID NO: 454957 - RNA, 19 nt, Homo sapiens
  misc_RNA (1)...(19): siRNA sense strand
cuauuucucuaagaccauu

SEQ ID NO: 454958 - RNA, 19 nt, Homo sapiens
  misc_RNA (1)...(19): siRNA sense strand
aggaaaagccucauguaaa

SEQ ID NO: 454959 - RNA, 19 nt, Homo sapiens
  misc_RNA (1)...(19): siRNA sense strand
gggaacugcucuuuaauua

SEQ ID NO: 454960 - RNA, 19 nt, Homo sapiens
  misc_RNA (1)...(19): siRNA sense strand
ggaaaagccucauguaaaa

SEQ ID NO: 454961 - RNA, 19 nt, Homo sapiens
  misc_RNA (1)...(19): siRNA sense strand
gacgggaacugcucuuuaa

SEQ ID NO: 454962 - RNA, 19 nt, Homo sapiens
  misc_RNA (1)...(19): siRNA sense strand
gaagaugugucccaagcuu

SEQ ID NO: 454963 - RNA, 19 nt, Homo sapiens
  misc_RNA (1)...(19): siRNA sense strand
uaagaccauucgcgauuua

SEQ ID NO: 454964 - RNA, 19 nt, Homo sapiens
  misc_RNA (1)...(19): siRNA sense strand
ggacgggaacugcucuuua

SEQ ID NO: 454965 - RNA, 19 nt, Homo sapiens
  misc_RNA (1)...(19): siRNA sense strand
ggaagacuguccucuaugg

SEQ ID NO: 454966 - RNA, 19 nt, Homo sapiens
  misc_RNA (1)...(19): siRNA sense strand
ggaagaggaagaagaguga

SEQ ID NO: 454967 - RNA, 19 nt, Homo sapiens
  misc_RNA (1)...(19): siRNA sense strand
agauuugacugcaagauug

SEQ ID NO: 454968 - RNA, 19 nt, Homo sapiens
  misc_RNA (1)...(19): siRNA sense strand
ggaugacgaugccaaguac

SEQ ID NO: 454969 - RNA, 19 nt, Homo sapiens
  misc_RNA (1)...(19): siRNA sense strand
gggaugacgaugccaagua

SEQ ID NO: 454970 - RNA, 19 nt, Homo sapiens
  misc_RNA (1)...(19): siRNA sense strand
cuaagaccauucgcgauuu

SEQ ID NO: 454971 - RNA, 19 nt, Homo sapiens
  misc_RNA (1)...(19): siRNA sense strand
guaaaacccuauuucucua

SEQ ID NO: 454972 - RNA, 19 nt, Homo sapiens
  misc_RNA (1)...(19): siRNA sense strand
ggaacugcucuuuaauuau

SEQ ID NO: 454973 - RNA, 19 nt, Homo sapiens
  misc_RNA (1)...(19): siRNA sense strand
acugcaagauugaaggaua

SEQ ID NO: 454974 - RNA, 19 nt, Homo sapiens
  misc_RNA (1)...(19): siRNA sense strand
ugucaacagucuuggagaa

SEQ ID NO: 454975 - RNA, 19 nt, Homo sapiens
  misc_RNA (1)...(19): siRNA sense strand
cauucgcgauuuagaaguu

SEQ ID NO: 454976 - RNA, 19 nt, Homo sapiens
  misc_RNA (1)...(19): siRNA sense strand
ccagauagacuacgaugag

SEQ ID NO: 454977 - RNA, 19 nt, Homo sapiens
  misc_RNA (1)...(19): siRNA sense strand
ccaaccagcccgcucaaug

SEQ ID NO: 454978 - RNA, 19 nt, Homo sapiens
  misc_RNA (1)...(19): siRNA sense strand
gaccauucgcgauuuagaa

SEQ ID NO: 454979 - RNA, 19 nt, Homo sapiens
  misc_RNA (1)...(19): siRNA sense strand
uuggaagacuguccucuau

SEQ ID NO: 454980 - RNA, 19 nt, Homo sapiens
  misc_RNA (1)...(19): siRNA sense strand
ucuaagaccauucgcgauu

SEQ ID NO: 454981 - RNA, 19 nt, Homo sapiens
  misc_RNA (1)...(19): siRNA sense strand
gcugugagagccauuggaa

SEQ ID NO: 454982 - RNA, 19 nt, Homo sapiens
  misc_RNA (1)...(19): siRNA sense strand
cgggaacugcucuuuaauu

SEQ ID NO: 454983 - RNA, 19 nt, Homo sapiens
  misc_RNA (1)...(19): siRNA sense strand
ugugagagccauuggaaga

SEQ ID NO: 454984 - RNA, 19 nt, Homo sapiens
  misc_RNA (1)...(19): siRNA sense strand
uagauuugacugcaagauu

SEQ ID NO: 454985 - RNA, 19 nt, Homo sapiens
  misc_RNA (1)...(19): siRNA sense strand
ucaacagggucaccaacca

SEQ ID NO: 454986 - RNA, 19 nt, Homo sapiens
  misc_RNA (1)...(19): siRNA sense strand
gauuugacugcaagauuga

SEQ ID NO: 454987 - RNA, 19 nt, Homo sapiens
  misc_RNA (1)...(19): siRNA sense strand
caaccagcccgcucaaugc

SEQ ID NO: 454988 - RNA, 19 nt, Homo sapiens
  misc_RNA (1)...(19): siRNA sense strand
aaacccuauuucucuaaga

SEQ ID NO: 454989 - RNA, 19 nt, Homo sapiens
  misc_RNA (1)...(19): siRNA sense strand
cuauuucucuaagaccauu

SEQ ID NO: 454990 - RNA, 19 nt, Homo sapiens
  misc_RNA (1)...(19): siRNA sense strand
aggaaaagccucauguaaa

SEQ ID NO: 454991 - RNA, 19 nt, Homo sapiens
  misc_RNA (1)...(19): siRNA sense strand
gggaacugcucuuuaauua

SEQ ID NO: 454992 - RNA, 19 nt, Homo sapiens
  misc_RNA (1)...(19): siRNA sense strand
ggaaaagccucauguaaaa

SEQ ID NO: 454993 - RNA, 19 nt, Homo sapiens
  misc_RNA (1)...(19): siRNA sense strand
gacgggaacugcucuuuaa

SEQ ID NO: 454994 - RNA, 19 nt, Homo sapiens
  misc_RNA (1)...(19): siRNA sense strand
gaagaugugucccaagcuu

SEQ ID NO: 454995 - RNA, 19 nt, Homo sapiens
  misc_RNA (1)...(19): siRNA sense strand
uaagaccauucgcgauuua

SEQ ID NO: 454996 - RNA, 19 nt, Homo sapiens
  misc_RNA (1)...(19): siRNA sense strand
ggacgggaacugcucuuua

SEQ ID NO: 454997 - RNA, 19 nt, Homo sapiens
  misc_RNA (1)...(19): siRNA sense strand
ggaagacuguccucuaugg

SEQ ID NO: 454998 - RNA, 19 nt, Homo sapiens
  misc_RNA (1)...(19): siRNA sense strand
ggaagaggaagaagaguga

SEQ ID NO: 454999 - RNA, 19 nt, Homo sapiens
  misc_RNA (1)...(19): siRNA sense strand
agauuugacugcaagauug

SEQ ID NO: 455000 - RNA, 19 nt, Homo sapiens
  misc_RNA (1)...(19): siRNA sense strand
ggaugacgaugccaaguac

SEQ ID NO: 455001 - RNA, 19 nt, Homo sapiens
  misc_RNA (1)...(19): siRNA sense strand
gggaugacgaugccaagua

SEQ ID NO: 455002 - RNA, 19 nt, Homo sapiens
  misc_RNA (1)...(19): siRNA sense strand
cuaagaccauucgcgauuu

SEQ ID NO: 455003 - RNA, 19 nt, Homo sapiens
  misc_RNA (1)...(19): siRNA sense strand
guaaaacccuauuucucua

SEQ ID NO: 455004 - RNA, 19 nt, Homo sapiens
  misc_RNA (1)...(19): siRNA sense strand
ggaacugcucuuuaauuau

SEQ ID NO: 455005 - RNA, 19 nt, Homo sapiens
  misc_RNA (1)...(19): siRNA sense strand
acugcaagauugaaggaua

SEQ ID NO: 455006 - RNA, 19 nt, Homo sapiens
  misc_RNA (1)...(19): siRNA sense strand
ugucaacagucuuggagaa

SEQ ID NO: 455007 - RNA, 19 nt, Homo sapiens
  misc_RNA (1)...(19): siRNA sense strand
cauucgcgauuuagaaguu

SEQ ID NO: 455008 - RNA, 19 nt, Homo sapiens
  misc_RNA (1)...(19): siRNA sense strand
ccagauagacuacgaugag

SEQ ID NO: 455009 - RNA, 19 nt, Homo sapiens
  misc_RNA (1)...(19): siRNA sense strand
ccaaccagcccgcucaaug

SEQ ID NO: 455010 - RNA, 19 nt, Homo sapiens
  misc_RNA (1)...(19): siRNA sense strand
gaccauucgcgauuuagaa

SEQ ID NO: 455011 - RNA, 19 nt, Homo sapiens
  misc_RNA (1)...(19): siRNA sense strand
uuggaagacuguccucuau

SEQ ID NO: 455012 - RNA, 19 nt, Homo sapiens
  misc_RNA (1)...(19): siRNA sense strand
ucuaagaccauucgcgauu

SEQ ID NO: 455013 - RNA, 19 nt, Homo sapiens
  misc_RNA (1)...(19): siRNA sense strand
gcugugagagccauuggaa

SEQ ID NO: 455014 - RNA, 19 nt, Homo sapiens
  misc_RNA (1)...(19): siRNA sense strand
cgggaacugcucuuuaauu

SEQ ID NO: 455015 - RNA, 19 nt, Homo sapiens
  misc_RNA (1)...(19): siRNA sense strand
ugugagagccauuggaaga

SEQ ID NO: 455016 - RNA, 19 nt, Homo sapiens
  misc_RNA (1)...(19): siRNA sense strand
uagauuugacugcaagauu

SEQ ID NO: 455017 - RNA, 19 nt, Homo sapiens
  misc_RNA (1)...(19): siRNA sense strand
ucaacagggucaccaacca

SEQ ID NO: 455018 - RNA, 19 nt, Homo sapiens
  misc_RNA (1)...(19): siRNA sense strand
gauuugacugcaagauuga

SEQ ID NO: 455019 - RNA, 19 nt, Homo sapiens
  misc_RNA (1)...(19): siRNA sense strand
caaccagcccgcucaaugc

SEQ ID NO: 455020 - RNA, 19 nt, Homo sapiens
  misc_RNA (1)...(19): siRNA sense strand
aaacccuauuucucuaaga

SEQ ID NO: 455021 - RNA, 19 nt, Homo sapiens
  misc_RNA (1)...(19): siRNA sense strand
cuauuucucuaagaccauu

SEQ ID NO: 455022 - RNA, 19 nt, Homo sapiens
  misc_RNA (1)...(19): siRNA sense strand
aggaaaagccucauguaaa

SEQ ID NO: 455023 - RNA, 19 nt, Homo sapiens
  misc_RNA (1)...(19): siRNA sense strand
gggaacugcucuuuaauua

SEQ ID NO: 455024 - RNA, 19 nt, Homo sapiens
  misc_RNA (1)...(19): siRNA sense strand
ggaaaagccucauguaaaa

SEQ ID NO: 455025 - RNA, 19 nt, Homo sapiens
  misc_RNA (1)...(19): siRNA sense strand
gacgggaacugcucuuuaa

SEQ ID NO: 455026 - RNA, 19 nt, Homo sapiens
  misc_RNA (1)...(19): siRNA sense strand
gaagaugugucccaagcuu

SEQ ID NO: 455027 - RNA, 19 nt, Homo sapiens
  misc_RNA (1)...(19): siRNA sense strand
uaagaccauucgcgauuua

SEQ ID NO: 455028 - RNA, 19 nt, Homo sapiens
  misc_RNA (1)...(19): siRNA sense strand
ggacgggaacugcucuuua

SEQ ID NO: 455029 - RNA, 19 nt, Homo sapiens
  misc_RNA (1)...(19): siRNA sense strand
ggaagaggaagaagaguga

SEQ ID NO: 455030 - RNA, 19 nt, Homo sapiens
  misc_RNA (1)...(19): siRNA sense strand
agauuugacugcaagauug

SEQ ID NO: 455031 - RNA, 19 nt, Homo sapiens
  misc_RNA (1)...(19): siRNA sense strand
ggaugacgaugccaaguac

SEQ ID NO: 455032 - RNA, 19 nt, Homo sapiens
  misc_RNA (1)...(19): siRNA sense strand
gggaugacgaugccaagua

SEQ ID NO: 455033 - RNA, 19 nt, Homo sapiens
  misc_RNA (1)...(19): siRNA sense strand
cuaagaccauucgcgauuu

SEQ ID NO: 455034 - RNA, 19 nt, Homo sapiens
  misc_RNA (1)...(19): siRNA sense strand
guaaaacccuauuucucua

SEQ ID NO: 455035 - RNA, 19 nt, Homo sapiens
  misc_RNA (1)...(19): siRNA sense strand
ggaacugcucuuuaauuau

SEQ ID NO: 455036 - RNA, 19 nt, Homo sapiens
  misc_RNA (1)...(19): siRNA sense strand
acugcaagauugaaggaua

SEQ ID NO: 455037 - RNA, 19 nt, Homo sapiens
  misc_RNA (1)...(19): siRNA sense strand
ugucaacagucuuggagaa

SEQ ID NO: 455038 - RNA, 19 nt, Homo sapiens
  misc_RNA (1)...(19): siRNA sense strand
cauucgcgauuuagaaguu

SEQ ID NO: 455039 - RNA, 19 nt, Homo sapiens
  misc_RNA (1)...(19): siRNA sense strand
ccagauagacuacgaugag

SEQ ID NO: 455040 - RNA, 19 nt, Homo sapiens
  misc_RNA (1)...(19): siRNA sense strand
ccaaccagcccgcucaaug

SEQ ID NO: 455041 - RNA, 19 nt, Homo sapiens
  misc_RNA (1)...(19): siRNA sense strand
gaccauucgcgauuuagaa

SEQ ID NO: 455042 - RNA, 19 nt, Homo sapiens
  misc_RNA (1)...(19): siRNA sense strand
ucuaagaccauucgcgauu

SEQ ID NO: 455043 - RNA, 19 nt, Homo sapiens
  misc_RNA (1)...(19): siRNA sense strand
cgggaacugcucuuuaauu

SEQ ID NO: 455044 - RNA, 19 nt, Homo sapiens
  misc_RNA (1)...(19): siRNA sense strand
uagauuugacugcaagauu

SEQ ID NO: 455045 - RNA, 19 nt, Homo sapiens
  misc_RNA (1)...(19): siRNA sense strand
gauuugacugcaagauuga

SEQ ID NO: 455046 - RNA, 19 nt, Homo sapiens
  misc_RNA (1)...(19): siRNA sense strand
ucaacagggucaccaacca

SEQ ID NO: 455047 - RNA, 19 nt, Homo sapiens
  misc_RNA (1)...(19): siRNA sense strand
caaccagcccgcucaaugc

SEQ ID NO: 455048 - RNA, 19 nt, Homo sapiens
  misc_RNA (1)...(19): siRNA sense strand
aaacccuauuucucuaaga

SEQ ID NO: 455049 - RNA, 19 nt, Homo sapiens
  misc_RNA (1)...(19): siRNA sense strand
cuauuucucuaagaccauu

SEQ ID NO: 455050 - RNA, 19 nt, Homo sapiens
  misc_RNA (1)...(19): siRNA sense strand
aggaaaagccucauguaaa

SEQ ID NO: 455051 - RNA, 19 nt, Homo sapiens
  misc_RNA (1)...(19): siRNA sense strand
gggaacugcucuuuaauua

SEQ ID NO: 455052 - RNA, 19 nt, Homo sapiens
  misc_RNA (1)...(19): siRNA sense strand
ggaaaagccucauguaaaa

SEQ ID NO: 455053 - RNA, 19 nt, Homo sapiens
  misc_RNA (1)...(19): siRNA sense strand
gacgggaacugcucuuuaa

SEQ ID NO: 455054 - RNA, 19 nt, Homo sapiens
  misc_RNA (1)...(19): siRNA sense strand
gaagaugugucccaagcuu

SEQ ID NO: 455055 - RNA, 19 nt, Homo sapiens
  misc_RNA (1)...(19): siRNA sense strand
uaagaccauucgcgauuua

SEQ ID NO: 455056 - RNA, 19 nt, Homo sapiens
  misc_RNA (1)...(19): siRNA sense strand
ggacgggaacugcucuuua

SEQ ID NO: 455057 - RNA, 19 nt, Homo sapiens
  misc_RNA (1)...(19): siRNA sense strand
ggaagaggaagaagaguga

SEQ ID NO: 455058 - RNA, 19 nt, Homo sapiens
  misc_RNA (1)...(19): siRNA sense strand
agauuugacugcaagauug

SEQ ID NO: 455059 - RNA, 19 nt, Homo sapiens
  misc_RNA (1)...(19): siRNA sense strand
ggaugacgaugccaaguac

SEQ ID NO: 455060 - RNA, 19 nt, Homo sapiens
  misc_RNA (1)...(19): siRNA sense strand
gggaugacgaugccaagua

SEQ ID NO: 455061 - RNA, 19 nt, Homo sapiens
  misc_RNA (1)...(19): siRNA sense strand
cuaagaccauucgcgauuu

SEQ ID NO: 455062 - RNA, 19 nt, Homo sapiens
  misc_RNA (1)...(19): siRNA sense strand
guaaaacccuauuucucua

SEQ ID NO: 455063 - RNA, 19 nt, Homo sapiens
  misc_RNA (1)...(19): siRNA sense strand
ggaacugcucuuuaauuau

SEQ ID NO: 455064 - RNA, 19 nt, Homo sapiens
  misc_RNA (1)...(19): siRNA sense strand
acugcaagauugaaggaua

SEQ ID NO: 455065 - RNA, 19 nt, Homo sapiens
  misc_RNA (1)...(19): siRNA sense strand
ugucaacagucuuggagaa

SEQ ID NO: 455066 - RNA, 19 nt, Homo sapiens
  misc_RNA (1)...(19): siRNA sense strand
cauucgcgauuuagaaguu

SEQ ID NO: 455067 - RNA, 19 nt, Homo sapiens
  misc_RNA (1)...(19): siRNA sense strand
ccagauagacuacgaugag

SEQ ID NO: 455068 - RNA, 19 nt, Homo sapiens
  misc_RNA (1)...(19): siRNA sense strand
ccaaccagcccgcucaaug

SEQ ID NO: 455069 - RNA, 19 nt, Homo sapiens
  misc_RNA (1)...(19): siRNA sense strand
gaccauucgcgauuuagaa

SEQ ID NO: 455070 - RNA, 19 nt, Homo sapiens
  misc_RNA (1)...(19): siRNA sense strand
ucuaagaccauucgcgauu

SEQ ID NO: 455071 - RNA, 19 nt, Homo sapiens
  misc_RNA (1)...(19): siRNA sense strand
cgggaacugcucuuuaauu

SEQ ID NO: 455072 - RNA, 19 nt, Homo sapiens
  misc_RNA (1)...(19): siRNA sense strand
uagauuugacugcaagauu

SEQ ID NO: 455073 - RNA, 19 nt, Homo sapiens
  misc_RNA (1)...(19): siRNA sense strand
gauuugacugcaagauuga

SEQ ID NO: 455074 - RNA, 19 nt, Homo sapiens
  misc_RNA (1)...(19): siRNA sense strand
ucaacagggucaccaacca

SEQ ID NO: 455075 - RNA, 19 nt, Homo sapiens
  misc_RNA (1)...(19): siRNA sense strand
caaccagcccgcucaaugc

SEQ ID NO: 455076 - RNA, 19 nt, Homo sapiens
  misc_RNA (1)...(19): siRNA sense strand
aaacccuauuucucuaaga

SEQ ID NO: 455077 - RNA, 19 nt, Homo sapiens
  misc_RNA (1)...(19): siRNA sense strand
cuauuucucuaagaccauu

SEQ ID NO: 455078 - RNA, 19 nt, Homo sapiens
  misc_RNA (1)...(19): siRNA sense strand
aggaaaagccucauguaaa

SEQ ID NO: 455079 - RNA, 19 nt, Homo sapiens
  misc_RNA (1)...(19): siRNA sense strand
gggaacugcucuuuaauua

SEQ ID NO: 455080 - RNA, 19 nt, Homo sapiens
  misc_RNA (1)...(19): siRNA sense strand
ggaaaagccucauguaaaa

SEQ ID NO: 455081 - RNA, 19 nt, Homo sapiens
  misc_RNA (1)...(19): siRNA sense strand
gacgggaacugcucuuuaa

SEQ ID NO: 455082 - RNA, 19 nt, Homo sapiens
  misc_RNA (1)...(19): siRNA sense strand
gaagaugugucccaagcuu

SEQ ID NO: 455083 - RNA, 19 nt, Homo sapiens
  misc_RNA (1)...(19): siRNA sense strand
uaagaccauucgcgauuua

SEQ ID NO: 455084 - RNA, 19 nt, Homo sapiens
  misc_RNA (1)...(19): siRNA sense strand
ggacgggaacugcucuuua

SEQ ID NO: 455085 - RNA, 19 nt, Homo sapiens
  misc_RNA (1)...(19): siRNA sense strand
ggaagacuguccucuaugg

SEQ ID NO: 455086 - RNA, 19 nt, Homo sapiens
  misc_RNA (1)...(19): siRNA sense strand
ggaagaggaagaagaguga

SEQ ID NO: 455087 - RNA, 19 nt, Homo sapiens
  misc_RNA (1)...(19): siRNA sense strand
agauuugacugcaagauug

SEQ ID NO: 455088 - RNA, 19 nt, Homo sapiens
  misc_RNA (1)...(19): siRNA sense strand
ggaugacgaugccaaguac

SEQ ID NO: 455089 - RNA, 19 nt, Homo sapiens
  misc_RNA (1)...(19): siRNA sense strand
gggaugacgaugccaagua

SEQ ID NO: 455090 - RNA, 19 nt, Homo sapiens
  misc_RNA (1)...(19): siRNA sense strand
cuaagaccauucgcgauuu

SEQ ID NO: 455091 - RNA, 19 nt, Homo sapiens
  misc_RNA (1)...(19): siRNA sense strand
guaaaacccuauuucucua

SEQ ID NO: 455092 - RNA, 19 nt, Homo sapiens
  misc_RNA (1)...(19): siRNA sense strand
ggaacugcucuuuaauuau

SEQ ID NO: 455093 - RNA, 19 nt, Homo sapiens
  misc_RNA (1)...(19): siRNA sense strand
acugcaagauugaaggaua

SEQ ID NO: 455094 - RNA, 19 nt, Homo sapiens
  misc_RNA (1)...(19): siRNA sense strand
ugucaacagucuuggagaa

SEQ ID NO: 455095 - RNA, 19 nt, Homo sapiens
  misc_RNA (1)...(19): siRNA sense strand
cauucgcgauuuagaaguu

SEQ ID NO: 455096 - RNA, 19 nt, Homo sapiens
  misc_RNA (1)...(19): siRNA sense strand
ccagauagacuacgaugag

SEQ ID NO: 455097 - RNA, 19 nt, Homo sapiens
  misc_RNA (1)...(19): siRNA sense strand
ccaaccagcccgcucaaug

SEQ ID NO: 455098 - RNA, 19 nt, Homo sapiens
  misc_RNA (1)...(19): siRNA sense strand
gaccauucgcgauuuagaa

SEQ ID NO: 455099 - RNA, 19 nt, Homo sapiens
  misc_RNA (1)...(19): siRNA sense strand
uuggaagacuguccucuau

SEQ ID NO: 455100 - RNA, 19 nt, Homo sapiens
  misc_RNA (1)...(19): siRNA sense strand
ucuaagaccauucgcgauu

SEQ ID NO: 455101 - RNA, 19 nt, Homo sapiens
  misc_RNA (1)...(19): siRNA sense strand
gcugugagagccauuggaa

SEQ ID NO: 455102 - RNA, 19 nt, Homo sapiens
  misc_RNA (1)...(19): siRNA sense strand
cgggaacugcucuuuaauu

SEQ ID NO: 455103 - RNA, 19 nt, Homo sapiens
  misc_RNA (1)...(19): siRNA sense strand
ugugagagccauuggaaga

SEQ ID NO: 455104 - RNA, 19 nt, Homo sapiens
  misc_RNA (1)...(19): siRNA sense strand
uagauuugacugcaagauu

SEQ ID NO: 455105 - RNA, 19 nt, Homo sapiens
  misc_RNA (1)...(19): siRNA sense strand
ucaacagggucaccaacca

SEQ ID NO: 455106 - RNA, 19 nt, Homo sapiens
  misc_RNA (1)...(19): siRNA sense strand
gauuugacugcaagauuga

SEQ ID NO: 455107 - RNA, 19 nt, Homo sapiens
  misc_RNA (1)...(19): siRNA sense strand
caaccagcccgcucaaugc

SEQ ID NO: 455108 - RNA, 19 nt, Homo sapiens
  misc_RNA (1)...(19): siRNA sense strand
aaacccuauuucucuaaga

SEQ ID NO: 455109 - RNA, 19 nt, Homo sapiens
  misc_RNA (1)...(19): siRNA sense strand
cuauuucucuaagaccauu

SEQ ID NO: 455110 - RNA, 19 nt, Homo sapiens
  misc_RNA (1)...(19): siRNA sense strand
aggaaaagccucauguaaa

SEQ ID NO: 455111 - RNA, 19 nt, Homo sapiens
  misc_RNA (1)...(19): siRNA sense strand
gggaacugcucuuuaauua

SEQ ID NO: 455112 - RNA, 19 nt, Homo sapiens
  misc_RNA (1)...(19): siRNA sense strand
ggaaaagccucauguaaaa

SEQ ID NO: 455113 - RNA, 19 nt, Homo sapiens
  misc_RNA (1)...(19): siRNA sense strand
gacgggaacugcucuuuaa

SEQ ID NO: 455114 - RNA, 19 nt, Homo sapiens
  misc_RNA (1)...(19): siRNA sense strand
gaagaugugucccaagcuu

SEQ ID NO: 455115 - RNA, 19 nt, Homo sapiens
  misc_RNA (1)...(19): siRNA sense strand
uaagaccauucgcgauuua

SEQ ID NO: 455116 - RNA, 19 nt, Homo sapiens
  misc_RNA (1)...(19): siRNA sense strand
ggacgggaacugcucuuua

SEQ ID NO: 455117 - RNA, 19 nt, Homo sapiens
  misc_RNA (1)...(19): siRNA sense strand
ggaagacuguccucuaugg

SEQ ID NO: 455118 - RNA, 19 nt, Homo sapiens
  misc_RNA (1)...(19): siRNA sense strand
ggaagaggaagaagaguga

SEQ ID NO: 455119 - RNA, 19 nt, Homo sapiens
  misc_RNA (1)...(19): siRNA sense strand
agauuugacugcaagauug

SEQ ID NO: 455120 - RNA, 19 nt, Homo sapiens
  misc_RNA (1)...(19): siRNA sense strand
ggaugacgaugccaaguac

SEQ ID NO: 455121 - RNA, 19 nt, Homo sapiens
  misc_RNA (1)...(19): siRNA sense strand
gggaugacgaugccaagua

SEQ ID NO: 455122 - RNA, 19 nt, Homo sapiens
  misc_RNA (1)...(19): siRNA sense strand
cuaagaccauucgcgauuu

SEQ ID NO: 455123 - RNA, 19 nt, Homo sapiens
  misc_RNA (1)...(19): siRNA sense strand
guaaaacccuauuucucua

SEQ ID NO: 455124 - RNA, 19 nt, Homo sapiens
  misc_RNA (1)...(19): siRNA sense strand
ggaacugcucuuuaauuau

SEQ ID NO: 455125 - RNA, 19 nt, Homo sapiens
  misc_RNA (1)...(19): siRNA sense strand
acugcaagauugaaggaua

SEQ ID NO: 455126 - RNA, 19 nt, Homo sapiens
  misc_RNA (1)...(19): siRNA sense strand
ugucaacagucuuggagaa

SEQ ID NO: 455127 - RNA, 19 nt, Homo sapiens
  misc_RNA (1)...(19): siRNA sense strand
cauucgcgauuuagaaguu

SEQ ID NO: 455128 - RNA, 19 nt, Homo sapiens
  misc_RNA (1)...(19): siRNA sense strand
ccagauagacuacgaugag

SEQ ID NO: 455129 - RNA, 19 nt, Homo sapiens
  misc_RNA (1)...(19): siRNA sense strand
ccaaccagcccgcucaaug

SEQ ID NO: 455130 - RNA, 19 nt, Homo sapiens
  misc_RNA (1)...(19): siRNA sense strand
gaccauucgcgauuuagaa

SEQ ID NO: 455131 - RNA, 19 nt, Homo sapiens
  misc_RNA (1)...(19): siRNA sense strand
uuggaagacuguccucuau

SEQ ID NO: 455132 - RNA, 19 nt, Homo sapiens
  misc_RNA (1)...(19): siRNA sense strand
ucuaagaccauucgcgauu

SEQ ID NO: 455133 - RNA, 19 nt, Homo sapiens
  misc_RNA (1)...(19): siRNA sense strand
gcugugagagccauuggaa

SEQ ID NO: 455134 - RNA, 19 nt, Homo sapiens
  misc_RNA (1)...(19): siRNA sense strand
cgggaacugcucuuuaauu

SEQ ID NO: 455135 - RNA, 19 nt, Homo sapiens
  misc_RNA (1)...(19): siRNA sense strand
ugugagagccauuggaaga

SEQ ID NO: 455136 - RNA, 19 nt, Homo sapiens
  misc_RNA (1)...(19): siRNA sense strand
uagauuugacugcaagauu

SEQ ID NO: 455137 - RNA, 19 nt, Homo sapiens
  misc_RNA (1)...(19): siRNA sense strand
ucaacagggucaccaacca

SEQ ID NO: 455138 - RNA, 19 nt, Homo sapiens
  misc_RNA (1)...(19): siRNA sense strand
gauuugacugcaagauuga

SEQ ID NO: 455139 - RNA, 19 nt, Homo sapiens
  misc_RNA (1)...(19): siRNA sense strand
caaccagcccgcucaaugc

SEQ ID NO: 455140 - RNA, 19 nt, Homo sapiens
  misc_RNA (1)...(19): siRNA sense strand
aaacccuauuucucuaaga

SEQ ID NO: 455141 - RNA, 19 nt, Homo sapiens
  misc_RNA (1)...(19): siRNA sense strand
cuauuucucuaagaccauu

SEQ ID NO: 455142 - RNA, 19 nt, Homo sapiens
  misc_RNA (1)...(19): siRNA sense strand
aggaaaagccucauguaaa

SEQ ID NO: 455143 - RNA, 19 nt, Homo sapiens
  misc_RNA (1)...(19): siRNA sense strand
gggaacugcucuuuaauua

SEQ ID NO: 455144 - RNA, 19 nt, Homo sapiens
  misc_RNA (1)...(19): siRNA sense strand
ggaaaagccucauguaaaa

SEQ ID NO: 455145 - RNA, 19 nt, Homo sapiens
  misc_RNA (1)...(19): siRNA sense strand
gacgggaacugcucuuuaa

SEQ ID NO: 455146 - RNA, 19 nt, Homo sapiens
  misc_RNA (1)...(19): siRNA sense strand
gaagaugugucccaagcuu

SEQ ID NO: 455147 - RNA, 19 nt, Homo sapiens
  misc_RNA (1)...(19): siRNA sense strand
uaagaccauucgcgauuua

SEQ ID NO: 455148 - RNA, 19 nt, Homo sapiens
  misc_RNA (1)...(19): siRNA sense strand
ggacgggaacugcucuuua

SEQ ID NO: 455149 - RNA, 19 nt, Homo sapiens
  misc_RNA (1)...(19): siRNA sense strand
ggaagacuguccucuaugg

SEQ ID NO: 455150 - RNA, 19 nt, Homo sapiens
  misc_RNA (1)...(19): siRNA sense strand
ggaagaggaagaagaguga

SEQ ID NO: 455151 - RNA, 19 nt, Homo sapiens
  misc_RNA (1)...(19): siRNA sense strand
agauuugacugcaagauug

SEQ ID NO: 455152 - RNA, 19 nt, Homo sapiens
  misc_RNA (1)...(19): siRNA sense strand
ggaugacgaugccaaguac

SEQ ID NO: 455153 - RNA, 19 nt, Homo sapiens
  misc_RNA (1)...(19): siRNA sense strand
gggaugacgaugccaagua

SEQ ID NO: 455154 - RNA, 19 nt, Homo sapiens
  misc_RNA (1)...(19): siRNA sense strand
cuaagaccauucgcgauuu

SEQ ID NO: 455155 - RNA, 19 nt, Homo sapiens
  misc_RNA (1)...(19): siRNA sense strand
guaaaacccuauuucucua

SEQ ID NO: 455156 - RNA, 19 nt, Homo sapiens
  misc_RNA (1)...(19): siRNA sense strand
ggaacugcucuuuaauuau

SEQ ID NO: 455157 - RNA, 19 nt, Homo sapiens
  misc_RNA (1)...(19): siRNA sense strand
acugcaagauugaaggaua

SEQ ID NO: 455158 - RNA, 19 nt, Homo sapiens
  misc_RNA (1)...(19): siRNA sense strand
ugucaacagucuuggagaa

SEQ ID NO: 455159 - RNA, 19 nt, Homo sapiens
  misc_RNA (1)...(19): siRNA sense strand
cauucgcgauuuagaaguu

SEQ ID NO: 455160 - RNA, 19 nt, Homo sapiens
  misc_RNA (1)...(19): siRNA sense strand
ccagauagacuacgaugag

SEQ ID NO: 455161 - RNA, 19 nt, Homo sapiens
  misc_RNA (1)...(19): siRNA sense strand
ccaaccagcccgcucaaug

SEQ ID NO: 455162 - RNA, 19 nt, Homo sapiens
  misc_RNA (1)...(19): siRNA sense strand
gaccauucgcgauuuagaa

SEQ ID NO: 455163 - RNA, 19 nt, Homo sapiens
  misc_RNA (1)...(19): siRNA sense strand
uuggaagacuguccucuau

SEQ ID NO: 455164 - RNA, 19 nt, Homo sapiens
  misc_RNA (1)...(19): siRNA sense strand
ucuaagaccauucgcgauu

SEQ ID NO: 455165 - RNA, 19 nt, Homo sapiens
  misc_RNA (1)...(19): siRNA sense strand
gcugugagagccauuggaa

SEQ ID NO: 455166 - RNA, 19 nt, Homo sapiens
  misc_RNA (1)...(19): siRNA sense strand
cgggaacugcucuuuaauu

SEQ ID NO: 455167 - RNA, 19 nt, Homo sapiens
  misc_RNA (1)...(19): siRNA sense strand
ugugagagccauuggaaga

SEQ ID NO: 455168 - RNA, 19 nt, Homo sapiens
  misc_RNA (1)...(19): siRNA sense strand
uagauuugacugcaagauu

SEQ ID NO: 455169 - RNA, 19 nt, Homo sapiens
  misc_RNA (1)...(19): siRNA sense strand
ucaacagggucaccaacca

SEQ ID NO: 455170 - RNA, 19 nt, Homo sapiens
  misc_RNA (1)...(19): siRNA sense strand
gauuugacugcaagauuga

SEQ ID NO: 455171 - RNA, 19 nt, Homo sapiens
  misc_RNA (1)...(19): siRNA sense strand
caaccagcccgcucaaugc

SEQ ID NO: 455172 - RNA, 19 nt, Homo sapiens
  misc_RNA (1)...(19): siRNA sense strand
aaacccuauuucucuaaga

SEQ ID NO: 455173 - RNA, 19 nt, Homo sapiens
  misc_RNA (1)...(19): siRNA sense strand
cuauuucucuaagaccauu

SEQ ID NO: 455174 - RNA, 19 nt, Homo sapiens
  misc_RNA (1)...(19): siRNA sense strand
aggaaaagccucauguaaa

SEQ ID NO: 455175 - RNA, 19 nt, Homo sapiens
  misc_RNA (1)...(19): siRNA sense strand
gggaacugcucuuuaauua

SEQ ID NO: 455176 - RNA, 19 nt, Homo sapiens
  misc_RNA (1)...(19): siRNA sense strand
ggaaaagccucauguaaaa

SEQ ID NO: 455177 - RNA, 19 nt, Homo sapiens
  misc_RNA (1)...(19): siRNA sense strand
gacgggaacugcucuuuaa

SEQ ID NO: 455178 - RNA, 19 nt, Homo sapiens
  misc_RNA (1)...(19): siRNA sense strand
gaagaugugucccaagcuu

SEQ ID NO: 455179 - RNA, 19 nt, Homo sapiens
  misc_RNA (1)...(19): siRNA sense strand
uaagaccauucgcgauuua

SEQ ID NO: 455180 - RNA, 19 nt, Homo sapiens
  misc_RNA (1)...(19): siRNA sense strand
ggacgggaacugcucuuua

SEQ ID NO: 455181 - RNA, 19 nt, Homo sapiens
  misc_RNA (1)...(19): siRNA sense strand
ggaagacuguccucuaugg

SEQ ID NO: 455182 - RNA, 19 nt, Homo sapiens
  misc_RNA (1)...(19): siRNA sense strand
ggaagaggaagaagaguga

SEQ ID NO: 455183 - RNA, 19 nt, Homo sapiens
  misc_RNA (1)...(19): siRNA sense strand
agauuugacugcaagauug

SEQ ID NO: 455184 - RNA, 19 nt, Homo sapiens
  misc_RNA (1)...(19): siRNA sense strand
ggaugacgaugccaaguac

SEQ ID NO: 455185 - RNA, 19 nt, Homo sapiens
  misc_RNA (1)...(19): siRNA sense strand
gggaugacgaugccaagua

SEQ ID NO: 455186 - RNA, 19 nt, Homo sapiens
  misc_RNA (1)...(19): siRNA sense strand
cuaagaccauucgcgauuu

SEQ ID NO: 455187 - RNA, 19 nt, Homo sapiens
  misc_RNA (1)...(19): siRNA sense strand
guaaaacccuauuucucua

SEQ ID NO: 455188 - RNA, 19 nt, Homo sapiens
  misc_RNA (1)...(19): siRNA sense strand
ggaacugcucuuuaauuau

SEQ ID NO: 455189 - RNA, 19 nt, Homo sapiens
  misc_RNA (1)...(19): siRNA sense strand
acugcaagauugaaggaua

SEQ ID NO: 455190 - RNA, 19 nt, Homo sapiens
  misc_RNA (1)...(19): siRNA sense strand
ugucaacagucuuggagaa

SEQ ID NO: 455191 - RNA, 19 nt, Homo sapiens
  misc_RNA (1)...(19): siRNA sense strand
cauucgcgauuuagaaguu

SEQ ID NO: 455192 - RNA, 19 nt, Homo sapiens
  misc_RNA (1)...(19): siRNA sense strand
ccagauagacuacgaugag

SEQ ID NO: 455193 - RNA, 19 nt, Homo sapiens
  misc_RNA (1)...(19): siRNA sense strand
ccaaccagcccgcucaaug

SEQ ID NO: 455194 - RNA, 19 nt, Homo sapiens
  misc_RNA (1)...(19): siRNA sense strand
gaccauucgcgauuuagaa

SEQ ID NO: 455195 - RNA, 19 nt, Homo sapiens
  misc_RNA (1)...(19): siRNA sense strand
uuggaagacuguccucuau

SEQ ID NO: 455196 - RNA, 19 nt, Homo sapiens
  misc_RNA (1)...(19): siRNA sense strand
ucuaagaccauucgcgauu

SEQ ID NO: 455197 - RNA, 19 nt, Homo sapiens
  misc_RNA (1)...(19): siRNA sense strand
gcugugagagccauuggaa

SEQ ID NO: 455198 - RNA, 19 nt, Homo sapiens
  misc_RNA (1)...(19): siRNA sense strand
cgggaacugcucuuuaauu

SEQ ID NO: 455199 - RNA, 19 nt, Homo sapiens
  misc_RNA (1)...(19): siRNA sense strand
ugugagagccauuggaaga

SEQ ID NO: 455200 - RNA, 19 nt, Homo sapiens
  misc_RNA (1)...(19): siRNA sense strand
uagauuugacugcaagauu

SEQ ID NO: 455201 - RNA, 19 nt, Homo sapiens
  misc_RNA (1)...(19): siRNA sense strand
ucaacagggucaccaacca

SEQ ID NO: 455202 - RNA, 19 nt, Homo sapiens
  misc_RNA (1)...(19): siRNA sense strand
gauuugacugcaagauuga

SEQ ID NO: 455203 - RNA, 19 nt, Homo sapiens
  misc_RNA (1)...(19): siRNA sense strand
caaccagcccgcucaaugc

SEQ ID NO: 455204 - RNA, 19 nt, Homo sapiens
  misc_RNA (1)...(19): siRNA sense strand
aaacccuauuucucuaaga

SEQ ID NO: 455205 - RNA, 19 nt, Homo sapiens
  misc_RNA (1)...(19): siRNA sense strand
cuauuucucuaagaccauu

SEQ ID NO: 455206 - RNA, 19 nt, Homo sapiens
  misc_RNA (1)...(19): siRNA sense strand
aggaaaagccucauguaaa

SEQ ID NO: 455207 - RNA, 19 nt, Homo sapiens
  misc_RNA (1)...(19): siRNA sense strand
gggaacugcucuuuaauua

SEQ ID NO: 455208 - RNA, 19 nt, Homo sapiens
  misc_RNA (1)...(19): siRNA sense strand
ggaaaagccucauguaaaa

SEQ ID NO: 455209 - RNA, 19 nt, Homo sapiens
  misc_RNA (1)...(19): siRNA sense strand
gacgggaacugcucuuuaa

SEQ ID NO: 455210 - RNA, 19 nt, Homo sapiens
  misc_RNA (1)...(19): siRNA sense strand
gaagaugugucccaagcuu

SEQ ID NO: 455211 - RNA, 19 nt, Homo sapiens
  misc_RNA (1)...(19): siRNA sense strand
uaagaccauucgcgauuua

SEQ ID NO: 455212 - RNA, 19 nt, Homo sapiens
  misc_RNA (1)...(19): siRNA sense strand
ggacgggaacugcucuuua

SEQ ID NO: 455213 - RNA, 19 nt, Homo sapiens
  misc_RNA (1)...(19): siRNA sense strand
ggaagacuguccucuaugg

SEQ ID NO: 455214 - RNA, 19 nt, Homo sapiens
  misc_RNA (1)...(19): siRNA sense strand
ggaagaggaagaagaguga

SEQ ID NO: 455215 - RNA, 19 nt, Homo sapiens
  misc_RNA (1)...(19): siRNA sense strand
agauuugacugcaagauug

SEQ ID NO: 455216 - RNA, 19 nt, Homo sapiens
  misc_RNA (1)...(19): siRNA sense strand
ggaugacgaugccaaguac

SEQ ID NO: 455217 - RNA, 19 nt, Homo sapiens
  misc_RNA (1)...(19): siRNA sense strand
gggaugacgaugccaagua

SEQ ID NO: 455218 - RNA, 19 nt, Homo sapiens
  misc_RNA (1)...(19): siRNA sense strand
cuaagaccauucgcgauuu

SEQ ID NO: 455219 - RNA, 19 nt, Homo sapiens
  misc_RNA (1)...(19): siRNA sense strand
guaaaacccuauuucucua

SEQ ID NO: 455220 - RNA, 19 nt, Homo sapiens
  misc_RNA (1)...(19): siRNA sense strand
ggaacugcucuuuaauuau

SEQ ID NO: 455221 - RNA, 19 nt, Homo sapiens
  misc_RNA (1)...(19): siRNA sense strand
acugcaagauugaaggaua

SEQ ID NO: 455222 - RNA, 19 nt, Homo sapiens
  misc_RNA (1)...(19): siRNA sense strand
ugucaacagucuuggagaa

SEQ ID NO: 455223 - RNA, 19 nt, Homo sapiens
  misc_RNA (1)...(19): siRNA sense strand
cauucgcgauuuagaaguu

SEQ ID NO: 455224 - RNA, 19 nt, Homo sapiens
  misc_RNA (1)...(19): siRNA sense strand
ccagauagacuacgaugag

SEQ ID NO: 455225 - RNA, 19 nt, Homo sapiens
  misc_RNA (1)...(19): siRNA sense strand
ccaaccagcccgcucaaug

SEQ ID NO: 455226 - RNA, 19 nt, Homo sapiens
  misc_RNA (1)...(19): siRNA sense strand
gaccauucgcgauuuagaa

SEQ ID NO: 455227 - RNA, 19 nt, Homo sapiens
  misc_RNA (1)...(19): siRNA sense strand
uuggaagacuguccucuau

SEQ ID NO: 455228 - RNA, 19 nt, Homo sapiens
  misc_RNA (1)...(19): siRNA sense strand
ucuaagaccauucgcgauu

SEQ ID NO: 455229 - RNA, 19 nt, Homo sapiens
  misc_RNA (1)...(19): siRNA sense strand
gcugugagagccauuggaa

SEQ ID NO: 455230 - RNA, 19 nt, Homo sapiens
  misc_RNA (1)...(19): siRNA sense strand
cgggaacugcucuuuaauu

SEQ ID NO: 455231 - RNA, 19 nt, Homo sapiens
  misc_RNA (1)...(19): siRNA sense strand
ugugagagccauuggaaga

SEQ ID NO: 455232 - RNA, 19 nt, Homo sapiens
  misc_RNA (1)...(19): siRNA sense strand
uagauuugacugcaagauu

SEQ ID NO: 455233 - RNA, 19 nt, Homo sapiens
  misc_RNA (1)...(19): siRNA sense strand
ucaacagggucaccaacca

SEQ ID NO: 455234 - RNA, 19 nt, Homo sapiens
  misc_RNA (1)...(19): siRNA sense strand
gauuugacugcaagauuga

SEQ ID NO: 455235 - RNA, 19 nt, Homo sapiens
  misc_RNA (1)...(19): siRNA sense strand
caaccagcccgcucaaugc

SEQ ID NO: 455236 - RNA, 19 nt, Homo sapiens
  misc_RNA (1)...(19): siRNA sense strand
aaacccuauuucucuaaga

SEQ ID NO: 455237 - RNA, 19 nt, Homo sapiens
  misc_RNA (1)...(19): siRNA sense strand
cuauuucucuaagaccauu

SEQ ID NO: 455238 - RNA, 19 nt, Homo sapiens
  misc_RNA (1)...(19): siRNA sense strand
aggaaaagccucauguaaa

SEQ ID NO: 455239 - RNA, 19 nt, Homo sapiens
  misc_RNA (1)...(19): siRNA sense strand
gggaacugcucuuuaauua

SEQ ID NO: 455240 - RNA, 19 nt, Homo sapiens
  misc_RNA (1)...(19): siRNA sense strand
ggaaaagccucauguaaaa

SEQ ID NO: 455241 - RNA, 19 nt, Homo sapiens
  misc_RNA (1)...(19): siRNA sense strand
gacgggaacugcucuuuaa

SEQ ID NO: 455242 - RNA, 19 nt, Homo sapiens
  misc_RNA (1)...(19): siRNA sense strand
gaagaugugucccaagcuu

SEQ ID NO: 455243 - RNA, 19 nt, Homo sapiens
  misc_RNA (1)...(19): siRNA sense strand
uaagaccauucgcgauuua

SEQ ID NO: 455244 - RNA, 19 nt, Homo sapiens
  misc_RNA (1)...(19): siRNA sense strand
ggacgggaacugcucuuua

SEQ ID NO: 455245 - RNA, 19 nt, Homo sapiens
  misc_RNA (1)...(19): siRNA sense strand
ggaagacuguccucuaugg

SEQ ID NO: 455246 - RNA, 19 nt, Homo sapiens
  misc_RNA (1)...(19): siRNA sense strand
ggaagaggaagaagaguga

SEQ ID NO: 455247 - RNA, 19 nt, Homo sapiens
  misc_RNA (1)...(19): siRNA sense strand
agauuugacugcaagauug

SEQ ID NO: 455248 - RNA, 19 nt, Homo sapiens
  misc_RNA (1)...(19): siRNA sense strand
ggaugacgaugccaaguac

SEQ ID NO: 455249 - RNA, 19 nt, Homo sapiens
  misc_RNA (1)...(19): siRNA sense strand
gggaugacgaugccaagua

SEQ ID NO: 455250 - RNA, 19 nt, Homo sapiens
  misc_RNA (1)...(19): siRNA sense strand
cuaagaccauucgcgauuu

SEQ ID NO: 455251 - RNA, 19 nt, Homo sapiens
  misc_RNA (1)...(19): siRNA sense strand
guaaaacccuauuucucua

SEQ ID NO: 455252 - RNA, 19 nt, Homo sapiens
  misc_RNA (1)...(19): siRNA sense strand
ggaacugcucuuuaauuau

SEQ ID NO: 455253 - RNA, 19 nt, Homo sapiens
  misc_RNA (1)...(19): siRNA sense strand
acugcaagauugaaggaua

SEQ ID NO: 455254 - RNA, 19 nt, Homo sapiens
  misc_RNA (1)...(19): siRNA sense strand
ugucaacagucuuggagaa

SEQ ID NO: 455255 - RNA, 19 nt, Homo sapiens
  misc_RNA (1)...(19): siRNA sense strand
cauucgcgauuuagaaguu

SEQ ID NO: 455256 - RNA, 19 nt, Homo sapiens
  misc_RNA (1)...(19): siRNA sense strand
ccagauagacuacgaugag

SEQ ID NO: 455257 - RNA, 19 nt, Homo sapiens
  misc_RNA (1)...(19): siRNA sense strand
ccaaccagcccgcucaaug

SEQ ID NO: 455258 - RNA, 19 nt, Homo sapiens
  misc_RNA (1)...(19): siRNA sense strand
gaccauucgcgauuuagaa

SEQ ID NO: 455259 - RNA, 19 nt, Homo sapiens
  misc_RNA (1)...(19): siRNA sense strand
uuggaagacuguccucuau

SEQ ID NO: 455260 - RNA, 19 nt, Homo sapiens
  misc_RNA (1)...(19): siRNA sense strand
ucuaagaccauucgcgauu

SEQ ID NO: 455261 - RNA, 19 nt, Homo sapiens
  misc_RNA (1)...(19): siRNA sense strand
gcugugagagccauuggaa

SEQ ID NO: 455262 - RNA, 19 nt, Homo sapiens
  misc_RNA (1)...(19): siRNA sense strand
cgggaacugcucuuuaauu

SEQ ID NO: 455263 - RNA, 19 nt, Homo sapiens
  misc_RNA (1)...(19): siRNA sense strand
ugugagagccauuggaaga

SEQ ID NO: 455264 - RNA, 19 nt, Homo sapiens
  misc_RNA (1)...(19): siRNA sense strand
uagauuugacugcaagauu

SEQ ID NO: 455265 - RNA, 19 nt, Homo sapiens
  misc_RNA (1)...(19): siRNA sense strand
ucaacagggucaccaacca

SEQ ID NO: 455266 - RNA, 19 nt, Homo sapiens
  misc_RNA (1)...(19): siRNA sense strand
gauuugacugcaagauuga

SEQ ID NO: 455267 - RNA, 19 nt, Homo sapiens
  misc_RNA (1)...(19): siRNA sense strand
caaccagcccgcucaaugc

SEQ ID NO: 455268 - RNA, 19 nt, Homo sapiens
  misc_RNA (1)...(19): siRNA sense strand
aaacccuauuucucuaaga

SEQ ID NO: 455269 - RNA, 19 nt, Homo sapiens
  misc_RNA (1)...(19): siRNA sense strand
cuauuucucuaagaccauu

SEQ ID NO: 455270 - RNA, 19 nt, Homo sapiens
  misc_RNA (1)...(19): siRNA sense strand
aggaaaagccucauguaaa

SEQ ID NO: 455271 - RNA, 19 nt, Homo sapiens
  misc_RNA (1)...(19): siRNA sense strand
gggaacugcucuuuaauua

SEQ ID NO: 455272 - RNA, 19 nt, Homo sapiens
  misc_RNA (1)...(19): siRNA sense strand
ggaaaagccucauguaaaa

SEQ ID NO: 455273 - RNA, 19 nt, Homo sapiens
  misc_RNA (1)...(19): siRNA sense strand
gacgggaacugcucuuuaa

SEQ ID NO: 455274 - RNA, 19 nt, Homo sapiens
  misc_RNA (1)...(19): siRNA sense strand
gaagaugugucccaagcuu

SEQ ID NO: 455275 - RNA, 19 nt, Homo sapiens
  misc_RNA (1)...(19): siRNA sense strand
uaagaccauucgcgauuua

SEQ ID NO: 455276 - RNA, 19 nt, Homo sapiens
  misc_RNA (1)...(19): siRNA sense strand
ggacgggaacugcucuuua

SEQ ID NO: 455277 - RNA, 19 nt, Homo sapiens
  misc_RNA (1)...(19): siRNA sense strand
ggaagacuguccucuaugg

SEQ ID NO: 455278 - RNA, 19 nt, Homo sapiens
  misc_RNA (1)...(19): siRNA sense strand
ggaagaggaagaagaguga

SEQ ID NO: 455279 - RNA, 19 nt, Homo sapiens
  misc_RNA (1)...(19): siRNA sense strand
agauuugacugcaagauug

SEQ ID NO: 455280 - RNA, 19 nt, Homo sapiens
  misc_RNA (1)...(19): siRNA sense strand
ggaugacgaugccaaguac

SEQ ID NO: 455281 - RNA, 19 nt, Homo sapiens
  misc_RNA (1)...(19): siRNA sense strand
gggaugacgaugccaagua

SEQ ID NO: 455282 - RNA, 19 nt, Homo sapiens
  misc_RNA (1)...(19): siRNA sense strand
cuaagaccauucgcgauuu

SEQ ID NO: 455283 - RNA, 19 nt, Homo sapiens
  misc_RNA (1)...(19): siRNA sense strand
guaaaacccuauuucucua

SEQ ID NO: 455284 - RNA, 19 nt, Homo sapiens
  misc_RNA (1)...(19): siRNA sense strand
ggaacugcucuuuaauuau

SEQ ID NO: 455285 - RNA, 19 nt, Homo sapiens
  misc_RNA (1)...(19): siRNA sense strand
acugcaagauugaaggaua

SEQ ID NO: 455286 - RNA, 19 nt, Homo sapiens
  misc_RNA (1)...(19): siRNA sense strand
ugucaacagucuuggagaa

SEQ ID NO: 455287 - RNA, 19 nt, Homo sapiens
  misc_RNA (1)...(19): siRNA sense strand
cauucgcgauuuagaaguu

SEQ ID NO: 455288 - RNA, 19 nt, Homo sapiens
  misc_RNA (1)...(19): siRNA sense strand
ccagauagacuacgaugag

SEQ ID NO: 455289 - RNA, 19 nt, Homo sapiens
  misc_RNA (1)...(19): siRNA sense strand
ccaaccagcccgcucaaug

SEQ ID NO: 455290 - RNA, 19 nt, Homo sapiens
  misc_RNA (1)...(19): siRNA sense strand
gaccauucgcgauuuagaa

SEQ ID NO: 455291 - RNA, 19 nt, Homo sapiens
  misc_RNA (1)...(19): siRNA sense strand
uuggaagacuguccucuau

SEQ ID NO: 455292 - RNA, 19 nt, Homo sapiens
  misc_RNA (1)...(19): siRNA sense strand
ucuaagaccauucgcgauu

SEQ ID NO: 455293 - RNA, 19 nt, Homo sapiens
  misc_RNA (1)...(19): siRNA sense strand
gcugugagagccauuggaa

SEQ ID NO: 455294 - RNA, 19 nt, Homo sapiens
  misc_RNA (1)...(19): siRNA sense strand
cgggaacugcucuuuaauu

SEQ ID NO: 455295 - RNA, 19 nt, Homo sapiens
  misc_RNA (1)...(19): siRNA sense strand
ugugagagccauuggaaga

SEQ ID NO: 455296 - RNA, 19 nt, Homo sapiens
  misc_RNA (1)...(19): siRNA sense strand
uagauuugacugcaagauu

SEQ ID NO: 455297 - RNA, 19 nt, Homo sapiens
  misc_RNA (1)...(19): siRNA sense strand
ucaacagggucaccaacca

SEQ ID NO: 455298 - RNA, 19 nt, Homo sapiens
  misc_RNA (1)...(19): siRNA sense strand
gauuugacugcaagauuga

SEQ ID NO: 455299 - RNA, 19 nt, Homo sapiens
  misc_RNA (1)...(19): siRNA sense strand
caaccagcccgcucaaugc

SEQ ID NO: 455300 - RNA, 19 nt, Homo sapiens
  misc_RNA (1)...(19): siRNA sense strand
aaacccuauuucucuaaga

SEQ ID NO: 455301 - RNA, 19 nt, Homo sapiens
  misc_RNA (1)...(19): siRNA sense strand
cuauuucucuaagaccauu

SEQ ID NO: 455302 - RNA, 19 nt, Homo sapiens
  misc_RNA (1)...(19): siRNA sense strand
aggaaaagccucauguaaa

SEQ ID NO: 455303 - RNA, 19 nt, Homo sapiens
  misc_RNA (1)...(19): siRNA sense strand
gggaacugcucuuuaauua

SEQ ID NO: 455304 - RNA, 19 nt, Homo sapiens
  misc_RNA (1)...(19): siRNA sense strand
ggaaaagccucauguaaaa

SEQ ID NO: 455305 - RNA, 19 nt, Homo sapiens
  misc_RNA (1)...(19): siRNA sense strand
gacgggaacugcucuuuaa

SEQ ID NO: 455306 - RNA, 19 nt, Homo sapiens
  misc_RNA (1)...(19): siRNA sense strand
gaagaugugucccaagcuu

SEQ ID NO: 455307 - RNA, 19 nt, Homo sapiens
  misc_RNA (1)...(19): siRNA sense strand
uaagaccauucgcgauuua

SEQ ID NO: 455308 - RNA, 19 nt, Homo sapiens
  misc_RNA (1)...(19): siRNA sense strand
ggacgggaacugcucuuua

SEQ ID NO: 455309 - RNA, 19 nt, Homo sapiens
  misc_RNA (1)...(19): siRNA sense strand
ggaagaggaagaagaguga

SEQ ID NO: 455310 - RNA, 19 nt, Homo sapiens
  misc_RNA (1)...(19): siRNA sense strand
agauuugacugcaagauug

SEQ ID NO: 455311 - RNA, 19 nt, Homo sapiens
  misc_RNA (1)...(19): siRNA sense strand
ggaugacgaugccaaguac

SEQ ID NO: 455312 - RNA, 19 nt, Homo sapiens
  misc_RNA (1)...(19): siRNA sense strand
gggaugacgaugccaagua

SEQ ID NO: 455313 - RNA, 19 nt, Homo sapiens
  misc_RNA (1)...(19): siRNA sense strand
cuaagaccauucgcgauuu

SEQ ID NO: 455314 - RNA, 19 nt, Homo sapiens
  misc_RNA (1)...(19): siRNA sense strand
guaaaacccuauuucucua

SEQ ID NO: 455315 - RNA, 19 nt, Homo sapiens
  misc_RNA (1)...(19): siRNA sense strand
ggaacugcucuuuaauuau

SEQ ID NO: 455316 - RNA, 19 nt, Homo sapiens
  misc_RNA (1)...(19): siRNA sense strand
acugcaagauugaaggaua

SEQ ID NO: 455317 - RNA, 19 nt, Homo sapiens
  misc_RNA (1)...(19): siRNA sense strand
ugucaacagucuuggagaa

SEQ ID NO: 455318 - RNA, 19 nt, Homo sapiens
  misc_RNA (1)...(19): siRNA sense strand
cauucgcgauuuagaaguu

SEQ ID NO: 455319 - RNA, 19 nt, Homo sapiens
  misc_RNA (1)...(19): siRNA sense strand
ccagauagacuacgaugag

SEQ ID NO: 455320 - RNA, 19 nt, Homo sapiens
  misc_RNA (1)...(19): siRNA sense strand
ccaaccagcccgcucaaug

SEQ ID NO: 455321 - RNA, 19 nt, Homo sapiens
  misc_RNA (1)...(19): siRNA sense strand
gaccauucgcgauuuagaa

SEQ ID NO: 455322 - RNA, 19 nt, Homo sapiens
  misc_RNA (1)...(19): siRNA sense strand
ucuaagaccauucgcgauu

SEQ ID NO: 455323 - RNA, 19 nt, Homo sapiens
  misc_RNA (1)...(19): siRNA sense strand
cgggaacugcucuuuaauu

SEQ ID NO: 455324 - RNA, 19 nt, Homo sapiens
  misc_RNA (1)...(19): siRNA sense strand
uagauuugacugcaagauu

SEQ ID NO: 455325 - RNA, 19 nt, Homo sapiens
  misc_RNA (1)...(19): siRNA sense strand
gauuugacugcaagauuga

SEQ ID NO: 455326 - RNA, 19 nt, Homo sapiens
  misc_RNA (1)...(19): siRNA sense strand
ucaacagggucaccaacca

SEQ ID NO: 455327 - RNA, 19 nt, Homo sapiens
  misc_RNA (1)...(19): siRNA sense strand
caaccagcccgcucaaugc

SEQ ID NO: 455328 - RNA, 19 nt, Homo sapiens
  misc_RNA (1)...(19): siRNA sense strand
aaacccuauuucucuaaga

SEQ ID NO: 455329 - RNA, 19 nt, Homo sapiens
  misc_RNA (1)...(19): siRNA sense strand
cuauuucucuaagaccauu

SEQ ID NO: 455330 - RNA, 19 nt, Homo sapiens
  misc_RNA (1)...(19): siRNA sense strand
aggaaaagccucauguaaa

SEQ ID NO: 455331 - RNA, 19 nt, Homo sapiens
  misc_RNA (1)...(19): siRNA sense strand
gggaacugcucuuuaauua

SEQ ID NO: 455332 - RNA, 19 nt, Homo sapiens
  misc_RNA (1)...(19): siRNA sense strand
ggaaaagccucauguaaaa

SEQ ID NO: 455333 - RNA, 19 nt, Homo sapiens
  misc_RNA (1)...(19): siRNA sense strand
gacgggaacugcucuuuaa

SEQ ID NO: 455334 - RNA, 19 nt, Homo sapiens
  misc_RNA (1)...(19): siRNA sense strand
gaagaugugucccaagcuu

SEQ ID NO: 455335 - RNA, 19 nt, Homo sapiens
  misc_RNA (1)...(19): siRNA sense strand
uaagaccauucgcgauuua

SEQ ID NO: 455336 - RNA, 19 nt, Homo sapiens
  misc_RNA (1)...(19): siRNA sense strand
ggacgggaacugcucuuua

SEQ ID NO: 455337 - RNA, 19 nt, Homo sapiens
  misc_RNA (1)...(19): siRNA sense strand
ggaagaggaagaagaguga

SEQ ID NO: 455338 - RNA, 19 nt, Homo sapiens
  misc_RNA (1)...(19): siRNA sense strand
agauuugacugcaagauug

SEQ ID NO: 455339 - RNA, 19 nt, Homo sapiens
  misc_RNA (1)...(19): siRNA sense strand
ggaugacgaugccaaguac

SEQ ID NO: 455340 - RNA, 19 nt, Homo sapiens
  misc_RNA (1)...(19): siRNA sense strand
gggaugacgaugccaagua

SEQ ID NO: 455341 - RNA, 19 nt, Homo sapiens
  misc_RNA (1)...(19): siRNA sense strand
cuaagaccauucgcgauuu

SEQ ID NO: 455342 - RNA, 19 nt, Homo sapiens
  misc_RNA (1)...(19): siRNA sense strand
guaaaacccuauuucucua

SEQ ID NO: 455343 - RNA, 19 nt, Homo sapiens
  misc_RNA (1)...(19): siRNA sense strand
ggaacugcucuuuaauuau

SEQ ID NO: 455344 - RNA, 19 nt, Homo sapiens
  misc_RNA (1)...(19): siRNA sense strand
acugcaagauugaaggaua

SEQ ID NO: 455345 - RNA, 19 nt, Homo sapiens
  misc_RNA (1)...(19): siRNA sense strand
ugucaacagucuuggagaa

SEQ ID NO: 455346 - RNA, 19 nt, Homo sapiens
  misc_RNA (1)...(19): siRNA sense strand
cauucgcgauuuagaaguu

SEQ ID NO: 455347 - RNA, 19 nt, Homo sapiens
  misc_RNA (1)...(19): siRNA sense strand
ccagauagacuacgaugag

SEQ ID NO: 455348 - RNA, 19 nt, Homo sapiens
  misc_RNA (1)...(19): siRNA sense strand
ccaaccagcccgcucaaug

SEQ ID NO: 455349 - RNA, 19 nt, Homo sapiens
  misc_RNA (1)...(19): siRNA sense strand
gaccauucgcgauuuagaa

SEQ ID NO: 455350 - RNA, 19 nt, Homo sapiens
  misc_RNA (1)...(19): siRNA sense strand
ucuaagaccauucgcgauu

SEQ ID NO: 455351 - RNA, 19 nt, Homo sapiens
  misc_RNA (1)...(19): siRNA sense strand
cgggaacugcucuuuaauu

SEQ ID NO: 455352 - RNA, 19 nt, Homo sapiens
  misc_RNA (1)...(19): siRNA sense strand
uagauuugacugcaagauu

SEQ ID NO: 455353 - RNA, 19 nt, Homo sapiens
  misc_RNA (1)...(19): siRNA sense strand
gauuugacugcaagauuga

SEQ ID NO: 455354 - RNA, 19 nt, Homo sapiens
  misc_RNA (1)...(19): siRNA sense strand
ucaacagggucaccaacca

SEQ ID NO: 455355 - RNA, 19 nt, Homo sapiens
  misc_RNA (1)...(19): siRNA sense strand
caaccagcccgcucaaugc

SEQ ID NO: 455356 - RNA, 19 nt, Homo sapiens
  misc_RNA (1)...(19): siRNA sense strand
aaacccuauuucucuaaga

SEQ ID NO: 455357 - RNA, 19 nt, Homo sapiens
  misc_RNA (1)...(19): siRNA sense strand
cuauuucucuaagaccauu

SEQ ID NO: 455358 - RNA, 19 nt, Homo sapiens
  misc_RNA (1)...(19): siRNA sense strand
aggaaaagccucauguaaa

SEQ ID NO: 455359 - RNA, 19 nt, Homo sapiens
  misc_RNA (1)...(19): siRNA sense strand
gggaacugcucuuuaauua

SEQ ID NO: 455360 - RNA, 19 nt, Homo sapiens
  misc_RNA (1)...(19): siRNA sense strand
ggaaaagccucauguaaaa

SEQ ID NO: 455361 - RNA, 19 nt, Homo sapiens
  misc_RNA (1)...(19): siRNA sense strand
gacgggaacugcucuuuaa

SEQ ID NO: 455362 - RNA, 19 nt, Homo sapiens
  misc_RNA (1)...(19): siRNA sense strand
gaagaugugucccaagcuu

SEQ ID NO: 455363 - RNA, 19 nt, Homo sapiens
  misc_RNA (1)...(19): siRNA sense strand
uaagaccauucgcgauuua

SEQ ID NO: 455364 - RNA, 19 nt, Homo sapiens
  misc_RNA (1)...(19): siRNA sense strand
ggacgggaacugcucuuua

SEQ ID NO: 455365 - RNA, 19 nt, Homo sapiens
  misc_RNA (1)...(19): siRNA sense strand
ggaagacuguccucuaugg

SEQ ID NO: 455366 - RNA, 19 nt, Homo sapiens
  misc_RNA (1)...(19): siRNA sense strand
ggaagaggaagaagaguga

SEQ ID NO: 455367 - RNA, 19 nt, Homo sapiens
  misc_RNA (1)...(19): siRNA sense strand
agauuugacugcaagauug

SEQ ID NO: 455368 - RNA, 19 nt, Homo sapiens
  misc_RNA (1)...(19): siRNA sense strand
ggaugacgaugccaaguac

SEQ ID NO: 455369 - RNA, 19 nt, Homo sapiens
  misc_RNA (1)...(19): siRNA sense strand
gggaugacgaugccaagua

SEQ ID NO: 455370 - RNA, 19 nt, Homo sapiens
  misc_RNA (1)...(19): siRNA sense strand
cuaagaccauucgcgauuu

SEQ ID NO: 455371 - RNA, 19 nt, Homo sapiens
  misc_RNA (1)...(19): siRNA sense strand
guaaaacccuauuucucua

SEQ ID NO: 455372 - RNA, 19 nt, Homo sapiens
  misc_RNA (1)...(19): siRNA sense strand
ggaacugcucuuuaauuau

SEQ ID NO: 455373 - RNA, 19 nt, Homo sapiens
  misc_RNA (1)...(19): siRNA sense strand
acugcaagauugaaggaua

SEQ ID NO: 455374 - RNA, 19 nt, Homo sapiens
  misc_RNA (1)...(19): siRNA sense strand
ugucaacagucuuggagaa

SEQ ID NO: 455375 - RNA, 19 nt, Homo sapiens
  misc_RNA (1)...(19): siRNA sense strand
cauucgcgauuuagaaguu

SEQ ID NO: 455376 - RNA, 19 nt, Homo sapiens
  misc_RNA (1)...(19): siRNA sense strand
ccagauagacuacgaugag

SEQ ID NO: 455377 - RNA, 19 nt, Homo sapiens
  misc_RNA (1)...(19): siRNA sense strand
ccaaccagcccgcucaaug

SEQ ID NO: 455378 - RNA, 19 nt, Homo sapiens
  misc_RNA (1)...(19): siRNA sense strand
gaccauucgcgauuuagaa

SEQ ID NO: 455379 - RNA, 19 nt, Homo sapiens
  misc_RNA (1)...(19): siRNA sense strand
uuggaagacuguccucuau

SEQ ID NO: 455380 - RNA, 19 nt, Homo sapiens
  misc_RNA (1)...(19): siRNA sense strand
ucuaagaccauucgcgauu

SEQ ID NO: 455381 - RNA, 19 nt, Homo sapiens
  misc_RNA (1)...(19): siRNA sense strand
gcugugagagccauuggaa

SEQ ID NO: 455382 - RNA, 19 nt, Homo sapiens
  misc_RNA (1)...(19): siRNA sense strand
cgggaacugcucuuuaauu

SEQ ID NO: 455383 - RNA, 19 nt, Homo sapiens
  misc_RNA (1)...(19): siRNA sense strand
ugugagagccauuggaaga

SEQ ID NO: 455384 - RNA, 19 nt, Homo sapiens
  misc_RNA (1)...(19): siRNA sense strand
uagauuugacugcaagauu

SEQ ID NO: 455385 - RNA, 19 nt, Homo sapiens
  misc_RNA (1)...(19): siRNA sense strand
ucaacagggucaccaacca

SEQ ID NO: 455386 - RNA, 19 nt, Homo sapiens
  misc_RNA (1)...(19): siRNA sense strand
gauuugacugcaagauuga

SEQ ID NO: 455387 - RNA, 19 nt, Homo sapiens
  misc_RNA (1)...(19): siRNA sense strand
caaccagcccgcucaaugc

SEQ ID NO: 455388 - RNA, 19 nt, Homo sapiens
  misc_RNA (1)...(19): siRNA sense strand
aaacccuauuucucuaaga

SEQ ID NO: 455389 - RNA, 19 nt, Homo sapiens
  misc_RNA (1)...(19): siRNA sense strand
cuauuucucuaagaccauu

SEQ ID NO: 455390 - RNA, 19 nt, Homo sapiens
  misc_RNA (1)...(19): siRNA sense strand
aggaaaagccucauguaaa

SEQ ID NO: 455391 - RNA, 19 nt, Homo sapiens
  misc_RNA (1)...(19): siRNA sense strand
gggaacugcucuuuaauua

SEQ ID NO: 455392 - RNA, 19 nt, Homo sapiens
  misc_RNA (1)...(19): siRNA sense strand
ggaaaagccucauguaaaa

SEQ ID NO: 455393 - RNA, 19 nt, Homo sapiens
  misc_RNA (1)...(19): siRNA sense strand
gacgggaacugcucuuuaa

SEQ ID NO: 455394 - RNA, 19 nt, Homo sapiens
  misc_RNA (1)...(19): siRNA sense strand
gaagaugugucccaagcuu

SEQ ID NO: 455395 - RNA, 19 nt, Homo sapiens
  misc_RNA (1)...(19): siRNA sense strand
uaagaccauucgcgauuua

SEQ ID NO: 455396 - RNA, 19 nt, Homo sapiens
  misc_RNA (1)...(19): siRNA sense strand
ggacgggaacugcucuuua

SEQ ID NO: 455397 - RNA, 19 nt, Homo sapiens
  misc_RNA (1)...(19): siRNA sense strand
ggaagacuguccucuaugg

SEQ ID NO: 455398 - RNA, 19 nt, Homo sapiens
  misc_RNA (1)...(19): siRNA sense strand
ggaagaggaagaagaguga

SEQ ID NO: 455399 - RNA, 19 nt, Homo sapiens
  misc_RNA (1)...(19): siRNA sense strand
agauuugacugcaagauug

SEQ ID NO: 455400 - RNA, 19 nt, Homo sapiens
  misc_RNA (1)...(19): siRNA sense strand
ggaugacgaugccaaguac

SEQ ID NO: 455401 - RNA, 19 nt, Homo sapiens
  misc_RNA (1)...(19): siRNA sense strand
gggaugacgaugccaagua

SEQ ID NO: 455402 - RNA, 19 nt, Homo sapiens
  misc_RNA (1)...(19): siRNA sense strand
cuaagaccauucgcgauuu

SEQ ID NO: 455403 - RNA, 19 nt, Homo sapiens
  misc_RNA (1)...(19): siRNA sense strand
guaaaacccuauuucucua

SEQ ID NO: 455404 - RNA, 19 nt, Homo sapiens
  misc_RNA (1)...(19): siRNA sense strand
ggaacugcucuuuaauuau

SEQ ID NO: 455405 - RNA, 19 nt, Homo sapiens
  misc_RNA (1)...(19): siRNA sense strand
acugcaagauugaaggaua

SEQ ID NO: 455406 - RNA, 19 nt, Homo sapiens
  misc_RNA (1)...(19): siRNA sense strand
ugucaacagucuuggagaa

SEQ ID NO: 455407 - RNA, 19 nt, Homo sapiens
  misc_RNA (1)...(19): siRNA sense strand
cauucgcgauuuagaaguu

SEQ ID NO: 455408 - RNA, 19 nt, Homo sapiens
  misc_RNA (1)...(19): siRNA sense strand
ccagauagacuacgaugag

SEQ ID NO: 455409 - RNA, 19 nt, Homo sapiens
  misc_RNA (1)...(19): siRNA sense strand
ccaaccagcccgcucaaug

SEQ ID NO: 455410 - RNA, 19 nt, Homo sapiens
  misc_RNA (1)...(19): siRNA sense strand
gaccauucgcgauuuagaa

SEQ ID NO: 455411 - RNA, 19 nt, Homo sapiens
  misc_RNA (1)...(19): siRNA sense strand
uuggaagacuguccucuau

SEQ ID NO: 455412 - RNA, 19 nt, Homo sapiens
  misc_RNA (1)...(19): siRNA sense strand
ucuaagaccauucgcgauu

SEQ ID NO: 455413 - RNA, 19 nt, Homo sapiens
  misc_RNA (1)...(19): siRNA sense strand
gcugugagagccauuggaa

SEQ ID NO: 455414 - RNA, 19 nt, Homo sapiens
  misc_RNA (1)...(19): siRNA sense strand
cgggaacugcucuuuaauu

SEQ ID NO: 455415 - RNA, 19 nt, Homo sapiens
  misc_RNA (1)...(19): siRNA sense strand
ugugagagccauuggaaga

SEQ ID NO: 455416 - RNA, 19 nt, Homo sapiens
  misc_RNA (1)...(19): siRNA sense strand
uagauuugacugcaagauu

SEQ ID NO: 455417 - RNA, 19 nt, Homo sapiens
  misc_RNA (1)...(19): siRNA sense strand
ucaacagggucaccaacca

SEQ ID NO: 455418 - RNA, 19 nt, Homo sapiens
  misc_RNA (1)...(19): siRNA sense strand
gauuugacugcaagauuga

SEQ ID NO: 455419 - RNA, 19 nt, Homo sapiens
  misc_RNA (1)...(19): siRNA sense strand
caaccagcccgcucaaugc

SEQ ID NO: 455420 - RNA, 19 nt, Homo sapiens
  misc_RNA (1)...(19): siRNA sense strand
aaacccuauuucucuaaga

SEQ ID NO: 455421 - RNA, 19 nt, Homo sapiens
  misc_RNA (1)...(19): siRNA sense strand
cuauuucucuaagaccauu

SEQ ID NO: 455422 - RNA, 19 nt, Homo sapiens
  misc_RNA (1)...(19): siRNA sense strand
aggaaaagccucauguaaa

SEQ ID NO: 455423 - RNA, 19 nt, Homo sapiens
  misc_RNA (1)...(19): siRNA sense strand
gggaacugcucuuuaauua

SEQ ID NO: 455424 - RNA, 19 nt, Homo sapiens
  misc_RNA (1)...(19): siRNA sense strand
ggaaaagccucauguaaaa

SEQ ID NO: 455425 - RNA, 19 nt, Homo sapiens
  misc_RNA (1)...(19): siRNA sense strand
gacgggaacugcucuuuaa

SEQ ID NO: 455426 - RNA, 19 nt, Homo sapiens
  misc_RNA (1)...(19): siRNA sense strand
gaagaugugucccaagcuu

SEQ ID NO: 455427 - RNA, 19 nt, Homo sapiens
  misc_RNA (1)...(19): siRNA sense strand
uaagaccauucgcgauuua

SEQ ID NO: 455428 - RNA, 19 nt, Homo sapiens
  misc_RNA (1)...(19): siRNA sense strand
ggacgggaacugcucuuua

SEQ ID NO: 455429 - RNA, 19 nt, Homo sapiens
  misc_RNA (1)...(19): siRNA sense strand
ggaagacuguccucuaugg

SEQ ID NO: 455430 - RNA, 19 nt, Homo sapiens
  misc_RNA (1)...(19): siRNA sense strand
ggaagaggaagaagaguga

SEQ ID NO: 455431 - RNA, 19 nt, Homo sapiens
  misc_RNA (1)...(19): siRNA sense strand
agauuugacugcaagauug

SEQ ID NO: 455432 - RNA, 19 nt, Homo sapiens
  misc_RNA (1)...(19): siRNA sense strand
ggaugacgaugccaaguac

SEQ ID NO: 455433 - RNA, 19 nt, Homo sapiens
  misc_RNA (1)...(19): siRNA sense strand
gggaugacgaugccaagua

SEQ ID NO: 455434 - RNA, 19 nt, Homo sapiens
  misc_RNA (1)...(19): siRNA sense strand
cuaagaccauucgcgauuu

SEQ ID NO: 455435 - RNA, 19 nt, Homo sapiens
  misc_RNA (1)...(19): siRNA sense strand
guaaaacccuauuucucua

SEQ ID NO: 455436 - RNA, 19 nt, Homo sapiens
  misc_RNA (1)...(19): siRNA sense strand
ggaacugcucuuuaauuau

SEQ ID NO: 455437 - RNA, 19 nt, Homo sapiens
  misc_RNA (1)...(19): siRNA sense strand
acugcaagauugaaggaua

SEQ ID NO: 455438 - RNA, 19 nt, Homo sapiens
  misc_RNA (1)...(19): siRNA sense strand
ugucaacagucuuggagaa

SEQ ID NO: 455439 - RNA, 19 nt, Homo sapiens
  misc_RNA (1)...(19): siRNA sense strand
cauucgcgauuuagaaguu

SEQ ID NO: 455440 - RNA, 19 nt, Homo sapiens
  misc_RNA (1)...(19): siRNA sense strand
ccagauagacuacgaugag

SEQ ID NO: 455441 - RNA, 19 nt, Homo sapiens
  misc_RNA (1)...(19): siRNA sense strand
ccaaccagcccgcucaaug

SEQ ID NO: 455442 - RNA, 19 nt, Homo sapiens
  misc_RNA (1)...(19): siRNA sense strand
gaccauucgcgauuuagaa

SEQ ID NO: 455443 - RNA, 19 nt, Homo sapiens
  misc_RNA (1)...(19): siRNA sense strand
uuggaagacuguccucuau

SEQ ID NO: 455444 - RNA, 19 nt, Homo sapiens
  misc_RNA (1)...(19): siRNA sense strand
ucuaagaccauucgcgauu

SEQ ID NO: 455445 - RNA, 19 nt, Homo sapiens
  misc_RNA (1)...(19): siRNA sense strand
gcugugagagccauuggaa

SEQ ID NO: 455446 - RNA, 19 nt, Homo sapiens
  misc_RNA (1)...(19): siRNA sense strand
cgggaacugcucuuuaauu

SEQ ID NO: 455447 - RNA, 19 nt, Homo sapiens
  misc_RNA (1)...(19): siRNA sense strand
ugugagagccauuggaaga

SEQ ID NO: 455448 - RNA, 19 nt, Homo sapiens
  misc_RNA (1)...(19): siRNA sense strand
uagauuugacugcaagauu

SEQ ID NO: 455449 - RNA, 19 nt, Homo sapiens
  misc_RNA (1)...(19): siRNA sense strand
ucaacagggucaccaacca

SEQ ID NO: 455450 - RNA, 19 nt, Homo sapiens
  misc_RNA (1)...(19): siRNA sense strand
gauuugacugcaagauuga

SEQ ID NO: 455451 - RNA, 19 nt, Homo sapiens
  misc_RNA (1)...(19): siRNA sense strand
caaccagcccgcucaaugc

SEQ ID NO: 455452 - RNA, 19 nt, Homo sapiens
  misc_RNA (1)...(19): siRNA sense strand
aaacccuauuucucuaaga

SEQ ID NO: 455453 - RNA, 19 nt, Homo sapiens
  misc_RNA (1)...(19): siRNA sense strand
cuauuucucuaagaccauu

SEQ ID NO: 455454 - RNA, 19 nt, Homo sapiens
  misc_RNA (1)...(19): siRNA sense strand
aggaaaagccucauguaaa

SEQ ID NO: 455455 - RNA, 19 nt, Homo sapiens
  misc_RNA (1)...(19): siRNA sense strand
gggaacugcucuuuaauua

SEQ ID NO: 455456 - RNA, 19 nt, Homo sapiens
  misc_RNA (1)...(19): siRNA sense strand
ggaaaagccucauguaaaa

SEQ ID NO: 455457 - RNA, 19 nt, Homo sapiens
  misc_RNA (1)...(19): siRNA sense strand
gacgggaacugcucuuuaa

SEQ ID NO: 455458 - RNA, 19 nt, Homo sapiens
  misc_RNA (1)...(19): siRNA sense strand
gaagaugugucccaagcuu

SEQ ID NO: 455459 - RNA, 19 nt, Homo sapiens
  misc_RNA (1)...(19): siRNA sense strand
uaagaccauucgcgauuua

SEQ ID NO: 455460 - RNA, 19 nt, Homo sapiens
  misc_RNA (1)...(19): siRNA sense strand
ggacgggaacugcucuuua

SEQ ID NO: 455461 - RNA, 19 nt, Homo sapiens
  misc_RNA (1)...(19): siRNA sense strand
ggaagacuguccucuaugg

SEQ ID NO: 455462 - RNA, 19 nt, Homo sapiens
  misc_RNA (1)...(19): siRNA sense strand
ggaagaggaagaagaguga

SEQ ID NO: 455463 - RNA, 19 nt, Homo sapiens
  misc_RNA (1)...(19): siRNA sense strand
agauuugacugcaagauug

SEQ ID NO: 455464 - RNA, 19 nt, Homo sapiens
  misc_RNA (1)...(19): siRNA sense strand
ggaugacgaugccaaguac

SEQ ID NO: 455465 - RNA, 19 nt, Homo sapiens
  misc_RNA (1)...(19): siRNA sense strand
gggaugacgaugccaagua

SEQ ID NO: 455466 - RNA, 19 nt, Homo sapiens
  misc_RNA (1)...(19): siRNA sense strand
cuaagaccauucgcgauuu

SEQ ID NO: 455467 - RNA, 19 nt, Homo sapiens
  misc_RNA (1)...(19): siRNA sense strand
guaaaacccuauuucucua

SEQ ID NO: 455468 - RNA, 19 nt, Homo sapiens
  misc_RNA (1)...(19): siRNA sense strand
ggaacugcucuuuaauuau

SEQ ID NO: 455469 - RNA, 19 nt, Homo sapiens
  misc_RNA (1)...(19): siRNA sense strand
acugcaagauugaaggaua

SEQ ID NO: 455470 - RNA, 19 nt, Homo sapiens
  misc_RNA (1)...(19): siRNA sense strand
ugucaacagucuuggagaa

SEQ ID NO: 455471 - RNA, 19 nt, Homo sapiens
  misc_RNA (1)...(19): siRNA sense strand
cauucgcgauuuagaaguu

SEQ ID NO: 455472 - RNA, 19 nt, Homo sapiens
  misc_RNA (1)...(19): siRNA sense strand
ccagauagacuacgaugag

SEQ ID NO: 455473 - RNA, 19 nt, Homo sapiens
  misc_RNA (1)...(19): siRNA sense strand
ccaaccagcccgcucaaug

SEQ ID NO: 455474 - RNA, 19 nt, Homo sapiens
  misc_RNA (1)...(19): siRNA sense strand
gaccauucgcgauuuagaa

SEQ ID NO: 455475 - RNA, 19 nt, Homo sapiens
  misc_RNA (1)...(19): siRNA sense strand
uuggaagacuguccucuau

SEQ ID NO: 455476 - RNA, 19 nt, Homo sapiens
  misc_RNA (1)...(19): siRNA sense strand
ucuaagaccauucgcgauu

SEQ ID NO: 455477 - RNA, 19 nt, Homo sapiens
  misc_RNA (1)...(19): siRNA sense strand
gcugugagagccauuggaa

SEQ ID NO: 455478 - RNA, 19 nt, Homo sapiens
  misc_RNA (1)...(19): siRNA sense strand
cgggaacugcucuuuaauu

SEQ ID NO: 455479 - RNA, 19 nt, Homo sapiens
  misc_RNA (1)...(19): siRNA sense strand
ugugagagccauuggaaga

SEQ ID NO: 455480 - RNA, 19 nt, Homo sapiens
  misc_RNA (1)...(19): siRNA sense strand
uagauuugacugcaagauu

SEQ ID NO: 455481 - RNA, 19 nt, Homo sapiens
  misc_RNA (1)...(19): siRNA sense strand
ucaacagggucaccaacca

SEQ ID NO: 455482 - RNA, 19 nt, Homo sapiens
  misc_RNA (1)...(19): siRNA sense strand
gauuugacugcaagauuga

SEQ ID NO: 455483 - RNA, 19 nt, Homo sapiens
  misc_RNA (1)...(19): siRNA sense strand
caaccagcccgcucaaugc

SEQ ID NO: 455484 - RNA, 19 nt, Homo sapiens
  misc_RNA (1)...(19): siRNA sense strand
aaacccuauuucucuaaga

SEQ ID NO: 455485 - RNA, 19 nt, Homo sapiens
  misc_RNA (1)...(19): siRNA sense strand
cuauuucucuaagaccauu

SEQ ID NO: 455486 - RNA, 19 nt, Homo sapiens
  misc_RNA (1)...(19): siRNA sense strand
aggaaaagccucauguaaa

SEQ ID NO: 455487 - RNA, 19 nt, Homo sapiens
  misc_RNA (1)...(19): siRNA sense strand
gggaacugcucuuuaauua

SEQ ID NO: 455488 - RNA, 19 nt, Homo sapiens
  misc_RNA (1)...(19): siRNA sense strand
ggaaaagccucauguaaaa

SEQ ID NO: 455489 - RNA, 19 nt, Homo sapiens
  misc_RNA (1)...(19): siRNA sense strand
gacgggaacugcucuuuaa

SEQ ID NO: 455490 - RNA, 19 nt, Homo sapiens
  misc_RNA (1)...(19): siRNA sense strand
gaagaugugucccaagcuu

SEQ ID NO: 455491 - RNA, 19 nt, Homo sapiens
  misc_RNA (1)...(19): siRNA sense strand
uaagaccauucgcgauuua

SEQ ID NO: 455492 - RNA, 19 nt, Homo sapiens
  misc_RNA (1)...(19): siRNA sense strand
ggacgggaacugcucuuua

SEQ ID NO: 455493 - RNA, 19 nt, Homo sapiens
  misc_RNA (1)...(19): siRNA sense strand
ggaagacuguccucuaugg

SEQ ID NO: 455494 - RNA, 19 nt, Homo sapiens
  misc_RNA (1)...(19): siRNA sense strand
ggaagaggaagaagaguga

SEQ ID NO: 455495 - RNA, 19 nt, Homo sapiens
  misc_RNA (1)...(19): siRNA sense strand
agauuugacugcaagauug

SEQ ID NO: 455496 - RNA, 19 nt, Homo sapiens
  misc_RNA (1)...(19): siRNA sense strand
ggaugacgaugccaaguac

SEQ ID NO: 455497 - RNA, 19 nt, Homo sapiens
  misc_RNA (1)...(19): siRNA sense strand
gggaugacgaugccaagua

SEQ ID NO: 455498 - RNA, 19 nt, Homo sapiens
  misc_RNA (1)...(19): siRNA sense strand
cuaagaccauucgcgauuu

SEQ ID NO: 455499 - RNA, 19 nt, Homo sapiens
  misc_RNA (1)...(19): siRNA sense strand
guaaaacccuauuucucua

SEQ ID NO: 455500 - RNA, 19 nt, Homo sapiens
  misc_RNA (1)...(19): siRNA sense strand
ggaacugcucuuuaauuau

SEQ ID NO: 455501 - RNA, 19 nt, Homo sapiens
  misc_RNA (1)...(19): siRNA sense strand
acugcaagauugaaggaua

SEQ ID NO: 455502 - RNA, 19 nt, Homo sapiens
  misc_RNA (1)...(19): siRNA sense strand
ugucaacagucuuggagaa

SEQ ID NO: 455503 - RNA, 19 nt, Homo sapiens
  misc_RNA (1)...(19): siRNA sense strand
cauucgcgauuuagaaguu

SEQ ID NO: 455504 - RNA, 19 nt, Homo sapiens
  misc_RNA (1)...(19): siRNA sense strand
ccagauagacuacgaugag

SEQ ID NO: 455505 - RNA, 19 nt, Homo sapiens
  misc_RNA (1)...(19): siRNA sense strand
ccaaccagcccgcucaaug

SEQ ID NO: 455506 - RNA, 19 nt, Homo sapiens
  misc_RNA (1)...(19): siRNA sense strand
gaccauucgcgauuuagaa

SEQ ID NO: 455507 - RNA, 19 nt, Homo sapiens
  misc_RNA (1)...(19): siRNA sense strand
uuggaagacuguccucuau

SEQ ID NO: 455508 - RNA, 19 nt, Homo sapiens
  misc_RNA (1)...(19): siRNA sense strand
ucuaagaccauucgcgauu

SEQ ID NO: 455509 - RNA, 19 nt, Homo sapiens
  misc_RNA (1)...(19): siRNA sense strand
gcugugagagccauuggaa

SEQ ID NO: 455510 - RNA, 19 nt, Homo sapiens
  misc_RNA (1)...(19): siRNA sense strand
cgggaacugcucuuuaauu

SEQ ID NO: 455511 - RNA, 19 nt, Homo sapiens
  misc_RNA (1)...(19): siRNA sense strand
ugugagagccauuggaaga

SEQ ID NO: 455512 - RNA, 19 nt, Homo sapiens
  misc_RNA (1)...(19): siRNA sense strand
uagauuugacugcaagauu

SEQ ID NO: 455513 - RNA, 19 nt, Homo sapiens
  misc_RNA (1)...(19): siRNA sense strand
ucaacagggucaccaacca

SEQ ID NO: 455514 - RNA, 19 nt, Homo sapiens
  misc_RNA (1)...(19): siRNA sense strand
gauuugacugcaagauuga

SEQ ID NO: 455515 - RNA, 19 nt, Homo sapiens
  misc_RNA (1)...(19): siRNA sense strand
caaccagcccgcucaaugc

SEQ ID NO: 455516 - RNA, 19 nt, Homo sapiens
  misc_RNA (1)...(19): siRNA sense strand
aaacccuauuucucuaaga

SEQ ID NO: 455517 - RNA, 19 nt, Homo sapiens
  misc_RNA (1)...(19): siRNA sense strand
cuauuucucuaagaccauu

SEQ ID NO: 455518 - RNA, 19 nt, Homo sapiens
  misc_RNA (1)...(19): siRNA sense strand
aggaaaagccucauguaaa

SEQ ID NO: 455519 - RNA, 19 nt, Homo sapiens
  misc_RNA (1)...(19): siRNA sense strand
gggaacugcucuuuaauua

SEQ ID NO: 455520 - RNA, 19 nt, Homo sapiens
  misc_RNA (1)...(19): siRNA sense strand
ggaaaagccucauguaaaa

SEQ ID NO: 455521 - RNA, 19 nt, Homo sapiens
  misc_RNA (1)...(19): siRNA sense strand
gacgggaacugcucuuuaa

SEQ ID NO: 455522 - RNA, 19 nt, Homo sapiens
  misc_RNA (1)...(19): siRNA sense strand
gaagaugugucccaagcuu

SEQ ID NO: 455523 - RNA, 19 nt, Homo sapiens
  misc_RNA (1)...(19): siRNA sense strand
uaagaccauucgcgauuua

SEQ ID NO: 455524 - RNA, 19 nt, Homo sapiens
  misc_RNA (1)...(19): siRNA sense strand
ggacgggaacugcucuuua

SEQ ID NO: 455525 - RNA, 19 nt, Homo sapiens
  misc_RNA (1)...(19): siRNA sense strand
ggaagacuguccucuaugg

SEQ ID NO: 455526 - RNA, 19 nt, Homo sapiens
  misc_RNA (1)...(19): siRNA sense strand
ggaagaggaagaagaguga

SEQ ID NO: 455527 - RNA, 19 nt, Homo sapiens
  misc_RNA (1)...(19): siRNA sense strand
agauuugacugcaagauug

SEQ ID NO: 455528 - RNA, 19 nt, Homo sapiens
  misc_RNA (1)...(19): siRNA sense strand
ggaugacgaugccaaguac

SEQ ID NO: 455529 - RNA, 19 nt, Homo sapiens
  misc_RNA (1)...(19): siRNA sense strand
gggaugacgaugccaagua

SEQ ID NO: 455530 - RNA, 19 nt, Homo sapiens
  misc_RNA (1)...(19): siRNA sense strand
cuaagaccauucgcgauuu

SEQ ID NO: 455531 - RNA, 19 nt, Homo sapiens
  misc_RNA (1)...(19): siRNA sense strand
guaaaacccuauuucucua

SEQ ID NO: 455532 - RNA, 19 nt, Homo sapiens
  misc_RNA (1)...(19): siRNA sense strand
ggaacugcucuuuaauuau

SEQ ID NO: 455533 - RNA, 19 nt, Homo sapiens
  misc_RNA (1)...(19): siRNA sense strand
acugcaagauugaaggaua

SEQ ID NO: 455534 - RNA, 19 nt, Homo sapiens
  misc_RNA (1)...(19): siRNA sense strand
ugucaacagucuuggagaa

SEQ ID NO: 455535 - RNA, 19 nt, Homo sapiens
  misc_RNA (1)...(19): siRNA sense strand
cauucgcgauuuagaaguu

SEQ ID NO: 455536 - RNA, 19 nt, Homo sapiens
  misc_RNA (1)...(19): siRNA sense strand
ccagauagacuacgaugag

SEQ ID NO: 455537 - RNA, 19 nt, Homo sapiens
  misc_RNA (1)...(19): siRNA sense strand
ccaaccagcccgcucaaug

SEQ ID NO: 455538 - RNA, 19 nt, Homo sapiens
  misc_RNA (1)...(19): siRNA sense strand
gaccauucgcgauuuagaa

SEQ ID NO: 455539 - RNA, 19 nt, Homo sapiens
  misc_RNA (1)...(19): siRNA sense strand
uuggaagacuguccucuau

SEQ ID NO: 455540 - RNA, 19 nt, Homo sapiens
  misc_RNA (1)...(19): siRNA sense strand
ucuaagaccauucgcgauu

SEQ ID NO: 455541 - RNA, 19 nt, Homo sapiens
  misc_RNA (1)...(19): siRNA sense strand
gcugugagagccauuggaa

SEQ ID NO: 455542 - RNA, 19 nt, Homo sapiens
  misc_RNA (1)...(19): siRNA sense strand
cgggaacugcucuuuaauu

SEQ ID NO: 455543 - RNA, 19 nt, Homo sapiens
  misc_RNA (1)...(19): siRNA sense strand
ugugagagccauuggaaga

SEQ ID NO: 455544 - RNA, 19 nt, Homo sapiens
  misc_RNA (1)...(19): siRNA sense strand
uagauuugacugcaagauu

SEQ ID NO: 455545 - RNA, 19 nt, Homo sapiens
  misc_RNA (1)...(19): siRNA sense strand
ucaacagggucaccaacca

SEQ ID NO: 455546 - RNA, 19 nt, Homo sapiens
  misc_RNA (1)...(19): siRNA sense strand
gauuugacugcaagauuga

SEQ ID NO: 455547 - RNA, 19 nt, Homo sapiens
  misc_RNA (1)...(19): siRNA sense strand
caaccagcccgcucaaugc

SEQ ID NO: 455548 - RNA, 19 nt, Homo sapiens
  misc_RNA (1)...(19): siRNA sense strand
aaacccuauuucucuaaga

SEQ ID NO: 455549 - RNA, 19 nt, Homo sapiens
  misc_RNA (1)...(19): siRNA sense strand
cuauuucucuaagaccauu

SEQ ID NO: 455550 - RNA, 19 nt, Homo sapiens
  misc_RNA (1)...(19): siRNA sense strand
aggaaaagccucauguaaa

SEQ ID NO: 455551 - RNA, 19 nt, Homo sapiens
  misc_RNA (1)...(19): siRNA sense strand
gggaacugcucuuuaauua

SEQ ID NO: 455552 - RNA, 19 nt, Homo sapiens
  misc_RNA (1)...(19): siRNA sense strand
ggaaaagccucauguaaaa

SEQ ID NO: 455553 - RNA, 19 nt, Homo sapiens
  misc_RNA (1)...(19): siRNA sense strand
gacgggaacugcucuuuaa

SEQ ID NO: 455554 - RNA, 19 nt, Homo sapiens
  misc_RNA (1)...(19): siRNA sense strand
gaagaugugucccaagcuu

SEQ ID NO: 455555 - RNA, 19 nt, Homo sapiens
  misc_RNA (1)...(19): siRNA sense strand
uaagaccauucgcgauuua

SEQ ID NO: 455556 - RNA, 19 nt, Homo sapiens
  misc_RNA (1)...(19): siRNA sense strand
ggacgggaacugcucuuua

SEQ ID NO: 455557 - RNA, 19 nt, Homo sapiens
  misc_RNA (1)...(19): siRNA sense strand
ggaagacuguccucuaugg

SEQ ID NO: 455558 - RNA, 19 nt, Homo sapiens
  misc_RNA (1)...(19): siRNA sense strand
ggaagaggaagaagaguga

SEQ ID NO: 455559 - RNA, 19 nt, Homo sapiens
  misc_RNA (1)...(19): siRNA sense strand
agauuugacugcaagauug

SEQ ID NO: 455560 - RNA, 19 nt, Homo sapiens
  misc_RNA (1)...(19): siRNA sense strand
ggaugacgaugccaaguac

SEQ ID NO: 455561 - RNA, 19 nt, Homo sapiens
  misc_RNA (1)...(19): siRNA sense strand
gggaugacgaugccaagua

SEQ ID NO: 455562 - RNA, 19 nt, Homo sapiens
  misc_RNA (1)...(19): siRNA sense strand
cuaagaccauucgcgauuu

SEQ ID NO: 455563 - RNA, 19 nt, Homo sapiens
  misc_RNA (1)...(19): siRNA sense strand
guaaaacccuauuucucua

SEQ ID NO: 455564 - RNA, 19 nt, Homo sapiens
  misc_RNA (1)...(19): siRNA sense strand
ggaacugcucuuuaauuau

SEQ ID NO: 455565 - RNA, 19 nt, Homo sapiens
  misc_RNA (1)...(19): siRNA sense strand
acugcaagauugaaggaua

SEQ ID NO: 455566 - RNA, 19 nt, Homo sapiens
  misc_RNA (1)...(19): siRNA sense strand
ugucaacagucuuggagaa

SEQ ID NO: 455567 - RNA, 19 nt, Homo sapiens
  misc_RNA (1)...(19): siRNA sense strand
cauucgcgauuuagaaguu

SEQ ID NO: 455568 - RNA, 19 nt, Homo sapiens
  misc_RNA (1)...(19): siRNA sense strand
ccagauagacuacgaugag

SEQ ID NO: 455569 - RNA, 19 nt, Homo sapiens
  misc_RNA (1)...(19): siRNA sense strand
ccaaccagcccgcucaaug

SEQ ID NO: 455570 - RNA, 19 nt, Homo sapiens
  misc_RNA (1)...(19): siRNA sense strand
gaccauucgcgauuuagaa

SEQ ID NO: 455571 - RNA, 19 nt, Homo sapiens
  misc_RNA (1)...(19): siRNA sense strand
uuggaagacuguccucuau

SEQ ID NO: 455572 - RNA, 19 nt, Homo sapiens
  misc_RNA (1)...(19): siRNA sense strand
ucuaagaccauucgcgauu

SEQ ID NO: 455573 - RNA, 19 nt, Homo sapiens
  misc_RNA (1)...(19): siRNA sense strand
gcugugagagccauuggaa

SEQ ID NO: 455574 - RNA, 19 nt, Homo sapiens
  misc_RNA (1)...(19): siRNA sense strand
cgggaacugcucuuuaauu

SEQ ID NO: 455575 - RNA, 19 nt, Homo sapiens
  misc_RNA (1)...(19): siRNA sense strand
ugugagagccauuggaaga

SEQ ID NO: 455576 - RNA, 19 nt, Homo sapiens
  misc_RNA (1)...(19): siRNA sense strand
uagauuugacugcaagauu

SEQ ID NO: 455577 - RNA, 19 nt, Homo sapiens
  misc_RNA (1)...(19): siRNA sense strand
ucaacagggucaccaacca

SEQ ID NO: 455578 - RNA, 19 nt, Homo sapiens
  misc_RNA (1)...(19): siRNA sense strand
gauuugacugcaagauuga

SEQ ID NO: 455579 - RNA, 19 nt, Homo sapiens
  misc_RNA (1)...(19): siRNA sense strand
caaccagcccgcucaaugc

SEQ ID NO: 455580 - RNA, 19 nt, Homo sapiens
  misc_RNA (1)...(19): siRNA sense strand
aaacccuauuucucuaaga

SEQ ID NO: 455581 - RNA, 19 nt, Homo sapiens
  misc_RNA (1)...(19): siRNA sense strand
cuauuucucuaagaccauu

SEQ ID NO: 455582 - RNA, 19 nt, Homo sapiens
  misc_RNA (1)...(19): siRNA sense strand
aggaaaagccucauguaaa

SEQ ID NO: 455583 - RNA, 19 nt, Homo sapiens
  misc_RNA (1)...(19): siRNA sense strand
gggaacugcucuuuaauua

SEQ ID NO: 455584 - RNA, 19 nt, Homo sapiens
  misc_RNA (1)...(19): siRNA sense strand
ggaaaagccucauguaaaa

SEQ ID NO: 455585 - RNA, 19 nt, Homo sapiens
  misc_RNA (1)...(19): siRNA sense strand
gacgggaacugcucuuuaa

SEQ ID NO: 455586 - RNA, 19 nt, Homo sapiens
  misc_RNA (1)...(19): siRNA sense strand
gaagaugugucccaagcuu

SEQ ID NO: 455587 - RNA, 19 nt, Homo sapiens
  misc_RNA (1)...(19): siRNA sense strand
uaagaccauucgcgauuua

SEQ ID NO: 455588 - RNA, 19 nt, Homo sapiens
  misc_RNA (1)...(19): siRNA sense strand
ggacgggaacugcucuuua

SEQ ID NO: 455589 - RNA, 19 nt, Homo sapiens
  misc_RNA (1)...(19): siRNA sense strand
ggaagaggaagaagaguga

SEQ ID NO: 455590 - RNA, 19 nt, Homo sapiens
  misc_RNA (1)...(19): siRNA sense strand
agauuugacugcaagauug

SEQ ID NO: 455591 - RNA, 19 nt, Homo sapiens
  misc_RNA (1)...(19): siRNA sense strand
ggaugacgaugccaaguac

SEQ ID NO: 455592 - RNA, 19 nt, Homo sapiens
  misc_RNA (1)...(19): siRNA sense strand
gggaugacgaugccaagua

SEQ ID NO: 455593 - RNA, 19 nt, Homo sapiens
  misc_RNA (1)...(19): siRNA sense strand
cuaagaccauucgcgauuu

SEQ ID NO: 455594 - RNA, 19 nt, Homo sapiens
  misc_RNA (1)...(19): siRNA sense strand
guaaaacccuauuucucua

SEQ ID NO: 455595 - RNA, 19 nt, Homo sapiens
  misc_RNA (1)...(19): siRNA sense strand
ggaacugcucuuuaauuau

SEQ ID NO: 455596 - RNA, 19 nt, Homo sapiens
  misc_RNA (1)...(19): siRNA sense strand
acugcaagauugaaggaua

SEQ ID NO: 455597 - RNA, 19 nt, Homo sapiens
  misc_RNA (1)...(19): siRNA sense strand
ugucaacagucuuggagaa

SEQ ID NO: 455598 - RNA, 19 nt, Homo sapiens
  misc_RNA (1)...(19): siRNA sense strand
cauucgcgauuuagaaguu

SEQ ID NO: 455599 - RNA, 19 nt, Homo sapiens
  misc_RNA (1)...(19): siRNA sense strand
ccagauagacuacgaugag

SEQ ID NO: 455600 - RNA, 19 nt, Homo sapiens
  misc_RNA (1)...(19): siRNA sense strand
ccaaccagcccgcucaaug

SEQ ID NO: 455601 - RNA, 19 nt, Homo sapiens
  misc_RNA (1)...(19): siRNA sense strand
gaccauucgcgauuuagaa

SEQ ID NO: 455602 - RNA, 19 nt, Homo sapiens
  misc_RNA (1)...(19): siRNA sense strand
ucuaagaccauucgcgauu

SEQ ID NO: 455603 - RNA, 19 nt, Homo sapiens
  misc_RNA (1)...(19): siRNA sense strand
cgggaacugcucuuuaauu

SEQ ID NO: 455604 - RNA, 19 nt, Homo sapiens
  misc_RNA (1)...(19): siRNA sense strand
uagauuugacugcaagauu

SEQ ID NO: 455605 - RNA, 19 nt, Homo sapiens
  misc_RNA (1)...(19): siRNA sense strand
gauuugacugcaagauuga

SEQ ID NO: 455606 - RNA, 19 nt, Homo sapiens
  misc_RNA (1)...(19): siRNA sense strand
ucaacagggucaccaacca

SEQ ID NO: 455607 - RNA, 19 nt, Homo sapiens
  misc_RNA (1)...(19): siRNA sense strand
caaccagcccgcucaaugc

SEQ ID NO: 455608 - RNA, 19 nt, Homo sapiens
  misc_RNA (1)...(19): siRNA sense strand
aaacccuauuucucuaaga

SEQ ID NO: 455609 - RNA, 19 nt, Homo sapiens
  misc_RNA (1)...(19): siRNA sense strand
cuauuucucuaagaccauu

SEQ ID NO: 455610 - RNA, 19 nt, Homo sapiens
  misc_RNA (1)...(19): siRNA sense strand
aggaaaagccucauguaaa

SEQ ID NO: 455611 - RNA, 19 nt, Homo sapiens
  misc_RNA (1)...(19): siRNA sense strand
gggaacugcucuuuaauua

SEQ ID NO: 455612 - RNA, 19 nt, Homo sapiens
  misc_RNA (1)...(19): siRNA sense strand
ggaaaagccucauguaaaa

SEQ ID NO: 455613 - RNA, 19 nt, Homo sapiens
  misc_RNA (1)...(19): siRNA sense strand
gacgggaacugcucuuuaa

SEQ ID NO: 455614 - RNA, 19 nt, Homo sapiens
  misc_RNA (1)...(19): siRNA sense strand
gaagaugugucccaagcuu

SEQ ID NO: 455615 - RNA, 19 nt, Homo sapiens
  misc_RNA (1)...(19): siRNA sense strand
uaagaccauucgcgauuua

SEQ ID NO: 455616 - RNA, 19 nt, Homo sapiens
  misc_RNA (1)...(19): siRNA sense strand
ggacgggaacugcucuuua

SEQ ID NO: 455617 - RNA, 19 nt, Homo sapiens
  misc_RNA (1)...(19): siRNA sense strand
ggaagaggaagaagaguga

SEQ ID NO: 455618 - RNA, 19 nt, Homo sapiens
  misc_RNA (1)...(19): siRNA sense strand
agauuugacugcaagauug

SEQ ID NO: 455619 - RNA, 19 nt, Homo sapiens
  misc_RNA (1)...(19): siRNA sense strand
ggaugacgaugccaaguac

SEQ ID NO: 455620 - RNA, 19 nt, Homo sapiens
  misc_RNA (1)...(19): siRNA sense strand
gggaugacgaugccaagua

SEQ ID NO: 455621 - RNA, 19 nt, Homo sapiens
  misc_RNA (1)...(19): siRNA sense strand
cuaagaccauucgcgauuu

SEQ ID NO: 455622 - RNA, 19 nt, Homo sapiens
  misc_RNA (1)...(19): siRNA sense strand
guaaaacccuauuucucua

SEQ ID NO: 455623 - RNA, 19 nt, Homo sapiens
  misc_RNA (1)...(19): siRNA sense strand
ggaacugcucuuuaauuau

SEQ ID NO: 455624 - RNA, 19 nt, Homo sapiens
  misc_RNA (1)...(19): siRNA sense strand
acugcaagauugaaggaua

SEQ ID NO: 455625 - RNA, 19 nt, Homo sapiens
  misc_RNA (1)...(19): siRNA sense strand
ugucaacagucuuggagaa

SEQ ID NO: 455626 - RNA, 19 nt, Homo sapiens
  misc_RNA (1)...(19): siRNA sense strand
cauucgcgauuuagaaguu

SEQ ID NO: 455627 - RNA, 19 nt, Homo sapiens
  misc_RNA (1)...(19): siRNA sense strand
ccagauagacuacgaugag

SEQ ID NO: 455628 - RNA, 19 nt, Homo sapiens
  misc_RNA (1)...(19): siRNA sense strand
ccaaccagcccgcucaaug

SEQ ID NO: 455629 - RNA, 19 nt, Homo sapiens
  misc_RNA (1)...(19): siRNA sense strand
gaccauucgcgauuuagaa

SEQ ID NO: 455630 - RNA, 19 nt, Homo sapiens
  misc_RNA (1)...(19): siRNA sense strand
ucuaagaccauucgcgauu

SEQ ID NO: 455631 - RNA, 19 nt, Homo sapiens
  misc_RNA (1)...(19): siRNA sense strand
cgggaacugcucuuuaauu

SEQ ID NO: 455632 - RNA, 19 nt, Homo sapiens
  misc_RNA (1)...(19): siRNA sense strand
uagauuugacugcaagauu

SEQ ID NO: 455633 - RNA, 19 nt, Homo sapiens
  misc_RNA (1)...(19): siRNA sense strand
gauuugacugcaagauuga

SEQ ID NO: 455634 - RNA, 19 nt, Homo sapiens
  misc_RNA (1)...(19): siRNA sense strand
ucaacagggucaccaacca

SEQ ID NO: 455635 - RNA, 19 nt, Homo sapiens
  misc_RNA (1)...(19): siRNA sense strand
caaccagcccgcucaaugc

SEQ ID NO: 455636 - RNA, 19 nt, Homo sapiens
  misc_RNA (1)...(19): siRNA sense strand
aaacccuauuucucuaaga

SEQ ID NO: 455637 - RNA, 19 nt, Homo sapiens
  misc_RNA (1)...(19): siRNA sense strand
cuauuucucuaagaccauu

SEQ ID NO: 455638 - RNA, 19 nt, Homo sapiens
  misc_RNA (1)...(19): siRNA sense strand
aggaaaagccucauguaaa

SEQ ID NO: 455639 - RNA, 19 nt, Homo sapiens
  misc_RNA (1)...(19): siRNA sense strand
gggaacugcucuuuaauua

SEQ ID NO: 455640 - RNA, 19 nt, Homo sapiens
  misc_RNA (1)...(19): siRNA sense strand
ggaaaagccucauguaaaa

SEQ ID NO: 455641 - RNA, 19 nt, Homo sapiens
  misc_RNA (1)...(19): siRNA sense strand
gacgggaacugcucuuuaa

SEQ ID NO: 455642 - RNA, 19 nt, Homo sapiens
  misc_RNA (1)...(19): siRNA sense strand
gaagaugugucccaagcuu

SEQ ID NO: 455643 - RNA, 19 nt, Homo sapiens
  misc_RNA (1)...(19): siRNA sense strand
uaagaccauucgcgauuua

SEQ ID NO: 455644 - RNA, 19 nt, Homo sapiens
  misc_RNA (1)...(19): siRNA sense strand
ggacgggaacugcucuuua

SEQ ID NO: 455645 - RNA, 19 nt, Homo sapiens
  misc_RNA (1)...(19): siRNA sense strand
ggaagacuguccucuaugg

SEQ ID NO: 455646 - RNA, 19 nt, Homo sapiens
  misc_RNA (1)...(19): siRNA sense strand
ggaagaggaagaagaguga

SEQ ID NO: 455647 - RNA, 19 nt, Homo sapiens
  misc_RNA (1)...(19): siRNA sense strand
agauuugacugcaagauug

SEQ ID NO: 455648 - RNA, 19 nt, Homo sapiens
  misc_RNA (1)...(19): siRNA sense strand
ggaugacgaugccaaguac

SEQ ID NO: 455649 - RNA, 19 nt, Homo sapiens
  misc_RNA (1)...(19): siRNA sense strand
gggaugacgaugccaagua

SEQ ID NO: 455650 - RNA, 19 nt, Homo sapiens
  misc_RNA (1)...(19): siRNA sense strand
cuaagaccauucgcgauuu

SEQ ID NO: 455651 - RNA, 19 nt, Homo sapiens
  misc_RNA (1)...(19): siRNA sense strand
guaaaacccuauuucucua

SEQ ID NO: 455652 - RNA, 19 nt, Homo sapiens
  misc_RNA (1)...(19): siRNA sense strand
ggaacugcucuuuaauuau

SEQ ID NO: 455653 - RNA, 19 nt, Homo sapiens
  misc_RNA (1)...(19): siRNA sense strand
acugcaagauugaaggaua

SEQ ID NO: 455654 - RNA, 19 nt, Homo sapiens
  misc_RNA (1)...(19): siRNA sense strand
ugucaacagucuuggagaa

SEQ ID NO: 455655 - RNA, 19 nt, Homo sapiens
  misc_RNA (1)...(19): siRNA sense strand
cauucgcgauuuagaaguu

SEQ ID NO: 455656 - RNA, 19 nt, Homo sapiens
  misc_RNA (1)...(19): siRNA sense strand
ccagauagacuacgaugag

SEQ ID NO: 455657 - RNA, 19 nt, Homo sapiens
  misc_RNA (1)...(19): siRNA sense strand
ccaaccagcccgcucaaug

SEQ ID NO: 455658 - RNA, 19 nt, Homo sapiens
  misc_RNA (1)...(19): siRNA sense strand
gaccauucgcgauuuagaa

SEQ ID NO: 455659 - RNA, 19 nt, Homo sapiens
  misc_RNA (1)...(19): siRNA sense strand
uuggaagacuguccucuau

SEQ ID NO: 455660 - RNA, 19 nt, Homo sapiens
  misc_RNA (1)...(19): siRNA sense strand
ucuaagaccauucgcgauu

SEQ ID NO: 455661 - RNA, 19 nt, Homo sapiens
  misc_RNA (1)...(19): siRNA sense strand
gcugugagagccauuggaa

SEQ ID NO: 455662 - RNA, 19 nt, Homo sapiens
  misc_RNA (1)...(19): siRNA sense strand
cgggaacugcucuuuaauu

SEQ ID NO: 455663 - RNA, 19 nt, Homo sapiens
  misc_RNA (1)...(19): siRNA sense strand
ugugagagccauuggaaga

SEQ ID NO: 455664 - RNA, 19 nt, Homo sapiens
  misc_RNA (1)...(19): siRNA sense strand
uagauuugacugcaagauu

SEQ ID NO: 455665 - RNA, 19 nt, Homo sapiens
  misc_RNA (1)...(19): siRNA sense strand
ucaacagggucaccaacca

SEQ ID NO: 455666 - RNA, 19 nt, Homo sapiens
  misc_RNA (1)...(19): siRNA sense strand
gauuugacugcaagauuga

SEQ ID NO: 455667 - RNA, 19 nt, Homo sapiens
  misc_RNA (1)...(19): siRNA sense strand
caaccagcccgcucaaugc

SEQ ID NO: 455668 - RNA, 19 nt, Homo sapiens
  misc_RNA (1)...(19): siRNA sense strand
aaacccuauuucucuaaga

SEQ ID NO: 455669 - RNA, 19 nt, Homo sapiens
  misc_RNA (1)...(19): siRNA sense strand
cuauuucucuaagaccauu

SEQ ID NO: 455670 - RNA, 19 nt, Homo sapiens
  misc_RNA (1)...(19): siRNA sense strand
aggaaaagccucauguaaa

SEQ ID NO: 455671 - RNA, 19 nt, Homo sapiens
  misc_RNA (1)...(19): siRNA sense strand
gggaacugcucuuuaauua

SEQ ID NO: 455672 - RNA, 19 nt, Homo sapiens
  misc_RNA (1)...(19): siRNA sense strand
ggaaaagccucauguaaaa

SEQ ID NO: 455673 - RNA, 19 nt, Homo sapiens
  misc_RNA (1)...(19): siRNA sense strand
gacgggaacugcucuuuaa

SEQ ID NO: 455674 - RNA, 19 nt, Homo sapiens
  misc_RNA (1)...(19): siRNA sense strand
gaagaugugucccaagcuu

SEQ ID NO: 455675 - RNA, 19 nt, Homo sapiens
  misc_RNA (1)...(19): siRNA sense strand
uaagaccauucgcgauuua

SEQ ID NO: 455676 - RNA, 19 nt, Homo sapiens
  misc_RNA (1)...(19): siRNA sense strand
ggacgggaacugcucuuua

SEQ ID NO: 455677 - RNA, 19 nt, Homo sapiens
  misc_RNA (1)...(19): siRNA sense strand
ggaagacuguccucuaugg

SEQ ID NO: 455678 - RNA, 19 nt, Homo sapiens
  misc_RNA (1)...(19): siRNA sense strand
ggaagaggaagaagaguga

SEQ ID NO: 455679 - RNA, 19 nt, Homo sapiens
  misc_RNA (1)...(19): siRNA sense strand
agauuugacugcaagauug

SEQ ID NO: 455680 - RNA, 19 nt, Homo sapiens
  misc_RNA (1)...(19): siRNA sense strand
ggaugacgaugccaaguac

SEQ ID NO: 455681 - RNA, 19 nt, Homo sapiens
  misc_RNA (1)...(19): siRNA sense strand
gggaugacgaugccaagua

SEQ ID NO: 455682 - RNA, 19 nt, Homo sapiens
  misc_RNA (1)...(19): siRNA sense strand
cuaagaccauucgcgauuu

SEQ ID NO: 455683 - RNA, 19 nt, Homo sapiens
  misc_RNA (1)...(19): siRNA sense strand
guaaaacccuauuucucua

SEQ ID NO: 455684 - RNA, 19 nt, Homo sapiens
  misc_RNA (1)...(19): siRNA sense strand
ggaacugcucuuuaauuau

SEQ ID NO: 455685 - RNA, 19 nt, Homo sapiens
  misc_RNA (1)...(19): siRNA sense strand
acugcaagauugaaggaua

SEQ ID NO: 455686 - RNA, 19 nt, Homo sapiens
  misc_RNA (1)...(19): siRNA sense strand
ugucaacagucuuggagaa

SEQ ID NO: 455687 - RNA, 19 nt, Homo sapiens
  misc_RNA (1)...(19): siRNA sense strand
cauucgcgauuuagaaguu

SEQ ID NO: 455688 - RNA, 19 nt, Homo sapiens
  misc_RNA (1)...(19): siRNA sense strand
ccagauagacuacgaugag

SEQ ID NO: 455689 - RNA, 19 nt, Homo sapiens
  misc_RNA (1)...(19): siRNA sense strand
ccaaccagcccgcucaaug

SEQ ID NO: 455690 - RNA, 19 nt, Homo sapiens
  misc_RNA (1)...(19): siRNA sense strand
gaccauucgcgauuuagaa

SEQ ID NO: 455691 - RNA, 19 nt, Homo sapiens
  misc_RNA (1)...(19): siRNA sense strand
uuggaagacuguccucuau

SEQ ID NO: 455692 - RNA, 19 nt, Homo sapiens
  misc_RNA (1)...(19): siRNA sense strand
ucuaagaccauucgcgauu

SEQ ID NO: 455693 - RNA, 19 nt, Homo sapiens
  misc_RNA (1)...(19): siRNA sense strand
gcugugagagccauuggaa

SEQ ID NO: 455694 - RNA, 19 nt, Homo sapiens
  misc_RNA (1)...(19): siRNA sense strand
cgggaacugcucuuuaauu

SEQ ID NO: 455695 - RNA, 19 nt, Homo sapiens
  misc_RNA (1)...(19): siRNA sense strand
ugugagagccauuggaaga

SEQ ID NO: 455696 - RNA, 19 nt, Homo sapiens
  misc_RNA (1)...(19): siRNA sense strand
uagauuugacugcaagauu

SEQ ID NO: 455697 - RNA, 19 nt, Homo sapiens
  misc_RNA (1)...(19): siRNA sense strand
ucaacagggucaccaacca

SEQ ID NO: 455698 - RNA, 19 nt, Homo sapiens
  misc_RNA (1)...(19): siRNA sense strand
gauuugacugcaagauuga

SEQ ID NO: 455699 - RNA, 19 nt, Homo sapiens
  misc_RNA (1)...(19): siRNA sense strand
caaccagcccgcucaaugc

SEQ ID NO: 455700 - RNA, 19 nt, Homo sapiens
  misc_RNA (1)...(19): siRNA sense strand
aaacccuauuucucuaaga

SEQ ID NO: 455701 - RNA, 19 nt, Homo sapiens
  misc_RNA (1)...(19): siRNA sense strand
cuauuucucuaagaccauu

SEQ ID NO: 455702 - RNA, 19 nt, Homo sapiens
  misc_RNA (1)...(19): siRNA sense strand
aggaaaagccucauguaaa

SEQ ID NO: 455703 - RNA, 19 nt, Homo sapiens
  misc_RNA (1)...(19): siRNA sense strand
gggaacugcucuuuaauua

SEQ ID NO: 455704 - RNA, 19 nt, Homo sapiens
  misc_RNA (1)...(19): siRNA sense strand
ggaaaagccucauguaaaa

SEQ ID NO: 455705 - RNA, 19 nt, Homo sapiens
  misc_RNA (1)...(19): siRNA sense strand
gacgggaacugcucuuuaa

SEQ ID NO: 455706 - RNA, 19 nt, Homo sapiens
  misc_RNA (1)...(19): siRNA sense strand
gaagaugugucccaagcuu

SEQ ID NO: 455707 - RNA, 19 nt, Homo sapiens
  misc_RNA (1)...(19): siRNA sense strand
uaagaccauucgcgauuua

SEQ ID NO: 455708 - RNA, 19 nt, Homo sapiens
  misc_RNA (1)...(19): siRNA sense strand
ggacgggaacugcucuuua

SEQ ID NO: 455709 - RNA, 19 nt, Homo sapiens
  misc_RNA (1)...(19): siRNA sense strand
ggaagacuguccucuaugg

SEQ ID NO: 455710 - RNA, 19 nt, Homo sapiens
  misc_RNA (1)...(19): siRNA sense strand
ggaagaggaagaagaguga

SEQ ID NO: 455711 - RNA, 19 nt, Homo sapiens
  misc_RNA (1)...(19): siRNA sense strand
agauuugacugcaagauug

SEQ ID NO: 455712 - RNA, 19 nt, Homo sapiens
  misc_RNA (1)...(19): siRNA sense strand
ggaugacgaugccaaguac

SEQ ID NO: 455713 - RNA, 19 nt, Homo sapiens
  misc_RNA (1)...(19): siRNA sense strand
gggaugacgaugccaagua

SEQ ID NO: 455714 - RNA, 19 nt, Homo sapiens
  misc_RNA (1)...(19): siRNA sense strand
cuaagaccauucgcgauuu

SEQ ID NO: 455715 - RNA, 19 nt, Homo sapiens
  misc_RNA (1)...(19): siRNA sense strand
guaaaacccuauuucucua

SEQ ID NO: 455716 - RNA, 19 nt, Homo sapiens
  misc_RNA (1)...(19): siRNA sense strand
ggaacugcucuuuaauuau

SEQ ID NO: 455717 - RNA, 19 nt, Homo sapiens
  misc_RNA (1)...(19): siRNA sense strand
acugcaagauugaaggaua

SEQ ID NO: 455718 - RNA, 19 nt, Homo sapiens
  misc_RNA (1)...(19): siRNA sense strand
ugucaacagucuuggagaa

SEQ ID NO: 455719 - RNA, 19 nt, Homo sapiens
  misc_RNA (1)...(19): siRNA sense strand
cauucgcgauuuagaaguu

SEQ ID NO: 455720 - RNA, 19 nt, Homo sapiens
  misc_RNA (1)...(19): siRNA sense strand
ccagauagacuacgaugag

SEQ ID NO: 455721 - RNA, 19 nt, Homo sapiens
  misc_RNA (1)...(19): siRNA sense strand
ccaaccagcccgcucaaug

SEQ ID NO: 455722 - RNA, 19 nt, Homo sapiens
  misc_RNA (1)...(19): siRNA sense strand
gaccauucgcgauuuagaa

SEQ ID NO: 455723 - RNA, 19 nt, Homo sapiens
  misc_RNA (1)...(19): siRNA sense strand
uuggaagacuguccucuau

SEQ ID NO: 455724 - RNA, 19 nt, Homo sapiens
  misc_RNA (1)...(19): siRNA sense strand
ucuaagaccauucgcgauu

SEQ ID NO: 455725 - RNA, 19 nt, Homo sapiens
  misc_RNA (1)...(19): siRNA sense strand
gcugugagagccauuggaa

SEQ ID NO: 455726 - RNA, 19 nt, Homo sapiens
  misc_RNA (1)...(19): siRNA sense strand
cgggaacugcucuuuaauu

SEQ ID NO: 455727 - RNA, 19 nt, Homo sapiens
  misc_RNA (1)...(19): siRNA sense strand
ugugagagccauuggaaga

SEQ ID NO: 455728 - RNA, 19 nt, Homo sapiens
  misc_RNA (1)...(19): siRNA sense strand
uagauuugacugcaagauu

SEQ ID NO: 455729 - RNA, 19 nt, Homo sapiens
  misc_RNA (1)...(19): siRNA sense strand
ucaacagggucaccaacca

SEQ ID NO: 455730 - RNA, 19 nt, Homo sapiens
  misc_RNA (1)...(19): siRNA sense strand
gauuugacugcaagauuga

SEQ ID NO: 455731 - RNA, 19 nt, Homo sapiens
  misc_RNA (1)...(19): siRNA sense strand
caaccagcccgcucaaugc

SEQ ID NO: 455732 - RNA, 19 nt, Homo sapiens
  misc_RNA (1)...(19): siRNA sense strand
aaacccuauuucucuaaga

SEQ ID NO: 455733 - RNA, 19 nt, Homo sapiens
  misc_RNA (1)...(19): siRNA sense strand
cuauuucucuaagaccauu

SEQ ID NO: 455734 - RNA, 19 nt, Homo sapiens
  misc_RNA (1)...(19): siRNA sense strand
aggaaaagccucauguaaa

SEQ ID NO: 455735 - RNA, 19 nt, Homo sapiens
  misc_RNA (1)...(19): siRNA sense strand
gggaacugcucuuuaauua

SEQ ID NO: 455736 - RNA, 19 nt, Homo sapiens
  misc_RNA (1)...(19): siRNA sense strand
ggaaaagccucauguaaaa

SEQ ID NO: 455737 - RNA, 19 nt, Homo sapiens
  misc_RNA (1)...(19): siRNA sense strand
gacgggaacugcucuuuaa

SEQ ID NO: 455738 - RNA, 19 nt, Homo sapiens
  misc_RNA (1)...(19): siRNA sense strand
gaagaugugucccaagcuu

SEQ ID NO: 455739 - RNA, 19 nt, Homo sapiens
  misc_RNA (1)...(19): siRNA sense strand
uaagaccauucgcgauuua

SEQ ID NO: 455740 - RNA, 19 nt, Homo sapiens
  misc_RNA (1)...(19): siRNA sense strand
ggacgggaacugcucuuua

SEQ ID NO: 455741 - RNA, 19 nt, Homo sapiens
  misc_RNA (1)...(19): siRNA sense strand
ggaagacuguccucuaugg

SEQ ID NO: 455742 - RNA, 19 nt, Homo sapiens
  misc_RNA (1)...(19): siRNA sense strand
ggaagaggaagaagaguga

SEQ ID NO: 455743 - RNA, 19 nt, Homo sapiens
  misc_RNA (1)...(19): siRNA sense strand
agauuugacugcaagauug

SEQ ID NO: 455744 - RNA, 19 nt, Homo sapiens
  misc_RNA (1)...(19): siRNA sense strand
ggaugacgaugccaaguac

SEQ ID NO: 455745 - RNA, 19 nt, Homo sapiens
  misc_RNA (1)...(19): siRNA sense strand
gggaugacgaugccaagua

SEQ ID NO: 455746 - RNA, 19 nt, Homo sapiens
  misc_RNA (1)...(19): siRNA sense strand
cuaagaccauucgcgauuu

SEQ ID NO: 455747 - RNA, 19 nt, Homo sapiens
  misc_RNA (1)...(19): siRNA sense strand
guaaaacccuauuucucua

SEQ ID NO: 455748 - RNA, 19 nt, Homo sapiens
  misc_RNA (1)...(19): siRNA sense strand
ggaacugcucuuuaauuau

SEQ ID NO: 455749 - RNA, 19 nt, Homo sapiens
  misc_RNA (1)...(19): siRNA sense strand
acugcaagauugaaggaua

SEQ ID NO: 455750 - RNA, 19 nt, Homo sapiens
  misc_RNA (1)...(19): siRNA sense strand
ugucaacagucuuggagaa

SEQ ID NO: 455751 - RNA, 19 nt, Homo sapiens
  misc_RNA (1)...(19): siRNA sense strand
cauucgcgauuuagaaguu

SEQ ID NO: 455752 - RNA, 19 nt, Homo sapiens
  misc_RNA (1)...(19): siRNA sense strand
ccagauagacuacgaugag

SEQ ID NO: 455753 - RNA, 19 nt, Homo sapiens
  misc_RNA (1)...(19): siRNA sense strand
ccaaccagcccgcucaaug

SEQ ID NO: 455754 - RNA, 19 nt, Homo sapiens
  misc_RNA (1)...(19): siRNA sense strand
gaccauucgcgauuuagaa

SEQ ID NO: 455755 - RNA, 19 nt, Homo sapiens
  misc_RNA (1)...(19): siRNA sense strand
uuggaagacuguccucuau

SEQ ID NO: 455756 - RNA, 19 nt, Homo sapiens
  misc_RNA (1)...(19): siRNA sense strand
ucuaagaccauucgcgauu

SEQ ID NO: 455757 - RNA, 19 nt, Homo sapiens
  misc_RNA (1)...(19): siRNA sense strand
gcugugagagccauuggaa

SEQ ID NO: 455758 - RNA, 19 nt, Homo sapiens
  misc_RNA (1)...(19): siRNA sense strand
cgggaacugcucuuuaauu

SEQ ID NO: 455759 - RNA, 19 nt, Homo sapiens
  misc_RNA (1)...(19): siRNA sense strand
ugugagagccauuggaaga

SEQ ID NO: 455760 - RNA, 19 nt, Homo sapiens
  misc_RNA (1)...(19): siRNA sense strand
uagauuugacugcaagauu

SEQ ID NO: 455761 - RNA, 19 nt, Homo sapiens
  misc_RNA (1)...(19): siRNA sense strand
ucaacagggucaccaacca

SEQ ID NO: 455762 - RNA, 19 nt, Homo sapiens
  misc_RNA (1)...(19): siRNA sense strand
gauuugacugcaagauuga

SEQ ID NO: 455763 - RNA, 19 nt, Homo sapiens
  misc_RNA (1)...(19): siRNA sense strand
caaccagcccgcucaaugc

SEQ ID NO: 455764 - RNA, 19 nt, Homo sapiens
  misc_RNA (1)...(19): siRNA sense strand
aaacccuauuucucuaaga

SEQ ID NO: 455765 - RNA, 19 nt, Homo sapiens
  misc_RNA (1)...(19): siRNA sense strand
cuauuucucuaagaccauu

SEQ ID NO: 455766 - RNA, 19 nt, Homo sapiens
  misc_RNA (1)...(19): siRNA sense strand
aggaaaagccucauguaaa

SEQ ID NO: 455767 - RNA, 19 nt, Homo sapiens
  misc_RNA (1)...(19): siRNA sense strand
gggaacugcucuuuaauua

SEQ ID NO: 455768 - RNA, 19 nt, Homo sapiens
  misc_RNA (1)...(19): siRNA sense strand
ggaaaagccucauguaaaa

SEQ ID NO: 455769 - RNA, 19 nt, Homo sapiens
  misc_RNA (1)...(19): siRNA sense strand
gacgggaacugcucuuuaa

SEQ ID NO: 455770 - RNA, 19 nt, Homo sapiens
  misc_RNA (1)...(19): siRNA sense strand
gaagaugugucccaagcuu

SEQ ID NO: 455771 - RNA, 19 nt, Homo sapiens
  misc_RNA (1)...(19): siRNA sense strand
uaagaccauucgcgauuua

SEQ ID NO: 455772 - RNA, 19 nt, Homo sapiens
  misc_RNA (1)...(19): siRNA sense strand
ggacgggaacugcucuuua

SEQ ID NO: 455773 - RNA, 19 nt, Homo sapiens
  misc_RNA (1)...(19): siRNA sense strand
ggaagacuguccucuaugg

SEQ ID NO: 455774 - RNA, 19 nt, Homo sapiens
  misc_RNA (1)...(19): siRNA sense strand
ggaagaggaagaagaguga

SEQ ID NO: 455775 - RNA, 19 nt, Homo sapiens
  misc_RNA (1)...(19): siRNA sense strand
agauuugacugcaagauug

SEQ ID NO: 455776 - RNA, 19 nt, Homo sapiens
  misc_RNA (1)...(19): siRNA sense strand
ggaugacgaugccaaguac

SEQ ID NO: 455777 - RNA, 19 nt, Homo sapiens
  misc_RNA (1)...(19): siRNA sense strand
gggaugacgaugccaagua

SEQ ID NO: 455778 - RNA, 19 nt, Homo sapiens
  misc_RNA (1)...(19): siRNA sense strand
cuaagaccauucgcgauuu

SEQ ID NO: 455779 - RNA, 19 nt, Homo sapiens
  misc_RNA (1)...(19): siRNA sense strand
guaaaacccuauuucucua

SEQ ID NO: 455780 - RNA, 19 nt, Homo sapiens
  misc_RNA (1)...(19): siRNA sense strand
ggaacugcucuuuaauuau

SEQ ID NO: 455781 - RNA, 19 nt, Homo sapiens
  misc_RNA (1)...(19): siRNA sense strand
acugcaagauugaaggaua

SEQ ID NO: 455782 - RNA, 19 nt, Homo sapiens
  misc_RNA (1)...(19): siRNA sense strand
ugucaacagucuuggagaa

SEQ ID NO: 455783 - RNA, 19 nt, Homo sapiens
  misc_RNA (1)...(19): siRNA sense strand
cauucgcgauuuagaaguu

SEQ ID NO: 455784 - RNA, 19 nt, Homo sapiens
  misc_RNA (1)...(19): siRNA sense strand
ccagauagacuacgaugag

SEQ ID NO: 455785 - RNA, 19 nt, Homo sapiens
  misc_RNA (1)...(19): siRNA sense strand
ccaaccagcccgcucaaug

SEQ ID NO: 455786 - RNA, 19 nt, Homo sapiens
  misc_RNA (1)...(19): siRNA sense strand
gaccauucgcgauuuagaa

SEQ ID NO: 455787 - RNA, 19 nt, Homo sapiens
  misc_RNA (1)...(19): siRNA sense strand
uuggaagacuguccucuau

SEQ ID NO: 455788 - RNA, 19 nt, Homo sapiens
  misc_RNA (1)...(19): siRNA sense strand
ucuaagaccauucgcgauu

SEQ ID NO: 455789 - RNA, 19 nt, Homo sapiens
  misc_RNA (1)...(19): siRNA sense strand
gcugugagagccauuggaa

SEQ ID NO: 455790 - RNA, 19 nt, Homo sapiens
  misc_RNA (1)...(19): siRNA sense strand
cgggaacugcucuuuaauu

SEQ ID NO: 455791 - RNA, 19 nt, Homo sapiens
  misc_RNA (1)...(19): siRNA sense strand
ugugagagccauuggaaga

SEQ ID NO: 455792 - RNA, 19 nt, Homo sapiens
  misc_RNA (1)...(19): siRNA sense strand
uagauuugacugcaagauu

SEQ ID NO: 455793 - RNA, 19 nt, Homo sapiens
  misc_RNA (1)...(19): siRNA sense strand
ucaacagggucaccaacca

SEQ ID NO: 455794 - RNA, 19 nt, Homo sapiens
  misc_RNA (1)...(19): siRNA sense strand
gauuugacugcaagauuga

SEQ ID NO: 455795 - RNA, 19 nt, Homo sapiens
  misc_RNA (1)...(19): siRNA sense strand
caaccagcccgcucaaugc

SEQ ID NO: 455796 - RNA, 19 nt, Homo sapiens
  misc_RNA (1)...(19): siRNA sense strand
aaacccuauuucucuaaga

SEQ ID NO: 455797 - RNA, 19 nt, Homo sapiens
  misc_RNA (1)...(19): siRNA sense strand
cuauuucucuaagaccauu

SEQ ID NO: 455798 - RNA, 19 nt, Homo sapiens
  misc_RNA (1)...(19): siRNA sense strand
aggaaaagccucauguaaa

SEQ ID NO: 455799 - RNA, 19 nt, Homo sapiens
  misc_RNA (1)...(19): siRNA sense strand
gggaacugcucuuuaauua

SEQ ID NO: 455800 - RNA, 19 nt, Homo sapiens
  misc_RNA (1)...(19): siRNA sense strand
ggaaaagccucauguaaaa

SEQ ID NO: 455801 - RNA, 19 nt, Homo sapiens
  misc_RNA (1)...(19): siRNA sense strand
gacgggaacugcucuuuaa

SEQ ID NO: 455802 - RNA, 19 nt, Homo sapiens
  misc_RNA (1)...(19): siRNA sense strand
gaagaugugucccaagcuu

SEQ ID NO: 455803 - RNA, 19 nt, Homo sapiens
  misc_RNA (1)...(19): siRNA sense strand
uaagaccauucgcgauuua

SEQ ID NO: 455804 - RNA, 19 nt, Homo sapiens
  misc_RNA (1)...(19): siRNA sense strand
ggacgggaacugcucuuua

SEQ ID NO: 455805 - RNA, 19 nt, Homo sapiens
  misc_RNA (1)...(19): siRNA sense strand
ggaagacuguccucuaugg

SEQ ID NO: 455806 - RNA, 19 nt, Homo sapiens
  misc_RNA (1)...(19): siRNA sense strand
ggaagaggaagaagaguga

SEQ ID NO: 455807 - RNA, 19 nt, Homo sapiens
  misc_RNA (1)...(19): siRNA sense strand
agauuugacugcaagauug

SEQ ID NO: 455808 - RNA, 19 nt, Homo sapiens
  misc_RNA (1)...(19): siRNA sense strand
ggaugacgaugccaaguac

SEQ ID NO: 455809 - RNA, 19 nt, Homo sapiens
  misc_RNA (1)...(19): siRNA sense strand
gggaugacgaugccaagua

SEQ ID NO: 455810 - RNA, 19 nt, Homo sapiens
  misc_RNA (1)...(19): siRNA sense strand
cuaagaccauucgcgauuu

SEQ ID NO: 455811 - RNA, 19 nt, Homo sapiens
  misc_RNA (1)...(19): siRNA sense strand
guaaaacccuauuucucua

SEQ ID NO: 455812 - RNA, 19 nt, Homo sapiens
  misc_RNA (1)...(19): siRNA sense strand
ggaacugcucuuuaauuau

SEQ ID NO: 455813 - RNA, 19 nt, Homo sapiens
  misc_RNA (1)...(19): siRNA sense strand
acugcaagauugaaggaua

SEQ ID NO: 455814 - RNA, 19 nt, Homo sapiens
  misc_RNA (1)...(19): siRNA sense strand
ugucaacagucuuggagaa

SEQ ID NO: 455815 - RNA, 19 nt, Homo sapiens
  misc_RNA (1)...(19): siRNA sense strand
cauucgcgauuuagaaguu

SEQ ID NO: 455816 - RNA, 19 nt, Homo sapiens
  misc_RNA (1)...(19): siRNA sense strand
ccagauagacuacgaugag

SEQ ID NO: 455817 - RNA, 19 nt, Homo sapiens
  misc_RNA (1)...(19): siRNA sense strand
ccaaccagcccgcucaaug

SEQ ID NO: 455818 - RNA, 19 nt, Homo sapiens
  misc_RNA (1)...(19): siRNA sense strand
gaccauucgcgauuuagaa

SEQ ID NO: 455819 - RNA, 19 nt, Homo sapiens
  misc_RNA (1)...(19): siRNA sense strand
uuggaagacuguccucuau

SEQ ID NO: 455820 - RNA, 19 nt, Homo sapiens
  misc_RNA (1)...(19): siRNA sense strand
ucuaagaccauucgcgauu

SEQ ID NO: 455821 - RNA, 19 nt, Homo sapiens
  misc_RNA (1)...(19): siRNA sense strand
gcugugagagccauuggaa

SEQ ID NO: 455822 - RNA, 19 nt, Homo sapiens
  misc_RNA (1)...(19): siRNA sense strand
cgggaacugcucuuuaauu

SEQ ID NO: 455823 - RNA, 19 nt, Homo sapiens
  misc_RNA (1)...(19): siRNA sense strand
ugugagagccauuggaaga

SEQ ID NO: 455824 - RNA, 19 nt, Homo sapiens
  misc_RNA (1)...(19): siRNA sense strand
uagauuugacugcaagauu

SEQ ID NO: 455825 - RNA, 19 nt, Homo sapiens
  misc_RNA (1)...(19): siRNA sense strand
ucaacagggucaccaacca

SEQ ID NO: 455826 - RNA, 19 nt, Homo sapiens
  misc_RNA (1)...(19): siRNA sense strand
gauuugacugcaagauuga

SEQ ID NO: 455827 - RNA, 19 nt, Homo sapiens
  misc_RNA (1)...(19): siRNA sense strand
caaccagcccgcucaaugc

SEQ ID NO: 455828 - RNA, 19 nt, Homo sapiens
  misc_RNA (1)...(19): siRNA sense strand
aaacccuauuucucuaaga

SEQ ID NO: 455829 - RNA, 19 nt, Homo sapiens
  misc_RNA (1)...(19): siRNA sense strand
cuauuucucuaagaccauu

SEQ ID NO: 455830 - RNA, 19 nt, Homo sapiens
  misc_RNA (1)...(19): siRNA sense strand
aggaaaagccucauguaaa

SEQ ID NO: 455831 - RNA, 19 nt, Homo sapiens
  misc_RNA (1)...(19): siRNA sense strand
gggaacugcucuuuaauua

SEQ ID NO: 455832 - RNA, 19 nt, Homo sapiens
  misc_RNA (1)...(19): siRNA sense strand
ggaaaagccucauguaaaa

SEQ ID NO: 455833 - RNA, 19 nt, Homo sapiens
  misc_RNA (1)...(19): siRNA sense strand
gacgggaacugcucuuuaa

SEQ ID NO: 455834 - RNA, 19 nt, Homo sapiens
  misc_RNA (1)...(19): siRNA sense strand
gaagaugugucccaagcuu

SEQ ID NO: 455835 - RNA, 19 nt, Homo sapiens
  misc_RNA (1)...(19): siRNA sense strand
uaagaccauucgcgauuua

SEQ ID NO: 455836 - RNA, 19 nt, Homo sapiens
  misc_RNA (1)...(19): siRNA sense strand
ggacgggaacugcucuuua

SEQ ID NO: 455837 - RNA, 19 nt, Homo sapiens
  misc_RNA (1)...(19): siRNA sense strand
ggaagacuguccucuaugg

SEQ ID NO: 455838 - RNA, 19 nt, Homo sapiens
  misc_RNA (1)...(19): siRNA sense strand
ggaagaggaagaagaguga

SEQ ID NO: 455839 - RNA, 19 nt, Homo sapiens
  misc_RNA (1)...(19): siRNA sense strand
agauuugacugcaagauug

SEQ ID NO: 455840 - RNA, 19 nt, Homo sapiens
  misc_RNA (1)...(19): siRNA sense strand
ggaugacgaugccaaguac

SEQ ID NO: 455841 - RNA, 19 nt, Homo sapiens
  misc_RNA (1)...(19): siRNA sense strand
gggaugacgaugccaagua

SEQ ID NO: 455842 - RNA, 19 nt, Homo sapiens
  misc_RNA (1)...(19): siRNA sense strand
cuaagaccauucgcgauuu

SEQ ID NO: 455843 - RNA, 19 nt, Homo sapiens
  misc_RNA (1)...(19): siRNA sense strand
guaaaacccuauuucucua

SEQ ID NO: 455844 - RNA, 19 nt, Homo sapiens
  misc_RNA (1)...(19): siRNA sense strand
ggaacugcucuuuaauuau

SEQ ID NO: 455845 - RNA, 19 nt, Homo sapiens
  misc_RNA (1)...(19): siRNA sense strand
acugcaagauugaaggaua

SEQ ID NO: 455846 - RNA, 19 nt, Homo sapiens
  misc_RNA (1)...(19): siRNA sense strand
ugucaacagucuuggagaa

SEQ ID NO: 455847 - RNA, 19 nt, Homo sapiens
  misc_RNA (1)...(19): siRNA sense strand
cauucgcgauuuagaaguu

SEQ ID NO: 455848 - RNA, 19 nt, Homo sapiens
  misc_RNA (1)...(19): siRNA sense strand
ccagauagacuacgaugag

SEQ ID NO: 455849 - RNA, 19 nt, Homo sapiens
  misc_RNA (1)...(19): siRNA sense strand
ccaaccagcccgcucaaug

SEQ ID NO: 455850 - RNA, 19 nt, Homo sapiens
  misc_RNA (1)...(19): siRNA sense strand
gaccauucgcgauuuagaa

SEQ ID NO: 455851 - RNA, 19 nt, Homo sapiens
  misc_RNA (1)...(19): siRNA sense strand
uuggaagacuguccucuau

SEQ ID NO: 455852 - RNA, 19 nt, Homo sapiens
  misc_RNA (1)...(19): siRNA sense strand
ucuaagaccauucgcgauu

SEQ ID NO: 455853 - RNA, 19 nt, Homo sapiens
  misc_RNA (1)...(19): siRNA sense strand
gcugugagagccauuggaa

SEQ ID NO: 455854 - RNA, 19 nt, Homo sapiens
  misc_RNA (1)...(19): siRNA sense strand
cgggaacugcucuuuaauu

SEQ ID NO: 455855 - RNA, 19 nt, Homo sapiens
  misc_RNA (1)...(19): siRNA sense strand
ugugagagccauuggaaga

SEQ ID NO: 455856 - RNA, 19 nt, Homo sapiens
  misc_RNA (1)...(19): siRNA sense strand
uagauuugacugcaagauu

SEQ ID NO: 455857 - RNA, 19 nt, Homo sapiens
  misc_RNA (1)...(19): siRNA sense strand
ucaacagggucaccaacca

SEQ ID NO: 455858 - RNA, 19 nt, Homo sapiens
  misc_RNA (1)...(19): siRNA sense strand
gauuugacugcaagauuga

SEQ ID NO: 455859 - RNA, 19 nt, Homo sapiens
  misc_RNA (1)...(19): siRNA sense strand
caaccagcccgcucaaugc

SEQ ID NO: 455860 - RNA, 19 nt, Homo sapiens
  misc_RNA (1)...(19): siRNA sense strand
aaacccuauuucucuaaga

SEQ ID NO: 455861 - RNA, 19 nt, Homo sapiens
  misc_RNA (1)...(19): siRNA sense strand
cuauuucucuaagaccauu

SEQ ID NO: 455862 - RNA, 19 nt, Homo sapiens
  misc_RNA (1)...(19): siRNA sense strand
aggaaaagccucauguaaa

SEQ ID NO: 455863 - RNA, 19 nt, Homo sapiens
  misc_RNA (1)...(19): siRNA sense strand
gggaacugcucuuuaauua

SEQ ID NO: 455864 - RNA, 19 nt, Homo sapiens
  misc_RNA (1)...(19): siRNA sense strand
ggaaaagccucauguaaaa

SEQ ID NO: 455865 - RNA, 19 nt, Homo sapiens
  misc_RNA (1)...(19): siRNA sense strand
gacgggaacugcucuuuaa

SEQ ID NO: 455866 - RNA, 19 nt, Homo sapiens
  misc_RNA (1)...(19): siRNA sense strand
gaagaugugucccaagcuu

SEQ ID NO: 455867 - RNA, 19 nt, Homo sapiens
  misc_RNA (1)...(19): siRNA sense strand
uaagaccauucgcgauuua

SEQ ID NO: 455868 - RNA, 19 nt, Homo sapiens
  misc_RNA (1)...(19): siRNA sense strand
ggacgggaacugcucuuua

SEQ ID NO: 455869 - RNA, 19 nt, Homo sapiens
  misc_RNA (1)...(19): siRNA sense strand
ggaagaggaagaagaguga

SEQ ID NO: 455870 - RNA, 19 nt, Homo sapiens
  misc_RNA (1)...(19): siRNA sense strand
agauuugacugcaagauug

SEQ ID NO: 455871 - RNA, 19 nt, Homo sapiens
  misc_RNA (1)...(19): siRNA sense strand
ggaugacgaugccaaguac

SEQ ID NO: 455872 - RNA, 19 nt, Homo sapiens
  misc_RNA (1)...(19): siRNA sense strand
gggaugacgaugccaagua

SEQ ID NO: 455873 - RNA, 19 nt, Homo sapiens
  misc_RNA (1)...(19): siRNA sense strand
cuaagaccauucgcgauuu

SEQ ID NO: 455874 - RNA, 19 nt, Homo sapiens
  misc_RNA (1)...(19): siRNA sense strand
guaaaacccuauuucucua

SEQ ID NO: 455875 - RNA, 19 nt, Homo sapiens
  misc_RNA (1)...(19): siRNA sense strand
ggaacugcucuuuaauuau

SEQ ID NO: 455876 - RNA, 19 nt, Homo sapiens
  misc_RNA (1)...(19): siRNA sense strand
acugcaagauugaaggaua

SEQ ID NO: 455877 - RNA, 19 nt, Homo sapiens
  misc_RNA (1)...(19): siRNA sense strand
ugucaacagucuuggagaa

SEQ ID NO: 455878 - RNA, 19 nt, Homo sapiens
  misc_RNA (1)...(19): siRNA sense strand
cauucgcgauuuagaaguu

SEQ ID NO: 455879 - RNA, 19 nt, Homo sapiens
  misc_RNA (1)...(19): siRNA sense strand
ccagauagacuacgaugag

SEQ ID NO: 455880 - RNA, 19 nt, Homo sapiens
  misc_RNA (1)...(19): siRNA sense strand
ccaaccagcccgcucaaug

SEQ ID NO: 455881 - RNA, 19 nt, Homo sapiens
  misc_RNA (1)...(19): siRNA sense strand
gaccauucgcgauuuagaa

SEQ ID NO: 455882 - RNA, 19 nt, Homo sapiens
  misc_RNA (1)...(19): siRNA sense strand
ucuaagaccauucgcgauu

SEQ ID NO: 455883 - RNA, 19 nt, Homo sapiens
  misc_RNA (1)...(19): siRNA sense strand
cgggaacugcucuuuaauu

SEQ ID NO: 455884 - RNA, 19 nt, Homo sapiens
  misc_RNA (1)...(19): siRNA sense strand
uagauuugacugcaagauu

SEQ ID NO: 455885 - RNA, 19 nt, Homo sapiens
  misc_RNA (1)...(19): siRNA sense strand
gauuugacugcaagauuga

SEQ ID NO: 455886 - RNA, 19 nt, Homo sapiens
  misc_RNA (1)...(19): siRNA sense strand
ucaacagggucaccaacca

SEQ ID NO: 455887 - RNA, 19 nt, Homo sapiens
  misc_RNA (1)...(19): siRNA sense strand
caaccagcccgcucaaugc

SEQ ID NO: 455888 - RNA, 19 nt, Homo sapiens
  misc_RNA (1)...(19): siRNA sense strand
aaacccuauuucucuaaga

SEQ ID NO: 455889 - RNA, 19 nt, Homo sapiens
  misc_RNA (1)...(19): siRNA sense strand
cuauuucucuaagaccauu

SEQ ID NO: 455890 - RNA, 19 nt, Homo sapiens
  misc_RNA (1)...(19): siRNA sense strand
aggaaaagccucauguaaa

SEQ ID NO: 455891 - RNA, 19 nt, Homo sapiens
  misc_RNA (1)...(19): siRNA sense strand
gggaacugcucuuuaauua

SEQ ID NO: 455892 - RNA, 19 nt, Homo sapiens
  misc_RNA (1)...(19): siRNA sense strand
ggaaaagccucauguaaaa

SEQ ID NO: 455893 - RNA, 19 nt, Homo sapiens
  misc_RNA (1)...(19): siRNA sense strand
gacgggaacugcucuuuaa

SEQ ID NO: 455894 - RNA, 19 nt, Homo sapiens
  misc_RNA (1)...(19): siRNA sense strand
gaagaugugucccaagcuu

SEQ ID NO: 455895 - RNA, 19 nt, Homo sapiens
  misc_RNA (1)...(19): siRNA sense strand
uaagaccauucgcgauuua

SEQ ID NO: 455896 - RNA, 19 nt, Homo sapiens
  misc_RNA (1)...(19): siRNA sense strand
ggacgggaacugcucuuua

SEQ ID NO: 455897 - RNA, 19 nt, Homo sapiens
  misc_RNA (1)...(19): siRNA sense strand
ggaagaggaagaagaguga

SEQ ID NO: 455898 - RNA, 19 nt, Homo sapiens
  misc_RNA (1)...(19): siRNA sense strand
agauuugacugcaagauug

SEQ ID NO: 455899 - RNA, 19 nt, Homo sapiens
  misc_RNA (1)...(19): siRNA sense strand
ggaugacgaugccaaguac

SEQ ID NO: 455900 - RNA, 19 nt, Homo sapiens
  misc_RNA (1)...(19): siRNA sense strand
gggaugacgaugccaagua

SEQ ID NO: 455901 - RNA, 19 nt, Homo sapiens
  misc_RNA (1)...(19): siRNA sense strand
cuaagaccauucgcgauuu

SEQ ID NO: 455902 - RNA, 19 nt, Homo sapiens
  misc_RNA (1)...(19): siRNA sense strand
guaaaacccuauuucucua

SEQ ID NO: 455903 - RNA, 19 nt, Homo sapiens
  misc_RNA (1)...(19): siRNA sense strand
ggaacugcucuuuaauuau

SEQ ID NO: 455904 - RNA, 19 nt, Homo sapiens
  misc_RNA (1)...(19): siRNA sense strand
acugcaagauugaaggaua

SEQ ID NO: 455905 - RNA, 19 nt, Homo sapiens
  misc_RNA (1)...(19): siRNA sense strand
ugucaacagucuuggagaa

SEQ ID NO: 455906 - RNA, 19 nt, Homo sapiens
  misc_RNA (1)...(19): siRNA sense strand
cauucgcgauuuagaaguu

SEQ ID NO: 455907 - RNA, 19 nt, Homo sapiens
  misc_RNA (1)...(19): siRNA sense strand
ccagauagacuacgaugag

SEQ ID NO: 455908 - RNA, 19 nt, Homo sapiens
  misc_RNA (1)...(19): siRNA sense strand
ccaaccagcccgcucaaug

SEQ ID NO: 455909 - RNA, 19 nt, Homo sapiens
  misc_RNA (1)...(19): siRNA sense strand
gaccauucgcgauuuagaa

SEQ ID NO: 455910 - RNA, 19 nt, Homo sapiens
  misc_RNA (1)...(19): siRNA sense strand
ucuaagaccauucgcgauu

SEQ ID NO: 455911 - RNA, 19 nt, Homo sapiens
  misc_RNA (1)...(19): siRNA sense strand
cgggaacugcucuuuaauu

SEQ ID NO: 455912 - RNA, 19 nt, Homo sapiens
  misc_RNA (1)...(19): siRNA sense strand
uagauuugacugcaagauu

SEQ ID NO: 455913 - RNA, 19 nt, Homo sapiens
  misc_RNA (1)...(19): siRNA sense strand
gauuugacugcaagauuga

SEQ ID NO: 455914 - RNA, 19 nt, Homo sapiens
  misc_RNA (1)...(19): siRNA sense strand
ucaacagggucaccaacca

SEQ ID NO: 455915 - RNA, 19 nt, Homo sapiens
  misc_RNA (1)...(19): siRNA sense strand
caaccagcccgcucaaugc

SEQ ID NO: 455916 - RNA, 19 nt, Homo sapiens
  misc_RNA (1)...(19): siRNA sense strand
aaacccuauuucucuaaga

SEQ ID NO: 455917 - RNA, 19 nt, Homo sapiens
  misc_RNA (1)...(19): siRNA sense strand
cuauuucucuaagaccauu

SEQ ID NO: 455918 - RNA, 19 nt, Homo sapiens
  misc_RNA (1)...(19): siRNA sense strand
aggaaaagccucauguaaa

SEQ ID NO: 455919 - RNA, 19 nt, Homo sapiens
  misc_RNA (1)...(19): siRNA sense strand
gggaacugcucuuuaauua

SEQ ID NO: 455920 - RNA, 19 nt, Homo sapiens
  misc_RNA (1)...(19): siRNA sense strand
ggaaaagccucauguaaaa

SEQ ID NO: 455921 - RNA, 19 nt, Homo sapiens
  misc_RNA (1)...(19): siRNA sense strand
gacgggaacugcucuuuaa

SEQ ID NO: 455922 - RNA, 19 nt, Homo sapiens
  misc_RNA (1)...(19): siRNA sense strand
gaagaugugucccaagcuu

SEQ ID NO: 455923 - RNA, 19 nt, Homo sapiens
  misc_RNA (1)...(19): siRNA sense strand
uaagaccauucgcgauuua

SEQ ID NO: 455924 - RNA, 19 nt, Homo sapiens
  misc_RNA (1)...(19): siRNA sense strand
ggacgggaacugcucuuua

SEQ ID NO: 455925 - RNA, 19 nt, Homo sapiens
  misc_RNA (1)...(19): siRNA sense strand
ggaagacuguccucuaugg

SEQ ID NO: 455926 - RNA, 19 nt, Homo sapiens
  misc_RNA (1)...(19): siRNA sense strand
ggaagaggaagaagaguga

SEQ ID NO: 455927 - RNA, 19 nt, Homo sapiens
  misc_RNA (1)...(19): siRNA sense strand
agauuugacugcaagauug

SEQ ID NO: 455928 - RNA, 19 nt, Homo sapiens
  misc_RNA (1)...(19): siRNA sense strand
ggaugacgaugccaaguac

SEQ ID NO: 455929 - RNA, 19 nt, Homo sapiens
  misc_RNA (1)...(19): siRNA sense strand
gggaugacgaugccaagua

SEQ ID NO: 455930 - RNA, 19 nt, Homo sapiens
  misc_RNA (1)...(19): siRNA sense strand
cuaagaccauucgcgauuu

SEQ ID NO: 455931 - RNA, 19 nt, Homo sapiens
  misc_RNA (1)...(19): siRNA sense strand
guaaaacccuauuucucua

SEQ ID NO: 455932 - RNA, 19 nt, Homo sapiens
  misc_RNA (1)...(19): siRNA sense strand
ggaacugcucuuuaauuau

SEQ ID NO: 455933 - RNA, 19 nt, Homo sapiens
  misc_RNA (1)...(19): siRNA sense strand
acugcaagauugaaggaua

SEQ ID NO: 455934 - RNA, 19 nt, Homo sapiens
  misc_RNA (1)...(19): siRNA sense strand
ugucaacagucuuggagaa

SEQ ID NO: 455935 - RNA, 19 nt, Homo sapiens
  misc_RNA (1)...(19): siRNA sense strand
cauucgcgauuuagaaguu

SEQ ID NO: 455936 - RNA, 19 nt, Homo sapiens
  misc_RNA (1)...(19): siRNA sense strand
ccagauagacuacgaugag

SEQ ID NO: 455937 - RNA, 19 nt, Homo sapiens
  misc_RNA (1)...(19): siRNA sense strand
ccaaccagcccgcucaaug

SEQ ID NO: 455938 - RNA, 19 nt, Homo sapiens
  misc_RNA (1)...(19): siRNA sense strand
gaccauucgcgauuuagaa

SEQ ID NO: 455939 - RNA, 19 nt, Homo sapiens
  misc_RNA (1)...(19): siRNA sense strand
uuggaagacuguccucuau

SEQ ID NO: 455940 - RNA, 19 nt, Homo sapiens
  misc_RNA (1)...(19): siRNA sense strand
ucuaagaccauucgcgauu

SEQ ID NO: 455941 - RNA, 19 nt, Homo sapiens
  misc_RNA (1)...(19): siRNA sense strand
gcugugagagccauuggaa

SEQ ID NO: 455942 - RNA, 19 nt, Homo sapiens
  misc_RNA (1)...(19): siRNA sense strand
cgggaacugcucuuuaauu

SEQ ID NO: 455943 - RNA, 19 nt, Homo sapiens
  misc_RNA (1)...(19): siRNA sense strand
ugugagagccauuggaaga

SEQ ID NO: 455944 - RNA, 19 nt, Homo sapiens
  misc_RNA (1)...(19): siRNA sense strand
uagauuugacugcaagauu

SEQ ID NO: 455945 - RNA, 19 nt, Homo sapiens
  misc_RNA (1)...(19): siRNA sense strand
ucaacagggucaccaacca

SEQ ID NO: 455946 - RNA, 19 nt, Homo sapiens
  misc_RNA (1)...(19): siRNA sense strand
gauuugacugcaagauuga

SEQ ID NO: 455947 - RNA, 19 nt, Homo sapiens
  misc_RNA (1)...(19): siRNA sense strand
caaccagcccgcucaaugc

SEQ ID NO: 455948 - RNA, 19 nt, Homo sapiens
  misc_RNA (1)...(19): siRNA sense strand
aaacccuauuucucuaaga

SEQ ID NO: 455949 - RNA, 19 nt, Homo sapiens
  misc_RNA (1)...(19): siRNA sense strand
cuauuucucuaagaccauu

SEQ ID NO: 455950 - RNA, 19 nt, Homo sapiens
  misc_RNA (1)...(19): siRNA sense strand
aggaaaagccucauguaaa

SEQ ID NO: 455951 - RNA, 19 nt, Homo sapiens
  misc_RNA (1)...(19): siRNA sense strand
gggaacugcucuuuaauua

SEQ ID NO: 455952 - RNA, 19 nt, Homo sapiens
  misc_RNA (1)...(19): siRNA sense strand
ggaaaagccucauguaaaa

SEQ ID NO: 455953 - RNA, 19 nt, Homo sapiens
  misc_RNA (1)...(19): siRNA sense strand
gacgggaacugcucuuuaa

SEQ ID NO: 455954 - RNA, 19 nt, Homo sapiens
  misc_RNA (1)...(19): siRNA sense strand
gaagaugugucccaagcuu

SEQ ID NO: 455955 - RNA, 19 nt, Homo sapiens
  misc_RNA (1)...(19): siRNA sense strand
uaagaccauucgcgauuua

SEQ ID NO: 455956 - RNA, 19 nt, Homo sapiens
  misc_RNA (1)...(19): siRNA sense strand
ggacgggaacugcucuuua

SEQ ID NO: 455957 - RNA, 19 nt, Homo sapiens
  misc_RNA (1)...(19): siRNA sense strand
ggaagacuguccucuaugg

SEQ ID NO: 455958 - RNA, 19 nt, Homo sapiens
  misc_RNA (1)...(19): siRNA sense strand
ggaagaggaagaagaguga

SEQ ID NO: 455959 - RNA, 19 nt, Homo sapiens
  misc_RNA (1)...(19): siRNA sense strand
agauuugacugcaagauug

SEQ ID NO: 455960 - RNA, 19 nt, Homo sapiens
  misc_RNA (1)...(19): siRNA sense strand
ggaugacgaugccaaguac

SEQ ID NO: 455961 - RNA, 19 nt, Homo sapiens
  misc_RNA (1)...(19): siRNA sense strand
gggaugacgaugccaagua

SEQ ID NO: 455962 - RNA, 19 nt, Homo sapiens
  misc_RNA (1)...(19): siRNA sense strand
cuaagaccauucgcgauuu

SEQ ID NO: 455963 - RNA, 19 nt, Homo sapiens
  misc_RNA (1)...(19): siRNA sense strand
guaaaacccuauuucucua

SEQ ID NO: 455964 - RNA, 19 nt, Homo sapiens
  misc_RNA (1)...(19): siRNA sense strand
ggaacugcucuuuaauuau

SEQ ID NO: 455965 - RNA, 19 nt, Homo sapiens
  misc_RNA (1)...(19): siRNA sense strand
acugcaagauugaaggaua

SEQ ID NO: 455966 - RNA, 19 nt, Homo sapiens
  misc_RNA (1)...(19): siRNA sense strand
ugucaacagucuuggagaa

SEQ ID NO: 455967 - RNA, 19 nt, Homo sapiens
  misc_RNA (1)...(19): siRNA sense strand
cauucgcgauuuagaaguu

SEQ ID NO: 455968 - RNA, 19 nt, Homo sapiens
  misc_RNA (1)...(19): siRNA sense strand
ccagauagacuacgaugag

SEQ ID NO: 455969 - RNA, 19 nt, Homo sapiens
  misc_RNA (1)...(19): siRNA sense strand
ccaaccagcccgcucaaug

SEQ ID NO: 455970 - RNA, 19 nt, Homo sapiens
  misc_RNA (1)...(19): siRNA sense strand
gaccauucgcgauuuagaa

SEQ ID NO: 455971 - RNA, 19 nt, Homo sapiens
  misc_RNA (1)...(19): siRNA sense strand
uuggaagacuguccucuau

SEQ ID NO: 455972 - RNA, 19 nt, Homo sapiens
  misc_RNA (1)...(19): siRNA sense strand
ucuaagaccauucgcgauu

SEQ ID NO: 455973 - RNA, 19 nt, Homo sapiens
  misc_RNA (1)...(19): siRNA sense strand
gcugugagagccauuggaa

SEQ ID NO: 455974 - RNA, 19 nt, Homo sapiens
  misc_RNA (1)...(19): siRNA sense strand
cgggaacugcucuuuaauu

SEQ ID NO: 455975 - RNA, 19 nt, Homo sapiens
  misc_RNA (1)...(19): siRNA sense strand
ugugagagccauuggaaga

SEQ ID NO: 455976 - RNA, 19 nt, Homo sapiens
  misc_RNA (1)...(19): siRNA sense strand
uagauuugacugcaagauu

SEQ ID NO: 455977 - RNA, 19 nt, Homo sapiens
  misc_RNA (1)...(19): siRNA sense strand
ucaacagggucaccaacca

SEQ ID NO: 455978 - RNA, 19 nt, Homo sapiens
  misc_RNA (1)...(19): siRNA sense strand
gauuugacugcaagauuga

SEQ ID NO: 455979 - RNA, 19 nt, Homo sapiens
  misc_RNA (1)...(19): siRNA sense strand
caaccagcccgcucaaugc

SEQ ID NO: 455980 - RNA, 19 nt, Homo sapiens
  misc_RNA (1)...(19): siRNA sense strand
aaacccuauuucucuaaga

SEQ ID NO: 455981 - RNA, 19 nt, Homo sapiens
  misc_RNA (1)...(19): siRNA sense strand
cuauuucucuaagaccauu

SEQ ID NO: 455982 - RNA, 19 nt, Homo sapiens
  misc_RNA (1)...(19): siRNA sense strand
aggaaaagccucauguaaa

SEQ ID NO: 455983 - RNA, 19 nt, Homo sapiens
  misc_RNA (1)...(19): siRNA sense strand
gggaacugcucuuuaauua

SEQ ID NO: 455984 - RNA, 19 nt, Homo sapiens
  misc_RNA (1)...(19): siRNA sense strand
ggaaaagccucauguaaaa

SEQ ID NO: 455985 - RNA, 19 nt, Homo sapiens
  misc_RNA (1)...(19): siRNA sense strand
gacgggaacugcucuuuaa

SEQ ID NO: 455986 - RNA, 19 nt, Homo sapiens
  misc_RNA (1)...(19): siRNA sense strand
gaagaugugucccaagcuu

SEQ ID NO: 455987 - RNA, 19 nt, Homo sapiens
  misc_RNA (1)...(19): siRNA sense strand
uaagaccauucgcgauuua

SEQ ID NO: 455988 - RNA, 19 nt, Homo sapiens
  misc_RNA (1)...(19): siRNA sense strand
ggacgggaacugcucuuua

SEQ ID NO: 455989 - RNA, 19 nt, Homo sapiens
  misc_RNA (1)...(19): siRNA sense strand
ggaagacuguccucuaugg

SEQ ID NO: 455990 - RNA, 19 nt, Homo sapiens
  misc_RNA (1)...(19): siRNA sense strand
ggaagaggaagaagaguga

SEQ ID NO: 455991 - RNA, 19 nt, Homo sapiens
  misc_RNA (1)...(19): siRNA sense strand
agauuugacugcaagauug

SEQ ID NO: 455992 - RNA, 19 nt, Homo sapiens
  misc_RNA (1)...(19): siRNA sense strand
ggaugacgaugccaaguac

SEQ ID NO: 455993 - RNA, 19 nt, Homo sapiens
  misc_RNA (1)...(19): siRNA sense strand
gggaugacgaugccaagua

SEQ ID NO: 455994 - RNA, 19 nt, Homo sapiens
  misc_RNA (1)...(19): siRNA sense strand
cuaagaccauucgcgauuu

SEQ ID NO: 455995 - RNA, 19 nt, Homo sapiens
  misc_RNA (1)...(19): siRNA sense strand
guaaaacccuauuucucua

SEQ ID NO: 455996 - RNA, 19 nt, Homo sapiens
  misc_RNA (1)...(19): siRNA sense strand
ggaacugcucuuuaauuau

SEQ ID NO: 455997 - RNA, 19 nt, Homo sapiens
  misc_RNA (1)...(19): siRNA sense strand
acugcaagauugaaggaua

SEQ ID NO: 455998 - RNA, 19 nt, Homo sapiens
  misc_RNA (1)...(19): siRNA sense strand
ugucaacagucuuggagaa

SEQ ID NO: 455999 - RNA, 19 nt, Homo sapiens
  misc_RNA (1)...(19): siRNA sense strand
cauucgcgauuuagaaguu

SEQ ID NO: 456000 - RNA, 19 nt, Homo sapiens
  misc_RNA (1)...(19): siRNA sense strand
ccagauagacuacgaugag

SEQ ID NO: 456001 - RNA, 19 nt, Homo sapiens
  misc_RNA (1)...(19): siRNA sense strand
ccaaccagcccgcucaaug

SEQ ID NO: 456002 - RNA, 19 nt, Homo sapiens
  misc_RNA (1)...(19): siRNA sense strand
gaccauucgcgauuuagaa

SEQ ID NO: 456003 - RNA, 19 nt, Homo sapiens
  misc_RNA (1)...(19): siRNA sense strand
uuggaagacuguccucuau

SEQ ID NO: 456004 - RNA, 19 nt, Homo sapiens
  misc_RNA (1)...(19): siRNA sense strand
ucuaagaccauucgcgauu

SEQ ID NO: 456005 - RNA, 19 nt, Homo sapiens
  misc_RNA (1)...(19): siRNA sense strand
gcugugagagccauuggaa

SEQ ID NO: 456006 - RNA, 19 nt, Homo sapiens
  misc_RNA (1)...(19): siRNA sense strand
cgggaacugcucuuuaauu

SEQ ID NO: 456007 - RNA, 19 nt, Homo sapiens
  misc_RNA (1)...(19): siRNA sense strand
ugugagagccauuggaaga

SEQ ID NO: 456008 - RNA, 19 nt, Homo sapiens
  misc_RNA (1)...(19): siRNA sense strand
uagauuugacugcaagauu

SEQ ID NO: 456009 - RNA, 19 nt, Homo sapiens
  misc_RNA (1)...(19): siRNA sense strand
ucaacagggucaccaacca

SEQ ID NO: 456010 - RNA, 19 nt, Homo sapiens
  misc_RNA (1)...(19): siRNA sense strand
gauuugacugcaagauuga

SEQ ID NO: 456011 - RNA, 19 nt, Homo sapiens
  misc_RNA (1)...(19): siRNA sense strand
caaccagcccgcucaaugc

SEQ ID NO: 456012 - RNA, 19 nt, Homo sapiens
  misc_RNA (1)...(19): siRNA sense strand
aaacccuauuucucuaaga

SEQ ID NO: 456013 - RNA, 19 nt, Homo sapiens
  misc_RNA (1)...(19): siRNA sense strand
cuauuucucuaagaccauu

SEQ ID NO: 456014 - RNA, 19 nt, Homo sapiens
  misc_RNA (1)...(19): siRNA sense strand
aggaaaagccucauguaaa

SEQ ID NO: 456015 - RNA, 19 nt, Homo sapiens
  misc_RNA (1)...(19): siRNA sense strand
gggaacugcucuuuaauua

SEQ ID NO: 456016 - RNA, 19 nt, Homo sapiens
  misc_RNA (1)...(19): siRNA sense strand
ggaaaagccucauguaaaa

SEQ ID NO: 456017 - RNA, 19 nt, Homo sapiens
  misc_RNA (1)...(19): siRNA sense strand
gacgggaacugcucuuuaa

SEQ ID NO: 456018 - RNA, 19 nt, Homo sapiens
  misc_RNA (1)...(19): siRNA sense strand
gaagaugugucccaagcuu

SEQ ID NO: 456019 - RNA, 19 nt, Homo sapiens
  misc_RNA (1)...(19): siRNA sense strand
uaagaccauucgcgauuua

SEQ ID NO: 456020 - RNA, 19 nt, Homo sapiens
  misc_RNA (1)...(19): siRNA sense strand
ggacgggaacugcucuuua

SEQ ID NO: 456021 - RNA, 19 nt, Homo sapiens
  misc_RNA (1)...(19): siRNA sense strand
ggaagacuguccucuaugg

SEQ ID NO: 456022 - RNA, 19 nt, Homo sapiens
  misc_RNA (1)...(19): siRNA sense strand
ggaagaggaagaagaguga

SEQ ID NO: 456023 - RNA, 19 nt, Homo sapiens
  misc_RNA (1)...(19): siRNA sense strand
agauuugacugcaagauug

SEQ ID NO: 456024 - RNA, 19 nt, Homo sapiens
  misc_RNA (1)...(19): siRNA sense strand
ggaugacgaugccaaguac

SEQ ID NO: 456025 - RNA, 19 nt, Homo sapiens
  misc_RNA (1)...(19): siRNA sense strand
gggaugacgaugccaagua

SEQ ID NO: 456026 - RNA, 19 nt, Homo sapiens
  misc_RNA (1)...(19): siRNA sense strand
cuaagaccauucgcgauuu

SEQ ID NO: 456027 - RNA, 19 nt, Homo sapiens
  misc_RNA (1)...(19): siRNA sense strand
guaaaacccuauuucucua

SEQ ID NO: 456028 - RNA, 19 nt, Homo sapiens
  misc_RNA (1)...(19): siRNA sense strand
ggaacugcucuuuaauuau

SEQ ID NO: 456029 - RNA, 19 nt, Homo sapiens
  misc_RNA (1)...(19): siRNA sense strand
acugcaagauugaaggaua

SEQ ID NO: 456030 - RNA, 19 nt, Homo sapiens
  misc_RNA (1)...(19): siRNA sense strand
ugucaacagucuuggagaa

SEQ ID NO: 456031 - RNA, 19 nt, Homo sapiens
  misc_RNA (1)...(19): siRNA sense strand
cauucgcgauuuagaaguu

SEQ ID NO: 456032 - RNA, 19 nt, Homo sapiens
  misc_RNA (1)...(19): siRNA sense strand
ccagauagacuacgaugag

SEQ ID NO: 456033 - RNA, 19 nt, Homo sapiens
  misc_RNA (1)...(19): siRNA sense strand
ccaaccagcccgcucaaug

SEQ ID NO: 456034 - RNA, 19 nt, Homo sapiens
  misc_RNA (1)...(19): siRNA sense strand
gaccauucgcgauuuagaa

SEQ ID NO: 456035 - RNA, 19 nt, Homo sapiens
  misc_RNA (1)...(19): siRNA sense strand
uuggaagacuguccucuau

SEQ ID NO: 456036 - RNA, 19 nt, Homo sapiens
  misc_RNA (1)...(19): siRNA sense strand
ucuaagaccauucgcgauu

SEQ ID NO: 456037 - RNA, 19 nt, Homo sapiens
  misc_RNA (1)...(19): siRNA sense strand
gcugugagagccauuggaa

SEQ ID NO: 456038 - RNA, 19 nt, Homo sapiens
  misc_RNA (1)...(19): siRNA sense strand
cgggaacugcucuuuaauu

SEQ ID NO: 456039 - RNA, 19 nt, Homo sapiens
  misc_RNA (1)...(19): siRNA sense strand
ugugagagccauuggaaga

SEQ ID NO: 456040 - RNA, 19 nt, Homo sapiens
  misc_RNA (1)...(19): siRNA sense strand
uagauuugacugcaagauu

SEQ ID NO: 456041 - RNA, 19 nt, Homo sapiens
  misc_RNA (1)...(19): siRNA sense strand
ucaacagggucaccaacca

SEQ ID NO: 456042 - RNA, 19 nt, Homo sapiens
  misc_RNA (1)...(19): siRNA sense strand
gauuugacugcaagauuga

SEQ ID NO: 456043 - RNA, 19 nt, Homo sapiens
  misc_RNA (1)...(19): siRNA sense strand
caaccagcccgcucaaugc

SEQ ID NO: 456044 - RNA, 19 nt, Homo sapiens
  misc_RNA (1)...(19): siRNA sense strand
aaacccuauuucucuaaga

SEQ ID NO: 456045 - RNA, 19 nt, Homo sapiens
  misc_RNA (1)...(19): siRNA sense strand
cuauuucucuaagaccauu

SEQ ID NO: 456046 - RNA, 19 nt, Homo sapiens
  misc_RNA (1)...(19): siRNA sense strand
aggaaaagccucauguaaa

SEQ ID NO: 456047 - RNA, 19 nt, Homo sapiens
  misc_RNA (1)...(19): siRNA sense strand
gggaacugcucuuuaauua

SEQ ID NO: 456048 - RNA, 19 nt, Homo sapiens
  misc_RNA (1)...(19): siRNA sense strand
ggaaaagccucauguaaaa

SEQ ID NO: 456049 - RNA, 19 nt, Homo sapiens
  misc_RNA (1)...(19): siRNA sense strand
gacgggaacugcucuuuaa

SEQ ID NO: 456050 - RNA, 19 nt, Homo sapiens
  misc_RNA (1)...(19): siRNA sense strand
gaagaugugucccaagcuu

SEQ ID NO: 456051 - RNA, 19 nt, Homo sapiens
  misc_RNA (1)...(19): siRNA sense strand
uaagaccauucgcgauuua

SEQ ID NO: 456052 - RNA, 19 nt, Homo sapiens
  misc_RNA (1)...(19): siRNA sense strand
ggacgggaacugcucuuua

SEQ ID NO: 456053 - RNA, 19 nt, Homo sapiens
  misc_RNA (1)...(19): siRNA sense strand
ggaagacuguccucuaugg

SEQ ID NO: 456054 - RNA, 19 nt, Homo sapiens
  misc_RNA (1)...(19): siRNA sense strand
ggaagaggaagaagaguga

SEQ ID NO: 456055 - RNA, 19 nt, Homo sapiens
  misc_RNA (1)...(19): siRNA sense strand
agauuugacugcaagauug

SEQ ID NO: 456056 - RNA, 19 nt, Homo sapiens
  misc_RNA (1)...(19): siRNA sense strand
ggaugacgaugccaaguac

SEQ ID NO: 456057 - RNA, 19 nt, Homo sapiens
  misc_RNA (1)...(19): siRNA sense strand
gggaugacgaugccaagua

SEQ ID NO: 456058 - RNA, 19 nt, Homo sapiens
  misc_RNA (1)...(19): siRNA sense strand
cuaagaccauucgcgauuu

SEQ ID NO: 456059 - RNA, 19 nt, Homo sapiens
  misc_RNA (1)...(19): siRNA sense strand
guaaaacccuauuucucua

SEQ ID NO: 456060 - RNA, 19 nt, Homo sapiens
  misc_RNA (1)...(19): siRNA sense strand
ggaacugcucuuuaauuau

SEQ ID NO: 456061 - RNA, 19 nt, Homo sapiens
  misc_RNA (1)...(19): siRNA sense strand
acugcaagauugaaggaua

SEQ ID NO: 456062 - RNA, 19 nt, Homo sapiens
  misc_RNA (1)...(19): siRNA sense strand
ugucaacagucuuggagaa

SEQ ID NO: 456063 - RNA, 19 nt, Homo sapiens
  misc_RNA (1)...(19): siRNA sense strand
cauucgcgauuuagaaguu

SEQ ID NO: 456064 - RNA, 19 nt, Homo sapiens
  misc_RNA (1)...(19): siRNA sense strand
ccagauagacuacgaugag

SEQ ID NO: 456065 - RNA, 19 nt, Homo sapiens
  misc_RNA (1)...(19): siRNA sense strand
ccaaccagcccgcucaaug

SEQ ID NO: 456066 - RNA, 19 nt, Homo sapiens
  misc_RNA (1)...(19): siRNA sense strand
gaccauucgcgauuuagaa

SEQ ID NO: 456067 - RNA, 19 nt, Homo sapiens
  misc_RNA (1)...(19): siRNA sense strand
uuggaagacuguccucuau

SEQ ID NO: 456068 - RNA, 19 nt, Homo sapiens
  misc_RNA (1)...(19): siRNA sense strand
ucuaagaccauucgcgauu

SEQ ID NO: 456069 - RNA, 19 nt, Homo sapiens
  misc_RNA (1)...(19): siRNA sense strand
gcugugagagccauuggaa

SEQ ID NO: 456070 - RNA, 19 nt, Homo sapiens
  misc_RNA (1)...(19): siRNA sense strand
cgggaacugcucuuuaauu

SEQ ID NO: 456071 - RNA, 19 nt, Homo sapiens
  misc_RNA (1)...(19): siRNA sense strand
ugugagagccauuggaaga

SEQ ID NO: 456072 - RNA, 19 nt, Homo sapiens
  misc_RNA (1)...(19): siRNA sense strand
uagauuugacugcaagauu

SEQ ID NO: 456073 - RNA, 19 nt, Homo sapiens
  misc_RNA (1)...(19): siRNA sense strand
ucaacagggucaccaacca

SEQ ID NO: 456074 - RNA, 19 nt, Homo sapiens
  misc_RNA (1)...(19): siRNA sense strand
gauuugacugcaagauuga

SEQ ID NO: 456075 - RNA, 19 nt, Homo sapiens
  misc_RNA (1)...(19): siRNA sense strand
caaccagcccgcucaaugc

SEQ ID NO: 456076 - RNA, 19 nt, Homo sapiens
  misc_RNA (1)...(19): siRNA sense strand
aaacccuauuucucuaaga

SEQ ID NO: 456077 - RNA, 19 nt, Homo sapiens
  misc_RNA (1)...(19): siRNA sense strand
cuauuucucuaagaccauu

SEQ ID NO: 456078 - RNA, 19 nt, Homo sapiens
  misc_RNA (1)...(19): siRNA sense strand
aggaaaagccucauguaaa

SEQ ID NO: 456079 - RNA, 19 nt, Homo sapiens
  misc_RNA (1)...(19): siRNA sense strand
gggaacugcucuuuaauua

SEQ ID NO: 456080 - RNA, 19 nt, Homo sapiens
  misc_RNA (1)...(19): siRNA sense strand
ggaaaagccucauguaaaa

SEQ ID NO: 456081 - RNA, 19 nt, Homo sapiens
  misc_RNA (1)...(19): siRNA sense strand
gacgggaacugcucuuuaa

SEQ ID NO: 456082 - RNA, 19 nt, Homo sapiens
  misc_RNA (1)...(19): siRNA sense strand
gaagaugugucccaagcuu

SEQ ID NO: 456083 - RNA, 19 nt, Homo sapiens
  misc_RNA (1)...(19): siRNA sense strand
uaagaccauucgcgauuua

SEQ ID NO: 456084 - RNA, 19 nt, Homo sapiens
  misc_RNA (1)...(19): siRNA sense strand
ggacgggaacugcucuuua

SEQ ID NO: 456085 - RNA, 19 nt, Homo sapiens
  misc_RNA (1)...(19): siRNA sense strand
ggaagacuguccucuaugg

SEQ ID NO: 456086 - RNA, 19 nt, Homo sapiens
  misc_RNA (1)...(19): siRNA sense strand
ggaagaggaagaagaguga

SEQ ID NO: 456087 - RNA, 19 nt, Homo sapiens
  misc_RNA (1)...(19): siRNA sense strand
agauuugacugcaagauug

SEQ ID NO: 456088 - RNA, 19 nt, Homo sapiens
  misc_RNA (1)...(19): siRNA sense strand
ggaugacgaugccaaguac

SEQ ID NO: 456089 - RNA, 19 nt, Homo sapiens
  misc_RNA (1)...(19): siRNA sense strand
gggaugacgaugccaagua

SEQ ID NO: 456090 - RNA, 19 nt, Homo sapiens
  misc_RNA (1)...(19): siRNA sense strand
cuaagaccauucgcgauuu

SEQ ID NO: 456091 - RNA, 19 nt, Homo sapiens
  misc_RNA (1)...(19): siRNA sense strand
guaaaacccuauuucucua

SEQ ID NO: 456092 - RNA, 19 nt, Homo sapiens
  misc_RNA (1)...(19): siRNA sense strand
ggaacugcucuuuaauuau

SEQ ID NO: 456093 - RNA, 19 nt, Homo sapiens
  misc_RNA (1)...(19): siRNA sense strand
acugcaagauugaaggaua

SEQ ID NO: 456094 - RNA, 19 nt, Homo sapiens
  misc_RNA (1)...(19): siRNA sense strand
ugucaacagucuuggagaa

SEQ ID NO: 456095 - RNA, 19 nt, Homo sapiens
  misc_RNA (1)...(19): siRNA sense strand
cauucgcgauuuagaaguu

SEQ ID NO: 456096 - RNA, 19 nt, Homo sapiens
  misc_RNA (1)...(19): siRNA sense strand
ccagauagacuacgaugag

SEQ ID NO: 456097 - RNA, 19 nt, Homo sapiens
  misc_RNA (1)...(19): siRNA sense strand
ccaaccagcccgcucaaug

SEQ ID NO: 456098 - RNA, 19 nt, Homo sapiens
  misc_RNA (1)...(19): siRNA sense strand
gaccauucgcgauuuagaa

SEQ ID NO: 456099 - RNA, 19 nt, Homo sapiens
  misc_RNA (1)...(19): siRNA sense strand
uuggaagacuguccucuau

SEQ ID NO: 456100 - RNA, 19 nt, Homo sapiens
  misc_RNA (1)...(19): siRNA sense strand
ucuaagaccauucgcgauu

SEQ ID NO: 456101 - RNA, 19 nt, Homo sapiens
  misc_RNA (1)...(19): siRNA sense strand
gcugugagagccauuggaa

SEQ ID NO: 456102 - RNA, 19 nt, Homo sapiens
  misc_RNA (1)...(19): siRNA sense strand
cgggaacugcucuuuaauu

SEQ ID NO: 456103 - RNA, 19 nt, Homo sapiens
  misc_RNA (1)...(19): siRNA sense strand
ugugagagccauuggaaga

SEQ ID NO: 456104 - RNA, 19 nt, Homo sapiens
  misc_RNA (1)...(19): siRNA sense strand
uagauuugacugcaagauu

SEQ ID NO: 456105 - RNA, 19 nt, Homo sapiens
  misc_RNA (1)...(19): siRNA sense strand
ucaacagggucaccaacca

SEQ ID NO: 456106 - RNA, 19 nt, Homo sapiens
  misc_RNA (1)...(19): siRNA sense strand
gauuugacugcaagauuga

SEQ ID NO: 456107 - RNA, 19 nt, Homo sapiens
  misc_RNA (1)...(19): siRNA sense strand
caaccagcccgcucaaugc

SEQ ID NO: 456108 - RNA, 19 nt, Homo sapiens
  misc_RNA (1)...(19): siRNA sense strand
aaacccuauuucucuaaga

SEQ ID NO: 456109 - RNA, 19 nt, Homo sapiens
  misc_RNA (1)...(19): siRNA sense strand
cuauuucucuaagaccauu

SEQ ID NO: 456110 - RNA, 19 nt, Homo sapiens
  misc_RNA (1)...(19): siRNA sense strand
aggaaaagccucauguaaa

SEQ ID NO: 456111 - RNA, 19 nt, Homo sapiens
  misc_RNA (1)...(19): siRNA sense strand
gggaacugcucuuuaauua

SEQ ID NO: 456112 - RNA, 19 nt, Homo sapiens
  misc_RNA (1)...(19): siRNA sense strand
ggaaaagccucauguaaaa

SEQ ID NO: 456113 - RNA, 19 nt, Homo sapiens
  misc_RNA (1)...(19): siRNA sense strand
gacgggaacugcucuuuaa

SEQ ID NO: 456114 - RNA, 19 nt, Homo sapiens
  misc_RNA (1)...(19): siRNA sense strand
gaagaugugucccaagcuu

SEQ ID NO: 456115 - RNA, 19 nt, Homo sapiens
  misc_RNA (1)...(19): siRNA sense strand
uaagaccauucgcgauuua

SEQ ID NO: 456116 - RNA, 19 nt, Homo sapiens
  misc_RNA (1)...(19): siRNA sense strand
ggacgggaacugcucuuua

SEQ ID NO: 456117 - RNA, 19 nt, Homo sapiens
  misc_RNA (1)...(19): siRNA sense strand
ggaagacuguccucuaugg

SEQ ID NO: 456118 - RNA, 19 nt, Homo sapiens
  misc_RNA (1)...(19): siRNA sense strand
ggaagaggaagaagaguga

SEQ ID NO: 456119 - RNA, 19 nt, Homo sapiens
  misc_RNA (1)...(19): siRNA sense strand
agauuugacugcaagauug

SEQ ID NO: 456120 - RNA, 19 nt, Homo sapiens
  misc_RNA (1)...(19): siRNA sense strand
ggaugacgaugccaaguac

SEQ ID NO: 456121 - RNA, 19 nt, Homo sapiens
  misc_RNA (1)...(19): siRNA sense strand
gggaugacgaugccaagua

SEQ ID NO: 456122 - RNA, 19 nt, Homo sapiens
  misc_RNA (1)...(19): siRNA sense strand
cuaagaccauucgcgauuu

SEQ ID NO: 456123 - RNA, 19 nt, Homo sapiens
  misc_RNA (1)...(19): siRNA sense strand
guaaaacccuauuucucua

SEQ ID NO: 456124 - RNA, 19 nt, Homo sapiens
  misc_RNA (1)...(19): siRNA sense strand
ggaacugcucuuuaauuau

SEQ ID NO: 456125 - RNA, 19 nt, Homo sapiens
  misc_RNA (1)...(19): siRNA sense strand
acugcaagauugaaggaua

SEQ ID NO: 456126 - RNA, 19 nt, Homo sapiens
  misc_RNA (1)...(19): siRNA sense strand
ugucaacagucuuggagaa

SEQ ID NO: 456127 - RNA, 19 nt, Homo sapiens
  misc_RNA (1)...(19): siRNA sense strand
cauucgcgauuuagaaguu

SEQ ID NO: 456128 - RNA, 19 nt, Homo sapiens
  misc_RNA (1)...(19): siRNA sense strand
ccagauagacuacgaugag

SEQ ID NO: 456129 - RNA, 19 nt, Homo sapiens
  misc_RNA (1)...(19): siRNA sense strand
ccaaccagcccgcucaaug

SEQ ID NO: 456130 - RNA, 19 nt, Homo sapiens
  misc_RNA (1)...(19): siRNA sense strand
gaccauucgcgauuuagaa

SEQ ID NO: 456131 - RNA, 19 nt, Homo sapiens
  misc_RNA (1)...(19): siRNA sense strand
uuggaagacuguccucuau

SEQ ID NO: 456132 - RNA, 19 nt, Homo sapiens
  misc_RNA (1)...(19): siRNA sense strand
ucuaagaccauucgcgauu

SEQ ID NO: 456133 - RNA, 19 nt, Homo sapiens
  misc_RNA (1)...(19): siRNA sense strand
gcugugagagccauuggaa

SEQ ID NO: 456134 - RNA, 19 nt, Homo sapiens
  misc_RNA (1)...(19): siRNA sense strand
cgggaacugcucuuuaauu

SEQ ID NO: 456135 - RNA, 19 nt, Homo sapiens
  misc_RNA (1)...(19): siRNA sense strand
ugugagagccauuggaaga

SEQ ID NO: 456136 - RNA, 19 nt, Homo sapiens
  misc_RNA (1)...(19): siRNA sense strand
uagauuugacugcaagauu

SEQ ID NO: 456137 - RNA, 19 nt, Homo sapiens
  misc_RNA (1)...(19): siRNA sense strand
ucaacagggucaccaacca

SEQ ID NO: 456138 - RNA, 19 nt, Homo sapiens
  misc_RNA (1)...(19): siRNA sense strand
gauuugacugcaagauuga

SEQ ID NO: 456139 - RNA, 19 nt, Homo sapiens
  misc_RNA (1)...(19): siRNA sense strand
caaccagcccgcucaaugc

SEQ ID NO: 456140 - RNA, 19 nt, Homo sapiens
  misc_RNA (1)...(19): siRNA sense strand
aaacccuauuucucuaaga

SEQ ID NO: 456141 - RNA, 19 nt, Homo sapiens
  misc_RNA (1)...(19): siRNA sense strand
cuauuucucuaagaccauu

SEQ ID NO: 456142 - RNA, 19 nt, Homo sapiens
  misc_RNA (1)...(19): siRNA sense strand
aggaaaagccucauguaaa

SEQ ID NO: 456143 - RNA, 19 nt, Homo sapiens
  misc_RNA (1)...(19): siRNA sense strand
gggaacugcucuuuaauua

SEQ ID NO: 456144 - RNA, 19 nt, Homo sapiens
  misc_RNA (1)...(19): siRNA sense strand
ggaaaagccucauguaaaa

SEQ ID NO: 456145 - RNA, 19 nt, Homo sapiens
  misc_RNA (1)...(19): siRNA sense strand
gacgggaacugcucuuuaa

SEQ ID NO: 456146 - RNA, 19 nt, Homo sapiens
  misc_RNA (1)...(19): siRNA sense strand
gaagaugugucccaagcuu

SEQ ID NO: 456147 - RNA, 19 nt, Homo sapiens
  misc_RNA (1)...(19): siRNA sense strand
uaagaccauucgcgauuua

SEQ ID NO: 456148 - RNA, 19 nt, Homo sapiens
  misc_RNA (1)...(19): siRNA sense strand
ggacgggaacugcucuuua

SEQ ID NO: 456149 - RNA, 19 nt, Homo sapiens
  misc_RNA (1)...(19): siRNA sense strand
ggaagaggaagaagaguga

SEQ ID NO: 456150 - RNA, 19 nt, Homo sapiens
  misc_RNA (1)...(19): siRNA sense strand
agauuugacugcaagauug

SEQ ID NO: 456151 - RNA, 19 nt, Homo sapiens
  misc_RNA (1)...(19): siRNA sense strand
ggaugacgaugccaaguac

SEQ ID NO: 456152 - RNA, 19 nt, Homo sapiens
  misc_RNA (1)...(19): siRNA sense strand
gggaugacgaugccaagua

SEQ ID NO: 456153 - RNA, 19 nt, Homo sapiens
  misc_RNA (1)...(19): siRNA sense strand
cuaagaccauucgcgauuu

SEQ ID NO: 456154 - RNA, 19 nt, Homo sapiens
  misc_RNA (1)...(19): siRNA sense strand
guaaaacccuauuucucua

SEQ ID NO: 456155 - RNA, 19 nt, Homo sapiens
  misc_RNA (1)...(19): siRNA sense strand
ggaacugcucuuuaauuau

SEQ ID NO: 456156 - RNA, 19 nt, Homo sapiens
  misc_RNA (1)...(19): siRNA sense strand
acugcaagauugaaggaua

SEQ ID NO: 456157 - RNA, 19 nt, Homo sapiens
  misc_RNA (1)...(19): siRNA sense strand
ugucaacagucuuggagaa

SEQ ID NO: 456158 - RNA, 19 nt, Homo sapiens
  misc_RNA (1)...(19): siRNA sense strand
cauucgcgauuuagaaguu

SEQ ID NO: 456159 - RNA, 19 nt, Homo sapiens
  misc_RNA (1)...(19): siRNA sense strand
ccagauagacuacgaugag

SEQ ID NO: 456160 - RNA, 19 nt, Homo sapiens
  misc_RNA (1)...(19): siRNA sense strand
ccaaccagcccgcucaaug

SEQ ID NO: 456161 - RNA, 19 nt, Homo sapiens
  misc_RNA (1)...(19): siRNA sense strand
gaccauucgcgauuuagaa

SEQ ID NO: 456162 - RNA, 19 nt, Homo sapiens
  misc_RNA (1)...(19): siRNA sense strand
ucuaagaccauucgcgauu

SEQ ID NO: 456163 - RNA, 19 nt, Homo sapiens
  misc_RNA (1)...(19): siRNA sense strand
cgggaacugcucuuuaauu

SEQ ID NO: 456164 - RNA, 19 nt, Homo sapiens
  misc_RNA (1)...(19): siRNA sense strand
uagauuugacugcaagauu

SEQ ID NO: 456165 - RNA, 19 nt, Homo sapiens
  misc_RNA (1)...(19): siRNA sense strand
gauuugacugcaagauuga

SEQ ID NO: 456166 - RNA, 19 nt, Homo sapiens
  misc_RNA (1)...(19): siRNA sense strand
ucaacagggucaccaacca

SEQ ID NO: 456167 - RNA, 19 nt, Homo sapiens
  misc_RNA (1)...(19): siRNA sense strand
caaccagcccgcucaaugc

SEQ ID NO: 456168 - RNA, 19 nt, Homo sapiens
  misc_RNA (1)...(19): siRNA sense strand
aaacccuauuucucuaaga

SEQ ID NO: 456169 - RNA, 19 nt, Homo sapiens
  misc_RNA (1)...(19): siRNA sense strand
cuauuucucuaagaccauu

SEQ ID NO: 456170 - RNA, 19 nt, Homo sapiens
  misc_RNA (1)...(19): siRNA sense strand
aggaaaagccucauguaaa

SEQ ID NO: 456171 - RNA, 19 nt, Homo sapiens
  misc_RNA (1)...(19): siRNA sense strand
gggaacugcucuuuaauua

SEQ ID NO: 456172 - RNA, 19 nt, Homo sapiens
  misc_RNA (1)...(19): siRNA sense strand
ggaaaagccucauguaaaa

SEQ ID NO: 456173 - RNA, 19 nt, Homo sapiens
  misc_RNA (1)...(19): siRNA sense strand
gacgggaacugcucuuuaa

SEQ ID NO: 456174 - RNA, 19 nt, Homo sapiens
  misc_RNA (1)...(19): siRNA sense strand
gaagaugugucccaagcuu

SEQ ID NO: 456175 - RNA, 19 nt, Homo sapiens
  misc_RNA (1)...(19): siRNA sense strand
uaagaccauucgcgauuua

SEQ ID NO: 456176 - RNA, 19 nt, Homo sapiens
  misc_RNA (1)...(19): siRNA sense strand
ggacgggaacugcucuuua

SEQ ID NO: 456177 - RNA, 19 nt, Homo sapiens
  misc_RNA (1)...(19): siRNA sense strand
ggaagaggaagaagaguga

SEQ ID NO: 456178 - RNA, 19 nt, Homo sapiens
  misc_RNA (1)...(19): siRNA sense strand
agauuugacugcaagauug

SEQ ID NO: 456179 - RNA, 19 nt, Homo sapiens
  misc_RNA (1)...(19): siRNA sense strand
ggaugacgaugccaaguac

SEQ ID NO: 456180 - RNA, 19 nt, Homo sapiens
  misc_RNA (1)...(19): siRNA sense strand
gggaugacgaugccaagua

SEQ ID NO: 456181 - RNA, 19 nt, Homo sapiens
  misc_RNA (1)...(19): siRNA sense strand
cuaagaccauucgcgauuu

SEQ ID NO: 456182 - RNA, 19 nt, Homo sapiens
  misc_RNA (1)...(19): siRNA sense strand
guaaaacccuauuucucua

SEQ ID NO: 456183 - RNA, 19 nt, Homo sapiens
  misc_RNA (1)...(19): siRNA sense strand
ggaacugcucuuuaauuau

SEQ ID NO: 456184 - RNA, 19 nt, Homo sapiens
  misc_RNA (1)...(19): siRNA sense strand
acugcaagauugaaggaua

SEQ ID NO: 456185 - RNA, 19 nt, Homo sapiens
  misc_RNA (1)...(19): siRNA sense strand
ugucaacagucuuggagaa

SEQ ID NO: 456186 - RNA, 19 nt, Homo sapiens
  misc_RNA (1)...(19): siRNA sense strand
cauucgcgauuuagaaguu

SEQ ID NO: 456187 - RNA, 19 nt, Homo sapiens
  misc_RNA (1)...(19): siRNA sense strand
ccagauagacuacgaugag

SEQ ID NO: 456188 - RNA, 19 nt, Homo sapiens
  misc_RNA (1)...(19): siRNA sense strand
ccaaccagcccgcucaaug

SEQ ID NO: 456189 - RNA, 19 nt, Homo sapiens
  misc_RNA (1)...(19): siRNA sense strand
gaccauucgcgauuuagaa

SEQ ID NO: 456190 - RNA, 19 nt, Homo sapiens
  misc_RNA (1)...(19): siRNA sense strand
ucuaagaccauucgcgauu

SEQ ID NO: 456191 - RNA, 19 nt, Homo sapiens
  misc_RNA (1)...(19): siRNA sense strand
cgggaacugcucuuuaauu

SEQ ID NO: 456192 - RNA, 19 nt, Homo sapiens
  misc_RNA (1)...(19): siRNA sense strand
uagauuugacugcaagauu

SEQ ID NO: 456193 - RNA, 19 nt, Homo sapiens
  misc_RNA (1)...(19): siRNA sense strand
gauuugacugcaagauuga

SEQ ID NO: 456194 - RNA, 19 nt, Homo sapiens
  misc_RNA (1)...(19): siRNA sense strand
ucaacagggucaccaacca

SEQ ID NO: 456195 - RNA, 19 nt, Homo sapiens
  misc_RNA (1)...(19): siRNA sense strand
caaccagcccgcucaaugc

SEQ ID NO: 456196 - RNA, 19 nt, Homo sapiens
  misc_RNA (1)...(19): siRNA sense strand
aaacccuauuucucuaaga

SEQ ID NO: 456197 - RNA, 19 nt, Homo sapiens
  misc_RNA (1)...(19): siRNA sense strand
cuauuucucuaagaccauu

SEQ ID NO: 456198 - RNA, 19 nt, Homo sapiens
  misc_RNA (1)...(19): siRNA sense strand
aggaaaagccucauguaaa

SEQ ID NO: 456199 - RNA, 19 nt, Homo sapiens
  misc_RNA (1)...(19): siRNA sense strand
gggaacugcucuuuaauua

SEQ ID NO: 456200 - RNA, 19 nt, Homo sapiens
  misc_RNA (1)...(19): siRNA sense strand
ggaaaagccucauguaaaa

SEQ ID NO: 456201 - RNA, 19 nt, Homo sapiens
  misc_RNA (1)...(19): siRNA sense strand
gacgggaacugcucuuuaa

SEQ ID NO: 456202 - RNA, 19 nt, Homo sapiens
  misc_RNA (1)...(19): siRNA sense strand
gaagaugugucccaagcuu

SEQ ID NO: 456203 - RNA, 19 nt, Homo sapiens
  misc_RNA (1)...(19): siRNA sense strand
uaagaccauucgcgauuua

SEQ ID NO: 456204 - RNA, 19 nt, Homo sapiens
  misc_RNA (1)...(19): siRNA sense strand
ggacgggaacugcucuuua

SEQ ID NO: 456205 - RNA, 19 nt, Homo sapiens
  misc_RNA (1)...(19): siRNA sense strand
ggaagacuguccucuaugg

SEQ ID NO: 456206 - RNA, 19 nt, Homo sapiens
  misc_RNA (1)...(19): siRNA sense strand
ggaagaggaagaagaguga

SEQ ID NO: 456207 - RNA, 19 nt, Homo sapiens
  misc_RNA (1)...(19): siRNA sense strand
agauuugacugcaagauug

SEQ ID NO: 456208 - RNA, 19 nt, Homo sapiens
  misc_RNA (1)...(19): siRNA sense strand
ggaugacgaugccaaguac

SEQ ID NO: 456209 - RNA, 19 nt, Homo sapiens
  misc_RNA (1)...(19): siRNA sense strand
gggaugacgaugccaagua

SEQ ID NO: 456210 - RNA, 19 nt, Homo sapiens
  misc_RNA (1)...(19): siRNA sense strand
cuaagaccauucgcgauuu

SEQ ID NO: 456211 - RNA, 19 nt, Homo sapiens
  misc_RNA (1)...(19): siRNA sense strand
guaaaacccuauuucucua

SEQ ID NO: 456212 - RNA, 19 nt, Homo sapiens
  misc_RNA (1)...(19): siRNA sense strand
ggaacugcucuuuaauuau

SEQ ID NO: 456213 - RNA, 19 nt, Homo sapiens
  misc_RNA (1)...(19): siRNA sense strand
acugcaagauugaaggaua

SEQ ID NO: 456214 - RNA, 19 nt, Homo sapiens
  misc_RNA (1)...(19): siRNA sense strand
ugucaacagucuuggagaa

SEQ ID NO: 456215 - RNA, 19 nt, Homo sapiens
  misc_RNA (1)...(19): siRNA sense strand
cauucgcgauuuagaaguu

SEQ ID NO: 456216 - RNA, 19 nt, Homo sapiens
  misc_RNA (1)...(19): siRNA sense strand
ccagauagacuacgaugag

SEQ ID NO: 456217 - RNA, 19 nt, Homo sapiens
  misc_RNA (1)...(19): siRNA sense strand
ccaaccagcccgcucaaug

SEQ ID NO: 456218 - RNA, 19 nt, Homo sapiens
  misc_RNA (1)...(19): siRNA sense strand
gaccauucgcgauuuagaa

SEQ ID NO: 456219 - RNA, 19 nt, Homo sapiens
  misc_RNA (1)...(19): siRNA sense strand
uuggaagacuguccucuau

SEQ ID NO: 456220 - RNA, 19 nt, Homo sapiens
  misc_RNA (1)...(19): siRNA sense strand
ucuaagaccauucgcgauu

SEQ ID NO: 456221 - RNA, 19 nt, Homo sapiens
  misc_RNA (1)...(19): siRNA sense strand
gcugugagagccauuggaa

SEQ ID NO: 456222 - RNA, 19 nt, Homo sapiens
  misc_RNA (1)...(19): siRNA sense strand
cgggaacugcucuuuaauu

SEQ ID NO: 456223 - RNA, 19 nt, Homo sapiens
  misc_RNA (1)...(19): siRNA sense strand
ugugagagccauuggaaga

SEQ ID NO: 456224 - RNA, 19 nt, Homo sapiens
  misc_RNA (1)...(19): siRNA sense strand
uagauuugacugcaagauu

SEQ ID NO: 456225 - RNA, 19 nt, Homo sapiens
  misc_RNA (1)...(19): siRNA sense strand
ucaacagggucaccaacca

SEQ ID NO: 456226 - RNA, 19 nt, Homo sapiens
  misc_RNA (1)...(19): siRNA sense strand
gauuugacugcaagauuga

SEQ ID NO: 456227 - RNA, 19 nt, Homo sapiens
  misc_RNA (1)...(19): siRNA sense strand
caaccagcccgcucaaugc

SEQ ID NO: 456228 - RNA, 19 nt, Homo sapiens
  misc_RNA (1)...(19): siRNA sense strand
aaacccuauuucucuaaga

SEQ ID NO: 456229 - RNA, 19 nt, Homo sapiens
  misc_RNA (1)...(19): siRNA sense strand
cuauuucucuaagaccauu

SEQ ID NO: 456230 - RNA, 19 nt, Homo sapiens
  misc_RNA (1)...(19): siRNA sense strand
aggaaaagccucauguaaa

SEQ ID NO: 456231 - RNA, 19 nt, Homo sapiens
  misc_RNA (1)...(19): siRNA sense strand
gggaacugcucuuuaauua

SEQ ID NO: 456232 - RNA, 19 nt, Homo sapiens
  misc_RNA (1)...(19): siRNA sense strand
ggaaaagccucauguaaaa

SEQ ID NO: 456233 - RNA, 19 nt, Homo sapiens
  misc_RNA (1)...(19): siRNA sense strand
gacgggaacugcucuuuaa

SEQ ID NO: 456234 - RNA, 19 nt, Homo sapiens
  misc_RNA (1)...(19): siRNA sense strand
gaagaugugucccaagcuu

SEQ ID NO: 456235 - RNA, 19 nt, Homo sapiens
  misc_RNA (1)...(19): siRNA sense strand
uaagaccauucgcgauuua

SEQ ID NO: 456236 - RNA, 19 nt, Homo sapiens
  misc_RNA (1)...(19): siRNA sense strand
ggacgggaacugcucuuua

SEQ ID NO: 456237 - RNA, 19 nt, Homo sapiens
  misc_RNA (1)...(19): siRNA sense strand
ggaagacuguccucuaugg

SEQ ID NO: 456238 - RNA, 19 nt, Homo sapiens
  misc_RNA (1)...(19): siRNA sense strand
ggaagaggaagaagaguga

SEQ ID NO: 456239 - RNA, 19 nt, Homo sapiens
  misc_RNA (1)...(19): siRNA sense strand
agauuugacugcaagauug

SEQ ID NO: 456240 - RNA, 19 nt, Homo sapiens
  misc_RNA (1)...(19): siRNA sense strand
ggaugacgaugccaaguac

SEQ ID NO: 456241 - RNA, 19 nt, Homo sapiens
  misc_RNA (1)...(19): siRNA sense strand
gggaugacgaugccaagua

SEQ ID NO: 456242 - RNA, 19 nt, Homo sapiens
  misc_RNA (1)...(19): siRNA sense strand
cuaagaccauucgcgauuu

SEQ ID NO: 456243 - RNA, 19 nt, Homo sapiens
  misc_RNA (1)...(19): siRNA sense strand
guaaaacccuauuucucua

SEQ ID NO: 456244 - RNA, 19 nt, Homo sapiens
  misc_RNA (1)...(19): siRNA sense strand
ggaacugcucuuuaauuau

SEQ ID NO: 456245 - RNA, 19 nt, Homo sapiens
  misc_RNA (1)...(19): siRNA sense strand
acugcaagauugaaggaua

SEQ ID NO: 456246 - RNA, 19 nt, Homo sapiens
  misc_RNA (1)...(19): siRNA sense strand
ugucaacagucuuggagaa

SEQ ID NO: 456247 - RNA, 19 nt, Homo sapiens
  misc_RNA (1)...(19): siRNA sense strand
cauucgcgauuuagaaguu

SEQ ID NO: 456248 - RNA, 19 nt, Homo sapiens
  misc_RNA (1)...(19): siRNA sense strand
ccagauagacuacgaugag

SEQ ID NO: 456249 - RNA, 19 nt, Homo sapiens
  misc_RNA (1)...(19): siRNA sense strand
ccaaccagcccgcucaaug

SEQ ID NO: 456250 - RNA, 19 nt, Homo sapiens
  misc_RNA (1)...(19): siRNA sense strand
gaccauucgcgauuuagaa

SEQ ID NO: 456251 - RNA, 19 nt, Homo sapiens
  misc_RNA (1)...(19): siRNA sense strand
uuggaagacuguccucuau

SEQ ID NO: 456252 - RNA, 19 nt, Homo sapiens
  misc_RNA (1)...(19): siRNA sense strand
ucuaagaccauucgcgauu

SEQ ID NO: 456253 - RNA, 19 nt, Homo sapiens
  misc_RNA (1)...(19): siRNA sense strand
gcugugagagccauuggaa

SEQ ID NO: 456254 - RNA, 19 nt, Homo sapiens
  misc_RNA (1)...(19): siRNA sense strand
cgggaacugcucuuuaauu

SEQ ID NO: 456255 - RNA, 19 nt, Homo sapiens
  misc_RNA (1)...(19): siRNA sense strand
ugugagagccauuggaaga

SEQ ID NO: 456256 - RNA, 19 nt, Homo sapiens
  misc_RNA (1)...(19): siRNA sense strand
uagauuugacugcaagauu

SEQ ID NO: 456257 - RNA, 19 nt, Homo sapiens
  misc_RNA (1)...(19): siRNA sense strand
ucaacagggucaccaacca

SEQ ID NO: 456258 - RNA, 19 nt, Homo sapiens
  misc_RNA (1)...(19): siRNA sense strand
gauuugacugcaagauuga

SEQ ID NO: 456259 - RNA, 19 nt, Homo sapiens
  misc_RNA (1)...(19): siRNA sense strand
caaccagcccgcucaaugc

SEQ ID NO: 456260 - RNA, 19 nt, Homo sapiens
  misc_RNA (1)...(19): siRNA sense strand
aaacccuauuucucuaaga

SEQ ID NO: 456261 - RNA, 19 nt, Homo sapiens
  misc_RNA (1)...(19): siRNA sense strand
cuauuucucuaagaccauu

SEQ ID NO: 456262 - RNA, 19 nt, Homo sapiens
  misc_RNA (1)...(19): siRNA sense strand
aggaaaagccucauguaaa

SEQ ID NO: 456263 - RNA, 19 nt, Homo sapiens
  misc_RNA (1)...(19): siRNA sense strand
gggaacugcucuuuaauua

SEQ ID NO: 456264 - RNA, 19 nt, Homo sapiens
  misc_RNA (1)...(19): siRNA sense strand
ggaaaagccucauguaaaa

SEQ ID NO: 456265 - RNA, 19 nt, Homo sapiens
  misc_RNA (1)...(19): siRNA sense strand
gacgggaacugcucuuuaa

SEQ ID NO: 456266 - RNA, 19 nt, Homo sapiens
  misc_RNA (1)...(19): siRNA sense strand
gaagaugugucccaagcuu

SEQ ID NO: 456267 - RNA, 19 nt, Homo sapiens
  misc_RNA (1)...(19): siRNA sense strand
uaagaccauucgcgauuua

SEQ ID NO: 456268 - RNA, 19 nt, Homo sapiens
  misc_RNA (1)...(19): siRNA sense strand
ggacgggaacugcucuuua

SEQ ID NO: 456269 - RNA, 19 nt, Homo sapiens
  misc_RNA (1)...(19): siRNA sense strand
ggaagacuguccucuaugg

SEQ ID NO: 456270 - RNA, 19 nt, Homo sapiens
  misc_RNA (1)...(19): siRNA sense strand
ggaagaggaagaagaguga

SEQ ID NO: 456271 - RNA, 19 nt, Homo sapiens
  misc_RNA (1)...(19): siRNA sense strand
agauuugacugcaagauug

SEQ ID NO: 456272 - RNA, 19 nt, Homo sapiens
  misc_RNA (1)...(19): siRNA sense strand
ggaugacgaugccaaguac

SEQ ID NO: 456273 - RNA, 19 nt, Homo sapiens
  misc_RNA (1)...(19): siRNA sense strand
gggaugacgaugccaagua

SEQ ID NO: 456274 - RNA, 19 nt, Homo sapiens
  misc_RNA (1)...(19): siRNA sense strand
cuaagaccauucgcgauuu

SEQ ID NO: 456275 - RNA, 19 nt, Homo sapiens
  misc_RNA (1)...(19): siRNA sense strand
guaaaacccuauuucucua

SEQ ID NO: 456276 - RNA, 19 nt, Homo sapiens
  misc_RNA (1)...(19): siRNA sense strand
ggaacugcucuuuaauuau

SEQ ID NO: 456277 - RNA, 19 nt, Homo sapiens
  misc_RNA (1)...(19): siRNA sense strand
acugcaagauugaaggaua

SEQ ID NO: 456278 - RNA, 19 nt, Homo sapiens
  misc_RNA (1)...(19): siRNA sense strand
ugucaacagucuuggagaa

SEQ ID NO: 456279 - RNA, 19 nt, Homo sapiens
  misc_RNA (1)...(19): siRNA sense strand
cauucgcgauuuagaaguu

SEQ ID NO: 456280 - RNA, 19 nt, Homo sapiens
  misc_RNA (1)...(19): siRNA sense strand
ccagauagacuacgaugag

SEQ ID NO: 456281 - RNA, 19 nt, Homo sapiens
  misc_RNA (1)...(19): siRNA sense strand
ccaaccagcccgcucaaug

SEQ ID NO: 456282 - RNA, 19 nt, Homo sapiens
  misc_RNA (1)...(19): siRNA sense strand
gaccauucgcgauuuagaa

SEQ ID NO: 456283 - RNA, 19 nt, Homo sapiens
  misc_RNA (1)...(19): siRNA sense strand
uuggaagacuguccucuau

SEQ ID NO: 456284 - RNA, 19 nt, Homo sapiens
  misc_RNA (1)...(19): siRNA sense strand
ucuaagaccauucgcgauu

SEQ ID NO: 456285 - RNA, 19 nt, Homo sapiens
  misc_RNA (1)...(19): siRNA sense strand
gcugugagagccauuggaa

SEQ ID NO: 456286 - RNA, 19 nt, Homo sapiens
  misc_RNA (1)...(19): siRNA sense strand
cgggaacugcucuuuaauu

SEQ ID NO: 456287 - RNA, 19 nt, Homo sapiens
  misc_RNA (1)...(19): siRNA sense strand
ugugagagccauuggaaga

SEQ ID NO: 456288 - RNA, 19 nt, Homo sapiens
  misc_RNA (1)...(19): siRNA sense strand
uagauuugacugcaagauu

SEQ ID NO: 456289 - RNA, 19 nt, Homo sapiens
  misc_RNA (1)...(19): siRNA sense strand
ucaacagggucaccaacca

SEQ ID NO: 456290 - RNA, 19 nt, Homo sapiens
  misc_RNA (1)...(19): siRNA sense strand
gauuugacugcaagauuga

SEQ ID NO: 456291 - RNA, 19 nt, Homo sapiens
  misc_RNA (1)...(19): siRNA sense strand
caaccagcccgcucaaugc

SEQ ID NO: 456292 - RNA, 19 nt, Homo sapiens
  misc_RNA (1)...(19): siRNA sense strand
aaacccuauuucucuaaga

SEQ ID NO: 456293 - RNA, 19 nt, Homo sapiens
  misc_RNA (1)...(19): siRNA sense strand
cuauuucucuaagaccauu

SEQ ID NO: 456294 - RNA, 19 nt, Homo sapiens
  misc_RNA (1)...(19): siRNA sense strand
aggaaaagccucauguaaa

SEQ ID NO: 456295 - RNA, 19 nt, Homo sapiens
  misc_RNA (1)...(19): siRNA sense strand
gggaacugcucuuuaauua

SEQ ID NO: 456296 - RNA, 19 nt, Homo sapiens
  misc_RNA (1)...(19): siRNA sense strand
ggaaaagccucauguaaaa

SEQ ID NO: 456297 - RNA, 19 nt, Homo sapiens
  misc_RNA (1)...(19): siRNA sense strand
gacgggaacugcucuuuaa

SEQ ID NO: 456298 - RNA, 19 nt, Homo sapiens
  misc_RNA (1)...(19): siRNA sense strand
gaagaugugucccaagcuu

SEQ ID NO: 456299 - RNA, 19 nt, Homo sapiens
  misc_RNA (1)...(19): siRNA sense strand
uaagaccauucgcgauuua

SEQ ID NO: 456300 - RNA, 19 nt, Homo sapiens
  misc_RNA (1)...(19): siRNA sense strand
ggacgggaacugcucuuua

SEQ ID NO: 456301 - RNA, 19 nt, Homo sapiens
  misc_RNA (1)...(19): siRNA sense strand
ggaagacuguccucuaugg

SEQ ID NO: 456302 - RNA, 19 nt, Homo sapiens
  misc_RNA (1)...(19): siRNA sense strand
ggaagaggaagaagaguga

SEQ ID NO: 456303 - RNA, 19 nt, Homo sapiens
  misc_RNA (1)...(19): siRNA sense strand
agauuugacugcaagauug

SEQ ID NO: 456304 - RNA, 19 nt, Homo sapiens
  misc_RNA (1)...(19): siRNA sense strand
ggaugacgaugccaaguac

SEQ ID NO: 456305 - RNA, 19 nt, Homo sapiens
  misc_RNA (1)...(19): siRNA sense strand
gggaugacgaugccaagua

SEQ ID NO: 456306 - RNA, 19 nt, Homo sapiens
  misc_RNA (1)...(19): siRNA sense strand
cuaagaccauucgcgauuu

SEQ ID NO: 456307 - RNA, 19 nt, Homo sapiens
  misc_RNA (1)...(19): siRNA sense strand
guaaaacccuauuucucua

SEQ ID NO: 456308 - RNA, 19 nt, Homo sapiens
  misc_RNA (1)...(19): siRNA sense strand
ggaacugcucuuuaauuau

SEQ ID NO: 456309 - RNA, 19 nt, Homo sapiens
  misc_RNA (1)...(19): siRNA sense strand
acugcaagauugaaggaua

SEQ ID NO: 456310 - RNA, 19 nt, Homo sapiens
  misc_RNA (1)...(19): siRNA sense strand
ugucaacagucuuggagaa

SEQ ID NO: 456311 - RNA, 19 nt, Homo sapiens
  misc_RNA (1)...(19): siRNA sense strand
cauucgcgauuuagaaguu

SEQ ID NO: 456312 - RNA, 19 nt, Homo sapiens
  misc_RNA (1)...(19): siRNA sense strand
ccagauagacuacgaugag

SEQ ID NO: 456313 - RNA, 19 nt, Homo sapiens
  misc_RNA (1)...(19): siRNA sense strand
ccaaccagcccgcucaaug

SEQ ID NO: 456314 - RNA, 19 nt, Homo sapiens
  misc_RNA (1)...(19): siRNA sense strand
gaccauucgcgauuuagaa

SEQ ID NO: 456315 - RNA, 19 nt, Homo sapiens
  misc_RNA (1)...(19): siRNA sense strand
uuggaagacuguccucuau

SEQ ID NO: 456316 - RNA, 19 nt, Homo sapiens
  misc_RNA (1)...(19): siRNA sense strand
ucuaagaccauucgcgauu

SEQ ID NO: 456317 - RNA, 19 nt, Homo sapiens
  misc_RNA (1)...(19): siRNA sense strand
gcugugagagccauuggaa

SEQ ID NO: 456318 - RNA, 19 nt, Homo sapiens
  misc_RNA (1)...(19): siRNA sense strand
cgggaacugcucuuuaauu

SEQ ID NO: 456319 - RNA, 19 nt, Homo sapiens
  misc_RNA (1)...(19): siRNA sense strand
ugugagagccauuggaaga

SEQ ID NO: 456320 - RNA, 19 nt, Homo sapiens
  misc_RNA (1)...(19): siRNA sense strand
uagauuugacugcaagauu

SEQ ID NO: 456321 - RNA, 19 nt, Homo sapiens
  misc_RNA (1)...(19): siRNA sense strand
ucaacagggucaccaacca

SEQ ID NO: 456322 - RNA, 19 nt, Homo sapiens
  misc_RNA (1)...(19): siRNA sense strand
gauuugacugcaagauuga

SEQ ID NO: 456323 - RNA, 19 nt, Homo sapiens
  misc_RNA (1)...(19): siRNA sense strand
caaccagcccgcucaaugc

SEQ ID NO: 456324 - RNA, 19 nt, Homo sapiens
  misc_RNA (1)...(19): siRNA sense strand
aaacccuauuucucuaaga

SEQ ID NO: 456325 - RNA, 19 nt, Homo sapiens
  misc_RNA (1)...(19): siRNA sense strand
cuauuucucuaagaccauu

SEQ ID NO: 456326 - RNA, 19 nt, Homo sapiens
  misc_RNA (1)...(19): siRNA sense strand
aggaaaagccucauguaaa

SEQ ID NO: 456327 - RNA, 19 nt, Homo sapiens
  misc_RNA (1)...(19): siRNA sense strand
gggaacugcucuuuaauua

SEQ ID NO: 456328 - RNA, 19 nt, Homo sapiens
  misc_RNA (1)...(19): siRNA sense strand
ggaaaagccucauguaaaa

SEQ ID NO: 456329 - RNA, 19 nt, Homo sapiens
  misc_RNA (1)...(19): siRNA sense strand
gacgggaacugcucuuuaa

SEQ ID NO: 456330 - RNA, 19 nt, Homo sapiens
  misc_RNA (1)...(19): siRNA sense strand
gaagaugugucccaagcuu

SEQ ID NO: 456331 - RNA, 19 nt, Homo sapiens
  misc_RNA (1)...(19): siRNA sense strand
uaagaccauucgcgauuua

SEQ ID NO: 456332 - RNA, 19 nt, Homo sapiens
  misc_RNA (1)...(19): siRNA sense strand
ggacgggaacugcucuuua

SEQ ID NO: 456333 - RNA, 19 nt, Homo sapiens
  misc_RNA (1)...(19): siRNA sense strand
ggaagacuguccucuaugg

SEQ ID NO: 456334 - RNA, 19 nt, Homo sapiens
  misc_RNA (1)...(19): siRNA sense strand
ggaagaggaagaagaguga

SEQ ID NO: 456335 - RNA, 19 nt, Homo sapiens
  misc_RNA (1)...(19): siRNA sense strand
agauuugacugcaagauug

SEQ ID NO: 456336 - RNA, 19 nt, Homo sapiens
  misc_RNA (1)...(19): siRNA sense strand
ggaugacgaugccaaguac

SEQ ID NO: 456337 - RNA, 19 nt, Homo sapiens
  misc_RNA (1)...(19): siRNA sense strand
gggaugacgaugccaagua

SEQ ID NO: 456338 - RNA, 19 nt, Homo sapiens
  misc_RNA (1)...(19): siRNA sense strand
cuaagaccauucgcgauuu

SEQ ID NO: 456339 - RNA, 19 nt, Homo sapiens
  misc_RNA (1)...(19): siRNA sense strand
guaaaacccuauuucucua

SEQ ID NO: 456340 - RNA, 19 nt, Homo sapiens
  misc_RNA (1)...(19): siRNA sense strand
ggaacugcucuuuaauuau

SEQ ID NO: 456341 - RNA, 19 nt, Homo sapiens
  misc_RNA (1)...(19): siRNA sense strand
acugcaagauugaaggaua

SEQ ID NO: 456342 - RNA, 19 nt, Homo sapiens
  misc_RNA (1)...(19): siRNA sense strand
ugucaacagucuuggagaa

SEQ ID NO: 456343 - RNA, 19 nt, Homo sapiens
  misc_RNA (1)...(19): siRNA sense strand
cauucgcgauuuagaaguu

SEQ ID NO: 456344 - RNA, 19 nt, Homo sapiens
  misc_RNA (1)...(19): siRNA sense strand
ccagauagacuacgaugag

SEQ ID NO: 456345 - RNA, 19 nt, Homo sapiens
  misc_RNA (1)...(19): siRNA sense strand
ccaaccagcccgcucaaug

SEQ ID NO: 456346 - RNA, 19 nt, Homo sapiens
  misc_RNA (1)...(19): siRNA sense strand
gaccauucgcgauuuagaa

SEQ ID NO: 456347 - RNA, 19 nt, Homo sapiens
  misc_RNA (1)...(19): siRNA sense strand
uuggaagacuguccucuau

SEQ ID NO: 456348 - RNA, 19 nt, Homo sapiens
  misc_RNA (1)...(19): siRNA sense strand
ucuaagaccauucgcgauu

SEQ ID NO: 456349 - RNA, 19 nt, Homo sapiens
  misc_RNA (1)...(19): siRNA sense strand
gcugugagagccauuggaa

SEQ ID NO: 456350 - RNA, 19 nt, Homo sapiens
  misc_RNA (1)...(19): siRNA sense strand
cgggaacugcucuuuaauu

SEQ ID NO: 456351 - RNA, 19 nt, Homo sapiens
  misc_RNA (1)...(19): siRNA sense strand
ugugagagccauuggaaga

SEQ ID NO: 456352 - RNA, 19 nt, Homo sapiens
  misc_RNA (1)...(19): siRNA sense strand
uagauuugacugcaagauu

SEQ ID NO: 456353 - RNA, 19 nt, Homo sapiens
  misc_RNA (1)...(19): siRNA sense strand
ucaacagggucaccaacca

SEQ ID NO: 456354 - RNA, 19 nt, Homo sapiens
  misc_RNA (1)...(19): siRNA sense strand
gauuugacugcaagauuga

SEQ ID NO: 456355 - RNA, 19 nt, Homo sapiens
  misc_RNA (1)...(19): siRNA sense strand
caaccagcccgcucaaugc

SEQ ID NO: 456356 - RNA, 19 nt, Homo sapiens
  misc_RNA (1)...(19): siRNA sense strand
aaacccuauuucucuaaga

SEQ ID NO: 456357 - RNA, 19 nt, Homo sapiens
  misc_RNA (1)...(19): siRNA sense strand
cuauuucucuaagaccauu

SEQ ID NO: 456358 - RNA, 19 nt, Homo sapiens
  misc_RNA (1)...(19): siRNA sense strand
aggaaaagccucauguaaa

SEQ ID NO: 456359 - RNA, 19 nt, Homo sapiens
  misc_RNA (1)...(19): siRNA sense strand
gggaacugcucuuuaauua

SEQ ID NO: 456360 - RNA, 19 nt, Homo sapiens
  misc_RNA (1)...(19): siRNA sense strand
ggaaaagccucauguaaaa

SEQ ID NO: 456361 - RNA, 19 nt, Homo sapiens
  misc_RNA (1)...(19): siRNA sense strand
gacgggaacugcucuuuaa

SEQ ID NO: 456362 - RNA, 19 nt, Homo sapiens
  misc_RNA (1)...(19): siRNA sense strand
gaagaugugucccaagcuu

SEQ ID NO: 456363 - RNA, 19 nt, Homo sapiens
  misc_RNA (1)...(19): siRNA sense strand
uaagaccauucgcgauuua

SEQ ID NO: 456364 - RNA, 19 nt, Homo sapiens
  misc_RNA (1)...(19): siRNA sense strand
ggacgggaacugcucuuua

SEQ ID NO: 456365 - RNA, 19 nt, Homo sapiens
  misc_RNA (1)...(19): siRNA sense strand
ggaagacuguccucuaugg

SEQ ID NO: 456366 - RNA, 19 nt, Homo sapiens
  misc_RNA (1)...(19): siRNA sense strand
ggaagaggaagaagaguga

SEQ ID NO: 456367 - RNA, 19 nt, Homo sapiens
  misc_RNA (1)...(19): siRNA sense strand
agauuugacugcaagauug

SEQ ID NO: 456368 - RNA, 19 nt, Homo sapiens
  misc_RNA (1)...(19): siRNA sense strand
ggaugacgaugccaaguac

SEQ ID NO: 456369 - RNA, 19 nt, Homo sapiens
  misc_RNA (1)...(19): siRNA sense strand
gggaugacgaugccaagua

SEQ ID NO: 456370 - RNA, 19 nt, Homo sapiens
  misc_RNA (1)...(19): siRNA sense strand
cuaagaccauucgcgauuu

SEQ ID NO: 456371 - RNA, 19 nt, Homo sapiens
  misc_RNA (1)...(19): siRNA sense strand
guaaaacccuauuucucua

SEQ ID NO: 456372 - RNA, 19 nt, Homo sapiens
  misc_RNA (1)...(19): siRNA sense strand
ggaacugcucuuuaauuau

SEQ ID NO: 456373 - RNA, 19 nt, Homo sapiens
  misc_RNA (1)...(19): siRNA sense strand
acugcaagauugaaggaua

SEQ ID NO: 456374 - RNA, 19 nt, Homo sapiens
  misc_RNA (1)...(19): siRNA sense strand
ugucaacagucuuggagaa

SEQ ID NO: 456375 - RNA, 19 nt, Homo sapiens
  misc_RNA (1)...(19): siRNA sense strand
cauucgcgauuuagaaguu

SEQ ID NO: 456376 - RNA, 19 nt, Homo sapiens
  misc_RNA (1)...(19): siRNA sense strand
ccagauagacuacgaugag

SEQ ID NO: 456377 - RNA, 19 nt, Homo sapiens
  misc_RNA (1)...(19): siRNA sense strand
ccaaccagcccgcucaaug

SEQ ID NO: 456378 - RNA, 19 nt, Homo sapiens
  misc_RNA (1)...(19): siRNA sense strand
gaccauucgcgauuuagaa

SEQ ID NO: 456379 - RNA, 19 nt, Homo sapiens
  misc_RNA (1)...(19): siRNA sense strand
uuggaagacuguccucuau

SEQ ID NO: 456380 - RNA, 19 nt, Homo sapiens
  misc_RNA (1)...(19): siRNA sense strand
ucuaagaccauucgcgauu

SEQ ID NO: 456381 - RNA, 19 nt, Homo sapiens
  misc_RNA (1)...(19): siRNA sense strand
gcugugagagccauuggaa

SEQ ID NO: 456382 - RNA, 19 nt, Homo sapiens
  misc_RNA (1)...(19): siRNA sense strand
cgggaacugcucuuuaauu

SEQ ID NO: 456383 - RNA, 19 nt, Homo sapiens
  misc_RNA (1)...(19): siRNA sense strand
ugugagagccauuggaaga

SEQ ID NO: 456384 - RNA, 19 nt, Homo sapiens
  misc_RNA (1)...(19): siRNA sense strand
uagauuugacugcaagauu

SEQ ID NO: 456385 - RNA, 19 nt, Homo sapiens
  misc_RNA (1)...(19): siRNA sense strand
ucaacagggucaccaacca

SEQ ID NO: 456386 - RNA, 19 nt, Homo sapiens
  misc_RNA (1)...(19): siRNA sense strand
gauuugacugcaagauuga

SEQ ID NO: 456387 - RNA, 19 nt, Homo sapiens
  misc_RNA (1)...(19): siRNA sense strand
caaccagcccgcucaaugc

SEQ ID NO: 456388 - RNA, 19 nt, Homo sapiens
  misc_RNA (1)...(19): siRNA sense strand
aaacccuauuucucuaaga

SEQ ID NO: 456389 - RNA, 19 nt, Homo sapiens
  misc_RNA (1)...(19): siRNA sense strand
cuauuucucuaagaccauu

SEQ ID NO: 456390 - RNA, 19 nt, Homo sapiens
  misc_RNA (1)...(19): siRNA sense strand
aggaaaagccucauguaaa

SEQ ID NO: 456391 - RNA, 19 nt, Homo sapiens
  misc_RNA (1)...(19): siRNA sense strand
gggaacugcucuuuaauua

SEQ ID NO: 456392 - RNA, 19 nt, Homo sapiens
  misc_RNA (1)...(19): siRNA sense strand
ggaaaagccucauguaaaa

SEQ ID NO: 456393 - RNA, 19 nt, Homo sapiens
  misc_RNA (1)...(19): siRNA sense strand
gacgggaacugcucuuuaa

SEQ ID NO: 456394 - RNA, 19 nt, Homo sapiens
  misc_RNA (1)...(19): siRNA sense strand
gaagaugugucccaagcuu

SEQ ID NO: 456395 - RNA, 19 nt, Homo sapiens
  misc_RNA (1)...(19): siRNA sense strand
uaagaccauucgcgauuua

SEQ ID NO: 456396 - RNA, 19 nt, Homo sapiens
  misc_RNA (1)...(19): siRNA sense strand
ggacgggaacugcucuuua

SEQ ID NO: 456397 - RNA, 19 nt, Homo sapiens
  misc_RNA (1)...(19): siRNA sense strand
ggaagacuguccucuaugg

SEQ ID NO: 456398 - RNA, 19 nt, Homo sapiens
  misc_RNA (1)...(19): siRNA sense strand
ggaagaggaagaagaguga

SEQ ID NO: 456399 - RNA, 19 nt, Homo sapiens
  misc_RNA (1)...(19): siRNA sense strand
agauuugacugcaagauug

SEQ ID NO: 456400 - RNA, 19 nt, Homo sapiens
  misc_RNA (1)...(19): siRNA sense strand
ggaugacgaugccaaguac

SEQ ID NO: 456401 - RNA, 19 nt, Homo sapiens
  misc_RNA (1)...(19): siRNA sense strand
gggaugacgaugccaagua

SEQ ID NO: 456402 - RNA, 19 nt, Homo sapiens
  misc_RNA (1)...(19): siRNA sense strand
cuaagaccauucgcgauuu

SEQ ID NO: 456403 - RNA, 19 nt, Homo sapiens
  misc_RNA (1)...(19): siRNA sense strand
guaaaacccuauuucucua

SEQ ID NO: 456404 - RNA, 19 nt, Homo sapiens
  misc_RNA (1)...(19): siRNA sense strand
ggaacugcucuuuaauuau

SEQ ID NO: 456405 - RNA, 19 nt, Homo sapiens
  misc_RNA (1)...(19): siRNA sense strand
acugcaagauugaaggaua

SEQ ID NO: 456406 - RNA, 19 nt, Homo sapiens
  misc_RNA (1)...(19): siRNA sense strand
ugucaacagucuuggagaa

SEQ ID NO: 456407 - RNA, 19 nt, Homo sapiens
  misc_RNA (1)...(19): siRNA sense strand
cauucgcgauuuagaaguu

SEQ ID NO: 456408 - RNA, 19 nt, Homo sapiens
  misc_RNA (1)...(19): siRNA sense strand
ccagauagacuacgaugag

SEQ ID NO: 456409 - RNA, 19 nt, Homo sapiens
  misc_RNA (1)...(19): siRNA sense strand
ccaaccagcccgcucaaug

SEQ ID NO: 456410 - RNA, 19 nt, Homo sapiens
  misc_RNA (1)...(19): siRNA sense strand
gaccauucgcgauuuagaa

SEQ ID NO: 456411 - RNA, 19 nt, Homo sapiens
  misc_RNA (1)...(19): siRNA sense strand
uuggaagacuguccucuau

SEQ ID NO: 456412 - RNA, 19 nt, Homo sapiens
  misc_RNA (1)...(19): siRNA sense strand
ucuaagaccauucgcgauu

SEQ ID NO: 456413 - RNA, 19 nt, Homo sapiens
  misc_RNA (1)...(19): siRNA sense strand
gcugugagagccauuggaa

SEQ ID NO: 456414 - RNA, 19 nt, Homo sapiens
  misc_RNA (1)...(19): siRNA sense strand
cgggaacugcucuuuaauu

SEQ ID NO: 456415 - RNA, 19 nt, Homo sapiens
  misc_RNA (1)...(19): siRNA sense strand
ugugagagccauuggaaga

SEQ ID NO: 456416 - RNA, 19 nt, Homo sapiens
  misc_RNA (1)...(19): siRNA sense strand
uagauuugacugcaagauu

SEQ ID NO: 456417 - RNA, 19 nt, Homo sapiens
  misc_RNA (1)...(19): siRNA sense strand
ucaacagggucaccaacca

SEQ ID NO: 456418 - RNA, 19 nt, Homo sapiens
  misc_RNA (1)...(19): siRNA sense strand
gauuugacugcaagauuga

SEQ ID NO: 456419 - RNA, 19 nt, Homo sapiens
  misc_RNA (1)...(19): siRNA sense strand
caaccagcccgcucaaugc

SEQ ID NO: 456420 - RNA, 19 nt, Homo sapiens
  misc_RNA (1)...(19): siRNA sense strand
aaacccuauuucucuaaga

SEQ ID NO: 456421 - RNA, 19 nt, Homo sapiens
  misc_RNA (1)...(19): siRNA sense strand
cuauuucucuaagaccauu

SEQ ID NO: 456422 - RNA, 19 nt, Homo sapiens
  misc_RNA (1)...(19): siRNA sense strand
aggaaaagccucauguaaa

SEQ ID NO: 456423 - RNA, 19 nt, Homo sapiens
  misc_RNA (1)...(19): siRNA sense strand
gggaacugcucuuuaauua

SEQ ID NO: 456424 - RNA, 19 nt, Homo sapiens
  misc_RNA (1)...(19): siRNA sense strand
ggaaaagccucauguaaaa

SEQ ID NO: 456425 - RNA, 19 nt, Homo sapiens
  misc_RNA (1)...(19): siRNA sense strand
gacgggaacugcucuuuaa

SEQ ID NO: 456426 - RNA, 19 nt, Homo sapiens
  misc_RNA (1)...(19): siRNA sense strand
gaagaugugucccaagcuu

SEQ ID NO: 456427 - RNA, 19 nt, Homo sapiens
  misc_RNA (1)...(19): siRNA sense strand
uaagaccauucgcgauuua

SEQ ID NO: 456428 - RNA, 19 nt, Homo sapiens
  misc_RNA (1)...(19): siRNA sense strand
ggacgggaacugcucuuua

SEQ ID NO: 456429 - RNA, 19 nt, Homo sapiens
  misc_RNA (1)...(19): siRNA sense strand
ggaagaggaagaagaguga

SEQ ID NO: 456430 - RNA, 19 nt, Homo sapiens
  misc_RNA (1)...(19): siRNA sense strand
agauuugacugcaagauug

SEQ ID NO: 456431 - RNA, 19 nt, Homo sapiens
  misc_RNA (1)...(19): siRNA sense strand
ggaugacgaugccaaguac

SEQ ID NO: 456432 - RNA, 19 nt, Homo sapiens
  misc_RNA (1)...(19): siRNA sense strand
gggaugacgaugccaagua

SEQ ID NO: 456433 - RNA, 19 nt, Homo sapiens
  misc_RNA (1)...(19): siRNA sense strand
cuaagaccauucgcgauuu

SEQ ID NO: 456434 - RNA, 19 nt, Homo sapiens
  misc_RNA (1)...(19): siRNA sense strand
guaaaacccuauuucucua

SEQ ID NO: 456435 - RNA, 19 nt, Homo sapiens
  misc_RNA (1)...(19): siRNA sense strand
ggaacugcucuuuaauuau

SEQ ID NO: 456436 - RNA, 19 nt, Homo sapiens
  misc_RNA (1)...(19): siRNA sense strand
acugcaagauugaaggaua

SEQ ID NO: 456437 - RNA, 19 nt, Homo sapiens
  misc_RNA (1)...(19): siRNA sense strand
ugucaacagucuuggagaa

SEQ ID NO: 456438 - RNA, 19 nt, Homo sapiens
  misc_RNA (1)...(19): siRNA sense strand
cauucgcgauuuagaaguu

SEQ ID NO: 456439 - RNA, 19 nt, Homo sapiens
  misc_RNA (1)...(19): siRNA sense strand
ccagauagacuacgaugag

SEQ ID NO: 456440 - RNA, 19 nt, Homo sapiens
  misc_RNA (1)...(19): siRNA sense strand
ccaaccagcccgcucaaug

SEQ ID NO: 456441 - RNA, 19 nt, Homo sapiens
  misc_RNA (1)...(19): siRNA sense strand
gaccauucgcgauuuagaa

SEQ ID NO: 456442 - RNA, 19 nt, Homo sapiens
  misc_RNA (1)...(19): siRNA sense strand
ucuaagaccauucgcgauu

SEQ ID NO: 456443 - RNA, 19 nt, Homo sapiens
  misc_RNA (1)...(19): siRNA sense strand
cgggaacugcucuuuaauu

SEQ ID NO: 456444 - RNA, 19 nt, Homo sapiens
  misc_RNA (1)...(19): siRNA sense strand
uagauuugacugcaagauu

SEQ ID NO: 456445 - RNA, 19 nt, Homo sapiens
  misc_RNA (1)...(19): siRNA sense strand
gauuugacugcaagauuga

SEQ ID NO: 456446 - RNA, 19 nt, Homo sapiens
  misc_RNA (1)...(19): siRNA sense strand
ucaacagggucaccaacca

SEQ ID NO: 456447 - RNA, 19 nt, Homo sapiens
  misc_RNA (1)...(19): siRNA sense strand
caaccagcccgcucaaugc

SEQ ID NO: 456448 - RNA, 19 nt, Homo sapiens
  misc_RNA (1)...(19): siRNA sense strand
aaacccuauuucucuaaga

SEQ ID NO: 456449 - RNA, 19 nt, Homo sapiens
  misc_RNA (1)...(19): siRNA sense strand
cuauuucucuaagaccauu

SEQ ID NO: 456450 - RNA, 19 nt, Homo sapiens
  misc_RNA (1)...(19): siRNA sense strand
aggaaaagccucauguaaa

SEQ ID NO: 456451 - RNA, 19 nt, Homo sapiens
  misc_RNA (1)...(19): siRNA sense strand
gggaacugcucuuuaauua

SEQ ID NO: 456452 - RNA, 19 nt, Homo sapiens
  misc_RNA (1)...(19): siRNA sense strand
ggaaaagccucauguaaaa

SEQ ID NO: 456453 - RNA, 19 nt, Homo sapiens
  misc_RNA (1)...(19): siRNA sense strand
gacgggaacugcucuuuaa

SEQ ID NO: 456454 - RNA, 19 nt, Homo sapiens
  misc_RNA (1)...(19): siRNA sense strand
gaagaugugucccaagcuu

SEQ ID NO: 456455 - RNA, 19 nt, Homo sapiens
  misc_RNA (1)...(19): siRNA sense strand
uaagaccauucgcgauuua

SEQ ID NO: 456456 - RNA, 19 nt, Homo sapiens
  misc_RNA (1)...(19): siRNA sense strand
ggacgggaacugcucuuua

SEQ ID NO: 456457 - RNA, 19 nt, Homo sapiens
  misc_RNA (1)...(19): siRNA sense strand
ggaagaggaagaagaguga

SEQ ID NO: 456458 - RNA, 19 nt, Homo sapiens
  misc_RNA (1)...(19): siRNA sense strand
agauuugacugcaagauug

SEQ ID NO: 456459 - RNA, 19 nt, Homo sapiens
  misc_RNA (1)...(19): siRNA sense strand
ggaugacgaugccaaguac

SEQ ID NO: 456460 - RNA, 19 nt, Homo sapiens
  misc_RNA (1)...(19): siRNA sense strand
gggaugacgaugccaagua

SEQ ID NO: 456461 - RNA, 19 nt, Homo sapiens
  misc_RNA (1)...(19): siRNA sense strand
cuaagaccauucgcgauuu

SEQ ID NO: 456462 - RNA, 19 nt, Homo sapiens
  misc_RNA (1)...(19): siRNA sense strand
guaaaacccuauuucucua

SEQ ID NO: 456463 - RNA, 19 nt, Homo sapiens
  misc_RNA (1)...(19): siRNA sense strand
ggaacugcucuuuaauuau

SEQ ID NO: 456464 - RNA, 19 nt, Homo sapiens
  misc_RNA (1)...(19): siRNA sense strand
acugcaagauugaaggaua

SEQ ID NO: 456465 - RNA, 19 nt, Homo sapiens
  misc_RNA (1)...(19): siRNA sense strand
ugucaacagucuuggagaa

SEQ ID NO: 456466 - RNA, 19 nt, Homo sapiens
  misc_RNA (1)...(19): siRNA sense strand
cauucgcgauuuagaaguu

SEQ ID NO: 456467 - RNA, 19 nt, Homo sapiens
  misc_RNA (1)...(19): siRNA sense strand
ccagauagacuacgaugag

SEQ ID NO: 456468 - RNA, 19 nt, Homo sapiens
  misc_RNA (1)...(19): siRNA sense strand
ccaaccagcccgcucaaug

SEQ ID NO: 456469 - RNA, 19 nt, Homo sapiens
  misc_RNA (1)...(19): siRNA sense strand
gaccauucgcgauuuagaa

SEQ ID NO: 456470 - RNA, 19 nt, Homo sapiens
  misc_RNA (1)...(19): siRNA sense strand
ucuaagaccauucgcgauu

SEQ ID NO: 456471 - RNA, 19 nt, Homo sapiens
  misc_RNA (1)...(19): siRNA sense strand
cgggaacugcucuuuaauu

SEQ ID NO: 456472 - RNA, 19 nt, Homo sapiens
  misc_RNA (1)...(19): siRNA sense strand
uagauuugacugcaagauu

SEQ ID NO: 456473 - RNA, 19 nt, Homo sapiens
  misc_RNA (1)...(19): siRNA sense strand
gauuugacugcaagauuga

SEQ ID NO: 456474 - RNA, 19 nt, Homo sapiens
  misc_RNA (1)...(19): siRNA sense strand
ucaacagggucaccaacca

SEQ ID NO: 456475 - RNA, 19 nt, Homo sapiens
  misc_RNA (1)...(19): siRNA sense strand
caaccagcccgcucaaugc

SEQ ID NO: 456476 - RNA, 19 nt, Homo sapiens
  misc_RNA (1)...(19): siRNA sense strand
aaacccuauuucucuaaga

SEQ ID NO: 456477 - RNA, 19 nt, Homo sapiens
  misc_RNA (1)...(19): siRNA sense strand
cuauuucucuaagaccauu

SEQ ID NO: 456478 - RNA, 19 nt, Homo sapiens
  misc_RNA (1)...(19): siRNA sense strand
aggaaaagccucauguaaa

SEQ ID NO: 456479 - RNA, 19 nt, Homo sapiens
  misc_RNA (1)...(19): siRNA sense strand
ccagugagcagauuuauua

SEQ ID NO: 456480 - RNA, 19 nt, Homo sapiens
  misc_RNA (1)...(19): siRNA sense strand
gugagcagauuuauuauga

SEQ ID NO: 456481 - RNA, 19 nt, Homo sapiens
  misc_RNA (1)...(19): siRNA sense strand
gcuaauaggucucgagauc

SEQ ID NO: 456482 - RNA, 19 nt, Homo sapiens
  misc_RNA (1)...(19): siRNA sense strand
gaagaaguccugcaucgaa

SEQ ID NO: 456483 - RNA, 19 nt, Homo sapiens
  misc_RNA (1)...(19): siRNA sense strand
ggaacaaccuuaaugaaac

SEQ ID NO: 456484 - RNA, 19 nt, Homo sapiens
  misc_RNA (1)...(19): siRNA sense strand
uaaugaaacugacagaaga

SEQ ID NO: 456485 - RNA, 19 nt, Homo sapiens
  misc_RNA (1)...(19): siRNA sense strand
uagaagaacuccagaaagu

SEQ ID NO: 456486 - RNA, 19 nt, Homo sapiens
  misc_RNA (1)...(19): siRNA sense strand
gagaauguccuuuauuguu

SEQ ID NO: 456487 - RNA, 19 nt, Homo sapiens
  misc_RNA (1)...(19): siRNA sense strand
ggagagucauuucaaguug

SEQ ID NO: 456488 - RNA, 19 nt, Homo sapiens
  misc_RNA (1)...(19): siRNA sense strand
uuacaugcaugaaggauuu

SEQ ID NO: 456489 - RNA, 19 nt, Homo sapiens
  misc_RNA (1)...(19): siRNA sense strand
ccacuggaaugaaaucuau

SEQ ID NO: 456490 - RNA, 19 nt, Homo sapiens
  misc_RNA (1)...(19): siRNA sense strand
gcaauuguuuacuguguug

SEQ ID NO: 456491 - RNA, 19 nt, Homo sapiens
  misc_RNA (1)...(19): siRNA sense strand
acaguuggcucacaaauuc

SEQ ID NO: 456492 - RNA, 19 nt, Homo sapiens
  misc_RNA (1)...(19): siRNA sense strand
caguaaggaucauguguuu

SEQ ID NO: 456493 - RNA, 19 nt, Homo sapiens
  misc_RNA (1)...(19): siRNA sense strand
gaacaaccuuaaugaaacu

SEQ ID NO: 456494 - RNA, 19 nt, Homo sapiens
  misc_RNA (1)...(19): siRNA sense strand
gaaacugacagaagacaga

SEQ ID NO: 456495 - RNA, 19 nt, Homo sapiens
  misc_RNA (1)...(19): siRNA sense strand
gcugaaccauccaccauau

SEQ ID NO: 456496 - RNA, 19 nt, Homo sapiens
  misc_RNA (1)...(19): siRNA sense strand
uaauaggucucgagaucuu

SEQ ID NO: 456497 - RNA, 19 nt, Homo sapiens
  misc_RNA (1)...(19): siRNA sense strand
gaucuuggugcaauuguuu

SEQ ID NO: 456498 - RNA, 19 nt, Homo sapiens
  misc_RNA (1)...(19): siRNA sense strand
gcaggagagucauuucaag

SEQ ID NO: 456499 - RNA, 19 nt, Homo sapiens
  misc_RNA (1)...(19): siRNA sense strand
gauuugaccuguacuucau

SEQ ID NO: 456500 - RNA, 19 nt, Homo sapiens
  misc_RNA (1)...(19): siRNA sense strand
uugagaauguccuuuauug

SEQ ID NO: 456501 - RNA, 19 nt, Homo sapiens
  misc_RNA (1)...(19): siRNA sense strand
gaggaacaaccuuaaugaa

SEQ ID NO: 456502 - RNA, 19 nt, Homo sapiens
  misc_RNA (1)...(19): siRNA sense strand
gagagucauuucaaguugu

SEQ ID NO: 456503 - RNA, 19 nt, Homo sapiens
  misc_RNA (1)...(19): siRNA sense strand
gaacaguuggcucacaaau

SEQ ID NO: 456504 - RNA, 19 nt, Homo sapiens
  misc_RNA (1)...(19): siRNA sense strand
aaaagaaguuggcaugaaa

SEQ ID NO: 456505 - RNA, 19 nt, Homo sapiens
  misc_RNA (1)...(19): siRNA sense strand
guccagcgccuaucuuaaa

SEQ ID NO: 456506 - RNA, 19 nt, Homo sapiens
  misc_RNA (1)...(19): siRNA sense strand
gaaguccugcaucgaaauu

SEQ ID NO: 456507 - RNA, 19 nt, Homo sapiens
  misc_RNA (1)...(19): siRNA sense strand
ggcaucauccacucaauuu

SEQ ID NO: 456508 - RNA, 19 nt, Homo sapiens
  misc_RNA (1)...(19): siRNA sense strand
cgaggaacaaccuuaauga

SEQ ID NO: 456509 - RNA, 19 nt, Homo sapiens
  misc_RNA (1)...(19): siRNA sense strand
gacagaagacagagaacaa

SEQ ID NO: 456510 - RNA, 19 nt, Homo sapiens
  misc_RNA (1)...(19): siRNA sense strand
aagaaguccugcaucgaaa

SEQ ID NO: 456511 - RNA, 19 nt, Homo sapiens
  misc_RNA (1)...(19): siRNA sense strand
cugcaccacuggaaugaaa

SEQ ID NO: 456512 - RNA, 19 nt, Homo sapiens
  misc_RNA (1)...(19): siRNA sense strand
guguuggugugaaagauuu

SEQ ID NO: 456513 - RNA, 19 nt, Homo sapiens
  misc_RNA (1)...(19): siRNA sense strand
caguugagaauguccuuua

SEQ ID NO: 456514 - RNA, 19 nt, Homo sapiens
  misc_RNA (1)...(19): siRNA sense strand
aggaacaaccuuaaugaaa

SEQ ID NO: 456515 - RNA, 19 nt, Homo sapiens
  misc_RNA (1)...(19): siRNA sense strand
caaguugucgugagaggaa

SEQ ID NO: 456516 - RNA, 19 nt, Homo sapiens
  misc_RNA (1)...(19): siRNA sense strand
gugcaauuguuuacugugu

SEQ ID NO: 456517 - RNA, 19 nt, Homo sapiens
  misc_RNA (1)...(19): siRNA sense strand
ggauuugaccuguacuuca

SEQ ID NO: 456518 - RNA, 19 nt, Homo sapiens
  misc_RNA (1)...(19): siRNA sense strand
caugaacgauggccucucu

SEQ ID NO: 456519 - RNA, 19 nt, Homo sapiens
  misc_RNA (1)...(19): siRNA sense strand
uaaaagaaguuggcaugaa

SEQ ID NO: 456520 - RNA, 19 nt, Homo sapiens
  misc_RNA (1)...(19): siRNA sense strand
ucagagagggaggcuaaua

SEQ ID NO: 456521 - RNA, 19 nt, Homo sapiens
  misc_RNA (1)...(19): siRNA sense strand
ccuagaagaacuccagaaa

SEQ ID NO: 456522 - RNA, 19 nt, Homo sapiens
  misc_RNA (1)...(19): siRNA sense strand
uuacuguguuggugugaaa

SEQ ID NO: 456523 - RNA, 19 nt, Homo sapiens
  misc_RNA (1)...(19): siRNA sense strand
gaggagacacuuacaugca

SEQ ID NO: 456524 - RNA, 19 nt, Homo sapiens
  misc_RNA (1)...(19): siRNA sense strand
gcaugaaggauuugaaagg

SEQ ID NO: 456525 - RNA, 19 nt, Homo sapiens
  misc_RNA (1)...(19): siRNA sense strand
gcacuccaggucagcauga

SEQ ID NO: 456526 - RNA, 19 nt, Homo sapiens
  misc_RNA (1)...(19): siRNA sense strand
gaagacagagaacaaaucc

SEQ ID NO: 456527 - RNA, 19 nt, Homo sapiens
  misc_RNA (1)...(19): siRNA sense strand
ugaacgauggccucucuuu

SEQ ID NO: 456528 - RNA, 19 nt, Homo sapiens
  misc_RNA (1)...(19): siRNA sense strand
gggccagugagcagauuua

SEQ ID NO: 456529 - RNA, 19 nt, Homo sapiens
  misc_RNA (1)...(19): siRNA sense strand
gauuugaaagggccaguga

SEQ ID NO: 456530 - RNA, 19 nt, Homo sapiens
  misc_RNA (1)...(19): siRNA sense strand
ucuauuacuuuguggaaca

SEQ ID NO: 456531 - RNA, 19 nt, Homo sapiens
  misc_RNA (1)...(19): siRNA sense strand
gaacgauggccucucuuuu

SEQ ID NO: 456532 - RNA, 19 nt, Homo sapiens
  misc_RNA (1)...(19): siRNA sense strand
uggaacaguuggcucacaa

SEQ ID NO: 456533 - RNA, 19 nt, Homo sapiens
  misc_RNA (1)...(19): siRNA sense strand
gaaccauccaccauaugug

SEQ ID NO: 456534 - RNA, 19 nt, Homo sapiens
  misc_RNA (1)...(19): siRNA sense strand
ggacaguaaggaucaugug

SEQ ID NO: 456535 - RNA, 19 nt, Homo sapiens
  misc_RNA (1)...(19): siRNA sense strand
ccagcgucaucauugcuuu

SEQ ID NO: 456536 - RNA, 19 nt, Homo sapiens
  misc_RNA (1)...(19): siRNA sense strand
ggaacaguuggcucacaaa

SEQ ID NO: 456537 - RNA, 19 nt, Homo sapiens
  misc_RNA (1)...(19): siRNA sense strand
guugagaauguccuuuauu

SEQ ID NO: 456538 - RNA, 19 nt, Homo sapiens
  misc_RNA (1)...(19): siRNA sense strand
gcagcuucaagaucaauga

SEQ ID NO: 456539 - RNA, 19 nt, Homo sapiens
  misc_RNA (1)...(19): siRNA sense strand
guaaggaucauguguuucc

SEQ ID NO: 456540 - RNA, 19 nt, Homo sapiens
  misc_RNA (1)...(19): siRNA sense strand
cagaagacagagaacaaau

SEQ ID NO: 456541 - RNA, 19 nt, Homo sapiens
  misc_RNA (1)...(19): siRNA sense strand
gcaaggcaucauccacuca

SEQ ID NO: 456542 - RNA, 19 nt, Homo sapiens
  misc_RNA (1)...(19): siRNA sense strand
uuaaugaaacugacagaag

SEQ ID NO: 456543 - RNA, 19 nt, Homo sapiens
  misc_RNA (1)...(19): siRNA sense strand
guguccagcgccuaucuua

SEQ ID NO: 456544 - RNA, 19 nt, Homo sapiens
  misc_RNA (1)...(19): siRNA sense strand
ggacagccagcgucaucau

SEQ ID NO: 456545 - RNA, 19 nt, Homo sapiens
  misc_RNA (1)...(19): siRNA sense strand
ccgaggaacaaccuuaaug

SEQ ID NO: 456546 - RNA, 19 nt, Homo sapiens
  misc_RNA (1)...(19): siRNA sense strand
ugaaccauccaccauaugu

SEQ ID NO: 456547 - RNA, 19 nt, Homo sapiens
  misc_RNA (1)...(19): siRNA sense strand
cagagagggaggcuaauag

SEQ ID NO: 456548 - RNA, 19 nt, Homo sapiens
  misc_RNA (1)...(19): siRNA sense strand
caaggcaucauccacucaa

SEQ ID NO: 456549 - RNA, 19 nt, Homo sapiens
  misc_RNA (1)...(19): siRNA sense strand
acagaagacagagaacaaa

SEQ ID NO: 456550 - RNA, 19 nt, Homo sapiens
  misc_RNA (1)...(19): siRNA sense strand
uaucuccaguucugucauc

SEQ ID NO: 456551 - RNA, 19 nt, Homo sapiens
  misc_RNA (1)...(19): siRNA sense strand
cauaugugcaggagaguca

SEQ ID NO: 456552 - RNA, 19 nt, Homo sapiens
  misc_RNA (1)...(19): siRNA sense strand
acaguaaggaucauguguu

SEQ ID NO: 456553 - RNA, 19 nt, Homo sapiens
  misc_RNA (1)...(19): siRNA sense strand
gacagccagcgucaucauu

SEQ ID NO: 456554 - RNA, 19 nt, Homo sapiens
  misc_RNA (1)...(19): siRNA sense strand
gagacacuuacaugcauga

SEQ ID NO: 456555 - RNA, 19 nt, Homo sapiens
  misc_RNA (1)...(19): siRNA sense strand
gacaguaaggaucaugugu

SEQ ID NO: 456556 - RNA, 19 nt, Homo sapiens
  misc_RNA (1)...(19): siRNA sense strand
gaaauucuagcagcugaac

SEQ ID NO: 456557 - RNA, 19 nt, Homo sapiens
  misc_RNA (1)...(19): siRNA sense strand
ugagaauguccuuuauugu

SEQ ID NO: 456558 - RNA, 19 nt, Homo sapiens
  misc_RNA (1)...(19): siRNA sense strand
gcaccacuggaaugaaauc

SEQ ID NO: 456559 - RNA, 19 nt, Homo sapiens
  misc_RNA (1)...(19): siRNA sense strand
cggcggauuugaccuguac

SEQ ID NO: 456560 - RNA, 19 nt, Homo sapiens
  misc_RNA (1)...(19): siRNA sense strand
ccacucuggugcucaucug

SEQ ID NO: 456561 - RNA, 19 nt, Homo sapiens
  misc_RNA (1)...(19): siRNA sense strand
uuugaccuguacuucauuu

SEQ ID NO: 456562 - RNA, 19 nt, Homo sapiens
  misc_RNA (1)...(19): siRNA sense strand
auucagagagggaggcuaa

SEQ ID NO: 456563 - RNA, 19 nt, Homo sapiens
  misc_RNA (1)...(19): siRNA sense strand
acagccagcgucaucauug

SEQ ID NO: 456564 - RNA, 19 nt, Homo sapiens
  misc_RNA (1)...(19): siRNA sense strand
cacccgaggaacaaccuua

SEQ ID NO: 456565 - RNA, 19 nt, Homo sapiens
  misc_RNA (1)...(19): siRNA sense strand
gccagugagcagauuuauu

SEQ ID NO: 456566 - RNA, 19 nt, Homo sapiens
  misc_RNA (1)...(19): siRNA sense strand
aggagacacuuacaugcau

SEQ ID NO: 456567 - RNA, 19 nt, Homo sapiens
  misc_RNA (1)...(19): siRNA sense strand
gucaaggccuagaagaacu

SEQ ID NO: 456568 - RNA, 19 nt, Homo sapiens
  misc_RNA (1)...(19): siRNA sense strand
caucagcccacaguugaga

SEQ ID NO: 456569 - RNA, 19 nt, Homo sapiens
  misc_RNA (1)...(19): siRNA sense strand
gauggccucucuuuuaucu

SEQ ID NO: 456570 - RNA, 19 nt, Homo sapiens
  misc_RNA (1)...(19): siRNA sense strand
ucauguguuucccgugaau

SEQ ID NO: 456571 - RNA, 19 nt, Homo sapiens
  misc_RNA (1)...(19): siRNA sense strand
gagagggaggcuaauaggu

SEQ ID NO: 456572 - RNA, 19 nt, Homo sapiens
  misc_RNA (1)...(19): siRNA sense strand
gagaacuccaugaagaucu

SEQ ID NO: 456573 - RNA, 19 nt, Homo sapiens
  misc_RNA (1)...(19): siRNA sense strand
caggacagccagcgucauc

SEQ ID NO: 456574 - RNA, 19 nt, Homo sapiens
  misc_RNA (1)...(19): siRNA sense strand
gugcaggagagucauuuca

SEQ ID NO: 456575 - RNA, 19 nt, Homo sapiens
  misc_RNA (1)...(19): siRNA sense strand
caucaccaccacacacugu

SEQ ID NO: 456576 - RNA, 19 nt, Homo sapiens
  misc_RNA (1)...(19): siRNA sense strand
aacgauggccucucuuuua

SEQ ID NO: 456577 - RNA, 19 nt, Homo sapiens
  misc_RNA (1)...(19): siRNA sense strand
aggagagucauuucaaguu

SEQ ID NO: 456578 - RNA, 19 nt, Homo sapiens
  misc_RNA (1)...(19): siRNA sense strand
caggagagucauuucaagu

SEQ ID NO: 456579 - RNA, 19 nt, Homo sapiens
  misc_RNA (1)...(19): siRNA sense strand
ccagugagcagauuuauua

SEQ ID NO: 456580 - RNA, 19 nt, Homo sapiens
  misc_RNA (1)...(19): siRNA sense strand
gugagcagauuuauuauga

SEQ ID NO: 456581 - RNA, 19 nt, Homo sapiens
  misc_RNA (1)...(19): siRNA sense strand
gcuaauaggucucgagauc

SEQ ID NO: 456582 - RNA, 19 nt, Homo sapiens
  misc_RNA (1)...(19): siRNA sense strand
gaagaaguccugcaucgaa

SEQ ID NO: 456583 - RNA, 19 nt, Homo sapiens
  misc_RNA (1)...(19): siRNA sense strand
ggaacaaccuuaaugaaac

SEQ ID NO: 456584 - RNA, 19 nt, Homo sapiens
  misc_RNA (1)...(19): siRNA sense strand
uaaugaaacugacagaaga

SEQ ID NO: 456585 - RNA, 19 nt, Homo sapiens
  misc_RNA (1)...(19): siRNA sense strand
uagaagaacuccagaaagu

SEQ ID NO: 456586 - RNA, 19 nt, Homo sapiens
  misc_RNA (1)...(19): siRNA sense strand
gagaauguccuuuauuguu

SEQ ID NO: 456587 - RNA, 19 nt, Homo sapiens
  misc_RNA (1)...(19): siRNA sense strand
ggagagucauuucaaguug

SEQ ID NO: 456588 - RNA, 19 nt, Homo sapiens
  misc_RNA (1)...(19): siRNA sense strand
uuacaugcaugaaggauuu

SEQ ID NO: 456589 - RNA, 19 nt, Homo sapiens
  misc_RNA (1)...(19): siRNA sense strand
ccacuggaaugaaaucuau

SEQ ID NO: 456590 - RNA, 19 nt, Homo sapiens
  misc_RNA (1)...(19): siRNA sense strand
gcaauuguuuacuguguug

SEQ ID NO: 456591 - RNA, 19 nt, Homo sapiens
  misc_RNA (1)...(19): siRNA sense strand
acaguuggcucacaaauuc

SEQ ID NO: 456592 - RNA, 19 nt, Homo sapiens
  misc_RNA (1)...(19): siRNA sense strand
caguaaggaucauguguuu

SEQ ID NO: 456593 - RNA, 19 nt, Homo sapiens
  misc_RNA (1)...(19): siRNA sense strand
gaacaaccuuaaugaaacu

SEQ ID NO: 456594 - RNA, 19 nt, Homo sapiens
  misc_RNA (1)...(19): siRNA sense strand
gaaacugacagaagacaga

SEQ ID NO: 456595 - RNA, 19 nt, Homo sapiens
  misc_RNA (1)...(19): siRNA sense strand
gcugaaccauccaccauau

SEQ ID NO: 456596 - RNA, 19 nt, Homo sapiens
  misc_RNA (1)...(19): siRNA sense strand
uaauaggucucgagaucuu

SEQ ID NO: 456597 - RNA, 19 nt, Homo sapiens
  misc_RNA (1)...(19): siRNA sense strand
gaucuuggugcaauuguuu

SEQ ID NO: 456598 - RNA, 19 nt, Homo sapiens
  misc_RNA (1)...(19): siRNA sense strand
gcaggagagucauuucaag

SEQ ID NO: 456599 - RNA, 19 nt, Homo sapiens
  misc_RNA (1)...(19): siRNA sense strand
gauuugaccuguacuucau

SEQ ID NO: 456600 - RNA, 19 nt, Homo sapiens
  misc_RNA (1)...(19): siRNA sense strand
uugagaauguccuuuauug

SEQ ID NO: 456601 - RNA, 19 nt, Homo sapiens
  misc_RNA (1)...(19): siRNA sense strand
gaggaacaaccuuaaugaa

SEQ ID NO: 456602 - RNA, 19 nt, Homo sapiens
  misc_RNA (1)...(19): siRNA sense strand
gagagucauuucaaguugu

SEQ ID NO: 456603 - RNA, 19 nt, Homo sapiens
  misc_RNA (1)...(19): siRNA sense strand
gaacaguuggcucacaaau

SEQ ID NO: 456604 - RNA, 19 nt, Homo sapiens
  misc_RNA (1)...(19): siRNA sense strand
aaaagaaguuggcaugaaa

SEQ ID NO: 456605 - RNA, 19 nt, Homo sapiens
  misc_RNA (1)...(19): siRNA sense strand
guccagcgccuaucuuaaa

SEQ ID NO: 456606 - RNA, 19 nt, Homo sapiens
  misc_RNA (1)...(19): siRNA sense strand
gaaguccugcaucgaaauu

SEQ ID NO: 456607 - RNA, 19 nt, Homo sapiens
  misc_RNA (1)...(19): siRNA sense strand
ggcaucauccacucaauuu

SEQ ID NO: 456608 - RNA, 19 nt, Homo sapiens
  misc_RNA (1)...(19): siRNA sense strand
cgaggaacaaccuuaauga

SEQ ID NO: 456609 - RNA, 19 nt, Homo sapiens
  misc_RNA (1)...(19): siRNA sense strand
gacagaagacagagaacaa

SEQ ID NO: 456610 - RNA, 19 nt, Homo sapiens
  misc_RNA (1)...(19): siRNA sense strand
aagaaguccugcaucgaaa

SEQ ID NO: 456611 - RNA, 19 nt, Homo sapiens
  misc_RNA (1)...(19): siRNA sense strand
cugcaccacuggaaugaaa

SEQ ID NO: 456612 - RNA, 19 nt, Homo sapiens
  misc_RNA (1)...(19): siRNA sense strand
guguuggugugaaagauuu

SEQ ID NO: 456613 - RNA, 19 nt, Homo sapiens
  misc_RNA (1)...(19): siRNA sense strand
caguugagaauguccuuua

SEQ ID NO: 456614 - RNA, 19 nt, Homo sapiens
  misc_RNA (1)...(19): siRNA sense strand
aggaacaaccuuaaugaaa

SEQ ID NO: 456615 - RNA, 19 nt, Homo sapiens
  misc_RNA (1)...(19): siRNA sense strand
caaguugucgugagaggaa

SEQ ID NO: 456616 - RNA, 19 nt, Homo sapiens
  misc_RNA (1)...(19): siRNA sense strand
gugcaauuguuuacugugu

SEQ ID NO: 456617 - RNA, 19 nt, Homo sapiens
  misc_RNA (1)...(19): siRNA sense strand
ggauuugaccuguacuuca

SEQ ID NO: 456618 - RNA, 19 nt, Homo sapiens
  misc_RNA (1)...(19): siRNA sense strand
caugaacgauggccucucu

SEQ ID NO: 456619 - RNA, 19 nt, Homo sapiens
  misc_RNA (1)...(19): siRNA sense strand
uaaaagaaguuggcaugaa

SEQ ID NO: 456620 - RNA, 19 nt, Homo sapiens
  misc_RNA (1)...(19): siRNA sense strand
ucagagagggaggcuaaua

SEQ ID NO: 456621 - RNA, 19 nt, Homo sapiens
  misc_RNA (1)...(19): siRNA sense strand
ccuagaagaacuccagaaa

SEQ ID NO: 456622 - RNA, 19 nt, Homo sapiens
  misc_RNA (1)...(19): siRNA sense strand
uuacuguguuggugugaaa

SEQ ID NO: 456623 - RNA, 19 nt, Homo sapiens
  misc_RNA (1)...(19): siRNA sense strand
gaggagacacuuacaugca

SEQ ID NO: 456624 - RNA, 19 nt, Homo sapiens
  misc_RNA (1)...(19): siRNA sense strand
gcaugaaggauuugaaagg

SEQ ID NO: 456625 - RNA, 19 nt, Homo sapiens
  misc_RNA (1)...(19): siRNA sense strand
gcacuccaggucagcauga

SEQ ID NO: 456626 - RNA, 19 nt, Homo sapiens
  misc_RNA (1)...(19): siRNA sense strand
gaagacagagaacaaaucc

SEQ ID NO: 456627 - RNA, 19 nt, Homo sapiens
  misc_RNA (1)...(19): siRNA sense strand
ugaacgauggccucucuuu

SEQ ID NO: 456628 - RNA, 19 nt, Homo sapiens
  misc_RNA (1)...(19): siRNA sense strand
gggccagugagcagauuua

SEQ ID NO: 456629 - RNA, 19 nt, Homo sapiens
  misc_RNA (1)...(19): siRNA sense strand
gauuugaaagggccaguga

SEQ ID NO: 456630 - RNA, 19 nt, Homo sapiens
  misc_RNA (1)...(19): siRNA sense strand
ucuauuacuuuguggaaca

SEQ ID NO: 456631 - RNA, 19 nt, Homo sapiens
  misc_RNA (1)...(19): siRNA sense strand
gaacgauggccucucuuuu

SEQ ID NO: 456632 - RNA, 19 nt, Homo sapiens
  misc_RNA (1)...(19): siRNA sense strand
uggaacaguuggcucacaa

SEQ ID NO: 456633 - RNA, 19 nt, Homo sapiens
  misc_RNA (1)...(19): siRNA sense strand
gaaccauccaccauaugug

SEQ ID NO: 456634 - RNA, 19 nt, Homo sapiens
  misc_RNA (1)...(19): siRNA sense strand
ggacaguaaggaucaugug

SEQ ID NO: 456635 - RNA, 19 nt, Homo sapiens
  misc_RNA (1)...(19): siRNA sense strand
ccagcgucaucauugcuuu

SEQ ID NO: 456636 - RNA, 19 nt, Homo sapiens
  misc_RNA (1)...(19): siRNA sense strand
ggaacaguuggcucacaaa

SEQ ID NO: 456637 - RNA, 19 nt, Homo sapiens
  misc_RNA (1)...(19): siRNA sense strand
guugagaauguccuuuauu

SEQ ID NO: 456638 - RNA, 19 nt, Homo sapiens
  misc_RNA (1)...(19): siRNA sense strand
gcagcuucaagaucaauga

SEQ ID NO: 456639 - RNA, 19 nt, Homo sapiens
  misc_RNA (1)...(19): siRNA sense strand
guaaggaucauguguuucc

SEQ ID NO: 456640 - RNA, 19 nt, Homo sapiens
  misc_RNA (1)...(19): siRNA sense strand
cagaagacagagaacaaau

SEQ ID NO: 456641 - RNA, 19 nt, Homo sapiens
  misc_RNA (1)...(19): siRNA sense strand
gcaaggcaucauccacuca

SEQ ID NO: 456642 - RNA, 19 nt, Homo sapiens
  misc_RNA (1)...(19): siRNA sense strand
uuaaugaaacugacagaag

SEQ ID NO: 456643 - RNA, 19 nt, Homo sapiens
  misc_RNA (1)...(19): siRNA sense strand
guguccagcgccuaucuua

SEQ ID NO: 456644 - RNA, 19 nt, Homo sapiens
  misc_RNA (1)...(19): siRNA sense strand
ggacagccagcgucaucau

SEQ ID NO: 456645 - RNA, 19 nt, Homo sapiens
  misc_RNA (1)...(19): siRNA sense strand
ccgaggaacaaccuuaaug

SEQ ID NO: 456646 - RNA, 19 nt, Homo sapiens
  misc_RNA (1)...(19): siRNA sense strand
ugaaccauccaccauaugu

SEQ ID NO: 456647 - RNA, 19 nt, Homo sapiens
  misc_RNA (1)...(19): siRNA sense strand
cagagagggaggcuaauag

SEQ ID NO: 456648 - RNA, 19 nt, Homo sapiens
  misc_RNA (1)...(19): siRNA sense strand
caaggcaucauccacucaa

SEQ ID NO: 456649 - RNA, 19 nt, Homo sapiens
  misc_RNA (1)...(19): siRNA sense strand
acagaagacagagaacaaa

SEQ ID NO: 456650 - RNA, 19 nt, Homo sapiens
  misc_RNA (1)...(19): siRNA sense strand
uaucuccaguucugucauc

SEQ ID NO: 456651 - RNA, 19 nt, Homo sapiens
  misc_RNA (1)...(19): siRNA sense strand
cauaugugcaggagaguca

SEQ ID NO: 456652 - RNA, 19 nt, Homo sapiens
  misc_RNA (1)...(19): siRNA sense strand
acaguaaggaucauguguu

SEQ ID NO: 456653 - RNA, 19 nt, Homo sapiens
  misc_RNA (1)...(19): siRNA sense strand
gacagccagcgucaucauu

SEQ ID NO: 456654 - RNA, 19 nt, Homo sapiens
  misc_RNA (1)...(19): siRNA sense strand
gagacacuuacaugcauga

SEQ ID NO: 456655 - RNA, 19 nt, Homo sapiens
  misc_RNA (1)...(19): siRNA sense strand
gacaguaaggaucaugugu

SEQ ID NO: 456656 - RNA, 19 nt, Homo sapiens
  misc_RNA (1)...(19): siRNA sense strand
gaaauucuagcagcugaac

SEQ ID NO: 456657 - RNA, 19 nt, Homo sapiens
  misc_RNA (1)...(19): siRNA sense strand
ugagaauguccuuuauugu

SEQ ID NO: 456658 - RNA, 19 nt, Homo sapiens
  misc_RNA (1)...(19): siRNA sense strand
gcaccacuggaaugaaauc

SEQ ID NO: 456659 - RNA, 19 nt, Homo sapiens
  misc_RNA (1)...(19): siRNA sense strand
cggcggauuugaccuguac

SEQ ID NO: 456660 - RNA, 19 nt, Homo sapiens
  misc_RNA (1)...(19): siRNA sense strand
ccacucuggugcucaucug

SEQ ID NO: 456661 - RNA, 19 nt, Homo sapiens
  misc_RNA (1)...(19): siRNA sense strand
uuugaccuguacuucauuu

SEQ ID NO: 456662 - RNA, 19 nt, Homo sapiens
  misc_RNA (1)...(19): siRNA sense strand
auucagagagggaggcuaa

SEQ ID NO: 456663 - RNA, 19 nt, Homo sapiens
  misc_RNA (1)...(19): siRNA sense strand
acagccagcgucaucauug

SEQ ID NO: 456664 - RNA, 19 nt, Homo sapiens
  misc_RNA (1)...(19): siRNA sense strand
cacccgaggaacaaccuua

SEQ ID NO: 456665 - RNA, 19 nt, Homo sapiens
  misc_RNA (1)...(19): siRNA sense strand
gccagugagcagauuuauu

SEQ ID NO: 456666 - RNA, 19 nt, Homo sapiens
  misc_RNA (1)...(19): siRNA sense strand
aggagacacuuacaugcau

SEQ ID NO: 456667 - RNA, 19 nt, Homo sapiens
  misc_RNA (1)...(19): siRNA sense strand
gucaaggccuagaagaacu

SEQ ID NO: 456668 - RNA, 19 nt, Homo sapiens
  misc_RNA (1)...(19): siRNA sense strand
caucagcccacaguugaga

SEQ ID NO: 456669 - RNA, 19 nt, Homo sapiens
  misc_RNA (1)...(19): siRNA sense strand
gauggccucucuuuuaucu

SEQ ID NO: 456670 - RNA, 19 nt, Homo sapiens
  misc_RNA (1)...(19): siRNA sense strand
ucauguguuucccgugaau

SEQ ID NO: 456671 - RNA, 19 nt, Homo sapiens
  misc_RNA (1)...(19): siRNA sense strand
gagagggaggcuaauaggu

SEQ ID NO: 456672 - RNA, 19 nt, Homo sapiens
  misc_RNA (1)...(19): siRNA sense strand
gagaacuccaugaagaucu

SEQ ID NO: 456673 - RNA, 19 nt, Homo sapiens
  misc_RNA (1)...(19): siRNA sense strand
caggacagccagcgucauc

SEQ ID NO: 456674 - RNA, 19 nt, Homo sapiens
  misc_RNA (1)...(19): siRNA sense strand
gugcaggagagucauuuca

SEQ ID NO: 456675 - RNA, 19 nt, Homo sapiens
  misc_RNA (1)...(19): siRNA sense strand
caucaccaccacacacugu

SEQ ID NO: 456676 - RNA, 19 nt, Homo sapiens
  misc_RNA (1)...(19): siRNA sense strand
aacgauggccucucuuuua

SEQ ID NO: 456677 - RNA, 19 nt, Homo sapiens
  misc_RNA (1)...(19): siRNA sense strand
aggagagucauuucaaguu

SEQ ID NO: 456678 - RNA, 19 nt, Homo sapiens
  misc_RNA (1)...(19): siRNA sense strand
caggagagucauuucaagu

SEQ ID NO: 456679 - RNA, 19 nt, Homo sapiens
  misc_RNA (1)...(19): siRNA sense strand
ccagugagcagauuuauua

SEQ ID NO: 456680 - RNA, 19 nt, Homo sapiens
  misc_RNA (1)...(19): siRNA sense strand
gugagcagauuuauuauga

SEQ ID NO: 456681 - RNA, 19 nt, Homo sapiens
  misc_RNA (1)...(19): siRNA sense strand
gcuaauaggucucgagauc

SEQ ID NO: 456682 - RNA, 19 nt, Homo sapiens
  misc_RNA (1)...(19): siRNA sense strand
gaagaaguccugcaucgaa

SEQ ID NO: 456683 - RNA, 19 nt, Homo sapiens
  misc_RNA (1)...(19): siRNA sense strand
ggaacaaccuuaaugaaac

SEQ ID NO: 456684 - RNA, 19 nt, Homo sapiens
  misc_RNA (1)...(19): siRNA sense strand
uaaugaaacugacagaaga

SEQ ID NO: 456685 - RNA, 19 nt, Homo sapiens
  misc_RNA (1)...(19): siRNA sense strand
uagaagaacuccagaaagu

SEQ ID NO: 456686 - RNA, 19 nt, Homo sapiens
  misc_RNA (1)...(19): siRNA sense strand
gagaauguccuuuauuguu

SEQ ID NO: 456687 - RNA, 19 nt, Homo sapiens
  misc_RNA (1)...(19): siRNA sense strand
ggagagucauuucaaguug

SEQ ID NO: 456688 - RNA, 19 nt, Homo sapiens
  misc_RNA (1)...(19): siRNA sense strand
uuacaugcaugaaggauuu

SEQ ID NO: 456689 - RNA, 19 nt, Homo sapiens
  misc_RNA (1)...(19): siRNA sense strand
ccacuggaaugaaaucuau

SEQ ID NO: 456690 - RNA, 19 nt, Homo sapiens
  misc_RNA (1)...(19): siRNA sense strand
gcaauuguuuacuguguug

SEQ ID NO: 456691 - RNA, 19 nt, Homo sapiens
  misc_RNA (1)...(19): siRNA sense strand
acaguuggcucacaaauuc

SEQ ID NO: 456692 - RNA, 19 nt, Homo sapiens
  misc_RNA (1)...(19): siRNA sense strand
caguaaggaucauguguuu

SEQ ID NO: 456693 - RNA, 19 nt, Homo sapiens
  misc_RNA (1)...(19): siRNA sense strand
gaacaaccuuaaugaaacu

SEQ ID NO: 456694 - RNA, 19 nt, Homo sapiens
  misc_RNA (1)...(19): siRNA sense strand
gaaacugacagaagacaga

SEQ ID NO: 456695 - RNA, 19 nt, Homo sapiens
  misc_RNA (1)...(19): siRNA sense strand
gcugaaccauccaccauau

SEQ ID NO: 456696 - RNA, 19 nt, Homo sapiens
  misc_RNA (1)...(19): siRNA sense strand
uaauaggucucgagaucuu

SEQ ID NO: 456697 - RNA, 19 nt, Homo sapiens
  misc_RNA (1)...(19): siRNA sense strand
gaucuuggugcaauuguuu

SEQ ID NO: 456698 - RNA, 19 nt, Homo sapiens
  misc_RNA (1)...(19): siRNA sense strand
gcaggagagucauuucaag

SEQ ID NO: 456699 - RNA, 19 nt, Homo sapiens
  misc_RNA (1)...(19): siRNA sense strand
gauuugaccuguacuucau

SEQ ID NO: 456700 - RNA, 19 nt, Homo sapiens
  misc_RNA (1)...(19): siRNA sense strand
uugagaauguccuuuauug

SEQ ID NO: 456701 - RNA, 19 nt, Homo sapiens
  misc_RNA (1)...(19): siRNA sense strand
gaggaacaaccuuaaugaa

SEQ ID NO: 456702 - RNA, 19 nt, Homo sapiens
  misc_RNA (1)...(19): siRNA sense strand
gagagucauuucaaguugu

SEQ ID NO: 456703 - RNA, 19 nt, Homo sapiens
  misc_RNA (1)...(19): siRNA sense strand
gaacaguuggcucacaaau

SEQ ID NO: 456704 - RNA, 19 nt, Homo sapiens
  misc_RNA (1)...(19): siRNA sense strand
aaaagaaguuggcaugaaa

SEQ ID NO: 456705 - RNA, 19 nt, Homo sapiens
  misc_RNA (1)...(19): siRNA sense strand
guccagcgccuaucuuaaa

SEQ ID NO: 456706 - RNA, 19 nt, Homo sapiens
  misc_RNA (1)...(19): siRNA sense strand
gaaguccugcaucgaaauu

SEQ ID NO: 456707 - RNA, 19 nt, Homo sapiens
  misc_RNA (1)...(19): siRNA sense strand
ggcaucauccacucaauuu

SEQ ID NO: 456708 - RNA, 19 nt, Homo sapiens
  misc_RNA (1)...(19): siRNA sense strand
cgaggaacaaccuuaauga

SEQ ID NO: 456709 - RNA, 19 nt, Homo sapiens
  misc_RNA (1)...(19): siRNA sense strand
gacagaagacagagaacaa

SEQ ID NO: 456710 - RNA, 19 nt, Homo sapiens
  misc_RNA (1)...(19): siRNA sense strand
aagaaguccugcaucgaaa

SEQ ID NO: 456711 - RNA, 19 nt, Homo sapiens
  misc_RNA (1)...(19): siRNA sense strand
cugcaccacuggaaugaaa

SEQ ID NO: 456712 - RNA, 19 nt, Homo sapiens
  misc_RNA (1)...(19): siRNA sense strand
guguuggugugaaagauuu

SEQ ID NO: 456713 - RNA, 19 nt, Homo sapiens
  misc_RNA (1)...(19): siRNA sense strand
caguugagaauguccuuua

SEQ ID NO: 456714 - RNA, 19 nt, Homo sapiens
  misc_RNA (1)...(19): siRNA sense strand
aggaacaaccuuaaugaaa

SEQ ID NO: 456715 - RNA, 19 nt, Homo sapiens
  misc_RNA (1)...(19): siRNA sense strand
caaguugucgugagaggaa

SEQ ID NO: 456716 - RNA, 19 nt, Homo sapiens
  misc_RNA (1)...(19): siRNA sense strand
gugcaauuguuuacugugu

SEQ ID NO: 456717 - RNA, 19 nt, Homo sapiens
  misc_RNA (1)...(19): siRNA sense strand
ggauuugaccuguacuuca

SEQ ID NO: 456718 - RNA, 19 nt, Homo sapiens
  misc_RNA (1)...(19): siRNA sense strand
caugaacgauggccucucu

SEQ ID NO: 456719 - RNA, 19 nt, Homo sapiens
  misc_RNA (1)...(19): siRNA sense strand
uaaaagaaguuggcaugaa

SEQ ID NO: 456720 - RNA, 19 nt, Homo sapiens
  misc_RNA (1)...(19): siRNA sense strand
ucagagagggaggcuaaua

SEQ ID NO: 456721 - RNA, 19 nt, Homo sapiens
  misc_RNA (1)...(19): siRNA sense strand
ccuagaagaacuccagaaa

SEQ ID NO: 456722 - RNA, 19 nt, Homo sapiens
  misc_RNA (1)...(19): siRNA sense strand
uuacuguguuggugugaaa

SEQ ID NO: 456723 - RNA, 19 nt, Homo sapiens
  misc_RNA (1)...(19): siRNA sense strand
gaggagacacuuacaugca

SEQ ID NO: 456724 - RNA, 19 nt, Homo sapiens
  misc_RNA (1)...(19): siRNA sense strand
gcaugaaggauuugaaagg

SEQ ID NO: 456725 - RNA, 19 nt, Homo sapiens
  misc_RNA (1)...(19): siRNA sense strand
gcacuccaggucagcauga

SEQ ID NO: 456726 - RNA, 19 nt, Homo sapiens
  misc_RNA (1)...(19): siRNA sense strand
gaagacagagaacaaaucc

SEQ ID NO: 456727 - RNA, 19 nt, Homo sapiens
  misc_RNA (1)...(19): siRNA sense strand
ugaacgauggccucucuuu

SEQ ID NO: 456728 - RNA, 19 nt, Homo sapiens
  misc_RNA (1)...(19): siRNA sense strand
gggccagugagcagauuua

SEQ ID NO: 456729 - RNA, 19 nt, Homo sapiens
  misc_RNA (1)...(19): siRNA sense strand
gauuugaaagggccaguga

SEQ ID NO: 456730 - RNA, 19 nt, Homo sapiens
  misc_RNA (1)...(19): siRNA sense strand
ucuauuacuuuguggaaca

SEQ ID NO: 456731 - RNA, 19 nt, Homo sapiens
  misc_RNA (1)...(19): siRNA sense strand
gaacgauggccucucuuuu

SEQ ID NO: 456732 - RNA, 19 nt, Homo sapiens
  misc_RNA (1)...(19): siRNA sense strand
uggaacaguuggcucacaa

SEQ ID NO: 456733 - RNA, 19 nt, Homo sapiens
  misc_RNA (1)...(19): siRNA sense strand
gaaccauccaccauaugug

SEQ ID NO: 456734 - RNA, 19 nt, Homo sapiens
  misc_RNA (1)...(19): siRNA sense strand
ggacaguaaggaucaugug

SEQ ID NO: 456735 - RNA, 19 nt, Homo sapiens
  misc_RNA (1)...(19): siRNA sense strand
ccagcgucaucauugcuuu

SEQ ID NO: 456736 - RNA, 19 nt, Homo sapiens
  misc_RNA (1)...(19): siRNA sense strand
ggaacaguuggcucacaaa

SEQ ID NO: 456737 - RNA, 19 nt, Homo sapiens
  misc_RNA (1)...(19): siRNA sense strand
guugagaauguccuuuauu

SEQ ID NO: 456738 - RNA, 19 nt, Homo sapiens
  misc_RNA (1)...(19): siRNA sense strand
gcagcuucaagaucaauga

SEQ ID NO: 456739 - RNA, 19 nt, Homo sapiens
  misc_RNA (1)...(19): siRNA sense strand
guaaggaucauguguuucc

SEQ ID NO: 456740 - RNA, 19 nt, Homo sapiens
  misc_RNA (1)...(19): siRNA sense strand
cagaagacagagaacaaau

SEQ ID NO: 456741 - RNA, 19 nt, Homo sapiens
  misc_RNA (1)...(19): siRNA sense strand
gcaaggcaucauccacuca

SEQ ID NO: 456742 - RNA, 19 nt, Homo sapiens
  misc_RNA (1)...(19): siRNA sense strand
uuaaugaaacugacagaag

SEQ ID NO: 456743 - RNA, 19 nt, Homo sapiens
  misc_RNA (1)...(19): siRNA sense strand
guguccagcgccuaucuua

SEQ ID NO: 456744 - RNA, 19 nt, Homo sapiens
  misc_RNA (1)...(19): siRNA sense strand
ggacagccagcgucaucau

SEQ ID NO: 456745 - RNA, 19 nt, Homo sapiens
  misc_RNA (1)...(19): siRNA sense strand
ccgaggaacaaccuuaaug

SEQ ID NO: 456746 - RNA, 19 nt, Homo sapiens
  misc_RNA (1)...(19): siRNA sense strand
ugaaccauccaccauaugu

SEQ ID NO: 456747 - RNA, 19 nt, Homo sapiens
  misc_RNA (1)...(19): siRNA sense strand
cagagagggaggcuaauag

SEQ ID NO: 456748 - RNA, 19 nt, Homo sapiens
  misc_RNA (1)...(19): siRNA sense strand
caaggcaucauccacucaa

SEQ ID NO: 456749 - RNA, 19 nt, Homo sapiens
  misc_RNA (1)...(19): siRNA sense strand
acagaagacagagaacaaa

SEQ ID NO: 456750 - RNA, 19 nt, Homo sapiens
  misc_RNA (1)...(19): siRNA sense strand
uaucuccaguucugucauc

SEQ ID NO: 456751 - RNA, 19 nt, Homo sapiens
  misc_RNA (1)...(19): siRNA sense strand
cauaugugcaggagaguca

SEQ ID NO: 456752 - RNA, 19 nt, Homo sapiens
  misc_RNA (1)...(19): siRNA sense strand
acaguaaggaucauguguu

SEQ ID NO: 456753 - RNA, 19 nt, Homo sapiens
  misc_RNA (1)...(19): siRNA sense strand
gacagccagcgucaucauu

SEQ ID NO: 456754 - RNA, 19 nt, Homo sapiens
  misc_RNA (1)...(19): siRNA sense strand
gagacacuuacaugcauga

SEQ ID NO: 456755 - RNA, 19 nt, Homo sapiens
  misc_RNA (1)...(19): siRNA sense strand
gacaguaaggaucaugugu

SEQ ID NO: 456756 - RNA, 19 nt, Homo sapiens
  misc_RNA (1)...(19): siRNA sense strand
gaaauucuagcagcugaac

SEQ ID NO: 456757 - RNA, 19 nt, Homo sapiens
  misc_RNA (1)...(19): siRNA sense strand
ugagaauguccuuuauugu

SEQ ID NO: 456758 - RNA, 19 nt, Homo sapiens
  misc_RNA (1)...(19): siRNA sense strand
gcaccacuggaaugaaauc

SEQ ID NO: 456759 - RNA, 19 nt, Homo sapiens
  misc_RNA (1)...(19): siRNA sense strand
cggcggauuugaccuguac

SEQ ID NO: 456760 - RNA, 19 nt, Homo sapiens
  misc_RNA (1)...(19): siRNA sense strand
ccacucuggugcucaucug

SEQ ID NO: 456761 - RNA, 19 nt, Homo sapiens
  misc_RNA (1)...(19): siRNA sense strand
uuugaccuguacuucauuu

SEQ ID NO: 456762 - RNA, 19 nt, Homo sapiens
  misc_RNA (1)...(19): siRNA sense strand
auucagagagggaggcuaa

SEQ ID NO: 456763 - RNA, 19 nt, Homo sapiens
  misc_RNA (1)...(19): siRNA sense strand
acagccagcgucaucauug

SEQ ID NO: 456764 - RNA, 19 nt, Homo sapiens
  misc_RNA (1)...(19): siRNA sense strand
cacccgaggaacaaccuua

SEQ ID NO: 456765 - RNA, 19 nt, Homo sapiens
  misc_RNA (1)...(19): siRNA sense strand
gccagugagcagauuuauu

SEQ ID NO: 456766 - RNA, 19 nt, Homo sapiens
  misc_RNA (1)...(19): siRNA sense strand
aggagacacuuacaugcau

SEQ ID NO: 456767 - RNA, 19 nt, Homo sapiens
  misc_RNA (1)...(19): siRNA sense strand
gucaaggccuagaagaacu

SEQ ID NO: 456768 - RNA, 19 nt, Homo sapiens
  misc_RNA (1)...(19): siRNA sense strand
caucagcccacaguugaga

SEQ ID NO: 456769 - RNA, 19 nt, Homo sapiens
  misc_RNA (1)...(19): siRNA sense strand
gauggccucucuuuuaucu

SEQ ID NO: 456770 - RNA, 19 nt, Homo sapiens
  misc_RNA (1)...(19): siRNA sense strand
ucauguguuucccgugaau

SEQ ID NO: 456771 - RNA, 19 nt, Homo sapiens
  misc_RNA (1)...(19): siRNA sense strand
gagagggaggcuaauaggu

SEQ ID NO: 456772 - RNA, 19 nt, Homo sapiens
  misc_RNA (1)...(19): siRNA sense strand
gagaacuccaugaagaucu

SEQ ID NO: 456773 - RNA, 19 nt, Homo sapiens
  misc_RNA (1)...(19): siRNA sense strand
caggacagccagcgucauc

SEQ ID NO: 456774 - RNA, 19 nt, Homo sapiens
  misc_RNA (1)...(19): siRNA sense strand
gugcaggagagucauuuca

SEQ ID NO: 456775 - RNA, 19 nt, Homo sapiens
  misc_RNA (1)...(19): siRNA sense strand
caucaccaccacacacugu

SEQ ID NO: 456776 - RNA, 19 nt, Homo sapiens
  misc_RNA (1)...(19): siRNA sense strand
aacgauggccucucuuuua

SEQ ID NO: 456777 - RNA, 19 nt, Homo sapiens
  misc_RNA (1)...(19): siRNA sense strand
aggagagucauuucaaguu

SEQ ID NO: 456778 - RNA, 19 nt, Homo sapiens
  misc_RNA (1)...(19): siRNA sense strand
caggagagucauuucaagu

SEQ ID NO: 456779 - RNA, 19 nt, Homo sapiens
  misc_RNA (1)...(19): siRNA sense strand
ccagugagcagauuuauua

SEQ ID NO: 456780 - RNA, 19 nt, Homo sapiens
  misc_RNA (1)...(19): siRNA sense strand
gugagcagauuuauuauga

SEQ ID NO: 456781 - RNA, 19 nt, Homo sapiens
  misc_RNA (1)...(19): siRNA sense strand
gcuaauaggucucgagauc

SEQ ID NO: 456782 - RNA, 19 nt, Homo sapiens
  misc_RNA (1)...(19): siRNA sense strand
gaagaaguccugcaucgaa

SEQ ID NO: 456783 - RNA, 19 nt, Homo sapiens
  misc_RNA (1)...(19): siRNA sense strand
ggaacaaccuuaaugaaac

SEQ ID NO: 456784 - RNA, 19 nt, Homo sapiens
  misc_RNA (1)...(19): siRNA sense strand
uaaugaaacugacagaaga

SEQ ID NO: 456785 - RNA, 19 nt, Homo sapiens
  misc_RNA (1)...(19): siRNA sense strand
uagaagaacuccagaaagu

SEQ ID NO: 456786 - RNA, 19 nt, Homo sapiens
  misc_RNA (1)...(19): siRNA sense strand
gagaauguccuuuauuguu

SEQ ID NO: 456787 - RNA, 19 nt, Homo sapiens
  misc_RNA (1)...(19): siRNA sense strand
ggagagucauuucaaguug

SEQ ID NO: 456788 - RNA, 19 nt, Homo sapiens
  misc_RNA (1)...(19): siRNA sense strand
uuacaugcaugaaggauuu

SEQ ID NO: 456789 - RNA, 19 nt, Homo sapiens
  misc_RNA (1)...(19): siRNA sense strand
ccacuggaaugaaaucuau

SEQ ID NO: 456790 - RNA, 19 nt, Homo sapiens
  misc_RNA (1)...(19): siRNA sense strand
gcaauuguuuacuguguug

SEQ ID NO: 456791 - RNA, 19 nt, Homo sapiens
  misc_RNA (1)...(19): siRNA sense strand
acaguuggcucacaaauuc

SEQ ID NO: 456792 - RNA, 19 nt, Homo sapiens
  misc_RNA (1)...(19): siRNA sense strand
caguaaggaucauguguuu

SEQ ID NO: 456793 - RNA, 19 nt, Homo sapiens
  misc_RNA (1)...(19): siRNA sense strand
gaacaaccuuaaugaaacu

SEQ ID NO: 456794 - RNA, 19 nt, Homo sapiens
  misc_RNA (1)...(19): siRNA sense strand
gaaacugacagaagacaga

SEQ ID NO: 456795 - RNA, 19 nt, Homo sapiens
  misc_RNA (1)...(19): siRNA sense strand
gcugaaccauccaccauau

SEQ ID NO: 456796 - RNA, 19 nt, Homo sapiens
  misc_RNA (1)...(19): siRNA sense strand
uaauaggucucgagaucuu

SEQ ID NO: 456797 - RNA, 19 nt, Homo sapiens
  misc_RNA (1)...(19): siRNA sense strand
gaucuuggugcaauuguuu

SEQ ID NO: 456798 - RNA, 19 nt, Homo sapiens
  misc_RNA (1)...(19): siRNA sense strand
gcaggagagucauuucaag

SEQ ID NO: 456799 - RNA, 19 nt, Homo sapiens
  misc_RNA (1)...(19): siRNA sense strand
gauuugaccuguacuucau

SEQ ID NO: 456800 - RNA, 19 nt, Homo sapiens
  misc_RNA (1)...(19): siRNA sense strand
uugagaauguccuuuauug

SEQ ID NO: 456801 - RNA, 19 nt, Homo sapiens
  misc_RNA (1)...(19): siRNA sense strand
gaggaacaaccuuaaugaa

SEQ ID NO: 456802 - RNA, 19 nt, Homo sapiens
  misc_RNA (1)...(19): siRNA sense strand
gagagucauuucaaguugu

SEQ ID NO: 456803 - RNA, 19 nt, Homo sapiens
  misc_RNA (1)...(19): siRNA sense strand
gaacaguuggcucacaaau

SEQ ID NO: 456804 - RNA, 19 nt, Homo sapiens
  misc_RNA (1)...(19): siRNA sense strand
aaaagaaguuggcaugaaa

SEQ ID NO: 456805 - RNA, 19 nt, Homo sapiens
  misc_RNA (1)...(19): siRNA sense strand
guccagcgccuaucuuaaa

SEQ ID NO: 456806 - RNA, 19 nt, Homo sapiens
  misc_RNA (1)...(19): siRNA sense strand
gaaguccugcaucgaaauu

SEQ ID NO: 456807 - RNA, 19 nt, Homo sapiens
  misc_RNA (1)...(19): siRNA sense strand
ggcaucauccacucaauuu

SEQ ID NO: 456808 - RNA, 19 nt, Homo sapiens
  misc_RNA (1)...(19): siRNA sense strand
cgaggaacaaccuuaauga

SEQ ID NO: 456809 - RNA, 19 nt, Homo sapiens
  misc_RNA (1)...(19): siRNA sense strand
gacagaagacagagaacaa

SEQ ID NO: 456810 - RNA, 19 nt, Homo sapiens
  misc_RNA (1)...(19): siRNA sense strand
aagaaguccugcaucgaaa

SEQ ID NO: 456811 - RNA, 19 nt, Homo sapiens
  misc_RNA (1)...(19): siRNA sense strand
cugcaccacuggaaugaaa

SEQ ID NO: 456812 - RNA, 19 nt, Homo sapiens
  misc_RNA (1)...(19): siRNA sense strand
guguuggugugaaagauuu

SEQ ID NO: 456813 - RNA, 19 nt, Homo sapiens
  misc_RNA (1)...(19): siRNA sense strand
caguugagaauguccuuua

SEQ ID NO: 456814 - RNA, 19 nt, Homo sapiens
  misc_RNA (1)...(19): siRNA sense strand
aggaacaaccuuaaugaaa

SEQ ID NO: 456815 - RNA, 19 nt, Homo sapiens
  misc_RNA (1)...(19): siRNA sense strand
caaguugucgugagaggaa

SEQ ID NO: 456816 - RNA, 19 nt, Homo sapiens
  misc_RNA (1)...(19): siRNA sense strand
gugcaauuguuuacugugu

SEQ ID NO: 456817 - RNA, 19 nt, Homo sapiens
  misc_RNA (1)...(19): siRNA sense strand
ggauuugaccuguacuuca

SEQ ID NO: 456818 - RNA, 19 nt, Homo sapiens
  misc_RNA (1)...(19): siRNA sense strand
caugaacgauggccucucu

SEQ ID NO: 456819 - RNA, 19 nt, Homo sapiens
  misc_RNA (1)...(19): siRNA sense strand
uaaaagaaguuggcaugaa

SEQ ID NO: 456820 - RNA, 19 nt, Homo sapiens
  misc_RNA (1)...(19): siRNA sense strand
ucagagagggaggcuaaua

SEQ ID NO: 456821 - RNA, 19 nt, Homo sapiens
  misc_RNA (1)...(19): siRNA sense strand
ccuagaagaacuccagaaa

SEQ ID NO: 456822 - RNA, 19 nt, Homo sapiens
  misc_RNA (1)...(19): siRNA sense strand
uuacuguguuggugugaaa

SEQ ID NO: 456823 - RNA, 19 nt, Homo sapiens
  misc_RNA (1)...(19): siRNA sense strand
gaggagacacuuacaugca

SEQ ID NO: 456824 - RNA, 19 nt, Homo sapiens
  misc_RNA (1)...(19): siRNA sense strand
gcaugaaggauuugaaagg

SEQ ID NO: 456825 - RNA, 19 nt, Homo sapiens
  misc_RNA (1)...(19): siRNA sense strand
gcacuccaggucagcauga

SEQ ID NO: 456826 - RNA, 19 nt, Homo sapiens
  misc_RNA (1)...(19): siRNA sense strand
gaagacagagaacaaaucc

SEQ ID NO: 456827 - RNA, 19 nt, Homo sapiens
  misc_RNA (1)...(19): siRNA sense strand
ugaacgauggccucucuuu

SEQ ID NO: 456828 - RNA, 19 nt, Homo sapiens
  misc_RNA (1)...(19): siRNA sense strand
gggccagugagcagauuua

SEQ ID NO: 456829 - RNA, 19 nt, Homo sapiens
  misc_RNA (1)...(19): siRNA sense strand
gauuugaaagggccaguga

SEQ ID NO: 456830 - RNA, 19 nt, Homo sapiens
  misc_RNA (1)...(19): siRNA sense strand
ucuauuacuuuguggaaca

SEQ ID NO: 456831 - RNA, 19 nt, Homo sapiens
  misc_RNA (1)...(19): siRNA sense strand
gaacgauggccucucuuuu

SEQ ID NO: 456832 - RNA, 19 nt, Homo sapiens
  misc_RNA (1)...(19): siRNA sense strand
uggaacaguuggcucacaa

SEQ ID NO: 456833 - RNA, 19 nt, Homo sapiens
  misc_RNA (1)...(19): siRNA sense strand
gaaccauccaccauaugug

SEQ ID NO: 456834 - RNA, 19 nt, Homo sapiens
  misc_RNA (1)...(19): siRNA sense strand
ggacaguaaggaucaugug

SEQ ID NO: 456835 - RNA, 19 nt, Homo sapiens
  misc_RNA (1)...(19): siRNA sense strand
ccagcgucaucauugcuuu

SEQ ID NO: 456836 - RNA, 19 nt, Homo sapiens
  misc_RNA (1)...(19): siRNA sense strand
ggaacaguuggcucacaaa

SEQ ID NO: 456837 - RNA, 19 nt, Homo sapiens
  misc_RNA (1)...(19): siRNA sense strand
guugagaauguccuuuauu

SEQ ID NO: 456838 - RNA, 19 nt, Homo sapiens
  misc_RNA (1)...(19): siRNA sense strand
gcagcuucaagaucaauga

SEQ ID NO: 456839 - RNA, 19 nt, Homo sapiens
  misc_RNA (1)...(19): siRNA sense strand
guaaggaucauguguuucc

SEQ ID NO: 456840 - RNA, 19 nt, Homo sapiens
  misc_RNA (1)...(19): siRNA sense strand
cagaagacagagaacaaau

SEQ ID NO: 456841 - RNA, 19 nt, Homo sapiens
  misc_RNA (1)...(19): siRNA sense strand
gcaaggcaucauccacuca

SEQ ID NO: 456842 - RNA, 19 nt, Homo sapiens
  misc_RNA (1)...(19): siRNA sense strand
uuaaugaaacugacagaag

SEQ ID NO: 456843 - RNA, 19 nt, Homo sapiens
  misc_RNA (1)...(19): siRNA sense strand
guguccagcgccuaucuua

SEQ ID NO: 456844 - RNA, 19 nt, Homo sapiens
  misc_RNA (1)...(19): siRNA sense strand
ggacagccagcgucaucau

SEQ ID NO: 456845 - RNA, 19 nt, Homo sapiens
  misc_RNA (1)...(19): siRNA sense strand
ccgaggaacaaccuuaaug

SEQ ID NO: 456846 - RNA, 19 nt, Homo sapiens
  misc_RNA (1)...(19): siRNA sense strand
ugaaccauccaccauaugu

SEQ ID NO: 456847 - RNA, 19 nt, Homo sapiens
  misc_RNA (1)...(19): siRNA sense strand
cagagagggaggcuaauag

SEQ ID NO: 456848 - RNA, 19 nt, Homo sapiens
  misc_RNA (1)...(19): siRNA sense strand
caaggcaucauccacucaa

SEQ ID NO: 456849 - RNA, 19 nt, Homo sapiens
  misc_RNA (1)...(19): siRNA sense strand
acagaagacagagaacaaa

SEQ ID NO: 456850 - RNA, 19 nt, Homo sapiens
  misc_RNA (1)...(19): siRNA sense strand
uaucuccaguucugucauc

SEQ ID NO: 456851 - RNA, 19 nt, Homo sapiens
  misc_RNA (1)...(19): siRNA sense strand
cauaugugcaggagaguca

SEQ ID NO: 456852 - RNA, 19 nt, Homo sapiens
  misc_RNA (1)...(19): siRNA sense strand
acaguaaggaucauguguu

SEQ ID NO: 456853 - RNA, 19 nt, Homo sapiens
  misc_RNA (1)...(19): siRNA sense strand
gacagccagcgucaucauu

SEQ ID NO: 456854 - RNA, 19 nt, Homo sapiens
  misc_RNA (1)...(19): siRNA sense strand
gagacacuuacaugcauga

SEQ ID NO: 456855 - RNA, 19 nt, Homo sapiens
  misc_RNA (1)...(19): siRNA sense strand
gacaguaaggaucaugugu

SEQ ID NO: 456856 - RNA, 19 nt, Homo sapiens
  misc_RNA (1)...(19): siRNA sense strand
gaaauucuagcagcugaac

SEQ ID NO: 456857 - RNA, 19 nt, Homo sapiens
  misc_RNA (1)...(19): siRNA sense strand
ugagaauguccuuuauugu

SEQ ID NO: 456858 - RNA, 19 nt, Homo sapiens
  misc_RNA (1)...(19): siRNA sense strand
gcaccacuggaaugaaauc

SEQ ID NO: 456859 - RNA, 19 nt, Homo sapiens
  misc_RNA (1)...(19): siRNA sense strand
cggcggauuugaccuguac

SEQ ID NO: 456860 - RNA, 19 nt, Homo sapiens
  misc_RNA (1)...(19): siRNA sense strand
ccacucuggugcucaucug

SEQ ID NO: 456861 - RNA, 19 nt, Homo sapiens
  misc_RNA (1)...(19): siRNA sense strand
uuugaccuguacuucauuu

SEQ ID NO: 456862 - RNA, 19 nt, Homo sapiens
  misc_RNA (1)...(19): siRNA sense strand
auucagagagggaggcuaa

SEQ ID NO: 456863 - RNA, 19 nt, Homo sapiens
  misc_RNA (1)...(19): siRNA sense strand
acagccagcgucaucauug

SEQ ID NO: 456864 - RNA, 19 nt, Homo sapiens
  misc_RNA (1)...(19): siRNA sense strand
cacccgaggaacaaccuua

SEQ ID NO: 456865 - RNA, 19 nt, Homo sapiens
  misc_RNA (1)...(19): siRNA sense strand
gccagugagcagauuuauu

SEQ ID NO: 456866 - RNA, 19 nt, Homo sapiens
  misc_RNA (1)...(19): siRNA sense strand
aggagacacuuacaugcau

SEQ ID NO: 456867 - RNA, 19 nt, Homo sapiens
  misc_RNA (1)...(19): siRNA sense strand
gucaaggccuagaagaacu

SEQ ID NO: 456868 - RNA, 19 nt, Homo sapiens
  misc_RNA (1)...(19): siRNA sense strand
caucagcccacaguugaga

SEQ ID NO: 456869 - RNA, 19 nt, Homo sapiens
  misc_RNA (1)...(19): siRNA sense strand
gauggccucucuuuuaucu

SEQ ID NO: 456870 - RNA, 19 nt, Homo sapiens
  misc_RNA (1)...(19): siRNA sense strand
ucauguguuucccgugaau

SEQ ID NO: 456871 - RNA, 19 nt, Homo sapiens
  misc_RNA (1)...(19): siRNA sense strand
gagagggaggcuaauaggu

SEQ ID NO: 456872 - RNA, 19 nt, Homo sapiens
  misc_RNA (1)...(19): siRNA sense strand
gagaacuccaugaagaucu

SEQ ID NO: 456873 - RNA, 19 nt, Homo sapiens
  misc_RNA (1)...(19): siRNA sense strand
caggacagccagcgucauc

SEQ ID NO: 456874 - RNA, 19 nt, Homo sapiens
  misc_RNA (1)...(19): siRNA sense strand
gugcaggagagucauuuca

SEQ ID NO: 456875 - RNA, 19 nt, Homo sapiens
  misc_RNA (1)...(19): siRNA sense strand
caucaccaccacacacugu

SEQ ID NO: 456876 - RNA, 19 nt, Homo sapiens
  misc_RNA (1)...(19): siRNA sense strand
aacgauggccucucuuuua

SEQ ID NO: 456877 - RNA, 19 nt, Homo sapiens
  misc_RNA (1)...(19): siRNA sense strand
aggagagucauuucaaguu

SEQ ID NO: 456878 - RNA, 19 nt, Homo sapiens
  misc_RNA (1)...(19): siRNA sense strand
caggagagucauuucaagu

SEQ ID NO: 456879 - RNA, 19 nt, Homo sapiens
  misc_RNA (1)...(19): siRNA sense strand
ccagugagcagauuuauua

SEQ ID NO: 456880 - RNA, 19 nt, Homo sapiens
  misc_RNA (1)...(19): siRNA sense strand
gugagcagauuuauuauga

SEQ ID NO: 456881 - RNA, 19 nt, Homo sapiens
  misc_RNA (1)...(19): siRNA sense strand
gcuaauaggucucgagauc

SEQ ID NO: 456882 - RNA, 19 nt, Homo sapiens
  misc_RNA (1)...(19): siRNA sense strand
gaagaaguccugcaucgaa

SEQ ID NO: 456883 - RNA, 19 nt, Homo sapiens
  misc_RNA (1)...(19): siRNA sense strand
ggaacaaccuuaaugaaac

SEQ ID NO: 456884 - RNA, 19 nt, Homo sapiens
  misc_RNA (1)...(19): siRNA sense strand
uaaugaaacugacagaaga

SEQ ID NO: 456885 - RNA, 19 nt, Homo sapiens
  misc_RNA (1)...(19): siRNA sense strand
uagaagaacuccagaaagu

SEQ ID NO: 456886 - RNA, 19 nt, Homo sapiens
  misc_RNA (1)...(19): siRNA sense strand
gagaauguccuuuauuguu

SEQ ID NO: 456887 - RNA, 19 nt, Homo sapiens
  misc_RNA (1)...(19): siRNA sense strand
ggagagucauuucaaguug

SEQ ID NO: 456888 - RNA, 19 nt, Homo sapiens
  misc_RNA (1)...(19): siRNA sense strand
uuacaugcaugaaggauuu

SEQ ID NO: 456889 - RNA, 19 nt, Homo sapiens
  misc_RNA (1)...(19): siRNA sense strand
ccacuggaaugaaaucuau

SEQ ID NO: 456890 - RNA, 19 nt, Homo sapiens
  misc_RNA (1)...(19): siRNA sense strand
gcaauuguuuacuguguug

SEQ ID NO: 456891 - RNA, 19 nt, Homo sapiens
  misc_RNA (1)...(19): siRNA sense strand
acaguuggcucacaaauuc

SEQ ID NO: 456892 - RNA, 19 nt, Homo sapiens
  misc_RNA (1)...(19): siRNA sense strand
caguaaggaucauguguuu

SEQ ID NO: 456893 - RNA, 19 nt, Homo sapiens
  misc_RNA (1)...(19): siRNA sense strand
gaacaaccuuaaugaaacu

SEQ ID NO: 456894 - RNA, 19 nt, Homo sapiens
  misc_RNA (1)...(19): siRNA sense strand
gaaacugacagaagacaga

SEQ ID NO: 456895 - RNA, 19 nt, Homo sapiens
  misc_RNA (1)...(19): siRNA sense strand
gcugaaccauccaccauau

SEQ ID NO: 456896 - RNA, 19 nt, Homo sapiens
  misc_RNA (1)...(19): siRNA sense strand
uaauaggucucgagaucuu

SEQ ID NO: 456897 - RNA, 19 nt, Homo sapiens
  misc_RNA (1)...(19): siRNA sense strand
gaucuuggugcaauuguuu

SEQ ID NO: 456898 - RNA, 19 nt, Homo sapiens
  misc_RNA (1)...(19): siRNA sense strand
gcaggagagucauuucaag

SEQ ID NO: 456899 - RNA, 19 nt, Homo sapiens
  misc_RNA (1)...(19): siRNA sense strand
gauuugaccuguacuucau

SEQ ID NO: 456900 - RNA, 19 nt, Homo sapiens
  misc_RNA (1)...(19): siRNA sense strand
uugagaauguccuuuauug

SEQ ID NO: 456901 - RNA, 19 nt, Homo sapiens
  misc_RNA (1)...(19): siRNA sense strand
gaggaacaaccuuaaugaa

SEQ ID NO: 456902 - RNA, 19 nt, Homo sapiens
  misc_RNA (1)...(19): siRNA sense strand
gagagucauuucaaguugu

SEQ ID NO: 456903 - RNA, 19 nt, Homo sapiens
  misc_RNA (1)...(19): siRNA sense strand
gaacaguuggcucacaaau

SEQ ID NO: 456904 - RNA, 19 nt, Homo sapiens
  misc_RNA (1)...(19): siRNA sense strand
aaaagaaguuggcaugaaa

SEQ ID NO: 456905 - RNA, 19 nt, Homo sapiens
  misc_RNA (1)...(19): siRNA sense strand
guccagcgccuaucuuaaa

SEQ ID NO: 456906 - RNA, 19 nt, Homo sapiens
  misc_RNA (1)...(19): siRNA sense strand
gaaguccugcaucgaaauu

SEQ ID NO: 456907 - RNA, 19 nt, Homo sapiens
  misc_RNA (1)...(19): siRNA sense strand
ggcaucauccacucaauuu

SEQ ID NO: 456908 - RNA, 19 nt, Homo sapiens
  misc_RNA (1)...(19): siRNA sense strand
cgaggaacaaccuuaauga

SEQ ID NO: 456909 - RNA, 19 nt, Homo sapiens
  misc_RNA (1)...(19): siRNA sense strand
gacagaagacagagaacaa

SEQ ID NO: 456910 - RNA, 19 nt, Homo sapiens
  misc_RNA (1)...(19): siRNA sense strand
aagaaguccugcaucgaaa

SEQ ID NO: 456911 - RNA, 19 nt, Homo sapiens
  misc_RNA (1)...(19): siRNA sense strand
cugcaccacuggaaugaaa

SEQ ID NO: 456912 - RNA, 19 nt, Homo sapiens
  misc_RNA (1)...(19): siRNA sense strand
guguuggugugaaagauuu

SEQ ID NO: 456913 - RNA, 19 nt, Homo sapiens
  misc_RNA (1)...(19): siRNA sense strand
caguugagaauguccuuua

SEQ ID NO: 456914 - RNA, 19 nt, Homo sapiens
  misc_RNA (1)...(19): siRNA sense strand
aggaacaaccuuaaugaaa

SEQ ID NO: 456915 - RNA, 19 nt, Homo sapiens
  misc_RNA (1)...(19): siRNA sense strand
caaguugucgugagaggaa

SEQ ID NO: 456916 - RNA, 19 nt, Homo sapiens
  misc_RNA (1)...(19): siRNA sense strand
gugcaauuguuuacugugu

SEQ ID NO: 456917 - RNA, 19 nt, Homo sapiens
  misc_RNA (1)...(19): siRNA sense strand
ggauuugaccuguacuuca

SEQ ID NO: 456918 - RNA, 19 nt, Homo sapiens
  misc_RNA (1)...(19): siRNA sense strand
caugaacgauggccucucu

SEQ ID NO: 456919 - RNA, 19 nt, Homo sapiens
  misc_RNA (1)...(19): siRNA sense strand
uaaaagaaguuggcaugaa

SEQ ID NO: 456920 - RNA, 19 nt, Homo sapiens
  misc_RNA (1)...(19): siRNA sense strand
ucagagagggaggcuaaua

SEQ ID NO: 456921 - RNA, 19 nt, Homo sapiens
  misc_RNA (1)...(19): siRNA sense strand
ccuagaagaacuccagaaa

SEQ ID NO: 456922 - RNA, 19 nt, Homo sapiens
  misc_RNA (1)...(19): siRNA sense strand
uuacuguguuggugugaaa

SEQ ID NO: 456923 - RNA, 19 nt, Homo sapiens
  misc_RNA (1)...(19): siRNA sense strand
gaggagacacuuacaugca

SEQ ID NO: 456924 - RNA, 19 nt, Homo sapiens
  misc_RNA (1)...(19): siRNA sense strand
gcaugaaggauuugaaagg

SEQ ID NO: 456925 - RNA, 19 nt, Homo sapiens
  misc_RNA (1)...(19): siRNA sense strand
gcacuccaggucagcauga

SEQ ID NO: 456926 - RNA, 19 nt, Homo sapiens
  misc_RNA (1)...(19): siRNA sense strand
gaagacagagaacaaaucc

SEQ ID NO: 456927 - RNA, 19 nt, Homo sapiens
  misc_RNA (1)...(19): siRNA sense strand
ugaacgauggccucucuuu

SEQ ID NO: 456928 - RNA, 19 nt, Homo sapiens
  misc_RNA (1)...(19): siRNA sense strand
gggccagugagcagauuua

SEQ ID NO: 456929 - RNA, 19 nt, Homo sapiens
  misc_RNA (1)...(19): siRNA sense strand
gauuugaaagggccaguga

SEQ ID NO: 456930 - RNA, 19 nt, Homo sapiens
  misc_RNA (1)...(19): siRNA sense strand
ucuauuacuuuguggaaca

SEQ ID NO: 456931 - RNA, 19 nt, Homo sapiens
  misc_RNA (1)...(19): siRNA sense strand
gaacgauggccucucuuuu

SEQ ID NO: 456932 - RNA, 19 nt, Homo sapiens
  misc_RNA (1)...(19): siRNA sense strand
uggaacaguuggcucacaa

SEQ ID NO: 456933 - RNA, 19 nt, Homo sapiens
  misc_RNA (1)...(19): siRNA sense strand
gaaccauccaccauaugug

SEQ ID NO: 456934 - RNA, 19 nt, Homo sapiens
  misc_RNA (1)...(19): siRNA sense strand
ggacaguaaggaucaugug

SEQ ID NO: 456935 - RNA, 19 nt, Homo sapiens
  misc_RNA (1)...(19): siRNA sense strand
ccagcgucaucauugcuuu

SEQ ID NO: 456936 - RNA, 19 nt, Homo sapiens
  misc_RNA (1)...(19): siRNA sense strand
ggaacaguuggcucacaaa

SEQ ID NO: 456937 - RNA, 19 nt, Homo sapiens
  misc_RNA (1)...(19): siRNA sense strand
guugagaauguccuuuauu

SEQ ID NO: 456938 - RNA, 19 nt, Homo sapiens
  misc_RNA (1)...(19): siRNA sense strand
gcagcuucaagaucaauga

SEQ ID NO: 456939 - RNA, 19 nt, Homo sapiens
  misc_RNA (1)...(19): siRNA sense strand
guaaggaucauguguuucc

SEQ ID NO: 456940 - RNA, 19 nt, Homo sapiens
  misc_RNA (1)...(19): siRNA sense strand
cagaagacagagaacaaau

SEQ ID NO: 456941 - RNA, 19 nt, Homo sapiens
  misc_RNA (1)...(19): siRNA sense strand
gcaaggcaucauccacuca

SEQ ID NO: 456942 - RNA, 19 nt, Homo sapiens
  misc_RNA (1)...(19): siRNA sense strand
uuaaugaaacugacagaag

SEQ ID NO: 456943 - RNA, 19 nt, Homo sapiens
  misc_RNA (1)...(19): siRNA sense strand
guguccagcgccuaucuua

SEQ ID NO: 456944 - RNA, 19 nt, Homo sapiens
  misc_RNA (1)...(19): siRNA sense strand
ggacagccagcgucaucau

SEQ ID NO: 456945 - RNA, 19 nt, Homo sapiens
  misc_RNA (1)...(19): siRNA sense strand
ccgaggaacaaccuuaaug

SEQ ID NO: 456946 - RNA, 19 nt, Homo sapiens
  misc_RNA (1)...(19): siRNA sense strand
ugaaccauccaccauaugu

SEQ ID NO: 456947 - RNA, 19 nt, Homo sapiens
  misc_RNA (1)...(19): siRNA sense strand
cagagagggaggcuaauag

SEQ ID NO: 456948 - RNA, 19 nt, Homo sapiens
  misc_RNA (1)...(19): siRNA sense strand
caaggcaucauccacucaa

SEQ ID NO: 456949 - RNA, 19 nt, Homo sapiens
  misc_RNA (1)...(19): siRNA sense strand
acagaagacagagaacaaa

SEQ ID NO: 456950 - RNA, 19 nt, Homo sapiens
  misc_RNA (1)...(19): siRNA sense strand
uaucuccaguucugucauc

SEQ ID NO: 456951 - RNA, 19 nt, Homo sapiens
  misc_RNA (1)...(19): siRNA sense strand
cauaugugcaggagaguca

SEQ ID NO: 456952 - RNA, 19 nt, Homo sapiens
  misc_RNA (1)...(19): siRNA sense strand
acaguaaggaucauguguu

SEQ ID NO: 456953 - RNA, 19 nt, Homo sapiens
  misc_RNA (1)...(19): siRNA sense strand
gacagccagcgucaucauu

SEQ ID NO: 456954 - RNA, 19 nt, Homo sapiens
  misc_RNA (1)...(19): siRNA sense strand
gagacacuuacaugcauga

SEQ ID NO: 456955 - RNA, 19 nt, Homo sapiens
  misc_RNA (1)...(19): siRNA sense strand
gacaguaaggaucaugugu

SEQ ID NO: 456956 - RNA, 19 nt, Homo sapiens
  misc_RNA (1)...(19): siRNA sense strand
gaaauucuagcagcugaac

SEQ ID NO: 456957 - RNA, 19 nt, Homo sapiens
  misc_RNA (1)...(19): siRNA sense strand
ugagaauguccuuuauugu

SEQ ID NO: 456958 - RNA, 19 nt, Homo sapiens
  misc_RNA (1)...(19): siRNA sense strand
gcaccacuggaaugaaauc

SEQ ID NO: 456959 - RNA, 19 nt, Homo sapiens
  misc_RNA (1)...(19): siRNA sense strand
cggcggauuugaccuguac

SEQ ID NO: 456960 - RNA, 19 nt, Homo sapiens
  misc_RNA (1)...(19): siRNA sense strand
ccacucuggugcucaucug

SEQ ID NO: 456961 - RNA, 19 nt, Homo sapiens
  misc_RNA (1)...(19): siRNA sense strand
uuugaccuguacuucauuu

SEQ ID NO: 456962 - RNA, 19 nt, Homo sapiens
  misc_RNA (1)...(19): siRNA sense strand
auucagagagggaggcuaa

SEQ ID NO: 456963 - RNA, 19 nt, Homo sapiens
  misc_RNA (1)...(19): siRNA sense strand
acagccagcgucaucauug

SEQ ID NO: 456964 - RNA, 19 nt, Homo sapiens
  misc_RNA (1)...(19): siRNA sense strand
cacccgaggaacaaccuua

SEQ ID NO: 456965 - RNA, 19 nt, Homo sapiens
  misc_RNA (1)...(19): siRNA sense strand
gccagugagcagauuuauu

SEQ ID NO: 456966 - RNA, 19 nt, Homo sapiens
  misc_RNA (1)...(19): siRNA sense strand
aggagacacuuacaugcau

SEQ ID NO: 456967 - RNA, 19 nt, Homo sapiens
  misc_RNA (1)...(19): siRNA sense strand
gucaaggccuagaagaacu

SEQ ID NO: 456968 - RNA, 19 nt, Homo sapiens
  misc_RNA (1)...(19): siRNA sense strand
caucagcccacaguugaga

SEQ ID NO: 456969 - RNA, 19 nt, Homo sapiens
  misc_RNA (1)...(19): siRNA sense strand
gauggccucucuuuuaucu

SEQ ID NO: 456970 - RNA, 19 nt, Homo sapiens
  misc_RNA (1)...(19): siRNA sense strand
ucauguguuucccgugaau

SEQ ID NO: 456971 - RNA, 19 nt, Homo sapiens
  misc_RNA (1)...(19): siRNA sense strand
gagagggaggcuaauaggu

SEQ ID NO: 456972 - RNA, 19 nt, Homo sapiens
  misc_RNA (1)...(19): siRNA sense strand
gagaacuccaugaagaucu

SEQ ID NO: 456973 - RNA, 19 nt, Homo sapiens
  misc_RNA (1)...(19): siRNA sense strand
caggacagccagcgucauc

SEQ ID NO: 456974 - RNA, 19 nt, Homo sapiens
  misc_RNA (1)...(19): siRNA sense strand
gugcaggagagucauuuca

SEQ ID NO: 456975 - RNA, 19 nt, Homo sapiens
  misc_RNA (1)...(19): siRNA sense strand
caucaccaccacacacugu

SEQ ID NO: 456976 - RNA, 19 nt, Homo sapiens
  misc_RNA (1)...(19): siRNA sense strand
aacgauggccucucuuuua

SEQ ID NO: 456977 - RNA, 19 nt, Homo sapiens
  misc_RNA (1)...(19): siRNA sense strand
aggagagucauuucaaguu

SEQ ID NO: 456978 - RNA, 19 nt, Homo sapiens
  misc_RNA (1)...(19): siRNA sense strand
caggagagucauuucaagu

SEQ ID NO: 456979 - RNA, 19 nt, Homo sapiens
  misc_RNA (1)...(19): siRNA sense strand
ccagugagcagauuuauua

SEQ ID NO: 456980 - RNA, 19 nt, Homo sapiens
  misc_RNA (1)...(19): siRNA sense strand
gugagcagauuuauuauga

SEQ ID NO: 456981 - RNA, 19 nt, Homo sapiens
  misc_RNA (1)...(19): siRNA sense strand
gcuaauaggucucgagauc

SEQ ID NO: 456982 - RNA, 19 nt, Homo sapiens
  misc_RNA (1)...(19): siRNA sense strand
gaagaaguccugcaucgaa

SEQ ID NO: 456983 - RNA, 19 nt, Homo sapiens
  misc_RNA (1)...(19): siRNA sense strand
ggaacaaccuuaaugaaac

SEQ ID NO: 456984 - RNA, 19 nt, Homo sapiens
  misc_RNA (1)...(19): siRNA sense strand
uaaugaaacugacagaaga

SEQ ID NO: 456985 - RNA, 19 nt, Homo sapiens
  misc_RNA (1)...(19): siRNA sense strand
uagaagaacuccagaaagu

SEQ ID NO: 456986 - RNA, 19 nt, Homo sapiens
  misc_RNA (1)...(19): siRNA sense strand
gagaauguccuuuauuguu

SEQ ID NO: 456987 - RNA, 19 nt, Homo sapiens
  misc_RNA (1)...(19): siRNA sense strand
ggagagucauuucaaguug

SEQ ID NO: 456988 - RNA, 19 nt, Homo sapiens
  misc_RNA (1)...(19): siRNA sense strand
uuacaugcaugaaggauuu

SEQ ID NO: 456989 - RNA, 19 nt, Homo sapiens
  misc_RNA (1)...(19): siRNA sense strand
ccacuggaaugaaaucuau

SEQ ID NO: 456990 - RNA, 19 nt, Homo sapiens
  misc_RNA (1)...(19): siRNA sense strand
gcaauuguuuacuguguug

SEQ ID NO: 456991 - RNA, 19 nt, Homo sapiens
  misc_RNA (1)...(19): siRNA sense strand
acaguuggcucacaaauuc

SEQ ID NO: 456992 - RNA, 19 nt, Homo sapiens
  misc_RNA (1)...(19): siRNA sense strand
caguaaggaucauguguuu

SEQ ID NO: 456993 - RNA, 19 nt, Homo sapiens
  misc_RNA (1)...(19): siRNA sense strand
gaacaaccuuaaugaaacu

SEQ ID NO: 456994 - RNA, 19 nt, Homo sapiens
  misc_RNA (1)...(19): siRNA sense strand
gaaacugacagaagacaga

SEQ ID NO: 456995 - RNA, 19 nt, Homo sapiens
  misc_RNA (1)...(19): siRNA sense strand
gcugaaccauccaccauau

SEQ ID NO: 456996 - RNA, 19 nt, Homo sapiens
  misc_RNA (1)...(19): siRNA sense strand
uaauaggucucgagaucuu

SEQ ID NO: 456997 - RNA, 19 nt, Homo sapiens
  misc_RNA (1)...(19): siRNA sense strand
gaucuuggugcaauuguuu

SEQ ID NO: 456998 - RNA, 19 nt, Homo sapiens
  misc_RNA (1)...(19): siRNA sense strand
gcaggagagucauuucaag

SEQ ID NO: 456999 - RNA, 19 nt, Homo sapiens
  misc_RNA (1)...(19): siRNA sense strand
gauuugaccuguacuucau

SEQ ID NO: 457000 - RNA, 19 nt, Homo sapiens
  misc_RNA (1)...(19): siRNA sense strand
uugagaauguccuuuauug

SEQ ID NO: 457001 - RNA, 19 nt, Homo sapiens
  misc_RNA (1)...(19): siRNA sense strand
gaggaacaaccuuaaugaa

SEQ ID NO: 457002 - RNA, 19 nt, Homo sapiens
  misc_RNA (1)...(19): siRNA sense strand
gagagucauuucaaguugu

SEQ ID NO: 457003 - RNA, 19 nt, Homo sapiens
  misc_RNA (1)...(19): siRNA sense strand
gaacaguuggcucacaaau

SEQ ID NO: 457004 - RNA, 19 nt, Homo sapiens
  misc_RNA (1)...(19): siRNA sense strand
aaaagaaguuggcaugaaa

SEQ ID NO: 457005 - RNA, 19 nt, Homo sapiens
  misc_RNA (1)...(19): siRNA sense strand
guccagcgccuaucuuaaa

SEQ ID NO: 457006 - RNA, 19 nt, Homo sapiens
  misc_RNA (1)...(19): siRNA sense strand
gaaguccugcaucgaaauu

SEQ ID NO: 457007 - RNA, 19 nt, Homo sapiens
  misc_RNA (1)...(19): siRNA sense strand
ggcaucauccacucaauuu

SEQ ID NO: 457008 - RNA, 19 nt, Homo sapiens
  misc_RNA (1)...(19): siRNA sense strand
cgaggaacaaccuuaauga

SEQ ID NO: 457009 - RNA, 19 nt, Homo sapiens
  misc_RNA (1)...(19): siRNA sense strand
gacagaagacagagaacaa

SEQ ID NO: 457010 - RNA, 19 nt, Homo sapiens
  misc_RNA (1)...(19): siRNA sense strand
aagaaguccugcaucgaaa

SEQ ID NO: 457011 - RNA, 19 nt, Homo sapiens
  misc_RNA (1)...(19): siRNA sense strand
cugcaccacuggaaugaaa

SEQ ID NO: 457012 - RNA, 19 nt, Homo sapiens
  misc_RNA (1)...(19): siRNA sense strand
guguuggugugaaagauuu

SEQ ID NO: 457013 - RNA, 19 nt, Homo sapiens
  misc_RNA (1)...(19): siRNA sense strand
caguugagaauguccuuua

SEQ ID NO: 457014 - RNA, 19 nt, Homo sapiens
  misc_RNA (1)...(19): siRNA sense strand
aggaacaaccuuaaugaaa

SEQ ID NO: 457015 - RNA, 19 nt, Homo sapiens
  misc_RNA (1)...(19): siRNA sense strand
caaguugucgugagaggaa

SEQ ID NO: 457016 - RNA, 19 nt, Homo sapiens
  misc_RNA (1)...(19): siRNA sense strand
gugcaauuguuuacugugu

SEQ ID NO: 457017 - RNA, 19 nt, Homo sapiens
  misc_RNA (1)...(19): siRNA sense strand
ggauuugaccuguacuuca

SEQ ID NO: 457018 - RNA, 19 nt, Homo sapiens
  misc_RNA (1)...(19): siRNA sense strand
caugaacgauggccucucu

SEQ ID NO: 457019 - RNA, 19 nt, Homo sapiens
  misc_RNA (1)...(19): siRNA sense strand
uaaaagaaguuggcaugaa

SEQ ID NO: 457020 - RNA, 19 nt, Homo sapiens
  misc_RNA (1)...(19): siRNA sense strand
ucagagagggaggcuaaua

SEQ ID NO: 457021 - RNA, 19 nt, Homo sapiens
  misc_RNA (1)...(19): siRNA sense strand
ccuagaagaacuccagaaa

SEQ ID NO: 457022 - RNA, 19 nt, Homo sapiens
  misc_RNA (1)...(19): siRNA sense strand
uuacuguguuggugugaaa

SEQ ID NO: 457023 - RNA, 19 nt, Homo sapiens
  misc_RNA (1)...(19): siRNA sense strand
gaggagacacuuacaugca

SEQ ID NO: 457024 - RNA, 19 nt, Homo sapiens
  misc_RNA (1)...(19): siRNA sense strand
gcaugaaggauuugaaagg

SEQ ID NO: 457025 - RNA, 19 nt, Homo sapiens
  misc_RNA (1)...(19): siRNA sense strand
gcacuccaggucagcauga

SEQ ID NO: 457026 - RNA, 19 nt, Homo sapiens
  misc_RNA (1)...(19): siRNA sense strand
gaagacagagaacaaaucc

SEQ ID NO: 457027 - RNA, 19 nt, Homo sapiens
  misc_RNA (1)...(19): siRNA sense strand
ugaacgauggccucucuuu

SEQ ID NO: 457028 - RNA, 19 nt, Homo sapiens
  misc_RNA (1)...(19): siRNA sense strand
gggccagugagcagauuua

SEQ ID NO: 457029 - RNA, 19 nt, Homo sapiens
  misc_RNA (1)...(19): siRNA sense strand
gauuugaaagggccaguga

SEQ ID NO: 457030 - RNA, 19 nt, Homo sapiens
  misc_RNA (1)...(19): siRNA sense strand
ucuauuacuuuguggaaca

SEQ ID NO: 457031 - RNA, 19 nt, Homo sapiens
  misc_RNA (1)...(19): siRNA sense strand
gaacgauggccucucuuuu

SEQ ID NO: 457032 - RNA, 19 nt, Homo sapiens
  misc_RNA (1)...(19): siRNA sense strand
uggaacaguuggcucacaa

SEQ ID NO: 457033 - RNA, 19 nt, Homo sapiens
  misc_RNA (1)...(19): siRNA sense strand
gaaccauccaccauaugug

SEQ ID NO: 457034 - RNA, 19 nt, Homo sapiens
  misc_RNA (1)...(19): siRNA sense strand
ggacaguaaggaucaugug

SEQ ID NO: 457035 - RNA, 19 nt, Homo sapiens
  misc_RNA (1)...(19): siRNA sense strand
ccagcgucaucauugcuuu

SEQ ID NO: 457036 - RNA, 19 nt, Homo sapiens
  misc_RNA (1)...(19): siRNA sense strand
ggaacaguuggcucacaaa

SEQ ID NO: 457037 - RNA, 19 nt, Homo sapiens
  misc_RNA (1)...(19): siRNA sense strand
guugagaauguccuuuauu

SEQ ID NO: 457038 - RNA, 19 nt, Homo sapiens
  misc_RNA (1)...(19): siRNA sense strand
gcagcuucaagaucaauga

SEQ ID NO: 457039 - RNA, 19 nt, Homo sapiens
  misc_RNA (1)...(19): siRNA sense strand
guaaggaucauguguuucc

SEQ ID NO: 457040 - RNA, 19 nt, Homo sapiens
  misc_RNA (1)...(19): siRNA sense strand
cagaagacagagaacaaau

SEQ ID NO: 457041 - RNA, 19 nt, Homo sapiens
  misc_RNA (1)...(19): siRNA sense strand
gcaaggcaucauccacuca

SEQ ID NO: 457042 - RNA, 19 nt, Homo sapiens
  misc_RNA (1)...(19): siRNA sense strand
uuaaugaaacugacagaag

SEQ ID NO: 457043 - RNA, 19 nt, Homo sapiens
  misc_RNA (1)...(19): siRNA sense strand
guguccagcgccuaucuua

SEQ ID NO: 457044 - RNA, 19 nt, Homo sapiens
  misc_RNA (1)...(19): siRNA sense strand
ggacagccagcgucaucau

SEQ ID NO: 457045 - RNA, 19 nt, Homo sapiens
  misc_RNA (1)...(19): siRNA sense strand
ccgaggaacaaccuuaaug

SEQ ID NO: 457046 - RNA, 19 nt, Homo sapiens
  misc_RNA (1)...(19): siRNA sense strand
ugaaccauccaccauaugu

SEQ ID NO: 457047 - RNA, 19 nt, Homo sapiens
  misc_RNA (1)...(19): siRNA sense strand
cagagagggaggcuaauag

SEQ ID NO: 457048 - RNA, 19 nt, Homo sapiens
  misc_RNA (1)...(19): siRNA sense strand
caaggcaucauccacucaa

SEQ ID NO: 457049 - RNA, 19 nt, Homo sapiens
  misc_RNA (1)...(19): siRNA sense strand
acagaagacagagaacaaa

SEQ ID NO: 457050 - RNA, 19 nt, Homo sapiens
  misc_RNA (1)...(19): siRNA sense strand
uaucuccaguucugucauc

SEQ ID NO: 457051 - RNA, 19 nt, Homo sapiens
  misc_RNA (1)...(19): siRNA sense strand
cauaugugcaggagaguca

SEQ ID NO: 457052 - RNA, 19 nt, Homo sapiens
  misc_RNA (1)...(19): siRNA sense strand
acaguaaggaucauguguu

SEQ ID NO: 457053 - RNA, 19 nt, Homo sapiens
  misc_RNA (1)...(19): siRNA sense strand
gacagccagcgucaucauu

SEQ ID NO: 457054 - RNA, 19 nt, Homo sapiens
  misc_RNA (1)...(19): siRNA sense strand
gagacacuuacaugcauga

SEQ ID NO: 457055 - RNA, 19 nt, Homo sapiens
  misc_RNA (1)...(19): siRNA sense strand
gacaguaaggaucaugugu

SEQ ID NO: 457056 - RNA, 19 nt, Homo sapiens
  misc_RNA (1)...(19): siRNA sense strand
gaaauucuagcagcugaac

SEQ ID NO: 457057 - RNA, 19 nt, Homo sapiens
  misc_RNA (1)...(19): siRNA sense strand
ugagaauguccuuuauugu

SEQ ID NO: 457058 - RNA, 19 nt, Homo sapiens
  misc_RNA (1)...(19): siRNA sense strand
gcaccacuggaaugaaauc

SEQ ID NO: 457059 - RNA, 19 nt, Homo sapiens
  misc_RNA (1)...(19): siRNA sense strand
cggcggauuugaccuguac

SEQ ID NO: 457060 - RNA, 19 nt, Homo sapiens
  misc_RNA (1)...(19): siRNA sense strand
ccacucuggugcucaucug

SEQ ID NO: 457061 - RNA, 19 nt, Homo sapiens
  misc_RNA (1)...(19): siRNA sense strand
uuugaccuguacuucauuu

SEQ ID NO: 457062 - RNA, 19 nt, Homo sapiens
  misc_RNA (1)...(19): siRNA sense strand
auucagagagggaggcuaa

SEQ ID NO: 457063 - RNA, 19 nt, Homo sapiens
  misc_RNA (1)...(19): siRNA sense strand
acagccagcgucaucauug

SEQ ID NO: 457064 - RNA, 19 nt, Homo sapiens
  misc_RNA (1)...(19): siRNA sense strand
cacccgaggaacaaccuua

SEQ ID NO: 457065 - RNA, 19 nt, Homo sapiens
  misc_RNA (1)...(19): siRNA sense strand
gccagugagcagauuuauu

SEQ ID NO: 457066 - RNA, 19 nt, Homo sapiens
  misc_RNA (1)...(19): siRNA sense strand
aggagacacuuacaugcau

SEQ ID NO: 457067 - RNA, 19 nt, Homo sapiens
  misc_RNA (1)...(19): siRNA sense strand
gucaaggccuagaagaacu

SEQ ID NO: 457068 - RNA, 19 nt, Homo sapiens
  misc_RNA (1)...(19): siRNA sense strand
caucagcccacaguugaga

SEQ ID NO: 457069 - RNA, 19 nt, Homo sapiens
  misc_RNA (1)...(19): siRNA sense strand
gauggccucucuuuuaucu

SEQ ID NO: 457070 - RNA, 19 nt, Homo sapiens
  misc_RNA (1)...(19): siRNA sense strand
ucauguguuucccgugaau

SEQ ID NO: 457071 - RNA, 19 nt, Homo sapiens
  misc_RNA (1)...(19): siRNA sense strand
gagagggaggcuaauaggu

SEQ ID NO: 457072 - RNA, 19 nt, Homo sapiens
  misc_RNA (1)...(19): siRNA sense strand
gagaacuccaugaagaucu

SEQ ID NO: 457073 - RNA, 19 nt, Homo sapiens
  misc_RNA (1)...(19): siRNA sense strand
caggacagccagcgucauc

SEQ ID NO: 457074 - RNA, 19 nt, Homo sapiens
  misc_RNA (1)...(19): siRNA sense strand
gugcaggagagucauuuca

SEQ ID NO: 457075 - RNA, 19 nt, Homo sapiens
  misc_RNA (1)...(19): siRNA sense strand
caucaccaccacacacugu

SEQ ID NO: 457076 - RNA, 19 nt, Homo sapiens
  misc_RNA (1)...(19): siRNA sense strand
aacgauggccucucuuuua

SEQ ID NO: 457077 - RNA, 19 nt, Homo sapiens
  misc_RNA (1)...(19): siRNA sense strand
aggagagucauuucaaguu

SEQ ID NO: 457078 - RNA, 19 nt, Homo sapiens
  misc_RNA (1)...(19): siRNA sense strand
caggagagucauuucaagu

SEQ ID NO: 457079 - RNA, 19 nt, Homo sapiens
  misc_RNA (1)...(19): siRNA sense strand
gcaugcagcucacugauuu

SEQ ID NO: 457080 - RNA, 19 nt, Homo sapiens
  misc_RNA (1)...(19): siRNA sense strand
gaacagggcuuuggucgau

SEQ ID NO: 457081 - RNA, 19 nt, Homo sapiens
  misc_RNA (1)...(19): siRNA sense strand
gaagguuccugcccagaaa

SEQ ID NO: 457082 - RNA, 19 nt, Homo sapiens
  misc_RNA (1)...(19): siRNA sense strand
aaaggcagcucuccugaaa

SEQ ID NO: 457083 - RNA, 19 nt, Homo sapiens
  misc_RNA (1)...(19): siRNA sense strand
ccugaaagcuucucccaaa

SEQ ID NO: 457084 - RNA, 19 nt, Homo sapiens
  misc_RNA (1)...(19): siRNA sense strand
ggaacagaauaaucaagaa

SEQ ID NO: 457085 - RNA, 19 nt, Homo sapiens
  misc_RNA (1)...(19): siRNA sense strand
gcagaaggcagacaucaau

SEQ ID NO: 457086 - RNA, 19 nt, Homo sapiens
  misc_RNA (1)...(19): siRNA sense strand
gcagcucacugauuucauc

SEQ ID NO: 457087 - RNA, 19 nt, Homo sapiens
  misc_RNA (1)...(19): siRNA sense strand
aggcagacaucaauacaaa

SEQ ID NO: 457088 - RNA, 19 nt, Homo sapiens
  misc_RNA (1)...(19): siRNA sense strand
gaaagccacaggccagaaa

SEQ ID NO: 457089 - RNA, 19 nt, Homo sapiens
  misc_RNA (1)...(19): siRNA sense strand
gaaaauuggucgcgauugu

SEQ ID NO: 457090 - RNA, 19 nt, Homo sapiens
  misc_RNA (1)...(19): siRNA sense strand
gaagauugaagccagagaa

SEQ ID NO: 457091 - RNA, 19 nt, Homo sapiens
  misc_RNA (1)...(19): siRNA sense strand
gaaugaaguuaagaagcuu

SEQ ID NO: 457092 - RNA, 19 nt, Homo sapiens
  misc_RNA (1)...(19): siRNA sense strand
gaaaaugaggaacagaaua

SEQ ID NO: 457093 - RNA, 19 nt, Homo sapiens
  misc_RNA (1)...(19): siRNA sense strand
gaaggcagacaucaauaca

SEQ ID NO: 457094 - RNA, 19 nt, Homo sapiens
  misc_RNA (1)...(19): siRNA sense strand
ugacagauuuugaucguuu

SEQ ID NO: 457095 - RNA, 19 nt, Homo sapiens
  misc_RNA (1)...(19): siRNA sense strand
cgauggaccuugcacucaa

SEQ ID NO: 457096 - RNA, 19 nt, Homo sapiens
  misc_RNA (1)...(19): siRNA sense strand
agaaugaaguuaagaagcu

SEQ ID NO: 457097 - RNA, 19 nt, Homo sapiens
  misc_RNA (1)...(19): siRNA sense strand
ucacugauuucauccucaa

SEQ ID NO: 457098 - RNA, 19 nt, Homo sapiens
  misc_RNA (1)...(19): siRNA sense strand
gguggccuaugucuccuuu

SEQ ID NO: 457099 - RNA, 19 nt, Homo sapiens
  misc_RNA (1)...(19): siRNA sense strand
cagaaggcagacaucaaua

SEQ ID NO: 457100 - RNA, 19 nt, Homo sapiens
  misc_RNA (1)...(19): siRNA sense strand
gaucagaacagggcuuugg

SEQ ID NO: 457101 - RNA, 19 nt, Homo sapiens
  misc_RNA (1)...(19): siRNA sense strand
gauuucauccucaaguuuc

SEQ ID NO: 457102 - RNA, 19 nt, Homo sapiens
  misc_RNA (1)...(19): siRNA sense strand
ggucgcgauuguagauguu

SEQ ID NO: 457103 - RNA, 19 nt, Homo sapiens
  misc_RNA (1)...(19): siRNA sense strand
acagugcccaccagaagua

SEQ ID NO: 457104 - RNA, 19 nt, Homo sapiens
  misc_RNA (1)...(19): siRNA sense strand
caagaaugaaguuaagaag

SEQ ID NO: 457105 - RNA, 19 nt, Homo sapiens
  misc_RNA (1)...(19): siRNA sense strand
gaugggccaagaagauuga

SEQ ID NO: 457106 - RNA, 19 nt, Homo sapiens
  misc_RNA (1)...(19): siRNA sense strand
gcaaagaaaaugaggaaca

SEQ ID NO: 457107 - RNA, 19 nt, Homo sapiens
  misc_RNA (1)...(19): siRNA sense strand
cugauuucauccucaaguu

SEQ ID NO: 457108 - RNA, 19 nt, Homo sapiens
  misc_RNA (1)...(19): siRNA sense strand
ugauuucauccucaaguuu

SEQ ID NO: 457109 - RNA, 19 nt, Homo sapiens
  misc_RNA (1)...(19): siRNA sense strand
gcagacaucaauacaaaau

SEQ ID NO: 457110 - RNA, 19 nt, Homo sapiens
  misc_RNA (1)...(19): siRNA sense strand
aggaacagaauaaucaaga

SEQ ID NO: 457111 - RNA, 19 nt, Homo sapiens
  misc_RNA (1)...(19): siRNA sense strand
ggcagaaggcagacaucaa

SEQ ID NO: 457112 - RNA, 19 nt, Homo sapiens
  misc_RNA (1)...(19): siRNA sense strand
gaugacagauuuugaucgu

SEQ ID NO: 457113 - RNA, 19 nt, Homo sapiens
  misc_RNA (1)...(19): siRNA sense strand
gcgauuguagauguuauug

SEQ ID NO: 457114 - RNA, 19 nt, Homo sapiens
  misc_RNA (1)...(19): siRNA sense strand
agaagguuccugcccagaa

SEQ ID NO: 457115 - RNA, 19 nt, Homo sapiens
  misc_RNA (1)...(19): siRNA sense strand
aggcagcucuccugaaagc

SEQ ID NO: 457116 - RNA, 19 nt, Homo sapiens
  misc_RNA (1)...(19): siRNA sense strand
augaggaacagaauaauca

SEQ ID NO: 457117 - RNA, 19 nt, Homo sapiens
  misc_RNA (1)...(19): siRNA sense strand
gccacacgaugggccaaga

SEQ ID NO: 457118 - RNA, 19 nt, Homo sapiens
  misc_RNA (1)...(19): siRNA sense strand
gcacacagaugaugaguug

SEQ ID NO: 457119 - RNA, 19 nt, Homo sapiens
  misc_RNA (1)...(19): siRNA sense strand
ggaaagcuuuggacuacua

SEQ ID NO: 457120 - RNA, 19 nt, Homo sapiens
  misc_RNA (1)...(19): siRNA sense strand
ggaaauaacagggaccuua

SEQ ID NO: 457121 - RNA, 19 nt, Homo sapiens
  misc_RNA (1)...(19): siRNA sense strand
ucaaucagcucaucacuau

SEQ ID NO: 457122 - RNA, 19 nt, Homo sapiens
  misc_RNA (1)...(19): siRNA sense strand
gaagagauagguucccaua

SEQ ID NO: 457123 - RNA, 19 nt, Homo sapiens
  misc_RNA (1)...(19): siRNA sense strand
gaagaugguuggcggcauu

SEQ ID NO: 457124 - RNA, 19 nt, Homo sapiens
  misc_RNA (1)...(19): siRNA sense strand
gaaauaacagggaccuuaa

SEQ ID NO: 457125 - RNA, 19 nt, Homo sapiens
  misc_RNA (1)...(19): siRNA sense strand
ugacaaggccugugaguuu

SEQ ID NO: 457126 - RNA, 19 nt, Homo sapiens
  misc_RNA (1)...(19): siRNA sense strand
caagauggaugaaucaaag

SEQ ID NO: 457127 - RNA, 19 nt, Homo sapiens
  misc_RNA (1)...(19): siRNA sense strand
agagaaagaucuacaggaa

SEQ ID NO: 457128 - RNA, 19 nt, Homo sapiens
  misc_RNA (1)...(19): siRNA sense strand
uaacagggaccuuaagaaa

SEQ ID NO: 457129 - RNA, 19 nt, Homo sapiens
  misc_RNA (1)...(19): siRNA sense strand
ucaagaagcuaauuacaag

SEQ ID NO: 457130 - RNA, 19 nt, Homo sapiens
  misc_RNA (1)...(19): siRNA sense strand
ugaagacgaugcaguuuga

SEQ ID NO: 457131 - RNA, 19 nt, Homo sapiens
  misc_RNA (1)...(19): siRNA sense strand
ggaagcauguggaccuuug

SEQ ID NO: 457132 - RNA, 19 nt, Homo sapiens
  misc_RNA (1)...(19): siRNA sense strand
gaagcgagccucagauaau

SEQ ID NO: 457133 - RNA, 19 nt, Homo sapiens
  misc_RNA (1)...(19): siRNA sense strand
ucaaugacauguccuacuu

SEQ ID NO: 457134 - RNA, 19 nt, Homo sapiens
  misc_RNA (1)...(19): siRNA sense strand
uaagaaaggacaagacauu

SEQ ID NO: 457135 - RNA, 19 nt, Homo sapiens
  misc_RNA (1)...(19): siRNA sense strand
gaugaguccuugaacuuug

SEQ ID NO: 457136 - RNA, 19 nt, Homo sapiens
  misc_RNA (1)...(19): siRNA sense strand
ggacacaugccuccucuga

SEQ ID NO: 457137 - RNA, 19 nt, Homo sapiens
  misc_RNA (1)...(19): siRNA sense strand
gaaccucaccaacaucaaa

SEQ ID NO: 457138 - RNA, 19 nt, Homo sapiens
  misc_RNA (1)...(19): siRNA sense strand
ggaaggagaugaggagucu

SEQ ID NO: 457139 - RNA, 19 nt, Homo sapiens
  misc_RNA (1)...(19): siRNA sense strand
gaaacuaaagcagaaauug

SEQ ID NO: 457140 - RNA, 19 nt, Homo sapiens
  misc_RNA (1)...(19): siRNA sense strand
cuaaccagcugaccaguga

SEQ ID NO: 457141 - RNA, 19 nt, Homo sapiens
  misc_RNA (1)...(19): siRNA sense strand
ggaggaggcugugcagaug

SEQ ID NO: 457142 - RNA, 19 nt, Homo sapiens
  misc_RNA (1)...(19): siRNA sense strand
gcagaaugccaucaagaaa

SEQ ID NO: 457143 - RNA, 19 nt, Homo sapiens
  misc_RNA (1)...(19): siRNA sense strand
gauaucauccugaagaaga

SEQ ID NO: 457144 - RNA, 19 nt, Homo sapiens
  misc_RNA (1)...(19): siRNA sense strand
gcacucacuggaaccauua

SEQ ID NO: 457145 - RNA, 19 nt, Homo sapiens
  misc_RNA (1)...(19): siRNA sense strand
cuucagagcuucgagauga

SEQ ID NO: 457146 - RNA, 19 nt, Homo sapiens
  misc_RNA (1)...(19): siRNA sense strand
gaucaucgcagcacaggaa

SEQ ID NO: 457147 - RNA, 19 nt, Homo sapiens
  misc_RNA (1)...(19): siRNA sense strand
gcagugggcugugcaguca

SEQ ID NO: 457148 - RNA, 19 nt, Homo sapiens
  misc_RNA (1)...(19): siRNA sense strand
gagaugaggagucuacuau

SEQ ID NO: 457149 - RNA, 19 nt, Homo sapiens
  misc_RNA (1)...(19): siRNA sense strand
caucauugcuuaagacagu

SEQ ID NO: 457150 - RNA, 19 nt, Homo sapiens
  misc_RNA (1)...(19): siRNA sense strand
ggaauguggugaagacgau

SEQ ID NO: 457151 - RNA, 19 nt, Homo sapiens
  misc_RNA (1)...(19): siRNA sense strand
agaaagaucuacaggaagu

SEQ ID NO: 457152 - RNA, 19 nt, Homo sapiens
  misc_RNA (1)...(19): siRNA sense strand
cagggcagcuggaguguga

SEQ ID NO: 457153 - RNA, 19 nt, Homo sapiens
  misc_RNA (1)...(19): siRNA sense strand
gagcugggcccucuugcua

SEQ ID NO: 457154 - RNA, 19 nt, Homo sapiens
  misc_RNA (1)...(19): siRNA sense strand
gguacagaaucuagagaaa

SEQ ID NO: 457155 - RNA, 19 nt, Homo sapiens
  misc_RNA (1)...(19): siRNA sense strand
ggaccgagcccaaguugug

SEQ ID NO: 457156 - RNA, 19 nt, Homo sapiens
  misc_RNA (1)...(19): siRNA sense strand
uacagaaucuagagaaaga

SEQ ID NO: 457157 - RNA, 19 nt, Homo sapiens
  misc_RNA (1)...(19): siRNA sense strand
cccguucucucaagacuua

SEQ ID NO: 457158 - RNA, 19 nt, Homo sapiens
  misc_RNA (1)...(19): siRNA sense strand
agacagugguggugaaaga

SEQ ID NO: 457159 - RNA, 19 nt, Homo sapiens
  misc_RNA (1)...(19): siRNA sense strand
gaacuuugaggagcagaua

SEQ ID NO: 457160 - RNA, 19 nt, Homo sapiens
  misc_RNA (1)...(19): siRNA sense strand
gaccaucugugcccgcauu

SEQ ID NO: 457161 - RNA, 19 nt, Homo sapiens
  misc_RNA (1)...(19): siRNA sense strand
ccacagucauugcugagaa

SEQ ID NO: 457162 - RNA, 19 nt, Homo sapiens
  misc_RNA (1)...(19): siRNA sense strand
aaacacaccucugcacugu

SEQ ID NO: 457163 - RNA, 19 nt, Homo sapiens
  misc_RNA (1)...(19): siRNA sense strand
aaagugaucuggagaacuc

SEQ ID NO: 457164 - RNA, 19 nt, Homo sapiens
  misc_RNA (1)...(19): siRNA sense strand
gaagggagagcguaagauc

SEQ ID NO: 457165 - RNA, 19 nt, Homo sapiens
  misc_RNA (1)...(19): siRNA sense strand
gacaaggccugugaguuug

SEQ ID NO: 457166 - RNA, 19 nt, Homo sapiens
  misc_RNA (1)...(19): siRNA sense strand
gaagauggagaaacuaaag

SEQ ID NO: 457167 - RNA, 19 nt, Homo sapiens
  misc_RNA (1)...(19): siRNA sense strand
agacauugcugcgagauga

SEQ ID NO: 457168 - RNA, 19 nt, Homo sapiens
  misc_RNA (1)...(19): siRNA sense strand
gcacugggacauuucaaga

SEQ ID NO: 457169 - RNA, 19 nt, Homo sapiens
  misc_RNA (1)...(19): siRNA sense strand
gaaggugggugccauucca

SEQ ID NO: 457170 - RNA, 19 nt, Homo sapiens
  misc_RNA (1)...(19): siRNA sense strand
gcagaugaguccuugaacu

SEQ ID NO: 457171 - RNA, 19 nt, Homo sapiens
  misc_RNA (1)...(19): siRNA sense strand
guagaggaccugacaacaa

SEQ ID NO: 457172 - RNA, 19 nt, Homo sapiens
  misc_RNA (1)...(19): siRNA sense strand
gaugaggagucuacuaugc

SEQ ID NO: 457173 - RNA, 19 nt, Homo sapiens
  misc_RNA (1)...(19): siRNA sense strand
agugaaagauguagccaaa

SEQ ID NO: 457174 - RNA, 19 nt, Homo sapiens
  misc_RNA (1)...(19): siRNA sense strand
uaacugacagcaucaauca

SEQ ID NO: 457175 - RNA, 19 nt, Homo sapiens
  misc_RNA (1)...(19): siRNA sense strand
acaaucagcucaccugucu

SEQ ID NO: 457176 - RNA, 19 nt, Homo sapiens
  misc_RNA (1)...(19): siRNA sense strand
gggagacaauggagaagug

SEQ ID NO: 457177 - RNA, 19 nt, Homo sapiens
  misc_RNA (1)...(19): siRNA sense strand
cagcacagcuaaucuuguc

SEQ ID NO: 457178 - RNA, 19 nt, Homo sapiens
  misc_RNA (1)...(19): siRNA sense strand
caacagcacagcuaaucuu

SEQ ID NO: 457179 - RNA, 19 nt, Homo sapiens
  misc_RNA (1)...(19): siRNA sense strand
gagagcugauggaagagaa

SEQ ID NO: 457180 - RNA, 19 nt, Homo sapiens
  misc_RNA (1)...(19): siRNA sense strand
ccaaggagguggccaacag

SEQ ID NO: 457181 - RNA, 19 nt, Homo sapiens
  misc_RNA (1)...(19): siRNA sense strand
ccuauccacuucccaacua

SEQ ID NO: 457182 - RNA, 19 nt, Homo sapiens
  misc_RNA (1)...(19): siRNA sense strand
ccucugguccugagaauuu

SEQ ID NO: 457183 - RNA, 19 nt, Homo sapiens
  misc_RNA (1)...(19): siRNA sense strand
gaaagggaagaacaagcua

SEQ ID NO: 457184 - RNA, 19 nt, Homo sapiens
  misc_RNA (1)...(19): siRNA sense strand
uggagaaacuaaagcagaa

SEQ ID NO: 457185 - RNA, 19 nt, Homo sapiens
  misc_RNA (1)...(19): siRNA sense strand
ccagaaggcucaggaagca

SEQ ID NO: 457186 - RNA, 19 nt, Homo sapiens
  misc_RNA (1)...(19): siRNA sense strand
gcucugaaccgcuguguca

SEQ ID NO: 457187 - RNA, 19 nt, Homo sapiens
  misc_RNA (1)...(19): siRNA sense strand
gaacucccgcaagcucuua

SEQ ID NO: 457188 - RNA, 19 nt, Homo sapiens
  misc_RNA (1)...(19): siRNA sense strand
uugaagagcaggagaauga

SEQ ID NO: 457189 - RNA, 19 nt, Homo sapiens
  misc_RNA (1)...(19): siRNA sense strand
ggacucggaggcaaugaaa

SEQ ID NO: 457190 - RNA, 19 nt, Homo sapiens
  misc_RNA (1)...(19): siRNA sense strand
ccaagaaggagcucauaga

SEQ ID NO: 457191 - RNA, 19 nt, Homo sapiens
  misc_RNA (1)...(19): siRNA sense strand
gaaggcagcagcucgagau

SEQ ID NO: 457192 - RNA, 19 nt, Homo sapiens
  misc_RNA (1)...(19): siRNA sense strand
gagaagaccaaggaaguga

SEQ ID NO: 457193 - RNA, 19 nt, Homo sapiens
  misc_RNA (1)...(19): siRNA sense strand
gugaagcgagccucagaua

SEQ ID NO: 457194 - RNA, 19 nt, Homo sapiens
  misc_RNA (1)...(19): siRNA sense strand
uaaaagccguggaagauga

SEQ ID NO: 457195 - RNA, 19 nt, Homo sapiens
  misc_RNA (1)...(19): siRNA sense strand
caaggaggcuggugguaac

SEQ ID NO: 457196 - RNA, 19 nt, Homo sapiens
  misc_RNA (1)...(19): siRNA sense strand
uugcagcucugaacaguug

SEQ ID NO: 457197 - RNA, 19 nt, Homo sapiens
  misc_RNA (1)...(19): siRNA sense strand
gagauggauucugcacuga

SEQ ID NO: 457198 - RNA, 19 nt, Homo sapiens
  misc_RNA (1)...(19): siRNA sense strand
agaaauugcacacagauga

SEQ ID NO: 457199 - RNA, 19 nt, Homo sapiens
  misc_RNA (1)...(19): siRNA sense strand
ggcugcagcuggcaaaguu

SEQ ID NO: 457200 - RNA, 19 nt, Homo sapiens
  misc_RNA (1)...(19): siRNA sense strand
ccagauggcgcaguacuuu

SEQ ID NO: 457201 - RNA, 19 nt, Homo sapiens
  misc_RNA (1)...(19): siRNA sense strand
gaugcucacugcaguccaa

SEQ ID NO: 457202 - RNA, 19 nt, Homo sapiens
  misc_RNA (1)...(19): siRNA sense strand
ugagaauuaugcagguauu

SEQ ID NO: 457203 - RNA, 19 nt, Homo sapiens
  misc_RNA (1)...(19): siRNA sense strand
caaugcagcugcgcagaau

SEQ ID NO: 457204 - RNA, 19 nt, Homo sapiens
  misc_RNA (1)...(19): siRNA sense strand
ggaaagugaucuggagaac

SEQ ID NO: 457205 - RNA, 19 nt, Homo sapiens
  misc_RNA (1)...(19): siRNA sense strand
gaaauugcacacagaugau

SEQ ID NO: 457206 - RNA, 19 nt, Homo sapiens
  misc_RNA (1)...(19): siRNA sense strand
ggagaugaggagucuacua

SEQ ID NO: 457207 - RNA, 19 nt, Homo sapiens
  misc_RNA (1)...(19): siRNA sense strand
gcuucgagaugagcacuaa

SEQ ID NO: 457208 - RNA, 19 nt, Homo sapiens
  misc_RNA (1)...(19): siRNA sense strand
gcaguugacaggacauuca

SEQ ID NO: 457209 - RNA, 19 nt, Homo sapiens
  misc_RNA (1)...(19): siRNA sense strand
ccaaggaggcuggugguaa

SEQ ID NO: 457210 - RNA, 19 nt, Homo sapiens
  misc_RNA (1)...(19): siRNA sense strand
gauccacucucagguagau

SEQ ID NO: 457211 - RNA, 19 nt, Homo sapiens
  misc_RNA (1)...(19): siRNA sense strand
guuaugaccaggcuacuga

SEQ ID NO: 457212 - RNA, 19 nt, Homo sapiens
  misc_RNA (1)...(19): siRNA sense strand
gaagagcaggagaaugaga

SEQ ID NO: 457213 - RNA, 19 nt, Homo sapiens
  misc_RNA (1)...(19): siRNA sense strand
ugaaagauguagccaaagc

SEQ ID NO: 457214 - RNA, 19 nt, Homo sapiens
  misc_RNA (1)...(19): siRNA sense strand
uagaggaccugacaacaac

SEQ ID NO: 457215 - RNA, 19 nt, Homo sapiens
  misc_RNA (1)...(19): siRNA sense strand
gcaaaccaggcaauucaga

SEQ ID NO: 457216 - RNA, 19 nt, Homo sapiens
  misc_RNA (1)...(19): siRNA sense strand
acggaaaccugccagaguu

SEQ ID NO: 457217 - RNA, 19 nt, Homo sapiens
  misc_RNA (1)...(19): siRNA sense strand
gacauguccuacuuugguu

SEQ ID NO: 457218 - RNA, 19 nt, Homo sapiens
  misc_RNA (1)...(19): siRNA sense strand
gaaggaauauuucuacaga

SEQ ID NO: 457219 - RNA, 19 nt, Homo sapiens
  misc_RNA (1)...(19): siRNA sense strand
gaugaaacgucaggaauuu

SEQ ID NO: 457220 - RNA, 19 nt, Homo sapiens
  misc_RNA (1)...(19): siRNA sense strand
ggacgccgcuggagagaaa

SEQ ID NO: 457221 - RNA, 19 nt, Homo sapiens
  misc_RNA (1)...(19): siRNA sense strand
gcuagaagcauauggaaua

SEQ ID NO: 457222 - RNA, 19 nt, Homo sapiens
  misc_RNA (1)...(19): siRNA sense strand
ggaauuuacuacacagaaa

SEQ ID NO: 457223 - RNA, 19 nt, Homo sapiens
  misc_RNA (1)...(19): siRNA sense strand
caacacgggucucugcuuu

SEQ ID NO: 457224 - RNA, 19 nt, Homo sapiens
  misc_RNA (1)...(19): siRNA sense strand
ccaaauggcccacuuuaaa

SEQ ID NO: 457225 - RNA, 19 nt, Homo sapiens
  misc_RNA (1)...(19): siRNA sense strand
gaugaaaggcaagcaauua

SEQ ID NO: 457226 - RNA, 19 nt, Homo sapiens
  misc_RNA (1)...(19): siRNA sense strand
gagaaucgaggacauuuaa

SEQ ID NO: 457227 - RNA, 19 nt, Homo sapiens
  misc_RNA (1)...(19): siRNA sense strand
aagagaagcuggccugauu

SEQ ID NO: 457228 - RNA, 19 nt, Homo sapiens
  misc_RNA (1)...(19): siRNA sense strand
gagguaaacauucuaauug

SEQ ID NO: 457229 - RNA, 19 nt, Homo sapiens
  misc_RNA (1)...(19): siRNA sense strand
gaaaugggcauguguguag

SEQ ID NO: 457230 - RNA, 19 nt, Homo sapiens
  misc_RNA (1)...(19): siRNA sense strand
ccaagaaccucgcauaguc

SEQ ID NO: 457231 - RNA, 19 nt, Homo sapiens
  misc_RNA (1)...(19): siRNA sense strand
gaagcuggccugauuaugu

SEQ ID NO: 457232 - RNA, 19 nt, Homo sapiens
  misc_RNA (1)...(19): siRNA sense strand
uggaauacauggccuguuu

SEQ ID NO: 457233 - RNA, 19 nt, Homo sapiens
  misc_RNA (1)...(19): siRNA sense strand
ugagguaguugacaaagaa

SEQ ID NO: 457234 - RNA, 19 nt, Homo sapiens
  misc_RNA (1)...(19): siRNA sense strand
ccaagugacugcuccauuc

SEQ ID NO: 457235 - RNA, 19 nt, Homo sapiens
  misc_RNA (1)...(19): siRNA sense strand
gagauugaauucugugugu

SEQ ID NO: 457236 - RNA, 19 nt, Homo sapiens
  misc_RNA (1)...(19): siRNA sense strand
gaaucgaggacauuuaauu

SEQ ID NO: 457237 - RNA, 19 nt, Homo sapiens
  misc_RNA (1)...(19): siRNA sense strand
gaaccucauuccuucuuug

SEQ ID NO: 457238 - RNA, 19 nt, Homo sapiens
  misc_RNA (1)...(19): siRNA sense strand
cuacagauauuucacagau

SEQ ID NO: 457239 - RNA, 19 nt, Homo sapiens
  misc_RNA (1)...(19): siRNA sense strand
gcaagcaauuagagccuuu

SEQ ID NO: 457240 - RNA, 19 nt, Homo sapiens
  misc_RNA (1)...(19): siRNA sense strand
acagauauuucacagauga

SEQ ID NO: 457241 - RNA, 19 nt, Homo sapiens
  misc_RNA (1)...(19): siRNA sense strand
acacaucccuguuccaaau

SEQ ID NO: 457242 - RNA, 19 nt, Homo sapiens
  misc_RNA (1)...(19): siRNA sense strand
cagcaugucuucuacuuca

SEQ ID NO: 457243 - RNA, 19 nt, Homo sapiens
  misc_RNA (1)...(19): siRNA sense strand
agcaagaucuucccaauug

SEQ ID NO: 457244 - RNA, 19 nt, Homo sapiens
  misc_RNA (1)...(19): siRNA sense strand
gaccuggccucugugcuua

SEQ ID NO: 457245 - RNA, 19 nt, Homo sapiens
  misc_RNA (1)...(19): siRNA sense strand
ucgcugagcucaucggaaa

SEQ ID NO: 457246 - RNA, 19 nt, Homo sapiens
  misc_RNA (1)...(19): siRNA sense strand
gugcaaagauggacucuac

SEQ ID NO: 457247 - RNA, 19 nt, Homo sapiens
  misc_RNA (1)...(19): siRNA sense strand
ggagcugcaucacauaguu

SEQ ID NO: 457248 - RNA, 19 nt, Homo sapiens
  misc_RNA (1)...(19): siRNA sense strand
gcaccucccucacuuugug

SEQ ID NO: 457249 - RNA, 19 nt, Homo sapiens
  misc_RNA (1)...(19): siRNA sense strand
ugaaggagcuggaccuaag

SEQ ID NO: 457250 - RNA, 19 nt, Homo sapiens
  misc_RNA (1)...(19): siRNA sense strand
gggcauguguguagaaaca

SEQ ID NO: 457251 - RNA, 19 nt, Homo sapiens
  misc_RNA (1)...(19): siRNA sense strand
gaaaucagagaaagagaga

SEQ ID NO: 457252 - RNA, 19 nt, Homo sapiens
  misc_RNA (1)...(19): siRNA sense strand
gaccggaagugcaaagaug

SEQ ID NO: 457253 - RNA, 19 nt, Homo sapiens
  misc_RNA (1)...(19): siRNA sense strand
aaacagacauggagcucuu

SEQ ID NO: 457254 - RNA, 19 nt, Homo sapiens
  misc_RNA (1)...(19): siRNA sense strand
ucacacagcugcuacuucu

SEQ ID NO: 457255 - RNA, 19 nt, Homo sapiens
  misc_RNA (1)...(19): siRNA sense strand
ggagaaucgaggacauuua

SEQ ID NO: 457256 - RNA, 19 nt, Homo sapiens
  misc_RNA (1)...(19): siRNA sense strand
cagcacagaucaacaugga

SEQ ID NO: 457257 - RNA, 19 nt, Homo sapiens
  misc_RNA (1)...(19): siRNA sense strand
ggaugaaacgucaggaauu

SEQ ID NO: 457258 - RNA, 19 nt, Homo sapiens
  misc_RNA (1)...(19): siRNA sense strand
ugaaagacaagaaagauga

SEQ ID NO: 457259 - RNA, 19 nt, Homo sapiens
  misc_RNA (1)...(19): siRNA sense strand
gcaagugaaagacaagaaa

SEQ ID NO: 457260 - RNA, 19 nt, Homo sapiens
  misc_RNA (1)...(19): siRNA sense strand
gcaauuagagccuuuaggu

SEQ ID NO: 457261 - RNA, 19 nt, Homo sapiens
  misc_RNA (1)...(19): siRNA sense strand
gcuguggccucacgucuga

SEQ ID NO: 457262 - RNA, 19 nt, Homo sapiens
  misc_RNA (1)...(19): siRNA sense strand
agagagagauggagaacau

SEQ ID NO: 457263 - RNA, 19 nt, Homo sapiens
  misc_RNA (1)...(19): siRNA sense strand
ggaucaggcugcaagugaa

SEQ ID NO: 457264 - RNA, 19 nt, Homo sapiens
  misc_RNA (1)...(19): siRNA sense strand
gcaggaaggaauauuucua

SEQ ID NO: 457265 - RNA, 19 nt, Homo sapiens
  misc_RNA (1)...(19): siRNA sense strand
ugacaucgguggagguugu

SEQ ID NO: 457266 - RNA, 19 nt, Homo sapiens
  misc_RNA (1)...(19): siRNA sense strand
cgaguucacuucccuguag

SEQ ID NO: 457267 - RNA, 19 nt, Homo sapiens
  misc_RNA (1)...(19): siRNA sense strand
ggagagguaaacauucuaa

SEQ ID NO: 457268 - RNA, 19 nt, Homo sapiens
  misc_RNA (1)...(19): siRNA sense strand
aggaggagcugaaggaguu

SEQ ID NO: 457269 - RNA, 19 nt, Homo sapiens
  misc_RNA (1)...(19): siRNA sense strand
ccucugugguguugcuuua

SEQ ID NO: 457270 - RNA, 19 nt, Homo sapiens
  misc_RNA (1)...(19): siRNA sense strand
gcagcaauguccuaugucu

SEQ ID NO: 457271 - RNA, 19 nt, Homo sapiens
  misc_RNA (1)...(19): siRNA sense strand
gaacaaccuggaugacguu

SEQ ID NO: 457272 - RNA, 19 nt, Homo sapiens
  misc_RNA (1)...(19): siRNA sense strand
gagcuggaccuaaguggaa

SEQ ID NO: 457273 - RNA, 19 nt, Homo sapiens
  misc_RNA (1)...(19): siRNA sense strand
ccaauggccucuggaugaa

SEQ ID NO: 457274 - RNA, 19 nt, Homo sapiens
  misc_RNA (1)...(19): siRNA sense strand
gcugauagcccgagugaca

SEQ ID NO: 457275 - RNA, 19 nt, Homo sapiens
  misc_RNA (1)...(19): siRNA sense strand
gaaaccaggagaucucaug

SEQ ID NO: 457276 - RNA, 19 nt, Homo sapiens
  misc_RNA (1)...(19): siRNA sense strand
gagcaagaucuucccaauu

SEQ ID NO: 457277 - RNA, 19 nt, Homo sapiens
  misc_RNA (1)...(19): siRNA sense strand
ugagaucagagacuuauuu

SEQ ID NO: 457278 - RNA, 19 nt, Homo sapiens
  misc_RNA (1)...(19): siRNA sense strand
aaaagacgcuagaagcaua

SEQ ID NO: 457279 - RNA, 19 nt, Homo sapiens
  misc_RNA (1)...(19): siRNA sense strand
ggacacaucccuguuccaa

SEQ ID NO: 457280 - RNA, 19 nt, Homo sapiens
  misc_RNA (1)...(19): siRNA sense strand
ggagagaugaguaauagca

SEQ ID NO: 457281 - RNA, 19 nt, Homo sapiens
  misc_RNA (1)...(19): siRNA sense strand
aaccacacguuuccuauug

SEQ ID NO: 457282 - RNA, 19 nt, Homo sapiens
  misc_RNA (1)...(19): siRNA sense strand
gcauguguguagaaacaga

SEQ ID NO: 457283 - RNA, 19 nt, Homo sapiens
  misc_RNA (1)...(19): siRNA sense strand
agaaagagagagagagaaa

SEQ ID NO: 457284 - RNA, 19 nt, Homo sapiens
  misc_RNA (1)...(19): siRNA sense strand
guucuacguuggccacuug

SEQ ID NO: 457285 - RNA, 19 nt, Homo sapiens
  misc_RNA (1)...(19): siRNA sense strand
ggaaagcuccccagaggua

SEQ ID NO: 457286 - RNA, 19 nt, Homo sapiens
  misc_RNA (1)...(19): siRNA sense strand
cgggagagaugaguaauag

SEQ ID NO: 457287 - RNA, 19 nt, Homo sapiens
  misc_RNA (1)...(19): siRNA sense strand
ggaccuggccucugugcuu

SEQ ID NO: 457288 - RNA, 19 nt, Homo sapiens
  misc_RNA (1)...(19): siRNA sense strand
gggcaucaaccacacguuu

SEQ ID NO: 457289 - RNA, 19 nt, Homo sapiens
  misc_RNA (1)...(19): siRNA sense strand
gguaaacauucuaauugca

SEQ ID NO: 457290 - RNA, 19 nt, Homo sapiens
  misc_RNA (1)...(19): siRNA sense strand
uaauugagaucagagacuu

SEQ ID NO: 457291 - RNA, 19 nt, Homo sapiens
  misc_RNA (1)...(19): siRNA sense strand
cgaggacauuuaauugaga

SEQ ID NO: 457292 - RNA, 19 nt, Homo sapiens
  misc_RNA (1)...(19): siRNA sense strand
gcugcuacuucuacaaaga

SEQ ID NO: 457293 - RNA, 19 nt, Homo sapiens
  misc_RNA (1)...(19): siRNA sense strand
gagagagaaaucagagaaa

SEQ ID NO: 457294 - RNA, 19 nt, Homo sapiens
  misc_RNA (1)...(19): siRNA sense strand
gagaucagagacuuauuug

SEQ ID NO: 457295 - RNA, 19 nt, Homo sapiens
  misc_RNA (1)...(19): siRNA sense strand
ggagaucucaugccugcaa

SEQ ID NO: 457296 - RNA, 19 nt, Homo sapiens
  misc_RNA (1)...(19): siRNA sense strand
gggaucaggcugcaaguga

SEQ ID NO: 457297 - RNA, 19 nt, Homo sapiens
  misc_RNA (1)...(19): siRNA sense strand
caaauggcccacuuuaaag

SEQ ID NO: 457298 - RNA, 19 nt, Homo sapiens
  misc_RNA (1)...(19): siRNA sense strand
ggucucugcuuugugauga

SEQ ID NO: 457299 - RNA, 19 nt, Homo sapiens
  misc_RNA (1)...(19): siRNA sense strand
ggccugcacuugccugaug

SEQ ID NO: 457300 - RNA, 19 nt, Homo sapiens
  misc_RNA (1)...(19): siRNA sense strand
gaaaggcaagcaauuagag

SEQ ID NO: 457301 - RNA, 19 nt, Homo sapiens
  misc_RNA (1)...(19): siRNA sense strand
gagaagcuggccugauuau

SEQ ID NO: 457302 - RNA, 19 nt, Homo sapiens
  misc_RNA (1)...(19): siRNA sense strand
gcacuuucugcauuaaauu

SEQ ID NO: 457303 - RNA, 19 nt, Homo sapiens
  misc_RNA (1)...(19): siRNA sense strand
acacagaaaucagagaaag

SEQ ID NO: 457304 - RNA, 19 nt, Homo sapiens
  misc_RNA (1)...(19): siRNA sense strand
gacccauccucaccucauu

SEQ ID NO: 457305 - RNA, 19 nt, Homo sapiens
  misc_RNA (1)...(19): siRNA sense strand
ccgcauagccguaccuuca

SEQ ID NO: 457306 - RNA, 19 nt, Homo sapiens
  misc_RNA (1)...(19): siRNA sense strand
gaacuggagcucugcuauc

SEQ ID NO: 457307 - RNA, 19 nt, Homo sapiens
  misc_RNA (1)...(19): siRNA sense strand
ugagcaagaucuucccaau

SEQ ID NO: 457308 - RNA, 19 nt, Homo sapiens
  misc_RNA (1)...(19): siRNA sense strand
cauccugccugcaaacuca

SEQ ID NO: 457309 - RNA, 19 nt, Homo sapiens
  misc_RNA (1)...(19): siRNA sense strand
aaacguuccugacacaagu

SEQ ID NO: 457310 - RNA, 19 nt, Homo sapiens
  misc_RNA (1)...(19): siRNA sense strand
uauugggccuguuaaguga

SEQ ID NO: 457311 - RNA, 19 nt, Homo sapiens
  misc_RNA (1)...(19): siRNA sense strand
caucaucuccaccuucuug

SEQ ID NO: 457312 - RNA, 19 nt, Homo sapiens
  misc_RNA (1)...(19): siRNA sense strand
acaacccucugucuacauu

SEQ ID NO: 457313 - RNA, 19 nt, Homo sapiens
  misc_RNA (1)...(19): siRNA sense strand
ccacaacccucugucuaca

SEQ ID NO: 457314 - RNA, 19 nt, Homo sapiens
  misc_RNA (1)...(19): siRNA sense strand
uuagguuggucaaaucaaa

SEQ ID NO: 457315 - RNA, 19 nt, Homo sapiens
  misc_RNA (1)...(19): siRNA sense strand
ccacagcucugcagaaccu

SEQ ID NO: 457316 - RNA, 19 nt, Homo sapiens
  misc_RNA (1)...(19): siRNA sense strand
ggaggagaaucgaggacau

SEQ ID NO: 457317 - RNA, 19 nt, Homo sapiens
  misc_RNA (1)...(19): siRNA sense strand
ggguggagcugcaucacau

SEQ ID NO: 457318 - RNA, 19 nt, Homo sapiens
  misc_RNA (1)...(19): siRNA sense strand
gaaggaauauuucuacaga

SEQ ID NO: 457319 - RNA, 19 nt, Homo sapiens
  misc_RNA (1)...(19): siRNA sense strand
gaugaaacgucaggaauuu

SEQ ID NO: 457320 - RNA, 19 nt, Homo sapiens
  misc_RNA (1)...(19): siRNA sense strand
ggacgccgcuggagagaaa

SEQ ID NO: 457321 - RNA, 19 nt, Homo sapiens
  misc_RNA (1)...(19): siRNA sense strand
gcuagaagcauauggaaua

SEQ ID NO: 457322 - RNA, 19 nt, Homo sapiens
  misc_RNA (1)...(19): siRNA sense strand
ggaauuuacuacacagaaa

SEQ ID NO: 457323 - RNA, 19 nt, Homo sapiens
  misc_RNA (1)...(19): siRNA sense strand
caacacgggucucugcuuu

SEQ ID NO: 457324 - RNA, 19 nt, Homo sapiens
  misc_RNA (1)...(19): siRNA sense strand
ccaaauggcccacuuuaaa

SEQ ID NO: 457325 - RNA, 19 nt, Homo sapiens
  misc_RNA (1)...(19): siRNA sense strand
gaugaaaggcaagcaauua

SEQ ID NO: 457326 - RNA, 19 nt, Homo sapiens
  misc_RNA (1)...(19): siRNA sense strand
gagaaucgaggacauuuaa

SEQ ID NO: 457327 - RNA, 19 nt, Homo sapiens
  misc_RNA (1)...(19): siRNA sense strand
aagagaagcuggccugauu

SEQ ID NO: 457328 - RNA, 19 nt, Homo sapiens
  misc_RNA (1)...(19): siRNA sense strand
gagguaaacauucuaauug

SEQ ID NO: 457329 - RNA, 19 nt, Homo sapiens
  misc_RNA (1)...(19): siRNA sense strand
gaaaugggcauguguguag

SEQ ID NO: 457330 - RNA, 19 nt, Homo sapiens
  misc_RNA (1)...(19): siRNA sense strand
ccaagaaccucgcauaguc

SEQ ID NO: 457331 - RNA, 19 nt, Homo sapiens
  misc_RNA (1)...(19): siRNA sense strand
gaagcuggccugauuaugu

SEQ ID NO: 457332 - RNA, 19 nt, Homo sapiens
  misc_RNA (1)...(19): siRNA sense strand
uggaauacauggccuguuu

SEQ ID NO: 457333 - RNA, 19 nt, Homo sapiens
  misc_RNA (1)...(19): siRNA sense strand
ugagguaguugacaaagaa

SEQ ID NO: 457334 - RNA, 19 nt, Homo sapiens
  misc_RNA (1)...(19): siRNA sense strand
ccaagugacugcuccauuc

SEQ ID NO: 457335 - RNA, 19 nt, Homo sapiens
  misc_RNA (1)...(19): siRNA sense strand
gagauugaauucugugugu

SEQ ID NO: 457336 - RNA, 19 nt, Homo sapiens
  misc_RNA (1)...(19): siRNA sense strand
gaaucgaggacauuuaauu

SEQ ID NO: 457337 - RNA, 19 nt, Homo sapiens
  misc_RNA (1)...(19): siRNA sense strand
gaaccucauuccuucuuug

SEQ ID NO: 457338 - RNA, 19 nt, Homo sapiens
  misc_RNA (1)...(19): siRNA sense strand
cuacagauauuucacagau

SEQ ID NO: 457339 - RNA, 19 nt, Homo sapiens
  misc_RNA (1)...(19): siRNA sense strand
gcaagcaauuagagccuuu

SEQ ID NO: 457340 - RNA, 19 nt, Homo sapiens
  misc_RNA (1)...(19): siRNA sense strand
acagauauuucacagauga

SEQ ID NO: 457341 - RNA, 19 nt, Homo sapiens
  misc_RNA (1)...(19): siRNA sense strand
acacaucccuguuccaaau

SEQ ID NO: 457342 - RNA, 19 nt, Homo sapiens
  misc_RNA (1)...(19): siRNA sense strand
cagcaugucuucuacuuca

SEQ ID NO: 457343 - RNA, 19 nt, Homo sapiens
  misc_RNA (1)...(19): siRNA sense strand
agcaagaucuucccaauug

SEQ ID NO: 457344 - RNA, 19 nt, Homo sapiens
  misc_RNA (1)...(19): siRNA sense strand
gaccuggccucugugcuua

SEQ ID NO: 457345 - RNA, 19 nt, Homo sapiens
  misc_RNA (1)...(19): siRNA sense strand
ucgcugagcucaucggaaa

SEQ ID NO: 457346 - RNA, 19 nt, Homo sapiens
  misc_RNA (1)...(19): siRNA sense strand
gugcaaagauggacucuac

SEQ ID NO: 457347 - RNA, 19 nt, Homo sapiens
  misc_RNA (1)...(19): siRNA sense strand
ggagcugcaucacauaguu

SEQ ID NO: 457348 - RNA, 19 nt, Homo sapiens
  misc_RNA (1)...(19): siRNA sense strand
gcaccucccucacuuugug

SEQ ID NO: 457349 - RNA, 19 nt, Homo sapiens
  misc_RNA (1)...(19): siRNA sense strand
ugaaggagcuggaccuaag

SEQ ID NO: 457350 - RNA, 19 nt, Homo sapiens
  misc_RNA (1)...(19): siRNA sense strand
gggcauguguguagaaaca

SEQ ID NO: 457351 - RNA, 19 nt, Homo sapiens
  misc_RNA (1)...(19): siRNA sense strand
gaaaucagagaaagagaga

SEQ ID NO: 457352 - RNA, 19 nt, Homo sapiens
  misc_RNA (1)...(19): siRNA sense strand
gaccggaagugcaaagaug

SEQ ID NO: 457353 - RNA, 19 nt, Homo sapiens
  misc_RNA (1)...(19): siRNA sense strand
aaacagacauggagcucuu

SEQ ID NO: 457354 - RNA, 19 nt, Homo sapiens
  misc_RNA (1)...(19): siRNA sense strand
ucacacagcugcuacuucu

SEQ ID NO: 457355 - RNA, 19 nt, Homo sapiens
  misc_RNA (1)...(19): siRNA sense strand
ggagaaucgaggacauuua

SEQ ID NO: 457356 - RNA, 19 nt, Homo sapiens
  misc_RNA (1)...(19): siRNA sense strand
cagcacagaucaacaugga

SEQ ID NO: 457357 - RNA, 19 nt, Homo sapiens
  misc_RNA (1)...(19): siRNA sense strand
ggaugaaacgucaggaauu

SEQ ID NO: 457358 - RNA, 19 nt, Homo sapiens
  misc_RNA (1)...(19): siRNA sense strand
ugaaagacaagaaagauga

SEQ ID NO: 457359 - RNA, 19 nt, Homo sapiens
  misc_RNA (1)...(19): siRNA sense strand
gcaagugaaagacaagaaa

SEQ ID NO: 457360 - RNA, 19 nt, Homo sapiens
  misc_RNA (1)...(19): siRNA sense strand
gcaauuagagccuuuaggu

SEQ ID NO: 457361 - RNA, 19 nt, Homo sapiens
  misc_RNA (1)...(19): siRNA sense strand
gcuguggccucacgucuga

SEQ ID NO: 457362 - RNA, 19 nt, Homo sapiens
  misc_RNA (1)...(19): siRNA sense strand
agagagagauggagaacau

SEQ ID NO: 457363 - RNA, 19 nt, Homo sapiens
  misc_RNA (1)...(19): siRNA sense strand
ggaucaggcugcaagugaa

SEQ ID NO: 457364 - RNA, 19 nt, Homo sapiens
  misc_RNA (1)...(19): siRNA sense strand
gcaggaaggaauauuucua

SEQ ID NO: 457365 - RNA, 19 nt, Homo sapiens
  misc_RNA (1)...(19): siRNA sense strand
ugacaucgguggagguugu

SEQ ID NO: 457366 - RNA, 19 nt, Homo sapiens
  misc_RNA (1)...(19): siRNA sense strand
cgaguucacuucccuguag

SEQ ID NO: 457367 - RNA, 19 nt, Homo sapiens
  misc_RNA (1)...(19): siRNA sense strand
ggagagguaaacauucuaa

SEQ ID NO: 457368 - RNA, 19 nt, Homo sapiens
  misc_RNA (1)...(19): siRNA sense strand
aggaggagcugaaggaguu

SEQ ID NO: 457369 - RNA, 19 nt, Homo sapiens
  misc_RNA (1)...(19): siRNA sense strand
ccucugugguguugcuuua

SEQ ID NO: 457370 - RNA, 19 nt, Homo sapiens
  misc_RNA (1)...(19): siRNA sense strand
gcagcaauguccuaugucu

SEQ ID NO: 457371 - RNA, 19 nt, Homo sapiens
  misc_RNA (1)...(19): siRNA sense strand
gaacaaccuggaugacguu

SEQ ID NO: 457372 - RNA, 19 nt, Homo sapiens
  misc_RNA (1)...(19): siRNA sense strand
gagcuggaccuaaguggaa

SEQ ID NO: 457373 - RNA, 19 nt, Homo sapiens
  misc_RNA (1)...(19): siRNA sense strand
ccaauggccucuggaugaa

SEQ ID NO: 457374 - RNA, 19 nt, Homo sapiens
  misc_RNA (1)...(19): siRNA sense strand
gcugauagcccgagugaca

SEQ ID NO: 457375 - RNA, 19 nt, Homo sapiens
  misc_RNA (1)...(19): siRNA sense strand
gaaaccaggagaucucaug

SEQ ID NO: 457376 - RNA, 19 nt, Homo sapiens
  misc_RNA (1)...(19): siRNA sense strand
gagcaagaucuucccaauu

SEQ ID NO: 457377 - RNA, 19 nt, Homo sapiens
  misc_RNA (1)...(19): siRNA sense strand
ugagaucagagacuuauuu

SEQ ID NO: 457378 - RNA, 19 nt, Homo sapiens
  misc_RNA (1)...(19): siRNA sense strand
aaaagacgcuagaagcaua

SEQ ID NO: 457379 - RNA, 19 nt, Homo sapiens
  misc_RNA (1)...(19): siRNA sense strand
ggacacaucccuguuccaa

SEQ ID NO: 457380 - RNA, 19 nt, Homo sapiens
  misc_RNA (1)...(19): siRNA sense strand
ggagagaugaguaauagca

SEQ ID NO: 457381 - RNA, 19 nt, Homo sapiens
  misc_RNA (1)...(19): siRNA sense strand
aaccacacguuuccuauug

SEQ ID NO: 457382 - RNA, 19 nt, Homo sapiens
  misc_RNA (1)...(19): siRNA sense strand
gcauguguguagaaacaga

SEQ ID NO: 457383 - RNA, 19 nt, Homo sapiens
  misc_RNA (1)...(19): siRNA sense strand
agaaagagagagagagaaa

SEQ ID NO: 457384 - RNA, 19 nt, Homo sapiens
  misc_RNA (1)...(19): siRNA sense strand
guucuacguuggccacuug

SEQ ID NO: 457385 - RNA, 19 nt, Homo sapiens
  misc_RNA (1)...(19): siRNA sense strand
ggaaagcuccccagaggua

SEQ ID NO: 457386 - RNA, 19 nt, Homo sapiens
  misc_RNA (1)...(19): siRNA sense strand
cgggagagaugaguaauag

SEQ ID NO: 457387 - RNA, 19 nt, Homo sapiens
  misc_RNA (1)...(19): siRNA sense strand
ggaccuggccucugugcuu

SEQ ID NO: 457388 - RNA, 19 nt, Homo sapiens
  misc_RNA (1)...(19): siRNA sense strand
gggcaucaaccacacguuu

SEQ ID NO: 457389 - RNA, 19 nt, Homo sapiens
  misc_RNA (1)...(19): siRNA sense strand
gguaaacauucuaauugca

SEQ ID NO: 457390 - RNA, 19 nt, Homo sapiens
  misc_RNA (1)...(19): siRNA sense strand
uaauugagaucagagacuu

SEQ ID NO: 457391 - RNA, 19 nt, Homo sapiens
  misc_RNA (1)...(19): siRNA sense strand
cgaggacauuuaauugaga

SEQ ID NO: 457392 - RNA, 19 nt, Homo sapiens
  misc_RNA (1)...(19): siRNA sense strand
gcugcuacuucuacaaaga

SEQ ID NO: 457393 - RNA, 19 nt, Homo sapiens
  misc_RNA (1)...(19): siRNA sense strand
gagagagaaaucagagaaa

SEQ ID NO: 457394 - RNA, 19 nt, Homo sapiens
  misc_RNA (1)...(19): siRNA sense strand
gagaucagagacuuauuug

SEQ ID NO: 457395 - RNA, 19 nt, Homo sapiens
  misc_RNA (1)...(19): siRNA sense strand
ggagaucucaugccugcaa

SEQ ID NO: 457396 - RNA, 19 nt, Homo sapiens
  misc_RNA (1)...(19): siRNA sense strand
gggaucaggcugcaaguga

SEQ ID NO: 457397 - RNA, 19 nt, Homo sapiens
  misc_RNA (1)...(19): siRNA sense strand
caaauggcccacuuuaaag

SEQ ID NO: 457398 - RNA, 19 nt, Homo sapiens
  misc_RNA (1)...(19): siRNA sense strand
ggucucugcuuugugauga

SEQ ID NO: 457399 - RNA, 19 nt, Homo sapiens
  misc_RNA (1)...(19): siRNA sense strand
ggccugcacuugccugaug

SEQ ID NO: 457400 - RNA, 19 nt, Homo sapiens
  misc_RNA (1)...(19): siRNA sense strand
gaaaggcaagcaauuagag

SEQ ID NO: 457401 - RNA, 19 nt, Homo sapiens
  misc_RNA (1)...(19): siRNA sense strand
gagaagcuggccugauuau

SEQ ID NO: 457402 - RNA, 19 nt, Homo sapiens
  misc_RNA (1)...(19): siRNA sense strand
gcacuuucugcauuaaauu

SEQ ID NO: 457403 - RNA, 19 nt, Homo sapiens
  misc_RNA (1)...(19): siRNA sense strand
acacagaaaucagagaaag

SEQ ID NO: 457404 - RNA, 19 nt, Homo sapiens
  misc_RNA (1)...(19): siRNA sense strand
gacccauccucaccucauu

SEQ ID NO: 457405 - RNA, 19 nt, Homo sapiens
  misc_RNA (1)...(19): siRNA sense strand
ccgcauagccguaccuuca

SEQ ID NO: 457406 - RNA, 19 nt, Homo sapiens
  misc_RNA (1)...(19): siRNA sense strand
gaacuggagcucugcuauc

SEQ ID NO: 457407 - RNA, 19 nt, Homo sapiens
  misc_RNA (1)...(19): siRNA sense strand
ugagcaagaucuucccaau

SEQ ID NO: 457408 - RNA, 19 nt, Homo sapiens
  misc_RNA (1)...(19): siRNA sense strand
cauccugccugcaaacuca

SEQ ID NO: 457409 - RNA, 19 nt, Homo sapiens
  misc_RNA (1)...(19): siRNA sense strand
aaacguuccugacacaagu

SEQ ID NO: 457410 - RNA, 19 nt, Homo sapiens
  misc_RNA (1)...(19): siRNA sense strand
uauugggccuguuaaguga

SEQ ID NO: 457411 - RNA, 19 nt, Homo sapiens
  misc_RNA (1)...(19): siRNA sense strand
caucaucuccaccuucuug

SEQ ID NO: 457412 - RNA, 19 nt, Homo sapiens
  misc_RNA (1)...(19): siRNA sense strand
acaacccucugucuacauu

SEQ ID NO: 457413 - RNA, 19 nt, Homo sapiens
  misc_RNA (1)...(19): siRNA sense strand
ccacaacccucugucuaca

SEQ ID NO: 457414 - RNA, 19 nt, Homo sapiens
  misc_RNA (1)...(19): siRNA sense strand
uuagguuggucaaaucaaa

SEQ ID NO: 457415 - RNA, 19 nt, Homo sapiens
  misc_RNA (1)...(19): siRNA sense strand
ccacagcucugcagaaccu

SEQ ID NO: 457416 - RNA, 19 nt, Homo sapiens
  misc_RNA (1)...(19): siRNA sense strand
ggaggagaaucgaggacau

SEQ ID NO: 457417 - RNA, 19 nt, Homo sapiens
  misc_RNA (1)...(19): siRNA sense strand
ggguggagcugcaucacau

SEQ ID NO: 457418 - RNA, 19 nt, Homo sapiens
  misc_RNA (1)...(19): siRNA sense strand
gaaggaauauuucuacaga

SEQ ID NO: 457419 - RNA, 19 nt, Homo sapiens
  misc_RNA (1)...(19): siRNA sense strand
gaugaaacgucaggaauuu

SEQ ID NO: 457420 - RNA, 19 nt, Homo sapiens
  misc_RNA (1)...(19): siRNA sense strand
ggacgccgcuggagagaaa

SEQ ID NO: 457421 - RNA, 19 nt, Homo sapiens
  misc_RNA (1)...(19): siRNA sense strand
gcuagaagcauauggaaua

SEQ ID NO: 457422 - RNA, 19 nt, Homo sapiens
  misc_RNA (1)...(19): siRNA sense strand
ggaauuuacuacacagaaa

SEQ ID NO: 457423 - RNA, 19 nt, Homo sapiens
  misc_RNA (1)...(19): siRNA sense strand
caacacgggucucugcuuu

SEQ ID NO: 457424 - RNA, 19 nt, Homo sapiens
  misc_RNA (1)...(19): siRNA sense strand
ccaaauggcccacuuuaaa

SEQ ID NO: 457425 - RNA, 19 nt, Homo sapiens
  misc_RNA (1)...(19): siRNA sense strand
gaugaaaggcaagcaauua

SEQ ID NO: 457426 - RNA, 19 nt, Homo sapiens
  misc_RNA (1)...(19): siRNA sense strand
gagaaucgaggacauuuaa

SEQ ID NO: 457427 - RNA, 19 nt, Homo sapiens
  misc_RNA (1)...(19): siRNA sense strand
aagagaagcuggccugauu

SEQ ID NO: 457428 - RNA, 19 nt, Homo sapiens
  misc_RNA (1)...(19): siRNA sense strand
gagguaaacauucuaauug

SEQ ID NO: 457429 - RNA, 19 nt, Homo sapiens
  misc_RNA (1)...(19): siRNA sense strand
gaaaugggcauguguguag

SEQ ID NO: 457430 - RNA, 19 nt, Homo sapiens
  misc_RNA (1)...(19): siRNA sense strand
ccaagaaccucgcauaguc

SEQ ID NO: 457431 - RNA, 19 nt, Homo sapiens
  misc_RNA (1)...(19): siRNA sense strand
gaagcuggccugauuaugu

SEQ ID NO: 457432 - RNA, 19 nt, Homo sapiens
  misc_RNA (1)...(19): siRNA sense strand
uggaauacauggccuguuu

SEQ ID NO: 457433 - RNA, 19 nt, Homo sapiens
  misc_RNA (1)...(19): siRNA sense strand
ugagguaguugacaaagaa

SEQ ID NO: 457434 - RNA, 19 nt, Homo sapiens
  misc_RNA (1)...(19): siRNA sense strand
ccaagugacugcuccauuc

SEQ ID NO: 457435 - RNA, 19 nt, Homo sapiens
  misc_RNA (1)...(19): siRNA sense strand
gagauugaauucugugugu

SEQ ID NO: 457436 - RNA, 19 nt, Homo sapiens
  misc_RNA (1)...(19): siRNA sense strand
gaaucgaggacauuuaauu

SEQ ID NO: 457437 - RNA, 19 nt, Homo sapiens
  misc_RNA (1)...(19): siRNA sense strand
gaaccucauuccuucuuug

SEQ ID NO: 457438 - RNA, 19 nt, Homo sapiens
  misc_RNA (1)...(19): siRNA sense strand
cuacagauauuucacagau

SEQ ID NO: 457439 - RNA, 19 nt, Homo sapiens
  misc_RNA (1)...(19): siRNA sense strand
gcaagcaauuagagccuuu

SEQ ID NO: 457440 - RNA, 19 nt, Homo sapiens
  misc_RNA (1)...(19): siRNA sense strand
acagauauuucacagauga

SEQ ID NO: 457441 - RNA, 19 nt, Homo sapiens
  misc_RNA (1)...(19): siRNA sense strand
acacaucccuguuccaaau

SEQ ID NO: 457442 - RNA, 19 nt, Homo sapiens
  misc_RNA (1)...(19): siRNA sense strand
cagcaugucuucuacuuca

SEQ ID NO: 457443 - RNA, 19 nt, Homo sapiens
  misc_RNA (1)...(19): siRNA sense strand
agcaagaucuucccaauug

SEQ ID NO: 457444 - RNA, 19 nt, Homo sapiens
  misc_RNA (1)...(19): siRNA sense strand
gaccuggccucugugcuua

SEQ ID NO: 457445 - RNA, 19 nt, Homo sapiens
  misc_RNA (1)...(19): siRNA sense strand
ucgcugagcucaucggaaa

SEQ ID NO: 457446 - RNA, 19 nt, Homo sapiens
  misc_RNA (1)...(19): siRNA sense strand
gugcaaagauggacucuac

SEQ ID NO: 457447 - RNA, 19 nt, Homo sapiens
  misc_RNA (1)...(19): siRNA sense strand
ggagcugcaucacauaguu

SEQ ID NO: 457448 - RNA, 19 nt, Homo sapiens
  misc_RNA (1)...(19): siRNA sense strand
gcaccucccucacuuugug

SEQ ID NO: 457449 - RNA, 19 nt, Homo sapiens
  misc_RNA (1)...(19): siRNA sense strand
ugaaggagcuggaccuaag

SEQ ID NO: 457450 - RNA, 19 nt, Homo sapiens
  misc_RNA (1)...(19): siRNA sense strand
gggcauguguguagaaaca

SEQ ID NO: 457451 - RNA, 19 nt, Homo sapiens
  misc_RNA (1)...(19): siRNA sense strand
gaaaucagagaaagagaga

SEQ ID NO: 457452 - RNA, 19 nt, Homo sapiens
  misc_RNA (1)...(19): siRNA sense strand
gaccggaagugcaaagaug

SEQ ID NO: 457453 - RNA, 19 nt, Homo sapiens
  misc_RNA (1)...(19): siRNA sense strand
aaacagacauggagcucuu

SEQ ID NO: 457454 - RNA, 19 nt, Homo sapiens
  misc_RNA (1)...(19): siRNA sense strand
ucacacagcugcuacuucu

SEQ ID NO: 457455 - RNA, 19 nt, Homo sapiens
  misc_RNA (1)...(19): siRNA sense strand
ggagaaucgaggacauuua

SEQ ID NO: 457456 - RNA, 19 nt, Homo sapiens
  misc_RNA (1)...(19): siRNA sense strand
cagcacagaucaacaugga

SEQ ID NO: 457457 - RNA, 19 nt, Homo sapiens
  misc_RNA (1)...(19): siRNA sense strand
ggaugaaacgucaggaauu

SEQ ID NO: 457458 - RNA, 19 nt, Homo sapiens
  misc_RNA (1)...(19): siRNA sense strand
ugaaagacaagaaagauga

SEQ ID NO: 457459 - RNA, 19 nt, Homo sapiens
  misc_RNA (1)...(19): siRNA sense strand
gcaagugaaagacaagaaa

SEQ ID NO: 457460 - RNA, 19 nt, Homo sapiens
  misc_RNA (1)...(19): siRNA sense strand
gcaauuagagccuuuaggu

SEQ ID NO: 457461 - RNA, 19 nt, Homo sapiens
  misc_RNA (1)...(19): siRNA sense strand
gcuguggccucacgucuga

SEQ ID NO: 457462 - RNA, 19 nt, Homo sapiens
  misc_RNA (1)...(19): siRNA sense strand
agagagagauggagaacau

SEQ ID NO: 457463 - RNA, 19 nt, Homo sapiens
  misc_RNA (1)...(19): siRNA sense strand
ggaucaggcugcaagugaa

SEQ ID NO: 457464 - RNA, 19 nt, Homo sapiens
  misc_RNA (1)...(19): siRNA sense strand
gcaggaaggaauauuucua

SEQ ID NO: 457465 - RNA, 19 nt, Homo sapiens
  misc_RNA (1)...(19): siRNA sense strand
ugacaucgguggagguugu

SEQ ID NO: 457466 - RNA, 19 nt, Homo sapiens
  misc_RNA (1)...(19): siRNA sense strand
cgaguucacuucccuguag

SEQ ID NO: 457467 - RNA, 19 nt, Homo sapiens
  misc_RNA (1)...(19): siRNA sense strand
ggagagguaaacauucuaa

SEQ ID NO: 457468 - RNA, 19 nt, Homo sapiens
  misc_RNA (1)...(19): siRNA sense strand
aggaggagcugaaggaguu

SEQ ID NO: 457469 - RNA, 19 nt, Homo sapiens
  misc_RNA (1)...(19): siRNA sense strand
ccucugugguguugcuuua

SEQ ID NO: 457470 - RNA, 19 nt, Homo sapiens
  misc_RNA (1)...(19): siRNA sense strand
gcagcaauguccuaugucu

SEQ ID NO: 457471 - RNA, 19 nt, Homo sapiens
  misc_RNA (1)...(19): siRNA sense strand
gaacaaccuggaugacguu

SEQ ID NO: 457472 - RNA, 19 nt, Homo sapiens
  misc_RNA (1)...(19): siRNA sense strand
gagcuggaccuaaguggaa

SEQ ID NO: 457473 - RNA, 19 nt, Homo sapiens
  misc_RNA (1)...(19): siRNA sense strand
ccaauggccucuggaugaa

SEQ ID NO: 457474 - RNA, 19 nt, Homo sapiens
  misc_RNA (1)...(19): siRNA sense strand
gcugauagcccgagugaca

SEQ ID NO: 457475 - RNA, 19 nt, Homo sapiens
  misc_RNA (1)...(19): siRNA sense strand
gaaaccaggagaucucaug

SEQ ID NO: 457476 - RNA, 19 nt, Homo sapiens
  misc_RNA (1)...(19): siRNA sense strand
gagcaagaucuucccaauu

SEQ ID NO: 457477 - RNA, 19 nt, Homo sapiens
  misc_RNA (1)...(19): siRNA sense strand
ugagaucagagacuuauuu

SEQ ID NO: 457478 - RNA, 19 nt, Homo sapiens
  misc_RNA (1)...(19): siRNA sense strand
aaaagacgcuagaagcaua

SEQ ID NO: 457479 - RNA, 19 nt, Homo sapiens
  misc_RNA (1)...(19): siRNA sense strand
ggacacaucccuguuccaa

SEQ ID NO: 457480 - RNA, 19 nt, Homo sapiens
  misc_RNA (1)...(19): siRNA sense strand
ggagagaugaguaauagca

SEQ ID NO: 457481 - RNA, 19 nt, Homo sapiens
  misc_RNA (1)...(19): siRNA sense strand
aaccacacguuuccuauug

SEQ ID NO: 457482 - RNA, 19 nt, Homo sapiens
  misc_RNA (1)...(19): siRNA sense strand
gcauguguguagaaacaga

SEQ ID NO: 457483 - RNA, 19 nt, Homo sapiens
  misc_RNA (1)...(19): siRNA sense strand
agaaagagagagagagaaa

SEQ ID NO: 457484 - RNA, 19 nt, Homo sapiens
  misc_RNA (1)...(19): siRNA sense strand
guucuacguuggccacuug

SEQ ID NO: 457485 - RNA, 19 nt, Homo sapiens
  misc_RNA (1)...(19): siRNA sense strand
ggaaagcuccccagaggua

SEQ ID NO: 457486 - RNA, 19 nt, Homo sapiens
  misc_RNA (1)...(19): siRNA sense strand
cgggagagaugaguaauag

SEQ ID NO: 457487 - RNA, 19 nt, Homo sapiens
  misc_RNA (1)...(19): siRNA sense strand
ggaccuggccucugugcuu

SEQ ID NO: 457488 - RNA, 19 nt, Homo sapiens
  misc_RNA (1)...(19): siRNA sense strand
gggcaucaaccacacguuu

SEQ ID NO: 457489 - RNA, 19 nt, Homo sapiens
  misc_RNA (1)...(19): siRNA sense strand
gguaaacauucuaauugca

SEQ ID NO: 457490 - RNA, 19 nt, Homo sapiens
  misc_RNA (1)...(19): siRNA sense strand
uaauugagaucagagacuu

SEQ ID NO: 457491 - RNA, 19 nt, Homo sapiens
  misc_RNA (1)...(19): siRNA sense strand
cgaggacauuuaauugaga

SEQ ID NO: 457492 - RNA, 19 nt, Homo sapiens
  misc_RNA (1)...(19): siRNA sense strand
gcugcuacuucuacaaaga

SEQ ID NO: 457493 - RNA, 19 nt, Homo sapiens
  misc_RNA (1)...(19): siRNA sense strand
gagagagaaaucagagaaa

SEQ ID NO: 457494 - RNA, 19 nt, Homo sapiens
  misc_RNA (1)...(19): siRNA sense strand
gagaucagagacuuauuug

SEQ ID NO: 457495 - RNA, 19 nt, Homo sapiens
  misc_RNA (1)...(19): siRNA sense strand
ggagaucucaugccugcaa

SEQ ID NO: 457496 - RNA, 19 nt, Homo sapiens
  misc_RNA (1)...(19): siRNA sense strand
gggaucaggcugcaaguga

SEQ ID NO: 457497 - RNA, 19 nt, Homo sapiens
  misc_RNA (1)...(19): siRNA sense strand
caaauggcccacuuuaaag

SEQ ID NO: 457498 - RNA, 19 nt, Homo sapiens
  misc_RNA (1)...(19): siRNA sense strand
ggucucugcuuugugauga

SEQ ID NO: 457499 - RNA, 19 nt, Homo sapiens
  misc_RNA (1)...(19): siRNA sense strand
ggccugcacuugccugaug

SEQ ID NO: 457500 - RNA, 19 nt, Homo sapiens
  misc_RNA (1)...(19): siRNA sense strand
gaaaggcaagcaauuagag

SEQ ID NO: 457501 - RNA, 19 nt, Homo sapiens
  misc_RNA (1)...(19): siRNA sense strand
gagaagcuggccugauuau

SEQ ID NO: 457502 - RNA, 19 nt, Homo sapiens
  misc_RNA (1)...(19): siRNA sense strand
gcacuuucugcauuaaauu

SEQ ID NO: 457503 - RNA, 19 nt, Homo sapiens
  misc_RNA (1)...(19): siRNA sense strand
acacagaaaucagagaaag

SEQ ID NO: 457504 - RNA, 19 nt, Homo sapiens
  misc_RNA (1)...(19): siRNA sense strand
gacccauccucaccucauu

SEQ ID NO: 457505 - RNA, 19 nt, Homo sapiens
  misc_RNA (1)...(19): siRNA sense strand
ccgcauagccguaccuuca

SEQ ID NO: 457506 - RNA, 19 nt, Homo sapiens
  misc_RNA (1)...(19): siRNA sense strand
gaacuggagcucugcuauc

SEQ ID NO: 457507 - RNA, 19 nt, Homo sapiens
  misc_RNA (1)...(19): siRNA sense strand
ugagcaagaucuucccaau

SEQ ID NO: 457508 - RNA, 19 nt, Homo sapiens
  misc_RNA (1)...(19): siRNA sense strand
cauccugccugcaaacuca

SEQ ID NO: 457509 - RNA, 19 nt, Homo sapiens
  misc_RNA (1)...(19): siRNA sense strand
aaacguuccugacacaagu

SEQ ID NO: 457510 - RNA, 19 nt, Homo sapiens
  misc_RNA (1)...(19): siRNA sense strand
uauugggccuguuaaguga

SEQ ID NO: 457511 - RNA, 19 nt, Homo sapiens
  misc_RNA (1)...(19): siRNA sense strand
caucaucuccaccuucuug

SEQ ID NO: 457512 - RNA, 19 nt, Homo sapiens
  misc_RNA (1)...(19): siRNA sense strand
acaacccucugucuacauu

SEQ ID NO: 457513 - RNA, 19 nt, Homo sapiens
  misc_RNA (1)...(19): siRNA sense strand
ccacaacccucugucuaca

SEQ ID NO: 457514 - RNA, 19 nt, Homo sapiens
  misc_RNA (1)...(19): siRNA sense strand
uuagguuggucaaaucaaa

SEQ ID NO: 457515 - RNA, 19 nt, Homo sapiens
  misc_RNA (1)...(19): siRNA sense strand
ccacagcucugcagaaccu

SEQ ID NO: 457516 - RNA, 19 nt, Homo sapiens
  misc_RNA (1)...(19): siRNA sense strand
ggaggagaaucgaggacau

SEQ ID NO: 457517 - RNA, 19 nt, Homo sapiens
  misc_RNA (1)...(19): siRNA sense strand
ggguggagcugcaucacau

SEQ ID NO: 457518 - RNA, 19 nt, Homo sapiens
  misc_RNA (1)...(19): siRNA sense strand
gaaggaauauuucuacaga

SEQ ID NO: 457519 - RNA, 19 nt, Homo sapiens
  misc_RNA (1)...(19): siRNA sense strand
gaugaaacgucaggaauuu

SEQ ID NO: 457520 - RNA, 19 nt, Homo sapiens
  misc_RNA (1)...(19): siRNA sense strand
ggacgccgcuggagagaaa

SEQ ID NO: 457521 - RNA, 19 nt, Homo sapiens
  misc_RNA (1)...(19): siRNA sense strand
gcuagaagcauauggaaua

SEQ ID NO: 457522 - RNA, 19 nt, Homo sapiens
  misc_RNA (1)...(19): siRNA sense strand
ggaauuuacuacacagaaa

SEQ ID NO: 457523 - RNA, 19 nt, Homo sapiens
  misc_RNA (1)...(19): siRNA sense strand
caacacgggucucugcuuu

SEQ ID NO: 457524 - RNA, 19 nt, Homo sapiens
  misc_RNA (1)...(19): siRNA sense strand
ccaaauggcccacuuuaaa

SEQ ID NO: 457525 - RNA, 19 nt, Homo sapiens
  misc_RNA (1)...(19): siRNA sense strand
gaugaaaggcaagcaauua

SEQ ID NO: 457526 - RNA, 19 nt, Homo sapiens
  misc_RNA (1)...(19): siRNA sense strand
gagaaucgaggacauuuaa

SEQ ID NO: 457527 - RNA, 19 nt, Homo sapiens
  misc_RNA (1)...(19): siRNA sense strand
aagagaagcuggccugauu

SEQ ID NO: 457528 - RNA, 19 nt, Homo sapiens
  misc_RNA (1)...(19): siRNA sense strand
gagguaaacauucuaauug

SEQ ID NO: 457529 - RNA, 19 nt, Homo sapiens
  misc_RNA (1)...(19): siRNA sense strand
gaaaugggcauguguguag

SEQ ID NO: 457530 - RNA, 19 nt, Homo sapiens
  misc_RNA (1)...(19): siRNA sense strand
ccaagaaccucgcauaguc

SEQ ID NO: 457531 - RNA, 19 nt, Homo sapiens
  misc_RNA (1)...(19): siRNA sense strand
gaagcuggccugauuaugu

SEQ ID NO: 457532 - RNA, 19 nt, Homo sapiens
  misc_RNA (1)...(19): siRNA sense strand
uggaauacauggccuguuu

SEQ ID NO: 457533 - RNA, 19 nt, Homo sapiens
  misc_RNA (1)...(19): siRNA sense strand
ugagguaguugacaaagaa

SEQ ID NO: 457534 - RNA, 19 nt, Homo sapiens
  misc_RNA (1)...(19): siRNA sense strand
ccaagugacugcuccauuc

SEQ ID NO: 457535 - RNA, 19 nt, Homo sapiens
  misc_RNA (1)...(19): siRNA sense strand
gagauugaauucugugugu

SEQ ID NO: 457536 - RNA, 19 nt, Homo sapiens
  misc_RNA (1)...(19): siRNA sense strand
gaaucgaggacauuuaauu

SEQ ID NO: 457537 - RNA, 19 nt, Homo sapiens
  misc_RNA (1)...(19): siRNA sense strand
gaaccucauuccuucuuug

SEQ ID NO: 457538 - RNA, 19 nt, Homo sapiens
  misc_RNA (1)...(19): siRNA sense strand
cuacagauauuucacagau

SEQ ID NO: 457539 - RNA, 19 nt, Homo sapiens
  misc_RNA (1)...(19): siRNA sense strand
gcaagcaauuagagccuuu

SEQ ID NO: 457540 - RNA, 19 nt, Homo sapiens
  misc_RNA (1)...(19): siRNA sense strand
acagauauuucacagauga

SEQ ID NO: 457541 - RNA, 19 nt, Homo sapiens
  misc_RNA (1)...(19): siRNA sense strand
acacaucccuguuccaaau

SEQ ID NO: 457542 - RNA, 19 nt, Homo sapiens
  misc_RNA (1)...(19): siRNA sense strand
cagcaugucuucuacuuca

SEQ ID NO: 457543 - RNA, 19 nt, Homo sapiens
  misc_RNA (1)...(19): siRNA sense strand
agcaagaucuucccaauug

SEQ ID NO: 457544 - RNA, 19 nt, Homo sapiens
  misc_RNA (1)...(19): siRNA sense strand
gaccuggccucugugcuua

SEQ ID NO: 457545 - RNA, 19 nt, Homo sapiens
  misc_RNA (1)...(19): siRNA sense strand
ucgcugagcucaucggaaa

SEQ ID NO: 457546 - RNA, 19 nt, Homo sapiens
  misc_RNA (1)...(19): siRNA sense strand
gugcaaagauggacucuac

SEQ ID NO: 457547 - RNA, 19 nt, Homo sapiens
  misc_RNA (1)...(19): siRNA sense strand
ggagcugcaucacauaguu

SEQ ID NO: 457548 - RNA, 19 nt, Homo sapiens
  misc_RNA (1)...(19): siRNA sense strand
gcaccucccucacuuugug

SEQ ID NO: 457549 - RNA, 19 nt, Homo sapiens
  misc_RNA (1)...(19): siRNA sense strand
ugaaggagcuggaccuaag

SEQ ID NO: 457550 - RNA, 19 nt, Homo sapiens
  misc_RNA (1)...(19): siRNA sense strand
gggcauguguguagaaaca

SEQ ID NO: 457551 - RNA, 19 nt, Homo sapiens
  misc_RNA (1)...(19): siRNA sense strand
gaaaucagagaaagagaga

SEQ ID NO: 457552 - RNA, 19 nt, Homo sapiens
  misc_RNA (1)...(19): siRNA sense strand
gaccggaagugcaaagaug

SEQ ID NO: 457553 - RNA, 19 nt, Homo sapiens
  misc_RNA (1)...(19): siRNA sense strand
aaacagacauggagcucuu

SEQ ID NO: 457554 - RNA, 19 nt, Homo sapiens
  misc_RNA (1)...(19): siRNA sense strand
ucacacagcugcuacuucu

SEQ ID NO: 457555 - RNA, 19 nt, Homo sapiens
  misc_RNA (1)...(19): siRNA sense strand
ggagaaucgaggacauuua

SEQ ID NO: 457556 - RNA, 19 nt, Homo sapiens
  misc_RNA (1)...(19): siRNA sense strand
cagcacagaucaacaugga

SEQ ID NO: 457557 - RNA, 19 nt, Homo sapiens
  misc_RNA (1)...(19): siRNA sense strand
ggaugaaacgucaggaauu

SEQ ID NO: 457558 - RNA, 19 nt, Homo sapiens
  misc_RNA (1)...(19): siRNA sense strand
ugaaagacaagaaagauga

SEQ ID NO: 457559 - RNA, 19 nt, Homo sapiens
  misc_RNA (1)...(19): siRNA sense strand
gcaagugaaagacaagaaa

SEQ ID NO: 457560 - RNA, 19 nt, Homo sapiens
  misc_RNA (1)...(19): siRNA sense strand
gcaauuagagccuuuaggu

SEQ ID NO: 457561 - RNA, 19 nt, Homo sapiens
  misc_RNA (1)...(19): siRNA sense strand
gcuguggccucacgucuga

SEQ ID NO: 457562 - RNA, 19 nt, Homo sapiens
  misc_RNA (1)...(19): siRNA sense strand
agagagagauggagaacau

SEQ ID NO: 457563 - RNA, 19 nt, Homo sapiens
  misc_RNA (1)...(19): siRNA sense strand
ggaucaggcugcaagugaa

SEQ ID NO: 457564 - RNA, 19 nt, Homo sapiens
  misc_RNA (1)...(19): siRNA sense strand
gcaggaaggaauauuucua

SEQ ID NO: 457565 - RNA, 19 nt, Homo sapiens
  misc_RNA (1)...(19): siRNA sense strand
ugacaucgguggagguugu

SEQ ID NO: 457566 - RNA, 19 nt, Homo sapiens
  misc_RNA (1)...(19): siRNA sense strand
cgaguucacuucccuguag

SEQ ID NO: 457567 - RNA, 19 nt, Homo sapiens
  misc_RNA (1)...(19): siRNA sense strand
ggagagguaaacauucuaa

SEQ ID NO: 457568 - RNA, 19 nt, Homo sapiens
  misc_RNA (1)...(19): siRNA sense strand
aggaggagcugaaggaguu

SEQ ID NO: 457569 - RNA, 19 nt, Homo sapiens
  misc_RNA (1)...(19): siRNA sense strand
ccucugugguguugcuuua

SEQ ID NO: 457570 - RNA, 19 nt, Homo sapiens
  misc_RNA (1)...(19): siRNA sense strand
gcagcaauguccuaugucu

SEQ ID NO: 457571 - RNA, 19 nt, Homo sapiens
  misc_RNA (1)...(19): siRNA sense strand
gaacaaccuggaugacguu

SEQ ID NO: 457572 - RNA, 19 nt, Homo sapiens
  misc_RNA (1)...(19): siRNA sense strand
gagcuggaccuaaguggaa

SEQ ID NO: 457573 - RNA, 19 nt, Homo sapiens
  misc_RNA (1)...(19): siRNA sense strand
ccaauggccucuggaugaa

SEQ ID NO: 457574 - RNA, 19 nt, Homo sapiens
  misc_RNA (1)...(19): siRNA sense strand
gcugauagcccgagugaca

SEQ ID NO: 457575 - RNA, 19 nt, Homo sapiens
  misc_RNA (1)...(19): siRNA sense strand
gaaaccaggagaucucaug

SEQ ID NO: 457576 - RNA, 19 nt, Homo sapiens
  misc_RNA (1)...(19): siRNA sense strand
gagcaagaucuucccaauu

SEQ ID NO: 457577 - RNA, 19 nt, Homo sapiens
  misc_RNA (1)...(19): siRNA sense strand
ugagaucagagacuuauuu

SEQ ID NO: 457578 - RNA, 19 nt, Homo sapiens
  misc_RNA (1)...(19): siRNA sense strand
aaaagacgcuagaagcaua

SEQ ID NO: 457579 - RNA, 19 nt, Homo sapiens
  misc_RNA (1)...(19): siRNA sense strand
ggacacaucccuguuccaa

SEQ ID NO: 457580 - RNA, 19 nt, Homo sapiens
  misc_RNA (1)...(19): siRNA sense strand
ggagagaugaguaauagca

SEQ ID NO: 457581 - RNA, 19 nt, Homo sapiens
  misc_RNA (1)...(19): siRNA sense strand
aaccacacguuuccuauug

SEQ ID NO: 457582 - RNA, 19 nt, Homo sapiens
  misc_RNA (1)...(19): siRNA sense strand
gcauguguguagaaacaga

SEQ ID NO: 457583 - RNA, 19 nt, Homo sapiens
  misc_RNA (1)...(19): siRNA sense strand
agaaagagagagagagaaa

SEQ ID NO: 457584 - RNA, 19 nt, Homo sapiens
  misc_RNA (1)...(19): siRNA sense strand
guucuacguuggccacuug

SEQ ID NO: 457585 - RNA, 19 nt, Homo sapiens
  misc_RNA (1)...(19): siRNA sense strand
ggaaagcuccccagaggua

SEQ ID NO: 457586 - RNA, 19 nt, Homo sapiens
  misc_RNA (1)...(19): siRNA sense strand
cgggagagaugaguaauag

SEQ ID NO: 457587 - RNA, 19 nt, Homo sapiens
  misc_RNA (1)...(19): siRNA sense strand
ggaccuggccucugugcuu

SEQ ID NO: 457588 - RNA, 19 nt, Homo sapiens
  misc_RNA (1)...(19): siRNA sense strand
gggcaucaaccacacguuu

SEQ ID NO: 457589 - RNA, 19 nt, Homo sapiens
  misc_RNA (1)...(19): siRNA sense strand
gguaaacauucuaauugca

SEQ ID NO: 457590 - RNA, 19 nt, Homo sapiens
  misc_RNA (1)...(19): siRNA sense strand
uaauugagaucagagacuu

SEQ ID NO: 457591 - RNA, 19 nt, Homo sapiens
  misc_RNA (1)...(19): siRNA sense strand
cgaggacauuuaauugaga

SEQ ID NO: 457592 - RNA, 19 nt, Homo sapiens
  misc_RNA (1)...(19): siRNA sense strand
gcugcuacuucuacaaaga

SEQ ID NO: 457593 - RNA, 19 nt, Homo sapiens
  misc_RNA (1)...(19): siRNA sense strand
gagagagaaaucagagaaa

SEQ ID NO: 457594 - RNA, 19 nt, Homo sapiens
  misc_RNA (1)...(19): siRNA sense strand
gagaucagagacuuauuug

SEQ ID NO: 457595 - RNA, 19 nt, Homo sapiens
  misc_RNA (1)...(19): siRNA sense strand
ggagaucucaugccugcaa

SEQ ID NO: 457596 - RNA, 19 nt, Homo sapiens
  misc_RNA (1)...(19): siRNA sense strand
gggaucaggcugcaaguga

SEQ ID NO: 457597 - RNA, 19 nt, Homo sapiens
  misc_RNA (1)...(19): siRNA sense strand
caaauggcccacuuuaaag

SEQ ID NO: 457598 - RNA, 19 nt, Homo sapiens
  misc_RNA (1)...(19): siRNA sense strand
ggucucugcuuugugauga

SEQ ID NO: 457599 - RNA, 19 nt, Homo sapiens
  misc_RNA (1)...(19): siRNA sense strand
ggccugcacuugccugaug

SEQ ID NO: 457600 - RNA, 19 nt, Homo sapiens
  misc_RNA (1)...(19): siRNA sense strand
gaaaggcaagcaauuagag

SEQ ID NO: 457601 - RNA, 19 nt, Homo sapiens
  misc_RNA (1)...(19): siRNA sense strand
gagaagcuggccugauuau

SEQ ID NO: 457602 - RNA, 19 nt, Homo sapiens
  misc_RNA (1)...(19): siRNA sense strand
gcacuuucugcauuaaauu

SEQ ID NO: 457603 - RNA, 19 nt, Homo sapiens
  misc_RNA (1)...(19): siRNA sense strand
acacagaaaucagagaaag

SEQ ID NO: 457604 - RNA, 19 nt, Homo sapiens
  misc_RNA (1)...(19): siRNA sense strand
gacccauccucaccucauu

SEQ ID NO: 457605 - RNA, 19 nt, Homo sapiens
  misc_RNA (1)...(19): siRNA sense strand
ccgcauagccguaccuuca

SEQ ID NO: 457606 - RNA, 19 nt, Homo sapiens
  misc_RNA (1)...(19): siRNA sense strand
gaacuggagcucugcuauc

SEQ ID NO: 457607 - RNA, 19 nt, Homo sapiens
  misc_RNA (1)...(19): siRNA sense strand
ugagcaagaucuucccaau

SEQ ID NO: 457608 - RNA, 19 nt, Homo sapiens
  misc_RNA (1)...(19): siRNA sense strand
cauccugccugcaaacuca

SEQ ID NO: 457609 - RNA, 19 nt, Homo sapiens
  misc_RNA (1)...(19): siRNA sense strand
aaacguuccugacacaagu

SEQ ID NO: 457610 - RNA, 19 nt, Homo sapiens
  misc_RNA (1)...(19): siRNA sense strand
uauugggccuguuaaguga

SEQ ID NO: 457611 - RNA, 19 nt, Homo sapiens
  misc_RNA (1)...(19): siRNA sense strand
caucaucuccaccuucuug

SEQ ID NO: 457612 - RNA, 19 nt, Homo sapiens
  misc_RNA (1)...(19): siRNA sense strand
acaacccucugucuacauu

SEQ ID NO: 457613 - RNA, 19 nt, Homo sapiens
  misc_RNA (1)...(19): siRNA sense strand
ccacaacccucugucuaca

SEQ ID NO: 457614 - RNA, 19 nt, Homo sapiens
  misc_RNA (1)...(19): siRNA sense strand
uuagguuggucaaaucaaa

SEQ ID NO: 457615 - RNA, 19 nt, Homo sapiens
  misc_RNA (1)...(19): siRNA sense strand
ccacagcucugcagaaccu

SEQ ID NO: 457616 - RNA, 19 nt, Homo sapiens
  misc_RNA (1)...(19): siRNA sense strand
ggaggagaaucgaggacau

SEQ ID NO: 457617 - RNA, 19 nt, Homo sapiens
  misc_RNA (1)...(19): siRNA sense strand
ggguggagcugcaucacau

SEQ ID NO: 457618 - RNA, 19 nt, Homo sapiens
  misc_RNA (1)...(19): siRNA sense strand
gaaggaauauuucuacaga

SEQ ID NO: 457619 - RNA, 19 nt, Homo sapiens
  misc_RNA (1)...(19): siRNA sense strand
gaugaaacgucaggaauuu

SEQ ID NO: 457620 - RNA, 19 nt, Homo sapiens
  misc_RNA (1)...(19): siRNA sense strand
ggacgccgcuggagagaaa

SEQ ID NO: 457621 - RNA, 19 nt, Homo sapiens
  misc_RNA (1)...(19): siRNA sense strand
gcuagaagcauauggaaua

SEQ ID NO: 457622 - RNA, 19 nt, Homo sapiens
  misc_RNA (1)...(19): siRNA sense strand
ggaauuuacuacacagaaa

SEQ ID NO: 457623 - RNA, 19 nt, Homo sapiens
  misc_RNA (1)...(19): siRNA sense strand
caacacgggucucugcuuu

SEQ ID NO: 457624 - RNA, 19 nt, Homo sapiens
  misc_RNA (1)...(19): siRNA sense strand
ccaaauggcccacuuuaaa

SEQ ID NO: 457625 - RNA, 19 nt, Homo sapiens
  misc_RNA (1)...(19): siRNA sense strand
gaugaaaggcaagcaauua

SEQ ID NO: 457626 - RNA, 19 nt, Homo sapiens
  misc_RNA (1)...(19): siRNA sense strand
gagaaucgaggacauuuaa

SEQ ID NO: 457627 - RNA, 19 nt, Homo sapiens
  misc_RNA (1)...(19): siRNA sense strand
aagagaagcuggccugauu

SEQ ID NO: 457628 - RNA, 19 nt, Homo sapiens
  misc_RNA (1)...(19): siRNA sense strand
gagguaaacauucuaauug

SEQ ID NO: 457629 - RNA, 19 nt, Homo sapiens
  misc_RNA (1)...(19): siRNA sense strand
gaaaugggcauguguguag

SEQ ID NO: 457630 - RNA, 19 nt, Homo sapiens
  misc_RNA (1)...(19): siRNA sense strand
ccaagaaccucgcauaguc

SEQ ID NO: 457631 - RNA, 19 nt, Homo sapiens
  misc_RNA (1)...(19): siRNA sense strand
gaagcuggccugauuaugu

SEQ ID NO: 457632 - RNA, 19 nt, Homo sapiens
  misc_RNA (1)...(19): siRNA sense strand
uggaauacauggccuguuu

SEQ ID NO: 457633 - RNA, 19 nt, Homo sapiens
  misc_RNA (1)...(19): siRNA sense strand
ugagguaguugacaaagaa

SEQ ID NO: 457634 - RNA, 19 nt, Homo sapiens
  misc_RNA (1)...(19): siRNA sense strand
ccaagugacugcuccauuc

SEQ ID NO: 457635 - RNA, 19 nt, Homo sapiens
  misc_RNA (1)...(19): siRNA sense strand
gagauugaauucugugugu

SEQ ID NO: 457636 - RNA, 19 nt, Homo sapiens
  misc_RNA (1)...(19): siRNA sense strand
gaaucgaggacauuuaauu

SEQ ID NO: 457637 - RNA, 19 nt, Homo sapiens
  misc_RNA (1)...(19): siRNA sense strand
gaaccucauuccuucuuug

SEQ ID NO: 457638 - RNA, 19 nt, Homo sapiens
  misc_RNA (1)...(19): siRNA sense strand
cuacagauauuucacagau

SEQ ID NO: 457639 - RNA, 19 nt, Homo sapiens
  misc_RNA (1)...(19): siRNA sense strand
gcaagcaauuagagccuuu

SEQ ID NO: 457640 - RNA, 19 nt, Homo sapiens
  misc_RNA (1)...(19): siRNA sense strand
acagauauuucacagauga

SEQ ID NO: 457641 - RNA, 19 nt, Homo sapiens
  misc_RNA (1)...(19): siRNA sense strand
acacaucccuguuccaaau

SEQ ID NO: 457642 - RNA, 19 nt, Homo sapiens
  misc_RNA (1)...(19): siRNA sense strand
cagcaugucuucuacuuca

SEQ ID NO: 457643 - RNA, 19 nt, Homo sapiens
  misc_RNA (1)...(19): siRNA sense strand
agcaagaucuucccaauug

SEQ ID NO: 457644 - RNA, 19 nt, Homo sapiens
  misc_RNA (1)...(19): siRNA sense strand
gaccuggccucugugcuua

SEQ ID NO: 457645 - RNA, 19 nt, Homo sapiens
  misc_RNA (1)...(19): siRNA sense strand
ucgcugagcucaucggaaa

SEQ ID NO: 457646 - RNA, 19 nt, Homo sapiens
  misc_RNA (1)...(19): siRNA sense strand
gugcaaagauggacucuac

SEQ ID NO: 457647 - RNA, 19 nt, Homo sapiens
  misc_RNA (1)...(19): siRNA sense strand
ggagcugcaucacauaguu

SEQ ID NO: 457648 - RNA, 19 nt, Homo sapiens
  misc_RNA (1)...(19): siRNA sense strand
gcaccucccucacuuugug

SEQ ID NO: 457649 - RNA, 19 nt, Homo sapiens
  misc_RNA (1)...(19): siRNA sense strand
ugaaggagcuggaccuaag

SEQ ID NO: 457650 - RNA, 19 nt, Homo sapiens
  misc_RNA (1)...(19): siRNA sense strand
gggcauguguguagaaaca

SEQ ID NO: 457651 - RNA, 19 nt, Homo sapiens
  misc_RNA (1)...(19): siRNA sense strand
gaaaucagagaaagagaga

SEQ ID NO: 457652 - RNA, 19 nt, Homo sapiens
  misc_RNA (1)...(19): siRNA sense strand
gaccggaagugcaaagaug

SEQ ID NO: 457653 - RNA, 19 nt, Homo sapiens
  misc_RNA (1)...(19): siRNA sense strand
aaacagacauggagcucuu

SEQ ID NO: 457654 - RNA, 19 nt, Homo sapiens
  misc_RNA (1)...(19): siRNA sense strand
ucacacagcugcuacuucu

SEQ ID NO: 457655 - RNA, 19 nt, Homo sapiens
  misc_RNA (1)...(19): siRNA sense strand
ggagaaucgaggacauuua

SEQ ID NO: 457656 - RNA, 19 nt, Homo sapiens
  misc_RNA (1)...(19): siRNA sense strand
cagcacagaucaacaugga

SEQ ID NO: 457657 - RNA, 19 nt, Homo sapiens
  misc_RNA (1)...(19): siRNA sense strand
ggaugaaacgucaggaauu

SEQ ID NO: 457658 - RNA, 19 nt, Homo sapiens
  misc_RNA (1)...(19): siRNA sense strand
ugaaagacaagaaagauga

SEQ ID NO: 457659 - RNA, 19 nt, Homo sapiens
  misc_RNA (1)...(19): siRNA sense strand
gcaagugaaagacaagaaa

SEQ ID NO: 457660 - RNA, 19 nt, Homo sapiens
  misc_RNA (1)...(19): siRNA sense strand
gcaauuagagccuuuaggu

SEQ ID NO: 457661 - RNA, 19 nt, Homo sapiens
  misc_RNA (1)...(19): siRNA sense strand
gcuguggccucacgucuga

SEQ ID NO: 457662 - RNA, 19 nt, Homo sapiens
  misc_RNA (1)...(19): siRNA sense strand
agagagagauggagaacau

SEQ ID NO: 457663 - RNA, 19 nt, Homo sapiens
  misc_RNA (1)...(19): siRNA sense strand
ggaucaggcugcaagugaa

SEQ ID NO: 457664 - RNA, 19 nt, Homo sapiens
  misc_RNA (1)...(19): siRNA sense strand
gcaggaaggaauauuucua

SEQ ID NO: 457665 - RNA, 19 nt, Homo sapiens
  misc_RNA (1)...(19): siRNA sense strand
ugacaucgguggagguugu

SEQ ID NO: 457666 - RNA, 19 nt, Homo sapiens
  misc_RNA (1)...(19): siRNA sense strand
cgaguucacuucccuguag

SEQ ID NO: 457667 - RNA, 19 nt, Homo sapiens
  misc_RNA (1)...(19): siRNA sense strand
ggagagguaaacauucuaa

SEQ ID NO: 457668 - RNA, 19 nt, Homo sapiens
  misc_RNA (1)...(19): siRNA sense strand
aggaggagcugaaggaguu

SEQ ID NO: 457669 - RNA, 19 nt, Homo sapiens
  misc_RNA (1)...(19): siRNA sense strand
ccucugugguguugcuuua

SEQ ID NO: 457670 - RNA, 19 nt, Homo sapiens
  misc_RNA (1)...(19): siRNA sense strand
gcagcaauguccuaugucu

SEQ ID NO: 457671 - RNA, 19 nt, Homo sapiens
  misc_RNA (1)...(19): siRNA sense strand
gaacaaccuggaugacguu

SEQ ID NO: 457672 - RNA, 19 nt, Homo sapiens
  misc_RNA (1)...(19): siRNA sense strand
gagcuggaccuaaguggaa

SEQ ID NO: 457673 - RNA, 19 nt, Homo sapiens
  misc_RNA (1)...(19): siRNA sense strand
ccaauggccucuggaugaa

SEQ ID NO: 457674 - RNA, 19 nt, Homo sapiens
  misc_RNA (1)...(19): siRNA sense strand
gcugauagcccgagugaca

SEQ ID NO: 457675 - RNA, 19 nt, Homo sapiens
  misc_RNA (1)...(19): siRNA sense strand
gaaaccaggagaucucaug

SEQ ID NO: 457676 - RNA, 19 nt, Homo sapiens
  misc_RNA (1)...(19): siRNA sense strand
gagcaagaucuucccaauu

SEQ ID NO: 457677 - RNA, 19 nt, Homo sapiens
  misc_RNA (1)...(19): siRNA sense strand
ugagaucagagacuuauuu

SEQ ID NO: 457678 - RNA, 19 nt, Homo sapiens
  misc_RNA (1)...(19): siRNA sense strand
aaaagacgcuagaagcaua

SEQ ID NO: 457679 - RNA, 19 nt, Homo sapiens
  misc_RNA (1)...(19): siRNA sense strand
ggacacaucccuguuccaa

SEQ ID NO: 457680 - RNA, 19 nt, Homo sapiens
  misc_RNA (1)...(19): siRNA sense strand
ggagagaugaguaauagca

SEQ ID NO: 457681 - RNA, 19 nt, Homo sapiens
  misc_RNA (1)...(19): siRNA sense strand
aaccacacguuuccuauug

SEQ ID NO: 457682 - RNA, 19 nt, Homo sapiens
  misc_RNA (1)...(19): siRNA sense strand
gcauguguguagaaacaga

SEQ ID NO: 457683 - RNA, 19 nt, Homo sapiens
  misc_RNA (1)...(19): siRNA sense strand
agaaagagagagagagaaa

SEQ ID NO: 457684 - RNA, 19 nt, Homo sapiens
  misc_RNA (1)...(19): siRNA sense strand
guucuacguuggccacuug

SEQ ID NO: 457685 - RNA, 19 nt, Homo sapiens
  misc_RNA (1)...(19): siRNA sense strand
ggaaagcuccccagaggua

SEQ ID NO: 457686 - RNA, 19 nt, Homo sapiens
  misc_RNA (1)...(19): siRNA sense strand
cgggagagaugaguaauag

SEQ ID NO: 457687 - RNA, 19 nt, Homo sapiens
  misc_RNA (1)...(19): siRNA sense strand
ggaccuggccucugugcuu

SEQ ID NO: 457688 - RNA, 19 nt, Homo sapiens
  misc_RNA (1)...(19): siRNA sense strand
gggcaucaaccacacguuu

SEQ ID NO: 457689 - RNA, 19 nt, Homo sapiens
  misc_RNA (1)...(19): siRNA sense strand
gguaaacauucuaauugca

SEQ ID NO: 457690 - RNA, 19 nt, Homo sapiens
  misc_RNA (1)...(19): siRNA sense strand
uaauugagaucagagacuu

SEQ ID NO: 457691 - RNA, 19 nt, Homo sapiens
  misc_RNA (1)...(19): siRNA sense strand
cgaggacauuuaauugaga

SEQ ID NO: 457692 - RNA, 19 nt, Homo sapiens
  misc_RNA (1)...(19): siRNA sense strand
gcugcuacuucuacaaaga

SEQ ID NO: 457693 - RNA, 19 nt, Homo sapiens
  misc_RNA (1)...(19): siRNA sense strand
gagagagaaaucagagaaa

SEQ ID NO: 457694 - RNA, 19 nt, Homo sapiens
  misc_RNA (1)...(19): siRNA sense strand
gagaucagagacuuauuug

SEQ ID NO: 457695 - RNA, 19 nt, Homo sapiens
  misc_RNA (1)...(19): siRNA sense strand
ggagaucucaugccugcaa

SEQ ID NO: 457696 - RNA, 19 nt, Homo sapiens
  misc_RNA (1)...(19): siRNA sense strand
gggaucaggcugcaaguga

SEQ ID NO: 457697 - RNA, 19 nt, Homo sapiens
  misc_RNA (1)...(19): siRNA sense strand
caaauggcccacuuuaaag

SEQ ID NO: 457698 - RNA, 19 nt, Homo sapiens
  misc_RNA (1)...(19): siRNA sense strand
ggucucugcuuugugauga

SEQ ID NO: 457699 - RNA, 19 nt, Homo sapiens
  misc_RNA (1)...(19): siRNA sense strand
ggccugcacuugccugaug

SEQ ID NO: 457700 - RNA, 19 nt, Homo sapiens
  misc_RNA (1)...(19): siRNA sense strand
gaaaggcaagcaauuagag

SEQ ID NO: 457701 - RNA, 19 nt, Homo sapiens
  misc_RNA (1)...(19): siRNA sense strand
gagaagcuggccugauuau

SEQ ID NO: 457702 - RNA, 19 nt, Homo sapiens
  misc_RNA (1)...(19): siRNA sense strand
gcacuuucugcauuaaauu

SEQ ID NO: 457703 - RNA, 19 nt, Homo sapiens
  misc_RNA (1)...(19): siRNA sense strand
acacagaaaucagagaaag

SEQ ID NO: 457704 - RNA, 19 nt, Homo sapiens
  misc_RNA (1)...(19): siRNA sense strand
gacccauccucaccucauu

SEQ ID NO: 457705 - RNA, 19 nt, Homo sapiens
  misc_RNA (1)...(19): siRNA sense strand
ccgcauagccguaccuuca

SEQ ID NO: 457706 - RNA, 19 nt, Homo sapiens
  misc_RNA (1)...(19): siRNA sense strand
gaacuggagcucugcuauc

SEQ ID NO: 457707 - RNA, 19 nt, Homo sapiens
  misc_RNA (1)...(19): siRNA sense strand
ugagcaagaucuucccaau

SEQ ID NO: 457708 - RNA, 19 nt, Homo sapiens
  misc_RNA (1)...(19): siRNA sense strand
cauccugccugcaaacuca

SEQ ID NO: 457709 - RNA, 19 nt, Homo sapiens
  misc_RNA (1)...(19): siRNA sense strand
aaacguuccugacacaagu

SEQ ID NO: 457710 - RNA, 19 nt, Homo sapiens
  misc_RNA (1)...(19): siRNA sense strand
uauugggccuguuaaguga

SEQ ID NO: 457711 - RNA, 19 nt, Homo sapiens
  misc_RNA (1)...(19): siRNA sense strand
caucaucuccaccuucuug

SEQ ID NO: 457712 - RNA, 19 nt, Homo sapiens
  misc_RNA (1)...(19): siRNA sense strand
acaacccucugucuacauu

SEQ ID NO: 457713 - RNA, 19 nt, Homo sapiens
  misc_RNA (1)...(19): siRNA sense strand
ccacaacccucugucuaca

SEQ ID NO: 457714 - RNA, 19 nt, Homo sapiens
  misc_RNA (1)...(19): siRNA sense strand
uuagguuggucaaaucaaa

SEQ ID NO: 457715 - RNA, 19 nt, Homo sapiens
  misc_RNA (1)...(19): siRNA sense strand
ccacagcucugcagaaccu

SEQ ID NO: 457716 - RNA, 19 nt, Homo sapiens
  misc_RNA (1)...(19): siRNA sense strand
ggaggagaaucgaggacau

SEQ ID NO: 457717 - RNA, 19 nt, Homo sapiens
  misc_RNA (1)...(19): siRNA sense strand
ggguggagcugcaucacau

SEQ ID NO: 457718 - RNA, 19 nt, Homo sapiens
  misc_RNA (1)...(19): siRNA sense strand
gcuagcagcuucaguggaa

SEQ ID NO: 457719 - RNA, 19 nt, Homo sapiens
  misc_RNA (1)...(19): siRNA sense strand
caacagccacccuugaaua

SEQ ID NO: 457720 - RNA, 19 nt, Homo sapiens
  misc_RNA (1)...(19): siRNA sense strand
acacuccacugccuucuua

SEQ ID NO: 457721 - RNA, 19 nt, Homo sapiens
  misc_RNA (1)...(19): siRNA sense strand
gaugggcgcuacucccuuu

SEQ ID NO: 457722 - RNA, 19 nt, Homo sapiens
  misc_RNA (1)...(19): siRNA sense strand
aguggaaucucuauccuua

SEQ ID NO: 457723 - RNA, 19 nt, Homo sapiens
  misc_RNA (1)...(19): siRNA sense strand
gugagucgcuucaaacuuc

SEQ ID NO: 457724 - RNA, 19 nt, Homo sapiens
  misc_RNA (1)...(19): siRNA sense strand
ggaccucgcugccuuguac

SEQ ID NO: 457725 - RNA, 19 nt, Homo sapiens
  misc_RNA (1)...(19): siRNA sense strand
gacaauauccuaacuccaa

SEQ ID NO: 457726 - RNA, 19 nt, Homo sapiens
  misc_RNA (1)...(19): siRNA sense strand
gauccagguuucuuacuau

SEQ ID NO: 457727 - RNA, 19 nt, Homo sapiens
  misc_RNA (1)...(19): siRNA sense strand
caagagacaagcacucaaa

SEQ ID NO: 457728 - RNA, 19 nt, Homo sapiens
  misc_RNA (1)...(19): siRNA sense strand
ggacaaaugagccuuaguc

SEQ ID NO: 457729 - RNA, 19 nt, Homo sapiens
  misc_RNA (1)...(19): siRNA sense strand
ugaagcagcugacccaucu

SEQ ID NO: 457730 - RNA, 19 nt, Homo sapiens
  misc_RNA (1)...(19): siRNA sense strand
ccaguggagucauuguaaa

SEQ ID NO: 457731 - RNA, 19 nt, Homo sapiens
  misc_RNA (1)...(19): siRNA sense strand
gagacaagcacucaaaucu

SEQ ID NO: 457732 - RNA, 19 nt, Homo sapiens
  misc_RNA (1)...(19): siRNA sense strand
ccaguguacuauagcauga

SEQ ID NO: 457733 - RNA, 19 nt, Homo sapiens
  misc_RNA (1)...(19): siRNA sense strand
cagcagcccugucacaucu

SEQ ID NO: 457734 - RNA, 19 nt, Homo sapiens
  misc_RNA (1)...(19): siRNA sense strand
cagccacccuugaauaauc

SEQ ID NO: 457735 - RNA, 19 nt, Homo sapiens
  misc_RNA (1)...(19): siRNA sense strand
ucacgcagcucgccauguc

SEQ ID NO: 457736 - RNA, 19 nt, Homo sapiens
  misc_RNA (1)...(19): siRNA sense strand
ucaaaucugccuccacuga

SEQ ID NO: 457737 - RNA, 19 nt, Homo sapiens
  misc_RNA (1)...(19): siRNA sense strand
ggagucauuguaaauacua

SEQ ID NO: 457738 - RNA, 19 nt, Homo sapiens
  misc_RNA (1)...(19): siRNA sense strand
caacagauccagguuucuu

SEQ ID NO: 457739 - RNA, 19 nt, Homo sapiens
  misc_RNA (1)...(19): siRNA sense strand
gguacgagcccuucuguag

SEQ ID NO: 457740 - RNA, 19 nt, Homo sapiens
  misc_RNA (1)...(19): siRNA sense strand
ugacccaucugcagcucua

SEQ ID NO: 457741 - RNA, 19 nt, Homo sapiens
  misc_RNA (1)...(19): siRNA sense strand
guacugaggcggacaaacu

SEQ ID NO: 457742 - RNA, 19 nt, Homo sapiens
  misc_RNA (1)...(19): siRNA sense strand
gagccagucugugcaagga

SEQ ID NO: 457743 - RNA, 19 nt, Homo sapiens
  misc_RNA (1)...(19): siRNA sense strand
gcagcugaaugucccuaau

SEQ ID NO: 457744 - RNA, 19 nt, Homo sapiens
  misc_RNA (1)...(19): siRNA sense strand
agauccagguuucuuacua

SEQ ID NO: 457745 - RNA, 19 nt, Homo sapiens
  misc_RNA (1)...(19): siRNA sense strand
gacagcaucggcagcagua

SEQ ID NO: 457746 - RNA, 19 nt, Homo sapiens
  misc_RNA (1)...(19): siRNA sense strand
gguagugacucgcaaaaug

SEQ ID NO: 457747 - RNA, 19 nt, Homo sapiens
  misc_RNA (1)...(19): siRNA sense strand
ccagcacccucuccuguca

SEQ ID NO: 457748 - RNA, 19 nt, Homo sapiens
  misc_RNA (1)...(19): siRNA sense strand
gcaacagccacccuugaau

SEQ ID NO: 457749 - RNA, 19 nt, Homo sapiens
  misc_RNA (1)...(19): siRNA sense strand
ccaagguucuacugaagca

SEQ ID NO: 457750 - RNA, 19 nt, Homo sapiens
  misc_RNA (1)...(19): siRNA sense strand
ucgccaagguucuacugaa

SEQ ID NO: 457751 - RNA, 19 nt, Homo sapiens
  misc_RNA (1)...(19): siRNA sense strand
cagcuucaguggaaucucu

SEQ ID NO: 457752 - RNA, 19 nt, Homo sapiens
  misc_RNA (1)...(19): siRNA sense strand
gagcagcagcccugucaca

SEQ ID NO: 457753 - RNA, 19 nt, Homo sapiens
  misc_RNA (1)...(19): siRNA sense strand
ggccagccauuacaguaca

SEQ ID NO: 457754 - RNA, 19 nt, Homo sapiens
  misc_RNA (1)...(19): siRNA sense strand
gggcuucucccuuguacug

SEQ ID NO: 457755 - RNA, 19 nt, Homo sapiens
  misc_RNA (1)...(19): siRNA sense strand
guggagucauuguaaauac

SEQ ID NO: 457756 - RNA, 19 nt, Homo sapiens
  misc_RNA (1)...(19): siRNA sense strand
gcagcaggcggcuuaccaa

SEQ ID NO: 457757 - RNA, 19 nt, Homo sapiens
  misc_RNA (1)...(19): siRNA sense strand
gcaagagacaagcacucaa

SEQ ID NO: 457758 - RNA, 19 nt, Homo sapiens
  misc_RNA (1)...(19): siRNA sense strand
cagcaucggcagcaguaaa

SEQ ID NO: 457759 - RNA, 19 nt, Homo sapiens
  misc_RNA (1)...(19): siRNA sense strand
cagcaacagccacccuuga

SEQ ID NO: 457760 - RNA, 19 nt, Homo sapiens
  misc_RNA (1)...(19): siRNA sense strand
gcagacuagcuucaucaug

SEQ ID NO: 457761 - RNA, 19 nt, Homo sapiens
  misc_RNA (1)...(19): siRNA sense strand
uaacuccaaccagcaauau

SEQ ID NO: 457762 - RNA, 19 nt, Homo sapiens
  misc_RNA (1)...(19): siRNA sense strand
gcagcagcccugucacauc

SEQ ID NO: 457763 - RNA, 19 nt, Homo sapiens
  misc_RNA (1)...(19): siRNA sense strand
aacagccacccuugaauaa

SEQ ID NO: 457764 - RNA, 19 nt, Homo sapiens
  misc_RNA (1)...(19): siRNA sense strand
uccauggccagucaacuua

SEQ ID NO: 457765 - RNA, 19 nt, Homo sapiens
  misc_RNA (1)...(19): siRNA sense strand
cucaacagauccagguuuc

SEQ ID NO: 457766 - RNA, 19 nt, Homo sapiens
  misc_RNA (1)...(19): siRNA sense strand
gggacagaguggacugaag

SEQ ID NO: 457767 - RNA, 19 nt, Homo sapiens
  misc_RNA (1)...(19): siRNA sense strand
ucaccagccucagcagugu

SEQ ID NO: 457768 - RNA, 19 nt, Homo sapiens
  misc_RNA (1)...(19): siRNA sense strand
guaaauacuacagcaugga

SEQ ID NO: 457769 - RNA, 19 nt, Homo sapiens
  misc_RNA (1)...(19): siRNA sense strand
uacagcccaugaugccuaa

SEQ ID NO: 457770 - RNA, 19 nt, Homo sapiens
  misc_RNA (1)...(19): siRNA sense strand
cuaacuccaaccagcaaua

SEQ ID NO: 457771 - RNA, 19 nt, Homo sapiens
  misc_RNA (1)...(19): siRNA sense strand
cagcagacuagcuucauca

SEQ ID NO: 457772 - RNA, 19 nt, Homo sapiens
  misc_RNA (1)...(19): siRNA sense strand
cagcugaaugucccuaaug

SEQ ID NO: 457773 - RNA, 19 nt, Homo sapiens
  misc_RNA (1)...(19): siRNA sense strand
ugcaaggccuggugguuca

SEQ ID NO: 457774 - RNA, 19 nt, Homo sapiens
  misc_RNA (1)...(19): siRNA sense strand
ucagcagacuagcuucauc

SEQ ID NO: 457775 - RNA, 19 nt, Homo sapiens
  misc_RNA (1)...(19): siRNA sense strand
aguacaaucuguccaucug

SEQ ID NO: 457776 - RNA, 19 nt, Homo sapiens
  misc_RNA (1)...(19): siRNA sense strand
caggccaacacacaaauga

SEQ ID NO: 457777 - RNA, 19 nt, Homo sapiens
  misc_RNA (1)...(19): siRNA sense strand
ccucaacagauccagguuu

SEQ ID NO: 457778 - RNA, 19 nt, Homo sapiens
  misc_RNA (1)...(19): siRNA sense strand
ccaacuauuccaccucuag

SEQ ID NO: 457779 - RNA, 19 nt, Homo sapiens
  misc_RNA (1)...(19): siRNA sense strand
aacagauccagguuucuua

SEQ ID NO: 457780 - RNA, 19 nt, Homo sapiens
  misc_RNA (1)...(19): siRNA sense strand
ucaggagugucaccuucug

SEQ ID NO: 457781 - RNA, 19 nt, Homo sapiens
  misc_RNA (1)...(19): siRNA sense strand
ccagccgccuuuccagcaa

SEQ ID NO: 457782 - RNA, 19 nt, Homo sapiens
  misc_RNA (1)...(19): siRNA sense strand
cgccaagguucuacugaag

SEQ ID NO: 457783 - RNA, 19 nt, Homo sapiens
  misc_RNA (1)...(19): siRNA sense strand
ggcaagagacaagcacuca

SEQ ID NO: 457784 - RNA, 19 nt, Homo sapiens
  misc_RNA (1)...(19): siRNA sense strand
cacagaugccacagcagua

SEQ ID NO: 457785 - RNA, 19 nt, Homo sapiens
  misc_RNA (1)...(19): siRNA sense strand
gaugcaaggccuggugguu

SEQ ID NO: 457786 - RNA, 19 nt, Homo sapiens
  misc_RNA (1)...(19): siRNA sense strand
agacaagcacucaaaucug

SEQ ID NO: 457787 - RNA, 19 nt, Homo sapiens
  misc_RNA (1)...(19): siRNA sense strand
cuccgugagucgcuucaaa

SEQ ID NO: 457788 - RNA, 19 nt, Homo sapiens
  misc_RNA (1)...(19): siRNA sense strand
gagggcaucacccguacug

SEQ ID NO: 457789 - RNA, 19 nt, Homo sapiens
  misc_RNA (1)...(19): siRNA sense strand
ggaagaagcuuaugaauug

SEQ ID NO: 457790 - RNA, 19 nt, Homo sapiens
  misc_RNA (1)...(19): siRNA sense strand
gaaaugugcucaaaguuua

SEQ ID NO: 457791 - RNA, 19 nt, Homo sapiens
  misc_RNA (1)...(19): siRNA sense strand
uaaagaagcugaagaaaug

SEQ ID NO: 457792 - RNA, 19 nt, Homo sapiens
  misc_RNA (1)...(19): siRNA sense strand
gaacuacucuuauaucaga

SEQ ID NO: 457793 - RNA, 19 nt, Homo sapiens
  misc_RNA (1)...(19): siRNA sense strand
ggagaaaccuuggcuauga

SEQ ID NO: 457794 - RNA, 19 nt, Homo sapiens
  misc_RNA (1)...(19): siRNA sense strand
gaaaguacaccuacauuaa

SEQ ID NO: 457795 - RNA, 19 nt, Homo sapiens
  misc_RNA (1)...(19): siRNA sense strand
gaagaaaugugcucaaagu

SEQ ID NO: 457796 - RNA, 19 nt, Homo sapiens
  misc_RNA (1)...(19): siRNA sense strand
caagaaggcugccguuaaa

SEQ ID NO: 457797 - RNA, 19 nt, Homo sapiens
  misc_RNA (1)...(19): siRNA sense strand
gaacuucuguugcaacuau

SEQ ID NO: 457798 - RNA, 19 nt, Homo sapiens
  misc_RNA (1)...(19): siRNA sense strand
caagccagcuaauauguua

SEQ ID NO: 457799 - RNA, 19 nt, Homo sapiens
  misc_RNA (1)...(19): siRNA sense strand
ggacacagcagacagauuu

SEQ ID NO: 457800 - RNA, 19 nt, Homo sapiens
  misc_RNA (1)...(19): siRNA sense strand
caagguggauuaugaauau

SEQ ID NO: 457801 - RNA, 19 nt, Homo sapiens
  misc_RNA (1)...(19): siRNA sense strand
ggaagcaggucucuauaga

SEQ ID NO: 457802 - RNA, 19 nt, Homo sapiens
  misc_RNA (1)...(19): siRNA sense strand
ggaagaugcugcagauguu

SEQ ID NO: 457803 - RNA, 19 nt, Homo sapiens
  misc_RNA (1)...(19): siRNA sense strand
gaacaucuuuguaccuaug

SEQ ID NO: 457804 - RNA, 19 nt, Homo sapiens
  misc_RNA (1)...(19): siRNA sense strand
gcaacuaugucguuuggaa

SEQ ID NO: 457805 - RNA, 19 nt, Homo sapiens
  misc_RNA (1)...(19): siRNA sense strand
caucagcgguagagaauuu

SEQ ID NO: 457806 - RNA, 19 nt, Homo sapiens
  misc_RNA (1)...(19): siRNA sense strand
gaaguaugaugaagccauu

SEQ ID NO: 457807 - RNA, 19 nt, Homo sapiens
  misc_RNA (1)...(19): siRNA sense strand
gaggaagccuggacuaaau

SEQ ID NO: 457808 - RNA, 19 nt, Homo sapiens
  misc_RNA (1)...(19): siRNA sense strand
gcagagagcaucauggauu

SEQ ID NO: 457809 - RNA, 19 nt, Homo sapiens
  misc_RNA (1)...(19): siRNA sense strand
gugaagcacuuaagaaaug

SEQ ID NO: 457810 - RNA, 19 nt, Homo sapiens
  misc_RNA (1)...(19): siRNA sense strand
uaaacuugcuguagaagaa

SEQ ID NO: 457811 - RNA, 19 nt, Homo sapiens
  misc_RNA (1)...(19): siRNA sense strand
gaauaaauuuggugaagca

SEQ ID NO: 457812 - RNA, 19 nt, Homo sapiens
  misc_RNA (1)...(19): siRNA sense strand
ggaaacgagguaucaguua

SEQ ID NO: 457813 - RNA, 19 nt, Homo sapiens
  misc_RNA (1)...(19): siRNA sense strand
gaacaucagcgguagagaa

SEQ ID NO: 457814 - RNA, 19 nt, Homo sapiens
  misc_RNA (1)...(19): siRNA sense strand
ggugagaaguuuaaagaau

SEQ ID NO: 457815 - RNA, 19 nt, Homo sapiens
  misc_RNA (1)...(19): siRNA sense strand
gcagauuugugauaaacuu

SEQ ID NO: 457816 - RNA, 19 nt, Homo sapiens
  misc_RNA (1)...(19): siRNA sense strand
gcagacagauuuaucaacu

SEQ ID NO: 457817 - RNA, 19 nt, Homo sapiens
  misc_RNA (1)...(19): siRNA sense strand
gaaauggauugaaauucug

SEQ ID NO: 457818 - RNA, 19 nt, Homo sapiens
  misc_RNA (1)...(19): siRNA sense strand
aaacugggccuauuacaaa

SEQ ID NO: 457819 - RNA, 19 nt, Homo sapiens
  misc_RNA (1)...(19): siRNA sense strand
gaaacgagguaucaguuac

SEQ ID NO: 457820 - RNA, 19 nt, Homo sapiens
  misc_RNA (1)...(19): siRNA sense strand
cauagaagaguuaguagua

SEQ ID NO: 457821 - RNA, 19 nt, Homo sapiens
  misc_RNA (1)...(19): siRNA sense strand
gugauaaacuugcuguaga

SEQ ID NO: 457822 - RNA, 19 nt, Homo sapiens
  misc_RNA (1)...(19): siRNA sense strand
gagaaaccuuggcuaugaa

SEQ ID NO: 457823 - RNA, 19 nt, Homo sapiens
  misc_RNA (1)...(19): siRNA sense strand
ugaaauggcagcaaagauu

SEQ ID NO: 457824 - RNA, 19 nt, Homo sapiens
  misc_RNA (1)...(19): siRNA sense strand
ggauugaaauucuguaaac

SEQ ID NO: 457825 - RNA, 19 nt, Homo sapiens
  misc_RNA (1)...(19): siRNA sense strand
uaagcaugcuggaaauauu

SEQ ID NO: 457826 - RNA, 19 nt, Homo sapiens
  misc_RNA (1)...(19): siRNA sense strand
ugaaaguacaccuacauua

SEQ ID NO: 457827 - RNA, 19 nt, Homo sapiens
  misc_RNA (1)...(19): siRNA sense strand
gugagaaguuuaaagaaug

SEQ ID NO: 457828 - RNA, 19 nt, Homo sapiens
  misc_RNA (1)...(19): siRNA sense strand
gcacucaagccagcuaaua

SEQ ID NO: 457829 - RNA, 19 nt, Homo sapiens
  misc_RNA (1)...(19): siRNA sense strand
ggucagacaagaaguauga

SEQ ID NO: 457830 - RNA, 19 nt, Homo sapiens
  misc_RNA (1)...(19): siRNA sense strand
ccaagaaggcugccguuaa

SEQ ID NO: 457831 - RNA, 19 nt, Homo sapiens
  misc_RNA (1)...(19): siRNA sense strand
ugcgagaucuugaggguua

SEQ ID NO: 457832 - RNA, 19 nt, Homo sapiens
  misc_RNA (1)...(19): siRNA sense strand
gccauuaaguguuacagaa

SEQ ID NO: 457833 - RNA, 19 nt, Homo sapiens
  misc_RNA (1)...(19): siRNA sense strand
ccaccagucuucaauacuu

SEQ ID NO: 457834 - RNA, 19 nt, Homo sapiens
  misc_RNA (1)...(19): siRNA sense strand
caagagagaaauccugaaa

SEQ ID NO: 457835 - RNA, 19 nt, Homo sapiens
  misc_RNA (1)...(19): siRNA sense strand
gauuaaagaagcugaagaa

SEQ ID NO: 457836 - RNA, 19 nt, Homo sapiens
  misc_RNA (1)...(19): siRNA sense strand
ggaaccaccaaccacauua

SEQ ID NO: 457837 - RNA, 19 nt, Homo sapiens
  misc_RNA (1)...(19): siRNA sense strand
guagagguuugagaaauga

SEQ ID NO: 457838 - RNA, 19 nt, Homo sapiens
  misc_RNA (1)...(19): siRNA sense strand
aagccaaccugauuaaaga

SEQ ID NO: 457839 - RNA, 19 nt, Homo sapiens
  misc_RNA (1)...(19): siRNA sense strand
gcuuuggaguacauaaaua

SEQ ID NO: 457840 - RNA, 19 nt, Homo sapiens
  misc_RNA (1)...(19): siRNA sense strand
ugauaaacuugcuguagaa

SEQ ID NO: 457841 - RNA, 19 nt, Homo sapiens
  misc_RNA (1)...(19): siRNA sense strand
uaaauuuggugaagcacuu

SEQ ID NO: 457842 - RNA, 19 nt, Homo sapiens
  misc_RNA (1)...(19): siRNA sense strand
ggcacaacauuaugacaaa

SEQ ID NO: 457843 - RNA, 19 nt, Homo sapiens
  misc_RNA (1)...(19): siRNA sense strand
augaagccauuaaguguua

SEQ ID NO: 457844 - RNA, 19 nt, Homo sapiens
  misc_RNA (1)...(19): siRNA sense strand
cuuaagaaaugucaugaga

SEQ ID NO: 457845 - RNA, 19 nt, Homo sapiens
  misc_RNA (1)...(19): siRNA sense strand
ccaccaaccacauuacuuu

SEQ ID NO: 457846 - RNA, 19 nt, Homo sapiens
  misc_RNA (1)...(19): siRNA sense strand
uauagaggauugcaagaga

SEQ ID NO: 457847 - RNA, 19 nt, Homo sapiens
  misc_RNA (1)...(19): siRNA sense strand
gaaaagcagauuugugaua

SEQ ID NO: 457848 - RNA, 19 nt, Homo sapiens
  misc_RNA (1)...(19): siRNA sense strand
gaccuuuccuuacuacaga

SEQ ID NO: 457849 - RNA, 19 nt, Homo sapiens
  misc_RNA (1)...(19): siRNA sense strand
gcaugugguuccaaacaga

SEQ ID NO: 457850 - RNA, 19 nt, Homo sapiens
  misc_RNA (1)...(19): siRNA sense strand
agaaaugugcucaaaguuu

SEQ ID NO: 457851 - RNA, 19 nt, Homo sapiens
  misc_RNA (1)...(19): siRNA sense strand
ggucagccaucuauugcuu

SEQ ID NO: 457852 - RNA, 19 nt, Homo sapiens
  misc_RNA (1)...(19): siRNA sense strand
gagcaucauggauugguua

SEQ ID NO: 457853 - RNA, 19 nt, Homo sapiens
  misc_RNA (1)...(19): siRNA sense strand
cagagagcaucauggauug

SEQ ID NO: 457854 - RNA, 19 nt, Homo sapiens
  misc_RNA (1)...(19): siRNA sense strand
gugaacuacucuuauauca

SEQ ID NO: 457855 - RNA, 19 nt, Homo sapiens
  misc_RNA (1)...(19): siRNA sense strand
cugacaagguggauuauga

SEQ ID NO: 457856 - RNA, 19 nt, Homo sapiens
  misc_RNA (1)...(19): siRNA sense strand
cagcaaagauuuuagaaga

SEQ ID NO: 457857 - RNA, 19 nt, Homo sapiens
  misc_RNA (1)...(19): siRNA sense strand
gcacguuuauggccuucuu

SEQ ID NO: 457858 - RNA, 19 nt, Homo sapiens
  misc_RNA (1)...(19): siRNA sense strand
gagaagcuuuggaacaucu

SEQ ID NO: 457859 - RNA, 19 nt, Homo sapiens
  misc_RNA (1)...(19): siRNA sense strand
ugcuauugcuuaccauuua

SEQ ID NO: 457860 - RNA, 19 nt, Homo sapiens
  misc_RNA (1)...(19): siRNA sense strand
uagagaagcuuuggaacau

SEQ ID NO: 457861 - RNA, 19 nt, Homo sapiens
  misc_RNA (1)...(19): siRNA sense strand
agaaaugucaugagauuga

SEQ ID NO: 457862 - RNA, 19 nt, Homo sapiens
  misc_RNA (1)...(19): siRNA sense strand
cagaaugugcccaggcuua

SEQ ID NO: 457863 - RNA, 19 nt, Homo sapiens
  misc_RNA (1)...(19): siRNA sense strand
gaaggcugccguuaaacuu

SEQ ID NO: 457864 - RNA, 19 nt, Homo sapiens
  misc_RNA (1)...(19): siRNA sense strand
gcacuuaagaaaugucaug

SEQ ID NO: 457865 - RNA, 19 nt, Homo sapiens
  misc_RNA (1)...(19): siRNA sense strand
gcagauguuuauagaggau

SEQ ID NO: 457866 - RNA, 19 nt, Homo sapiens
  misc_RNA (1)...(19): siRNA sense strand
gguagagaauuugaaugaa

SEQ ID NO: 457867 - RNA, 19 nt, Homo sapiens
  misc_RNA (1)...(19): siRNA sense strand
cguagagguuugagaaaug

SEQ ID NO: 457868 - RNA, 19 nt, Homo sapiens
  misc_RNA (1)...(19): siRNA sense strand
aagcggaucuugagguguu

SEQ ID NO: 457869 - RNA, 19 nt, Homo sapiens
  misc_RNA (1)...(19): siRNA sense strand
uggaacaucuuuguaccua

SEQ ID NO: 457870 - RNA, 19 nt, Homo sapiens
  misc_RNA (1)...(19): siRNA sense strand
gcuuaugaauugguucgua

SEQ ID NO: 457871 - RNA, 19 nt, Homo sapiens
  misc_RNA (1)...(19): siRNA sense strand
gcuauugcuuaccauuuau

SEQ ID NO: 457872 - RNA, 19 nt, Homo sapiens
  misc_RNA (1)...(19): siRNA sense strand
gaaugugcccaggcuuaua

SEQ ID NO: 457873 - RNA, 19 nt, Homo sapiens
  misc_RNA (1)...(19): siRNA sense strand
cuacuuggcacaacauuau

SEQ ID NO: 457874 - RNA, 19 nt, Homo sapiens
  misc_RNA (1)...(19): siRNA sense strand
gaagaugcugcagauguuu

SEQ ID NO: 457875 - RNA, 19 nt, Homo sapiens
  misc_RNA (1)...(19): siRNA sense strand
ggcaaucauagaagaguua

SEQ ID NO: 457876 - RNA, 19 nt, Homo sapiens
  misc_RNA (1)...(19): siRNA sense strand
cugaagaaaugugcucaaa

SEQ ID NO: 457877 - RNA, 19 nt, Homo sapiens
  misc_RNA (1)...(19): siRNA sense strand
caaaauacaugcuaaaagc

SEQ ID NO: 457878 - RNA, 19 nt, Homo sapiens
  misc_RNA (1)...(19): siRNA sense strand
aagcaugcuggaaauauua

SEQ ID NO: 457879 - RNA, 19 nt, Homo sapiens
  misc_RNA (1)...(19): siRNA sense strand
gaugaagccauuaaguguu

SEQ ID NO: 457880 - RNA, 19 nt, Homo sapiens
  misc_RNA (1)...(19): siRNA sense strand
aaaggaagaagcuuaugaa

SEQ ID NO: 457881 - RNA, 19 nt, Homo sapiens
  misc_RNA (1)...(19): siRNA sense strand
ggaacaucuuuguaccuau

SEQ ID NO: 457882 - RNA, 19 nt, Homo sapiens
  misc_RNA (1)...(19): siRNA sense strand
gggaaacgagguaucaguu

SEQ ID NO: 457883 - RNA, 19 nt, Homo sapiens
  misc_RNA (1)...(19): siRNA sense strand
caucauggauugguuaugc

SEQ ID NO: 457884 - RNA, 19 nt, Homo sapiens
  misc_RNA (1)...(19): siRNA sense strand
gaaaugucaugagauugag

SEQ ID NO: 457885 - RNA, 19 nt, Homo sapiens
  misc_RNA (1)...(19): siRNA sense strand
gaagaagcuuaugaauugg

SEQ ID NO: 457886 - RNA, 19 nt, Homo sapiens
  misc_RNA (1)...(19): siRNA sense strand
guuaugaaaccucucuaaa

SEQ ID NO: 457887 - RNA, 19 nt, Homo sapiens
  misc_RNA (1)...(19): siRNA sense strand
caccagucuucaauacuuu

SEQ ID NO: 457888 - RNA, 19 nt, Homo sapiens
  misc_RNA (1)...(19): siRNA sense strand
ugaagagucauguguguug

SEQ ID NO: 457889 - RNA, 19 nt, Homo sapiens
  misc_RNA (1)...(19): siRNA sense strand
ggaagaagcuuaugaauug

SEQ ID NO: 457890 - RNA, 19 nt, Homo sapiens
  misc_RNA (1)...(19): siRNA sense strand
gaaaugugcucaaaguuua

SEQ ID NO: 457891 - RNA, 19 nt, Homo sapiens
  misc_RNA (1)...(19): siRNA sense strand
uaaagaagcugcugaaauu

SEQ ID NO: 457892 - RNA, 19 nt, Homo sapiens
  misc_RNA (1)...(19): siRNA sense strand
uaaagaagcugaagaaaug

SEQ ID NO: 457893 - RNA, 19 nt, Homo sapiens
  misc_RNA (1)...(19): siRNA sense strand
gaacuacucuuauaucaga

SEQ ID NO: 457894 - RNA, 19 nt, Homo sapiens
  misc_RNA (1)...(19): siRNA sense strand
gaucauauguggacuuauu

SEQ ID NO: 457895 - RNA, 19 nt, Homo sapiens
  misc_RNA (1)...(19): siRNA sense strand
ggagaaaccuuggcuauga

SEQ ID NO: 457896 - RNA, 19 nt, Homo sapiens
  misc_RNA (1)...(19): siRNA sense strand
gaaaguacaccuacauuaa

SEQ ID NO: 457897 - RNA, 19 nt, Homo sapiens
  misc_RNA (1)...(19): siRNA sense strand
gaagaaaugugcucaaagu

SEQ ID NO: 457898 - RNA, 19 nt, Homo sapiens
  misc_RNA (1)...(19): siRNA sense strand
caagaaggcugccguuaaa

SEQ ID NO: 457899 - RNA, 19 nt, Homo sapiens
  misc_RNA (1)...(19): siRNA sense strand
gaacuucuguugcaacuau

SEQ ID NO: 457900 - RNA, 19 nt, Homo sapiens
  misc_RNA (1)...(19): siRNA sense strand
gaagcgagcuauagaguug

SEQ ID NO: 457901 - RNA, 19 nt, Homo sapiens
  misc_RNA (1)...(19): siRNA sense strand
caagccagcuaauauguua

SEQ ID NO: 457902 - RNA, 19 nt, Homo sapiens
  misc_RNA (1)...(19): siRNA sense strand
ggacacagcagacagauuu

SEQ ID NO: 457903 - RNA, 19 nt, Homo sapiens
  misc_RNA (1)...(19): siRNA sense strand
caacgaauccaaagaauuu

SEQ ID NO: 457904 - RNA, 19 nt, Homo sapiens
  misc_RNA (1)...(19): siRNA sense strand
caagguggauuaugaauau

SEQ ID NO: 457905 - RNA, 19 nt, Homo sapiens
  misc_RNA (1)...(19): siRNA sense strand
gaagaaggaugaugaugau

SEQ ID NO: 457906 - RNA, 19 nt, Homo sapiens
  misc_RNA (1)...(19): siRNA sense strand
caacaacacuugaugaauc

SEQ ID NO: 457907 - RNA, 19 nt, Homo sapiens
  misc_RNA (1)...(19): siRNA sense strand
ggaagcaggucucuauaga

SEQ ID NO: 457908 - RNA, 19 nt, Homo sapiens
  misc_RNA (1)...(19): siRNA sense strand
ggaagaugcugcagauguu

SEQ ID NO: 457909 - RNA, 19 nt, Homo sapiens
  misc_RNA (1)...(19): siRNA sense strand
gaacaucuuuguaccuaug

SEQ ID NO: 457910 - RNA, 19 nt, Homo sapiens
  misc_RNA (1)...(19): siRNA sense strand
cuaaagaagcuacguaaua

SEQ ID NO: 457911 - RNA, 19 nt, Homo sapiens
  misc_RNA (1)...(19): siRNA sense strand
gauaugaagaucacaguua

SEQ ID NO: 457912 - RNA, 19 nt, Homo sapiens
  misc_RNA (1)...(19): siRNA sense strand
gcaacuaugucguuuggaa

SEQ ID NO: 457913 - RNA, 19 nt, Homo sapiens
  misc_RNA (1)...(19): siRNA sense strand
caucagcgguagagaauuu

SEQ ID NO: 457914 - RNA, 19 nt, Homo sapiens
  misc_RNA (1)...(19): siRNA sense strand
gaaguaugaugaagccauu

SEQ ID NO: 457915 - RNA, 19 nt, Homo sapiens
  misc_RNA (1)...(19): siRNA sense strand
gaggaagccuggacuaaau

SEQ ID NO: 457916 - RNA, 19 nt, Homo sapiens
  misc_RNA (1)...(19): siRNA sense strand
gcagagagcaucauggauu

SEQ ID NO: 457917 - RNA, 19 nt, Homo sapiens
  misc_RNA (1)...(19): siRNA sense strand
gugaagcacuuaagaaaug

SEQ ID NO: 457918 - RNA, 19 nt, Homo sapiens
  misc_RNA (1)...(19): siRNA sense strand
uaaacuugcuguagaagaa

SEQ ID NO: 457919 - RNA, 19 nt, Homo sapiens
  misc_RNA (1)...(19): siRNA sense strand
gaauaaauuuggugaagca

SEQ ID NO: 457920 - RNA, 19 nt, Homo sapiens
  misc_RNA (1)...(19): siRNA sense strand
gaagcuacguaauaaacaa

SEQ ID NO: 457921 - RNA, 19 nt, Homo sapiens
  misc_RNA (1)...(19): siRNA sense strand
cugaagaacuggccaauga

SEQ ID NO: 457922 - RNA, 19 nt, Homo sapiens
  misc_RNA (1)...(19): siRNA sense strand
ggaaacgagguaucaguua

SEQ ID NO: 457923 - RNA, 19 nt, Homo sapiens
  misc_RNA (1)...(19): siRNA sense strand
gaacaucagcgguagagaa

SEQ ID NO: 457924 - RNA, 19 nt, Homo sapiens
  misc_RNA (1)...(19): siRNA sense strand
ggugagaaguuuaaagaau

SEQ ID NO: 457925 - RNA, 19 nt, Homo sapiens
  misc_RNA (1)...(19): siRNA sense strand
gcagauuugugauaaacuu

SEQ ID NO: 457926 - RNA, 19 nt, Homo sapiens
  misc_RNA (1)...(19): siRNA sense strand
guaaagagggcauuugcua

SEQ ID NO: 457927 - RNA, 19 nt, Homo sapiens
  misc_RNA (1)...(19): siRNA sense strand
gcagacagauuuaucaacu

SEQ ID NO: 457928 - RNA, 19 nt, Homo sapiens
  misc_RNA (1)...(19): siRNA sense strand
aaacugggccuauuacaaa

SEQ ID NO: 457929 - RNA, 19 nt, Homo sapiens
  misc_RNA (1)...(19): siRNA sense strand
gaaauggauugaaauucug

SEQ ID NO: 457930 - RNA, 19 nt, Homo sapiens
  misc_RNA (1)...(19): siRNA sense strand
gaaacgagguaucaguuac

SEQ ID NO: 457931 - RNA, 19 nt, Homo sapiens
  misc_RNA (1)...(19): siRNA sense strand
acagaaaccuccagacaug

SEQ ID NO: 457932 - RNA, 19 nt, Homo sapiens
  misc_RNA (1)...(19): siRNA sense strand
gaagauuacccuuagauca

SEQ ID NO: 457933 - RNA, 19 nt, Homo sapiens
  misc_RNA (1)...(19): siRNA sense strand
cauagaagaguuaguagua

SEQ ID NO: 457934 - RNA, 19 nt, Homo sapiens
  misc_RNA (1)...(19): siRNA sense strand
gugauaaacuugcuguaga

SEQ ID NO: 457935 - RNA, 19 nt, Homo sapiens
  misc_RNA (1)...(19): siRNA sense strand
gaacuggccaaugaaauuu

SEQ ID NO: 457936 - RNA, 19 nt, Homo sapiens
  misc_RNA (1)...(19): siRNA sense strand
ugaagaacuuggugaagaa

SEQ ID NO: 457937 - RNA, 19 nt, Homo sapiens
  misc_RNA (1)...(19): siRNA sense strand
gagaaaccuuggcuaugaa

SEQ ID NO: 457938 - RNA, 19 nt, Homo sapiens
  misc_RNA (1)...(19): siRNA sense strand
gaagaucacaguuaaugga

SEQ ID NO: 457939 - RNA, 19 nt, Homo sapiens
  misc_RNA (1)...(19): siRNA sense strand
gaagaacuggccaaugaaa

SEQ ID NO: 457940 - RNA, 19 nt, Homo sapiens
  misc_RNA (1)...(19): siRNA sense strand
ugaaauggcagcaaagauu

SEQ ID NO: 457941 - RNA, 19 nt, Homo sapiens
  misc_RNA (1)...(19): siRNA sense strand
guaaagaagcugcugaaau

SEQ ID NO: 457942 - RNA, 19 nt, Homo sapiens
  misc_RNA (1)...(19): siRNA sense strand
ggauugaaauucuguaaac

SEQ ID NO: 457943 - RNA, 19 nt, Homo sapiens
  misc_RNA (1)...(19): siRNA sense strand
aaagaaagcccagauagaa

SEQ ID NO: 457944 - RNA, 19 nt, Homo sapiens
  misc_RNA (1)...(19): siRNA sense strand
uaagcaugcuggaaauauu

SEQ ID NO: 457945 - RNA, 19 nt, Homo sapiens
  misc_RNA (1)...(19): siRNA sense strand
ugaaaguacaccuacauua

SEQ ID NO: 457946 - RNA, 19 nt, Homo sapiens
  misc_RNA (1)...(19): siRNA sense strand
gugagaaguuuaaagaaug

SEQ ID NO: 457947 - RNA, 19 nt, Homo sapiens
  misc_RNA (1)...(19): siRNA sense strand
gcacucaagccagcuaaua

SEQ ID NO: 457948 - RNA, 19 nt, Homo sapiens
  misc_RNA (1)...(19): siRNA sense strand
ggucagacaagaaguauga

SEQ ID NO: 457949 - RNA, 19 nt, Homo sapiens
  misc_RNA (1)...(19): siRNA sense strand
gagcaacgaauccaaagaa

SEQ ID NO: 457950 - RNA, 19 nt, Homo sapiens
  misc_RNA (1)...(19): siRNA sense strand
uaacaccguugaagaacuu

SEQ ID NO: 457951 - RNA, 19 nt, Homo sapiens
  misc_RNA (1)...(19): siRNA sense strand
gauaggagguccaaaagaa

SEQ ID NO: 457952 - RNA, 19 nt, Homo sapiens
  misc_RNA (1)...(19): siRNA sense strand
ccagauagaagaagagaaa

SEQ ID NO: 457953 - RNA, 19 nt, Homo sapiens
  misc_RNA (1)...(19): siRNA sense strand
ccaagaaggcugccguuaa

SEQ ID NO: 457954 - RNA, 19 nt, Homo sapiens
  misc_RNA (1)...(19): siRNA sense strand
ugcgagaucuugaggguua

SEQ ID NO: 457955 - RNA, 19 nt, Homo sapiens
  misc_RNA (1)...(19): siRNA sense strand
gccauuaaguguuacagaa

SEQ ID NO: 457956 - RNA, 19 nt, Homo sapiens
  misc_RNA (1)...(19): siRNA sense strand
ccaccagucuucaauacuu

SEQ ID NO: 457957 - RNA, 19 nt, Homo sapiens
  misc_RNA (1)...(19): siRNA sense strand
caagagagaaauccugaaa

SEQ ID NO: 457958 - RNA, 19 nt, Homo sapiens
  misc_RNA (1)...(19): siRNA sense strand
uagaucauauguggacuua

SEQ ID NO: 457959 - RNA, 19 nt, Homo sapiens
  misc_RNA (1)...(19): siRNA sense strand
gauuaaagaagcugaagaa

SEQ ID NO: 457960 - RNA, 19 nt, Homo sapiens
  misc_RNA (1)...(19): siRNA sense strand
ggaaccaccaaccacauua

SEQ ID NO: 457961 - RNA, 19 nt, Homo sapiens
  misc_RNA (1)...(19): siRNA sense strand
guagagguuugagaaauga

SEQ ID NO: 457962 - RNA, 19 nt, Homo sapiens
  misc_RNA (1)...(19): siRNA sense strand
aagaagagcucaaaagaaa

SEQ ID NO: 457963 - RNA, 19 nt, Homo sapiens
  misc_RNA (1)...(19): siRNA sense strand
aagccaaccugauuaaaga

SEQ ID NO: 457964 - RNA, 19 nt, Homo sapiens
  misc_RNA (1)...(19): siRNA sense strand
gcuuuggaguacauaaaua

SEQ ID NO: 457965 - RNA, 19 nt, Homo sapiens
  misc_RNA (1)...(19): siRNA sense strand
ugauaaacuugcuguagaa

SEQ ID NO: 457966 - RNA, 19 nt, Homo sapiens
  misc_RNA (1)...(19): siRNA sense strand
agacauguauggagguauu

SEQ ID NO: 457967 - RNA, 19 nt, Homo sapiens
  misc_RNA (1)...(19): siRNA sense strand
uaaauuuggugaagcacuu

SEQ ID NO: 457968 - RNA, 19 nt, Homo sapiens
  misc_RNA (1)...(19): siRNA sense strand
ggcacaacauuaugacaaa

SEQ ID NO: 457969 - RNA, 19 nt, Homo sapiens
  misc_RNA (1)...(19): siRNA sense strand
augaagccauuaaguguua

SEQ ID NO: 457970 - RNA, 19 nt, Homo sapiens
  misc_RNA (1)...(19): siRNA sense strand
gaucacaguuaauggagau

SEQ ID NO: 457971 - RNA, 19 nt, Homo sapiens
  misc_RNA (1)...(19): siRNA sense strand
gcaacgaauccaaagaauu

SEQ ID NO: 457972 - RNA, 19 nt, Homo sapiens
  misc_RNA (1)...(19): siRNA sense strand
cuuaagaaaugucaugaga

SEQ ID NO: 457973 - RNA, 19 nt, Homo sapiens
  misc_RNA (1)...(19): siRNA sense strand
ccaccaaccacauuacuuu

SEQ ID NO: 457974 - RNA, 19 nt, Homo sapiens
  misc_RNA (1)...(19): siRNA sense strand
uauagaggauugcaagaga

SEQ ID NO: 457975 - RNA, 19 nt, Homo sapiens
  misc_RNA (1)...(19): siRNA sense strand
gaaaagcagauuugugaua

SEQ ID NO: 457976 - RNA, 19 nt, Homo sapiens
  misc_RNA (1)...(19): siRNA sense strand
gaccuuuccuuacuacaga

SEQ ID NO: 457977 - RNA, 19 nt, Homo sapiens
  misc_RNA (1)...(19): siRNA sense strand
gcaaauugucauaagcuuu

SEQ ID NO: 457978 - RNA, 19 nt, Homo sapiens
  misc_RNA (1)...(19): siRNA sense strand
aagaagcugcugaaauuua

SEQ ID NO: 457979 - RNA, 19 nt, Homo sapiens
  misc_RNA (1)...(19): siRNA sense strand
cagagaaacuggccaaggu

SEQ ID NO: 457980 - RNA, 19 nt, Homo sapiens
  misc_RNA (1)...(19): siRNA sense strand
gaaggaugaugaugaugag

SEQ ID NO: 457981 - RNA, 19 nt, Homo sapiens
  misc_RNA (1)...(19): siRNA sense strand
gcaugugguuccaaacaga

SEQ ID NO: 457982 - RNA, 19 nt, Homo sapiens
  misc_RNA (1)...(19): siRNA sense strand
agaaaugugcucaaaguuu

SEQ ID NO: 457983 - RNA, 19 nt, Homo sapiens
  misc_RNA (1)...(19): siRNA sense strand
ggucagccaucuauugcuu

SEQ ID NO: 457984 - RNA, 19 nt, Homo sapiens
  misc_RNA (1)...(19): siRNA sense strand
gagcaucauggauugguua

SEQ ID NO: 457985 - RNA, 19 nt, Homo sapiens
  misc_RNA (1)...(19): siRNA sense strand
cagcaaagauuuuagaaga

SEQ ID NO: 457986 - RNA, 19 nt, Homo sapiens
  misc_RNA (1)...(19): siRNA sense strand
ugaggaagauuacccuuag

SEQ ID NO: 457987 - RNA, 19 nt, Homo sapiens
  misc_RNA (1)...(19): siRNA sense strand
gugaacuacucuuauauca

SEQ ID NO: 457988 - RNA, 19 nt, Homo sapiens
  misc_RNA (1)...(19): siRNA sense strand
cugacaagguggauuauga

SEQ ID NO: 457989 - RNA, 19 nt, Homo sapiens
  misc_RNA (1)...(19): siRNA sense strand
gcagcaaggugguacagaa

SEQ ID NO: 457990 - RNA, 19 nt, Homo sapiens
  misc_RNA (1)...(19): siRNA sense strand
gcaaggugguacagaaguu

SEQ ID NO: 457991 - RNA, 19 nt, Homo sapiens
  misc_RNA (1)...(19): siRNA sense strand
gcaaguacagucacaagga

SEQ ID NO: 457992 - RNA, 19 nt, Homo sapiens
  misc_RNA (1)...(19): siRNA sense strand
ucagagcccugcacuuugu

SEQ ID NO: 457993 - RNA, 19 nt, Homo sapiens
  misc_RNA (1)...(19): siRNA sense strand
gcagcaagugcccaucuuu

SEQ ID NO: 457994 - RNA, 19 nt, Homo sapiens
  misc_RNA (1)...(19): siRNA sense strand
guuggaagcugcucuaagc

SEQ ID NO: 457995 - RNA, 19 nt, Homo sapiens
  misc_RNA (1)...(19): siRNA sense strand
aaacgcaacucagcagcaa

SEQ ID NO: 457996 - RNA, 19 nt, Homo sapiens
  misc_RNA (1)...(19): siRNA sense strand
cuucagagcccugcacuuu

SEQ ID NO: 457997 - RNA, 19 nt, Homo sapiens
  misc_RNA (1)...(19): siRNA sense strand
gaaguugguccugcccuuu

SEQ ID NO: 457998 - RNA, 19 nt, Homo sapiens
  misc_RNA (1)...(19): siRNA sense strand
gauccuggcucgggaagca

SEQ ID NO: 457999 - RNA, 19 nt, Homo sapiens
  misc_RNA (1)...(19): siRNA sense strand
cgggaacgcuggcauuucu

SEQ ID NO: 458000 - RNA, 19 nt, Homo sapiens
  misc_RNA (1)...(19): siRNA sense strand
guacagucacaaggacaua

SEQ ID NO: 458001 - RNA, 19 nt, Homo sapiens
  misc_RNA (1)...(19): siRNA sense strand
uuuaugcccugccuugaga

SEQ ID NO: 458002 - RNA, 19 nt, Homo sapiens
  misc_RNA (1)...(19): siRNA sense strand
agagcuaccugaggcagaa

SEQ ID NO: 458003 - RNA, 19 nt, Homo sapiens
  misc_RNA (1)...(19): siRNA sense strand
uggaagccauugcccacuu

SEQ ID NO: 458004 - RNA, 19 nt, Homo sapiens
  misc_RNA (1)...(19): siRNA sense strand
uggcuacagucaacaucuu

SEQ ID NO: 458005 - RNA, 19 nt, Homo sapiens
  misc_RNA (1)...(19): siRNA sense strand
cagcaagugcccaucuuuc

SEQ ID NO: 458006 - RNA, 19 nt, Homo sapiens
  misc_RNA (1)...(19): siRNA sense strand
gcaaggccagaggaacuga

SEQ ID NO: 458007 - RNA, 19 nt, Homo sapiens
  misc_RNA (1)...(19): siRNA sense strand
ccuggugugugcccuggaa

SEQ ID NO: 458008 - RNA, 19 nt, Homo sapiens
  misc_RNA (1)...(19): siRNA sense strand
guucaggaaacgcaacuca

SEQ ID NO: 458009 - RNA, 19 nt, Homo sapiens
  misc_RNA (1)...(19): siRNA sense strand
ucacaaggacauaguagcu

SEQ ID NO: 458010 - RNA, 19 nt, Homo sapiens
  misc_RNA (1)...(19): siRNA sense strand
caaggugguacagaaguug

SEQ ID NO: 458011 - RNA, 19 nt, Homo sapiens
  misc_RNA (1)...(19): siRNA sense strand
ccacggcagcaucugauca

SEQ ID NO: 458012 - RNA, 19 nt, Homo sapiens
  misc_RNA (1)...(19): siRNA sense strand
gcagcaaggugguacagaa

SEQ ID NO: 458013 - RNA, 19 nt, Homo sapiens
  misc_RNA (1)...(19): siRNA sense strand
gcaaggugguacagaaguu

SEQ ID NO: 458014 - RNA, 19 nt, Homo sapiens
  misc_RNA (1)...(19): siRNA sense strand
gcaaguacagucacaagga

SEQ ID NO: 458015 - RNA, 19 nt, Homo sapiens
  misc_RNA (1)...(19): siRNA sense strand
ucagagcccugcacuuugu

SEQ ID NO: 458016 - RNA, 19 nt, Homo sapiens
  misc_RNA (1)...(19): siRNA sense strand
gcagcaagugcccaucuuu

SEQ ID NO: 458017 - RNA, 19 nt, Homo sapiens
  misc_RNA (1)...(19): siRNA sense strand
guuggaagcugcucuaagc

SEQ ID NO: 458018 - RNA, 19 nt, Homo sapiens
  misc_RNA (1)...(19): siRNA sense strand
aaacgcaacucagcagcaa

SEQ ID NO: 458019 - RNA, 19 nt, Homo sapiens
  misc_RNA (1)...(19): siRNA sense strand
cuucagagcccugcacuuu

SEQ ID NO: 458020 - RNA, 19 nt, Homo sapiens
  misc_RNA (1)...(19): siRNA sense strand
gaaguugguccugcccuuu

SEQ ID NO: 458021 - RNA, 19 nt, Homo sapiens
  misc_RNA (1)...(19): siRNA sense strand
gauccuggcucgggaagca

SEQ ID NO: 458022 - RNA, 19 nt, Homo sapiens
  misc_RNA (1)...(19): siRNA sense strand
cgggaacgcuggcauuucu

SEQ ID NO: 458023 - RNA, 19 nt, Homo sapiens
  misc_RNA (1)...(19): siRNA sense strand
guacagucacaaggacaua

SEQ ID NO: 458024 - RNA, 19 nt, Homo sapiens
  misc_RNA (1)...(19): siRNA sense strand
uuuaugcccugccuugaga

SEQ ID NO: 458025 - RNA, 19 nt, Homo sapiens
  misc_RNA (1)...(19): siRNA sense strand
agagcuaccugaggcagaa

SEQ ID NO: 458026 - RNA, 19 nt, Homo sapiens
  misc_RNA (1)...(19): siRNA sense strand
uggaagccauugcccacuu

SEQ ID NO: 458027 - RNA, 19 nt, Homo sapiens
  misc_RNA (1)...(19): siRNA sense strand
uggcuacagucaacaucuu

SEQ ID NO: 458028 - RNA, 19 nt, Homo sapiens
  misc_RNA (1)...(19): siRNA sense strand
cagcaagugcccaucuuuc

SEQ ID NO: 458029 - RNA, 19 nt, Homo sapiens
  misc_RNA (1)...(19): siRNA sense strand
gcaaggccagaggaacuga

SEQ ID NO: 458030 - RNA, 19 nt, Homo sapiens
  misc_RNA (1)...(19): siRNA sense strand
ccuggugugugcccuggaa

SEQ ID NO: 458031 - RNA, 19 nt, Homo sapiens
  misc_RNA (1)...(19): siRNA sense strand
guucaggaaacgcaacuca

SEQ ID NO: 458032 - RNA, 19 nt, Homo sapiens
  misc_RNA (1)...(19): siRNA sense strand
ucacaaggacauaguagcu

SEQ ID NO: 458033 - RNA, 19 nt, Homo sapiens
  misc_RNA (1)...(19): siRNA sense strand
caaggugguacagaaguug

SEQ ID NO: 458034 - RNA, 19 nt, Homo sapiens
  misc_RNA (1)...(19): siRNA sense strand
ccacggcagcaucugauca

SEQ ID NO: 458035 - RNA, 19 nt, Homo sapiens
  misc_RNA (1)...(19): siRNA sense strand
gcauguaaaccacugaaga

SEQ ID NO: 458036 - RNA, 19 nt, Homo sapiens
  misc_RNA (1)...(19): siRNA sense strand
cauguaaaccacugaagaa

SEQ ID NO: 458037 - RNA, 19 nt, Homo sapiens
  misc_RNA (1)...(19): siRNA sense strand
gcucuuggguuuagcaaaa

SEQ ID NO: 458038 - RNA, 19 nt, Homo sapiens
  misc_RNA (1)...(19): siRNA sense strand
aaaucugucugaugcaugu

SEQ ID NO: 458039 - RNA, 19 nt, Homo sapiens
  misc_RNA (1)...(19): siRNA sense strand
ggcagcaucuucagcucuu

SEQ ID NO: 458040 - RNA, 19 nt, Homo sapiens
  misc_RNA (1)...(19): siRNA sense strand
cuucagcucuuggguuuag

SEQ ID NO: 458041 - RNA, 19 nt, Homo sapiens
  misc_RNA (1)...(19): siRNA sense strand
ccacugaagaagcgaaauc

SEQ ID NO: 458042 - RNA, 19 nt, Homo sapiens
  misc_RNA (1)...(19): siRNA sense strand
cauccuuaacugagaauga

SEQ ID NO: 458043 - RNA, 19 nt, Homo sapiens
  misc_RNA (1)...(19): siRNA sense strand
gcagcaucuucagcucuug

SEQ ID NO: 458044 - RNA, 19 nt, Homo sapiens
  misc_RNA (1)...(19): siRNA sense strand
cugcauccuuaacugagaa

SEQ ID NO: 458045 - RNA, 19 nt, Homo sapiens
  misc_RNA (1)...(19): siRNA sense strand
gcauguaaaccacugaaga

SEQ ID NO: 458046 - RNA, 19 nt, Homo sapiens
  misc_RNA (1)...(19): siRNA sense strand
cauguaaaccacugaagaa

SEQ ID NO: 458047 - RNA, 19 nt, Homo sapiens
  misc_RNA (1)...(19): siRNA sense strand
gcucuuggguuuagcaaaa

SEQ ID NO: 458048 - RNA, 19 nt, Homo sapiens
  misc_RNA (1)...(19): siRNA sense strand
aaaucugucugaugcaugu

SEQ ID NO: 458049 - RNA, 19 nt, Homo sapiens
  misc_RNA (1)...(19): siRNA sense strand
ggcagcaucuucagcucuu

SEQ ID NO: 458050 - RNA, 19 nt, Homo sapiens
  misc_RNA (1)...(19): siRNA sense strand
cuucagcucuuggguuuag

SEQ ID NO: 458051 - RNA, 19 nt, Homo sapiens
  misc_RNA (1)...(19): siRNA sense strand
ccacugaagaagcgaaauc

SEQ ID NO: 458052 - RNA, 19 nt, Homo sapiens
  misc_RNA (1)...(19): siRNA sense strand
cauccuuaacugagaauga

SEQ ID NO: 458053 - RNA, 19 nt, Homo sapiens
  misc_RNA (1)...(19): siRNA sense strand
gcagcaucuucagcucuug

SEQ ID NO: 458054 - RNA, 19 nt, Homo sapiens
  misc_RNA (1)...(19): siRNA sense strand
cugcauccuuaacugagaa

SEQ ID NO: 458055 - RNA, 19 nt, Homo sapiens
  misc_RNA (1)...(19): siRNA sense strand
gcauguaaaccacugaaga

SEQ ID NO: 458056 - RNA, 19 nt, Homo sapiens
  misc_RNA (1)...(19): siRNA sense strand
cauguaaaccacugaagaa

SEQ ID NO: 458057 - RNA, 19 nt, Homo sapiens
  misc_RNA (1)...(19): siRNA sense strand
gcucuuggguuuagcaaaa

SEQ ID NO: 458058 - RNA, 19 nt, Homo sapiens
  misc_RNA (1)...(19): siRNA sense strand
aaaucugucugaugcaugu

SEQ ID NO: 458059 - RNA, 19 nt, Homo sapiens
  misc_RNA (1)...(19): siRNA sense strand
ggcagcaucuucagcucuu

SEQ ID NO: 458060 - RNA, 19 nt, Homo sapiens
  misc_RNA (1)...(19): siRNA sense strand
cuucagcucuuggguuuag

SEQ ID NO: 458061 - RNA, 19 nt, Homo sapiens
  misc_RNA (1)...(19): siRNA sense strand
ccacugaagaagcgaaauc

SEQ ID NO: 458062 - RNA, 19 nt, Homo sapiens
  misc_RNA (1)...(19): siRNA sense strand
cauccuuaacugagaauga

SEQ ID NO: 458063 - RNA, 19 nt, Homo sapiens
  misc_RNA (1)...(19): siRNA sense strand
gcagcaucuucagcucuug

SEQ ID NO: 458064 - RNA, 19 nt, Homo sapiens
  misc_RNA (1)...(19): siRNA sense strand
cugcauccuuaacugagaa

SEQ ID NO: 458065 - RNA, 19 nt, Homo sapiens
  misc_RNA (1)...(19): siRNA sense strand
gcauguaaaccacugaaga

SEQ ID NO: 458066 - RNA, 19 nt, Homo sapiens
  misc_RNA (1)...(19): siRNA sense strand
cauguaaaccacugaagaa

SEQ ID NO: 458067 - RNA, 19 nt, Homo sapiens
  misc_RNA (1)...(19): siRNA sense strand
gcucuuggguuuagcaaaa

SEQ ID NO: 458068 - RNA, 19 nt, Homo sapiens
  misc_RNA (1)...(19): siRNA sense strand
aaaucugucugaugcaugu

SEQ ID NO: 458069 - RNA, 19 nt, Homo sapiens
  misc_RNA (1)...(19): siRNA sense strand
ggcagcaucuucagcucuu

SEQ ID NO: 458070 - RNA, 19 nt, Homo sapiens
  misc_RNA (1)...(19): siRNA sense strand
cuucagcucuuggguuuag

SEQ ID NO: 458071 - RNA, 19 nt, Homo sapiens
  misc_RNA (1)...(19): siRNA sense strand
ccacugaagaagcgaaauc

SEQ ID NO: 458072 - RNA, 19 nt, Homo sapiens
  misc_RNA (1)...(19): siRNA sense strand
cauccuuaacugagaauga

SEQ ID NO: 458073 - RNA, 19 nt, Homo sapiens
  misc_RNA (1)...(19): siRNA sense strand
gcagcaucuucagcucuug

SEQ ID NO: 458074 - RNA, 19 nt, Homo sapiens
  misc_RNA (1)...(19): siRNA sense strand
cugcauccuuaacugagaa

SEQ ID NO: 458075 - RNA, 19 nt, Homo sapiens
  misc_RNA (1)...(19): siRNA sense strand
gcauguaaaccacugaaga

SEQ ID NO: 458076 - RNA, 19 nt, Homo sapiens
  misc_RNA (1)...(19): siRNA sense strand
cauguaaaccacugaagaa

SEQ ID NO: 458077 - RNA, 19 nt, Homo sapiens
  misc_RNA (1)...(19): siRNA sense strand
gcucuuggguuuagcaaaa

SEQ ID NO: 458078 - RNA, 19 nt, Homo sapiens
  misc_RNA (1)...(19): siRNA sense strand
aaaucugucugaugcaugu

SEQ ID NO: 458079 - RNA, 19 nt, Homo sapiens
  misc_RNA (1)...(19): siRNA sense strand
ggcagcaucuucagcucuu

SEQ ID NO: 458080 - RNA, 19 nt, Homo sapiens
  misc_RNA (1)...(19): siRNA sense strand
cuucagcucuuggguuuag

SEQ ID NO: 458081 - RNA, 19 nt, Homo sapiens
  misc_RNA (1)...(19): siRNA sense strand
ccacugaagaagcgaaauc

SEQ ID NO: 458082 - RNA, 19 nt, Homo sapiens
  misc_RNA (1)...(19): siRNA sense strand
cauccuuaacugagaauga

SEQ ID NO: 458083 - RNA, 19 nt, Homo sapiens
  misc_RNA (1)...(19): siRNA sense strand
gcagcaucuucagcucuug

SEQ ID NO: 458084 - RNA, 19 nt, Homo sapiens
  misc_RNA (1)...(19): siRNA sense strand
cugcauccuuaacugagaa

SEQ ID NO: 458085 - RNA, 19 nt, Homo sapiens
  misc_RNA (1)...(19): siRNA sense strand
gcauguaaaccacugaaga

SEQ ID NO: 458086 - RNA, 19 nt, Homo sapiens
  misc_RNA (1)...(19): siRNA sense strand
cauguaaaccacugaagaa

SEQ ID NO: 458087 - RNA, 19 nt, Homo sapiens
  misc_RNA (1)...(19): siRNA sense strand
gcucuuggguuuagcaaaa

SEQ ID NO: 458088 - RNA, 19 nt, Homo sapiens
  misc_RNA (1)...(19): siRNA sense strand
aaaucugucugaugcaugu

SEQ ID NO: 458089 - RNA, 19 nt, Homo sapiens
  misc_RNA (1)...(19): siRNA sense strand
ggcagcaucuucagcucuu

SEQ ID NO: 458090 - RNA, 19 nt, Homo sapiens
  misc_RNA (1)...(19): siRNA sense strand
cuucagcucuuggguuuag

SEQ ID NO: 458091 - RNA, 19 nt, Homo sapiens
  misc_RNA (1)...(19): siRNA sense strand
ccacugaagaagcgaaauc

SEQ ID NO: 458092 - RNA, 19 nt, Homo sapiens
  misc_RNA (1)...(19): siRNA sense strand
cauccuuaacugagaauga

SEQ ID NO: 458093 - RNA, 19 nt, Homo sapiens
  misc_RNA (1)...(19): siRNA sense strand
gcagcaucuucagcucuug

SEQ ID NO: 458094 - RNA, 19 nt, Homo sapiens
  misc_RNA (1)...(19): siRNA sense strand
cugcauccuuaacugagaa

SEQ ID NO: 458095 - RNA, 19 nt, Homo sapiens
  misc_RNA (1)...(19): siRNA sense strand
gcauguaaaccacugaaga

SEQ ID NO: 458096 - RNA, 19 nt, Homo sapiens
  misc_RNA (1)...(19): siRNA sense strand
cauguaaaccacugaagaa

SEQ ID NO: 458097 - RNA, 19 nt, Homo sapiens
  misc_RNA (1)...(19): siRNA sense strand
gcucuuggguuuagcaaaa

SEQ ID NO: 458098 - RNA, 19 nt, Homo sapiens
  misc_RNA (1)...(19): siRNA sense strand
aaaucugucugaugcaugu

SEQ ID NO: 458099 - RNA, 19 nt, Homo sapiens
  misc_RNA (1)...(19): siRNA sense strand
ggcagcaucuucagcucuu

SEQ ID NO: 458100 - RNA, 19 nt, Homo sapiens
  misc_RNA (1)...(19): siRNA sense strand
cuucagcucuuggguuuag

SEQ ID NO: 458101 - RNA, 19 nt, Homo sapiens
  misc_RNA (1)...(19): siRNA sense strand
ccacugaagaagcgaaauc

SEQ ID NO: 458102 - RNA, 19 nt, Homo sapiens
  misc_RNA (1)...(19): siRNA sense strand
cauccuuaacugagaauga

SEQ ID NO: 458103 - RNA, 19 nt, Homo sapiens
  misc_RNA (1)...(19): siRNA sense strand
gcagcaucuucagcucuug

SEQ ID NO: 458104 - RNA, 19 nt, Homo sapiens
  misc_RNA (1)...(19): siRNA sense strand
cugcauccuuaacugagaa

SEQ ID NO: 458105 - RNA, 19 nt, Homo sapiens
  misc_RNA (1)...(19): siRNA sense strand
gcauguaaaccacugaaga

SEQ ID NO: 458106 - RNA, 19 nt, Homo sapiens
  misc_RNA (1)...(19): siRNA sense strand
cauguaaaccacugaagaa

SEQ ID NO: 458107 - RNA, 19 nt, Homo sapiens
  misc_RNA (1)...(19): siRNA sense strand
gcucuuggguuuagcaaaa

SEQ ID NO: 458108 - RNA, 19 nt, Homo sapiens
  misc_RNA (1)...(19): siRNA sense strand
aaaucugucugaugcaugu

SEQ ID NO: 458109 - RNA, 19 nt, Homo sapiens
  misc_RNA (1)...(19): siRNA sense strand
ggcagcaucuucagcucuu

SEQ ID NO: 458110 - RNA, 19 nt, Homo sapiens
  misc_RNA (1)...(19): siRNA sense strand
cuucagcucuuggguuuag

SEQ ID NO: 458111 - RNA, 19 nt, Homo sapiens
  misc_RNA (1)...(19): siRNA sense strand
ccacugaagaagcgaaauc

SEQ ID NO: 458112 - RNA, 19 nt, Homo sapiens
  misc_RNA (1)...(19): siRNA sense strand
cauccuuaacugagaauga

SEQ ID NO: 458113 - RNA, 19 nt, Homo sapiens
  misc_RNA (1)...(19): siRNA sense strand
gcagcaucuucagcucuug

SEQ ID NO: 458114 - RNA, 19 nt, Homo sapiens
  misc_RNA (1)...(19): siRNA sense strand
cugcauccuuaacugagaa

SEQ ID NO: 458115 - RNA, 19 nt, Homo sapiens
  misc_RNA (1)...(19): siRNA sense strand
guacagggcuccagaagua

SEQ ID NO: 458116 - RNA, 19 nt, Homo sapiens
  misc_RNA (1)...(19): siRNA sense strand
gcucaaccaugccaaugua

SEQ ID NO: 458117 - RNA, 19 nt, Homo sapiens
  misc_RNA (1)...(19): siRNA sense strand
aaacacggcuucuuucauc

SEQ ID NO: 458118 - RNA, 19 nt, Homo sapiens
  misc_RNA (1)...(19): siRNA sense strand
ucacaaacacggcuucuuu

SEQ ID NO: 458119 - RNA, 19 nt, Homo sapiens
  misc_RNA (1)...(19): siRNA sense strand
ccugaaggcuaucaacuuu

SEQ ID NO: 458120 - RNA, 19 nt, Homo sapiens
  misc_RNA (1)...(19): siRNA sense strand
gaaguacuccugaggucua

SEQ ID NO: 458121 - RNA, 19 nt, Homo sapiens
  misc_RNA (1)...(19): siRNA sense strand
ggaauaucauguaucagau

SEQ ID NO: 458122 - RNA, 19 nt, Homo sapiens
  misc_RNA (1)...(19): siRNA sense strand
gaccagaacuugugaaaau

SEQ ID NO: 458123 - RNA, 19 nt, Homo sapiens
  misc_RNA (1)...(19): siRNA sense strand
uacaaggacucgcauuuau

SEQ ID NO: 458124 - RNA, 19 nt, Homo sapiens
  misc_RNA (1)...(19): siRNA sense strand
ggacucgcauuuauucaca

SEQ ID NO: 458125 - RNA, 19 nt, Homo sapiens
  misc_RNA (1)...(19): siRNA sense strand
gggagcugaucgcuauuaa

SEQ ID NO: 458126 - RNA, 19 nt, Homo sapiens
  misc_RNA (1)...(19): siRNA sense strand
gaauagauacacaacaauc

SEQ ID NO: 458127 - RNA, 19 nt, Homo sapiens
  misc_RNA (1)...(19): siRNA sense strand
uuacaaggacucgcauuua

SEQ ID NO: 458128 - RNA, 19 nt, Homo sapiens
  misc_RNA (1)...(19): siRNA sense strand
caaggacucgcauuuauuc

SEQ ID NO: 458129 - RNA, 19 nt, Homo sapiens
  misc_RNA (1)...(19): siRNA sense strand
ccaauaacuuaaagaccuu

SEQ ID NO: 458130 - RNA, 19 nt, Homo sapiens
  misc_RNA (1)...(19): siRNA sense strand
gccaauguagucaaauuaa

SEQ ID NO: 458131 - RNA, 19 nt, Homo sapiens
  misc_RNA (1)...(19): siRNA sense strand
guguguacccaauaacuua

SEQ ID NO: 458132 - RNA, 19 nt, Homo sapiens
  misc_RNA (1)...(19): siRNA sense strand
aaaccuccauauacagauu

SEQ ID NO: 458133 - RNA, 19 nt, Homo sapiens
  misc_RNA (1)...(19): siRNA sense strand
cuucuuucaucgagacuua

SEQ ID NO: 458134 - RNA, 19 nt, Homo sapiens
  misc_RNA (1)...(19): siRNA sense strand
gagcugaucgcuauuaaaa

SEQ ID NO: 458135 - RNA, 19 nt, Homo sapiens
  misc_RNA (1)...(19): siRNA sense strand
gaucaaaaccuccauauac

SEQ ID NO: 458136 - RNA, 19 nt, Homo sapiens
  misc_RNA (1)...(19): siRNA sense strand
gcuauaaggaauaucaugu

SEQ ID NO: 458137 - RNA, 19 nt, Homo sapiens
  misc_RNA (1)...(19): siRNA sense strand
gggaaaaugaucaucuuua

SEQ ID NO: 458138 - RNA, 19 nt, Homo sapiens
  misc_RNA (1)...(19): siRNA sense strand
ccaugccaauguagucaaa

SEQ ID NO: 458139 - RNA, 19 nt, Homo sapiens
  misc_RNA (1)...(19): siRNA sense strand
aagaaacgaccaacagcua

SEQ ID NO: 458140 - RNA, 19 nt, Homo sapiens
  misc_RNA (1)...(19): siRNA sense strand
caucauggcagaaguuuac

SEQ ID NO: 458141 - RNA, 19 nt, Homo sapiens
  misc_RNA (1)...(19): siRNA sense strand
ugguuuggcccgagaaaua

SEQ ID NO: 458142 - RNA, 19 nt, Homo sapiens
  misc_RNA (1)...(19): siRNA sense strand
uucgggagguuaagucuuu

SEQ ID NO: 458143 - RNA, 19 nt, Homo sapiens
  misc_RNA (1)...(19): siRNA sense strand
aaucuuuaccagcucauua

SEQ ID NO: 458144 - RNA, 19 nt, Homo sapiens
  misc_RNA (1)...(19): siRNA sense strand
acaaggacucgcauuuauu

SEQ ID NO: 458145 - RNA, 19 nt, Homo sapiens
  misc_RNA (1)...(19): siRNA sense strand
aggaauaucauguaucaga

SEQ ID NO: 458146 - RNA, 19 nt, Homo sapiens
  misc_RNA (1)...(19): siRNA sense strand
gaaacgaccaacagcuagu

SEQ ID NO: 458147 - RNA, 19 nt, Homo sapiens
  misc_RNA (1)...(19): siRNA sense strand
uaaguuguuuccugagucu

SEQ ID NO: 458148 - RNA, 19 nt, Homo sapiens
  misc_RNA (1)...(19): siRNA sense strand
ggagcugaucgcuauuaaa

SEQ ID NO: 458149 - RNA, 19 nt, Homo sapiens
  misc_RNA (1)...(19): siRNA sense strand
ucgcauuuauucacaaaca

SEQ ID NO: 458150 - RNA, 19 nt, Homo sapiens
  misc_RNA (1)...(19): siRNA sense strand
caguccagcuccugagaga

SEQ ID NO: 458151 - RNA, 19 nt, Homo sapiens
  misc_RNA (1)...(19): siRNA sense strand
gaaguuaucagggaaaaug

SEQ ID NO: 458152 - RNA, 19 nt, Homo sapiens
  misc_RNA (1)...(19): siRNA sense strand
gaagcucaaccaugccaau

SEQ ID NO: 458153 - RNA, 19 nt, Homo sapiens
  misc_RNA (1)...(19): siRNA sense strand
gggaccagaacuugugaaa

SEQ ID NO: 458154 - RNA, 19 nt, Homo sapiens
  misc_RNA (1)...(19): siRNA sense strand
gcaucauggcagaaguuua

SEQ ID NO: 458155 - RNA, 19 nt, Homo sapiens
  misc_RNA (1)...(19): siRNA sense strand
gggaagaagcauugagucu

SEQ ID NO: 458156 - RNA, 19 nt, Homo sapiens
  misc_RNA (1)...(19): siRNA sense strand
caaacacggcuucuuucau

SEQ ID NO: 458157 - RNA, 19 nt, Homo sapiens
  misc_RNA (1)...(19): siRNA sense strand
aauaaguuguuuccugagu

SEQ ID NO: 458158 - RNA, 19 nt, Homo sapiens
  misc_RNA (1)...(19): siRNA sense strand
cugagaaccuccucugcau

SEQ ID NO: 458159 - RNA, 19 nt, Homo sapiens
  misc_RNA (1)...(19): siRNA sense strand
ugccaauguagucaaauua

SEQ ID NO: 458160 - RNA, 19 nt, Homo sapiens
  misc_RNA (1)...(19): siRNA sense strand
uaccagcucauuaaagaga

SEQ ID NO: 458161 - RNA, 19 nt, Homo sapiens
  misc_RNA (1)...(19): siRNA sense strand
caaccaugccaauguaguc

SEQ ID NO: 458162 - RNA, 19 nt, Homo sapiens
  misc_RNA (1)...(19): siRNA sense strand
ccugaggucuaccaacuac

SEQ ID NO: 458163 - RNA, 19 nt, Homo sapiens
  misc_RNA (1)...(19): siRNA sense strand
gaaaauugcagacuuuggu

SEQ ID NO: 458164 - RNA, 19 nt, Homo sapiens
  misc_RNA (1)...(19): siRNA sense strand
ugagucugcuauaaggaau

SEQ ID NO: 458165 - RNA, 19 nt, Homo sapiens
  misc_RNA (1)...(19): siRNA sense strand
augccaauguagucaaauu

SEQ ID NO: 458166 - RNA, 19 nt, Homo sapiens
  misc_RNA (1)...(19): siRNA sense strand
acaaacacggcuucuuuca

SEQ ID NO: 458167 - RNA, 19 nt, Homo sapiens
  misc_RNA (1)...(19): siRNA sense strand
ucgaguacaugaaggaaaa

SEQ ID NO: 458168 - RNA, 19 nt, Homo sapiens
  misc_RNA (1)...(19): siRNA sense strand
cccgagaaauacgaucaaa

SEQ ID NO: 458169 - RNA, 19 nt, Homo sapiens
  misc_RNA (1)...(19): siRNA sense strand
ugugaaaauugcagacuuu

SEQ ID NO: 458170 - RNA, 19 nt, Homo sapiens
  misc_RNA (1)...(19): siRNA sense strand
aaagaaguuaucagggaaa

SEQ ID NO: 458171 - RNA, 19 nt, Homo sapiens
  misc_RNA (1)...(19): siRNA sense strand
ccagcucauuaaagagaga

SEQ ID NO: 458172 - RNA, 19 nt, Homo sapiens
  misc_RNA (1)...(19): siRNA sense strand
ggaggaaugcaugaaccuu

SEQ ID NO: 458173 - RNA, 19 nt, Homo sapiens
  misc_RNA (1)...(19): siRNA sense strand
uuuccugagucugcuauaa

SEQ ID NO: 458174 - RNA, 19 nt, Homo sapiens
  misc_RNA (1)...(19): siRNA sense strand
gcaugggaccagaacuugu

SEQ ID NO: 458175 - RNA, 19 nt, Homo sapiens
  misc_RNA (1)...(19): siRNA sense strand
acucgcauuuauucacaaa

SEQ ID NO: 458176 - RNA, 19 nt, Homo sapiens
  misc_RNA (1)...(19): siRNA sense strand
cacaaacacggcuucuuuc

SEQ ID NO: 458177 - RNA, 19 nt, Homo sapiens
  misc_RNA (1)...(19): siRNA sense strand
ucccaaugcuagcagugaa

SEQ ID NO: 458178 - RNA, 19 nt, Homo sapiens
  misc_RNA (1)...(19): siRNA sense strand
aagacugacuggccugaag

SEQ ID NO: 458179 - RNA, 19 nt, Homo sapiens
  misc_RNA (1)...(19): siRNA sense strand
caaaaccuccauauacaga

SEQ ID NO: 458180 - RNA, 19 nt, Homo sapiens
  misc_RNA (1)...(19): siRNA sense strand
aaauugcagacuuugguuu

SEQ ID NO: 458181 - RNA, 19 nt, Homo sapiens
  misc_RNA (1)...(19): siRNA sense strand
caugggaccagaacuugug

SEQ ID NO: 458182 - RNA, 19 nt, Homo sapiens
  misc_RNA (1)...(19): siRNA sense strand
agaccuugauucccaaugc

SEQ ID NO: 458183 - RNA, 19 nt, Homo sapiens
  misc_RNA (1)...(19): siRNA sense strand
guacagggcuccagaagua

SEQ ID NO: 458184 - RNA, 19 nt, Homo sapiens
  misc_RNA (1)...(19): siRNA sense strand
gcucaaccaugccaaugua

SEQ ID NO: 458185 - RNA, 19 nt, Homo sapiens
  misc_RNA (1)...(19): siRNA sense strand
aaacacggcuucuuucauc

SEQ ID NO: 458186 - RNA, 19 nt, Homo sapiens
  misc_RNA (1)...(19): siRNA sense strand
ucacaaacacggcuucuuu

SEQ ID NO: 458187 - RNA, 19 nt, Homo sapiens
  misc_RNA (1)...(19): siRNA sense strand
ccugaaggcuaucaacuuu

SEQ ID NO: 458188 - RNA, 19 nt, Homo sapiens
  misc_RNA (1)...(19): siRNA sense strand
gaaguacuccugaggucua

SEQ ID NO: 458189 - RNA, 19 nt, Homo sapiens
  misc_RNA (1)...(19): siRNA sense strand
ggaauaucauguaucagau

SEQ ID NO: 458190 - RNA, 19 nt, Homo sapiens
  misc_RNA (1)...(19): siRNA sense strand
gaccagaacuugugaaaau

SEQ ID NO: 458191 - RNA, 19 nt, Homo sapiens
  misc_RNA (1)...(19): siRNA sense strand
uacaaggacucgcauuuau

SEQ ID NO: 458192 - RNA, 19 nt, Homo sapiens
  misc_RNA (1)...(19): siRNA sense strand
ggacucgcauuuauucaca

SEQ ID NO: 458193 - RNA, 19 nt, Homo sapiens
  misc_RNA (1)...(19): siRNA sense strand
gggagcugaucgcuauuaa

SEQ ID NO: 458194 - RNA, 19 nt, Homo sapiens
  misc_RNA (1)...(19): siRNA sense strand
gaauagauacacaacaauc

SEQ ID NO: 458195 - RNA, 19 nt, Homo sapiens
  misc_RNA (1)...(19): siRNA sense strand
uuacaaggacucgcauuua

SEQ ID NO: 458196 - RNA, 19 nt, Homo sapiens
  misc_RNA (1)...(19): siRNA sense strand
caaggacucgcauuuauuc

SEQ ID NO: 458197 - RNA, 19 nt, Homo sapiens
  misc_RNA (1)...(19): siRNA sense strand
ccaauaacuuaaagaccuu

SEQ ID NO: 458198 - RNA, 19 nt, Homo sapiens
  misc_RNA (1)...(19): siRNA sense strand
gccaauguagucaaauuaa

SEQ ID NO: 458199 - RNA, 19 nt, Homo sapiens
  misc_RNA (1)...(19): siRNA sense strand
guguguacccaauaacuua

SEQ ID NO: 458200 - RNA, 19 nt, Homo sapiens
  misc_RNA (1)...(19): siRNA sense strand
aaaccuccauauacagauu

SEQ ID NO: 458201 - RNA, 19 nt, Homo sapiens
  misc_RNA (1)...(19): siRNA sense strand
cuucuuucaucgagacuua

SEQ ID NO: 458202 - RNA, 19 nt, Homo sapiens
  misc_RNA (1)...(19): siRNA sense strand
gagcugaucgcuauuaaaa

SEQ ID NO: 458203 - RNA, 19 nt, Homo sapiens
  misc_RNA (1)...(19): siRNA sense strand
gaucaaaaccuccauauac

SEQ ID NO: 458204 - RNA, 19 nt, Homo sapiens
  misc_RNA (1)...(19): siRNA sense strand
gcuauaaggaauaucaugu

SEQ ID NO: 458205 - RNA, 19 nt, Homo sapiens
  misc_RNA (1)...(19): siRNA sense strand
gggaaaaugaucaucuuua

SEQ ID NO: 458206 - RNA, 19 nt, Homo sapiens
  misc_RNA (1)...(19): siRNA sense strand
ccaugccaauguagucaaa

SEQ ID NO: 458207 - RNA, 19 nt, Homo sapiens
  misc_RNA (1)...(19): siRNA sense strand
aagaaacgaccaacagcua

SEQ ID NO: 458208 - RNA, 19 nt, Homo sapiens
  misc_RNA (1)...(19): siRNA sense strand
caucauggcagaaguuuac

SEQ ID NO: 458209 - RNA, 19 nt, Homo sapiens
  misc_RNA (1)...(19): siRNA sense strand
ugguuuggcccgagaaaua

SEQ ID NO: 458210 - RNA, 19 nt, Homo sapiens
  misc_RNA (1)...(19): siRNA sense strand
uucgggagguuaagucuuu

SEQ ID NO: 458211 - RNA, 19 nt, Homo sapiens
  misc_RNA (1)...(19): siRNA sense strand
aaucuuuaccagcucauua

SEQ ID NO: 458212 - RNA, 19 nt, Homo sapiens
  misc_RNA (1)...(19): siRNA sense strand
acaaggacucgcauuuauu

SEQ ID NO: 458213 - RNA, 19 nt, Homo sapiens
  misc_RNA (1)...(19): siRNA sense strand
aggaauaucauguaucaga

SEQ ID NO: 458214 - RNA, 19 nt, Homo sapiens
  misc_RNA (1)...(19): siRNA sense strand
gaaacgaccaacagcuagu

SEQ ID NO: 458215 - RNA, 19 nt, Homo sapiens
  misc_RNA (1)...(19): siRNA sense strand
uaaguuguuuccugagucu

SEQ ID NO: 458216 - RNA, 19 nt, Homo sapiens
  misc_RNA (1)...(19): siRNA sense strand
ggagcugaucgcuauuaaa

SEQ ID NO: 458217 - RNA, 19 nt, Homo sapiens
  misc_RNA (1)...(19): siRNA sense strand
ucgcauuuauucacaaaca

SEQ ID NO: 458218 - RNA, 19 nt, Homo sapiens
  misc_RNA (1)...(19): siRNA sense strand
caguccagcuccugagaga

SEQ ID NO: 458219 - RNA, 19 nt, Homo sapiens
  misc_RNA (1)...(19): siRNA sense strand
gaaguuaucagggaaaaug

SEQ ID NO: 458220 - RNA, 19 nt, Homo sapiens
  misc_RNA (1)...(19): siRNA sense strand
gaagcucaaccaugccaau

SEQ ID NO: 458221 - RNA, 19 nt, Homo sapiens
  misc_RNA (1)...(19): siRNA sense strand
gggaccagaacuugugaaa

SEQ ID NO: 458222 - RNA, 19 nt, Homo sapiens
  misc_RNA (1)...(19): siRNA sense strand
gcaucauggcagaaguuua

SEQ ID NO: 458223 - RNA, 19 nt, Homo sapiens
  misc_RNA (1)...(19): siRNA sense strand
gggaagaagcauugagucu

SEQ ID NO: 458224 - RNA, 19 nt, Homo sapiens
  misc_RNA (1)...(19): siRNA sense strand
caaacacggcuucuuucau

SEQ ID NO: 458225 - RNA, 19 nt, Homo sapiens
  misc_RNA (1)...(19): siRNA sense strand
aauaaguuguuuccugagu

SEQ ID NO: 458226 - RNA, 19 nt, Homo sapiens
  misc_RNA (1)...(19): siRNA sense strand
cugagaaccuccucugcau

SEQ ID NO: 458227 - RNA, 19 nt, Homo sapiens
  misc_RNA (1)...(19): siRNA sense strand
ugccaauguagucaaauua

SEQ ID NO: 458228 - RNA, 19 nt, Homo sapiens
  misc_RNA (1)...(19): siRNA sense strand
uaccagcucauuaaagaga

SEQ ID NO: 458229 - RNA, 19 nt, Homo sapiens
  misc_RNA (1)...(19): siRNA sense strand
caaccaugccaauguaguc

SEQ ID NO: 458230 - RNA, 19 nt, Homo sapiens
  misc_RNA (1)...(19): siRNA sense strand
ccugaggucuaccaacuac

SEQ ID NO: 458231 - RNA, 19 nt, Homo sapiens
  misc_RNA (1)...(19): siRNA sense strand
gaaaauugcagacuuuggu

SEQ ID NO: 458232 - RNA, 19 nt, Homo sapiens
  misc_RNA (1)...(19): siRNA sense strand
ugagucugcuauaaggaau

SEQ ID NO: 458233 - RNA, 19 nt, Homo sapiens
  misc_RNA (1)...(19): siRNA sense strand
augccaauguagucaaauu

SEQ ID NO: 458234 - RNA, 19 nt, Homo sapiens
  misc_RNA (1)...(19): siRNA sense strand
acaaacacggcuucuuuca

SEQ ID NO: 458235 - RNA, 19 nt, Homo sapiens
  misc_RNA (1)...(19): siRNA sense strand
ucgaguacaugaaggaaaa

SEQ ID NO: 458236 - RNA, 19 nt, Homo sapiens
  misc_RNA (1)...(19): siRNA sense strand
cccgagaaauacgaucaaa

SEQ ID NO: 458237 - RNA, 19 nt, Homo sapiens
  misc_RNA (1)...(19): siRNA sense strand
ugugaaaauugcagacuuu

SEQ ID NO: 458238 - RNA, 19 nt, Homo sapiens
  misc_RNA (1)...(19): siRNA sense strand
aaagaaguuaucagggaaa

SEQ ID NO: 458239 - RNA, 19 nt, Homo sapiens
  misc_RNA (1)...(19): siRNA sense strand
ccagcucauuaaagagaga

SEQ ID NO: 458240 - RNA, 19 nt, Homo sapiens
  misc_RNA (1)...(19): siRNA sense strand
ggaggaaugcaugaaccuu

SEQ ID NO: 458241 - RNA, 19 nt, Homo sapiens
  misc_RNA (1)...(19): siRNA sense strand
uuuccugagucugcuauaa

SEQ ID NO: 458242 - RNA, 19 nt, Homo sapiens
  misc_RNA (1)...(19): siRNA sense strand
gcaugggaccagaacuugu

SEQ ID NO: 458243 - RNA, 19 nt, Homo sapiens
  misc_RNA (1)...(19): siRNA sense strand
acucgcauuuauucacaaa

SEQ ID NO: 458244 - RNA, 19 nt, Homo sapiens
  misc_RNA (1)...(19): siRNA sense strand
cacaaacacggcuucuuuc

SEQ ID NO: 458245 - RNA, 19 nt, Homo sapiens
  misc_RNA (1)...(19): siRNA sense strand
ucccaaugcuagcagugaa

SEQ ID NO: 458246 - RNA, 19 nt, Homo sapiens
  misc_RNA (1)...(19): siRNA sense strand
aagacugacuggccugaag

SEQ ID NO: 458247 - RNA, 19 nt, Homo sapiens
  misc_RNA (1)...(19): siRNA sense strand
caaaaccuccauauacaga

SEQ ID NO: 458248 - RNA, 19 nt, Homo sapiens
  misc_RNA (1)...(19): siRNA sense strand
aaauugcagacuuugguuu

SEQ ID NO: 458249 - RNA, 19 nt, Homo sapiens
  misc_RNA (1)...(19): siRNA sense strand
caugggaccagaacuugug

SEQ ID NO: 458250 - RNA, 19 nt, Homo sapiens
  misc_RNA (1)...(19): siRNA sense strand
agaccuugauucccaaugc

SEQ ID NO: 458251 - RNA, 19 nt, Homo sapiens
  misc_RNA (1)...(19): siRNA sense strand
guacagggcuccagaagua

SEQ ID NO: 458252 - RNA, 19 nt, Homo sapiens
  misc_RNA (1)...(19): siRNA sense strand
gcucaaccaugccaaugua

SEQ ID NO: 458253 - RNA, 19 nt, Homo sapiens
  misc_RNA (1)...(19): siRNA sense strand
aaacacggcuucuuucauc

SEQ ID NO: 458254 - RNA, 19 nt, Homo sapiens
  misc_RNA (1)...(19): siRNA sense strand
ucacaaacacggcuucuuu

SEQ ID NO: 458255 - RNA, 19 nt, Homo sapiens
  misc_RNA (1)...(19): siRNA sense strand
ccugaaggcuaucaacuuu

SEQ ID NO: 458256 - RNA, 19 nt, Homo sapiens
  misc_RNA (1)...(19): siRNA sense strand
gaaguacuccugaggucua

SEQ ID NO: 458257 - RNA, 19 nt, Homo sapiens
  misc_RNA (1)...(19): siRNA sense strand
ggaauaucauguaucagau

SEQ ID NO: 458258 - RNA, 19 nt, Homo sapiens
  misc_RNA (1)...(19): siRNA sense strand
gaccagaacuugugaaaau

SEQ ID NO: 458259 - RNA, 19 nt, Homo sapiens
  misc_RNA (1)...(19): siRNA sense strand
uacaaggacucgcauuuau

SEQ ID NO: 458260 - RNA, 19 nt, Homo sapiens
  misc_RNA (1)...(19): siRNA sense strand
ggacucgcauuuauucaca

SEQ ID NO: 458261 - RNA, 19 nt, Homo sapiens
  misc_RNA (1)...(19): siRNA sense strand
gggagcugaucgcuauuaa

SEQ ID NO: 458262 - RNA, 19 nt, Homo sapiens
  misc_RNA (1)...(19): siRNA sense strand
gaauagauacacaacaauc

SEQ ID NO: 458263 - RNA, 19 nt, Homo sapiens
  misc_RNA (1)...(19): siRNA sense strand
uuacaaggacucgcauuua

SEQ ID NO: 458264 - RNA, 19 nt, Homo sapiens
  misc_RNA (1)...(19): siRNA sense strand
caaggacucgcauuuauuc

SEQ ID NO: 458265 - RNA, 19 nt, Homo sapiens
  misc_RNA (1)...(19): siRNA sense strand
ccaauaacuuaaagaccuu

SEQ ID NO: 458266 - RNA, 19 nt, Homo sapiens
  misc_RNA (1)...(19): siRNA sense strand
gccaauguagucaaauuaa

SEQ ID NO: 458267 - RNA, 19 nt, Homo sapiens
  misc_RNA (1)...(19): siRNA sense strand
guguguacccaauaacuua

SEQ ID NO: 458268 - RNA, 19 nt, Homo sapiens
  misc_RNA (1)...(19): siRNA sense strand
aaaccuccauauacagauu

SEQ ID NO: 458269 - RNA, 19 nt, Homo sapiens
  misc_RNA (1)...(19): siRNA sense strand
cuucuuucaucgagacuua

SEQ ID NO: 458270 - RNA, 19 nt, Homo sapiens
  misc_RNA (1)...(19): siRNA sense strand
gagcugaucgcuauuaaaa

SEQ ID NO: 458271 - RNA, 19 nt, Homo sapiens
  misc_RNA (1)...(19): siRNA sense strand
gaucaaaaccuccauauac

SEQ ID NO: 458272 - RNA, 19 nt, Homo sapiens
  misc_RNA (1)...(19): siRNA sense strand
gcuauaaggaauaucaugu

SEQ ID NO: 458273 - RNA, 19 nt, Homo sapiens
  misc_RNA (1)...(19): siRNA sense strand
gggaaaaugaucaucuuua

SEQ ID NO: 458274 - RNA, 19 nt, Homo sapiens
  misc_RNA (1)...(19): siRNA sense strand
ccaugccaauguagucaaa

SEQ ID NO: 458275 - RNA, 19 nt, Homo sapiens
  misc_RNA (1)...(19): siRNA sense strand
aagaaacgaccaacagcua

SEQ ID NO: 458276 - RNA, 19 nt, Homo sapiens
  misc_RNA (1)...(19): siRNA sense strand
caucauggcagaaguuuac

SEQ ID NO: 458277 - RNA, 19 nt, Homo sapiens
  misc_RNA (1)...(19): siRNA sense strand
ugguuuggcccgagaaaua

SEQ ID NO: 458278 - RNA, 19 nt, Homo sapiens
  misc_RNA (1)...(19): siRNA sense strand
uucgggagguuaagucuuu

SEQ ID NO: 458279 - RNA, 19 nt, Homo sapiens
  misc_RNA (1)...(19): siRNA sense strand
aaucuuuaccagcucauua

SEQ ID NO: 458280 - RNA, 19 nt, Homo sapiens
  misc_RNA (1)...(19): siRNA sense strand
acaaggacucgcauuuauu

SEQ ID NO: 458281 - RNA, 19 nt, Homo sapiens
  misc_RNA (1)...(19): siRNA sense strand
aggaauaucauguaucaga

SEQ ID NO: 458282 - RNA, 19 nt, Homo sapiens
  misc_RNA (1)...(19): siRNA sense strand
gaaacgaccaacagcuagu

SEQ ID NO: 458283 - RNA, 19 nt, Homo sapiens
  misc_RNA (1)...(19): siRNA sense strand
uaaguuguuuccugagucu

SEQ ID NO: 458284 - RNA, 19 nt, Homo sapiens
  misc_RNA (1)...(19): siRNA sense strand
ggagcugaucgcuauuaaa

SEQ ID NO: 458285 - RNA, 19 nt, Homo sapiens
  misc_RNA (1)...(19): siRNA sense strand
ucgcauuuauucacaaaca

SEQ ID NO: 458286 - RNA, 19 nt, Homo sapiens
  misc_RNA (1)...(19): siRNA sense strand
caguccagcuccugagaga

SEQ ID NO: 458287 - RNA, 19 nt, Homo sapiens
  misc_RNA (1)...(19): siRNA sense strand
gaaguuaucagggaaaaug

SEQ ID NO: 458288 - RNA, 19 nt, Homo sapiens
  misc_RNA (1)...(19): siRNA sense strand
gaagcucaaccaugccaau

SEQ ID NO: 458289 - RNA, 19 nt, Homo sapiens
  misc_RNA (1)...(19): siRNA sense strand
gggaccagaacuugugaaa

SEQ ID NO: 458290 - RNA, 19 nt, Homo sapiens
  misc_RNA (1)...(19): siRNA sense strand
gcaucauggcagaaguuua

SEQ ID NO: 458291 - RNA, 19 nt, Homo sapiens
  misc_RNA (1)...(19): siRNA sense strand
gggaagaagcauugagucu

SEQ ID NO: 458292 - RNA, 19 nt, Homo sapiens
  misc_RNA (1)...(19): siRNA sense strand
caaacacggcuucuuucau

SEQ ID NO: 458293 - RNA, 19 nt, Homo sapiens
  misc_RNA (1)...(19): siRNA sense strand
aauaaguuguuuccugagu

SEQ ID NO: 458294 - RNA, 19 nt, Homo sapiens
  misc_RNA (1)...(19): siRNA sense strand
cugagaaccuccucugcau

SEQ ID NO: 458295 - RNA, 19 nt, Homo sapiens
  misc_RNA (1)...(19): siRNA sense strand
ugccaauguagucaaauua

SEQ ID NO: 458296 - RNA, 19 nt, Homo sapiens
  misc_RNA (1)...(19): siRNA sense strand
uaccagcucauuaaagaga

SEQ ID NO: 458297 - RNA, 19 nt, Homo sapiens
  misc_RNA (1)...(19): siRNA sense strand
caaccaugccaauguaguc

SEQ ID NO: 458298 - RNA, 19 nt, Homo sapiens
  misc_RNA (1)...(19): siRNA sense strand
ccugaggucuaccaacuac

SEQ ID NO: 458299 - RNA, 19 nt, Homo sapiens
  misc_RNA (1)...(19): siRNA sense strand
gaaaauugcagacuuuggu

SEQ ID NO: 458300 - RNA, 19 nt, Homo sapiens
  misc_RNA (1)...(19): siRNA sense strand
ugagucugcuauaaggaau

SEQ ID NO: 458301 - RNA, 19 nt, Homo sapiens
  misc_RNA (1)...(19): siRNA sense strand
augccaauguagucaaauu

SEQ ID NO: 458302 - RNA, 19 nt, Homo sapiens
  misc_RNA (1)...(19): siRNA sense strand
acaaacacggcuucuuuca

SEQ ID NO: 458303 - RNA, 19 nt, Homo sapiens
  misc_RNA (1)...(19): siRNA sense strand
ucgaguacaugaaggaaaa

SEQ ID NO: 458304 - RNA, 19 nt, Homo sapiens
  misc_RNA (1)...(19): siRNA sense strand
cccgagaaauacgaucaaa

SEQ ID NO: 458305 - RNA, 19 nt, Homo sapiens
  misc_RNA (1)...(19): siRNA sense strand
ugugaaaauugcagacuuu

SEQ ID NO: 458306 - RNA, 19 nt, Homo sapiens
  misc_RNA (1)...(19): siRNA sense strand
aaagaaguuaucagggaaa

SEQ ID NO: 458307 - RNA, 19 nt, Homo sapiens
  misc_RNA (1)...(19): siRNA sense strand
ccagcucauuaaagagaga

SEQ ID NO: 458308 - RNA, 19 nt, Homo sapiens
  misc_RNA (1)...(19): siRNA sense strand
ggaggaaugcaugaaccuu

SEQ ID NO: 458309 - RNA, 19 nt, Homo sapiens
  misc_RNA (1)...(19): siRNA sense strand
uuuccugagucugcuauaa

SEQ ID NO: 458310 - RNA, 19 nt, Homo sapiens
  misc_RNA (1)...(19): siRNA sense strand
gcaugggaccagaacuugu

SEQ ID NO: 458311 - RNA, 19 nt, Homo sapiens
  misc_RNA (1)...(19): siRNA sense strand
acucgcauuuauucacaaa

SEQ ID NO: 458312 - RNA, 19 nt, Homo sapiens
  misc_RNA (1)...(19): siRNA sense strand
cacaaacacggcuucuuuc

SEQ ID NO: 458313 - RNA, 19 nt, Homo sapiens
  misc_RNA (1)...(19): siRNA sense strand
ucccaaugcuagcagugaa

SEQ ID NO: 458314 - RNA, 19 nt, Homo sapiens
  misc_RNA (1)...(19): siRNA sense strand
aagacugacuggccugaag

SEQ ID NO: 458315 - RNA, 19 nt, Homo sapiens
  misc_RNA (1)...(19): siRNA sense strand
caaaaccuccauauacaga

SEQ ID NO: 458316 - RNA, 19 nt, Homo sapiens
  misc_RNA (1)...(19): siRNA sense strand
aaauugcagacuuugguuu

SEQ ID NO: 458317 - RNA, 19 nt, Homo sapiens
  misc_RNA (1)...(19): siRNA sense strand
caugggaccagaacuugug

SEQ ID NO: 458318 - RNA, 19 nt, Homo sapiens
  misc_RNA (1)...(19): siRNA sense strand
agaccuugauucccaaugc

SEQ ID NO: 458319 - RNA, 19 nt, Homo sapiens
  misc_RNA (1)...(19): siRNA sense strand
gcagaaggcuaucagaaac

SEQ ID NO: 458320 - RNA, 19 nt, Homo sapiens
  misc_RNA (1)...(19): siRNA sense strand
ggaaacaucggccaugguu

SEQ ID NO: 458321 - RNA, 19 nt, Homo sapiens
  misc_RNA (1)...(19): siRNA sense strand
uggcaagaaucuccaguuu

SEQ ID NO: 458322 - RNA, 19 nt, Homo sapiens
  misc_RNA (1)...(19): siRNA sense strand
aaacaucggccaugguuga

SEQ ID NO: 458323 - RNA, 19 nt, Homo sapiens
  misc_RNA (1)...(19): siRNA sense strand
gccucgagcuggagaguuc

SEQ ID NO: 458324 - RNA, 19 nt, Homo sapiens
  misc_RNA (1)...(19): siRNA sense strand
ugagcaaagaaguaaguua

SEQ ID NO: 458325 - RNA, 19 nt, Homo sapiens
  misc_RNA (1)...(19): siRNA sense strand
gcaacugggugggguaauu

SEQ ID NO: 458326 - RNA, 19 nt, Homo sapiens
  misc_RNA (1)...(19): siRNA sense strand
gcagagagcagugggaaaa

SEQ ID NO: 458327 - RNA, 19 nt, Homo sapiens
  misc_RNA (1)...(19): siRNA sense strand
ugcagaaggcuaucagaaa

SEQ ID NO: 458328 - RNA, 19 nt, Homo sapiens
  misc_RNA (1)...(19): siRNA sense strand
gaaaaugccagaagaacuc

SEQ ID NO: 458329 - RNA, 19 nt, Homo sapiens
  misc_RNA (1)...(19): siRNA sense strand
ggaguuuccaggugucuag

SEQ ID NO: 458330 - RNA, 19 nt, Homo sapiens
  misc_RNA (1)...(19): siRNA sense strand
ggccaugguugauccaaaa

SEQ ID NO: 458331 - RNA, 19 nt, Homo sapiens
  misc_RNA (1)...(19): siRNA sense strand
cggccaugguugauccaaa

SEQ ID NO: 458332 - RNA, 19 nt, Homo sapiens
  misc_RNA (1)...(19): siRNA sense strand
guccagccgcagagaagua

SEQ ID NO: 458333 - RNA, 19 nt, Homo sapiens
  misc_RNA (1)...(19): siRNA sense strand
cuaggaaaaugccagaaga

SEQ ID NO: 458334 - RNA, 19 nt, Homo sapiens
  misc_RNA (1)...(19): siRNA sense strand
cgggaaagggagacgauug

SEQ ID NO: 458335 - RNA, 19 nt, Homo sapiens
  misc_RNA (1)...(19): siRNA sense strand
gcagaaggcuaucagaaac

SEQ ID NO: 458336 - RNA, 19 nt, Homo sapiens
  misc_RNA (1)...(19): siRNA sense strand
ggaaacaucggccaugguu

SEQ ID NO: 458337 - RNA, 19 nt, Homo sapiens
  misc_RNA (1)...(19): siRNA sense strand
uggcaagaaucuccaguuu

SEQ ID NO: 458338 - RNA, 19 nt, Homo sapiens
  misc_RNA (1)...(19): siRNA sense strand
aaacaucggccaugguuga

SEQ ID NO: 458339 - RNA, 19 nt, Homo sapiens
  misc_RNA (1)...(19): siRNA sense strand
gcagcagccuccugaccaa

SEQ ID NO: 458340 - RNA, 19 nt, Homo sapiens
  misc_RNA (1)...(19): siRNA sense strand
gccucgagcuggagaguuc

SEQ ID NO: 458341 - RNA, 19 nt, Homo sapiens
  misc_RNA (1)...(19): siRNA sense strand
ugagcaaagaaguaaguua

SEQ ID NO: 458342 - RNA, 19 nt, Homo sapiens
  misc_RNA (1)...(19): siRNA sense strand
gcaacugggugggguaauu

SEQ ID NO: 458343 - RNA, 19 nt, Homo sapiens
  misc_RNA (1)...(19): siRNA sense strand
gcagagagcagugggaaaa

SEQ ID NO: 458344 - RNA, 19 nt, Homo sapiens
  misc_RNA (1)...(19): siRNA sense strand
ugcagaaggcuaucagaaa

SEQ ID NO: 458345 - RNA, 19 nt, Homo sapiens
  misc_RNA (1)...(19): siRNA sense strand
gaaaaugccagaagaacuc

SEQ ID NO: 458346 - RNA, 19 nt, Homo sapiens
  misc_RNA (1)...(19): siRNA sense strand
ggaguuuccaggugucuag

SEQ ID NO: 458347 - RNA, 19 nt, Homo sapiens
  misc_RNA (1)...(19): siRNA sense strand
ggccaugguugauccaaaa

SEQ ID NO: 458348 - RNA, 19 nt, Homo sapiens
  misc_RNA (1)...(19): siRNA sense strand
cggccaugguugauccaaa

SEQ ID NO: 458349 - RNA, 19 nt, Homo sapiens
  misc_RNA (1)...(19): siRNA sense strand
gcagccuccugaccaaugc

SEQ ID NO: 458350 - RNA, 19 nt, Homo sapiens
  misc_RNA (1)...(19): siRNA sense strand
guccagccgcagagaagua

SEQ ID NO: 458351 - RNA, 19 nt, Homo sapiens
  misc_RNA (1)...(19): siRNA sense strand
cuaggaaaaugccagaaga

SEQ ID NO: 458352 - RNA, 19 nt, Homo sapiens
  misc_RNA (1)...(19): siRNA sense strand
cgggaaagggagacgauug

SEQ ID NO: 458353 - RNA, 19 nt, Homo sapiens
  misc_RNA (1)...(19): siRNA sense strand
ggaaugaaccugcugaaua

SEQ ID NO: 458354 - RNA, 19 nt, Homo sapiens
  misc_RNA (1)...(19): siRNA sense strand
gaaugaaccugcugaauac

SEQ ID NO: 458355 - RNA, 19 nt, Homo sapiens
  misc_RNA (1)...(19): siRNA sense strand
ucacugcucuuccuucuuu

SEQ ID NO: 458356 - RNA, 19 nt, Homo sapiens
  misc_RNA (1)...(19): siRNA sense strand
caaauccucuuuccucuau

SEQ ID NO: 458357 - RNA, 19 nt, Homo sapiens
  misc_RNA (1)...(19): siRNA sense strand
aggaauagcugcacgaauu

SEQ ID NO: 458358 - RNA, 19 nt, Homo sapiens
  misc_RNA (1)...(19): siRNA sense strand
uaacgaaggcaaaggaaua

SEQ ID NO: 458359 - RNA, 19 nt, Homo sapiens
  misc_RNA (1)...(19): siRNA sense strand
ccucagaucugcauauuuc

SEQ ID NO: 458360 - RNA, 19 nt, Homo sapiens
  misc_RNA (1)...(19): siRNA sense strand
caacccgacuccuguaauu

SEQ ID NO: 458361 - RNA, 19 nt, Homo sapiens
  misc_RNA (1)...(19): siRNA sense strand
ggaaauccauaucccaaag

SEQ ID NO: 458362 - RNA, 19 nt, Homo sapiens
  misc_RNA (1)...(19): siRNA sense strand
cacauaaaccuguuccuua

SEQ ID NO: 458363 - RNA, 19 nt, Homo sapiens
  misc_RNA (1)...(19): siRNA sense strand
ugaagaauguacuaacgaa

SEQ ID NO: 458364 - RNA, 19 nt, Homo sapiens
  misc_RNA (1)...(19): siRNA sense strand
ucagaauccuucacaauca

SEQ ID NO: 458365 - RNA, 19 nt, Homo sapiens
  misc_RNA (1)...(19): siRNA sense strand
uaacaaugcaggucuggua

SEQ ID NO: 458366 - RNA, 19 nt, Homo sapiens
  misc_RNA (1)...(19): siRNA sense strand
caaaccaccuccuucaaca

SEQ ID NO: 458367 - RNA, 19 nt, Homo sapiens
  misc_RNA (1)...(19): siRNA sense strand
gcauucaguuccaauuuca

SEQ ID NO: 458368 - RNA, 19 nt, Homo sapiens
  misc_RNA (1)...(19): siRNA sense strand
gaaugaagaccuuucgaau

SEQ ID NO: 458369 - RNA, 19 nt, Homo sapiens
  misc_RNA (1)...(19): siRNA sense strand
ccaccuccuucaacauaua

SEQ ID NO: 458370 - RNA, 19 nt, Homo sapiens
  misc_RNA (1)...(19): siRNA sense strand
cagcuugaguacuccuuua

SEQ ID NO: 458371 - RNA, 19 nt, Homo sapiens
  misc_RNA (1)...(19): siRNA sense strand
aaucaacuccucugcuuua

SEQ ID NO: 458372 - RNA, 19 nt, Homo sapiens
  misc_RNA (1)...(19): siRNA sense strand
gaccaacaauuuuccuuua

SEQ ID NO: 458373 - RNA, 19 nt, Homo sapiens
  misc_RNA (1)...(19): siRNA sense strand
auaccaaacccaacaguua

SEQ ID NO: 458374 - RNA, 19 nt, Homo sapiens
  misc_RNA (1)...(19): siRNA sense strand
cugauggguuuccuaguua

SEQ ID NO: 458375 - RNA, 19 nt, Homo sapiens
  misc_RNA (1)...(19): siRNA sense strand
ggaccucugucaucuucaa

SEQ ID NO: 458376 - RNA, 19 nt, Homo sapiens
  misc_RNA (1)...(19): siRNA sense strand
ccugauggguuuccuaguu

SEQ ID NO: 458377 - RNA, 19 nt, Homo sapiens
  misc_RNA (1)...(19): siRNA sense strand
aggaagaccuagccgcaua

SEQ ID NO: 458378 - RNA, 19 nt, Homo sapiens
  misc_RNA (1)...(19): siRNA sense strand
ggugugaacaguccucuuu

SEQ ID NO: 458379 - RNA, 19 nt, Homo sapiens
  misc_RNA (1)...(19): siRNA sense strand
ccaaugacaccaauuuaau

SEQ ID NO: 458380 - RNA, 19 nt, Homo sapiens
  misc_RNA (1)...(19): siRNA sense strand
ucacacaccucagccauca

SEQ ID NO: 458381 - RNA, 19 nt, Homo sapiens
  misc_RNA (1)...(19): siRNA sense strand
agaccuagccgcauaaaug

SEQ ID NO: 458382 - RNA, 19 nt, Homo sapiens
  misc_RNA (1)...(19): siRNA sense strand
ucaggucucuccagcuuga

SEQ ID NO: 458383 - RNA, 19 nt, Homo sapiens
  misc_RNA (1)...(19): siRNA sense strand
gacauugccuguacagucu

SEQ ID NO: 458384 - RNA, 19 nt, Homo sapiens
  misc_RNA (1)...(19): siRNA sense strand
caacccaaauucugcuuca

SEQ ID NO: 458385 - RNA, 19 nt, Homo sapiens
  misc_RNA (1)...(19): siRNA sense strand
ggaacaaucccaggaaauc

SEQ ID NO: 458386 - RNA, 19 nt, Homo sapiens
  misc_RNA (1)...(19): siRNA sense strand
uugcaagaauuacagcaua

SEQ ID NO: 458387 - RNA, 19 nt, Homo sapiens
  misc_RNA (1)...(19): siRNA sense strand
uuaaucaacuccucugcuu

SEQ ID NO: 458388 - RNA, 19 nt, Homo sapiens
  misc_RNA (1)...(19): siRNA sense strand
gauaucuucuuguggaaca

SEQ ID NO: 458389 - RNA, 19 nt, Homo sapiens
  misc_RNA (1)...(19): siRNA sense strand
gaacaguccucuuuugucu

SEQ ID NO: 458390 - RNA, 19 nt, Homo sapiens
  misc_RNA (1)...(19): siRNA sense strand
aaucauccuugcaagaauu

SEQ ID NO: 458391 - RNA, 19 nt, Homo sapiens
  misc_RNA (1)...(19): siRNA sense strand
caacuccucugcuuuaucc

SEQ ID NO: 458392 - RNA, 19 nt, Homo sapiens
  misc_RNA (1)...(19): siRNA sense strand
gcuguucucucagggcuuu

SEQ ID NO: 458393 - RNA, 19 nt, Homo sapiens
  misc_RNA (1)...(19): siRNA sense strand
cccaaauucugcuucauug

SEQ ID NO: 458394 - RNA, 19 nt, Homo sapiens
  misc_RNA (1)...(19): siRNA sense strand
gcacaagccgguuuaucau

SEQ ID NO: 458395 - RNA, 19 nt, Homo sapiens
  misc_RNA (1)...(19): siRNA sense strand
ggaagaccuagccgcauaa

SEQ ID NO: 458396 - RNA, 19 nt, Homo sapiens
  misc_RNA (1)...(19): siRNA sense strand
ucauggcacuuuagguuug

SEQ ID NO: 458397 - RNA, 19 nt, Homo sapiens
  misc_RNA (1)...(19): siRNA sense strand
ggcaauuaaucauccauca

SEQ ID NO: 458398 - RNA, 19 nt, Homo sapiens
  misc_RNA (1)...(19): siRNA sense strand
ucaaggaccucugucaucu

SEQ ID NO: 458399 - RNA, 19 nt, Homo sapiens
  misc_RNA (1)...(19): siRNA sense strand
ccaagugcuuauaacaaug

SEQ ID NO: 458400 - RNA, 19 nt, Homo sapiens
  misc_RNA (1)...(19): siRNA sense strand
ugcaagaauuacagcauaa

SEQ ID NO: 458401 - RNA, 19 nt, Homo sapiens
  misc_RNA (1)...(19): siRNA sense strand
guggaacaaucccaggaaa

SEQ ID NO: 458402 - RNA, 19 nt, Homo sapiens
  misc_RNA (1)...(19): siRNA sense strand
cauccaaugacaccaauuu

SEQ ID NO: 458403 - RNA, 19 nt, Homo sapiens
  misc_RNA (1)...(19): siRNA sense strand
acaccacgguccacucuug

SEQ ID NO: 458404 - RNA, 19 nt, Homo sapiens
  misc_RNA (1)...(19): siRNA sense strand
ccucaugguucuaauccuu

SEQ ID NO: 458405 - RNA, 19 nt, Homo sapiens
  misc_RNA (1)...(19): siRNA sense strand
aauccucuuuccucuauuu

SEQ ID NO: 458406 - RNA, 19 nt, Homo sapiens
  misc_RNA (1)...(19): siRNA sense strand
caacauccgugcccaucag

SEQ ID NO: 458407 - RNA, 19 nt, Homo sapiens
  misc_RNA (1)...(19): siRNA sense strand
ucaaagguccaucucauuc

SEQ ID NO: 458408 - RNA, 19 nt, Homo sapiens
  misc_RNA (1)...(19): siRNA sense strand
cccagcaagucaacucuuu

SEQ ID NO: 458409 - RNA, 19 nt, Homo sapiens
  misc_RNA (1)...(19): siRNA sense strand
gacauugggccgugcauau

SEQ ID NO: 458410 - RNA, 19 nt, Homo sapiens
  misc_RNA (1)...(19): siRNA sense strand
ccaccuccaccuccauaua

SEQ ID NO: 458411 - RNA, 19 nt, Homo sapiens
  misc_RNA (1)...(19): siRNA sense strand
cagcauucaguuccaauuu

SEQ ID NO: 458412 - RNA, 19 nt, Homo sapiens
  misc_RNA (1)...(19): siRNA sense strand
ggcaacccaucucuuaauc

SEQ ID NO: 458413 - RNA, 19 nt, Homo sapiens
  misc_RNA (1)...(19): siRNA sense strand
ugucaggucucuccagcuu

SEQ ID NO: 458414 - RNA, 19 nt, Homo sapiens
  misc_RNA (1)...(19): siRNA sense strand
gugcauauacuucaacauc

SEQ ID NO: 458415 - RNA, 19 nt, Homo sapiens
  misc_RNA (1)...(19): siRNA sense strand
ggacauugggccgugcaua

SEQ ID NO: 458416 - RNA, 19 nt, Homo sapiens
  misc_RNA (1)...(19): siRNA sense strand
ccucagccaucaauaccaa

SEQ ID NO: 458417 - RNA, 19 nt, Homo sapiens
  misc_RNA (1)...(19): siRNA sense strand
ccaccuccauauacuccua

SEQ ID NO: 458418 - RNA, 19 nt, Homo sapiens
  misc_RNA (1)...(19): siRNA sense strand
uuacauccauccacaguac

SEQ ID NO: 458419 - RNA, 19 nt, Homo sapiens
  misc_RNA (1)...(19): siRNA sense strand
cuucggcucuggaaagcua

SEQ ID NO: 458420 - RNA, 19 nt, Homo sapiens
  misc_RNA (1)...(19): siRNA sense strand
ugacaccaauuuaaucaac

SEQ ID NO: 458421 - RNA, 19 nt, Homo sapiens
  misc_RNA (1)...(19): siRNA sense strand
aaauucugcuucauuguca

SEQ ID NO: 458422 - RNA, 19 nt, Homo sapiens
  misc_RNA (1)...(19): siRNA sense strand
ccacugcaccuguuacauc

SEQ ID NO: 458423 - RNA, 19 nt, Homo sapiens
  misc_RNA (1)...(19): siRNA sense strand
uuacuucuuugaccaacaa

SEQ ID NO: 458424 - RNA, 19 nt, Homo sapiens
  misc_RNA (1)...(19): siRNA sense strand
ugaaccugcugaauacugu

SEQ ID NO: 458425 - RNA, 19 nt, Homo sapiens
  misc_RNA (1)...(19): siRNA sense strand
caaucauccuugcaagaau

SEQ ID NO: 458426 - RNA, 19 nt, Homo sapiens
  misc_RNA (1)...(19): siRNA sense strand
cuugaguacuccuuuaaau

SEQ ID NO: 458427 - RNA, 19 nt, Homo sapiens
  misc_RNA (1)...(19): siRNA sense strand
ggugaagaauguacuaacg

SEQ ID NO: 458428 - RNA, 19 nt, Homo sapiens
  misc_RNA (1)...(19): siRNA sense strand
caaauucugcuucauuguc

SEQ ID NO: 458429 - RNA, 19 nt, Homo sapiens
  misc_RNA (1)...(19): siRNA sense strand
ccacauaaaccuguuccuu

SEQ ID NO: 458430 - RNA, 19 nt, Homo sapiens
  misc_RNA (1)...(19): siRNA sense strand
accaagugcuuauaacaau

SEQ ID NO: 458431 - RNA, 19 nt, Homo sapiens
  misc_RNA (1)...(19): siRNA sense strand
ugaguacuccuuuaaaugg

SEQ ID NO: 458432 - RNA, 19 nt, Homo sapiens
  misc_RNA (1)...(19): siRNA sense strand
gaucugcauauuucaucua

SEQ ID NO: 458433 - RNA, 19 nt, Homo sapiens
  misc_RNA (1)...(19): siRNA sense strand
caaugacaccaauuuaauc

SEQ ID NO: 458434 - RNA, 19 nt, Homo sapiens
  misc_RNA (1)...(19): siRNA sense strand
caaaaccuauacagaauca

SEQ ID NO: 458435 - RNA, 19 nt, Homo sapiens
  misc_RNA (1)...(19): siRNA sense strand
uaccucagaucugcauauu

SEQ ID NO: 458436 - RNA, 19 nt, Homo sapiens
  misc_RNA (1)...(19): siRNA sense strand
ggauucgccucagcauuca

SEQ ID NO: 458437 - RNA, 19 nt, Homo sapiens
  misc_RNA (1)...(19): siRNA sense strand
cauccgugcccaucaguuu

SEQ ID NO: 458438 - RNA, 19 nt, Homo sapiens
  misc_RNA (1)...(19): siRNA sense strand
gaagaccuagccgcauaaa

SEQ ID NO: 458439 - RNA, 19 nt, Homo sapiens
  misc_RNA (1)...(19): siRNA sense strand
acaaucauccuugcaagaa

SEQ ID NO: 458440 - RNA, 19 nt, Homo sapiens
  misc_RNA (1)...(19): siRNA sense strand
aaggaccucugucaucuuc

SEQ ID NO: 458441 - RNA, 19 nt, Homo sapiens
  misc_RNA (1)...(19): siRNA sense strand
ucucauggcacuuuagguu

SEQ ID NO: 458442 - RNA, 19 nt, Homo sapiens
  misc_RNA (1)...(19): siRNA sense strand
uccaaugacaccaauuuaa

SEQ ID NO: 458443 - RNA, 19 nt, Homo sapiens
  misc_RNA (1)...(19): siRNA sense strand
gacauccaaugacaccaau

SEQ ID NO: 458444 - RNA, 19 nt, Homo sapiens
  misc_RNA (1)...(19): siRNA sense strand
aaccaccuccuucaacaua

SEQ ID NO: 458445 - RNA, 19 nt, Homo sapiens
  misc_RNA (1)...(19): siRNA sense strand
cagaauccuucacaaucau

SEQ ID NO: 458446 - RNA, 19 nt, Homo sapiens
  misc_RNA (1)...(19): siRNA sense strand
uuuaucaucuggacuucaa

SEQ ID NO: 458447 - RNA, 19 nt, Homo sapiens
  misc_RNA (1)...(19): siRNA sense strand
acaagccgguuuaucaucu

SEQ ID NO: 458448 - RNA, 19 nt, Homo sapiens
  misc_RNA (1)...(19): siRNA sense strand
acuggcaacccaucucuua

SEQ ID NO: 458449 - RNA, 19 nt, Homo sapiens
  misc_RNA (1)...(19): siRNA sense strand
cuucuuugaccaacaauuu

SEQ ID NO: 458450 - RNA, 19 nt, Homo sapiens
  misc_RNA (1)...(19): siRNA sense strand
cuucaaagguccaucucau

SEQ ID NO: 458451 - RNA, 19 nt, Homo sapiens
  misc_RNA (1)...(19): siRNA sense strand
gcauuugcuucuacuucug

SEQ ID NO: 458452 - RNA, 19 nt, Homo sapiens
  misc_RNA (1)...(19): siRNA sense strand
augcaggucugguaccauu

SEQ ID NO: 458453 - RNA, 19 nt, Homo sapiens
  misc_RNA (1)...(19): siRNA sense strand
ggaaugaaccugcugaaua

SEQ ID NO: 458454 - RNA, 19 nt, Homo sapiens
  misc_RNA (1)...(19): siRNA sense strand
gaaugaaccugcugaauac

SEQ ID NO: 458455 - RNA, 19 nt, Homo sapiens
  misc_RNA (1)...(19): siRNA sense strand
ucacugcucuuccuucuuu

SEQ ID NO: 458456 - RNA, 19 nt, Homo sapiens
  misc_RNA (1)...(19): siRNA sense strand
caaauccucuuuccucuau

SEQ ID NO: 458457 - RNA, 19 nt, Homo sapiens
  misc_RNA (1)...(19): siRNA sense strand
aggaauagcugcacgaauu

SEQ ID NO: 458458 - RNA, 19 nt, Homo sapiens
  misc_RNA (1)...(19): siRNA sense strand
uaacgaaggcaaaggaaua

SEQ ID NO: 458459 - RNA, 19 nt, Homo sapiens
  misc_RNA (1)...(19): siRNA sense strand
ccucagaucugcauauuuc

SEQ ID NO: 458460 - RNA, 19 nt, Homo sapiens
  misc_RNA (1)...(19): siRNA sense strand
caacccgacuccuguaauu

SEQ ID NO: 458461 - RNA, 19 nt, Homo sapiens
  misc_RNA (1)...(19): siRNA sense strand
ggaaauccauaucccaaag

SEQ ID NO: 458462 - RNA, 19 nt, Homo sapiens
  misc_RNA (1)...(19): siRNA sense strand
cacauaaaccuguuccuua

SEQ ID NO: 458463 - RNA, 19 nt, Homo sapiens
  misc_RNA (1)...(19): siRNA sense strand
ugaagaauguacuaacgaa

SEQ ID NO: 458464 - RNA, 19 nt, Homo sapiens
  misc_RNA (1)...(19): siRNA sense strand
ucagaauccuucacaauca

SEQ ID NO: 458465 - RNA, 19 nt, Homo sapiens
  misc_RNA (1)...(19): siRNA sense strand
uaacaaugcaggucuggua

SEQ ID NO: 458466 - RNA, 19 nt, Homo sapiens
  misc_RNA (1)...(19): siRNA sense strand
caaaccaccuccuucaaca

SEQ ID NO: 458467 - RNA, 19 nt, Homo sapiens
  misc_RNA (1)...(19): siRNA sense strand
gcauucaguuccaauuuca

SEQ ID NO: 458468 - RNA, 19 nt, Homo sapiens
  misc_RNA (1)...(19): siRNA sense strand
gaaugaagaccuuucgaau

SEQ ID NO: 458469 - RNA, 19 nt, Homo sapiens
  misc_RNA (1)...(19): siRNA sense strand
ccaccuccuucaacauaua

SEQ ID NO: 458470 - RNA, 19 nt, Homo sapiens
  misc_RNA (1)...(19): siRNA sense strand
cagcuugaguacuccuuua

SEQ ID NO: 458471 - RNA, 19 nt, Homo sapiens
  misc_RNA (1)...(19): siRNA sense strand
aaucaacuccucugcuuua

SEQ ID NO: 458472 - RNA, 19 nt, Homo sapiens
  misc_RNA (1)...(19): siRNA sense strand
gaccaacaauuuuccuuua

SEQ ID NO: 458473 - RNA, 19 nt, Homo sapiens
  misc_RNA (1)...(19): siRNA sense strand
auaccaaacccaacaguua

SEQ ID NO: 458474 - RNA, 19 nt, Homo sapiens
  misc_RNA (1)...(19): siRNA sense strand
cugauggguuuccuaguua

SEQ ID NO: 458475 - RNA, 19 nt, Homo sapiens
  misc_RNA (1)...(19): siRNA sense strand
ggaccucugucaucuucaa

SEQ ID NO: 458476 - RNA, 19 nt, Homo sapiens
  misc_RNA (1)...(19): siRNA sense strand
ccugauggguuuccuaguu

SEQ ID NO: 458477 - RNA, 19 nt, Homo sapiens
  misc_RNA (1)...(19): siRNA sense strand
aggaagaccuagccgcaua

SEQ ID NO: 458478 - RNA, 19 nt, Homo sapiens
  misc_RNA (1)...(19): siRNA sense strand
ggugugaacaguccucuuu

SEQ ID NO: 458479 - RNA, 19 nt, Homo sapiens
  misc_RNA (1)...(19): siRNA sense strand
ccaaugacaccaauuuaau

SEQ ID NO: 458480 - RNA, 19 nt, Homo sapiens
  misc_RNA (1)...(19): siRNA sense strand
ucacacaccucagccauca

SEQ ID NO: 458481 - RNA, 19 nt, Homo sapiens
  misc_RNA (1)...(19): siRNA sense strand
agaccuagccgcauaaaug

SEQ ID NO: 458482 - RNA, 19 nt, Homo sapiens
  misc_RNA (1)...(19): siRNA sense strand
ucaggucucuccagcuuga

SEQ ID NO: 458483 - RNA, 19 nt, Homo sapiens
  misc_RNA (1)...(19): siRNA sense strand
gacauugccuguacagucu

SEQ ID NO: 458484 - RNA, 19 nt, Homo sapiens
  misc_RNA (1)...(19): siRNA sense strand
caacccaaauucugcuuca

SEQ ID NO: 458485 - RNA, 19 nt, Homo sapiens
  misc_RNA (1)...(19): siRNA sense strand
ggaacaaucccaggaaauc

SEQ ID NO: 458486 - RNA, 19 nt, Homo sapiens
  misc_RNA (1)...(19): siRNA sense strand
uugcaagaauuacagcaua

SEQ ID NO: 458487 - RNA, 19 nt, Homo sapiens
  misc_RNA (1)...(19): siRNA sense strand
uuaaucaacuccucugcuu

SEQ ID NO: 458488 - RNA, 19 nt, Homo sapiens
  misc_RNA (1)...(19): siRNA sense strand
gauaucuucuuguggaaca

SEQ ID NO: 458489 - RNA, 19 nt, Homo sapiens
  misc_RNA (1)...(19): siRNA sense strand
gaacaguccucuuuugucu

SEQ ID NO: 458490 - RNA, 19 nt, Homo sapiens
  misc_RNA (1)...(19): siRNA sense strand
aaucauccuugcaagaauu

SEQ ID NO: 458491 - RNA, 19 nt, Homo sapiens
  misc_RNA (1)...(19): siRNA sense strand
caacuccucugcuuuaucc

SEQ ID NO: 458492 - RNA, 19 nt, Homo sapiens
  misc_RNA (1)...(19): siRNA sense strand
gcuguucucucagggcuuu

SEQ ID NO: 458493 - RNA, 19 nt, Homo sapiens
  misc_RNA (1)...(19): siRNA sense strand
cccaaauucugcuucauug

SEQ ID NO: 458494 - RNA, 19 nt, Homo sapiens
  misc_RNA (1)...(19): siRNA sense strand
gcacaagccgguuuaucau

SEQ ID NO: 458495 - RNA, 19 nt, Homo sapiens
  misc_RNA (1)...(19): siRNA sense strand
ggaagaccuagccgcauaa

SEQ ID NO: 458496 - RNA, 19 nt, Homo sapiens
  misc_RNA (1)...(19): siRNA sense strand
ucauggcacuuuagguuug

SEQ ID NO: 458497 - RNA, 19 nt, Homo sapiens
  misc_RNA (1)...(19): siRNA sense strand
ggcaauuaaucauccauca

SEQ ID NO: 458498 - RNA, 19 nt, Homo sapiens
  misc_RNA (1)...(19): siRNA sense strand
ucaaggaccucugucaucu

SEQ ID NO: 458499 - RNA, 19 nt, Homo sapiens
  misc_RNA (1)...(19): siRNA sense strand
ccaagugcuuauaacaaug

SEQ ID NO: 458500 - RNA, 19 nt, Homo sapiens
  misc_RNA (1)...(19): siRNA sense strand
ugcaagaauuacagcauaa

SEQ ID NO: 458501 - RNA, 19 nt, Homo sapiens
  misc_RNA (1)...(19): siRNA sense strand
guggaacaaucccaggaaa

SEQ ID NO: 458502 - RNA, 19 nt, Homo sapiens
  misc_RNA (1)...(19): siRNA sense strand
cauccaaugacaccaauuu

SEQ ID NO: 458503 - RNA, 19 nt, Homo sapiens
  misc_RNA (1)...(19): siRNA sense strand
acaccacgguccacucuug

SEQ ID NO: 458504 - RNA, 19 nt, Homo sapiens
  misc_RNA (1)...(19): siRNA sense strand
ccucaugguucuaauccuu

SEQ ID NO: 458505 - RNA, 19 nt, Homo sapiens
  misc_RNA (1)...(19): siRNA sense strand
aauccucuuuccucuauuu

SEQ ID NO: 458506 - RNA, 19 nt, Homo sapiens
  misc_RNA (1)...(19): siRNA sense strand
caacauccgugcccaucag

SEQ ID NO: 458507 - RNA, 19 nt, Homo sapiens
  misc_RNA (1)...(19): siRNA sense strand
ucaaagguccaucucauuc

SEQ ID NO: 458508 - RNA, 19 nt, Homo sapiens
  misc_RNA (1)...(19): siRNA sense strand
cccagcaagucaacucuuu

SEQ ID NO: 458509 - RNA, 19 nt, Homo sapiens
  misc_RNA (1)...(19): siRNA sense strand
gacauugggccgugcauau

SEQ ID NO: 458510 - RNA, 19 nt, Homo sapiens
  misc_RNA (1)...(19): siRNA sense strand
ccaccuccaccuccauaua

SEQ ID NO: 458511 - RNA, 19 nt, Homo sapiens
  misc_RNA (1)...(19): siRNA sense strand
cagcauucaguuccaauuu

SEQ ID NO: 458512 - RNA, 19 nt, Homo sapiens
  misc_RNA (1)...(19): siRNA sense strand
ggcaacccaucucuuaauc

SEQ ID NO: 458513 - RNA, 19 nt, Homo sapiens
  misc_RNA (1)...(19): siRNA sense strand
ugucaggucucuccagcuu

SEQ ID NO: 458514 - RNA, 19 nt, Homo sapiens
  misc_RNA (1)...(19): siRNA sense strand
gugcauauacuucaacauc

SEQ ID NO: 458515 - RNA, 19 nt, Homo sapiens
  misc_RNA (1)...(19): siRNA sense strand
ggacauugggccgugcaua

SEQ ID NO: 458516 - RNA, 19 nt, Homo sapiens
  misc_RNA (1)...(19): siRNA sense strand
ccucagccaucaauaccaa

SEQ ID NO: 458517 - RNA, 19 nt, Homo sapiens
  misc_RNA (1)...(19): siRNA sense strand
ccaccuccauauacuccua

SEQ ID NO: 458518 - RNA, 19 nt, Homo sapiens
  misc_RNA (1)...(19): siRNA sense strand
uuacauccauccacaguac

SEQ ID NO: 458519 - RNA, 19 nt, Homo sapiens
  misc_RNA (1)...(19): siRNA sense strand
cuucggcucuggaaagcua

SEQ ID NO: 458520 - RNA, 19 nt, Homo sapiens
  misc_RNA (1)...(19): siRNA sense strand
ugacaccaauuuaaucaac

SEQ ID NO: 458521 - RNA, 19 nt, Homo sapiens
  misc_RNA (1)...(19): siRNA sense strand
aaauucugcuucauuguca

SEQ ID NO: 458522 - RNA, 19 nt, Homo sapiens
  misc_RNA (1)...(19): siRNA sense strand
ccacugcaccuguuacauc

SEQ ID NO: 458523 - RNA, 19 nt, Homo sapiens
  misc_RNA (1)...(19): siRNA sense strand
uuacuucuuugaccaacaa

SEQ ID NO: 458524 - RNA, 19 nt, Homo sapiens
  misc_RNA (1)...(19): siRNA sense strand
ugaaccugcugaauacugu

SEQ ID NO: 458525 - RNA, 19 nt, Homo sapiens
  misc_RNA (1)...(19): siRNA sense strand
caaucauccuugcaagaau

SEQ ID NO: 458526 - RNA, 19 nt, Homo sapiens
  misc_RNA (1)...(19): siRNA sense strand
cuugaguacuccuuuaaau

SEQ ID NO: 458527 - RNA, 19 nt, Homo sapiens
  misc_RNA (1)...(19): siRNA sense strand
ggugaagaauguacuaacg

SEQ ID NO: 458528 - RNA, 19 nt, Homo sapiens
  misc_RNA (1)...(19): siRNA sense strand
caaauucugcuucauuguc

SEQ ID NO: 458529 - RNA, 19 nt, Homo sapiens
  misc_RNA (1)...(19): siRNA sense strand
ccacauaaaccuguuccuu

SEQ ID NO: 458530 - RNA, 19 nt, Homo sapiens
  misc_RNA (1)...(19): siRNA sense strand
accaagugcuuauaacaau

SEQ ID NO: 458531 - RNA, 19 nt, Homo sapiens
  misc_RNA (1)...(19): siRNA sense strand
ugaguacuccuuuaaaugg

SEQ ID NO: 458532 - RNA, 19 nt, Homo sapiens
  misc_RNA (1)...(19): siRNA sense strand
gaucugcauauuucaucua

SEQ ID NO: 458533 - RNA, 19 nt, Homo sapiens
  misc_RNA (1)...(19): siRNA sense strand
caaugacaccaauuuaauc

SEQ ID NO: 458534 - RNA, 19 nt, Homo sapiens
  misc_RNA (1)...(19): siRNA sense strand
caaaaccuauacagaauca

SEQ ID NO: 458535 - RNA, 19 nt, Homo sapiens
  misc_RNA (1)...(19): siRNA sense strand
uaccucagaucugcauauu

SEQ ID NO: 458536 - RNA, 19 nt, Homo sapiens
  misc_RNA (1)...(19): siRNA sense strand
ggauucgccucagcauuca

SEQ ID NO: 458537 - RNA, 19 nt, Homo sapiens
  misc_RNA (1)...(19): siRNA sense strand
cauccgugcccaucaguuu

SEQ ID NO: 458538 - RNA, 19 nt, Homo sapiens
  misc_RNA (1)...(19): siRNA sense strand
gaagaccuagccgcauaaa

SEQ ID NO: 458539 - RNA, 19 nt, Homo sapiens
  misc_RNA (1)...(19): siRNA sense strand
acaaucauccuugcaagaa

SEQ ID NO: 458540 - RNA, 19 nt, Homo sapiens
  misc_RNA (1)...(19): siRNA sense strand
aaggaccucugucaucuuc

SEQ ID NO: 458541 - RNA, 19 nt, Homo sapiens
  misc_RNA (1)...(19): siRNA sense strand
ucucauggcacuuuagguu

SEQ ID NO: 458542 - RNA, 19 nt, Homo sapiens
  misc_RNA (1)...(19): siRNA sense strand
uccaaugacaccaauuuaa

SEQ ID NO: 458543 - RNA, 19 nt, Homo sapiens
  misc_RNA (1)...(19): siRNA sense strand
gacauccaaugacaccaau

SEQ ID NO: 458544 - RNA, 19 nt, Homo sapiens
  misc_RNA (1)...(19): siRNA sense strand
aaccaccuccuucaacaua

SEQ ID NO: 458545 - RNA, 19 nt, Homo sapiens
  misc_RNA (1)...(19): siRNA sense strand
cagaauccuucacaaucau

SEQ ID NO: 458546 - RNA, 19 nt, Homo sapiens
  misc_RNA (1)...(19): siRNA sense strand
uuuaucaucuggacuucaa

SEQ ID NO: 458547 - RNA, 19 nt, Homo sapiens
  misc_RNA (1)...(19): siRNA sense strand
acaagccgguuuaucaucu

SEQ ID NO: 458548 - RNA, 19 nt, Homo sapiens
  misc_RNA (1)...(19): siRNA sense strand
acuggcaacccaucucuua

SEQ ID NO: 458549 - RNA, 19 nt, Homo sapiens
  misc_RNA (1)...(19): siRNA sense strand
cuucuuugaccaacaauuu

SEQ ID NO: 458550 - RNA, 19 nt, Homo sapiens
  misc_RNA (1)...(19): siRNA sense strand
cuucaaagguccaucucau

SEQ ID NO: 458551 - RNA, 19 nt, Homo sapiens
  misc_RNA (1)...(19): siRNA sense strand
gcauuugcuucuacuucug

SEQ ID NO: 458552 - RNA, 19 nt, Homo sapiens
  misc_RNA (1)...(19): siRNA sense strand
augcaggucugguaccauu

SEQ ID NO: 458553 - RNA, 19 nt, Homo sapiens
  misc_RNA (1)...(19): siRNA sense strand
uaacaugacuugcagauuu

SEQ ID NO: 458554 - RNA, 19 nt, Homo sapiens
  misc_RNA (1)...(19): siRNA sense strand
guacugaaaucccaccuua

SEQ ID NO: 458555 - RNA, 19 nt, Homo sapiens
  misc_RNA (1)...(19): siRNA sense strand
gcagugaaaccaucuguua

SEQ ID NO: 458556 - RNA, 19 nt, Homo sapiens
  misc_RNA (1)...(19): siRNA sense strand
gcagauggcucuuuguaca

SEQ ID NO: 458557 - RNA, 19 nt, Homo sapiens
  misc_RNA (1)...(19): siRNA sense strand
caacaaauuucuccuguac

SEQ ID NO: 458558 - RNA, 19 nt, Homo sapiens
  misc_RNA (1)...(19): siRNA sense strand
ugaaacagauuacgagugu

SEQ ID NO: 458559 - RNA, 19 nt, Homo sapiens
  misc_RNA (1)...(19): siRNA sense strand
gaauauggacgcugauaga

SEQ ID NO: 458560 - RNA, 19 nt, Homo sapiens
  misc_RNA (1)...(19): siRNA sense strand
gaaaucccaccuuauguga

SEQ ID NO: 458561 - RNA, 19 nt, Homo sapiens
  misc_RNA (1)...(19): siRNA sense strand
caauuggacuggaggcuau

SEQ ID NO: 458562 - RNA, 19 nt, Homo sapiens
  misc_RNA (1)...(19): siRNA sense strand
gaacuucaucauuaacaug

SEQ ID NO: 458563 - RNA, 19 nt, Homo sapiens
  misc_RNA (1)...(19): siRNA sense strand
caccuuaugugaugaagug

SEQ ID NO: 458564 - RNA, 19 nt, Homo sapiens
  misc_RNA (1)...(19): siRNA sense strand
uguauagacugcacaacaa

SEQ ID NO: 458565 - RNA, 19 nt, Homo sapiens
  misc_RNA (1)...(19): siRNA sense strand
acaacaaauuucuccugua

SEQ ID NO: 458566 - RNA, 19 nt, Homo sapiens
  misc_RNA (1)...(19): siRNA sense strand
cagcagauggcucuuugua

SEQ ID NO: 458567 - RNA, 19 nt, Homo sapiens
  misc_RNA (1)...(19): siRNA sense strand
gaaacagauuacgagugua

SEQ ID NO: 458568 - RNA, 19 nt, Homo sapiens
  misc_RNA (1)...(19): siRNA sense strand
gcagcuuccugaaacagau

SEQ ID NO: 458569 - RNA, 19 nt, Homo sapiens
  misc_RNA (1)...(19): siRNA sense strand
ggacuggaggcuauaagug

SEQ ID NO: 458570 - RNA, 19 nt, Homo sapiens
  misc_RNA (1)...(19): siRNA sense strand
gauggcucuuuguacauuu

SEQ ID NO: 458571 - RNA, 19 nt, Homo sapiens
  misc_RNA (1)...(19): siRNA sense strand
cauuggaguuggcuauguu

SEQ ID NO: 458572 - RNA, 19 nt, Homo sapiens
  misc_RNA (1)...(19): siRNA sense strand
ggaagccugucacuuuuga

SEQ ID NO: 458573 - RNA, 19 nt, Homo sapiens
  misc_RNA (1)...(19): siRNA sense strand
aaucccaccuuaugugaug

SEQ ID NO: 458574 - RNA, 19 nt, Homo sapiens
  misc_RNA (1)...(19): siRNA sense strand
ggaauauggacgcugauag

SEQ ID NO: 458575 - RNA, 19 nt, Homo sapiens
  misc_RNA (1)...(19): siRNA sense strand
gggaauauggacgcugaua

SEQ ID NO: 458576 - RNA, 19 nt, Homo sapiens
  misc_RNA (1)...(19): siRNA sense strand
gaugaaguguccgagcaau

SEQ ID NO: 458577 - RNA, 19 nt, Homo sapiens
  misc_RNA (1)...(19): siRNA sense strand
guauagacugcacaacaaa

SEQ ID NO: 458578 - RNA, 19 nt, Homo sapiens
  misc_RNA (1)...(19): siRNA sense strand
ugaaaucccaccuuaugug

SEQ ID NO: 458579 - RNA, 19 nt, Homo sapiens
  misc_RNA (1)...(19): siRNA sense strand
uuaccuguguugaucaaga

SEQ ID NO: 458580 - RNA, 19 nt, Homo sapiens
  misc_RNA (1)...(19): siRNA sense strand
ccaaaaugcuauauugcaa

SEQ ID NO: 458581 - RNA, 19 nt, Homo sapiens
  misc_RNA (1)...(19): siRNA sense strand
gagcagaccguuucuaccu

SEQ ID NO: 458582 - RNA, 19 nt, Homo sapiens
  misc_RNA (1)...(19): siRNA sense strand
agauggcucuuuguacauu

SEQ ID NO: 458583 - RNA, 19 nt, Homo sapiens
  misc_RNA (1)...(19): siRNA sense strand
gauagacguccugcucauu

SEQ ID NO: 458584 - RNA, 19 nt, Homo sapiens
  misc_RNA (1)...(19): siRNA sense strand
cuacggcucuggcucuaag

SEQ ID NO: 458585 - RNA, 19 nt, Homo sapiens
  misc_RNA (1)...(19): siRNA sense strand
aaauuucuccuguaccuau

SEQ ID NO: 458586 - RNA, 19 nt, Homo sapiens
  misc_RNA (1)...(19): siRNA sense strand
aaccaucuguuaccugugu

SEQ ID NO: 458587 - RNA, 19 nt, Homo sapiens
  misc_RNA (1)...(19): siRNA sense strand
acaaauuucuccuguaccu

SEQ ID NO: 458588 - RNA, 19 nt, Homo sapiens
  misc_RNA (1)...(19): siRNA sense strand
ccaaaagaacuucaucauu

SEQ ID NO: 458589 - RNA, 19 nt, Homo sapiens
  misc_RNA (1)...(19): siRNA sense strand
augggaagccugucacuuu

SEQ ID NO: 458590 - RNA, 19 nt, Homo sapiens
  misc_RNA (1)...(19): siRNA sense strand
acugaaaucccaccuuaug

SEQ ID NO: 458591 - RNA, 19 nt, Homo sapiens
  misc_RNA (1)...(19): siRNA sense strand
uagacugcacaacaaauuu

SEQ ID NO: 458592 - RNA, 19 nt, Homo sapiens
  misc_RNA (1)...(19): siRNA sense strand
aaacagauuacgaguguac

SEQ ID NO: 458593 - RNA, 19 nt, Homo sapiens
  misc_RNA (1)...(19): siRNA sense strand
gcucauuggaguuggcuau

SEQ ID NO: 458594 - RNA, 19 nt, Homo sapiens
  misc_RNA (1)...(19): siRNA sense strand
gaccagcagauggcucuuu

SEQ ID NO: 458595 - RNA, 19 nt, Homo sapiens
  misc_RNA (1)...(19): siRNA sense strand
ucuguuaccuguguugauc

SEQ ID NO: 458596 - RNA, 19 nt, Homo sapiens
  misc_RNA (1)...(19): siRNA sense strand
gauuacgaguguaccaacu

SEQ ID NO: 458597 - RNA, 19 nt, Homo sapiens
  misc_RNA (1)...(19): siRNA sense strand
ugauagacguccugcucau

SEQ ID NO: 458598 - RNA, 19 nt, Homo sapiens
  misc_RNA (1)...(19): siRNA sense strand
aaugcuauauugcaauugg

SEQ ID NO: 458599 - RNA, 19 nt, Homo sapiens
  misc_RNA (1)...(19): siRNA sense strand
uaaccguacuuuucccaaa

SEQ ID NO: 458600 - RNA, 19 nt, Homo sapiens
  misc_RNA (1)...(19): siRNA sense strand
ucauuggaguuggcuaugu

SEQ ID NO: 458601 - RNA, 19 nt, Homo sapiens
  misc_RNA (1)...(19): siRNA sense strand
auagacugcacaacaaauu

SEQ ID NO: 458602 - RNA, 19 nt, Homo sapiens
  misc_RNA (1)...(19): siRNA sense strand
caagacuucaaaucccaaa

SEQ ID NO: 458603 - RNA, 19 nt, Homo sapiens
  misc_RNA (1)...(19): siRNA sense strand
agacugcacaacaaauuuc

SEQ ID NO: 458604 - RNA, 19 nt, Homo sapiens
  misc_RNA (1)...(19): siRNA sense strand
accagcagauggcucuuug

SEQ ID NO: 458605 - RNA, 19 nt, Homo sapiens
  misc_RNA (1)...(19): siRNA sense strand
auagacguccugcucauug

SEQ ID NO: 458606 - RNA, 19 nt, Homo sapiens
  misc_RNA (1)...(19): siRNA sense strand
ugaaguguccgagcaaugg

SEQ ID NO: 458607 - RNA, 19 nt, Homo sapiens
  misc_RNA (1)...(19): siRNA sense strand
gcucuggcucuaagcauca

SEQ ID NO: 458608 - RNA, 19 nt, Homo sapiens
  misc_RNA (1)...(19): siRNA sense strand
caaauuucuccuguaccua

SEQ ID NO: 458609 - RNA, 19 nt, Homo sapiens
  misc_RNA (1)...(19): siRNA sense strand
uaacaugacuugcagauuu

SEQ ID NO: 458610 - RNA, 19 nt, Homo sapiens
  misc_RNA (1)...(19): siRNA sense strand
guacugaaaucccaccuua

SEQ ID NO: 458611 - RNA, 19 nt, Homo sapiens
  misc_RNA (1)...(19): siRNA sense strand
gcagugaaaccaucuguua

SEQ ID NO: 458612 - RNA, 19 nt, Homo sapiens
  misc_RNA (1)...(19): siRNA sense strand
gcagauggcucuuuguaca

SEQ ID NO: 458613 - RNA, 19 nt, Homo sapiens
  misc_RNA (1)...(19): siRNA sense strand
caacaaauuucuccuguac

SEQ ID NO: 458614 - RNA, 19 nt, Homo sapiens
  misc_RNA (1)...(19): siRNA sense strand
ugaaacagauuacgagugu

SEQ ID NO: 458615 - RNA, 19 nt, Homo sapiens
  misc_RNA (1)...(19): siRNA sense strand
gaauauggacgcugauaga

SEQ ID NO: 458616 - RNA, 19 nt, Homo sapiens
  misc_RNA (1)...(19): siRNA sense strand
gaaaucccaccuuauguga

SEQ ID NO: 458617 - RNA, 19 nt, Homo sapiens
  misc_RNA (1)...(19): siRNA sense strand
caauuggacuggaggcuau

SEQ ID NO: 458618 - RNA, 19 nt, Homo sapiens
  misc_RNA (1)...(19): siRNA sense strand
gaacuucaucauuaacaug

SEQ ID NO: 458619 - RNA, 19 nt, Homo sapiens
  misc_RNA (1)...(19): siRNA sense strand
caccuuaugugaugaagug

SEQ ID NO: 458620 - RNA, 19 nt, Homo sapiens
  misc_RNA (1)...(19): siRNA sense strand
uguauagacugcacaacaa

SEQ ID NO: 458621 - RNA, 19 nt, Homo sapiens
  misc_RNA (1)...(19): siRNA sense strand
acaacaaauuucuccugua

SEQ ID NO: 458622 - RNA, 19 nt, Homo sapiens
  misc_RNA (1)...(19): siRNA sense strand
cagcagauggcucuuugua

SEQ ID NO: 458623 - RNA, 19 nt, Homo sapiens
  misc_RNA (1)...(19): siRNA sense strand
gaaacagauuacgagugua

SEQ ID NO: 458624 - RNA, 19 nt, Homo sapiens
  misc_RNA (1)...(19): siRNA sense strand
gcagcuuccugaaacagau

SEQ ID NO: 458625 - RNA, 19 nt, Homo sapiens
  misc_RNA (1)...(19): siRNA sense strand
ggacuggaggcuauaagug

SEQ ID NO: 458626 - RNA, 19 nt, Homo sapiens
  misc_RNA (1)...(19): siRNA sense strand
gauggcucuuuguacauuu

SEQ ID NO: 458627 - RNA, 19 nt, Homo sapiens
  misc_RNA (1)...(19): siRNA sense strand
cauuggaguuggcuauguu

SEQ ID NO: 458628 - RNA, 19 nt, Homo sapiens
  misc_RNA (1)...(19): siRNA sense strand
ggaagccugucacuuuuga

SEQ ID NO: 458629 - RNA, 19 nt, Homo sapiens
  misc_RNA (1)...(19): siRNA sense strand
aaucccaccuuaugugaug

SEQ ID NO: 458630 - RNA, 19 nt, Homo sapiens
  misc_RNA (1)...(19): siRNA sense strand
ggaauauggacgcugauag

SEQ ID NO: 458631 - RNA, 19 nt, Homo sapiens
  misc_RNA (1)...(19): siRNA sense strand
gggaauauggacgcugaua

SEQ ID NO: 458632 - RNA, 19 nt, Homo sapiens
  misc_RNA (1)...(19): siRNA sense strand
gaugaaguguccgagcaau

SEQ ID NO: 458633 - RNA, 19 nt, Homo sapiens
  misc_RNA (1)...(19): siRNA sense strand
guauagacugcacaacaaa

SEQ ID NO: 458634 - RNA, 19 nt, Homo sapiens
  misc_RNA (1)...(19): siRNA sense strand
ugaaaucccaccuuaugug

SEQ ID NO: 458635 - RNA, 19 nt, Homo sapiens
  misc_RNA (1)...(19): siRNA sense strand
uuaccuguguugaucaaga

SEQ ID NO: 458636 - RNA, 19 nt, Homo sapiens
  misc_RNA (1)...(19): siRNA sense strand
ccaaaaugcuauauugcaa

SEQ ID NO: 458637 - RNA, 19 nt, Homo sapiens
  misc_RNA (1)...(19): siRNA sense strand
gagcagaccguuucuaccu

SEQ ID NO: 458638 - RNA, 19 nt, Homo sapiens
  misc_RNA (1)...(19): siRNA sense strand
agauggcucuuuguacauu

SEQ ID NO: 458639 - RNA, 19 nt, Homo sapiens
  misc_RNA (1)...(19): siRNA sense strand
gauagacguccugcucauu

SEQ ID NO: 458640 - RNA, 19 nt, Homo sapiens
  misc_RNA (1)...(19): siRNA sense strand
cuacggcucuggcucuaag

SEQ ID NO: 458641 - RNA, 19 nt, Homo sapiens
  misc_RNA (1)...(19): siRNA sense strand
aaauuucuccuguaccuau

SEQ ID NO: 458642 - RNA, 19 nt, Homo sapiens
  misc_RNA (1)...(19): siRNA sense strand
aaccaucuguuaccugugu

SEQ ID NO: 458643 - RNA, 19 nt, Homo sapiens
  misc_RNA (1)...(19): siRNA sense strand
acaaauuucuccuguaccu

SEQ ID NO: 458644 - RNA, 19 nt, Homo sapiens
  misc_RNA (1)...(19): siRNA sense strand
ccaaaagaacuucaucauu

SEQ ID NO: 458645 - RNA, 19 nt, Homo sapiens
  misc_RNA (1)...(19): siRNA sense strand
augggaagccugucacuuu

SEQ ID NO: 458646 - RNA, 19 nt, Homo sapiens
  misc_RNA (1)...(19): siRNA sense strand
acugaaaucccaccuuaug

SEQ ID NO: 458647 - RNA, 19 nt, Homo sapiens
  misc_RNA (1)...(19): siRNA sense strand
uagacugcacaacaaauuu

SEQ ID NO: 458648 - RNA, 19 nt, Homo sapiens
  misc_RNA (1)...(19): siRNA sense strand
aaacagauuacgaguguac

SEQ ID NO: 458649 - RNA, 19 nt, Homo sapiens
  misc_RNA (1)...(19): siRNA sense strand
gcucauuggaguuggcuau

SEQ ID NO: 458650 - RNA, 19 nt, Homo sapiens
  misc_RNA (1)...(19): siRNA sense strand
gaccagcagauggcucuuu

SEQ ID NO: 458651 - RNA, 19 nt, Homo sapiens
  misc_RNA (1)...(19): siRNA sense strand
ucuguuaccuguguugauc

SEQ ID NO: 458652 - RNA, 19 nt, Homo sapiens
  misc_RNA (1)...(19): siRNA sense strand
gauuacgaguguaccaacu

SEQ ID NO: 458653 - RNA, 19 nt, Homo sapiens
  misc_RNA (1)...(19): siRNA sense strand
ugauagacguccugcucau

SEQ ID NO: 458654 - RNA, 19 nt, Homo sapiens
  misc_RNA (1)...(19): siRNA sense strand
aaugcuauauugcaauugg

SEQ ID NO: 458655 - RNA, 19 nt, Homo sapiens
  misc_RNA (1)...(19): siRNA sense strand
uaaccguacuuuucccaaa

SEQ ID NO: 458656 - RNA, 19 nt, Homo sapiens
  misc_RNA (1)...(19): siRNA sense strand
ucauuggaguuggcuaugu

SEQ ID NO: 458657 - RNA, 19 nt, Homo sapiens
  misc_RNA (1)...(19): siRNA sense strand
auagacugcacaacaaauu

SEQ ID NO: 458658 - RNA, 19 nt, Homo sapiens
  misc_RNA (1)...(19): siRNA sense strand
caagacuucaaaucccaaa

SEQ ID NO: 458659 - RNA, 19 nt, Homo sapiens
  misc_RNA (1)...(19): siRNA sense strand
agacugcacaacaaauuuc

SEQ ID NO: 458660 - RNA, 19 nt, Homo sapiens
  misc_RNA (1)...(19): siRNA sense strand
accagcagauggcucuuug

SEQ ID NO: 458661 - RNA, 19 nt, Homo sapiens
  misc_RNA (1)...(19): siRNA sense strand
auagacguccugcucauug

SEQ ID NO: 458662 - RNA, 19 nt, Homo sapiens
  misc_RNA (1)...(19): siRNA sense strand
ugaaguguccgagcaaugg

SEQ ID NO: 458663 - RNA, 19 nt, Homo sapiens
  misc_RNA (1)...(19): siRNA sense strand
gcucuggcucuaagcauca

SEQ ID NO: 458664 - RNA, 19 nt, Homo sapiens
  misc_RNA (1)...(19): siRNA sense strand
caaauuucuccuguaccua

SEQ ID NO: 458665 - RNA, 19 nt, Homo sapiens
  misc_RNA (1)...(19): siRNA sense strand
gcacugugguccucuucaa

SEQ ID NO: 458666 - RNA, 19 nt, Homo sapiens
  misc_RNA (1)...(19): siRNA sense strand
ggcaacaacuggaucugaa

SEQ ID NO: 458667 - RNA, 19 nt, Homo sapiens
  misc_RNA (1)...(19): siRNA sense strand
gcugguauccucccaugua

SEQ ID NO: 458668 - RNA, 19 nt, Homo sapiens
  misc_RNA (1)...(19): siRNA sense strand
gcacccagaugaguucuuc

SEQ ID NO: 458669 - RNA, 19 nt, Homo sapiens
  misc_RNA (1)...(19): siRNA sense strand
ccaccucagucuucacauu

SEQ ID NO: 458670 - RNA, 19 nt, Homo sapiens
  misc_RNA (1)...(19): siRNA sense strand
ggacaucauuccagguuuu

SEQ ID NO: 458671 - RNA, 19 nt, Homo sapiens
  misc_RNA (1)...(19): siRNA sense strand
ccaggccucugcacaaaug

SEQ ID NO: 458672 - RNA, 19 nt, Homo sapiens
  misc_RNA (1)...(19): siRNA sense strand
uggcgcagcuggcuucuug

SEQ ID NO: 458673 - RNA, 19 nt, Homo sapiens
  misc_RNA (1)...(19): siRNA sense strand
gaggcucgguuccugauuc

SEQ ID NO: 458674 - RNA, 19 nt, Homo sapiens
  misc_RNA (1)...(19): siRNA sense strand
ucacucaccuggcagucaa

SEQ ID NO: 458675 - RNA, 19 nt, Homo sapiens
  misc_RNA (1)...(19): siRNA sense strand
gcccugcuaucugccuuua

SEQ ID NO: 458676 - RNA, 19 nt, Homo sapiens
  misc_RNA (1)...(19): siRNA sense strand
ccacggacagcugguauuu

SEQ ID NO: 458677 - RNA, 19 nt, Homo sapiens
  misc_RNA (1)...(19): siRNA sense strand
ucacugcccuuuccuuugc

SEQ ID NO: 458678 - RNA, 19 nt, Homo sapiens
  misc_RNA (1)...(19): siRNA sense strand
caacaacuggaucugaaga

SEQ ID NO: 458679 - RNA, 19 nt, Homo sapiens
  misc_RNA (1)...(19): siRNA sense strand
caccagcccuguccuccuu

SEQ ID NO: 458680 - RNA, 19 nt, Homo sapiens
  misc_RNA (1)...(19): siRNA sense strand
acacacuccucuucacuca

SEQ ID NO: 458681 - RNA, 19 nt, Homo sapiens
  misc_RNA (1)...(19): siRNA sense strand
gggacaucauuccagguuu

SEQ ID NO: 458682 - RNA, 19 nt, Homo sapiens
  misc_RNA (1)...(19): siRNA sense strand
gcuaugugcacccagauga

SEQ ID NO: 458683 - RNA, 19 nt, Homo sapiens
  misc_RNA (1)...(19): siRNA sense strand
cagcguagcaucuguagca

SEQ ID NO: 458684 - RNA, 19 nt, Homo sapiens
  misc_RNA (1)...(19): siRNA sense strand
caagcacacccacccacua

SEQ ID NO: 458685 - RNA, 19 nt, Homo sapiens
  misc_RNA (1)...(19): siRNA sense strand
acacuccucuucacucaca

SEQ ID NO: 458686 - RNA, 19 nt, Homo sapiens
  misc_RNA (1)...(19): siRNA sense strand
ccacuacacacuccucuuc

SEQ ID NO: 458687 - RNA, 19 nt, Homo sapiens
  misc_RNA (1)...(19): siRNA sense strand
gauccagcguagcaucugu

SEQ ID NO: 458688 - RNA, 19 nt, Homo sapiens
  misc_RNA (1)...(19): siRNA sense strand
gaccuucuccaacaccauu

SEQ ID NO: 458689 - RNA, 19 nt, Homo sapiens
  misc_RNA (1)...(19): siRNA sense strand
uguagcagcugggacauca

SEQ ID NO: 458690 - RNA, 19 nt, Homo sapiens
  misc_RNA (1)...(19): siRNA sense strand
cugguauccucccauguaa

SEQ ID NO: 458691 - RNA, 19 nt, Homo sapiens
  misc_RNA (1)...(19): siRNA sense strand
acggacagcugguauuucu

SEQ ID NO: 458692 - RNA, 19 nt, Homo sapiens
  misc_RNA (1)...(19): siRNA sense strand
ccucacagcagcgguguuu

SEQ ID NO: 458693 - RNA, 19 nt, Homo sapiens
  misc_RNA (1)...(19): siRNA sense strand
ucacagcagcgguguuugu

SEQ ID NO: 458694 - RNA, 19 nt, Homo sapiens
  misc_RNA (1)...(19): siRNA sense strand
ccucacugcccuuuccuuu

SEQ ID NO: 458695 - RNA, 19 nt, Homo sapiens
  misc_RNA (1)...(19): siRNA sense strand
acaaccagccugccaagug

SEQ ID NO: 458696 - RNA, 19 nt, Homo sapiens
  misc_RNA (1)...(19): siRNA sense strand
uagcagcugggacaucauu

SEQ ID NO: 458697 - RNA, 19 nt, Homo sapiens
  misc_RNA (1)...(19): siRNA sense strand
gggaccaccucagucuuca

SEQ ID NO: 458698 - RNA, 19 nt, Homo sapiens
  misc_RNA (1)...(19): siRNA sense strand
gcaacaacuggaucugaag

SEQ ID NO: 458699 - RNA, 19 nt, Homo sapiens
  misc_RNA (1)...(19): siRNA sense strand
gccaaacccugaaaagcuu

SEQ ID NO: 458700 - RNA, 19 nt, Homo sapiens
  misc_RNA (1)...(19): siRNA sense strand
ucaacuucuugcacuacaa

SEQ ID NO: 458701 - RNA, 19 nt, Homo sapiens
  misc_RNA (1)...(19): siRNA sense strand
caccucagucuucacauug

SEQ ID NO: 458702 - RNA, 19 nt, Homo sapiens
  misc_RNA (1)...(19): siRNA sense strand
caguggaggugguggacau

SEQ ID NO: 458703 - RNA, 19 nt, Homo sapiens
  misc_RNA (1)...(19): siRNA sense strand
ccuaucuccuucuccucua

SEQ ID NO: 458704 - RNA, 19 nt, Homo sapiens
  misc_RNA (1)...(19): siRNA sense strand
cuccaggccucugcacaaa

SEQ ID NO: 458705 - RNA, 19 nt, Homo sapiens
  misc_RNA (1)...(19): siRNA sense strand
ccaccuuucuggccuuugc

SEQ ID NO: 458706 - RNA, 19 nt, Homo sapiens
  misc_RNA (1)...(19): siRNA sense strand
gaccaccucagucuucaca

SEQ ID NO: 458707 - RNA, 19 nt, Homo sapiens
  misc_RNA (1)...(19): siRNA sense strand
acccuggucuucuacacaa

SEQ ID NO: 458708 - RNA, 19 nt, Homo sapiens
  misc_RNA (1)...(19): siRNA sense strand
uggaagagauuaaggauua

SEQ ID NO: 458709 - RNA, 19 nt, Homo sapiens
  misc_RNA (1)...(19): siRNA sense strand
ccaaugaaaucaagucuaa

SEQ ID NO: 458710 - RNA, 19 nt, Homo sapiens
  misc_RNA (1)...(19): siRNA sense strand
uaaggaaacuccagaauau

SEQ ID NO: 458711 - RNA, 19 nt, Homo sapiens
  misc_RNA (1)...(19): siRNA sense strand
gcaaaugucccaaguguaa

SEQ ID NO: 458712 - RNA, 19 nt, Homo sapiens
  misc_RNA (1)...(19): siRNA sense strand
gaaggcagcuguugaagau

SEQ ID NO: 458713 - RNA, 19 nt, Homo sapiens
  misc_RNA (1)...(19): siRNA sense strand
agaagaagcuacaugauuu

SEQ ID NO: 458714 - RNA, 19 nt, Homo sapiens
  misc_RNA (1)...(19): siRNA sense strand
gaugaugccucacuauuga

SEQ ID NO: 458715 - RNA, 19 nt, Homo sapiens
  misc_RNA (1)...(19): siRNA sense strand
gaacaagcaggcccuauaa

SEQ ID NO: 458716 - RNA, 19 nt, Homo sapiens
  misc_RNA (1)...(19): siRNA sense strand
gcugaggacugaaguaauu

SEQ ID NO: 458717 - RNA, 19 nt, Homo sapiens
  misc_RNA (1)...(19): siRNA sense strand
ggagaaggaugaugcaaau

SEQ ID NO: 458718 - RNA, 19 nt, Homo sapiens
  misc_RNA (1)...(19): siRNA sense strand
gaagaaagagaacaagaaa

SEQ ID NO: 458719 - RNA, 19 nt, Homo sapiens
  misc_RNA (1)...(19): siRNA sense strand
uaaggaaacuggaagagaa

SEQ ID NO: 458720 - RNA, 19 nt, Homo sapiens
  misc_RNA (1)...(19): siRNA sense strand
ccaaucagauccauaaguu

SEQ ID NO: 458721 - RNA, 19 nt, Homo sapiens
  misc_RNA (1)...(19): siRNA sense strand
ggaaaugaaugcagagcuu

SEQ ID NO: 458722 - RNA, 19 nt, Homo sapiens
  misc_RNA (1)...(19): siRNA sense strand
uagaauaccuacagaagaa

SEQ ID NO: 458723 - RNA, 19 nt, Homo sapiens
  misc_RNA (1)...(19): siRNA sense strand
gaaggaugaugcaaauuuc

SEQ ID NO: 458724 - RNA, 19 nt, Homo sapiens
  misc_RNA (1)...(19): siRNA sense strand
gcagugggauauugacaaa

SEQ ID NO: 458725 - RNA, 19 nt, Homo sapiens
  misc_RNA (1)...(19): siRNA sense strand
gaggacaucucuagacuuc

SEQ ID NO: 458726 - RNA, 19 nt, Homo sapiens
  misc_RNA (1)...(19): siRNA sense strand
gaagaaggcagcuguugaa

SEQ ID NO: 458727 - RNA, 19 nt, Homo sapiens
  misc_RNA (1)...(19): siRNA sense strand
gaaaauggcugaugaggau

SEQ ID NO: 458728 - RNA, 19 nt, Homo sapiens
  misc_RNA (1)...(19): siRNA sense strand
gaggaugccuugaggaaga

SEQ ID NO: 458729 - RNA, 19 nt, Homo sapiens
  misc_RNA (1)...(19): siRNA sense strand
uaaacgggaugaagaagaa

SEQ ID NO: 458730 - RNA, 19 nt, Homo sapiens
  misc_RNA (1)...(19): siRNA sense strand
gagagaagcagaagcuaaa

SEQ ID NO: 458731 - RNA, 19 nt, Homo sapiens
  misc_RNA (1)...(19): siRNA sense strand
acaaagaguuggcucagaa

SEQ ID NO: 458732 - RNA, 19 nt, Homo sapiens
  misc_RNA (1)...(19): siRNA sense strand
gcgcaaaugucccaagugu

SEQ ID NO: 458733 - RNA, 19 nt, Homo sapiens
  misc_RNA (1)...(19): siRNA sense strand
caaagaaaccagacaaugu

SEQ ID NO: 458734 - RNA, 19 nt, Homo sapiens
  misc_RNA (1)...(19): siRNA sense strand
ugcaggagcugaacucuuu

SEQ ID NO: 458735 - RNA, 19 nt, Homo sapiens
  misc_RNA (1)...(19): siRNA sense strand
gaccagguguugacucuga

SEQ ID NO: 458736 - RNA, 19 nt, Homo sapiens
  misc_RNA (1)...(19): siRNA sense strand
aaagaaaccagacaaugua

SEQ ID NO: 458737 - RNA, 19 nt, Homo sapiens
  misc_RNA (1)...(19): siRNA sense strand
gcuaaacaguggagauaau

SEQ ID NO: 458738 - RNA, 19 nt, Homo sapiens
  misc_RNA (1)...(19): siRNA sense strand
gagauucugcuaaggauaa

SEQ ID NO: 458739 - RNA, 19 nt, Homo sapiens
  misc_RNA (1)...(19): siRNA sense strand
gcuaggaggugucucuuca

SEQ ID NO: 458740 - RNA, 19 nt, Homo sapiens
  misc_RNA (1)...(19): siRNA sense strand
gaagaacgagaacgagaaa

SEQ ID NO: 458741 - RNA, 19 nt, Homo sapiens
  misc_RNA (1)...(19): siRNA sense strand
gagaugagguuagucuuca

SEQ ID NO: 458742 - RNA, 19 nt, Homo sapiens
  misc_RNA (1)...(19): siRNA sense strand
uaucaaugcucggaaguuu

SEQ ID NO: 458743 - RNA, 19 nt, Homo sapiens
  misc_RNA (1)...(19): siRNA sense strand
gaagcacuccucucugaaa

SEQ ID NO: 458744 - RNA, 19 nt, Homo sapiens
  misc_RNA (1)...(19): siRNA sense strand
aagaagcacuccucucuga

SEQ ID NO: 458745 - RNA, 19 nt, Homo sapiens
  misc_RNA (1)...(19): siRNA sense strand
auaagaagcugaggacuga

SEQ ID NO: 458746 - RNA, 19 nt, Homo sapiens
  misc_RNA (1)...(19): siRNA sense strand
guaucauccuuaaacguua

SEQ ID NO: 458747 - RNA, 19 nt, Homo sapiens
  misc_RNA (1)...(19): siRNA sense strand
gugaugagauucugaugga

SEQ ID NO: 458748 - RNA, 19 nt, Homo sapiens
  misc_RNA (1)...(19): siRNA sense strand
cagcccagcuugcagauga

SEQ ID NO: 458749 - RNA, 19 nt, Homo sapiens
  misc_RNA (1)...(19): siRNA sense strand
ggaagcagaaauuaucaaa

SEQ ID NO: 458750 - RNA, 19 nt, Homo sapiens
  misc_RNA (1)...(19): siRNA sense strand
gggagguccugagauauaa

SEQ ID NO: 458751 - RNA, 19 nt, Homo sapiens
  misc_RNA (1)...(19): siRNA sense strand
gagcaagucguuaaggaaa

SEQ ID NO: 458752 - RNA, 19 nt, Homo sapiens
  misc_RNA (1)...(19): siRNA sense strand
ggacauguucaauuucaaa

SEQ ID NO: 458753 - RNA, 19 nt, Homo sapiens
  misc_RNA (1)...(19): siRNA sense strand
cagaagaagcuacaugauu

SEQ ID NO: 458754 - RNA, 19 nt, Homo sapiens
  misc_RNA (1)...(19): siRNA sense strand
ucaguagccuccagaauca

SEQ ID NO: 458755 - RNA, 19 nt, Homo sapiens
  misc_RNA (1)...(19): siRNA sense strand
ggagagggaacgagaaaga

SEQ ID NO: 458756 - RNA, 19 nt, Homo sapiens
  misc_RNA (1)...(19): siRNA sense strand
ggaguuggcucagaagaag

SEQ ID NO: 458757 - RNA, 19 nt, Homo sapiens
  misc_RNA (1)...(19): siRNA sense strand
uuaaggaaacuccagaaua

SEQ ID NO: 458758 - RNA, 19 nt, Homo sapiens
  misc_RNA (1)...(19): siRNA sense strand
gaaaaggacauguucaauu

SEQ ID NO: 458759 - RNA, 19 nt, Homo sapiens
  misc_RNA (1)...(19): siRNA sense strand
gagaaaggcaaacaugaug

SEQ ID NO: 458760 - RNA, 19 nt, Homo sapiens
  misc_RNA (1)...(19): siRNA sense strand
cagcugagaagaagucuaa

SEQ ID NO: 458761 - RNA, 19 nt, Homo sapiens
  misc_RNA (1)...(19): siRNA sense strand
ggaaacaauuaagcuagga

SEQ ID NO: 458762 - RNA, 19 nt, Homo sapiens
  misc_RNA (1)...(19): siRNA sense strand
agaaggaugaugcaaauuu

SEQ ID NO: 458763 - RNA, 19 nt, Homo sapiens
  misc_RNA (1)...(19): siRNA sense strand
uggaggagcagauagaaua

SEQ ID NO: 458764 - RNA, 19 nt, Homo sapiens
  misc_RNA (1)...(19): siRNA sense strand
gaucuaaggcaaagacuca

SEQ ID NO: 458765 - RNA, 19 nt, Homo sapiens
  misc_RNA (1)...(19): siRNA sense strand
gagagauucugcuaaggau

SEQ ID NO: 458766 - RNA, 19 nt, Homo sapiens
  misc_RNA (1)...(19): siRNA sense strand
gauauaagcggaaauugag

SEQ ID NO: 458767 - RNA, 19 nt, Homo sapiens
  misc_RNA (1)...(19): siRNA sense strand
gaaaugcugaggauagaau

SEQ ID NO: 458768 - RNA, 19 nt, Homo sapiens
  misc_RNA (1)...(19): siRNA sense strand
guaauucagcuagaagaua

SEQ ID NO: 458769 - RNA, 19 nt, Homo sapiens
  misc_RNA (1)...(19): siRNA sense strand
augcagagcuugaggagaa

SEQ ID NO: 458770 - RNA, 19 nt, Homo sapiens
  misc_RNA (1)...(19): siRNA sense strand
gauugugacuguuuaugau

SEQ ID NO: 458771 - RNA, 19 nt, Homo sapiens
  misc_RNA (1)...(19): siRNA sense strand
agagaaggagcaucuguua

SEQ ID NO: 458772 - RNA, 19 nt, Homo sapiens
  misc_RNA (1)...(19): siRNA sense strand
gcacuccucucugaaaugg

SEQ ID NO: 458773 - RNA, 19 nt, Homo sapiens
  misc_RNA (1)...(19): siRNA sense strand
gcaccagguugagcuuauu

SEQ ID NO: 458774 - RNA, 19 nt, Homo sapiens
  misc_RNA (1)...(19): siRNA sense strand
ggaauugacagaucuucuu

SEQ ID NO: 458775 - RNA, 19 nt, Homo sapiens
  misc_RNA (1)...(19): siRNA sense strand
gaggaggucacuacacaaa

SEQ ID NO: 458776 - RNA, 19 nt, Homo sapiens
  misc_RNA (1)...(19): siRNA sense strand
gcuugcagaugaccucaaa

SEQ ID NO: 458777 - RNA, 19 nt, Homo sapiens
  misc_RNA (1)...(19): siRNA sense strand
gaagauaaagagaagaaag

SEQ ID NO: 458778 - RNA, 19 nt, Homo sapiens
  misc_RNA (1)...(19): siRNA sense strand
ugaacaagcaggcccuaua

SEQ ID NO: 458779 - RNA, 19 nt, Homo sapiens
  misc_RNA (1)...(19): siRNA sense strand
uggcagaaauguuggauca

SEQ ID NO: 458780 - RNA, 19 nt, Homo sapiens
  misc_RNA (1)...(19): siRNA sense strand
ugaaagcacacuuggauga

SEQ ID NO: 458781 - RNA, 19 nt, Homo sapiens
  misc_RNA (1)...(19): siRNA sense strand
gcucggaaguuugaggaaa

SEQ ID NO: 458782 - RNA, 19 nt, Homo sapiens
  misc_RNA (1)...(19): siRNA sense strand
caucgcaucuacauugguu

SEQ ID NO: 458783 - RNA, 19 nt, Homo sapiens
  misc_RNA (1)...(19): siRNA sense strand
ggcaaagacucaaggaucu

SEQ ID NO: 458784 - RNA, 19 nt, Homo sapiens
  misc_RNA (1)...(19): siRNA sense strand
agacaaaguucagcugaug

SEQ ID NO: 458785 - RNA, 19 nt, Homo sapiens
  misc_RNA (1)...(19): siRNA sense strand
ggauaaagagaaaggcaaa

SEQ ID NO: 458786 - RNA, 19 nt, Homo sapiens
  misc_RNA (1)...(19): siRNA sense strand
ucaggaggaugccaaugaa

SEQ ID NO: 458787 - RNA, 19 nt, Homo sapiens
  misc_RNA (1)...(19): siRNA sense strand
ucucuuuccuugcuacuuu

SEQ ID NO: 458788 - RNA, 19 nt, Homo sapiens
  misc_RNA (1)...(19): siRNA sense strand
ggaacuagacauuagaaca

SEQ ID NO: 458789 - RNA, 19 nt, Homo sapiens
  misc_RNA (1)...(19): siRNA sense strand
gacccaagccuuagagaug

SEQ ID NO: 458790 - RNA, 19 nt, Homo sapiens
  misc_RNA (1)...(19): siRNA sense strand
gaagagaaggagcaucugu

SEQ ID NO: 458791 - RNA, 19 nt, Homo sapiens
  misc_RNA (1)...(19): siRNA sense strand
gacauuagaacacugcaaa

SEQ ID NO: 458792 - RNA, 19 nt, Homo sapiens
  misc_RNA (1)...(19): siRNA sense strand
gagaagaaagagaacaaga

SEQ ID NO: 458793 - RNA, 19 nt, Homo sapiens
  misc_RNA (1)...(19): siRNA sense strand
ggagagagaacgagagaag

SEQ ID NO: 458794 - RNA, 19 nt, Homo sapiens
  misc_RNA (1)...(19): siRNA sense strand
gagaaaggagggagaagga

SEQ ID NO: 458795 - RNA, 19 nt, Homo sapiens
  misc_RNA (1)...(19): siRNA sense strand
uuagaacacugcaaaccaa

SEQ ID NO: 458796 - RNA, 19 nt, Homo sapiens
  misc_RNA (1)...(19): siRNA sense strand
gaacuucgugagcacauug

SEQ ID NO: 458797 - RNA, 19 nt, Homo sapiens
  misc_RNA (1)...(19): siRNA sense strand
cuacaggaauugacagauc

SEQ ID NO: 458798 - RNA, 19 nt, Homo sapiens
  misc_RNA (1)...(19): siRNA sense strand
aaacauccguaucauccuu

SEQ ID NO: 458799 - RNA, 19 nt, Homo sapiens
  misc_RNA (1)...(19): siRNA sense strand
gucaggaauuggaaauaaa

SEQ ID NO: 458800 - RNA, 19 nt, Homo sapiens
  misc_RNA (1)...(19): siRNA sense strand
ggcaggccauugaagauga

SEQ ID NO: 458801 - RNA, 19 nt, Homo sapiens
  misc_RNA (1)...(19): siRNA sense strand
gauagaauaccuacagaag

SEQ ID NO: 458802 - RNA, 19 nt, Homo sapiens
  misc_RNA (1)...(19): siRNA sense strand
gcagauagaauaccuacag

SEQ ID NO: 458803 - RNA, 19 nt, Homo sapiens
  misc_RNA (1)...(19): siRNA sense strand
agagagagauucugcuaag

SEQ ID NO: 458804 - RNA, 19 nt, Homo sapiens
  misc_RNA (1)...(19): siRNA sense strand
ggaugaagaagaacgagaa

SEQ ID NO: 458805 - RNA, 19 nt, Homo sapiens
  misc_RNA (1)...(19): siRNA sense strand
uaauucagcuagaagauac

SEQ ID NO: 458806 - RNA, 19 nt, Homo sapiens
  misc_RNA (1)...(19): siRNA sense strand
aaugagagccuacaguuga

SEQ ID NO: 458807 - RNA, 19 nt, Homo sapiens
  misc_RNA (1)...(19): siRNA sense strand
ucuccaaguugcagaguaa

SEQ ID NO: 458808 - RNA, 19 nt, Homo sapiens
  misc_RNA (1)...(19): siRNA sense strand
gagaauaaguccaaguuug

SEQ ID NO: 458809 - RNA, 19 nt, Homo sapiens
  misc_RNA (1)...(19): siRNA sense strand
gaaacaagcuggccaugca

SEQ ID NO: 458810 - RNA, 19 nt, Homo sapiens
  misc_RNA (1)...(19): siRNA sense strand
gaagaaggccugcaacugu

SEQ ID NO: 458811 - RNA, 19 nt, Homo sapiens
  misc_RNA (1)...(19): siRNA sense strand
gcaacugucugcugcugaa

SEQ ID NO: 458812 - RNA, 19 nt, Homo sapiens
  misc_RNA (1)...(19): siRNA sense strand
ggaaggaugccaccaaugu

SEQ ID NO: 458813 - RNA, 19 nt, Homo sapiens
  misc_RNA (1)...(19): siRNA sense strand
ugggaacccugaccucaua

SEQ ID NO: 458814 - RNA, 19 nt, Homo sapiens
  misc_RNA (1)...(19): siRNA sense strand
cggagcgucuggccaaaua

SEQ ID NO: 458815 - RNA, 19 nt, Homo sapiens
  misc_RNA (1)...(19): siRNA sense strand
uagaugggaccgagaauaa

SEQ ID NO: 458816 - RNA, 19 nt, Homo sapiens
  misc_RNA (1)...(19): siRNA sense strand
ucggagagcuguauaagag

SEQ ID NO: 458817 - RNA, 19 nt, Homo sapiens
  misc_RNA (1)...(19): siRNA sense strand
caaauacaaccaacucaug

SEQ ID NO: 458818 - RNA, 19 nt, Homo sapiens
  misc_RNA (1)...(19): siRNA sense strand
gugccagccuucaauguga

SEQ ID NO: 458819 - RNA, 19 nt, Homo sapiens
  misc_RNA (1)...(19): siRNA sense strand
caaugugggugaugaaggu

SEQ ID NO: 458820 - RNA, 19 nt, Homo sapiens
  misc_RNA (1)...(19): siRNA sense strand
ccaacauccuggagaacaa

SEQ ID NO: 458821 - RNA, 19 nt, Homo sapiens
  misc_RNA (1)...(19): siRNA sense strand
acuaagagacggagacaaa

SEQ ID NO: 458822 - RNA, 19 nt, Homo sapiens
  misc_RNA (1)...(19): siRNA sense strand
ggcagcaucugaguucuau

SEQ ID NO: 458823 - RNA, 19 nt, Homo sapiens
  misc_RNA (1)...(19): siRNA sense strand
cuaugaggcucuggaacua

SEQ ID NO: 458824 - RNA, 19 nt, Homo sapiens
  misc_RNA (1)...(19): siRNA sense strand
gcacaggacagaucaagac

SEQ ID NO: 458825 - RNA, 19 nt, Homo sapiens
  misc_RNA (1)...(19): siRNA sense strand
gggugaacauccagauugu

SEQ ID NO: 458826 - RNA, 19 nt, Homo sapiens
  misc_RNA (1)...(19): siRNA sense strand
caaggaagccaugcgcauu

SEQ ID NO: 458827 - RNA, 19 nt, Homo sapiens
  misc_RNA (1)...(19): siRNA sense strand
aaauacaaccaacucauga

SEQ ID NO: 458828 - RNA, 19 nt, Homo sapiens
  misc_RNA (1)...(19): siRNA sense strand
gcaaugggaaguacgaucu

SEQ ID NO: 458829 - RNA, 19 nt, Homo sapiens
  misc_RNA (1)...(19): siRNA sense strand
gaaggaugccaccaaugug

SEQ ID NO: 458830 - RNA, 19 nt, Homo sapiens
  misc_RNA (1)...(19): siRNA sense strand
gaacuaagagacggagaca

SEQ ID NO: 458831 - RNA, 19 nt, Homo sapiens
  misc_RNA (1)...(19): siRNA sense strand
ggacgcaaguuccguaacc

SEQ ID NO: 458832 - RNA, 19 nt, Homo sapiens
  misc_RNA (1)...(19): siRNA sense strand
ugaaggcuguggagaacau

SEQ ID NO: 458833 - RNA, 19 nt, Homo sapiens
  misc_RNA (1)...(19): siRNA sense strand
ggucaucaaggccaaguau

SEQ ID NO: 458834 - RNA, 19 nt, Homo sapiens
  misc_RNA (1)...(19): siRNA sense strand
acaaccaacucaugaggau

SEQ ID NO: 458835 - RNA, 19 nt, Homo sapiens
  misc_RNA (1)...(19): siRNA sense strand
cgagaauaaguccaaguuu

SEQ ID NO: 458836 - RNA, 19 nt, Homo sapiens
  misc_RNA (1)...(19): siRNA sense strand
cacccaacauccuggagaa

SEQ ID NO: 458837 - RNA, 19 nt, Homo sapiens
  misc_RNA (1)...(19): siRNA sense strand
gaugggaccgagaauaagu

SEQ ID NO: 458838 - RNA, 19 nt, Homo sapiens
  misc_RNA (1)...(19): siRNA sense strand
agagcuuuaucaagaacua

SEQ ID NO: 458839 - RNA, 19 nt, Homo sapiens
  misc_RNA (1)...(19): siRNA sense strand
gauccaggcgugcaaacug

SEQ ID NO: 458840 - RNA, 19 nt, Homo sapiens
  misc_RNA (1)...(19): siRNA sense strand
gcacaucacuggggagaag

SEQ ID NO: 458841 - RNA, 19 nt, Homo sapiens
  misc_RNA (1)...(19): siRNA sense strand
gagaagaaggccugcaacu

SEQ ID NO: 458842 - RNA, 19 nt, Homo sapiens
  misc_RNA (1)...(19): siRNA sense strand
caggaugacugggccacuu

SEQ ID NO: 458843 - RNA, 19 nt, Homo sapiens
  misc_RNA (1)...(19): siRNA sense strand
uaagagcuuuaucaagaac

SEQ ID NO: 458844 - RNA, 19 nt, Homo sapiens
  misc_RNA (1)...(19): siRNA sense strand
cuagaugggaccgagaaua

SEQ ID NO: 458845 - RNA, 19 nt, Homo sapiens
  misc_RNA (1)...(19): siRNA sense strand
ccgagaauaaguccaaguu

SEQ ID NO: 458846 - RNA, 19 nt, Homo sapiens
  misc_RNA (1)...(19): siRNA sense strand
gggagacugaggacacauu

SEQ ID NO: 458847 - RNA, 19 nt, Homo sapiens
  misc_RNA (1)...(19): siRNA sense strand
ccaaauacaaccaacucau

SEQ ID NO: 458848 - RNA, 19 nt, Homo sapiens
  misc_RNA (1)...(19): siRNA sense strand
ggagacugaggacacauuc

SEQ ID NO: 458849 - RNA, 19 nt, Homo sapiens
  misc_RNA (1)...(19): siRNA sense strand
ugggaaggaugccaccaau

SEQ ID NO: 458850 - RNA, 19 nt, Homo sapiens
  misc_RNA (1)...(19): siRNA sense strand
auucauugcugaccuugug

SEQ ID NO: 458851 - RNA, 19 nt, Homo sapiens
  misc_RNA (1)...(19): siRNA sense strand
augcaggaguucaugauuc

SEQ ID NO: 458852 - RNA, 19 nt, Homo sapiens
  misc_RNA (1)...(19): siRNA sense strand
gcccugcucugcugcaaaa

SEQ ID NO: 458853 - RNA, 19 nt, Homo sapiens
  misc_RNA (1)...(19): siRNA sense strand
ggccaaguaugggaaggau

SEQ ID NO: 458854 - RNA, 19 nt, Homo sapiens
  misc_RNA (1)...(19): siRNA sense strand
ucugaguucuaucgcaaug

SEQ ID NO: 458855 - RNA, 19 nt, Homo sapiens
  misc_RNA (1)...(19): siRNA sense strand
cacauucauugcugaccuu

SEQ ID NO: 458856 - RNA, 19 nt, Homo sapiens
  misc_RNA (1)...(19): siRNA sense strand
gacugaggacacauucauu

SEQ ID NO: 458857 - RNA, 19 nt, Homo sapiens
  misc_RNA (1)...(19): siRNA sense strand
gagcgucuggccaaauaca

SEQ ID NO: 458858 - RNA, 19 nt, Homo sapiens
  misc_RNA (1)...(19): siRNA sense strand
ugcaggaguucaugauucu

SEQ ID NO: 458859 - RNA, 19 nt, Homo sapiens
  misc_RNA (1)...(19): siRNA sense strand
ccugaaggcuguggagaac

SEQ ID NO: 458860 - RNA, 19 nt, Homo sapiens
  misc_RNA (1)...(19): siRNA sense strand
aaugggaaguacgaucuug

SEQ ID NO: 458861 - RNA, 19 nt, Homo sapiens
  misc_RNA (1)...(19): siRNA sense strand
caacauccuggagaacaau

SEQ ID NO: 458862 - RNA, 19 nt, Homo sapiens
  misc_RNA (1)...(19): siRNA sense strand
gaacccugaccucauacuc

SEQ ID NO: 458863 - RNA, 19 nt, Homo sapiens
  misc_RNA (1)...(19): siRNA sense strand
uaagagacggagacaaagg

SEQ ID NO: 458864 - RNA, 19 nt, Homo sapiens
  misc_RNA (1)...(19): siRNA sense strand
aaggaagccaugcgcauug

SEQ ID NO: 458865 - RNA, 19 nt, Homo sapiens
  misc_RNA (1)...(19): siRNA sense strand
gagaauaaguccaaguuug

SEQ ID NO: 458866 - RNA, 19 nt, Homo sapiens
  misc_RNA (1)...(19): siRNA sense strand
gaaacaagcuggccaugca

SEQ ID NO: 458867 - RNA, 19 nt, Homo sapiens
  misc_RNA (1)...(19): siRNA sense strand
gaagaaggccugcaacugu

SEQ ID NO: 458868 - RNA, 19 nt, Homo sapiens
  misc_RNA (1)...(19): siRNA sense strand
gcaacugucugcugcugaa

SEQ ID NO: 458869 - RNA, 19 nt, Homo sapiens
  misc_RNA (1)...(19): siRNA sense strand
ggaaggaugccaccaaugu

SEQ ID NO: 458870 - RNA, 19 nt, Homo sapiens
  misc_RNA (1)...(19): siRNA sense strand
ugggaacccugaccucaua

SEQ ID NO: 458871 - RNA, 19 nt, Homo sapiens
  misc_RNA (1)...(19): siRNA sense strand
cggagcgucuggccaaaua

SEQ ID NO: 458872 - RNA, 19 nt, Homo sapiens
  misc_RNA (1)...(19): siRNA sense strand
uagaugggaccgagaauaa

SEQ ID NO: 458873 - RNA, 19 nt, Homo sapiens
  misc_RNA (1)...(19): siRNA sense strand
ucggagagcuguauaagag

SEQ ID NO: 458874 - RNA, 19 nt, Homo sapiens
  misc_RNA (1)...(19): siRNA sense strand
caaauacaaccaacucaug

SEQ ID NO: 458875 - RNA, 19 nt, Homo sapiens
  misc_RNA (1)...(19): siRNA sense strand
gugccagccuucaauguga

SEQ ID NO: 458876 - RNA, 19 nt, Homo sapiens
  misc_RNA (1)...(19): siRNA sense strand
caaugugggugaugaaggu

SEQ ID NO: 458877 - RNA, 19 nt, Homo sapiens
  misc_RNA (1)...(19): siRNA sense strand
ccaacauccuggagaacaa

SEQ ID NO: 458878 - RNA, 19 nt, Homo sapiens
  misc_RNA (1)...(19): siRNA sense strand
acuaagagacggagacaaa

SEQ ID NO: 458879 - RNA, 19 nt, Homo sapiens
  misc_RNA (1)...(19): siRNA sense strand
ggcagcaucugaguucuau

SEQ ID NO: 458880 - RNA, 19 nt, Homo sapiens
  misc_RNA (1)...(19): siRNA sense strand
cuaugaggcucuggaacua

SEQ ID NO: 458881 - RNA, 19 nt, Homo sapiens
  misc_RNA (1)...(19): siRNA sense strand
gcacaggacagaucaagac

SEQ ID NO: 458882 - RNA, 19 nt, Homo sapiens
  misc_RNA (1)...(19): siRNA sense strand
gggugaacauccagauugu

SEQ ID NO: 458883 - RNA, 19 nt, Homo sapiens
  misc_RNA (1)...(19): siRNA sense strand
caaggaagccaugcgcauu

SEQ ID NO: 458884 - RNA, 19 nt, Homo sapiens
  misc_RNA (1)...(19): siRNA sense strand
aaauacaaccaacucauga

SEQ ID NO: 458885 - RNA, 19 nt, Homo sapiens
  misc_RNA (1)...(19): siRNA sense strand
gcaaugggaaguacgaucu

SEQ ID NO: 458886 - RNA, 19 nt, Homo sapiens
  misc_RNA (1)...(19): siRNA sense strand
gaaggaugccaccaaugug

SEQ ID NO: 458887 - RNA, 19 nt, Homo sapiens
  misc_RNA (1)...(19): siRNA sense strand
gaacuaagagacggagaca

SEQ ID NO: 458888 - RNA, 19 nt, Homo sapiens
  misc_RNA (1)...(19): siRNA sense strand
ggacgcaaguuccguaacc

SEQ ID NO: 458889 - RNA, 19 nt, Homo sapiens
  misc_RNA (1)...(19): siRNA sense strand
ugaaggcuguggagaacau

SEQ ID NO: 458890 - RNA, 19 nt, Homo sapiens
  misc_RNA (1)...(19): siRNA sense strand
ggucaucaaggccaaguau

SEQ ID NO: 458891 - RNA, 19 nt, Homo sapiens
  misc_RNA (1)...(19): siRNA sense strand
acaaccaacucaugaggau

SEQ ID NO: 458892 - RNA, 19 nt, Homo sapiens
  misc_RNA (1)...(19): siRNA sense strand
cgagaauaaguccaaguuu

SEQ ID NO: 458893 - RNA, 19 nt, Homo sapiens
  misc_RNA (1)...(19): siRNA sense strand
cacccaacauccuggagaa

SEQ ID NO: 458894 - RNA, 19 nt, Homo sapiens
  misc_RNA (1)...(19): siRNA sense strand
gaugggaccgagaauaagu

SEQ ID NO: 458895 - RNA, 19 nt, Homo sapiens
  misc_RNA (1)...(19): siRNA sense strand
agagcuuuaucaagaacua

SEQ ID NO: 458896 - RNA, 19 nt, Homo sapiens
  misc_RNA (1)...(19): siRNA sense strand
gauccaggcgugcaaacug

SEQ ID NO: 458897 - RNA, 19 nt, Homo sapiens
  misc_RNA (1)...(19): siRNA sense strand
gcacaucacuggggagaag

SEQ ID NO: 458898 - RNA, 19 nt, Homo sapiens
  misc_RNA (1)...(19): siRNA sense strand
gagaagaaggccugcaacu

SEQ ID NO: 458899 - RNA, 19 nt, Homo sapiens
  misc_RNA (1)...(19): siRNA sense strand
caggaugacugggccacuu

SEQ ID NO: 458900 - RNA, 19 nt, Homo sapiens
  misc_RNA (1)...(19): siRNA sense strand
uaagagcuuuaucaagaac

SEQ ID NO: 458901 - RNA, 19 nt, Homo sapiens
  misc_RNA (1)...(19): siRNA sense strand
cuagaugggaccgagaaua

SEQ ID NO: 458902 - RNA, 19 nt, Homo sapiens
  misc_RNA (1)...(19): siRNA sense strand
ccgagaauaaguccaaguu

SEQ ID NO: 458903 - RNA, 19 nt, Homo sapiens
  misc_RNA (1)...(19): siRNA sense strand
gggagacugaggacacauu

SEQ ID NO: 458904 - RNA, 19 nt, Homo sapiens
  misc_RNA (1)...(19): siRNA sense strand
ccaaauacaaccaacucau

SEQ ID NO: 458905 - RNA, 19 nt, Homo sapiens
  misc_RNA (1)...(19): siRNA sense strand
ggagacugaggacacauuc

SEQ ID NO: 458906 - RNA, 19 nt, Homo sapiens
  misc_RNA (1)...(19): siRNA sense strand
ugggaaggaugccaccaau

SEQ ID NO: 458907 - RNA, 19 nt, Homo sapiens
  misc_RNA (1)...(19): siRNA sense strand
auucauugcugaccuugug

SEQ ID NO: 458908 - RNA, 19 nt, Homo sapiens
  misc_RNA (1)...(19): siRNA sense strand
augcaggaguucaugauuc

SEQ ID NO: 458909 - RNA, 19 nt, Homo sapiens
  misc_RNA (1)...(19): siRNA sense strand
gcccugcucugcugcaaaa

SEQ ID NO: 458910 - RNA, 19 nt, Homo sapiens
  misc_RNA (1)...(19): siRNA sense strand
ggccaaguaugggaaggau

SEQ ID NO: 458911 - RNA, 19 nt, Homo sapiens
  misc_RNA (1)...(19): siRNA sense strand
ucugaguucuaucgcaaug

SEQ ID NO: 458912 - RNA, 19 nt, Homo sapiens
  misc_RNA (1)...(19): siRNA sense strand
cacauucauugcugaccuu

SEQ ID NO: 458913 - RNA, 19 nt, Homo sapiens
  misc_RNA (1)...(19): siRNA sense strand
gacugaggacacauucauu

SEQ ID NO: 458914 - RNA, 19 nt, Homo sapiens
  misc_RNA (1)...(19): siRNA sense strand
gagcgucuggccaaauaca

SEQ ID NO: 458915 - RNA, 19 nt, Homo sapiens
  misc_RNA (1)...(19): siRNA sense strand
ugcaggaguucaugauucu

SEQ ID NO: 458916 - RNA, 19 nt, Homo sapiens
  misc_RNA (1)...(19): siRNA sense strand
ccugaaggcuguggagaac

SEQ ID NO: 458917 - RNA, 19 nt, Homo sapiens
  misc_RNA (1)...(19): siRNA sense strand
aaugggaaguacgaucuug

SEQ ID NO: 458918 - RNA, 19 nt, Homo sapiens
  misc_RNA (1)...(19): siRNA sense strand
caacauccuggagaacaau

SEQ ID NO: 458919 - RNA, 19 nt, Homo sapiens
  misc_RNA (1)...(19): siRNA sense strand
gaacccugaccucauacuc

SEQ ID NO: 458920 - RNA, 19 nt, Homo sapiens
  misc_RNA (1)...(19): siRNA sense strand
uaagagacggagacaaagg

SEQ ID NO: 458921 - RNA, 19 nt, Homo sapiens
  misc_RNA (1)...(19): siRNA sense strand
aaggaagccaugcgcauug

SEQ ID NO: 458922 - RNA, 19 nt, Homo sapiens
  misc_RNA (1)...(19): siRNA sense strand
gaagaacacaccagaaauu

SEQ ID NO: 458923 - RNA, 19 nt, Homo sapiens
  misc_RNA (1)...(19): siRNA sense strand
gcagcuggcuaguggcuua

SEQ ID NO: 458924 - RNA, 19 nt, Homo sapiens
  misc_RNA (1)...(19): siRNA sense strand
gaacacaccagaaauuugu

SEQ ID NO: 458925 - RNA, 19 nt, Homo sapiens
  misc_RNA (1)...(19): siRNA sense strand
ucagaaagcuguggacuca

SEQ ID NO: 458926 - RNA, 19 nt, Homo sapiens
  misc_RNA (1)...(19): siRNA sense strand
gcgcaagauugaucagaaa

SEQ ID NO: 458927 - RNA, 19 nt, Homo sapiens
  misc_RNA (1)...(19): siRNA sense strand
aaacugcgagccagcauua

SEQ ID NO: 458928 - RNA, 19 nt, Homo sapiens
  misc_RNA (1)...(19): siRNA sense strand
gaaguacucagccgcuaaa

SEQ ID NO: 458929 - RNA, 19 nt, Homo sapiens
  misc_RNA (1)...(19): siRNA sense strand
gaagccagauacuaaagag

SEQ ID NO: 458930 - RNA, 19 nt, Homo sapiens
  misc_RNA (1)...(19): siRNA sense strand
caccagaaauuugucauug

SEQ ID NO: 458931 - RNA, 19 nt, Homo sapiens
  misc_RNA (1)...(19): siRNA sense strand
gcuggcuaguggcuuauua

SEQ ID NO: 458932 - RNA, 19 nt, Homo sapiens
  misc_RNA (1)...(19): siRNA sense strand
aggguaaccucaaagcuaa

SEQ ID NO: 458933 - RNA, 19 nt, Homo sapiens
  misc_RNA (1)...(19): siRNA sense strand
ggaaguacucagccgcuaa

SEQ ID NO: 458934 - RNA, 19 nt, Homo sapiens
  misc_RNA (1)...(19): siRNA sense strand
ucagaggaauuggcaggua

SEQ ID NO: 458935 - RNA, 19 nt, Homo sapiens
  misc_RNA (1)...(19): siRNA sense strand
cagaggaauuggcagguau

SEQ ID NO: 458936 - RNA, 19 nt, Homo sapiens
  misc_RNA (1)...(19): siRNA sense strand
uggaauuuauccucacaaa

SEQ ID NO: 458937 - RNA, 19 nt, Homo sapiens
  misc_RNA (1)...(19): siRNA sense strand
uugagaagccagauacuaa

SEQ ID NO: 458938 - RNA, 19 nt, Homo sapiens
  misc_RNA (1)...(19): siRNA sense strand
ucagucagcacgugagaaa

SEQ ID NO: 458939 - RNA, 19 nt, Homo sapiens
  misc_RNA (1)...(19): siRNA sense strand
ucacaaauugguguucuaa

SEQ ID NO: 458940 - RNA, 19 nt, Homo sapiens
  misc_RNA (1)...(19): siRNA sense strand
guacucagccgcuaaaucc

SEQ ID NO: 458941 - RNA, 19 nt, Homo sapiens
  misc_RNA (1)...(19): siRNA sense strand
ugagaagccagauacuaaa

SEQ ID NO: 458942 - RNA, 19 nt, Homo sapiens
  misc_RNA (1)...(19): siRNA sense strand
aagaacacaccagaaauuu

SEQ ID NO: 458943 - RNA, 19 nt, Homo sapiens
  misc_RNA (1)...(19): siRNA sense strand
aaggguaaccucaaagcua

SEQ ID NO: 458944 - RNA, 19 nt, Homo sapiens
  misc_RNA (1)...(19): siRNA sense strand
caagauugaucagaaagcu

SEQ ID NO: 458945 - RNA, 19 nt, Homo sapiens
  misc_RNA (1)...(19): siRNA sense strand
ccgcaacccuguccuuguc

SEQ ID NO: 458946 - RNA, 19 nt, Homo sapiens
  misc_RNA (1)...(19): siRNA sense strand
guacccgggugguuaaacu

SEQ ID NO: 458947 - RNA, 19 nt, Homo sapiens
  misc_RNA (1)...(19): siRNA sense strand
gcucugacgaauggaauuu

SEQ ID NO: 458948 - RNA, 19 nt, Homo sapiens
  misc_RNA (1)...(19): siRNA sense strand
cauugccacuucaaccaaa

SEQ ID NO: 458949 - RNA, 19 nt, Homo sapiens
  misc_RNA (1)...(19): siRNA sense strand
guugagaagccagauacua

SEQ ID NO: 458950 - RNA, 19 nt, Homo sapiens
  misc_RNA (1)...(19): siRNA sense strand
ucugacgaauggaauuuau

SEQ ID NO: 458951 - RNA, 19 nt, Homo sapiens
  misc_RNA (1)...(19): siRNA sense strand
gagaagccagauacuaaag

SEQ ID NO: 458952 - RNA, 19 nt, Homo sapiens
  misc_RNA (1)...(19): siRNA sense strand
aauccaagguugaaaagaa

SEQ ID NO: 458953 - RNA, 19 nt, Homo sapiens
  misc_RNA (1)...(19): siRNA sense strand
aaaguugagaagccagaua

SEQ ID NO: 458954 - RNA, 19 nt, Homo sapiens
  misc_RNA (1)...(19): siRNA sense strand
gaaacccgaagccaagaag

SEQ ID NO: 458955 - RNA, 19 nt, Homo sapiens
  misc_RNA (1)...(19): siRNA sense strand
agaacacaccagaaauuug

SEQ ID NO: 458956 - RNA, 19 nt, Homo sapiens
  misc_RNA (1)...(19): siRNA sense strand
ggaccauucugaucauccu

SEQ ID NO: 458957 - RNA, 19 nt, Homo sapiens
  misc_RNA (1)...(19): siRNA sense strand
gcgguacccgggugguuaa

SEQ ID NO: 458958 - RNA, 19 nt, Homo sapiens
  misc_RNA (1)...(19): siRNA sense strand
gguuaaacuucgcaaaaug

SEQ ID NO: 458959 - RNA, 19 nt, Homo sapiens
  misc_RNA (1)...(19): siRNA sense strand
gccagauacuaaagagaag

SEQ ID NO: 458960 - RNA, 19 nt, Homo sapiens
  misc_RNA (1)...(19): siRNA sense strand
uggcagguauucccgaucu

SEQ ID NO: 458961 - RNA, 19 nt, Homo sapiens
  misc_RNA (1)...(19): siRNA sense strand
cagauacuaaagagaagaa

SEQ ID NO: 458962 - RNA, 19 nt, Homo sapiens
  misc_RNA (1)...(19): siRNA sense strand
uaccugcgaucuguguuug

SEQ ID NO: 458963 - RNA, 19 nt, Homo sapiens
  misc_RNA (1)...(19): siRNA sense strand
uucccgaucugccauguau

SEQ ID NO: 458964 - RNA, 19 nt, Homo sapiens
  misc_RNA (1)...(19): siRNA sense strand
ugccauguauuccagaaag

SEQ ID NO: 458965 - RNA, 19 nt, Homo sapiens
  misc_RNA (1)...(19): siRNA sense strand
cgaucuguguuugcucuga

SEQ ID NO: 458966 - RNA, 19 nt, Homo sapiens
  misc_RNA (1)...(19): siRNA sense strand
agagaaauaugagauuacg

SEQ ID NO: 458967 - RNA, 19 nt, Homo sapiens
  misc_RNA (1)...(19): siRNA sense strand
agccagauacuaaagagaa

SEQ ID NO: 458968 - RNA, 19 nt, Homo sapiens
  misc_RNA (1)...(19): siRNA sense strand
uguuugcucugacgaaugg

SEQ ID NO: 458969 - RNA, 19 nt, Homo sapiens
  misc_RNA (1)...(19): siRNA sense strand
gcuguugagccacggcaaa

SEQ ID NO: 458970 - RNA, 19 nt, Homo sapiens
  misc_RNA (1)...(19): siRNA sense strand
gcuaaauccaagguugaaa

SEQ ID NO: 458971 - RNA, 19 nt, Homo sapiens
  misc_RNA (1)...(19): siRNA sense strand
ccgcuaaauccaagguuga

SEQ ID NO: 458972 - RNA, 19 nt, Homo sapiens
  misc_RNA (1)...(19): siRNA sense strand
acaccagaaauuugucauu

SEQ ID NO: 458973 - RNA, 19 nt, Homo sapiens
  misc_RNA (1)...(19): siRNA sense strand
cuaccugcgaucuguguuu

SEQ ID NO: 458974 - RNA, 19 nt, Homo sapiens
  misc_RNA (1)...(19): siRNA sense strand
aaucagaccuguagccauu

SEQ ID NO: 458975 - RNA, 19 nt, Homo sapiens
  misc_RNA (1)...(19): siRNA sense strand
ccagacaccuuugacgaua

SEQ ID NO: 458976 - RNA, 19 nt, Homo sapiens
  misc_RNA (1)...(19): siRNA sense strand
cagaggagauggaggagaa

SEQ ID NO: 458977 - RNA, 19 nt, Homo sapiens
  misc_RNA (1)...(19): siRNA sense strand
ucaaggcccugcauuucua

SEQ ID NO: 458978 - RNA, 19 nt, Homo sapiens
  misc_RNA (1)...(19): siRNA sense strand
gaacgggugaccuucauau

SEQ ID NO: 458979 - RNA, 19 nt, Homo sapiens
  misc_RNA (1)...(19): siRNA sense strand
gugacucucuggagcuaua

SEQ ID NO: 458980 - RNA, 19 nt, Homo sapiens
  misc_RNA (1)...(19): siRNA sense strand
gcccacagauuugguaaug

SEQ ID NO: 458981 - RNA, 19 nt, Homo sapiens
  misc_RNA (1)...(19): siRNA sense strand
gggcagccuucgcuuugaa

SEQ ID NO: 458982 - RNA, 19 nt, Homo sapiens
  misc_RNA (1)...(19): siRNA sense strand
gcuauaaucagaccuguag

SEQ ID NO: 458983 - RNA, 19 nt, Homo sapiens
  misc_RNA (1)...(19): siRNA sense strand
gccacccucuucucucuaa

SEQ ID NO: 458984 - RNA, 19 nt, Homo sapiens
  misc_RNA (1)...(19): siRNA sense strand
ggaacgggugaccuucaua

SEQ ID NO: 458985 - RNA, 19 nt, Homo sapiens
  misc_RNA (1)...(19): siRNA sense strand
caaagcccagaauggaaua

SEQ ID NO: 458986 - RNA, 19 nt, Homo sapiens
  misc_RNA (1)...(19): siRNA sense strand
cagauucucucaggaugga

SEQ ID NO: 458987 - RNA, 19 nt, Homo sapiens
  misc_RNA (1)...(19): siRNA sense strand
gggaacgggugaccuucau

SEQ ID NO: 458988 - RNA, 19 nt, Homo sapiens
  misc_RNA (1)...(19): siRNA sense strand
ucaaagcccagaauggaau

SEQ ID NO: 458989 - RNA, 19 nt, Homo sapiens
  misc_RNA (1)...(19): siRNA sense strand
ccucuucucucuaacaacu

SEQ ID NO: 458990 - RNA, 19 nt, Homo sapiens
  misc_RNA (1)...(19): siRNA sense strand
caucgaacaccuuguacug

SEQ ID NO: 458991 - RNA, 19 nt, Homo sapiens
  misc_RNA (1)...(19): siRNA sense strand
gcuggcggcuuugaugauc

SEQ ID NO: 458992 - RNA, 19 nt, Homo sapiens
  misc_RNA (1)...(19): siRNA sense strand
acucaucgaacaccuugua

SEQ ID NO: 458993 - RNA, 19 nt, Homo sapiens
  misc_RNA (1)...(19): siRNA sense strand
cuucaaagcccagaaugga

SEQ ID NO: 458994 - RNA, 19 nt, Homo sapiens
  misc_RNA (1)...(19): siRNA sense strand
gugggcagccuucgcuuug

SEQ ID NO: 458995 - RNA, 19 nt, Homo sapiens
  misc_RNA (1)...(19): siRNA sense strand
uacaccaacucaucgaaca

SEQ ID NO: 458996 - RNA, 19 nt, Homo sapiens
  misc_RNA (1)...(19): siRNA sense strand
gcgcuggcggcuuugauga

SEQ ID NO: 458997 - RNA, 19 nt, Homo sapiens
  misc_RNA (1)...(19): siRNA sense strand
ugaggcacuuucccuucaa

SEQ ID NO: 458998 - RNA, 19 nt, Homo sapiens
  misc_RNA (1)...(19): siRNA sense strand
cccgggagcucuacaugag

SEQ ID NO: 458999 - RNA, 19 nt, Homo sapiens
  misc_RNA (1)...(19): siRNA sense strand
cgggugaccuucauaugac

SEQ ID NO: 459000 - RNA, 19 nt, Homo sapiens
  misc_RNA (1)...(19): siRNA sense strand
acgggugaccuucauauga

SEQ ID NO: 459001 - RNA, 19 nt, Homo sapiens
  misc_RNA (1)...(19): siRNA sense strand
gguaaugccacccucuucu

SEQ ID NO: 459002 - RNA, 19 nt, Homo sapiens
  misc_RNA (1)...(19): siRNA sense strand
gaggcacuuucccuucaag

SEQ ID NO: 459003 - RNA, 19 nt, Homo sapiens
  misc_RNA (1)...(19): siRNA sense strand
aaauaaaccuggacaguua

SEQ ID NO: 459004 - RNA, 19 nt, Homo sapiens
  misc_RNA (1)...(19): siRNA sense strand
gaagagaucucagcuaugu

SEQ ID NO: 459005 - RNA, 19 nt, Homo sapiens
  misc_RNA (1)...(19): siRNA sense strand
gaacgugccuucagacaag

SEQ ID NO: 459006 - RNA, 19 nt, Homo sapiens
  misc_RNA (1)...(19): siRNA sense strand
ggacagcuccucccaagaa

SEQ ID NO: 459007 - RNA, 19 nt, Homo sapiens
  misc_RNA (1)...(19): siRNA sense strand
gaggacugcuuguaugaaa

SEQ ID NO: 459008 - RNA, 19 nt, Homo sapiens
  misc_RNA (1)...(19): siRNA sense strand
caagagauuuagcucauug

SEQ ID NO: 459009 - RNA, 19 nt, Homo sapiens
  misc_RNA (1)...(19): siRNA sense strand
gagaguauccuuggaaauu

SEQ ID NO: 459010 - RNA, 19 nt, Homo sapiens
  misc_RNA (1)...(19): siRNA sense strand
aagcugaguuugcugaaua

SEQ ID NO: 459011 - RNA, 19 nt, Homo sapiens
  misc_RNA (1)...(19): siRNA sense strand
gauacagacucucaacaga

SEQ ID NO: 459012 - RNA, 19 nt, Homo sapiens
  misc_RNA (1)...(19): siRNA sense strand
cagcaaggcagagauauua

SEQ ID NO: 459013 - RNA, 19 nt, Homo sapiens
  misc_RNA (1)...(19): siRNA sense strand
aagaagagaucucagcuau

SEQ ID NO: 459014 - RNA, 19 nt, Homo sapiens
  misc_RNA (1)...(19): siRNA sense strand
gaucucagcuauguacuca

SEQ ID NO: 459015 - RNA, 19 nt, Homo sapiens
  misc_RNA (1)...(19): siRNA sense strand
gaagaagagaucucagcua

SEQ ID NO: 459016 - RNA, 19 nt, Homo sapiens
  misc_RNA (1)...(19): siRNA sense strand
ggaagggcccuaugaagug

SEQ ID NO: 459017 - RNA, 19 nt, Homo sapiens
  misc_RNA (1)...(19): siRNA sense strand
gaacgacuacgagagcaua

SEQ ID NO: 459018 - RNA, 19 nt, Homo sapiens
  misc_RNA (1)...(19): siRNA sense strand
ccacagacacgaccaguga

SEQ ID NO: 459019 - RNA, 19 nt, Homo sapiens
  misc_RNA (1)...(19): siRNA sense strand
uaaauaaaccuggacaguu

SEQ ID NO: 459020 - RNA, 19 nt, Homo sapiens
  misc_RNA (1)...(19): siRNA sense strand
gccagagccugauuaugaa

SEQ ID NO: 459021 - RNA, 19 nt, Homo sapiens
  misc_RNA (1)...(19): siRNA sense strand
ccucggaucugcuggauuc

SEQ ID NO: 459022 - RNA, 19 nt, Homo sapiens
  misc_RNA (1)...(19): siRNA sense strand
gaagagagugccacagaca

SEQ ID NO: 459023 - RNA, 19 nt, Homo sapiens
  misc_RNA (1)...(19): siRNA sense strand
ggacaguuagugaauaaau

SEQ ID NO: 459024 - RNA, 19 nt, Homo sapiens
  misc_RNA (1)...(19): siRNA sense strand
uuacuagccuggcaacaga

SEQ ID NO: 459025 - RNA, 19 nt, Homo sapiens
  misc_RNA (1)...(19): siRNA sense strand
ccuaugaagugcucaagga

SEQ ID NO: 459026 - RNA, 19 nt, Homo sapiens
  misc_RNA (1)...(19): siRNA sense strand
caaaggagaacgacuacga

SEQ ID NO: 459027 - RNA, 19 nt, Homo sapiens
  misc_RNA (1)...(19): siRNA sense strand
agccagagccugauuauga

SEQ ID NO: 459028 - RNA, 19 nt, Homo sapiens
  misc_RNA (1)...(19): siRNA sense strand
gcagcaaggcagagauauu

SEQ ID NO: 459029 - RNA, 19 nt, Homo sapiens
  misc_RNA (1)...(19): siRNA sense strand
auacaagucucgggaagaa

SEQ ID NO: 459030 - RNA, 19 nt, Homo sapiens
  misc_RNA (1)...(19): siRNA sense strand
gacaguuagugaauaaauc

SEQ ID NO: 459031 - RNA, 19 nt, Homo sapiens
  misc_RNA (1)...(19): siRNA sense strand
guagagaguauccuuggaa

SEQ ID NO: 459032 - RNA, 19 nt, Homo sapiens
  misc_RNA (1)...(19): siRNA sense strand
cagugaaacuaacaagaga

SEQ ID NO: 459033 - RNA, 19 nt, Homo sapiens
  misc_RNA (1)...(19): siRNA sense strand
gaguauccuuggaaauuca

SEQ ID NO: 459034 - RNA, 19 nt, Homo sapiens
  misc_RNA (1)...(19): siRNA sense strand
uagagaguauccuuggaaa

SEQ ID NO: 459035 - RNA, 19 nt, Homo sapiens
  misc_RNA (1)...(19): siRNA sense strand
ggauggaagggcccuauga

SEQ ID NO: 459036 - RNA, 19 nt, Homo sapiens
  misc_RNA (1)...(19): siRNA sense strand
ucucuaugcuacuguuaaa

SEQ ID NO: 459037 - RNA, 19 nt, Homo sapiens
  misc_RNA (1)...(19): siRNA sense strand
gacagcuccucccaagaaa

SEQ ID NO: 459038 - RNA, 19 nt, Homo sapiens
  misc_RNA (1)...(19): siRNA sense strand
guggaggacugcuuguaug

SEQ ID NO: 459039 - RNA, 19 nt, Homo sapiens
  misc_RNA (1)...(19): siRNA sense strand
cuggacaguuagugaauaa

SEQ ID NO: 459040 - RNA, 19 nt, Homo sapiens
  misc_RNA (1)...(19): siRNA sense strand
aaauucaugugauccagaa

SEQ ID NO: 459041 - RNA, 19 nt, Homo sapiens
  misc_RNA (1)...(19): siRNA sense strand
gucaaaguguuaauguaga

SEQ ID NO: 459042 - RNA, 19 nt, Homo sapiens
  misc_RNA (1)...(19): siRNA sense strand
gauggaagggcccuaugaa

SEQ ID NO: 459043 - RNA, 19 nt, Homo sapiens
  misc_RNA (1)...(19): siRNA sense strand
gucgggagcugcccagaau

SEQ ID NO: 459044 - RNA, 19 nt, Homo sapiens
  misc_RNA (1)...(19): siRNA sense strand
gaagcgauacagacucuca

SEQ ID NO: 459045 - RNA, 19 nt, Homo sapiens
  misc_RNA (1)...(19): siRNA sense strand
guaaauaaaccuggacagu

SEQ ID NO: 459046 - RNA, 19 nt, Homo sapiens
  misc_RNA (1)...(19): siRNA sense strand
agauuuagcucauugucau

SEQ ID NO: 459047 - RNA, 19 nt, Homo sapiens
  misc_RNA (1)...(19): siRNA sense strand
caccaccugucccuguuaa

SEQ ID NO: 459048 - RNA, 19 nt, Homo sapiens
  misc_RNA (1)...(19): siRNA sense strand
ugaaggcaaagcugaguuu

SEQ ID NO: 459049 - RNA, 19 nt, Homo sapiens
  misc_RNA (1)...(19): siRNA sense strand
gaagaagaccccacucuca

SEQ ID NO: 459050 - RNA, 19 nt, Homo sapiens
  misc_RNA (1)...(19): siRNA sense strand
gugaaacuaacaagagauu

SEQ ID NO: 459051 - RNA, 19 nt, Homo sapiens
  misc_RNA (1)...(19): siRNA sense strand
ggacgagaaugaaaaccuu

SEQ ID NO: 459052 - RNA, 19 nt, Homo sapiens
  misc_RNA (1)...(19): siRNA sense strand
aaaugucgucaaaguguua

SEQ ID NO: 459053 - RNA, 19 nt, Homo sapiens
  misc_RNA (1)...(19): siRNA sense strand
guguuaauguagagaguau

SEQ ID NO: 459054 - RNA, 19 nt, Homo sapiens
  misc_RNA (1)...(19): siRNA sense strand
ccuggacaguuagugaaua

SEQ ID NO: 459055 - RNA, 19 nt, Homo sapiens
  misc_RNA (1)...(19): siRNA sense strand
gguggaggacugcuuguau

SEQ ID NO: 459056 - RNA, 19 nt, Homo sapiens
  misc_RNA (1)...(19): siRNA sense strand
ucucagcuauguacucauc

SEQ ID NO: 459057 - RNA, 19 nt, Homo sapiens
  misc_RNA (1)...(19): siRNA sense strand
gagauuuagcucauuguca

SEQ ID NO: 459058 - RNA, 19 nt, Homo sapiens
  misc_RNA (1)...(19): siRNA sense strand
acaagagauuuagcucauu

SEQ ID NO: 459059 - RNA, 19 nt, Homo sapiens
  misc_RNA (1)...(19): siRNA sense strand
aacaagagauuuagcucau

SEQ ID NO: 459060 - RNA, 19 nt, Homo sapiens
  misc_RNA (1)...(19): siRNA sense strand
gauguucagccguucaguu

SEQ ID NO: 459061 - RNA, 19 nt, Homo sapiens
  misc_RNA (1)...(19): siRNA sense strand
ggagccagagccugauuau

SEQ ID NO: 459062 - RNA, 19 nt, Homo sapiens
  misc_RNA (1)...(19): siRNA sense strand
ucaaaguguuaauguagag

SEQ ID NO: 459063 - RNA, 19 nt, Homo sapiens
  misc_RNA (1)...(19): siRNA sense strand
cuacuucugccucgaaaga

SEQ ID NO: 459064 - RNA, 19 nt, Homo sapiens
  misc_RNA (1)...(19): siRNA sense strand
caacagagaggaagaaaag

SEQ ID NO: 459065 - RNA, 19 nt, Homo sapiens
  misc_RNA (1)...(19): siRNA sense strand
gaucucuaugcuacuguua

SEQ ID NO: 459066 - RNA, 19 nt, Homo sapiens
  misc_RNA (1)...(19): siRNA sense strand
acacgaccagugaaacuaa

SEQ ID NO: 459067 - RNA, 19 nt, Homo sapiens
  misc_RNA (1)...(19): siRNA sense strand
cggaagagagugccacaga

SEQ ID NO: 459068 - RNA, 19 nt, Homo sapiens
  misc_RNA (1)...(19): siRNA sense strand
ucgucaaaguguuaaugua

SEQ ID NO: 459069 - RNA, 19 nt, Homo sapiens
  misc_RNA (1)...(19): siRNA sense strand
ccaccuacaccuccauuca

SEQ ID NO: 459070 - RNA, 19 nt, Homo sapiens
  misc_RNA (1)...(19): siRNA sense strand
aaaccuggacaguuaguga

SEQ ID NO: 459071 - RNA, 19 nt, Homo sapiens
  misc_RNA (1)...(19): siRNA sense strand
ccagugaaacuaacaagag

SEQ ID NO: 459072 - RNA, 19 nt, Homo sapiens
  misc_RNA (1)...(19): siRNA sense strand
agaguauccuuggaaauuc

SEQ ID NO: 459073 - RNA, 19 nt, Homo sapiens
  misc_RNA (1)...(19): siRNA sense strand
cgucaaaguguuaauguag

SEQ ID NO: 459074 - RNA, 19 nt, Homo sapiens
  misc_RNA (1)...(19): siRNA sense strand
aaaccaaaaugucaucaga

SEQ ID NO: 459075 - RNA, 19 nt, Homo sapiens
  misc_RNA (1)...(19): siRNA sense strand
gauuaugaagcgauacaga

SEQ ID NO: 459076 - RNA, 19 nt, Homo sapiens
  misc_RNA (1)...(19): siRNA sense strand
ucacccuccuccuguaaug

SEQ ID NO: 459077 - RNA, 19 nt, Homo sapiens
  misc_RNA (1)...(19): siRNA sense strand
ggucacccuccuccuguaa

SEQ ID NO: 459078 - RNA, 19 nt, Homo sapiens
  misc_RNA (1)...(19): siRNA sense strand
gucaucaccuuccucaucu

SEQ ID NO: 459079 - RNA, 19 nt, Homo sapiens
  misc_RNA (1)...(19): siRNA sense strand
gauuuagcucauugucaua

SEQ ID NO: 459080 - RNA, 19 nt, Homo sapiens
  misc_RNA (1)...(19): siRNA sense strand
ggaggacugcuuguaugaa

SEQ ID NO: 459081 - RNA, 19 nt, Homo sapiens
  misc_RNA (1)...(19): siRNA sense strand
aagaagccgcgacagcaua

SEQ ID NO: 459082 - RNA, 19 nt, Homo sapiens
  misc_RNA (1)...(19): siRNA sense strand
gacacgaccagugaaacua

SEQ ID NO: 459083 - RNA, 19 nt, Homo sapiens
  misc_RNA (1)...(19): siRNA sense strand
guucagccguucaguuacu

SEQ ID NO: 459084 - RNA, 19 nt, Homo sapiens
  misc_RNA (1)...(19): siRNA sense strand
cugcacaccuggagaaagg

SEQ ID NO: 459085 - RNA, 19 nt, Homo sapiens
  misc_RNA (1)...(19): siRNA sense strand
acaguacucugaccugcau

SEQ ID NO: 459086 - RNA, 19 nt, Homo sapiens
  misc_RNA (1)...(19): siRNA sense strand
gaccaugagaaccugauga

SEQ ID NO: 459087 - RNA, 19 nt, Homo sapiens
  misc_RNA (1)...(19): siRNA sense strand
uguaugaaacugugaagga

SEQ ID NO: 459088 - RNA, 19 nt, Homo sapiens
  misc_RNA (1)...(19): siRNA sense strand
ccaccaccugucccuguua

SEQ ID NO: 459089 - RNA, 19 nt, Homo sapiens
  misc_RNA (1)...(19): siRNA sense strand
ucuaugcuacuguuaaaga

SEQ ID NO: 459090 - RNA, 19 nt, Homo sapiens
  misc_RNA (1)...(19): siRNA sense strand
acaagucucgggaagaaga

SEQ ID NO: 459091 - RNA, 19 nt, Homo sapiens
  misc_RNA (1)...(19): siRNA sense strand
cgucaucaccuuccucauc

SEQ ID NO: 459092 - RNA, 19 nt, Homo sapiens
  misc_RNA (1)...(19): siRNA sense strand
ggacagcacagggaaacca

SEQ ID NO: 459093 - RNA, 19 nt, Homo sapiens
  misc_RNA (1)...(19): siRNA sense strand
gccugauuaugaagcgaua

SEQ ID NO: 459094 - RNA, 19 nt, Homo sapiens
  misc_RNA (1)...(19): siRNA sense strand
gggagaggcggaagagagu

SEQ ID NO: 459095 - RNA, 19 nt, Homo sapiens
  misc_RNA (1)...(19): siRNA sense strand
uggaagggcccuaugaagu

SEQ ID NO: 459096 - RNA, 19 nt, Homo sapiens
  misc_RNA (1)...(19): siRNA sense strand
gcacagggaaaccaaaaug

SEQ ID NO: 459097 - RNA, 19 nt, Homo sapiens
  misc_RNA (1)...(19): siRNA sense strand
acgaggaaguccagacauc

SEQ ID NO: 459098 - RNA, 19 nt, Homo sapiens
  misc_RNA (1)...(19): siRNA sense strand
ggacugcuuguaugaaacu

SEQ ID NO: 459099 - RNA, 19 nt, Homo sapiens
  misc_RNA (1)...(19): siRNA sense strand
gcggacagaugcagaucac

SEQ ID NO: 459100 - RNA, 19 nt, Homo sapiens
  misc_RNA (1)...(19): siRNA sense strand
gaggagccagagccugauu

SEQ ID NO: 459101 - RNA, 19 nt, Homo sapiens
  misc_RNA (1)...(19): siRNA sense strand
cgacuacgagagcauaagu

SEQ ID NO: 459102 - RNA, 19 nt, Homo sapiens
  misc_RNA (1)...(19): siRNA sense strand
ucccaaaggagaacgacua

SEQ ID NO: 459103 - RNA, 19 nt, Homo sapiens
  misc_RNA (1)...(19): siRNA sense strand
gaaacaagauccugcauag

SEQ ID NO: 459104 - RNA, 19 nt, Homo sapiens
  misc_RNA (1)...(19): siRNA sense strand
gugaugaaguuuccaaaua

SEQ ID NO: 459105 - RNA, 19 nt, Homo sapiens
  misc_RNA (1)...(19): siRNA sense strand
ggccaaacguggacaacua

SEQ ID NO: 459106 - RNA, 19 nt, Homo sapiens
  misc_RNA (1)...(19): siRNA sense strand
gaagguggcucugaagaag

SEQ ID NO: 459107 - RNA, 19 nt, Homo sapiens
  misc_RNA (1)...(19): siRNA sense strand
ugaagaaggugcugaugga

SEQ ID NO: 459108 - RNA, 19 nt, Homo sapiens
  misc_RNA (1)...(19): siRNA sense strand
guauauaccugguguucga

SEQ ID NO: 459109 - RNA, 19 nt, Homo sapiens
  misc_RNA (1)...(19): siRNA sense strand
caugaaggcugcuaaugug

SEQ ID NO: 459110 - RNA, 19 nt, Homo sapiens
  misc_RNA (1)...(19): siRNA sense strand
ggacaacuaugagcuguac

SEQ ID NO: 459111 - RNA, 19 nt, Homo sapiens
  misc_RNA (1)...(19): siRNA sense strand
gaaggcugcuaaugugcuu

SEQ ID NO: 459112 - RNA, 19 nt, Homo sapiens
  misc_RNA (1)...(19): siRNA sense strand
ucaagagggugaugcagau

SEQ ID NO: 459113 - RNA, 19 nt, Homo sapiens
  misc_RNA (1)...(19): siRNA sense strand
caagauccuucagcuucua

SEQ ID NO: 459114 - RNA, 19 nt, Homo sapiens
  misc_RNA (1)...(19): siRNA sense strand
caacuugauugagauuugu

SEQ ID NO: 459115 - RNA, 19 nt, Homo sapiens
  misc_RNA (1)...(19): siRNA sense strand
ugaugaaguuuccaaauac

SEQ ID NO: 459116 - RNA, 19 nt, Homo sapiens
  misc_RNA (1)...(19): siRNA sense strand
ucuacuacauccacagaaa

SEQ ID NO: 459117 - RNA, 19 nt, Homo sapiens
  misc_RNA (1)...(19): siRNA sense strand
ggacaugaaggcugcuaau

SEQ ID NO: 459118 - RNA, 19 nt, Homo sapiens
  misc_RNA (1)...(19): siRNA sense strand
agaaacaagauccugcaua

SEQ ID NO: 459119 - RNA, 19 nt, Homo sapiens
  misc_RNA (1)...(19): siRNA sense strand
ccaaccagacggaguuuga

SEQ ID NO: 459120 - RNA, 19 nt, Homo sapiens
  misc_RNA (1)...(19): siRNA sense strand
caaacguggacaacuauga

SEQ ID NO: 459121 - RNA, 19 nt, Homo sapiens
  misc_RNA (1)...(19): siRNA sense strand
gaagaaggugcugauggaa

SEQ ID NO: 459122 - RNA, 19 nt, Homo sapiens
  misc_RNA (1)...(19): siRNA sense strand
gcugggcuguugagcaaug

SEQ ID NO: 459123 - RNA, 19 nt, Homo sapiens
  misc_RNA (1)...(19): siRNA sense strand
acuaugagcuguacgaaaa

SEQ ID NO: 459124 - RNA, 19 nt, Homo sapiens
  misc_RNA (1)...(19): siRNA sense strand
acgagaauguggucaacuu

SEQ ID NO: 459125 - RNA, 19 nt, Homo sapiens
  misc_RNA (1)...(19): siRNA sense strand
ugaccuugcugggcuguug

SEQ ID NO: 459126 - RNA, 19 nt, Homo sapiens
  misc_RNA (1)...(19): siRNA sense strand
gccagaagcggaaggugaa

SEQ ID NO: 459127 - RNA, 19 nt, Homo sapiens
  misc_RNA (1)...(19): siRNA sense strand
cugcaaggguaguauauac

SEQ ID NO: 459128 - RNA, 19 nt, Homo sapiens
  misc_RNA (1)...(19): siRNA sense strand
ccaccaaccagacggaguu

SEQ ID NO: 459129 - RNA, 19 nt, Homo sapiens
  misc_RNA (1)...(19): siRNA sense strand
ucaagauccuucagcuucu

SEQ ID NO: 459130 - RNA, 19 nt, Homo sapiens
  misc_RNA (1)...(19): siRNA sense strand
gaugaaguuuccaaauacg

SEQ ID NO: 459131 - RNA, 19 nt, Homo sapiens
  misc_RNA (1)...(19): siRNA sense strand
gcaauguuuuggucaaguu

SEQ ID NO: 459132 - RNA, 19 nt, Homo sapiens
  misc_RNA (1)...(19): siRNA sense strand
gcugcaaggguaguauaua

SEQ ID NO: 459133 - RNA, 19 nt, Homo sapiens
  misc_RNA (1)...(19): siRNA sense strand
agaaggugcugauggaaaa

SEQ ID NO: 459134 - RNA, 19 nt, Homo sapiens
  misc_RNA (1)...(19): siRNA sense strand
ccacccaccugacguccau

SEQ ID NO: 459135 - RNA, 19 nt, Homo sapiens
  misc_RNA (1)...(19): siRNA sense strand
ccaacucgcccucaucagu

SEQ ID NO: 459136 - RNA, 19 nt, Homo sapiens
  misc_RNA (1)...(19): siRNA sense strand
uuaacggccucuacuacau

SEQ ID NO: 459137 - RNA, 19 nt, Homo sapiens
  misc_RNA (1)...(19): siRNA sense strand
cacuggaccucaucgacaa

SEQ ID NO: 459138 - RNA, 19 nt, Homo sapiens
  misc_RNA (1)...(19): siRNA sense strand
agaagguggcucugaagaa

SEQ ID NO: 459139 - RNA, 19 nt, Homo sapiens
  misc_RNA (1)...(19): siRNA sense strand
cggaagggcagccagauca

SEQ ID NO: 459140 - RNA, 19 nt, Homo sapiens
  misc_RNA (1)...(19): siRNA sense strand
gcaccaacucgcccucauc

SEQ ID NO: 459141 - RNA, 19 nt, Homo sapiens
  misc_RNA (1)...(19): siRNA sense strand
ggaguuugagcgcgucuuc

SEQ ID NO: 459142 - RNA, 19 nt, Homo sapiens
  misc_RNA (1)...(19): siRNA sense strand
gcaaucccgccaccaccaa

SEQ ID NO: 459143 - RNA, 19 nt, Homo sapiens
  misc_RNA (1)...(19): siRNA sense strand
gccaaacguggacaacuau

SEQ ID NO: 459144 - RNA, 19 nt, Homo sapiens
  misc_RNA (1)...(19): siRNA sense strand
gggcuguugagcaauguuu

SEQ ID NO: 459145 - RNA, 19 nt, Homo sapiens
  misc_RNA (1)...(19): siRNA sense strand
aagaaggugcugauggaaa

SEQ ID NO: 459146 - RNA, 19 nt, Homo sapiens
  misc_RNA (1)...(19): siRNA sense strand
gacaugaaggcugcuaaug

SEQ ID NO: 459147 - RNA, 19 nt, Homo sapiens
  misc_RNA (1)...(19): siRNA sense strand
ucaaguucacgcugucuga

SEQ ID NO: 459148 - RNA, 19 nt, Homo sapiens
  misc_RNA (1)...(19): siRNA sense strand
gcaagaccggccagaaggu

SEQ ID NO: 459149 - RNA, 19 nt, Homo sapiens
  misc_RNA (1)...(19): siRNA sense strand
cgagaauguggucaacuug

SEQ ID NO: 459150 - RNA, 19 nt, Homo sapiens
  misc_RNA (1)...(19): siRNA sense strand
ccucaaccacgacuucuuc

SEQ ID NO: 459151 - RNA, 19 nt, Homo sapiens
  misc_RNA (1)...(19): siRNA sense strand
caacuaugagcuguacgaa

SEQ ID NO: 459152 - RNA, 19 nt, Homo sapiens
  misc_RNA (1)...(19): siRNA sense strand
gauccugcauagggacaug

SEQ ID NO: 459153 - RNA, 19 nt, Homo sapiens
  misc_RNA (1)...(19): siRNA sense strand
uccugaagcuggcagacuu

SEQ ID NO: 459154 - RNA, 19 nt, Homo sapiens
  misc_RNA (1)...(19): siRNA sense strand
uaacggccucuacuacauc

SEQ ID NO: 459155 - RNA, 19 nt, Homo sapiens
  misc_RNA (1)...(19): siRNA sense strand
ccuucagccuggccaagaa

SEQ ID NO: 459156 - RNA, 19 nt, Homo sapiens
  misc_RNA (1)...(19): siRNA sense strand
caccaacucgcccucauca

SEQ ID NO: 459157 - RNA, 19 nt, Homo sapiens
  misc_RNA (1)...(19): siRNA sense strand
gcuuaacggccucuacuac

SEQ ID NO: 459158 - RNA, 19 nt, Homo sapiens
  misc_RNA (1)...(19): siRNA sense strand
gcgaugacgcccucaacca

SEQ ID NO: 459159 - RNA, 19 nt, Homo sapiens
  misc_RNA (1)...(19): siRNA sense strand
cauacgcacuggaccucau

SEQ ID NO: 459160 - RNA, 19 nt, Homo sapiens
  misc_RNA (1)...(19): siRNA sense strand
acacggagcagcaccaacu

SEQ ID NO: 459161 - RNA, 19 nt, Homo sapiens
  misc_RNA (1)...(19): siRNA sense strand
guaaauauguggucuguuu

SEQ ID NO: 459162 - RNA, 19 nt, Homo sapiens
  misc_RNA (1)...(19): siRNA sense strand
ggacaaggaugugaagaua

SEQ ID NO: 459163 - RNA, 19 nt, Homo sapiens
  misc_RNA (1)...(19): siRNA sense strand
caacaucgauugccuugug

SEQ ID NO: 459164 - RNA, 19 nt, Homo sapiens
  misc_RNA (1)...(19): siRNA sense strand
acaaggaugugaagauaaa

SEQ ID NO: 459165 - RNA, 19 nt, Homo sapiens
  misc_RNA (1)...(19): siRNA sense strand
ccaacgaccugguuaugaa

SEQ ID NO: 459166 - RNA, 19 nt, Homo sapiens
  misc_RNA (1)...(19): siRNA sense strand
gguaaaaucuacagccuua

SEQ ID NO: 459167 - RNA, 19 nt, Homo sapiens
  misc_RNA (1)...(19): siRNA sense strand
ggaaggaggccguguuaga

SEQ ID NO: 459168 - RNA, 19 nt, Homo sapiens
  misc_RNA (1)...(19): siRNA sense strand
gaaaagggguaaauaugug

SEQ ID NO: 459169 - RNA, 19 nt, Homo sapiens
  misc_RNA (1)...(19): siRNA sense strand
caacugaugagccuucuga

SEQ ID NO: 459170 - RNA, 19 nt, Homo sapiens
  misc_RNA (1)...(19): siRNA sense strand
cgugacaggugaucaaguu

SEQ ID NO: 459171 - RNA, 19 nt, Homo sapiens
  misc_RNA (1)...(19): siRNA sense strand
gauaaacacgccaucauag

SEQ ID NO: 459172 - RNA, 19 nt, Homo sapiens
  misc_RNA (1)...(19): siRNA sense strand
ugagaaggaugcucugcaa

SEQ ID NO: 459173 - RNA, 19 nt, Homo sapiens
  misc_RNA (1)...(19): siRNA sense strand
gggcaucgcgcaccucuau

SEQ ID NO: 459174 - RNA, 19 nt, Homo sapiens
  misc_RNA (1)...(19): siRNA sense strand
gaagauaaacacgccauca

SEQ ID NO: 459175 - RNA, 19 nt, Homo sapiens
  misc_RNA (1)...(19): siRNA sense strand
agauaaacacgccaucaua

SEQ ID NO: 459176 - RNA, 19 nt, Homo sapiens
  misc_RNA (1)...(19): siRNA sense strand
ugagacugcuguacgaaug

SEQ ID NO: 459177 - RNA, 19 nt, Homo sapiens
  misc_RNA (1)...(19): siRNA sense strand
gaaggaugcucugcaacca

SEQ ID NO: 459178 - RNA, 19 nt, Homo sapiens
  misc_RNA (1)...(19): siRNA sense strand
uggcaucuauagaaagaaa

SEQ ID NO: 459179 - RNA, 19 nt, Homo sapiens
  misc_RNA (1)...(19): siRNA sense strand
gaucuuccaacaucgauug

SEQ ID NO: 459180 - RNA, 19 nt, Homo sapiens
  misc_RNA (1)...(19): siRNA sense strand
gacaaggaugugaagauaa

SEQ ID NO: 459181 - RNA, 19 nt, Homo sapiens
  misc_RNA (1)...(19): siRNA sense strand
ugacaggugaucaaguuaa

SEQ ID NO: 459182 - RNA, 19 nt, Homo sapiens
  misc_RNA (1)...(19): siRNA sense strand
cagauaauucagcuccuua

SEQ ID NO: 459183 - RNA, 19 nt, Homo sapiens
  misc_RNA (1)...(19): siRNA sense strand
uaaacacgccaucauagug

SEQ ID NO: 459184 - RNA, 19 nt, Homo sapiens
  misc_RNA (1)...(19): siRNA sense strand
caacgugacaggugaucaa

SEQ ID NO: 459185 - RNA, 19 nt, Homo sapiens
  misc_RNA (1)...(19): siRNA sense strand
caugguggcugauguucau

SEQ ID NO: 459186 - RNA, 19 nt, Homo sapiens
  misc_RNA (1)...(19): siRNA sense strand
gacaggugaucaaguuaag

SEQ ID NO: 459187 - RNA, 19 nt, Homo sapiens
  misc_RNA (1)...(19): siRNA sense strand
gcgcaccucuauggcauug

SEQ ID NO: 459188 - RNA, 19 nt, Homo sapiens
  misc_RNA (1)...(19): siRNA sense strand
ugacccagcugcucaacuc

SEQ ID NO: 459189 - RNA, 19 nt, Homo sapiens
  misc_RNA (1)...(19): siRNA sense strand
ggucuacggagggauauuu

SEQ ID NO: 459190 - RNA, 19 nt, Homo sapiens
  misc_RNA (1)...(19): siRNA sense strand
ccagauaauucagcuccuu

SEQ ID NO: 459191 - RNA, 19 nt, Homo sapiens
  misc_RNA (1)...(19): siRNA sense strand
ggguaaauauguggucugu

SEQ ID NO: 459192 - RNA, 19 nt, Homo sapiens
  misc_RNA (1)...(19): siRNA sense strand
ggagaaaagggguaaauau

SEQ ID NO: 459193 - RNA, 19 nt, Homo sapiens
  misc_RNA (1)...(19): siRNA sense strand
cugaguacauccagaggaa

SEQ ID NO: 459194 - RNA, 19 nt, Homo sapiens
  misc_RNA (1)...(19): siRNA sense strand
gagaaaagggguaaauaug

SEQ ID NO: 459195 - RNA, 19 nt, Homo sapiens
  misc_RNA (1)...(19): siRNA sense strand
gaaggaggccguguuagac

SEQ ID NO: 459196 - RNA, 19 nt, Homo sapiens
  misc_RNA (1)...(19): siRNA sense strand
gggcuacgccagggacuuu

SEQ ID NO: 459197 - RNA, 19 nt, Homo sapiens
  misc_RNA (1)...(19): siRNA sense strand
ucgaguuccugaaggugua

SEQ ID NO: 459198 - RNA, 19 nt, Homo sapiens
  misc_RNA (1)...(19): siRNA sense strand
caggugaucaaguuaagaa

SEQ ID NO: 459199 - RNA, 19 nt, Homo sapiens
  misc_RNA (1)...(19): siRNA sense strand
gaguacauccagaggaaga

SEQ ID NO: 459200 - RNA, 19 nt, Homo sapiens
  misc_RNA (1)...(19): siRNA sense strand
gaaagcugagacugcugua

SEQ ID NO: 459201 - RNA, 19 nt, Homo sapiens
  misc_RNA (1)...(19): siRNA sense strand
gcaccucuauggcauugcu

SEQ ID NO: 459202 - RNA, 19 nt, Homo sapiens
  misc_RNA (1)...(19): siRNA sense strand
gcuccaugguggcugaugu

SEQ ID NO: 459203 - RNA, 19 nt, Homo sapiens
  misc_RNA (1)...(19): siRNA sense strand
ugggaaggaggccguguua

SEQ ID NO: 459204 - RNA, 19 nt, Homo sapiens
  misc_RNA (1)...(19): siRNA sense strand
acggagggauauuucugua

SEQ ID NO: 459205 - RNA, 19 nt, Homo sapiens
  misc_RNA (1)...(19): siRNA sense strand
uuuggcaucuauagaaaga

SEQ ID NO: 459206 - RNA, 19 nt, Homo sapiens
  misc_RNA (1)...(19): siRNA sense strand
ccgacgacgugcucgaguu

SEQ ID NO: 459207 - RNA, 19 nt, Homo sapiens
  misc_RNA (1)...(19): siRNA sense strand
gugaucaaguuaagaagcu

SEQ ID NO: 459208 - RNA, 19 nt, Homo sapiens
  misc_RNA (1)...(19): siRNA sense strand
uggccuacgucauggagaa

SEQ ID NO: 459209 - RNA, 19 nt, Homo sapiens
  misc_RNA (1)...(19): siRNA sense strand
cguguguucucgugucaga

SEQ ID NO: 459210 - RNA, 19 nt, Homo sapiens
  misc_RNA (1)...(19): siRNA sense strand
uccugaagguguaugagaa

SEQ ID NO: 459211 - RNA, 19 nt, Homo sapiens
  misc_RNA (1)...(19): siRNA sense strand
gcaucuauagaaagaaauc

SEQ ID NO: 459212 - RNA, 19 nt, Homo sapiens
  misc_RNA (1)...(19): siRNA sense strand
cgugucagaagaagauaaa

SEQ ID NO: 459213 - RNA, 19 nt, Homo sapiens
  misc_RNA (1)...(19): siRNA sense strand
gcaucgcgcaccucuaugg

SEQ ID NO: 459214 - RNA, 19 nt, Homo sapiens
  misc_RNA (1)...(19): siRNA sense strand
aagaagagccccaauggaa

SEQ ID NO: 459215 - RNA, 19 nt, Homo sapiens
  misc_RNA (1)...(19): siRNA sense strand
gugacaggugaucaaguua

SEQ ID NO: 459216 - RNA, 19 nt, Homo sapiens
  misc_RNA (1)...(19): siRNA sense strand
cgucauucccacagacauu

SEQ ID NO: 459217 - RNA, 19 nt, Homo sapiens
  misc_RNA (1)...(19): siRNA sense strand
cgaccugguuaugaacaug

SEQ ID NO: 459218 - RNA, 19 nt, Homo sapiens
  misc_RNA (1)...(19): siRNA sense strand
gcagucaaagccaucucuu

SEQ ID NO: 459219 - RNA, 19 nt, Homo sapiens
  misc_RNA (1)...(19): siRNA sense strand
cauaguggaaccggagaaa

SEQ ID NO: 459220 - RNA, 19 nt, Homo sapiens
  misc_RNA (1)...(19): siRNA sense strand
cgacgacgugcucgaguuc

SEQ ID NO: 459221 - RNA, 19 nt, Homo sapiens
  misc_RNA (1)...(19): siRNA sense strand
acccugccgucacugagua

SEQ ID NO: 459222 - RNA, 19 nt, Homo sapiens
  misc_RNA (1)...(19): siRNA sense strand
cauaugaacucgcuuuaua

SEQ ID NO: 459223 - RNA, 19 nt, Homo sapiens
  misc_RNA (1)...(19): siRNA sense strand
gaggaggucugauguguaa

SEQ ID NO: 459224 - RNA, 19 nt, Homo sapiens
  misc_RNA (1)...(19): siRNA sense strand
gcgaagaaaugcucaguga

SEQ ID NO: 459225 - RNA, 19 nt, Homo sapiens
  misc_RNA (1)...(19): siRNA sense strand
gaagaaaugcucagugauc

SEQ ID NO: 459226 - RNA, 19 nt, Homo sapiens
  misc_RNA (1)...(19): siRNA sense strand
gaggcacacuuaacaagaa

SEQ ID NO: 459227 - RNA, 19 nt, Homo sapiens
  misc_RNA (1)...(19): siRNA sense strand
gaaaagaccgggaagguuu

SEQ ID NO: 459228 - RNA, 19 nt, Homo sapiens
  misc_RNA (1)...(19): siRNA sense strand
caagaaagcauaugaacuc

SEQ ID NO: 459229 - RNA, 19 nt, Homo sapiens
  misc_RNA (1)...(19): siRNA sense strand
gauggugacugcacaaugg

SEQ ID NO: 459230 - RNA, 19 nt, Homo sapiens
  misc_RNA (1)...(19): siRNA sense strand
uggcagagcuacguggaua

SEQ ID NO: 459231 - RNA, 19 nt, Homo sapiens
  misc_RNA (1)...(19): siRNA sense strand
gaaaugcucagugaucaga

SEQ ID NO: 459232 - RNA, 19 nt, Homo sapiens
  misc_RNA (1)...(19): siRNA sense strand
gagcauuacgccaauagaa

SEQ ID NO: 459233 - RNA, 19 nt, Homo sapiens
  misc_RNA (1)...(19): siRNA sense strand
gggaagguuucuuuaccaa

SEQ ID NO: 459234 - RNA, 19 nt, Homo sapiens
  misc_RNA (1)...(19): siRNA sense strand
caauggacauccggacaaa

SEQ ID NO: 459235 - RNA, 19 nt, Homo sapiens
  misc_RNA (1)...(19): siRNA sense strand
gcauuacgccaauagaaau

SEQ ID NO: 459236 - RNA, 19 nt, Homo sapiens
  misc_RNA (1)...(19): siRNA sense strand
ggaggcacacuuaacaaga

SEQ ID NO: 459237 - RNA, 19 nt, Homo sapiens
  misc_RNA (1)...(19): siRNA sense strand
cuacguggauaaccugaug

SEQ ID NO: 459238 - RNA, 19 nt, Homo sapiens
  misc_RNA (1)...(19): siRNA sense strand
gaccgggaagguuucuuua

SEQ ID NO: 459239 - RNA, 19 nt, Homo sapiens
  misc_RNA (1)...(19): siRNA sense strand
gcucagugaucagagauag

SEQ ID NO: 459240 - RNA, 19 nt, Homo sapiens
  misc_RNA (1)...(19): siRNA sense strand
gccaauagaaauagauaug

SEQ ID NO: 459241 - RNA, 19 nt, Homo sapiens
  misc_RNA (1)...(19): siRNA sense strand
aagaaaugcucagugauca

SEQ ID NO: 459242 - RNA, 19 nt, Homo sapiens
  misc_RNA (1)...(19): siRNA sense strand
ucagagcauuacgccaaua

SEQ ID NO: 459243 - RNA, 19 nt, Homo sapiens
  misc_RNA (1)...(19): siRNA sense strand
gcauaugaacucgcuuuau

SEQ ID NO: 459244 - RNA, 19 nt, Homo sapiens
  misc_RNA (1)...(19): siRNA sense strand
gcuacugcgacgccaaaua

SEQ ID NO: 459245 - RNA, 19 nt, Homo sapiens
  misc_RNA (1)...(19): siRNA sense strand
cauuacgccaauagaaaua

SEQ ID NO: 459246 - RNA, 19 nt, Homo sapiens
  misc_RNA (1)...(19): siRNA sense strand
guccacggaggcacacuua

SEQ ID NO: 459247 - RNA, 19 nt, Homo sapiens
  misc_RNA (1)...(19): siRNA sense strand
ggacauccggacaaagagu

SEQ ID NO: 459248 - RNA, 19 nt, Homo sapiens
  misc_RNA (1)...(19): siRNA sense strand
cuacugcgacgccaaauac

SEQ ID NO: 459249 - RNA, 19 nt, Homo sapiens
  misc_RNA (1)...(19): siRNA sense strand
uuacgccaauagaaauaga

SEQ ID NO: 459250 - RNA, 19 nt, Homo sapiens
  misc_RNA (1)...(19): siRNA sense strand
aggcacacuuaacaagaaa

SEQ ID NO: 459251 - RNA, 19 nt, Homo sapiens
  misc_RNA (1)...(19): siRNA sense strand
agaccgggaagguuucuuu

SEQ ID NO: 459252 - RNA, 19 nt, Homo sapiens
  misc_RNA (1)...(19): siRNA sense strand
gggcgucuuucagagcauu

SEQ ID NO: 459253 - RNA, 19 nt, Homo sapiens
  misc_RNA (1)...(19): siRNA sense strand
cugaggaggucugaugugu

SEQ ID NO: 459254 - RNA, 19 nt, Homo sapiens
  misc_RNA (1)...(19): siRNA sense strand
ugaggaggucugaugugua

SEQ ID NO: 459255 - RNA, 19 nt, Homo sapiens
  misc_RNA (1)...(19): siRNA sense strand
ggaaaagaccgggaagguu

SEQ ID NO: 459256 - RNA, 19 nt, Homo sapiens
  misc_RNA (1)...(19): siRNA sense strand
cgggaagguuucuuuacca

SEQ ID NO: 459257 - RNA, 19 nt, Homo sapiens
  misc_RNA (1)...(19): siRNA sense strand
ccacggaggcacacuuaac

SEQ ID NO: 459258 - RNA, 19 nt, Homo sapiens
  misc_RNA (1)...(19): siRNA sense strand
uaccaacgguuugacucuu

SEQ ID NO: 459259 - RNA, 19 nt, Homo sapiens
  misc_RNA (1)...(19): siRNA sense strand
accaacgguuugacucuug

SEQ ID NO: 459260 - RNA, 19 nt, Homo sapiens
  misc_RNA (1)...(19): siRNA sense strand
cacuuaacaagaaagcaua

SEQ ID NO: 459261 - RNA, 19 nt, Homo sapiens
  misc_RNA (1)...(19): siRNA sense strand
acaauggacauccggacaa

SEQ ID NO: 459262 - RNA, 19 nt, Homo sapiens
  misc_RNA (1)...(19): siRNA sense strand
gcgaagaaaugcucaguga

SEQ ID NO: 459263 - RNA, 19 nt, Homo sapiens
  misc_RNA (1)...(19): siRNA sense strand
gaagaaaugcucagugauc

SEQ ID NO: 459264 - RNA, 19 nt, Homo sapiens
  misc_RNA (1)...(19): siRNA sense strand
gaaaagaccgggaagguuu

SEQ ID NO: 459265 - RNA, 19 nt, Homo sapiens
  misc_RNA (1)...(19): siRNA sense strand
gauggugacugcacaaugg

SEQ ID NO: 459266 - RNA, 19 nt, Homo sapiens
  misc_RNA (1)...(19): siRNA sense strand
uggcagagcuacguggaua

SEQ ID NO: 459267 - RNA, 19 nt, Homo sapiens
  misc_RNA (1)...(19): siRNA sense strand
gaaaugcucagugaucaga

SEQ ID NO: 459268 - RNA, 19 nt, Homo sapiens
  misc_RNA (1)...(19): siRNA sense strand
gagcauuacgccaauagaa

SEQ ID NO: 459269 - RNA, 19 nt, Homo sapiens
  misc_RNA (1)...(19): siRNA sense strand
gggaagguuucuuuaccaa

SEQ ID NO: 459270 - RNA, 19 nt, Homo sapiens
  misc_RNA (1)...(19): siRNA sense strand
caauggacauccggacaaa

SEQ ID NO: 459271 - RNA, 19 nt, Homo sapiens
  misc_RNA (1)...(19): siRNA sense strand
gcauuacgccaauagaaau

SEQ ID NO: 459272 - RNA, 19 nt, Homo sapiens
  misc_RNA (1)...(19): siRNA sense strand
cuacguggauaaccugaug

SEQ ID NO: 459273 - RNA, 19 nt, Homo sapiens
  misc_RNA (1)...(19): siRNA sense strand
gaccgggaagguuucuuua

SEQ ID NO: 459274 - RNA, 19 nt, Homo sapiens
  misc_RNA (1)...(19): siRNA sense strand
gcucagugaucagagauag

SEQ ID NO: 459275 - RNA, 19 nt, Homo sapiens
  misc_RNA (1)...(19): siRNA sense strand
gccaauagaaauagauaug

SEQ ID NO: 459276 - RNA, 19 nt, Homo sapiens
  misc_RNA (1)...(19): siRNA sense strand
aagaaaugcucagugauca

SEQ ID NO: 459277 - RNA, 19 nt, Homo sapiens
  misc_RNA (1)...(19): siRNA sense strand
ucagagcauuacgccaaua

SEQ ID NO: 459278 - RNA, 19 nt, Homo sapiens
  misc_RNA (1)...(19): siRNA sense strand
gcuacugcgacgccaaaua

SEQ ID NO: 459279 - RNA, 19 nt, Homo sapiens
  misc_RNA (1)...(19): siRNA sense strand
cauuacgccaauagaaaua

SEQ ID NO: 459280 - RNA, 19 nt, Homo sapiens
  misc_RNA (1)...(19): siRNA sense strand
ggacauccggacaaagagu

SEQ ID NO: 459281 - RNA, 19 nt, Homo sapiens
  misc_RNA (1)...(19): siRNA sense strand
cuacugcgacgccaaauac

SEQ ID NO: 459282 - RNA, 19 nt, Homo sapiens
  misc_RNA (1)...(19): siRNA sense strand
gggcgucuuucagagcauu

SEQ ID NO: 459283 - RNA, 19 nt, Homo sapiens
  misc_RNA (1)...(19): siRNA sense strand
agaccgggaagguuucuuu

SEQ ID NO: 459284 - RNA, 19 nt, Homo sapiens
  misc_RNA (1)...(19): siRNA sense strand
uuacgccaauagaaauaga

SEQ ID NO: 459285 - RNA, 19 nt, Homo sapiens
  misc_RNA (1)...(19): siRNA sense strand
ggaaaagaccgggaagguu

SEQ ID NO: 459286 - RNA, 19 nt, Homo sapiens
  misc_RNA (1)...(19): siRNA sense strand
cgggaagguuucuuuacca

SEQ ID NO: 459287 - RNA, 19 nt, Homo sapiens
  misc_RNA (1)...(19): siRNA sense strand
uaccaacgguuugacucuu

SEQ ID NO: 459288 - RNA, 19 nt, Homo sapiens
  misc_RNA (1)...(19): siRNA sense strand
accaacgguuugacucuug

SEQ ID NO: 459289 - RNA, 19 nt, Homo sapiens
  misc_RNA (1)...(19): siRNA sense strand
acaauggacauccggacaa

SEQ ID NO: 459290 - RNA, 19 nt, Homo sapiens
  misc_RNA (1)...(19): siRNA sense strand
gggaacugcucuuuaauua

SEQ ID NO: 459291 - RNA, 19 nt, Homo sapiens
  misc_RNA (1)...(19): siRNA sense strand
ggaaaagccucauguaaaa

SEQ ID NO: 459292 - RNA, 19 nt, Homo sapiens
  misc_RNA (1)...(19): siRNA sense strand
gacgggaacugcucuuuaa

SEQ ID NO: 459293 - RNA, 19 nt, Homo sapiens
  misc_RNA (1)...(19): siRNA sense strand
gaagaugugucccaagcuu

SEQ ID NO: 459294 - RNA, 19 nt, Homo sapiens
  misc_RNA (1)...(19): siRNA sense strand
uaagaccauucgcgauuua

SEQ ID NO: 459295 - RNA, 19 nt, Homo sapiens
  misc_RNA (1)...(19): siRNA sense strand
ggacgggaacugcucuuua

SEQ ID NO: 459296 - RNA, 19 nt, Homo sapiens
  misc_RNA (1)...(19): siRNA sense strand
ggaagacuguccucuaugg

SEQ ID NO: 459297 - RNA, 19 nt, Homo sapiens
  misc_RNA (1)...(19): siRNA sense strand
ggaagaggaagaagaguga

SEQ ID NO: 459298 - RNA, 19 nt, Homo sapiens
  misc_RNA (1)...(19): siRNA sense strand
agauuugacugcaagauug

SEQ ID NO: 459299 - RNA, 19 nt, Homo sapiens
  misc_RNA (1)...(19): siRNA sense strand
ggaugacgaugccaaguac

SEQ ID NO: 459300 - RNA, 19 nt, Homo sapiens
  misc_RNA (1)...(19): siRNA sense strand
gggaugacgaugccaagua

SEQ ID NO: 459301 - RNA, 19 nt, Homo sapiens
  misc_RNA (1)...(19): siRNA sense strand
cuaagaccauucgcgauuu

SEQ ID NO: 459302 - RNA, 19 nt, Homo sapiens
  misc_RNA (1)...(19): siRNA sense strand
guaaaacccuauuucucua

SEQ ID NO: 459303 - RNA, 19 nt, Homo sapiens
  misc_RNA (1)...(19): siRNA sense strand
ggaacugcucuuuaauuau

SEQ ID NO: 459304 - RNA, 19 nt, Homo sapiens
  misc_RNA (1)...(19): siRNA sense strand
acugcaagauugaaggaua

SEQ ID NO: 459305 - RNA, 19 nt, Homo sapiens
  misc_RNA (1)...(19): siRNA sense strand
ugucaacagucuuggagaa

SEQ ID NO: 459306 - RNA, 19 nt, Homo sapiens
  misc_RNA (1)...(19): siRNA sense strand
cauucgcgauuuagaaguu

SEQ ID NO: 459307 - RNA, 19 nt, Homo sapiens
  misc_RNA (1)...(19): siRNA sense strand
ccagauagacuacgaugag

SEQ ID NO: 459308 - RNA, 19 nt, Homo sapiens
  misc_RNA (1)...(19): siRNA sense strand
ccaaccagcccgcucaaug

SEQ ID NO: 459309 - RNA, 19 nt, Homo sapiens
  misc_RNA (1)...(19): siRNA sense strand
gaccauucgcgauuuagaa

SEQ ID NO: 459310 - RNA, 19 nt, Homo sapiens
  misc_RNA (1)...(19): siRNA sense strand
uuggaagacuguccucuau

SEQ ID NO: 459311 - RNA, 19 nt, Homo sapiens
  misc_RNA (1)...(19): siRNA sense strand
ucuaagaccauucgcgauu

SEQ ID NO: 459312 - RNA, 19 nt, Homo sapiens
  misc_RNA (1)...(19): siRNA sense strand
gcugugagagccauuggaa

SEQ ID NO: 459313 - RNA, 19 nt, Homo sapiens
  misc_RNA (1)...(19): siRNA sense strand
cgggaacugcucuuuaauu

SEQ ID NO: 459314 - RNA, 19 nt, Homo sapiens
  misc_RNA (1)...(19): siRNA sense strand
ugugagagccauuggaaga

SEQ ID NO: 459315 - RNA, 19 nt, Homo sapiens
  misc_RNA (1)...(19): siRNA sense strand
uagauuugacugcaagauu

SEQ ID NO: 459316 - RNA, 19 nt, Homo sapiens
  misc_RNA (1)...(19): siRNA sense strand
ucaacagggucaccaacca

SEQ ID NO: 459317 - RNA, 19 nt, Homo sapiens
  misc_RNA (1)...(19): siRNA sense strand
gauuugacugcaagauuga

SEQ ID NO: 459318 - RNA, 19 nt, Homo sapiens
  misc_RNA (1)...(19): siRNA sense strand
caaccagcccgcucaaugc

SEQ ID NO: 459319 - RNA, 19 nt, Homo sapiens
  misc_RNA (1)...(19): siRNA sense strand
aaacccuauuucucuaaga

SEQ ID NO: 459320 - RNA, 19 nt, Homo sapiens
  misc_RNA (1)...(19): siRNA sense strand
cuauuucucuaagaccauu

SEQ ID NO: 459321 - RNA, 19 nt, Homo sapiens
  misc_RNA (1)...(19): siRNA sense strand
aggaaaagccucauguaaa

SEQ ID NO: 459322 - RNA, 19 nt, Homo sapiens
  misc_RNA (1)...(19): siRNA sense strand
gggaacugcucuuuaauua

SEQ ID NO: 459323 - RNA, 19 nt, Homo sapiens
  misc_RNA (1)...(19): siRNA sense strand
ggaaaagccucauguaaaa

SEQ ID NO: 459324 - RNA, 19 nt, Homo sapiens
  misc_RNA (1)...(19): siRNA sense strand
gacgggaacugcucuuuaa

SEQ ID NO: 459325 - RNA, 19 nt, Homo sapiens
  misc_RNA (1)...(19): siRNA sense strand
gaagaugugucccaagcuu

SEQ ID NO: 459326 - RNA, 19 nt, Homo sapiens
  misc_RNA (1)...(19): siRNA sense strand
uaagaccauucgcgauuua

SEQ ID NO: 459327 - RNA, 19 nt, Homo sapiens
  misc_RNA (1)...(19): siRNA sense strand
ggacgggaacugcucuuua

SEQ ID NO: 459328 - RNA, 19 nt, Homo sapiens
  misc_RNA (1)...(19): siRNA sense strand
ggaagacuguccucuaugg

SEQ ID NO: 459329 - RNA, 19 nt, Homo sapiens
  misc_RNA (1)...(19): siRNA sense strand
ggaagaggaagaagaguga

SEQ ID NO: 459330 - RNA, 19 nt, Homo sapiens
  misc_RNA (1)...(19): siRNA sense strand
agauuugacugcaagauug

SEQ ID NO: 459331 - RNA, 19 nt, Homo sapiens
  misc_RNA (1)...(19): siRNA sense strand
ggaugacgaugccaaguac

SEQ ID NO: 459332 - RNA, 19 nt, Homo sapiens
  misc_RNA (1)...(19): siRNA sense strand
gggaugacgaugccaagua

SEQ ID NO: 459333 - RNA, 19 nt, Homo sapiens
  misc_RNA (1)...(19): siRNA sense strand
cuaagaccauucgcgauuu

SEQ ID NO: 459334 - RNA, 19 nt, Homo sapiens
  misc_RNA (1)...(19): siRNA sense strand
guaaaacccuauuucucua

SEQ ID NO: 459335 - RNA, 19 nt, Homo sapiens
  misc_RNA (1)...(19): siRNA sense strand
ggaacugcucuuuaauuau

SEQ ID NO: 459336 - RNA, 19 nt, Homo sapiens
  misc_RNA (1)...(19): siRNA sense strand
acugcaagauugaaggaua

SEQ ID NO: 459337 - RNA, 19 nt, Homo sapiens
  misc_RNA (1)...(19): siRNA sense strand
ugucaacagucuuggagaa

SEQ ID NO: 459338 - RNA, 19 nt, Homo sapiens
  misc_RNA (1)...(19): siRNA sense strand
cauucgcgauuuagaaguu

SEQ ID NO: 459339 - RNA, 19 nt, Homo sapiens
  misc_RNA (1)...(19): siRNA sense strand
ccagauagacuacgaugag

SEQ ID NO: 459340 - RNA, 19 nt, Homo sapiens
  misc_RNA (1)...(19): siRNA sense strand
ccaaccagcccgcucaaug

SEQ ID NO: 459341 - RNA, 19 nt, Homo sapiens
  misc_RNA (1)...(19): siRNA sense strand
gaccauucgcgauuuagaa

SEQ ID NO: 459342 - RNA, 19 nt, Homo sapiens
  misc_RNA (1)...(19): siRNA sense strand
uuggaagacuguccucuau

SEQ ID NO: 459343 - RNA, 19 nt, Homo sapiens
  misc_RNA (1)...(19): siRNA sense strand
ucuaagaccauucgcgauu

SEQ ID NO: 459344 - RNA, 19 nt, Homo sapiens
  misc_RNA (1)...(19): siRNA sense strand
gcugugagagccauuggaa

SEQ ID NO: 459345 - RNA, 19 nt, Homo sapiens
  misc_RNA (1)...(19): siRNA sense strand
cgggaacugcucuuuaauu

SEQ ID NO: 459346 - RNA, 19 nt, Homo sapiens
  misc_RNA (1)...(19): siRNA sense strand
ugugagagccauuggaaga

SEQ ID NO: 459347 - RNA, 19 nt, Homo sapiens
  misc_RNA (1)...(19): siRNA sense strand
uagauuugacugcaagauu

SEQ ID NO: 459348 - RNA, 19 nt, Homo sapiens
  misc_RNA (1)...(19): siRNA sense strand
ucaacagggucaccaacca

SEQ ID NO: 459349 - RNA, 19 nt, Homo sapiens
  misc_RNA (1)...(19): siRNA sense strand
gauuugacugcaagauuga

SEQ ID NO: 459350 - RNA, 19 nt, Homo sapiens
  misc_RNA (1)...(19): siRNA sense strand
caaccagcccgcucaaugc

SEQ ID NO: 459351 - RNA, 19 nt, Homo sapiens
  misc_RNA (1)...(19): siRNA sense strand
aaacccuauuucucuaaga

SEQ ID NO: 459352 - RNA, 19 nt, Homo sapiens
  misc_RNA (1)...(19): siRNA sense strand
cuauuucucuaagaccauu

SEQ ID NO: 459353 - RNA, 19 nt, Homo sapiens
  misc_RNA (1)...(19): siRNA sense strand
aggaaaagccucauguaaa

SEQ ID NO: 459354 - RNA, 19 nt, Homo sapiens
  misc_RNA (1)...(19): siRNA sense strand
gggaacugcucuuuaauua

SEQ ID NO: 459355 - RNA, 19 nt, Homo sapiens
  misc_RNA (1)...(19): siRNA sense strand
ggaaaagccucauguaaaa

SEQ ID NO: 459356 - RNA, 19 nt, Homo sapiens
  misc_RNA (1)...(19): siRNA sense strand
gacgggaacugcucuuuaa

SEQ ID NO: 459357 - RNA, 19 nt, Homo sapiens
  misc_RNA (1)...(19): siRNA sense strand
gaagaugugucccaagcuu

SEQ ID NO: 459358 - RNA, 19 nt, Homo sapiens
  misc_RNA (1)...(19): siRNA sense strand
uaagaccauucgcgauuua

SEQ ID NO: 459359 - RNA, 19 nt, Homo sapiens
  misc_RNA (1)...(19): siRNA sense strand
ggacgggaacugcucuuua

SEQ ID NO: 459360 - RNA, 19 nt, Homo sapiens
  misc_RNA (1)...(19): siRNA sense strand
ggaagacuguccucuaugg

SEQ ID NO: 459361 - RNA, 19 nt, Homo sapiens
  misc_RNA (1)...(19): siRNA sense strand
ggaagaggaagaagaguga

SEQ ID NO: 459362 - RNA, 19 nt, Homo sapiens
  misc_RNA (1)...(19): siRNA sense strand
agauuugacugcaagauug

SEQ ID NO: 459363 - RNA, 19 nt, Homo sapiens
  misc_RNA (1)...(19): siRNA sense strand
ggaugacgaugccaaguac

SEQ ID NO: 459364 - RNA, 19 nt, Homo sapiens
  misc_RNA (1)...(19): siRNA sense strand
gggaugacgaugccaagua

SEQ ID NO: 459365 - RNA, 19 nt, Homo sapiens
  misc_RNA (1)...(19): siRNA sense strand
cuaagaccauucgcgauuu

SEQ ID NO: 459366 - RNA, 19 nt, Homo sapiens
  misc_RNA (1)...(19): siRNA sense strand
guaaaacccuauuucucua

SEQ ID NO: 459367 - RNA, 19 nt, Homo sapiens
  misc_RNA (1)...(19): siRNA sense strand
ggaacugcucuuuaauuau

SEQ ID NO: 459368 - RNA, 19 nt, Homo sapiens
  misc_RNA (1)...(19): siRNA sense strand
acugcaagauugaaggaua

SEQ ID NO: 459369 - RNA, 19 nt, Homo sapiens
  misc_RNA (1)...(19): siRNA sense strand
ugucaacagucuuggagaa

SEQ ID NO: 459370 - RNA, 19 nt, Homo sapiens
  misc_RNA (1)...(19): siRNA sense strand
cauucgcgauuuagaaguu

SEQ ID NO: 459371 - RNA, 19 nt, Homo sapiens
  misc_RNA (1)...(19): siRNA sense strand
ccagauagacuacgaugag

SEQ ID NO: 459372 - RNA, 19 nt, Homo sapiens
  misc_RNA (1)...(19): siRNA sense strand
ccaaccagcccgcucaaug

SEQ ID NO: 459373 - RNA, 19 nt, Homo sapiens
  misc_RNA (1)...(19): siRNA sense strand
gaccauucgcgauuuagaa

SEQ ID NO: 459374 - RNA, 19 nt, Homo sapiens
  misc_RNA (1)...(19): siRNA sense strand
uuggaagacuguccucuau

SEQ ID NO: 459375 - RNA, 19 nt, Homo sapiens
  misc_RNA (1)...(19): siRNA sense strand
ucuaagaccauucgcgauu

SEQ ID NO: 459376 - RNA, 19 nt, Homo sapiens
  misc_RNA (1)...(19): siRNA sense strand
gcugugagagccauuggaa

SEQ ID NO: 459377 - RNA, 19 nt, Homo sapiens
  misc_RNA (1)...(19): siRNA sense strand
cgggaacugcucuuuaauu

SEQ ID NO: 459378 - RNA, 19 nt, Homo sapiens
  misc_RNA (1)...(19): siRNA sense strand
ugugagagccauuggaaga

SEQ ID NO: 459379 - RNA, 19 nt, Homo sapiens
  misc_RNA (1)...(19): siRNA sense strand
uagauuugacugcaagauu

SEQ ID NO: 459380 - RNA, 19 nt, Homo sapiens
  misc_RNA (1)...(19): siRNA sense strand
ucaacagggucaccaacca

SEQ ID NO: 459381 - RNA, 19 nt, Homo sapiens
  misc_RNA (1)...(19): siRNA sense strand
gauuugacugcaagauuga

SEQ ID NO: 459382 - RNA, 19 nt, Homo sapiens
  misc_RNA (1)...(19): siRNA sense strand
caaccagcccgcucaaugc

SEQ ID NO: 459383 - RNA, 19 nt, Homo sapiens
  misc_RNA (1)...(19): siRNA sense strand
aaacccuauuucucuaaga

SEQ ID NO: 459384 - RNA, 19 nt, Homo sapiens
  misc_RNA (1)...(19): siRNA sense strand
cuauuucucuaagaccauu

SEQ ID NO: 459385 - RNA, 19 nt, Homo sapiens
  misc_RNA (1)...(19): siRNA sense strand
aggaaaagccucauguaaa

SEQ ID NO: 459386 - RNA, 19 nt, Homo sapiens
  misc_RNA (1)...(19): siRNA sense strand
gggaacugcucuuuaauua

SEQ ID NO: 459387 - RNA, 19 nt, Homo sapiens
  misc_RNA (1)...(19): siRNA sense strand
ggaaaagccucauguaaaa

SEQ ID NO: 459388 - RNA, 19 nt, Homo sapiens
  misc_RNA (1)...(19): siRNA sense strand
gacgggaacugcucuuuaa

SEQ ID NO: 459389 - RNA, 19 nt, Homo sapiens
  misc_RNA (1)...(19): siRNA sense strand
gaagaugugucccaagcuu

SEQ ID NO: 459390 - RNA, 19 nt, Homo sapiens
  misc_RNA (1)...(19): siRNA sense strand
uaagaccauucgcgauuua

SEQ ID NO: 459391 - RNA, 19 nt, Homo sapiens
  misc_RNA (1)...(19): siRNA sense strand
ggacgggaacugcucuuua

SEQ ID NO: 459392 - RNA, 19 nt, Homo sapiens
  misc_RNA (1)...(19): siRNA sense strand
ggaagacuguccucuaugg

SEQ ID NO: 459393 - RNA, 19 nt, Homo sapiens
  misc_RNA (1)...(19): siRNA sense strand
ggaagaggaagaagaguga

SEQ ID NO: 459394 - RNA, 19 nt, Homo sapiens
  misc_RNA (1)...(19): siRNA sense strand
agauuugacugcaagauug

SEQ ID NO: 459395 - RNA, 19 nt, Homo sapiens
  misc_RNA (1)...(19): siRNA sense strand
ggaugacgaugccaaguac

SEQ ID NO: 459396 - RNA, 19 nt, Homo sapiens
  misc_RNA (1)...(19): siRNA sense strand
gggaugacgaugccaagua

SEQ ID NO: 459397 - RNA, 19 nt, Homo sapiens
  misc_RNA (1)...(19): siRNA sense strand
cuaagaccauucgcgauuu

SEQ ID NO: 459398 - RNA, 19 nt, Homo sapiens
  misc_RNA (1)...(19): siRNA sense strand
guaaaacccuauuucucua

SEQ ID NO: 459399 - RNA, 19 nt, Homo sapiens
  misc_RNA (1)...(19): siRNA sense strand
ggaacugcucuuuaauuau

SEQ ID NO: 459400 - RNA, 19 nt, Homo sapiens
  misc_RNA (1)...(19): siRNA sense strand
acugcaagauugaaggaua

SEQ ID NO: 459401 - RNA, 19 nt, Homo sapiens
  misc_RNA (1)...(19): siRNA sense strand
ugucaacagucuuggagaa

SEQ ID NO: 459402 - RNA, 19 nt, Homo sapiens
  misc_RNA (1)...(19): siRNA sense strand
cauucgcgauuuagaaguu

SEQ ID NO: 459403 - RNA, 19 nt, Homo sapiens
  misc_RNA (1)...(19): siRNA sense strand
ccagauagacuacgaugag

SEQ ID NO: 459404 - RNA, 19 nt, Homo sapiens
  misc_RNA (1)...(19): siRNA sense strand
ccaaccagcccgcucaaug

SEQ ID NO: 459405 - RNA, 19 nt, Homo sapiens
  misc_RNA (1)...(19): siRNA sense strand
gaccauucgcgauuuagaa

SEQ ID NO: 459406 - RNA, 19 nt, Homo sapiens
  misc_RNA (1)...(19): siRNA sense strand
uuggaagacuguccucuau

SEQ ID NO: 459407 - RNA, 19 nt, Homo sapiens
  misc_RNA (1)...(19): siRNA sense strand
ucuaagaccauucgcgauu

SEQ ID NO: 459408 - RNA, 19 nt, Homo sapiens
  misc_RNA (1)...(19): siRNA sense strand
gcugugagagccauuggaa

SEQ ID NO: 459409 - RNA, 19 nt, Homo sapiens
  misc_RNA (1)...(19): siRNA sense strand
cgggaacugcucuuuaauu

SEQ ID NO: 459410 - RNA, 19 nt, Homo sapiens
  misc_RNA (1)...(19): siRNA sense strand
ugugagagccauuggaaga

SEQ ID NO: 459411 - RNA, 19 nt, Homo sapiens
  misc_RNA (1)...(19): siRNA sense strand
uagauuugacugcaagauu

SEQ ID NO: 459412 - RNA, 19 nt, Homo sapiens
  misc_RNA (1)...(19): siRNA sense strand
ucaacagggucaccaacca

SEQ ID NO: 459413 - RNA, 19 nt, Homo sapiens
  misc_RNA (1)...(19): siRNA sense strand
gauuugacugcaagauuga

SEQ ID NO: 459414 - RNA, 19 nt, Homo sapiens
  misc_RNA (1)...(19): siRNA sense strand
caaccagcccgcucaaugc

SEQ ID NO: 459415 - RNA, 19 nt, Homo sapiens
  misc_RNA (1)...(19): siRNA sense strand
aaacccuauuucucuaaga

SEQ ID NO: 459416 - RNA, 19 nt, Homo sapiens
  misc_RNA (1)...(19): siRNA sense strand
cuauuucucuaagaccauu

SEQ ID NO: 459417 - RNA, 19 nt, Homo sapiens
  misc_RNA (1)...(19): siRNA sense strand
aggaaaagccucauguaaa

SEQ ID NO: 459418 - RNA, 19 nt, Homo sapiens
  misc_RNA (1)...(19): siRNA sense strand
gggaacugcucuuuaauua

SEQ ID NO: 459419 - RNA, 19 nt, Homo sapiens
  misc_RNA (1)...(19): siRNA sense strand
ggaaaagccucauguaaaa

SEQ ID NO: 459420 - RNA, 19 nt, Homo sapiens
  misc_RNA (1)...(19): siRNA sense strand
gacgggaacugcucuuuaa

SEQ ID NO: 459421 - RNA, 19 nt, Homo sapiens
  misc_RNA (1)...(19): siRNA sense strand
gaagaugugucccaagcuu

SEQ ID NO: 459422 - RNA, 19 nt, Homo sapiens
  misc_RNA (1)...(19): siRNA sense strand
uaagaccauucgcgauuua

SEQ ID NO: 459423 - RNA, 19 nt, Homo sapiens
  misc_RNA (1)...(19): siRNA sense strand
ggacgggaacugcucuuua

SEQ ID NO: 459424 - RNA, 19 nt, Homo sapiens
  misc_RNA (1)...(19): siRNA sense strand
ggaagacuguccucuaugg

SEQ ID NO: 459425 - RNA, 19 nt, Homo sapiens
  misc_RNA (1)...(19): siRNA sense strand
ggaagaggaagaagaguga

SEQ ID NO: 459426 - RNA, 19 nt, Homo sapiens
  misc_RNA (1)...(19): siRNA sense strand
agauuugacugcaagauug

SEQ ID NO: 459427 - RNA, 19 nt, Homo sapiens
  misc_RNA (1)...(19): siRNA sense strand
ggaugacgaugccaaguac

SEQ ID NO: 459428 - RNA, 19 nt, Homo sapiens
  misc_RNA (1)...(19): siRNA sense strand
gggaugacgaugccaagua

SEQ ID NO: 459429 - RNA, 19 nt, Homo sapiens
  misc_RNA (1)...(19): siRNA sense strand
cuaagaccauucgcgauuu

SEQ ID NO: 459430 - RNA, 19 nt, Homo sapiens
  misc_RNA (1)...(19): siRNA sense strand
guaaaacccuauuucucua

SEQ ID NO: 459431 - RNA, 19 nt, Homo sapiens
  misc_RNA (1)...(19): siRNA sense strand
ggaacugcucuuuaauuau

SEQ ID NO: 459432 - RNA, 19 nt, Homo sapiens
  misc_RNA (1)...(19): siRNA sense strand
acugcaagauugaaggaua

SEQ ID NO: 459433 - RNA, 19 nt, Homo sapiens
  misc_RNA (1)...(19): siRNA sense strand
ugucaacagucuuggagaa

SEQ ID NO: 459434 - RNA, 19 nt, Homo sapiens
  misc_RNA (1)...(19): siRNA sense strand
cauucgcgauuuagaaguu

SEQ ID NO: 459435 - RNA, 19 nt, Homo sapiens
  misc_RNA (1)...(19): siRNA sense strand
ccagauagacuacgaugag

SEQ ID NO: 459436 - RNA, 19 nt, Homo sapiens
  misc_RNA (1)...(19): siRNA sense strand
ccaaccagcccgcucaaug

SEQ ID NO: 459437 - RNA, 19 nt, Homo sapiens
  misc_RNA (1)...(19): siRNA sense strand
gaccauucgcgauuuagaa

SEQ ID NO: 459438 - RNA, 19 nt, Homo sapiens
  misc_RNA (1)...(19): siRNA sense strand
uuggaagacuguccucuau

SEQ ID NO: 459439 - RNA, 19 nt, Homo sapiens
  misc_RNA (1)...(19): siRNA sense strand
ucuaagaccauucgcgauu

SEQ ID NO: 459440 - RNA, 19 nt, Homo sapiens
  misc_RNA (1)...(19): siRNA sense strand
gcugugagagccauuggaa

SEQ ID NO: 459441 - RNA, 19 nt, Homo sapiens
  misc_RNA (1)...(19): siRNA sense strand
cgggaacugcucuuuaauu

SEQ ID NO: 459442 - RNA, 19 nt, Homo sapiens
  misc_RNA (1)...(19): siRNA sense strand
ugugagagccauuggaaga

SEQ ID NO: 459443 - RNA, 19 nt, Homo sapiens
  misc_RNA (1)...(19): siRNA sense strand
uagauuugacugcaagauu

SEQ ID NO: 459444 - RNA, 19 nt, Homo sapiens
  misc_RNA (1)...(19): siRNA sense strand
ucaacagggucaccaacca

SEQ ID NO: 459445 - RNA, 19 nt, Homo sapiens
  misc_RNA (1)...(19): siRNA sense strand
gauuugacugcaagauuga

SEQ ID NO: 459446 - RNA, 19 nt, Homo sapiens
  misc_RNA (1)...(19): siRNA sense strand
caaccagcccgcucaaugc

SEQ ID NO: 459447 - RNA, 19 nt, Homo sapiens
  misc_RNA (1)...(19): siRNA sense strand
aaacccuauuucucuaaga

SEQ ID NO: 459448 - RNA, 19 nt, Homo sapiens
  misc_RNA (1)...(19): siRNA sense strand
cuauuucucuaagaccauu

SEQ ID NO: 459449 - RNA, 19 nt, Homo sapiens
  misc_RNA (1)...(19): siRNA sense strand
aggaaaagccucauguaaa

SEQ ID NO: 459450 - RNA, 19 nt, Homo sapiens
  misc_RNA (1)...(19): siRNA sense strand
gggaacugcucuuuaauua

SEQ ID NO: 459451 - RNA, 19 nt, Homo sapiens
  misc_RNA (1)...(19): siRNA sense strand
ggaaaagccucauguaaaa

SEQ ID NO: 459452 - RNA, 19 nt, Homo sapiens
  misc_RNA (1)...(19): siRNA sense strand
gacgggaacugcucuuuaa

SEQ ID NO: 459453 - RNA, 19 nt, Homo sapiens
  misc_RNA (1)...(19): siRNA sense strand
gaagaugugucccaagcuu

SEQ ID NO: 459454 - RNA, 19 nt, Homo sapiens
  misc_RNA (1)...(19): siRNA sense strand
uaagaccauucgcgauuua

SEQ ID NO: 459455 - RNA, 19 nt, Homo sapiens
  misc_RNA (1)...(19): siRNA sense strand
ggacgggaacugcucuuua

SEQ ID NO: 459456 - RNA, 19 nt, Homo sapiens
  misc_RNA (1)...(19): siRNA sense strand
ggaagacuguccucuaugg

SEQ ID NO: 459457 - RNA, 19 nt, Homo sapiens
  misc_RNA (1)...(19): siRNA sense strand
ggaagaggaagaagaguga

SEQ ID NO: 459458 - RNA, 19 nt, Homo sapiens
  misc_RNA (1)...(19): siRNA sense strand
agauuugacugcaagauug

SEQ ID NO: 459459 - RNA, 19 nt, Homo sapiens
  misc_RNA (1)...(19): siRNA sense strand
ggaugacgaugccaaguac

SEQ ID NO: 459460 - RNA, 19 nt, Homo sapiens
  misc_RNA (1)...(19): siRNA sense strand
gggaugacgaugccaagua

SEQ ID NO: 459461 - RNA, 19 nt, Homo sapiens
  misc_RNA (1)...(19): siRNA sense strand
cuaagaccauucgcgauuu

SEQ ID NO: 459462 - RNA, 19 nt, Homo sapiens
  misc_RNA (1)...(19): siRNA sense strand
guaaaacccuauuucucua

SEQ ID NO: 459463 - RNA, 19 nt, Homo sapiens
  misc_RNA (1)...(19): siRNA sense strand
ggaacugcucuuuaauuau

SEQ ID NO: 459464 - RNA, 19 nt, Homo sapiens
  misc_RNA (1)...(19): siRNA sense strand
acugcaagauugaaggaua

SEQ ID NO: 459465 - RNA, 19 nt, Homo sapiens
  misc_RNA (1)...(19): siRNA sense strand
ugucaacagucuuggagaa

SEQ ID NO: 459466 - RNA, 19 nt, Homo sapiens
  misc_RNA (1)...(19): siRNA sense strand
cauucgcgauuuagaaguu

SEQ ID NO: 459467 - RNA, 19 nt, Homo sapiens
  misc_RNA (1)...(19): siRNA sense strand
ccagauagacuacgaugag

SEQ ID NO: 459468 - RNA, 19 nt, Homo sapiens
  misc_RNA (1)...(19): siRNA sense strand
ccaaccagcccgcucaaug

SEQ ID NO: 459469 - RNA, 19 nt, Homo sapiens
  misc_RNA (1)...(19): siRNA sense strand
gaccauucgcgauuuagaa

SEQ ID NO: 459470 - RNA, 19 nt, Homo sapiens
  misc_RNA (1)...(19): siRNA sense strand
uuggaagacuguccucuau

SEQ ID NO: 459471 - RNA, 19 nt, Homo sapiens
  misc_RNA (1)...(19): siRNA sense strand
ucuaagaccauucgcgauu

SEQ ID NO: 459472 - RNA, 19 nt, Homo sapiens
  misc_RNA (1)...(19): siRNA sense strand
gcugugagagccauuggaa

SEQ ID NO: 459473 - RNA, 19 nt, Homo sapiens
  misc_RNA (1)...(19): siRNA sense strand
cgggaacugcucuuuaauu

SEQ ID NO: 459474 - RNA, 19 nt, Homo sapiens
  misc_RNA (1)...(19): siRNA sense strand
ugugagagccauuggaaga

SEQ ID NO: 459475 - RNA, 19 nt, Homo sapiens
  misc_RNA (1)...(19): siRNA sense strand
uagauuugacugcaagauu

SEQ ID NO: 459476 - RNA, 19 nt, Homo sapiens
  misc_RNA (1)...(19): siRNA sense strand
ucaacagggucaccaacca

SEQ ID NO: 459477 - RNA, 19 nt, Homo sapiens
  misc_RNA (1)...(19): siRNA sense strand
gauuugacugcaagauuga

SEQ ID NO: 459478 - RNA, 19 nt, Homo sapiens
  misc_RNA (1)...(19): siRNA sense strand
caaccagcccgcucaaugc

SEQ ID NO: 459479 - RNA, 19 nt, Homo sapiens
  misc_RNA (1)...(19): siRNA sense strand
aaacccuauuucucuaaga

SEQ ID NO: 459480 - RNA, 19 nt, Homo sapiens
  misc_RNA (1)...(19): siRNA sense strand
cuauuucucuaagaccauu

SEQ ID NO: 459481 - RNA, 19 nt, Homo sapiens
  misc_RNA (1)...(19): siRNA sense strand
aggaaaagccucauguaaa

SEQ ID NO: 459482 - RNA, 19 nt, Homo sapiens
  misc_RNA (1)...(19): siRNA sense strand
gggaacugcucuuuaauua

SEQ ID NO: 459483 - RNA, 19 nt, Homo sapiens
  misc_RNA (1)...(19): siRNA sense strand
ggaaaagccucauguaaaa

SEQ ID NO: 459484 - RNA, 19 nt, Homo sapiens
  misc_RNA (1)...(19): siRNA sense strand
gacgggaacugcucuuuaa

SEQ ID NO: 459485 - RNA, 19 nt, Homo sapiens
  misc_RNA (1)...(19): siRNA sense strand
gaagaugugucccaagcuu

SEQ ID NO: 459486 - RNA, 19 nt, Homo sapiens
  misc_RNA (1)...(19): siRNA sense strand
uaagaccauucgcgauuua

SEQ ID NO: 459487 - RNA, 19 nt, Homo sapiens
  misc_RNA (1)...(19): siRNA sense strand
ggacgggaacugcucuuua

SEQ ID NO: 459488 - RNA, 19 nt, Homo sapiens
  misc_RNA (1)...(19): siRNA sense strand
ggaagacuguccucuaugg

SEQ ID NO: 459489 - RNA, 19 nt, Homo sapiens
  misc_RNA (1)...(19): siRNA sense strand
ggaagaggaagaagaguga

SEQ ID NO: 459490 - RNA, 19 nt, Homo sapiens
  misc_RNA (1)...(19): siRNA sense strand
agauuugacugcaagauug

SEQ ID NO: 459491 - RNA, 19 nt, Homo sapiens
  misc_RNA (1)...(19): siRNA sense strand
ggaugacgaugccaaguac

SEQ ID NO: 459492 - RNA, 19 nt, Homo sapiens
  misc_RNA (1)...(19): siRNA sense strand
gggaugacgaugccaagua

SEQ ID NO: 459493 - RNA, 19 nt, Homo sapiens
  misc_RNA (1)...(19): siRNA sense strand
cuaagaccauucgcgauuu

SEQ ID NO: 459494 - RNA, 19 nt, Homo sapiens
  misc_RNA (1)...(19): siRNA sense strand
guaaaacccuauuucucua

SEQ ID NO: 459495 - RNA, 19 nt, Homo sapiens
  misc_RNA (1)...(19): siRNA sense strand
ggaacugcucuuuaauuau

SEQ ID NO: 459496 - RNA, 19 nt, Homo sapiens
  misc_RNA (1)...(19): siRNA sense strand
acugcaagauugaaggaua

SEQ ID NO: 459497 - RNA, 19 nt, Homo sapiens
  misc_RNA (1)...(19): siRNA sense strand
ugucaacagucuuggagaa

SEQ ID NO: 459498 - RNA, 19 nt, Homo sapiens
  misc_RNA (1)...(19): siRNA sense strand
cauucgcgauuuagaaguu

SEQ ID NO: 459499 - RNA, 19 nt, Homo sapiens
  misc_RNA (1)...(19): siRNA sense strand
ccagauagacuacgaugag

SEQ ID NO: 459500 - RNA, 19 nt, Homo sapiens
  misc_RNA (1)...(19): siRNA sense strand
ccaaccagcccgcucaaug

SEQ ID NO: 459501 - RNA, 19 nt, Homo sapiens
  misc_RNA (1)...(19): siRNA sense strand
gaccauucgcgauuuagaa

SEQ ID NO: 459502 - RNA, 19 nt, Homo sapiens
  misc_RNA (1)...(19): siRNA sense strand
uuggaagacuguccucuau

SEQ ID NO: 459503 - RNA, 19 nt, Homo sapiens
  misc_RNA (1)...(19): siRNA sense strand
ucuaagaccauucgcgauu

SEQ ID NO: 459504 - RNA, 19 nt, Homo sapiens
  misc_RNA (1)...(19): siRNA sense strand
gcugugagagccauuggaa

SEQ ID NO: 459505 - RNA, 19 nt, Homo sapiens
  misc_RNA (1)...(19): siRNA sense strand
cgggaacugcucuuuaauu

SEQ ID NO: 459506 - RNA, 19 nt, Homo sapiens
  misc_RNA (1)...(19): siRNA sense strand
ugugagagccauuggaaga

SEQ ID NO: 459507 - RNA, 19 nt, Homo sapiens
  misc_RNA (1)...(19): siRNA sense strand
uagauuugacugcaagauu

SEQ ID NO: 459508 - RNA, 19 nt, Homo sapiens
  misc_RNA (1)...(19): siRNA sense strand
ucaacagggucaccaacca

SEQ ID NO: 459509 - RNA, 19 nt, Homo sapiens
  misc_RNA (1)...(19): siRNA sense strand
gauuugacugcaagauuga

SEQ ID NO: 459510 - RNA, 19 nt, Homo sapiens
  misc_RNA (1)...(19): siRNA sense strand
caaccagcccgcucaaugc

SEQ ID NO: 459511 - RNA, 19 nt, Homo sapiens
  misc_RNA (1)...(19): siRNA sense strand
aaacccuauuucucuaaga

SEQ ID NO: 459512 - RNA, 19 nt, Homo sapiens
  misc_RNA (1)...(19): siRNA sense strand
cuauuucucuaagaccauu

SEQ ID NO: 459513 - RNA, 19 nt, Homo sapiens
  misc_RNA (1)...(19): siRNA sense strand
aggaaaagccucauguaaa

SEQ ID NO: 459514 - RNA, 19 nt, Homo sapiens
  misc_RNA (1)...(19): siRNA sense strand
gggaacugcucuuuaauua

SEQ ID NO: 459515 - RNA, 19 nt, Homo sapiens
  misc_RNA (1)...(19): siRNA sense strand
ggaaaagccucauguaaaa

SEQ ID NO: 459516 - RNA, 19 nt, Homo sapiens
  misc_RNA (1)...(19): siRNA sense strand
gacgggaacugcucuuuaa

SEQ ID NO: 459517 - RNA, 19 nt, Homo sapiens
  misc_RNA (1)...(19): siRNA sense strand
gaagaugugucccaagcuu

SEQ ID NO: 459518 - RNA, 19 nt, Homo sapiens
  misc_RNA (1)...(19): siRNA sense strand
uaagaccauucgcgauuua

SEQ ID NO: 459519 - RNA, 19 nt, Homo sapiens
  misc_RNA (1)...(19): siRNA sense strand
ggacgggaacugcucuuua

SEQ ID NO: 459520 - RNA, 19 nt, Homo sapiens
  misc_RNA (1)...(19): siRNA sense strand
ggaagaggaagaagaguga

SEQ ID NO: 459521 - RNA, 19 nt, Homo sapiens
  misc_RNA (1)...(19): siRNA sense strand
agauuugacugcaagauug

SEQ ID NO: 459522 - RNA, 19 nt, Homo sapiens
  misc_RNA (1)...(19): siRNA sense strand
ggaugacgaugccaaguac

SEQ ID NO: 459523 - RNA, 19 nt, Homo sapiens
  misc_RNA (1)...(19): siRNA sense strand
gggaugacgaugccaagua

SEQ ID NO: 459524 - RNA, 19 nt, Homo sapiens
  misc_RNA (1)...(19): siRNA sense strand
cuaagaccauucgcgauuu

SEQ ID NO: 459525 - RNA, 19 nt, Homo sapiens
  misc_RNA (1)...(19): siRNA sense strand
guaaaacccuauuucucua

SEQ ID NO: 459526 - RNA, 19 nt, Homo sapiens
  misc_RNA (1)...(19): siRNA sense strand
ggaacugcucuuuaauuau

SEQ ID NO: 459527 - RNA, 19 nt, Homo sapiens
  misc_RNA (1)...(19): siRNA sense strand
acugcaagauugaaggaua

SEQ ID NO: 459528 - RNA, 19 nt, Homo sapiens
  misc_RNA (1)...(19): siRNA sense strand
ugucaacagucuuggagaa

SEQ ID NO: 459529 - RNA, 19 nt, Homo sapiens
  misc_RNA (1)...(19): siRNA sense strand
cauucgcgauuuagaaguu

SEQ ID NO: 459530 - RNA, 19 nt, Homo sapiens
  misc_RNA (1)...(19): siRNA sense strand
ccagauagacuacgaugag

SEQ ID NO: 459531 - RNA, 19 nt, Homo sapiens
  misc_RNA (1)...(19): siRNA sense strand
ccaaccagcccgcucaaug

SEQ ID NO: 459532 - RNA, 19 nt, Homo sapiens
  misc_RNA (1)...(19): siRNA sense strand
gaccauucgcgauuuagaa

SEQ ID NO: 459533 - RNA, 19 nt, Homo sapiens
  misc_RNA (1)...(19): siRNA sense strand
ucuaagaccauucgcgauu

SEQ ID NO: 459534 - RNA, 19 nt, Homo sapiens
  misc_RNA (1)...(19): siRNA sense strand
cgggaacugcucuuuaauu

SEQ ID NO: 459535 - RNA, 19 nt, Homo sapiens
  misc_RNA (1)...(19): siRNA sense strand
uagauuugacugcaagauu

SEQ ID NO: 459536 - RNA, 19 nt, Homo sapiens
  misc_RNA (1)...(19): siRNA sense strand
gauuugacugcaagauuga

SEQ ID NO: 459537 - RNA, 19 nt, Homo sapiens
  misc_RNA (1)...(19): siRNA sense strand
ucaacagggucaccaacca

SEQ ID NO: 459538 - RNA, 19 nt, Homo sapiens
  misc_RNA (1)...(19): siRNA sense strand
caaccagcccgcucaaugc

SEQ ID NO: 459539 - RNA, 19 nt, Homo sapiens
  misc_RNA (1)...(19): siRNA sense strand
aaacccuauuucucuaaga

SEQ ID NO: 459540 - RNA, 19 nt, Homo sapiens
  misc_RNA (1)...(19): siRNA sense strand
cuauuucucuaagaccauu

SEQ ID NO: 459541 - RNA, 19 nt, Homo sapiens
  misc_RNA (1)...(19): siRNA sense strand
aggaaaagccucauguaaa

SEQ ID NO: 459542 - RNA, 19 nt, Homo sapiens
  misc_RNA (1)...(19): siRNA sense strand
gggaacugcucuuuaauua

SEQ ID NO: 459543 - RNA, 19 nt, Homo sapiens
  misc_RNA (1)...(19): siRNA sense strand
ggaaaagccucauguaaaa

SEQ ID NO: 459544 - RNA, 19 nt, Homo sapiens
  misc_RNA (1)...(19): siRNA sense strand
gacgggaacugcucuuuaa

SEQ ID NO: 459545 - RNA, 19 nt, Homo sapiens
  misc_RNA (1)...(19): siRNA sense strand
gaagaugugucccaagcuu

SEQ ID NO: 459546 - RNA, 19 nt, Homo sapiens
  misc_RNA (1)...(19): siRNA sense strand
uaagaccauucgcgauuua

SEQ ID NO: 459547 - RNA, 19 nt, Homo sapiens
  misc_RNA (1)...(19): siRNA sense strand
ggacgggaacugcucuuua

SEQ ID NO: 459548 - RNA, 19 nt, Homo sapiens
  misc_RNA (1)...(19): siRNA sense strand
ggaagaggaagaagaguga

SEQ ID NO: 459549 - RNA, 19 nt, Homo sapiens
  misc_RNA (1)...(19): siRNA sense strand
agauuugacugcaagauug

SEQ ID NO: 459550 - RNA, 19 nt, Homo sapiens
  misc_RNA (1)...(19): siRNA sense strand
ggaugacgaugccaaguac

SEQ ID NO: 459551 - RNA, 19 nt, Homo sapiens
  misc_RNA (1)...(19): siRNA sense strand
gggaugacgaugccaagua

SEQ ID NO: 459552 - RNA, 19 nt, Homo sapiens
  misc_RNA (1)...(19): siRNA sense strand
cuaagaccauucgcgauuu

SEQ ID NO: 459553 - RNA, 19 nt, Homo sapiens
  misc_RNA (1)...(19): siRNA sense strand
guaaaacccuauuucucua

SEQ ID NO: 459554 - RNA, 19 nt, Homo sapiens
  misc_RNA (1)...(19): siRNA sense strand
ggaacugcucuuuaauuau

SEQ ID NO: 459555 - RNA, 19 nt, Homo sapiens
  misc_RNA (1)...(19): siRNA sense strand
acugcaagauugaaggaua

SEQ ID NO: 459556 - RNA, 19 nt, Homo sapiens
  misc_RNA (1)...(19): siRNA sense strand
ugucaacagucuuggagaa

SEQ ID NO: 459557 - RNA, 19 nt, Homo sapiens
  misc_RNA (1)...(19): siRNA sense strand
cauucgcgauuuagaaguu

SEQ ID NO: 459558 - RNA, 19 nt, Homo sapiens
  misc_RNA (1)...(19): siRNA sense strand
ccagauagacuacgaugag

SEQ ID NO: 459559 - RNA, 19 nt, Homo sapiens
  misc_RNA (1)...(19): siRNA sense strand
ccaaccagcccgcucaaug

SEQ ID NO: 459560 - RNA, 19 nt, Homo sapiens
  misc_RNA (1)...(19): siRNA sense strand
gaccauucgcgauuuagaa

SEQ ID NO: 459561 - RNA, 19 nt, Homo sapiens
  misc_RNA (1)...(19): siRNA sense strand
ucuaagaccauucgcgauu

SEQ ID NO: 459562 - RNA, 19 nt, Homo sapiens
  misc_RNA (1)...(19): siRNA sense strand
cgggaacugcucuuuaauu

SEQ ID NO: 459563 - RNA, 19 nt, Homo sapiens
  misc_RNA (1)...(19): siRNA sense strand
uagauuugacugcaagauu

SEQ ID NO: 459564 - RNA, 19 nt, Homo sapiens
  misc_RNA (1)...(19): siRNA sense strand
gauuugacugcaagauuga

SEQ ID NO: 459565 - RNA, 19 nt, Homo sapiens
  misc_RNA (1)...(19): siRNA sense strand
ucaacagggucaccaacca

SEQ ID NO: 459566 - RNA, 19 nt, Homo sapiens
  misc_RNA (1)...(19): siRNA sense strand
caaccagcccgcucaaugc

SEQ ID NO: 459567 - RNA, 19 nt, Homo sapiens
  misc_RNA (1)...(19): siRNA sense strand
aaacccuauuucucuaaga

SEQ ID NO: 459568 - RNA, 19 nt, Homo sapiens
  misc_RNA (1)...(19): siRNA sense strand
cuauuucucuaagaccauu

SEQ ID NO: 459569 - RNA, 19 nt, Homo sapiens
  misc_RNA (1)...(19): siRNA sense strand
aggaaaagccucauguaaa

SEQ ID NO: 459570 - RNA, 19 nt, Homo sapiens
  misc_RNA (1)...(19): siRNA sense strand
gaacaaccucucugaagaa

SEQ ID NO: 459571 - RNA, 19 nt, Homo sapiens
  misc_RNA (1)...(19): siRNA sense strand
gccaaugacucaagcugua

SEQ ID NO: 459572 - RNA, 19 nt, Homo sapiens
  misc_RNA (1)...(19): siRNA sense strand
caaagaagccagccaaauc

SEQ ID NO: 459573 - RNA, 19 nt, Homo sapiens
  misc_RNA (1)...(19): siRNA sense strand
gcagacagcaucgagauuu

SEQ ID NO: 459574 - RNA, 19 nt, Homo sapiens
  misc_RNA (1)...(19): siRNA sense strand
cagacagcaucgagauuua

SEQ ID NO: 459575 - RNA, 19 nt, Homo sapiens
  misc_RNA (1)...(19): siRNA sense strand
aaaggaaacugucaucgau

SEQ ID NO: 459576 - RNA, 19 nt, Homo sapiens
  misc_RNA (1)...(19): siRNA sense strand
agaacaaccucucugaaga

SEQ ID NO: 459577 - RNA, 19 nt, Homo sapiens
  misc_RNA (1)...(19): siRNA sense strand
caaccucucugaagaaguc

SEQ ID NO: 459578 - RNA, 19 nt, Homo sapiens
  misc_RNA (1)...(19): siRNA sense strand
cuacugaugucccagaaau

SEQ ID NO: 459579 - RNA, 19 nt, Homo sapiens
  misc_RNA (1)...(19): siRNA sense strand
acaaggagaccaaagagaa

SEQ ID NO: 459580 - RNA, 19 nt, Homo sapiens
  misc_RNA (1)...(19): siRNA sense strand
gaggauaucagcaugaagu

SEQ ID NO: 459581 - RNA, 19 nt, Homo sapiens
  misc_RNA (1)...(19): siRNA sense strand
aaacugucaucgauaggaa

SEQ ID NO: 459582 - RNA, 19 nt, Homo sapiens
  misc_RNA (1)...(19): siRNA sense strand
caaagccguucaucucagu

SEQ ID NO: 459583 - RNA, 19 nt, Homo sapiens
  misc_RNA (1)...(19): siRNA sense strand
gaaacugucaucgauagga

SEQ ID NO: 459584 - RNA, 19 nt, Homo sapiens
  misc_RNA (1)...(19): siRNA sense strand
gaagaggaaggaagagaag

SEQ ID NO: 459585 - RNA, 19 nt, Homo sapiens
  misc_RNA (1)...(19): siRNA sense strand
gcugccagauggacaagga

SEQ ID NO: 459586 - RNA, 19 nt, Homo sapiens
  misc_RNA (1)...(19): siRNA sense strand
ggacaaggagaccaaagag

SEQ ID NO: 459587 - RNA, 19 nt, Homo sapiens
  misc_RNA (1)...(19): siRNA sense strand
gaggaaggaagagaagaaa

SEQ ID NO: 459588 - RNA, 19 nt, Homo sapiens
  misc_RNA (1)...(19): siRNA sense strand
gacggcuacugguuccuaa

SEQ ID NO: 459589 - RNA, 19 nt, Homo sapiens
  misc_RNA (1)...(19): siRNA sense strand
ccaaagaagccagccaaau

SEQ ID NO: 459590 - RNA, 19 nt, Homo sapiens
  misc_RNA (1)...(19): siRNA sense strand
gagaagaggaaggaagaga

SEQ ID NO: 459591 - RNA, 19 nt, Homo sapiens
  misc_RNA (1)...(19): siRNA sense strand
ggacagccaggaccacaag

SEQ ID NO: 459592 - RNA, 19 nt, Homo sapiens
  misc_RNA (1)...(19): siRNA sense strand
aggaaacugucaucgauag

SEQ ID NO: 459593 - RNA, 19 nt, Homo sapiens
  misc_RNA (1)...(19): siRNA sense strand
gacaaggagaccaaagaga

SEQ ID NO: 459594 - RNA, 19 nt, Homo sapiens
  misc_RNA (1)...(19): siRNA sense strand
ccagagcaguacugagucu

SEQ ID NO: 459595 - RNA, 19 nt, Homo sapiens
  misc_RNA (1)...(19): siRNA sense strand
cuaguggcguauaagaaga

SEQ ID NO: 459596 - RNA, 19 nt, Homo sapiens
  misc_RNA (1)...(19): siRNA sense strand
ccaaugacucaagcuguaa

SEQ ID NO: 459597 - RNA, 19 nt, Homo sapiens
  misc_RNA (1)...(19): siRNA sense strand
ucgaggauaucagcaugaa

SEQ ID NO: 459598 - RNA, 19 nt, Homo sapiens
  misc_RNA (1)...(19): siRNA sense strand
cagcaugaaguucgaugaa

SEQ ID NO: 459599 - RNA, 19 nt, Homo sapiens
  misc_RNA (1)...(19): siRNA sense strand
caagcuguaagucaucuga

SEQ ID NO: 459600 - RNA, 19 nt, Homo sapiens
  misc_RNA (1)...(19): siRNA sense strand
cccagaaauuccagcaguu

SEQ ID NO: 459601 - RNA, 19 nt, Homo sapiens
  misc_RNA (1)...(19): siRNA sense strand
guccagagcaguacugagu

SEQ ID NO: 459602 - RNA, 19 nt, Homo sapiens
  misc_RNA (1)...(19): siRNA sense strand
caagauugcccagaucaag

SEQ ID NO: 459603 - RNA, 19 nt, Homo sapiens
  misc_RNA (1)...(19): siRNA sense strand
ccgagaagaggaaggaaga

SEQ ID NO: 459604 - RNA, 19 nt, Homo sapiens
  misc_RNA (1)...(19): siRNA sense strand
gcgcagacagcaucgagau

SEQ ID NO: 459605 - RNA, 19 nt, Homo sapiens
  misc_RNA (1)...(19): siRNA sense strand
agaagaggaaggaagagaa

SEQ ID NO: 459606 - RNA, 19 nt, Homo sapiens
  misc_RNA (1)...(19): siRNA sense strand
ggaaggaagagaagaaacc

SEQ ID NO: 459607 - RNA, 19 nt, Homo sapiens
  misc_RNA (1)...(19): siRNA sense strand
gacagcaucgagauuuaug

SEQ ID NO: 459608 - RNA, 19 nt, Homo sapiens
  misc_RNA (1)...(19): siRNA sense strand
gaaggaagagaagaaacca

SEQ ID NO: 459609 - RNA, 19 nt, Homo sapiens
  misc_RNA (1)...(19): siRNA sense strand
agaggaaggaagagaagaa

SEQ ID NO: 459610 - RNA, 19 nt, Homo sapiens
  misc_RNA (1)...(19): siRNA sense strand
caugccuaguggcguauaa

SEQ ID NO: 459611 - RNA, 19 nt, Homo sapiens
  misc_RNA (1)...(19): siRNA sense strand
cuucaaagccguucaucuc

SEQ ID NO: 459612 - RNA, 19 nt, Homo sapiens
  misc_RNA (1)...(19): siRNA sense strand
aaggaaacugucaucgaua

SEQ ID NO: 459613 - RNA, 19 nt, Homo sapiens
  misc_RNA (1)...(19): siRNA sense strand
cacaagagcgaggugacua

SEQ ID NO: 459614 - RNA, 19 nt, Homo sapiens
  misc_RNA (1)...(19): siRNA sense strand
ccagaaauuccagcaguuc

SEQ ID NO: 459615 - RNA, 19 nt, Homo sapiens
  misc_RNA (1)...(19): siRNA sense strand
cuacugguuccuaaagcua

SEQ ID NO: 459616 - RNA, 19 nt, Homo sapiens
  misc_RNA (1)...(19): siRNA sense strand
gcuacugguuccuaaagcu

SEQ ID NO: 459617 - RNA, 19 nt, Homo sapiens
  misc_RNA (1)...(19): siRNA sense strand
ccaggaugccaaugacuca

SEQ ID NO: 459618 - RNA, 19 nt, Homo sapiens
  misc_RNA (1)...(19): siRNA sense strand
gugcccagcuacugauguc

SEQ ID NO: 459619 - RNA, 19 nt, Homo sapiens
  misc_RNA (1)...(19): siRNA sense strand
ugucaucgauaggaauaca

SEQ ID NO: 459620 - RNA, 19 nt, Homo sapiens
  misc_RNA (1)...(19): siRNA sense strand
ggauaucagcaugaaguuc

SEQ ID NO: 459621 - RNA, 19 nt, Homo sapiens
  misc_RNA (1)...(19): siRNA sense strand
ccuaguggcguauaagaag

SEQ ID NO: 459622 - RNA, 19 nt, Homo sapiens
  misc_RNA (1)...(19): siRNA sense strand
caaggagaccaaagagaac

SEQ ID NO: 459623 - RNA, 19 nt, Homo sapiens
  misc_RNA (1)...(19): siRNA sense strand
gcgcaaccucuccuaugga

SEQ ID NO: 459624 - RNA, 19 nt, Homo sapiens
  misc_RNA (1)...(19): siRNA sense strand
caagcgcaaccucuccuau

SEQ ID NO: 459625 - RNA, 19 nt, Homo sapiens
  misc_RNA (1)...(19): siRNA sense strand
gaacaaccucucugaagaa

SEQ ID NO: 459626 - RNA, 19 nt, Homo sapiens
  misc_RNA (1)...(19): siRNA sense strand
gccaaugacucaagcugua

SEQ ID NO: 459627 - RNA, 19 nt, Homo sapiens
  misc_RNA (1)...(19): siRNA sense strand
caaagaagccagccaaauc

SEQ ID NO: 459628 - RNA, 19 nt, Homo sapiens
  misc_RNA (1)...(19): siRNA sense strand
gcagacagcaucgagauuu

SEQ ID NO: 459629 - RNA, 19 nt, Homo sapiens
  misc_RNA (1)...(19): siRNA sense strand
cagacagcaucgagauuua

SEQ ID NO: 459630 - RNA, 19 nt, Homo sapiens
  misc_RNA (1)...(19): siRNA sense strand
aaaggaaacugucaucgau

SEQ ID NO: 459631 - RNA, 19 nt, Homo sapiens
  misc_RNA (1)...(19): siRNA sense strand
agaacaaccucucugaaga

SEQ ID NO: 459632 - RNA, 19 nt, Homo sapiens
  misc_RNA (1)...(19): siRNA sense strand
caaccucucugaagaaguc

SEQ ID NO: 459633 - RNA, 19 nt, Homo sapiens
  misc_RNA (1)...(19): siRNA sense strand
cuacugaugucccagaaau

SEQ ID NO: 459634 - RNA, 19 nt, Homo sapiens
  misc_RNA (1)...(19): siRNA sense strand
acaaggagaccaaagagaa

SEQ ID NO: 459635 - RNA, 19 nt, Homo sapiens
  misc_RNA (1)...(19): siRNA sense strand
gaggauaucagcaugaagu

SEQ ID NO: 459636 - RNA, 19 nt, Homo sapiens
  misc_RNA (1)...(19): siRNA sense strand
aaacugucaucgauaggaa

SEQ ID NO: 459637 - RNA, 19 nt, Homo sapiens
  misc_RNA (1)...(19): siRNA sense strand
caaagccguucaucucagu

SEQ ID NO: 459638 - RNA, 19 nt, Homo sapiens
  misc_RNA (1)...(19): siRNA sense strand
gaaacugucaucgauagga

SEQ ID NO: 459639 - RNA, 19 nt, Homo sapiens
  misc_RNA (1)...(19): siRNA sense strand
gaagaggaaggaagagaag

SEQ ID NO: 459640 - RNA, 19 nt, Homo sapiens
  misc_RNA (1)...(19): siRNA sense strand
gcugccagauggacaagga

SEQ ID NO: 459641 - RNA, 19 nt, Homo sapiens
  misc_RNA (1)...(19): siRNA sense strand
ggacaaggagaccaaagag

SEQ ID NO: 459642 - RNA, 19 nt, Homo sapiens
  misc_RNA (1)...(19): siRNA sense strand
gaggaaggaagagaagaaa

SEQ ID NO: 459643 - RNA, 19 nt, Homo sapiens
  misc_RNA (1)...(19): siRNA sense strand
gacggcuacugguuccuaa

SEQ ID NO: 459644 - RNA, 19 nt, Homo sapiens
  misc_RNA (1)...(19): siRNA sense strand
ccaaagaagccagccaaau

SEQ ID NO: 459645 - RNA, 19 nt, Homo sapiens
  misc_RNA (1)...(19): siRNA sense strand
gagaagaggaaggaagaga

SEQ ID NO: 459646 - RNA, 19 nt, Homo sapiens
  misc_RNA (1)...(19): siRNA sense strand
ggacagccaggaccacaag

SEQ ID NO: 459647 - RNA, 19 nt, Homo sapiens
  misc_RNA (1)...(19): siRNA sense strand
aggaaacugucaucgauag

SEQ ID NO: 459648 - RNA, 19 nt, Homo sapiens
  misc_RNA (1)...(19): siRNA sense strand
gacaaggagaccaaagaga

SEQ ID NO: 459649 - RNA, 19 nt, Homo sapiens
  misc_RNA (1)...(19): siRNA sense strand
ccagagcaguacugagucu

SEQ ID NO: 459650 - RNA, 19 nt, Homo sapiens
  misc_RNA (1)...(19): siRNA sense strand
cuaguggcguauaagaaga

SEQ ID NO: 459651 - RNA, 19 nt, Homo sapiens
  misc_RNA (1)...(19): siRNA sense strand
ccaaugacucaagcuguaa

SEQ ID NO: 459652 - RNA, 19 nt, Homo sapiens
  misc_RNA (1)...(19): siRNA sense strand
ucgaggauaucagcaugaa

SEQ ID NO: 459653 - RNA, 19 nt, Homo sapiens
  misc_RNA (1)...(19): siRNA sense strand
cagcaugaaguucgaugaa

SEQ ID NO: 459654 - RNA, 19 nt, Homo sapiens
  misc_RNA (1)...(19): siRNA sense strand
caagcuguaagucaucuga

SEQ ID NO: 459655 - RNA, 19 nt, Homo sapiens
  misc_RNA (1)...(19): siRNA sense strand
cccagaaauuccagcaguu

SEQ ID NO: 459656 - RNA, 19 nt, Homo sapiens
  misc_RNA (1)...(19): siRNA sense strand
guccagagcaguacugagu

SEQ ID NO: 459657 - RNA, 19 nt, Homo sapiens
  misc_RNA (1)...(19): siRNA sense strand
caagauugcccagaucaag

SEQ ID NO: 459658 - RNA, 19 nt, Homo sapiens
  misc_RNA (1)...(19): siRNA sense strand
ccgagaagaggaaggaaga

SEQ ID NO: 459659 - RNA, 19 nt, Homo sapiens
  misc_RNA (1)...(19): siRNA sense strand
gcgcagacagcaucgagau

SEQ ID NO: 459660 - RNA, 19 nt, Homo sapiens
  misc_RNA (1)...(19): siRNA sense strand
agaagaggaaggaagagaa

SEQ ID NO: 459661 - RNA, 19 nt, Homo sapiens
  misc_RNA (1)...(19): siRNA sense strand
ggaaggaagagaagaaacc

SEQ ID NO: 459662 - RNA, 19 nt, Homo sapiens
  misc_RNA (1)...(19): siRNA sense strand
gacagcaucgagauuuaug

SEQ ID NO: 459663 - RNA, 19 nt, Homo sapiens
  misc_RNA (1)...(19): siRNA sense strand
gaaggaagagaagaaacca

SEQ ID NO: 459664 - RNA, 19 nt, Homo sapiens
  misc_RNA (1)...(19): siRNA sense strand
agaggaaggaagagaagaa

SEQ ID NO: 459665 - RNA, 19 nt, Homo sapiens
  misc_RNA (1)...(19): siRNA sense strand
caugccuaguggcguauaa

SEQ ID NO: 459666 - RNA, 19 nt, Homo sapiens
  misc_RNA (1)...(19): siRNA sense strand
cuucaaagccguucaucuc

SEQ ID NO: 459667 - RNA, 19 nt, Homo sapiens
  misc_RNA (1)...(19): siRNA sense strand
aaggaaacugucaucgaua

SEQ ID NO: 459668 - RNA, 19 nt, Homo sapiens
  misc_RNA (1)...(19): siRNA sense strand
cacaagagcgaggugacua

SEQ ID NO: 459669 - RNA, 19 nt, Homo sapiens
  misc_RNA (1)...(19): siRNA sense strand
ccagaaauuccagcaguuc

SEQ ID NO: 459670 - RNA, 19 nt, Homo sapiens
  misc_RNA (1)...(19): siRNA sense strand
cuacugguuccuaaagcua

SEQ ID NO: 459671 - RNA, 19 nt, Homo sapiens
  misc_RNA (1)...(19): siRNA sense strand
gcuacugguuccuaaagcu

SEQ ID NO: 459672 - RNA, 19 nt, Homo sapiens
  misc_RNA (1)...(19): siRNA sense strand
ccaggaugccaaugacuca

SEQ ID NO: 459673 - RNA, 19 nt, Homo sapiens
  misc_RNA (1)...(19): siRNA sense strand
gugcccagcuacugauguc

SEQ ID NO: 459674 - RNA, 19 nt, Homo sapiens
  misc_RNA (1)...(19): siRNA sense strand
ugucaucgauaggaauaca

SEQ ID NO: 459675 - RNA, 19 nt, Homo sapiens
  misc_RNA (1)...(19): siRNA sense strand
ggauaucagcaugaaguuc

SEQ ID NO: 459676 - RNA, 19 nt, Homo sapiens
  misc_RNA (1)...(19): siRNA sense strand
ccuaguggcguauaagaag

SEQ ID NO: 459677 - RNA, 19 nt, Homo sapiens
  misc_RNA (1)...(19): siRNA sense strand
caaggagaccaaagagaac

SEQ ID NO: 459678 - RNA, 19 nt, Homo sapiens
  misc_RNA (1)...(19): siRNA sense strand
gcgcaaccucuccuaugga

SEQ ID NO: 459679 - RNA, 19 nt, Homo sapiens
  misc_RNA (1)...(19): siRNA sense strand
caagcgcaaccucuccuau

SEQ ID NO: 459680 - RNA, 19 nt, Homo sapiens
  misc_RNA (1)...(19): siRNA sense strand
gacaugcacugccuaauua

SEQ ID NO: 459681 - RNA, 19 nt, Homo sapiens
  misc_RNA (1)...(19): siRNA sense strand
guacagaacucucccauuc

SEQ ID NO: 459682 - RNA, 19 nt, Homo sapiens
  misc_RNA (1)...(19): siRNA sense strand
gauggaaacuucacaauuc

SEQ ID NO: 459683 - RNA, 19 nt, Homo sapiens
  misc_RNA (1)...(19): siRNA sense strand
gaugaaaugugccuugaaa

SEQ ID NO: 459684 - RNA, 19 nt, Homo sapiens
  misc_RNA (1)...(19): siRNA sense strand
gaagguggauuugcuauug

SEQ ID NO: 459685 - RNA, 19 nt, Homo sapiens
  misc_RNA (1)...(19): siRNA sense strand
caaacaggcuuuacagaga

SEQ ID NO: 459686 - RNA, 19 nt, Homo sapiens
  misc_RNA (1)...(19): siRNA sense strand
gauaauuucuccaaacuca

SEQ ID NO: 459687 - RNA, 19 nt, Homo sapiens
  misc_RNA (1)...(19): siRNA sense strand
caagagagaaauccagaua

SEQ ID NO: 459688 - RNA, 19 nt, Homo sapiens
  misc_RNA (1)...(19): siRNA sense strand
caagaaagagugcccaauu

SEQ ID NO: 459689 - RNA, 19 nt, Homo sapiens
  misc_RNA (1)...(19): siRNA sense strand
gaaugaagugcuccagaua

SEQ ID NO: 459690 - RNA, 19 nt, Homo sapiens
  misc_RNA (1)...(19): siRNA sense strand
cauuuaagcuacucaagaa

SEQ ID NO: 459691 - RNA, 19 nt, Homo sapiens
  misc_RNA (1)...(19): siRNA sense strand
ccucggaccucucaacaaa

SEQ ID NO: 459692 - RNA, 19 nt, Homo sapiens
  misc_RNA (1)...(19): siRNA sense strand
caucaucucuguuucuuca

SEQ ID NO: 459693 - RNA, 19 nt, Homo sapiens
  misc_RNA (1)...(19): siRNA sense strand
ggacucaaaucuccugaca

SEQ ID NO: 459694 - RNA, 19 nt, Homo sapiens
  misc_RNA (1)...(19): siRNA sense strand
cugaagaacugcuaaacaa

SEQ ID NO: 459695 - RNA, 19 nt, Homo sapiens
  misc_RNA (1)...(19): siRNA sense strand
cuacuucacuuugccauuu

SEQ ID NO: 459696 - RNA, 19 nt, Homo sapiens
  misc_RNA (1)...(19): siRNA sense strand
ccacagcccugcaucaaca

SEQ ID NO: 459697 - RNA, 19 nt, Homo sapiens
  misc_RNA (1)...(19): siRNA sense strand
aaagucagguggcaauuug

SEQ ID NO: 459698 - RNA, 19 nt, Homo sapiens
  misc_RNA (1)...(19): siRNA sense strand
gggagucaaugcaguagaa

SEQ ID NO: 459699 - RNA, 19 nt, Homo sapiens
  misc_RNA (1)...(19): siRNA sense strand
gaaagucagguggcaauuu

SEQ ID NO: 459700 - RNA, 19 nt, Homo sapiens
  misc_RNA (1)...(19): siRNA sense strand
guaaagucaucaucucugu

SEQ ID NO: 459701 - RNA, 19 nt, Homo sapiens
  misc_RNA (1)...(19): siRNA sense strand
agagaaauccagauaauga

SEQ ID NO: 459702 - RNA, 19 nt, Homo sapiens
  misc_RNA (1)...(19): siRNA sense strand
cagaaauggucaaccugua

SEQ ID NO: 459703 - RNA, 19 nt, Homo sapiens
  misc_RNA (1)...(19): siRNA sense strand
agagagaaauccagauaau

SEQ ID NO: 459704 - RNA, 19 nt, Homo sapiens
  misc_RNA (1)...(19): siRNA sense strand
aaacaggcuuuacagagaa

SEQ ID NO: 459705 - RNA, 19 nt, Homo sapiens
  misc_RNA (1)...(19): siRNA sense strand
acacaacgcuguccuaucg

SEQ ID NO: 459706 - RNA, 19 nt, Homo sapiens
  misc_RNA (1)...(19): siRNA sense strand
aaugacaaguaccuaguua

SEQ ID NO: 459707 - RNA, 19 nt, Homo sapiens
  misc_RNA (1)...(19): siRNA sense strand
gcacaggcguauucucagu

SEQ ID NO: 459708 - RNA, 19 nt, Homo sapiens
  misc_RNA (1)...(19): siRNA sense strand
gacaagcaaugggaugaaa

SEQ ID NO: 459709 - RNA, 19 nt, Homo sapiens
  misc_RNA (1)...(19): siRNA sense strand
ggaaccagacccugacaaa

SEQ ID NO: 459710 - RNA, 19 nt, Homo sapiens
  misc_RNA (1)...(19): siRNA sense strand
gcucuuggauguuuguugu

SEQ ID NO: 459711 - RNA, 19 nt, Homo sapiens
  misc_RNA (1)...(19): siRNA sense strand
gaguagcggugauguaugg

SEQ ID NO: 459712 - RNA, 19 nt, Homo sapiens
  misc_RNA (1)...(19): siRNA sense strand
gaagcgccaccaacaaauu

SEQ ID NO: 459713 - RNA, 19 nt, Homo sapiens
  misc_RNA (1)...(19): siRNA sense strand
ucaaugcaguagaagauga

SEQ ID NO: 459714 - RNA, 19 nt, Homo sapiens
  misc_RNA (1)...(19): siRNA sense strand
uuucauuccucuucaagua

SEQ ID NO: 459715 - RNA, 19 nt, Homo sapiens
  misc_RNA (1)...(19): siRNA sense strand
aacaacagcugaugacuca

SEQ ID NO: 459716 - RNA, 19 nt, Homo sapiens
  misc_RNA (1)...(19): siRNA sense strand
ccugauaauucucgauauu

SEQ ID NO: 459717 - RNA, 19 nt, Homo sapiens
  misc_RNA (1)...(19): siRNA sense strand
gggaagugcucauucugau

SEQ ID NO: 459718 - RNA, 19 nt, Homo sapiens
  misc_RNA (1)...(19): siRNA sense strand
ucaaaucuccugacacuuc

SEQ ID NO: 459719 - RNA, 19 nt, Homo sapiens
  misc_RNA (1)...(19): siRNA sense strand
gcagacauuugggcucuug

SEQ ID NO: 459720 - RNA, 19 nt, Homo sapiens
  misc_RNA (1)...(19): siRNA sense strand
acaaaaggccggauauuua

SEQ ID NO: 459721 - RNA, 19 nt, Homo sapiens
  misc_RNA (1)...(19): siRNA sense strand
gggaugaaaugugccuuga

SEQ ID NO: 459722 - RNA, 19 nt, Homo sapiens
  misc_RNA (1)...(19): siRNA sense strand
ccugaccucuugccuauga

SEQ ID NO: 459723 - RNA, 19 nt, Homo sapiens
  misc_RNA (1)...(19): siRNA sense strand
aagaaagagugcccaauuc

SEQ ID NO: 459724 - RNA, 19 nt, Homo sapiens
  misc_RNA (1)...(19): siRNA sense strand
gcaaacaucccgagaagcu

SEQ ID NO: 459725 - RNA, 19 nt, Homo sapiens
  misc_RNA (1)...(19): siRNA sense strand
gccacuauguccuguguga

SEQ ID NO: 459726 - RNA, 19 nt, Homo sapiens
  misc_RNA (1)...(19): siRNA sense strand
aaagucaucaucucuguuu

SEQ ID NO: 459727 - RNA, 19 nt, Homo sapiens
  misc_RNA (1)...(19): siRNA sense strand
agacaugcacugccuaauu

SEQ ID NO: 459728 - RNA, 19 nt, Homo sapiens
  misc_RNA (1)...(19): siRNA sense strand
caaacucacagcugaagaa

SEQ ID NO: 459729 - RNA, 19 nt, Homo sapiens
  misc_RNA (1)...(19): siRNA sense strand
ugacgauaauuucuccaaa

SEQ ID NO: 459730 - RNA, 19 nt, Homo sapiens
  misc_RNA (1)...(19): siRNA sense strand
ggaagagggccacuguuca

SEQ ID NO: 459731 - RNA, 19 nt, Homo sapiens
  misc_RNA (1)...(19): siRNA sense strand
ccacagagacuucaauugc

SEQ ID NO: 459732 - RNA, 19 nt, Homo sapiens
  misc_RNA (1)...(19): siRNA sense strand
gauaaugagggaucuuuca

SEQ ID NO: 459733 - RNA, 19 nt, Homo sapiens
  misc_RNA (1)...(19): siRNA sense strand
gaaugacaaguaccuaguu

SEQ ID NO: 459734 - RNA, 19 nt, Homo sapiens
  misc_RNA (1)...(19): siRNA sense strand
gaucccaggcuuucaauca

SEQ ID NO: 459735 - RNA, 19 nt, Homo sapiens
  misc_RNA (1)...(19): siRNA sense strand
acucacagcugaagaacug

SEQ ID NO: 459736 - RNA, 19 nt, Homo sapiens
  misc_RNA (1)...(19): siRNA sense strand
agaaugaagugcuccagau

SEQ ID NO: 459737 - RNA, 19 nt, Homo sapiens
  misc_RNA (1)...(19): siRNA sense strand
gaauauuguggguuacauu

SEQ ID NO: 459738 - RNA, 19 nt, Homo sapiens
  misc_RNA (1)...(19): siRNA sense strand
acaaguaccuaguuaacca

SEQ ID NO: 459739 - RNA, 19 nt, Homo sapiens
  misc_RNA (1)...(19): siRNA sense strand
cauuugggcucuuggaugu

SEQ ID NO: 459740 - RNA, 19 nt, Homo sapiens
  misc_RNA (1)...(19): siRNA sense strand
gcaaaaucaucacuacgaa

SEQ ID NO: 459741 - RNA, 19 nt, Homo sapiens
  misc_RNA (1)...(19): siRNA sense strand
gggcacaggcguauucuca

SEQ ID NO: 459742 - RNA, 19 nt, Homo sapiens
  misc_RNA (1)...(19): siRNA sense strand
uguccuacuucucauuuaa

SEQ ID NO: 459743 - RNA, 19 nt, Homo sapiens
  misc_RNA (1)...(19): siRNA sense strand
caagacaugcacugccuaa

SEQ ID NO: 459744 - RNA, 19 nt, Homo sapiens
  misc_RNA (1)...(19): siRNA sense strand
uuaagcuacucaagaaaga

SEQ ID NO: 459745 - RNA, 19 nt, Homo sapiens
  misc_RNA (1)...(19): siRNA sense strand
gcaguagaagaugagauua

SEQ ID NO: 459746 - RNA, 19 nt, Homo sapiens
  misc_RNA (1)...(19): siRNA sense strand
gacaacagccaaagguuca

SEQ ID NO: 459747 - RNA, 19 nt, Homo sapiens
  misc_RNA (1)...(19): siRNA sense strand
ggaagguggauuugcuauu

SEQ ID NO: 459748 - RNA, 19 nt, Homo sapiens
  misc_RNA (1)...(19): siRNA sense strand
augaagugcuccagauauu

SEQ ID NO: 459749 - RNA, 19 nt, Homo sapiens
  misc_RNA (1)...(19): siRNA sense strand
gacgauaauuucuccaaac

SEQ ID NO: 459750 - RNA, 19 nt, Homo sapiens
  misc_RNA (1)...(19): siRNA sense strand
cuacuucucauuuaagcua

SEQ ID NO: 459751 - RNA, 19 nt, Homo sapiens
  misc_RNA (1)...(19): siRNA sense strand
gagagaaauccagauaaug

SEQ ID NO: 459752 - RNA, 19 nt, Homo sapiens
  misc_RNA (1)...(19): siRNA sense strand
cuacgaaggcagacauuug

SEQ ID NO: 459753 - RNA, 19 nt, Homo sapiens
  misc_RNA (1)...(19): siRNA sense strand
caguagaagaugagauuaa

SEQ ID NO: 459754 - RNA, 19 nt, Homo sapiens
  misc_RNA (1)...(19): siRNA sense strand
gugccuguuucaagaauga

SEQ ID NO: 459755 - RNA, 19 nt, Homo sapiens
  misc_RNA (1)...(19): siRNA sense strand
caaggacuuugccaagcuu

SEQ ID NO: 459756 - RNA, 19 nt, Homo sapiens
  misc_RNA (1)...(19): siRNA sense strand
cguggaaucccuuugauga

SEQ ID NO: 459757 - RNA, 19 nt, Homo sapiens
  misc_RNA (1)...(19): siRNA sense strand
caaucagccuggccuuuua

SEQ ID NO: 459758 - RNA, 19 nt, Homo sapiens
  misc_RNA (1)...(19): siRNA sense strand
gaagagggccacuguucag

SEQ ID NO: 459759 - RNA, 19 nt, Homo sapiens
  misc_RNA (1)...(19): siRNA sense strand
gaaauggucaaccuguaca

SEQ ID NO: 459760 - RNA, 19 nt, Homo sapiens
  misc_RNA (1)...(19): siRNA sense strand
gugcaaaacuccuauuauc

SEQ ID NO: 459761 - RNA, 19 nt, Homo sapiens
  misc_RNA (1)...(19): siRNA sense strand
caagcaaugggaugaaaug

SEQ ID NO: 459762 - RNA, 19 nt, Homo sapiens
  misc_RNA (1)...(19): siRNA sense strand
caugauaugugugccuguu

SEQ ID NO: 459763 - RNA, 19 nt, Homo sapiens
  misc_RNA (1)...(19): siRNA sense strand
acucaaaucuccugacacu

SEQ ID NO: 459764 - RNA, 19 nt, Homo sapiens
  misc_RNA (1)...(19): siRNA sense strand
gaaagagugcccaauucca

SEQ ID NO: 459765 - RNA, 19 nt, Homo sapiens
  misc_RNA (1)...(19): siRNA sense strand
ggaagcgccaccaacaaau

SEQ ID NO: 459766 - RNA, 19 nt, Homo sapiens
  misc_RNA (1)...(19): siRNA sense strand
caaaucuccugacacuucu

SEQ ID NO: 459767 - RNA, 19 nt, Homo sapiens
  misc_RNA (1)...(19): siRNA sense strand
ggacaagcaaugggaugaa

SEQ ID NO: 459768 - RNA, 19 nt, Homo sapiens
  misc_RNA (1)...(19): siRNA sense strand
aagcgugucugauccuuuc

SEQ ID NO: 459769 - RNA, 19 nt, Homo sapiens
  misc_RNA (1)...(19): siRNA sense strand
aacagcagcuaaugcagaa

SEQ ID NO: 459770 - RNA, 19 nt, Homo sapiens
  misc_RNA (1)...(19): siRNA sense strand
ggcccagacucagcaguuu

SEQ ID NO: 459771 - RNA, 19 nt, Homo sapiens
  misc_RNA (1)...(19): siRNA sense strand
aaagagugcccaauuccaa

SEQ ID NO: 459772 - RNA, 19 nt, Homo sapiens
  misc_RNA (1)...(19): siRNA sense strand
gacaaaaggccggauauuu

SEQ ID NO: 459773 - RNA, 19 nt, Homo sapiens
  misc_RNA (1)...(19): siRNA sense strand
ugauggaaacuucacaauu

SEQ ID NO: 459774 - RNA, 19 nt, Homo sapiens
  misc_RNA (1)...(19): siRNA sense strand
ucgauauucucaagacaug

SEQ ID NO: 459775 - RNA, 19 nt, Homo sapiens
  misc_RNA (1)...(19): siRNA sense strand
ucccugaccucuugccuau

SEQ ID NO: 459776 - RNA, 19 nt, Homo sapiens
  misc_RNA (1)...(19): siRNA sense strand
uggguuacauugauucuag

SEQ ID NO: 459777 - RNA, 19 nt, Homo sapiens
  misc_RNA (1)...(19): siRNA sense strand
aagaacugcuaaacaagga

SEQ ID NO: 459778 - RNA, 19 nt, Homo sapiens
  misc_RNA (1)...(19): siRNA sense strand
gugcccaauuccaaaugua

SEQ ID NO: 459779 - RNA, 19 nt, Homo sapiens
  misc_RNA (1)...(19): siRNA sense strand
ccagguguccuacuucuca

SEQ ID NO: 459780 - RNA, 19 nt, Homo sapiens
  misc_RNA (1)...(19): siRNA sense strand
gcacagaggccuccacgaa

SEQ ID NO: 459781 - RNA, 19 nt, Homo sapiens
  misc_RNA (1)...(19): siRNA sense strand
gaaggacaacaccuacuua

SEQ ID NO: 459782 - RNA, 19 nt, Homo sapiens
  misc_RNA (1)...(19): siRNA sense strand
gauuauagcucuguaugag

SEQ ID NO: 459783 - RNA, 19 nt, Homo sapiens
  misc_RNA (1)...(19): siRNA sense strand
gguccuacauucacuacuu

SEQ ID NO: 459784 - RNA, 19 nt, Homo sapiens
  misc_RNA (1)...(19): siRNA sense strand
acagaggccuccacgaaga

SEQ ID NO: 459785 - RNA, 19 nt, Homo sapiens
  misc_RNA (1)...(19): siRNA sense strand
uuauagcucuguaugagaa

SEQ ID NO: 459786 - RNA, 19 nt, Homo sapiens
  misc_RNA (1)...(19): siRNA sense strand
gagauuauagcucuguaug

SEQ ID NO: 459787 - RNA, 19 nt, Homo sapiens
  misc_RNA (1)...(19): siRNA sense strand
guccuacauucacuacuuu

SEQ ID NO: 459788 - RNA, 19 nt, Homo sapiens
  misc_RNA (1)...(19): siRNA sense strand
cacagcggaugaaggauug

SEQ ID NO: 459789 - RNA, 19 nt, Homo sapiens
  misc_RNA (1)...(19): siRNA sense strand
ucacagcggaugaaggauu

SEQ ID NO: 459790 - RNA, 19 nt, Homo sapiens
  misc_RNA (1)...(19): siRNA sense strand
gcacgugcccaucgacauc

SEQ ID NO: 459791 - RNA, 19 nt, Homo sapiens
  misc_RNA (1)...(19): siRNA sense strand
uacuuucacugccuaagaa

SEQ ID NO: 459792 - RNA, 19 nt, Homo sapiens
  misc_RNA (1)...(19): siRNA sense strand
ggauuggcaggagauuaua

SEQ ID NO: 459793 - RNA, 19 nt, Homo sapiens
  misc_RNA (1)...(19): siRNA sense strand
ggagauuauagcucuguau

SEQ ID NO: 459794 - RNA, 19 nt, Homo sapiens
  misc_RNA (1)...(19): siRNA sense strand
gcacugcagccugaaaugg

SEQ ID NO: 459795 - RNA, 19 nt, Homo sapiens
  misc_RNA (1)...(19): siRNA sense strand
agaaggacaacaccuacuu

SEQ ID NO: 459796 - RNA, 19 nt, Homo sapiens
  misc_RNA (1)...(19): siRNA sense strand
cuacuuucacugccuaaga

SEQ ID NO: 459797 - RNA, 19 nt, Homo sapiens
  misc_RNA (1)...(19): siRNA sense strand
gaaggauuggcaggagauu

SEQ ID NO: 459798 - RNA, 19 nt, Homo sapiens
  misc_RNA (1)...(19): siRNA sense strand
aauccuggaccuucucaaa

SEQ ID NO: 459799 - RNA, 19 nt, Homo sapiens
  misc_RNA (1)...(19): siRNA sense strand
aggauuggcaggagauuau

SEQ ID NO: 459800 - RNA, 19 nt, Homo sapiens
  misc_RNA (1)...(19): siRNA sense strand
uacauucacuacuuucacu

SEQ ID NO: 459801 - RNA, 19 nt, Homo sapiens
  misc_RNA (1)...(19): siRNA sense strand
gcacagaggccuccacgaa

SEQ ID NO: 459802 - RNA, 19 nt, Homo sapiens
  misc_RNA (1)...(19): siRNA sense strand
gaaggacaacaccuacuua

SEQ ID NO: 459803 - RNA, 19 nt, Homo sapiens
  misc_RNA (1)...(19): siRNA sense strand
gauuauagcucuguaugag

SEQ ID NO: 459804 - RNA, 19 nt, Homo sapiens
  misc_RNA (1)...(19): siRNA sense strand
gguccuacauucacuacuu

SEQ ID NO: 459805 - RNA, 19 nt, Homo sapiens
  misc_RNA (1)...(19): siRNA sense strand
acagaggccuccacgaaga

SEQ ID NO: 459806 - RNA, 19 nt, Homo sapiens
  misc_RNA (1)...(19): siRNA sense strand
uuauagcucuguaugagaa

SEQ ID NO: 459807 - RNA, 19 nt, Homo sapiens
  misc_RNA (1)...(19): siRNA sense strand
gagauuauagcucuguaug

SEQ ID NO: 459808 - RNA, 19 nt, Homo sapiens
  misc_RNA (1)...(19): siRNA sense strand
guccuacauucacuacuuu

SEQ ID NO: 459809 - RNA, 19 nt, Homo sapiens
  misc_RNA (1)...(19): siRNA sense strand
cacagcggaugaaggauug

SEQ ID NO: 459810 - RNA, 19 nt, Homo sapiens
  misc_RNA (1)...(19): siRNA sense strand
ucacagcggaugaaggauu

SEQ ID NO: 459811 - RNA, 19 nt, Homo sapiens
  misc_RNA (1)...(19): siRNA sense strand
gcacgugcccaucgacauc

SEQ ID NO: 459812 - RNA, 19 nt, Homo sapiens
  misc_RNA (1)...(19): siRNA sense strand
uacuuucacugccuaagaa

SEQ ID NO: 459813 - RNA, 19 nt, Homo sapiens
  misc_RNA (1)...(19): siRNA sense strand
ggauuggcaggagauuaua

SEQ ID NO: 459814 - RNA, 19 nt, Homo sapiens
  misc_RNA (1)...(19): siRNA sense strand
ggagauuauagcucuguau

SEQ ID NO: 459815 - RNA, 19 nt, Homo sapiens
  misc_RNA (1)...(19): siRNA sense strand
gcacugcagccugaaaugg

SEQ ID NO: 459816 - RNA, 19 nt, Homo sapiens
  misc_RNA (1)...(19): siRNA sense strand
agaaggacaacaccuacuu

SEQ ID NO: 459817 - RNA, 19 nt, Homo sapiens
  misc_RNA (1)...(19): siRNA sense strand
cuacuuucacugccuaaga

SEQ ID NO: 459818 - RNA, 19 nt, Homo sapiens
  misc_RNA (1)...(19): siRNA sense strand
gaaggauuggcaggagauu

SEQ ID NO: 459819 - RNA, 19 nt, Homo sapiens
  misc_RNA (1)...(19): siRNA sense strand
aauccuggaccuucucaaa

SEQ ID NO: 459820 - RNA, 19 nt, Homo sapiens
  misc_RNA (1)...(19): siRNA sense strand
aggauuggcaggagauuau

SEQ ID NO: 459821 - RNA, 19 nt, Homo sapiens
  misc_RNA (1)...(19): siRNA sense strand
uacauucacuacuuucacu

SEQ ID NO: 459822 - RNA, 19 nt, Homo sapiens
  misc_RNA (1)...(19): siRNA sense strand
gcacagaggccuccacgaa

SEQ ID NO: 459823 - RNA, 19 nt, Homo sapiens
  misc_RNA (1)...(19): siRNA sense strand
gaaggacaacaccuacuua

SEQ ID NO: 459824 - RNA, 19 nt, Homo sapiens
  misc_RNA (1)...(19): siRNA sense strand
ugaaggaccugccgaguca

SEQ ID NO: 459825 - RNA, 19 nt, Homo sapiens
  misc_RNA (1)...(19): siRNA sense strand
gggaagccauugacgugua

SEQ ID NO: 459826 - RNA, 19 nt, Homo sapiens
  misc_RNA (1)...(19): siRNA sense strand
gaugggaaccucucuguga

SEQ ID NO: 459827 - RNA, 19 nt, Homo sapiens
  misc_RNA (1)...(19): siRNA sense strand
gauuauagcucuguaugag

SEQ ID NO: 459828 - RNA, 19 nt, Homo sapiens
  misc_RNA (1)...(19): siRNA sense strand
gaucugauuggcaagcuua

SEQ ID NO: 459829 - RNA, 19 nt, Homo sapiens
  misc_RNA (1)...(19): siRNA sense strand
ucauggagcuugagaucuu

SEQ ID NO: 459830 - RNA, 19 nt, Homo sapiens
  misc_RNA (1)...(19): siRNA sense strand
gguccuacauucacuacuu

SEQ ID NO: 459831 - RNA, 19 nt, Homo sapiens
  misc_RNA (1)...(19): siRNA sense strand
ggaggcagauguccugucu

SEQ ID NO: 459832 - RNA, 19 nt, Homo sapiens
  misc_RNA (1)...(19): siRNA sense strand
gagcagguguugccaaugc

SEQ ID NO: 459833 - RNA, 19 nt, Homo sapiens
  misc_RNA (1)...(19): siRNA sense strand
agaagcagauugccaagug

SEQ ID NO: 459834 - RNA, 19 nt, Homo sapiens
  misc_RNA (1)...(19): siRNA sense strand
agacgaugcuguugcuuug

SEQ ID NO: 459835 - RNA, 19 nt, Homo sapiens
  misc_RNA (1)...(19): siRNA sense strand
acagaggccuccacgaaga

SEQ ID NO: 459836 - RNA, 19 nt, Homo sapiens
  misc_RNA (1)...(19): siRNA sense strand
gagacgaugcuguugcuuu

SEQ ID NO: 459837 - RNA, 19 nt, Homo sapiens
  misc_RNA (1)...(19): siRNA sense strand
uuauagcucuguaugagaa

SEQ ID NO: 459838 - RNA, 19 nt, Homo sapiens
  misc_RNA (1)...(19): siRNA sense strand
gcugcuggcuuugaagaaa

SEQ ID NO: 459839 - RNA, 19 nt, Homo sapiens
  misc_RNA (1)...(19): siRNA sense strand
ccagagagcaguggaguug

SEQ ID NO: 459840 - RNA, 19 nt, Homo sapiens
  misc_RNA (1)...(19): siRNA sense strand
gaagcugacaucuccaaga

SEQ ID NO: 459841 - RNA, 19 nt, Homo sapiens
  misc_RNA (1)...(19): siRNA sense strand
gaaacucaacgguguacga

SEQ ID NO: 459842 - RNA, 19 nt, Homo sapiens
  misc_RNA (1)...(19): siRNA sense strand
gagauuauagcucuguaug

SEQ ID NO: 459843 - RNA, 19 nt, Homo sapiens
  misc_RNA (1)...(19): siRNA sense strand
gagcaguggaguugaguga

SEQ ID NO: 459844 - RNA, 19 nt, Homo sapiens
  misc_RNA (1)...(19): siRNA sense strand
guccuacauucacuacuuu

SEQ ID NO: 459845 - RNA, 19 nt, Homo sapiens
  misc_RNA (1)...(19): siRNA sense strand
cagagcagguguugccaau

SEQ ID NO: 459846 - RNA, 19 nt, Homo sapiens
  misc_RNA (1)...(19): siRNA sense strand
gaaugucaacuaugagauc

SEQ ID NO: 459847 - RNA, 19 nt, Homo sapiens
  misc_RNA (1)...(19): siRNA sense strand
ccaaagagaagaugguuac

SEQ ID NO: 459848 - RNA, 19 nt, Homo sapiens
  misc_RNA (1)...(19): siRNA sense strand
ggagcuugagaucuucuua

SEQ ID NO: 459849 - RNA, 19 nt, Homo sapiens
  misc_RNA (1)...(19): siRNA sense strand
cacagcggaugaaggauug

SEQ ID NO: 459850 - RNA, 19 nt, Homo sapiens
  misc_RNA (1)...(19): siRNA sense strand
ggaagccauugacguguac

SEQ ID NO: 459851 - RNA, 19 nt, Homo sapiens
  misc_RNA (1)...(19): siRNA sense strand
ucacagcggaugaaggauu

SEQ ID NO: 459852 - RNA, 19 nt, Homo sapiens
  misc_RNA (1)...(19): siRNA sense strand
cccugacacugcuugaaua

SEQ ID NO: 459853 - RNA, 19 nt, Homo sapiens
  misc_RNA (1)...(19): siRNA sense strand
gcagaucacagugcuggaa

SEQ ID NO: 459854 - RNA, 19 nt, Homo sapiens
  misc_RNA (1)...(19): siRNA sense strand
gcacgugcccaucgacauc

SEQ ID NO: 459855 - RNA, 19 nt, Homo sapiens
  misc_RNA (1)...(19): siRNA sense strand
ggaccgagugacugaauuc

SEQ ID NO: 459856 - RNA, 19 nt, Homo sapiens
  misc_RNA (1)...(19): siRNA sense strand
uacuuucacugccuaagaa

SEQ ID NO: 459857 - RNA, 19 nt, Homo sapiens
  misc_RNA (1)...(19): siRNA sense strand
gcuguugcuuugcagauca

SEQ ID NO: 459858 - RNA, 19 nt, Homo sapiens
  misc_RNA (1)...(19): siRNA sense strand
ggguagaggcagugucuga

SEQ ID NO: 459859 - RNA, 19 nt, Homo sapiens
  misc_RNA (1)...(19): siRNA sense strand
ugacacugcuugaauacac

SEQ ID NO: 459860 - RNA, 19 nt, Homo sapiens
  misc_RNA (1)...(19): siRNA sense strand
aagcugacaucuccaagag

SEQ ID NO: 459861 - RNA, 19 nt, Homo sapiens
  misc_RNA (1)...(19): siRNA sense strand
uucggaaugucaacuauga

SEQ ID NO: 459862 - RNA, 19 nt, Homo sapiens
  misc_RNA (1)...(19): siRNA sense strand
ggauuggcaggagauuaua

SEQ ID NO: 459863 - RNA, 19 nt, Homo sapiens
  misc_RNA (1)...(19): siRNA sense strand
acacugagacccggaauca

SEQ ID NO: 459864 - RNA, 19 nt, Homo sapiens
  misc_RNA (1)...(19): siRNA sense strand
cugagcagguggcagaaga

SEQ ID NO: 459865 - RNA, 19 nt, Homo sapiens
  misc_RNA (1)...(19): siRNA sense strand
ucacugaagaagcagauug

SEQ ID NO: 459866 - RNA, 19 nt, Homo sapiens
  misc_RNA (1)...(19): siRNA sense strand
gguucggaaugucaacuau

SEQ ID NO: 459867 - RNA, 19 nt, Homo sapiens
  misc_RNA (1)...(19): siRNA sense strand
ggagauuauagcucuguau

SEQ ID NO: 459868 - RNA, 19 nt, Homo sapiens
  misc_RNA (1)...(19): siRNA sense strand
gagauccccucacugaaga

SEQ ID NO: 459869 - RNA, 19 nt, Homo sapiens
  misc_RNA (1)...(19): siRNA sense strand
gggagacgaugcuguugcu

SEQ ID NO: 459870 - RNA, 19 nt, Homo sapiens
  misc_RNA (1)...(19): siRNA sense strand
uccuggaggugaugggaua

SEQ ID NO: 459871 - RNA, 19 nt, Homo sapiens
  misc_RNA (1)...(19): siRNA sense strand
gcacugcagccugaaaugg

SEQ ID NO: 459872 - RNA, 19 nt, Homo sapiens
  misc_RNA (1)...(19): siRNA sense strand
gacugacucuggcaucucu

SEQ ID NO: 459873 - RNA, 19 nt, Homo sapiens
  misc_RNA (1)...(19): siRNA sense strand
uggcagaagaugcgauuga

SEQ ID NO: 459874 - RNA, 19 nt, Homo sapiens
  misc_RNA (1)...(19): siRNA sense strand
agaaggacaacaccuacuu

SEQ ID NO: 459875 - RNA, 19 nt, Homo sapiens
  misc_RNA (1)...(19): siRNA sense strand
ggaucugauuggcaagcuu

SEQ ID NO: 459876 - RNA, 19 nt, Homo sapiens
  misc_RNA (1)...(19): siRNA sense strand
gcccugacacugcuugaau

SEQ ID NO: 459877 - RNA, 19 nt, Homo sapiens
  misc_RNA (1)...(19): siRNA sense strand
ggaaugucaacuaugagau

SEQ ID NO: 459878 - RNA, 19 nt, Homo sapiens
  misc_RNA (1)...(19): siRNA sense strand
gagcuugagaucuucuuag

SEQ ID NO: 459879 - RNA, 19 nt, Homo sapiens
  misc_RNA (1)...(19): siRNA sense strand
ugagugaggaggcagaugu

SEQ ID NO: 459880 - RNA, 19 nt, Homo sapiens
  misc_RNA (1)...(19): siRNA sense strand
ugccgaggcugcuggaauc

SEQ ID NO: 459881 - RNA, 19 nt, Homo sapiens
  misc_RNA (1)...(19): siRNA sense strand
gaucuucuuagcccagaga

SEQ ID NO: 459882 - RNA, 19 nt, Homo sapiens
  misc_RNA (1)...(19): siRNA sense strand
aaaggauccuggaggugau

SEQ ID NO: 459883 - RNA, 19 nt, Homo sapiens
  misc_RNA (1)...(19): siRNA sense strand
gaaggauuggcaggagauu

SEQ ID NO: 459884 - RNA, 19 nt, Homo sapiens
  misc_RNA (1)...(19): siRNA sense strand
cuacuuucacugccuaaga

SEQ ID NO: 459885 - RNA, 19 nt, Homo sapiens
  misc_RNA (1)...(19): siRNA sense strand
cggaaugucaacuaugaga

SEQ ID NO: 459886 - RNA, 19 nt, Homo sapiens
  misc_RNA (1)...(19): siRNA sense strand
agagagcaguggaguugag

SEQ ID NO: 459887 - RNA, 19 nt, Homo sapiens
  misc_RNA (1)...(19): siRNA sense strand
aauccuggaccuucucaaa

SEQ ID NO: 459888 - RNA, 19 nt, Homo sapiens
  misc_RNA (1)...(19): siRNA sense strand
gguggcagaagaugcgauu

SEQ ID NO: 459889 - RNA, 19 nt, Homo sapiens
  misc_RNA (1)...(19): siRNA sense strand
aggauuggcaggagauuau

SEQ ID NO: 459890 - RNA, 19 nt, Homo sapiens
  misc_RNA (1)...(19): siRNA sense strand
agaccaaggagcugcagaa

SEQ ID NO: 459891 - RNA, 19 nt, Homo sapiens
  misc_RNA (1)...(19): siRNA sense strand
gggacugacucuggcaucu

SEQ ID NO: 459892 - RNA, 19 nt, Homo sapiens
  misc_RNA (1)...(19): siRNA sense strand
gagcagguggcagaagaug

SEQ ID NO: 459893 - RNA, 19 nt, Homo sapiens
  misc_RNA (1)...(19): siRNA sense strand
ggcagaagaugcgauugac

SEQ ID NO: 459894 - RNA, 19 nt, Homo sapiens
  misc_RNA (1)...(19): siRNA sense strand
aagagcugauggugcagaa

SEQ ID NO: 459895 - RNA, 19 nt, Homo sapiens
  misc_RNA (1)...(19): siRNA sense strand
cugcuugaauacacugaga

SEQ ID NO: 459896 - RNA, 19 nt, Homo sapiens
  misc_RNA (1)...(19): siRNA sense strand
uacauucacuacuuucacu

SEQ ID NO: 459897 - RNA, 19 nt, Homo sapiens
  misc_RNA (1)...(19): siRNA sense strand
uuggcaagcuuaccagucu

SEQ ID NO: 459898 - RNA, 19 nt, Homo sapiens
  misc_RNA (1)...(19): siRNA sense strand
ggauacagcuaguguuuga

SEQ ID NO: 459899 - RNA, 19 nt, Homo sapiens
  misc_RNA (1)...(19): siRNA sense strand
gaaaccaguaccauuauua

SEQ ID NO: 459900 - RNA, 19 nt, Homo sapiens
  misc_RNA (1)...(19): siRNA sense strand
uggaagaucugcucaagua

SEQ ID NO: 459901 - RNA, 19 nt, Homo sapiens
  misc_RNA (1)...(19): siRNA sense strand
aaaccuggauucaagauuu

SEQ ID NO: 459902 - RNA, 19 nt, Homo sapiens
  misc_RNA (1)...(19): siRNA sense strand
gaauuacucggucaauaua

SEQ ID NO: 459903 - RNA, 19 nt, Homo sapiens
  misc_RNA (1)...(19): siRNA sense strand
gcgcauccaucaaagcuuu

SEQ ID NO: 459904 - RNA, 19 nt, Homo sapiens
  misc_RNA (1)...(19): siRNA sense strand
ggaauuacucggucaauau

SEQ ID NO: 459905 - RNA, 19 nt, Homo sapiens
  misc_RNA (1)...(19): siRNA sense strand
gcagagcgcauccaucaaa

SEQ ID NO: 459906 - RNA, 19 nt, Homo sapiens
  misc_RNA (1)...(19): siRNA sense strand
caagaacgaaccaaauuaa

SEQ ID NO: 459907 - RNA, 19 nt, Homo sapiens
  misc_RNA (1)...(19): siRNA sense strand
gaagauauauccgaaacca

SEQ ID NO: 459908 - RNA, 19 nt, Homo sapiens
  misc_RNA (1)...(19): siRNA sense strand
cuauaacucuccaucagua

SEQ ID NO: 459909 - RNA, 19 nt, Homo sapiens
  misc_RNA (1)...(19): siRNA sense strand
guacuucaauccagaguca

SEQ ID NO: 459910 - RNA, 19 nt, Homo sapiens
  misc_RNA (1)...(19): siRNA sense strand
uggauaggcucaaugauga

SEQ ID NO: 459911 - RNA, 19 nt, Homo sapiens
  misc_RNA (1)...(19): siRNA sense strand
ucaagaacgaaccaaauua

SEQ ID NO: 459912 - RNA, 19 nt, Homo sapiens
  misc_RNA (1)...(19): siRNA sense strand
uguggaaguugaagauaua

SEQ ID NO: 459913 - RNA, 19 nt, Homo sapiens
  misc_RNA (1)...(19): siRNA sense strand
ccaguuggaucaccaugaa

SEQ ID NO: 459914 - RNA, 19 nt, Homo sapiens
  misc_RNA (1)...(19): siRNA sense strand
caugaacgaugugauugua

SEQ ID NO: 459915 - RNA, 19 nt, Homo sapiens
  misc_RNA (1)...(19): siRNA sense strand
aaugauaucuguagguaug

SEQ ID NO: 459916 - RNA, 19 nt, Homo sapiens
  misc_RNA (1)...(19): siRNA sense strand
cgaaaccaguaccauuauu

SEQ ID NO: 459917 - RNA, 19 nt, Homo sapiens
  misc_RNA (1)...(19): siRNA sense strand
gagcugaaguuggccaaug

SEQ ID NO: 459918 - RNA, 19 nt, Homo sapiens
  misc_RNA (1)...(19): siRNA sense strand
gauuguaucugcagcucaa

SEQ ID NO: 459919 - RNA, 19 nt, Homo sapiens
  misc_RNA (1)...(19): siRNA sense strand
ggaaccugcuccugacaug

SEQ ID NO: 459920 - RNA, 19 nt, Homo sapiens
  misc_RNA (1)...(19): siRNA sense strand
caugagguauuacaguuug

SEQ ID NO: 459921 - RNA, 19 nt, Homo sapiens
  misc_RNA (1)...(19): siRNA sense strand
gaccauggcucuaguugac

SEQ ID NO: 459922 - RNA, 19 nt, Homo sapiens
  misc_RNA (1)...(19): siRNA sense strand
uaagagaagagcugaaguu

SEQ ID NO: 459923 - RNA, 19 nt, Homo sapiens
  misc_RNA (1)...(19): siRNA sense strand
gcucaagaccaccucgaua

SEQ ID NO: 459924 - RNA, 19 nt, Homo sapiens
  misc_RNA (1)...(19): siRNA sense strand
gugcagcgcuguggaggaa

SEQ ID NO: 459925 - RNA, 19 nt, Homo sapiens
  misc_RNA (1)...(19): siRNA sense strand
aaccuggauucaagauuua

SEQ ID NO: 459926 - RNA, 19 nt, Homo sapiens
  misc_RNA (1)...(19): siRNA sense strand
ucaggagaauacacggaua

SEQ ID NO: 459927 - RNA, 19 nt, Homo sapiens
  misc_RNA (1)...(19): siRNA sense strand
gaagaucuugagaauaugu

SEQ ID NO: 459928 - RNA, 19 nt, Homo sapiens
  misc_RNA (1)...(19): siRNA sense strand
ggcuaaaccuggauucaag

SEQ ID NO: 459929 - RNA, 19 nt, Homo sapiens
  misc_RNA (1)...(19): siRNA sense strand
gcagcgcuguggaggaaau

SEQ ID NO: 459930 - RNA, 19 nt, Homo sapiens
  misc_RNA (1)...(19): siRNA sense strand
uaacggaucccacucugau

SEQ ID NO: 459931 - RNA, 19 nt, Homo sapiens
  misc_RNA (1)...(19): siRNA sense strand
cauggcggcuucacucuca

SEQ ID NO: 459932 - RNA, 19 nt, Homo sapiens
  misc_RNA (1)...(19): siRNA sense strand
ugaacgaugugauuguauc

SEQ ID NO: 459933 - RNA, 19 nt, Homo sapiens
  misc_RNA (1)...(19): siRNA sense strand
ggaaauuguggcuguggaa

SEQ ID NO: 459934 - RNA, 19 nt, Homo sapiens
  misc_RNA (1)...(19): siRNA sense strand
aggaauuacucggucaaua

SEQ ID NO: 459935 - RNA, 19 nt, Homo sapiens
  misc_RNA (1)...(19): siRNA sense strand
uccgaaaccaguaccauua

SEQ ID NO: 459936 - RNA, 19 nt, Homo sapiens
  misc_RNA (1)...(19): siRNA sense strand
gauauauccgaaaccagua

SEQ ID NO: 459937 - RNA, 19 nt, Homo sapiens
  misc_RNA (1)...(19): siRNA sense strand
ggaucaccaugaacgaugu

SEQ ID NO: 459938 - RNA, 19 nt, Homo sapiens
  misc_RNA (1)...(19): siRNA sense strand
cacaugcaauucagggaaa

SEQ ID NO: 459939 - RNA, 19 nt, Homo sapiens
  misc_RNA (1)...(19): siRNA sense strand
agaauuugauacaguggaa

SEQ ID NO: 459940 - RNA, 19 nt, Homo sapiens
  misc_RNA (1)...(19): siRNA sense strand
gaauacacggauacagcua

SEQ ID NO: 459941 - RNA, 19 nt, Homo sapiens
  misc_RNA (1)...(19): siRNA sense strand
ccgcagagcgcauccauca

SEQ ID NO: 459942 - RNA, 19 nt, Homo sapiens
  misc_RNA (1)...(19): siRNA sense strand
ucuaaucugcgcaaacuuu

SEQ ID NO: 459943 - RNA, 19 nt, Homo sapiens
  misc_RNA (1)...(19): siRNA sense strand
gaccggaagucaaaaguug

SEQ ID NO: 459944 - RNA, 19 nt, Homo sapiens
  misc_RNA (1)...(19): siRNA sense strand
ccauccaggugaaaggaaa

SEQ ID NO: 459945 - RNA, 19 nt, Homo sapiens
  misc_RNA (1)...(19): siRNA sense strand
caacugggaaucugucaca

SEQ ID NO: 459946 - RNA, 19 nt, Homo sapiens
  misc_RNA (1)...(19): siRNA sense strand
gagccuggccacaucaaga

SEQ ID NO: 459947 - RNA, 19 nt, Homo sapiens
  misc_RNA (1)...(19): siRNA sense strand
gaagaucugcucaaguacu

SEQ ID NO: 459948 - RNA, 19 nt, Homo sapiens
  misc_RNA (1)...(19): siRNA sense strand
gcucaucuuugucuacacu

SEQ ID NO: 459949 - RNA, 19 nt, Homo sapiens
  misc_RNA (1)...(19): siRNA sense strand
aagaucugcucaaguacuu

SEQ ID NO: 459950 - RNA, 19 nt, Homo sapiens
  misc_RNA (1)...(19): siRNA sense strand
gaaucugucacaagcucua

SEQ ID NO: 459951 - RNA, 19 nt, Homo sapiens
  misc_RNA (1)...(19): siRNA sense strand
caccaugaacgaugugauu

SEQ ID NO: 459952 - RNA, 19 nt, Homo sapiens
  misc_RNA (1)...(19): siRNA sense strand
gcuaagaccauggcucuag

SEQ ID NO: 459953 - RNA, 19 nt, Homo sapiens
  misc_RNA (1)...(19): siRNA sense strand
ugacuacuuuguggcuaaa

SEQ ID NO: 459954 - RNA, 19 nt, Homo sapiens
  misc_RNA (1)...(19): siRNA sense strand
cucaagaccaccucgauaa

SEQ ID NO: 459955 - RNA, 19 nt, Homo sapiens
  misc_RNA (1)...(19): siRNA sense strand
guugcacucccaggaauua

SEQ ID NO: 459956 - RNA, 19 nt, Homo sapiens
  misc_RNA (1)...(19): siRNA sense strand
gagaccaacugggaaucug

SEQ ID NO: 459957 - RNA, 19 nt, Homo sapiens
  misc_RNA (1)...(19): siRNA sense strand
ccagagucauggcaagaag

SEQ ID NO: 459958 - RNA, 19 nt, Homo sapiens
  misc_RNA (1)...(19): siRNA sense strand
gucacaagcucuauuucag

SEQ ID NO: 459959 - RNA, 19 nt, Homo sapiens
  misc_RNA (1)...(19): siRNA sense strand
gaacgaugugauuguaucu

SEQ ID NO: 459960 - RNA, 19 nt, Homo sapiens
  misc_RNA (1)...(19): siRNA sense strand
gcuaaaccuggauucaaga

SEQ ID NO: 459961 - RNA, 19 nt, Homo sapiens
  misc_RNA (1)...(19): siRNA sense strand
cuagauucccgaacagcua

SEQ ID NO: 459962 - RNA, 19 nt, Homo sapiens
  misc_RNA (1)...(19): siRNA sense strand
gaucugcucaaguacuuca

SEQ ID NO: 459963 - RNA, 19 nt, Homo sapiens
  misc_RNA (1)...(19): siRNA sense strand
cagcuaguguuugacaauc

SEQ ID NO: 459964 - RNA, 19 nt, Homo sapiens
  misc_RNA (1)...(19): siRNA sense strand
cuaagaccauggcucuagu

SEQ ID NO: 459965 - RNA, 19 nt, Homo sapiens
  misc_RNA (1)...(19): siRNA sense strand
uugcagaauuugauacagu

SEQ ID NO: 459966 - RNA, 19 nt, Homo sapiens
  misc_RNA (1)...(19): siRNA sense strand
ucacauucaaguccgauga

SEQ ID NO: 459967 - RNA, 19 nt, Homo sapiens
  misc_RNA (1)...(19): siRNA sense strand
uggauuagaggaagcagaa

SEQ ID NO: 459968 - RNA, 19 nt, Homo sapiens
  misc_RNA (1)...(19): siRNA sense strand
ccaauguggucuucuuucc

SEQ ID NO: 459969 - RNA, 19 nt, Homo sapiens
  misc_RNA (1)...(19): siRNA sense strand
cuggauaggcucaaugaug

SEQ ID NO: 459970 - RNA, 19 nt, Homo sapiens
  misc_RNA (1)...(19): siRNA sense strand
guaacggaucccacucuga

SEQ ID NO: 459971 - RNA, 19 nt, Homo sapiens
  misc_RNA (1)...(19): siRNA sense strand
aaucaagaacgaaccaaau

SEQ ID NO: 459972 - RNA, 19 nt, Homo sapiens
  misc_RNA (1)...(19): siRNA sense strand
aaaccaguaccauuauuag

SEQ ID NO: 459973 - RNA, 19 nt, Homo sapiens
  misc_RNA (1)...(19): siRNA sense strand
ggaaguugaagauauaucc

SEQ ID NO: 459974 - RNA, 19 nt, Homo sapiens
  misc_RNA (1)...(19): siRNA sense strand
gauaucuguagguaugauu

SEQ ID NO: 459975 - RNA, 19 nt, Homo sapiens
  misc_RNA (1)...(19): siRNA sense strand
aguccuagauucccgaaca

SEQ ID NO: 459976 - RNA, 19 nt, Homo sapiens
  misc_RNA (1)...(19): siRNA sense strand
caguugcacucccaggaau

SEQ ID NO: 459977 - RNA, 19 nt, Homo sapiens
  misc_RNA (1)...(19): siRNA sense strand
augaugaugccaagcguua

SEQ ID NO: 459978 - RNA, 19 nt, Homo sapiens
  misc_RNA (1)...(19): siRNA sense strand
gaugaugccaagcguuaca

SEQ ID NO: 459979 - RNA, 19 nt, Homo sapiens
  misc_RNA (1)...(19): siRNA sense strand
ucaugagguauuacaguuu

SEQ ID NO: 459980 - RNA, 19 nt, Homo sapiens
  misc_RNA (1)...(19): siRNA sense strand
ggccaauguggucuucuuu

SEQ ID NO: 459981 - RNA, 19 nt, Homo sapiens
  misc_RNA (1)...(19): siRNA sense strand
uuguggaaguugaagauau

SEQ ID NO: 459982 - RNA, 19 nt, Homo sapiens
  misc_RNA (1)...(19): siRNA sense strand
gaugccaagcguuacaguu

SEQ ID NO: 459983 - RNA, 19 nt, Homo sapiens
  misc_RNA (1)...(19): siRNA sense strand
ugucacaagcucuauuuca

SEQ ID NO: 459984 - RNA, 19 nt, Homo sapiens
  misc_RNA (1)...(19): siRNA sense strand
acggauacagcuaguguuu

SEQ ID NO: 459985 - RNA, 19 nt, Homo sapiens
  misc_RNA (1)...(19): siRNA sense strand
aaaucaagaacgaaccaaa

SEQ ID NO: 459986 - RNA, 19 nt, Homo sapiens
  misc_RNA (1)...(19): siRNA sense strand
ccgaaaccaguaccauuau

SEQ ID NO: 459987 - RNA, 19 nt, Homo sapiens
  misc_RNA (1)...(19): siRNA sense strand
uuucagggguauccuauaa

SEQ ID NO: 459988 - RNA, 19 nt, Homo sapiens
  misc_RNA (1)...(19): siRNA sense strand
cagagcgcauccaucaaag

SEQ ID NO: 459989 - RNA, 19 nt, Homo sapiens
  misc_RNA (1)...(19): siRNA sense strand
gcuaguguuugacaaucag

SEQ ID NO: 459990 - RNA, 19 nt, Homo sapiens
  misc_RNA (1)...(19): siRNA sense strand
uggccaauguggucuucuu

SEQ ID NO: 459991 - RNA, 19 nt, Homo sapiens
  misc_RNA (1)...(19): siRNA sense strand
gccaagcguuacaguugca

SEQ ID NO: 459992 - RNA, 19 nt, Homo sapiens
  misc_RNA (1)...(19): siRNA sense strand
gauaggcucaaugaugaug

SEQ ID NO: 459993 - RNA, 19 nt, Homo sapiens
  misc_RNA (1)...(19): siRNA sense strand
gcucaaguacuucaaucca

SEQ ID NO: 459994 - RNA, 19 nt, Homo sapiens
  misc_RNA (1)...(19): siRNA sense strand
aucaugagguauuacaguu

SEQ ID NO: 459995 - RNA, 19 nt, Homo sapiens
  misc_RNA (1)...(19): siRNA sense strand
acucuaaucugcgcaaacu

SEQ ID NO: 459996 - RNA, 19 nt, Homo sapiens
  misc_RNA (1)...(19): siRNA sense strand
ccauggcucuaguugacau

SEQ ID NO: 459997 - RNA, 19 nt, Homo sapiens
  misc_RNA (1)...(19): siRNA sense strand
guuugagccuggccacauc

SEQ ID NO: 459998 - RNA, 19 nt, Homo sapiens
  misc_RNA (1)...(19): siRNA sense strand
ggauacagcuaguguuuga

SEQ ID NO: 459999 - RNA, 19 nt, Homo sapiens
  misc_RNA (1)...(19): siRNA sense strand
gaaaccaguaccauuauua

SEQ ID NO: 460000 - RNA, 19 nt, Homo sapiens
  misc_RNA (1)...(19): siRNA sense strand
uggaagaucugcucaagua

SEQ ID NO: 460001 - RNA, 19 nt, Homo sapiens
  misc_RNA (1)...(19): siRNA sense strand
aaaccuggauucaagauuu

SEQ ID NO: 460002 - RNA, 19 nt, Homo sapiens
  misc_RNA (1)...(19): siRNA sense strand
gaauuacucggucaauaua

SEQ ID NO: 460003 - RNA, 19 nt, Homo sapiens
  misc_RNA (1)...(19): siRNA sense strand
gcgcauccaucaaagcuuu

SEQ ID NO: 460004 - RNA, 19 nt, Homo sapiens
  misc_RNA (1)...(19): siRNA sense strand
ggaauuacucggucaauau

SEQ ID NO: 460005 - RNA, 19 nt, Homo sapiens
  misc_RNA (1)...(19): siRNA sense strand
gcagagcgcauccaucaaa

SEQ ID NO: 460006 - RNA, 19 nt, Homo sapiens
  misc_RNA (1)...(19): siRNA sense strand
caagaacgaaccaaauuaa

SEQ ID NO: 460007 - RNA, 19 nt, Homo sapiens
  misc_RNA (1)...(19): siRNA sense strand
gaagauauauccgaaacca

SEQ ID NO: 460008 - RNA, 19 nt, Homo sapiens
  misc_RNA (1)...(19): siRNA sense strand
cuauaacucuccaucagua

SEQ ID NO: 460009 - RNA, 19 nt, Homo sapiens
  misc_RNA (1)...(19): siRNA sense strand
guacuucaauccagaguca

SEQ ID NO: 460010 - RNA, 19 nt, Homo sapiens
  misc_RNA (1)...(19): siRNA sense strand
uggauaggcucaaugauga

SEQ ID NO: 460011 - RNA, 19 nt, Homo sapiens
  misc_RNA (1)...(19): siRNA sense strand
ucaagaacgaaccaaauua

SEQ ID NO: 460012 - RNA, 19 nt, Homo sapiens
  misc_RNA (1)...(19): siRNA sense strand
uguggaaguugaagauaua

SEQ ID NO: 460013 - RNA, 19 nt, Homo sapiens
  misc_RNA (1)...(19): siRNA sense strand
ccaguuggaucaccaugaa

SEQ ID NO: 460014 - RNA, 19 nt, Homo sapiens
  misc_RNA (1)...(19): siRNA sense strand
caugaacgaugugauugua

SEQ ID NO: 460015 - RNA, 19 nt, Homo sapiens
  misc_RNA (1)...(19): siRNA sense strand
aaugauaucuguagguaug

SEQ ID NO: 460016 - RNA, 19 nt, Homo sapiens
  misc_RNA (1)...(19): siRNA sense strand
cgaaaccaguaccauuauu

SEQ ID NO: 460017 - RNA, 19 nt, Homo sapiens
  misc_RNA (1)...(19): siRNA sense strand
gagcugaaguuggccaaug

SEQ ID NO: 460018 - RNA, 19 nt, Homo sapiens
  misc_RNA (1)...(19): siRNA sense strand
gauuguaucugcagcucaa

SEQ ID NO: 460019 - RNA, 19 nt, Homo sapiens
  misc_RNA (1)...(19): siRNA sense strand
ggaaccugcuccugacaug

SEQ ID NO: 460020 - RNA, 19 nt, Homo sapiens
  misc_RNA (1)...(19): siRNA sense strand
caugagguauuacaguuug

SEQ ID NO: 460021 - RNA, 19 nt, Homo sapiens
  misc_RNA (1)...(19): siRNA sense strand
gaccauggcucuaguugac

SEQ ID NO: 460022 - RNA, 19 nt, Homo sapiens
  misc_RNA (1)...(19): siRNA sense strand
uaagagaagagcugaaguu

SEQ ID NO: 460023 - RNA, 19 nt, Homo sapiens
  misc_RNA (1)...(19): siRNA sense strand
gcucaagaccaccucgaua

SEQ ID NO: 460024 - RNA, 19 nt, Homo sapiens
  misc_RNA (1)...(19): siRNA sense strand
gugcagcgcuguggaggaa

SEQ ID NO: 460025 - RNA, 19 nt, Homo sapiens
  misc_RNA (1)...(19): siRNA sense strand
aaccuggauucaagauuua

SEQ ID NO: 460026 - RNA, 19 nt, Homo sapiens
  misc_RNA (1)...(19): siRNA sense strand
ucaggagaauacacggaua

SEQ ID NO: 460027 - RNA, 19 nt, Homo sapiens
  misc_RNA (1)...(19): siRNA sense strand
gaagaucuugagaauaugu

SEQ ID NO: 460028 - RNA, 19 nt, Homo sapiens
  misc_RNA (1)...(19): siRNA sense strand
ggcuaaaccuggauucaag

SEQ ID NO: 460029 - RNA, 19 nt, Homo sapiens
  misc_RNA (1)...(19): siRNA sense strand
gcagcgcuguggaggaaau

SEQ ID NO: 460030 - RNA, 19 nt, Homo sapiens
  misc_RNA (1)...(19): siRNA sense strand
uaacggaucccacucugau

SEQ ID NO: 460031 - RNA, 19 nt, Homo sapiens
  misc_RNA (1)...(19): siRNA sense strand
cauggcggcuucacucuca

SEQ ID NO: 460032 - RNA, 19 nt, Homo sapiens
  misc_RNA (1)...(19): siRNA sense strand
ugaacgaugugauuguauc

SEQ ID NO: 460033 - RNA, 19 nt, Homo sapiens
  misc_RNA (1)...(19): siRNA sense strand
ggaaauuguggcuguggaa

SEQ ID NO: 460034 - RNA, 19 nt, Homo sapiens
  misc_RNA (1)...(19): siRNA sense strand
aggaauuacucggucaaua

SEQ ID NO: 460035 - RNA, 19 nt, Homo sapiens
  misc_RNA (1)...(19): siRNA sense strand
uccgaaaccaguaccauua

SEQ ID NO: 460036 - RNA, 19 nt, Homo sapiens
  misc_RNA (1)...(19): siRNA sense strand
gauauauccgaaaccagua

SEQ ID NO: 460037 - RNA, 19 nt, Homo sapiens
  misc_RNA (1)...(19): siRNA sense strand
ggaucaccaugaacgaugu

SEQ ID NO: 460038 - RNA, 19 nt, Homo sapiens
  misc_RNA (1)...(19): siRNA sense strand
cacaugcaauucagggaaa

SEQ ID NO: 460039 - RNA, 19 nt, Homo sapiens
  misc_RNA (1)...(19): siRNA sense strand
agaauuugauacaguggaa

SEQ ID NO: 460040 - RNA, 19 nt, Homo sapiens
  misc_RNA (1)...(19): siRNA sense strand
gaauacacggauacagcua

SEQ ID NO: 460041 - RNA, 19 nt, Homo sapiens
  misc_RNA (1)...(19): siRNA sense strand
ccgcagagcgcauccauca

SEQ ID NO: 460042 - RNA, 19 nt, Homo sapiens
  misc_RNA (1)...(19): siRNA sense strand
ucuaaucugcgcaaacuuu

SEQ ID NO: 460043 - RNA, 19 nt, Homo sapiens
  misc_RNA (1)...(19): siRNA sense strand
gaccggaagucaaaaguug

SEQ ID NO: 460044 - RNA, 19 nt, Homo sapiens
  misc_RNA (1)...(19): siRNA sense strand
ccauccaggugaaaggaaa

SEQ ID NO: 460045 - RNA, 19 nt, Homo sapiens
  misc_RNA (1)...(19): siRNA sense strand
caacugggaaucugucaca

SEQ ID NO: 460046 - RNA, 19 nt, Homo sapiens
  misc_RNA (1)...(19): siRNA sense strand
gagccuggccacaucaaga

SEQ ID NO: 460047 - RNA, 19 nt, Homo sapiens
  misc_RNA (1)...(19): siRNA sense strand
gaagaucugcucaaguacu

SEQ ID NO: 460048 - RNA, 19 nt, Homo sapiens
  misc_RNA (1)...(19): siRNA sense strand
gcucaucuuugucuacacu

SEQ ID NO: 460049 - RNA, 19 nt, Homo sapiens
  misc_RNA (1)...(19): siRNA sense strand
aagaucugcucaaguacuu

SEQ ID NO: 460050 - RNA, 19 nt, Homo sapiens
  misc_RNA (1)...(19): siRNA sense strand
gaaucugucacaagcucua

SEQ ID NO: 460051 - RNA, 19 nt, Homo sapiens
  misc_RNA (1)...(19): siRNA sense strand
caccaugaacgaugugauu

SEQ ID NO: 460052 - RNA, 19 nt, Homo sapiens
  misc_RNA (1)...(19): siRNA sense strand
gcuaagaccauggcucuag

SEQ ID NO: 460053 - RNA, 19 nt, Homo sapiens
  misc_RNA (1)...(19): siRNA sense strand
ugacuacuuuguggcuaaa

SEQ ID NO: 460054 - RNA, 19 nt, Homo sapiens
  misc_RNA (1)...(19): siRNA sense strand
cucaagaccaccucgauaa

SEQ ID NO: 460055 - RNA, 19 nt, Homo sapiens
  misc_RNA (1)...(19): siRNA sense strand
guugcacucccaggaauua

SEQ ID NO: 460056 - RNA, 19 nt, Homo sapiens
  misc_RNA (1)...(19): siRNA sense strand
gagaccaacugggaaucug

SEQ ID NO: 460057 - RNA, 19 nt, Homo sapiens
  misc_RNA (1)...(19): siRNA sense strand
ccagagucauggcaagaag

SEQ ID NO: 460058 - RNA, 19 nt, Homo sapiens
  misc_RNA (1)...(19): siRNA sense strand
gucacaagcucuauuucag

SEQ ID NO: 460059 - RNA, 19 nt, Homo sapiens
  misc_RNA (1)...(19): siRNA sense strand
gaacgaugugauuguaucu

SEQ ID NO: 460060 - RNA, 19 nt, Homo sapiens
  misc_RNA (1)...(19): siRNA sense strand
gcuaaaccuggauucaaga

SEQ ID NO: 460061 - RNA, 19 nt, Homo sapiens
  misc_RNA (1)...(19): siRNA sense strand
cuagauucccgaacagcua

SEQ ID NO: 460062 - RNA, 19 nt, Homo sapiens
  misc_RNA (1)...(19): siRNA sense strand
gaucugcucaaguacuuca

SEQ ID NO: 460063 - RNA, 19 nt, Homo sapiens
  misc_RNA (1)...(19): siRNA sense strand
cagcuaguguuugacaauc

SEQ ID NO: 460064 - RNA, 19 nt, Homo sapiens
  misc_RNA (1)...(19): siRNA sense strand
cuaagaccauggcucuagu

SEQ ID NO: 460065 - RNA, 19 nt, Homo sapiens
  misc_RNA (1)...(19): siRNA sense strand
uugcagaauuugauacagu

SEQ ID NO: 460066 - RNA, 19 nt, Homo sapiens
  misc_RNA (1)...(19): siRNA sense strand
ucacauucaaguccgauga

SEQ ID NO: 460067 - RNA, 19 nt, Homo sapiens
  misc_RNA (1)...(19): siRNA sense strand
uggauuagaggaagcagaa

SEQ ID NO: 460068 - RNA, 19 nt, Homo sapiens
  misc_RNA (1)...(19): siRNA sense strand
ccaauguggucuucuuucc

SEQ ID NO: 460069 - RNA, 19 nt, Homo sapiens
  misc_RNA (1)...(19): siRNA sense strand
cuggauaggcucaaugaug

SEQ ID NO: 460070 - RNA, 19 nt, Homo sapiens
  misc_RNA (1)...(19): siRNA sense strand
guaacggaucccacucuga

SEQ ID NO: 460071 - RNA, 19 nt, Homo sapiens
  misc_RNA (1)...(19): siRNA sense strand
aaucaagaacgaaccaaau

SEQ ID NO: 460072 - RNA, 19 nt, Homo sapiens
  misc_RNA (1)...(19): siRNA sense strand
aaaccaguaccauuauuag

SEQ ID NO: 460073 - RNA, 19 nt, Homo sapiens
  misc_RNA (1)...(19): siRNA sense strand
ggaaguugaagauauaucc

SEQ ID NO: 460074 - RNA, 19 nt, Homo sapiens
  misc_RNA (1)...(19): siRNA sense strand
gauaucuguagguaugauu

SEQ ID NO: 460075 - RNA, 19 nt, Homo sapiens
  misc_RNA (1)...(19): siRNA sense strand
aguccuagauucccgaaca

SEQ ID NO: 460076 - RNA, 19 nt, Homo sapiens
  misc_RNA (1)...(19): siRNA sense strand
caguugcacucccaggaau

SEQ ID NO: 460077 - RNA, 19 nt, Homo sapiens
  misc_RNA (1)...(19): siRNA sense strand
augaugaugccaagcguua

SEQ ID NO: 460078 - RNA, 19 nt, Homo sapiens
  misc_RNA (1)...(19): siRNA sense strand
gaugaugccaagcguuaca

SEQ ID NO: 460079 - RNA, 19 nt, Homo sapiens
  misc_RNA (1)...(19): siRNA sense strand
ucaugagguauuacaguuu

SEQ ID NO: 460080 - RNA, 19 nt, Homo sapiens
  misc_RNA (1)...(19): siRNA sense strand
ggccaauguggucuucuuu

SEQ ID NO: 460081 - RNA, 19 nt, Homo sapiens
  misc_RNA (1)...(19): siRNA sense strand
uuguggaaguugaagauau

SEQ ID NO: 460082 - RNA, 19 nt, Homo sapiens
  misc_RNA (1)...(19): siRNA sense strand
gaugccaagcguuacaguu

SEQ ID NO: 460083 - RNA, 19 nt, Homo sapiens
  misc_RNA (1)...(19): siRNA sense strand
ugucacaagcucuauuuca

SEQ ID NO: 460084 - RNA, 19 nt, Homo sapiens
  misc_RNA (1)...(19): siRNA sense strand
acggauacagcuaguguuu

SEQ ID NO: 460085 - RNA, 19 nt, Homo sapiens
  misc_RNA (1)...(19): siRNA sense strand
aaaucaagaacgaaccaaa

SEQ ID NO: 460086 - RNA, 19 nt, Homo sapiens
  misc_RNA (1)...(19): siRNA sense strand
ccgaaaccaguaccauuau

SEQ ID NO: 460087 - RNA, 19 nt, Homo sapiens
  misc_RNA (1)...(19): siRNA sense strand
uuucagggguauccuauaa

SEQ ID NO: 460088 - RNA, 19 nt, Homo sapiens
  misc_RNA (1)...(19): siRNA sense strand
cagagcgcauccaucaaag

SEQ ID NO: 460089 - RNA, 19 nt, Homo sapiens
  misc_RNA (1)...(19): siRNA sense strand
gcuaguguuugacaaucag

SEQ ID NO: 460090 - RNA, 19 nt, Homo sapiens
  misc_RNA (1)...(19): siRNA sense strand
uggccaauguggucuucuu

SEQ ID NO: 460091 - RNA, 19 nt, Homo sapiens
  misc_RNA (1)...(19): siRNA sense strand
gccaagcguuacaguugca

SEQ ID NO: 460092 - RNA, 19 nt, Homo sapiens
  misc_RNA (1)...(19): siRNA sense strand
gauaggcucaaugaugaug

SEQ ID NO: 460093 - RNA, 19 nt, Homo sapiens
  misc_RNA (1)...(19): siRNA sense strand
gcucaaguacuucaaucca

SEQ ID NO: 460094 - RNA, 19 nt, Homo sapiens
  misc_RNA (1)...(19): siRNA sense strand
aucaugagguauuacaguu

SEQ ID NO: 460095 - RNA, 19 nt, Homo sapiens
  misc_RNA (1)...(19): siRNA sense strand
acucuaaucugcgcaaacu

SEQ ID NO: 460096 - RNA, 19 nt, Homo sapiens
  misc_RNA (1)...(19): siRNA sense strand
ccauggcucuaguugacau

SEQ ID NO: 460097 - RNA, 19 nt, Homo sapiens
  misc_RNA (1)...(19): siRNA sense strand
guuugagccuggccacauc

SEQ ID NO: 460098 - RNA, 19 nt, Homo sapiens
  misc_RNA (1)...(19): siRNA sense strand
ggaagcagauuacugguuu

SEQ ID NO: 460099 - RNA, 19 nt, Homo sapiens
  misc_RNA (1)...(19): siRNA sense strand
gcagauuacugguuuauga

SEQ ID NO: 460100 - RNA, 19 nt, Homo sapiens
  misc_RNA (1)...(19): siRNA sense strand
gagcagaaaguucggauua

SEQ ID NO: 460101 - RNA, 19 nt, Homo sapiens
  misc_RNA (1)...(19): siRNA sense strand
gcagaaaguucggauuaaa

SEQ ID NO: 460102 - RNA, 19 nt, Homo sapiens
  misc_RNA (1)...(19): siRNA sense strand
guacaucccugccagauuc

SEQ ID NO: 460103 - RNA, 19 nt, Homo sapiens
  misc_RNA (1)...(19): siRNA sense strand
gaagaugggugaccucaag

SEQ ID NO: 460104 - RNA, 19 nt, Homo sapiens
  misc_RNA (1)...(19): siRNA sense strand
gaaaccggauuccaacuau

SEQ ID NO: 460105 - RNA, 19 nt, Homo sapiens
  misc_RNA (1)...(19): siRNA sense strand
caaggaagccuaccagauu

SEQ ID NO: 460106 - RNA, 19 nt, Homo sapiens
  misc_RNA (1)...(19): siRNA sense strand
gagagcagguuuaaugaug

SEQ ID NO: 460107 - RNA, 19 nt, Homo sapiens
  misc_RNA (1)...(19): siRNA sense strand
gggcaucucuaaagugaaa

SEQ ID NO: 460108 - RNA, 19 nt, Homo sapiens
  misc_RNA (1)...(19): siRNA sense strand
uacaagaccuccgauauuu

SEQ ID NO: 460109 - RNA, 19 nt, Homo sapiens
  misc_RNA (1)...(19): siRNA sense strand
guacaagaccuccgauauu

SEQ ID NO: 460110 - RNA, 19 nt, Homo sapiens
  misc_RNA (1)...(19): siRNA sense strand
gaagcagauuacugguuua

SEQ ID NO: 460111 - RNA, 19 nt, Homo sapiens
  misc_RNA (1)...(19): siRNA sense strand
ugagaagcauccugaguuu

SEQ ID NO: 460112 - RNA, 19 nt, Homo sapiens
  misc_RNA (1)...(19): siRNA sense strand
gaaacaaagaugcuaauca

SEQ ID NO: 460113 - RNA, 19 nt, Homo sapiens
  misc_RNA (1)...(19): siRNA sense strand
gaaccucgcgcuugaaaug

SEQ ID NO: 460114 - RNA, 19 nt, Homo sapiens
  misc_RNA (1)...(19): siRNA sense strand
ugauggaacucaacugauu

SEQ ID NO: 460115 - RNA, 19 nt, Homo sapiens
  misc_RNA (1)...(19): siRNA sense strand
gaaaggaucgggcacugaa

SEQ ID NO: 460116 - RNA, 19 nt, Homo sapiens
  misc_RNA (1)...(19): siRNA sense strand
uggagucucucauucguua

SEQ ID NO: 460117 - RNA, 19 nt, Homo sapiens
  misc_RNA (1)...(19): siRNA sense strand
ggaugacccuggcccauga

SEQ ID NO: 460118 - RNA, 19 nt, Homo sapiens
  misc_RNA (1)...(19): siRNA sense strand
gcuagaagguuuagauuuu

SEQ ID NO: 460119 - RNA, 19 nt, Homo sapiens
  misc_RNA (1)...(19): siRNA sense strand
caaagaugcuaaucaccaa

SEQ ID NO: 460120 - RNA, 19 nt, Homo sapiens
  misc_RNA (1)...(19): siRNA sense strand
gcugagaccuaccugaaga

SEQ ID NO: 460121 - RNA, 19 nt, Homo sapiens
  misc_RNA (1)...(19): siRNA sense strand
ggacaaaugauggucagua

SEQ ID NO: 460122 - RNA, 19 nt, Homo sapiens
  misc_RNA (1)...(19): siRNA sense strand
aggagaagauuaucaagaa

SEQ ID NO: 460123 - RNA, 19 nt, Homo sapiens
  misc_RNA (1)...(19): siRNA sense strand
gccgagcacuguauaaaug

SEQ ID NO: 460124 - RNA, 19 nt, Homo sapiens
  misc_RNA (1)...(19): siRNA sense strand
gaaaacagauuggaaagga

SEQ ID NO: 460125 - RNA, 19 nt, Homo sapiens
  misc_RNA (1)...(19): siRNA sense strand
gcagauggagucucucauu

SEQ ID NO: 460126 - RNA, 19 nt, Homo sapiens
  misc_RNA (1)...(19): siRNA sense strand
gcggagagcagguuuaaug

SEQ ID NO: 460127 - RNA, 19 nt, Homo sapiens
  misc_RNA (1)...(19): siRNA sense strand
gcagagcuguaccaugguu

SEQ ID NO: 460128 - RNA, 19 nt, Homo sapiens
  misc_RNA (1)...(19): siRNA sense strand
gggaugaggccuuugcuuu

SEQ ID NO: 460129 - RNA, 19 nt, Homo sapiens
  misc_RNA (1)...(19): siRNA sense strand
uggaagcgcuagaagguuu

SEQ ID NO: 460130 - RNA, 19 nt, Homo sapiens
  misc_RNA (1)...(19): siRNA sense strand
aaacaaagaugcuaaucac

SEQ ID NO: 460131 - RNA, 19 nt, Homo sapiens
  misc_RNA (1)...(19): siRNA sense strand
ucagaggacuuaucagaca

SEQ ID NO: 460132 - RNA, 19 nt, Homo sapiens
  misc_RNA (1)...(19): siRNA sense strand
gcaguccgcucccauguac

SEQ ID NO: 460133 - RNA, 19 nt, Homo sapiens
  misc_RNA (1)...(19): siRNA sense strand
agaagcauccugaguuuaa

SEQ ID NO: 460134 - RNA, 19 nt, Homo sapiens
  misc_RNA (1)...(19): siRNA sense strand
cuccaugucuucuccauuu

SEQ ID NO: 460135 - RNA, 19 nt, Homo sapiens
  misc_RNA (1)...(19): siRNA sense strand
gcagagaacgaucgcuuug

SEQ ID NO: 460136 - RNA, 19 nt, Homo sapiens
  misc_RNA (1)...(19): siRNA sense strand
auaggaaacuguucaagga

SEQ ID NO: 460137 - RNA, 19 nt, Homo sapiens
  misc_RNA (1)...(19): siRNA sense strand
gacaagcaaguaucucuuu

SEQ ID NO: 460138 - RNA, 19 nt, Homo sapiens
  misc_RNA (1)...(19): siRNA sense strand
aacaacagcucccagauuc

SEQ ID NO: 460139 - RNA, 19 nt, Homo sapiens
  misc_RNA (1)...(19): siRNA sense strand
ggaugaggccuuugcuuug

SEQ ID NO: 460140 - RNA, 19 nt, Homo sapiens
  misc_RNA (1)...(19): siRNA sense strand
gaccauggcuggguugaca

SEQ ID NO: 460141 - RNA, 19 nt, Homo sapiens
  misc_RNA (1)...(19): siRNA sense strand
ucuaugaguuguauucaga

SEQ ID NO: 460142 - RNA, 19 nt, Homo sapiens
  misc_RNA (1)...(19): siRNA sense strand
guguugacguggagagaua

SEQ ID NO: 460143 - RNA, 19 nt, Homo sapiens
  misc_RNA (1)...(19): siRNA sense strand
gcacaguccaugggcuuua

SEQ ID NO: 460144 - RNA, 19 nt, Homo sapiens
  misc_RNA (1)...(19): siRNA sense strand
ggacuuaucagacaugcau

SEQ ID NO: 460145 - RNA, 19 nt, Homo sapiens
  misc_RNA (1)...(19): siRNA sense strand
gacaaaugauggucaguac

SEQ ID NO: 460146 - RNA, 19 nt, Homo sapiens
  misc_RNA (1)...(19): siRNA sense strand
gaggacccguucacagcua

SEQ ID NO: 460147 - RNA, 19 nt, Homo sapiens
  misc_RNA (1)...(19): siRNA sense strand
aaacaacagcucccagauu

SEQ ID NO: 460148 - RNA, 19 nt, Homo sapiens
  misc_RNA (1)...(19): siRNA sense strand
ugacagacagcuagagauu

SEQ ID NO: 460149 - RNA, 19 nt, Homo sapiens
  misc_RNA (1)...(19): siRNA sense strand
gaacgaucgcuuugaggaa

SEQ ID NO: 460150 - RNA, 19 nt, Homo sapiens
  misc_RNA (1)...(19): siRNA sense strand
ggagaagauuaucaagaag

SEQ ID NO: 460151 - RNA, 19 nt, Homo sapiens
  misc_RNA (1)...(19): siRNA sense strand
gagcucaucagcagcauug

SEQ ID NO: 460152 - RNA, 19 nt, Homo sapiens
  misc_RNA (1)...(19): siRNA sense strand
uacaauggcuccaagaucu

SEQ ID NO: 460153 - RNA, 19 nt, Homo sapiens
  misc_RNA (1)...(19): siRNA sense strand
ugcaucagcuacuuuacua

SEQ ID NO: 460154 - RNA, 19 nt, Homo sapiens
  misc_RNA (1)...(19): siRNA sense strand
gagaagcauccugaguuua

SEQ ID NO: 460155 - RNA, 19 nt, Homo sapiens
  misc_RNA (1)...(19): siRNA sense strand
gagaaccucgcgcuugaaa

SEQ ID NO: 460156 - RNA, 19 nt, Homo sapiens
  misc_RNA (1)...(19): siRNA sense strand
gauaaagccgagcacugua

SEQ ID NO: 460157 - RNA, 19 nt, Homo sapiens
  misc_RNA (1)...(19): siRNA sense strand
gacaaucucuuugcuaucg

SEQ ID NO: 460158 - RNA, 19 nt, Homo sapiens
  misc_RNA (1)...(19): siRNA sense strand
cagauggagucucucauuc

SEQ ID NO: 460159 - RNA, 19 nt, Homo sapiens
  misc_RNA (1)...(19): siRNA sense strand
ccagaaagcguuccacaag

SEQ ID NO: 460160 - RNA, 19 nt, Homo sapiens
  misc_RNA (1)...(19): siRNA sense strand
gcgcugggaugaggccuuu

SEQ ID NO: 460161 - RNA, 19 nt, Homo sapiens
  misc_RNA (1)...(19): siRNA sense strand
caaagaaacaaagaugcua

SEQ ID NO: 460162 - RNA, 19 nt, Homo sapiens
  misc_RNA (1)...(19): siRNA sense strand
gcugaagaauggacagauc

SEQ ID NO: 460163 - RNA, 19 nt, Homo sapiens
  misc_RNA (1)...(19): siRNA sense strand
cgaaaccggauuccaacua

SEQ ID NO: 460164 - RNA, 19 nt, Homo sapiens
  misc_RNA (1)...(19): siRNA sense strand
gaugaggccuuugcuuugg

SEQ ID NO: 460165 - RNA, 19 nt, Homo sapiens
  misc_RNA (1)...(19): siRNA sense strand
caagaccuccgauauuuag

SEQ ID NO: 460166 - RNA, 19 nt, Homo sapiens
  misc_RNA (1)...(19): siRNA sense strand
uggacaaucucuuugcuau

SEQ ID NO: 460167 - RNA, 19 nt, Homo sapiens
  misc_RNA (1)...(19): siRNA sense strand
agaagucugucuccaaaca

SEQ ID NO: 460168 - RNA, 19 nt, Homo sapiens
  misc_RNA (1)...(19): siRNA sense strand
gauggaacucaacugauuu

SEQ ID NO: 460169 - RNA, 19 nt, Homo sapiens
  misc_RNA (1)...(19): siRNA sense strand
gugagaagcauccugaguu

SEQ ID NO: 460170 - RNA, 19 nt, Homo sapiens
  misc_RNA (1)...(19): siRNA sense strand
acaagaccuccgauauuua

SEQ ID NO: 460171 - RNA, 19 nt, Homo sapiens
  misc_RNA (1)...(19): siRNA sense strand
guaaaggagaagauuauca

SEQ ID NO: 460172 - RNA, 19 nt, Homo sapiens
  misc_RNA (1)...(19): siRNA sense strand
ucaaugggaucaucagcau

SEQ ID NO: 460173 - RNA, 19 nt, Homo sapiens
  misc_RNA (1)...(19): siRNA sense strand
ccacgacagugaggaguug

SEQ ID NO: 460174 - RNA, 19 nt, Homo sapiens
  misc_RNA (1)...(19): siRNA sense strand
gcaagguggcucagaguuc

SEQ ID NO: 460175 - RNA, 19 nt, Homo sapiens
  misc_RNA (1)...(19): siRNA sense strand
uccaugggcuuuacaagga

SEQ ID NO: 460176 - RNA, 19 nt, Homo sapiens
  misc_RNA (1)...(19): siRNA sense strand
gaugacagacagcuagaga

SEQ ID NO: 460177 - RNA, 19 nt, Homo sapiens
  misc_RNA (1)...(19): siRNA sense strand
ucgggcaucucuaaaguga

SEQ ID NO: 460178 - RNA, 19 nt, Homo sapiens
  misc_RNA (1)...(19): siRNA sense strand
uaaagccgagcacuguaua

SEQ ID NO: 460179 - RNA, 19 nt, Homo sapiens
  misc_RNA (1)...(19): siRNA sense strand
gugaggacaugcucugcuu

SEQ ID NO: 460180 - RNA, 19 nt, Homo sapiens
  misc_RNA (1)...(19): siRNA sense strand
ggguaaaggagaagauuau

SEQ ID NO: 460181 - RNA, 19 nt, Homo sapiens
  misc_RNA (1)...(19): siRNA sense strand
ccugaucacugagcagaaa

SEQ ID NO: 460182 - RNA, 19 nt, Homo sapiens
  misc_RNA (1)...(19): siRNA sense strand
gaaaucgauuggcuaucca

SEQ ID NO: 460183 - RNA, 19 nt, Homo sapiens
  misc_RNA (1)...(19): siRNA sense strand
ggaagcgcuagaagguuua

SEQ ID NO: 460184 - RNA, 19 nt, Homo sapiens
  misc_RNA (1)...(19): siRNA sense strand
ggcgugaacuggccaugga

SEQ ID NO: 460185 - RNA, 19 nt, Homo sapiens
  misc_RNA (1)...(19): siRNA sense strand
aaggaagccuaccagauug

SEQ ID NO: 460186 - RNA, 19 nt, Homo sapiens
  misc_RNA (1)...(19): siRNA sense strand
gagaagauuaucaagaagu

SEQ ID NO: 460187 - RNA, 19 nt, Homo sapiens
  misc_RNA (1)...(19): siRNA sense strand
gagaaaauccucaucuaug

SEQ ID NO: 460188 - RNA, 19 nt, Homo sapiens
  misc_RNA (1)...(19): siRNA sense strand
acaacccgcugcucaacaa

SEQ ID NO: 460189 - RNA, 19 nt, Homo sapiens
  misc_RNA (1)...(19): siRNA sense strand
gauggagucucucauucgu

SEQ ID NO: 460190 - RNA, 19 nt, Homo sapiens
  misc_RNA (1)...(19): siRNA sense strand
ggaaaggaucgggcacuga

SEQ ID NO: 460191 - RNA, 19 nt, Homo sapiens
  misc_RNA (1)...(19): siRNA sense strand
gaucgggcacugaacuuug

SEQ ID NO: 460192 - RNA, 19 nt, Homo sapiens
  misc_RNA (1)...(19): siRNA sense strand
agaaaguucggauuaaaug

SEQ ID NO: 460193 - RNA, 19 nt, Homo sapiens
  misc_RNA (1)...(19): siRNA sense strand
gaagcauccugaguuuaag

SEQ ID NO: 460194 - RNA, 19 nt, Homo sapiens
  misc_RNA (1)...(19): siRNA sense strand
caccucugauggcaccuua

SEQ ID NO: 460195 - RNA, 19 nt, Homo sapiens
  misc_RNA (1)...(19): siRNA sense strand
uguaugacaucgacaccaa

SEQ ID NO: 460196 - RNA, 19 nt, Homo sapiens
  misc_RNA (1)...(19): siRNA sense strand
gaagcuggccgugguagau

SEQ ID NO: 460197 - RNA, 19 nt, Homo sapiens
  misc_RNA (1)...(19): siRNA sense strand
cuaccuaccucaagaagcu

SEQ ID NO: 460198 - RNA, 19 nt, Homo sapiens
  misc_RNA (1)...(19): siRNA sense strand
ggaagcagauuacugguuu

SEQ ID NO: 460199 - RNA, 19 nt, Homo sapiens
  misc_RNA (1)...(19): siRNA sense strand
gcagauuacugguuuauga

SEQ ID NO: 460200 - RNA, 19 nt, Homo sapiens
  misc_RNA (1)...(19): siRNA sense strand
gagcagaaaguucggauua

SEQ ID NO: 460201 - RNA, 19 nt, Homo sapiens
  misc_RNA (1)...(19): siRNA sense strand
gcagaaaguucggauuaaa

SEQ ID NO: 460202 - RNA, 19 nt, Homo sapiens
  misc_RNA (1)...(19): siRNA sense strand
guacaucccugccagauuc

SEQ ID NO: 460203 - RNA, 19 nt, Homo sapiens
  misc_RNA (1)...(19): siRNA sense strand
gaagaugggugaccucaag

SEQ ID NO: 460204 - RNA, 19 nt, Homo sapiens
  misc_RNA (1)...(19): siRNA sense strand
gaaaccggauuccaacuau

SEQ ID NO: 460205 - RNA, 19 nt, Homo sapiens
  misc_RNA (1)...(19): siRNA sense strand
caaggaagccuaccagauu

SEQ ID NO: 460206 - RNA, 19 nt, Homo sapiens
  misc_RNA (1)...(19): siRNA sense strand
gagagcagguuuaaugaug

SEQ ID NO: 460207 - RNA, 19 nt, Homo sapiens
  misc_RNA (1)...(19): siRNA sense strand
gggcaucucuaaagugaaa

SEQ ID NO: 460208 - RNA, 19 nt, Homo sapiens
  misc_RNA (1)...(19): siRNA sense strand
uacaagaccuccgauauuu

SEQ ID NO: 460209 - RNA, 19 nt, Homo sapiens
  misc_RNA (1)...(19): siRNA sense strand
guacaagaccuccgauauu

SEQ ID NO: 460210 - RNA, 19 nt, Homo sapiens
  misc_RNA (1)...(19): siRNA sense strand
gaagcagauuacugguuua

SEQ ID NO: 460211 - RNA, 19 nt, Homo sapiens
  misc_RNA (1)...(19): siRNA sense strand
ugagaagcauccugaguuu

SEQ ID NO: 460212 - RNA, 19 nt, Homo sapiens
  misc_RNA (1)...(19): siRNA sense strand
gaaacaaagaugcuaauca

SEQ ID NO: 460213 - RNA, 19 nt, Homo sapiens
  misc_RNA (1)...(19): siRNA sense strand
gaaccucgcgcuugaaaug

SEQ ID NO: 460214 - RNA, 19 nt, Homo sapiens
  misc_RNA (1)...(19): siRNA sense strand
ugauggaacucaacugauu

SEQ ID NO: 460215 - RNA, 19 nt, Homo sapiens
  misc_RNA (1)...(19): siRNA sense strand
gaaaggaucgggcacugaa

SEQ ID NO: 460216 - RNA, 19 nt, Homo sapiens
  misc_RNA (1)...(19): siRNA sense strand
uggagucucucauucguua

SEQ ID NO: 460217 - RNA, 19 nt, Homo sapiens
  misc_RNA (1)...(19): siRNA sense strand
ggaugacccuggcccauga

SEQ ID NO: 460218 - RNA, 19 nt, Homo sapiens
  misc_RNA (1)...(19): siRNA sense strand
gcuagaagguuuagauuuu

SEQ ID NO: 460219 - RNA, 19 nt, Homo sapiens
  misc_RNA (1)...(19): siRNA sense strand
caaagaugcuaaucaccaa

SEQ ID NO: 460220 - RNA, 19 nt, Homo sapiens
  misc_RNA (1)...(19): siRNA sense strand
gcugagaccuaccugaaga

SEQ ID NO: 460221 - RNA, 19 nt, Homo sapiens
  misc_RNA (1)...(19): siRNA sense strand
ggacaaaugauggucagua

SEQ ID NO: 460222 - RNA, 19 nt, Homo sapiens
  misc_RNA (1)...(19): siRNA sense strand
aggagaagauuaucaagaa

SEQ ID NO: 460223 - RNA, 19 nt, Homo sapiens
  misc_RNA (1)...(19): siRNA sense strand
gccgagcacuguauaaaug

SEQ ID NO: 460224 - RNA, 19 nt, Homo sapiens
  misc_RNA (1)...(19): siRNA sense strand
gaaaacagauuggaaagga

SEQ ID NO: 460225 - RNA, 19 nt, Homo sapiens
  misc_RNA (1)...(19): siRNA sense strand
gcagauggagucucucauu

SEQ ID NO: 460226 - RNA, 19 nt, Homo sapiens
  misc_RNA (1)...(19): siRNA sense strand
gcggagagcagguuuaaug

SEQ ID NO: 460227 - RNA, 19 nt, Homo sapiens
  misc_RNA (1)...(19): siRNA sense strand
gcagagcuguaccaugguu

SEQ ID NO: 460228 - RNA, 19 nt, Homo sapiens
  misc_RNA (1)...(19): siRNA sense strand
gggaugaggccuuugcuuu

SEQ ID NO: 460229 - RNA, 19 nt, Homo sapiens
  misc_RNA (1)...(19): siRNA sense strand
uggaagcgcuagaagguuu

SEQ ID NO: 460230 - RNA, 19 nt, Homo sapiens
  misc_RNA (1)...(19): siRNA sense strand
aaacaaagaugcuaaucac

SEQ ID NO: 460231 - RNA, 19 nt, Homo sapiens
  misc_RNA (1)...(19): siRNA sense strand
ucagaggacuuaucagaca

SEQ ID NO: 460232 - RNA, 19 nt, Homo sapiens
  misc_RNA (1)...(19): siRNA sense strand
gcaguccgcucccauguac

SEQ ID NO: 460233 - RNA, 19 nt, Homo sapiens
  misc_RNA (1)...(19): siRNA sense strand
agaagcauccugaguuuaa

SEQ ID NO: 460234 - RNA, 19 nt, Homo sapiens
  misc_RNA (1)...(19): siRNA sense strand
cuccaugucuucuccauuu

SEQ ID NO: 460235 - RNA, 19 nt, Homo sapiens
  misc_RNA (1)...(19): siRNA sense strand
gcagagaacgaucgcuuug

SEQ ID NO: 460236 - RNA, 19 nt, Homo sapiens
  misc_RNA (1)...(19): siRNA sense strand
auaggaaacuguucaagga

SEQ ID NO: 460237 - RNA, 19 nt, Homo sapiens
  misc_RNA (1)...(19): siRNA sense strand
gacaagcaaguaucucuuu

SEQ ID NO: 460238 - RNA, 19 nt, Homo sapiens
  misc_RNA (1)...(19): siRNA sense strand
aacaacagcucccagauuc

SEQ ID NO: 460239 - RNA, 19 nt, Homo sapiens
  misc_RNA (1)...(19): siRNA sense strand
ggaugaggccuuugcuuug

SEQ ID NO: 460240 - RNA, 19 nt, Homo sapiens
  misc_RNA (1)...(19): siRNA sense strand
gaccauggcuggguugaca

SEQ ID NO: 460241 - RNA, 19 nt, Homo sapiens
  misc_RNA (1)...(19): siRNA sense strand
ucuaugaguuguauucaga

SEQ ID NO: 460242 - RNA, 19 nt, Homo sapiens
  misc_RNA (1)...(19): siRNA sense strand
guguugacguggagagaua

SEQ ID NO: 460243 - RNA, 19 nt, Homo sapiens
  misc_RNA (1)...(19): siRNA sense strand
gcacaguccaugggcuuua

SEQ ID NO: 460244 - RNA, 19 nt, Homo sapiens
  misc_RNA (1)...(19): siRNA sense strand
ggacuuaucagacaugcau

SEQ ID NO: 460245 - RNA, 19 nt, Homo sapiens
  misc_RNA (1)...(19): siRNA sense strand
gacaaaugauggucaguac

SEQ ID NO: 460246 - RNA, 19 nt, Homo sapiens
  misc_RNA (1)...(19): siRNA sense strand
gaggacccguucacagcua

SEQ ID NO: 460247 - RNA, 19 nt, Homo sapiens
  misc_RNA (1)...(19): siRNA sense strand
aaacaacagcucccagauu

SEQ ID NO: 460248 - RNA, 19 nt, Homo sapiens
  misc_RNA (1)...(19): siRNA sense strand
ugacagacagcuagagauu

SEQ ID NO: 460249 - RNA, 19 nt, Homo sapiens
  misc_RNA (1)...(19): siRNA sense strand
gaacgaucgcuuugaggaa

SEQ ID NO: 460250 - RNA, 19 nt, Homo sapiens
  misc_RNA (1)...(19): siRNA sense strand
ggagaagauuaucaagaag

SEQ ID NO: 460251 - RNA, 19 nt, Homo sapiens
  misc_RNA (1)...(19): siRNA sense strand
gagcucaucagcagcauug

SEQ ID NO: 460252 - RNA, 19 nt, Homo sapiens
  misc_RNA (1)...(19): siRNA sense strand
uacaauggcuccaagaucu

SEQ ID NO: 460253 - RNA, 19 nt, Homo sapiens
  misc_RNA (1)...(19): siRNA sense strand
ugcaucagcuacuuuacua

SEQ ID NO: 460254 - RNA, 19 nt, Homo sapiens
  misc_RNA (1)...(19): siRNA sense strand
gagaagcauccugaguuua

SEQ ID NO: 460255 - RNA, 19 nt, Homo sapiens
  misc_RNA (1)...(19): siRNA sense strand
gagaaccucgcgcuugaaa

SEQ ID NO: 460256 - RNA, 19 nt, Homo sapiens
  misc_RNA (1)...(19): siRNA sense strand
gauaaagccgagcacugua

SEQ ID NO: 460257 - RNA, 19 nt, Homo sapiens
  misc_RNA (1)...(19): siRNA sense strand
gacaaucucuuugcuaucg

SEQ ID NO: 460258 - RNA, 19 nt, Homo sapiens
  misc_RNA (1)...(19): siRNA sense strand
cagauggagucucucauuc

SEQ ID NO: 460259 - RNA, 19 nt, Homo sapiens
  misc_RNA (1)...(19): siRNA sense strand
ccagaaagcguuccacaag

SEQ ID NO: 460260 - RNA, 19 nt, Homo sapiens
  misc_RNA (1)...(19): siRNA sense strand
gcgcugggaugaggccuuu

SEQ ID NO: 460261 - RNA, 19 nt, Homo sapiens
  misc_RNA (1)...(19): siRNA sense strand
caaagaaacaaagaugcua

SEQ ID NO: 460262 - RNA, 19 nt, Homo sapiens
  misc_RNA (1)...(19): siRNA sense strand
gcugaagaauggacagauc

SEQ ID NO: 460263 - RNA, 19 nt, Homo sapiens
  misc_RNA (1)...(19): siRNA sense strand
cgaaaccggauuccaacua

SEQ ID NO: 460264 - RNA, 19 nt, Homo sapiens
  misc_RNA (1)...(19): siRNA sense strand
gaugaggccuuugcuuugg

SEQ ID NO: 460265 - RNA, 19 nt, Homo sapiens
  misc_RNA (1)...(19): siRNA sense strand
caagaccuccgauauuuag

SEQ ID NO: 460266 - RNA, 19 nt, Homo sapiens
  misc_RNA (1)...(19): siRNA sense strand
uggacaaucucuuugcuau

SEQ ID NO: 460267 - RNA, 19 nt, Homo sapiens
  misc_RNA (1)...(19): siRNA sense strand
agaagucugucuccaaaca

SEQ ID NO: 460268 - RNA, 19 nt, Homo sapiens
  misc_RNA (1)...(19): siRNA sense strand
gauggaacucaacugauuu

SEQ ID NO: 460269 - RNA, 19 nt, Homo sapiens
  misc_RNA (1)...(19): siRNA sense strand
gugagaagcauccugaguu

SEQ ID NO: 460270 - RNA, 19 nt, Homo sapiens
  misc_RNA (1)...(19): siRNA sense strand
acaagaccuccgauauuua

SEQ ID NO: 460271 - RNA, 19 nt, Homo sapiens
  misc_RNA (1)...(19): siRNA sense strand
guaaaggagaagauuauca

SEQ ID NO: 460272 - RNA, 19 nt, Homo sapiens
  misc_RNA (1)...(19): siRNA sense strand
ucaaugggaucaucagcau

SEQ ID NO: 460273 - RNA, 19 nt, Homo sapiens
  misc_RNA (1)...(19): siRNA sense strand
ccacgacagugaggaguug

SEQ ID NO: 460274 - RNA, 19 nt, Homo sapiens
  misc_RNA (1)...(19): siRNA sense strand
gcaagguggcucagaguuc

SEQ ID NO: 460275 - RNA, 19 nt, Homo sapiens
  misc_RNA (1)...(19): siRNA sense strand
uccaugggcuuuacaagga

SEQ ID NO: 460276 - RNA, 19 nt, Homo sapiens
  misc_RNA (1)...(19): siRNA sense strand
gaugacagacagcuagaga

SEQ ID NO: 460277 - RNA, 19 nt, Homo sapiens
  misc_RNA (1)...(19): siRNA sense strand
ucgggcaucucuaaaguga

SEQ ID NO: 460278 - RNA, 19 nt, Homo sapiens
  misc_RNA (1)...(19): siRNA sense strand
uaaagccgagcacuguaua

SEQ ID NO: 460279 - RNA, 19 nt, Homo sapiens
  misc_RNA (1)...(19): siRNA sense strand
gugaggacaugcucugcuu

SEQ ID NO: 460280 - RNA, 19 nt, Homo sapiens
  misc_RNA (1)...(19): siRNA sense strand
ggguaaaggagaagauuau

SEQ ID NO: 460281 - RNA, 19 nt, Homo sapiens
  misc_RNA (1)...(19): siRNA sense strand
ccugaucacugagcagaaa

SEQ ID NO: 460282 - RNA, 19 nt, Homo sapiens
  misc_RNA (1)...(19): siRNA sense strand
gaaaucgauuggcuaucca

SEQ ID NO: 460283 - RNA, 19 nt, Homo sapiens
  misc_RNA (1)...(19): siRNA sense strand
ggaagcgcuagaagguuua

SEQ ID NO: 460284 - RNA, 19 nt, Homo sapiens
  misc_RNA (1)...(19): siRNA sense strand
ggcgugaacuggccaugga

SEQ ID NO: 460285 - RNA, 19 nt, Homo sapiens
  misc_RNA (1)...(19): siRNA sense strand
aaggaagccuaccagauug

SEQ ID NO: 460286 - RNA, 19 nt, Homo sapiens
  misc_RNA (1)...(19): siRNA sense strand
gagaagauuaucaagaagu

SEQ ID NO: 460287 - RNA, 19 nt, Homo sapiens
  misc_RNA (1)...(19): siRNA sense strand
gagaaaauccucaucuaug

SEQ ID NO: 460288 - RNA, 19 nt, Homo sapiens
  misc_RNA (1)...(19): siRNA sense strand
acaacccgcugcucaacaa

SEQ ID NO: 460289 - RNA, 19 nt, Homo sapiens
  misc_RNA (1)...(19): siRNA sense strand
gauggagucucucauucgu

SEQ ID NO: 460290 - RNA, 19 nt, Homo sapiens
  misc_RNA (1)...(19): siRNA sense strand
ggaaaggaucgggcacuga

SEQ ID NO: 460291 - RNA, 19 nt, Homo sapiens
  misc_RNA (1)...(19): siRNA sense strand
gaucgggcacugaacuuug

SEQ ID NO: 460292 - RNA, 19 nt, Homo sapiens
  misc_RNA (1)...(19): siRNA sense strand
agaaaguucggauuaaaug

SEQ ID NO: 460293 - RNA, 19 nt, Homo sapiens
  misc_RNA (1)...(19): siRNA sense strand
gaagcauccugaguuuaag

SEQ ID NO: 460294 - RNA, 19 nt, Homo sapiens
  misc_RNA (1)...(19): siRNA sense strand
caccucugauggcaccuua

SEQ ID NO: 460295 - RNA, 19 nt, Homo sapiens
  misc_RNA (1)...(19): siRNA sense strand
uguaugacaucgacaccaa

SEQ ID NO: 460296 - RNA, 19 nt, Homo sapiens
  misc_RNA (1)...(19): siRNA sense strand
gaagcuggccgugguagau

SEQ ID NO: 460297 - RNA, 19 nt, Homo sapiens
  misc_RNA (1)...(19): siRNA sense strand
cuaccuaccucaagaagcu

SEQ ID NO: 460298 - RNA, 19 nt, Homo sapiens
  misc_RNA (1)...(19): siRNA sense strand
ggaagcagauuacugguuu

SEQ ID NO: 460299 - RNA, 19 nt, Homo sapiens
  misc_RNA (1)...(19): siRNA sense strand
gcagauuacugguuuauga

SEQ ID NO: 460300 - RNA, 19 nt, Homo sapiens
  misc_RNA (1)...(19): siRNA sense strand
gagcagaaaguucggauua

SEQ ID NO: 460301 - RNA, 19 nt, Homo sapiens
  misc_RNA (1)...(19): siRNA sense strand
gcagaaaguucggauuaaa

SEQ ID NO: 460302 - RNA, 19 nt, Homo sapiens
  misc_RNA (1)...(19): siRNA sense strand
guacaucccugccagauuc

SEQ ID NO: 460303 - RNA, 19 nt, Homo sapiens
  misc_RNA (1)...(19): siRNA sense strand
gaagaugggugaccucaag

SEQ ID NO: 460304 - RNA, 19 nt, Homo sapiens
  misc_RNA (1)...(19): siRNA sense strand
gaaaccggauuccaacuau

SEQ ID NO: 460305 - RNA, 19 nt, Homo sapiens
  misc_RNA (1)...(19): siRNA sense strand
caaggaagccuaccagauu

SEQ ID NO: 460306 - RNA, 19 nt, Homo sapiens
  misc_RNA (1)...(19): siRNA sense strand
gagagcagguuuaaugaug

SEQ ID NO: 460307 - RNA, 19 nt, Homo sapiens
  misc_RNA (1)...(19): siRNA sense strand
gggcaucucuaaagugaaa

SEQ ID NO: 460308 - RNA, 19 nt, Homo sapiens
  misc_RNA (1)...(19): siRNA sense strand
uacaagaccuccgauauuu

SEQ ID NO: 460309 - RNA, 19 nt, Homo sapiens
  misc_RNA (1)...(19): siRNA sense strand
guacaagaccuccgauauu

SEQ ID NO: 460310 - RNA, 19 nt, Homo sapiens
  misc_RNA (1)...(19): siRNA sense strand
gaagcagauuacugguuua

SEQ ID NO: 460311 - RNA, 19 nt, Homo sapiens
  misc_RNA (1)...(19): siRNA sense strand
ugagaagcauccugaguuu

SEQ ID NO: 460312 - RNA, 19 nt, Homo sapiens
  misc_RNA (1)...(19): siRNA sense strand
gaaacaaagaugcuaauca

SEQ ID NO: 460313 - RNA, 19 nt, Homo sapiens
  misc_RNA (1)...(19): siRNA sense strand
gaaccucgcgcuugaaaug

SEQ ID NO: 460314 - RNA, 19 nt, Homo sapiens
  misc_RNA (1)...(19): siRNA sense strand
ugauggaacucaacugauu

SEQ ID NO: 460315 - RNA, 19 nt, Homo sapiens
  misc_RNA (1)...(19): siRNA sense strand
gaaaggaucgggcacugaa

SEQ ID NO: 460316 - RNA, 19 nt, Homo sapiens
  misc_RNA (1)...(19): siRNA sense strand
uggagucucucauucguua

SEQ ID NO: 460317 - RNA, 19 nt, Homo sapiens
  misc_RNA (1)...(19): siRNA sense strand
ggaugacccuggcccauga

SEQ ID NO: 460318 - RNA, 19 nt, Homo sapiens
  misc_RNA (1)...(19): siRNA sense strand
gcuagaagguuuagauuuu

SEQ ID NO: 460319 - RNA, 19 nt, Homo sapiens
  misc_RNA (1)...(19): siRNA sense strand
caaagaugcuaaucaccaa

SEQ ID NO: 460320 - RNA, 19 nt, Homo sapiens
  misc_RNA (1)...(19): siRNA sense strand
gcugagaccuaccugaaga

SEQ ID NO: 460321 - RNA, 19 nt, Homo sapiens
  misc_RNA (1)...(19): siRNA sense strand
ggacaaaugauggucagua

SEQ ID NO: 460322 - RNA, 19 nt, Homo sapiens
  misc_RNA (1)...(19): siRNA sense strand
aggagaagauuaucaagaa

SEQ ID NO: 460323 - RNA, 19 nt, Homo sapiens
  misc_RNA (1)...(19): siRNA sense strand
gccgagcacuguauaaaug

SEQ ID NO: 460324 - RNA, 19 nt, Homo sapiens
  misc_RNA (1)...(19): siRNA sense strand
gaaaacagauuggaaagga

SEQ ID NO: 460325 - RNA, 19 nt, Homo sapiens
  misc_RNA (1)...(19): siRNA sense strand
gcagauggagucucucauu

SEQ ID NO: 460326 - RNA, 19 nt, Homo sapiens
  misc_RNA (1)...(19): siRNA sense strand
gcggagagcagguuuaaug

SEQ ID NO: 460327 - RNA, 19 nt, Homo sapiens
  misc_RNA (1)...(19): siRNA sense strand
gcagagcuguaccaugguu

SEQ ID NO: 460328 - RNA, 19 nt, Homo sapiens
  misc_RNA (1)...(19): siRNA sense strand
gggaugaggccuuugcuuu

SEQ ID NO: 460329 - RNA, 19 nt, Homo sapiens
  misc_RNA (1)...(19): siRNA sense strand
uggaagcgcuagaagguuu

SEQ ID NO: 460330 - RNA, 19 nt, Homo sapiens
  misc_RNA (1)...(19): siRNA sense strand
aaacaaagaugcuaaucac

SEQ ID NO: 460331 - RNA, 19 nt, Homo sapiens
  misc_RNA (1)...(19): siRNA sense strand
ucagaggacuuaucagaca

SEQ ID NO: 460332 - RNA, 19 nt, Homo sapiens
  misc_RNA (1)...(19): siRNA sense strand
gcaguccgcucccauguac

SEQ ID NO: 460333 - RNA, 19 nt, Homo sapiens
  misc_RNA (1)...(19): siRNA sense strand
agaagcauccugaguuuaa

SEQ ID NO: 460334 - RNA, 19 nt, Homo sapiens
  misc_RNA (1)...(19): siRNA sense strand
cuccaugucuucuccauuu

SEQ ID NO: 460335 - RNA, 19 nt, Homo sapiens
  misc_RNA (1)...(19): siRNA sense strand
gcagagaacgaucgcuuug

SEQ ID NO: 460336 - RNA, 19 nt, Homo sapiens
  misc_RNA (1)...(19): siRNA sense strand
auaggaaacuguucaagga

SEQ ID NO: 460337 - RNA, 19 nt, Homo sapiens
  misc_RNA (1)...(19): siRNA sense strand
gacaagcaaguaucucuuu

SEQ ID NO: 460338 - RNA, 19 nt, Homo sapiens
  misc_RNA (1)...(19): siRNA sense strand
aacaacagcucccagauuc

SEQ ID NO: 460339 - RNA, 19 nt, Homo sapiens
  misc_RNA (1)...(19): siRNA sense strand
ggaugaggccuuugcuuug

SEQ ID NO: 460340 - RNA, 19 nt, Homo sapiens
  misc_RNA (1)...(19): siRNA sense strand
gaccauggcuggguugaca

SEQ ID NO: 460341 - RNA, 19 nt, Homo sapiens
  misc_RNA (1)...(19): siRNA sense strand
ucuaugaguuguauucaga

SEQ ID NO: 460342 - RNA, 19 nt, Homo sapiens
  misc_RNA (1)...(19): siRNA sense strand
guguugacguggagagaua

SEQ ID NO: 460343 - RNA, 19 nt, Homo sapiens
  misc_RNA (1)...(19): siRNA sense strand
gcacaguccaugggcuuua

SEQ ID NO: 460344 - RNA, 19 nt, Homo sapiens
  misc_RNA (1)...(19): siRNA sense strand
ggacuuaucagacaugcau

SEQ ID NO: 460345 - RNA, 19 nt, Homo sapiens
  misc_RNA (1)...(19): siRNA sense strand
gacaaaugauggucaguac

SEQ ID NO: 460346 - RNA, 19 nt, Homo sapiens
  misc_RNA (1)...(19): siRNA sense strand
gaggacccguucacagcua

SEQ ID NO: 460347 - RNA, 19 nt, Homo sapiens
  misc_RNA (1)...(19): siRNA sense strand
aaacaacagcucccagauu

SEQ ID NO: 460348 - RNA, 19 nt, Homo sapiens
  misc_RNA (1)...(19): siRNA sense strand
ugacagacagcuagagauu

SEQ ID NO: 460349 - RNA, 19 nt, Homo sapiens
  misc_RNA (1)...(19): siRNA sense strand
gaacgaucgcuuugaggaa

SEQ ID NO: 460350 - RNA, 19 nt, Homo sapiens
  misc_RNA (1)...(19): siRNA sense strand
ggagaagauuaucaagaag

SEQ ID NO: 460351 - RNA, 19 nt, Homo sapiens
  misc_RNA (1)...(19): siRNA sense strand
gagcucaucagcagcauug

SEQ ID NO: 460352 - RNA, 19 nt, Homo sapiens
  misc_RNA (1)...(19): siRNA sense strand
uacaauggcuccaagaucu

SEQ ID NO: 460353 - RNA, 19 nt, Homo sapiens
  misc_RNA (1)...(19): siRNA sense strand
ugcaucagcuacuuuacua

SEQ ID NO: 460354 - RNA, 19 nt, Homo sapiens
  misc_RNA (1)...(19): siRNA sense strand
gagaagcauccugaguuua

SEQ ID NO: 460355 - RNA, 19 nt, Homo sapiens
  misc_RNA (1)...(19): siRNA sense strand
gagaaccucgcgcuugaaa

SEQ ID NO: 460356 - RNA, 19 nt, Homo sapiens
  misc_RNA (1)...(19): siRNA sense strand
gauaaagccgagcacugua

SEQ ID NO: 460357 - RNA, 19 nt, Homo sapiens
  misc_RNA (1)...(19): siRNA sense strand
gacaaucucuuugcuaucg

SEQ ID NO: 460358 - RNA, 19 nt, Homo sapiens
  misc_RNA (1)...(19): siRNA sense strand
cagauggagucucucauuc

SEQ ID NO: 460359 - RNA, 19 nt, Homo sapiens
  misc_RNA (1)...(19): siRNA sense strand
ccagaaagcguuccacaag

SEQ ID NO: 460360 - RNA, 19 nt, Homo sapiens
  misc_RNA (1)...(19): siRNA sense strand
gcgcugggaugaggccuuu

SEQ ID NO: 460361 - RNA, 19 nt, Homo sapiens
  misc_RNA (1)...(19): siRNA sense strand
caaagaaacaaagaugcua

SEQ ID NO: 460362 - RNA, 19 nt, Homo sapiens
  misc_RNA (1)...(19): siRNA sense strand
gcugaagaauggacagauc

SEQ ID NO: 460363 - RNA, 19 nt, Homo sapiens
  misc_RNA (1)...(19): siRNA sense strand
cgaaaccggauuccaacua

SEQ ID NO: 460364 - RNA, 19 nt, Homo sapiens
  misc_RNA (1)...(19): siRNA sense strand
gaugaggccuuugcuuugg

SEQ ID NO: 460365 - RNA, 19 nt, Homo sapiens
  misc_RNA (1)...(19): siRNA sense strand
caagaccuccgauauuuag

SEQ ID NO: 460366 - RNA, 19 nt, Homo sapiens
  misc_RNA (1)...(19): siRNA sense strand
uggacaaucucuuugcuau

SEQ ID NO: 460367 - RNA, 19 nt, Homo sapiens
  misc_RNA (1)...(19): siRNA sense strand
agaagucugucuccaaaca

SEQ ID NO: 460368 - RNA, 19 nt, Homo sapiens
  misc_RNA (1)...(19): siRNA sense strand
gauggaacucaacugauuu

SEQ ID NO: 460369 - RNA, 19 nt, Homo sapiens
  misc_RNA (1)...(19): siRNA sense strand
gugagaagcauccugaguu

SEQ ID NO: 460370 - RNA, 19 nt, Homo sapiens
  misc_RNA (1)...(19): siRNA sense strand
acaagaccuccgauauuua

SEQ ID NO: 460371 - RNA, 19 nt, Homo sapiens
  misc_RNA (1)...(19): siRNA sense strand
guaaaggagaagauuauca

SEQ ID NO: 460372 - RNA, 19 nt, Homo sapiens
  misc_RNA (1)...(19): siRNA sense strand
ucaaugggaucaucagcau

SEQ ID NO: 460373 - RNA, 19 nt, Homo sapiens
  misc_RNA (1)...(19): siRNA sense strand
ccacgacagugaggaguug

SEQ ID NO: 460374 - RNA, 19 nt, Homo sapiens
  misc_RNA (1)...(19): siRNA sense strand
gcaagguggcucagaguuc

SEQ ID NO: 460375 - RNA, 19 nt, Homo sapiens
  misc_RNA (1)...(19): siRNA sense strand
uccaugggcuuuacaagga

SEQ ID NO: 460376 - RNA, 19 nt, Homo sapiens
  misc_RNA (1)...(19): siRNA sense strand
gaugacagacagcuagaga

SEQ ID NO: 460377 - RNA, 19 nt, Homo sapiens
  misc_RNA (1)...(19): siRNA sense strand
ucgggcaucucuaaaguga

SEQ ID NO: 460378 - RNA, 19 nt, Homo sapiens
  misc_RNA (1)...(19): siRNA sense strand
uaaagccgagcacuguaua

SEQ ID NO: 460379 - RNA, 19 nt, Homo sapiens
  misc_RNA (1)...(19): siRNA sense strand
gugaggacaugcucugcuu

SEQ ID NO: 460380 - RNA, 19 nt, Homo sapiens
  misc_RNA (1)...(19): siRNA sense strand
ggguaaaggagaagauuau

SEQ ID NO: 460381 - RNA, 19 nt, Homo sapiens
  misc_RNA (1)...(19): siRNA sense strand
ccugaucacugagcagaaa

SEQ ID NO: 460382 - RNA, 19 nt, Homo sapiens
  misc_RNA (1)...(19): siRNA sense strand
gaaaucgauuggcuaucca

SEQ ID NO: 460383 - RNA, 19 nt, Homo sapiens
  misc_RNA (1)...(19): siRNA sense strand
ggaagcgcuagaagguuua

SEQ ID NO: 460384 - RNA, 19 nt, Homo sapiens
  misc_RNA (1)...(19): siRNA sense strand
ggcgugaacuggccaugga

SEQ ID NO: 460385 - RNA, 19 nt, Homo sapiens
  misc_RNA (1)...(19): siRNA sense strand
aaggaagccuaccagauug

SEQ ID NO: 460386 - RNA, 19 nt, Homo sapiens
  misc_RNA (1)...(19): siRNA sense strand
gagaagauuaucaagaagu

SEQ ID NO: 460387 - RNA, 19 nt, Homo sapiens
  misc_RNA (1)...(19): siRNA sense strand
gagaaaauccucaucuaug

SEQ ID NO: 460388 - RNA, 19 nt, Homo sapiens
  misc_RNA (1)...(19): siRNA sense strand
acaacccgcugcucaacaa

SEQ ID NO: 460389 - RNA, 19 nt, Homo sapiens
  misc_RNA (1)...(19): siRNA sense strand
gauggagucucucauucgu

SEQ ID NO: 460390 - RNA, 19 nt, Homo sapiens
  misc_RNA (1)...(19): siRNA sense strand
ggaaaggaucgggcacuga

SEQ ID NO: 460391 - RNA, 19 nt, Homo sapiens
  misc_RNA (1)...(19): siRNA sense strand
gaucgggcacugaacuuug

SEQ ID NO: 460392 - RNA, 19 nt, Homo sapiens
  misc_RNA (1)...(19): siRNA sense strand
agaaaguucggauuaaaug

SEQ ID NO: 460393 - RNA, 19 nt, Homo sapiens
  misc_RNA (1)...(19): siRNA sense strand
gaagcauccugaguuuaag

SEQ ID NO: 460394 - RNA, 19 nt, Homo sapiens
  misc_RNA (1)...(19): siRNA sense strand
caccucugauggcaccuua

SEQ ID NO: 460395 - RNA, 19 nt, Homo sapiens
  misc_RNA (1)...(19): siRNA sense strand
uguaugacaucgacaccaa

SEQ ID NO: 460396 - RNA, 19 nt, Homo sapiens
  misc_RNA (1)...(19): siRNA sense strand
gaagcuggccgugguagau

SEQ ID NO: 460397 - RNA, 19 nt, Homo sapiens
  misc_RNA (1)...(19): siRNA sense strand
cuaccuaccucaagaagcu

SEQ ID NO: 460398 - RNA, 19 nt, Homo sapiens
  misc_RNA (1)...(19): siRNA sense strand
ggaagcagauuacugguuu

SEQ ID NO: 460399 - RNA, 19 nt, Homo sapiens
  misc_RNA (1)...(19): siRNA sense strand
gcagauuacugguuuauga

SEQ ID NO: 460400 - RNA, 19 nt, Homo sapiens
  misc_RNA (1)...(19): siRNA sense strand
gagcagaaaguucggauua

SEQ ID NO: 460401 - RNA, 19 nt, Homo sapiens
  misc_RNA (1)...(19): siRNA sense strand
gcagaaaguucggauuaaa

SEQ ID NO: 460402 - RNA, 19 nt, Homo sapiens
  misc_RNA (1)...(19): siRNA sense strand
guacaucccugccagauuc

SEQ ID NO: 460403 - RNA, 19 nt, Homo sapiens
  misc_RNA (1)...(19): siRNA sense strand
gaagaugggugaccucaag

SEQ ID NO: 460404 - RNA, 19 nt, Homo sapiens
  misc_RNA (1)...(19): siRNA sense strand
gaaaccggauuccaacuau

SEQ ID NO: 460405 - RNA, 19 nt, Homo sapiens
  misc_RNA (1)...(19): siRNA sense strand
caaggaagccuaccagauu

SEQ ID NO: 460406 - RNA, 19 nt, Homo sapiens
  misc_RNA (1)...(19): siRNA sense strand
gagagcagguuuaaugaug

SEQ ID NO: 460407 - RNA, 19 nt, Homo sapiens
  misc_RNA (1)...(19): siRNA sense strand
gggcaucucuaaagugaaa

SEQ ID NO: 460408 - RNA, 19 nt, Homo sapiens
  misc_RNA (1)...(19): siRNA sense strand
uacaagaccuccgauauuu

SEQ ID NO: 460409 - RNA, 19 nt, Homo sapiens
  misc_RNA (1)...(19): siRNA sense strand
guacaagaccuccgauauu

SEQ ID NO: 460410 - RNA, 19 nt, Homo sapiens
  misc_RNA (1)...(19): siRNA sense strand
gaagcagauuacugguuua

SEQ ID NO: 460411 - RNA, 19 nt, Homo sapiens
  misc_RNA (1)...(19): siRNA sense strand
ugagaagcauccugaguuu

SEQ ID NO: 460412 - RNA, 19 nt, Homo sapiens
  misc_RNA (1)...(19): siRNA sense strand
gaaacaaagaugcuaauca

SEQ ID NO: 460413 - RNA, 19 nt, Homo sapiens
  misc_RNA (1)...(19): siRNA sense strand
gaaccucgcgcuugaaaug

SEQ ID NO: 460414 - RNA, 19 nt, Homo sapiens
  misc_RNA (1)...(19): siRNA sense strand
ugauggaacucaacugauu

SEQ ID NO: 460415 - RNA, 19 nt, Homo sapiens
  misc_RNA (1)...(19): siRNA sense strand
gaaaggaucgggcacugaa

SEQ ID NO: 460416 - RNA, 19 nt, Homo sapiens
  misc_RNA (1)...(19): siRNA sense strand
uggagucucucauucguua

SEQ ID NO: 460417 - RNA, 19 nt, Homo sapiens
  misc_RNA (1)...(19): siRNA sense strand
ggaugacccuggcccauga

SEQ ID NO: 460418 - RNA, 19 nt, Homo sapiens
  misc_RNA (1)...(19): siRNA sense strand
gcuagaagguuuagauuuu

SEQ ID NO: 460419 - RNA, 19 nt, Homo sapiens
  misc_RNA (1)...(19): siRNA sense strand
caaagaugcuaaucaccaa

SEQ ID NO: 460420 - RNA, 19 nt, Homo sapiens
  misc_RNA (1)...(19): siRNA sense strand
gcugagaccuaccugaaga

SEQ ID NO: 460421 - RNA, 19 nt, Homo sapiens
  misc_RNA (1)...(19): siRNA sense strand
ggacaaaugauggucagua

SEQ ID NO: 460422 - RNA, 19 nt, Homo sapiens
  misc_RNA (1)...(19): siRNA sense strand
aggagaagauuaucaagaa

SEQ ID NO: 460423 - RNA, 19 nt, Homo sapiens
  misc_RNA (1)...(19): siRNA sense strand
gccgagcacuguauaaaug

SEQ ID NO: 460424 - RNA, 19 nt, Homo sapiens
  misc_RNA (1)...(19): siRNA sense strand
gaaaacagauuggaaagga

SEQ ID NO: 460425 - RNA, 19 nt, Homo sapiens
  misc_RNA (1)...(19): siRNA sense strand
gcagauggagucucucauu

SEQ ID NO: 460426 - RNA, 19 nt, Homo sapiens
  misc_RNA (1)...(19): siRNA sense strand
gcggagagcagguuuaaug

SEQ ID NO: 460427 - RNA, 19 nt, Homo sapiens
  misc_RNA (1)...(19): siRNA sense strand
gcagagcuguaccaugguu

SEQ ID NO: 460428 - RNA, 19 nt, Homo sapiens
  misc_RNA (1)...(19): siRNA sense strand
gggaugaggccuuugcuuu

SEQ ID NO: 460429 - RNA, 19 nt, Homo sapiens
  misc_RNA (1)...(19): siRNA sense strand
uggaagcgcuagaagguuu

SEQ ID NO: 460430 - RNA, 19 nt, Homo sapiens
  misc_RNA (1)...(19): siRNA sense strand
aaacaaagaugcuaaucac

SEQ ID NO: 460431 - RNA, 19 nt, Homo sapiens
  misc_RNA (1)...(19): siRNA sense strand
ucagaggacuuaucagaca

SEQ ID NO: 460432 - RNA, 19 nt, Homo sapiens
  misc_RNA (1)...(19): siRNA sense strand
gcaguccgcucccauguac

SEQ ID NO: 460433 - RNA, 19 nt, Homo sapiens
  misc_RNA (1)...(19): siRNA sense strand
agaagcauccugaguuuaa

SEQ ID NO: 460434 - RNA, 19 nt, Homo sapiens
  misc_RNA (1)...(19): siRNA sense strand
cuccaugucuucuccauuu

SEQ ID NO: 460435 - RNA, 19 nt, Homo sapiens
  misc_RNA (1)...(19): siRNA sense strand
gcagagaacgaucgcuuug

SEQ ID NO: 460436 - RNA, 19 nt, Homo sapiens
  misc_RNA (1)...(19): siRNA sense strand
auaggaaacuguucaagga

SEQ ID NO: 460437 - RNA, 19 nt, Homo sapiens
  misc_RNA (1)...(19): siRNA sense strand
gacaagcaaguaucucuuu

SEQ ID NO: 460438 - RNA, 19 nt, Homo sapiens
  misc_RNA (1)...(19): siRNA sense strand
aacaacagcucccagauuc

SEQ ID NO: 460439 - RNA, 19 nt, Homo sapiens
  misc_RNA (1)...(19): siRNA sense strand
ggaugaggccuuugcuuug

SEQ ID NO: 460440 - RNA, 19 nt, Homo sapiens
  misc_RNA (1)...(19): siRNA sense strand
gaccauggcuggguugaca

SEQ ID NO: 460441 - RNA, 19 nt, Homo sapiens
  misc_RNA (1)...(19): siRNA sense strand
ucuaugaguuguauucaga

SEQ ID NO: 460442 - RNA, 19 nt, Homo sapiens
  misc_RNA (1)...(19): siRNA sense strand
guguugacguggagagaua

SEQ ID NO: 460443 - RNA, 19 nt, Homo sapiens
  misc_RNA (1)...(19): siRNA sense strand
gcacaguccaugggcuuua

SEQ ID NO: 460444 - RNA, 19 nt, Homo sapiens
  misc_RNA (1)...(19): siRNA sense strand
ggacuuaucagacaugcau

SEQ ID NO: 460445 - RNA, 19 nt, Homo sapiens
  misc_RNA (1)...(19): siRNA sense strand
gacaaaugauggucaguac

SEQ ID NO: 460446 - RNA, 19 nt, Homo sapiens
  misc_RNA (1)...(19): siRNA sense strand
gaggacccguucacagcua

SEQ ID NO: 460447 - RNA, 19 nt, Homo sapiens
  misc_RNA (1)...(19): siRNA sense strand
aaacaacagcucccagauu

SEQ ID NO: 460448 - RNA, 19 nt, Homo sapiens
  misc_RNA (1)...(19): siRNA sense strand
ugacagacagcuagagauu

SEQ ID NO: 460449 - RNA, 19 nt, Homo sapiens
  misc_RNA (1)...(19): siRNA sense strand
gaacgaucgcuuugaggaa

SEQ ID NO: 460450 - RNA, 19 nt, Homo sapiens
  misc_RNA (1)...(19): siRNA sense strand
ggagaagauuaucaagaag

SEQ ID NO: 460451 - RNA, 19 nt, Homo sapiens
  misc_RNA (1)...(19): siRNA sense strand
gagcucaucagcagcauug

SEQ ID NO: 460452 - RNA, 19 nt, Homo sapiens
  misc_RNA (1)...(19): siRNA sense strand
uacaauggcuccaagaucu

SEQ ID NO: 460453 - RNA, 19 nt, Homo sapiens
  misc_RNA (1)...(19): siRNA sense strand
ugcaucagcuacuuuacua

SEQ ID NO: 460454 - RNA, 19 nt, Homo sapiens
  misc_RNA (1)...(19): siRNA sense strand
gagaagcauccugaguuua

SEQ ID NO: 460455 - RNA, 19 nt, Homo sapiens
  misc_RNA (1)...(19): siRNA sense strand
gagaaccucgcgcuugaaa

SEQ ID NO: 460456 - RNA, 19 nt, Homo sapiens
  misc_RNA (1)...(19): siRNA sense strand
gauaaagccgagcacugua

SEQ ID NO: 460457 - RNA, 19 nt, Homo sapiens
  misc_RNA (1)...(19): siRNA sense strand
gacaaucucuuugcuaucg

SEQ ID NO: 460458 - RNA, 19 nt, Homo sapiens
  misc_RNA (1)...(19): siRNA sense strand
cagauggagucucucauuc

SEQ ID NO: 460459 - RNA, 19 nt, Homo sapiens
  misc_RNA (1)...(19): siRNA sense strand
ccagaaagcguuccacaag

SEQ ID NO: 460460 - RNA, 19 nt, Homo sapiens
  misc_RNA (1)...(19): siRNA sense strand
gcgcugggaugaggccuuu

SEQ ID NO: 460461 - RNA, 19 nt, Homo sapiens
  misc_RNA (1)...(19): siRNA sense strand
caaagaaacaaagaugcua

SEQ ID NO: 460462 - RNA, 19 nt, Homo sapiens
  misc_RNA (1)...(19): siRNA sense strand
gcugaagaauggacagauc

SEQ ID NO: 460463 - RNA, 19 nt, Homo sapiens
  misc_RNA (1)...(19): siRNA sense strand
cgaaaccggauuccaacua

SEQ ID NO: 460464 - RNA, 19 nt, Homo sapiens
  misc_RNA (1)...(19): siRNA sense strand
gaugaggccuuugcuuugg

SEQ ID NO: 460465 - RNA, 19 nt, Homo sapiens
  misc_RNA (1)...(19): siRNA sense strand
caagaccuccgauauuuag

SEQ ID NO: 460466 - RNA, 19 nt, Homo sapiens
  misc_RNA (1)...(19): siRNA sense strand
uggacaaucucuuugcuau

SEQ ID NO: 460467 - RNA, 19 nt, Homo sapiens
  misc_RNA (1)...(19): siRNA sense strand
agaagucugucuccaaaca

SEQ ID NO: 460468 - RNA, 19 nt, Homo sapiens
  misc_RNA (1)...(19): siRNA sense strand
gauggaacucaacugauuu

SEQ ID NO: 460469 - RNA, 19 nt, Homo sapiens
  misc_RNA (1)...(19): siRNA sense strand
gugagaagcauccugaguu

SEQ ID NO: 460470 - RNA, 19 nt, Homo sapiens
  misc_RNA (1)...(19): siRNA sense strand
acaagaccuccgauauuua

SEQ ID NO: 460471 - RNA, 19 nt, Homo sapiens
  misc_RNA (1)...(19): siRNA sense strand
guaaaggagaagauuauca

SEQ ID NO: 460472 - RNA, 19 nt, Homo sapiens
  misc_RNA (1)...(19): siRNA sense strand
ucaaugggaucaucagcau

SEQ ID NO: 460473 - RNA, 19 nt, Homo sapiens
  misc_RNA (1)...(19): siRNA sense strand
ccacgacagugaggaguug

SEQ ID NO: 460474 - RNA, 19 nt, Homo sapiens
  misc_RNA (1)...(19): siRNA sense strand
gcaagguggcucagaguuc

SEQ ID NO: 460475 - RNA, 19 nt, Homo sapiens
  misc_RNA (1)...(19): siRNA sense strand
uccaugggcuuuacaagga

SEQ ID NO: 460476 - RNA, 19 nt, Homo sapiens
  misc_RNA (1)...(19): siRNA sense strand
gaugacagacagcuagaga

SEQ ID NO: 460477 - RNA, 19 nt, Homo sapiens
  misc_RNA (1)...(19): siRNA sense strand
ucgggcaucucuaaaguga

SEQ ID NO: 460478 - RNA, 19 nt, Homo sapiens
  misc_RNA (1)...(19): siRNA sense strand
uaaagccgagcacuguaua

SEQ ID NO: 460479 - RNA, 19 nt, Homo sapiens
  misc_RNA (1)...(19): siRNA sense strand
gugaggacaugcucugcuu

SEQ ID NO: 460480 - RNA, 19 nt, Homo sapiens
  misc_RNA (1)...(19): siRNA sense strand
ggguaaaggagaagauuau

SEQ ID NO: 460481 - RNA, 19 nt, Homo sapiens
  misc_RNA (1)...(19): siRNA sense strand
ccugaucacugagcagaaa

SEQ ID NO: 460482 - RNA, 19 nt, Homo sapiens
  misc_RNA (1)...(19): siRNA sense strand
gaaaucgauuggcuaucca

SEQ ID NO: 460483 - RNA, 19 nt, Homo sapiens
  misc_RNA (1)...(19): siRNA sense strand
ggaagcgcuagaagguuua

SEQ ID NO: 460484 - RNA, 19 nt, Homo sapiens
  misc_RNA (1)...(19): siRNA sense strand
ggcgugaacuggccaugga

SEQ ID NO: 460485 - RNA, 19 nt, Homo sapiens
  misc_RNA (1)...(19): siRNA sense strand
aaggaagccuaccagauug

SEQ ID NO: 460486 - RNA, 19 nt, Homo sapiens
  misc_RNA (1)...(19): siRNA sense strand
gagaagauuaucaagaagu

SEQ ID NO: 460487 - RNA, 19 nt, Homo sapiens
  misc_RNA (1)...(19): siRNA sense strand
gagaaaauccucaucuaug

SEQ ID NO: 460488 - RNA, 19 nt, Homo sapiens
  misc_RNA (1)...(19): siRNA sense strand
acaacccgcugcucaacaa

SEQ ID NO: 460489 - RNA, 19 nt, Homo sapiens
  misc_RNA (1)...(19): siRNA sense strand
gauggagucucucauucgu

SEQ ID NO: 460490 - RNA, 19 nt, Homo sapiens
  misc_RNA (1)...(19): siRNA sense strand
ggaaaggaucgggcacuga

SEQ ID NO: 460491 - RNA, 19 nt, Homo sapiens
  misc_RNA (1)...(19): siRNA sense strand
gaucgggcacugaacuuug

SEQ ID NO: 460492 - RNA, 19 nt, Homo sapiens
  misc_RNA (1)...(19): siRNA sense strand
agaaaguucggauuaaaug

SEQ ID NO: 460493 - RNA, 19 nt, Homo sapiens
  misc_RNA (1)...(19): siRNA sense strand
gaagcauccugaguuuaag

SEQ ID NO: 460494 - RNA, 19 nt, Homo sapiens
  misc_RNA (1)...(19): siRNA sense strand
caccucugauggcaccuua

SEQ ID NO: 460495 - RNA, 19 nt, Homo sapiens
  misc_RNA (1)...(19): siRNA sense strand
uguaugacaucgacaccaa

SEQ ID NO: 460496 - RNA, 19 nt, Homo sapiens
  misc_RNA (1)...(19): siRNA sense strand
gaagcuggccgugguagau

SEQ ID NO: 460497 - RNA, 19 nt, Homo sapiens
  misc_RNA (1)...(19): siRNA sense strand
cuaccuaccucaagaagcu

SEQ ID NO: 460498 - RNA, 19 nt, Homo sapiens
  misc_RNA (1)...(19): siRNA sense strand
ggaagcagauuacugguuu

SEQ ID NO: 460499 - RNA, 19 nt, Homo sapiens
  misc_RNA (1)...(19): siRNA sense strand
gcagauuacugguuuauga

SEQ ID NO: 460500 - RNA, 19 nt, Homo sapiens
  misc_RNA (1)...(19): siRNA sense strand
gagcagaaaguucggauua

SEQ ID NO: 460501 - RNA, 19 nt, Homo sapiens
  misc_RNA (1)...(19): siRNA sense strand
gcagaaaguucggauuaaa

SEQ ID NO: 460502 - RNA, 19 nt, Homo sapiens
  misc_RNA (1)...(19): siRNA sense strand
guacaucccugccagauuc

SEQ ID NO: 460503 - RNA, 19 nt, Homo sapiens
  misc_RNA (1)...(19): siRNA sense strand
gaagaugggugaccucaag

SEQ ID NO: 460504 - RNA, 19 nt, Homo sapiens
  misc_RNA (1)...(19): siRNA sense strand
gaaaccggauuccaacuau

SEQ ID NO: 460505 - RNA, 19 nt, Homo sapiens
  misc_RNA (1)...(19): siRNA sense strand
caaggaagccuaccagauu

SEQ ID NO: 460506 - RNA, 19 nt, Homo sapiens
  misc_RNA (1)...(19): siRNA sense strand
gagagcagguuuaaugaug

SEQ ID NO: 460507 - RNA, 19 nt, Homo sapiens
  misc_RNA (1)...(19): siRNA sense strand
gggcaucucuaaagugaaa

SEQ ID NO: 460508 - RNA, 19 nt, Homo sapiens
  misc_RNA (1)...(19): siRNA sense strand
uacaagaccuccgauauuu

SEQ ID NO: 460509 - RNA, 19 nt, Homo sapiens
  misc_RNA (1)...(19): siRNA sense strand
guacaagaccuccgauauu

SEQ ID NO: 460510 - RNA, 19 nt, Homo sapiens
  misc_RNA (1)...(19): siRNA sense strand
gaagcagauuacugguuua

SEQ ID NO: 460511 - RNA, 19 nt, Homo sapiens
  misc_RNA (1)...(19): siRNA sense strand
ugagaagcauccugaguuu

SEQ ID NO: 460512 - RNA, 19 nt, Homo sapiens
  misc_RNA (1)...(19): siRNA sense strand
gaaacaaagaugcuaauca

SEQ ID NO: 460513 - RNA, 19 nt, Homo sapiens
  misc_RNA (1)...(19): siRNA sense strand
gaaccucgcgcuugaaaug

SEQ ID NO: 460514 - RNA, 19 nt, Homo sapiens
  misc_RNA (1)...(19): siRNA sense strand
ugauggaacucaacugauu

SEQ ID NO: 460515 - RNA, 19 nt, Homo sapiens
  misc_RNA (1)...(19): siRNA sense strand
gaaaggaucgggcacugaa

SEQ ID NO: 460516 - RNA, 19 nt, Homo sapiens
  misc_RNA (1)...(19): siRNA sense strand
uggagucucucauucguua

SEQ ID NO: 460517 - RNA, 19 nt, Homo sapiens
  misc_RNA (1)...(19): siRNA sense strand
ggaugacccuggcccauga

SEQ ID NO: 460518 - RNA, 19 nt, Homo sapiens
  misc_RNA (1)...(19): siRNA sense strand
gcuagaagguuuagauuuu

SEQ ID NO: 460519 - RNA, 19 nt, Homo sapiens
  misc_RNA (1)...(19): siRNA sense strand
caaagaugcuaaucaccaa

SEQ ID NO: 460520 - RNA, 19 nt, Homo sapiens
  misc_RNA (1)...(19): siRNA sense strand
gcugagaccuaccugaaga

SEQ ID NO: 460521 - RNA, 19 nt, Homo sapiens
  misc_RNA (1)...(19): siRNA sense strand
ggacaaaugauggucagua

SEQ ID NO: 460522 - RNA, 19 nt, Homo sapiens
  misc_RNA (1)...(19): siRNA sense strand
aggagaagauuaucaagaa

SEQ ID NO: 460523 - RNA, 19 nt, Homo sapiens
  misc_RNA (1)...(19): siRNA sense strand
gccgagcacuguauaaaug

SEQ ID NO: 460524 - RNA, 19 nt, Homo sapiens
  misc_RNA (1)...(19): siRNA sense strand
gaaaacagauuggaaagga

SEQ ID NO: 460525 - RNA, 19 nt, Homo sapiens
  misc_RNA (1)...(19): siRNA sense strand
gcagauggagucucucauu

SEQ ID NO: 460526 - RNA, 19 nt, Homo sapiens
  misc_RNA (1)...(19): siRNA sense strand
gcggagagcagguuuaaug

SEQ ID NO: 460527 - RNA, 19 nt, Homo sapiens
  misc_RNA (1)...(19): siRNA sense strand
gcagagcuguaccaugguu

SEQ ID NO: 460528 - RNA, 19 nt, Homo sapiens
  misc_RNA (1)...(19): siRNA sense strand
gggaugaggccuuugcuuu

SEQ ID NO: 460529 - RNA, 19 nt, Homo sapiens
  misc_RNA (1)...(19): siRNA sense strand
uggaagcgcuagaagguuu

SEQ ID NO: 460530 - RNA, 19 nt, Homo sapiens
  misc_RNA (1)...(19): siRNA sense strand
aaacaaagaugcuaaucac

SEQ ID NO: 460531 - RNA, 19 nt, Homo sapiens
  misc_RNA (1)...(19): siRNA sense strand
ucagaggacuuaucagaca

SEQ ID NO: 460532 - RNA, 19 nt, Homo sapiens
  misc_RNA (1)...(19): siRNA sense strand
gcaguccgcucccauguac

SEQ ID NO: 460533 - RNA, 19 nt, Homo sapiens
  misc_RNA (1)...(19): siRNA sense strand
agaagcauccugaguuuaa

SEQ ID NO: 460534 - RNA, 19 nt, Homo sapiens
  misc_RNA (1)...(19): siRNA sense strand
cuccaugucuucuccauuu

SEQ ID NO: 460535 - RNA, 19 nt, Homo sapiens
  misc_RNA (1)...(19): siRNA sense strand
gcagagaacgaucgcuuug

SEQ ID NO: 460536 - RNA, 19 nt, Homo sapiens
  misc_RNA (1)...(19): siRNA sense strand
auaggaaacuguucaagga

SEQ ID NO: 460537 - RNA, 19 nt, Homo sapiens
  misc_RNA (1)...(19): siRNA sense strand
gacaagcaaguaucucuuu

SEQ ID NO: 460538 - RNA, 19 nt, Homo sapiens
  misc_RNA (1)...(19): siRNA sense strand
aacaacagcucccagauuc

SEQ ID NO: 460539 - RNA, 19 nt, Homo sapiens
  misc_RNA (1)...(19): siRNA sense strand
ggaugaggccuuugcuuug

SEQ ID NO: 460540 - RNA, 19 nt, Homo sapiens
  misc_RNA (1)...(19): siRNA sense strand
gaccauggcuggguugaca

SEQ ID NO: 460541 - RNA, 19 nt, Homo sapiens
  misc_RNA (1)...(19): siRNA sense strand
ucuaugaguuguauucaga

SEQ ID NO: 460542 - RNA, 19 nt, Homo sapiens
  misc_RNA (1)...(19): siRNA sense strand
guguugacguggagagaua

SEQ ID NO: 460543 - RNA, 19 nt, Homo sapiens
  misc_RNA (1)...(19): siRNA sense strand
gcacaguccaugggcuuua

SEQ ID NO: 460544 - RNA, 19 nt, Homo sapiens
  misc_RNA (1)...(19): siRNA sense strand
ggacuuaucagacaugcau

SEQ ID NO: 460545 - RNA, 19 nt, Homo sapiens
  misc_RNA (1)...(19): siRNA sense strand
gacaaaugauggucaguac

SEQ ID NO: 460546 - RNA, 19 nt, Homo sapiens
  misc_RNA (1)...(19): siRNA sense strand
gaggacccguucacagcua

SEQ ID NO: 460547 - RNA, 19 nt, Homo sapiens
  misc_RNA (1)...(19): siRNA sense strand
aaacaacagcucccagauu

SEQ ID NO: 460548 - RNA, 19 nt, Homo sapiens
  misc_RNA (1)...(19): siRNA sense strand
ugacagacagcuagagauu

SEQ ID NO: 460549 - RNA, 19 nt, Homo sapiens
  misc_RNA (1)...(19): siRNA sense strand
gaacgaucgcuuugaggaa

SEQ ID NO: 460550 - RNA, 19 nt, Homo sapiens
  misc_RNA (1)...(19): siRNA sense strand
ggagaagauuaucaagaag

SEQ ID NO: 460551 - RNA, 19 nt, Homo sapiens
  misc_RNA (1)...(19): siRNA sense strand
gagcucaucagcagcauug

SEQ ID NO: 460552 - RNA, 19 nt, Homo sapiens
  misc_RNA (1)...(19): siRNA sense strand
uacaauggcuccaagaucu

SEQ ID NO: 460553 - RNA, 19 nt, Homo sapiens
  misc_RNA (1)...(19): siRNA sense strand
ugcaucagcuacuuuacua

SEQ ID NO: 460554 - RNA, 19 nt, Homo sapiens
  misc_RNA (1)...(19): siRNA sense strand
gagaagcauccugaguuua

SEQ ID NO: 460555 - RNA, 19 nt, Homo sapiens
  misc_RNA (1)...(19): siRNA sense strand
gagaaccucgcgcuugaaa

SEQ ID NO: 460556 - RNA, 19 nt, Homo sapiens
  misc_RNA (1)...(19): siRNA sense strand
gauaaagccgagcacugua

SEQ ID NO: 460557 - RNA, 19 nt, Homo sapiens
  misc_RNA (1)...(19): siRNA sense strand
gacaaucucuuugcuaucg

SEQ ID NO: 460558 - RNA, 19 nt, Homo sapiens
  misc_RNA (1)...(19): siRNA sense strand
cagauggagucucucauuc

SEQ ID NO: 460559 - RNA, 19 nt, Homo sapiens
  misc_RNA (1)...(19): siRNA sense strand
ccagaaagcguuccacaag

SEQ ID NO: 460560 - RNA, 19 nt, Homo sapiens
  misc_RNA (1)...(19): siRNA sense strand
gcgcugggaugaggccuuu

SEQ ID NO: 460561 - RNA, 19 nt, Homo sapiens
  misc_RNA (1)...(19): siRNA sense strand
caaagaaacaaagaugcua

SEQ ID NO: 460562 - RNA, 19 nt, Homo sapiens
  misc_RNA (1)...(19): siRNA sense strand
gcugaagaauggacagauc

SEQ ID NO: 460563 - RNA, 19 nt, Homo sapiens
  misc_RNA (1)...(19): siRNA sense strand
cgaaaccggauuccaacua

SEQ ID NO: 460564 - RNA, 19 nt, Homo sapiens
  misc_RNA (1)...(19): siRNA sense strand
gaugaggccuuugcuuugg

SEQ ID NO: 460565 - RNA, 19 nt, Homo sapiens
  misc_RNA (1)...(19): siRNA sense strand
caagaccuccgauauuuag

SEQ ID NO: 460566 - RNA, 19 nt, Homo sapiens
  misc_RNA (1)...(19): siRNA sense strand
uggacaaucucuuugcuau

SEQ ID NO: 460567 - RNA, 19 nt, Homo sapiens
  misc_RNA (1)...(19): siRNA sense strand
agaagucugucuccaaaca

SEQ ID NO: 460568 - RNA, 19 nt, Homo sapiens
  misc_RNA (1)...(19): siRNA sense strand
gauggaacucaacugauuu

SEQ ID NO: 460569 - RNA, 19 nt, Homo sapiens
  misc_RNA (1)...(19): siRNA sense strand
gugagaagcauccugaguu

SEQ ID NO: 460570 - RNA, 19 nt, Homo sapiens
  misc_RNA (1)...(19): siRNA sense strand
acaagaccuccgauauuua

SEQ ID NO: 460571 - RNA, 19 nt, Homo sapiens
  misc_RNA (1)...(19): siRNA sense strand
guaaaggagaagauuauca

SEQ ID NO: 460572 - RNA, 19 nt, Homo sapiens
  misc_RNA (1)...(19): siRNA sense strand
ucaaugggaucaucagcau

SEQ ID NO: 460573 - RNA, 19 nt, Homo sapiens
  misc_RNA (1)...(19): siRNA sense strand
ccacgacagugaggaguug

SEQ ID NO: 460574 - RNA, 19 nt, Homo sapiens
  misc_RNA (1)...(19): siRNA sense strand
gcaagguggcucagaguuc

SEQ ID NO: 460575 - RNA, 19 nt, Homo sapiens
  misc_RNA (1)...(19): siRNA sense strand
uccaugggcuuuacaagga

SEQ ID NO: 460576 - RNA, 19 nt, Homo sapiens
  misc_RNA (1)...(19): siRNA sense strand
gaugacagacagcuagaga

SEQ ID NO: 460577 - RNA, 19 nt, Homo sapiens
  misc_RNA (1)...(19): siRNA sense strand
ucgggcaucucuaaaguga

SEQ ID NO: 460578 - RNA, 19 nt, Homo sapiens
  misc_RNA (1)...(19): siRNA sense strand
uaaagccgagcacuguaua

SEQ ID NO: 460579 - RNA, 19 nt, Homo sapiens
  misc_RNA (1)...(19): siRNA sense strand
gugaggacaugcucugcuu

SEQ ID NO: 460580 - RNA, 19 nt, Homo sapiens
  misc_RNA (1)...(19): siRNA sense strand
ggguaaaggagaagauuau

SEQ ID NO: 460581 - RNA, 19 nt, Homo sapiens
  misc_RNA (1)...(19): siRNA sense strand
ccugaucacugagcagaaa

SEQ ID NO: 460582 - RNA, 19 nt, Homo sapiens
  misc_RNA (1)...(19): siRNA sense strand
gaaaucgauuggcuaucca

SEQ ID NO: 460583 - RNA, 19 nt, Homo sapiens
  misc_RNA (1)...(19): siRNA sense strand
ggaagcgcuagaagguuua

SEQ ID NO: 460584 - RNA, 19 nt, Homo sapiens
  misc_RNA (1)...(19): siRNA sense strand
ggcgugaacuggccaugga

SEQ ID NO: 460585 - RNA, 19 nt, Homo sapiens
  misc_RNA (1)...(19): siRNA sense strand
aaggaagccuaccagauug

SEQ ID NO: 460586 - RNA, 19 nt, Homo sapiens
  misc_RNA (1)...(19): siRNA sense strand
gagaagauuaucaagaagu

SEQ ID NO: 460587 - RNA, 19 nt, Homo sapiens
  misc_RNA (1)...(19): siRNA sense strand
gagaaaauccucaucuaug

SEQ ID NO: 460588 - RNA, 19 nt, Homo sapiens
  misc_RNA (1)...(19): siRNA sense strand
acaacccgcugcucaacaa

SEQ ID NO: 460589 - RNA, 19 nt, Homo sapiens
  misc_RNA (1)...(19): siRNA sense strand
gauggagucucucauucgu

SEQ ID NO: 460590 - RNA, 19 nt, Homo sapiens
  misc_RNA (1)...(19): siRNA sense strand
ggaaaggaucgggcacuga

SEQ ID NO: 460591 - RNA, 19 nt, Homo sapiens
  misc_RNA (1)...(19): siRNA sense strand
gaucgggcacugaacuuug

SEQ ID NO: 460592 - RNA, 19 nt, Homo sapiens
  misc_RNA (1)...(19): siRNA sense strand
agaaaguucggauuaaaug

SEQ ID NO: 460593 - RNA, 19 nt, Homo sapiens
  misc_RNA (1)...(19): siRNA sense strand
gaagcauccugaguuuaag

SEQ ID NO: 460594 - RNA, 19 nt, Homo sapiens
  misc_RNA (1)...(19): siRNA sense strand
caccucugauggcaccuua

SEQ ID NO: 460595 - RNA, 19 nt, Homo sapiens
  misc_RNA (1)...(19): siRNA sense strand
uguaugacaucgacaccaa

SEQ ID NO: 460596 - RNA, 19 nt, Homo sapiens
  misc_RNA (1)...(19): siRNA sense strand
gaagcuggccgugguagau

SEQ ID NO: 460597 - RNA, 19 nt, Homo sapiens
  misc_RNA (1)...(19): siRNA sense strand
cuaccuaccucaagaagcu

SEQ ID NO: 460598 - RNA, 19 nt, Homo sapiens
  misc_RNA (1)...(19): siRNA sense strand
ggaagcagauuacugguuu

SEQ ID NO: 460599 - RNA, 19 nt, Homo sapiens
  misc_RNA (1)...(19): siRNA sense strand
gcagauuacugguuuauga

SEQ ID NO: 460600 - RNA, 19 nt, Homo sapiens
  misc_RNA (1)...(19): siRNA sense strand
gagcagaaaguucggauua

SEQ ID NO: 460601 - RNA, 19 nt, Homo sapiens
  misc_RNA (1)...(19): siRNA sense strand
gcagaaaguucggauuaaa

SEQ ID NO: 460602 - RNA, 19 nt, Homo sapiens
  misc_RNA (1)...(19): siRNA sense strand
guacaucccugccagauuc

SEQ ID NO: 460603 - RNA, 19 nt, Homo sapiens
  misc_RNA (1)...(19): siRNA sense strand
gaagaugggugaccucaag

SEQ ID NO: 460604 - RNA, 19 nt, Homo sapiens
  misc_RNA (1)...(19): siRNA sense strand
gaaaccggauuccaacuau

SEQ ID NO: 460605 - RNA, 19 nt, Homo sapiens
  misc_RNA (1)...(19): siRNA sense strand
caaggaagccuaccagauu

SEQ ID NO: 460606 - RNA, 19 nt, Homo sapiens
  misc_RNA (1)...(19): siRNA sense strand
gagagcagguuuaaugaug

SEQ ID NO: 460607 - RNA, 19 nt, Homo sapiens
  misc_RNA (1)...(19): siRNA sense strand
gggcaucucuaaagugaaa

SEQ ID NO: 460608 - RNA, 19 nt, Homo sapiens
  misc_RNA (1)...(19): siRNA sense strand
uacaagaccuccgauauuu

SEQ ID NO: 460609 - RNA, 19 nt, Homo sapiens
  misc_RNA (1)...(19): siRNA sense strand
guacaagaccuccgauauu

SEQ ID NO: 460610 - RNA, 19 nt, Homo sapiens
  misc_RNA (1)...(19): siRNA sense strand
gaagcagauuacugguuua

SEQ ID NO: 460611 - RNA, 19 nt, Homo sapiens
  misc_RNA (1)...(19): siRNA sense strand
ugagaagcauccugaguuu

SEQ ID NO: 460612 - RNA, 19 nt, Homo sapiens
  misc_RNA (1)...(19): siRNA sense strand
gaaacaaagaugcuaauca

SEQ ID NO: 460613 - RNA, 19 nt, Homo sapiens
  misc_RNA (1)...(19): siRNA sense strand
gaaccucgcgcuugaaaug

SEQ ID NO: 460614 - RNA, 19 nt, Homo sapiens
  misc_RNA (1)...(19): siRNA sense strand
ugauggaacucaacugauu

SEQ ID NO: 460615 - RNA, 19 nt, Homo sapiens
  misc_RNA (1)...(19): siRNA sense strand
gaaaggaucgggcacugaa

SEQ ID NO: 460616 - RNA, 19 nt, Homo sapiens
  misc_RNA (1)...(19): siRNA sense strand
uggagucucucauucguua

SEQ ID NO: 460617 - RNA, 19 nt, Homo sapiens
  misc_RNA (1)...(19): siRNA sense strand
ggaugacccuggcccauga

SEQ ID NO: 460618 - RNA, 19 nt, Homo sapiens
  misc_RNA (1)...(19): siRNA sense strand
gcuagaagguuuagauuuu

SEQ ID NO: 460619 - RNA, 19 nt, Homo sapiens
  misc_RNA (1)...(19): siRNA sense strand
caaagaugcuaaucaccaa

SEQ ID NO: 460620 - RNA, 19 nt, Homo sapiens
  misc_RNA (1)...(19): siRNA sense strand
gcugagaccuaccugaaga

SEQ ID NO: 460621 - RNA, 19 nt, Homo sapiens
  misc_RNA (1)...(19): siRNA sense strand
ggacaaaugauggucagua

SEQ ID NO: 460622 - RNA, 19 nt, Homo sapiens
  misc_RNA (1)...(19): siRNA sense strand
aggagaagauuaucaagaa

SEQ ID NO: 460623 - RNA, 19 nt, Homo sapiens
  misc_RNA (1)...(19): siRNA sense strand
gccgagcacuguauaaaug

SEQ ID NO: 460624 - RNA, 19 nt, Homo sapiens
  misc_RNA (1)...(19): siRNA sense strand
gaaaacagauuggaaagga

SEQ ID NO: 460625 - RNA, 19 nt, Homo sapiens
  misc_RNA (1)...(19): siRNA sense strand
gcagauggagucucucauu

SEQ ID NO: 460626 - RNA, 19 nt, Homo sapiens
  misc_RNA (1)...(19): siRNA sense strand
gcggagagcagguuuaaug

SEQ ID NO: 460627 - RNA, 19 nt, Homo sapiens
  misc_RNA (1)...(19): siRNA sense strand
gcagagcuguaccaugguu

SEQ ID NO: 460628 - RNA, 19 nt, Homo sapiens
  misc_RNA (1)...(19): siRNA sense strand
gggaugaggccuuugcuuu

SEQ ID NO: 460629 - RNA, 19 nt, Homo sapiens
  misc_RNA (1)...(19): siRNA sense strand
uggaagcgcuagaagguuu

SEQ ID NO: 460630 - RNA, 19 nt, Homo sapiens
  misc_RNA (1)...(19): siRNA sense strand
aaacaaagaugcuaaucac

SEQ ID NO: 460631 - RNA, 19 nt, Homo sapiens
  misc_RNA (1)...(19): siRNA sense strand
ucagaggacuuaucagaca

SEQ ID NO: 460632 - RNA, 19 nt, Homo sapiens
  misc_RNA (1)...(19): siRNA sense strand
gcaguccgcucccauguac

SEQ ID NO: 460633 - RNA, 19 nt, Homo sapiens
  misc_RNA (1)...(19): siRNA sense strand
agaagcauccugaguuuaa

SEQ ID NO: 460634 - RNA, 19 nt, Homo sapiens
  misc_RNA (1)...(19): siRNA sense strand
cuccaugucuucuccauuu

SEQ ID NO: 460635 - RNA, 19 nt, Homo sapiens
  misc_RNA (1)...(19): siRNA sense strand
gcagagaacgaucgcuuug

SEQ ID NO: 460636 - RNA, 19 nt, Homo sapiens
  misc_RNA (1)...(19): siRNA sense strand
auaggaaacuguucaagga

SEQ ID NO: 460637 - RNA, 19 nt, Homo sapiens
  misc_RNA (1)...(19): siRNA sense strand
gacaagcaaguaucucuuu

SEQ ID NO: 460638 - RNA, 19 nt, Homo sapiens
  misc_RNA (1)...(19): siRNA sense strand
aacaacagcucccagauuc

SEQ ID NO: 460639 - RNA, 19 nt, Homo sapiens
  misc_RNA (1)...(19): siRNA sense strand
ggaugaggccuuugcuuug

SEQ ID NO: 460640 - RNA, 19 nt, Homo sapiens
  misc_RNA (1)...(19): siRNA sense strand
gaccauggcuggguugaca

SEQ ID NO: 460641 - RNA, 19 nt, Homo sapiens
  misc_RNA (1)...(19): siRNA sense strand
ucuaugaguuguauucaga

SEQ ID NO: 460642 - RNA, 19 nt, Homo sapiens
  misc_RNA (1)...(19): siRNA sense strand
guguugacguggagagaua

SEQ ID NO: 460643 - RNA, 19 nt, Homo sapiens
  misc_RNA (1)...(19): siRNA sense strand
gcacaguccaugggcuuua

SEQ ID NO: 460644 - RNA, 19 nt, Homo sapiens
  misc_RNA (1)...(19): siRNA sense strand
ggacuuaucagacaugcau

SEQ ID NO: 460645 - RNA, 19 nt, Homo sapiens
  misc_RNA (1)...(19): siRNA sense strand
gacaaaugauggucaguac

SEQ ID NO: 460646 - RNA, 19 nt, Homo sapiens
  misc_RNA (1)...(19): siRNA sense strand
gaggacccguucacagcua

SEQ ID NO: 460647 - RNA, 19 nt, Homo sapiens
  misc_RNA (1)...(19): siRNA sense strand
aaacaacagcucccagauu

SEQ ID NO: 460648 - RNA, 19 nt, Homo sapiens
  misc_RNA (1)...(19): siRNA sense strand
ugacagacagcuagagauu

SEQ ID NO: 460649 - RNA, 19 nt, Homo sapiens
  misc_RNA (1)...(19): siRNA sense strand
gaacgaucgcuuugaggaa

SEQ ID NO: 460650 - RNA, 19 nt, Homo sapiens
  misc_RNA (1)...(19): siRNA sense strand
ggagaagauuaucaagaag

SEQ ID NO: 460651 - RNA, 19 nt, Homo sapiens
  misc_RNA (1)...(19): siRNA sense strand
gagcucaucagcagcauug

SEQ ID NO: 460652 - RNA, 19 nt, Homo sapiens
  misc_RNA (1)...(19): siRNA sense strand
uacaauggcuccaagaucu

SEQ ID NO: 460653 - RNA, 19 nt, Homo sapiens
  misc_RNA (1)...(19): siRNA sense strand
ugcaucagcuacuuuacua

SEQ ID NO: 460654 - RNA, 19 nt, Homo sapiens
  misc_RNA (1)...(19): siRNA sense strand
gagaagcauccugaguuua

SEQ ID NO: 460655 - RNA, 19 nt, Homo sapiens
  misc_RNA (1)...(19): siRNA sense strand
gagaaccucgcgcuugaaa

SEQ ID NO: 460656 - RNA, 19 nt, Homo sapiens
  misc_RNA (1)...(19): siRNA sense strand
gauaaagccgagcacugua

SEQ ID NO: 460657 - RNA, 19 nt, Homo sapiens
  misc_RNA (1)...(19): siRNA sense strand
gacaaucucuuugcuaucg

SEQ ID NO: 460658 - RNA, 19 nt, Homo sapiens
  misc_RNA (1)...(19): siRNA sense strand
cagauggagucucucauuc

SEQ ID NO: 460659 - RNA, 19 nt, Homo sapiens
  misc_RNA (1)...(19): siRNA sense strand
ccagaaagcguuccacaag

SEQ ID NO: 460660 - RNA, 19 nt, Homo sapiens
  misc_RNA (1)...(19): siRNA sense strand
gcgcugggaugaggccuuu

SEQ ID NO: 460661 - RNA, 19 nt, Homo sapiens
  misc_RNA (1)...(19): siRNA sense strand
caaagaaacaaagaugcua

SEQ ID NO: 460662 - RNA, 19 nt, Homo sapiens
  misc_RNA (1)...(19): siRNA sense strand
gcugaagaauggacagauc

SEQ ID NO: 460663 - RNA, 19 nt, Homo sapiens
  misc_RNA (1)...(19): siRNA sense strand
cgaaaccggauuccaacua

SEQ ID NO: 460664 - RNA, 19 nt, Homo sapiens
  misc_RNA (1)...(19): siRNA sense strand
gaugaggccuuugcuuugg

SEQ ID NO: 460665 - RNA, 19 nt, Homo sapiens
  misc_RNA (1)...(19): siRNA sense strand
caagaccuccgauauuuag

SEQ ID NO: 460666 - RNA, 19 nt, Homo sapiens
  misc_RNA (1)...(19): siRNA sense strand
uggacaaucucuuugcuau

SEQ ID NO: 460667 - RNA, 19 nt, Homo sapiens
  misc_RNA (1)...(19): siRNA sense strand
agaagucugucuccaaaca

SEQ ID NO: 460668 - RNA, 19 nt, Homo sapiens
  misc_RNA (1)...(19): siRNA sense strand
gauggaacucaacugauuu

SEQ ID NO: 460669 - RNA, 19 nt, Homo sapiens
  misc_RNA (1)...(19): siRNA sense strand
gugagaagcauccugaguu

SEQ ID NO: 460670 - RNA, 19 nt, Homo sapiens
  misc_RNA (1)...(19): siRNA sense strand
acaagaccuccgauauuua

SEQ ID NO: 460671 - RNA, 19 nt, Homo sapiens
  misc_RNA (1)...(19): siRNA sense strand
guaaaggagaagauuauca

SEQ ID NO: 460672 - RNA, 19 nt, Homo sapiens
  misc_RNA (1)...(19): siRNA sense strand
ucaaugggaucaucagcau

SEQ ID NO: 460673 - RNA, 19 nt, Homo sapiens
  misc_RNA (1)...(19): siRNA sense strand
ccacgacagugaggaguug

SEQ ID NO: 460674 - RNA, 19 nt, Homo sapiens
  misc_RNA (1)...(19): siRNA sense strand
gcaagguggcucagaguuc

SEQ ID NO: 460675 - RNA, 19 nt, Homo sapiens
  misc_RNA (1)...(19): siRNA sense strand
uccaugggcuuuacaagga

SEQ ID NO: 460676 - RNA, 19 nt, Homo sapiens
  misc_RNA (1)...(19): siRNA sense strand
gaugacagacagcuagaga

SEQ ID NO: 460677 - RNA, 19 nt, Homo sapiens
  misc_RNA (1)...(19): siRNA sense strand
ucgggcaucucuaaaguga

SEQ ID NO: 460678 - RNA, 19 nt, Homo sapiens
  misc_RNA (1)...(19): siRNA sense strand
uaaagccgagcacuguaua

SEQ ID NO: 460679 - RNA, 19 nt, Homo sapiens
  misc_RNA (1)...(19): siRNA sense strand
gugaggacaugcucugcuu

SEQ ID NO: 460680 - RNA, 19 nt, Homo sapiens
  misc_RNA (1)...(19): siRNA sense strand
ggguaaaggagaagauuau

SEQ ID NO: 460681 - RNA, 19 nt, Homo sapiens
  misc_RNA (1)...(19): siRNA sense strand
ccugaucacugagcagaaa

SEQ ID NO: 460682 - RNA, 19 nt, Homo sapiens
  misc_RNA (1)...(19): siRNA sense strand
gaaaucgauuggcuaucca

SEQ ID NO: 460683 - RNA, 19 nt, Homo sapiens
  misc_RNA (1)...(19): siRNA sense strand
ggaagcgcuagaagguuua

SEQ ID NO: 460684 - RNA, 19 nt, Homo sapiens
  misc_RNA (1)...(19): siRNA sense strand
ggcgugaacuggccaugga

SEQ ID NO: 460685 - RNA, 19 nt, Homo sapiens
  misc_RNA (1)...(19): siRNA sense strand
aaggaagccuaccagauug

SEQ ID NO: 460686 - RNA, 19 nt, Homo sapiens
  misc_RNA (1)...(19): siRNA sense strand
gagaagauuaucaagaagu

SEQ ID NO: 460687 - RNA, 19 nt, Homo sapiens
  misc_RNA (1)...(19): siRNA sense strand
gagaaaauccucaucuaug

SEQ ID NO: 460688 - RNA, 19 nt, Homo sapiens
  misc_RNA (1)...(19): siRNA sense strand
acaacccgcugcucaacaa

SEQ ID NO: 460689 - RNA, 19 nt, Homo sapiens
  misc_RNA (1)...(19): siRNA sense strand
gauggagucucucauucgu

SEQ ID NO: 460690 - RNA, 19 nt, Homo sapiens
  misc_RNA (1)...(19): siRNA sense strand
ggaaaggaucgggcacuga

SEQ ID NO: 460691 - RNA, 19 nt, Homo sapiens
  misc_RNA (1)...(19): siRNA sense strand
gaucgggcacugaacuuug

SEQ ID NO: 460692 - RNA, 19 nt, Homo sapiens
  misc_RNA (1)...(19): siRNA sense strand
agaaaguucggauuaaaug

SEQ ID NO: 460693 - RNA, 19 nt, Homo sapiens
  misc_RNA (1)...(19): siRNA sense strand
gaagcauccugaguuuaag

SEQ ID NO: 460694 - RNA, 19 nt, Homo sapiens
  misc_RNA (1)...(19): siRNA sense strand
caccucugauggcaccuua

SEQ ID NO: 460695 - RNA, 19 nt, Homo sapiens
  misc_RNA (1)...(19): siRNA sense strand
uguaugacaucgacaccaa

SEQ ID NO: 460696 - RNA, 19 nt, Homo sapiens
  misc_RNA (1)...(19): siRNA sense strand
gaagcuggccgugguagau

SEQ ID NO: 460697 - RNA, 19 nt, Homo sapiens
  misc_RNA (1)...(19): siRNA sense strand
cuaccuaccucaagaagcu

SEQ ID NO: 460698 - RNA, 19 nt, Homo sapiens
  misc_RNA (1)...(19): siRNA sense strand
ggaagcagauuacugguuu

SEQ ID NO: 460699 - RNA, 19 nt, Homo sapiens
  misc_RNA (1)...(19): siRNA sense strand
gcagauuacugguuuauga

SEQ ID NO: 460700 - RNA, 19 nt, Homo sapiens
  misc_RNA (1)...(19): siRNA sense strand
gagcagaaaguucggauua

SEQ ID NO: 460701 - RNA, 19 nt, Homo sapiens
  misc_RNA (1)...(19): siRNA sense strand
gcagaaaguucggauuaaa

SEQ ID NO: 460702 - RNA, 19 nt, Homo sapiens
  misc_RNA (1)...(19): siRNA sense strand
guacaucccugccagauuc

SEQ ID NO: 460703 - RNA, 19 nt, Homo sapiens
  misc_RNA (1)...(19): siRNA sense strand
gaagaugggugaccucaag

SEQ ID NO: 460704 - RNA, 19 nt, Homo sapiens
  misc_RNA (1)...(19): siRNA sense strand
gaaaccggauuccaacuau

SEQ ID NO: 460705 - RNA, 19 nt, Homo sapiens
  misc_RNA (1)...(19): siRNA sense strand
caaggaagccuaccagauu

SEQ ID NO: 460706 - RNA, 19 nt, Homo sapiens
  misc_RNA (1)...(19): siRNA sense strand
gagagcagguuuaaugaug

SEQ ID NO: 460707 - RNA, 19 nt, Homo sapiens
  misc_RNA (1)...(19): siRNA sense strand
gggcaucucuaaagugaaa

SEQ ID NO: 460708 - RNA, 19 nt, Homo sapiens
  misc_RNA (1)...(19): siRNA sense strand
uacaagaccuccgauauuu

SEQ ID NO: 460709 - RNA, 19 nt, Homo sapiens
  misc_RNA (1)...(19): siRNA sense strand
guacaagaccuccgauauu

SEQ ID NO: 460710 - RNA, 19 nt, Homo sapiens
  misc_RNA (1)...(19): siRNA sense strand
gaagcagauuacugguuua

SEQ ID NO: 460711 - RNA, 19 nt, Homo sapiens
  misc_RNA (1)...(19): siRNA sense strand
ugagaagcauccugaguuu

SEQ ID NO: 460712 - RNA, 19 nt, Homo sapiens
  misc_RNA (1)...(19): siRNA sense strand
gaaacaaagaugcuaauca

SEQ ID NO: 460713 - RNA, 19 nt, Homo sapiens
  misc_RNA (1)...(19): siRNA sense strand
gaaccucgcgcuugaaaug

SEQ ID NO: 460714 - RNA, 19 nt, Homo sapiens
  misc_RNA (1)...(19): siRNA sense strand
ugauggaacucaacugauu

SEQ ID NO: 460715 - RNA, 19 nt, Homo sapiens
  misc_RNA (1)...(19): siRNA sense strand
gaaaggaucgggcacugaa

SEQ ID NO: 460716 - RNA, 19 nt, Homo sapiens
  misc_RNA (1)...(19): siRNA sense strand
uggagucucucauucguua

SEQ ID NO: 460717 - RNA, 19 nt, Homo sapiens
  misc_RNA (1)...(19): siRNA sense strand
ggaugacccuggcccauga

SEQ ID NO: 460718 - RNA, 19 nt, Homo sapiens
  misc_RNA (1)...(19): siRNA sense strand
gcuagaagguuuagauuuu

SEQ ID NO: 460719 - RNA, 19 nt, Homo sapiens
  misc_RNA (1)...(19): siRNA sense strand
caaagaugcuaaucaccaa

SEQ ID NO: 460720 - RNA, 19 nt, Homo sapiens
  misc_RNA (1)...(19): siRNA sense strand
gcugagaccuaccugaaga

SEQ ID NO: 460721 - RNA, 19 nt, Homo sapiens
  misc_RNA (1)...(19): siRNA sense strand
ggacaaaugauggucagua

SEQ ID NO: 460722 - RNA, 19 nt, Homo sapiens
  misc_RNA (1)...(19): siRNA sense strand
aggagaagauuaucaagaa

SEQ ID NO: 460723 - RNA, 19 nt, Homo sapiens
  misc_RNA (1)...(19): siRNA sense strand
gccgagcacuguauaaaug

SEQ ID NO: 460724 - RNA, 19 nt, Homo sapiens
  misc_RNA (1)...(19): siRNA sense strand
gaaaacagauuggaaagga

SEQ ID NO: 460725 - RNA, 19 nt, Homo sapiens
  misc_RNA (1)...(19): siRNA sense strand
gcagauggagucucucauu

SEQ ID NO: 460726 - RNA, 19 nt, Homo sapiens
  misc_RNA (1)...(19): siRNA sense strand
gcggagagcagguuuaaug

SEQ ID NO: 460727 - RNA, 19 nt, Homo sapiens
  misc_RNA (1)...(19): siRNA sense strand
gcagagcuguaccaugguu

SEQ ID NO: 460728 - RNA, 19 nt, Homo sapiens
  misc_RNA (1)...(19): siRNA sense strand
gggaugaggccuuugcuuu

SEQ ID NO: 460729 - RNA, 19 nt, Homo sapiens
  misc_RNA (1)...(19): siRNA sense strand
uggaagcgcuagaagguuu

SEQ ID NO: 460730 - RNA, 19 nt, Homo sapiens
  misc_RNA (1)...(19): siRNA sense strand
aaacaaagaugcuaaucac

SEQ ID NO: 460731 - RNA, 19 nt, Homo sapiens
  misc_RNA (1)...(19): siRNA sense strand
ucagaggacuuaucagaca

SEQ ID NO: 460732 - RNA, 19 nt, Homo sapiens
  misc_RNA (1)...(19): siRNA sense strand
gcaguccgcucccauguac

SEQ ID NO: 460733 - RNA, 19 nt, Homo sapiens
  misc_RNA (1)...(19): siRNA sense strand
agaagcauccugaguuuaa

SEQ ID NO: 460734 - RNA, 19 nt, Homo sapiens
  misc_RNA (1)...(19): siRNA sense strand
cuccaugucuucuccauuu

SEQ ID NO: 460735 - RNA, 19 nt, Homo sapiens
  misc_RNA (1)...(19): siRNA sense strand
gcagagaacgaucgcuuug

SEQ ID NO: 460736 - RNA, 19 nt, Homo sapiens
  misc_RNA (1)...(19): siRNA sense strand
auaggaaacuguucaagga

SEQ ID NO: 460737 - RNA, 19 nt, Homo sapiens
  misc_RNA (1)...(19): siRNA sense strand
gacaagcaaguaucucuuu

SEQ ID NO: 460738 - RNA, 19 nt, Homo sapiens
  misc_RNA (1)...(19): siRNA sense strand
aacaacagcucccagauuc

SEQ ID NO: 460739 - RNA, 19 nt, Homo sapiens
  misc_RNA (1)...(19): siRNA sense strand
ggaugaggccuuugcuuug

SEQ ID NO: 460740 - RNA, 19 nt, Homo sapiens
  misc_RNA (1)...(19): siRNA sense strand
gaccauggcuggguugaca

SEQ ID NO: 460741 - RNA, 19 nt, Homo sapiens
  misc_RNA (1)...(19): siRNA sense strand
ucuaugaguuguauucaga

SEQ ID NO: 460742 - RNA, 19 nt, Homo sapiens
  misc_RNA (1)...(19): siRNA sense strand
guguugacguggagagaua

SEQ ID NO: 460743 - RNA, 19 nt, Homo sapiens
  misc_RNA (1)...(19): siRNA sense strand
gcacaguccaugggcuuua

SEQ ID NO: 460744 - RNA, 19 nt, Homo sapiens
  misc_RNA (1)...(19): siRNA sense strand
ggacuuaucagacaugcau

SEQ ID NO: 460745 - RNA, 19 nt, Homo sapiens
  misc_RNA (1)...(19): siRNA sense strand
gacaaaugauggucaguac

SEQ ID NO: 460746 - RNA, 19 nt, Homo sapiens
  misc_RNA (1)...(19): siRNA sense strand
gaggacccguucacagcua

SEQ ID NO: 460747 - RNA, 19 nt, Homo sapiens
  misc_RNA (1)...(19): siRNA sense strand
aaacaacagcucccagauu

SEQ ID NO: 460748 - RNA, 19 nt, Homo sapiens
  misc_RNA (1)...(19): siRNA sense strand
ugacagacagcuagagauu

SEQ ID NO: 460749 - RNA, 19 nt, Homo sapiens
  misc_RNA (1)...(19): siRNA sense strand
gaacgaucgcuuugaggaa

SEQ ID NO: 460750 - RNA, 19 nt, Homo sapiens
  misc_RNA (1)...(19): siRNA sense strand
ggagaagauuaucaagaag

SEQ ID NO: 460751 - RNA, 19 nt, Homo sapiens
  misc_RNA (1)...(19): siRNA sense strand
gagcucaucagcagcauug

SEQ ID NO: 460752 - RNA, 19 nt, Homo sapiens
  misc_RNA (1)...(19): siRNA sense strand
uacaauggcuccaagaucu

SEQ ID NO: 460753 - RNA, 19 nt, Homo sapiens
  misc_RNA (1)...(19): siRNA sense strand
ugcaucagcuacuuuacua

SEQ ID NO: 460754 - RNA, 19 nt, Homo sapiens
  misc_RNA (1)...(19): siRNA sense strand
gagaagcauccugaguuua

SEQ ID NO: 460755 - RNA, 19 nt, Homo sapiens
  misc_RNA (1)...(19): siRNA sense strand
gagaaccucgcgcuugaaa

SEQ ID NO: 460756 - RNA, 19 nt, Homo sapiens
  misc_RNA (1)...(19): siRNA sense strand
gauaaagccgagcacugua

SEQ ID NO: 460757 - RNA, 19 nt, Homo sapiens
  misc_RNA (1)...(19): siRNA sense strand
gacaaucucuuugcuaucg

SEQ ID NO: 460758 - RNA, 19 nt, Homo sapiens
  misc_RNA (1)...(19): siRNA sense strand
cagauggagucucucauuc

SEQ ID NO: 460759 - RNA, 19 nt, Homo sapiens
  misc_RNA (1)...(19): siRNA sense strand
ccagaaagcguuccacaag

SEQ ID NO: 460760 - RNA, 19 nt, Homo sapiens
  misc_RNA (1)...(19): siRNA sense strand
gcgcugggaugaggccuuu

SEQ ID NO: 460761 - RNA, 19 nt, Homo sapiens
  misc_RNA (1)...(19): siRNA sense strand
caaagaaacaaagaugcua

SEQ ID NO: 460762 - RNA, 19 nt, Homo sapiens
  misc_RNA (1)...(19): siRNA sense strand
gcugaagaauggacagauc

SEQ ID NO: 460763 - RNA, 19 nt, Homo sapiens
  misc_RNA (1)...(19): siRNA sense strand
cgaaaccggauuccaacua

SEQ ID NO: 460764 - RNA, 19 nt, Homo sapiens
  misc_RNA (1)...(19): siRNA sense strand
gaugaggccuuugcuuugg

SEQ ID NO: 460765 - RNA, 19 nt, Homo sapiens
  misc_RNA (1)...(19): siRNA sense strand
caagaccuccgauauuuag

SEQ ID NO: 460766 - RNA, 19 nt, Homo sapiens
  misc_RNA (1)...(19): siRNA sense strand
uggacaaucucuuugcuau

SEQ ID NO: 460767 - RNA, 19 nt, Homo sapiens
  misc_RNA (1)...(19): siRNA sense strand
agaagucugucuccaaaca

SEQ ID NO: 460768 - RNA, 19 nt, Homo sapiens
  misc_RNA (1)...(19): siRNA sense strand
gauggaacucaacugauuu

SEQ ID NO: 460769 - RNA, 19 nt, Homo sapiens
  misc_RNA (1)...(19): siRNA sense strand
gugagaagcauccugaguu

SEQ ID NO: 460770 - RNA, 19 nt, Homo sapiens
  misc_RNA (1)...(19): siRNA sense strand
acaagaccuccgauauuua

SEQ ID NO: 460771 - RNA, 19 nt, Homo sapiens
  misc_RNA (1)...(19): siRNA sense strand
guaaaggagaagauuauca

SEQ ID NO: 460772 - RNA, 19 nt, Homo sapiens
  misc_RNA (1)...(19): siRNA sense strand
ucaaugggaucaucagcau

SEQ ID NO: 460773 - RNA, 19 nt, Homo sapiens
  misc_RNA (1)...(19): siRNA sense strand
ccacgacagugaggaguug

SEQ ID NO: 460774 - RNA, 19 nt, Homo sapiens
  misc_RNA (1)...(19): siRNA sense strand
gcaagguggcucagaguuc

SEQ ID NO: 460775 - RNA, 19 nt, Homo sapiens
  misc_RNA (1)...(19): siRNA sense strand
uccaugggcuuuacaagga

SEQ ID NO: 460776 - RNA, 19 nt, Homo sapiens
  misc_RNA (1)...(19): siRNA sense strand
gaugacagacagcuagaga

SEQ ID NO: 460777 - RNA, 19 nt, Homo sapiens
  misc_RNA (1)...(19): siRNA sense strand
ucgggcaucucuaaaguga

SEQ ID NO: 460778 - RNA, 19 nt, Homo sapiens
  misc_RNA (1)...(19): siRNA sense strand
uaaagccgagcacuguaua

SEQ ID NO: 460779 - RNA, 19 nt, Homo sapiens
  misc_RNA (1)...(19): siRNA sense strand
gugaggacaugcucugcuu

SEQ ID NO: 460780 - RNA, 19 nt, Homo sapiens
  misc_RNA (1)...(19): siRNA sense strand
ggguaaaggagaagauuau

SEQ ID NO: 460781 - RNA, 19 nt, Homo sapiens
  misc_RNA (1)...(19): siRNA sense strand
ccugaucacugagcagaaa

SEQ ID NO: 460782 - RNA, 19 nt, Homo sapiens
  misc_RNA (1)...(19): siRNA sense strand
gaaaucgauuggcuaucca

SEQ ID NO: 460783 - RNA, 19 nt, Homo sapiens
  misc_RNA (1)...(19): siRNA sense strand
ggaagcgcuagaagguuua

SEQ ID NO: 460784 - RNA, 19 nt, Homo sapiens
  misc_RNA (1)...(19): siRNA sense strand
ggcgugaacuggccaugga

SEQ ID NO: 460785 - RNA, 19 nt, Homo sapiens
  misc_RNA (1)...(19): siRNA sense strand
aaggaagccuaccagauug

SEQ ID NO: 460786 - RNA, 19 nt, Homo sapiens
  misc_RNA (1)...(19): siRNA sense strand
gagaagauuaucaagaagu

SEQ ID NO: 460787 - RNA, 19 nt, Homo sapiens
  misc_RNA (1)...(19): siRNA sense strand
gagaaaauccucaucuaug

SEQ ID NO: 460788 - RNA, 19 nt, Homo sapiens
  misc_RNA (1)...(19): siRNA sense strand
acaacccgcugcucaacaa

SEQ ID NO: 460789 - RNA, 19 nt, Homo sapiens
  misc_RNA (1)...(19): siRNA sense strand
gauggagucucucauucgu

SEQ ID NO: 460790 - RNA, 19 nt, Homo sapiens
  misc_RNA (1)...(19): siRNA sense strand
ggaaaggaucgggcacuga

SEQ ID NO: 460791 - RNA, 19 nt, Homo sapiens
  misc_RNA (1)...(19): siRNA sense strand
gaucgggcacugaacuuug

SEQ ID NO: 460792 - RNA, 19 nt, Homo sapiens
  misc_RNA (1)...(19): siRNA sense strand
agaaaguucggauuaaaug

SEQ ID NO: 460793 - RNA, 19 nt, Homo sapiens
  misc_RNA (1)...(19): siRNA sense strand
gaagcauccugaguuuaag

SEQ ID NO: 460794 - RNA, 19 nt, Homo sapiens
  misc_RNA (1)...(19): siRNA sense strand
caccucugauggcaccuua

SEQ ID NO: 460795 - RNA, 19 nt, Homo sapiens
  misc_RNA (1)...(19): siRNA sense strand
uguaugacaucgacaccaa

SEQ ID NO: 460796 - RNA, 19 nt, Homo sapiens
  misc_RNA (1)...(19): siRNA sense strand
gaagcuggccgugguagau

SEQ ID NO: 460797 - RNA, 19 nt, Homo sapiens
  misc_RNA (1)...(19): siRNA sense strand
cuaccuaccucaagaagcu

SEQ ID NO: 460798 - RNA, 19 nt, Homo sapiens
  misc_RNA (1)...(19): siRNA sense strand
ggaagcagauuacugguuu

SEQ ID NO: 460799 - RNA, 19 nt, Homo sapiens
  misc_RNA (1)...(19): siRNA sense strand
gcagauuacugguuuauga

SEQ ID NO: 460800 - RNA, 19 nt, Homo sapiens
  misc_RNA (1)...(19): siRNA sense strand
gagcagaaaguucggauua

SEQ ID NO: 460801 - RNA, 19 nt, Homo sapiens
  misc_RNA (1)...(19): siRNA sense strand
gcagaaaguucggauuaaa

SEQ ID NO: 460802 - RNA, 19 nt, Homo sapiens
  misc_RNA (1)...(19): siRNA sense strand
guacaucccugccagauuc

SEQ ID NO: 460803 - RNA, 19 nt, Homo sapiens
  misc_RNA (1)...(19): siRNA sense strand
gaagaugggugaccucaag

SEQ ID NO: 460804 - RNA, 19 nt, Homo sapiens
  misc_RNA (1)...(19): siRNA sense strand
gaaaccggauuccaacuau

SEQ ID NO: 460805 - RNA, 19 nt, Homo sapiens
  misc_RNA (1)...(19): siRNA sense strand
caaggaagccuaccagauu

SEQ ID NO: 460806 - RNA, 19 nt, Homo sapiens
  misc_RNA (1)...(19): siRNA sense strand
gagagcagguuuaaugaug

SEQ ID NO: 460807 - RNA, 19 nt, Homo sapiens
  misc_RNA (1)...(19): siRNA sense strand
gggcaucucuaaagugaaa

SEQ ID NO: 460808 - RNA, 19 nt, Homo sapiens
  misc_RNA (1)...(19): siRNA sense strand
uacaagaccuccgauauuu

SEQ ID NO: 460809 - RNA, 19 nt, Homo sapiens
  misc_RNA (1)...(19): siRNA sense strand
guacaagaccuccgauauu

SEQ ID NO: 460810 - RNA, 19 nt, Homo sapiens
  misc_RNA (1)...(19): siRNA sense strand
gaagcagauuacugguuua

SEQ ID NO: 460811 - RNA, 19 nt, Homo sapiens
  misc_RNA (1)...(19): siRNA sense strand
ugagaagcauccugaguuu

SEQ ID NO: 460812 - RNA, 19 nt, Homo sapiens
  misc_RNA (1)...(19): siRNA sense strand
gaaacaaagaugcuaauca

SEQ ID NO: 460813 - RNA, 19 nt, Homo sapiens
  misc_RNA (1)...(19): siRNA sense strand
gaaccucgcgcuugaaaug

SEQ ID NO: 460814 - RNA, 19 nt, Homo sapiens
  misc_RNA (1)...(19): siRNA sense strand
ugauggaacucaacugauu

SEQ ID NO: 460815 - RNA, 19 nt, Homo sapiens
  misc_RNA (1)...(19): siRNA sense strand
gaaaggaucgggcacugaa

SEQ ID NO: 460816 - RNA, 19 nt, Homo sapiens
  misc_RNA (1)...(19): siRNA sense strand
uggagucucucauucguua

SEQ ID NO: 460817 - RNA, 19 nt, Homo sapiens
  misc_RNA (1)...(19): siRNA sense strand
ggaugacccuggcccauga

SEQ ID NO: 460818 - RNA, 19 nt, Homo sapiens
  misc_RNA (1)...(19): siRNA sense strand
gcuagaagguuuagauuuu

SEQ ID NO: 460819 - RNA, 19 nt, Homo sapiens
  misc_RNA (1)...(19): siRNA sense strand
caaagaugcuaaucaccaa

SEQ ID NO: 460820 - RNA, 19 nt, Homo sapiens
  misc_RNA (1)...(19): siRNA sense strand
gcugagaccuaccugaaga

SEQ ID NO: 460821 - RNA, 19 nt, Homo sapiens
  misc_RNA (1)...(19): siRNA sense strand
ggacaaaugauggucagua

SEQ ID NO: 460822 - RNA, 19 nt, Homo sapiens
  misc_RNA (1)...(19): siRNA sense strand
aggagaagauuaucaagaa

SEQ ID NO: 460823 - RNA, 19 nt, Homo sapiens
  misc_RNA (1)...(19): siRNA sense strand
gccgagcacuguauaaaug

SEQ ID NO: 460824 - RNA, 19 nt, Homo sapiens
  misc_RNA (1)...(19): siRNA sense strand
gaaaacagauuggaaagga

SEQ ID NO: 460825 - RNA, 19 nt, Homo sapiens
  misc_RNA (1)...(19): siRNA sense strand
gcagauggagucucucauu

SEQ ID NO: 460826 - RNA, 19 nt, Homo sapiens
  misc_RNA (1)...(19): siRNA sense strand
gcggagagcagguuuaaug

SEQ ID NO: 460827 - RNA, 19 nt, Homo sapiens
  misc_RNA (1)...(19): siRNA sense strand
gcagagcuguaccaugguu

SEQ ID NO: 460828 - RNA, 19 nt, Homo sapiens
  misc_RNA (1)...(19): siRNA sense strand
gggaugaggccuuugcuuu

SEQ ID NO: 460829 - RNA, 19 nt, Homo sapiens
  misc_RNA (1)...(19): siRNA sense strand
uggaagcgcuagaagguuu

SEQ ID NO: 460830 - RNA, 19 nt, Homo sapiens
  misc_RNA (1)...(19): siRNA sense strand
aaacaaagaugcuaaucac

SEQ ID NO: 460831 - RNA, 19 nt, Homo sapiens
  misc_RNA (1)...(19): siRNA sense strand
ucagaggacuuaucagaca

SEQ ID NO: 460832 - RNA, 19 nt, Homo sapiens
  misc_RNA (1)...(19): siRNA sense strand
gcaguccgcucccauguac

SEQ ID NO: 460833 - RNA, 19 nt, Homo sapiens
  misc_RNA (1)...(19): siRNA sense strand
agaagcauccugaguuuaa

SEQ ID NO: 460834 - RNA, 19 nt, Homo sapiens
  misc_RNA (1)...(19): siRNA sense strand
cuccaugucuucuccauuu

SEQ ID NO: 460835 - RNA, 19 nt, Homo sapiens
  misc_RNA (1)...(19): siRNA sense strand
gcagagaacgaucgcuuug

SEQ ID NO: 460836 - RNA, 19 nt, Homo sapiens
  misc_RNA (1)...(19): siRNA sense strand
auaggaaacuguucaagga

SEQ ID NO: 460837 - RNA, 19 nt, Homo sapiens
  misc_RNA (1)...(19): siRNA sense strand
gacaagcaaguaucucuuu

SEQ ID NO: 460838 - RNA, 19 nt, Homo sapiens
  misc_RNA (1)...(19): siRNA sense strand
aacaacagcucccagauuc

SEQ ID NO: 460839 - RNA, 19 nt, Homo sapiens
  misc_RNA (1)...(19): siRNA sense strand
ggaugaggccuuugcuuug

SEQ ID NO: 460840 - RNA, 19 nt, Homo sapiens
  misc_RNA (1)...(19): siRNA sense strand
gaccauggcuggguugaca

SEQ ID NO: 460841 - RNA, 19 nt, Homo sapiens
  misc_RNA (1)...(19): siRNA sense strand
ucuaugaguuguauucaga

SEQ ID NO: 460842 - RNA, 19 nt, Homo sapiens
  misc_RNA (1)...(19): siRNA sense strand
guguugacguggagagaua

SEQ ID NO: 460843 - RNA, 19 nt, Homo sapiens
  misc_RNA (1)...(19): siRNA sense strand
gcacaguccaugggcuuua

SEQ ID NO: 460844 - RNA, 19 nt, Homo sapiens
  misc_RNA (1)...(19): siRNA sense strand
ggacuuaucagacaugcau

SEQ ID NO: 460845 - RNA, 19 nt, Homo sapiens
  misc_RNA (1)...(19): siRNA sense strand
gacaaaugauggucaguac

SEQ ID NO: 460846 - RNA, 19 nt, Homo sapiens
  misc_RNA (1)...(19): siRNA sense strand
gaggacccguucacagcua

SEQ ID NO: 460847 - RNA, 19 nt, Homo sapiens
  misc_RNA (1)...(19): siRNA sense strand
aaacaacagcucccagauu

SEQ ID NO: 460848 - RNA, 19 nt, Homo sapiens
  misc_RNA (1)...(19): siRNA sense strand
ugacagacagcuagagauu

SEQ ID NO: 460849 - RNA, 19 nt, Homo sapiens
  misc_RNA (1)...(19): siRNA sense strand
gaacgaucgcuuugaggaa

SEQ ID NO: 460850 - RNA, 19 nt, Homo sapiens
  misc_RNA (1)...(19): siRNA sense strand
ggagaagauuaucaagaag

SEQ ID NO: 460851 - RNA, 19 nt, Homo sapiens
  misc_RNA (1)...(19): siRNA sense strand
gagcucaucagcagcauug

SEQ ID NO: 460852 - RNA, 19 nt, Homo sapiens
  misc_RNA (1)...(19): siRNA sense strand
uacaauggcuccaagaucu

SEQ ID NO: 460853 - RNA, 19 nt, Homo sapiens
  misc_RNA (1)...(19): siRNA sense strand
ugcaucagcuacuuuacua

SEQ ID NO: 460854 - RNA, 19 nt, Homo sapiens
  misc_RNA (1)...(19): siRNA sense strand
gagaagcauccugaguuua

SEQ ID NO: 460855 - RNA, 19 nt, Homo sapiens
  misc_RNA (1)...(19): siRNA sense strand
gagaaccucgcgcuugaaa

SEQ ID NO: 460856 - RNA, 19 nt, Homo sapiens
  misc_RNA (1)...(19): siRNA sense strand
gauaaagccgagcacugua

SEQ ID NO: 460857 - RNA, 19 nt, Homo sapiens
  misc_RNA (1)...(19): siRNA sense strand
gacaaucucuuugcuaucg

SEQ ID NO: 460858 - RNA, 19 nt, Homo sapiens
  misc_RNA (1)...(19): siRNA sense strand
cagauggagucucucauuc

SEQ ID NO: 460859 - RNA, 19 nt, Homo sapiens
  misc_RNA (1)...(19): siRNA sense strand
ccagaaagcguuccacaag

SEQ ID NO: 460860 - RNA, 19 nt, Homo sapiens
  misc_RNA (1)...(19): siRNA sense strand
gcgcugggaugaggccuuu

SEQ ID NO: 460861 - RNA, 19 nt, Homo sapiens
  misc_RNA (1)...(19): siRNA sense strand
caaagaaacaaagaugcua

SEQ ID NO: 460862 - RNA, 19 nt, Homo sapiens
  misc_RNA (1)...(19): siRNA sense strand
gcugaagaauggacagauc

SEQ ID NO: 460863 - RNA, 19 nt, Homo sapiens
  misc_RNA (1)...(19): siRNA sense strand
cgaaaccggauuccaacua

SEQ ID NO: 460864 - RNA, 19 nt, Homo sapiens
  misc_RNA (1)...(19): siRNA sense strand
gaugaggccuuugcuuugg

SEQ ID NO: 460865 - RNA, 19 nt, Homo sapiens
  misc_RNA (1)...(19): siRNA sense strand
caagaccuccgauauuuag

SEQ ID NO: 460866 - RNA, 19 nt, Homo sapiens
  misc_RNA (1)...(19): siRNA sense strand
uggacaaucucuuugcuau

SEQ ID NO: 460867 - RNA, 19 nt, Homo sapiens
  misc_RNA (1)...(19): siRNA sense strand
agaagucugucuccaaaca

SEQ ID NO: 460868 - RNA, 19 nt, Homo sapiens
  misc_RNA (1)...(19): siRNA sense strand
gauggaacucaacugauuu

SEQ ID NO: 460869 - RNA, 19 nt, Homo sapiens
  misc_RNA (1)...(19): siRNA sense strand
gugagaagcauccugaguu

SEQ ID NO: 460870 - RNA, 19 nt, Homo sapiens
  misc_RNA (1)...(19): siRNA sense strand
acaagaccuccgauauuua

SEQ ID NO: 460871 - RNA, 19 nt, Homo sapiens
  misc_RNA (1)...(19): siRNA sense strand
guaaaggagaagauuauca

SEQ ID NO: 460872 - RNA, 19 nt, Homo sapiens
  misc_RNA (1)...(19): siRNA sense strand
ucaaugggaucaucagcau

SEQ ID NO: 460873 - RNA, 19 nt, Homo sapiens
  misc_RNA (1)...(19): siRNA sense strand
ccacgacagugaggaguug

SEQ ID NO: 460874 - RNA, 19 nt, Homo sapiens
  misc_RNA (1)...(19): siRNA sense strand
gcaagguggcucagaguuc

SEQ ID NO: 460875 - RNA, 19 nt, Homo sapiens
  misc_RNA (1)...(19): siRNA sense strand
uccaugggcuuuacaagga

SEQ ID NO: 460876 - RNA, 19 nt, Homo sapiens
  misc_RNA (1)...(19): siRNA sense strand
gaugacagacagcuagaga

SEQ ID NO: 460877 - RNA, 19 nt, Homo sapiens
  misc_RNA (1)...(19): siRNA sense strand
ucgggcaucucuaaaguga

SEQ ID NO: 460878 - RNA, 19 nt, Homo sapiens
  misc_RNA (1)...(19): siRNA sense strand
uaaagccgagcacuguaua

SEQ ID NO: 460879 - RNA, 19 nt, Homo sapiens
  misc_RNA (1)...(19): siRNA sense strand
gugaggacaugcucugcuu

SEQ ID NO: 460880 - RNA, 19 nt, Homo sapiens
  misc_RNA (1)...(19): siRNA sense strand
ggguaaaggagaagauuau

SEQ ID NO: 460881 - RNA, 19 nt, Homo sapiens
  misc_RNA (1)...(19): siRNA sense strand
ccugaucacugagcagaaa

SEQ ID NO: 460882 - RNA, 19 nt, Homo sapiens
  misc_RNA (1)...(19): siRNA sense strand
gaaaucgauuggcuaucca

SEQ ID NO: 460883 - RNA, 19 nt, Homo sapiens
  misc_RNA (1)...(19): siRNA sense strand
ggaagcgcuagaagguuua

SEQ ID NO: 460884 - RNA, 19 nt, Homo sapiens
  misc_RNA (1)...(19): siRNA sense strand
ggcgugaacuggccaugga

SEQ ID NO: 460885 - RNA, 19 nt, Homo sapiens
  misc_RNA (1)...(19): siRNA sense strand
aaggaagccuaccagauug

SEQ ID NO: 460886 - RNA, 19 nt, Homo sapiens
  misc_RNA (1)...(19): siRNA sense strand
gagaagauuaucaagaagu

SEQ ID NO: 460887 - RNA, 19 nt, Homo sapiens
  misc_RNA (1)...(19): siRNA sense strand
gagaaaauccucaucuaug

SEQ ID NO: 460888 - RNA, 19 nt, Homo sapiens
  misc_RNA (1)...(19): siRNA sense strand
acaacccgcugcucaacaa

SEQ ID NO: 460889 - RNA, 19 nt, Homo sapiens
  misc_RNA (1)...(19): siRNA sense strand
gauggagucucucauucgu

SEQ ID NO: 460890 - RNA, 19 nt, Homo sapiens
  misc_RNA (1)...(19): siRNA sense strand
ggaaaggaucgggcacuga

SEQ ID NO: 460891 - RNA, 19 nt, Homo sapiens
  misc_RNA (1)...(19): siRNA sense strand
gaucgggcacugaacuuug

SEQ ID NO: 460892 - RNA, 19 nt, Homo sapiens
  misc_RNA (1)...(19): siRNA sense strand
agaaaguucggauuaaaug

SEQ ID NO: 460893 - RNA, 19 nt, Homo sapiens
  misc_RNA (1)...(19): siRNA sense strand
gaagcauccugaguuuaag

SEQ ID NO: 460894 - RNA, 19 nt, Homo sapiens
  misc_RNA (1)...(19): siRNA sense strand
caccucugauggcaccuua

SEQ ID NO: 460895 - RNA, 19 nt, Homo sapiens
  misc_RNA (1)...(19): siRNA sense strand
uguaugacaucgacaccaa

SEQ ID NO: 460896 - RNA, 19 nt, Homo sapiens
  misc_RNA (1)...(19): siRNA sense strand
gaagcuggccgugguagau

SEQ ID NO: 460897 - RNA, 19 nt, Homo sapiens
  misc_RNA (1)...(19): siRNA sense strand
cuaccuaccucaagaagcu

SEQ ID NO: 460898 - RNA, 19 nt, Homo sapiens
  misc_RNA (1)...(19): siRNA sense strand
ucauggaccuugacuuuga

SEQ ID NO: 460899 - RNA, 19 nt, Homo sapiens
  misc_RNA (1)...(19): siRNA sense strand
gcgacgagguucagauucu

SEQ ID NO: 460900 - RNA, 19 nt, Homo sapiens
  misc_RNA (1)...(19): siRNA sense strand
cagcgacgagguucagauu

SEQ ID NO: 460901 - RNA, 19 nt, Homo sapiens
  misc_RNA (1)...(19): siRNA sense strand
ggacucaugaacucaccaa

SEQ ID NO: 460902 - RNA, 19 nt, Homo sapiens
  misc_RNA (1)...(19): siRNA sense strand
agaguggccugguacacau

SEQ ID NO: 460903 - RNA, 19 nt, Homo sapiens
  misc_RNA (1)...(19): siRNA sense strand
gcgugggacucaugaacuc

SEQ ID NO: 460904 - RNA, 19 nt, Homo sapiens
  misc_RNA (1)...(19): siRNA sense strand
gaagaagccugcugcauaa

SEQ ID NO: 460905 - RNA, 19 nt, Homo sapiens
  misc_RNA (1)...(19): siRNA sense strand
gaaguuagaugaauuguac

SEQ ID NO: 460906 - RNA, 19 nt, Homo sapiens
  misc_RNA (1)...(19): siRNA sense strand
gaccagauauugugaacuu

SEQ ID NO: 460907 - RNA, 19 nt, Homo sapiens
  misc_RNA (1)...(19): siRNA sense strand
gaucuuagcagaaucuuga

SEQ ID NO: 460908 - RNA, 19 nt, Homo sapiens
  misc_RNA (1)...(19): siRNA sense strand
gcagaguccuaaagaagaa

SEQ ID NO: 460909 - RNA, 19 nt, Homo sapiens
  misc_RNA (1)...(19): siRNA sense strand
cuuaaagccuggaaugaua

SEQ ID NO: 460910 - RNA, 19 nt, Homo sapiens
  misc_RNA (1)...(19): siRNA sense strand
agaaacaucccuggaauua

SEQ ID NO: 460911 - RNA, 19 nt, Homo sapiens
  misc_RNA (1)...(19): siRNA sense strand
agaagaagccugcugcaua

SEQ ID NO: 460912 - RNA, 19 nt, Homo sapiens
  misc_RNA (1)...(19): siRNA sense strand
ggacguuucugcauuugga

SEQ ID NO: 460913 - RNA, 19 nt, Homo sapiens
  misc_RNA (1)...(19): siRNA sense strand
guaagcaagcugaacauuu

SEQ ID NO: 460914 - RNA, 19 nt, Homo sapiens
  misc_RNA (1)...(19): siRNA sense strand
agaaucauguugaagcuaa

SEQ ID NO: 460915 - RNA, 19 nt, Homo sapiens
  misc_RNA (1)...(19): siRNA sense strand
ccgcuucccucaagaguaa

SEQ ID NO: 460916 - RNA, 19 nt, Homo sapiens
  misc_RNA (1)...(19): siRNA sense strand
uaagcaagcugaacauuuu

SEQ ID NO: 460917 - RNA, 19 nt, Homo sapiens
  misc_RNA (1)...(19): siRNA sense strand
ggcagcagcuaccaagaaa

SEQ ID NO: 460918 - RNA, 19 nt, Homo sapiens
  misc_RNA (1)...(19): siRNA sense strand
guugaaggcuacaagaaga

SEQ ID NO: 460919 - RNA, 19 nt, Homo sapiens
  misc_RNA (1)...(19): siRNA sense strand
aaacaucccuggaauuacu

SEQ ID NO: 460920 - RNA, 19 nt, Homo sapiens
  misc_RNA (1)...(19): siRNA sense strand
cagcacuggucaugucuaa

SEQ ID NO: 460921 - RNA, 19 nt, Homo sapiens
  misc_RNA (1)...(19): siRNA sense strand
ucagaaacaucccuggaau

SEQ ID NO: 460922 - RNA, 19 nt, Homo sapiens
  misc_RNA (1)...(19): siRNA sense strand
auacagaucuuagcagaau

SEQ ID NO: 460923 - RNA, 19 nt, Homo sapiens
  misc_RNA (1)...(19): siRNA sense strand
gcacuggucaugucuaaag

SEQ ID NO: 460924 - RNA, 19 nt, Homo sapiens
  misc_RNA (1)...(19): siRNA sense strand
uguugaagcuaaacccaua

SEQ ID NO: 460925 - RNA, 19 nt, Homo sapiens
  misc_RNA (1)...(19): siRNA sense strand
ggaaguuagaugaauugua

SEQ ID NO: 460926 - RNA, 19 nt, Homo sapiens
  misc_RNA (1)...(19): siRNA sense strand
uaaagaagaacccacugaa

SEQ ID NO: 460927 - RNA, 19 nt, Homo sapiens
  misc_RNA (1)...(19): siRNA sense strand
gaaucauguugaagcuaaa

SEQ ID NO: 460928 - RNA, 19 nt, Homo sapiens
  misc_RNA (1)...(19): siRNA sense strand
gugggacguuucugcauuu

SEQ ID NO: 460929 - RNA, 19 nt, Homo sapiens
  misc_RNA (1)...(19): siRNA sense strand
aaagaagaacccacugaaa

SEQ ID NO: 460930 - RNA, 19 nt, Homo sapiens
  misc_RNA (1)...(19): siRNA sense strand
gaagcuguuuugcuccuua

SEQ ID NO: 460931 - RNA, 19 nt, Homo sapiens
  misc_RNA (1)...(19): siRNA sense strand
gcccuaugcugucagugaa

SEQ ID NO: 460932 - RNA, 19 nt, Homo sapiens
  misc_RNA (1)...(19): siRNA sense strand
gcuccuauucgaccagaua

SEQ ID NO: 460933 - RNA, 19 nt, Homo sapiens
  misc_RNA (1)...(19): siRNA sense strand
aaacuuaaagccuggaaug

SEQ ID NO: 460934 - RNA, 19 nt, Homo sapiens
  misc_RNA (1)...(19): siRNA sense strand
gaagcuaaacccauaugca

SEQ ID NO: 460935 - RNA, 19 nt, Homo sapiens
  misc_RNA (1)...(19): siRNA sense strand
ucacuuugccugcuguauu

SEQ ID NO: 460936 - RNA, 19 nt, Homo sapiens
  misc_RNA (1)...(19): siRNA sense strand
cagauauugugaacuuugu

SEQ ID NO: 460937 - RNA, 19 nt, Homo sapiens
  misc_RNA (1)...(19): siRNA sense strand
caucaaggccuucagaaac

SEQ ID NO: 460938 - RNA, 19 nt, Homo sapiens
  misc_RNA (1)...(19): siRNA sense strand
ccucaagaguaacuacaau

SEQ ID NO: 460939 - RNA, 19 nt, Homo sapiens
  misc_RNA (1)...(19): siRNA sense strand
gguaguugaagauaaaguu

SEQ ID NO: 460940 - RNA, 19 nt, Homo sapiens
  misc_RNA (1)...(19): siRNA sense strand
gcuaaacccauaugcaaag

SEQ ID NO: 460941 - RNA, 19 nt, Homo sapiens
  misc_RNA (1)...(19): siRNA sense strand
ccagauauugugaacuuug

SEQ ID NO: 460942 - RNA, 19 nt, Homo sapiens
  misc_RNA (1)...(19): siRNA sense strand
caagccaaaucagaugaga

SEQ ID NO: 460943 - RNA, 19 nt, Homo sapiens
  misc_RNA (1)...(19): siRNA sense strand
cuaaagaagaacccacuga

SEQ ID NO: 460944 - RNA, 19 nt, Homo sapiens
  misc_RNA (1)...(19): siRNA sense strand
gagcaccacgcaagaagau

SEQ ID NO: 460945 - RNA, 19 nt, Homo sapiens
  misc_RNA (1)...(19): siRNA sense strand
caucguagagugaacacaa

SEQ ID NO: 460946 - RNA, 19 nt, Homo sapiens
  misc_RNA (1)...(19): siRNA sense strand
cacuuugccugcuguauuc

SEQ ID NO: 460947 - RNA, 19 nt, Homo sapiens
  misc_RNA (1)...(19): siRNA sense strand
aagcuaaacccauaugcaa

SEQ ID NO: 460948 - RNA, 19 nt, Homo sapiens
  misc_RNA (1)...(19): siRNA sense strand
caucgcagaguccuaaaga

SEQ ID NO: 460949 - RNA, 19 nt, Homo sapiens
  misc_RNA (1)...(19): siRNA sense strand
ugcacaagaugauuaauac

SEQ ID NO: 460950 - RNA, 19 nt, Homo sapiens
  misc_RNA (1)...(19): siRNA sense strand
cagaaacaucccuggaauu

SEQ ID NO: 460951 - RNA, 19 nt, Homo sapiens
  misc_RNA (1)...(19): siRNA sense strand
gaagaccaaggaagcuguu

SEQ ID NO: 460952 - RNA, 19 nt, Homo sapiens
  misc_RNA (1)...(19): siRNA sense strand
gcuacaagaagaccaagga

SEQ ID NO: 460953 - RNA, 19 nt, Homo sapiens
  misc_RNA (1)...(19): siRNA sense strand
ugugggacguuucugcauu

SEQ ID NO: 460954 - RNA, 19 nt, Homo sapiens
  misc_RNA (1)...(19): siRNA sense strand
gaaaccagccccugaaaag

SEQ ID NO: 460955 - RNA, 19 nt, Homo sapiens
  misc_RNA (1)...(19): siRNA sense strand
gcacaagaugauuaauaca

SEQ ID NO: 460956 - RNA, 19 nt, Homo sapiens
  misc_RNA (1)...(19): siRNA sense strand
ccuaugcugucagugaauu

SEQ ID NO: 460957 - RNA, 19 nt, Homo sapiens
  misc_RNA (1)...(19): siRNA sense strand
gcucgaauucccagaguuc

SEQ ID NO: 460958 - RNA, 19 nt, Homo sapiens
  misc_RNA (1)...(19): siRNA sense strand
cuaaacccauaugcaaaga

SEQ ID NO: 460959 - RNA, 19 nt, Homo sapiens
  misc_RNA (1)...(19): siRNA sense strand
auucaaggcuccuauucga

SEQ ID NO: 460960 - RNA, 19 nt, Homo sapiens
  misc_RNA (1)...(19): siRNA sense strand
agagugaacacaacccaaa

SEQ ID NO: 460961 - RNA, 19 nt, Homo sapiens
  misc_RNA (1)...(19): siRNA sense strand
guaguugaagauaaaguug

SEQ ID NO: 460962 - RNA, 19 nt, Homo sapiens
  misc_RNA (1)...(19): siRNA sense strand
ucaucaaggccuucagaaa

SEQ ID NO: 460963 - RNA, 19 nt, Homo sapiens
  misc_RNA (1)...(19): siRNA sense strand
gcgaaugagagcuggcaaa

SEQ ID NO: 460964 - RNA, 19 nt, Homo sapiens
  misc_RNA (1)...(19): siRNA sense strand
ccuauucgaccagauauug

SEQ ID NO: 460965 - RNA, 19 nt, Homo sapiens
  misc_RNA (1)...(19): siRNA sense strand
gcccacugauaucggugua

SEQ ID NO: 460966 - RNA, 19 nt, Homo sapiens
  misc_RNA (1)...(19): siRNA sense strand
cuacaagccaaaucagaug

SEQ ID NO: 460967 - RNA, 19 nt, Homo sapiens
  misc_RNA (1)...(19): siRNA sense strand
gagaaucauguugaagcua

SEQ ID NO: 460968 - RNA, 19 nt, Homo sapiens
  misc_RNA (1)...(19): siRNA sense strand
aaacuugagaaucauguug

SEQ ID NO: 460969 - RNA, 19 nt, Homo sapiens
  misc_RNA (1)...(19): siRNA sense strand
ccaugcacaagaugauuaa

SEQ ID NO: 460970 - RNA, 19 nt, Homo sapiens
  misc_RNA (1)...(19): siRNA sense strand
agccuggaaugauaucaaa

SEQ ID NO: 460971 - RNA, 19 nt, Homo sapiens
  misc_RNA (1)...(19): siRNA sense strand
cccaugcacaagaugauua

SEQ ID NO: 460972 - RNA, 19 nt, Homo sapiens
  misc_RNA (1)...(19): siRNA sense strand
gaaacaucccuggaauuac

SEQ ID NO: 460973 - RNA, 19 nt, Homo sapiens
  misc_RNA (1)...(19): siRNA sense strand
cuacuacagaggagaagaa

SEQ ID NO: 460974 - RNA, 19 nt, Homo sapiens
  misc_RNA (1)...(19): siRNA sense strand
cacaagcuccggguggaua

SEQ ID NO: 460975 - RNA, 19 nt, Homo sapiens
  misc_RNA (1)...(19): siRNA sense strand
caacagacagcccuaugcu

SEQ ID NO: 460976 - RNA, 19 nt, Homo sapiens
  misc_RNA (1)...(19): siRNA sense strand
gagaagaagccugcugcau

SEQ ID NO: 460977 - RNA, 19 nt, Homo sapiens
  misc_RNA (1)...(19): siRNA sense strand
aagaagaacccacugaaaa

SEQ ID NO: 460978 - RNA, 19 nt, Homo sapiens
  misc_RNA (1)...(19): siRNA sense strand
ccacugauaucgguguacu

SEQ ID NO: 460979 - RNA, 19 nt, Homo sapiens
  misc_RNA (1)...(19): siRNA sense strand
gaaacuuaaagccuggaau

SEQ ID NO: 460980 - RNA, 19 nt, Homo sapiens
  misc_RNA (1)...(19): siRNA sense strand
uccggaaguuagaugaauu

SEQ ID NO: 460981 - RNA, 19 nt, Homo sapiens
  misc_RNA (1)...(19): siRNA sense strand
gcaaaggcaaaaugagaaa

SEQ ID NO: 460982 - RNA, 19 nt, Homo sapiens
  misc_RNA (1)...(19): siRNA sense strand
ugagaaucauguugaagcu

SEQ ID NO: 460983 - RNA, 19 nt, Homo sapiens
  misc_RNA (1)...(19): siRNA sense strand
acuacaaucuucccaugca

SEQ ID NO: 460984 - RNA, 19 nt, Homo sapiens
  misc_RNA (1)...(19): siRNA sense strand
ucaagaguaacuacaaucu

SEQ ID NO: 460985 - RNA, 19 nt, Homo sapiens
  misc_RNA (1)...(19): siRNA sense strand
guauucaaggcuccuauuc

SEQ ID NO: 460986 - RNA, 19 nt, Homo sapiens
  misc_RNA (1)...(19): siRNA sense strand
ccuggaauuacucugcuua

SEQ ID NO: 460987 - RNA, 19 nt, Homo sapiens
  misc_RNA (1)...(19): siRNA sense strand
aucaaggccuucagaaaca

SEQ ID NO: 460988 - RNA, 19 nt, Homo sapiens
  misc_RNA (1)...(19): siRNA sense strand
uaucaucaaggccuucaga

SEQ ID NO: 460989 - RNA, 19 nt, Homo sapiens
  misc_RNA (1)...(19): siRNA sense strand
aaaguugaaggcuacaaga

SEQ ID NO: 460990 - RNA, 19 nt, Homo sapiens
  misc_RNA (1)...(19): siRNA sense strand
uaaaguugaaggcuacaag

SEQ ID NO: 460991 - RNA, 19 nt, Homo sapiens
  misc_RNA (1)...(19): siRNA sense strand
ugugguagguaagaaagga

SEQ ID NO: 460992 - RNA, 19 nt, Homo sapiens
  misc_RNA (1)...(19): siRNA sense strand
uuaaagccuggaaugauau

SEQ ID NO: 460993 - RNA, 19 nt, Homo sapiens
  misc_RNA (1)...(19): siRNA sense strand
cgaaugagagcuggcaaag

SEQ ID NO: 460994 - RNA, 19 nt, Homo sapiens
  misc_RNA (1)...(19): siRNA sense strand
cgcagaguccuaaagaaga

SEQ ID NO: 460995 - RNA, 19 nt, Homo sapiens
  misc_RNA (1)...(19): siRNA sense strand
gaugaauuguacggcacuu

SEQ ID NO: 460996 - RNA, 19 nt, Homo sapiens
  misc_RNA (1)...(19): siRNA sense strand
gugggcaugugggacguuu

SEQ ID NO: 460997 - RNA, 19 nt, Homo sapiens
  misc_RNA (1)...(19): siRNA sense strand
cuuugguaguugaagauaa

SEQ ID NO: 460998 - RNA, 19 nt, Homo sapiens
  misc_RNA (1)...(19): siRNA sense strand
gcacuacaagccaaaucag

SEQ ID NO: 460999 - RNA, 19 nt, Homo sapiens
  misc_RNA (1)...(19): siRNA sense strand
ggcacuacaagccaaauca

SEQ ID NO: 461000 - RNA, 19 nt, Homo sapiens
  misc_RNA (1)...(19): siRNA sense strand
ucgcagaguccuaaagaag

SEQ ID NO: 461001 - RNA, 19 nt, Homo sapiens
  misc_RNA (1)...(19): siRNA sense strand
cuacaagaagaccaaggaa

SEQ ID NO: 461002 - RNA, 19 nt, Homo sapiens
  misc_RNA (1)...(19): siRNA sense strand
gcucuggccagggugcuuu

SEQ ID NO: 461003 - RNA, 19 nt, Homo sapiens
  misc_RNA (1)...(19): siRNA sense strand
gaagucaucugucauuaaa

SEQ ID NO: 461004 - RNA, 19 nt, Homo sapiens
  misc_RNA (1)...(19): siRNA sense strand
gaagagaaguccaacagaa

SEQ ID NO: 461005 - RNA, 19 nt, Homo sapiens
  misc_RNA (1)...(19): siRNA sense strand
gaaguucuguccucgguua

SEQ ID NO: 461006 - RNA, 19 nt, Homo sapiens
  misc_RNA (1)...(19): siRNA sense strand
cuacggagauggaugauaa

SEQ ID NO: 461007 - RNA, 19 nt, Homo sapiens
  misc_RNA (1)...(19): siRNA sense strand
gcagugauaguauggauua

SEQ ID NO: 461008 - RNA, 19 nt, Homo sapiens
  misc_RNA (1)...(19): siRNA sense strand
ggaagcgccuggaagauga

SEQ ID NO: 461009 - RNA, 19 nt, Homo sapiens
  misc_RNA (1)...(19): siRNA sense strand
caagugcccuucugcauga

SEQ ID NO: 461010 - RNA, 19 nt, Homo sapiens
  misc_RNA (1)...(19): siRNA sense strand
ggacagacgucaggcagaa

SEQ ID NO: 461011 - RNA, 19 nt, Homo sapiens
  misc_RNA (1)...(19): siRNA sense strand
caaaaugccugaugaugua

SEQ ID NO: 461012 - RNA, 19 nt, Homo sapiens
  misc_RNA (1)...(19): siRNA sense strand
aaacacagcccaacaguga

SEQ ID NO: 461013 - RNA, 19 nt, Homo sapiens
  misc_RNA (1)...(19): siRNA sense strand
gaaaucugcuacuccguau

SEQ ID NO: 461014 - RNA, 19 nt, Homo sapiens
  misc_RNA (1)...(19): siRNA sense strand
ucagugaaaugaugaaaug

SEQ ID NO: 461015 - RNA, 19 nt, Homo sapiens
  misc_RNA (1)...(19): siRNA sense strand
cgauauggcaucuguguua

SEQ ID NO: 461016 - RNA, 19 nt, Homo sapiens
  misc_RNA (1)...(19): siRNA sense strand
gugauaguauggauuauga

SEQ ID NO: 461017 - RNA, 19 nt, Homo sapiens
  misc_RNA (1)...(19): siRNA sense strand
gaugauaguggcagugaua

SEQ ID NO: 461018 - RNA, 19 nt, Homo sapiens
  misc_RNA (1)...(19): siRNA sense strand
ccacugcgcuccagcucua

SEQ ID NO: 461019 - RNA, 19 nt, Homo sapiens
  misc_RNA (1)...(19): siRNA sense strand
gugaaaugaugaaauguga

SEQ ID NO: 461020 - RNA, 19 nt, Homo sapiens
  misc_RNA (1)...(19): siRNA sense strand
ggacagcaauagggugauu

SEQ ID NO: 461021 - RNA, 19 nt, Homo sapiens
  misc_RNA (1)...(19): siRNA sense strand
gcaaaucaaugaggugcuu

SEQ ID NO: 461022 - RNA, 19 nt, Homo sapiens
  misc_RNA (1)...(19): siRNA sense strand
caccagaaguuuaaaggaa

SEQ ID NO: 461023 - RNA, 19 nt, Homo sapiens
  misc_RNA (1)...(19): siRNA sense strand
gauauggcaucuguguuaa

SEQ ID NO: 461024 - RNA, 19 nt, Homo sapiens
  misc_RNA (1)...(19): siRNA sense strand
uauuaugucucuucucgua

SEQ ID NO: 461025 - RNA, 19 nt, Homo sapiens
  misc_RNA (1)...(19): siRNA sense strand
caacagaaaguguaaauac

SEQ ID NO: 461026 - RNA, 19 nt, Homo sapiens
  misc_RNA (1)...(19): siRNA sense strand
caagcuggcuccuuucuag

SEQ ID NO: 461027 - RNA, 19 nt, Homo sapiens
  misc_RNA (1)...(19): siRNA sense strand
gugcuaaccugcauucugu

SEQ ID NO: 461028 - RNA, 19 nt, Homo sapiens
  misc_RNA (1)...(19): siRNA sense strand
gauaguggcagugauagua

SEQ ID NO: 461029 - RNA, 19 nt, Homo sapiens
  misc_RNA (1)...(19): siRNA sense strand
guacguggcugcaguucau

SEQ ID NO: 461030 - RNA, 19 nt, Homo sapiens
  misc_RNA (1)...(19): siRNA sense strand
ucaaauucaugcacaauca

SEQ ID NO: 461031 - RNA, 19 nt, Homo sapiens
  misc_RNA (1)...(19): siRNA sense strand
agacccagcucaacaaguu

SEQ ID NO: 461032 - RNA, 19 nt, Homo sapiens
  misc_RNA (1)...(19): siRNA sense strand
ccagcgagguggagauuga

SEQ ID NO: 461033 - RNA, 19 nt, Homo sapiens
  misc_RNA (1)...(19): siRNA sense strand
gagcuguacuacuguguga

SEQ ID NO: 461034 - RNA, 19 nt, Homo sapiens
  misc_RNA (1)...(19): siRNA sense strand
guacaugcagggacagaua

SEQ ID NO: 461035 - RNA, 19 nt, Homo sapiens
  misc_RNA (1)...(19): siRNA sense strand
gaagcagacauuuguggua

SEQ ID NO: 461036 - RNA, 19 nt, Homo sapiens
  misc_RNA (1)...(19): siRNA sense strand
gcucugaccuuugcucuuc

SEQ ID NO: 461037 - RNA, 19 nt, Homo sapiens
  misc_RNA (1)...(19): siRNA sense strand
gagaagggauggguaugga

SEQ ID NO: 461038 - RNA, 19 nt, Homo sapiens
  misc_RNA (1)...(19): siRNA sense strand
ugaauuggguggcgaguuc

SEQ ID NO: 461039 - RNA, 19 nt, Homo sapiens
  misc_RNA (1)...(19): siRNA sense strand
agacgaagguguugugcuu

SEQ ID NO: 461040 - RNA, 19 nt, Homo sapiens
  misc_RNA (1)...(19): siRNA sense strand
ugaagaagcagacauuugu

SEQ ID NO: 461041 - RNA, 19 nt, Homo sapiens
  misc_RNA (1)...(19): siRNA sense strand
gaagggaucaaccucaaau

SEQ ID NO: 461042 - RNA, 19 nt, Homo sapiens
  misc_RNA (1)...(19): siRNA sense strand
gcaugagccuucgggauga

SEQ ID NO: 461043 - RNA, 19 nt, Homo sapiens
  misc_RNA (1)...(19): siRNA sense strand
ggaucaaccucaaauucau

SEQ ID NO: 461044 - RNA, 19 nt, Homo sapiens
  misc_RNA (1)...(19): siRNA sense strand
gaaaugaugaaaugugaca

SEQ ID NO: 461045 - RNA, 19 nt, Homo sapiens
  misc_RNA (1)...(19): siRNA sense strand
cagaaucacuagagcugaa

SEQ ID NO: 461046 - RNA, 19 nt, Homo sapiens
  misc_RNA (1)...(19): siRNA sense strand
gcaucuguguuaacuucua

SEQ ID NO: 461047 - RNA, 19 nt, Homo sapiens
  misc_RNA (1)...(19): siRNA sense strand
acacuggagucacgcgaua

SEQ ID NO: 461048 - RNA, 19 nt, Homo sapiens
  misc_RNA (1)...(19): siRNA sense strand
ggcccagacuccugaauug

SEQ ID NO: 461049 - RNA, 19 nt, Homo sapiens
  misc_RNA (1)...(19): siRNA sense strand
ggacugaucaagacucugu

SEQ ID NO: 461050 - RNA, 19 nt, Homo sapiens
  misc_RNA (1)...(19): siRNA sense strand
aguaccagcuucagucuuu

SEQ ID NO: 461051 - RNA, 19 nt, Homo sapiens
  misc_RNA (1)...(19): siRNA sense strand
gcaugaccuucgagagauu

SEQ ID NO: 461052 - RNA, 19 nt, Homo sapiens
  misc_RNA (1)...(19): siRNA sense strand
aaucugcuacuccguauua

SEQ ID NO: 461053 - RNA, 19 nt, Homo sapiens
  misc_RNA (1)...(19): siRNA sense strand
gcccagacccacuacuaua

SEQ ID NO: 461054 - RNA, 19 nt, Homo sapiens
  misc_RNA (1)...(19): siRNA sense strand
cagggucgauccagcaauu

SEQ ID NO: 461055 - RNA, 19 nt, Homo sapiens
  misc_RNA (1)...(19): siRNA sense strand
gaaaagagaaccuccauca

SEQ ID NO: 461056 - RNA, 19 nt, Homo sapiens
  misc_RNA (1)...(19): siRNA sense strand
gauucacccuaguggauuu

SEQ ID NO: 461057 - RNA, 19 nt, Homo sapiens
  misc_RNA (1)...(19): siRNA sense strand
ccagacuccugaauugcua

SEQ ID NO: 461058 - RNA, 19 nt, Homo sapiens
  misc_RNA (1)...(19): siRNA sense strand
agaaugacauccgcaagaa

SEQ ID NO: 461059 - RNA, 19 nt, Homo sapiens
  misc_RNA (1)...(19): siRNA sense strand
cuucuuagaugcugugaug

SEQ ID NO: 461060 - RNA, 19 nt, Homo sapiens
  misc_RNA (1)...(19): siRNA sense strand
gagcagcaaugcaggugau

SEQ ID NO: 461061 - RNA, 19 nt, Homo sapiens
  misc_RNA (1)...(19): siRNA sense strand
gauucaagcucuucuuacu

SEQ ID NO: 461062 - RNA, 19 nt, Homo sapiens
  misc_RNA (1)...(19): siRNA sense strand
ccaacgugcugcagggauu

SEQ ID NO: 461063 - RNA, 19 nt, Homo sapiens
  misc_RNA (1)...(19): siRNA sense strand
ccuggaagaugaugaagau

SEQ ID NO: 461064 - RNA, 19 nt, Homo sapiens
  misc_RNA (1)...(19): siRNA sense strand
gaaguaaucaaaccugucu

SEQ ID NO: 461065 - RNA, 19 nt, Homo sapiens
  misc_RNA (1)...(19): siRNA sense strand
gaagaggguggcacugaga

SEQ ID NO: 461066 - RNA, 19 nt, Homo sapiens
  misc_RNA (1)...(19): siRNA sense strand
caucaaacccggaccugaa

SEQ ID NO: 461067 - RNA, 19 nt, Homo sapiens
  misc_RNA (1)...(19): siRNA sense strand
acgagaagcucaucaacau

SEQ ID NO: 461068 - RNA, 19 nt, Homo sapiens
  misc_RNA (1)...(19): siRNA sense strand
ccagaggacugaucaagac

SEQ ID NO: 461069 - RNA, 19 nt, Homo sapiens
  misc_RNA (1)...(19): siRNA sense strand
ggugugagccugacgucua

SEQ ID NO: 461070 - RNA, 19 nt, Homo sapiens
  misc_RNA (1)...(19): siRNA sense strand
guacaaagggacaccaugu

SEQ ID NO: 461071 - RNA, 19 nt, Homo sapiens
  misc_RNA (1)...(19): siRNA sense strand
ggagggcguuaguggauca

SEQ ID NO: 461072 - RNA, 19 nt, Homo sapiens
  misc_RNA (1)...(19): siRNA sense strand
gggaucaaccucaaauuca

SEQ ID NO: 461073 - RNA, 19 nt, Homo sapiens
  misc_RNA (1)...(19): siRNA sense strand
gaugauaccucuuuugucu

SEQ ID NO: 461074 - RNA, 19 nt, Homo sapiens
  misc_RNA (1)...(19): siRNA sense strand
gaguccagcuguuaugauc

SEQ ID NO: 461075 - RNA, 19 nt, Homo sapiens
  misc_RNA (1)...(19): siRNA sense strand
ccagccagcucugaccuuu

SEQ ID NO: 461076 - RNA, 19 nt, Homo sapiens
  misc_RNA (1)...(19): siRNA sense strand
uaacaucggaacaguguau

SEQ ID NO: 461077 - RNA, 19 nt, Homo sapiens
  misc_RNA (1)...(19): siRNA sense strand
caaaggcuauggcacaacu

SEQ ID NO: 461078 - RNA, 19 nt, Homo sapiens
  misc_RNA (1)...(19): siRNA sense strand
ggaagagaaguccaacaga

SEQ ID NO: 461079 - RNA, 19 nt, Homo sapiens
  misc_RNA (1)...(19): siRNA sense strand
gguguacaagggaauguua

SEQ ID NO: 461080 - RNA, 19 nt, Homo sapiens
  misc_RNA (1)...(19): siRNA sense strand
ccacggagccaacucugaa

SEQ ID NO: 461081 - RNA, 19 nt, Homo sapiens
  misc_RNA (1)...(19): siRNA sense strand
uugacgagcugcagaauca

SEQ ID NO: 461082 - RNA, 19 nt, Homo sapiens
  misc_RNA (1)...(19): siRNA sense strand
gaauucaacccacucaucu

SEQ ID NO: 461083 - RNA, 19 nt, Homo sapiens
  misc_RNA (1)...(19): siRNA sense strand
cucaacaaguucuauacua

SEQ ID NO: 461084 - RNA, 19 nt, Homo sapiens
  misc_RNA (1)...(19): siRNA sense strand
gaaggugaggcgccuaaug

SEQ ID NO: 461085 - RNA, 19 nt, Homo sapiens
  misc_RNA (1)...(19): siRNA sense strand
aggaaaugaucgacaggua

SEQ ID NO: 461086 - RNA, 19 nt, Homo sapiens
  misc_RNA (1)...(19): siRNA sense strand
ccagaaguuuaaaggaaga

SEQ ID NO: 461087 - RNA, 19 nt, Homo sapiens
  misc_RNA (1)...(19): siRNA sense strand
gccagcaucuuugggcuuu

SEQ ID NO: 461088 - RNA, 19 nt, Homo sapiens
  misc_RNA (1)...(19): siRNA sense strand
guacaguccucagcuugga

SEQ ID NO: 461089 - RNA, 19 nt, Homo sapiens
  misc_RNA (1)...(19): siRNA sense strand
gugacaagccaaaguggua

SEQ ID NO: 461090 - RNA, 19 nt, Homo sapiens
  misc_RNA (1)...(19): siRNA sense strand
uggcggaucuuuacuggau

SEQ ID NO: 461091 - RNA, 19 nt, Homo sapiens
  misc_RNA (1)...(19): siRNA sense strand
gaagguaaauaagaaugac

SEQ ID NO: 461092 - RNA, 19 nt, Homo sapiens
  misc_RNA (1)...(19): siRNA sense strand
uggcaucuguguuaacuuc

SEQ ID NO: 461093 - RNA, 19 nt, Homo sapiens
  misc_RNA (1)...(19): siRNA sense strand
uguuagaccuccucaagug

SEQ ID NO: 461094 - RNA, 19 nt, Homo sapiens
  misc_RNA (1)...(19): siRNA sense strand
ccagacccaucucgauuca

SEQ ID NO: 461095 - RNA, 19 nt, Homo sapiens
  misc_RNA (1)...(19): siRNA sense strand
gucgggagcuguacuacug

SEQ ID NO: 461096 - RNA, 19 nt, Homo sapiens
  misc_RNA (1)...(19): siRNA sense strand
guaguaacaucggaacagu

SEQ ID NO: 461097 - RNA, 19 nt, Homo sapiens
  misc_RNA (1)...(19): siRNA sense strand
cgaauucacaacaauaugu

SEQ ID NO: 461098 - RNA, 19 nt, Homo sapiens
  misc_RNA (1)...(19): siRNA sense strand
cagcgaauucacaacaaua

SEQ ID NO: 461099 - RNA, 19 nt, Homo sapiens
  misc_RNA (1)...(19): siRNA sense strand
ucuacaaacuggacuucaa

SEQ ID NO: 461100 - RNA, 19 nt, Homo sapiens
  misc_RNA (1)...(19): siRNA sense strand
uacaaacggagauaucuuu

SEQ ID NO: 461101 - RNA, 19 nt, Homo sapiens
  misc_RNA (1)...(19): siRNA sense strand
ggaagggaucaaccucaaa

SEQ ID NO: 461102 - RNA, 19 nt, Homo sapiens
  misc_RNA (1)...(19): siRNA sense strand
ugugugguguugcguagua

SEQ ID NO: 461103 - RNA, 19 nt, Homo sapiens
  misc_RNA (1)...(19): siRNA sense strand
gaagucaucugucauuaaa

SEQ ID NO: 461104 - RNA, 19 nt, Homo sapiens
  misc_RNA (1)...(19): siRNA sense strand
gaagagaaguccaacagaa

SEQ ID NO: 461105 - RNA, 19 nt, Homo sapiens
  misc_RNA (1)...(19): siRNA sense strand
gaaguucuguccucgguua

SEQ ID NO: 461106 - RNA, 19 nt, Homo sapiens
  misc_RNA (1)...(19): siRNA sense strand
cuacggagauggaugauaa

SEQ ID NO: 461107 - RNA, 19 nt, Homo sapiens
  misc_RNA (1)...(19): siRNA sense strand
gcagugauaguauggauua

SEQ ID NO: 461108 - RNA, 19 nt, Homo sapiens
  misc_RNA (1)...(19): siRNA sense strand
ggaagcgccuggaagauga

SEQ ID NO: 461109 - RNA, 19 nt, Homo sapiens
  misc_RNA (1)...(19): siRNA sense strand
caagugcccuucugcauga

SEQ ID NO: 461110 - RNA, 19 nt, Homo sapiens
  misc_RNA (1)...(19): siRNA sense strand
ggacagacgucaggcagaa

SEQ ID NO: 461111 - RNA, 19 nt, Homo sapiens
  misc_RNA (1)...(19): siRNA sense strand
caaaaugccugaugaugua

SEQ ID NO: 461112 - RNA, 19 nt, Homo sapiens
  misc_RNA (1)...(19): siRNA sense strand
aaacacagcccaacaguga

SEQ ID NO: 461113 - RNA, 19 nt, Homo sapiens
  misc_RNA (1)...(19): siRNA sense strand
gaaaucugcuacuccguau

SEQ ID NO: 461114 - RNA, 19 nt, Homo sapiens
  misc_RNA (1)...(19): siRNA sense strand
ucagugaaaugaugaaaug

SEQ ID NO: 461115 - RNA, 19 nt, Homo sapiens
  misc_RNA (1)...(19): siRNA sense strand
cgauauggcaucuguguua

SEQ ID NO: 461116 - RNA, 19 nt, Homo sapiens
  misc_RNA (1)...(19): siRNA sense strand
gugauaguauggauuauga

SEQ ID NO: 461117 - RNA, 19 nt, Homo sapiens
  misc_RNA (1)...(19): siRNA sense strand
gaugauaguggcagugaua

SEQ ID NO: 461118 - RNA, 19 nt, Homo sapiens
  misc_RNA (1)...(19): siRNA sense strand
ccacugcgcuccagcucua

SEQ ID NO: 461119 - RNA, 19 nt, Homo sapiens
  misc_RNA (1)...(19): siRNA sense strand
gugaaaugaugaaauguga

SEQ ID NO: 461120 - RNA, 19 nt, Homo sapiens
  misc_RNA (1)...(19): siRNA sense strand
ggacagcaauagggugauu

SEQ ID NO: 461121 - RNA, 19 nt, Homo sapiens
  misc_RNA (1)...(19): siRNA sense strand
gcaaaucaaugaggugcuu

SEQ ID NO: 461122 - RNA, 19 nt, Homo sapiens
  misc_RNA (1)...(19): siRNA sense strand
caccagaaguuuaaaggaa

SEQ ID NO: 461123 - RNA, 19 nt, Homo sapiens
  misc_RNA (1)...(19): siRNA sense strand
gauauggcaucuguguuaa

SEQ ID NO: 461124 - RNA, 19 nt, Homo sapiens
  misc_RNA (1)...(19): siRNA sense strand
uauuaugucucuucucgua

SEQ ID NO: 461125 - RNA, 19 nt, Homo sapiens
  misc_RNA (1)...(19): siRNA sense strand
caacagaaaguguaaauac

SEQ ID NO: 461126 - RNA, 19 nt, Homo sapiens
  misc_RNA (1)...(19): siRNA sense strand
caagcuggcuccuuucuag

SEQ ID NO: 461127 - RNA, 19 nt, Homo sapiens
  misc_RNA (1)...(19): siRNA sense strand
gugcuaaccugcauucugu

SEQ ID NO: 461128 - RNA, 19 nt, Homo sapiens
  misc_RNA (1)...(19): siRNA sense strand
gauaguggcagugauagua

SEQ ID NO: 461129 - RNA, 19 nt, Homo sapiens
  misc_RNA (1)...(19): siRNA sense strand
guacguggcugcaguucau

SEQ ID NO: 461130 - RNA, 19 nt, Homo sapiens
  misc_RNA (1)...(19): siRNA sense strand
ucaaauucaugcacaauca

SEQ ID NO: 461131 - RNA, 19 nt, Homo sapiens
  misc_RNA (1)...(19): siRNA sense strand
agacccagcucaacaaguu

SEQ ID NO: 461132 - RNA, 19 nt, Homo sapiens
  misc_RNA (1)...(19): siRNA sense strand
ccagcgagguggagauuga

SEQ ID NO: 461133 - RNA, 19 nt, Homo sapiens
  misc_RNA (1)...(19): siRNA sense strand
gagcuguacuacuguguga

SEQ ID NO: 461134 - RNA, 19 nt, Homo sapiens
  misc_RNA (1)...(19): siRNA sense strand
guacaugcagggacagaua

SEQ ID NO: 461135 - RNA, 19 nt, Homo sapiens
  misc_RNA (1)...(19): siRNA sense strand
gaagcagacauuuguggua

SEQ ID NO: 461136 - RNA, 19 nt, Homo sapiens
  misc_RNA (1)...(19): siRNA sense strand
gcucugaccuuugcucuuc

SEQ ID NO: 461137 - RNA, 19 nt, Homo sapiens
  misc_RNA (1)...(19): siRNA sense strand
gagaagggauggguaugga

SEQ ID NO: 461138 - RNA, 19 nt, Homo sapiens
  misc_RNA (1)...(19): siRNA sense strand
ugaauuggguggcgaguuc

SEQ ID NO: 461139 - RNA, 19 nt, Homo sapiens
  misc_RNA (1)...(19): siRNA sense strand
agacgaagguguugugcuu

SEQ ID NO: 461140 - RNA, 19 nt, Homo sapiens
  misc_RNA (1)...(19): siRNA sense strand
ugaagaagcagacauuugu

SEQ ID NO: 461141 - RNA, 19 nt, Homo sapiens
  misc_RNA (1)...(19): siRNA sense strand
gaagggaucaaccucaaau

SEQ ID NO: 461142 - RNA, 19 nt, Homo sapiens
  misc_RNA (1)...(19): siRNA sense strand
gcaugagccuucgggauga

SEQ ID NO: 461143 - RNA, 19 nt, Homo sapiens
  misc_RNA (1)...(19): siRNA sense strand
ggaucaaccucaaauucau

SEQ ID NO: 461144 - RNA, 19 nt, Homo sapiens
  misc_RNA (1)...(19): siRNA sense strand
gaaaugaugaaaugugaca

SEQ ID NO: 461145 - RNA, 19 nt, Homo sapiens
  misc_RNA (1)...(19): siRNA sense strand
cagaaucacuagagcugaa

SEQ ID NO: 461146 - RNA, 19 nt, Homo sapiens
  misc_RNA (1)...(19): siRNA sense strand
gcaucuguguuaacuucua

SEQ ID NO: 461147 - RNA, 19 nt, Homo sapiens
  misc_RNA (1)...(19): siRNA sense strand
acacuggagucacgcgaua

SEQ ID NO: 461148 - RNA, 19 nt, Homo sapiens
  misc_RNA (1)...(19): siRNA sense strand
ggcccagacuccugaauug

SEQ ID NO: 461149 - RNA, 19 nt, Homo sapiens
  misc_RNA (1)...(19): siRNA sense strand
ggacugaucaagacucugu

SEQ ID NO: 461150 - RNA, 19 nt, Homo sapiens
  misc_RNA (1)...(19): siRNA sense strand
aguaccagcuucagucuuu

SEQ ID NO: 461151 - RNA, 19 nt, Homo sapiens
  misc_RNA (1)...(19): siRNA sense strand
gcaugaccuucgagagauu

SEQ ID NO: 461152 - RNA, 19 nt, Homo sapiens
  misc_RNA (1)...(19): siRNA sense strand
aaucugcuacuccguauua

SEQ ID NO: 461153 - RNA, 19 nt, Homo sapiens
  misc_RNA (1)...(19): siRNA sense strand
gcccagacccacuacuaua

SEQ ID NO: 461154 - RNA, 19 nt, Homo sapiens
  misc_RNA (1)...(19): siRNA sense strand
cagggucgauccagcaauu

SEQ ID NO: 461155 - RNA, 19 nt, Homo sapiens
  misc_RNA (1)...(19): siRNA sense strand
gaaaagagaaccuccauca

SEQ ID NO: 461156 - RNA, 19 nt, Homo sapiens
  misc_RNA (1)...(19): siRNA sense strand
gauucacccuaguggauuu

SEQ ID NO: 461157 - RNA, 19 nt, Homo sapiens
  misc_RNA (1)...(19): siRNA sense strand
ccagacuccugaauugcua

SEQ ID NO: 461158 - RNA, 19 nt, Homo sapiens
  misc_RNA (1)...(19): siRNA sense strand
agaaugacauccgcaagaa

SEQ ID NO: 461159 - RNA, 19 nt, Homo sapiens
  misc_RNA (1)...(19): siRNA sense strand
cuucuuagaugcugugaug

SEQ ID NO: 461160 - RNA, 19 nt, Homo sapiens
  misc_RNA (1)...(19): siRNA sense strand
gagcagcaaugcaggugau

SEQ ID NO: 461161 - RNA, 19 nt, Homo sapiens
  misc_RNA (1)...(19): siRNA sense strand
gauucaagcucuucuuacu

SEQ ID NO: 461162 - RNA, 19 nt, Homo sapiens
  misc_RNA (1)...(19): siRNA sense strand
ccaacgugcugcagggauu

SEQ ID NO: 461163 - RNA, 19 nt, Homo sapiens
  misc_RNA (1)...(19): siRNA sense strand
ccuggaagaugaugaagau

SEQ ID NO: 461164 - RNA, 19 nt, Homo sapiens
  misc_RNA (1)...(19): siRNA sense strand
gaaguaaucaaaccugucu

SEQ ID NO: 461165 - RNA, 19 nt, Homo sapiens
  misc_RNA (1)...(19): siRNA sense strand
gaagaggguggcacugaga

SEQ ID NO: 461166 - RNA, 19 nt, Homo sapiens
  misc_RNA (1)...(19): siRNA sense strand
caucaaacccggaccugaa

SEQ ID NO: 461167 - RNA, 19 nt, Homo sapiens
  misc_RNA (1)...(19): siRNA sense strand
acgagaagcucaucaacau

SEQ ID NO: 461168 - RNA, 19 nt, Homo sapiens
  misc_RNA (1)...(19): siRNA sense strand
ccagaggacugaucaagac

SEQ ID NO: 461169 - RNA, 19 nt, Homo sapiens
  misc_RNA (1)...(19): siRNA sense strand
ggugugagccugacgucua

SEQ ID NO: 461170 - RNA, 19 nt, Homo sapiens
  misc_RNA (1)...(19): siRNA sense strand
guacaaagggacaccaugu

SEQ ID NO: 461171 - RNA, 19 nt, Homo sapiens
  misc_RNA (1)...(19): siRNA sense strand
ggagggcguuaguggauca

SEQ ID NO: 461172 - RNA, 19 nt, Homo sapiens
  misc_RNA (1)...(19): siRNA sense strand
gggaucaaccucaaauuca

SEQ ID NO: 461173 - RNA, 19 nt, Homo sapiens
  misc_RNA (1)...(19): siRNA sense strand
gaugauaccucuuuugucu

SEQ ID NO: 461174 - RNA, 19 nt, Homo sapiens
  misc_RNA (1)...(19): siRNA sense strand
gaguccagcuguuaugauc

SEQ ID NO: 461175 - RNA, 19 nt, Homo sapiens
  misc_RNA (1)...(19): siRNA sense strand
ccagccagcucugaccuuu

SEQ ID NO: 461176 - RNA, 19 nt, Homo sapiens
  misc_RNA (1)...(19): siRNA sense strand
uaacaucggaacaguguau

SEQ ID NO: 461177 - RNA, 19 nt, Homo sapiens
  misc_RNA (1)...(19): siRNA sense strand
caaaggcuauggcacaacu

SEQ ID NO: 461178 - RNA, 19 nt, Homo sapiens
  misc_RNA (1)...(19): siRNA sense strand
ggaagagaaguccaacaga

SEQ ID NO: 461179 - RNA, 19 nt, Homo sapiens
  misc_RNA (1)...(19): siRNA sense strand
gguguacaagggaauguua

SEQ ID NO: 461180 - RNA, 19 nt, Homo sapiens
  misc_RNA (1)...(19): siRNA sense strand
ccacggagccaacucugaa

SEQ ID NO: 461181 - RNA, 19 nt, Homo sapiens
  misc_RNA (1)...(19): siRNA sense strand
uugacgagcugcagaauca

SEQ ID NO: 461182 - RNA, 19 nt, Homo sapiens
  misc_RNA (1)...(19): siRNA sense strand
gaauucaacccacucaucu

SEQ ID NO: 461183 - RNA, 19 nt, Homo sapiens
  misc_RNA (1)...(19): siRNA sense strand
cucaacaaguucuauacua

SEQ ID NO: 461184 - RNA, 19 nt, Homo sapiens
  misc_RNA (1)...(19): siRNA sense strand
gaaggugaggcgccuaaug

SEQ ID NO: 461185 - RNA, 19 nt, Homo sapiens
  misc_RNA (1)...(19): siRNA sense strand
aggaaaugaucgacaggua

SEQ ID NO: 461186 - RNA, 19 nt, Homo sapiens
  misc_RNA (1)...(19): siRNA sense strand
ccagaaguuuaaaggaaga

SEQ ID NO: 461187 - RNA, 19 nt, Homo sapiens
  misc_RNA (1)...(19): siRNA sense strand
gccagcaucuuugggcuuu

SEQ ID NO: 461188 - RNA, 19 nt, Homo sapiens
  misc_RNA (1)...(19): siRNA sense strand
guacaguccucagcuugga

SEQ ID NO: 461189 - RNA, 19 nt, Homo sapiens
  misc_RNA (1)...(19): siRNA sense strand
gugacaagccaaaguggua

SEQ ID NO: 461190 - RNA, 19 nt, Homo sapiens
  misc_RNA (1)...(19): siRNA sense strand
uggcggaucuuuacuggau

SEQ ID NO: 461191 - RNA, 19 nt, Homo sapiens
  misc_RNA (1)...(19): siRNA sense strand
gaagguaaauaagaaugac

SEQ ID NO: 461192 - RNA, 19 nt, Homo sapiens
  misc_RNA (1)...(19): siRNA sense strand
uggcaucuguguuaacuuc

SEQ ID NO: 461193 - RNA, 19 nt, Homo sapiens
  misc_RNA (1)...(19): siRNA sense strand
uguuagaccuccucaagug

SEQ ID NO: 461194 - RNA, 19 nt, Homo sapiens
  misc_RNA (1)...(19): siRNA sense strand
ccagacccaucucgauuca

SEQ ID NO: 461195 - RNA, 19 nt, Homo sapiens
  misc_RNA (1)...(19): siRNA sense strand
gucgggagcuguacuacug

SEQ ID NO: 461196 - RNA, 19 nt, Homo sapiens
  misc_RNA (1)...(19): siRNA sense strand
guaguaacaucggaacagu

SEQ ID NO: 461197 - RNA, 19 nt, Homo sapiens
  misc_RNA (1)...(19): siRNA sense strand
cgaauucacaacaauaugu

SEQ ID NO: 461198 - RNA, 19 nt, Homo sapiens
  misc_RNA (1)...(19): siRNA sense strand
cagcgaauucacaacaaua

SEQ ID NO: 461199 - RNA, 19 nt, Homo sapiens
  misc_RNA (1)...(19): siRNA sense strand
ucuacaaacuggacuucaa

SEQ ID NO: 461200 - RNA, 19 nt, Homo sapiens
  misc_RNA (1)...(19): siRNA sense strand
uacaaacggagauaucuuu

SEQ ID NO: 461201 - RNA, 19 nt, Homo sapiens
  misc_RNA (1)...(19): siRNA sense strand
ggaagggaucaaccucaaa

SEQ ID NO: 461202 - RNA, 19 nt, Homo sapiens
  misc_RNA (1)...(19): siRNA sense strand
ugugugguguugcguagua

SEQ ID NO: 461203 - RNA, 19 nt, Homo sapiens
  misc_RNA (1)...(19): siRNA sense strand
gaagucaucugucauuaaa

SEQ ID NO: 461204 - RNA, 19 nt, Homo sapiens
  misc_RNA (1)...(19): siRNA sense strand
gaagagaaguccaacagaa

SEQ ID NO: 461205 - RNA, 19 nt, Homo sapiens
  misc_RNA (1)...(19): siRNA sense strand
gaaguucuguccucgguua

SEQ ID NO: 461206 - RNA, 19 nt, Homo sapiens
  misc_RNA (1)...(19): siRNA sense strand
cuacggagauggaugauaa

SEQ ID NO: 461207 - RNA, 19 nt, Homo sapiens
  misc_RNA (1)...(19): siRNA sense strand
gcagugauaguauggauua

SEQ ID NO: 461208 - RNA, 19 nt, Homo sapiens
  misc_RNA (1)...(19): siRNA sense strand
ggaagcgccuggaagauga

SEQ ID NO: 461209 - RNA, 19 nt, Homo sapiens
  misc_RNA (1)...(19): siRNA sense strand
caagugcccuucugcauga

SEQ ID NO: 461210 - RNA, 19 nt, Homo sapiens
  misc_RNA (1)...(19): siRNA sense strand
ggacagacgucaggcagaa

SEQ ID NO: 461211 - RNA, 19 nt, Homo sapiens
  misc_RNA (1)...(19): siRNA sense strand
caaaaugccugaugaugua

SEQ ID NO: 461212 - RNA, 19 nt, Homo sapiens
  misc_RNA (1)...(19): siRNA sense strand
aaacacagcccaacaguga

SEQ ID NO: 461213 - RNA, 19 nt, Homo sapiens
  misc_RNA (1)...(19): siRNA sense strand
gaaaucugcuacuccguau

SEQ ID NO: 461214 - RNA, 19 nt, Homo sapiens
  misc_RNA (1)...(19): siRNA sense strand
ucagugaaaugaugaaaug

SEQ ID NO: 461215 - RNA, 19 nt, Homo sapiens
  misc_RNA (1)...(19): siRNA sense strand
cgauauggcaucuguguua

SEQ ID NO: 461216 - RNA, 19 nt, Homo sapiens
  misc_RNA (1)...(19): siRNA sense strand
gugauaguauggauuauga

SEQ ID NO: 461217 - RNA, 19 nt, Homo sapiens
  misc_RNA (1)...(19): siRNA sense strand
gaugauaguggcagugaua

SEQ ID NO: 461218 - RNA, 19 nt, Homo sapiens
  misc_RNA (1)...(19): siRNA sense strand
ccacugcgcuccagcucua

SEQ ID NO: 461219 - RNA, 19 nt, Homo sapiens
  misc_RNA (1)...(19): siRNA sense strand
gugaaaugaugaaauguga

SEQ ID NO: 461220 - RNA, 19 nt, Homo sapiens
  misc_RNA (1)...(19): siRNA sense strand
ggacagcaauagggugauu

SEQ ID NO: 461221 - RNA, 19 nt, Homo sapiens
  misc_RNA (1)...(19): siRNA sense strand
gcaaaucaaugaggugcuu

SEQ ID NO: 461222 - RNA, 19 nt, Homo sapiens
  misc_RNA (1)...(19): siRNA sense strand
caccagaaguuuaaaggaa

SEQ ID NO: 461223 - RNA, 19 nt, Homo sapiens
  misc_RNA (1)...(19): siRNA sense strand
gauauggcaucuguguuaa

SEQ ID NO: 461224 - RNA, 19 nt, Homo sapiens
  misc_RNA (1)...(19): siRNA sense strand
uauuaugucucuucucgua

SEQ ID NO: 461225 - RNA, 19 nt, Homo sapiens
  misc_RNA (1)...(19): siRNA sense strand
caacagaaaguguaaauac

SEQ ID NO: 461226 - RNA, 19 nt, Homo sapiens
  misc_RNA (1)...(19): siRNA sense strand
caagcuggcuccuuucuag

SEQ ID NO: 461227 - RNA, 19 nt, Homo sapiens
  misc_RNA (1)...(19): siRNA sense strand
gugcuaaccugcauucugu

SEQ ID NO: 461228 - RNA, 19 nt, Homo sapiens
  misc_RNA (1)...(19): siRNA sense strand
gauaguggcagugauagua

SEQ ID NO: 461229 - RNA, 19 nt, Homo sapiens
  misc_RNA (1)...(19): siRNA sense strand
guacguggcugcaguucau

SEQ ID NO: 461230 - RNA, 19 nt, Homo sapiens
  misc_RNA (1)...(19): siRNA sense strand
ucaaauucaugcacaauca

SEQ ID NO: 461231 - RNA, 19 nt, Homo sapiens
  misc_RNA (1)...(19): siRNA sense strand
agacccagcucaacaaguu

SEQ ID NO: 461232 - RNA, 19 nt, Homo sapiens
  misc_RNA (1)...(19): siRNA sense strand
ccagcgagguggagauuga

SEQ ID NO: 461233 - RNA, 19 nt, Homo sapiens
  misc_RNA (1)...(19): siRNA sense strand
gagcuguacuacuguguga

SEQ ID NO: 461234 - RNA, 19 nt, Homo sapiens
  misc_RNA (1)...(19): siRNA sense strand
guacaugcagggacagaua

SEQ ID NO: 461235 - RNA, 19 nt, Homo sapiens
  misc_RNA (1)...(19): siRNA sense strand
gaagcagacauuuguggua

SEQ ID NO: 461236 - RNA, 19 nt, Homo sapiens
  misc_RNA (1)...(19): siRNA sense strand
gcucugaccuuugcucuuc

SEQ ID NO: 461237 - RNA, 19 nt, Homo sapiens
  misc_RNA (1)...(19): siRNA sense strand
gagaagggauggguaugga

SEQ ID NO: 461238 - RNA, 19 nt, Homo sapiens
  misc_RNA (1)...(19): siRNA sense strand
ugaauuggguggcgaguuc

SEQ ID NO: 461239 - RNA, 19 nt, Homo sapiens
  misc_RNA (1)...(19): siRNA sense strand
agacgaagguguugugcuu

SEQ ID NO: 461240 - RNA, 19 nt, Homo sapiens
  misc_RNA (1)...(19): siRNA sense strand
ugaagaagcagacauuugu

SEQ ID NO: 461241 - RNA, 19 nt, Homo sapiens
  misc_RNA (1)...(19): siRNA sense strand
gaagggaucaaccucaaau

SEQ ID NO: 461242 - RNA, 19 nt, Homo sapiens
  misc_RNA (1)...(19): siRNA sense strand
gcaugagccuucgggauga

SEQ ID NO: 461243 - RNA, 19 nt, Homo sapiens
  misc_RNA (1)...(19): siRNA sense strand
ggaucaaccucaaauucau

SEQ ID NO: 461244 - RNA, 19 nt, Homo sapiens
  misc_RNA (1)...(19): siRNA sense strand
gaaaugaugaaaugugaca

SEQ ID NO: 461245 - RNA, 19 nt, Homo sapiens
  misc_RNA (1)...(19): siRNA sense strand
cagaaucacuagagcugaa

SEQ ID NO: 461246 - RNA, 19 nt, Homo sapiens
  misc_RNA (1)...(19): siRNA sense strand
gcaucuguguuaacuucua

SEQ ID NO: 461247 - RNA, 19 nt, Homo sapiens
  misc_RNA (1)...(19): siRNA sense strand
acacuggagucacgcgaua

SEQ ID NO: 461248 - RNA, 19 nt, Homo sapiens
  misc_RNA (1)...(19): siRNA sense strand
ggcccagacuccugaauug

SEQ ID NO: 461249 - RNA, 19 nt, Homo sapiens
  misc_RNA (1)...(19): siRNA sense strand
ggacugaucaagacucugu

SEQ ID NO: 461250 - RNA, 19 nt, Homo sapiens
  misc_RNA (1)...(19): siRNA sense strand
aguaccagcuucagucuuu

SEQ ID NO: 461251 - RNA, 19 nt, Homo sapiens
  misc_RNA (1)...(19): siRNA sense strand
gcaugaccuucgagagauu

SEQ ID NO: 461252 - RNA, 19 nt, Homo sapiens
  misc_RNA (1)...(19): siRNA sense strand
aaucugcuacuccguauua

SEQ ID NO: 461253 - RNA, 19 nt, Homo sapiens
  misc_RNA (1)...(19): siRNA sense strand
gcccagacccacuacuaua

SEQ ID NO: 461254 - RNA, 19 nt, Homo sapiens
  misc_RNA (1)...(19): siRNA sense strand
cagggucgauccagcaauu

SEQ ID NO: 461255 - RNA, 19 nt, Homo sapiens
  misc_RNA (1)...(19): siRNA sense strand
gaaaagagaaccuccauca

SEQ ID NO: 461256 - RNA, 19 nt, Homo sapiens
  misc_RNA (1)...(19): siRNA sense strand
gauucacccuaguggauuu

SEQ ID NO: 461257 - RNA, 19 nt, Homo sapiens
  misc_RNA (1)...(19): siRNA sense strand
ccagacuccugaauugcua

SEQ ID NO: 461258 - RNA, 19 nt, Homo sapiens
  misc_RNA (1)...(19): siRNA sense strand
agaaugacauccgcaagaa

SEQ ID NO: 461259 - RNA, 19 nt, Homo sapiens
  misc_RNA (1)...(19): siRNA sense strand
cuucuuagaugcugugaug

SEQ ID NO: 461260 - RNA, 19 nt, Homo sapiens
  misc_RNA (1)...(19): siRNA sense strand
gagcagcaaugcaggugau

SEQ ID NO: 461261 - RNA, 19 nt, Homo sapiens
  misc_RNA (1)...(19): siRNA sense strand
gauucaagcucuucuuacu

SEQ ID NO: 461262 - RNA, 19 nt, Homo sapiens
  misc_RNA (1)...(19): siRNA sense strand
ccaacgugcugcagggauu

SEQ ID NO: 461263 - RNA, 19 nt, Homo sapiens
  misc_RNA (1)...(19): siRNA sense strand
ccuggaagaugaugaagau

SEQ ID NO: 461264 - RNA, 19 nt, Homo sapiens
  misc_RNA (1)...(19): siRNA sense strand
gaaguaaucaaaccugucu

SEQ ID NO: 461265 - RNA, 19 nt, Homo sapiens
  misc_RNA (1)...(19): siRNA sense strand
gaagaggguggcacugaga

SEQ ID NO: 461266 - RNA, 19 nt, Homo sapiens
  misc_RNA (1)...(19): siRNA sense strand
caucaaacccggaccugaa

SEQ ID NO: 461267 - RNA, 19 nt, Homo sapiens
  misc_RNA (1)...(19): siRNA sense strand
acgagaagcucaucaacau

SEQ ID NO: 461268 - RNA, 19 nt, Homo sapiens
  misc_RNA (1)...(19): siRNA sense strand
ccagaggacugaucaagac

SEQ ID NO: 461269 - RNA, 19 nt, Homo sapiens
  misc_RNA (1)...(19): siRNA sense strand
ggugugagccugacgucua

SEQ ID NO: 461270 - RNA, 19 nt, Homo sapiens
  misc_RNA (1)...(19): siRNA sense strand
guacaaagggacaccaugu

SEQ ID NO: 461271 - RNA, 19 nt, Homo sapiens
  misc_RNA (1)...(19): siRNA sense strand
ggagggcguuaguggauca

SEQ ID NO: 461272 - RNA, 19 nt, Homo sapiens
  misc_RNA (1)...(19): siRNA sense strand
gggaucaaccucaaauuca

SEQ ID NO: 461273 - RNA, 19 nt, Homo sapiens
  misc_RNA (1)...(19): siRNA sense strand
gaugauaccucuuuugucu

SEQ ID NO: 461274 - RNA, 19 nt, Homo sapiens
  misc_RNA (1)...(19): siRNA sense strand
gaguccagcuguuaugauc

SEQ ID NO: 461275 - RNA, 19 nt, Homo sapiens
  misc_RNA (1)...(19): siRNA sense strand
ccagccagcucugaccuuu

SEQ ID NO: 461276 - RNA, 19 nt, Homo sapiens
  misc_RNA (1)...(19): siRNA sense strand
uaacaucggaacaguguau

SEQ ID NO: 461277 - RNA, 19 nt, Homo sapiens
  misc_RNA (1)...(19): siRNA sense strand
caaaggcuauggcacaacu

SEQ ID NO: 461278 - RNA, 19 nt, Homo sapiens
  misc_RNA (1)...(19): siRNA sense strand
ggaagagaaguccaacaga

SEQ ID NO: 461279 - RNA, 19 nt, Homo sapiens
  misc_RNA (1)...(19): siRNA sense strand
gguguacaagggaauguua

SEQ ID NO: 461280 - RNA, 19 nt, Homo sapiens
  misc_RNA (1)...(19): siRNA sense strand
ccacggagccaacucugaa

SEQ ID NO: 461281 - RNA, 19 nt, Homo sapiens
  misc_RNA (1)...(19): siRNA sense strand
uugacgagcugcagaauca

SEQ ID NO: 461282 - RNA, 19 nt, Homo sapiens
  misc_RNA (1)...(19): siRNA sense strand
gaauucaacccacucaucu

SEQ ID NO: 461283 - RNA, 19 nt, Homo sapiens
  misc_RNA (1)...(19): siRNA sense strand
cucaacaaguucuauacua

SEQ ID NO: 461284 - RNA, 19 nt, Homo sapiens
  misc_RNA (1)...(19): siRNA sense strand
gaaggugaggcgccuaaug

SEQ ID NO: 461285 - RNA, 19 nt, Homo sapiens
  misc_RNA (1)...(19): siRNA sense strand
aggaaaugaucgacaggua

SEQ ID NO: 461286 - RNA, 19 nt, Homo sapiens
  misc_RNA (1)...(19): siRNA sense strand
ccagaaguuuaaaggaaga

SEQ ID NO: 461287 - RNA, 19 nt, Homo sapiens
  misc_RNA (1)...(19): siRNA sense strand
gccagcaucuuugggcuuu

SEQ ID NO: 461288 - RNA, 19 nt, Homo sapiens
  misc_RNA (1)...(19): siRNA sense strand
guacaguccucagcuugga

SEQ ID NO: 461289 - RNA, 19 nt, Homo sapiens
  misc_RNA (1)...(19): siRNA sense strand
gugacaagccaaaguggua

SEQ ID NO: 461290 - RNA, 19 nt, Homo sapiens
  misc_RNA (1)...(19): siRNA sense strand
uggcggaucuuuacuggau

SEQ ID NO: 461291 - RNA, 19 nt, Homo sapiens
  misc_RNA (1)...(19): siRNA sense strand
gaagguaaauaagaaugac

SEQ ID NO: 461292 - RNA, 19 nt, Homo sapiens
  misc_RNA (1)...(19): siRNA sense strand
uggcaucuguguuaacuuc

SEQ ID NO: 461293 - RNA, 19 nt, Homo sapiens
  misc_RNA (1)...(19): siRNA sense strand
uguuagaccuccucaagug

SEQ ID NO: 461294 - RNA, 19 nt, Homo sapiens
  misc_RNA (1)...(19): siRNA sense strand
ccagacccaucucgauuca

SEQ ID NO: 461295 - RNA, 19 nt, Homo sapiens
  misc_RNA (1)...(19): siRNA sense strand
gucgggagcuguacuacug

SEQ ID NO: 461296 - RNA, 19 nt, Homo sapiens
  misc_RNA (1)...(19): siRNA sense strand
guaguaacaucggaacagu

SEQ ID NO: 461297 - RNA, 19 nt, Homo sapiens
  misc_RNA (1)...(19): siRNA sense strand
cgaauucacaacaauaugu

SEQ ID NO: 461298 - RNA, 19 nt, Homo sapiens
  misc_RNA (1)...(19): siRNA sense strand
cagcgaauucacaacaaua

SEQ ID NO: 461299 - RNA, 19 nt, Homo sapiens
  misc_RNA (1)...(19): siRNA sense strand
ucuacaaacuggacuucaa

SEQ ID NO: 461300 - RNA, 19 nt, Homo sapiens
  misc_RNA (1)...(19): siRNA sense strand
uacaaacggagauaucuuu

SEQ ID NO: 461301 - RNA, 19 nt, Homo sapiens
  misc_RNA (1)...(19): siRNA sense strand
ggaagggaucaaccucaaa

SEQ ID NO: 461302 - RNA, 19 nt, Homo sapiens
  misc_RNA (1)...(19): siRNA sense strand
ugugugguguugcguagua

SEQ ID NO: 461303 - RNA, 19 nt, Homo sapiens
  misc_RNA (1)...(19): siRNA sense strand
gaagucaucugucauuaaa

SEQ ID NO: 461304 - RNA, 19 nt, Homo sapiens
  misc_RNA (1)...(19): siRNA sense strand
gaagagaaguccaacagaa

SEQ ID NO: 461305 - RNA, 19 nt, Homo sapiens
  misc_RNA (1)...(19): siRNA sense strand
gaaguucuguccucgguua

SEQ ID NO: 461306 - RNA, 19 nt, Homo sapiens
  misc_RNA (1)...(19): siRNA sense strand
cuacggagauggaugauaa

SEQ ID NO: 461307 - RNA, 19 nt, Homo sapiens
  misc_RNA (1)...(19): siRNA sense strand
gcagugauaguauggauua

SEQ ID NO: 461308 - RNA, 19 nt, Homo sapiens
  misc_RNA (1)...(19): siRNA sense strand
ggaagcgccuggaagauga

SEQ ID NO: 461309 - RNA, 19 nt, Homo sapiens
  misc_RNA (1)...(19): siRNA sense strand
caagugcccuucugcauga

SEQ ID NO: 461310 - RNA, 19 nt, Homo sapiens
  misc_RNA (1)...(19): siRNA sense strand
ggacagacgucaggcagaa

SEQ ID NO: 461311 - RNA, 19 nt, Homo sapiens
  misc_RNA (1)...(19): siRNA sense strand
caaaaugccugaugaugua

SEQ ID NO: 461312 - RNA, 19 nt, Homo sapiens
  misc_RNA (1)...(19): siRNA sense strand
aaacacagcccaacaguga

SEQ ID NO: 461313 - RNA, 19 nt, Homo sapiens
  misc_RNA (1)...(19): siRNA sense strand
gaaaucugcuacuccguau

SEQ ID NO: 461314 - RNA, 19 nt, Homo sapiens
  misc_RNA (1)...(19): siRNA sense strand
ucagugaaaugaugaaaug

SEQ ID NO: 461315 - RNA, 19 nt, Homo sapiens
  misc_RNA (1)...(19): siRNA sense strand
cgauauggcaucuguguua

SEQ ID NO: 461316 - RNA, 19 nt, Homo sapiens
  misc_RNA (1)...(19): siRNA sense strand
gugauaguauggauuauga

SEQ ID NO: 461317 - RNA, 19 nt, Homo sapiens
  misc_RNA (1)...(19): siRNA sense strand
gaugauaguggcagugaua

SEQ ID NO: 461318 - RNA, 19 nt, Homo sapiens
  misc_RNA (1)...(19): siRNA sense strand
ccacugcgcuccagcucua

SEQ ID NO: 461319 - RNA, 19 nt, Homo sapiens
  misc_RNA (1)...(19): siRNA sense strand
gugaaaugaugaaauguga

SEQ ID NO: 461320 - RNA, 19 nt, Homo sapiens
  misc_RNA (1)...(19): siRNA sense strand
ggacagcaauagggugauu

SEQ ID NO: 461321 - RNA, 19 nt, Homo sapiens
  misc_RNA (1)...(19): siRNA sense strand
gcaaaucaaugaggugcuu

SEQ ID NO: 461322 - RNA, 19 nt, Homo sapiens
  misc_RNA (1)...(19): siRNA sense strand
caccagaaguuuaaaggaa

SEQ ID NO: 461323 - RNA, 19 nt, Homo sapiens
  misc_RNA (1)...(19): siRNA sense strand
gauauggcaucuguguuaa

SEQ ID NO: 461324 - RNA, 19 nt, Homo sapiens
  misc_RNA (1)...(19): siRNA sense strand
uauuaugucucuucucgua

SEQ ID NO: 461325 - RNA, 19 nt, Homo sapiens
  misc_RNA (1)...(19): siRNA sense strand
caacagaaaguguaaauac

SEQ ID NO: 461326 - RNA, 19 nt, Homo sapiens
  misc_RNA (1)...(19): siRNA sense strand
caagcuggcuccuuucuag

SEQ ID NO: 461327 - RNA, 19 nt, Homo sapiens
  misc_RNA (1)...(19): siRNA sense strand
gugcuaaccugcauucugu

SEQ ID NO: 461328 - RNA, 19 nt, Homo sapiens
  misc_RNA (1)...(19): siRNA sense strand
gauaguggcagugauagua

SEQ ID NO: 461329 - RNA, 19 nt, Homo sapiens
  misc_RNA (1)...(19): siRNA sense strand
guacguggcugcaguucau

SEQ ID NO: 461330 - RNA, 19 nt, Homo sapiens
  misc_RNA (1)...(19): siRNA sense strand
ucaaauucaugcacaauca

SEQ ID NO: 461331 - RNA, 19 nt, Homo sapiens
  misc_RNA (1)...(19): siRNA sense strand
agacccagcucaacaaguu

SEQ ID NO: 461332 - RNA, 19 nt, Homo sapiens
  misc_RNA (1)...(19): siRNA sense strand
ccagcgagguggagauuga

SEQ ID NO: 461333 - RNA, 19 nt, Homo sapiens
  misc_RNA (1)...(19): siRNA sense strand
gagcuguacuacuguguga

SEQ ID NO: 461334 - RNA, 19 nt, Homo sapiens
  misc_RNA (1)...(19): siRNA sense strand
guacaugcagggacagaua

SEQ ID NO: 461335 - RNA, 19 nt, Homo sapiens
  misc_RNA (1)...(19): siRNA sense strand
gaagcagacauuuguggua

SEQ ID NO: 461336 - RNA, 19 nt, Homo sapiens
  misc_RNA (1)...(19): siRNA sense strand
gcucugaccuuugcucuuc

SEQ ID NO: 461337 - RNA, 19 nt, Homo sapiens
  misc_RNA (1)...(19): siRNA sense strand
gagaagggauggguaugga

SEQ ID NO: 461338 - RNA, 19 nt, Homo sapiens
  misc_RNA (1)...(19): siRNA sense strand
ugaauuggguggcgaguuc

SEQ ID NO: 461339 - RNA, 19 nt, Homo sapiens
  misc_RNA (1)...(19): siRNA sense strand
agacgaagguguugugcuu

SEQ ID NO: 461340 - RNA, 19 nt, Homo sapiens
  misc_RNA (1)...(19): siRNA sense strand
ugaagaagcagacauuugu

SEQ ID NO: 461341 - RNA, 19 nt, Homo sapiens
  misc_RNA (1)...(19): siRNA sense strand
gaagggaucaaccucaaau

SEQ ID NO: 461342 - RNA, 19 nt, Homo sapiens
  misc_RNA (1)...(19): siRNA sense strand
gcaugagccuucgggauga

SEQ ID NO: 461343 - RNA, 19 nt, Homo sapiens
  misc_RNA (1)...(19): siRNA sense strand
ggaucaaccucaaauucau

SEQ ID NO: 461344 - RNA, 19 nt, Homo sapiens
  misc_RNA (1)...(19): siRNA sense strand
gaaaugaugaaaugugaca

SEQ ID NO: 461345 - RNA, 19 nt, Homo sapiens
  misc_RNA (1)...(19): siRNA sense strand
cagaaucacuagagcugaa

SEQ ID NO: 461346 - RNA, 19 nt, Homo sapiens
  misc_RNA (1)...(19): siRNA sense strand
gcaucuguguuaacuucua

SEQ ID NO: 461347 - RNA, 19 nt, Homo sapiens
  misc_RNA (1)...(19): siRNA sense strand
acacuggagucacgcgaua

SEQ ID NO: 461348 - RNA, 19 nt, Homo sapiens
  misc_RNA (1)...(19): siRNA sense strand
ggcccagacuccugaauug

SEQ ID NO: 461349 - RNA, 19 nt, Homo sapiens
  misc_RNA (1)...(19): siRNA sense strand
ggacugaucaagacucugu

SEQ ID NO: 461350 - RNA, 19 nt, Homo sapiens
  misc_RNA (1)...(19): siRNA sense strand
aguaccagcuucagucuuu

SEQ ID NO: 461351 - RNA, 19 nt, Homo sapiens
  misc_RNA (1)...(19): siRNA sense strand
gcaugaccuucgagagauu

SEQ ID NO: 461352 - RNA, 19 nt, Homo sapiens
  misc_RNA (1)...(19): siRNA sense strand
aaucugcuacuccguauua

SEQ ID NO: 461353 - RNA, 19 nt, Homo sapiens
  misc_RNA (1)...(19): siRNA sense strand
gcccagacccacuacuaua

SEQ ID NO: 461354 - RNA, 19 nt, Homo sapiens
  misc_RNA (1)...(19): siRNA sense strand
cagggucgauccagcaauu

SEQ ID NO: 461355 - RNA, 19 nt, Homo sapiens
  misc_RNA (1)...(19): siRNA sense strand
gaaaagagaaccuccauca

SEQ ID NO: 461356 - RNA, 19 nt, Homo sapiens
  misc_RNA (1)...(19): siRNA sense strand
gauucacccuaguggauuu

SEQ ID NO: 461357 - RNA, 19 nt, Homo sapiens
  misc_RNA (1)...(19): siRNA sense strand
ccagacuccugaauugcua

SEQ ID NO: 461358 - RNA, 19 nt, Homo sapiens
  misc_RNA (1)...(19): siRNA sense strand
agaaugacauccgcaagaa

SEQ ID NO: 461359 - RNA, 19 nt, Homo sapiens
  misc_RNA (1)...(19): siRNA sense strand
cuucuuagaugcugugaug

SEQ ID NO: 461360 - RNA, 19 nt, Homo sapiens
  misc_RNA (1)...(19): siRNA sense strand
gagcagcaaugcaggugau

SEQ ID NO: 461361 - RNA, 19 nt, Homo sapiens
  misc_RNA (1)...(19): siRNA sense strand
gauucaagcucuucuuacu

SEQ ID NO: 461362 - RNA, 19 nt, Homo sapiens
  misc_RNA (1)...(19): siRNA sense strand
ccaacgugcugcagggauu

SEQ ID NO: 461363 - RNA, 19 nt, Homo sapiens
  misc_RNA (1)...(19): siRNA sense strand
ccuggaagaugaugaagau

SEQ ID NO: 461364 - RNA, 19 nt, Homo sapiens
  misc_RNA (1)...(19): siRNA sense strand
gaaguaaucaaaccugucu

SEQ ID NO: 461365 - RNA, 19 nt, Homo sapiens
  misc_RNA (1)...(19): siRNA sense strand
gaagaggguggcacugaga

SEQ ID NO: 461366 - RNA, 19 nt, Homo sapiens
  misc_RNA (1)...(19): siRNA sense strand
caucaaacccggaccugaa

SEQ ID NO: 461367 - RNA, 19 nt, Homo sapiens
  misc_RNA (1)...(19): siRNA sense strand
acgagaagcucaucaacau

SEQ ID NO: 461368 - RNA, 19 nt, Homo sapiens
  misc_RNA (1)...(19): siRNA sense strand
ccagaggacugaucaagac

SEQ ID NO: 461369 - RNA, 19 nt, Homo sapiens
  misc_RNA (1)...(19): siRNA sense strand
ggugugagccugacgucua

SEQ ID NO: 461370 - RNA, 19 nt, Homo sapiens
  misc_RNA (1)...(19): siRNA sense strand
guacaaagggacaccaugu

SEQ ID NO: 461371 - RNA, 19 nt, Homo sapiens
  misc_RNA (1)...(19): siRNA sense strand
ggagggcguuaguggauca

SEQ ID NO: 461372 - RNA, 19 nt, Homo sapiens
  misc_RNA (1)...(19): siRNA sense strand
gggaucaaccucaaauuca

SEQ ID NO: 461373 - RNA, 19 nt, Homo sapiens
  misc_RNA (1)...(19): siRNA sense strand
gaugauaccucuuuugucu

SEQ ID NO: 461374 - RNA, 19 nt, Homo sapiens
  misc_RNA (1)...(19): siRNA sense strand
gaguccagcuguuaugauc

SEQ ID NO: 461375 - RNA, 19 nt, Homo sapiens
  misc_RNA (1)...(19): siRNA sense strand
ccagccagcucugaccuuu

SEQ ID NO: 461376 - RNA, 19 nt, Homo sapiens
  misc_RNA (1)...(19): siRNA sense strand
uaacaucggaacaguguau

SEQ ID NO: 461377 - RNA, 19 nt, Homo sapiens
  misc_RNA (1)...(19): siRNA sense strand
caaaggcuauggcacaacu

SEQ ID NO: 461378 - RNA, 19 nt, Homo sapiens
  misc_RNA (1)...(19): siRNA sense strand
ggaagagaaguccaacaga

SEQ ID NO: 461379 - RNA, 19 nt, Homo sapiens
  misc_RNA (1)...(19): siRNA sense strand
gguguacaagggaauguua

SEQ ID NO: 461380 - RNA, 19 nt, Homo sapiens
  misc_RNA (1)...(19): siRNA sense strand
ccacggagccaacucugaa

SEQ ID NO: 461381 - RNA, 19 nt, Homo sapiens
  misc_RNA (1)...(19): siRNA sense strand
uugacgagcugcagaauca

SEQ ID NO: 461382 - RNA, 19 nt, Homo sapiens
  misc_RNA (1)...(19): siRNA sense strand
gaauucaacccacucaucu

SEQ ID NO: 461383 - RNA, 19 nt, Homo sapiens
  misc_RNA (1)...(19): siRNA sense strand
cucaacaaguucuauacua

SEQ ID NO: 461384 - RNA, 19 nt, Homo sapiens
  misc_RNA (1)...(19): siRNA sense strand
gaaggugaggcgccuaaug

SEQ ID NO: 461385 - RNA, 19 nt, Homo sapiens
  misc_RNA (1)...(19): siRNA sense strand
aggaaaugaucgacaggua

SEQ ID NO: 461386 - RNA, 19 nt, Homo sapiens
  misc_RNA (1)...(19): siRNA sense strand
ccagaaguuuaaaggaaga

SEQ ID NO: 461387 - RNA, 19 nt, Homo sapiens
  misc_RNA (1)...(19): siRNA sense strand
gccagcaucuuugggcuuu

SEQ ID NO: 461388 - RNA, 19 nt, Homo sapiens
  misc_RNA (1)...(19): siRNA sense strand
guacaguccucagcuugga

SEQ ID NO: 461389 - RNA, 19 nt, Homo sapiens
  misc_RNA (1)...(19): siRNA sense strand
gugacaagccaaaguggua

SEQ ID NO: 461390 - RNA, 19 nt, Homo sapiens
  misc_RNA (1)...(19): siRNA sense strand
uggcggaucuuuacuggau

SEQ ID NO: 461391 - RNA, 19 nt, Homo sapiens
  misc_RNA (1)...(19): siRNA sense strand
gaagguaaauaagaaugac

SEQ ID NO: 461392 - RNA, 19 nt, Homo sapiens
  misc_RNA (1)...(19): siRNA sense strand
uggcaucuguguuaacuuc

SEQ ID NO: 461393 - RNA, 19 nt, Homo sapiens
  misc_RNA (1)...(19): siRNA sense strand
uguuagaccuccucaagug

SEQ ID NO: 461394 - RNA, 19 nt, Homo sapiens
  misc_RNA (1)...(19): siRNA sense strand
ccagacccaucucgauuca

SEQ ID NO: 461395 - RNA, 19 nt, Homo sapiens
  misc_RNA (1)...(19): siRNA sense strand
gucgggagcuguacuacug

SEQ ID NO: 461396 - RNA, 19 nt, Homo sapiens
  misc_RNA (1)...(19): siRNA sense strand
guaguaacaucggaacagu

SEQ ID NO: 461397 - RNA, 19 nt, Homo sapiens
  misc_RNA (1)...(19): siRNA sense strand
cgaauucacaacaauaugu

SEQ ID NO: 461398 - RNA, 19 nt, Homo sapiens
  misc_RNA (1)...(19): siRNA sense strand
cagcgaauucacaacaaua

SEQ ID NO: 461399 - RNA, 19 nt, Homo sapiens
  misc_RNA (1)...(19): siRNA sense strand
ucuacaaacuggacuucaa

SEQ ID NO: 461400 - RNA, 19 nt, Homo sapiens
  misc_RNA (1)...(19): siRNA sense strand
uacaaacggagauaucuuu

SEQ ID NO: 461401 - RNA, 19 nt, Homo sapiens
  misc_RNA (1)...(19): siRNA sense strand
ggaagggaucaaccucaaa

SEQ ID NO: 461402 - RNA, 19 nt, Homo sapiens
  misc_RNA (1)...(19): siRNA sense strand
ugugugguguugcguagua

SEQ ID NO: 461403 - RNA, 19 nt, Homo sapiens
  misc_RNA (1)...(19): siRNA sense strand
gaagucaucugucauuaaa

SEQ ID NO: 461404 - RNA, 19 nt, Homo sapiens
  misc_RNA (1)...(19): siRNA sense strand
gaagagaaguccaacagaa

SEQ ID NO: 461405 - RNA, 19 nt, Homo sapiens
  misc_RNA (1)...(19): siRNA sense strand
gaaguucuguccucgguua

SEQ ID NO: 461406 - RNA, 19 nt, Homo sapiens
  misc_RNA (1)...(19): siRNA sense strand
cuacggagauggaugauaa

SEQ ID NO: 461407 - RNA, 19 nt, Homo sapiens
  misc_RNA (1)...(19): siRNA sense strand
gcagugauaguauggauua

SEQ ID NO: 461408 - RNA, 19 nt, Homo sapiens
  misc_RNA (1)...(19): siRNA sense strand
ggaagcgccuggaagauga

SEQ ID NO: 461409 - RNA, 19 nt, Homo sapiens
  misc_RNA (1)...(19): siRNA sense strand
caagugcccuucugcauga

SEQ ID NO: 461410 - RNA, 19 nt, Homo sapiens
  misc_RNA (1)...(19): siRNA sense strand
ggacagacgucaggcagaa

SEQ ID NO: 461411 - RNA, 19 nt, Homo sapiens
  misc_RNA (1)...(19): siRNA sense strand
caaaaugccugaugaugua

SEQ ID NO: 461412 - RNA, 19 nt, Homo sapiens
  misc_RNA (1)...(19): siRNA sense strand
aaacacagcccaacaguga

SEQ ID NO: 461413 - RNA, 19 nt, Homo sapiens
  misc_RNA (1)...(19): siRNA sense strand
gaaaucugcuacuccguau

SEQ ID NO: 461414 - RNA, 19 nt, Homo sapiens
  misc_RNA (1)...(19): siRNA sense strand
ucagugaaaugaugaaaug

SEQ ID NO: 461415 - RNA, 19 nt, Homo sapiens
  misc_RNA (1)...(19): siRNA sense strand
cgauauggcaucuguguua

SEQ ID NO: 461416 - RNA, 19 nt, Homo sapiens
  misc_RNA (1)...(19): siRNA sense strand
gugauaguauggauuauga

SEQ ID NO: 461417 - RNA, 19 nt, Homo sapiens
  misc_RNA (1)...(19): siRNA sense strand
gaugauaguggcagugaua

SEQ ID NO: 461418 - RNA, 19 nt, Homo sapiens
  misc_RNA (1)...(19): siRNA sense strand
ccacugcgcuccagcucua

SEQ ID NO: 461419 - RNA, 19 nt, Homo sapiens
  misc_RNA (1)...(19): siRNA sense strand
gugaaaugaugaaauguga

SEQ ID NO: 461420 - RNA, 19 nt, Homo sapiens
  misc_RNA (1)...(19): siRNA sense strand
ggacagcaauagggugauu

SEQ ID NO: 461421 - RNA, 19 nt, Homo sapiens
  misc_RNA (1)...(19): siRNA sense strand
gcaaaucaaugaggugcuu

SEQ ID NO: 461422 - RNA, 19 nt, Homo sapiens
  misc_RNA (1)...(19): siRNA sense strand
caccagaaguuuaaaggaa

SEQ ID NO: 461423 - RNA, 19 nt, Homo sapiens
  misc_RNA (1)...(19): siRNA sense strand
gauauggcaucuguguuaa

SEQ ID NO: 461424 - RNA, 19 nt, Homo sapiens
  misc_RNA (1)...(19): siRNA sense strand
uauuaugucucuucucgua

SEQ ID NO: 461425 - RNA, 19 nt, Homo sapiens
  misc_RNA (1)...(19): siRNA sense strand
caacagaaaguguaaauac

SEQ ID NO: 461426 - RNA, 19 nt, Homo sapiens
  misc_RNA (1)...(19): siRNA sense strand
caagcuggcuccuuucuag

SEQ ID NO: 461427 - RNA, 19 nt, Homo sapiens
  misc_RNA (1)...(19): siRNA sense strand
gugcuaaccugcauucugu

SEQ ID NO: 461428 - RNA, 19 nt, Homo sapiens
  misc_RNA (1)...(19): siRNA sense strand
gauaguggcagugauagua

SEQ ID NO: 461429 - RNA, 19 nt, Homo sapiens
  misc_RNA (1)...(19): siRNA sense strand
guacguggcugcaguucau

SEQ ID NO: 461430 - RNA, 19 nt, Homo sapiens
  misc_RNA (1)...(19): siRNA sense strand
ucaaauucaugcacaauca

SEQ ID NO: 461431 - RNA, 19 nt, Homo sapiens
  misc_RNA (1)...(19): siRNA sense strand
agacccagcucaacaaguu

SEQ ID NO: 461432 - RNA, 19 nt, Homo sapiens
  misc_RNA (1)...(19): siRNA sense strand
ccagcgagguggagauuga

SEQ ID NO: 461433 - RNA, 19 nt, Homo sapiens
  misc_RNA (1)...(19): siRNA sense strand
gagcuguacuacuguguga

SEQ ID NO: 461434 - RNA, 19 nt, Homo sapiens
  misc_RNA (1)...(19): siRNA sense strand
guacaugcagggacagaua

SEQ ID NO: 461435 - RNA, 19 nt, Homo sapiens
  misc_RNA (1)...(19): siRNA sense strand
gaagcagacauuuguggua

SEQ ID NO: 461436 - RNA, 19 nt, Homo sapiens
  misc_RNA (1)...(19): siRNA sense strand
gcucugaccuuugcucuuc

SEQ ID NO: 461437 - RNA, 19 nt, Homo sapiens
  misc_RNA (1)...(19): siRNA sense strand
gagaagggauggguaugga

SEQ ID NO: 461438 - RNA, 19 nt, Homo sapiens
  misc_RNA (1)...(19): siRNA sense strand
ugaauuggguggcgaguuc

SEQ ID NO: 461439 - RNA, 19 nt, Homo sapiens
  misc_RNA (1)...(19): siRNA sense strand
agacgaagguguugugcuu

SEQ ID NO: 461440 - RNA, 19 nt, Homo sapiens
  misc_RNA (1)...(19): siRNA sense strand
ugaagaagcagacauuugu

SEQ ID NO: 461441 - RNA, 19 nt, Homo sapiens
  misc_RNA (1)...(19): siRNA sense strand
gaagggaucaaccucaaau

SEQ ID NO: 461442 - RNA, 19 nt, Homo sapiens
  misc_RNA (1)...(19): siRNA sense strand
gcaugagccuucgggauga

SEQ ID NO: 461443 - RNA, 19 nt, Homo sapiens
  misc_RNA (1)...(19): siRNA sense strand
ggaucaaccucaaauucau

SEQ ID NO: 461444 - RNA, 19 nt, Homo sapiens
  misc_RNA (1)...(19): siRNA sense strand
gaaaugaugaaaugugaca

SEQ ID NO: 461445 - RNA, 19 nt, Homo sapiens
  misc_RNA (1)...(19): siRNA sense strand
cagaaucacuagagcugaa

SEQ ID NO: 461446 - RNA, 19 nt, Homo sapiens
  misc_RNA (1)...(19): siRNA sense strand
gcaucuguguuaacuucua

SEQ ID NO: 461447 - RNA, 19 nt, Homo sapiens
  misc_RNA (1)...(19): siRNA sense strand
acacuggagucacgcgaua

SEQ ID NO: 461448 - RNA, 19 nt, Homo sapiens
  misc_RNA (1)...(19): siRNA sense strand
ggcccagacuccugaauug

SEQ ID NO: 461449 - RNA, 19 nt, Homo sapiens
  misc_RNA (1)...(19): siRNA sense strand
ggacugaucaagacucugu

SEQ ID NO: 461450 - RNA, 19 nt, Homo sapiens
  misc_RNA (1)...(19): siRNA sense strand
aguaccagcuucagucuuu

SEQ ID NO: 461451 - RNA, 19 nt, Homo sapiens
  misc_RNA (1)...(19): siRNA sense strand
gcaugaccuucgagagauu

SEQ ID NO: 461452 - RNA, 19 nt, Homo sapiens
  misc_RNA (1)...(19): siRNA sense strand
aaucugcuacuccguauua

SEQ ID NO: 461453 - RNA, 19 nt, Homo sapiens
  misc_RNA (1)...(19): siRNA sense strand
gcccagacccacuacuaua

SEQ ID NO: 461454 - RNA, 19 nt, Homo sapiens
  misc_RNA (1)...(19): siRNA sense strand
cagggucgauccagcaauu

SEQ ID NO: 461455 - RNA, 19 nt, Homo sapiens
  misc_RNA (1)...(19): siRNA sense strand
gaaaagagaaccuccauca

SEQ ID NO: 461456 - RNA, 19 nt, Homo sapiens
  misc_RNA (1)...(19): siRNA sense strand
gauucacccuaguggauuu

SEQ ID NO: 461457 - RNA, 19 nt, Homo sapiens
  misc_RNA (1)...(19): siRNA sense strand
ccagacuccugaauugcua

SEQ ID NO: 461458 - RNA, 19 nt, Homo sapiens
  misc_RNA (1)...(19): siRNA sense strand
agaaugacauccgcaagaa

SEQ ID NO: 461459 - RNA, 19 nt, Homo sapiens
  misc_RNA (1)...(19): siRNA sense strand
cuucuuagaugcugugaug

SEQ ID NO: 461460 - RNA, 19 nt, Homo sapiens
  misc_RNA (1)...(19): siRNA sense strand
gagcagcaaugcaggugau

SEQ ID NO: 461461 - RNA, 19 nt, Homo sapiens
  misc_RNA (1)...(19): siRNA sense strand
gauucaagcucuucuuacu

SEQ ID NO: 461462 - RNA, 19 nt, Homo sapiens
  misc_RNA (1)...(19): siRNA sense strand
ccaacgugcugcagggauu

SEQ ID NO: 461463 - RNA, 19 nt, Homo sapiens
  misc_RNA (1)...(19): siRNA sense strand
ccuggaagaugaugaagau

SEQ ID NO: 461464 - RNA, 19 nt, Homo sapiens
  misc_RNA (1)...(19): siRNA sense strand
gaaguaaucaaaccugucu

SEQ ID NO: 461465 - RNA, 19 nt, Homo sapiens
  misc_RNA (1)...(19): siRNA sense strand
gaagaggguggcacugaga

SEQ ID NO: 461466 - RNA, 19 nt, Homo sapiens
  misc_RNA (1)...(19): siRNA sense strand
caucaaacccggaccugaa

SEQ ID NO: 461467 - RNA, 19 nt, Homo sapiens
  misc_RNA (1)...(19): siRNA sense strand
acgagaagcucaucaacau

SEQ ID NO: 461468 - RNA, 19 nt, Homo sapiens
  misc_RNA (1)...(19): siRNA sense strand
ccagaggacugaucaagac

SEQ ID NO: 461469 - RNA, 19 nt, Homo sapiens
  misc_RNA (1)...(19): siRNA sense strand
ggugugagccugacgucua

SEQ ID NO: 461470 - RNA, 19 nt, Homo sapiens
  misc_RNA (1)...(19): siRNA sense strand
guacaaagggacaccaugu

SEQ ID NO: 461471 - RNA, 19 nt, Homo sapiens
  misc_RNA (1)...(19): siRNA sense strand
ggagggcguuaguggauca

SEQ ID NO: 461472 - RNA, 19 nt, Homo sapiens
  misc_RNA (1)...(19): siRNA sense strand
gggaucaaccucaaauuca

SEQ ID NO: 461473 - RNA, 19 nt, Homo sapiens
  misc_RNA (1)...(19): siRNA sense strand
gaugauaccucuuuugucu

SEQ ID NO: 461474 - RNA, 19 nt, Homo sapiens
  misc_RNA (1)...(19): siRNA sense strand
gaguccagcuguuaugauc

SEQ ID NO: 461475 - RNA, 19 nt, Homo sapiens
  misc_RNA (1)...(19): siRNA sense strand
ccagccagcucugaccuuu

SEQ ID NO: 461476 - RNA, 19 nt, Homo sapiens
  misc_RNA (1)...(19): siRNA sense strand
uaacaucggaacaguguau

SEQ ID NO: 461477 - RNA, 19 nt, Homo sapiens
  misc_RNA (1)...(19): siRNA sense strand
caaaggcuauggcacaacu

SEQ ID NO: 461478 - RNA, 19 nt, Homo sapiens
  misc_RNA (1)...(19): siRNA sense strand
ggaagagaaguccaacaga

SEQ ID NO: 461479 - RNA, 19 nt, Homo sapiens
  misc_RNA (1)...(19): siRNA sense strand
gguguacaagggaauguua

SEQ ID NO: 461480 - RNA, 19 nt, Homo sapiens
  misc_RNA (1)...(19): siRNA sense strand
ccacggagccaacucugaa

SEQ ID NO: 461481 - RNA, 19 nt, Homo sapiens
  misc_RNA (1)...(19): siRNA sense strand
uugacgagcugcagaauca

SEQ ID NO: 461482 - RNA, 19 nt, Homo sapiens
  misc_RNA (1)...(19): siRNA sense strand
gaauucaacccacucaucu

SEQ ID NO: 461483 - RNA, 19 nt, Homo sapiens
  misc_RNA (1)...(19): siRNA sense strand
cucaacaaguucuauacua

SEQ ID NO: 461484 - RNA, 19 nt, Homo sapiens
  misc_RNA (1)...(19): siRNA sense strand
gaaggugaggcgccuaaug

SEQ ID NO: 461485 - RNA, 19 nt, Homo sapiens
  misc_RNA (1)...(19): siRNA sense strand
aggaaaugaucgacaggua

SEQ ID NO: 461486 - RNA, 19 nt, Homo sapiens
  misc_RNA (1)...(19): siRNA sense strand
ccagaaguuuaaaggaaga

SEQ ID NO: 461487 - RNA, 19 nt, Homo sapiens
  misc_RNA (1)...(19): siRNA sense strand
gccagcaucuuugggcuuu

SEQ ID NO: 461488 - RNA, 19 nt, Homo sapiens
  misc_RNA (1)...(19): siRNA sense strand
guacaguccucagcuugga

SEQ ID NO: 461489 - RNA, 19 nt, Homo sapiens
  misc_RNA (1)...(19): siRNA sense strand
gugacaagccaaaguggua

SEQ ID NO: 461490 - RNA, 19 nt, Homo sapiens
  misc_RNA (1)...(19): siRNA sense strand
uggcggaucuuuacuggau

SEQ ID NO: 461491 - RNA, 19 nt, Homo sapiens
  misc_RNA (1)...(19): siRNA sense strand
gaagguaaauaagaaugac

SEQ ID NO: 461492 - RNA, 19 nt, Homo sapiens
  misc_RNA (1)...(19): siRNA sense strand
uggcaucuguguuaacuuc

SEQ ID NO: 461493 - RNA, 19 nt, Homo sapiens
  misc_RNA (1)...(19): siRNA sense strand
uguuagaccuccucaagug

SEQ ID NO: 461494 - RNA, 19 nt, Homo sapiens
  misc_RNA (1)...(19): siRNA sense strand
ccagacccaucucgauuca

SEQ ID NO: 461495 - RNA, 19 nt, Homo sapiens
  misc_RNA (1)...(19): siRNA sense strand
gucgggagcuguacuacug

SEQ ID NO: 461496 - RNA, 19 nt, Homo sapiens
  misc_RNA (1)...(19): siRNA sense strand
guaguaacaucggaacagu

SEQ ID NO: 461497 - RNA, 19 nt, Homo sapiens
  misc_RNA (1)...(19): siRNA sense strand
cgaauucacaacaauaugu

SEQ ID NO: 461498 - RNA, 19 nt, Homo sapiens
  misc_RNA (1)...(19): siRNA sense strand
cagcgaauucacaacaaua

SEQ ID NO: 461499 - RNA, 19 nt, Homo sapiens
  misc_RNA (1)...(19): siRNA sense strand
ucuacaaacuggacuucaa

SEQ ID NO: 461500 - RNA, 19 nt, Homo sapiens
  misc_RNA (1)...(19): siRNA sense strand
uacaaacggagauaucuuu

SEQ ID NO: 461501 - RNA, 19 nt, Homo sapiens
  misc_RNA (1)...(19): siRNA sense strand
ggaagggaucaaccucaaa

SEQ ID NO: 461502 - RNA, 19 nt, Homo sapiens
  misc_RNA (1)...(19): siRNA sense strand
ugugugguguugcguagua

SEQ ID NO: 461503 - RNA, 19 nt, Homo sapiens
  misc_RNA (1)...(19): siRNA sense strand
gaagucaucugucauuaaa

SEQ ID NO: 461504 - RNA, 19 nt, Homo sapiens
  misc_RNA (1)...(19): siRNA sense strand
gaagagaaguccaacagaa

SEQ ID NO: 461505 - RNA, 19 nt, Homo sapiens
  misc_RNA (1)...(19): siRNA sense strand
gaaguucuguccucgguua

SEQ ID NO: 461506 - RNA, 19 nt, Homo sapiens
  misc_RNA (1)...(19): siRNA sense strand
cuacggagauggaugauaa

SEQ ID NO: 461507 - RNA, 19 nt, Homo sapiens
  misc_RNA (1)...(19): siRNA sense strand
gcagugauaguauggauua

SEQ ID NO: 461508 - RNA, 19 nt, Homo sapiens
  misc_RNA (1)...(19): siRNA sense strand
ggaagcgccuggaagauga

SEQ ID NO: 461509 - RNA, 19 nt, Homo sapiens
  misc_RNA (1)...(19): siRNA sense strand
caagugcccuucugcauga

SEQ ID NO: 461510 - RNA, 19 nt, Homo sapiens
  misc_RNA (1)...(19): siRNA sense strand
ggacagacgucaggcagaa

SEQ ID NO: 461511 - RNA, 19 nt, Homo sapiens
  misc_RNA (1)...(19): siRNA sense strand
caaaaugccugaugaugua

SEQ ID NO: 461512 - RNA, 19 nt, Homo sapiens
  misc_RNA (1)...(19): siRNA sense strand
aaacacagcccaacaguga

SEQ ID NO: 461513 - RNA, 19 nt, Homo sapiens
  misc_RNA (1)...(19): siRNA sense strand
ucagugaaaugaugaaaug

SEQ ID NO: 461514 - RNA, 19 nt, Homo sapiens
  misc_RNA (1)...(19): siRNA sense strand
cgauauggcaucuguguua

SEQ ID NO: 461515 - RNA, 19 nt, Homo sapiens
  misc_RNA (1)...(19): siRNA sense strand
gugauaguauggauuauga

SEQ ID NO: 461516 - RNA, 19 nt, Homo sapiens
  misc_RNA (1)...(19): siRNA sense strand
gaugauaguggcagugaua

SEQ ID NO: 461517 - RNA, 19 nt, Homo sapiens
  misc_RNA (1)...(19): siRNA sense strand
ccacugcgcuccagcucua

SEQ ID NO: 461518 - RNA, 19 nt, Homo sapiens
  misc_RNA (1)...(19): siRNA sense strand
gugaaaugaugaaauguga

SEQ ID NO: 461519 - RNA, 19 nt, Homo sapiens
  misc_RNA (1)...(19): siRNA sense strand
ggacagcaauagggugauu

SEQ ID NO: 461520 - RNA, 19 nt, Homo sapiens
  misc_RNA (1)...(19): siRNA sense strand
gcaaaucaaugaggugcuu

SEQ ID NO: 461521 - RNA, 19 nt, Homo sapiens
  misc_RNA (1)...(19): siRNA sense strand
caccagaaguuuaaaggaa

SEQ ID NO: 461522 - RNA, 19 nt, Homo sapiens
  misc_RNA (1)...(19): siRNA sense strand
gauauggcaucuguguuaa

SEQ ID NO: 461523 - RNA, 19 nt, Homo sapiens
  misc_RNA (1)...(19): siRNA sense strand
caacagaaaguguaaauac

SEQ ID NO: 461524 - RNA, 19 nt, Homo sapiens
  misc_RNA (1)...(19): siRNA sense strand
caagcuggcuccuuucuag

SEQ ID NO: 461525 - RNA, 19 nt, Homo sapiens
  misc_RNA (1)...(19): siRNA sense strand
gugcuaaccugcauucugu

SEQ ID NO: 461526 - RNA, 19 nt, Homo sapiens
  misc_RNA (1)...(19): siRNA sense strand
gauaguggcagugauagua

SEQ ID NO: 461527 - RNA, 19 nt, Homo sapiens
  misc_RNA (1)...(19): siRNA sense strand
ucaaauucaugcacaauca

SEQ ID NO: 461528 - RNA, 19 nt, Homo sapiens
  misc_RNA (1)...(19): siRNA sense strand
agacccagcucaacaaguu

SEQ ID NO: 461529 - RNA, 19 nt, Homo sapiens
  misc_RNA (1)...(19): siRNA sense strand
ccagcgagguggagauuga

SEQ ID NO: 461530 - RNA, 19 nt, Homo sapiens
  misc_RNA (1)...(19): siRNA sense strand
gagcuguacuacuguguga

SEQ ID NO: 461531 - RNA, 19 nt, Homo sapiens
  misc_RNA (1)...(19): siRNA sense strand
guacaugcagggacagaua

SEQ ID NO: 461532 - RNA, 19 nt, Homo sapiens
  misc_RNA (1)...(19): siRNA sense strand
gaagcagacauuuguggua

SEQ ID NO: 461533 - RNA, 19 nt, Homo sapiens
  misc_RNA (1)...(19): siRNA sense strand
gcucugaccuuugcucuuc

SEQ ID NO: 461534 - RNA, 19 nt, Homo sapiens
  misc_RNA (1)...(19): siRNA sense strand
gagaagggauggguaugga

SEQ ID NO: 461535 - RNA, 19 nt, Homo sapiens
  misc_RNA (1)...(19): siRNA sense strand
ugaauuggguggcgaguuc

SEQ ID NO: 461536 - RNA, 19 nt, Homo sapiens
  misc_RNA (1)...(19): siRNA sense strand
agacgaagguguugugcuu

SEQ ID NO: 461537 - RNA, 19 nt, Homo sapiens
  misc_RNA (1)...(19): siRNA sense strand
ugaagaagcagacauuugu

SEQ ID NO: 461538 - RNA, 19 nt, Homo sapiens
  misc_RNA (1)...(19): siRNA sense strand
gaagggaucaaccucaaau

SEQ ID NO: 461539 - RNA, 19 nt, Homo sapiens
  misc_RNA (1)...(19): siRNA sense strand
gcaugagccuucgggauga

SEQ ID NO: 461540 - RNA, 19 nt, Homo sapiens
  misc_RNA (1)...(19): siRNA sense strand
ggaucaaccucaaauucau

SEQ ID NO: 461541 - RNA, 19 nt, Homo sapiens
  misc_RNA (1)...(19): siRNA sense strand
gaaaugaugaaaugugaca

SEQ ID NO: 461542 - RNA, 19 nt, Homo sapiens
  misc_RNA (1)...(19): siRNA sense strand
cagaaucacuagagcugaa

SEQ ID NO: 461543 - RNA, 19 nt, Homo sapiens
  misc_RNA (1)...(19): siRNA sense strand
gcaucuguguuaacuucua

SEQ ID NO: 461544 - RNA, 19 nt, Homo sapiens
  misc_RNA (1)...(19): siRNA sense strand
acacuggagucacgcgaua

SEQ ID NO: 461545 - RNA, 19 nt, Homo sapiens
  misc_RNA (1)...(19): siRNA sense strand
ggacugaucaagacucugu

SEQ ID NO: 461546 - RNA, 19 nt, Homo sapiens
  misc_RNA (1)...(19): siRNA sense strand
aguaccagcuucagucuuu

SEQ ID NO: 461547 - RNA, 19 nt, Homo sapiens
  misc_RNA (1)...(19): siRNA sense strand
ggcccagacuccugaauug

SEQ ID NO: 461548 - RNA, 19 nt, Homo sapiens
  misc_RNA (1)...(19): siRNA sense strand
gcaugaccuucgagagauu

SEQ ID NO: 461549 - RNA, 19 nt, Homo sapiens
  misc_RNA (1)...(19): siRNA sense strand
gcccagacccacuacuaua

SEQ ID NO: 461550 - RNA, 19 nt, Homo sapiens
  misc_RNA (1)...(19): siRNA sense strand
cagggucgauccagcaauu

SEQ ID NO: 461551 - RNA, 19 nt, Homo sapiens
  misc_RNA (1)...(19): siRNA sense strand
gaaaagagaaccuccauca

SEQ ID NO: 461552 - RNA, 19 nt, Homo sapiens
  misc_RNA (1)...(19): siRNA sense strand
gauucacccuaguggauuu

SEQ ID NO: 461553 - RNA, 19 nt, Homo sapiens
  misc_RNA (1)...(19): siRNA sense strand
gauucaagcucuucuuacu

SEQ ID NO: 461554 - RNA, 19 nt, Homo sapiens
  misc_RNA (1)...(19): siRNA sense strand
ccagacuccugaauugcua

SEQ ID NO: 461555 - RNA, 19 nt, Homo sapiens
  misc_RNA (1)...(19): siRNA sense strand
agaaugacauccgcaagaa

SEQ ID NO: 461556 - RNA, 19 nt, Homo sapiens
  misc_RNA (1)...(19): siRNA sense strand
cuucuuagaugcugugaug

SEQ ID NO: 461557 - RNA, 19 nt, Homo sapiens
  misc_RNA (1)...(19): siRNA sense strand
gagcagcaaugcaggugau

SEQ ID NO: 461558 - RNA, 19 nt, Homo sapiens
  misc_RNA (1)...(19): siRNA sense strand
ccaacgugcugcagggauu

SEQ ID NO: 461559 - RNA, 19 nt, Homo sapiens
  misc_RNA (1)...(19): siRNA sense strand
ccuggaagaugaugaagau

SEQ ID NO: 461560 - RNA, 19 nt, Homo sapiens
  misc_RNA (1)...(19): siRNA sense strand
gaaguaaucaaaccugucu

SEQ ID NO: 461561 - RNA, 19 nt, Homo sapiens
  misc_RNA (1)...(19): siRNA sense strand
gaagaggguggcacugaga

SEQ ID NO: 461562 - RNA, 19 nt, Homo sapiens
  misc_RNA (1)...(19): siRNA sense strand
caucaaacccggaccugaa

SEQ ID NO: 461563 - RNA, 19 nt, Homo sapiens
  misc_RNA (1)...(19): siRNA sense strand
acgagaagcucaucaacau

SEQ ID NO: 461564 - RNA, 19 nt, Homo sapiens
  misc_RNA (1)...(19): siRNA sense strand
ccagaggacugaucaagac

SEQ ID NO: 461565 - RNA, 19 nt, Homo sapiens
  misc_RNA (1)...(19): siRNA sense strand
ggugugagccugacgucua

SEQ ID NO: 461566 - RNA, 19 nt, Homo sapiens
  misc_RNA (1)...(19): siRNA sense strand
guacaaagggacaccaugu

SEQ ID NO: 461567 - RNA, 19 nt, Homo sapiens
  misc_RNA (1)...(19): siRNA sense strand
gaugauaccucuuuugucu

SEQ ID NO: 461568 - RNA, 19 nt, Homo sapiens
  misc_RNA (1)...(19): siRNA sense strand
gggaucaaccucaaauuca

SEQ ID NO: 461569 - RNA, 19 nt, Homo sapiens
  misc_RNA (1)...(19): siRNA sense strand
gaguccagcuguuaugauc

SEQ ID NO: 461570 - RNA, 19 nt, Homo sapiens
  misc_RNA (1)...(19): siRNA sense strand
ggagggcguuaguggauca

SEQ ID NO: 461571 - RNA, 19 nt, Homo sapiens
  misc_RNA (1)...(19): siRNA sense strand
ccagccagcucugaccuuu

SEQ ID NO: 461572 - RNA, 19 nt, Homo sapiens
  misc_RNA (1)...(19): siRNA sense strand
uaacaucggaacaguguau

SEQ ID NO: 461573 - RNA, 19 nt, Homo sapiens
  misc_RNA (1)...(19): siRNA sense strand
caaaggcuauggcacaacu

SEQ ID NO: 461574 - RNA, 19 nt, Homo sapiens
  misc_RNA (1)...(19): siRNA sense strand
ggaagagaaguccaacaga

SEQ ID NO: 461575 - RNA, 19 nt, Homo sapiens
  misc_RNA (1)...(19): siRNA sense strand
gguguacaagggaauguua

SEQ ID NO: 461576 - RNA, 19 nt, Homo sapiens
  misc_RNA (1)...(19): siRNA sense strand
ccacggagccaacucugaa

SEQ ID NO: 461577 - RNA, 19 nt, Homo sapiens
  misc_RNA (1)...(19): siRNA sense strand
uugacgagcugcagaauca

SEQ ID NO: 461578 - RNA, 19 nt, Homo sapiens
  misc_RNA (1)...(19): siRNA sense strand
gaauucaacccacucaucu

SEQ ID NO: 461579 - RNA, 19 nt, Homo sapiens
  misc_RNA (1)...(19): siRNA sense strand
cucaacaaguucuauacua

SEQ ID NO: 461580 - RNA, 19 nt, Homo sapiens
  misc_RNA (1)...(19): siRNA sense strand
gaaggugaggcgccuaaug

SEQ ID NO: 461581 - RNA, 19 nt, Homo sapiens
  misc_RNA (1)...(19): siRNA sense strand
aggaaaugaucgacaggua

SEQ ID NO: 461582 - RNA, 19 nt, Homo sapiens
  misc_RNA (1)...(19): siRNA sense strand
ccagaaguuuaaaggaaga

SEQ ID NO: 461583 - RNA, 19 nt, Homo sapiens
  misc_RNA (1)...(19): siRNA sense strand
gccagcaucuuugggcuuu

SEQ ID NO: 461584 - RNA, 19 nt, Homo sapiens
  misc_RNA (1)...(19): siRNA sense strand
guacaguccucagcuugga

SEQ ID NO: 461585 - RNA, 19 nt, Homo sapiens
  misc_RNA (1)...(19): siRNA sense strand
gugacaagccaaaguggua

SEQ ID NO: 461586 - RNA, 19 nt, Homo sapiens
  misc_RNA (1)...(19): siRNA sense strand
uggcggaucuuuacuggau

SEQ ID NO: 461587 - RNA, 19 nt, Homo sapiens
  misc_RNA (1)...(19): siRNA sense strand
gaagguaaauaagaaugac

SEQ ID NO: 461588 - RNA, 19 nt, Homo sapiens
  misc_RNA (1)...(19): siRNA sense strand
uguuagaccuccucaagug

SEQ ID NO: 461589 - RNA, 19 nt, Homo sapiens
  misc_RNA (1)...(19): siRNA sense strand
uggcaucuguguuaacuuc

SEQ ID NO: 461590 - RNA, 19 nt, Homo sapiens
  misc_RNA (1)...(19): siRNA sense strand
ccagacccaucucgauuca

SEQ ID NO: 461591 - RNA, 19 nt, Homo sapiens
  misc_RNA (1)...(19): siRNA sense strand
gucgggagcuguacuacug

SEQ ID NO: 461592 - RNA, 19 nt, Homo sapiens
  misc_RNA (1)...(19): siRNA sense strand
guaguaacaucggaacagu

SEQ ID NO: 461593 - RNA, 19 nt, Homo sapiens
  misc_RNA (1)...(19): siRNA sense strand
cgaauucacaacaauaugu

SEQ ID NO: 461594 - RNA, 19 nt, Homo sapiens
  misc_RNA (1)...(19): siRNA sense strand
cagcgaauucacaacaaua

SEQ ID NO: 461595 - RNA, 19 nt, Homo sapiens
  misc_RNA (1)...(19): siRNA sense strand
ucuacaaacuggacuucaa

SEQ ID NO: 461596 - RNA, 19 nt, Homo sapiens
  misc_RNA (1)...(19): siRNA sense strand
cagcgagucuaucucuaug

SEQ ID NO: 461597 - RNA, 19 nt, Homo sapiens
  misc_RNA (1)...(19): siRNA sense strand
ggaagggaucaaccucaaa

SEQ ID NO: 461598 - RNA, 19 nt, Homo sapiens
  misc_RNA (1)...(19): siRNA sense strand
ugugugguguugcguagua

SEQ ID NO: 461599 - RNA, 19 nt, Homo sapiens
  misc_RNA (1)...(19): siRNA sense strand
uacaaacggagauaucuuu

SEQ ID NO: 461600 - RNA, 19 nt, Homo sapiens
  misc_RNA (1)...(19): siRNA sense strand
gcagacauuugugguacau

SEQ ID NO: 461601 - RNA, 19 nt, Homo sapiens
  misc_RNA (1)...(19): siRNA sense strand
guacagccagcaaaucaau

SEQ ID NO: 461602 - RNA, 19 nt, Homo sapiens
  misc_RNA (1)...(19): siRNA sense strand
guaccugucccuuggagaa

SEQ ID NO: 461603 - RNA, 19 nt, Homo sapiens
  misc_RNA (1)...(19): siRNA sense strand
gaagucaucugucauuaaa

SEQ ID NO: 461604 - RNA, 19 nt, Homo sapiens
  misc_RNA (1)...(19): siRNA sense strand
gaagagaaguccaacagaa

SEQ ID NO: 461605 - RNA, 19 nt, Homo sapiens
  misc_RNA (1)...(19): siRNA sense strand
gaaguucuguccucgguua

SEQ ID NO: 461606 - RNA, 19 nt, Homo sapiens
  misc_RNA (1)...(19): siRNA sense strand
cuacggagauggaugauaa

SEQ ID NO: 461607 - RNA, 19 nt, Homo sapiens
  misc_RNA (1)...(19): siRNA sense strand
gcagugauaguauggauua

SEQ ID NO: 461608 - RNA, 19 nt, Homo sapiens
  misc_RNA (1)...(19): siRNA sense strand
ggaagcgccuggaagauga

SEQ ID NO: 461609 - RNA, 19 nt, Homo sapiens
  misc_RNA (1)...(19): siRNA sense strand
caagugcccuucugcauga

SEQ ID NO: 461610 - RNA, 19 nt, Homo sapiens
  misc_RNA (1)...(19): siRNA sense strand
ggacagacgucaggcagaa

SEQ ID NO: 461611 - RNA, 19 nt, Homo sapiens
  misc_RNA (1)...(19): siRNA sense strand
caaaaugccugaugaugua

SEQ ID NO: 461612 - RNA, 19 nt, Homo sapiens
  misc_RNA (1)...(19): siRNA sense strand
aaacacagcccaacaguga

SEQ ID NO: 461613 - RNA, 19 nt, Homo sapiens
  misc_RNA (1)...(19): siRNA sense strand
ucagugaaaugaugaaaug

SEQ ID NO: 461614 - RNA, 19 nt, Homo sapiens
  misc_RNA (1)...(19): siRNA sense strand
cgauauggcaucuguguua

SEQ ID NO: 461615 - RNA, 19 nt, Homo sapiens
  misc_RNA (1)...(19): siRNA sense strand
gugauaguauggauuauga

SEQ ID NO: 461616 - RNA, 19 nt, Homo sapiens
  misc_RNA (1)...(19): siRNA sense strand
gaugauaguggcagugaua

SEQ ID NO: 461617 - RNA, 19 nt, Homo sapiens
  misc_RNA (1)...(19): siRNA sense strand
ccacugcgcuccagcucua

SEQ ID NO: 461618 - RNA, 19 nt, Homo sapiens
  misc_RNA (1)...(19): siRNA sense strand
gugaaaugaugaaauguga

SEQ ID NO: 461619 - RNA, 19 nt, Homo sapiens
  misc_RNA (1)...(19): siRNA sense strand
ggacagcaauagggugauu

SEQ ID NO: 461620 - RNA, 19 nt, Homo sapiens
  misc_RNA (1)...(19): siRNA sense strand
gcaaaucaaugaggugcuu

SEQ ID NO: 461621 - RNA, 19 nt, Homo sapiens
  misc_RNA (1)...(19): siRNA sense strand
caccagaaguuuaaaggaa

SEQ ID NO: 461622 - RNA, 19 nt, Homo sapiens
  misc_RNA (1)...(19): siRNA sense strand
gauauggcaucuguguuaa

SEQ ID NO: 461623 - RNA, 19 nt, Homo sapiens
  misc_RNA (1)...(19): siRNA sense strand
caacagaaaguguaaauac

SEQ ID NO: 461624 - RNA, 19 nt, Homo sapiens
  misc_RNA (1)...(19): siRNA sense strand
caagcuggcuccuuucuag

SEQ ID NO: 461625 - RNA, 19 nt, Homo sapiens
  misc_RNA (1)...(19): siRNA sense strand
gugcuaaccugcauucugu

SEQ ID NO: 461626 - RNA, 19 nt, Homo sapiens
  misc_RNA (1)...(19): siRNA sense strand
gauaguggcagugauagua

SEQ ID NO: 461627 - RNA, 19 nt, Homo sapiens
  misc_RNA (1)...(19): siRNA sense strand
ucaaauucaugcacaauca

SEQ ID NO: 461628 - RNA, 19 nt, Homo sapiens
  misc_RNA (1)...(19): siRNA sense strand
agacccagcucaacaaguu

SEQ ID NO: 461629 - RNA, 19 nt, Homo sapiens
  misc_RNA (1)...(19): siRNA sense strand
ccagcgagguggagauuga

SEQ ID NO: 461630 - RNA, 19 nt, Homo sapiens
  misc_RNA (1)...(19): siRNA sense strand
gagcuguacuacuguguga

SEQ ID NO: 461631 - RNA, 19 nt, Homo sapiens
  misc_RNA (1)...(19): siRNA sense strand
guacaugcagggacagaua

SEQ ID NO: 461632 - RNA, 19 nt, Homo sapiens
  misc_RNA (1)...(19): siRNA sense strand
gaagcagacauuuguggua

SEQ ID NO: 461633 - RNA, 19 nt, Homo sapiens
  misc_RNA (1)...(19): siRNA sense strand
gcucugaccuuugcucuuc

SEQ ID NO: 461634 - RNA, 19 nt, Homo sapiens
  misc_RNA (1)...(19): siRNA sense strand
gagaagggauggguaugga

SEQ ID NO: 461635 - RNA, 19 nt, Homo sapiens
  misc_RNA (1)...(19): siRNA sense strand
ugaauuggguggcgaguuc

SEQ ID NO: 461636 - RNA, 19 nt, Homo sapiens
  misc_RNA (1)...(19): siRNA sense strand
agacgaagguguugugcuu

SEQ ID NO: 461637 - RNA, 19 nt, Homo sapiens
  misc_RNA (1)...(19): siRNA sense strand
ugaagaagcagacauuugu

SEQ ID NO: 461638 - RNA, 19 nt, Homo sapiens
  misc_RNA (1)...(19): siRNA sense strand
gaagggaucaaccucaaau

SEQ ID NO: 461639 - RNA, 19 nt, Homo sapiens
  misc_RNA (1)...(19): siRNA sense strand
gcaugagccuucgggauga

SEQ ID NO: 461640 - RNA, 19 nt, Homo sapiens
  misc_RNA (1)...(19): siRNA sense strand
ggaucaaccucaaauucau

SEQ ID NO: 461641 - RNA, 19 nt, Homo sapiens
  misc_RNA (1)...(19): siRNA sense strand
gaaaugaugaaaugugaca

SEQ ID NO: 461642 - RNA, 19 nt, Homo sapiens
  misc_RNA (1)...(19): siRNA sense strand
cagaaucacuagagcugaa

SEQ ID NO: 461643 - RNA, 19 nt, Homo sapiens
  misc_RNA (1)...(19): siRNA sense strand
gcaucuguguuaacuucua

SEQ ID NO: 461644 - RNA, 19 nt, Homo sapiens
  misc_RNA (1)...(19): siRNA sense strand
acacuggagucacgcgaua

SEQ ID NO: 461645 - RNA, 19 nt, Homo sapiens
  misc_RNA (1)...(19): siRNA sense strand
ggacugaucaagacucugu

SEQ ID NO: 461646 - RNA, 19 nt, Homo sapiens
  misc_RNA (1)...(19): siRNA sense strand
aguaccagcuucagucuuu

SEQ ID NO: 461647 - RNA, 19 nt, Homo sapiens
  misc_RNA (1)...(19): siRNA sense strand
ggcccagacuccugaauug

SEQ ID NO: 461648 - RNA, 19 nt, Homo sapiens
  misc_RNA (1)...(19): siRNA sense strand
gcaugaccuucgagagauu

SEQ ID NO: 461649 - RNA, 19 nt, Homo sapiens
  misc_RNA (1)...(19): siRNA sense strand
gcccagacccacuacuaua

SEQ ID NO: 461650 - RNA, 19 nt, Homo sapiens
  misc_RNA (1)...(19): siRNA sense strand
cagggucgauccagcaauu

SEQ ID NO: 461651 - RNA, 19 nt, Homo sapiens
  misc_RNA (1)...(19): siRNA sense strand
gaaaagagaaccuccauca

SEQ ID NO: 461652 - RNA, 19 nt, Homo sapiens
  misc_RNA (1)...(19): siRNA sense strand
gauucacccuaguggauuu

SEQ ID NO: 461653 - RNA, 19 nt, Homo sapiens
  misc_RNA (1)...(19): siRNA sense strand
gauucaagcucuucuuacu

SEQ ID NO: 461654 - RNA, 19 nt, Homo sapiens
  misc_RNA (1)...(19): siRNA sense strand
ccagacuccugaauugcua

SEQ ID NO: 461655 - RNA, 19 nt, Homo sapiens
  misc_RNA (1)...(19): siRNA sense strand
agaaugacauccgcaagaa

SEQ ID NO: 461656 - RNA, 19 nt, Homo sapiens
  misc_RNA (1)...(19): siRNA sense strand
cuucuuagaugcugugaug

SEQ ID NO: 461657 - RNA, 19 nt, Homo sapiens
  misc_RNA (1)...(19): siRNA sense strand
gagcagcaaugcaggugau

SEQ ID NO: 461658 - RNA, 19 nt, Homo sapiens
  misc_RNA (1)...(19): siRNA sense strand
ccaacgugcugcagggauu

SEQ ID NO: 461659 - RNA, 19 nt, Homo sapiens
  misc_RNA (1)...(19): siRNA sense strand
ccuggaagaugaugaagau

SEQ ID NO: 461660 - RNA, 19 nt, Homo sapiens
  misc_RNA (1)...(19): siRNA sense strand
gaaguaaucaaaccugucu

SEQ ID NO: 461661 - RNA, 19 nt, Homo sapiens
  misc_RNA (1)...(19): siRNA sense strand
gaagaggguggcacugaga

SEQ ID NO: 461662 - RNA, 19 nt, Homo sapiens
  misc_RNA (1)...(19): siRNA sense strand
caucaaacccggaccugaa

SEQ ID NO: 461663 - RNA, 19 nt, Homo sapiens
  misc_RNA (1)...(19): siRNA sense strand
acgagaagcucaucaacau

SEQ ID NO: 461664 - RNA, 19 nt, Homo sapiens
  misc_RNA (1)...(19): siRNA sense strand
ccagaggacugaucaagac

SEQ ID NO: 461665 - RNA, 19 nt, Homo sapiens
  misc_RNA (1)...(19): siRNA sense strand
ggugugagccugacgucua

SEQ ID NO: 461666 - RNA, 19 nt, Homo sapiens
  misc_RNA (1)...(19): siRNA sense strand
guacaaagggacaccaugu

SEQ ID NO: 461667 - RNA, 19 nt, Homo sapiens
  misc_RNA (1)...(19): siRNA sense strand
gaugauaccucuuuugucu

SEQ ID NO: 461668 - RNA, 19 nt, Homo sapiens
  misc_RNA (1)...(19): siRNA sense strand
gggaucaaccucaaauuca

SEQ ID NO: 461669 - RNA, 19 nt, Homo sapiens
  misc_RNA (1)...(19): siRNA sense strand
gaguccagcuguuaugauc

SEQ ID NO: 461670 - RNA, 19 nt, Homo sapiens
  misc_RNA (1)...(19): siRNA sense strand
ggagggcguuaguggauca

SEQ ID NO: 461671 - RNA, 19 nt, Homo sapiens
  misc_RNA (1)...(19): siRNA sense strand
ccagccagcucugaccuuu

SEQ ID NO: 461672 - RNA, 19 nt, Homo sapiens
  misc_RNA (1)...(19): siRNA sense strand
uaacaucggaacaguguau

SEQ ID NO: 461673 - RNA, 19 nt, Homo sapiens
  misc_RNA (1)...(19): siRNA sense strand
caaaggcuauggcacaacu

SEQ ID NO: 461674 - RNA, 19 nt, Homo sapiens
  misc_RNA (1)...(19): siRNA sense strand
ggaagagaaguccaacaga

SEQ ID NO: 461675 - RNA, 19 nt, Homo sapiens
  misc_RNA (1)...(19): siRNA sense strand
gguguacaagggaauguua

SEQ ID NO: 461676 - RNA, 19 nt, Homo sapiens
  misc_RNA (1)...(19): siRNA sense strand
ccacggagccaacucugaa

SEQ ID NO: 461677 - RNA, 19 nt, Homo sapiens
  misc_RNA (1)...(19): siRNA sense strand
uugacgagcugcagaauca

SEQ ID NO: 461678 - RNA, 19 nt, Homo sapiens
  misc_RNA (1)...(19): siRNA sense strand
gaauucaacccacucaucu

SEQ ID NO: 461679 - RNA, 19 nt, Homo sapiens
  misc_RNA (1)...(19): siRNA sense strand
cucaacaaguucuauacua

SEQ ID NO: 461680 - RNA, 19 nt, Homo sapiens
  misc_RNA (1)...(19): siRNA sense strand
gaaggugaggcgccuaaug

SEQ ID NO: 461681 - RNA, 19 nt, Homo sapiens
  misc_RNA (1)...(19): siRNA sense strand
aggaaaugaucgacaggua

SEQ ID NO: 461682 - RNA, 19 nt, Homo sapiens
  misc_RNA (1)...(19): siRNA sense strand
ccagaaguuuaaaggaaga

SEQ ID NO: 461683 - RNA, 19 nt, Homo sapiens
  misc_RNA (1)...(19): siRNA sense strand
gccagcaucuuugggcuuu

SEQ ID NO: 461684 - RNA, 19 nt, Homo sapiens
  misc_RNA (1)...(19): siRNA sense strand
guacaguccucagcuugga

SEQ ID NO: 461685 - RNA, 19 nt, Homo sapiens
  misc_RNA (1)...(19): siRNA sense strand
gugacaagccaaaguggua

SEQ ID NO: 461686 - RNA, 19 nt, Homo sapiens
  misc_RNA (1)...(19): siRNA sense strand
uggcggaucuuuacuggau

SEQ ID NO: 461687 - RNA, 19 nt, Homo sapiens
  misc_RNA (1)...(19): siRNA sense strand
gaagguaaauaagaaugac

SEQ ID NO: 461688 - RNA, 19 nt, Homo sapiens
  misc_RNA (1)...(19): siRNA sense strand
uguuagaccuccucaagug

SEQ ID NO: 461689 - RNA, 19 nt, Homo sapiens
  misc_RNA (1)...(19): siRNA sense strand
uggcaucuguguuaacuuc

SEQ ID NO: 461690 - RNA, 19 nt, Homo sapiens
  misc_RNA (1)...(19): siRNA sense strand
ccagacccaucucgauuca

SEQ ID NO: 461691 - RNA, 19 nt, Homo sapiens
  misc_RNA (1)...(19): siRNA sense strand
gucgggagcuguacuacug

SEQ ID NO: 461692 - RNA, 19 nt, Homo sapiens
  misc_RNA (1)...(19): siRNA sense strand
guaguaacaucggaacagu

SEQ ID NO: 461693 - RNA, 19 nt, Homo sapiens
  misc_RNA (1)...(19): siRNA sense strand
cgaauucacaacaauaugu

SEQ ID NO: 461694 - RNA, 19 nt, Homo sapiens
  misc_RNA (1)...(19): siRNA sense strand
cagcgaauucacaacaaua

SEQ ID NO: 461695 - RNA, 19 nt, Homo sapiens
  misc_RNA (1)...(19): siRNA sense strand
ucuacaaacuggacuucaa

SEQ ID NO: 461696 - RNA, 19 nt, Homo sapiens
  misc_RNA (1)...(19): siRNA sense strand
cagcgagucuaucucuaug

SEQ ID NO: 461697 - RNA, 19 nt, Homo sapiens
  misc_RNA (1)...(19): siRNA sense strand
ggaagggaucaaccucaaa

SEQ ID NO: 461698 - RNA, 19 nt, Homo sapiens
  misc_RNA (1)...(19): siRNA sense strand
ugugugguguugcguagua

SEQ ID NO: 461699 - RNA, 19 nt, Homo sapiens
  misc_RNA (1)...(19): siRNA sense strand
uacaaacggagauaucuuu

SEQ ID NO: 461700 - RNA, 19 nt, Homo sapiens
  misc_RNA (1)...(19): siRNA sense strand
gcagacauuugugguacau

SEQ ID NO: 461701 - RNA, 19 nt, Homo sapiens
  misc_RNA (1)...(19): siRNA sense strand
guacagccagcaaaucaau

SEQ ID NO: 461702 - RNA, 19 nt, Homo sapiens
  misc_RNA (1)...(19): siRNA sense strand
guaccugucccuuggagaa

SEQ ID NO: 461703 - RNA, 19 nt, Homo sapiens
  misc_RNA (1)...(19): siRNA sense strand
gaagucaucugucauuaaa

SEQ ID NO: 461704 - RNA, 19 nt, Homo sapiens
  misc_RNA (1)...(19): siRNA sense strand
gaagagaaguccaacagaa

SEQ ID NO: 461705 - RNA, 19 nt, Homo sapiens
  misc_RNA (1)...(19): siRNA sense strand
gaaguucuguccucgguua

SEQ ID NO: 461706 - RNA, 19 nt, Homo sapiens
  misc_RNA (1)...(19): siRNA sense strand
cuacggagauggaugauaa

SEQ ID NO: 461707 - RNA, 19 nt, Homo sapiens
  misc_RNA (1)...(19): siRNA sense strand
gcagugauaguauggauua

SEQ ID NO: 461708 - RNA, 19 nt, Homo sapiens
  misc_RNA (1)...(19): siRNA sense strand
ggaagcgccuggaagauga

SEQ ID NO: 461709 - RNA, 19 nt, Homo sapiens
  misc_RNA (1)...(19): siRNA sense strand
caagugcccuucugcauga

SEQ ID NO: 461710 - RNA, 19 nt, Homo sapiens
  misc_RNA (1)...(19): siRNA sense strand
ggacagacgucaggcagaa

SEQ ID NO: 461711 - RNA, 19 nt, Homo sapiens
  misc_RNA (1)...(19): siRNA sense strand
caaaaugccugaugaugua

SEQ ID NO: 461712 - RNA, 19 nt, Homo sapiens
  misc_RNA (1)...(19): siRNA sense strand
aaacacagcccaacaguga

SEQ ID NO: 461713 - RNA, 19 nt, Homo sapiens
  misc_RNA (1)...(19): siRNA sense strand
gaaaucugcuacuccguau

SEQ ID NO: 461714 - RNA, 19 nt, Homo sapiens
  misc_RNA (1)...(19): siRNA sense strand
ucagugaaaugaugaaaug

SEQ ID NO: 461715 - RNA, 19 nt, Homo sapiens
  misc_RNA (1)...(19): siRNA sense strand
cgauauggcaucuguguua

SEQ ID NO: 461716 - RNA, 19 nt, Homo sapiens
  misc_RNA (1)...(19): siRNA sense strand
gugauaguauggauuauga

SEQ ID NO: 461717 - RNA, 19 nt, Homo sapiens
  misc_RNA (1)...(19): siRNA sense strand
gaugauaguggcagugaua

SEQ ID NO: 461718 - RNA, 19 nt, Homo sapiens
  misc_RNA (1)...(19): siRNA sense strand
ccacugcgcuccagcucua

SEQ ID NO: 461719 - RNA, 19 nt, Homo sapiens
  misc_RNA (1)...(19): siRNA sense strand
gugaaaugaugaaauguga

SEQ ID NO: 461720 - RNA, 19 nt, Homo sapiens
  misc_RNA (1)...(19): siRNA sense strand
ggacagcaauagggugauu

SEQ ID NO: 461721 - RNA, 19 nt, Homo sapiens
  misc_RNA (1)...(19): siRNA sense strand
gcaaaucaaugaggugcuu

SEQ ID NO: 461722 - RNA, 19 nt, Homo sapiens
  misc_RNA (1)...(19): siRNA sense strand
caccagaaguuuaaaggaa

SEQ ID NO: 461723 - RNA, 19 nt, Homo sapiens
  misc_RNA (1)...(19): siRNA sense strand
gauauggcaucuguguuaa

SEQ ID NO: 461724 - RNA, 19 nt, Homo sapiens
  misc_RNA (1)...(19): siRNA sense strand
uauuaugucucuucucgua

SEQ ID NO: 461725 - RNA, 19 nt, Homo sapiens
  misc_RNA (1)...(19): siRNA sense strand
caacagaaaguguaaauac

SEQ ID NO: 461726 - RNA, 19 nt, Homo sapiens
  misc_RNA (1)...(19): siRNA sense strand
caagcuggcuccuuucuag

SEQ ID NO: 461727 - RNA, 19 nt, Homo sapiens
  misc_RNA (1)...(19): siRNA sense strand
gugcuaaccugcauucugu

SEQ ID NO: 461728 - RNA, 19 nt, Homo sapiens
  misc_RNA (1)...(19): siRNA sense strand
gauaguggcagugauagua

SEQ ID NO: 461729 - RNA, 19 nt, Homo sapiens
  misc_RNA (1)...(19): siRNA sense strand
guacguggcugcaguucau

SEQ ID NO: 461730 - RNA, 19 nt, Homo sapiens
  misc_RNA (1)...(19): siRNA sense strand
ucaaauucaugcacaauca

SEQ ID NO: 461731 - RNA, 19 nt, Homo sapiens
  misc_RNA (1)...(19): siRNA sense strand
agacccagcucaacaaguu

SEQ ID NO: 461732 - RNA, 19 nt, Homo sapiens
  misc_RNA (1)...(19): siRNA sense strand
ccagcgagguggagauuga

SEQ ID NO: 461733 - RNA, 19 nt, Homo sapiens
  misc_RNA (1)...(19): siRNA sense strand
gagcuguacuacuguguga

SEQ ID NO: 461734 - RNA, 19 nt, Homo sapiens
  misc_RNA (1)...(19): siRNA sense strand
guacaugcagggacagaua

SEQ ID NO: 461735 - RNA, 19 nt, Homo sapiens
  misc_RNA (1)...(19): siRNA sense strand
gaagcagacauuuguggua

SEQ ID NO: 461736 - RNA, 19 nt, Homo sapiens
  misc_RNA (1)...(19): siRNA sense strand
gcucugaccuuugcucuuc

SEQ ID NO: 461737 - RNA, 19 nt, Homo sapiens
  misc_RNA (1)...(19): siRNA sense strand
gagaagggauggguaugga

SEQ ID NO: 461738 - RNA, 19 nt, Homo sapiens
  misc_RNA (1)...(19): siRNA sense strand
ugaauuggguggcgaguuc

SEQ ID NO: 461739 - RNA, 19 nt, Homo sapiens
  misc_RNA (1)...(19): siRNA sense strand
agacgaagguguugugcuu

SEQ ID NO: 461740 - RNA, 19 nt, Homo sapiens
  misc_RNA (1)...(19): siRNA sense strand
ugaagaagcagacauuugu

SEQ ID NO: 461741 - RNA, 19 nt, Homo sapiens
  misc_RNA (1)...(19): siRNA sense strand
gaagggaucaaccucaaau

SEQ ID NO: 461742 - RNA, 19 nt, Homo sapiens
  misc_RNA (1)...(19): siRNA sense strand
gcaugagccuucgggauga

SEQ ID NO: 461743 - RNA, 19 nt, Homo sapiens
  misc_RNA (1)...(19): siRNA sense strand
ggaucaaccucaaauucau

SEQ ID NO: 461744 - RNA, 19 nt, Homo sapiens
  misc_RNA (1)...(19): siRNA sense strand
gaaaugaugaaaugugaca

SEQ ID NO: 461745 - RNA, 19 nt, Homo sapiens
  misc_RNA (1)...(19): siRNA sense strand
cagaaucacuagagcugaa

SEQ ID NO: 461746 - RNA, 19 nt, Homo sapiens
  misc_RNA (1)...(19): siRNA sense strand
gcaucuguguuaacuucua

SEQ ID NO: 461747 - RNA, 19 nt, Homo sapiens
  misc_RNA (1)...(19): siRNA sense strand
acacuggagucacgcgaua

SEQ ID NO: 461748 - RNA, 19 nt, Homo sapiens
  misc_RNA (1)...(19): siRNA sense strand
ggcccagacuccugaauug

SEQ ID NO: 461749 - RNA, 19 nt, Homo sapiens
  misc_RNA (1)...(19): siRNA sense strand
ggacugaucaagacucugu

SEQ ID NO: 461750 - RNA, 19 nt, Homo sapiens
  misc_RNA (1)...(19): siRNA sense strand
aguaccagcuucagucuuu

SEQ ID NO: 461751 - RNA, 19 nt, Homo sapiens
  misc_RNA (1)...(19): siRNA sense strand
gcaugaccuucgagagauu

SEQ ID NO: 461752 - RNA, 19 nt, Homo sapiens
  misc_RNA (1)...(19): siRNA sense strand
aaucugcuacuccguauua

SEQ ID NO: 461753 - RNA, 19 nt, Homo sapiens
  misc_RNA (1)...(19): siRNA sense strand
gcccagacccacuacuaua

SEQ ID NO: 461754 - RNA, 19 nt, Homo sapiens
  misc_RNA (1)...(19): siRNA sense strand
cagggucgauccagcaauu

SEQ ID NO: 461755 - RNA, 19 nt, Homo sapiens
  misc_RNA (1)...(19): siRNA sense strand
gaaaagagaaccuccauca

SEQ ID NO: 461756 - RNA, 19 nt, Homo sapiens
  misc_RNA (1)...(19): siRNA sense strand
gauucacccuaguggauuu

SEQ ID NO: 461757 - RNA, 19 nt, Homo sapiens
  misc_RNA (1)...(19): siRNA sense strand
ccagacuccugaauugcua

SEQ ID NO: 461758 - RNA, 19 nt, Homo sapiens
  misc_RNA (1)...(19): siRNA sense strand
agaaugacauccgcaagaa

SEQ ID NO: 461759 - RNA, 19 nt, Homo sapiens
  misc_RNA (1)...(19): siRNA sense strand
cuucuuagaugcugugaug

SEQ ID NO: 461760 - RNA, 19 nt, Homo sapiens
  misc_RNA (1)...(19): siRNA sense strand
gagcagcaaugcaggugau

SEQ ID NO: 461761 - RNA, 19 nt, Homo sapiens
  misc_RNA (1)...(19): siRNA sense strand
gauucaagcucuucuuacu

SEQ ID NO: 461762 - RNA, 19 nt, Homo sapiens
  misc_RNA (1)...(19): siRNA sense strand
ccaacgugcugcagggauu

SEQ ID NO: 461763 - RNA, 19 nt, Homo sapiens
  misc_RNA (1)...(19): siRNA sense strand
ccuggaagaugaugaagau

SEQ ID NO: 461764 - RNA, 19 nt, Homo sapiens
  misc_RNA (1)...(19): siRNA sense strand
gaaguaaucaaaccugucu

SEQ ID NO: 461765 - RNA, 19 nt, Homo sapiens
  misc_RNA (1)...(19): siRNA sense strand
gaagaggguggcacugaga

SEQ ID NO: 461766 - RNA, 19 nt, Homo sapiens
  misc_RNA (1)...(19): siRNA sense strand
caucaaacccggaccugaa

SEQ ID NO: 461767 - RNA, 19 nt, Homo sapiens
  misc_RNA (1)...(19): siRNA sense strand
acgagaagcucaucaacau

SEQ ID NO: 461768 - RNA, 19 nt, Homo sapiens
  misc_RNA (1)...(19): siRNA sense strand
ccagaggacugaucaagac

SEQ ID NO: 461769 - RNA, 19 nt, Homo sapiens
  misc_RNA (1)...(19): siRNA sense strand
ggugugagccugacgucua

SEQ ID NO: 461770 - RNA, 19 nt, Homo sapiens
  misc_RNA (1)...(19): siRNA sense strand
guacaaagggacaccaugu

SEQ ID NO: 461771 - RNA, 19 nt, Homo sapiens
  misc_RNA (1)...(19): siRNA sense strand
ggagggcguuaguggauca

SEQ ID NO: 461772 - RNA, 19 nt, Homo sapiens
  misc_RNA (1)...(19): siRNA sense strand
gggaucaaccucaaauuca

SEQ ID NO: 461773 - RNA, 19 nt, Homo sapiens
  misc_RNA (1)...(19): siRNA sense strand
gaugauaccucuuuugucu

SEQ ID NO: 461774 - RNA, 19 nt, Homo sapiens
  misc_RNA (1)...(19): siRNA sense strand
gaguccagcuguuaugauc

SEQ ID NO: 461775 - RNA, 19 nt, Homo sapiens
  misc_RNA (1)...(19): siRNA sense strand
ccagccagcucugaccuuu

SEQ ID NO: 461776 - RNA, 19 nt, Homo sapiens
  misc_RNA (1)...(19): siRNA sense strand
uaacaucggaacaguguau

SEQ ID NO: 461777 - RNA, 19 nt, Homo sapiens
  misc_RNA (1)...(19): siRNA sense strand
caaaggcuauggcacaacu

SEQ ID NO: 461778 - RNA, 19 nt, Homo sapiens
  misc_RNA (1)...(19): siRNA sense strand
ggaagagaaguccaacaga

SEQ ID NO: 461779 - RNA, 19 nt, Homo sapiens
  misc_RNA (1)...(19): siRNA sense strand
gguguacaagggaauguua

SEQ ID NO: 461780 - RNA, 19 nt, Homo sapiens
  misc_RNA (1)...(19): siRNA sense strand
ccacggagccaacucugaa

SEQ ID NO: 461781 - RNA, 19 nt, Homo sapiens
  misc_RNA (1)...(19): siRNA sense strand
uugacgagcugcagaauca

SEQ ID NO: 461782 - RNA, 19 nt, Homo sapiens
  misc_RNA (1)...(19): siRNA sense strand
gaauucaacccacucaucu

SEQ ID NO: 461783 - RNA, 19 nt, Homo sapiens
  misc_RNA (1)...(19): siRNA sense strand
cucaacaaguucuauacua

SEQ ID NO: 461784 - RNA, 19 nt, Homo sapiens
  misc_RNA (1)...(19): siRNA sense strand
gaaggugaggcgccuaaug

SEQ ID NO: 461785 - RNA, 19 nt, Homo sapiens
  misc_RNA (1)...(19): siRNA sense strand
aggaaaugaucgacaggua

SEQ ID NO: 461786 - RNA, 19 nt, Homo sapiens
  misc_RNA (1)...(19): siRNA sense strand
ccagaaguuuaaaggaaga

SEQ ID NO: 461787 - RNA, 19 nt, Homo sapiens
  misc_RNA (1)...(19): siRNA sense strand
gccagcaucuuugggcuuu

SEQ ID NO: 461788 - RNA, 19 nt, Homo sapiens
  misc_RNA (1)...(19): siRNA sense strand
guacaguccucagcuugga

SEQ ID NO: 461789 - RNA, 19 nt, Homo sapiens
  misc_RNA (1)...(19): siRNA sense strand
gugacaagccaaaguggua

SEQ ID NO: 461790 - RNA, 19 nt, Homo sapiens
  misc_RNA (1)...(19): siRNA sense strand
uggcggaucuuuacuggau

SEQ ID NO: 461791 - RNA, 19 nt, Homo sapiens
  misc_RNA (1)...(19): siRNA sense strand
gaagguaaauaagaaugac

SEQ ID NO: 461792 - RNA, 19 nt, Homo sapiens
  misc_RNA (1)...(19): siRNA sense strand
uggcaucuguguuaacuuc

SEQ ID NO: 461793 - RNA, 19 nt, Homo sapiens
  misc_RNA (1)...(19): siRNA sense strand
uguuagaccuccucaagug

SEQ ID NO: 461794 - RNA, 19 nt, Homo sapiens
  misc_RNA (1)...(19): siRNA sense strand
ccagacccaucucgauuca

SEQ ID NO: 461795 - RNA, 19 nt, Homo sapiens
  misc_RNA (1)...(19): siRNA sense strand
gucgggagcuguacuacug

SEQ ID NO: 461796 - RNA, 19 nt, Homo sapiens
  misc_RNA (1)...(19): siRNA sense strand
guaguaacaucggaacagu

SEQ ID NO: 461797 - RNA, 19 nt, Homo sapiens
  misc_RNA (1)...(19): siRNA sense strand
cgaauucacaacaauaugu

SEQ ID NO: 461798 - RNA, 19 nt, Homo sapiens
  misc_RNA (1)...(19): siRNA sense strand
cagcgaauucacaacaaua

SEQ ID NO: 461799 - RNA, 19 nt, Homo sapiens
  misc_RNA (1)...(19): siRNA sense strand
ucuacaaacuggacuucaa

SEQ ID NO: 461800 - RNA, 19 nt, Homo sapiens
  misc_RNA (1)...(19): siRNA sense strand
uacaaacggagauaucuuu

SEQ ID NO: 461801 - RNA, 19 nt, Homo sapiens
  misc_RNA (1)...(19): siRNA sense strand
ggaagggaucaaccucaaa

SEQ ID NO: 461802 - RNA, 19 nt, Homo sapiens
  misc_RNA (1)...(19): siRNA sense strand
ugugugguguugcguagua

SEQ ID NO: 461803 - RNA, 19 nt, Homo sapiens
  misc_RNA (1)...(19): siRNA sense strand
gaagucaucugucauuaaa

SEQ ID NO: 461804 - RNA, 19 nt, Homo sapiens
  misc_RNA (1)...(19): siRNA sense strand
gaagagaaguccaacagaa

SEQ ID NO: 461805 - RNA, 19 nt, Homo sapiens
  misc_RNA (1)...(19): siRNA sense strand
gaaguucuguccucgguua

SEQ ID NO: 461806 - RNA, 19 nt, Homo sapiens
  misc_RNA (1)...(19): siRNA sense strand
cuacggagauggaugauaa

SEQ ID NO: 461807 - RNA, 19 nt, Homo sapiens
  misc_RNA (1)...(19): siRNA sense strand
gcagugauaguauggauua

SEQ ID NO: 461808 - RNA, 19 nt, Homo sapiens
  misc_RNA (1)...(19): siRNA sense strand
ggaagcgccuggaagauga

SEQ ID NO: 461809 - RNA, 19 nt, Homo sapiens
  misc_RNA (1)...(19): siRNA sense strand
caagugcccuucugcauga

SEQ ID NO: 461810 - RNA, 19 nt, Homo sapiens
  misc_RNA (1)...(19): siRNA sense strand
ggacagacgucaggcagaa

SEQ ID NO: 461811 - RNA, 19 nt, Homo sapiens
  misc_RNA (1)...(19): siRNA sense strand
caaaaugccugaugaugua

SEQ ID NO: 461812 - RNA, 19 nt, Homo sapiens
  misc_RNA (1)...(19): siRNA sense strand
aaacacagcccaacaguga

SEQ ID NO: 461813 - RNA, 19 nt, Homo sapiens
  misc_RNA (1)...(19): siRNA sense strand
gaaaucugcuacuccguau

SEQ ID NO: 461814 - RNA, 19 nt, Homo sapiens
  misc_RNA (1)...(19): siRNA sense strand
ucagugaaaugaugaaaug

SEQ ID NO: 461815 - RNA, 19 nt, Homo sapiens
  misc_RNA (1)...(19): siRNA sense strand
cgauauggcaucuguguua

SEQ ID NO: 461816 - RNA, 19 nt, Homo sapiens
  misc_RNA (1)...(19): siRNA sense strand
gugauaguauggauuauga

SEQ ID NO: 461817 - RNA, 19 nt, Homo sapiens
  misc_RNA (1)...(19): siRNA sense strand
gaugauaguggcagugaua

SEQ ID NO: 461818 - RNA, 19 nt, Homo sapiens
  misc_RNA (1)...(19): siRNA sense strand
ccacugcgcuccagcucua

SEQ ID NO: 461819 - RNA, 19 nt, Homo sapiens
  misc_RNA (1)...(19): siRNA sense strand
gugaaaugaugaaauguga

SEQ ID NO: 461820 - RNA, 19 nt, Homo sapiens
  misc_RNA (1)...(19): siRNA sense strand
ggacagcaauagggugauu

SEQ ID NO: 461821 - RNA, 19 nt, Homo sapiens
  misc_RNA (1)...(19): siRNA sense strand
gcaaaucaaugaggugcuu

SEQ ID NO: 461822 - RNA, 19 nt, Homo sapiens
  misc_RNA (1)...(19): siRNA sense strand
caccagaaguuuaaaggaa

SEQ ID NO: 461823 - RNA, 19 nt, Homo sapiens
  misc_RNA (1)...(19): siRNA sense strand
gauauggcaucuguguuaa

SEQ ID NO: 461824 - RNA, 19 nt, Homo sapiens
  misc_RNA (1)...(19): siRNA sense strand
uauuaugucucuucucgua

SEQ ID NO: 461825 - RNA, 19 nt, Homo sapiens
  misc_RNA (1)...(19): siRNA sense strand
caacagaaaguguaaauac

SEQ ID NO: 461826 - RNA, 19 nt, Homo sapiens
  misc_RNA (1)...(19): siRNA sense strand
caagcuggcuccuuucuag

SEQ ID NO: 461827 - RNA, 19 nt, Homo sapiens
  misc_RNA (1)...(19): siRNA sense strand
gugcuaaccugcauucugu

SEQ ID NO: 461828 - RNA, 19 nt, Homo sapiens
  misc_RNA (1)...(19): siRNA sense strand
gauaguggcagugauagua

SEQ ID NO: 461829 - RNA, 19 nt, Homo sapiens
  misc_RNA (1)...(19): siRNA sense strand
guacguggcugcaguucau

SEQ ID NO: 461830 - RNA, 19 nt, Homo sapiens
  misc_RNA (1)...(19): siRNA sense strand
ucaaauucaugcacaauca

SEQ ID NO: 461831 - RNA, 19 nt, Homo sapiens
  misc_RNA (1)...(19): siRNA sense strand
agacccagcucaacaaguu

SEQ ID NO: 461832 - RNA, 19 nt, Homo sapiens
  misc_RNA (1)...(19): siRNA sense strand
ccagcgagguggagauuga

SEQ ID NO: 461833 - RNA, 19 nt, Homo sapiens
  misc_RNA (1)...(19): siRNA sense strand
gagcuguacuacuguguga

SEQ ID NO: 461834 - RNA, 19 nt, Homo sapiens
  misc_RNA (1)...(19): siRNA sense strand
guacaugcagggacagaua

SEQ ID NO: 461835 - RNA, 19 nt, Homo sapiens
  misc_RNA (1)...(19): siRNA sense strand
gaagcagacauuuguggua

SEQ ID NO: 461836 - RNA, 19 nt, Homo sapiens
  misc_RNA (1)...(19): siRNA sense strand
gcucugaccuuugcucuuc

SEQ ID NO: 461837 - RNA, 19 nt, Homo sapiens
  misc_RNA (1)...(19): siRNA sense strand
gagaagggauggguaugga

SEQ ID NO: 461838 - RNA, 19 nt, Homo sapiens
  misc_RNA (1)...(19): siRNA sense strand
ugaauuggguggcgaguuc

SEQ ID NO: 461839 - RNA, 19 nt, Homo sapiens
  misc_RNA (1)...(19): siRNA sense strand
agacgaagguguugugcuu

SEQ ID NO: 461840 - RNA, 19 nt, Homo sapiens
  misc_RNA (1)...(19): siRNA sense strand
ugaagaagcagacauuugu

SEQ ID NO: 461841 - RNA, 19 nt, Homo sapiens
  misc_RNA (1)...(19): siRNA sense strand
gaagggaucaaccucaaau

SEQ ID NO: 461842 - RNA, 19 nt, Homo sapiens
  misc_RNA (1)...(19): siRNA sense strand
gcaugagccuucgggauga

SEQ ID NO: 461843 - RNA, 19 nt, Homo sapiens
  misc_RNA (1)...(19): siRNA sense strand
ggaucaaccucaaauucau

SEQ ID NO: 461844 - RNA, 19 nt, Homo sapiens
  misc_RNA (1)...(19): siRNA sense strand
gaaaugaugaaaugugaca

SEQ ID NO: 461845 - RNA, 19 nt, Homo sapiens
  misc_RNA (1)...(19): siRNA sense strand
cagaaucacuagagcugaa

SEQ ID NO: 461846 - RNA, 19 nt, Homo sapiens
  misc_RNA (1)...(19): siRNA sense strand
gcaucuguguuaacuucua

SEQ ID NO: 461847 - RNA, 19 nt, Homo sapiens
  misc_RNA (1)...(19): siRNA sense strand
acacuggagucacgcgaua

SEQ ID NO: 461848 - RNA, 19 nt, Homo sapiens
  misc_RNA (1)...(19): siRNA sense strand
ggcccagacuccugaauug

SEQ ID NO: 461849 - RNA, 19 nt, Homo sapiens
  misc_RNA (1)...(19): siRNA sense strand
ggacugaucaagacucugu

SEQ ID NO: 461850 - RNA, 19 nt, Homo sapiens
  misc_RNA (1)...(19): siRNA sense strand
aguaccagcuucagucuuu

SEQ ID NO: 461851 - RNA, 19 nt, Homo sapiens
  misc_RNA (1)...(19): siRNA sense strand
gcaugaccuucgagagauu

SEQ ID NO: 461852 - RNA, 19 nt, Homo sapiens
  misc_RNA (1)...(19): siRNA sense strand
aaucugcuacuccguauua

SEQ ID NO: 461853 - RNA, 19 nt, Homo sapiens
  misc_RNA (1)...(19): siRNA sense strand
gcccagacccacuacuaua

SEQ ID NO: 461854 - RNA, 19 nt, Homo sapiens
  misc_RNA (1)...(19): siRNA sense strand
cagggucgauccagcaauu

SEQ ID NO: 461855 - RNA, 19 nt, Homo sapiens
  misc_RNA (1)...(19): siRNA sense strand
gaaaagagaaccuccauca

SEQ ID NO: 461856 - RNA, 19 nt, Homo sapiens
  misc_RNA (1)...(19): siRNA sense strand
gauucacccuaguggauuu

SEQ ID NO: 461857 - RNA, 19 nt, Homo sapiens
  misc_RNA (1)...(19): siRNA sense strand
ccagacuccugaauugcua

SEQ ID NO: 461858 - RNA, 19 nt, Homo sapiens
  misc_RNA (1)...(19): siRNA sense strand
agaaugacauccgcaagaa

SEQ ID NO: 461859 - RNA, 19 nt, Homo sapiens
  misc_RNA (1)...(19): siRNA sense strand
cuucuuagaugcugugaug

SEQ ID NO: 461860 - RNA, 19 nt, Homo sapiens
  misc_RNA (1)...(19): siRNA sense strand
gagcagcaaugcaggugau

SEQ ID NO: 461861 - RNA, 19 nt, Homo sapiens
  misc_RNA (1)...(19): siRNA sense strand
gauucaagcucuucuuacu

SEQ ID NO: 461862 - RNA, 19 nt, Homo sapiens
  misc_RNA (1)...(19): siRNA sense strand
ccaacgugcugcagggauu

SEQ ID NO: 461863 - RNA, 19 nt, Homo sapiens
  misc_RNA (1)...(19): siRNA sense strand
ccuggaagaugaugaagau

SEQ ID NO: 461864 - RNA, 19 nt, Homo sapiens
  misc_RNA (1)...(19): siRNA sense strand
gaaguaaucaaaccugucu

SEQ ID NO: 461865 - RNA, 19 nt, Homo sapiens
  misc_RNA (1)...(19): siRNA sense strand
gaagaggguggcacugaga

SEQ ID NO: 461866 - RNA, 19 nt, Homo sapiens
  misc_RNA (1)...(19): siRNA sense strand
caucaaacccggaccugaa

SEQ ID NO: 461867 - RNA, 19 nt, Homo sapiens
  misc_RNA (1)...(19): siRNA sense strand
acgagaagcucaucaacau

SEQ ID NO: 461868 - RNA, 19 nt, Homo sapiens
  misc_RNA (1)...(19): siRNA sense strand
ccagaggacugaucaagac

SEQ ID NO: 461869 - RNA, 19 nt, Homo sapiens
  misc_RNA (1)...(19): siRNA sense strand
ggugugagccugacgucua

SEQ ID NO: 461870 - RNA, 19 nt, Homo sapiens
  misc_RNA (1)...(19): siRNA sense strand
guacaaagggacaccaugu

SEQ ID NO: 461871 - RNA, 19 nt, Homo sapiens
  misc_RNA (1)...(19): siRNA sense strand
ggagggcguuaguggauca

SEQ ID NO: 461872 - RNA, 19 nt, Homo sapiens
  misc_RNA (1)...(19): siRNA sense strand
gggaucaaccucaaauuca

SEQ ID NO: 461873 - RNA, 19 nt, Homo sapiens
  misc_RNA (1)...(19): siRNA sense strand
gaugauaccucuuuugucu

SEQ ID NO: 461874 - RNA, 19 nt, Homo sapiens
  misc_RNA (1)...(19): siRNA sense strand
gaguccagcuguuaugauc

SEQ ID NO: 461875 - RNA, 19 nt, Homo sapiens
  misc_RNA (1)...(19): siRNA sense strand
ccagccagcucugaccuuu

SEQ ID NO: 461876 - RNA, 19 nt, Homo sapiens
  misc_RNA (1)...(19): siRNA sense strand
uaacaucggaacaguguau

SEQ ID NO: 461877 - RNA, 19 nt, Homo sapiens
  misc_RNA (1)...(19): siRNA sense strand
caaaggcuauggcacaacu

SEQ ID NO: 461878 - RNA, 19 nt, Homo sapiens
  misc_RNA (1)...(19): siRNA sense strand
ggaagagaaguccaacaga

SEQ ID NO: 461879 - RNA, 19 nt, Homo sapiens
  misc_RNA (1)...(19): siRNA sense strand
gguguacaagggaauguua

SEQ ID NO: 461880 - RNA, 19 nt, Homo sapiens
  misc_RNA (1)...(19): siRNA sense strand
ccacggagccaacucugaa

SEQ ID NO: 461881 - RNA, 19 nt, Homo sapiens
  misc_RNA (1)...(19): siRNA sense strand
uugacgagcugcagaauca

SEQ ID NO: 461882 - RNA, 19 nt, Homo sapiens
  misc_RNA (1)...(19): siRNA sense strand
gaauucaacccacucaucu

SEQ ID NO: 461883 - RNA, 19 nt, Homo sapiens
  misc_RNA (1)...(19): siRNA sense strand
cucaacaaguucuauacua

SEQ ID NO: 461884 - RNA, 19 nt, Homo sapiens
  misc_RNA (1)...(19): siRNA sense strand
gaaggugaggcgccuaaug

SEQ ID NO: 461885 - RNA, 19 nt, Homo sapiens
  misc_RNA (1)...(19): siRNA sense strand
aggaaaugaucgacaggua

SEQ ID NO: 461886 - RNA, 19 nt, Homo sapiens
  misc_RNA (1)...(19): siRNA sense strand
ccagaaguuuaaaggaaga

SEQ ID NO: 461887 - RNA, 19 nt, Homo sapiens
  misc_RNA (1)...(19): siRNA sense strand
gccagcaucuuugggcuuu

SEQ ID NO: 461888 - RNA, 19 nt, Homo sapiens
  misc_RNA (1)...(19): siRNA sense strand
guacaguccucagcuugga

SEQ ID NO: 461889 - RNA, 19 nt, Homo sapiens
  misc_RNA (1)...(19): siRNA sense strand
gugacaagccaaaguggua

SEQ ID NO: 461890 - RNA, 19 nt, Homo sapiens
  misc_RNA (1)...(19): siRNA sense strand
uggcggaucuuuacuggau

SEQ ID NO: 461891 - RNA, 19 nt, Homo sapiens
  misc_RNA (1)...(19): siRNA sense strand
gaagguaaauaagaaugac

SEQ ID NO: 461892 - RNA, 19 nt, Homo sapiens
  misc_RNA (1)...(19): siRNA sense strand
uggcaucuguguuaacuuc

SEQ ID NO: 461893 - RNA, 19 nt, Homo sapiens
  misc_RNA (1)...(19): siRNA sense strand
uguuagaccuccucaagug

SEQ ID NO: 461894 - RNA, 19 nt, Homo sapiens
  misc_RNA (1)...(19): siRNA sense strand
ccagacccaucucgauuca

SEQ ID NO: 461895 - RNA, 19 nt, Homo sapiens
  misc_RNA (1)...(19): siRNA sense strand
gucgggagcuguacuacug

SEQ ID NO: 461896 - RNA, 19 nt, Homo sapiens
  misc_RNA (1)...(19): siRNA sense strand
guaguaacaucggaacagu

SEQ ID NO: 461897 - RNA, 19 nt, Homo sapiens
  misc_RNA (1)...(19): siRNA sense strand
cgaauucacaacaauaugu

SEQ ID NO: 461898 - RNA, 19 nt, Homo sapiens
  misc_RNA (1)...(19): siRNA sense strand
cagcgaauucacaacaaua

SEQ ID NO: 461899 - RNA, 19 nt, Homo sapiens
  misc_RNA (1)...(19): siRNA sense strand
ucuacaaacuggacuucaa

SEQ ID NO: 461900 - RNA, 19 nt, Homo sapiens
  misc_RNA (1)...(19): siRNA sense strand
uacaaacggagauaucuuu

SEQ ID NO: 461901 - RNA, 19 nt, Homo sapiens
  misc_RNA (1)...(19): siRNA sense strand
ggaagggaucaaccucaaa

SEQ ID NO: 461902 - RNA, 19 nt, Homo sapiens
  misc_RNA (1)...(19): siRNA sense strand
ugugugguguugcguagua

SEQ ID NO: 461903 - RNA, 19 nt, Homo sapiens
  misc_RNA (1)...(19): siRNA sense strand
gaagucaucugucauuaaa

SEQ ID NO: 461904 - RNA, 19 nt, Homo sapiens
  misc_RNA (1)...(19): siRNA sense strand
gaagagaaguccaacagaa

SEQ ID NO: 461905 - RNA, 19 nt, Homo sapiens
  misc_RNA (1)...(19): siRNA sense strand
gaaguucuguccucgguua

SEQ ID NO: 461906 - RNA, 19 nt, Homo sapiens
  misc_RNA (1)...(19): siRNA sense strand
cuacggagauggaugauaa

SEQ ID NO: 461907 - RNA, 19 nt, Homo sapiens
  misc_RNA (1)...(19): siRNA sense strand
gcagugauaguauggauua

SEQ ID NO: 461908 - RNA, 19 nt, Homo sapiens
  misc_RNA (1)...(19): siRNA sense strand
ggaagcgccuggaagauga

SEQ ID NO: 461909 - RNA, 19 nt, Homo sapiens
  misc_RNA (1)...(19): siRNA sense strand
caagugcccuucugcauga

SEQ ID NO: 461910 - RNA, 19 nt, Homo sapiens
  misc_RNA (1)...(19): siRNA sense strand
ggacagacgucaggcagaa

SEQ ID NO: 461911 - RNA, 19 nt, Homo sapiens
  misc_RNA (1)...(19): siRNA sense strand
caaaaugccugaugaugua

SEQ ID NO: 461912 - RNA, 19 nt, Homo sapiens
  misc_RNA (1)...(19): siRNA sense strand
aaacacagcccaacaguga

SEQ ID NO: 461913 - RNA, 19 nt, Homo sapiens
  misc_RNA (1)...(19): siRNA sense strand
gaaaucugcuacuccguau

SEQ ID NO: 461914 - RNA, 19 nt, Homo sapiens
  misc_RNA (1)...(19): siRNA sense strand
ucagugaaaugaugaaaug

SEQ ID NO: 461915 - RNA, 19 nt, Homo sapiens
  misc_RNA (1)...(19): siRNA sense strand
cgauauggcaucuguguua

SEQ ID NO: 461916 - RNA, 19 nt, Homo sapiens
  misc_RNA (1)...(19): siRNA sense strand
gugauaguauggauuauga

SEQ ID NO: 461917 - RNA, 19 nt, Homo sapiens
  misc_RNA (1)...(19): siRNA sense strand
gaugauaguggcagugaua

SEQ ID NO: 461918 - RNA, 19 nt, Homo sapiens
  misc_RNA (1)...(19): siRNA sense strand
ccacugcgcuccagcucua

SEQ ID NO: 461919 - RNA, 19 nt, Homo sapiens
  misc_RNA (1)...(19): siRNA sense strand
gugaaaugaugaaauguga

SEQ ID NO: 461920 - RNA, 19 nt, Homo sapiens
  misc_RNA (1)...(19): siRNA sense strand
ggacagcaauagggugauu

SEQ ID NO: 461921 - RNA, 19 nt, Homo sapiens
  misc_RNA (1)...(19): siRNA sense strand
gcaaaucaaugaggugcuu

SEQ ID NO: 461922 - RNA, 19 nt, Homo sapiens
  misc_RNA (1)...(19): siRNA sense strand
caccagaaguuuaaaggaa

SEQ ID NO: 461923 - RNA, 19 nt, Homo sapiens
  misc_RNA (1)...(19): siRNA sense strand
gauauggcaucuguguuaa

SEQ ID NO: 461924 - RNA, 19 nt, Homo sapiens
  misc_RNA (1)...(19): siRNA sense strand
uauuaugucucuucucgua

SEQ ID NO: 461925 - RNA, 19 nt, Homo sapiens
  misc_RNA (1)...(19): siRNA sense strand
caacagaaaguguaaauac

SEQ ID NO: 461926 - RNA, 19 nt, Homo sapiens
  misc_RNA (1)...(19): siRNA sense strand
caagcuggcuccuuucuag

SEQ ID NO: 461927 - RNA, 19 nt, Homo sapiens
  misc_RNA (1)...(19): siRNA sense strand
gugcuaaccugcauucugu

SEQ ID NO: 461928 - RNA, 19 nt, Homo sapiens
  misc_RNA (1)...(19): siRNA sense strand
gauaguggcagugauagua

SEQ ID NO: 461929 - RNA, 19 nt, Homo sapiens
  misc_RNA (1)...(19): siRNA sense strand
guacguggcugcaguucau

SEQ ID NO: 461930 - RNA, 19 nt, Homo sapiens
  misc_RNA (1)...(19): siRNA sense strand
ucaaauucaugcacaauca

SEQ ID NO: 461931 - RNA, 19 nt, Homo sapiens
  misc_RNA (1)...(19): siRNA sense strand
agacccagcucaacaaguu

SEQ ID NO: 461932 - RNA, 19 nt, Homo sapiens
  misc_RNA (1)...(19): siRNA sense strand
ccagcgagguggagauuga

SEQ ID NO: 461933 - RNA, 19 nt, Homo sapiens
  misc_RNA (1)...(19): siRNA sense strand
gagcuguacuacuguguga

SEQ ID NO: 461934 - RNA, 19 nt, Homo sapiens
  misc_RNA (1)...(19): siRNA sense strand
guacaugcagggacagaua

SEQ ID NO: 461935 - RNA, 19 nt, Homo sapiens
  misc_RNA (1)...(19): siRNA sense strand
gaagcagacauuuguggua

SEQ ID NO: 461936 - RNA, 19 nt, Homo sapiens
  misc_RNA (1)...(19): siRNA sense strand
gcucugaccuuugcucuuc

SEQ ID NO: 461937 - RNA, 19 nt, Homo sapiens
  misc_RNA (1)...(19): siRNA sense strand
gagaagggauggguaugga

SEQ ID NO: 461938 - RNA, 19 nt, Homo sapiens
  misc_RNA (1)...(19): siRNA sense strand
ugaauuggguggcgaguuc

SEQ ID NO: 461939 - RNA, 19 nt, Homo sapiens
  misc_RNA (1)...(19): siRNA sense strand
agacgaagguguugugcuu

SEQ ID NO: 461940 - RNA, 19 nt, Homo sapiens
  misc_RNA (1)...(19): siRNA sense strand
ugaagaagcagacauuugu

SEQ ID NO: 461941 - RNA, 19 nt, Homo sapiens
  misc_RNA (1)...(19): siRNA sense strand
gaagggaucaaccucaaau

SEQ ID NO: 461942 - RNA, 19 nt, Homo sapiens
  misc_RNA (1)...(19): siRNA sense strand
gcaugagccuucgggauga

SEQ ID NO: 461943 - RNA, 19 nt, Homo sapiens
  misc_RNA (1)...(19): siRNA sense strand
ggaucaaccucaaauucau

SEQ ID NO: 461944 - RNA, 19 nt, Homo sapiens
  misc_RNA (1)...(19): siRNA sense strand
gaaaugaugaaaugugaca

SEQ ID NO: 461945 - RNA, 19 nt, Homo sapiens
  misc_RNA (1)...(19): siRNA sense strand
cagaaucacuagagcugaa

SEQ ID NO: 461946 - RNA, 19 nt, Homo sapiens
  misc_RNA (1)...(19): siRNA sense strand
gcaucuguguuaacuucua

SEQ ID NO: 461947 - RNA, 19 nt, Homo sapiens
  misc_RNA (1)...(19): siRNA sense strand
acacuggagucacgcgaua

SEQ ID NO: 461948 - RNA, 19 nt, Homo sapiens
  misc_RNA (1)...(19): siRNA sense strand
ggcccagacuccugaauug

SEQ ID NO: 461949 - RNA, 19 nt, Homo sapiens
  misc_RNA (1)...(19): siRNA sense strand
ggacugaucaagacucugu

SEQ ID NO: 461950 - RNA, 19 nt, Homo sapiens
  misc_RNA (1)...(19): siRNA sense strand
aguaccagcuucagucuuu

SEQ ID NO: 461951 - RNA, 19 nt, Homo sapiens
  misc_RNA (1)...(19): siRNA sense strand
gcaugaccuucgagagauu

SEQ ID NO: 461952 - RNA, 19 nt, Homo sapiens
  misc_RNA (1)...(19): siRNA sense strand
aaucugcuacuccguauua

SEQ ID NO: 461953 - RNA, 19 nt, Homo sapiens
  misc_RNA (1)...(19): siRNA sense strand
gcccagacccacuacuaua

SEQ ID NO: 461954 - RNA, 19 nt, Homo sapiens
  misc_RNA (1)...(19): siRNA sense strand
cagggucgauccagcaauu

SEQ ID NO: 461955 - RNA, 19 nt, Homo sapiens
  misc_RNA (1)...(19): siRNA sense strand
gaaaagagaaccuccauca

SEQ ID NO: 461956 - RNA, 19 nt, Homo sapiens
  misc_RNA (1)...(19): siRNA sense strand
gauucacccuaguggauuu

SEQ ID NO: 461957 - RNA, 19 nt, Homo sapiens
  misc_RNA (1)...(19): siRNA sense strand
ccagacuccugaauugcua

SEQ ID NO: 461958 - RNA, 19 nt, Homo sapiens
  misc_RNA (1)...(19): siRNA sense strand
agaaugacauccgcaagaa

SEQ ID NO: 461959 - RNA, 19 nt, Homo sapiens
  misc_RNA (1)...(19): siRNA sense strand
cuucuuagaugcugugaug

SEQ ID NO: 461960 - RNA, 19 nt, Homo sapiens
  misc_RNA (1)...(19): siRNA sense strand
gagcagcaaugcaggugau

SEQ ID NO: 461961 - RNA, 19 nt, Homo sapiens
  misc_RNA (1)...(19): siRNA sense strand
gauucaagcucuucuuacu

SEQ ID NO: 461962 - RNA, 19 nt, Homo sapiens
  misc_RNA (1)...(19): siRNA sense strand
ccaacgugcugcagggauu

SEQ ID NO: 461963 - RNA, 19 nt, Homo sapiens
  misc_RNA (1)...(19): siRNA sense strand
ccuggaagaugaugaagau

SEQ ID NO: 461964 - RNA, 19 nt, Homo sapiens
  misc_RNA (1)...(19): siRNA sense strand
gaaguaaucaaaccugucu

SEQ ID NO: 461965 - RNA, 19 nt, Homo sapiens
  misc_RNA (1)...(19): siRNA sense strand
gaagaggguggcacugaga

SEQ ID NO: 461966 - RNA, 19 nt, Homo sapiens
  misc_RNA (1)...(19): siRNA sense strand
caucaaacccggaccugaa

SEQ ID NO: 461967 - RNA, 19 nt, Homo sapiens
  misc_RNA (1)...(19): siRNA sense strand
acgagaagcucaucaacau

SEQ ID NO: 461968 - RNA, 19 nt, Homo sapiens
  misc_RNA (1)...(19): siRNA sense strand
ccagaggacugaucaagac

SEQ ID NO: 461969 - RNA, 19 nt, Homo sapiens
  misc_RNA (1)...(19): siRNA sense strand
ggugugagccugacgucua

SEQ ID NO: 461970 - RNA, 19 nt, Homo sapiens
  misc_RNA (1)...(19): siRNA sense strand
guacaaagggacaccaugu

SEQ ID NO: 461971 - RNA, 19 nt, Homo sapiens
  misc_RNA (1)...(19): siRNA sense strand
ggagggcguuaguggauca

SEQ ID NO: 461972 - RNA, 19 nt, Homo sapiens
  misc_RNA (1)...(19): siRNA sense strand
gggaucaaccucaaauuca

SEQ ID NO: 461973 - RNA, 19 nt, Homo sapiens
  misc_RNA (1)...(19): siRNA sense strand
gaugauaccucuuuugucu

SEQ ID NO: 461974 - RNA, 19 nt, Homo sapiens
  misc_RNA (1)...(19): siRNA sense strand
gaguccagcuguuaugauc

SEQ ID NO: 461975 - RNA, 19 nt, Homo sapiens
  misc_RNA (1)...(19): siRNA sense strand
ccagccagcucugaccuuu

SEQ ID NO: 461976 - RNA, 19 nt, Homo sapiens
  misc_RNA (1)...(19): siRNA sense strand
uaacaucggaacaguguau

SEQ ID NO: 461977 - RNA, 19 nt, Homo sapiens
  misc_RNA (1)...(19): siRNA sense strand
caaaggcuauggcacaacu

SEQ ID NO: 461978 - RNA, 19 nt, Homo sapiens
  misc_RNA (1)...(19): siRNA sense strand
ggaagagaaguccaacaga

SEQ ID NO: 461979 - RNA, 19 nt, Homo sapiens
  misc_RNA (1)...(19): siRNA sense strand
gguguacaagggaauguua

SEQ ID NO: 461980 - RNA, 19 nt, Homo sapiens
  misc_RNA (1)...(19): siRNA sense strand
ccacggagccaacucugaa

SEQ ID NO: 461981 - RNA, 19 nt, Homo sapiens
  misc_RNA (1)...(19): siRNA sense strand
uugacgagcugcagaauca

SEQ ID NO: 461982 - RNA, 19 nt, Homo sapiens
  misc_RNA (1)...(19): siRNA sense strand
gaauucaacccacucaucu

SEQ ID NO: 461983 - RNA, 19 nt, Homo sapiens
  misc_RNA (1)...(19): siRNA sense strand
cucaacaaguucuauacua

SEQ ID NO: 461984 - RNA, 19 nt, Homo sapiens
  misc_RNA (1)...(19): siRNA sense strand
gaaggugaggcgccuaaug

SEQ ID NO: 461985 - RNA, 19 nt, Homo sapiens
  misc_RNA (1)...(19): siRNA sense strand
aggaaaugaucgacaggua

SEQ ID NO: 461986 - RNA, 19 nt, Homo sapiens
  misc_RNA (1)...(19): siRNA sense strand
ccagaaguuuaaaggaaga

SEQ ID NO: 461987 - RNA, 19 nt, Homo sapiens
  misc_RNA (1)...(19): siRNA sense strand
gccagcaucuuugggcuuu

SEQ ID NO: 461988 - RNA, 19 nt, Homo sapiens
  misc_RNA (1)...(19): siRNA sense strand
guacaguccucagcuugga

SEQ ID NO: 461989 - RNA, 19 nt, Homo sapiens
  misc_RNA (1)...(19): siRNA sense strand
gugacaagccaaaguggua

SEQ ID NO: 461990 - RNA, 19 nt, Homo sapiens
  misc_RNA (1)...(19): siRNA sense strand
uggcggaucuuuacuggau

SEQ ID NO: 461991 - RNA, 19 nt, Homo sapiens
  misc_RNA (1)...(19): siRNA sense strand
gaagguaaauaagaaugac

SEQ ID NO: 461992 - RNA, 19 nt, Homo sapiens
  misc_RNA (1)...(19): siRNA sense strand
uggcaucuguguuaacuuc

SEQ ID NO: 461993 - RNA, 19 nt, Homo sapiens
  misc_RNA (1)...(19): siRNA sense strand
uguuagaccuccucaagug

SEQ ID NO: 461994 - RNA, 19 nt, Homo sapiens
  misc_RNA (1)...(19): siRNA sense strand
ccagacccaucucgauuca

SEQ ID NO: 461995 - RNA, 19 nt, Homo sapiens
  misc_RNA (1)...(19): siRNA sense strand
gucgggagcuguacuacug

SEQ ID NO: 461996 - RNA, 19 nt, Homo sapiens
  misc_RNA (1)...(19): siRNA sense strand
guaguaacaucggaacagu

SEQ ID NO: 461997 - RNA, 19 nt, Homo sapiens
  misc_RNA (1)...(19): siRNA sense strand
cgaauucacaacaauaugu

SEQ ID NO: 461998 - RNA, 19 nt, Homo sapiens
  misc_RNA (1)...(19): siRNA sense strand
cagcgaauucacaacaaua

SEQ ID NO: 461999 - RNA, 19 nt, Homo sapiens
  misc_RNA (1)...(19): siRNA sense strand
ucuacaaacuggacuucaa

SEQ ID NO: 462000 - RNA, 19 nt, Homo sapiens
  misc_RNA (1)...(19): siRNA sense strand
uacaaacggagauaucuuu

SEQ ID NO: 462001 - RNA, 19 nt, Homo sapiens
  misc_RNA (1)...(19): siRNA sense strand
ggaagggaucaaccucaaa

SEQ ID NO: 462002 - RNA, 19 nt, Homo sapiens
  misc_RNA (1)...(19): siRNA sense strand
ugugugguguugcguagua

SEQ ID NO: 462003 - RNA, 19 nt, Homo sapiens
  misc_RNA (1)...(19): siRNA sense strand
gaagucaucugucauuaaa

SEQ ID NO: 462004 - RNA, 19 nt, Homo sapiens
  misc_RNA (1)...(19): siRNA sense strand
gaagagaaguccaacagaa

SEQ ID NO: 462005 - RNA, 19 nt, Homo sapiens
  misc_RNA (1)...(19): siRNA sense strand
gaaguucuguccucgguua

SEQ ID NO: 462006 - RNA, 19 nt, Homo sapiens
  misc_RNA (1)...(19): siRNA sense strand
cuacggagauggaugauaa

SEQ ID NO: 462007 - RNA, 19 nt, Homo sapiens
  misc_RNA (1)...(19): siRNA sense strand
gcagugauaguauggauua

SEQ ID NO: 462008 - RNA, 19 nt, Homo sapiens
  misc_RNA (1)...(19): siRNA sense strand
ggaagcgccuggaagauga

SEQ ID NO: 462009 - RNA, 19 nt, Homo sapiens
  misc_RNA (1)...(19): siRNA sense strand
caagugcccuucugcauga

SEQ ID NO: 462010 - RNA, 19 nt, Homo sapiens
  misc_RNA (1)...(19): siRNA sense strand
ggacagacgucaggcagaa

SEQ ID NO: 462011 - RNA, 19 nt, Homo sapiens
  misc_RNA (1)...(19): siRNA sense strand
caaaaugccugaugaugua

SEQ ID NO: 462012 - RNA, 19 nt, Homo sapiens
  misc_RNA (1)...(19): siRNA sense strand
aaacacagcccaacaguga

SEQ ID NO: 462013 - RNA, 19 nt, Homo sapiens
  misc_RNA (1)...(19): siRNA sense strand
gaaaucugcuacuccguau

SEQ ID NO: 462014 - RNA, 19 nt, Homo sapiens
  misc_RNA (1)...(19): siRNA sense strand
ucagugaaaugaugaaaug

SEQ ID NO: 462015 - RNA, 19 nt, Homo sapiens
  misc_RNA (1)...(19): siRNA sense strand
cgauauggcaucuguguua

SEQ ID NO: 462016 - RNA, 19 nt, Homo sapiens
  misc_RNA (1)...(19): siRNA sense strand
gugauaguauggauuauga

SEQ ID NO: 462017 - RNA, 19 nt, Homo sapiens
  misc_RNA (1)...(19): siRNA sense strand
gaugauaguggcagugaua

SEQ ID NO: 462018 - RNA, 19 nt, Homo sapiens
  misc_RNA (1)...(19): siRNA sense strand
ccacugcgcuccagcucua

SEQ ID NO: 462019 - RNA, 19 nt, Homo sapiens
  misc_RNA (1)...(19): siRNA sense strand
gugaaaugaugaaauguga

SEQ ID NO: 462020 - RNA, 19 nt, Homo sapiens
  misc_RNA (1)...(19): siRNA sense strand
ggacagcaauagggugauu

SEQ ID NO: 462021 - RNA, 19 nt, Homo sapiens
  misc_RNA (1)...(19): siRNA sense strand
gcaaaucaaugaggugcuu

SEQ ID NO: 462022 - RNA, 19 nt, Homo sapiens
  misc_RNA (1)...(19): siRNA sense strand
caccagaaguuuaaaggaa

SEQ ID NO: 462023 - RNA, 19 nt, Homo sapiens
  misc_RNA (1)...(19): siRNA sense strand
gauauggcaucuguguuaa

SEQ ID NO: 462024 - RNA, 19 nt, Homo sapiens
  misc_RNA (1)...(19): siRNA sense strand
uauuaugucucuucucgua

SEQ ID NO: 462025 - RNA, 19 nt, Homo sapiens
  misc_RNA (1)...(19): siRNA sense strand
caacagaaaguguaaauac

SEQ ID NO: 462026 - RNA, 19 nt, Homo sapiens
  misc_RNA (1)...(19): siRNA sense strand
caagcuggcuccuuucuag

SEQ ID NO: 462027 - RNA, 19 nt, Homo sapiens
  misc_RNA (1)...(19): siRNA sense strand
gugcuaaccugcauucugu

SEQ ID NO: 462028 - RNA, 19 nt, Homo sapiens
  misc_RNA (1)...(19): siRNA sense strand
gauaguggcagugauagua

SEQ ID NO: 462029 - RNA, 19 nt, Homo sapiens
  misc_RNA (1)...(19): siRNA sense strand
guacguggcugcaguucau

SEQ ID NO: 462030 - RNA, 19 nt, Homo sapiens
  misc_RNA (1)...(19): siRNA sense strand
ucaaauucaugcacaauca

SEQ ID NO: 462031 - RNA, 19 nt, Homo sapiens
  misc_RNA (1)...(19): siRNA sense strand
agacccagcucaacaaguu

SEQ ID NO: 462032 - RNA, 19 nt, Homo sapiens
  misc_RNA (1)...(19): siRNA sense strand
ccagcgagguggagauuga

SEQ ID NO: 462033 - RNA, 19 nt, Homo sapiens
  misc_RNA (1)...(19): siRNA sense strand
gagcuguacuacuguguga

SEQ ID NO: 462034 - RNA, 19 nt, Homo sapiens
  misc_RNA (1)...(19): siRNA sense strand
guacaugcagggacagaua

SEQ ID NO: 462035 - RNA, 19 nt, Homo sapiens
  misc_RNA (1)...(19): siRNA sense strand
gaagcagacauuuguggua

SEQ ID NO: 462036 - RNA, 19 nt, Homo sapiens
  misc_RNA (1)...(19): siRNA sense strand
gcucugaccuuugcucuuc

SEQ ID NO: 462037 - RNA, 19 nt, Homo sapiens
  misc_RNA (1)...(19): siRNA sense strand
gagaagggauggguaugga

SEQ ID NO: 462038 - RNA, 19 nt, Homo sapiens
  misc_RNA (1)...(19): siRNA sense strand
ugaauuggguggcgaguuc

SEQ ID NO: 462039 - RNA, 19 nt, Homo sapiens
  misc_RNA (1)...(19): siRNA sense strand
agacgaagguguugugcuu

SEQ ID NO: 462040 - RNA, 19 nt, Homo sapiens
  misc_RNA (1)...(19): siRNA sense strand
ugaagaagcagacauuugu

SEQ ID NO: 462041 - RNA, 19 nt, Homo sapiens
  misc_RNA (1)...(19): siRNA sense strand
gaagggaucaaccucaaau

SEQ ID NO: 462042 - RNA, 19 nt, Homo sapiens
  misc_RNA (1)...(19): siRNA sense strand
gcaugagccuucgggauga

SEQ ID NO: 462043 - RNA, 19 nt, Homo sapiens
  misc_RNA (1)...(19): siRNA sense strand
ggaucaaccucaaauucau

SEQ ID NO: 462044 - RNA, 19 nt, Homo sapiens
  misc_RNA (1)...(19): siRNA sense strand
gaaaugaugaaaugugaca

SEQ ID NO: 462045 - RNA, 19 nt, Homo sapiens
  misc_RNA (1)...(19): siRNA sense strand
cagaaucacuagagcugaa

SEQ ID NO: 462046 - RNA, 19 nt, Homo sapiens
  misc_RNA (1)...(19): siRNA sense strand
gcaucuguguuaacuucua

SEQ ID NO: 462047 - RNA, 19 nt, Homo sapiens
  misc_RNA (1)...(19): siRNA sense strand
acacuggagucacgcgaua

SEQ ID NO: 462048 - RNA, 19 nt, Homo sapiens
  misc_RNA (1)...(19): siRNA sense strand
ggcccagacuccugaauug

SEQ ID NO: 462049 - RNA, 19 nt, Homo sapiens
  misc_RNA (1)...(19): siRNA sense strand
ggacugaucaagacucugu

SEQ ID NO: 462050 - RNA, 19 nt, Homo sapiens
  misc_RNA (1)...(19): siRNA sense strand
aguaccagcuucagucuuu

SEQ ID NO: 462051 - RNA, 19 nt, Homo sapiens
  misc_RNA (1)...(19): siRNA sense strand
gcaugaccuucgagagauu

SEQ ID NO: 462052 - RNA, 19 nt, Homo sapiens
  misc_RNA (1)...(19): siRNA sense strand
aaucugcuacuccguauua

SEQ ID NO: 462053 - RNA, 19 nt, Homo sapiens
  misc_RNA (1)...(19): siRNA sense strand
gcccagacccacuacuaua

SEQ ID NO: 462054 - RNA, 19 nt, Homo sapiens
  misc_RNA (1)...(19): siRNA sense strand
cagggucgauccagcaauu

SEQ ID NO: 462055 - RNA, 19 nt, Homo sapiens
  misc_RNA (1)...(19): siRNA sense strand
gaaaagagaaccuccauca

SEQ ID NO: 462056 - RNA, 19 nt, Homo sapiens
  misc_RNA (1)...(19): siRNA sense strand
gauucacccuaguggauuu

SEQ ID NO: 462057 - RNA, 19 nt, Homo sapiens
  misc_RNA (1)...(19): siRNA sense strand
ccagacuccugaauugcua

SEQ ID NO: 462058 - RNA, 19 nt, Homo sapiens
  misc_RNA (1)...(19): siRNA sense strand
agaaugacauccgcaagaa

SEQ ID NO: 462059 - RNA, 19 nt, Homo sapiens
  misc_RNA (1)...(19): siRNA sense strand
cuucuuagaugcugugaug

SEQ ID NO: 462060 - RNA, 19 nt, Homo sapiens
  misc_RNA (1)...(19): siRNA sense strand
gagcagcaaugcaggugau

SEQ ID NO: 462061 - RNA, 19 nt, Homo sapiens
  misc_RNA (1)...(19): siRNA sense strand
gauucaagcucuucuuacu

SEQ ID NO: 462062 - RNA, 19 nt, Homo sapiens
  misc_RNA (1)...(19): siRNA sense strand
ccaacgugcugcagggauu

SEQ ID NO: 462063 - RNA, 19 nt, Homo sapiens
  misc_RNA (1)...(19): siRNA sense strand
ccuggaagaugaugaagau

SEQ ID NO: 462064 - RNA, 19 nt, Homo sapiens
  misc_RNA (1)...(19): siRNA sense strand
gaaguaaucaaaccugucu

SEQ ID NO: 462065 - RNA, 19 nt, Homo sapiens
  misc_RNA (1)...(19): siRNA sense strand
gaagaggguggcacugaga

SEQ ID NO: 462066 - RNA, 19 nt, Homo sapiens
  misc_RNA (1)...(19): siRNA sense strand
caucaaacccggaccugaa

SEQ ID NO: 462067 - RNA, 19 nt, Homo sapiens
  misc_RNA (1)...(19): siRNA sense strand
acgagaagcucaucaacau

SEQ ID NO: 462068 - RNA, 19 nt, Homo sapiens
  misc_RNA (1)...(19): siRNA sense strand
ccagaggacugaucaagac

SEQ ID NO: 462069 - RNA, 19 nt, Homo sapiens
  misc_RNA (1)...(19): siRNA sense strand
ggugugagccugacgucua

SEQ ID NO: 462070 - RNA, 19 nt, Homo sapiens
  misc_RNA (1)...(19): siRNA sense strand
guacaaagggacaccaugu

SEQ ID NO: 462071 - RNA, 19 nt, Homo sapiens
  misc_RNA (1)...(19): siRNA sense strand
ggagggcguuaguggauca

SEQ ID NO: 462072 - RNA, 19 nt, Homo sapiens
  misc_RNA (1)...(19): siRNA sense strand
gggaucaaccucaaauuca

SEQ ID NO: 462073 - RNA, 19 nt, Homo sapiens
  misc_RNA (1)...(19): siRNA sense strand
gaugauaccucuuuugucu

SEQ ID NO: 462074 - RNA, 19 nt, Homo sapiens
  misc_RNA (1)...(19): siRNA sense strand
gaguccagcuguuaugauc

SEQ ID NO: 462075 - RNA, 19 nt, Homo sapiens
  misc_RNA (1)...(19): siRNA sense strand
ccagccagcucugaccuuu

SEQ ID NO: 462076 - RNA, 19 nt, Homo sapiens
  misc_RNA (1)...(19): siRNA sense strand
uaacaucggaacaguguau

SEQ ID NO: 462077 - RNA, 19 nt, Homo sapiens
  misc_RNA (1)...(19): siRNA sense strand
caaaggcuauggcacaacu

SEQ ID NO: 462078 - RNA, 19 nt, Homo sapiens
  misc_RNA (1)...(19): siRNA sense strand
ggaagagaaguccaacaga

SEQ ID NO: 462079 - RNA, 19 nt, Homo sapiens
  misc_RNA (1)...(19): siRNA sense strand
gguguacaagggaauguua

SEQ ID NO: 462080 - RNA, 19 nt, Homo sapiens
  misc_RNA (1)...(19): siRNA sense strand
ccacggagccaacucugaa

SEQ ID NO: 462081 - RNA, 19 nt, Homo sapiens
  misc_RNA (1)...(19): siRNA sense strand
uugacgagcugcagaauca

SEQ ID NO: 462082 - RNA, 19 nt, Homo sapiens
  misc_RNA (1)...(19): siRNA sense strand
gaauucaacccacucaucu

SEQ ID NO: 462083 - RNA, 19 nt, Homo sapiens
  misc_RNA (1)...(19): siRNA sense strand
cucaacaaguucuauacua

SEQ ID NO: 462084 - RNA, 19 nt, Homo sapiens
  misc_RNA (1)...(19): siRNA sense strand
gaaggugaggcgccuaaug

SEQ ID NO: 462085 - RNA, 19 nt, Homo sapiens
  misc_RNA (1)...(19): siRNA sense strand
aggaaaugaucgacaggua

SEQ ID NO: 462086 - RNA, 19 nt, Homo sapiens
  misc_RNA (1)...(19): siRNA sense strand
ccagaaguuuaaaggaaga

SEQ ID NO: 462087 - RNA, 19 nt, Homo sapiens
  misc_RNA (1)...(19): siRNA sense strand
gccagcaucuuugggcuuu

SEQ ID NO: 462088 - RNA, 19 nt, Homo sapiens
  misc_RNA (1)...(19): siRNA sense strand
guacaguccucagcuugga

SEQ ID NO: 462089 - RNA, 19 nt, Homo sapiens
  misc_RNA (1)...(19): siRNA sense strand
gugacaagccaaaguggua

SEQ ID NO: 462090 - RNA, 19 nt, Homo sapiens
  misc_RNA (1)...(19): siRNA sense strand
uggcggaucuuuacuggau

SEQ ID NO: 462091 - RNA, 19 nt, Homo sapiens
  misc_RNA (1)...(19): siRNA sense strand
gaagguaaauaagaaugac

SEQ ID NO: 462092 - RNA, 19 nt, Homo sapiens
  misc_RNA (1)...(19): siRNA sense strand
uggcaucuguguuaacuuc

SEQ ID NO: 462093 - RNA, 19 nt, Homo sapiens
  misc_RNA (1)...(19): siRNA sense strand
uguuagaccuccucaagug

SEQ ID NO: 462094 - RNA, 19 nt, Homo sapiens
  misc_RNA (1)...(19): siRNA sense strand
ccagacccaucucgauuca

SEQ ID NO: 462095 - RNA, 19 nt, Homo sapiens
  misc_RNA (1)...(19): siRNA sense strand
gucgggagcuguacuacug

SEQ ID NO: 462096 - RNA, 19 nt, Homo sapiens
  misc_RNA (1)...(19): siRNA sense strand
guaguaacaucggaacagu

SEQ ID NO: 462097 - RNA, 19 nt, Homo sapiens
  misc_RNA (1)...(19): siRNA sense strand
cgaauucacaacaauaugu

SEQ ID NO: 462098 - RNA, 19 nt, Homo sapiens
  misc_RNA (1)...(19): siRNA sense strand
cagcgaauucacaacaaua

SEQ ID NO: 462099 - RNA, 19 nt, Homo sapiens
  misc_RNA (1)...(19): siRNA sense strand
ucuacaaacuggacuucaa

SEQ ID NO: 462100 - RNA, 19 nt, Homo sapiens
  misc_RNA (1)...(19): siRNA sense strand
uacaaacggagauaucuuu

SEQ ID NO: 462101 - RNA, 19 nt, Homo sapiens
  misc_RNA (1)...(19): siRNA sense strand
ggaagggaucaaccucaaa

SEQ ID NO: 462102 - RNA, 19 nt, Homo sapiens
  misc_RNA (1)...(19): siRNA sense strand
ugugugguguugcguagua

SEQ ID NO: 462103 - RNA, 19 nt, Homo sapiens
  misc_RNA (1)...(19): siRNA sense strand
gaagucaucugucauuaaa

SEQ ID NO: 462104 - RNA, 19 nt, Homo sapiens
  misc_RNA (1)...(19): siRNA sense strand
gaagagaaguccaacagaa

SEQ ID NO: 462105 - RNA, 19 nt, Homo sapiens
  misc_RNA (1)...(19): siRNA sense strand
gaaguucuguccucgguua

SEQ ID NO: 462106 - RNA, 19 nt, Homo sapiens
  misc_RNA (1)...(19): siRNA sense strand
cuacggagauggaugauaa

SEQ ID NO: 462107 - RNA, 19 nt, Homo sapiens
  misc_RNA (1)...(19): siRNA sense strand
gcagugauaguauggauua

SEQ ID NO: 462108 - RNA, 19 nt, Homo sapiens
  misc_RNA (1)...(19): siRNA sense strand
ggaagcgccuggaagauga

SEQ ID NO: 462109 - RNA, 19 nt, Homo sapiens
  misc_RNA (1)...(19): siRNA sense strand
caagugcccuucugcauga

SEQ ID NO: 462110 - RNA, 19 nt, Homo sapiens
  misc_RNA (1)...(19): siRNA sense strand
ggacagacgucaggcagaa

SEQ ID NO: 462111 - RNA, 19 nt, Homo sapiens
  misc_RNA (1)...(19): siRNA sense strand
caaaaugccugaugaugua

SEQ ID NO: 462112 - RNA, 19 nt, Homo sapiens
  misc_RNA (1)...(19): siRNA sense strand
aaacacagcccaacaguga

SEQ ID NO: 462113 - RNA, 19 nt, Homo sapiens
  misc_RNA (1)...(19): siRNA sense strand
gaaaucugcuacuccguau

SEQ ID NO: 462114 - RNA, 19 nt, Homo sapiens
  misc_RNA (1)...(19): siRNA sense strand
ucagugaaaugaugaaaug

SEQ ID NO: 462115 - RNA, 19 nt, Homo sapiens
  misc_RNA (1)...(19): siRNA sense strand
cgauauggcaucuguguua

SEQ ID NO: 462116 - RNA, 19 nt, Homo sapiens
  misc_RNA (1)...(19): siRNA sense strand
gugauaguauggauuauga

SEQ ID NO: 462117 - RNA, 19 nt, Homo sapiens
  misc_RNA (1)...(19): siRNA sense strand
gaugauaguggcagugaua

SEQ ID NO: 462118 - RNA, 19 nt, Homo sapiens
  misc_RNA (1)...(19): siRNA sense strand
ccacugcgcuccagcucua

SEQ ID NO: 462119 - RNA, 19 nt, Homo sapiens
  misc_RNA (1)...(19): siRNA sense strand
gugaaaugaugaaauguga

SEQ ID NO: 462120 - RNA, 19 nt, Homo sapiens
  misc_RNA (1)...(19): siRNA sense strand
ggacagcaauagggugauu

SEQ ID NO: 462121 - RNA, 19 nt, Homo sapiens
  misc_RNA (1)...(19): siRNA sense strand
gcaaaucaaugaggugcuu

SEQ ID NO: 462122 - RNA, 19 nt, Homo sapiens
  misc_RNA (1)...(19): siRNA sense strand
caccagaaguuuaaaggaa

SEQ ID NO: 462123 - RNA, 19 nt, Homo sapiens
  misc_RNA (1)...(19): siRNA sense strand
gauauggcaucuguguuaa

SEQ ID NO: 462124 - RNA, 19 nt, Homo sapiens
  misc_RNA (1)...(19): siRNA sense strand
uauuaugucucuucucgua

SEQ ID NO: 462125 - RNA, 19 nt, Homo sapiens
  misc_RNA (1)...(19): siRNA sense strand
caacagaaaguguaaauac

SEQ ID NO: 462126 - RNA, 19 nt, Homo sapiens
  misc_RNA (1)...(19): siRNA sense strand
caagcuggcuccuuucuag

SEQ ID NO: 462127 - RNA, 19 nt, Homo sapiens
  misc_RNA (1)...(19): siRNA sense strand
gugcuaaccugcauucugu

SEQ ID NO: 462128 - RNA, 19 nt, Homo sapiens
  misc_RNA (1)...(19): siRNA sense strand
gauaguggcagugauagua

SEQ ID NO: 462129 - RNA, 19 nt, Homo sapiens
  misc_RNA (1)...(19): siRNA sense strand
guacguggcugcaguucau

SEQ ID NO: 462130 - RNA, 19 nt, Homo sapiens
  misc_RNA (1)...(19): siRNA sense strand
ucaaauucaugcacaauca

SEQ ID NO: 462131 - RNA, 19 nt, Homo sapiens
  misc_RNA (1)...(19): siRNA sense strand
agacccagcucaacaaguu

SEQ ID NO: 462132 - RNA, 19 nt, Homo sapiens
  misc_RNA (1)...(19): siRNA sense strand
ccagcgagguggagauuga

SEQ ID NO: 462133 - RNA, 19 nt, Homo sapiens
  misc_RNA (1)...(19): siRNA sense strand
gagcuguacuacuguguga

SEQ ID NO: 462134 - RNA, 19 nt, Homo sapiens
  misc_RNA (1)...(19): siRNA sense strand
guacaugcagggacagaua

SEQ ID NO: 462135 - RNA, 19 nt, Homo sapiens
  misc_RNA (1)...(19): siRNA sense strand
gaagcagacauuuguggua

SEQ ID NO: 462136 - RNA, 19 nt, Homo sapiens
  misc_RNA (1)...(19): siRNA sense strand
gcucugaccuuugcucuuc

SEQ ID NO: 462137 - RNA, 19 nt, Homo sapiens
  misc_RNA (1)...(19): siRNA sense strand
gagaagggauggguaugga

SEQ ID NO: 462138 - RNA, 19 nt, Homo sapiens
  misc_RNA (1)...(19): siRNA sense strand
ugaauuggguggcgaguuc

SEQ ID NO: 462139 - RNA, 19 nt, Homo sapiens
  misc_RNA (1)...(19): siRNA sense strand
agacgaagguguugugcuu

SEQ ID NO: 462140 - RNA, 19 nt, Homo sapiens
  misc_RNA (1)...(19): siRNA sense strand
ugaagaagcagacauuugu

SEQ ID NO: 462141 - RNA, 19 nt, Homo sapiens
  misc_RNA (1)...(19): siRNA sense strand
gaagggaucaaccucaaau

SEQ ID NO: 462142 - RNA, 19 nt, Homo sapiens
  misc_RNA (1)...(19): siRNA sense strand
gcaugagccuucgggauga

SEQ ID NO: 462143 - RNA, 19 nt, Homo sapiens
  misc_RNA (1)...(19): siRNA sense strand
ggaucaaccucaaauucau

SEQ ID NO: 462144 - RNA, 19 nt, Homo sapiens
  misc_RNA (1)...(19): siRNA sense strand
gaaaugaugaaaugugaca

SEQ ID NO: 462145 - RNA, 19 nt, Homo sapiens
  misc_RNA (1)...(19): siRNA sense strand
cagaaucacuagagcugaa

SEQ ID NO: 462146 - RNA, 19 nt, Homo sapiens
  misc_RNA (1)...(19): siRNA sense strand
gcaucuguguuaacuucua

SEQ ID NO: 462147 - RNA, 19 nt, Homo sapiens
  misc_RNA (1)...(19): siRNA sense strand
acacuggagucacgcgaua

SEQ ID NO: 462148 - RNA, 19 nt, Homo sapiens
  misc_RNA (1)...(19): siRNA sense strand
ggcccagacuccugaauug

SEQ ID NO: 462149 - RNA, 19 nt, Homo sapiens
  misc_RNA (1)...(19): siRNA sense strand
ggacugaucaagacucugu

SEQ ID NO: 462150 - RNA, 19 nt, Homo sapiens
  misc_RNA (1)...(19): siRNA sense strand
aguaccagcuucagucuuu

SEQ ID NO: 462151 - RNA, 19 nt, Homo sapiens
  misc_RNA (1)...(19): siRNA sense strand
gcaugaccuucgagagauu

SEQ ID NO: 462152 - RNA, 19 nt, Homo sapiens
  misc_RNA (1)...(19): siRNA sense strand
aaucugcuacuccguauua

SEQ ID NO: 462153 - RNA, 19 nt, Homo sapiens
  misc_RNA (1)...(19): siRNA sense strand
gcccagacccacuacuaua

SEQ ID NO: 462154 - RNA, 19 nt, Homo sapiens
  misc_RNA (1)...(19): siRNA sense strand
cagggucgauccagcaauu

SEQ ID NO: 462155 - RNA, 19 nt, Homo sapiens
  misc_RNA (1)...(19): siRNA sense strand
gaaaagagaaccuccauca

SEQ ID NO: 462156 - RNA, 19 nt, Homo sapiens
  misc_RNA (1)...(19): siRNA sense strand
gauucacccuaguggauuu

SEQ ID NO: 462157 - RNA, 19 nt, Homo sapiens
  misc_RNA (1)...(19): siRNA sense strand
ccagacuccugaauugcua

SEQ ID NO: 462158 - RNA, 19 nt, Homo sapiens
  misc_RNA (1)...(19): siRNA sense strand
agaaugacauccgcaagaa

SEQ ID NO: 462159 - RNA, 19 nt, Homo sapiens
  misc_RNA (1)...(19): siRNA sense strand
cuucuuagaugcugugaug

SEQ ID NO: 462160 - RNA, 19 nt, Homo sapiens
  misc_RNA (1)...(19): siRNA sense strand
gagcagcaaugcaggugau

SEQ ID NO: 462161 - RNA, 19 nt, Homo sapiens
  misc_RNA (1)...(19): siRNA sense strand
gauucaagcucuucuuacu

SEQ ID NO: 462162 - RNA, 19 nt, Homo sapiens
  misc_RNA (1)...(19): siRNA sense strand
ccaacgugcugcagggauu

SEQ ID NO: 462163 - RNA, 19 nt, Homo sapiens
  misc_RNA (1)...(19): siRNA sense strand
ccuggaagaugaugaagau

SEQ ID NO: 462164 - RNA, 19 nt, Homo sapiens
  misc_RNA (1)...(19): siRNA sense strand
gaaguaaucaaaccugucu

SEQ ID NO: 462165 - RNA, 19 nt, Homo sapiens
  misc_RNA (1)...(19): siRNA sense strand
gaagaggguggcacugaga

SEQ ID NO: 462166 - RNA, 19 nt, Homo sapiens
  misc_RNA (1)...(19): siRNA sense strand
caucaaacccggaccugaa

SEQ ID NO: 462167 - RNA, 19 nt, Homo sapiens
  misc_RNA (1)...(19): siRNA sense strand
acgagaagcucaucaacau

SEQ ID NO: 462168 - RNA, 19 nt, Homo sapiens
  misc_RNA (1)...(19): siRNA sense strand
ccagaggacugaucaagac

SEQ ID NO: 462169 - RNA, 19 nt, Homo sapiens
  misc_RNA (1)...(19): siRNA sense strand
ggugugagccugacgucua

SEQ ID NO: 462170 - RNA, 19 nt, Homo sapiens
  misc_RNA (1)...(19): siRNA sense strand
guacaaagggacaccaugu

SEQ ID NO: 462171 - RNA, 19 nt, Homo sapiens
  misc_RNA (1)...(19): siRNA sense strand
ggagggcguuaguggauca

SEQ ID NO: 462172 - RNA, 19 nt, Homo sapiens
  misc_RNA (1)...(19): siRNA sense strand
gggaucaaccucaaauuca

SEQ ID NO: 462173 - RNA, 19 nt, Homo sapiens
  misc_RNA (1)...(19): siRNA sense strand
gaugauaccucuuuugucu

SEQ ID NO: 462174 - RNA, 19 nt, Homo sapiens
  misc_RNA (1)...(19): siRNA sense strand
gaguccagcuguuaugauc

SEQ ID NO: 462175 - RNA, 19 nt, Homo sapiens
  misc_RNA (1)...(19): siRNA sense strand
ccagccagcucugaccuuu

SEQ ID NO: 462176 - RNA, 19 nt, Homo sapiens
  misc_RNA (1)...(19): siRNA sense strand
uaacaucggaacaguguau

SEQ ID NO: 462177 - RNA, 19 nt, Homo sapiens
  misc_RNA (1)...(19): siRNA sense strand
caaaggcuauggcacaacu

SEQ ID NO: 462178 - RNA, 19 nt, Homo sapiens
  misc_RNA (1)...(19): siRNA sense strand
ggaagagaaguccaacaga

SEQ ID NO: 462179 - RNA, 19 nt, Homo sapiens
  misc_RNA (1)...(19): siRNA sense strand
gguguacaagggaauguua

SEQ ID NO: 462180 - RNA, 19 nt, Homo sapiens
  misc_RNA (1)...(19): siRNA sense strand
ccacggagccaacucugaa

SEQ ID NO: 462181 - RNA, 19 nt, Homo sapiens
  misc_RNA (1)...(19): siRNA sense strand
uugacgagcugcagaauca

SEQ ID NO: 462182 - RNA, 19 nt, Homo sapiens
  misc_RNA (1)...(19): siRNA sense strand
gaauucaacccacucaucu

SEQ ID NO: 462183 - RNA, 19 nt, Homo sapiens
  misc_RNA (1)...(19): siRNA sense strand
cucaacaaguucuauacua

SEQ ID NO: 462184 - RNA, 19 nt, Homo sapiens
  misc_RNA (1)...(19): siRNA sense strand
gaaggugaggcgccuaaug

SEQ ID NO: 462185 - RNA, 19 nt, Homo sapiens
  misc_RNA (1)...(19): siRNA sense strand
aggaaaugaucgacaggua

SEQ ID NO: 462186 - RNA, 19 nt, Homo sapiens
  misc_RNA (1)...(19): siRNA sense strand
ccagaaguuuaaaggaaga

SEQ ID NO: 462187 - RNA, 19 nt, Homo sapiens
  misc_RNA (1)...(19): siRNA sense strand
gccagcaucuuugggcuuu

SEQ ID NO: 462188 - RNA, 19 nt, Homo sapiens
  misc_RNA (1)...(19): siRNA sense strand
guacaguccucagcuugga

SEQ ID NO: 462189 - RNA, 19 nt, Homo sapiens
  misc_RNA (1)...(19): siRNA sense strand
gugacaagccaaaguggua

SEQ ID NO: 462190 - RNA, 19 nt, Homo sapiens
  misc_RNA (1)...(19): siRNA sense strand
uggcggaucuuuacuggau

SEQ ID NO: 462191 - RNA, 19 nt, Homo sapiens
  misc_RNA (1)...(19): siRNA sense strand
gaagguaaauaagaaugac

SEQ ID NO: 462192 - RNA, 19 nt, Homo sapiens
  misc_RNA (1)...(19): siRNA sense strand
uggcaucuguguuaacuuc

SEQ ID NO: 462193 - RNA, 19 nt, Homo sapiens
  misc_RNA (1)...(19): siRNA sense strand
uguuagaccuccucaagug

SEQ ID NO: 462194 - RNA, 19 nt, Homo sapiens
  misc_RNA (1)...(19): siRNA sense strand
ccagacccaucucgauuca

SEQ ID NO: 462195 - RNA, 19 nt, Homo sapiens
  misc_RNA (1)...(19): siRNA sense strand
gucgggagcuguacuacug

SEQ ID NO: 462196 - RNA, 19 nt, Homo sapiens
  misc_RNA (1)...(19): siRNA sense strand
guaguaacaucggaacagu

SEQ ID NO: 462197 - RNA, 19 nt, Homo sapiens
  misc_RNA (1)...(19): siRNA sense strand
cgaauucacaacaauaugu

SEQ ID NO: 462198 - RNA, 19 nt, Homo sapiens
  misc_RNA (1)...(19): siRNA sense strand
cagcgaauucacaacaaua

SEQ ID NO: 462199 - RNA, 19 nt, Homo sapiens
  misc_RNA (1)...(19): siRNA sense strand
ucuacaaacuggacuucaa

SEQ ID NO: 462200 - RNA, 19 nt, Homo sapiens
  misc_RNA (1)...(19): siRNA sense strand
uacaaacggagauaucuuu

SEQ ID NO: 462201 - RNA, 19 nt, Homo sapiens
  misc_RNA (1)...(19): siRNA sense strand
ggaagggaucaaccucaaa

SEQ ID NO: 462202 - RNA, 19 nt, Homo sapiens
  misc_RNA (1)...(19): siRNA sense strand
ugugugguguugcguagua

SEQ ID NO: 462203 - RNA, 19 nt, Homo sapiens
  misc_RNA (1)...(19): siRNA sense strand
gaagucaucugucauuaaa

SEQ ID NO: 462204 - RNA, 19 nt, Homo sapiens
  misc_RNA (1)...(19): siRNA sense strand
gaagagaaguccaacagaa

SEQ ID NO: 462205 - RNA, 19 nt, Homo sapiens
  misc_RNA (1)...(19): siRNA sense strand
gaaguucuguccucgguua

SEQ ID NO: 462206 - RNA, 19 nt, Homo sapiens
  misc_RNA (1)...(19): siRNA sense strand
cuacggagauggaugauaa

SEQ ID NO: 462207 - RNA, 19 nt, Homo sapiens
  misc_RNA (1)...(19): siRNA sense strand
gcagugauaguauggauua

SEQ ID NO: 462208 - RNA, 19 nt, Homo sapiens
  misc_RNA (1)...(19): siRNA sense strand
ggaagcgccuggaagauga

SEQ ID NO: 462209 - RNA, 19 nt, Homo sapiens
  misc_RNA (1)...(19): siRNA sense strand
caagugcccuucugcauga

SEQ ID NO: 462210 - RNA, 19 nt, Homo sapiens
  misc_RNA (1)...(19): siRNA sense strand
ggacagacgucaggcagaa

SEQ ID NO: 462211 - RNA, 19 nt, Homo sapiens
  misc_RNA (1)...(19): siRNA sense strand
caaaaugccugaugaugua

SEQ ID NO: 462212 - RNA, 19 nt, Homo sapiens
  misc_RNA (1)...(19): siRNA sense strand
aaacacagcccaacaguga

SEQ ID NO: 462213 - RNA, 19 nt, Homo sapiens
  misc_RNA (1)...(19): siRNA sense strand
gaaaucugcuacuccguau

SEQ ID NO: 462214 - RNA, 19 nt, Homo sapiens
  misc_RNA (1)...(19): siRNA sense strand
ucagugaaaugaugaaaug

SEQ ID NO: 462215 - RNA, 19 nt, Homo sapiens
  misc_RNA (1)...(19): siRNA sense strand
cgauauggcaucuguguua

SEQ ID NO: 462216 - RNA, 19 nt, Homo sapiens
  misc_RNA (1)...(19): siRNA sense strand
gugauaguauggauuauga

SEQ ID NO: 462217 - RNA, 19 nt, Homo sapiens
  misc_RNA (1)...(19): siRNA sense strand
gaugauaguggcagugaua

SEQ ID NO: 462218 - RNA, 19 nt, Homo sapiens
  misc_RNA (1)...(19): siRNA sense strand
ccacugcgcuccagcucua

SEQ ID NO: 462219 - RNA, 19 nt, Homo sapiens
  misc_RNA (1)...(19): siRNA sense strand
gugaaaugaugaaauguga

SEQ ID NO: 462220 - RNA, 19 nt, Homo sapiens
  misc_RNA (1)...(19): siRNA sense strand
ggacagcaauagggugauu

SEQ ID NO: 462221 - RNA, 19 nt, Homo sapiens
  misc_RNA (1)...(19): siRNA sense strand
gcaaaucaaugaggugcuu

SEQ ID NO: 462222 - RNA, 19 nt, Homo sapiens
  misc_RNA (1)...(19): siRNA sense strand
caccagaaguuuaaaggaa

SEQ ID NO: 462223 - RNA, 19 nt, Homo sapiens
  misc_RNA (1)...(19): siRNA sense strand
gauauggcaucuguguuaa

SEQ ID NO: 462224 - RNA, 19 nt, Homo sapiens
  misc_RNA (1)...(19): siRNA sense strand
uauuaugucucuucucgua

SEQ ID NO: 462225 - RNA, 19 nt, Homo sapiens
  misc_RNA (1)...(19): siRNA sense strand
caacagaaaguguaaauac

SEQ ID NO: 462226 - RNA, 19 nt, Homo sapiens
  misc_RNA (1)...(19): siRNA sense strand
caagcuggcuccuuucuag

SEQ ID NO: 462227 - RNA, 19 nt, Homo sapiens
  misc_RNA (1)...(19): siRNA sense strand
gugcuaaccugcauucugu

SEQ ID NO: 462228 - RNA, 19 nt, Homo sapiens
  misc_RNA (1)...(19): siRNA sense strand
gauaguggcagugauagua

SEQ ID NO: 462229 - RNA, 19 nt, Homo sapiens
  misc_RNA (1)...(19): siRNA sense strand
guacguggcugcaguucau

SEQ ID NO: 462230 - RNA, 19 nt, Homo sapiens
  misc_RNA (1)...(19): siRNA sense strand
ucaaauucaugcacaauca

SEQ ID NO: 462231 - RNA, 19 nt, Homo sapiens
  misc_RNA (1)...(19): siRNA sense strand
agacccagcucaacaaguu

SEQ ID NO: 462232 - RNA, 19 nt, Homo sapiens
  misc_RNA (1)...(19): siRNA sense strand
ccagcgagguggagauuga

SEQ ID NO: 462233 - RNA, 19 nt, Homo sapiens
  misc_RNA (1)...(19): siRNA sense strand
gagcuguacuacuguguga

SEQ ID NO: 462234 - RNA, 19 nt, Homo sapiens
  misc_RNA (1)...(19): siRNA sense strand
guacaugcagggacagaua

SEQ ID NO: 462235 - RNA, 19 nt, Homo sapiens
  misc_RNA (1)...(19): siRNA sense strand
gaagcagacauuuguggua

SEQ ID NO: 462236 - RNA, 19 nt, Homo sapiens
  misc_RNA (1)...(19): siRNA sense strand
gcucugaccuuugcucuuc

SEQ ID NO: 462237 - RNA, 19 nt, Homo sapiens
  misc_RNA (1)...(19): siRNA sense strand
gagaagggauggguaugga

SEQ ID NO: 462238 - RNA, 19 nt, Homo sapiens
  misc_RNA (1)...(19): siRNA sense strand
ugaauuggguggcgaguuc

SEQ ID NO: 462239 - RNA, 19 nt, Homo sapiens
  misc_RNA (1)...(19): siRNA sense strand
agacgaagguguugugcuu

SEQ ID NO: 462240 - RNA, 19 nt, Homo sapiens
  misc_RNA (1)...(19): siRNA sense strand
ugaagaagcagacauuugu

SEQ ID NO: 462241 - RNA, 19 nt, Homo sapiens
  misc_RNA (1)...(19): siRNA sense strand
gaagggaucaaccucaaau

SEQ ID NO: 462242 - RNA, 19 nt, Homo sapiens
  misc_RNA (1)...(19): siRNA sense strand
gcaugagccuucgggauga

SEQ ID NO: 462243 - RNA, 19 nt, Homo sapiens
  misc_RNA (1)...(19): siRNA sense strand
ggaucaaccucaaauucau

SEQ ID NO: 462244 - RNA, 19 nt, Homo sapiens
  misc_RNA (1)...(19): siRNA sense strand
gaaaugaugaaaugugaca

SEQ ID NO: 462245 - RNA, 19 nt, Homo sapiens
  misc_RNA (1)...(19): siRNA sense strand
cagaaucacuagagcugaa

SEQ ID NO: 462246 - RNA, 19 nt, Homo sapiens
  misc_RNA (1)...(19): siRNA sense strand
gcaucuguguuaacuucua

SEQ ID NO: 462247 - RNA, 19 nt, Homo sapiens
  misc_RNA (1)...(19): siRNA sense strand
acacuggagucacgcgaua

SEQ ID NO: 462248 - RNA, 19 nt, Homo sapiens
  misc_RNA (1)...(19): siRNA sense strand
ggcccagacuccugaauug

SEQ ID NO: 462249 - RNA, 19 nt, Homo sapiens
  misc_RNA (1)...(19): siRNA sense strand
ggacugaucaagacucugu

SEQ ID NO: 462250 - RNA, 19 nt, Homo sapiens
  misc_RNA (1)...(19): siRNA sense strand
aguaccagcuucagucuuu

SEQ ID NO: 462251 - RNA, 19 nt, Homo sapiens
  misc_RNA (1)...(19): siRNA sense strand
gcaugaccuucgagagauu

SEQ ID NO: 462252 - RNA, 19 nt, Homo sapiens
  misc_RNA (1)...(19): siRNA sense strand
aaucugcuacuccguauua

SEQ ID NO: 462253 - RNA, 19 nt, Homo sapiens
  misc_RNA (1)...(19): siRNA sense strand
gcccagacccacuacuaua

SEQ ID NO: 462254 - RNA, 19 nt, Homo sapiens
  misc_RNA (1)...(19): siRNA sense strand
cagggucgauccagcaauu

SEQ ID NO: 462255 - RNA, 19 nt, Homo sapiens
  misc_RNA (1)...(19): siRNA sense strand
gaaaagagaaccuccauca

SEQ ID NO: 462256 - RNA, 19 nt, Homo sapiens
  misc_RNA (1)...(19): siRNA sense strand
gauucacccuaguggauuu

SEQ ID NO: 462257 - RNA, 19 nt, Homo sapiens
  misc_RNA (1)...(19): siRNA sense strand
ccagacuccugaauugcua

SEQ ID NO: 462258 - RNA, 19 nt, Homo sapiens
  misc_RNA (1)...(19): siRNA sense strand
agaaugacauccgcaagaa

SEQ ID NO: 462259 - RNA, 19 nt, Homo sapiens
  misc_RNA (1)...(19): siRNA sense strand
cuucuuagaugcugugaug

SEQ ID NO: 462260 - RNA, 19 nt, Homo sapiens
  misc_RNA (1)...(19): siRNA sense strand
gagcagcaaugcaggugau

SEQ ID NO: 462261 - RNA, 19 nt, Homo sapiens
  misc_RNA (1)...(19): siRNA sense strand
gauucaagcucuucuuacu

SEQ ID NO: 462262 - RNA, 19 nt, Homo sapiens
  misc_RNA (1)...(19): siRNA sense strand
ccaacgugcugcagggauu

SEQ ID NO: 462263 - RNA, 19 nt, Homo sapiens
  misc_RNA (1)...(19): siRNA sense strand
ccuggaagaugaugaagau

SEQ ID NO: 462264 - RNA, 19 nt, Homo sapiens
  misc_RNA (1)...(19): siRNA sense strand
gaaguaaucaaaccugucu

SEQ ID NO: 462265 - RNA, 19 nt, Homo sapiens
  misc_RNA (1)...(19): siRNA sense strand
gaagaggguggcacugaga

SEQ ID NO: 462266 - RNA, 19 nt, Homo sapiens
  misc_RNA (1)...(19): siRNA sense strand
caucaaacccggaccugaa

SEQ ID NO: 462267 - RNA, 19 nt, Homo sapiens
  misc_RNA (1)...(19): siRNA sense strand
acgagaagcucaucaacau

SEQ ID NO: 462268 - RNA, 19 nt, Homo sapiens
  misc_RNA (1)...(19): siRNA sense strand
ccagaggacugaucaagac

SEQ ID NO: 462269 - RNA, 19 nt, Homo sapiens
  misc_RNA (1)...(19): siRNA sense strand
ggugugagccugacgucua

SEQ ID NO: 462270 - RNA, 19 nt, Homo sapiens
  misc_RNA (1)...(19): siRNA sense strand
guacaaagggacaccaugu

SEQ ID NO: 462271 - RNA, 19 nt, Homo sapiens
  misc_RNA (1)...(19): siRNA sense strand
ggagggcguuaguggauca

SEQ ID NO: 462272 - RNA, 19 nt, Homo sapiens
  misc_RNA (1)...(19): siRNA sense strand
gggaucaaccucaaauuca

SEQ ID NO: 462273 - RNA, 19 nt, Homo sapiens
  misc_RNA (1)...(19): siRNA sense strand
gaugauaccucuuuugucu

SEQ ID NO: 462274 - RNA, 19 nt, Homo sapiens
  misc_RNA (1)...(19): siRNA sense strand
gaguccagcuguuaugauc

SEQ ID NO: 462275 - RNA, 19 nt, Homo sapiens
  misc_RNA (1)...(19): siRNA sense strand
ccagccagcucugaccuuu

SEQ ID NO: 462276 - RNA, 19 nt, Homo sapiens
  misc_RNA (1)...(19): siRNA sense strand
uaacaucggaacaguguau

SEQ ID NO: 462277 - RNA, 19 nt, Homo sapiens
  misc_RNA (1)...(19): siRNA sense strand
caaaggcuauggcacaacu

SEQ ID NO: 462278 - RNA, 19 nt, Homo sapiens
  misc_RNA (1)...(19): siRNA sense strand
ggaagagaaguccaacaga

SEQ ID NO: 462279 - RNA, 19 nt, Homo sapiens
  misc_RNA (1)...(19): siRNA sense strand
gguguacaagggaauguua

SEQ ID NO: 462280 - RNA, 19 nt, Homo sapiens
  misc_RNA (1)...(19): siRNA sense strand
ccacggagccaacucugaa

SEQ ID NO: 462281 - RNA, 19 nt, Homo sapiens
  misc_RNA (1)...(19): siRNA sense strand
uugacgagcugcagaauca

SEQ ID NO: 462282 - RNA, 19 nt, Homo sapiens
  misc_RNA (1)...(19): siRNA sense strand
gaauucaacccacucaucu

SEQ ID NO: 462283 - RNA, 19 nt, Homo sapiens
  misc_RNA (1)...(19): siRNA sense strand
cucaacaaguucuauacua

SEQ ID NO: 462284 - RNA, 19 nt, Homo sapiens
  misc_RNA (1)...(19): siRNA sense strand
gaaggugaggcgccuaaug

SEQ ID NO: 462285 - RNA, 19 nt, Homo sapiens
  misc_RNA (1)...(19): siRNA sense strand
aggaaaugaucgacaggua

SEQ ID NO: 462286 - RNA, 19 nt, Homo sapiens
  misc_RNA (1)...(19): siRNA sense strand
ccagaaguuuaaaggaaga

SEQ ID NO: 462287 - RNA, 19 nt, Homo sapiens
  misc_RNA (1)...(19): siRNA sense strand
gccagcaucuuugggcuuu

SEQ ID NO: 462288 - RNA, 19 nt, Homo sapiens
  misc_RNA (1)...(19): siRNA sense strand
guacaguccucagcuugga

SEQ ID NO: 462289 - RNA, 19 nt, Homo sapiens
  misc_RNA (1)...(19): siRNA sense strand
gugacaagccaaaguggua

SEQ ID NO: 462290 - RNA, 19 nt, Homo sapiens
  misc_RNA (1)...(19): siRNA sense strand
uggcggaucuuuacuggau

SEQ ID NO: 462291 - RNA, 19 nt, Homo sapiens
  misc_RNA (1)...(19): siRNA sense strand
gaagguaaauaagaaugac

SEQ ID NO: 462292 - RNA, 19 nt, Homo sapiens
  misc_RNA (1)...(19): siRNA sense strand
uggcaucuguguuaacuuc

SEQ ID NO: 462293 - RNA, 19 nt, Homo sapiens
  misc_RNA (1)...(19): siRNA sense strand
uguuagaccuccucaagug

SEQ ID NO: 462294 - RNA, 19 nt, Homo sapiens
  misc_RNA (1)...(19): siRNA sense strand
ccagacccaucucgauuca

SEQ ID NO: 462295 - RNA, 19 nt, Homo sapiens
  misc_RNA (1)...(19): siRNA sense strand
gucgggagcuguacuacug

SEQ ID NO: 462296 - RNA, 19 nt, Homo sapiens
  misc_RNA (1)...(19): siRNA sense strand
guaguaacaucggaacagu

SEQ ID NO: 462297 - RNA, 19 nt, Homo sapiens
  misc_RNA (1)...(19): siRNA sense strand
cgaauucacaacaauaugu

SEQ ID NO: 462298 - RNA, 19 nt, Homo sapiens
  misc_RNA (1)...(19): siRNA sense strand
cagcgaauucacaacaaua

SEQ ID NO: 462299 - RNA, 19 nt, Homo sapiens
  misc_RNA (1)...(19): siRNA sense strand
ucuacaaacuggacuucaa

SEQ ID NO: 462300 - RNA, 19 nt, Homo sapiens
  misc_RNA (1)...(19): siRNA sense strand
uacaaacggagauaucuuu

SEQ ID NO: 462301 - RNA, 19 nt, Homo sapiens
  misc_RNA (1)...(19): siRNA sense strand
ggaagggaucaaccucaaa

SEQ ID NO: 462302 - RNA, 19 nt, Homo sapiens
  misc_RNA (1)...(19): siRNA sense strand
ugugugguguugcguagua

SEQ ID NO: 462303 - RNA, 19 nt, Homo sapiens
  misc_RNA (1)...(19): siRNA sense strand
gaagucaucugucauuaaa

SEQ ID NO: 462304 - RNA, 19 nt, Homo sapiens
  misc_RNA (1)...(19): siRNA sense strand
gaagagaaguccaacagaa

SEQ ID NO: 462305 - RNA, 19 nt, Homo sapiens
  misc_RNA (1)...(19): siRNA sense strand
gaaguucuguccucgguua

SEQ ID NO: 462306 - RNA, 19 nt, Homo sapiens
  misc_RNA (1)...(19): siRNA sense strand
cuacggagauggaugauaa

SEQ ID NO: 462307 - RNA, 19 nt, Homo sapiens
  misc_RNA (1)...(19): siRNA sense strand
gcagugauaguauggauua

SEQ ID NO: 462308 - RNA, 19 nt, Homo sapiens
  misc_RNA (1)...(19): siRNA sense strand
ggaagcgccuggaagauga

SEQ ID NO: 462309 - RNA, 19 nt, Homo sapiens
  misc_RNA (1)...(19): siRNA sense strand
caagugcccuucugcauga

SEQ ID NO: 462310 - RNA, 19 nt, Homo sapiens
  misc_RNA (1)...(19): siRNA sense strand
ggacagacgucaggcagaa

SEQ ID NO: 462311 - RNA, 19 nt, Homo sapiens
  misc_RNA (1)...(19): siRNA sense strand
caaaaugccugaugaugua

SEQ ID NO: 462312 - RNA, 19 nt, Homo sapiens
  misc_RNA (1)...(19): siRNA sense strand
aaacacagcccaacaguga

SEQ ID NO: 462313 - RNA, 19 nt, Homo sapiens
  misc_RNA (1)...(19): siRNA sense strand
ucagugaaaugaugaaaug

SEQ ID NO: 462314 - RNA, 19 nt, Homo sapiens
  misc_RNA (1)...(19): siRNA sense strand
cgauauggcaucuguguua

SEQ ID NO: 462315 - RNA, 19 nt, Homo sapiens
  misc_RNA (1)...(19): siRNA sense strand
gugauaguauggauuauga

SEQ ID NO: 462316 - RNA, 19 nt, Homo sapiens
  misc_RNA (1)...(19): siRNA sense strand
gaugauaguggcagugaua

SEQ ID NO: 462317 - RNA, 19 nt, Homo sapiens
  misc_RNA (1)...(19): siRNA sense strand
ccacugcgcuccagcucua

SEQ ID NO: 462318 - RNA, 19 nt, Homo sapiens
  misc_RNA (1)...(19): siRNA sense strand
gugaaaugaugaaauguga

SEQ ID NO: 462319 - RNA, 19 nt, Homo sapiens
  misc_RNA (1)...(19): siRNA sense strand
ggacagcaauagggugauu

SEQ ID NO: 462320 - RNA, 19 nt, Homo sapiens
  misc_RNA (1)...(19): siRNA sense strand
gcaaaucaaugaggugcuu

SEQ ID NO: 462321 - RNA, 19 nt, Homo sapiens
  misc_RNA (1)...(19): siRNA sense strand
caccagaaguuuaaaggaa

SEQ ID NO: 462322 - RNA, 19 nt, Homo sapiens
  misc_RNA (1)...(19): siRNA sense strand
gauauggcaucuguguuaa

SEQ ID NO: 462323 - RNA, 19 nt, Homo sapiens
  misc_RNA (1)...(19): siRNA sense strand
caacagaaaguguaaauac

SEQ ID NO: 462324 - RNA, 19 nt, Homo sapiens
  misc_RNA (1)...(19): siRNA sense strand
caagcuggcuccuuucuag

SEQ ID NO: 462325 - RNA, 19 nt, Homo sapiens
  misc_RNA (1)...(19): siRNA sense strand
gugcuaaccugcauucugu

SEQ ID NO: 462326 - RNA, 19 nt, Homo sapiens
  misc_RNA (1)...(19): siRNA sense strand
gauaguggcagugauagua

SEQ ID NO: 462327 - RNA, 19 nt, Homo sapiens
  misc_RNA (1)...(19): siRNA sense strand
ucaaauucaugcacaauca

SEQ ID NO: 462328 - RNA, 19 nt, Homo sapiens
  misc_RNA (1)...(19): siRNA sense strand
agacccagcucaacaaguu

SEQ ID NO: 462329 - RNA, 19 nt, Homo sapiens
  misc_RNA (1)...(19): siRNA sense strand
ccagcgagguggagauuga

SEQ ID NO: 462330 - RNA, 19 nt, Homo sapiens
  misc_RNA (1)...(19): siRNA sense strand
gagcuguacuacuguguga

SEQ ID NO: 462331 - RNA, 19 nt, Homo sapiens
  misc_RNA (1)...(19): siRNA sense strand
guacaugcagggacagaua

SEQ ID NO: 462332 - RNA, 19 nt, Homo sapiens
  misc_RNA (1)...(19): siRNA sense strand
gaagcagacauuuguggua

SEQ ID NO: 462333 - RNA, 19 nt, Homo sapiens
  misc_RNA (1)...(19): siRNA sense strand
gcucugaccuuugcucuuc

SEQ ID NO: 462334 - RNA, 19 nt, Homo sapiens
  misc_RNA (1)...(19): siRNA sense strand
gagaagggauggguaugga

SEQ ID NO: 462335 - RNA, 19 nt, Homo sapiens
  misc_RNA (1)...(19): siRNA sense strand
ugaauuggguggcgaguuc

SEQ ID NO: 462336 - RNA, 19 nt, Homo sapiens
  misc_RNA (1)...(19): siRNA sense strand
agacgaagguguugugcuu

SEQ ID NO: 462337 - RNA, 19 nt, Homo sapiens
  misc_RNA (1)...(19): siRNA sense strand
ugaagaagcagacauuugu

SEQ ID NO: 462338 - RNA, 19 nt, Homo sapiens
  misc_RNA (1)...(19): siRNA sense strand
gaagggaucaaccucaaau

SEQ ID NO: 462339 - RNA, 19 nt, Homo sapiens
  misc_RNA (1)...(19): siRNA sense strand
gcaugagccuucgggauga

SEQ ID NO: 462340 - RNA, 19 nt, Homo sapiens
  misc_RNA (1)...(19): siRNA sense strand
ggaucaaccucaaauucau

SEQ ID NO: 462341 - RNA, 19 nt, Homo sapiens
  misc_RNA (1)...(19): siRNA sense strand
gaaaugaugaaaugugaca

SEQ ID NO: 462342 - RNA, 19 nt, Homo sapiens
  misc_RNA (1)...(19): siRNA sense strand
cagaaucacuagagcugaa

SEQ ID NO: 462343 - RNA, 19 nt, Homo sapiens
  misc_RNA (1)...(19): siRNA sense strand
gcaucuguguuaacuucua

SEQ ID NO: 462344 - RNA, 19 nt, Homo sapiens
  misc_RNA (1)...(19): siRNA sense strand
acacuggagucacgcgaua

SEQ ID NO: 462345 - RNA, 19 nt, Homo sapiens
  misc_RNA (1)...(19): siRNA sense strand
ggacugaucaagacucugu

SEQ ID NO: 462346 - RNA, 19 nt, Homo sapiens
  misc_RNA (1)...(19): siRNA sense strand
aguaccagcuucagucuuu

SEQ ID NO: 462347 - RNA, 19 nt, Homo sapiens
  misc_RNA (1)...(19): siRNA sense strand
ggcccagacuccugaauug

SEQ ID NO: 462348 - RNA, 19 nt, Homo sapiens
  misc_RNA (1)...(19): siRNA sense strand
gcaugaccuucgagagauu

SEQ ID NO: 462349 - RNA, 19 nt, Homo sapiens
  misc_RNA (1)...(19): siRNA sense strand
gcccagacccacuacuaua

SEQ ID NO: 462350 - RNA, 19 nt, Homo sapiens
  misc_RNA (1)...(19): siRNA sense strand
cagggucgauccagcaauu

SEQ ID NO: 462351 - RNA, 19 nt, Homo sapiens
  misc_RNA (1)...(19): siRNA sense strand
gaaaagagaaccuccauca

SEQ ID NO: 462352 - RNA, 19 nt, Homo sapiens
  misc_RNA (1)...(19): siRNA sense strand
gauucacccuaguggauuu

SEQ ID NO: 462353 - RNA, 19 nt, Homo sapiens
  misc_RNA (1)...(19): siRNA sense strand
gauucaagcucuucuuacu

SEQ ID NO: 462354 - RNA, 19 nt, Homo sapiens
  misc_RNA (1)...(19): siRNA sense strand
ccagacuccugaauugcua

SEQ ID NO: 462355 - RNA, 19 nt, Homo sapiens
  misc_RNA (1)...(19): siRNA sense strand
agaaugacauccgcaagaa

SEQ ID NO: 462356 - RNA, 19 nt, Homo sapiens
  misc_RNA (1)...(19): siRNA sense strand
cuucuuagaugcugugaug

SEQ ID NO: 462357 - RNA, 19 nt, Homo sapiens
  misc_RNA (1)...(19): siRNA sense strand
gagcagcaaugcaggugau

SEQ ID NO: 462358 - RNA, 19 nt, Homo sapiens
  misc_RNA (1)...(19): siRNA sense strand
ccaacgugcugcagggauu

SEQ ID NO: 462359 - RNA, 19 nt, Homo sapiens
  misc_RNA (1)...(19): siRNA sense strand
ccuggaagaugaugaagau

SEQ ID NO: 462360 - RNA, 19 nt, Homo sapiens
  misc_RNA (1)...(19): siRNA sense strand
gaaguaaucaaaccugucu

SEQ ID NO: 462361 - RNA, 19 nt, Homo sapiens
  misc_RNA (1)...(19): siRNA sense strand
gaagaggguggcacugaga

SEQ ID NO: 462362 - RNA, 19 nt, Homo sapiens
  misc_RNA (1)...(19): siRNA sense strand
caucaaacccggaccugaa

SEQ ID NO: 462363 - RNA, 19 nt, Homo sapiens
  misc_RNA (1)...(19): siRNA sense strand
acgagaagcucaucaacau

SEQ ID NO: 462364 - RNA, 19 nt, Homo sapiens
  misc_RNA (1)...(19): siRNA sense strand
ccagaggacugaucaagac

SEQ ID NO: 462365 - RNA, 19 nt, Homo sapiens
  misc_RNA (1)...(19): siRNA sense strand
ggugugagccugacgucua

SEQ ID NO: 462366 - RNA, 19 nt, Homo sapiens
  misc_RNA (1)...(19): siRNA sense strand
guacaaagggacaccaugu

SEQ ID NO: 462367 - RNA, 19 nt, Homo sapiens
  misc_RNA (1)...(19): siRNA sense strand
gaugauaccucuuuugucu

SEQ ID NO: 462368 - RNA, 19 nt, Homo sapiens
  misc_RNA (1)...(19): siRNA sense strand
gggaucaaccucaaauuca

SEQ ID NO: 462369 - RNA, 19 nt, Homo sapiens
  misc_RNA (1)...(19): siRNA sense strand
gaguccagcuguuaugauc

SEQ ID NO: 462370 - RNA, 19 nt, Homo sapiens
  misc_RNA (1)...(19): siRNA sense strand
ggagggcguuaguggauca

SEQ ID NO: 462371 - RNA, 19 nt, Homo sapiens
  misc_RNA (1)...(19): siRNA sense strand
ccagccagcucugaccuuu

SEQ ID NO: 462372 - RNA, 19 nt, Homo sapiens
  misc_RNA (1)...(19): siRNA sense strand
uaacaucggaacaguguau

SEQ ID NO: 462373 - RNA, 19 nt, Homo sapiens
  misc_RNA (1)...(19): siRNA sense strand
caaaggcuauggcacaacu

SEQ ID NO: 462374 - RNA, 19 nt, Homo sapiens
  misc_RNA (1)...(19): siRNA sense strand
ggaagagaaguccaacaga

SEQ ID NO: 462375 - RNA, 19 nt, Homo sapiens
  misc_RNA (1)...(19): siRNA sense strand
gguguacaagggaauguua

SEQ ID NO: 462376 - RNA, 19 nt, Homo sapiens
  misc_RNA (1)...(19): siRNA sense strand
ccacggagccaacucugaa

SEQ ID NO: 462377 - RNA, 19 nt, Homo sapiens
  misc_RNA (1)...(19): siRNA sense strand
uugacgagcugcagaauca

SEQ ID NO: 462378 - RNA, 19 nt, Homo sapiens
  misc_RNA (1)...(19): siRNA sense strand
gaauucaacccacucaucu

SEQ ID NO: 462379 - RNA, 19 nt, Homo sapiens
  misc_RNA (1)...(19): siRNA sense strand
cucaacaaguucuauacua

SEQ ID NO: 462380 - RNA, 19 nt, Homo sapiens
  misc_RNA (1)...(19): siRNA sense strand
gaaggugaggcgccuaaug

SEQ ID NO: 462381 - RNA, 19 nt, Homo sapiens
  misc_RNA (1)...(19): siRNA sense strand
aggaaaugaucgacaggua

SEQ ID NO: 462382 - RNA, 19 nt, Homo sapiens
  misc_RNA (1)...(19): siRNA sense strand
ccagaaguuuaaaggaaga

SEQ ID NO: 462383 - RNA, 19 nt, Homo sapiens
  misc_RNA (1)...(19): siRNA sense strand
gccagcaucuuugggcuuu

SEQ ID NO: 462384 - RNA, 19 nt, Homo sapiens
  misc_RNA (1)...(19): siRNA sense strand
guacaguccucagcuugga

SEQ ID NO: 462385 - RNA, 19 nt, Homo sapiens
  misc_RNA (1)...(19): siRNA sense strand
gugacaagccaaaguggua

SEQ ID NO: 462386 - RNA, 19 nt, Homo sapiens
  misc_RNA (1)...(19): siRNA sense strand
uggcggaucuuuacuggau

SEQ ID NO: 462387 - RNA, 19 nt, Homo sapiens
  misc_RNA (1)...(19): siRNA sense strand
gaagguaaauaagaaugac

SEQ ID NO: 462388 - RNA, 19 nt, Homo sapiens
  misc_RNA (1)...(19): siRNA sense strand
uguuagaccuccucaagug

SEQ ID NO: 462389 - RNA, 19 nt, Homo sapiens
  misc_RNA (1)...(19): siRNA sense strand
uggcaucuguguuaacuuc

SEQ ID NO: 462390 - RNA, 19 nt, Homo sapiens
  misc_RNA (1)...(19): siRNA sense strand
ccagacccaucucgauuca

SEQ ID NO: 462391 - RNA, 19 nt, Homo sapiens
  misc_RNA (1)...(19): siRNA sense strand
gucgggagcuguacuacug

SEQ ID NO: 462392 - RNA, 19 nt, Homo sapiens
  misc_RNA (1)...(19): siRNA sense strand
guaguaacaucggaacagu

SEQ ID NO: 462393 - RNA, 19 nt, Homo sapiens
  misc_RNA (1)...(19): siRNA sense strand
cgaauucacaacaauaugu

SEQ ID NO: 462394 - RNA, 19 nt, Homo sapiens
  misc_RNA (1)...(19): siRNA sense strand
cagcgaauucacaacaaua

SEQ ID NO: 462395 - RNA, 19 nt, Homo sapiens
  misc_RNA (1)...(19): siRNA sense strand
ucuacaaacuggacuucaa

SEQ ID NO: 462396 - RNA, 19 nt, Homo sapiens
  misc_RNA (1)...(19): siRNA sense strand
cagcgagucuaucucuaug

SEQ ID NO: 462397 - RNA, 19 nt, Homo sapiens
  misc_RNA (1)...(19): siRNA sense strand
ggaagggaucaaccucaaa

SEQ ID NO: 462398 - RNA, 19 nt, Homo sapiens
  misc_RNA (1)...(19): siRNA sense strand
ugugugguguugcguagua

SEQ ID NO: 462399 - RNA, 19 nt, Homo sapiens
  misc_RNA (1)...(19): siRNA sense strand
uacaaacggagauaucuuu

SEQ ID NO: 462400 - RNA, 19 nt, Homo sapiens
  misc_RNA (1)...(19): siRNA sense strand
gcagacauuugugguacau

SEQ ID NO: 462401 - RNA, 19 nt, Homo sapiens
  misc_RNA (1)...(19): siRNA sense strand
guacagccagcaaaucaau

SEQ ID NO: 462402 - RNA, 19 nt, Homo sapiens
  misc_RNA (1)...(19): siRNA sense strand
guaccugucccuuggagaa

SEQ ID NO: 462403 - RNA, 19 nt, Homo sapiens
  misc_RNA (1)...(19): siRNA sense strand
gaagucaucugucauuaaa

SEQ ID NO: 462404 - RNA, 19 nt, Homo sapiens
  misc_RNA (1)...(19): siRNA sense strand
gaagagaaguccaacagaa

SEQ ID NO: 462405 - RNA, 19 nt, Homo sapiens
  misc_RNA (1)...(19): siRNA sense strand
gaaguucuguccucgguua

SEQ ID NO: 462406 - RNA, 19 nt, Homo sapiens
  misc_RNA (1)...(19): siRNA sense strand
cuacggagauggaugauaa

SEQ ID NO: 462407 - RNA, 19 nt, Homo sapiens
  misc_RNA (1)...(19): siRNA sense strand
gcagugauaguauggauua

SEQ ID NO: 462408 - RNA, 19 nt, Homo sapiens
  misc_RNA (1)...(19): siRNA sense strand
ggaagcgccuggaagauga

SEQ ID NO: 462409 - RNA, 19 nt, Homo sapiens
  misc_RNA (1)...(19): siRNA sense strand
caagugcccuucugcauga

SEQ ID NO: 462410 - RNA, 19 nt, Homo sapiens
  misc_RNA (1)...(19): siRNA sense strand
ggacagacgucaggcagaa

SEQ ID NO: 462411 - RNA, 19 nt, Homo sapiens
  misc_RNA (1)...(19): siRNA sense strand
caaaaugccugaugaugua

SEQ ID NO: 462412 - RNA, 19 nt, Homo sapiens
  misc_RNA (1)...(19): siRNA sense strand
aaacacagcccaacaguga

SEQ ID NO: 462413 - RNA, 19 nt, Homo sapiens
  misc_RNA (1)...(19): siRNA sense strand
ucagugaaaugaugaaaug

SEQ ID NO: 462414 - RNA, 19 nt, Homo sapiens
  misc_RNA (1)...(19): siRNA sense strand
cgauauggcaucuguguua

SEQ ID NO: 462415 - RNA, 19 nt, Homo sapiens
  misc_RNA (1)...(19): siRNA sense strand
gugauaguauggauuauga

SEQ ID NO: 462416 - RNA, 19 nt, Homo sapiens
  misc_RNA (1)...(19): siRNA sense strand
gaugauaguggcagugaua

SEQ ID NO: 462417 - RNA, 19 nt, Homo sapiens
  misc_RNA (1)...(19): siRNA sense strand
ccacugcgcuccagcucua

SEQ ID NO: 462418 - RNA, 19 nt, Homo sapiens
  misc_RNA (1)...(19): siRNA sense strand
gugaaaugaugaaauguga

SEQ ID NO: 462419 - RNA, 19 nt, Homo sapiens
  misc_RNA (1)...(19): siRNA sense strand
ggacagcaauagggugauu

SEQ ID NO: 462420 - RNA, 19 nt, Homo sapiens
  misc_RNA (1)...(19): siRNA sense strand
gcaaaucaaugaggugcuu

SEQ ID NO: 462421 - RNA, 19 nt, Homo sapiens
  misc_RNA (1)...(19): siRNA sense strand
caccagaaguuuaaaggaa

SEQ ID NO: 462422 - RNA, 19 nt, Homo sapiens
  misc_RNA (1)...(19): siRNA sense strand
gauauggcaucuguguuaa

SEQ ID NO: 462423 - RNA, 19 nt, Homo sapiens
  misc_RNA (1)...(19): siRNA sense strand
caacagaaaguguaaauac

SEQ ID NO: 462424 - RNA, 19 nt, Homo sapiens
  misc_RNA (1)...(19): siRNA sense strand
caagcuggcuccuuucuag

SEQ ID NO: 462425 - RNA, 19 nt, Homo sapiens
  misc_RNA (1)...(19): siRNA sense strand
gugcuaaccugcauucugu

SEQ ID NO: 462426 - RNA, 19 nt, Homo sapiens
  misc_RNA (1)...(19): siRNA sense strand
gauaguggcagugauagua

SEQ ID NO: 462427 - RNA, 19 nt, Homo sapiens
  misc_RNA (1)...(19): siRNA sense strand
ucaaauucaugcacaauca

SEQ ID NO: 462428 - RNA, 19 nt, Homo sapiens
  misc_RNA (1)...(19): siRNA sense strand
agacccagcucaacaaguu

SEQ ID NO: 462429 - RNA, 19 nt, Homo sapiens
  misc_RNA (1)...(19): siRNA sense strand
ccagcgagguggagauuga

SEQ ID NO: 462430 - RNA, 19 nt, Homo sapiens
  misc_RNA (1)...(19): siRNA sense strand
gagcuguacuacuguguga

SEQ ID NO: 462431 - RNA, 19 nt, Homo sapiens
  misc_RNA (1)...(19): siRNA sense strand
guacaugcagggacagaua

SEQ ID NO: 462432 - RNA, 19 nt, Homo sapiens
  misc_RNA (1)...(19): siRNA sense strand
gaagcagacauuuguggua

SEQ ID NO: 462433 - RNA, 19 nt, Homo sapiens
  misc_RNA (1)...(19): siRNA sense strand
gcucugaccuuugcucuuc

SEQ ID NO: 462434 - RNA, 19 nt, Homo sapiens
  misc_RNA (1)...(19): siRNA sense strand
gagaagggauggguaugga

SEQ ID NO: 462435 - RNA, 19 nt, Homo sapiens
  misc_RNA (1)...(19): siRNA sense strand
ugaauuggguggcgaguuc

SEQ ID NO: 462436 - RNA, 19 nt, Homo sapiens
  misc_RNA (1)...(19): siRNA sense strand
agacgaagguguugugcuu

SEQ ID NO: 462437 - RNA, 19 nt, Homo sapiens
  misc_RNA (1)...(19): siRNA sense strand
ugaagaagcagacauuugu

SEQ ID NO: 462438 - RNA, 19 nt, Homo sapiens
  misc_RNA (1)...(19): siRNA sense strand
gaagggaucaaccucaaau

SEQ ID NO: 462439 - RNA, 19 nt, Homo sapiens
  misc_RNA (1)...(19): siRNA sense strand
gcaugagccuucgggauga

SEQ ID NO: 462440 - RNA, 19 nt, Homo sapiens
  misc_RNA (1)...(19): siRNA sense strand
ggaucaaccucaaauucau

SEQ ID NO: 462441 - RNA, 19 nt, Homo sapiens
  misc_RNA (1)...(19): siRNA sense strand
gaaaugaugaaaugugaca

SEQ ID NO: 462442 - RNA, 19 nt, Homo sapiens
  misc_RNA (1)...(19): siRNA sense strand
cagaaucacuagagcugaa

SEQ ID NO: 462443 - RNA, 19 nt, Homo sapiens
  misc_RNA (1)...(19): siRNA sense strand
gcaucuguguuaacuucua

SEQ ID NO: 462444 - RNA, 19 nt, Homo sapiens
  misc_RNA (1)...(19): siRNA sense strand
acacuggagucacgcgaua

SEQ ID NO: 462445 - RNA, 19 nt, Homo sapiens
  misc_RNA (1)...(19): siRNA sense strand
ggacugaucaagacucugu

SEQ ID NO: 462446 - RNA, 19 nt, Homo sapiens
  misc_RNA (1)...(19): siRNA sense strand
aguaccagcuucagucuuu

SEQ ID NO: 462447 - RNA, 19 nt, Homo sapiens
  misc_RNA (1)...(19): siRNA sense strand
ggcccagacuccugaauug

SEQ ID NO: 462448 - RNA, 19 nt, Homo sapiens
  misc_RNA (1)...(19): siRNA sense strand
gcaugaccuucgagagauu

SEQ ID NO: 462449 - RNA, 19 nt, Homo sapiens
  misc_RNA (1)...(19): siRNA sense strand
gcccagacccacuacuaua

SEQ ID NO: 462450 - RNA, 19 nt, Homo sapiens
  misc_RNA (1)...(19): siRNA sense strand
cagggucgauccagcaauu

SEQ ID NO: 462451 - RNA, 19 nt, Homo sapiens
  misc_RNA (1)...(19): siRNA sense strand
gaaaagagaaccuccauca

SEQ ID NO: 462452 - RNA, 19 nt, Homo sapiens
  misc_RNA (1)...(19): siRNA sense strand
gauucacccuaguggauuu

SEQ ID NO: 462453 - RNA, 19 nt, Homo sapiens
  misc_RNA (1)...(19): siRNA sense strand
gauucaagcucuucuuacu

SEQ ID NO: 462454 - RNA, 19 nt, Homo sapiens
  misc_RNA (1)...(19): siRNA sense strand
ccagacuccugaauugcua

SEQ ID NO: 462455 - RNA, 19 nt, Homo sapiens
  misc_RNA (1)...(19): siRNA sense strand
agaaugacauccgcaagaa

SEQ ID NO: 462456 - RNA, 19 nt, Homo sapiens
  misc_RNA (1)...(19): siRNA sense strand
cuucuuagaugcugugaug

SEQ ID NO: 462457 - RNA, 19 nt, Homo sapiens
  misc_RNA (1)...(19): siRNA sense strand
gagcagcaaugcaggugau

SEQ ID NO: 462458 - RNA, 19 nt, Homo sapiens
  misc_RNA (1)...(19): siRNA sense strand
ccaacgugcugcagggauu

SEQ ID NO: 462459 - RNA, 19 nt, Homo sapiens
  misc_RNA (1)...(19): siRNA sense strand
ccuggaagaugaugaagau

SEQ ID NO: 462460 - RNA, 19 nt, Homo sapiens
  misc_RNA (1)...(19): siRNA sense strand
gaaguaaucaaaccugucu

SEQ ID NO: 462461 - RNA, 19 nt, Homo sapiens
  misc_RNA (1)...(19): siRNA sense strand
gaagaggguggcacugaga

SEQ ID NO: 462462 - RNA, 19 nt, Homo sapiens
  misc_RNA (1)...(19): siRNA sense strand
caucaaacccggaccugaa

SEQ ID NO: 462463 - RNA, 19 nt, Homo sapiens
  misc_RNA (1)...(19): siRNA sense strand
acgagaagcucaucaacau

SEQ ID NO: 462464 - RNA, 19 nt, Homo sapiens
  misc_RNA (1)...(19): siRNA sense strand
ccagaggacugaucaagac

SEQ ID NO: 462465 - RNA, 19 nt, Homo sapiens
  misc_RNA (1)...(19): siRNA sense strand
ggugugagccugacgucua

SEQ ID NO: 462466 - RNA, 19 nt, Homo sapiens
  misc_RNA (1)...(19): siRNA sense strand
guacaaagggacaccaugu

SEQ ID NO: 462467 - RNA, 19 nt, Homo sapiens
  misc_RNA (1)...(19): siRNA sense strand
gaugauaccucuuuugucu

SEQ ID NO: 462468 - RNA, 19 nt, Homo sapiens
  misc_RNA (1)...(19): siRNA sense strand
gggaucaaccucaaauuca

SEQ ID NO: 462469 - RNA, 19 nt, Homo sapiens
  misc_RNA (1)...(19): siRNA sense strand
gaguccagcuguuaugauc

SEQ ID NO: 462470 - RNA, 19 nt, Homo sapiens
  misc_RNA (1)...(19): siRNA sense strand
ggagggcguuaguggauca

SEQ ID NO: 462471 - RNA, 19 nt, Homo sapiens
  misc_RNA (1)...(19): siRNA sense strand
ccagccagcucugaccuuu

SEQ ID NO: 462472 - RNA, 19 nt, Homo sapiens
  misc_RNA (1)...(19): siRNA sense strand
uaacaucggaacaguguau

SEQ ID NO: 462473 - RNA, 19 nt, Homo sapiens
  misc_RNA (1)...(19): siRNA sense strand
caaaggcuauggcacaacu

SEQ ID NO: 462474 - RNA, 19 nt, Homo sapiens
  misc_RNA (1)...(19): siRNA sense strand
ggaagagaaguccaacaga

SEQ ID NO: 462475 - RNA, 19 nt, Homo sapiens
  misc_RNA (1)...(19): siRNA sense strand
gguguacaagggaauguua

SEQ ID NO: 462476 - RNA, 19 nt, Homo sapiens
  misc_RNA (1)...(19): siRNA sense strand
ccacggagccaacucugaa

SEQ ID NO: 462477 - RNA, 19 nt, Homo sapiens
  misc_RNA (1)...(19): siRNA sense strand
uugacgagcugcagaauca

SEQ ID NO: 462478 - RNA, 19 nt, Homo sapiens
  misc_RNA (1)...(19): siRNA sense strand
gaauucaacccacucaucu

SEQ ID NO: 462479 - RNA, 19 nt, Homo sapiens
  misc_RNA (1)...(19): siRNA sense strand
cucaacaaguucuauacua

SEQ ID NO: 462480 - RNA, 19 nt, Homo sapiens
  misc_RNA (1)...(19): siRNA sense strand
gaaggugaggcgccuaaug

SEQ ID NO: 462481 - RNA, 19 nt, Homo sapiens
  misc_RNA (1)...(19): siRNA sense strand
aggaaaugaucgacaggua

SEQ ID NO: 462482 - RNA, 19 nt, Homo sapiens
  misc_RNA (1)...(19): siRNA sense strand
ccagaaguuuaaaggaaga

SEQ ID NO: 462483 - RNA, 19 nt, Homo sapiens
  misc_RNA (1)...(19): siRNA sense strand
gccagcaucuuugggcuuu

SEQ ID NO: 462484 - RNA, 19 nt, Homo sapiens
  misc_RNA (1)...(19): siRNA sense strand
guacaguccucagcuugga

SEQ ID NO: 462485 - RNA, 19 nt, Homo sapiens
  misc_RNA (1)...(19): siRNA sense strand
gugacaagccaaaguggua

SEQ ID NO: 462486 - RNA, 19 nt, Homo sapiens
  misc_RNA (1)...(19): siRNA sense strand
uggcggaucuuuacuggau

SEQ ID NO: 462487 - RNA, 19 nt, Homo sapiens
  misc_RNA (1)...(19): siRNA sense strand
gaagguaaauaagaaugac

SEQ ID NO: 462488 - RNA, 19 nt, Homo sapiens
  misc_RNA (1)...(19): siRNA sense strand
uguuagaccuccucaagug

SEQ ID NO: 462489 - RNA, 19 nt, Homo sapiens
  misc_RNA (1)...(19): siRNA sense strand
uggcaucuguguuaacuuc

SEQ ID NO: 462490 - RNA, 19 nt, Homo sapiens
  misc_RNA (1)...(19): siRNA sense strand
ccagacccaucucgauuca

SEQ ID NO: 462491 - RNA, 19 nt, Homo sapiens
  misc_RNA (1)...(19): siRNA sense strand
gucgggagcuguacuacug

SEQ ID NO: 462492 - RNA, 19 nt, Homo sapiens
  misc_RNA (1)...(19): siRNA sense strand
guaguaacaucggaacagu

SEQ ID NO: 462493 - RNA, 19 nt, Homo sapiens
  misc_RNA (1)...(19): siRNA sense strand
cgaauucacaacaauaugu

SEQ ID NO: 462494 - RNA, 19 nt, Homo sapiens
  misc_RNA (1)...(19): siRNA sense strand
cagcgaauucacaacaaua

SEQ ID NO: 462495 - RNA, 19 nt, Homo sapiens
  misc_RNA (1)...(19): siRNA sense strand
ucuacaaacuggacuucaa

SEQ ID NO: 462496 - RNA, 19 nt, Homo sapiens
  misc_RNA (1)...(19): siRNA sense strand
cagcgagucuaucucuaug

SEQ ID NO: 462497 - RNA, 19 nt, Homo sapiens
  misc_RNA (1)...(19): siRNA sense strand
ggaagggaucaaccucaaa

SEQ ID NO: 462498 - RNA, 19 nt, Homo sapiens
  misc_RNA (1)...(19): siRNA sense strand
ugugugguguugcguagua

SEQ ID NO: 462499 - RNA, 19 nt, Homo sapiens
  misc_RNA (1)...(19): siRNA sense strand
uacaaacggagauaucuuu

SEQ ID NO: 462500 - RNA, 19 nt, Homo sapiens
  misc_RNA (1)...(19): siRNA sense strand
gcagacauuugugguacau

SEQ ID NO: 462501 - RNA, 19 nt, Homo sapiens
  misc_RNA (1)...(19): siRNA sense strand
guacagccagcaaaucaau

SEQ ID NO: 462502 - RNA, 19 nt, Homo sapiens
  misc_RNA (1)...(19): siRNA sense strand
guaccugucccuuggagaa

SEQ ID NO: 462503 - RNA, 19 nt, Homo sapiens
  misc_RNA (1)...(19): siRNA sense strand
gaagucaucugucauuaaa

SEQ ID NO: 462504 - RNA, 19 nt, Homo sapiens
  misc_RNA (1)...(19): siRNA sense strand
gaagagaaguccaacagaa

SEQ ID NO: 462505 - RNA, 19 nt, Homo sapiens
  misc_RNA (1)...(19): siRNA sense strand
gaaguucuguccucgguua

SEQ ID NO: 462506 - RNA, 19 nt, Homo sapiens
  misc_RNA (1)...(19): siRNA sense strand
cuacggagauggaugauaa

SEQ ID NO: 462507 - RNA, 19 nt, Homo sapiens
  misc_RNA (1)...(19): siRNA sense strand
gcagugauaguauggauua

SEQ ID NO: 462508 - RNA, 19 nt, Homo sapiens
  misc_RNA (1)...(19): siRNA sense strand
ggaagcgccuggaagauga

SEQ ID NO: 462509 - RNA, 19 nt, Homo sapiens
  misc_RNA (1)...(19): siRNA sense strand
caagugcccuucugcauga

SEQ ID NO: 462510 - RNA, 19 nt, Homo sapiens
  misc_RNA (1)...(19): siRNA sense strand
ggacagacgucaggcagaa

SEQ ID NO: 462511 - RNA, 19 nt, Homo sapiens
  misc_RNA (1)...(19): siRNA sense strand
caaaaugccugaugaugua

SEQ ID NO: 462512 - RNA, 19 nt, Homo sapiens
  misc_RNA (1)...(19): siRNA sense strand
aaacacagcccaacaguga

SEQ ID NO: 462513 - RNA, 19 nt, Homo sapiens
  misc_RNA (1)...(19): siRNA sense strand
gaaaucugcuacuccguau

SEQ ID NO: 462514 - RNA, 19 nt, Homo sapiens
  misc_RNA (1)...(19): siRNA sense strand
ucagugaaaugaugaaaug

SEQ ID NO: 462515 - RNA, 19 nt, Homo sapiens
  misc_RNA (1)...(19): siRNA sense strand
cgauauggcaucuguguua

SEQ ID NO: 462516 - RNA, 19 nt, Homo sapiens
  misc_RNA (1)...(19): siRNA sense strand
gugauaguauggauuauga

SEQ ID NO: 462517 - RNA, 19 nt, Homo sapiens
  misc_RNA (1)...(19): siRNA sense strand
gaugauaguggcagugaua

SEQ ID NO: 462518 - RNA, 19 nt, Homo sapiens
  misc_RNA (1)...(19): siRNA sense strand
ccacugcgcuccagcucua

SEQ ID NO: 462519 - RNA, 19 nt, Homo sapiens
  misc_RNA (1)...(19): siRNA sense strand
gugaaaugaugaaauguga

SEQ ID NO: 462520 - RNA, 19 nt, Homo sapiens
  misc_RNA (1)...(19): siRNA sense strand
ggacagcaauagggugauu

SEQ ID NO: 462521 - RNA, 19 nt, Homo sapiens
  misc_RNA (1)...(19): siRNA sense strand
gcaaaucaaugaggugcuu

SEQ ID NO: 462522 - RNA, 19 nt, Homo sapiens
  misc_RNA (1)...(19): siRNA sense strand
caccagaaguuuaaaggaa

SEQ ID NO: 462523 - RNA, 19 nt, Homo sapiens
  misc_RNA (1)...(19): siRNA sense strand
gauauggcaucuguguuaa

SEQ ID NO: 462524 - RNA, 19 nt, Homo sapiens
  misc_RNA (1)...(19): siRNA sense strand
uauuaugucucuucucgua

SEQ ID NO: 462525 - RNA, 19 nt, Homo sapiens
  misc_RNA (1)...(19): siRNA sense strand
caacagaaaguguaaauac

SEQ ID NO: 462526 - RNA, 19 nt, Homo sapiens
  misc_RNA (1)...(19): siRNA sense strand
caagcuggcuccuuucuag

SEQ ID NO: 462527 - RNA, 19 nt, Homo sapiens
  misc_RNA (1)...(19): siRNA sense strand
gugcuaaccugcauucugu

SEQ ID NO: 462528 - RNA, 19 nt, Homo sapiens
  misc_RNA (1)...(19): siRNA sense strand
gauaguggcagugauagua

SEQ ID NO: 462529 - RNA, 19 nt, Homo sapiens
  misc_RNA (1)...(19): siRNA sense strand
guacguggcugcaguucau

SEQ ID NO: 462530 - RNA, 19 nt, Homo sapiens
  misc_RNA (1)...(19): siRNA sense strand
ucaaauucaugcacaauca

SEQ ID NO: 462531 - RNA, 19 nt, Homo sapiens
  misc_RNA (1)...(19): siRNA sense strand
agacccagcucaacaaguu

SEQ ID NO: 462532 - RNA, 19 nt, Homo sapiens
  misc_RNA (1)...(19): siRNA sense strand
ccagcgagguggagauuga

SEQ ID NO: 462533 - RNA, 19 nt, Homo sapiens
  misc_RNA (1)...(19): siRNA sense strand
gagcuguacuacuguguga

SEQ ID NO: 462534 - RNA, 19 nt, Homo sapiens
  misc_RNA (1)...(19): siRNA sense strand
guacaugcagggacagaua

SEQ ID NO: 462535 - RNA, 19 nt, Homo sapiens
  misc_RNA (1)...(19): siRNA sense strand
gaagcagacauuuguggua

SEQ ID NO: 462536 - RNA, 19 nt, Homo sapiens
  misc_RNA (1)...(19): siRNA sense strand
gcucugaccuuugcucuuc

SEQ ID NO: 462537 - RNA, 19 nt, Homo sapiens
  misc_RNA (1)...(19): siRNA sense strand
gagaagggauggguaugga

SEQ ID NO: 462538 - RNA, 19 nt, Homo sapiens
  misc_RNA (1)...(19): siRNA sense strand
ugaauuggguggcgaguuc

SEQ ID NO: 462539 - RNA, 19 nt, Homo sapiens
  misc_RNA (1)...(19): siRNA sense strand
agacgaagguguugugcuu

SEQ ID NO: 462540 - RNA, 19 nt, Homo sapiens
  misc_RNA (1)...(19): siRNA sense strand
ugaagaagcagacauuugu

SEQ ID NO: 462541 - RNA, 19 nt, Homo sapiens
  misc_RNA (1)...(19): siRNA sense strand
gaagggaucaaccucaaau

SEQ ID NO: 462542 - RNA, 19 nt, Homo sapiens
  misc_RNA (1)...(19): siRNA sense strand
gcaugagccuucgggauga

SEQ ID NO: 462543 - RNA, 19 nt, Homo sapiens
  misc_RNA (1)...(19): siRNA sense strand
ggaucaaccucaaauucau

SEQ ID NO: 462544 - RNA, 19 nt, Homo sapiens
  misc_RNA (1)...(19): siRNA sense strand
gaaaugaugaaaugugaca

SEQ ID NO: 462545 - RNA, 19 nt, Homo sapiens
  misc_RNA (1)...(19): siRNA sense strand
cagaaucacuagagcugaa

SEQ ID NO: 462546 - RNA, 19 nt, Homo sapiens
  misc_RNA (1)...(19): siRNA sense strand
gcaucuguguuaacuucua

SEQ ID NO: 462547 - RNA, 19 nt, Homo sapiens
  misc_RNA (1)...(19): siRNA sense strand
acacuggagucacgcgaua

SEQ ID NO: 462548 - RNA, 19 nt, Homo sapiens
  misc_RNA (1)...(19): siRNA sense strand
ggcccagacuccugaauug

SEQ ID NO: 462549 - RNA, 19 nt, Homo sapiens
  misc_RNA (1)...(19): siRNA sense strand
ggacugaucaagacucugu

SEQ ID NO: 462550 - RNA, 19 nt, Homo sapiens
  misc_RNA (1)...(19): siRNA sense strand
aguaccagcuucagucuuu

SEQ ID NO: 462551 - RNA, 19 nt, Homo sapiens
  misc_RNA (1)...(19): siRNA sense strand
gcaugaccuucgagagauu

SEQ ID NO: 462552 - RNA, 19 nt, Homo sapiens
  misc_RNA (1)...(19): siRNA sense strand
aaucugcuacuccguauua

SEQ ID NO: 462553 - RNA, 19 nt, Homo sapiens
  misc_RNA (1)...(19): siRNA sense strand
gcccagacccacuacuaua

SEQ ID NO: 462554 - RNA, 19 nt, Homo sapiens
  misc_RNA (1)...(19): siRNA sense strand
cagggucgauccagcaauu

SEQ ID NO: 462555 - RNA, 19 nt, Homo sapiens
  misc_RNA (1)...(19): siRNA sense strand
gaaaagagaaccuccauca

SEQ ID NO: 462556 - RNA, 19 nt, Homo sapiens
  misc_RNA (1)...(19): siRNA sense strand
gauucacccuaguggauuu

SEQ ID NO: 462557 - RNA, 19 nt, Homo sapiens
  misc_RNA (1)...(19): siRNA sense strand
ccagacuccugaauugcua

SEQ ID NO: 462558 - RNA, 19 nt, Homo sapiens
  misc_RNA (1)...(19): siRNA sense strand
agaaugacauccgcaagaa

SEQ ID NO: 462559 - RNA, 19 nt, Homo sapiens
  misc_RNA (1)...(19): siRNA sense strand
cuucuuagaugcugugaug

SEQ ID NO: 462560 - RNA, 19 nt, Homo sapiens
  misc_RNA (1)...(19): siRNA sense strand
gagcagcaaugcaggugau

SEQ ID NO: 462561 - RNA, 19 nt, Homo sapiens
  misc_RNA (1)...(19): siRNA sense strand
gauucaagcucuucuuacu

SEQ ID NO: 462562 - RNA, 19 nt, Homo sapiens
  misc_RNA (1)...(19): siRNA sense strand
ccaacgugcugcagggauu

SEQ ID NO: 462563 - RNA, 19 nt, Homo sapiens
  misc_RNA (1)...(19): siRNA sense strand
ccuggaagaugaugaagau

SEQ ID NO: 462564 - RNA, 19 nt, Homo sapiens
  misc_RNA (1)...(19): siRNA sense strand
gaaguaaucaaaccugucu

SEQ ID NO: 462565 - RNA, 19 nt, Homo sapiens
  misc_RNA (1)...(19): siRNA sense strand
gaagaggguggcacugaga

SEQ ID NO: 462566 - RNA, 19 nt, Homo sapiens
  misc_RNA (1)...(19): siRNA sense strand
caucaaacccggaccugaa

SEQ ID NO: 462567 - RNA, 19 nt, Homo sapiens
  misc_RNA (1)...(19): siRNA sense strand
acgagaagcucaucaacau

SEQ ID NO: 462568 - RNA, 19 nt, Homo sapiens
  misc_RNA (1)...(19): siRNA sense strand
ccagaggacugaucaagac

SEQ ID NO: 462569 - RNA, 19 nt, Homo sapiens
  misc_RNA (1)...(19): siRNA sense strand
ggugugagccugacgucua

SEQ ID NO: 462570 - RNA, 19 nt, Homo sapiens
  misc_RNA (1)...(19): siRNA sense strand
guacaaagggacaccaugu

SEQ ID NO: 462571 - RNA, 19 nt, Homo sapiens
  misc_RNA (1)...(19): siRNA sense strand
ggagggcguuaguggauca

SEQ ID NO: 462572 - RNA, 19 nt, Homo sapiens
  misc_RNA (1)...(19): siRNA sense strand
gggaucaaccucaaauuca

SEQ ID NO: 462573 - RNA, 19 nt, Homo sapiens
  misc_RNA (1)...(19): siRNA sense strand
gaugauaccucuuuugucu

SEQ ID NO: 462574 - RNA, 19 nt, Homo sapiens
  misc_RNA (1)...(19): siRNA sense strand
gaguccagcuguuaugauc

SEQ ID NO: 462575 - RNA, 19 nt, Homo sapiens
  misc_RNA (1)...(19): siRNA sense strand
ccagccagcucugaccuuu

SEQ ID NO: 462576 - RNA, 19 nt, Homo sapiens
  misc_RNA (1)...(19): siRNA sense strand
uaacaucggaacaguguau

SEQ ID NO: 462577 - RNA, 19 nt, Homo sapiens
  misc_RNA (1)...(19): siRNA sense strand
caaaggcuauggcacaacu

SEQ ID NO: 462578 - RNA, 19 nt, Homo sapiens
  misc_RNA (1)...(19): siRNA sense strand
ggaagagaaguccaacaga

SEQ ID NO: 462579 - RNA, 19 nt, Homo sapiens
  misc_RNA (1)...(19): siRNA sense strand
gguguacaagggaauguua

SEQ ID NO: 462580 - RNA, 19 nt, Homo sapiens
  misc_RNA (1)...(19): siRNA sense strand
ccacggagccaacucugaa

SEQ ID NO: 462581 - RNA, 19 nt, Homo sapiens
  misc_RNA (1)...(19): siRNA sense strand
uugacgagcugcagaauca

SEQ ID NO: 462582 - RNA, 19 nt, Homo sapiens
  misc_RNA (1)...(19): siRNA sense strand
gaauucaacccacucaucu

SEQ ID NO: 462583 - RNA, 19 nt, Homo sapiens
  misc_RNA (1)...(19): siRNA sense strand
cucaacaaguucuauacua

SEQ ID NO: 462584 - RNA, 19 nt, Homo sapiens
  misc_RNA (1)...(19): siRNA sense strand
gaaggugaggcgccuaaug

SEQ ID NO: 462585 - RNA, 19 nt, Homo sapiens
  misc_RNA (1)...(19): siRNA sense strand
aggaaaugaucgacaggua

SEQ ID NO: 462586 - RNA, 19 nt, Homo sapiens
  misc_RNA (1)...(19): siRNA sense strand
ccagaaguuuaaaggaaga

SEQ ID NO: 462587 - RNA, 19 nt, Homo sapiens
  misc_RNA (1)...(19): siRNA sense strand
gccagcaucuuugggcuuu

SEQ ID NO: 462588 - RNA, 19 nt, Homo sapiens
  misc_RNA (1)...(19): siRNA sense strand
guacaguccucagcuugga

SEQ ID NO: 462589 - RNA, 19 nt, Homo sapiens
  misc_RNA (1)...(19): siRNA sense strand
gugacaagccaaaguggua

SEQ ID NO: 462590 - RNA, 19 nt, Homo sapiens
  misc_RNA (1)...(19): siRNA sense strand
uggcggaucuuuacuggau

SEQ ID NO: 462591 - RNA, 19 nt, Homo sapiens
  misc_RNA (1)...(19): siRNA sense strand
gaagguaaauaagaaugac

SEQ ID NO: 462592 - RNA, 19 nt, Homo sapiens
  misc_RNA (1)...(19): siRNA sense strand
uggcaucuguguuaacuuc

SEQ ID NO: 462593 - RNA, 19 nt, Homo sapiens
  misc_RNA (1)...(19): siRNA sense strand
uguuagaccuccucaagug

SEQ ID NO: 462594 - RNA, 19 nt, Homo sapiens
  misc_RNA (1)...(19): siRNA sense strand
ccagacccaucucgauuca

SEQ ID NO: 462595 - RNA, 19 nt, Homo sapiens
  misc_RNA (1)...(19): siRNA sense strand
gucgggagcuguacuacug

SEQ ID NO: 462596 - RNA, 19 nt, Homo sapiens
  misc_RNA (1)...(19): siRNA sense strand
guaguaacaucggaacagu

SEQ ID NO: 462597 - RNA, 19 nt, Homo sapiens
  misc_RNA (1)...(19): siRNA sense strand
cgaauucacaacaauaugu

SEQ ID NO: 462598 - RNA, 19 nt, Homo sapiens
  misc_RNA (1)...(19): siRNA sense strand
cagcgaauucacaacaaua

SEQ ID NO: 462599 - RNA, 19 nt, Homo sapiens
  misc_RNA (1)...(19): siRNA sense strand
ucuacaaacuggacuucaa

SEQ ID NO: 462600 - RNA, 19 nt, Homo sapiens
  misc_RNA (1)...(19): siRNA sense strand
uacaaacggagauaucuuu

SEQ ID NO: 462601 - RNA, 19 nt, Homo sapiens
  misc_RNA (1)...(19): siRNA sense strand
ggaagggaucaaccucaaa

SEQ ID NO: 462602 - RNA, 19 nt, Homo sapiens
  misc_RNA (1)...(19): siRNA sense strand
ugugugguguugcguagua

SEQ ID NO: 462603 - RNA, 19 nt, Homo sapiens
  misc_RNA (1)...(19): siRNA sense strand
gaagucaucugucauuaaa

SEQ ID NO: 462604 - RNA, 19 nt, Homo sapiens
  misc_RNA (1)...(19): siRNA sense strand
gaagagaaguccaacagaa

SEQ ID NO: 462605 - RNA, 19 nt, Homo sapiens
  misc_RNA (1)...(19): siRNA sense strand
gaaguucuguccucgguua

SEQ ID NO: 462606 - RNA, 19 nt, Homo sapiens
  misc_RNA (1)...(19): siRNA sense strand
cuacggagauggaugauaa

SEQ ID NO: 462607 - RNA, 19 nt, Homo sapiens
  misc_RNA (1)...(19): siRNA sense strand
gcagugauaguauggauua

SEQ ID NO: 462608 - RNA, 19 nt, Homo sapiens
  misc_RNA (1)...(19): siRNA sense strand
ggaagcgccuggaagauga

SEQ ID NO: 462609 - RNA, 19 nt, Homo sapiens
  misc_RNA (1)...(19): siRNA sense strand
caagugcccuucugcauga

SEQ ID NO: 462610 - RNA, 19 nt, Homo sapiens
  misc_RNA (1)...(19): siRNA sense strand
ggacagacgucaggcagaa

SEQ ID NO: 462611 - RNA, 19 nt, Homo sapiens
  misc_RNA (1)...(19): siRNA sense strand
caaaaugccugaugaugua

SEQ ID NO: 462612 - RNA, 19 nt, Homo sapiens
  misc_RNA (1)...(19): siRNA sense strand
aaacacagcccaacaguga

SEQ ID NO: 462613 - RNA, 19 nt, Homo sapiens
  misc_RNA (1)...(19): siRNA sense strand
gaaaucugcuacuccguau

SEQ ID NO: 462614 - RNA, 19 nt, Homo sapiens
  misc_RNA (1)...(19): siRNA sense strand
ucagugaaaugaugaaaug

SEQ ID NO: 462615 - RNA, 19 nt, Homo sapiens
  misc_RNA (1)...(19): siRNA sense strand
cgauauggcaucuguguua

SEQ ID NO: 462616 - RNA, 19 nt, Homo sapiens
  misc_RNA (1)...(19): siRNA sense strand
gugauaguauggauuauga

SEQ ID NO: 462617 - RNA, 19 nt, Homo sapiens
  misc_RNA (1)...(19): siRNA sense strand
gaugauaguggcagugaua

SEQ ID NO: 462618 - RNA, 19 nt, Homo sapiens
  misc_RNA (1)...(19): siRNA sense strand
ccacugcgcuccagcucua

SEQ ID NO: 462619 - RNA, 19 nt, Homo sapiens
  misc_RNA (1)...(19): siRNA sense strand
gugaaaugaugaaauguga

SEQ ID NO: 462620 - RNA, 19 nt, Homo sapiens
  misc_RNA (1)...(19): siRNA sense strand
ggacagcaauagggugauu

SEQ ID NO: 462621 - RNA, 19 nt, Homo sapiens
  misc_RNA (1)...(19): siRNA sense strand
gcaaaucaaugaggugcuu

SEQ ID NO: 462622 - RNA, 19 nt, Homo sapiens
  misc_RNA (1)...(19): siRNA sense strand
caccagaaguuuaaaggaa

SEQ ID NO: 462623 - RNA, 19 nt, Homo sapiens
  misc_RNA (1)...(19): siRNA sense strand
gauauggcaucuguguuaa

SEQ ID NO: 462624 - RNA, 19 nt, Homo sapiens
  misc_RNA (1)...(19): siRNA sense strand
uauuaugucucuucucgua

SEQ ID NO: 462625 - RNA, 19 nt, Homo sapiens
  misc_RNA (1)...(19): siRNA sense strand
caacagaaaguguaaauac

SEQ ID NO: 462626 - RNA, 19 nt, Homo sapiens
  misc_RNA (1)...(19): siRNA sense strand
caagcuggcuccuuucuag

SEQ ID NO: 462627 - RNA, 19 nt, Homo sapiens
  misc_RNA (1)...(19): siRNA sense strand
gugcuaaccugcauucugu

SEQ ID NO: 462628 - RNA, 19 nt, Homo sapiens
  misc_RNA (1)...(19): siRNA sense strand
gauaguggcagugauagua

SEQ ID NO: 462629 - RNA, 19 nt, Homo sapiens
  misc_RNA (1)...(19): siRNA sense strand
guacguggcugcaguucau

SEQ ID NO: 462630 - RNA, 19 nt, Homo sapiens
  misc_RNA (1)...(19): siRNA sense strand
ucaaauucaugcacaauca

SEQ ID NO: 462631 - RNA, 19 nt, Homo sapiens
  misc_RNA (1)...(19): siRNA sense strand
agacccagcucaacaaguu

SEQ ID NO: 462632 - RNA, 19 nt, Homo sapiens
  misc_RNA (1)...(19): siRNA sense strand
ccagcgagguggagauuga

SEQ ID NO: 462633 - RNA, 19 nt, Homo sapiens
  misc_RNA (1)...(19): siRNA sense strand
gagcuguacuacuguguga

SEQ ID NO: 462634 - RNA, 19 nt, Homo sapiens
  misc_RNA (1)...(19): siRNA sense strand
guacaugcagggacagaua

SEQ ID NO: 462635 - RNA, 19 nt, Homo sapiens
  misc_RNA (1)...(19): siRNA sense strand
gaagcagacauuuguggua

SEQ ID NO: 462636 - RNA, 19 nt, Homo sapiens
  misc_RNA (1)...(19): siRNA sense strand
gcucugaccuuugcucuuc

SEQ ID NO: 462637 - RNA, 19 nt, Homo sapiens
  misc_RNA (1)...(19): siRNA sense strand
gagaagggauggguaugga

SEQ ID NO: 462638 - RNA, 19 nt, Homo sapiens
  misc_RNA (1)...(19): siRNA sense strand
ugaauuggguggcgaguuc

SEQ ID NO: 462639 - RNA, 19 nt, Homo sapiens
  misc_RNA (1)...(19): siRNA sense strand
agacgaagguguugugcuu

SEQ ID NO: 462640 - RNA, 19 nt, Homo sapiens
  misc_RNA (1)...(19): siRNA sense strand
ugaagaagcagacauuugu

SEQ ID NO: 462641 - RNA, 19 nt, Homo sapiens
  misc_RNA (1)...(19): siRNA sense strand
gaagggaucaaccucaaau

SEQ ID NO: 462642 - RNA, 19 nt, Homo sapiens
  misc_RNA (1)...(19): siRNA sense strand
gcaugagccuucgggauga

SEQ ID NO: 462643 - RNA, 19 nt, Homo sapiens
  misc_RNA (1)...(19): siRNA sense strand
ggaucaaccucaaauucau

SEQ ID NO: 462644 - RNA, 19 nt, Homo sapiens
  misc_RNA (1)...(19): siRNA sense strand
gaaaugaugaaaugugaca

SEQ ID NO: 462645 - RNA, 19 nt, Homo sapiens
  misc_RNA (1)...(19): siRNA sense strand
cagaaucacuagagcugaa

SEQ ID NO: 462646 - RNA, 19 nt, Homo sapiens
  misc_RNA (1)...(19): siRNA sense strand
gcaucuguguuaacuucua

SEQ ID NO: 462647 - RNA, 19 nt, Homo sapiens
  misc_RNA (1)...(19): siRNA sense strand
acacuggagucacgcgaua

SEQ ID NO: 462648 - RNA, 19 nt, Homo sapiens
  misc_RNA (1)...(19): siRNA sense strand
ggcccagacuccugaauug

SEQ ID NO: 462649 - RNA, 19 nt, Homo sapiens
  misc_RNA (1)...(19): siRNA sense strand
ggacugaucaagacucugu

SEQ ID NO: 462650 - RNA, 19 nt, Homo sapiens
  misc_RNA (1)...(19): siRNA sense strand
aguaccagcuucagucuuu

SEQ ID NO: 462651 - RNA, 19 nt, Homo sapiens
  misc_RNA (1)...(19): siRNA sense strand
gcaugaccuucgagagauu

SEQ ID NO: 462652 - RNA, 19 nt, Homo sapiens
  misc_RNA (1)...(19): siRNA sense strand
aaucugcuacuccguauua

SEQ ID NO: 462653 - RNA, 19 nt, Homo sapiens
  misc_RNA (1)...(19): siRNA sense strand
gcccagacccacuacuaua

SEQ ID NO: 462654 - RNA, 19 nt, Homo sapiens
  misc_RNA (1)...(19): siRNA sense strand
cagggucgauccagcaauu

SEQ ID NO: 462655 - RNA, 19 nt, Homo sapiens
  misc_RNA (1)...(19): siRNA sense strand
gaaaagagaaccuccauca

SEQ ID NO: 462656 - RNA, 19 nt, Homo sapiens
  misc_RNA (1)...(19): siRNA sense strand
gauucacccuaguggauuu

SEQ ID NO: 462657 - RNA, 19 nt, Homo sapiens
  misc_RNA (1)...(19): siRNA sense strand
ccagacuccugaauugcua

SEQ ID NO: 462658 - RNA, 19 nt, Homo sapiens
  misc_RNA (1)...(19): siRNA sense strand
agaaugacauccgcaagaa

SEQ ID NO: 462659 - RNA, 19 nt, Homo sapiens
  misc_RNA (1)...(19): siRNA sense strand
cuucuuagaugcugugaug

SEQ ID NO: 462660 - RNA, 19 nt, Homo sapiens
  misc_RNA (1)...(19): siRNA sense strand
gagcagcaaugcaggugau

SEQ ID NO: 462661 - RNA, 19 nt, Homo sapiens
  misc_RNA (1)...(19): siRNA sense strand
gauucaagcucuucuuacu

SEQ ID NO: 462662 - RNA, 19 nt, Homo sapiens
  misc_RNA (1)...(19): siRNA sense strand
ccaacgugcugcagggauu

SEQ ID NO: 462663 - RNA, 19 nt, Homo sapiens
  misc_RNA (1)...(19): siRNA sense strand
ccuggaagaugaugaagau

SEQ ID NO: 462664 - RNA, 19 nt, Homo sapiens
  misc_RNA (1)...(19): siRNA sense strand
gaaguaaucaaaccugucu

SEQ ID NO: 462665 - RNA, 19 nt, Homo sapiens
  misc_RNA (1)...(19): siRNA sense strand
gaagaggguggcacugaga

SEQ ID NO: 462666 - RNA, 19 nt, Homo sapiens
  misc_RNA (1)...(19): siRNA sense strand
caucaaacccggaccugaa

SEQ ID NO: 462667 - RNA, 19 nt, Homo sapiens
  misc_RNA (1)...(19): siRNA sense strand
acgagaagcucaucaacau

SEQ ID NO: 462668 - RNA, 19 nt, Homo sapiens
  misc_RNA (1)...(19): siRNA sense strand
ccagaggacugaucaagac

SEQ ID NO: 462669 - RNA, 19 nt, Homo sapiens
  misc_RNA (1)...(19): siRNA sense strand
ggugugagccugacgucua

SEQ ID NO: 462670 - RNA, 19 nt, Homo sapiens
  misc_RNA (1)...(19): siRNA sense strand
guacaaagggacaccaugu

SEQ ID NO: 462671 - RNA, 19 nt, Homo sapiens
  misc_RNA (1)...(19): siRNA sense strand
ggagggcguuaguggauca

SEQ ID NO: 462672 - RNA, 19 nt, Homo sapiens
  misc_RNA (1)...(19): siRNA sense strand
gggaucaaccucaaauuca

SEQ ID NO: 462673 - RNA, 19 nt, Homo sapiens
  misc_RNA (1)...(19): siRNA sense strand
gaugauaccucuuuugucu

SEQ ID NO: 462674 - RNA, 19 nt, Homo sapiens
  misc_RNA (1)...(19): siRNA sense strand
gaguccagcuguuaugauc

SEQ ID NO: 462675 - RNA, 19 nt, Homo sapiens
  misc_RNA (1)...(19): siRNA sense strand
ccagccagcucugaccuuu

SEQ ID NO: 462676 - RNA, 19 nt, Homo sapiens
  misc_RNA (1)...(19): siRNA sense strand
uaacaucggaacaguguau

SEQ ID NO: 462677 - RNA, 19 nt, Homo sapiens
  misc_RNA (1)...(19): siRNA sense strand
caaaggcuauggcacaacu

SEQ ID NO: 462678 - RNA, 19 nt, Homo sapiens
  misc_RNA (1)...(19): siRNA sense strand
ggaagagaaguccaacaga

SEQ ID NO: 462679 - RNA, 19 nt, Homo sapiens
  misc_RNA (1)...(19): siRNA sense strand
gguguacaagggaauguua

SEQ ID NO: 462680 - RNA, 19 nt, Homo sapiens
  misc_RNA (1)...(19): siRNA sense strand
ccacggagccaacucugaa

SEQ ID NO: 462681 - RNA, 19 nt, Homo sapiens
  misc_RNA (1)...(19): siRNA sense strand
uugacgagcugcagaauca

SEQ ID NO: 462682 - RNA, 19 nt, Homo sapiens
  misc_RNA (1)...(19): siRNA sense strand
gaauucaacccacucaucu

SEQ ID NO: 462683 - RNA, 19 nt, Homo sapiens
  misc_RNA (1)...(19): siRNA sense strand
cucaacaaguucuauacua

SEQ ID NO: 462684 - RNA, 19 nt, Homo sapiens
  misc_RNA (1)...(19): siRNA sense strand
gaaggugaggcgccuaaug

SEQ ID NO: 462685 - RNA, 19 nt, Homo sapiens
  misc_RNA (1)...(19): siRNA sense strand
aggaaaugaucgacaggua

SEQ ID NO: 462686 - RNA, 19 nt, Homo sapiens
  misc_RNA (1)...(19): siRNA sense strand
ccagaaguuuaaaggaaga

SEQ ID NO: 462687 - RNA, 19 nt, Homo sapiens
  misc_RNA (1)...(19): siRNA sense strand
gccagcaucuuugggcuuu

SEQ ID NO: 462688 - RNA, 19 nt, Homo sapiens
  misc_RNA (1)...(19): siRNA sense strand
guacaguccucagcuugga

SEQ ID NO: 462689 - RNA, 19 nt, Homo sapiens
  misc_RNA (1)...(19): siRNA sense strand
gugacaagccaaaguggua

SEQ ID NO: 462690 - RNA, 19 nt, Homo sapiens
  misc_RNA (1)...(19): siRNA sense strand
uggcggaucuuuacuggau

SEQ ID NO: 462691 - RNA, 19 nt, Homo sapiens
  misc_RNA (1)...(19): siRNA sense strand
gaagguaaauaagaaugac

SEQ ID NO: 462692 - RNA, 19 nt, Homo sapiens
  misc_RNA (1)...(19): siRNA sense strand
uggcaucuguguuaacuuc

SEQ ID NO: 462693 - RNA, 19 nt, Homo sapiens
  misc_RNA (1)...(19): siRNA sense strand
uguuagaccuccucaagug

SEQ ID NO: 462694 - RNA, 19 nt, Homo sapiens
  misc_RNA (1)...(19): siRNA sense strand
ccagacccaucucgauuca

SEQ ID NO: 462695 - RNA, 19 nt, Homo sapiens
  misc_RNA (1)...(19): siRNA sense strand
gucgggagcuguacuacug

SEQ ID NO: 462696 - RNA, 19 nt, Homo sapiens
  misc_RNA (1)...(19): siRNA sense strand
guaguaacaucggaacagu

SEQ ID NO: 462697 - RNA, 19 nt, Homo sapiens
  misc_RNA (1)...(19): siRNA sense strand
cgaauucacaacaauaugu

SEQ ID NO: 462698 - RNA, 19 nt, Homo sapiens
  misc_RNA (1)...(19): siRNA sense strand
cagcgaauucacaacaaua

SEQ ID NO: 462699 - RNA, 19 nt, Homo sapiens
  misc_RNA (1)...(19): siRNA sense strand
ucuacaaacuggacuucaa

SEQ ID NO: 462700 - RNA, 19 nt, Homo sapiens
  misc_RNA (1)...(19): siRNA sense strand
uacaaacggagauaucuuu

SEQ ID NO: 462701 - RNA, 19 nt, Homo sapiens
  misc_RNA (1)...(19): siRNA sense strand
ggaagggaucaaccucaaa

SEQ ID NO: 462702 - RNA, 19 nt, Homo sapiens
  misc_RNA (1)...(19): siRNA sense strand
ugugugguguugcguagua

SEQ ID NO: 462703 - RNA, 19 nt, Homo sapiens
  misc_RNA (1)...(19): siRNA sense strand
gaagucaucugucauuaaa

SEQ ID NO: 462704 - RNA, 19 nt, Homo sapiens
  misc_RNA (1)...(19): siRNA sense strand
gaagagaaguccaacagaa

SEQ ID NO: 462705 - RNA, 19 nt, Homo sapiens
  misc_RNA (1)...(19): siRNA sense strand
gaaguucuguccucgguua

SEQ ID NO: 462706 - RNA, 19 nt, Homo sapiens
  misc_RNA (1)...(19): siRNA sense strand
cuacggagauggaugauaa

SEQ ID NO: 462707 - RNA, 19 nt, Homo sapiens
  misc_RNA (1)...(19): siRNA sense strand
gcagugauaguauggauua

SEQ ID NO: 462708 - RNA, 19 nt, Homo sapiens
  misc_RNA (1)...(19): siRNA sense strand
ggaagcgccuggaagauga

SEQ ID NO: 462709 - RNA, 19 nt, Homo sapiens
  misc_RNA (1)...(19): siRNA sense strand
caagugcccuucugcauga

SEQ ID NO: 462710 - RNA, 19 nt, Homo sapiens
  misc_RNA (1)...(19): siRNA sense strand
ggacagacgucaggcagaa

SEQ ID NO: 462711 - RNA, 19 nt, Homo sapiens
  misc_RNA (1)...(19): siRNA sense strand
caaaaugccugaugaugua

SEQ ID NO: 462712 - RNA, 19 nt, Homo sapiens
  misc_RNA (1)...(19): siRNA sense strand
aaacacagcccaacaguga

SEQ ID NO: 462713 - RNA, 19 nt, Homo sapiens
  misc_RNA (1)...(19): siRNA sense strand
gaaaucugcuacuccguau

SEQ ID NO: 462714 - RNA, 19 nt, Homo sapiens
  misc_RNA (1)...(19): siRNA sense strand
ucagugaaaugaugaaaug

SEQ ID NO: 462715 - RNA, 19 nt, Homo sapiens
  misc_RNA (1)...(19): siRNA sense strand
cgauauggcaucuguguua

SEQ ID NO: 462716 - RNA, 19 nt, Homo sapiens
  misc_RNA (1)...(19): siRNA sense strand
gugauaguauggauuauga

SEQ ID NO: 462717 - RNA, 19 nt, Homo sapiens
  misc_RNA (1)...(19): siRNA sense strand
gaugauaguggcagugaua

SEQ ID NO: 462718 - RNA, 19 nt, Homo sapiens
  misc_RNA (1)...(19): siRNA sense strand
ccacugcgcuccagcucua

SEQ ID NO: 462719 - RNA, 19 nt, Homo sapiens
  misc_RNA (1)...(19): siRNA sense strand
gugaaaugaugaaauguga

SEQ ID NO: 462720 - RNA, 19 nt, Homo sapiens
  misc_RNA (1)...(19): siRNA sense strand
ggacagcaauagggugauu

SEQ ID NO: 462721 - RNA, 19 nt, Homo sapiens
  misc_RNA (1)...(19): siRNA sense strand
gcaaaucaaugaggugcuu

SEQ ID NO: 462722 - RNA, 19 nt, Homo sapiens
  misc_RNA (1)...(19): siRNA sense strand
caccagaaguuuaaaggaa

SEQ ID NO: 462723 - RNA, 19 nt, Homo sapiens
  misc_RNA (1)...(19): siRNA sense strand
gauauggcaucuguguuaa

SEQ ID NO: 462724 - RNA, 19 nt, Homo sapiens
  misc_RNA (1)...(19): siRNA sense strand
uauuaugucucuucucgua

SEQ ID NO: 462725 - RNA, 19 nt, Homo sapiens
  misc_RNA (1)...(19): siRNA sense strand
caacagaaaguguaaauac

SEQ ID NO: 462726 - RNA, 19 nt, Homo sapiens
  misc_RNA (1)...(19): siRNA sense strand
caagcuggcuccuuucuag

SEQ ID NO: 462727 - RNA, 19 nt, Homo sapiens
  misc_RNA (1)...(19): siRNA sense strand
gugcuaaccugcauucugu

SEQ ID NO: 462728 - RNA, 19 nt, Homo sapiens
  misc_RNA (1)...(19): siRNA sense strand
gauaguggcagugauagua

SEQ ID NO: 462729 - RNA, 19 nt, Homo sapiens
  misc_RNA (1)...(19): siRNA sense strand
guacguggcugcaguucau

SEQ ID NO: 462730 - RNA, 19 nt, Homo sapiens
  misc_RNA (1)...(19): siRNA sense strand
ucaaauucaugcacaauca

SEQ ID NO: 462731 - RNA, 19 nt, Homo sapiens
  misc_RNA (1)...(19): siRNA sense strand
agacccagcucaacaaguu

SEQ ID NO: 462732 - RNA, 19 nt, Homo sapiens
  misc_RNA (1)...(19): siRNA sense strand
ccagcgagguggagauuga

SEQ ID NO: 462733 - RNA, 19 nt, Homo sapiens
  misc_RNA (1)...(19): siRNA sense strand
gagcuguacuacuguguga

SEQ ID NO: 462734 - RNA, 19 nt, Homo sapiens
  misc_RNA (1)...(19): siRNA sense strand
guacaugcagggacagaua

SEQ ID NO: 462735 - RNA, 19 nt, Homo sapiens
  misc_RNA (1)...(19): siRNA sense strand
gaagcagacauuuguggua

SEQ ID NO: 462736 - RNA, 19 nt, Homo sapiens
  misc_RNA (1)...(19): siRNA sense strand
gcucugaccuuugcucuuc

SEQ ID NO: 462737 - RNA, 19 nt, Homo sapiens
  misc_RNA (1)...(19): siRNA sense strand
gagaagggauggguaugga

SEQ ID NO: 462738 - RNA, 19 nt, Homo sapiens
  misc_RNA (1)...(19): siRNA sense strand
ugaauuggguggcgaguuc

SEQ ID NO: 462739 - RNA, 19 nt, Homo sapiens
  misc_RNA (1)...(19): siRNA sense strand
agacgaagguguugugcuu

SEQ ID NO: 462740 - RNA, 19 nt, Homo sapiens
  misc_RNA (1)...(19): siRNA sense strand
ugaagaagcagacauuugu

SEQ ID NO: 462741 - RNA, 19 nt, Homo sapiens
  misc_RNA (1)...(19): siRNA sense strand
gaagggaucaaccucaaau

SEQ ID NO: 462742 - RNA, 19 nt, Homo sapiens
  misc_RNA (1)...(19): siRNA sense strand
gcaugagccuucgggauga

SEQ ID NO: 462743 - RNA, 19 nt, Homo sapiens
  misc_RNA (1)...(19): siRNA sense strand
ggaucaaccucaaauucau

SEQ ID NO: 462744 - RNA, 19 nt, Homo sapiens
  misc_RNA (1)...(19): siRNA sense strand
gaaaugaugaaaugugaca

SEQ ID NO: 462745 - RNA, 19 nt, Homo sapiens
  misc_RNA (1)...(19): siRNA sense strand
cagaaucacuagagcugaa

SEQ ID NO: 462746 - RNA, 19 nt, Homo sapiens
  misc_RNA (1)...(19): siRNA sense strand
gcaucuguguuaacuucua

SEQ ID NO: 462747 - RNA, 19 nt, Homo sapiens
  misc_RNA (1)...(19): siRNA sense strand
acacuggagucacgcgaua

SEQ ID NO: 462748 - RNA, 19 nt, Homo sapiens
  misc_RNA (1)...(19): siRNA sense strand
ggcccagacuccugaauug

SEQ ID NO: 462749 - RNA, 19 nt, Homo sapiens
  misc_RNA (1)...(19): siRNA sense strand
ggacugaucaagacucugu

SEQ ID NO: 462750 - RNA, 19 nt, Homo sapiens
  misc_RNA (1)...(19): siRNA sense strand
aguaccagcuucagucuuu

SEQ ID NO: 462751 - RNA, 19 nt, Homo sapiens
  misc_RNA (1)...(19): siRNA sense strand
gcaugaccuucgagagauu

SEQ ID NO: 462752 - RNA, 19 nt, Homo sapiens
  misc_RNA (1)...(19): siRNA sense strand
aaucugcuacuccguauua

SEQ ID NO: 462753 - RNA, 19 nt, Homo sapiens
  misc_RNA (1)...(19): siRNA sense strand
gcccagacccacuacuaua

SEQ ID NO: 462754 - RNA, 19 nt, Homo sapiens
  misc_RNA (1)...(19): siRNA sense strand
cagggucgauccagcaauu

SEQ ID NO: 462755 - RNA, 19 nt, Homo sapiens
  misc_RNA (1)...(19): siRNA sense strand
gaaaagagaaccuccauca

SEQ ID NO: 462756 - RNA, 19 nt, Homo sapiens
  misc_RNA (1)...(19): siRNA sense strand
gauucacccuaguggauuu

SEQ ID NO: 462757 - RNA, 19 nt, Homo sapiens
  misc_RNA (1)...(19): siRNA sense strand
ccagacuccugaauugcua

SEQ ID NO: 462758 - RNA, 19 nt, Homo sapiens
  misc_RNA (1)...(19): siRNA sense strand
agaaugacauccgcaagaa

SEQ ID NO: 462759 - RNA, 19 nt, Homo sapiens
  misc_RNA (1)...(19): siRNA sense strand
cuucuuagaugcugugaug

SEQ ID NO: 462760 - RNA, 19 nt, Homo sapiens
  misc_RNA (1)...(19): siRNA sense strand
gagcagcaaugcaggugau

SEQ ID NO: 462761 - RNA, 19 nt, Homo sapiens
  misc_RNA (1)...(19): siRNA sense strand
gauucaagcucuucuuacu

SEQ ID NO: 462762 - RNA, 19 nt, Homo sapiens
  misc_RNA (1)...(19): siRNA sense strand
ccaacgugcugcagggauu

SEQ ID NO: 462763 - RNA, 19 nt, Homo sapiens
  misc_RNA (1)...(19): siRNA sense strand
ccuggaagaugaugaagau

SEQ ID NO: 462764 - RNA, 19 nt, Homo sapiens
  misc_RNA (1)...(19): siRNA sense strand
gaaguaaucaaaccugucu

SEQ ID NO: 462765 - RNA, 19 nt, Homo sapiens
  misc_RNA (1)...(19): siRNA sense strand
gaagaggguggcacugaga

SEQ ID NO: 462766 - RNA, 19 nt, Homo sapiens
  misc_RNA (1)...(19): siRNA sense strand
caucaaacccggaccugaa

SEQ ID NO: 462767 - RNA, 19 nt, Homo sapiens
  misc_RNA (1)...(19): siRNA sense strand
acgagaagcucaucaacau

SEQ ID NO: 462768 - RNA, 19 nt, Homo sapiens
  misc_RNA (1)...(19): siRNA sense strand
ccagaggacugaucaagac

SEQ ID NO: 462769 - RNA, 19 nt, Homo sapiens
  misc_RNA (1)...(19): siRNA sense strand
ggugugagccugacgucua

SEQ ID NO: 462770 - RNA, 19 nt, Homo sapiens
  misc_RNA (1)...(19): siRNA sense strand
guacaaagggacaccaugu

SEQ ID NO: 462771 - RNA, 19 nt, Homo sapiens
  misc_RNA (1)...(19): siRNA sense strand
ggagggcguuaguggauca

SEQ ID NO: 462772 - RNA, 19 nt, Homo sapiens
  misc_RNA (1)...(19): siRNA sense strand
gggaucaaccucaaauuca

SEQ ID NO: 462773 - RNA, 19 nt, Homo sapiens
  misc_RNA (1)...(19): siRNA sense strand
gaugauaccucuuuugucu

SEQ ID NO: 462774 - RNA, 19 nt, Homo sapiens
  misc_RNA (1)...(19): siRNA sense strand
gaguccagcuguuaugauc

SEQ ID NO: 462775 - RNA, 19 nt, Homo sapiens
  misc_RNA (1)...(19): siRNA sense strand
ccagccagcucugaccuuu

SEQ ID NO: 462776 - RNA, 19 nt, Homo sapiens
  misc_RNA (1)...(19): siRNA sense strand
uaacaucggaacaguguau

SEQ ID NO: 462777 - RNA, 19 nt, Homo sapiens
  misc_RNA (1)...(19): siRNA sense strand
caaaggcuauggcacaacu

SEQ ID NO: 462778 - RNA, 19 nt, Homo sapiens
  misc_RNA (1)...(19): siRNA sense strand
ggaagagaaguccaacaga

SEQ ID NO: 462779 - RNA, 19 nt, Homo sapiens
  misc_RNA (1)...(19): siRNA sense strand
gguguacaagggaauguua

SEQ ID NO: 462780 - RNA, 19 nt, Homo sapiens
  misc_RNA (1)...(19): siRNA sense strand
ccacggagccaacucugaa

SEQ ID NO: 462781 - RNA, 19 nt, Homo sapiens
  misc_RNA (1)...(19): siRNA sense strand
uugacgagcugcagaauca

SEQ ID NO: 462782 - RNA, 19 nt, Homo sapiens
  misc_RNA (1)...(19): siRNA sense strand
gaauucaacccacucaucu

SEQ ID NO: 462783 - RNA, 19 nt, Homo sapiens
  misc_RNA (1)...(19): siRNA sense strand
cucaacaaguucuauacua

SEQ ID NO: 462784 - RNA, 19 nt, Homo sapiens
  misc_RNA (1)...(19): siRNA sense strand
gaaggugaggcgccuaaug

SEQ ID NO: 462785 - RNA, 19 nt, Homo sapiens
  misc_RNA (1)...(19): siRNA sense strand
aggaaaugaucgacaggua

SEQ ID NO: 462786 - RNA, 19 nt, Homo sapiens
  misc_RNA (1)...(19): siRNA sense strand
ccagaaguuuaaaggaaga

SEQ ID NO: 462787 - RNA, 19 nt, Homo sapiens
  misc_RNA (1)...(19): siRNA sense strand
gccagcaucuuugggcuuu

SEQ ID NO: 462788 - RNA, 19 nt, Homo sapiens
  misc_RNA (1)...(19): siRNA sense strand
guacaguccucagcuugga

SEQ ID NO: 462789 - RNA, 19 nt, Homo sapiens
  misc_RNA (1)...(19): siRNA sense strand
gugacaagccaaaguggua

SEQ ID NO: 462790 - RNA, 19 nt, Homo sapiens
  misc_RNA (1)...(19): siRNA sense strand
uggcggaucuuuacuggau

SEQ ID NO: 462791 - RNA, 19 nt, Homo sapiens
  misc_RNA (1)...(19): siRNA sense strand
gaagguaaauaagaaugac

SEQ ID NO: 462792 - RNA, 19 nt, Homo sapiens
  misc_RNA (1)...(19): siRNA sense strand
uggcaucuguguuaacuuc

SEQ ID NO: 462793 - RNA, 19 nt, Homo sapiens
  misc_RNA (1)...(19): siRNA sense strand
uguuagaccuccucaagug

SEQ ID NO: 462794 - RNA, 19 nt, Homo sapiens
  misc_RNA (1)...(19): siRNA sense strand
ccagacccaucucgauuca

SEQ ID NO: 462795 - RNA, 19 nt, Homo sapiens
  misc_RNA (1)...(19): siRNA sense strand
gucgggagcuguacuacug

SEQ ID NO: 462796 - RNA, 19 nt, Homo sapiens
  misc_RNA (1)...(19): siRNA sense strand
guaguaacaucggaacagu

SEQ ID NO: 462797 - RNA, 19 nt, Homo sapiens
  misc_RNA (1)...(19): siRNA sense strand
cgaauucacaacaauaugu

SEQ ID NO: 462798 - RNA, 19 nt, Homo sapiens
  misc_RNA (1)...(19): siRNA sense strand
cagcgaauucacaacaaua

SEQ ID NO: 462799 - RNA, 19 nt, Homo sapiens
  misc_RNA (1)...(19): siRNA sense strand
ucuacaaacuggacuucaa

SEQ ID NO: 462800 - RNA, 19 nt, Homo sapiens
  misc_RNA (1)...(19): siRNA sense strand
uacaaacggagauaucuuu

SEQ ID NO: 462801 - RNA, 19 nt, Homo sapiens
  misc_RNA (1)...(19): siRNA sense strand
ggaagggaucaaccucaaa

SEQ ID NO: 462802 - RNA, 19 nt, Homo sapiens
  misc_RNA (1)...(19): siRNA sense strand
ugugugguguugcguagua

SEQ ID NO: 462803 - RNA, 19 nt, Homo sapiens
  misc_RNA (1)...(19): siRNA sense strand
gaagucaucugucauuaaa

SEQ ID NO: 462804 - RNA, 19 nt, Homo sapiens
  misc_RNA (1)...(19): siRNA sense strand
gaagagaaguccaacagaa

SEQ ID NO: 462805 - RNA, 19 nt, Homo sapiens
  misc_RNA (1)...(19): siRNA sense strand
gaaguucuguccucgguua

SEQ ID NO: 462806 - RNA, 19 nt, Homo sapiens
  misc_RNA (1)...(19): siRNA sense strand
cuacggagauggaugauaa

SEQ ID NO: 462807 - RNA, 19 nt, Homo sapiens
  misc_RNA (1)...(19): siRNA sense strand
gcagugauaguauggauua

SEQ ID NO: 462808 - RNA, 19 nt, Homo sapiens
  misc_RNA (1)...(19): siRNA sense strand
ggaagcgccuggaagauga

SEQ ID NO: 462809 - RNA, 19 nt, Homo sapiens
  misc_RNA (1)...(19): siRNA sense strand
caagugcccuucugcauga

SEQ ID NO: 462810 - RNA, 19 nt, Homo sapiens
  misc_RNA (1)...(19): siRNA sense strand
ggacagacgucaggcagaa

SEQ ID NO: 462811 - RNA, 19 nt, Homo sapiens
  misc_RNA (1)...(19): siRNA sense strand
caaaaugccugaugaugua

SEQ ID NO: 462812 - RNA, 19 nt, Homo sapiens
  misc_RNA (1)...(19): siRNA sense strand
aaacacagcccaacaguga

SEQ ID NO: 462813 - RNA, 19 nt, Homo sapiens
  misc_RNA (1)...(19): siRNA sense strand
gaaaucugcuacuccguau

SEQ ID NO: 462814 - RNA, 19 nt, Homo sapiens
  misc_RNA (1)...(19): siRNA sense strand
ucagugaaaugaugaaaug

SEQ ID NO: 462815 - RNA, 19 nt, Homo sapiens
  misc_RNA (1)...(19): siRNA sense strand
cgauauggcaucuguguua

SEQ ID NO: 462816 - RNA, 19 nt, Homo sapiens
  misc_RNA (1)...(19): siRNA sense strand
gugauaguauggauuauga

SEQ ID NO: 462817 - RNA, 19 nt, Homo sapiens
  misc_RNA (1)...(19): siRNA sense strand
gaugauaguggcagugaua

SEQ ID NO: 462818 - RNA, 19 nt, Homo sapiens
  misc_RNA (1)...(19): siRNA sense strand
ccacugcgcuccagcucua

SEQ ID NO: 462819 - RNA, 19 nt, Homo sapiens
  misc_RNA (1)...(19): siRNA sense strand
gugaaaugaugaaauguga

SEQ ID NO: 462820 - RNA, 19 nt, Homo sapiens
  misc_RNA (1)...(19): siRNA sense strand
ggacagcaauagggugauu

SEQ ID NO: 462821 - RNA, 19 nt, Homo sapiens
  misc_RNA (1)...(19): siRNA sense strand
gcaaaucaaugaggugcuu

SEQ ID NO: 462822 - RNA, 19 nt, Homo sapiens
  misc_RNA (1)...(19): siRNA sense strand
caccagaaguuuaaaggaa

SEQ ID NO: 462823 - RNA, 19 nt, Homo sapiens
  misc_RNA (1)...(19): siRNA sense strand
gauauggcaucuguguuaa

SEQ ID NO: 462824 - RNA, 19 nt, Homo sapiens
  misc_RNA (1)...(19): siRNA sense strand
uauuaugucucuucucgua

SEQ ID NO: 462825 - RNA, 19 nt, Homo sapiens
  misc_RNA (1)...(19): siRNA sense strand
caacagaaaguguaaauac

SEQ ID NO: 462826 - RNA, 19 nt, Homo sapiens
  misc_RNA (1)...(19): siRNA sense strand
caagcuggcuccuuucuag

SEQ ID NO: 462827 - RNA, 19 nt, Homo sapiens
  misc_RNA (1)...(19): siRNA sense strand
gugcuaaccugcauucugu

SEQ ID NO: 462828 - RNA, 19 nt, Homo sapiens
  misc_RNA (1)...(19): siRNA sense strand
gauaguggcagugauagua

SEQ ID NO: 462829 - RNA, 19 nt, Homo sapiens
  misc_RNA (1)...(19): siRNA sense strand
guacguggcugcaguucau

SEQ ID NO: 462830 - RNA, 19 nt, Homo sapiens
  misc_RNA (1)...(19): siRNA sense strand
ucaaauucaugcacaauca

SEQ ID NO: 462831 - RNA, 19 nt, Homo sapiens
  misc_RNA (1)...(19): siRNA sense strand
agacccagcucaacaaguu

SEQ ID NO: 462832 - RNA, 19 nt, Homo sapiens
  misc_RNA (1)...(19): siRNA sense strand
ccagcgagguggagauuga

SEQ ID NO: 462833 - RNA, 19 nt, Homo sapiens
  misc_RNA (1)...(19): siRNA sense strand
gagcuguacuacuguguga

SEQ ID NO: 462834 - RNA, 19 nt, Homo sapiens
  misc_RNA (1)...(19): siRNA sense strand
guacaugcagggacagaua

SEQ ID NO: 462835 - RNA, 19 nt, Homo sapiens
  misc_RNA (1)...(19): siRNA sense strand
gaagcagacauuuguggua

SEQ ID NO: 462836 - RNA, 19 nt, Homo sapiens
  misc_RNA (1)...(19): siRNA sense strand
gcucugaccuuugcucuuc

SEQ ID NO: 462837 - RNA, 19 nt, Homo sapiens
  misc_RNA (1)...(19): siRNA sense strand
gagaagggauggguaugga

SEQ ID NO: 462838 - RNA, 19 nt, Homo sapiens
  misc_RNA (1)...(19): siRNA sense strand
ugaauuggguggcgaguuc

SEQ ID NO: 462839 - RNA, 19 nt, Homo sapiens
  misc_RNA (1)...(19): siRNA sense strand
agacgaagguguugugcuu

SEQ ID NO: 462840 - RNA, 19 nt, Homo sapiens
  misc_RNA (1)...(19): siRNA sense strand
ugaagaagcagacauuugu

SEQ ID NO: 462841 - RNA, 19 nt, Homo sapiens
  misc_RNA (1)...(19): siRNA sense strand
gaagggaucaaccucaaau

SEQ ID NO: 462842 - RNA, 19 nt, Homo sapiens
  misc_RNA (1)...(19): siRNA sense strand
gcaugagccuucgggauga

SEQ ID NO: 462843 - RNA, 19 nt, Homo sapiens
  misc_RNA (1)...(19): siRNA sense strand
ggaucaaccucaaauucau

SEQ ID NO: 462844 - RNA, 19 nt, Homo sapiens
  misc_RNA (1)...(19): siRNA sense strand
gaaaugaugaaaugugaca

SEQ ID NO: 462845 - RNA, 19 nt, Homo sapiens
  misc_RNA (1)...(19): siRNA sense strand
cagaaucacuagagcugaa

SEQ ID NO: 462846 - RNA, 19 nt, Homo sapiens
  misc_RNA (1)...(19): siRNA sense strand
gcaucuguguuaacuucua

SEQ ID NO: 462847 - RNA, 19 nt, Homo sapiens
  misc_RNA (1)...(19): siRNA sense strand
acacuggagucacgcgaua

SEQ ID NO: 462848 - RNA, 19 nt, Homo sapiens
  misc_RNA (1)...(19): siRNA sense strand
ggcccagacuccugaauug

SEQ ID NO: 462849 - RNA, 19 nt, Homo sapiens
  misc_RNA (1)...(19): siRNA sense strand
ggacugaucaagacucugu

SEQ ID NO: 462850 - RNA, 19 nt, Homo sapiens
  misc_RNA (1)...(19): siRNA sense strand
aguaccagcuucagucuuu

SEQ ID NO: 462851 - RNA, 19 nt, Homo sapiens
  misc_RNA (1)...(19): siRNA sense strand
gcaugaccuucgagagauu

SEQ ID NO: 462852 - RNA, 19 nt, Homo sapiens
  misc_RNA (1)...(19): siRNA sense strand
aaucugcuacuccguauua

SEQ ID NO: 462853 - RNA, 19 nt, Homo sapiens
  misc_RNA (1)...(19): siRNA sense strand
gcccagacccacuacuaua

SEQ ID NO: 462854 - RNA, 19 nt, Homo sapiens
  misc_RNA (1)...(19): siRNA sense strand
cagggucgauccagcaauu

SEQ ID NO: 462855 - RNA, 19 nt, Homo sapiens
  misc_RNA (1)...(19): siRNA sense strand
gaaaagagaaccuccauca

SEQ ID NO: 462856 - RNA, 19 nt, Homo sapiens
  misc_RNA (1)...(19): siRNA sense strand
gauucacccuaguggauuu

SEQ ID NO: 462857 - RNA, 19 nt, Homo sapiens
  misc_RNA (1)...(19): siRNA sense strand
ccagacuccugaauugcua

SEQ ID NO: 462858 - RNA, 19 nt, Homo sapiens
  misc_RNA (1)...(19): siRNA sense strand
agaaugacauccgcaagaa

SEQ ID NO: 462859 - RNA, 19 nt, Homo sapiens
  misc_RNA (1)...(19): siRNA sense strand
cuucuuagaugcugugaug

SEQ ID NO: 462860 - RNA, 19 nt, Homo sapiens
  misc_RNA (1)...(19): siRNA sense strand
gagcagcaaugcaggugau

SEQ ID NO: 462861 - RNA, 19 nt, Homo sapiens
  misc_RNA (1)...(19): siRNA sense strand
gauucaagcucuucuuacu

SEQ ID NO: 462862 - RNA, 19 nt, Homo sapiens
  misc_RNA (1)...(19): siRNA sense strand
ccaacgugcugcagggauu

SEQ ID NO: 462863 - RNA, 19 nt, Homo sapiens
  misc_RNA (1)...(19): siRNA sense strand
ccuggaagaugaugaagau

SEQ ID NO: 462864 - RNA, 19 nt, Homo sapiens
  misc_RNA (1)...(19): siRNA sense strand
gaaguaaucaaaccugucu

SEQ ID NO: 462865 - RNA, 19 nt, Homo sapiens
  misc_RNA (1)...(19): siRNA sense strand
gaagaggguggcacugaga

SEQ ID NO: 462866 - RNA, 19 nt, Homo sapiens
  misc_RNA (1)...(19): siRNA sense strand
caucaaacccggaccugaa

SEQ ID NO: 462867 - RNA, 19 nt, Homo sapiens
  misc_RNA (1)...(19): siRNA sense strand
acgagaagcucaucaacau

SEQ ID NO: 462868 - RNA, 19 nt, Homo sapiens
  misc_RNA (1)...(19): siRNA sense strand
ccagaggacugaucaagac

SEQ ID NO: 462869 - RNA, 19 nt, Homo sapiens
  misc_RNA (1)...(19): siRNA sense strand
ggugugagccugacgucua

SEQ ID NO: 462870 - RNA, 19 nt, Homo sapiens
  misc_RNA (1)...(19): siRNA sense strand
guacaaagggacaccaugu

SEQ ID NO: 462871 - RNA, 19 nt, Homo sapiens
  misc_RNA (1)...(19): siRNA sense strand
ggagggcguuaguggauca

SEQ ID NO: 462872 - RNA, 19 nt, Homo sapiens
  misc_RNA (1)...(19): siRNA sense strand
gggaucaaccucaaauuca

SEQ ID NO: 462873 - RNA, 19 nt, Homo sapiens
  misc_RNA (1)...(19): siRNA sense strand
gaugauaccucuuuugucu

SEQ ID NO: 462874 - RNA, 19 nt, Homo sapiens
  misc_RNA (1)...(19): siRNA sense strand
gaguccagcuguuaugauc

SEQ ID NO: 462875 - RNA, 19 nt, Homo sapiens
  misc_RNA (1)...(19): siRNA sense strand
ccagccagcucugaccuuu

SEQ ID NO: 462876 - RNA, 19 nt, Homo sapiens
  misc_RNA (1)...(19): siRNA sense strand
uaacaucggaacaguguau

SEQ ID NO: 462877 - RNA, 19 nt, Homo sapiens
  misc_RNA (1)...(19): siRNA sense strand
caaaggcuauggcacaacu

SEQ ID NO: 462878 - RNA, 19 nt, Homo sapiens
  misc_RNA (1)...(19): siRNA sense strand
ggaagagaaguccaacaga

SEQ ID NO: 462879 - RNA, 19 nt, Homo sapiens
  misc_RNA (1)...(19): siRNA sense strand
gguguacaagggaauguua

SEQ ID NO: 462880 - RNA, 19 nt, Homo sapiens
  misc_RNA (1)...(19): siRNA sense strand
ccacggagccaacucugaa

SEQ ID NO: 462881 - RNA, 19 nt, Homo sapiens
  misc_RNA (1)...(19): siRNA sense strand
uugacgagcugcagaauca

SEQ ID NO: 462882 - RNA, 19 nt, Homo sapiens
  misc_RNA (1)...(19): siRNA sense strand
gaauucaacccacucaucu

SEQ ID NO: 462883 - RNA, 19 nt, Homo sapiens
  misc_RNA (1)...(19): siRNA sense strand
cucaacaaguucuauacua

SEQ ID NO: 462884 - RNA, 19 nt, Homo sapiens
  misc_RNA (1)...(19): siRNA sense strand
gaaggugaggcgccuaaug

SEQ ID NO: 462885 - RNA, 19 nt, Homo sapiens
  misc_RNA (1)...(19): siRNA sense strand
aggaaaugaucgacaggua

SEQ ID NO: 462886 - RNA, 19 nt, Homo sapiens
  misc_RNA (1)...(19): siRNA sense strand
ccagaaguuuaaaggaaga

SEQ ID NO: 462887 - RNA, 19 nt, Homo sapiens
  misc_RNA (1)...(19): siRNA sense strand
gccagcaucuuugggcuuu

SEQ ID NO: 462888 - RNA, 19 nt, Homo sapiens
  misc_RNA (1)...(19): siRNA sense strand
guacaguccucagcuugga

SEQ ID NO: 462889 - RNA, 19 nt, Homo sapiens
  misc_RNA (1)...(19): siRNA sense strand
gugacaagccaaaguggua

SEQ ID NO: 462890 - RNA, 19 nt, Homo sapiens
  misc_RNA (1)...(19): siRNA sense strand
uggcggaucuuuacuggau

SEQ ID NO: 462891 - RNA, 19 nt, Homo sapiens
  misc_RNA (1)...(19): siRNA sense strand
gaagguaaauaagaaugac

SEQ ID NO: 462892 - RNA, 19 nt, Homo sapiens
  misc_RNA (1)...(19): siRNA sense strand
uggcaucuguguuaacuuc

SEQ ID NO: 462893 - RNA, 19 nt, Homo sapiens
  misc_RNA (1)...(19): siRNA sense strand
uguuagaccuccucaagug

SEQ ID NO: 462894 - RNA, 19 nt, Homo sapiens
  misc_RNA (1)...(19): siRNA sense strand
ccagacccaucucgauuca

SEQ ID NO: 462895 - RNA, 19 nt, Homo sapiens
  misc_RNA (1)...(19): siRNA sense strand
gucgggagcuguacuacug

SEQ ID NO: 462896 - RNA, 19 nt, Homo sapiens
  misc_RNA (1)...(19): siRNA sense strand
guaguaacaucggaacagu

SEQ ID NO: 462897 - RNA, 19 nt, Homo sapiens
  misc_RNA (1)...(19): siRNA sense strand
cgaauucacaacaauaugu

SEQ ID NO: 462898 - RNA, 19 nt, Homo sapiens
  misc_RNA (1)...(19): siRNA sense strand
cagcgaauucacaacaaua

SEQ ID NO: 462899 - RNA, 19 nt, Homo sapiens
  misc_RNA (1)...(19): siRNA sense strand
ucuacaaacuggacuucaa

SEQ ID NO: 462900 - RNA, 19 nt, Homo sapiens
  misc_RNA (1)...(19): siRNA sense strand
uacaaacggagauaucuuu

SEQ ID NO: 462901 - RNA, 19 nt, Homo sapiens
  misc_RNA (1)...(19): siRNA sense strand
ggaagggaucaaccucaaa

SEQ ID NO: 462902 - RNA, 19 nt, Homo sapiens
  misc_RNA (1)...(19): siRNA sense strand
ugugugguguugcguagua

SEQ ID NO: 462903 - RNA, 19 nt, Homo sapiens
  misc_RNA (1)...(19): siRNA sense strand
gaagucaucugucauuaaa

SEQ ID NO: 462904 - RNA, 19 nt, Homo sapiens
  misc_RNA (1)...(19): siRNA sense strand
gaagagaaguccaacagaa

SEQ ID NO: 462905 - RNA, 19 nt, Homo sapiens
  misc_RNA (1)...(19): siRNA sense strand
gaaguucuguccucgguua

SEQ ID NO: 462906 - RNA, 19 nt, Homo sapiens
  misc_RNA (1)...(19): siRNA sense strand
cuacggagauggaugauaa

SEQ ID NO: 462907 - RNA, 19 nt, Homo sapiens
  misc_RNA (1)...(19): siRNA sense strand
gcagugauaguauggauua

SEQ ID NO: 462908 - RNA, 19 nt, Homo sapiens
  misc_RNA (1)...(19): siRNA sense strand
ggaagcgccuggaagauga

SEQ ID NO: 462909 - RNA, 19 nt, Homo sapiens
  misc_RNA (1)...(19): siRNA sense strand
caagugcccuucugcauga

SEQ ID NO: 462910 - RNA, 19 nt, Homo sapiens
  misc_RNA (1)...(19): siRNA sense strand
ggacagacgucaggcagaa

SEQ ID NO: 462911 - RNA, 19 nt, Homo sapiens
  misc_RNA (1)...(19): siRNA sense strand
caaaaugccugaugaugua

SEQ ID NO: 462912 - RNA, 19 nt, Homo sapiens
  misc_RNA (1)...(19): siRNA sense strand
aaacacagcccaacaguga

SEQ ID NO: 462913 - RNA, 19 nt, Homo sapiens
  misc_RNA (1)...(19): siRNA sense strand
gaaaucugcuacuccguau

SEQ ID NO: 462914 - RNA, 19 nt, Homo sapiens
  misc_RNA (1)...(19): siRNA sense strand
ucagugaaaugaugaaaug

SEQ ID NO: 462915 - RNA, 19 nt, Homo sapiens
  misc_RNA (1)...(19): siRNA sense strand
cgauauggcaucuguguua

SEQ ID NO: 462916 - RNA, 19 nt, Homo sapiens
  misc_RNA (1)...(19): siRNA sense strand
gugauaguauggauuauga

SEQ ID NO: 462917 - RNA, 19 nt, Homo sapiens
  misc_RNA (1)...(19): siRNA sense strand
gaugauaguggcagugaua

SEQ ID NO: 462918 - RNA, 19 nt, Homo sapiens
  misc_RNA (1)...(19): siRNA sense strand
ccacugcgcuccagcucua

SEQ ID NO: 462919 - RNA, 19 nt, Homo sapiens
  misc_RNA (1)...(19): siRNA sense strand
gugaaaugaugaaauguga

SEQ ID NO: 462920 - RNA, 19 nt, Homo sapiens
  misc_RNA (1)...(19): siRNA sense strand
ggacagcaauagggugauu

SEQ ID NO: 462921 - RNA, 19 nt, Homo sapiens
  misc_RNA (1)...(19): siRNA sense strand
gcaaaucaaugaggugcuu

SEQ ID NO: 462922 - RNA, 19 nt, Homo sapiens
  misc_RNA (1)...(19): siRNA sense strand
caccagaaguuuaaaggaa

SEQ ID NO: 462923 - RNA, 19 nt, Homo sapiens
  misc_RNA (1)...(19): siRNA sense strand
gauauggcaucuguguuaa

SEQ ID NO: 462924 - RNA, 19 nt, Homo sapiens
  misc_RNA (1)...(19): siRNA sense strand
uauuaugucucuucucgua

SEQ ID NO: 462925 - RNA, 19 nt, Homo sapiens
  misc_RNA (1)...(19): siRNA sense strand
caacagaaaguguaaauac

SEQ ID NO: 462926 - RNA, 19 nt, Homo sapiens
  misc_RNA (1)...(19): siRNA sense strand
caagcuggcuccuuucuag

SEQ ID NO: 462927 - RNA, 19 nt, Homo sapiens
  misc_RNA (1)...(19): siRNA sense strand
gugcuaaccugcauucugu

SEQ ID NO: 462928 - RNA, 19 nt, Homo sapiens
  misc_RNA (1)...(19): siRNA sense strand
gauaguggcagugauagua

SEQ ID NO: 462929 - RNA, 19 nt, Homo sapiens
  misc_RNA (1)...(19): siRNA sense strand
guacguggcugcaguucau

SEQ ID NO: 462930 - RNA, 19 nt, Homo sapiens
  misc_RNA (1)...(19): siRNA sense strand
ucaaauucaugcacaauca

SEQ ID NO: 462931 - RNA, 19 nt, Homo sapiens
  misc_RNA (1)...(19): siRNA sense strand
agacccagcucaacaaguu

SEQ ID NO: 462932 - RNA, 19 nt, Homo sapiens
  misc_RNA (1)...(19): siRNA sense strand
ccagcgagguggagauuga

SEQ ID NO: 462933 - RNA, 19 nt, Homo sapiens
  misc_RNA (1)...(19): siRNA sense strand
gagcuguacuacuguguga

SEQ ID NO: 462934 - RNA, 19 nt, Homo sapiens
  misc_RNA (1)...(19): siRNA sense strand
guacaugcagggacagaua

SEQ ID NO: 462935 - RNA, 19 nt, Homo sapiens
  misc_RNA (1)...(19): siRNA sense strand
gaagcagacauuuguggua

SEQ ID NO: 462936 - RNA, 19 nt, Homo sapiens
  misc_RNA (1)...(19): siRNA sense strand
gcucugaccuuugcucuuc

SEQ ID NO: 462937 - RNA, 19 nt, Homo sapiens
  misc_RNA (1)...(19): siRNA sense strand
gagaagggauggguaugga

SEQ ID NO: 462938 - RNA, 19 nt, Homo sapiens
  misc_RNA (1)...(19): siRNA sense strand
ugaauuggguggcgaguuc

SEQ ID NO: 462939 - RNA, 19 nt, Homo sapiens
  misc_RNA (1)...(19): siRNA sense strand
agacgaagguguugugcuu

SEQ ID NO: 462940 - RNA, 19 nt, Homo sapiens
  misc_RNA (1)...(19): siRNA sense strand
ugaagaagcagacauuugu

SEQ ID NO: 462941 - RNA, 19 nt, Homo sapiens
  misc_RNA (1)...(19): siRNA sense strand
gaagggaucaaccucaaau

SEQ ID NO: 462942 - RNA, 19 nt, Homo sapiens
  misc_RNA (1)...(19): siRNA sense strand
gcaugagccuucgggauga

SEQ ID NO: 462943 - RNA, 19 nt, Homo sapiens
  misc_RNA (1)...(19): siRNA sense strand
ggaucaaccucaaauucau

SEQ ID NO: 462944 - RNA, 19 nt, Homo sapiens
  misc_RNA (1)...(19): siRNA sense strand
gaaaugaugaaaugugaca

SEQ ID NO: 462945 - RNA, 19 nt, Homo sapiens
  misc_RNA (1)...(19): siRNA sense strand
cagaaucacuagagcugaa

SEQ ID NO: 462946 - RNA, 19 nt, Homo sapiens
  misc_RNA (1)...(19): siRNA sense strand
gcaucuguguuaacuucua

SEQ ID NO: 462947 - RNA, 19 nt, Homo sapiens
  misc_RNA (1)...(19): siRNA sense strand
acacuggagucacgcgaua

SEQ ID NO: 462948 - RNA, 19 nt, Homo sapiens
  misc_RNA (1)...(19): siRNA sense strand
ggcccagacuccugaauug

SEQ ID NO: 462949 - RNA, 19 nt, Homo sapiens
  misc_RNA (1)...(19): siRNA sense strand
ggacugaucaagacucugu

SEQ ID NO: 462950 - RNA, 19 nt, Homo sapiens
  misc_RNA (1)...(19): siRNA sense strand
aguaccagcuucagucuuu

SEQ ID NO: 462951 - RNA, 19 nt, Homo sapiens
  misc_RNA (1)...(19): siRNA sense strand
gcaugaccuucgagagauu

SEQ ID NO: 462952 - RNA, 19 nt, Homo sapiens
  misc_RNA (1)...(19): siRNA sense strand
aaucugcuacuccguauua

SEQ ID NO: 462953 - RNA, 19 nt, Homo sapiens
  misc_RNA (1)...(19): siRNA sense strand
gcccagacccacuacuaua

SEQ ID NO: 462954 - RNA, 19 nt, Homo sapiens
  misc_RNA (1)...(19): siRNA sense strand
cagggucgauccagcaauu

SEQ ID NO: 462955 - RNA, 19 nt, Homo sapiens
  misc_RNA (1)...(19): siRNA sense strand
gaaaagagaaccuccauca

SEQ ID NO: 462956 - RNA, 19 nt, Homo sapiens
  misc_RNA (1)...(19): siRNA sense strand
gauucacccuaguggauuu

SEQ ID NO: 462957 - RNA, 19 nt, Homo sapiens
  misc_RNA (1)...(19): siRNA sense strand
ccagacuccugaauugcua

SEQ ID NO: 462958 - RNA, 19 nt, Homo sapiens
  misc_RNA (1)...(19): siRNA sense strand
agaaugacauccgcaagaa

SEQ ID NO: 462959 - RNA, 19 nt, Homo sapiens
  misc_RNA (1)...(19): siRNA sense strand
cuucuuagaugcugugaug

SEQ ID NO: 462960 - RNA, 19 nt, Homo sapiens
  misc_RNA (1)...(19): siRNA sense strand
gagcagcaaugcaggugau

SEQ ID NO: 462961 - RNA, 19 nt, Homo sapiens
  misc_RNA (1)...(19): siRNA sense strand
gauucaagcucuucuuacu

SEQ ID NO: 462962 - RNA, 19 nt, Homo sapiens
  misc_RNA (1)...(19): siRNA sense strand
ccaacgugcugcagggauu

SEQ ID NO: 462963 - RNA, 19 nt, Homo sapiens
  misc_RNA (1)...(19): siRNA sense strand
ccuggaagaugaugaagau

SEQ ID NO: 462964 - RNA, 19 nt, Homo sapiens
  misc_RNA (1)...(19): siRNA sense strand
gaaguaaucaaaccugucu

SEQ ID NO: 462965 - RNA, 19 nt, Homo sapiens
  misc_RNA (1)...(19): siRNA sense strand
gaagaggguggcacugaga

SEQ ID NO: 462966 - RNA, 19 nt, Homo sapiens
  misc_RNA (1)...(19): siRNA sense strand
caucaaacccggaccugaa

SEQ ID NO: 462967 - RNA, 19 nt, Homo sapiens
  misc_RNA (1)...(19): siRNA sense strand
acgagaagcucaucaacau

SEQ ID NO: 462968 - RNA, 19 nt, Homo sapiens
  misc_RNA (1)...(19): siRNA sense strand
ccagaggacugaucaagac

SEQ ID NO: 462969 - RNA, 19 nt, Homo sapiens
  misc_RNA (1)...(19): siRNA sense strand
ggugugagccugacgucua

SEQ ID NO: 462970 - RNA, 19 nt, Homo sapiens
  misc_RNA (1)...(19): siRNA sense strand
guacaaagggacaccaugu

SEQ ID NO: 462971 - RNA, 19 nt, Homo sapiens
  misc_RNA (1)...(19): siRNA sense strand
ggagggcguuaguggauca

SEQ ID NO: 462972 - RNA, 19 nt, Homo sapiens
  misc_RNA (1)...(19): siRNA sense strand
gggaucaaccucaaauuca

SEQ ID NO: 462973 - RNA, 19 nt, Homo sapiens
  misc_RNA (1)...(19): siRNA sense strand
gaugauaccucuuuugucu

SEQ ID NO: 462974 - RNA, 19 nt, Homo sapiens
  misc_RNA (1)...(19): siRNA sense strand
gaguccagcuguuaugauc

SEQ ID NO: 462975 - RNA, 19 nt, Homo sapiens
  misc_RNA (1)...(19): siRNA sense strand
ccagccagcucugaccuuu

SEQ ID NO: 462976 - RNA, 19 nt, Homo sapiens
  misc_RNA (1)...(19): siRNA sense strand
uaacaucggaacaguguau

SEQ ID NO: 462977 - RNA, 19 nt, Homo sapiens
  misc_RNA (1)...(19): siRNA sense strand
caaaggcuauggcacaacu

SEQ ID NO: 462978 - RNA, 19 nt, Homo sapiens
  misc_RNA (1)...(19): siRNA sense strand
ggaagagaaguccaacaga

SEQ ID NO: 462979 - RNA, 19 nt, Homo sapiens
  misc_RNA (1)...(19): siRNA sense strand
gguguacaagggaauguua

SEQ ID NO: 462980 - RNA, 19 nt, Homo sapiens
  misc_RNA (1)...(19): siRNA sense strand
ccacggagccaacucugaa

SEQ ID NO: 462981 - RNA, 19 nt, Homo sapiens
  misc_RNA (1)...(19): siRNA sense strand
uugacgagcugcagaauca

SEQ ID NO: 462982 - RNA, 19 nt, Homo sapiens
  misc_RNA (1)...(19): siRNA sense strand
gaauucaacccacucaucu

SEQ ID NO: 462983 - RNA, 19 nt, Homo sapiens
  misc_RNA (1)...(19): siRNA sense strand
cucaacaaguucuauacua

SEQ ID NO: 462984 - RNA, 19 nt, Homo sapiens
  misc_RNA (1)...(19): siRNA sense strand
gaaggugaggcgccuaaug

SEQ ID NO: 462985 - RNA, 19 nt, Homo sapiens
  misc_RNA (1)...(19): siRNA sense strand
aggaaaugaucgacaggua

SEQ ID NO: 462986 - RNA, 19 nt, Homo sapiens
  misc_RNA (1)...(19): siRNA sense strand
ccagaaguuuaaaggaaga

SEQ ID NO: 462987 - RNA, 19 nt, Homo sapiens
  misc_RNA (1)...(19): siRNA sense strand
gccagcaucuuugggcuuu

SEQ ID NO: 462988 - RNA, 19 nt, Homo sapiens
  misc_RNA (1)...(19): siRNA sense strand
guacaguccucagcuugga

SEQ ID NO: 462989 - RNA, 19 nt, Homo sapiens
  misc_RNA (1)...(19): siRNA sense strand
gugacaagccaaaguggua

SEQ ID NO: 462990 - RNA, 19 nt, Homo sapiens
  misc_RNA (1)...(19): siRNA sense strand
uggcggaucuuuacuggau

SEQ ID NO: 462991 - RNA, 19 nt, Homo sapiens
  misc_RNA (1)...(19): siRNA sense strand
gaagguaaauaagaaugac

SEQ ID NO: 462992 - RNA, 19 nt, Homo sapiens
  misc_RNA (1)...(19): siRNA sense strand
uggcaucuguguuaacuuc

SEQ ID NO: 462993 - RNA, 19 nt, Homo sapiens
  misc_RNA (1)...(19): siRNA sense strand
uguuagaccuccucaagug

SEQ ID NO: 462994 - RNA, 19 nt, Homo sapiens
  misc_RNA (1)...(19): siRNA sense strand
ccagacccaucucgauuca

SEQ ID NO: 462995 - RNA, 19 nt, Homo sapiens
  misc_RNA (1)...(19): siRNA sense strand
gucgggagcuguacuacug

SEQ ID NO: 462996 - RNA, 19 nt, Homo sapiens
  misc_RNA (1)...(19): siRNA sense strand
guaguaacaucggaacagu

SEQ ID NO: 462997 - RNA, 19 nt, Homo sapiens
  misc_RNA (1)...(19): siRNA sense strand
cgaauucacaacaauaugu

SEQ ID NO: 462998 - RNA, 19 nt, Homo sapiens
  misc_RNA (1)...(19): siRNA sense strand
cagcgaauucacaacaaua

SEQ ID NO: 462999 - RNA, 19 nt, Homo sapiens
  misc_RNA (1)...(19): siRNA sense strand
ucuacaaacuggacuucaa

SEQ ID NO: 463000 - RNA, 19 nt, Homo sapiens
  misc_RNA (1)...(19): siRNA sense strand
uacaaacggagauaucuuu

SEQ ID NO: 463001 - RNA, 19 nt, Homo sapiens
  misc_RNA (1)...(19): siRNA sense strand
ggaagggaucaaccucaaa

SEQ ID NO: 463002 - RNA, 19 nt, Homo sapiens
  misc_RNA (1)...(19): siRNA sense strand
ugugugguguugcguagua

SEQ ID NO: 463003 - RNA, 19 nt, Homo sapiens
  misc_RNA (1)...(19): siRNA sense strand
gaagucaucugucauuaaa

SEQ ID NO: 463004 - RNA, 19 nt, Homo sapiens
  misc_RNA (1)...(19): siRNA sense strand
gaagagaaguccaacagaa

SEQ ID NO: 463005 - RNA, 19 nt, Homo sapiens
  misc_RNA (1)...(19): siRNA sense strand
gaaguucuguccucgguua

SEQ ID NO: 463006 - RNA, 19 nt, Homo sapiens
  misc_RNA (1)...(19): siRNA sense strand
cuacggagauggaugauaa

SEQ ID NO: 463007 - RNA, 19 nt, Homo sapiens
  misc_RNA (1)...(19): siRNA sense strand
gcagugauaguauggauua

SEQ ID NO: 463008 - RNA, 19 nt, Homo sapiens
  misc_RNA (1)...(19): siRNA sense strand
ggaagcgccuggaagauga

SEQ ID NO: 463009 - RNA, 19 nt, Homo sapiens
  misc_RNA (1)...(19): siRNA sense strand
caagugcccuucugcauga

SEQ ID NO: 463010 - RNA, 19 nt, Homo sapiens
  misc_RNA (1)...(19): siRNA sense strand
ggacagacgucaggcagaa

SEQ ID NO: 463011 - RNA, 19 nt, Homo sapiens
  misc_RNA (1)...(19): siRNA sense strand
caaaaugccugaugaugua

SEQ ID NO: 463012 - RNA, 19 nt, Homo sapiens
  misc_RNA (1)...(19): siRNA sense strand
aaacacagcccaacaguga

SEQ ID NO: 463013 - RNA, 19 nt, Homo sapiens
  misc_RNA (1)...(19): siRNA sense strand
gaaaucugcuacuccguau

SEQ ID NO: 463014 - RNA, 19 nt, Homo sapiens
  misc_RNA (1)...(19): siRNA sense strand
ucagugaaaugaugaaaug

SEQ ID NO: 463015 - RNA, 19 nt, Homo sapiens
  misc_RNA (1)...(19): siRNA sense strand
cgauauggcaucuguguua

SEQ ID NO: 463016 - RNA, 19 nt, Homo sapiens
  misc_RNA (1)...(19): siRNA sense strand
gugauaguauggauuauga

SEQ ID NO: 463017 - RNA, 19 nt, Homo sapiens
  misc_RNA (1)...(19): siRNA sense strand
gaugauaguggcagugaua

SEQ ID NO: 463018 - RNA, 19 nt, Homo sapiens
  misc_RNA (1)...(19): siRNA sense strand
ccacugcgcuccagcucua

SEQ ID NO: 463019 - RNA, 19 nt, Homo sapiens
  misc_RNA (1)...(19): siRNA sense strand
gugaaaugaugaaauguga

SEQ ID NO: 463020 - RNA, 19 nt, Homo sapiens
  misc_RNA (1)...(19): siRNA sense strand
ggacagcaauagggugauu

SEQ ID NO: 463021 - RNA, 19 nt, Homo sapiens
  misc_RNA (1)...(19): siRNA sense strand
gcaaaucaaugaggugcuu

SEQ ID NO: 463022 - RNA, 19 nt, Homo sapiens
  misc_RNA (1)...(19): siRNA sense strand
caccagaaguuuaaaggaa

SEQ ID NO: 463023 - RNA, 19 nt, Homo sapiens
  misc_RNA (1)...(19): siRNA sense strand
gauauggcaucuguguuaa

SEQ ID NO: 463024 - RNA, 19 nt, Homo sapiens
  misc_RNA (1)...(19): siRNA sense strand
uauuaugucucuucucgua

SEQ ID NO: 463025 - RNA, 19 nt, Homo sapiens
  misc_RNA (1)...(19): siRNA sense strand
caacagaaaguguaaauac

SEQ ID NO: 463026 - RNA, 19 nt, Homo sapiens
  misc_RNA (1)...(19): siRNA sense strand
caagcuggcuccuuucuag

SEQ ID NO: 463027 - RNA, 19 nt, Homo sapiens
  misc_RNA (1)...(19): siRNA sense strand
gugcuaaccugcauucugu

SEQ ID NO: 463028 - RNA, 19 nt, Homo sapiens
  misc_RNA (1)...(19): siRNA sense strand
gauaguggcagugauagua

SEQ ID NO: 463029 - RNA, 19 nt, Homo sapiens
  misc_RNA (1)...(19): siRNA sense strand
guacguggcugcaguucau

SEQ ID NO: 463030 - RNA, 19 nt, Homo sapiens
  misc_RNA (1)...(19): siRNA sense strand
ucaaauucaugcacaauca

SEQ ID NO: 463031 - RNA, 19 nt, Homo sapiens
  misc_RNA (1)...(19): siRNA sense strand
agacccagcucaacaaguu

SEQ ID NO: 463032 - RNA, 19 nt, Homo sapiens
  misc_RNA (1)...(19): siRNA sense strand
ccagcgagguggagauuga

SEQ ID NO: 463033 - RNA, 19 nt, Homo sapiens
  misc_RNA (1)...(19): siRNA sense strand
gagcuguacuacuguguga

SEQ ID NO: 463034 - RNA, 19 nt, Homo sapiens
  misc_RNA (1)...(19): siRNA sense strand
guacaugcagggacagaua

SEQ ID NO: 463035 - RNA, 19 nt, Homo sapiens
  misc_RNA (1)...(19): siRNA sense strand
gaagcagacauuuguggua

SEQ ID NO: 463036 - RNA, 19 nt, Homo sapiens
  misc_RNA (1)...(19): siRNA sense strand
gcucugaccuuugcucuuc

SEQ ID NO: 463037 - RNA, 19 nt, Homo sapiens
  misc_RNA (1)...(19): siRNA sense strand
gagaagggauggguaugga

SEQ ID NO: 463038 - RNA, 19 nt, Homo sapiens
  misc_RNA (1)...(19): siRNA sense strand
ugaauuggguggcgaguuc

SEQ ID NO: 463039 - RNA, 19 nt, Homo sapiens
  misc_RNA (1)...(19): siRNA sense strand
agacgaagguguugugcuu

SEQ ID NO: 463040 - RNA, 19 nt, Homo sapiens
  misc_RNA (1)...(19): siRNA sense strand
ugaagaagcagacauuugu

SEQ ID NO: 463041 - RNA, 19 nt, Homo sapiens
  misc_RNA (1)...(19): siRNA sense strand
gaagggaucaaccucaaau

SEQ ID NO: 463042 - RNA, 19 nt, Homo sapiens
  misc_RNA (1)...(19): siRNA sense strand
gcaugagccuucgggauga

SEQ ID NO: 463043 - RNA, 19 nt, Homo sapiens
  misc_RNA (1)...(19): siRNA sense strand
ggaucaaccucaaauucau

SEQ ID NO: 463044 - RNA, 19 nt, Homo sapiens
  misc_RNA (1)...(19): siRNA sense strand
gaaaugaugaaaugugaca

SEQ ID NO: 463045 - RNA, 19 nt, Homo sapiens
  misc_RNA (1)...(19): siRNA sense strand
cagaaucacuagagcugaa

SEQ ID NO: 463046 - RNA, 19 nt, Homo sapiens
  misc_RNA (1)...(19): siRNA sense strand
gcaucuguguuaacuucua

SEQ ID NO: 463047 - RNA, 19 nt, Homo sapiens
  misc_RNA (1)...(19): siRNA sense strand
acacuggagucacgcgaua

SEQ ID NO: 463048 - RNA, 19 nt, Homo sapiens
  misc_RNA (1)...(19): siRNA sense strand
ggcccagacuccugaauug

SEQ ID NO: 463049 - RNA, 19 nt, Homo sapiens
  misc_RNA (1)...(19): siRNA sense strand
ggacugaucaagacucugu

SEQ ID NO: 463050 - RNA, 19 nt, Homo sapiens
  misc_RNA (1)...(19): siRNA sense strand
aguaccagcuucagucuuu

SEQ ID NO: 463051 - RNA, 19 nt, Homo sapiens
  misc_RNA (1)...(19): siRNA sense strand
gcaugaccuucgagagauu

SEQ ID NO: 463052 - RNA, 19 nt, Homo sapiens
  misc_RNA (1)...(19): siRNA sense strand
aaucugcuacuccguauua

SEQ ID NO: 463053 - RNA, 19 nt, Homo sapiens
  misc_RNA (1)...(19): siRNA sense strand
gcccagacccacuacuaua

SEQ ID NO: 463054 - RNA, 19 nt, Homo sapiens
  misc_RNA (1)...(19): siRNA sense strand
cagggucgauccagcaauu

SEQ ID NO: 463055 - RNA, 19 nt, Homo sapiens
  misc_RNA (1)...(19): siRNA sense strand
gaaaagagaaccuccauca

SEQ ID NO: 463056 - RNA, 19 nt, Homo sapiens
  misc_RNA (1)...(19): siRNA sense strand
gauucacccuaguggauuu

SEQ ID NO: 463057 - RNA, 19 nt, Homo sapiens
  misc_RNA (1)...(19): siRNA sense strand
ccagacuccugaauugcua

SEQ ID NO: 463058 - RNA, 19 nt, Homo sapiens
  misc_RNA (1)...(19): siRNA sense strand
agaaugacauccgcaagaa

SEQ ID NO: 463059 - RNA, 19 nt, Homo sapiens
  misc_RNA (1)...(19): siRNA sense strand
cuucuuagaugcugugaug

SEQ ID NO: 463060 - RNA, 19 nt, Homo sapiens
  misc_RNA (1)...(19): siRNA sense strand
gagcagcaaugcaggugau

SEQ ID NO: 463061 - RNA, 19 nt, Homo sapiens
  misc_RNA (1)...(19): siRNA sense strand
gauucaagcucuucuuacu

SEQ ID NO: 463062 - RNA, 19 nt, Homo sapiens
  misc_RNA (1)...(19): siRNA sense strand
ccaacgugcugcagggauu

SEQ ID NO: 463063 - RNA, 19 nt, Homo sapiens
  misc_RNA (1)...(19): siRNA sense strand
ccuggaagaugaugaagau

SEQ ID NO: 463064 - RNA, 19 nt, Homo sapiens
  misc_RNA (1)...(19): siRNA sense strand
gaaguaaucaaaccugucu

SEQ ID NO: 463065 - RNA, 19 nt, Homo sapiens
  misc_RNA (1)...(19): siRNA sense strand
gaagaggguggcacugaga

SEQ ID NO: 463066 - RNA, 19 nt, Homo sapiens
  misc_RNA (1)...(19): siRNA sense strand
caucaaacccggaccugaa

SEQ ID NO: 463067 - RNA, 19 nt, Homo sapiens
  misc_RNA (1)...(19): siRNA sense strand
acgagaagcucaucaacau

SEQ ID NO: 463068 - RNA, 19 nt, Homo sapiens
  misc_RNA (1)...(19): siRNA sense strand
ccagaggacugaucaagac

SEQ ID NO: 463069 - RNA, 19 nt, Homo sapiens
  misc_RNA (1)...(19): siRNA sense strand
ggugugagccugacgucua

SEQ ID NO: 463070 - RNA, 19 nt, Homo sapiens
  misc_RNA (1)...(19): siRNA sense strand
guacaaagggacaccaugu

SEQ ID NO: 463071 - RNA, 19 nt, Homo sapiens
  misc_RNA (1)...(19): siRNA sense strand
ggagggcguuaguggauca

SEQ ID NO: 463072 - RNA, 19 nt, Homo sapiens
  misc_RNA (1)...(19): siRNA sense strand
gggaucaaccucaaauuca

SEQ ID NO: 463073 - RNA, 19 nt, Homo sapiens
  misc_RNA (1)...(19): siRNA sense strand
gaugauaccucuuuugucu

SEQ ID NO: 463074 - RNA, 19 nt, Homo sapiens
  misc_RNA (1)...(19): siRNA sense strand
gaguccagcuguuaugauc

SEQ ID NO: 463075 - RNA, 19 nt, Homo sapiens
  misc_RNA (1)...(19): siRNA sense strand
ccagccagcucugaccuuu

SEQ ID NO: 463076 - RNA, 19 nt, Homo sapiens
  misc_RNA (1)...(19): siRNA sense strand
uaacaucggaacaguguau

SEQ ID NO: 463077 - RNA, 19 nt, Homo sapiens
  misc_RNA (1)...(19): siRNA sense strand
caaaggcuauggcacaacu

SEQ ID NO: 463078 - RNA, 19 nt, Homo sapiens
  misc_RNA (1)...(19): siRNA sense strand
ggaagagaaguccaacaga

SEQ ID NO: 463079 - RNA, 19 nt, Homo sapiens
  misc_RNA (1)...(19): siRNA sense strand
gguguacaagggaauguua

SEQ ID NO: 463080 - RNA, 19 nt, Homo sapiens
  misc_RNA (1)...(19): siRNA sense strand
ccacggagccaacucugaa

SEQ ID NO: 463081 - RNA, 19 nt, Homo sapiens
  misc_RNA (1)...(19): siRNA sense strand
uugacgagcugcagaauca

SEQ ID NO: 463082 - RNA, 19 nt, Homo sapiens
  misc_RNA (1)...(19): siRNA sense strand
gaauucaacccacucaucu

SEQ ID NO: 463083 - RNA, 19 nt, Homo sapiens
  misc_RNA (1)...(19): siRNA sense strand
cucaacaaguucuauacua

SEQ ID NO: 463084 - RNA, 19 nt, Homo sapiens
  misc_RNA (1)...(19): siRNA sense strand
gaaggugaggcgccuaaug

SEQ ID NO: 463085 - RNA, 19 nt, Homo sapiens
  misc_RNA (1)...(19): siRNA sense strand
aggaaaugaucgacaggua

SEQ ID NO: 463086 - RNA, 19 nt, Homo sapiens
  misc_RNA (1)...(19): siRNA sense strand
ccagaaguuuaaaggaaga

SEQ ID NO: 463087 - RNA, 19 nt, Homo sapiens
  misc_RNA (1)...(19): siRNA sense strand
gccagcaucuuugggcuuu

SEQ ID NO: 463088 - RNA, 19 nt, Homo sapiens
  misc_RNA (1)...(19): siRNA sense strand
guacaguccucagcuugga

SEQ ID NO: 463089 - RNA, 19 nt, Homo sapiens
  misc_RNA (1)...(19): siRNA sense strand
gugacaagccaaaguggua

SEQ ID NO: 463090 - RNA, 19 nt, Homo sapiens
  misc_RNA (1)...(19): siRNA sense strand
uggcggaucuuuacuggau

SEQ ID NO: 463091 - RNA, 19 nt, Homo sapiens
  misc_RNA (1)...(19): siRNA sense strand
gaagguaaauaagaaugac

SEQ ID NO: 463092 - RNA, 19 nt, Homo sapiens
  misc_RNA (1)...(19): siRNA sense strand
uggcaucuguguuaacuuc

SEQ ID NO: 463093 - RNA, 19 nt, Homo sapiens
  misc_RNA (1)...(19): siRNA sense strand
uguuagaccuccucaagug

SEQ ID NO: 463094 - RNA, 19 nt, Homo sapiens
  misc_RNA (1)...(19): siRNA sense strand
ccagacccaucucgauuca

SEQ ID NO: 463095 - RNA, 19 nt, Homo sapiens
  misc_RNA (1)...(19): siRNA sense strand
gucgggagcuguacuacug

SEQ ID NO: 463096 - RNA, 19 nt, Homo sapiens
  misc_RNA (1)...(19): siRNA sense strand
guaguaacaucggaacagu

SEQ ID NO: 463097 - RNA, 19 nt, Homo sapiens
  misc_RNA (1)...(19): siRNA sense strand
cgaauucacaacaauaugu

SEQ ID NO: 463098 - RNA, 19 nt, Homo sapiens
  misc_RNA (1)...(19): siRNA sense strand
cagcgaauucacaacaaua

SEQ ID NO: 463099 - RNA, 19 nt, Homo sapiens
  misc_RNA (1)...(19): siRNA sense strand
ucuacaaacuggacuucaa

SEQ ID NO: 463100 - RNA, 19 nt, Homo sapiens
  misc_RNA (1)...(19): siRNA sense strand
uacaaacggagauaucuuu

SEQ ID NO: 463101 - RNA, 19 nt, Homo sapiens
  misc_RNA (1)...(19): siRNA sense strand
ggaagggaucaaccucaaa

SEQ ID NO: 463102 - RNA, 19 nt, Homo sapiens
  misc_RNA (1)...(19): siRNA sense strand
ugugugguguugcguagua

SEQ ID NO: 463103 - RNA, 19 nt, Homo sapiens
  misc_RNA (1)...(19): siRNA sense strand
gaagucaucugucauuaaa

SEQ ID NO: 463104 - RNA, 19 nt, Homo sapiens
  misc_RNA (1)...(19): siRNA sense strand
gaagagaaguccaacagaa

SEQ ID NO: 463105 - RNA, 19 nt, Homo sapiens
  misc_RNA (1)...(19): siRNA sense strand
gaaguucuguccucgguua

SEQ ID NO: 463106 - RNA, 19 nt, Homo sapiens
  misc_RNA (1)...(19): siRNA sense strand
cuacggagauggaugauaa

SEQ ID NO: 463107 - RNA, 19 nt, Homo sapiens
  misc_RNA (1)...(19): siRNA sense strand
gcagugauaguauggauua

SEQ ID NO: 463108 - RNA, 19 nt, Homo sapiens
  misc_RNA (1)...(19): siRNA sense strand
ggaagcgccuggaagauga

SEQ ID NO: 463109 - RNA, 19 nt, Homo sapiens
  misc_RNA (1)...(19): siRNA sense strand
caagugcccuucugcauga

SEQ ID NO: 463110 - RNA, 19 nt, Homo sapiens
  misc_RNA (1)...(19): siRNA sense strand
ggacagacgucaggcagaa

SEQ ID NO: 463111 - RNA, 19 nt, Homo sapiens
  misc_RNA (1)...(19): siRNA sense strand
caaaaugccugaugaugua

SEQ ID NO: 463112 - RNA, 19 nt, Homo sapiens
  misc_RNA (1)...(19): siRNA sense strand
aaacacagcccaacaguga

SEQ ID NO: 463113 - RNA, 19 nt, Homo sapiens
  misc_RNA (1)...(19): siRNA sense strand
ucagugaaaugaugaaaug

SEQ ID NO: 463114 - RNA, 19 nt, Homo sapiens
  misc_RNA (1)...(19): siRNA sense strand
cgauauggcaucuguguua

SEQ ID NO: 463115 - RNA, 19 nt, Homo sapiens
  misc_RNA (1)...(19): siRNA sense strand
gugauaguauggauuauga

SEQ ID NO: 463116 - RNA, 19 nt, Homo sapiens
  misc_RNA (1)...(19): siRNA sense strand
gaugauaguggcagugaua

SEQ ID NO: 463117 - RNA, 19 nt, Homo sapiens
  misc_RNA (1)...(19): siRNA sense strand
ccacugcgcuccagcucua

SEQ ID NO: 463118 - RNA, 19 nt, Homo sapiens
  misc_RNA (1)...(19): siRNA sense strand
gugaaaugaugaaauguga

SEQ ID NO: 463119 - RNA, 19 nt, Homo sapiens
  misc_RNA (1)...(19): siRNA sense strand
ggacagcaauagggugauu

SEQ ID NO: 463120 - RNA, 19 nt, Homo sapiens
  misc_RNA (1)...(19): siRNA sense strand
gcaaaucaaugaggugcuu

SEQ ID NO: 463121 - RNA, 19 nt, Homo sapiens
  misc_RNA (1)...(19): siRNA sense strand
caccagaaguuuaaaggaa

SEQ ID NO: 463122 - RNA, 19 nt, Homo sapiens
  misc_RNA (1)...(19): siRNA sense strand
gauauggcaucuguguuaa

SEQ ID NO: 463123 - RNA, 19 nt, Homo sapiens
  misc_RNA (1)...(19): siRNA sense strand
caacagaaaguguaaauac

SEQ ID NO: 463124 - RNA, 19 nt, Homo sapiens
  misc_RNA (1)...(19): siRNA sense strand
caagcuggcuccuuucuag

SEQ ID NO: 463125 - RNA, 19 nt, Homo sapiens
  misc_RNA (1)...(19): siRNA sense strand
gugcuaaccugcauucugu

SEQ ID NO: 463126 - RNA, 19 nt, Homo sapiens
  misc_RNA (1)...(19): siRNA sense strand
gauaguggcagugauagua

SEQ ID NO: 463127 - RNA, 19 nt, Homo sapiens
  misc_RNA (1)...(19): siRNA sense strand
ucaaauucaugcacaauca

SEQ ID NO: 463128 - RNA, 19 nt, Homo sapiens
  misc_RNA (1)...(19): siRNA sense strand
agacccagcucaacaaguu

SEQ ID NO: 463129 - RNA, 19 nt, Homo sapiens
  misc_RNA (1)...(19): siRNA sense strand
ccagcgagguggagauuga

SEQ ID NO: 463130 - RNA, 19 nt, Homo sapiens
  misc_RNA (1)...(19): siRNA sense strand
gagcuguacuacuguguga

SEQ ID NO: 463131 - RNA, 19 nt, Homo sapiens
  misc_RNA (1)...(19): siRNA sense strand
guacaugcagggacagaua

SEQ ID NO: 463132 - RNA, 19 nt, Homo sapiens
  misc_RNA (1)...(19): siRNA sense strand
gaagcagacauuuguggua

SEQ ID NO: 463133 - RNA, 19 nt, Homo sapiens
  misc_RNA (1)...(19): siRNA sense strand
gcucugaccuuugcucuuc

SEQ ID NO: 463134 - RNA, 19 nt, Homo sapiens
  misc_RNA (1)...(19): siRNA sense strand
gagaagggauggguaugga

SEQ ID NO: 463135 - RNA, 19 nt, Homo sapiens
  misc_RNA (1)...(19): siRNA sense strand
ugaauuggguggcgaguuc

SEQ ID NO: 463136 - RNA, 19 nt, Homo sapiens
  misc_RNA (1)...(19): siRNA sense strand
agacgaagguguugugcuu

SEQ ID NO: 463137 - RNA, 19 nt, Homo sapiens
  misc_RNA (1)...(19): siRNA sense strand
ugaagaagcagacauuugu

SEQ ID NO: 463138 - RNA, 19 nt, Homo sapiens
  misc_RNA (1)...(19): siRNA sense strand
gaagggaucaaccucaaau

SEQ ID NO: 463139 - RNA, 19 nt, Homo sapiens
  misc_RNA (1)...(19): siRNA sense strand
gcaugagccuucgggauga

SEQ ID NO: 463140 - RNA, 19 nt, Homo sapiens
  misc_RNA (1)...(19): siRNA sense strand
ggaucaaccucaaauucau

SEQ ID NO: 463141 - RNA, 19 nt, Homo sapiens
  misc_RNA (1)...(19): siRNA sense strand
gaaaugaugaaaugugaca

SEQ ID NO: 463142 - RNA, 19 nt, Homo sapiens
  misc_RNA (1)...(19): siRNA sense strand
cagaaucacuagagcugaa

SEQ ID NO: 463143 - RNA, 19 nt, Homo sapiens
  misc_RNA (1)...(19): siRNA sense strand
gcaucuguguuaacuucua

SEQ ID NO: 463144 - RNA, 19 nt, Homo sapiens
  misc_RNA (1)...(19): siRNA sense strand
acacuggagucacgcgaua

SEQ ID NO: 463145 - RNA, 19 nt, Homo sapiens
  misc_RNA (1)...(19): siRNA sense strand
ggacugaucaagacucugu

SEQ ID NO: 463146 - RNA, 19 nt, Homo sapiens
  misc_RNA (1)...(19): siRNA sense strand
aguaccagcuucagucuuu

SEQ ID NO: 463147 - RNA, 19 nt, Homo sapiens
  misc_RNA (1)...(19): siRNA sense strand
ggcccagacuccugaauug

SEQ ID NO: 463148 - RNA, 19 nt, Homo sapiens
  misc_RNA (1)...(19): siRNA sense strand
gcaugaccuucgagagauu

SEQ ID NO: 463149 - RNA, 19 nt, Homo sapiens
  misc_RNA (1)...(19): siRNA sense strand
gcccagacccacuacuaua

SEQ ID NO: 463150 - RNA, 19 nt, Homo sapiens
  misc_RNA (1)...(19): siRNA sense strand
cagggucgauccagcaauu

SEQ ID NO: 463151 - RNA, 19 nt, Homo sapiens
  misc_RNA (1)...(19): siRNA sense strand
gaaaagagaaccuccauca

SEQ ID NO: 463152 - RNA, 19 nt, Homo sapiens
  misc_RNA (1)...(19): siRNA sense strand
gauucacccuaguggauuu

SEQ ID NO: 463153 - RNA, 19 nt, Homo sapiens
  misc_RNA (1)...(19): siRNA sense strand
gauucaagcucuucuuacu

SEQ ID NO: 463154 - RNA, 19 nt, Homo sapiens
  misc_RNA (1)...(19): siRNA sense strand
ccagacuccugaauugcua

SEQ ID NO: 463155 - RNA, 19 nt, Homo sapiens
  misc_RNA (1)...(19): siRNA sense strand
agaaugacauccgcaagaa

SEQ ID NO: 463156 - RNA, 19 nt, Homo sapiens
  misc_RNA (1)...(19): siRNA sense strand
cuucuuagaugcugugaug

SEQ ID NO: 463157 - RNA, 19 nt, Homo sapiens
  misc_RNA (1)...(19): siRNA sense strand
gagcagcaaugcaggugau

SEQ ID NO: 463158 - RNA, 19 nt, Homo sapiens
  misc_RNA (1)...(19): siRNA sense strand
ccaacgugcugcagggauu

SEQ ID NO: 463159 - RNA, 19 nt, Homo sapiens
  misc_RNA (1)...(19): siRNA sense strand
ccuggaagaugaugaagau

SEQ ID NO: 463160 - RNA, 19 nt, Homo sapiens
  misc_RNA (1)...(19): siRNA sense strand
gaaguaaucaaaccugucu

SEQ ID NO: 463161 - RNA, 19 nt, Homo sapiens
  misc_RNA (1)...(19): siRNA sense strand
gaagaggguggcacugaga

SEQ ID NO: 463162 - RNA, 19 nt, Homo sapiens
  misc_RNA (1)...(19): siRNA sense strand
caucaaacccggaccugaa

SEQ ID NO: 463163 - RNA, 19 nt, Homo sapiens
  misc_RNA (1)...(19): siRNA sense strand
acgagaagcucaucaacau

SEQ ID NO: 463164 - RNA, 19 nt, Homo sapiens
  misc_RNA (1)...(19): siRNA sense strand
ccagaggacugaucaagac

SEQ ID NO: 463165 - RNA, 19 nt, Homo sapiens
  misc_RNA (1)...(19): siRNA sense strand
ggugugagccugacgucua

SEQ ID NO: 463166 - RNA, 19 nt, Homo sapiens
  misc_RNA (1)...(19): siRNA sense strand
guacaaagggacaccaugu

SEQ ID NO: 463167 - RNA, 19 nt, Homo sapiens
  misc_RNA (1)...(19): siRNA sense strand
gaugauaccucuuuugucu

SEQ ID NO: 463168 - RNA, 19 nt, Homo sapiens
  misc_RNA (1)...(19): siRNA sense strand
gggaucaaccucaaauuca

SEQ ID NO: 463169 - RNA, 19 nt, Homo sapiens
  misc_RNA (1)...(19): siRNA sense strand
gaguccagcuguuaugauc

SEQ ID NO: 463170 - RNA, 19 nt, Homo sapiens
  misc_RNA (1)...(19): siRNA sense strand
ggagggcguuaguggauca

SEQ ID NO: 463171 - RNA, 19 nt, Homo sapiens
  misc_RNA (1)...(19): siRNA sense strand
ccagccagcucugaccuuu

SEQ ID NO: 463172 - RNA, 19 nt, Homo sapiens
  misc_RNA (1)...(19): siRNA sense strand
uaacaucggaacaguguau

SEQ ID NO: 463173 - RNA, 19 nt, Homo sapiens
  misc_RNA (1)...(19): siRNA sense strand
caaaggcuauggcacaacu

SEQ ID NO: 463174 - RNA, 19 nt, Homo sapiens
  misc_RNA (1)...(19): siRNA sense strand
ggaagagaaguccaacaga

SEQ ID NO: 463175 - RNA, 19 nt, Homo sapiens
  misc_RNA (1)...(19): siRNA sense strand
gguguacaagggaauguua

SEQ ID NO: 463176 - RNA, 19 nt, Homo sapiens
  misc_RNA (1)...(19): siRNA sense strand
ccacggagccaacucugaa

SEQ ID NO: 463177 - RNA, 19 nt, Homo sapiens
  misc_RNA (1)...(19): siRNA sense strand
uugacgagcugcagaauca

SEQ ID NO: 463178 - RNA, 19 nt, Homo sapiens
  misc_RNA (1)...(19): siRNA sense strand
gaauucaacccacucaucu

SEQ ID NO: 463179 - RNA, 19 nt, Homo sapiens
  misc_RNA (1)...(19): siRNA sense strand
cucaacaaguucuauacua

SEQ ID NO: 463180 - RNA, 19 nt, Homo sapiens
  misc_RNA (1)...(19): siRNA sense strand
gaaggugaggcgccuaaug

SEQ ID NO: 463181 - RNA, 19 nt, Homo sapiens
  misc_RNA (1)...(19): siRNA sense strand
aggaaaugaucgacaggua

SEQ ID NO: 463182 - RNA, 19 nt, Homo sapiens
  misc_RNA (1)...(19): siRNA sense strand
ccagaaguuuaaaggaaga

SEQ ID NO: 463183 - RNA, 19 nt, Homo sapiens
  misc_RNA (1)...(19): siRNA sense strand
gccagcaucuuugggcuuu

SEQ ID NO: 463184 - RNA, 19 nt, Homo sapiens
  misc_RNA (1)...(19): siRNA sense strand
guacaguccucagcuugga

SEQ ID NO: 463185 - RNA, 19 nt, Homo sapiens
  misc_RNA (1)...(19): siRNA sense strand
gugacaagccaaaguggua

SEQ ID NO: 463186 - RNA, 19 nt, Homo sapiens
  misc_RNA (1)...(19): siRNA sense strand
uggcggaucuuuacuggau

SEQ ID NO: 463187 - RNA, 19 nt, Homo sapiens
  misc_RNA (1)...(19): siRNA sense strand
gaagguaaauaagaaugac

SEQ ID NO: 463188 - RNA, 19 nt, Homo sapiens
  misc_RNA (1)...(19): siRNA sense strand
uguuagaccuccucaagug

SEQ ID NO: 463189 - RNA, 19 nt, Homo sapiens
  misc_RNA (1)...(19): siRNA sense strand
uggcaucuguguuaacuuc

SEQ ID NO: 463190 - RNA, 19 nt, Homo sapiens
  misc_RNA (1)...(19): siRNA sense strand
ccagacccaucucgauuca

SEQ ID NO: 463191 - RNA, 19 nt, Homo sapiens
  misc_RNA (1)...(19): siRNA sense strand
gucgggagcuguacuacug

SEQ ID NO: 463192 - RNA, 19 nt, Homo sapiens
  misc_RNA (1)...(19): siRNA sense strand
guaguaacaucggaacagu

SEQ ID NO: 463193 - RNA, 19 nt, Homo sapiens
  misc_RNA (1)...(19): siRNA sense strand
cgaauucacaacaauaugu

SEQ ID NO: 463194 - RNA, 19 nt, Homo sapiens
  misc_RNA (1)...(19): siRNA sense strand
cagcgaauucacaacaaua

SEQ ID NO: 463195 - RNA, 19 nt, Homo sapiens
  misc_RNA (1)...(19): siRNA sense strand
ucuacaaacuggacuucaa

SEQ ID NO: 463196 - RNA, 19 nt, Homo sapiens
  misc_RNA (1)...(19): siRNA sense strand
cagcgagucuaucucuaug

SEQ ID NO: 463197 - RNA, 19 nt, Homo sapiens
  misc_RNA (1)...(19): siRNA sense strand
ggaagggaucaaccucaaa

SEQ ID NO: 463198 - RNA, 19 nt, Homo sapiens
  misc_RNA (1)...(19): siRNA sense strand
ugugugguguugcguagua

SEQ ID NO: 463199 - RNA, 19 nt, Homo sapiens
  misc_RNA (1)...(19): siRNA sense strand
uacaaacggagauaucuuu

SEQ ID NO: 463200 - RNA, 19 nt, Homo sapiens
  misc_RNA (1)...(19): siRNA sense strand
gcagacauuugugguacau

SEQ ID NO: 463201 - RNA, 19 nt, Homo sapiens
  misc_RNA (1)...(19): siRNA sense strand
guacagccagcaaaucaau

SEQ ID NO: 463202 - RNA, 19 nt, Homo sapiens
  misc_RNA (1)...(19): siRNA sense strand
guaccugucccuuggagaa

SEQ ID NO: 463203 - RNA, 19 nt, Homo sapiens
  misc_RNA (1)...(19): siRNA sense strand
gaagucaucugucauuaaa

SEQ ID NO: 463204 - RNA, 19 nt, Homo sapiens
  misc_RNA (1)...(19): siRNA sense strand
gaagagaaguccaacagaa

SEQ ID NO: 463205 - RNA, 19 nt, Homo sapiens
  misc_RNA (1)...(19): siRNA sense strand
gaaguucuguccucgguua

SEQ ID NO: 463206 - RNA, 19 nt, Homo sapiens
  misc_RNA (1)...(19): siRNA sense strand
cuacggagauggaugauaa

SEQ ID NO: 463207 - RNA, 19 nt, Homo sapiens
  misc_RNA (1)...(19): siRNA sense strand
gcagugauaguauggauua

SEQ ID NO: 463208 - RNA, 19 nt, Homo sapiens
  misc_RNA (1)...(19): siRNA sense strand
ggaagcgccuggaagauga

SEQ ID NO: 463209 - RNA, 19 nt, Homo sapiens
  misc_RNA (1)...(19): siRNA sense strand
caagugcccuucugcauga

SEQ ID NO: 463210 - RNA, 19 nt, Homo sapiens
  misc_RNA (1)...(19): siRNA sense strand
ggacagacgucaggcagaa

SEQ ID NO: 463211 - RNA, 19 nt, Homo sapiens
  misc_RNA (1)...(19): siRNA sense strand
caaaaugccugaugaugua

SEQ ID NO: 463212 - RNA, 19 nt, Homo sapiens
  misc_RNA (1)...(19): siRNA sense strand
aaacacagcccaacaguga

SEQ ID NO: 463213 - RNA, 19 nt, Homo sapiens
  misc_RNA (1)...(19): siRNA sense strand
ucagugaaaugaugaaaug

SEQ ID NO: 463214 - RNA, 19 nt, Homo sapiens
  misc_RNA (1)...(19): siRNA sense strand
cgauauggcaucuguguua

SEQ ID NO: 463215 - RNA, 19 nt, Homo sapiens
  misc_RNA (1)...(19): siRNA sense strand
gugauaguauggauuauga

SEQ ID NO: 463216 - RNA, 19 nt, Homo sapiens
  misc_RNA (1)...(19): siRNA sense strand
gaugauaguggcagugaua

SEQ ID NO: 463217 - RNA, 19 nt, Homo sapiens
  misc_RNA (1)...(19): siRNA sense strand
ccacugcgcuccagcucua

SEQ ID NO: 463218 - RNA, 19 nt, Homo sapiens
  misc_RNA (1)...(19): siRNA sense strand
gugaaaugaugaaauguga

SEQ ID NO: 463219 - RNA, 19 nt, Homo sapiens
  misc_RNA (1)...(19): siRNA sense strand
ggacagcaauagggugauu

SEQ ID NO: 463220 - RNA, 19 nt, Homo sapiens
  misc_RNA (1)...(19): siRNA sense strand
gcaaaucaaugaggugcuu

SEQ ID NO: 463221 - RNA, 19 nt, Homo sapiens
  misc_RNA (1)...(19): siRNA sense strand
caccagaaguuuaaaggaa

SEQ ID NO: 463222 - RNA, 19 nt, Homo sapiens
  misc_RNA (1)...(19): siRNA sense strand
gauauggcaucuguguuaa

SEQ ID NO: 463223 - RNA, 19 nt, Homo sapiens
  misc_RNA (1)...(19): siRNA sense strand
caacagaaaguguaaauac

SEQ ID NO: 463224 - RNA, 19 nt, Homo sapiens
  misc_RNA (1)...(19): siRNA sense strand
caagcuggcuccuuucuag

SEQ ID NO: 463225 - RNA, 19 nt, Homo sapiens
  misc_RNA (1)...(19): siRNA sense strand
gugcuaaccugcauucugu

SEQ ID NO: 463226 - RNA, 19 nt, Homo sapiens
  misc_RNA (1)...(19): siRNA sense strand
gauaguggcagugauagua

SEQ ID NO: 463227 - RNA, 19 nt, Homo sapiens
  misc_RNA (1)...(19): siRNA sense strand
ucaaauucaugcacaauca

SEQ ID NO: 463228 - RNA, 19 nt, Homo sapiens
  misc_RNA (1)...(19): siRNA sense strand
agacccagcucaacaaguu

SEQ ID NO: 463229 - RNA, 19 nt, Homo sapiens
  misc_RNA (1)...(19): siRNA sense strand
ccagcgagguggagauuga

SEQ ID NO: 463230 - RNA, 19 nt, Homo sapiens
  misc_RNA (1)...(19): siRNA sense strand
gagcuguacuacuguguga

SEQ ID NO: 463231 - RNA, 19 nt, Homo sapiens
  misc_RNA (1)...(19): siRNA sense strand
guacaugcagggacagaua

SEQ ID NO: 463232 - RNA, 19 nt, Homo sapiens
  misc_RNA (1)...(19): siRNA sense strand
gaagcagacauuuguggua

SEQ ID NO: 463233 - RNA, 19 nt, Homo sapiens
  misc_RNA (1)...(19): siRNA sense strand
gcucugaccuuugcucuuc

SEQ ID NO: 463234 - RNA, 19 nt, Homo sapiens
  misc_RNA (1)...(19): siRNA sense strand
gagaagggauggguaugga

SEQ ID NO: 463235 - RNA, 19 nt, Homo sapiens
  misc_RNA (1)...(19): siRNA sense strand
ugaauuggguggcgaguuc

SEQ ID NO: 463236 - RNA, 19 nt, Homo sapiens
  misc_RNA (1)...(19): siRNA sense strand
agacgaagguguugugcuu

SEQ ID NO: 463237 - RNA, 19 nt, Homo sapiens
  misc_RNA (1)...(19): siRNA sense strand
ugaagaagcagacauuugu

SEQ ID NO: 463238 - RNA, 19 nt, Homo sapiens
  misc_RNA (1)...(19): siRNA sense strand
gaagggaucaaccucaaau

SEQ ID NO: 463239 - RNA, 19 nt, Homo sapiens
  misc_RNA (1)...(19): siRNA sense strand
gcaugagccuucgggauga

SEQ ID NO: 463240 - RNA, 19 nt, Homo sapiens
  misc_RNA (1)...(19): siRNA sense strand
ggaucaaccucaaauucau

SEQ ID NO: 463241 - RNA, 19 nt, Homo sapiens
  misc_RNA (1)...(19): siRNA sense strand
gaaaugaugaaaugugaca

SEQ ID NO: 463242 - RNA, 19 nt, Homo sapiens
  misc_RNA (1)...(19): siRNA sense strand
cagaaucacuagagcugaa

SEQ ID NO: 463243 - RNA, 19 nt, Homo sapiens
  misc_RNA (1)...(19): siRNA sense strand
gcaucuguguuaacuucua

SEQ ID NO: 463244 - RNA, 19 nt, Homo sapiens
  misc_RNA (1)...(19): siRNA sense strand
acacuggagucacgcgaua

SEQ ID NO: 463245 - RNA, 19 nt, Homo sapiens
  misc_RNA (1)...(19): siRNA sense strand
ggacugaucaagacucugu

SEQ ID NO: 463246 - RNA, 19 nt, Homo sapiens
  misc_RNA (1)...(19): siRNA sense strand
aguaccagcuucagucuuu

SEQ ID NO: 463247 - RNA, 19 nt, Homo sapiens
  misc_RNA (1)...(19): siRNA sense strand
ggcccagacuccugaauug

SEQ ID NO: 463248 - RNA, 19 nt, Homo sapiens
  misc_RNA (1)...(19): siRNA sense strand
gcaugaccuucgagagauu

SEQ ID NO: 463249 - RNA, 19 nt, Homo sapiens
  misc_RNA (1)...(19): siRNA sense strand
gcccagacccacuacuaua

SEQ ID NO: 463250 - RNA, 19 nt, Homo sapiens
  misc_RNA (1)...(19): siRNA sense strand
cagggucgauccagcaauu

SEQ ID NO: 463251 - RNA, 19 nt, Homo sapiens
  misc_RNA (1)...(19): siRNA sense strand
gaaaagagaaccuccauca

SEQ ID NO: 463252 - RNA, 19 nt, Homo sapiens
  misc_RNA (1)...(19): siRNA sense strand
gauucacccuaguggauuu

SEQ ID NO: 463253 - RNA, 19 nt, Homo sapiens
  misc_RNA (1)...(19): siRNA sense strand
gauucaagcucuucuuacu

SEQ ID NO: 463254 - RNA, 19 nt, Homo sapiens
  misc_RNA (1)...(19): siRNA sense strand
ccagacuccugaauugcua

SEQ ID NO: 463255 - RNA, 19 nt, Homo sapiens
  misc_RNA (1)...(19): siRNA sense strand
agaaugacauccgcaagaa

SEQ ID NO: 463256 - RNA, 19 nt, Homo sapiens
  misc_RNA (1)...(19): siRNA sense strand
cuucuuagaugcugugaug

SEQ ID NO: 463257 - RNA, 19 nt, Homo sapiens
  misc_RNA (1)...(19): siRNA sense strand
gagcagcaaugcaggugau

SEQ ID NO: 463258 - RNA, 19 nt, Homo sapiens
  misc_RNA (1)...(19): siRNA sense strand
ccaacgugcugcagggauu

SEQ ID NO: 463259 - RNA, 19 nt, Homo sapiens
  misc_RNA (1)...(19): siRNA sense strand
ccuggaagaugaugaagau

SEQ ID NO: 463260 - RNA, 19 nt, Homo sapiens
  misc_RNA (1)...(19): siRNA sense strand
gaaguaaucaaaccugucu

SEQ ID NO: 463261 - RNA, 19 nt, Homo sapiens
  misc_RNA (1)...(19): siRNA sense strand
gaagaggguggcacugaga

SEQ ID NO: 463262 - RNA, 19 nt, Homo sapiens
  misc_RNA (1)...(19): siRNA sense strand
caucaaacccggaccugaa

SEQ ID NO: 463263 - RNA, 19 nt, Homo sapiens
  misc_RNA (1)...(19): siRNA sense strand
acgagaagcucaucaacau

SEQ ID NO: 463264 - RNA, 19 nt, Homo sapiens
  misc_RNA (1)...(19): siRNA sense strand
ccagaggacugaucaagac

SEQ ID NO: 463265 - RNA, 19 nt, Homo sapiens
  misc_RNA (1)...(19): siRNA sense strand
ggugugagccugacgucua

SEQ ID NO: 463266 - RNA, 19 nt, Homo sapiens
  misc_RNA (1)...(19): siRNA sense strand
guacaaagggacaccaugu

SEQ ID NO: 463267 - RNA, 19 nt, Homo sapiens
  misc_RNA (1)...(19): siRNA sense strand
gaugauaccucuuuugucu

SEQ ID NO: 463268 - RNA, 19 nt, Homo sapiens
  misc_RNA (1)...(19): siRNA sense strand
gggaucaaccucaaauuca

SEQ ID NO: 463269 - RNA, 19 nt, Homo sapiens
  misc_RNA (1)...(19): siRNA sense strand
gaguccagcuguuaugauc

SEQ ID NO: 463270 - RNA, 19 nt, Homo sapiens
  misc_RNA (1)...(19): siRNA sense strand
ggagggcguuaguggauca

SEQ ID NO: 463271 - RNA, 19 nt, Homo sapiens
  misc_RNA (1)...(19): siRNA sense strand
ccagccagcucugaccuuu

SEQ ID NO: 463272 - RNA, 19 nt, Homo sapiens
  misc_RNA (1)...(19): siRNA sense strand
uaacaucggaacaguguau

SEQ ID NO: 463273 - RNA, 19 nt, Homo sapiens
  misc_RNA (1)...(19): siRNA sense strand
caaaggcuauggcacaacu

SEQ ID NO: 463274 - RNA, 19 nt, Homo sapiens
  misc_RNA (1)...(19): siRNA sense strand
ggaagagaaguccaacaga

SEQ ID NO: 463275 - RNA, 19 nt, Homo sapiens
  misc_RNA (1)...(19): siRNA sense strand
gguguacaagggaauguua

SEQ ID NO: 463276 - RNA, 19 nt, Homo sapiens
  misc_RNA (1)...(19): siRNA sense strand
ccacggagccaacucugaa

SEQ ID NO: 463277 - RNA, 19 nt, Homo sapiens
  misc_RNA (1)...(19): siRNA sense strand
uugacgagcugcagaauca

SEQ ID NO: 463278 - RNA, 19 nt, Homo sapiens
  misc_RNA (1)...(19): siRNA sense strand
gaauucaacccacucaucu

SEQ ID NO: 463279 - RNA, 19 nt, Homo sapiens
  misc_RNA (1)...(19): siRNA sense strand
cucaacaaguucuauacua

SEQ ID NO: 463280 - RNA, 19 nt, Homo sapiens
  misc_RNA (1)...(19): siRNA sense strand
gaaggugaggcgccuaaug

SEQ ID NO: 463281 - RNA, 19 nt, Homo sapiens
  misc_RNA (1)...(19): siRNA sense strand
aggaaaugaucgacaggua

SEQ ID NO: 463282 - RNA, 19 nt, Homo sapiens
  misc_RNA (1)...(19): siRNA sense strand
ccagaaguuuaaaggaaga

SEQ ID NO: 463283 - RNA, 19 nt, Homo sapiens
  misc_RNA (1)...(19): siRNA sense strand
gccagcaucuuugggcuuu

SEQ ID NO: 463284 - RNA, 19 nt, Homo sapiens
  misc_RNA (1)...(19): siRNA sense strand
guacaguccucagcuugga

SEQ ID NO: 463285 - RNA, 19 nt, Homo sapiens
  misc_RNA (1)...(19): siRNA sense strand
gugacaagccaaaguggua

SEQ ID NO: 463286 - RNA, 19 nt, Homo sapiens
  misc_RNA (1)...(19): siRNA sense strand
uggcggaucuuuacuggau

SEQ ID NO: 463287 - RNA, 19 nt, Homo sapiens
  misc_RNA (1)...(19): siRNA sense strand
gaagguaaauaagaaugac

SEQ ID NO: 463288 - RNA, 19 nt, Homo sapiens
  misc_RNA (1)...(19): siRNA sense strand
uguuagaccuccucaagug

SEQ ID NO: 463289 - RNA, 19 nt, Homo sapiens
  misc_RNA (1)...(19): siRNA sense strand
uggcaucuguguuaacuuc

SEQ ID NO: 463290 - RNA, 19 nt, Homo sapiens
  misc_RNA (1)...(19): siRNA sense strand
ccagacccaucucgauuca

SEQ ID NO: 463291 - RNA, 19 nt, Homo sapiens
  misc_RNA (1)...(19): siRNA sense strand
gucgggagcuguacuacug

SEQ ID NO: 463292 - RNA, 19 nt, Homo sapiens
  misc_RNA (1)...(19): siRNA sense strand
guaguaacaucggaacagu

SEQ ID NO: 463293 - RNA, 19 nt, Homo sapiens
  misc_RNA (1)...(19): siRNA sense strand
cgaauucacaacaauaugu

SEQ ID NO: 463294 - RNA, 19 nt, Homo sapiens
  misc_RNA (1)...(19): siRNA sense strand
cagcgaauucacaacaaua

SEQ ID NO: 463295 - RNA, 19 nt, Homo sapiens
  misc_RNA (1)...(19): siRNA sense strand
ucuacaaacuggacuucaa

SEQ ID NO: 463296 - RNA, 19 nt, Homo sapiens
  misc_RNA (1)...(19): siRNA sense strand
cagcgagucuaucucuaug

SEQ ID NO: 463297 - RNA, 19 nt, Homo sapiens
  misc_RNA (1)...(19): siRNA sense strand
ggaagggaucaaccucaaa

SEQ ID NO: 463298 - RNA, 19 nt, Homo sapiens
  misc_RNA (1)...(19): siRNA sense strand
ugugugguguugcguagua

SEQ ID NO: 463299 - RNA, 19 nt, Homo sapiens
  misc_RNA (1)...(19): siRNA sense strand
uacaaacggagauaucuuu

SEQ ID NO: 463300 - RNA, 19 nt, Homo sapiens
  misc_RNA (1)...(19): siRNA sense strand
gcagacauuugugguacau

SEQ ID NO: 463301 - RNA, 19 nt, Homo sapiens
  misc_RNA (1)...(19): siRNA sense strand
guacagccagcaaaucaau

SEQ ID NO: 463302 - RNA, 19 nt, Homo sapiens
  misc_RNA (1)...(19): siRNA sense strand
guaccugucccuuggagaa

SEQ ID NO: 463303 - RNA, 19 nt, Homo sapiens
  misc_RNA (1)...(19): siRNA sense strand
gaagucaucugucauuaaa

SEQ ID NO: 463304 - RNA, 19 nt, Homo sapiens
  misc_RNA (1)...(19): siRNA sense strand
gaagagaaguccaacagaa

SEQ ID NO: 463305 - RNA, 19 nt, Homo sapiens
  misc_RNA (1)...(19): siRNA sense strand
gaaguucuguccucgguua

SEQ ID NO: 463306 - RNA, 19 nt, Homo sapiens
  misc_RNA (1)...(19): siRNA sense strand
cuacggagauggaugauaa

SEQ ID NO: 463307 - RNA, 19 nt, Homo sapiens
  misc_RNA (1)...(19): siRNA sense strand
gcagugauaguauggauua

SEQ ID NO: 463308 - RNA, 19 nt, Homo sapiens
  misc_RNA (1)...(19): siRNA sense strand
ggaagcgccuggaagauga

SEQ ID NO: 463309 - RNA, 19 nt, Homo sapiens
  misc_RNA (1)...(19): siRNA sense strand
caagugcccuucugcauga

SEQ ID NO: 463310 - RNA, 19 nt, Homo sapiens
  misc_RNA (1)...(19): siRNA sense strand
ggacagacgucaggcagaa

SEQ ID NO: 463311 - RNA, 19 nt, Homo sapiens
  misc_RNA (1)...(19): siRNA sense strand
caaaaugccugaugaugua

SEQ ID NO: 463312 - RNA, 19 nt, Homo sapiens
  misc_RNA (1)...(19): siRNA sense strand
aaacacagcccaacaguga

SEQ ID NO: 463313 - RNA, 19 nt, Homo sapiens
  misc_RNA (1)...(19): siRNA sense strand
gaaaucugcuacuccguau

SEQ ID NO: 463314 - RNA, 19 nt, Homo sapiens
  misc_RNA (1)...(19): siRNA sense strand
ucagugaaaugaugaaaug

SEQ ID NO: 463315 - RNA, 19 nt, Homo sapiens
  misc_RNA (1)...(19): siRNA sense strand
cgauauggcaucuguguua

SEQ ID NO: 463316 - RNA, 19 nt, Homo sapiens
  misc_RNA (1)...(19): siRNA sense strand
gugauaguauggauuauga

SEQ ID NO: 463317 - RNA, 19 nt, Homo sapiens
  misc_RNA (1)...(19): siRNA sense strand
gaugauaguggcagugaua

SEQ ID NO: 463318 - RNA, 19 nt, Homo sapiens
  misc_RNA (1)...(19): siRNA sense strand
ccacugcgcuccagcucua

SEQ ID NO: 463319 - RNA, 19 nt, Homo sapiens
  misc_RNA (1)...(19): siRNA sense strand
gugaaaugaugaaauguga

SEQ ID NO: 463320 - RNA, 19 nt, Homo sapiens
  misc_RNA (1)...(19): siRNA sense strand
ggacagcaauagggugauu

SEQ ID NO: 463321 - RNA, 19 nt, Homo sapiens
  misc_RNA (1)...(19): siRNA sense strand
gcaaaucaaugaggugcuu

SEQ ID NO: 463322 - RNA, 19 nt, Homo sapiens
  misc_RNA (1)...(19): siRNA sense strand
caccagaaguuuaaaggaa

SEQ ID NO: 463323 - RNA, 19 nt, Homo sapiens
  misc_RNA (1)...(19): siRNA sense strand
gauauggcaucuguguuaa

SEQ ID NO: 463324 - RNA, 19 nt, Homo sapiens
  misc_RNA (1)...(19): siRNA sense strand
uauuaugucucuucucgua

SEQ ID NO: 463325 - RNA, 19 nt, Homo sapiens
  misc_RNA (1)...(19): siRNA sense strand
caacagaaaguguaaauac

SEQ ID NO: 463326 - RNA, 19 nt, Homo sapiens
  misc_RNA (1)...(19): siRNA sense strand
caagcuggcuccuuucuag

SEQ ID NO: 463327 - RNA, 19 nt, Homo sapiens
  misc_RNA (1)...(19): siRNA sense strand
gugcuaaccugcauucugu

SEQ ID NO: 463328 - RNA, 19 nt, Homo sapiens
  misc_RNA (1)...(19): siRNA sense strand
gauaguggcagugauagua

SEQ ID NO: 463329 - RNA, 19 nt, Homo sapiens
  misc_RNA (1)...(19): siRNA sense strand
guacguggcugcaguucau

SEQ ID NO: 463330 - RNA, 19 nt, Homo sapiens
  misc_RNA (1)...(19): siRNA sense strand
ucaaauucaugcacaauca

SEQ ID NO: 463331 - RNA, 19 nt, Homo sapiens
  misc_RNA (1)...(19): siRNA sense strand
agacccagcucaacaaguu

SEQ ID NO: 463332 - RNA, 19 nt, Homo sapiens
  misc_RNA (1)...(19): siRNA sense strand
ccagcgagguggagauuga

SEQ ID NO: 463333 - RNA, 19 nt, Homo sapiens
  misc_RNA (1)...(19): siRNA sense strand
gagcuguacuacuguguga

SEQ ID NO: 463334 - RNA, 19 nt, Homo sapiens
  misc_RNA (1)...(19): siRNA sense strand
guacaugcagggacagaua

SEQ ID NO: 463335 - RNA, 19 nt, Homo sapiens
  misc_RNA (1)...(19): siRNA sense strand
gaagcagacauuuguggua

SEQ ID NO: 463336 - RNA, 19 nt, Homo sapiens
  misc_RNA (1)...(19): siRNA sense strand
gcucugaccuuugcucuuc

SEQ ID NO: 463337 - RNA, 19 nt, Homo sapiens
  misc_RNA (1)...(19): siRNA sense strand
gagaagggauggguaugga

SEQ ID NO: 463338 - RNA, 19 nt, Homo sapiens
  misc_RNA (1)...(19): siRNA sense strand
ugaauuggguggcgaguuc

SEQ ID NO: 463339 - RNA, 19 nt, Homo sapiens
  misc_RNA (1)...(19): siRNA sense strand
agacgaagguguugugcuu

SEQ ID NO: 463340 - RNA, 19 nt, Homo sapiens
  misc_RNA (1)...(19): siRNA sense strand
ugaagaagcagacauuugu

SEQ ID NO: 463341 - RNA, 19 nt, Homo sapiens
  misc_RNA (1)...(19): siRNA sense strand
gaagggaucaaccucaaau

SEQ ID NO: 463342 - RNA, 19 nt, Homo sapiens
  misc_RNA (1)...(19): siRNA sense strand
gcaugagccuucgggauga

SEQ ID NO: 463343 - RNA, 19 nt, Homo sapiens
  misc_RNA (1)...(19): siRNA sense strand
ggaucaaccucaaauucau

SEQ ID NO: 463344 - RNA, 19 nt, Homo sapiens
  misc_RNA (1)...(19): siRNA sense strand
gaaaugaugaaaugugaca

SEQ ID NO: 463345 - RNA, 19 nt, Homo sapiens
  misc_RNA (1)...(19): siRNA sense strand
cagaaucacuagagcugaa

SEQ ID NO: 463346 - RNA, 19 nt, Homo sapiens
  misc_RNA (1)...(19): siRNA sense strand
gcaucuguguuaacuucua

SEQ ID NO: 463347 - RNA, 19 nt, Homo sapiens
  misc_RNA (1)...(19): siRNA sense strand
acacuggagucacgcgaua

SEQ ID NO: 463348 - RNA, 19 nt, Homo sapiens
  misc_RNA (1)...(19): siRNA sense strand
ggcccagacuccugaauug

SEQ ID NO: 463349 - RNA, 19 nt, Homo sapiens
  misc_RNA (1)...(19): siRNA sense strand
ggacugaucaagacucugu

SEQ ID NO: 463350 - RNA, 19 nt, Homo sapiens
  misc_RNA (1)...(19): siRNA sense strand
aguaccagcuucagucuuu

SEQ ID NO: 463351 - RNA, 19 nt, Homo sapiens
  misc_RNA (1)...(19): siRNA sense strand
gcaugaccuucgagagauu

SEQ ID NO: 463352 - RNA, 19 nt, Homo sapiens
  misc_RNA (1)...(19): siRNA sense strand
aaucugcuacuccguauua

SEQ ID NO: 463353 - RNA, 19 nt, Homo sapiens
  misc_RNA (1)...(19): siRNA sense strand
gcccagacccacuacuaua

SEQ ID NO: 463354 - RNA, 19 nt, Homo sapiens
  misc_RNA (1)...(19): siRNA sense strand
cagggucgauccagcaauu

SEQ ID NO: 463355 - RNA, 19 nt, Homo sapiens
  misc_RNA (1)...(19): siRNA sense strand
gaaaagagaaccuccauca

SEQ ID NO: 463356 - RNA, 19 nt, Homo sapiens
  misc_RNA (1)...(19): siRNA sense strand
gauucacccuaguggauuu

SEQ ID NO: 463357 - RNA, 19 nt, Homo sapiens
  misc_RNA (1)...(19): siRNA sense strand
ccagacuccugaauugcua

SEQ ID NO: 463358 - RNA, 19 nt, Homo sapiens
  misc_RNA (1)...(19): siRNA sense strand
agaaugacauccgcaagaa

SEQ ID NO: 463359 - RNA, 19 nt, Homo sapiens
  misc_RNA (1)...(19): siRNA sense strand
cuucuuagaugcugugaug

SEQ ID NO: 463360 - RNA, 19 nt, Homo sapiens
  misc_RNA (1)...(19): siRNA sense strand
gagcagcaaugcaggugau

SEQ ID NO: 463361 - RNA, 19 nt, Homo sapiens
  misc_RNA (1)...(19): siRNA sense strand
gauucaagcucuucuuacu

SEQ ID NO: 463362 - RNA, 19 nt, Homo sapiens
  misc_RNA (1)...(19): siRNA sense strand
ccaacgugcugcagggauu

SEQ ID NO: 463363 - RNA, 19 nt, Homo sapiens
  misc_RNA (1)...(19): siRNA sense strand
ccuggaagaugaugaagau

SEQ ID NO: 463364 - RNA, 19 nt, Homo sapiens
  misc_RNA (1)...(19): siRNA sense strand
gaaguaaucaaaccugucu

SEQ ID NO: 463365 - RNA, 19 nt, Homo sapiens
  misc_RNA (1)...(19): siRNA sense strand
gaagaggguggcacugaga

SEQ ID NO: 463366 - RNA, 19 nt, Homo sapiens
  misc_RNA (1)...(19): siRNA sense strand
caucaaacccggaccugaa

SEQ ID NO: 463367 - RNA, 19 nt, Homo sapiens
  misc_RNA (1)...(19): siRNA sense strand
acgagaagcucaucaacau

SEQ ID NO: 463368 - RNA, 19 nt, Homo sapiens
  misc_RNA (1)...(19): siRNA sense strand
ccagaggacugaucaagac

SEQ ID NO: 463369 - RNA, 19 nt, Homo sapiens
  misc_RNA (1)...(19): siRNA sense strand
ggugugagccugacgucua

SEQ ID NO: 463370 - RNA, 19 nt, Homo sapiens
  misc_RNA (1)...(19): siRNA sense strand
guacaaagggacaccaugu

SEQ ID NO: 463371 - RNA, 19 nt, Homo sapiens
  misc_RNA (1)...(19): siRNA sense strand
ggagggcguuaguggauca

SEQ ID NO: 463372 - RNA, 19 nt, Homo sapiens
  misc_RNA (1)...(19): siRNA sense strand
gggaucaaccucaaauuca

SEQ ID NO: 463373 - RNA, 19 nt, Homo sapiens
  misc_RNA (1)...(19): siRNA sense strand
gaugauaccucuuuugucu

SEQ ID NO: 463374 - RNA, 19 nt, Homo sapiens
  misc_RNA (1)...(19): siRNA sense strand
gaguccagcuguuaugauc

SEQ ID NO: 463375 - RNA, 19 nt, Homo sapiens
  misc_RNA (1)...(19): siRNA sense strand
ccagccagcucugaccuuu

SEQ ID NO: 463376 - RNA, 19 nt, Homo sapiens
  misc_RNA (1)...(19): siRNA sense strand
uaacaucggaacaguguau

SEQ ID NO: 463377 - RNA, 19 nt, Homo sapiens
  misc_RNA (1)...(19): siRNA sense strand
caaaggcuauggcacaacu

SEQ ID NO: 463378 - RNA, 19 nt, Homo sapiens
  misc_RNA (1)...(19): siRNA sense strand
ggaagagaaguccaacaga

SEQ ID NO: 463379 - RNA, 19 nt, Homo sapiens
  misc_RNA (1)...(19): siRNA sense strand
gguguacaagggaauguua

SEQ ID NO: 463380 - RNA, 19 nt, Homo sapiens
  misc_RNA (1)...(19): siRNA sense strand
ccacggagccaacucugaa

SEQ ID NO: 463381 - RNA, 19 nt, Homo sapiens
  misc_RNA (1)...(19): siRNA sense strand
uugacgagcugcagaauca

SEQ ID NO: 463382 - RNA, 19 nt, Homo sapiens
  misc_RNA (1)...(19): siRNA sense strand
gaauucaacccacucaucu

SEQ ID NO: 463383 - RNA, 19 nt, Homo sapiens
  misc_RNA (1)...(19): siRNA sense strand
cucaacaaguucuauacua

SEQ ID NO: 463384 - RNA, 19 nt, Homo sapiens
  misc_RNA (1)...(19): siRNA sense strand
gaaggugaggcgccuaaug

SEQ ID NO: 463385 - RNA, 19 nt, Homo sapiens
  misc_RNA (1)...(19): siRNA sense strand
aggaaaugaucgacaggua

SEQ ID NO: 463386 - RNA, 19 nt, Homo sapiens
  misc_RNA (1)...(19): siRNA sense strand
ccagaaguuuaaaggaaga

SEQ ID NO: 463387 - RNA, 19 nt, Homo sapiens
  misc_RNA (1)...(19): siRNA sense strand
gccagcaucuuugggcuuu

SEQ ID NO: 463388 - RNA, 19 nt, Homo sapiens
  misc_RNA (1)...(19): siRNA sense strand
guacaguccucagcuugga

SEQ ID NO: 463389 - RNA, 19 nt, Homo sapiens
  misc_RNA (1)...(19): siRNA sense strand
gugacaagccaaaguggua

SEQ ID NO: 463390 - RNA, 19 nt, Homo sapiens
  misc_RNA (1)...(19): siRNA sense strand
uggcggaucuuuacuggau

SEQ ID NO: 463391 - RNA, 19 nt, Homo sapiens
  misc_RNA (1)...(19): siRNA sense strand
gaagguaaauaagaaugac

SEQ ID NO: 463392 - RNA, 19 nt, Homo sapiens
  misc_RNA (1)...(19): siRNA sense strand
uggcaucuguguuaacuuc

SEQ ID NO: 463393 - RNA, 19 nt, Homo sapiens
  misc_RNA (1)...(19): siRNA sense strand
uguuagaccuccucaagug

SEQ ID NO: 463394 - RNA, 19 nt, Homo sapiens
  misc_RNA (1)...(19): siRNA sense strand
ccagacccaucucgauuca

SEQ ID NO: 463395 - RNA, 19 nt, Homo sapiens
  misc_RNA (1)...(19): siRNA sense strand
gucgggagcuguacuacug

SEQ ID NO: 463396 - RNA, 19 nt, Homo sapiens
  misc_RNA (1)...(19): siRNA sense strand
guaguaacaucggaacagu

SEQ ID NO: 463397 - RNA, 19 nt, Homo sapiens
  misc_RNA (1)...(19): siRNA sense strand
cgaauucacaacaauaugu

SEQ ID NO: 463398 - RNA, 19 nt, Homo sapiens
  misc_RNA (1)...(19): siRNA sense strand
cagcgaauucacaacaaua

SEQ ID NO: 463399 - RNA, 19 nt, Homo sapiens
  misc_RNA (1)...(19): siRNA sense strand
ucuacaaacuggacuucaa

SEQ ID NO: 463400 - RNA, 19 nt, Homo sapiens
  misc_RNA (1)...(19): siRNA sense strand
uacaaacggagauaucuuu

SEQ ID NO: 463401 - RNA, 19 nt, Homo sapiens
  misc_RNA (1)...(19): siRNA sense strand
ggaagggaucaaccucaaa

SEQ ID NO: 463402 - RNA, 19 nt, Homo sapiens
  misc_RNA (1)...(19): siRNA sense strand
ugugugguguugcguagua

SEQ ID NO: 463403 - RNA, 19 nt, Homo sapiens
  misc_RNA (1)...(19): siRNA sense strand
gaagucaucugucauuaaa

SEQ ID NO: 463404 - RNA, 19 nt, Homo sapiens
  misc_RNA (1)...(19): siRNA sense strand
gaagagaaguccaacagaa

SEQ ID NO: 463405 - RNA, 19 nt, Homo sapiens
  misc_RNA (1)...(19): siRNA sense strand
gaaguucuguccucgguua

SEQ ID NO: 463406 - RNA, 19 nt, Homo sapiens
  misc_RNA (1)...(19): siRNA sense strand
cuacggagauggaugauaa

SEQ ID NO: 463407 - RNA, 19 nt, Homo sapiens
  misc_RNA (1)...(19): siRNA sense strand
gcagugauaguauggauua

SEQ ID NO: 463408 - RNA, 19 nt, Homo sapiens
  misc_RNA (1)...(19): siRNA sense strand
ggaagcgccuggaagauga

SEQ ID NO: 463409 - RNA, 19 nt, Homo sapiens
  misc_RNA (1)...(19): siRNA sense strand
caagugcccuucugcauga

SEQ ID NO: 463410 - RNA, 19 nt, Homo sapiens
  misc_RNA (1)...(19): siRNA sense strand
ggacagacgucaggcagaa

SEQ ID NO: 463411 - RNA, 19 nt, Homo sapiens
  misc_RNA (1)...(19): siRNA sense strand
caaaaugccugaugaugua

SEQ ID NO: 463412 - RNA, 19 nt, Homo sapiens
  misc_RNA (1)...(19): siRNA sense strand
aaacacagcccaacaguga

SEQ ID NO: 463413 - RNA, 19 nt, Homo sapiens
  misc_RNA (1)...(19): siRNA sense strand
gaaaucugcuacuccguau

SEQ ID NO: 463414 - RNA, 19 nt, Homo sapiens
  misc_RNA (1)...(19): siRNA sense strand
ucagugaaaugaugaaaug

SEQ ID NO: 463415 - RNA, 19 nt, Homo sapiens
  misc_RNA (1)...(19): siRNA sense strand
cgauauggcaucuguguua

SEQ ID NO: 463416 - RNA, 19 nt, Homo sapiens
  misc_RNA (1)...(19): siRNA sense strand
gugauaguauggauuauga

SEQ ID NO: 463417 - RNA, 19 nt, Homo sapiens
  misc_RNA (1)...(19): siRNA sense strand
gaugauaguggcagugaua

SEQ ID NO: 463418 - RNA, 19 nt, Homo sapiens
  misc_RNA (1)...(19): siRNA sense strand
ccacugcgcuccagcucua

SEQ ID NO: 463419 - RNA, 19 nt, Homo sapiens
  misc_RNA (1)...(19): siRNA sense strand
gugaaaugaugaaauguga

SEQ ID NO: 463420 - RNA, 19 nt, Homo sapiens
  misc_RNA (1)...(19): siRNA sense strand
ggacagcaauagggugauu

SEQ ID NO: 463421 - RNA, 19 nt, Homo sapiens
  misc_RNA (1)...(19): siRNA sense strand
gcaaaucaaugaggugcuu

SEQ ID NO: 463422 - RNA, 19 nt, Homo sapiens
  misc_RNA (1)...(19): siRNA sense strand
caccagaaguuuaaaggaa

SEQ ID NO: 463423 - RNA, 19 nt, Homo sapiens
  misc_RNA (1)...(19): siRNA sense strand
gauauggcaucuguguuaa

SEQ ID NO: 463424 - RNA, 19 nt, Homo sapiens
  misc_RNA (1)...(19): siRNA sense strand
uauuaugucucuucucgua

SEQ ID NO: 463425 - RNA, 19 nt, Homo sapiens
  misc_RNA (1)...(19): siRNA sense strand
caacagaaaguguaaauac

SEQ ID NO: 463426 - RNA, 19 nt, Homo sapiens
  misc_RNA (1)...(19): siRNA sense strand
caagcuggcuccuuucuag

SEQ ID NO: 463427 - RNA, 19 nt, Homo sapiens
  misc_RNA (1)...(19): siRNA sense strand
gugcuaaccugcauucugu

SEQ ID NO: 463428 - RNA, 19 nt, Homo sapiens
  misc_RNA (1)...(19): siRNA sense strand
gauaguggcagugauagua

SEQ ID NO: 463429 - RNA, 19 nt, Homo sapiens
  misc_RNA (1)...(19): siRNA sense strand
guacguggcugcaguucau

SEQ ID NO: 463430 - RNA, 19 nt, Homo sapiens
  misc_RNA (1)...(19): siRNA sense strand
ucaaauucaugcacaauca

SEQ ID NO: 463431 - RNA, 19 nt, Homo sapiens
  misc_RNA (1)...(19): siRNA sense strand
agacccagcucaacaaguu

SEQ ID NO: 463432 - RNA, 19 nt, Homo sapiens
  misc_RNA (1)...(19): siRNA sense strand
ccagcgagguggagauuga

SEQ ID NO: 463433 - RNA, 19 nt, Homo sapiens
  misc_RNA (1)...(19): siRNA sense strand
gagcuguacuacuguguga

SEQ ID NO: 463434 - RNA, 19 nt, Homo sapiens
  misc_RNA (1)...(19): siRNA sense strand
guacaugcagggacagaua

SEQ ID NO: 463435 - RNA, 19 nt, Homo sapiens
  misc_RNA (1)...(19): siRNA sense strand
gaagcagacauuuguggua

SEQ ID NO: 463436 - RNA, 19 nt, Homo sapiens
  misc_RNA (1)...(19): siRNA sense strand
gcucugaccuuugcucuuc

SEQ ID NO: 463437 - RNA, 19 nt, Homo sapiens
  misc_RNA (1)...(19): siRNA sense strand
gagaagggauggguaugga

SEQ ID NO: 463438 - RNA, 19 nt, Homo sapiens
  misc_RNA (1)...(19): siRNA sense strand
ugaauuggguggcgaguuc

SEQ ID NO: 463439 - RNA, 19 nt, Homo sapiens
  misc_RNA (1)...(19): siRNA sense strand
agacgaagguguugugcuu

SEQ ID NO: 463440 - RNA, 19 nt, Homo sapiens
  misc_RNA (1)...(19): siRNA sense strand
ugaagaagcagacauuugu

SEQ ID NO: 463441 - RNA, 19 nt, Homo sapiens
  misc_RNA (1)...(19): siRNA sense strand
gaagggaucaaccucaaau

SEQ ID NO: 463442 - RNA, 19 nt, Homo sapiens
  misc_RNA (1)...(19): siRNA sense strand
gcaugagccuucgggauga

SEQ ID NO: 463443 - RNA, 19 nt, Homo sapiens
  misc_RNA (1)...(19): siRNA sense strand
ggaucaaccucaaauucau

SEQ ID NO: 463444 - RNA, 19 nt, Homo sapiens
  misc_RNA (1)...(19): siRNA sense strand
gaaaugaugaaaugugaca

SEQ ID NO: 463445 - RNA, 19 nt, Homo sapiens
  misc_RNA (1)...(19): siRNA sense strand
cagaaucacuagagcugaa

SEQ ID NO: 463446 - RNA, 19 nt, Homo sapiens
  misc_RNA (1)...(19): siRNA sense strand
gcaucuguguuaacuucua

SEQ ID NO: 463447 - RNA, 19 nt, Homo sapiens
  misc_RNA (1)...(19): siRNA sense strand
acacuggagucacgcgaua

SEQ ID NO: 463448 - RNA, 19 nt, Homo sapiens
  misc_RNA (1)...(19): siRNA sense strand
ggcccagacuccugaauug

SEQ ID NO: 463449 - RNA, 19 nt, Homo sapiens
  misc_RNA (1)...(19): siRNA sense strand
ggacugaucaagacucugu

SEQ ID NO: 463450 - RNA, 19 nt, Homo sapiens
  misc_RNA (1)...(19): siRNA sense strand
aguaccagcuucagucuuu

SEQ ID NO: 463451 - RNA, 19 nt, Homo sapiens
  misc_RNA (1)...(19): siRNA sense strand
gcaugaccuucgagagauu

SEQ ID NO: 463452 - RNA, 19 nt, Homo sapiens
  misc_RNA (1)...(19): siRNA sense strand
aaucugcuacuccguauua

SEQ ID NO: 463453 - RNA, 19 nt, Homo sapiens
  misc_RNA (1)...(19): siRNA sense strand
gcccagacccacuacuaua

SEQ ID NO: 463454 - RNA, 19 nt, Homo sapiens
  misc_RNA (1)...(19): siRNA sense strand
cagggucgauccagcaauu

SEQ ID NO: 463455 - RNA, 19 nt, Homo sapiens
  misc_RNA (1)...(19): siRNA sense strand
gaaaagagaaccuccauca

SEQ ID NO: 463456 - RNA, 19 nt, Homo sapiens
  misc_RNA (1)...(19): siRNA sense strand
gauucacccuaguggauuu

SEQ ID NO: 463457 - RNA, 19 nt, Homo sapiens
  misc_RNA (1)...(19): siRNA sense strand
ccagacuccugaauugcua

SEQ ID NO: 463458 - RNA, 19 nt, Homo sapiens
  misc_RNA (1)...(19): siRNA sense strand
agaaugacauccgcaagaa

SEQ ID NO: 463459 - RNA, 19 nt, Homo sapiens
  misc_RNA (1)...(19): siRNA sense strand
cuucuuagaugcugugaug

SEQ ID NO: 463460 - RNA, 19 nt, Homo sapiens
  misc_RNA (1)...(19): siRNA sense strand
gagcagcaaugcaggugau

SEQ ID NO: 463461 - RNA, 19 nt, Homo sapiens
  misc_RNA (1)...(19): siRNA sense strand
gauucaagcucuucuuacu

SEQ ID NO: 463462 - RNA, 19 nt, Homo sapiens
  misc_RNA (1)...(19): siRNA sense strand
ccaacgugcugcagggauu

SEQ ID NO: 463463 - RNA, 19 nt, Homo sapiens
  misc_RNA (1)...(19): siRNA sense strand
ccuggaagaugaugaagau

SEQ ID NO: 463464 - RNA, 19 nt, Homo sapiens
  misc_RNA (1)...(19): siRNA sense strand
gaaguaaucaaaccugucu

SEQ ID NO: 463465 - RNA, 19 nt, Homo sapiens
  misc_RNA (1)...(19): siRNA sense strand
gaagaggguggcacugaga

SEQ ID NO: 463466 - RNA, 19 nt, Homo sapiens
  misc_RNA (1)...(19): siRNA sense strand
caucaaacccggaccugaa

SEQ ID NO: 463467 - RNA, 19 nt, Homo sapiens
  misc_RNA (1)...(19): siRNA sense strand
acgagaagcucaucaacau

SEQ ID NO: 463468 - RNA, 19 nt, Homo sapiens
  misc_RNA (1)...(19): siRNA sense strand
ccagaggacugaucaagac

SEQ ID NO: 463469 - RNA, 19 nt, Homo sapiens
  misc_RNA (1)...(19): siRNA sense strand
ggugugagccugacgucua

SEQ ID NO: 463470 - RNA, 19 nt, Homo sapiens
  misc_RNA (1)...(19): siRNA sense strand
guacaaagggacaccaugu

SEQ ID NO: 463471 - RNA, 19 nt, Homo sapiens
  misc_RNA (1)...(19): siRNA sense strand
ggagggcguuaguggauca

SEQ ID NO: 463472 - RNA, 19 nt, Homo sapiens
  misc_RNA (1)...(19): siRNA sense strand
gggaucaaccucaaauuca

SEQ ID NO: 463473 - RNA, 19 nt, Homo sapiens
  misc_RNA (1)...(19): siRNA sense strand
gaugauaccucuuuugucu

SEQ ID NO: 463474 - RNA, 19 nt, Homo sapiens
  misc_RNA (1)...(19): siRNA sense strand
gaguccagcuguuaugauc

SEQ ID NO: 463475 - RNA, 19 nt, Homo sapiens
  misc_RNA (1)...(19): siRNA sense strand
ccagccagcucugaccuuu

SEQ ID NO: 463476 - RNA, 19 nt, Homo sapiens
  misc_RNA (1)...(19): siRNA sense strand
uaacaucggaacaguguau

SEQ ID NO: 463477 - RNA, 19 nt, Homo sapiens
  misc_RNA (1)...(19): siRNA sense strand
caaaggcuauggcacaacu

SEQ ID NO: 463478 - RNA, 19 nt, Homo sapiens
  misc_RNA (1)...(19): siRNA sense strand
ggaagagaaguccaacaga

SEQ ID NO: 463479 - RNA, 19 nt, Homo sapiens
  misc_RNA (1)...(19): siRNA sense strand
gguguacaagggaauguua

SEQ ID NO: 463480 - RNA, 19 nt, Homo sapiens
  misc_RNA (1)...(19): siRNA sense strand
ccacggagccaacucugaa

SEQ ID NO: 463481 - RNA, 19 nt, Homo sapiens
  misc_RNA (1)...(19): siRNA sense strand
uugacgagcugcagaauca

SEQ ID NO: 463482 - RNA, 19 nt, Homo sapiens
  misc_RNA (1)...(19): siRNA sense strand
gaauucaacccacucaucu

SEQ ID NO: 463483 - RNA, 19 nt, Homo sapiens
  misc_RNA (1)...(19): siRNA sense strand
cucaacaaguucuauacua

SEQ ID NO: 463484 - RNA, 19 nt, Homo sapiens
  misc_RNA (1)...(19): siRNA sense strand
gaaggugaggcgccuaaug

SEQ ID NO: 463485 - RNA, 19 nt, Homo sapiens
  misc_RNA (1)...(19): siRNA sense strand
aggaaaugaucgacaggua

SEQ ID NO: 463486 - RNA, 19 nt, Homo sapiens
  misc_RNA (1)...(19): siRNA sense strand
ccagaaguuuaaaggaaga

SEQ ID NO: 463487 - RNA, 19 nt, Homo sapiens
  misc_RNA (1)...(19): siRNA sense strand
gccagcaucuuugggcuuu

SEQ ID NO: 463488 - RNA, 19 nt, Homo sapiens
  misc_RNA (1)...(19): siRNA sense strand
guacaguccucagcuugga

SEQ ID NO: 463489 - RNA, 19 nt, Homo sapiens
  misc_RNA (1)...(19): siRNA sense strand
gugacaagccaaaguggua

SEQ ID NO: 463490 - RNA, 19 nt, Homo sapiens
  misc_RNA (1)...(19): siRNA sense strand
uggcggaucuuuacuggau

SEQ ID NO: 463491 - RNA, 19 nt, Homo sapiens
  misc_RNA (1)...(19): siRNA sense strand
gaagguaaauaagaaugac

SEQ ID NO: 463492 - RNA, 19 nt, Homo sapiens
  misc_RNA (1)...(19): siRNA sense strand
uggcaucuguguuaacuuc

SEQ ID NO: 463493 - RNA, 19 nt, Homo sapiens
  misc_RNA (1)...(19): siRNA sense strand
uguuagaccuccucaagug

SEQ ID NO: 463494 - RNA, 19 nt, Homo sapiens
  misc_RNA (1)...(19): siRNA sense strand
ccagacccaucucgauuca

SEQ ID NO: 463495 - RNA, 19 nt, Homo sapiens
  misc_RNA (1)...(19): siRNA sense strand
gucgggagcuguacuacug

SEQ ID NO: 463496 - RNA, 19 nt, Homo sapiens
  misc_RNA (1)...(19): siRNA sense strand
guaguaacaucggaacagu

SEQ ID NO: 463497 - RNA, 19 nt, Homo sapiens
  misc_RNA (1)...(19): siRNA sense strand
cgaauucacaacaauaugu

SEQ ID NO: 463498 - RNA, 19 nt, Homo sapiens
  misc_RNA (1)...(19): siRNA sense strand
cagcgaauucacaacaaua

SEQ ID NO: 463499 - RNA, 19 nt, Homo sapiens
  misc_RNA (1)...(19): siRNA sense strand
ucuacaaacuggacuucaa

SEQ ID NO: 463500 - RNA, 19 nt, Homo sapiens
  misc_RNA (1)...(19): siRNA sense strand
uacaaacggagauaucuuu

SEQ ID NO: 463501 - RNA, 19 nt, Homo sapiens
  misc_RNA (1)...(19): siRNA sense strand
ggaagggaucaaccucaaa

SEQ ID NO: 463502 - RNA, 19 nt, Homo sapiens
  misc_RNA (1)...(19): siRNA sense strand
ugugugguguugcguagua

SEQ ID NO: 463503 - RNA, 19 nt, Homo sapiens
  misc_RNA (1)...(19): siRNA sense strand
gaagucaucugucauuaaa

SEQ ID NO: 463504 - RNA, 19 nt, Homo sapiens
  misc_RNA (1)...(19): siRNA sense strand
gaagagaaguccaacagaa

SEQ ID NO: 463505 - RNA, 19 nt, Homo sapiens
  misc_RNA (1)...(19): siRNA sense strand
gaaguucuguccucgguua

SEQ ID NO: 463506 - RNA, 19 nt, Homo sapiens
  misc_RNA (1)...(19): siRNA sense strand
cuacggagauggaugauaa

SEQ ID NO: 463507 - RNA, 19 nt, Homo sapiens
  misc_RNA (1)...(19): siRNA sense strand
gcagugauaguauggauua

SEQ ID NO: 463508 - RNA, 19 nt, Homo sapiens
  misc_RNA (1)...(19): siRNA sense strand
ggaagcgccuggaagauga

SEQ ID NO: 463509 - RNA, 19 nt, Homo sapiens
  misc_RNA (1)...(19): siRNA sense strand
caagugcccuucugcauga

SEQ ID NO: 463510 - RNA, 19 nt, Homo sapiens
  misc_RNA (1)...(19): siRNA sense strand
ggacagacgucaggcagaa

SEQ ID NO: 463511 - RNA, 19 nt, Homo sapiens
  misc_RNA (1)...(19): siRNA sense strand
caaaaugccugaugaugua

SEQ ID NO: 463512 - RNA, 19 nt, Homo sapiens
  misc_RNA (1)...(19): siRNA sense strand
aaacacagcccaacaguga

SEQ ID NO: 463513 - RNA, 19 nt, Homo sapiens
  misc_RNA (1)...(19): siRNA sense strand
gaaaucugcuacuccguau

SEQ ID NO: 463514 - RNA, 19 nt, Homo sapiens
  misc_RNA (1)...(19): siRNA sense strand
ucagugaaaugaugaaaug

SEQ ID NO: 463515 - RNA, 19 nt, Homo sapiens
  misc_RNA (1)...(19): siRNA sense strand
cgauauggcaucuguguua

SEQ ID NO: 463516 - RNA, 19 nt, Homo sapiens
  misc_RNA (1)...(19): siRNA sense strand
gugauaguauggauuauga

SEQ ID NO: 463517 - RNA, 19 nt, Homo sapiens
  misc_RNA (1)...(19): siRNA sense strand
gaugauaguggcagugaua

SEQ ID NO: 463518 - RNA, 19 nt, Homo sapiens
  misc_RNA (1)...(19): siRNA sense strand
ccacugcgcuccagcucua

SEQ ID NO: 463519 - RNA, 19 nt, Homo sapiens
  misc_RNA (1)...(19): siRNA sense strand
gugaaaugaugaaauguga

SEQ ID NO: 463520 - RNA, 19 nt, Homo sapiens
  misc_RNA (1)...(19): siRNA sense strand
ggacagcaauagggugauu

SEQ ID NO: 463521 - RNA, 19 nt, Homo sapiens
  misc_RNA (1)...(19): siRNA sense strand
gcaaaucaaugaggugcuu

SEQ ID NO: 463522 - RNA, 19 nt, Homo sapiens
  misc_RNA (1)...(19): siRNA sense strand
caccagaaguuuaaaggaa

SEQ ID NO: 463523 - RNA, 19 nt, Homo sapiens
  misc_RNA (1)...(19): siRNA sense strand
gauauggcaucuguguuaa

SEQ ID NO: 463524 - RNA, 19 nt, Homo sapiens
  misc_RNA (1)...(19): siRNA sense strand
uauuaugucucuucucgua

SEQ ID NO: 463525 - RNA, 19 nt, Homo sapiens
  misc_RNA (1)...(19): siRNA sense strand
caacagaaaguguaaauac

SEQ ID NO: 463526 - RNA, 19 nt, Homo sapiens
  misc_RNA (1)...(19): siRNA sense strand
caagcuggcuccuuucuag

SEQ ID NO: 463527 - RNA, 19 nt, Homo sapiens
  misc_RNA (1)...(19): siRNA sense strand
gugcuaaccugcauucugu

SEQ ID NO: 463528 - RNA, 19 nt, Homo sapiens
  misc_RNA (1)...(19): siRNA sense strand
gauaguggcagugauagua

SEQ ID NO: 463529 - RNA, 19 nt, Homo sapiens
  misc_RNA (1)...(19): siRNA sense strand
guacguggcugcaguucau

SEQ ID NO: 463530 - RNA, 19 nt, Homo sapiens
  misc_RNA (1)...(19): siRNA sense strand
ucaaauucaugcacaauca

SEQ ID NO: 463531 - RNA, 19 nt, Homo sapiens
  misc_RNA (1)...(19): siRNA sense strand
agacccagcucaacaaguu

SEQ ID NO: 463532 - RNA, 19 nt, Homo sapiens
  misc_RNA (1)...(19): siRNA sense strand
ccagcgagguggagauuga

SEQ ID NO: 463533 - RNA, 19 nt, Homo sapiens
  misc_RNA (1)...(19): siRNA sense strand
gagcuguacuacuguguga

SEQ ID NO: 463534 - RNA, 19 nt, Homo sapiens
  misc_RNA (1)...(19): siRNA sense strand
guacaugcagggacagaua

SEQ ID NO: 463535 - RNA, 19 nt, Homo sapiens
  misc_RNA (1)...(19): siRNA sense strand
gaagcagacauuuguggua

SEQ ID NO: 463536 - RNA, 19 nt, Homo sapiens
  misc_RNA (1)...(19): siRNA sense strand
gcucugaccuuugcucuuc

SEQ ID NO: 463537 - RNA, 19 nt, Homo sapiens
  misc_RNA (1)...(19): siRNA sense strand
gagaagggauggguaugga

SEQ ID NO: 463538 - RNA, 19 nt, Homo sapiens
  misc_RNA (1)...(19): siRNA sense strand
ugaauuggguggcgaguuc

SEQ ID NO: 463539 - RNA, 19 nt, Homo sapiens
  misc_RNA (1)...(19): siRNA sense strand
agacgaagguguugugcuu

SEQ ID NO: 463540 - RNA, 19 nt, Homo sapiens
  misc_RNA (1)...(19): siRNA sense strand
ugaagaagcagacauuugu

SEQ ID NO: 463541 - RNA, 19 nt, Homo sapiens
  misc_RNA (1)...(19): siRNA sense strand
gaagggaucaaccucaaau

SEQ ID NO: 463542 - RNA, 19 nt, Homo sapiens
  misc_RNA (1)...(19): siRNA sense strand
gcaugagccuucgggauga

SEQ ID NO: 463543 - RNA, 19 nt, Homo sapiens
  misc_RNA (1)...(19): siRNA sense strand
ggaucaaccucaaauucau

SEQ ID NO: 463544 - RNA, 19 nt, Homo sapiens
  misc_RNA (1)...(19): siRNA sense strand
gaaaugaugaaaugugaca

SEQ ID NO: 463545 - RNA, 19 nt, Homo sapiens
  misc_RNA (1)...(19): siRNA sense strand
cagaaucacuagagcugaa

SEQ ID NO: 463546 - RNA, 19 nt, Homo sapiens
  misc_RNA (1)...(19): siRNA sense strand
gcaucuguguuaacuucua

SEQ ID NO: 463547 - RNA, 19 nt, Homo sapiens
  misc_RNA (1)...(19): siRNA sense strand
acacuggagucacgcgaua

SEQ ID NO: 463548 - RNA, 19 nt, Homo sapiens
  misc_RNA (1)...(19): siRNA sense strand
ggcccagacuccugaauug

SEQ ID NO: 463549 - RNA, 19 nt, Homo sapiens
  misc_RNA (1)...(19): siRNA sense strand
ggacugaucaagacucugu

SEQ ID NO: 463550 - RNA, 19 nt, Homo sapiens
  misc_RNA (1)...(19): siRNA sense strand
aguaccagcuucagucuuu

SEQ ID NO: 463551 - RNA, 19 nt, Homo sapiens
  misc_RNA (1)...(19): siRNA sense strand
gcaugaccuucgagagauu

SEQ ID NO: 463552 - RNA, 19 nt, Homo sapiens
  misc_RNA (1)...(19): siRNA sense strand
aaucugcuacuccguauua

SEQ ID NO: 463553 - RNA, 19 nt, Homo sapiens
  misc_RNA (1)...(19): siRNA sense strand
gcccagacccacuacuaua

SEQ ID NO: 463554 - RNA, 19 nt, Homo sapiens
  misc_RNA (1)...(19): siRNA sense strand
cagggucgauccagcaauu

SEQ ID NO: 463555 - RNA, 19 nt, Homo sapiens
  misc_RNA (1)...(19): siRNA sense strand
gaaaagagaaccuccauca

SEQ ID NO: 463556 - RNA, 19 nt, Homo sapiens
  misc_RNA (1)...(19): siRNA sense strand
gauucacccuaguggauuu

SEQ ID NO: 463557 - RNA, 19 nt, Homo sapiens
  misc_RNA (1)...(19): siRNA sense strand
ccagacuccugaauugcua

SEQ ID NO: 463558 - RNA, 19 nt, Homo sapiens
  misc_RNA (1)...(19): siRNA sense strand
agaaugacauccgcaagaa

SEQ ID NO: 463559 - RNA, 19 nt, Homo sapiens
  misc_RNA (1)...(19): siRNA sense strand
cuucuuagaugcugugaug

SEQ ID NO: 463560 - RNA, 19 nt, Homo sapiens
  misc_RNA (1)...(19): siRNA sense strand
gagcagcaaugcaggugau

SEQ ID NO: 463561 - RNA, 19 nt, Homo sapiens
  misc_RNA (1)...(19): siRNA sense strand
gauucaagcucuucuuacu

SEQ ID NO: 463562 - RNA, 19 nt, Homo sapiens
  misc_RNA (1)...(19): siRNA sense strand
ccaacgugcugcagggauu

SEQ ID NO: 463563 - RNA, 19 nt, Homo sapiens
  misc_RNA (1)...(19): siRNA sense strand
ccuggaagaugaugaagau

SEQ ID NO: 463564 - RNA, 19 nt, Homo sapiens
  misc_RNA (1)...(19): siRNA sense strand
gaaguaaucaaaccugucu

SEQ ID NO: 463565 - RNA, 19 nt, Homo sapiens
  misc_RNA (1)...(19): siRNA sense strand
gaagaggguggcacugaga

SEQ ID NO: 463566 - RNA, 19 nt, Homo sapiens
  misc_RNA (1)...(19): siRNA sense strand
caucaaacccggaccugaa

SEQ ID NO: 463567 - RNA, 19 nt, Homo sapiens
  misc_RNA (1)...(19): siRNA sense strand
acgagaagcucaucaacau

SEQ ID NO: 463568 - RNA, 19 nt, Homo sapiens
  misc_RNA (1)...(19): siRNA sense strand
ccagaggacugaucaagac

SEQ ID NO: 463569 - RNA, 19 nt, Homo sapiens
  misc_RNA (1)...(19): siRNA sense strand
ggugugagccugacgucua

SEQ ID NO: 463570 - RNA, 19 nt, Homo sapiens
  misc_RNA (1)...(19): siRNA sense strand
guacaaagggacaccaugu

SEQ ID NO: 463571 - RNA, 19 nt, Homo sapiens
  misc_RNA (1)...(19): siRNA sense strand
ggagggcguuaguggauca

SEQ ID NO: 463572 - RNA, 19 nt, Homo sapiens
  misc_RNA (1)...(19): siRNA sense strand
gggaucaaccucaaauuca

SEQ ID NO: 463573 - RNA, 19 nt, Homo sapiens
  misc_RNA (1)...(19): siRNA sense strand
gaugauaccucuuuugucu

SEQ ID NO: 463574 - RNA, 19 nt, Homo sapiens
  misc_RNA (1)...(19): siRNA sense strand
gaguccagcuguuaugauc

SEQ ID NO: 463575 - RNA, 19 nt, Homo sapiens
  misc_RNA (1)...(19): siRNA sense strand
ccagccagcucugaccuuu

SEQ ID NO: 463576 - RNA, 19 nt, Homo sapiens
  misc_RNA (1)...(19): siRNA sense strand
uaacaucggaacaguguau

SEQ ID NO: 463577 - RNA, 19 nt, Homo sapiens
  misc_RNA (1)...(19): siRNA sense strand
caaaggcuauggcacaacu

SEQ ID NO: 463578 - RNA, 19 nt, Homo sapiens
  misc_RNA (1)...(19): siRNA sense strand
ggaagagaaguccaacaga

SEQ ID NO: 463579 - RNA, 19 nt, Homo sapiens
  misc_RNA (1)...(19): siRNA sense strand
gguguacaagggaauguua

SEQ ID NO: 463580 - RNA, 19 nt, Homo sapiens
  misc_RNA (1)...(19): siRNA sense strand
ccacggagccaacucugaa

SEQ ID NO: 463581 - RNA, 19 nt, Homo sapiens
  misc_RNA (1)...(19): siRNA sense strand
uugacgagcugcagaauca

SEQ ID NO: 463582 - RNA, 19 nt, Homo sapiens
  misc_RNA (1)...(19): siRNA sense strand
gaauucaacccacucaucu

SEQ ID NO: 463583 - RNA, 19 nt, Homo sapiens
  misc_RNA (1)...(19): siRNA sense strand
cucaacaaguucuauacua

SEQ ID NO: 463584 - RNA, 19 nt, Homo sapiens
  misc_RNA (1)...(19): siRNA sense strand
gaaggugaggcgccuaaug

SEQ ID NO: 463585 - RNA, 19 nt, Homo sapiens
  misc_RNA (1)...(19): siRNA sense strand
aggaaaugaucgacaggua

SEQ ID NO: 463586 - RNA, 19 nt, Homo sapiens
  misc_RNA (1)...(19): siRNA sense strand
ccagaaguuuaaaggaaga

SEQ ID NO: 463587 - RNA, 19 nt, Homo sapiens
  misc_RNA (1)...(19): siRNA sense strand
gccagcaucuuugggcuuu

SEQ ID NO: 463588 - RNA, 19 nt, Homo sapiens
  misc_RNA (1)...(19): siRNA sense strand
guacaguccucagcuugga

SEQ ID NO: 463589 - RNA, 19 nt, Homo sapiens
  misc_RNA (1)...(19): siRNA sense strand
gugacaagccaaaguggua

SEQ ID NO: 463590 - RNA, 19 nt, Homo sapiens
  misc_RNA (1)...(19): siRNA sense strand
uggcggaucuuuacuggau

SEQ ID NO: 463591 - RNA, 19 nt, Homo sapiens
  misc_RNA (1)...(19): siRNA sense strand
gaagguaaauaagaaugac

SEQ ID NO: 463592 - RNA, 19 nt, Homo sapiens
  misc_RNA (1)...(19): siRNA sense strand
uggcaucuguguuaacuuc

SEQ ID NO: 463593 - RNA, 19 nt, Homo sapiens
  misc_RNA (1)...(19): siRNA sense strand
uguuagaccuccucaagug

SEQ ID NO: 463594 - RNA, 19 nt, Homo sapiens
  misc_RNA (1)...(19): siRNA sense strand
ccagacccaucucgauuca

SEQ ID NO: 463595 - RNA, 19 nt, Homo sapiens
  misc_RNA (1)...(19): siRNA sense strand
gucgggagcuguacuacug

SEQ ID NO: 463596 - RNA, 19 nt, Homo sapiens
  misc_RNA (1)...(19): siRNA sense strand
guaguaacaucggaacagu

SEQ ID NO: 463597 - RNA, 19 nt, Homo sapiens
  misc_RNA (1)...(19): siRNA sense strand
cgaauucacaacaauaugu

SEQ ID NO: 463598 - RNA, 19 nt, Homo sapiens
  misc_RNA (1)...(19): siRNA sense strand
cagcgaauucacaacaaua

SEQ ID NO: 463599 - RNA, 19 nt, Homo sapiens
  misc_RNA (1)...(19): siRNA sense strand
ucuacaaacuggacuucaa

SEQ ID NO: 463600 - RNA, 19 nt, Homo sapiens
  misc_RNA (1)...(19): siRNA sense strand
uacaaacggagauaucuuu

SEQ ID NO: 463601 - RNA, 19 nt, Homo sapiens
  misc_RNA (1)...(19): siRNA sense strand
ggaagggaucaaccucaaa

SEQ ID NO: 463602 - RNA, 19 nt, Homo sapiens
  misc_RNA (1)...(19): siRNA sense strand
ugugugguguugcguagua

SEQ ID NO: 463603 - RNA, 19 nt, Homo sapiens
  misc_RNA (1)...(19): siRNA sense strand
gaagucaucugucauuaaa

SEQ ID NO: 463604 - RNA, 19 nt, Homo sapiens
  misc_RNA (1)...(19): siRNA sense strand
gaagagaaguccaacagaa

SEQ ID NO: 463605 - RNA, 19 nt, Homo sapiens
  misc_RNA (1)...(19): siRNA sense strand
gaaguucuguccucgguua

SEQ ID NO: 463606 - RNA, 19 nt, Homo sapiens
  misc_RNA (1)...(19): siRNA sense strand
cuacggagauggaugauaa

SEQ ID NO: 463607 - RNA, 19 nt, Homo sapiens
  misc_RNA (1)...(19): siRNA sense strand
gcagugauaguauggauua

SEQ ID NO: 463608 - RNA, 19 nt, Homo sapiens
  misc_RNA (1)...(19): siRNA sense strand
ggaagcgccuggaagauga

SEQ ID NO: 463609 - RNA, 19 nt, Homo sapiens
  misc_RNA (1)...(19): siRNA sense strand
caagugcccuucugcauga

SEQ ID NO: 463610 - RNA, 19 nt, Homo sapiens
  misc_RNA (1)...(19): siRNA sense strand
ggacagacgucaggcagaa

SEQ ID NO: 463611 - RNA, 19 nt, Homo sapiens
  misc_RNA (1)...(19): siRNA sense strand
caaaaugccugaugaugua

SEQ ID NO: 463612 - RNA, 19 nt, Homo sapiens
  misc_RNA (1)...(19): siRNA sense strand
aaacacagcccaacaguga

SEQ ID NO: 463613 - RNA, 19 nt, Homo sapiens
  misc_RNA (1)...(19): siRNA sense strand
gaaaucugcuacuccguau

SEQ ID NO: 463614 - RNA, 19 nt, Homo sapiens
  misc_RNA (1)...(19): siRNA sense strand
ucagugaaaugaugaaaug

SEQ ID NO: 463615 - RNA, 19 nt, Homo sapiens
  misc_RNA (1)...(19): siRNA sense strand
cgauauggcaucuguguua

SEQ ID NO: 463616 - RNA, 19 nt, Homo sapiens
  misc_RNA (1)...(19): siRNA sense strand
gugauaguauggauuauga

SEQ ID NO: 463617 - RNA, 19 nt, Homo sapiens
  misc_RNA (1)...(19): siRNA sense strand
gaugauaguggcagugaua

SEQ ID NO: 463618 - RNA, 19 nt, Homo sapiens
  misc_RNA (1)...(19): siRNA sense strand
ccacugcgcuccagcucua

SEQ ID NO: 463619 - RNA, 19 nt, Homo sapiens
  misc_RNA (1)...(19): siRNA sense strand
gugaaaugaugaaauguga

SEQ ID NO: 463620 - RNA, 19 nt, Homo sapiens
  misc_RNA (1)...(19): siRNA sense strand
ggacagcaauagggugauu

SEQ ID NO: 463621 - RNA, 19 nt, Homo sapiens
  misc_RNA (1)...(19): siRNA sense strand
gcaaaucaaugaggugcuu

SEQ ID NO: 463622 - RNA, 19 nt, Homo sapiens
  misc_RNA (1)...(19): siRNA sense strand
caccagaaguuuaaaggaa

SEQ ID NO: 463623 - RNA, 19 nt, Homo sapiens
  misc_RNA (1)...(19): siRNA sense strand
gauauggcaucuguguuaa

SEQ ID NO: 463624 - RNA, 19 nt, Homo sapiens
  misc_RNA (1)...(19): siRNA sense strand
uauuaugucucuucucgua

SEQ ID NO: 463625 - RNA, 19 nt, Homo sapiens
  misc_RNA (1)...(19): siRNA sense strand
caacagaaaguguaaauac

SEQ ID NO: 463626 - RNA, 19 nt, Homo sapiens
  misc_RNA (1)...(19): siRNA sense strand
caagcuggcuccuuucuag

SEQ ID NO: 463627 - RNA, 19 nt, Homo sapiens
  misc_RNA (1)...(19): siRNA sense strand
gugcuaaccugcauucugu

SEQ ID NO: 463628 - RNA, 19 nt, Homo sapiens
  misc_RNA (1)...(19): siRNA sense strand
gauaguggcagugauagua

SEQ ID NO: 463629 - RNA, 19 nt, Homo sapiens
  misc_RNA (1)...(19): siRNA sense strand
guacguggcugcaguucau

SEQ ID NO: 463630 - RNA, 19 nt, Homo sapiens
  misc_RNA (1)...(19): siRNA sense strand
ucaaauucaugcacaauca

SEQ ID NO: 463631 - RNA, 19 nt, Homo sapiens
  misc_RNA (1)...(19): siRNA sense strand
agacccagcucaacaaguu

SEQ ID NO: 463632 - RNA, 19 nt, Homo sapiens
  misc_RNA (1)...(19): siRNA sense strand
ccagcgagguggagauuga

SEQ ID NO: 463633 - RNA, 19 nt, Homo sapiens
  misc_RNA (1)...(19): siRNA sense strand
gagcuguacuacuguguga

SEQ ID NO: 463634 - RNA, 19 nt, Homo sapiens
  misc_RNA (1)...(19): siRNA sense strand
guacaugcagggacagaua

SEQ ID NO: 463635 - RNA, 19 nt, Homo sapiens
  misc_RNA (1)...(19): siRNA sense strand
gaagcagacauuuguggua

SEQ ID NO: 463636 - RNA, 19 nt, Homo sapiens
  misc_RNA (1)...(19): siRNA sense strand
gcucugaccuuugcucuuc

SEQ ID NO: 463637 - RNA, 19 nt, Homo sapiens
  misc_RNA (1)...(19): siRNA sense strand
gagaagggauggguaugga

SEQ ID NO: 463638 - RNA, 19 nt, Homo sapiens
  misc_RNA (1)...(19): siRNA sense strand
ugaauuggguggcgaguuc

SEQ ID NO: 463639 - RNA, 19 nt, Homo sapiens
  misc_RNA (1)...(19): siRNA sense strand
agacgaagguguugugcuu

SEQ ID NO: 463640 - RNA, 19 nt, Homo sapiens
  misc_RNA (1)...(19): siRNA sense strand
ugaagaagcagacauuugu

SEQ ID NO: 463641 - RNA, 19 nt, Homo sapiens
  misc_RNA (1)...(19): siRNA sense strand
gaagggaucaaccucaaau

SEQ ID NO: 463642 - RNA, 19 nt, Homo sapiens
  misc_RNA (1)...(19): siRNA sense strand
gcaugagccuucgggauga

SEQ ID NO: 463643 - RNA, 19 nt, Homo sapiens
  misc_RNA (1)...(19): siRNA sense strand
ggaucaaccucaaauucau

SEQ ID NO: 463644 - RNA, 19 nt, Homo sapiens
  misc_RNA (1)...(19): siRNA sense strand
gaaaugaugaaaugugaca

SEQ ID NO: 463645 - RNA, 19 nt, Homo sapiens
  misc_RNA (1)...(19): siRNA sense strand
cagaaucacuagagcugaa

SEQ ID NO: 463646 - RNA, 19 nt, Homo sapiens
  misc_RNA (1)...(19): siRNA sense strand
gcaucuguguuaacuucua

SEQ ID NO: 463647 - RNA, 19 nt, Homo sapiens
  misc_RNA (1)...(19): siRNA sense strand
acacuggagucacgcgaua

SEQ ID NO: 463648 - RNA, 19 nt, Homo sapiens
  misc_RNA (1)...(19): siRNA sense strand
ggcccagacuccugaauug

SEQ ID NO: 463649 - RNA, 19 nt, Homo sapiens
  misc_RNA (1)...(19): siRNA sense strand
ggacugaucaagacucugu

SEQ ID NO: 463650 - RNA, 19 nt, Homo sapiens
  misc_RNA (1)...(19): siRNA sense strand
aguaccagcuucagucuuu

SEQ ID NO: 463651 - RNA, 19 nt, Homo sapiens
  misc_RNA (1)...(19): siRNA sense strand
gcaugaccuucgagagauu

SEQ ID NO: 463652 - RNA, 19 nt, Homo sapiens
  misc_RNA (1)...(19): siRNA sense strand
aaucugcuacuccguauua

SEQ ID NO: 463653 - RNA, 19 nt, Homo sapiens
  misc_RNA (1)...(19): siRNA sense strand
gcccagacccacuacuaua

SEQ ID NO: 463654 - RNA, 19 nt, Homo sapiens
  misc_RNA (1)...(19): siRNA sense strand
cagggucgauccagcaauu

SEQ ID NO: 463655 - RNA, 19 nt, Homo sapiens
  misc_RNA (1)...(19): siRNA sense strand
gaaaagagaaccuccauca

SEQ ID NO: 463656 - RNA, 19 nt, Homo sapiens
  misc_RNA (1)...(19): siRNA sense strand
gauucacccuaguggauuu

SEQ ID NO: 463657 - RNA, 19 nt, Homo sapiens
  misc_RNA (1)...(19): siRNA sense strand
ccagacuccugaauugcua

SEQ ID NO: 463658 - RNA, 19 nt, Homo sapiens
  misc_RNA (1)...(19): siRNA sense strand
agaaugacauccgcaagaa

SEQ ID NO: 463659 - RNA, 19 nt, Homo sapiens
  misc_RNA (1)...(19): siRNA sense strand
cuucuuagaugcugugaug

SEQ ID NO: 463660 - RNA, 19 nt, Homo sapiens
  misc_RNA (1)...(19): siRNA sense strand
gagcagcaaugcaggugau

SEQ ID NO: 463661 - RNA, 19 nt, Homo sapiens
  misc_RNA (1)...(19): siRNA sense strand
gauucaagcucuucuuacu

SEQ ID NO: 463662 - RNA, 19 nt, Homo sapiens
  misc_RNA (1)...(19): siRNA sense strand
ccaacgugcugcagggauu

SEQ ID NO: 463663 - RNA, 19 nt, Homo sapiens
  misc_RNA (1)...(19): siRNA sense strand
ccuggaagaugaugaagau

SEQ ID NO: 463664 - RNA, 19 nt, Homo sapiens
  misc_RNA (1)...(19): siRNA sense strand
gaaguaaucaaaccugucu

SEQ ID NO: 463665 - RNA, 19 nt, Homo sapiens
  misc_RNA (1)...(19): siRNA sense strand
gaagaggguggcacugaga

SEQ ID NO: 463666 - RNA, 19 nt, Homo sapiens
  misc_RNA (1)...(19): siRNA sense strand
caucaaacccggaccugaa

SEQ ID NO: 463667 - RNA, 19 nt, Homo sapiens
  misc_RNA (1)...(19): siRNA sense strand
acgagaagcucaucaacau

SEQ ID NO: 463668 - RNA, 19 nt, Homo sapiens
  misc_RNA (1)...(19): siRNA sense strand
ccagaggacugaucaagac

SEQ ID NO: 463669 - RNA, 19 nt, Homo sapiens
  misc_RNA (1)...(19): siRNA sense strand
ggugugagccugacgucua

SEQ ID NO: 463670 - RNA, 19 nt, Homo sapiens
  misc_RNA (1)...(19): siRNA sense strand
guacaaagggacaccaugu

SEQ ID NO: 463671 - RNA, 19 nt, Homo sapiens
  misc_RNA (1)...(19): siRNA sense strand
ggagggcguuaguggauca

SEQ ID NO: 463672 - RNA, 19 nt, Homo sapiens
  misc_RNA (1)...(19): siRNA sense strand
gggaucaaccucaaauuca

SEQ ID NO: 463673 - RNA, 19 nt, Homo sapiens
  misc_RNA (1)...(19): siRNA sense strand
gaugauaccucuuuugucu

SEQ ID NO: 463674 - RNA, 19 nt, Homo sapiens
  misc_RNA (1)...(19): siRNA sense strand
gaguccagcuguuaugauc

SEQ ID NO: 463675 - RNA, 19 nt, Homo sapiens
  misc_RNA (1)...(19): siRNA sense strand
ccagccagcucugaccuuu

SEQ ID NO: 463676 - RNA, 19 nt, Homo sapiens
  misc_RNA (1)...(19): siRNA sense strand
uaacaucggaacaguguau

SEQ ID NO: 463677 - RNA, 19 nt, Homo sapiens
  misc_RNA (1)...(19): siRNA sense strand
caaaggcuauggcacaacu

SEQ ID NO: 463678 - RNA, 19 nt, Homo sapiens
  misc_RNA (1)...(19): siRNA sense strand
ggaagagaaguccaacaga

SEQ ID NO: 463679 - RNA, 19 nt, Homo sapiens
  misc_RNA (1)...(19): siRNA sense strand
gguguacaagggaauguua

SEQ ID NO: 463680 - RNA, 19 nt, Homo sapiens
  misc_RNA (1)...(19): siRNA sense strand
ccacggagccaacucugaa

SEQ ID NO: 463681 - RNA, 19 nt, Homo sapiens
  misc_RNA (1)...(19): siRNA sense strand
uugacgagcugcagaauca

SEQ ID NO: 463682 - RNA, 19 nt, Homo sapiens
  misc_RNA (1)...(19): siRNA sense strand
gaauucaacccacucaucu

SEQ ID NO: 463683 - RNA, 19 nt, Homo sapiens
  misc_RNA (1)...(19): siRNA sense strand
cucaacaaguucuauacua

SEQ ID NO: 463684 - RNA, 19 nt, Homo sapiens
  misc_RNA (1)...(19): siRNA sense strand
gaaggugaggcgccuaaug

SEQ ID NO: 463685 - RNA, 19 nt, Homo sapiens
  misc_RNA (1)...(19): siRNA sense strand
aggaaaugaucgacaggua

SEQ ID NO: 463686 - RNA, 19 nt, Homo sapiens
  misc_RNA (1)...(19): siRNA sense strand
ccagaaguuuaaaggaaga

SEQ ID NO: 463687 - RNA, 19 nt, Homo sapiens
  misc_RNA (1)...(19): siRNA sense strand
gccagcaucuuugggcuuu

SEQ ID NO: 463688 - RNA, 19 nt, Homo sapiens
  misc_RNA (1)...(19): siRNA sense strand
guacaguccucagcuugga

SEQ ID NO: 463689 - RNA, 19 nt, Homo sapiens
  misc_RNA (1)...(19): siRNA sense strand
gugacaagccaaaguggua

SEQ ID NO: 463690 - RNA, 19 nt, Homo sapiens
  misc_RNA (1)...(19): siRNA sense strand
uggcggaucuuuacuggau

SEQ ID NO: 463691 - RNA, 19 nt, Homo sapiens
  misc_RNA (1)...(19): siRNA sense strand
gaagguaaauaagaaugac

SEQ ID NO: 463692 - RNA, 19 nt, Homo sapiens
  misc_RNA (1)...(19): siRNA sense strand
uggcaucuguguuaacuuc

SEQ ID NO: 463693 - RNA, 19 nt, Homo sapiens
  misc_RNA (1)...(19): siRNA sense strand
uguuagaccuccucaagug

SEQ ID NO: 463694 - RNA, 19 nt, Homo sapiens
  misc_RNA (1)...(19): siRNA sense strand
ccagacccaucucgauuca

SEQ ID NO: 463695 - RNA, 19 nt, Homo sapiens
  misc_RNA (1)...(19): siRNA sense strand
gucgggagcuguacuacug

SEQ ID NO: 463696 - RNA, 19 nt, Homo sapiens
  misc_RNA (1)...(19): siRNA sense strand
guaguaacaucggaacagu

SEQ ID NO: 463697 - RNA, 19 nt, Homo sapiens
  misc_RNA (1)...(19): siRNA sense strand
cgaauucacaacaauaugu

SEQ ID NO: 463698 - RNA, 19 nt, Homo sapiens
  misc_RNA (1)...(19): siRNA sense strand
cagcgaauucacaacaaua

SEQ ID NO: 463699 - RNA, 19 nt, Homo sapiens
  misc_RNA (1)...(19): siRNA sense strand
ucuacaaacuggacuucaa

SEQ ID NO: 463700 - RNA, 19 nt, Homo sapiens
  misc_RNA (1)...(19): siRNA sense strand
uacaaacggagauaucuuu

SEQ ID NO: 463701 - RNA, 19 nt, Homo sapiens
  misc_RNA (1)...(19): siRNA sense strand
ggaagggaucaaccucaaa

SEQ ID NO: 463702 - RNA, 19 nt, Homo sapiens
  misc_RNA (1)...(19): siRNA sense strand
ugugugguguugcguagua

SEQ ID NO: 463703 - RNA, 19 nt, Homo sapiens
  misc_RNA (1)...(19): siRNA sense strand
gaagucaucugucauuaaa

SEQ ID NO: 463704 - RNA, 19 nt, Homo sapiens
  misc_RNA (1)...(19): siRNA sense strand
gaagagaaguccaacagaa

SEQ ID NO: 463705 - RNA, 19 nt, Homo sapiens
  misc_RNA (1)...(19): siRNA sense strand
gaaguucuguccucgguua

SEQ ID NO: 463706 - RNA, 19 nt, Homo sapiens
  misc_RNA (1)...(19): siRNA sense strand
cuacggagauggaugauaa

SEQ ID NO: 463707 - RNA, 19 nt, Homo sapiens
  misc_RNA (1)...(19): siRNA sense strand
gcagugauaguauggauua

SEQ ID NO: 463708 - RNA, 19 nt, Homo sapiens
  misc_RNA (1)...(19): siRNA sense strand
ggaagcgccuggaagauga

SEQ ID NO: 463709 - RNA, 19 nt, Homo sapiens
  misc_RNA (1)...(19): siRNA sense strand
caagugcccuucugcauga

SEQ ID NO: 463710 - RNA, 19 nt, Homo sapiens
  misc_RNA (1)...(19): siRNA sense strand
ggacagacgucaggcagaa

SEQ ID NO: 463711 - RNA, 19 nt, Homo sapiens
  misc_RNA (1)...(19): siRNA sense strand
caaaaugccugaugaugua

SEQ ID NO: 463712 - RNA, 19 nt, Homo sapiens
  misc_RNA (1)...(19): siRNA sense strand
aaacacagcccaacaguga

SEQ ID NO: 463713 - RNA, 19 nt, Homo sapiens
  misc_RNA (1)...(19): siRNA sense strand
gaaaucugcuacuccguau

SEQ ID NO: 463714 - RNA, 19 nt, Homo sapiens
  misc_RNA (1)...(19): siRNA sense strand
ucagugaaaugaugaaaug

SEQ ID NO: 463715 - RNA, 19 nt, Homo sapiens
  misc_RNA (1)...(19): siRNA sense strand
cgauauggcaucuguguua

SEQ ID NO: 463716 - RNA, 19 nt, Homo sapiens
  misc_RNA (1)...(19): siRNA sense strand
gugauaguauggauuauga

SEQ ID NO: 463717 - RNA, 19 nt, Homo sapiens
  misc_RNA (1)...(19): siRNA sense strand
gaugauaguggcagugaua

SEQ ID NO: 463718 - RNA, 19 nt, Homo sapiens
  misc_RNA (1)...(19): siRNA sense strand
ccacugcgcuccagcucua

SEQ ID NO: 463719 - RNA, 19 nt, Homo sapiens
  misc_RNA (1)...(19): siRNA sense strand
gugaaaugaugaaauguga

SEQ ID NO: 463720 - RNA, 19 nt, Homo sapiens
  misc_RNA (1)...(19): siRNA sense strand
ggacagcaauagggugauu

SEQ ID NO: 463721 - RNA, 19 nt, Homo sapiens
  misc_RNA (1)...(19): siRNA sense strand
gcaaaucaaugaggugcuu

SEQ ID NO: 463722 - RNA, 19 nt, Homo sapiens
  misc_RNA (1)...(19): siRNA sense strand
caccagaaguuuaaaggaa

SEQ ID NO: 463723 - RNA, 19 nt, Homo sapiens
  misc_RNA (1)...(19): siRNA sense strand
gauauggcaucuguguuaa

SEQ ID NO: 463724 - RNA, 19 nt, Homo sapiens
  misc_RNA (1)...(19): siRNA sense strand
uauuaugucucuucucgua

SEQ ID NO: 463725 - RNA, 19 nt, Homo sapiens
  misc_RNA (1)...(19): siRNA sense strand
caacagaaaguguaaauac

SEQ ID NO: 463726 - RNA, 19 nt, Homo sapiens
  misc_RNA (1)...(19): siRNA sense strand
caagcuggcuccuuucuag

SEQ ID NO: 463727 - RNA, 19 nt, Homo sapiens
  misc_RNA (1)...(19): siRNA sense strand
gugcuaaccugcauucugu

SEQ ID NO: 463728 - RNA, 19 nt, Homo sapiens
  misc_RNA (1)...(19): siRNA sense strand
gauaguggcagugauagua

SEQ ID NO: 463729 - RNA, 19 nt, Homo sapiens
  misc_RNA (1)...(19): siRNA sense strand
guacguggcugcaguucau

SEQ ID NO: 463730 - RNA, 19 nt, Homo sapiens
  misc_RNA (1)...(19): siRNA sense strand
ucaaauucaugcacaauca

SEQ ID NO: 463731 - RNA, 19 nt, Homo sapiens
  misc_RNA (1)...(19): siRNA sense strand
agacccagcucaacaaguu

SEQ ID NO: 463732 - RNA, 19 nt, Homo sapiens
  misc_RNA (1)...(19): siRNA sense strand
ccagcgagguggagauuga

SEQ ID NO: 463733 - RNA, 19 nt, Homo sapiens
  misc_RNA (1)...(19): siRNA sense strand
gagcuguacuacuguguga

SEQ ID NO: 463734 - RNA, 19 nt, Homo sapiens
  misc_RNA (1)...(19): siRNA sense strand
guacaugcagggacagaua

SEQ ID NO: 463735 - RNA, 19 nt, Homo sapiens
  misc_RNA (1)...(19): siRNA sense strand
gaagcagacauuuguggua

SEQ ID NO: 463736 - RNA, 19 nt, Homo sapiens
  misc_RNA (1)...(19): siRNA sense strand
gcucugaccuuugcucuuc

SEQ ID NO: 463737 - RNA, 19 nt, Homo sapiens
  misc_RNA (1)...(19): siRNA sense strand
gagaagggauggguaugga

SEQ ID NO: 463738 - RNA, 19 nt, Homo sapiens
  misc_RNA (1)...(19): siRNA sense strand
ugaauuggguggcgaguuc

SEQ ID NO: 463739 - RNA, 19 nt, Homo sapiens
  misc_RNA (1)...(19): siRNA sense strand
agacgaagguguugugcuu

SEQ ID NO: 463740 - RNA, 19 nt, Homo sapiens
  misc_RNA (1)...(19): siRNA sense strand
ugaagaagcagacauuugu

SEQ ID NO: 463741 - RNA, 19 nt, Homo sapiens
  misc_RNA (1)...(19): siRNA sense strand
gaagggaucaaccucaaau

SEQ ID NO: 463742 - RNA, 19 nt, Homo sapiens
  misc_RNA (1)...(19): siRNA sense strand
gcaugagccuucgggauga

SEQ ID NO: 463743 - RNA, 19 nt, Homo sapiens
  misc_RNA (1)...(19): siRNA sense strand
ggaucaaccucaaauucau

SEQ ID NO: 463744 - RNA, 19 nt, Homo sapiens
  misc_RNA (1)...(19): siRNA sense strand
gaaaugaugaaaugugaca

SEQ ID NO: 463745 - RNA, 19 nt, Homo sapiens
  misc_RNA (1)...(19): siRNA sense strand
cagaaucacuagagcugaa

SEQ ID NO: 463746 - RNA, 19 nt, Homo sapiens
  misc_RNA (1)...(19): siRNA sense strand
gcaucuguguuaacuucua

SEQ ID NO: 463747 - RNA, 19 nt, Homo sapiens
  misc_RNA (1)...(19): siRNA sense strand
acacuggagucacgcgaua

SEQ ID NO: 463748 - RNA, 19 nt, Homo sapiens
  misc_RNA (1)...(19): siRNA sense strand
ggcccagacuccugaauug

SEQ ID NO: 463749 - RNA, 19 nt, Homo sapiens
  misc_RNA (1)...(19): siRNA sense strand
ggacugaucaagacucugu

SEQ ID NO: 463750 - RNA, 19 nt, Homo sapiens
  misc_RNA (1)...(19): siRNA sense strand
aguaccagcuucagucuuu

SEQ ID NO: 463751 - RNA, 19 nt, Homo sapiens
  misc_RNA (1)...(19): siRNA sense strand
gcaugaccuucgagagauu

SEQ ID NO: 463752 - RNA, 19 nt, Homo sapiens
  misc_RNA (1)...(19): siRNA sense strand
aaucugcuacuccguauua

SEQ ID NO: 463753 - RNA, 19 nt, Homo sapiens
  misc_RNA (1)...(19): siRNA sense strand
gcccagacccacuacuaua

SEQ ID NO: 463754 - RNA, 19 nt, Homo sapiens
  misc_RNA (1)...(19): siRNA sense strand
cagggucgauccagcaauu

SEQ ID NO: 463755 - RNA, 19 nt, Homo sapiens
  misc_RNA (1)...(19): siRNA sense strand
gaaaagagaaccuccauca

SEQ ID NO: 463756 - RNA, 19 nt, Homo sapiens
  misc_RNA (1)...(19): siRNA sense strand
gauucacccuaguggauuu

SEQ ID NO: 463757 - RNA, 19 nt, Homo sapiens
  misc_RNA (1)...(19): siRNA sense strand
ccagacuccugaauugcua

SEQ ID NO: 463758 - RNA, 19 nt, Homo sapiens
  misc_RNA (1)...(19): siRNA sense strand
agaaugacauccgcaagaa

SEQ ID NO: 463759 - RNA, 19 nt, Homo sapiens
  misc_RNA (1)...(19): siRNA sense strand
cuucuuagaugcugugaug

SEQ ID NO: 463760 - RNA, 19 nt, Homo sapiens
  misc_RNA (1)...(19): siRNA sense strand
gagcagcaaugcaggugau

SEQ ID NO: 463761 - RNA, 19 nt, Homo sapiens
  misc_RNA (1)...(19): siRNA sense strand
gauucaagcucuucuuacu

SEQ ID NO: 463762 - RNA, 19 nt, Homo sapiens
  misc_RNA (1)...(19): siRNA sense strand
ccaacgugcugcagggauu

SEQ ID NO: 463763 - RNA, 19 nt, Homo sapiens
  misc_RNA (1)...(19): siRNA sense strand
ccuggaagaugaugaagau

SEQ ID NO: 463764 - RNA, 19 nt, Homo sapiens
  misc_RNA (1)...(19): siRNA sense strand
gaaguaaucaaaccugucu

SEQ ID NO: 463765 - RNA, 19 nt, Homo sapiens
  misc_RNA (1)...(19): siRNA sense strand
gaagaggguggcacugaga

SEQ ID NO: 463766 - RNA, 19 nt, Homo sapiens
  misc_RNA (1)...(19): siRNA sense strand
caucaaacccggaccugaa

SEQ ID NO: 463767 - RNA, 19 nt, Homo sapiens
  misc_RNA (1)...(19): siRNA sense strand
acgagaagcucaucaacau

SEQ ID NO: 463768 - RNA, 19 nt, Homo sapiens
  misc_RNA (1)...(19): siRNA sense strand
ccagaggacugaucaagac

SEQ ID NO: 463769 - RNA, 19 nt, Homo sapiens
  misc_RNA (1)...(19): siRNA sense strand
ggugugagccugacgucua

SEQ ID NO: 463770 - RNA, 19 nt, Homo sapiens
  misc_RNA (1)...(19): siRNA sense strand
guacaaagggacaccaugu

SEQ ID NO: 463771 - RNA, 19 nt, Homo sapiens
  misc_RNA (1)...(19): siRNA sense strand
ggagggcguuaguggauca

SEQ ID NO: 463772 - RNA, 19 nt, Homo sapiens
  misc_RNA (1)...(19): siRNA sense strand
gggaucaaccucaaauuca

SEQ ID NO: 463773 - RNA, 19 nt, Homo sapiens
  misc_RNA (1)...(19): siRNA sense strand
gaugauaccucuuuugucu

SEQ ID NO: 463774 - RNA, 19 nt, Homo sapiens
  misc_RNA (1)...(19): siRNA sense strand
gaguccagcuguuaugauc

SEQ ID NO: 463775 - RNA, 19 nt, Homo sapiens
  misc_RNA (1)...(19): siRNA sense strand
ccagccagcucugaccuuu

SEQ ID NO: 463776 - RNA, 19 nt, Homo sapiens
  misc_RNA (1)...(19): siRNA sense strand
uaacaucggaacaguguau

SEQ ID NO: 463777 - RNA, 19 nt, Homo sapiens
  misc_RNA (1)...(19): siRNA sense strand
caaaggcuauggcacaacu

SEQ ID NO: 463778 - RNA, 19 nt, Homo sapiens
  misc_RNA (1)...(19): siRNA sense strand
ggaagagaaguccaacaga

SEQ ID NO: 463779 - RNA, 19 nt, Homo sapiens
  misc_RNA (1)...(19): siRNA sense strand
gguguacaagggaauguua

SEQ ID NO: 463780 - RNA, 19 nt, Homo sapiens
  misc_RNA (1)...(19): siRNA sense strand
ccacggagccaacucugaa

SEQ ID NO: 463781 - RNA, 19 nt, Homo sapiens
  misc_RNA (1)...(19): siRNA sense strand
uugacgagcugcagaauca

SEQ ID NO: 463782 - RNA, 19 nt, Homo sapiens
  misc_RNA (1)...(19): siRNA sense strand
gaauucaacccacucaucu

SEQ ID NO: 463783 - RNA, 19 nt, Homo sapiens
  misc_RNA (1)...(19): siRNA sense strand
cucaacaaguucuauacua

SEQ ID NO: 463784 - RNA, 19 nt, Homo sapiens
  misc_RNA (1)...(19): siRNA sense strand
gaaggugaggcgccuaaug

SEQ ID NO: 463785 - RNA, 19 nt, Homo sapiens
  misc_RNA (1)...(19): siRNA sense strand
aggaaaugaucgacaggua

SEQ ID NO: 463786 - RNA, 19 nt, Homo sapiens
  misc_RNA (1)...(19): siRNA sense strand
ccagaaguuuaaaggaaga

SEQ ID NO: 463787 - RNA, 19 nt, Homo sapiens
  misc_RNA (1)...(19): siRNA sense strand
gccagcaucuuugggcuuu

SEQ ID NO: 463788 - RNA, 19 nt, Homo sapiens
  misc_RNA (1)...(19): siRNA sense strand
guacaguccucagcuugga

SEQ ID NO: 463789 - RNA, 19 nt, Homo sapiens
  misc_RNA (1)...(19): siRNA sense strand
gugacaagccaaaguggua

SEQ ID NO: 463790 - RNA, 19 nt, Homo sapiens
  misc_RNA (1)...(19): siRNA sense strand
uggcggaucuuuacuggau

SEQ ID NO: 463791 - RNA, 19 nt, Homo sapiens
  misc_RNA (1)...(19): siRNA sense strand
gaagguaaauaagaaugac

SEQ ID NO: 463792 - RNA, 19 nt, Homo sapiens
  misc_RNA (1)...(19): siRNA sense strand
uggcaucuguguuaacuuc

SEQ ID NO: 463793 - RNA, 19 nt, Homo sapiens
  misc_RNA (1)...(19): siRNA sense strand
uguuagaccuccucaagug

SEQ ID NO: 463794 - RNA, 19 nt, Homo sapiens
  misc_RNA (1)...(19): siRNA sense strand
ccagacccaucucgauuca

SEQ ID NO: 463795 - RNA, 19 nt, Homo sapiens
  misc_RNA (1)...(19): siRNA sense strand
gucgggagcuguacuacug

SEQ ID NO: 463796 - RNA, 19 nt, Homo sapiens
  misc_RNA (1)...(19): siRNA sense strand
guaguaacaucggaacagu

SEQ ID NO: 463797 - RNA, 19 nt, Homo sapiens
  misc_RNA (1)...(19): siRNA sense strand
cgaauucacaacaauaugu

SEQ ID NO: 463798 - RNA, 19 nt, Homo sapiens
  misc_RNA (1)...(19): siRNA sense strand
cagcgaauucacaacaaua

SEQ ID NO: 463799 - RNA, 19 nt, Homo sapiens
  misc_RNA (1)...(19): siRNA sense strand
ucuacaaacuggacuucaa

SEQ ID NO: 463800 - RNA, 19 nt, Homo sapiens
  misc_RNA (1)...(19): siRNA sense strand
uacaaacggagauaucuuu

SEQ ID NO: 463801 - RNA, 19 nt, Homo sapiens
  misc_RNA (1)...(19): siRNA sense strand
ggaagggaucaaccucaaa

SEQ ID NO: 463802 - RNA, 19 nt, Homo sapiens
  misc_RNA (1)...(19): siRNA sense strand
ugugugguguugcguagua

SEQ ID NO: 463803 - RNA, 19 nt, Homo sapiens
  misc_RNA (1)...(19): siRNA sense strand
gaagucaucugucauuaaa

SEQ ID NO: 463804 - RNA, 19 nt, Homo sapiens
  misc_RNA (1)...(19): siRNA sense strand
gaagagaaguccaacagaa

SEQ ID NO: 463805 - RNA, 19 nt, Homo sapiens
  misc_RNA (1)...(19): siRNA sense strand
gaaguucuguccucgguua

SEQ ID NO: 463806 - RNA, 19 nt, Homo sapiens
  misc_RNA (1)...(19): siRNA sense strand
cuacggagauggaugauaa

SEQ ID NO: 463807 - RNA, 19 nt, Homo sapiens
  misc_RNA (1)...(19): siRNA sense strand
gcagugauaguauggauua

SEQ ID NO: 463808 - RNA, 19 nt, Homo sapiens
  misc_RNA (1)...(19): siRNA sense strand
ggaagcgccuggaagauga

SEQ ID NO: 463809 - RNA, 19 nt, Homo sapiens
  misc_RNA (1)...(19): siRNA sense strand
caagugcccuucugcauga

SEQ ID NO: 463810 - RNA, 19 nt, Homo sapiens
  misc_RNA (1)...(19): siRNA sense strand
ggacagacgucaggcagaa

SEQ ID NO: 463811 - RNA, 19 nt, Homo sapiens
  misc_RNA (1)...(19): siRNA sense strand
caaaaugccugaugaugua

SEQ ID NO: 463812 - RNA, 19 nt, Homo sapiens
  misc_RNA (1)...(19): siRNA sense strand
aaacacagcccaacaguga

SEQ ID NO: 463813 - RNA, 19 nt, Homo sapiens
  misc_RNA (1)...(19): siRNA sense strand
gaaaucugcuacuccguau

SEQ ID NO: 463814 - RNA, 19 nt, Homo sapiens
  misc_RNA (1)...(19): siRNA sense strand
ucagugaaaugaugaaaug

SEQ ID NO: 463815 - RNA, 19 nt, Homo sapiens
  misc_RNA (1)...(19): siRNA sense strand
cgauauggcaucuguguua

SEQ ID NO: 463816 - RNA, 19 nt, Homo sapiens
  misc_RNA (1)...(19): siRNA sense strand
gugauaguauggauuauga

SEQ ID NO: 463817 - RNA, 19 nt, Homo sapiens
  misc_RNA (1)...(19): siRNA sense strand
gaugauaguggcagugaua

SEQ ID NO: 463818 - RNA, 19 nt, Homo sapiens
  misc_RNA (1)...(19): siRNA sense strand
ccacugcgcuccagcucua

SEQ ID NO: 463819 - RNA, 19 nt, Homo sapiens
  misc_RNA (1)...(19): siRNA sense strand
gugaaaugaugaaauguga

SEQ ID NO: 463820 - RNA, 19 nt, Homo sapiens
  misc_RNA (1)...(19): siRNA sense strand
ggacagcaauagggugauu

SEQ ID NO: 463821 - RNA, 19 nt, Homo sapiens
  misc_RNA (1)...(19): siRNA sense strand
gcaaaucaaugaggugcuu

SEQ ID NO: 463822 - RNA, 19 nt, Homo sapiens
  misc_RNA (1)...(19): siRNA sense strand
caccagaaguuuaaaggaa

SEQ ID NO: 463823 - RNA, 19 nt, Homo sapiens
  misc_RNA (1)...(19): siRNA sense strand
gauauggcaucuguguuaa

SEQ ID NO: 463824 - RNA, 19 nt, Homo sapiens
  misc_RNA (1)...(19): siRNA sense strand
uauuaugucucuucucgua

SEQ ID NO: 463825 - RNA, 19 nt, Homo sapiens
  misc_RNA (1)...(19): siRNA sense strand
caacagaaaguguaaauac

SEQ ID NO: 463826 - RNA, 19 nt, Homo sapiens
  misc_RNA (1)...(19): siRNA sense strand
caagcuggcuccuuucuag

SEQ ID NO: 463827 - RNA, 19 nt, Homo sapiens
  misc_RNA (1)...(19): siRNA sense strand
gugcuaaccugcauucugu

SEQ ID NO: 463828 - RNA, 19 nt, Homo sapiens
  misc_RNA (1)...(19): siRNA sense strand
gauaguggcagugauagua

SEQ ID NO: 463829 - RNA, 19 nt, Homo sapiens
  misc_RNA (1)...(19): siRNA sense strand
guacguggcugcaguucau

SEQ ID NO: 463830 - RNA, 19 nt, Homo sapiens
  misc_RNA (1)...(19): siRNA sense strand
ucaaauucaugcacaauca

SEQ ID NO: 463831 - RNA, 19 nt, Homo sapiens
  misc_RNA (1)...(19): siRNA sense strand
agacccagcucaacaaguu

SEQ ID NO: 463832 - RNA, 19 nt, Homo sapiens
  misc_RNA (1)...(19): siRNA sense strand
ccagcgagguggagauuga

SEQ ID NO: 463833 - RNA, 19 nt, Homo sapiens
  misc_RNA (1)...(19): siRNA sense strand
gagcuguacuacuguguga

SEQ ID NO: 463834 - RNA, 19 nt, Homo sapiens
  misc_RNA (1)...(19): siRNA sense strand
guacaugcagggacagaua

SEQ ID NO: 463835 - RNA, 19 nt, Homo sapiens
  misc_RNA (1)...(19): siRNA sense strand
gaagcagacauuuguggua

SEQ ID NO: 463836 - RNA, 19 nt, Homo sapiens
  misc_RNA (1)...(19): siRNA sense strand
gcucugaccuuugcucuuc

SEQ ID NO: 463837 - RNA, 19 nt, Homo sapiens
  misc_RNA (1)...(19): siRNA sense strand
gagaagggauggguaugga

SEQ ID NO: 463838 - RNA, 19 nt, Homo sapiens
  misc_RNA (1)...(19): siRNA sense strand
ugaauuggguggcgaguuc

SEQ ID NO: 463839 - RNA, 19 nt, Homo sapiens
  misc_RNA (1)...(19): siRNA sense strand
agacgaagguguugugcuu

SEQ ID NO: 463840 - RNA, 19 nt, Homo sapiens
  misc_RNA (1)...(19): siRNA sense strand
ugaagaagcagacauuugu

SEQ ID NO: 463841 - RNA, 19 nt, Homo sapiens
  misc_RNA (1)...(19): siRNA sense strand
gaagggaucaaccucaaau

SEQ ID NO: 463842 - RNA, 19 nt, Homo sapiens
  misc_RNA (1)...(19): siRNA sense strand
gcaugagccuucgggauga

SEQ ID NO: 463843 - RNA, 19 nt, Homo sapiens
  misc_RNA (1)...(19): siRNA sense strand
ggaucaaccucaaauucau

SEQ ID NO: 463844 - RNA, 19 nt, Homo sapiens
  misc_RNA (1)...(19): siRNA sense strand
gaaaugaugaaaugugaca

SEQ ID NO: 463845 - RNA, 19 nt, Homo sapiens
  misc_RNA (1)...(19): siRNA sense strand
cagaaucacuagagcugaa

SEQ ID NO: 463846 - RNA, 19 nt, Homo sapiens
  misc_RNA (1)...(19): siRNA sense strand
gcaucuguguuaacuucua

SEQ ID NO: 463847 - RNA, 19 nt, Homo sapiens
  misc_RNA (1)...(19): siRNA sense strand
acacuggagucacgcgaua

SEQ ID NO: 463848 - RNA, 19 nt, Homo sapiens
  misc_RNA (1)...(19): siRNA sense strand
ggcccagacuccugaauug

SEQ ID NO: 463849 - RNA, 19 nt, Homo sapiens
  misc_RNA (1)...(19): siRNA sense strand
ggacugaucaagacucugu

SEQ ID NO: 463850 - RNA, 19 nt, Homo sapiens
  misc_RNA (1)...(19): siRNA sense strand
aguaccagcuucagucuuu

SEQ ID NO: 463851 - RNA, 19 nt, Homo sapiens
  misc_RNA (1)...(19): siRNA sense strand
gcaugaccuucgagagauu

SEQ ID NO: 463852 - RNA, 19 nt, Homo sapiens
  misc_RNA (1)...(19): siRNA sense strand
aaucugcuacuccguauua

SEQ ID NO: 463853 - RNA, 19 nt, Homo sapiens
  misc_RNA (1)...(19): siRNA sense strand
gcccagacccacuacuaua

SEQ ID NO: 463854 - RNA, 19 nt, Homo sapiens
  misc_RNA (1)...(19): siRNA sense strand
cagggucgauccagcaauu

SEQ ID NO: 463855 - RNA, 19 nt, Homo sapiens
  misc_RNA (1)...(19): siRNA sense strand
gaaaagagaaccuccauca

SEQ ID NO: 463856 - RNA, 19 nt, Homo sapiens
  misc_RNA (1)...(19): siRNA sense strand
gauucacccuaguggauuu

SEQ ID NO: 463857 - RNA, 19 nt, Homo sapiens
  misc_RNA (1)...(19): siRNA sense strand
ccagacuccugaauugcua

SEQ ID NO: 463858 - RNA, 19 nt, Homo sapiens
  misc_RNA (1)...(19): siRNA sense strand
agaaugacauccgcaagaa

SEQ ID NO: 463859 - RNA, 19 nt, Homo sapiens
  misc_RNA (1)...(19): siRNA sense strand
cuucuuagaugcugugaug

SEQ ID NO: 463860 - RNA, 19 nt, Homo sapiens
  misc_RNA (1)...(19): siRNA sense strand
gagcagcaaugcaggugau

SEQ ID NO: 463861 - RNA, 19 nt, Homo sapiens
  misc_RNA (1)...(19): siRNA sense strand
gauucaagcucuucuuacu

SEQ ID NO: 463862 - RNA, 19 nt, Homo sapiens
  misc_RNA (1)...(19): siRNA sense strand
ccaacgugcugcagggauu

SEQ ID NO: 463863 - RNA, 19 nt, Homo sapiens
  misc_RNA (1)...(19): siRNA sense strand
ccuggaagaugaugaagau

SEQ ID NO: 463864 - RNA, 19 nt, Homo sapiens
  misc_RNA (1)...(19): siRNA sense strand
gaaguaaucaaaccugucu

SEQ ID NO: 463865 - RNA, 19 nt, Homo sapiens
  misc_RNA (1)...(19): siRNA sense strand
gaagaggguggcacugaga

SEQ ID NO: 463866 - RNA, 19 nt, Homo sapiens
  misc_RNA (1)...(19): siRNA sense strand
caucaaacccggaccugaa

SEQ ID NO: 463867 - RNA, 19 nt, Homo sapiens
  misc_RNA (1)...(19): siRNA sense strand
acgagaagcucaucaacau

SEQ ID NO: 463868 - RNA, 19 nt, Homo sapiens
  misc_RNA (1)...(19): siRNA sense strand
ccagaggacugaucaagac

SEQ ID NO: 463869 - RNA, 19 nt, Homo sapiens
  misc_RNA (1)...(19): siRNA sense strand
ggugugagccugacgucua

SEQ ID NO: 463870 - RNA, 19 nt, Homo sapiens
  misc_RNA (1)...(19): siRNA sense strand
guacaaagggacaccaugu

SEQ ID NO: 463871 - RNA, 19 nt, Homo sapiens
  misc_RNA (1)...(19): siRNA sense strand
ggagggcguuaguggauca

SEQ ID NO: 463872 - RNA, 19 nt, Homo sapiens
  misc_RNA (1)...(19): siRNA sense strand
gggaucaaccucaaauuca

SEQ ID NO: 463873 - RNA, 19 nt, Homo sapiens
  misc_RNA (1)...(19): siRNA sense strand
gaugauaccucuuuugucu

SEQ ID NO: 463874 - RNA, 19 nt, Homo sapiens
  misc_RNA (1)...(19): siRNA sense strand
gaguccagcuguuaugauc

SEQ ID NO: 463875 - RNA, 19 nt, Homo sapiens
  misc_RNA (1)...(19): siRNA sense strand
ccagccagcucugaccuuu

SEQ ID NO: 463876 - RNA, 19 nt, Homo sapiens
  misc_RNA (1)...(19): siRNA sense strand
uaacaucggaacaguguau

SEQ ID NO: 463877 - RNA, 19 nt, Homo sapiens
  misc_RNA (1)...(19): siRNA sense strand
caaaggcuauggcacaacu

SEQ ID NO: 463878 - RNA, 19 nt, Homo sapiens
  misc_RNA (1)...(19): siRNA sense strand
ggaagagaaguccaacaga

SEQ ID NO: 463879 - RNA, 19 nt, Homo sapiens
  misc_RNA (1)...(19): siRNA sense strand
gguguacaagggaauguua

SEQ ID NO: 463880 - RNA, 19 nt, Homo sapiens
  misc_RNA (1)...(19): siRNA sense strand
ccacggagccaacucugaa

SEQ ID NO: 463881 - RNA, 19 nt, Homo sapiens
  misc_RNA (1)...(19): siRNA sense strand
uugacgagcugcagaauca

SEQ ID NO: 463882 - RNA, 19 nt, Homo sapiens
  misc_RNA (1)...(19): siRNA sense strand
gaauucaacccacucaucu

SEQ ID NO: 463883 - RNA, 19 nt, Homo sapiens
  misc_RNA (1)...(19): siRNA sense strand
cucaacaaguucuauacua

SEQ ID NO: 463884 - RNA, 19 nt, Homo sapiens
  misc_RNA (1)...(19): siRNA sense strand
gaaggugaggcgccuaaug

SEQ ID NO: 463885 - RNA, 19 nt, Homo sapiens
  misc_RNA (1)...(19): siRNA sense strand
aggaaaugaucgacaggua

SEQ ID NO: 463886 - RNA, 19 nt, Homo sapiens
  misc_RNA (1)...(19): siRNA sense strand
ccagaaguuuaaaggaaga

SEQ ID NO: 463887 - RNA, 19 nt, Homo sapiens
  misc_RNA (1)...(19): siRNA sense strand
gccagcaucuuugggcuuu

SEQ ID NO: 463888 - RNA, 19 nt, Homo sapiens
  misc_RNA (1)...(19): siRNA sense strand
guacaguccucagcuugga

SEQ ID NO: 463889 - RNA, 19 nt, Homo sapiens
  misc_RNA (1)...(19): siRNA sense strand
gugacaagccaaaguggua

SEQ ID NO: 463890 - RNA, 19 nt, Homo sapiens
  misc_RNA (1)...(19): siRNA sense strand
uggcggaucuuuacuggau

SEQ ID NO: 463891 - RNA, 19 nt, Homo sapiens
  misc_RNA (1)...(19): siRNA sense strand
gaagguaaauaagaaugac

SEQ ID NO: 463892 - RNA, 19 nt, Homo sapiens
  misc_RNA (1)...(19): siRNA sense strand
uggcaucuguguuaacuuc

SEQ ID NO: 463893 - RNA, 19 nt, Homo sapiens
  misc_RNA (1)...(19): siRNA sense strand
uguuagaccuccucaagug

SEQ ID NO: 463894 - RNA, 19 nt, Homo sapiens
  misc_RNA (1)...(19): siRNA sense strand
ccagacccaucucgauuca

SEQ ID NO: 463895 - RNA, 19 nt, Homo sapiens
  misc_RNA (1)...(19): siRNA sense strand
gucgggagcuguacuacug

SEQ ID NO: 463896 - RNA, 19 nt, Homo sapiens
  misc_RNA (1)...(19): siRNA sense strand
guaguaacaucggaacagu

SEQ ID NO: 463897 - RNA, 19 nt, Homo sapiens
  misc_RNA (1)...(19): siRNA sense strand
cgaauucacaacaauaugu

SEQ ID NO: 463898 - RNA, 19 nt, Homo sapiens
  misc_RNA (1)...(19): siRNA sense strand
cagcgaauucacaacaaua

SEQ ID NO: 463899 - RNA, 19 nt, Homo sapiens
  misc_RNA (1)...(19): siRNA sense strand
ucuacaaacuggacuucaa

SEQ ID NO: 463900 - RNA, 19 nt, Homo sapiens
  misc_RNA (1)...(19): siRNA sense strand
uacaaacggagauaucuuu

SEQ ID NO: 463901 - RNA, 19 nt, Homo sapiens
  misc_RNA (1)...(19): siRNA sense strand
ggaagggaucaaccucaaa

SEQ ID NO: 463902 - RNA, 19 nt, Homo sapiens
  misc_RNA (1)...(19): siRNA sense strand
ugugugguguugcguagua

SEQ ID NO: 463903 - RNA, 19 nt, Homo sapiens
  misc_RNA (1)...(19): siRNA sense strand
gaagucaucugucauuaaa

SEQ ID NO: 463904 - RNA, 19 nt, Homo sapiens
  misc_RNA (1)...(19): siRNA sense strand
gaagagaaguccaacagaa

SEQ ID NO: 463905 - RNA, 19 nt, Homo sapiens
  misc_RNA (1)...(19): siRNA sense strand
gaaguucuguccucgguua

SEQ ID NO: 463906 - RNA, 19 nt, Homo sapiens
  misc_RNA (1)...(19): siRNA sense strand
cuacggagauggaugauaa

SEQ ID NO: 463907 - RNA, 19 nt, Homo sapiens
  misc_RNA (1)...(19): siRNA sense strand
gcagugauaguauggauua

SEQ ID NO: 463908 - RNA, 19 nt, Homo sapiens
  misc_RNA (1)...(19): siRNA sense strand
ggaagcgccuggaagauga

SEQ ID NO: 463909 - RNA, 19 nt, Homo sapiens
  misc_RNA (1)...(19): siRNA sense strand
caagugcccuucugcauga

SEQ ID NO: 463910 - RNA, 19 nt, Homo sapiens
  misc_RNA (1)...(19): siRNA sense strand
ggacagacgucaggcagaa

SEQ ID NO: 463911 - RNA, 19 nt, Homo sapiens
  misc_RNA (1)...(19): siRNA sense strand
caaaaugccugaugaugua

SEQ ID NO: 463912 - RNA, 19 nt, Homo sapiens
  misc_RNA (1)...(19): siRNA sense strand
aaacacagcccaacaguga

SEQ ID NO: 463913 - RNA, 19 nt, Homo sapiens
  misc_RNA (1)...(19): siRNA sense strand
ucagugaaaugaugaaaug

SEQ ID NO: 463914 - RNA, 19 nt, Homo sapiens
  misc_RNA (1)...(19): siRNA sense strand
cgauauggcaucuguguua

SEQ ID NO: 463915 - RNA, 19 nt, Homo sapiens
  misc_RNA (1)...(19): siRNA sense strand
gugauaguauggauuauga

SEQ ID NO: 463916 - RNA, 19 nt, Homo sapiens
  misc_RNA (1)...(19): siRNA sense strand
gaugauaguggcagugaua

SEQ ID NO: 463917 - RNA, 19 nt, Homo sapiens
  misc_RNA (1)...(19): siRNA sense strand
ccacugcgcuccagcucua

SEQ ID NO: 463918 - RNA, 19 nt, Homo sapiens
  misc_RNA (1)...(19): siRNA sense strand
gugaaaugaugaaauguga

SEQ ID NO: 463919 - RNA, 19 nt, Homo sapiens
  misc_RNA (1)...(19): siRNA sense strand
ggacagcaauagggugauu

SEQ ID NO: 463920 - RNA, 19 nt, Homo sapiens
  misc_RNA (1)...(19): siRNA sense strand
gcaaaucaaugaggugcuu

SEQ ID NO: 463921 - RNA, 19 nt, Homo sapiens
  misc_RNA (1)...(19): siRNA sense strand
caccagaaguuuaaaggaa

SEQ ID NO: 463922 - RNA, 19 nt, Homo sapiens
  misc_RNA (1)...(19): siRNA sense strand
gauauggcaucuguguuaa

SEQ ID NO: 463923 - RNA, 19 nt, Homo sapiens
  misc_RNA (1)...(19): siRNA sense strand
caacagaaaguguaaauac

SEQ ID NO: 463924 - RNA, 19 nt, Homo sapiens
  misc_RNA (1)...(19): siRNA sense strand
caagcuggcuccuuucuag

SEQ ID NO: 463925 - RNA, 19 nt, Homo sapiens
  misc_RNA (1)...(19): siRNA sense strand
gugcuaaccugcauucugu

SEQ ID NO: 463926 - RNA, 19 nt, Homo sapiens
  misc_RNA (1)...(19): siRNA sense strand
gauaguggcagugauagua

SEQ ID NO: 463927 - RNA, 19 nt, Homo sapiens
  misc_RNA (1)...(19): siRNA sense strand
ucaaauucaugcacaauca

SEQ ID NO: 463928 - RNA, 19 nt, Homo sapiens
  misc_RNA (1)...(19): siRNA sense strand
agacccagcucaacaaguu

SEQ ID NO: 463929 - RNA, 19 nt, Homo sapiens
  misc_RNA (1)...(19): siRNA sense strand
ccagcgagguggagauuga

SEQ ID NO: 463930 - RNA, 19 nt, Homo sapiens
  misc_RNA (1)...(19): siRNA sense strand
gagcuguacuacuguguga

SEQ ID NO: 463931 - RNA, 19 nt, Homo sapiens
  misc_RNA (1)...(19): siRNA sense strand
guacaugcagggacagaua

SEQ ID NO: 463932 - RNA, 19 nt, Homo sapiens
  misc_RNA (1)...(19): siRNA sense strand
gaagcagacauuuguggua

SEQ ID NO: 463933 - RNA, 19 nt, Homo sapiens
  misc_RNA (1)...(19): siRNA sense strand
gcucugaccuuugcucuuc

SEQ ID NO: 463934 - RNA, 19 nt, Homo sapiens
  misc_RNA (1)...(19): siRNA sense strand
gagaagggauggguaugga

SEQ ID NO: 463935 - RNA, 19 nt, Homo sapiens
  misc_RNA (1)...(19): siRNA sense strand
ugaauuggguggcgaguuc

SEQ ID NO: 463936 - RNA, 19 nt, Homo sapiens
  misc_RNA (1)...(19): siRNA sense strand
agacgaagguguugugcuu

SEQ ID NO: 463937 - RNA, 19 nt, Homo sapiens
  misc_RNA (1)...(19): siRNA sense strand
ugaagaagcagacauuugu

SEQ ID NO: 463938 - RNA, 19 nt, Homo sapiens
  misc_RNA (1)...(19): siRNA sense strand
gaagggaucaaccucaaau

SEQ ID NO: 463939 - RNA, 19 nt, Homo sapiens
  misc_RNA (1)...(19): siRNA sense strand
gcaugagccuucgggauga

SEQ ID NO: 463940 - RNA, 19 nt, Homo sapiens
  misc_RNA (1)...(19): siRNA sense strand
ggaucaaccucaaauucau

SEQ ID NO: 463941 - RNA, 19 nt, Homo sapiens
  misc_RNA (1)...(19): siRNA sense strand
gaaaugaugaaaugugaca

SEQ ID NO: 463942 - RNA, 19 nt, Homo sapiens
  misc_RNA (1)...(19): siRNA sense strand
cagaaucacuagagcugaa

SEQ ID NO: 463943 - RNA, 19 nt, Homo sapiens
  misc_RNA (1)...(19): siRNA sense strand
gcaucuguguuaacuucua

SEQ ID NO: 463944 - RNA, 19 nt, Homo sapiens
  misc_RNA (1)...(19): siRNA sense strand
acacuggagucacgcgaua

SEQ ID NO: 463945 - RNA, 19 nt, Homo sapiens
  misc_RNA (1)...(19): siRNA sense strand
ggacugaucaagacucugu

SEQ ID NO: 463946 - RNA, 19 nt, Homo sapiens
  misc_RNA (1)...(19): siRNA sense strand
aguaccagcuucagucuuu

SEQ ID NO: 463947 - RNA, 19 nt, Homo sapiens
  misc_RNA (1)...(19): siRNA sense strand
ggcccagacuccugaauug

SEQ ID NO: 463948 - RNA, 19 nt, Homo sapiens
  misc_RNA (1)...(19): siRNA sense strand
gcaugaccuucgagagauu

SEQ ID NO: 463949 - RNA, 19 nt, Homo sapiens
  misc_RNA (1)...(19): siRNA sense strand
gcccagacccacuacuaua

SEQ ID NO: 463950 - RNA, 19 nt, Homo sapiens
  misc_RNA (1)...(19): siRNA sense strand
cagggucgauccagcaauu

SEQ ID NO: 463951 - RNA, 19 nt, Homo sapiens
  misc_RNA (1)...(19): siRNA sense strand
gaaaagagaaccuccauca

SEQ ID NO: 463952 - RNA, 19 nt, Homo sapiens
  misc_RNA (1)...(19): siRNA sense strand
gauucacccuaguggauuu

SEQ ID NO: 463953 - RNA, 19 nt, Homo sapiens
  misc_RNA (1)...(19): siRNA sense strand
gauucaagcucuucuuacu

SEQ ID NO: 463954 - RNA, 19 nt, Homo sapiens
  misc_RNA (1)...(19): siRNA sense strand
ccagacuccugaauugcua

SEQ ID NO: 463955 - RNA, 19 nt, Homo sapiens
  misc_RNA (1)...(19): siRNA sense strand
agaaugacauccgcaagaa

SEQ ID NO: 463956 - RNA, 19 nt, Homo sapiens
  misc_RNA (1)...(19): siRNA sense strand
cuucuuagaugcugugaug

SEQ ID NO: 463957 - RNA, 19 nt, Homo sapiens
  misc_RNA (1)...(19): siRNA sense strand
gagcagcaaugcaggugau

SEQ ID NO: 463958 - RNA, 19 nt, Homo sapiens
  misc_RNA (1)...(19): siRNA sense strand
ccaacgugcugcagggauu

SEQ ID NO: 463959 - RNA, 19 nt, Homo sapiens
  misc_RNA (1)...(19): siRNA sense strand
ccuggaagaugaugaagau

SEQ ID NO: 463960 - RNA, 19 nt, Homo sapiens
  misc_RNA (1)...(19): siRNA sense strand
gaaguaaucaaaccugucu

SEQ ID NO: 463961 - RNA, 19 nt, Homo sapiens
  misc_RNA (1)...(19): siRNA sense strand
gaagaggguggcacugaga

SEQ ID NO: 463962 - RNA, 19 nt, Homo sapiens
  misc_RNA (1)...(19): siRNA sense strand
caucaaacccggaccugaa

SEQ ID NO: 463963 - RNA, 19 nt, Homo sapiens
  misc_RNA (1)...(19): siRNA sense strand
acgagaagcucaucaacau

SEQ ID NO: 463964 - RNA, 19 nt, Homo sapiens
  misc_RNA (1)...(19): siRNA sense strand
ccagaggacugaucaagac

SEQ ID NO: 463965 - RNA, 19 nt, Homo sapiens
  misc_RNA (1)...(19): siRNA sense strand
ggugugagccugacgucua

SEQ ID NO: 463966 - RNA, 19 nt, Homo sapiens
  misc_RNA (1)...(19): siRNA sense strand
guacaaagggacaccaugu

SEQ ID NO: 463967 - RNA, 19 nt, Homo sapiens
  misc_RNA (1)...(19): siRNA sense strand
gaugauaccucuuuugucu

SEQ ID NO: 463968 - RNA, 19 nt, Homo sapiens
  misc_RNA (1)...(19): siRNA sense strand
gggaucaaccucaaauuca

SEQ ID NO: 463969 - RNA, 19 nt, Homo sapiens
  misc_RNA (1)...(19): siRNA sense strand
gaguccagcuguuaugauc

SEQ ID NO: 463970 - RNA, 19 nt, Homo sapiens
  misc_RNA (1)...(19): siRNA sense strand
ggagggcguuaguggauca

SEQ ID NO: 463971 - RNA, 19 nt, Homo sapiens
  misc_RNA (1)...(19): siRNA sense strand
ccagccagcucugaccuuu

SEQ ID NO: 463972 - RNA, 19 nt, Homo sapiens
  misc_RNA (1)...(19): siRNA sense strand
uaacaucggaacaguguau

SEQ ID NO: 463973 - RNA, 19 nt, Homo sapiens
  misc_RNA (1)...(19): siRNA sense strand
caaaggcuauggcacaacu

SEQ ID NO: 463974 - RNA, 19 nt, Homo sapiens
  misc_RNA (1)...(19): siRNA sense strand
ggaagagaaguccaacaga

SEQ ID NO: 463975 - RNA, 19 nt, Homo sapiens
  misc_RNA (1)...(19): siRNA sense strand
gguguacaagggaauguua

SEQ ID NO: 463976 - RNA, 19 nt, Homo sapiens
  misc_RNA (1)...(19): siRNA sense strand
ccacggagccaacucugaa

SEQ ID NO: 463977 - RNA, 19 nt, Homo sapiens
  misc_RNA (1)...(19): siRNA sense strand
uugacgagcugcagaauca

SEQ ID NO: 463978 - RNA, 19 nt, Homo sapiens
  misc_RNA (1)...(19): siRNA sense strand
gaauucaacccacucaucu

SEQ ID NO: 463979 - RNA, 19 nt, Homo sapiens
  misc_RNA (1)...(19): siRNA sense strand
cucaacaaguucuauacua

SEQ ID NO: 463980 - RNA, 19 nt, Homo sapiens
  misc_RNA (1)...(19): siRNA sense strand
gaaggugaggcgccuaaug

SEQ ID NO: 463981 - RNA, 19 nt, Homo sapiens
  misc_RNA (1)...(19): siRNA sense strand
aggaaaugaucgacaggua

SEQ ID NO: 463982 - RNA, 19 nt, Homo sapiens
  misc_RNA (1)...(19): siRNA sense strand
ccagaaguuuaaaggaaga

SEQ ID NO: 463983 - RNA, 19 nt, Homo sapiens
  misc_RNA (1)...(19): siRNA sense strand
gccagcaucuuugggcuuu

SEQ ID NO: 463984 - RNA, 19 nt, Homo sapiens
  misc_RNA (1)...(19): siRNA sense strand
guacaguccucagcuugga

SEQ ID NO: 463985 - RNA, 19 nt, Homo sapiens
  misc_RNA (1)...(19): siRNA sense strand
gugacaagccaaaguggua

SEQ ID NO: 463986 - RNA, 19 nt, Homo sapiens
  misc_RNA (1)...(19): siRNA sense strand
uggcggaucuuuacuggau

SEQ ID NO: 463987 - RNA, 19 nt, Homo sapiens
  misc_RNA (1)...(19): siRNA sense strand
gaagguaaauaagaaugac

SEQ ID NO: 463988 - RNA, 19 nt, Homo sapiens
  misc_RNA (1)...(19): siRNA sense strand
uguuagaccuccucaagug

SEQ ID NO: 463989 - RNA, 19 nt, Homo sapiens
  misc_RNA (1)...(19): siRNA sense strand
uggcaucuguguuaacuuc

SEQ ID NO: 463990 - RNA, 19 nt, Homo sapiens
  misc_RNA (1)...(19): siRNA sense strand
ccagacccaucucgauuca

SEQ ID NO: 463991 - RNA, 19 nt, Homo sapiens
  misc_RNA (1)...(19): siRNA sense strand
gucgggagcuguacuacug

SEQ ID NO: 463992 - RNA, 19 nt, Homo sapiens
  misc_RNA (1)...(19): siRNA sense strand
guaguaacaucggaacagu

SEQ ID NO: 463993 - RNA, 19 nt, Homo sapiens
  misc_RNA (1)...(19): siRNA sense strand
cgaauucacaacaauaugu

SEQ ID NO: 463994 - RNA, 19 nt, Homo sapiens
  misc_RNA (1)...(19): siRNA sense strand
cagcgaauucacaacaaua

SEQ ID NO: 463995 - RNA, 19 nt, Homo sapiens
  misc_RNA (1)...(19): siRNA sense strand
ucuacaaacuggacuucaa

SEQ ID NO: 463996 - RNA, 19 nt, Homo sapiens
  misc_RNA (1)...(19): siRNA sense strand
cagcgagucuaucucuaug

SEQ ID NO: 463997 - RNA, 19 nt, Homo sapiens
  misc_RNA (1)...(19): siRNA sense strand
ggaagggaucaaccucaaa

SEQ ID NO: 463998 - RNA, 19 nt, Homo sapiens
  misc_RNA (1)...(19): siRNA sense strand
ugugugguguugcguagua

SEQ ID NO: 463999 - RNA, 19 nt, Homo sapiens
  misc_RNA (1)...(19): siRNA sense strand
uacaaacggagauaucuuu

SEQ ID NO: 464000 - RNA, 19 nt, Homo sapiens
  misc_RNA (1)...(19): siRNA sense strand
gcagacauuugugguacau

SEQ ID NO: 464001 - RNA, 19 nt, Homo sapiens
  misc_RNA (1)...(19): siRNA sense strand
guacagccagcaaaucaau

SEQ ID NO: 464002 - RNA, 19 nt, Homo sapiens
  misc_RNA (1)...(19): siRNA sense strand
guaccugucccuuggagaa

SEQ ID NO: 464003 - RNA, 19 nt, Homo sapiens
  misc_RNA (1)...(19): siRNA sense strand
gaagucaucugucauuaaa

SEQ ID NO: 464004 - RNA, 19 nt, Homo sapiens
  misc_RNA (1)...(19): siRNA sense strand
gaagagaaguccaacagaa

SEQ ID NO: 464005 - RNA, 19 nt, Homo sapiens
  misc_RNA (1)...(19): siRNA sense strand
gaaguucuguccucgguua

SEQ ID NO: 464006 - RNA, 19 nt, Homo sapiens
  misc_RNA (1)...(19): siRNA sense strand
cuacggagauggaugauaa

SEQ ID NO: 464007 - RNA, 19 nt, Homo sapiens
  misc_RNA (1)...(19): siRNA sense strand
gcagugauaguauggauua

SEQ ID NO: 464008 - RNA, 19 nt, Homo sapiens
  misc_RNA (1)...(19): siRNA sense strand
ggaagcgccuggaagauga

SEQ ID NO: 464009 - RNA, 19 nt, Homo sapiens
  misc_RNA (1)...(19): siRNA sense strand
caagugcccuucugcauga

SEQ ID NO: 464010 - RNA, 19 nt, Homo sapiens
  misc_RNA (1)...(19): siRNA sense strand
ggacagacgucaggcagaa

SEQ ID NO: 464011 - RNA, 19 nt, Homo sapiens
  misc_RNA (1)...(19): siRNA sense strand
caaaaugccugaugaugua

SEQ ID NO: 464012 - RNA, 19 nt, Homo sapiens
  misc_RNA (1)...(19): siRNA sense strand
aaacacagcccaacaguga

SEQ ID NO: 464013 - RNA, 19 nt, Homo sapiens
  misc_RNA (1)...(19): siRNA sense strand
ucagugaaaugaugaaaug

SEQ ID NO: 464014 - RNA, 19 nt, Homo sapiens
  misc_RNA (1)...(19): siRNA sense strand
cgauauggcaucuguguua

SEQ ID NO: 464015 - RNA, 19 nt, Homo sapiens
  misc_RNA (1)...(19): siRNA sense strand
gugauaguauggauuauga

SEQ ID NO: 464016 - RNA, 19 nt, Homo sapiens
  misc_RNA (1)...(19): siRNA sense strand
gaugauaguggcagugaua

SEQ ID NO: 464017 - RNA, 19 nt, Homo sapiens
  misc_RNA (1)...(19): siRNA sense strand
ccacugcgcuccagcucua

SEQ ID NO: 464018 - RNA, 19 nt, Homo sapiens
  misc_RNA (1)...(19): siRNA sense strand
gugaaaugaugaaauguga

SEQ ID NO: 464019 - RNA, 19 nt, Homo sapiens
  misc_RNA (1)...(19): siRNA sense strand
ggacagcaauagggugauu

SEQ ID NO: 464020 - RNA, 19 nt, Homo sapiens
  misc_RNA (1)...(19): siRNA sense strand
gcaaaucaaugaggugcuu

SEQ ID NO: 464021 - RNA, 19 nt, Homo sapiens
  misc_RNA (1)...(19): siRNA sense strand
caccagaaguuuaaaggaa

SEQ ID NO: 464022 - RNA, 19 nt, Homo sapiens
  misc_RNA (1)...(19): siRNA sense strand
gauauggcaucuguguuaa

SEQ ID NO: 464023 - RNA, 19 nt, Homo sapiens
  misc_RNA (1)...(19): siRNA sense strand
caacagaaaguguaaauac

SEQ ID NO: 464024 - RNA, 19 nt, Homo sapiens
  misc_RNA (1)...(19): siRNA sense strand
caagcuggcuccuuucuag

SEQ ID NO: 464025 - RNA, 19 nt, Homo sapiens
  misc_RNA (1)...(19): siRNA sense strand
gugcuaaccugcauucugu

SEQ ID NO: 464026 - RNA, 19 nt, Homo sapiens
  misc_RNA (1)...(19): siRNA sense strand
gauaguggcagugauagua

SEQ ID NO: 464027 - RNA, 19 nt, Homo sapiens
  misc_RNA (1)...(19): siRNA sense strand
ucaaauucaugcacaauca

SEQ ID NO: 464028 - RNA, 19 nt, Homo sapiens
  misc_RNA (1)...(19): siRNA sense strand
agacccagcucaacaaguu

SEQ ID NO: 464029 - RNA, 19 nt, Homo sapiens
  misc_RNA (1)...(19): siRNA sense strand
ccagcgagguggagauuga

SEQ ID NO: 464030 - RNA, 19 nt, Homo sapiens
  misc_RNA (1)...(19): siRNA sense strand
gagcuguacuacuguguga

SEQ ID NO: 464031 - RNA, 19 nt, Homo sapiens
  misc_RNA (1)...(19): siRNA sense strand
guacaugcagggacagaua

SEQ ID NO: 464032 - RNA, 19 nt, Homo sapiens
  misc_RNA (1)...(19): siRNA sense strand
gaagcagacauuuguggua

SEQ ID NO: 464033 - RNA, 19 nt, Homo sapiens
  misc_RNA (1)...(19): siRNA sense strand
gcucugaccuuugcucuuc

SEQ ID NO: 464034 - RNA, 19 nt, Homo sapiens
  misc_RNA (1)...(19): siRNA sense strand
gagaagggauggguaugga

SEQ ID NO: 464035 - RNA, 19 nt, Homo sapiens
  misc_RNA (1)...(19): siRNA sense strand
ugaauuggguggcgaguuc

SEQ ID NO: 464036 - RNA, 19 nt, Homo sapiens
  misc_RNA (1)...(19): siRNA sense strand
agacgaagguguugugcuu

SEQ ID NO: 464037 - RNA, 19 nt, Homo sapiens
  misc_RNA (1)...(19): siRNA sense strand
ugaagaagcagacauuugu

SEQ ID NO: 464038 - RNA, 19 nt, Homo sapiens
  misc_RNA (1)...(19): siRNA sense strand
gaagggaucaaccucaaau

SEQ ID NO: 464039 - RNA, 19 nt, Homo sapiens
  misc_RNA (1)...(19): siRNA sense strand
gcaugagccuucgggauga

SEQ ID NO: 464040 - RNA, 19 nt, Homo sapiens
  misc_RNA (1)...(19): siRNA sense strand
ggaucaaccucaaauucau

SEQ ID NO: 464041 - RNA, 19 nt, Homo sapiens
  misc_RNA (1)...(19): siRNA sense strand
gaaaugaugaaaugugaca

SEQ ID NO: 464042 - RNA, 19 nt, Homo sapiens
  misc_RNA (1)...(19): siRNA sense strand
cagaaucacuagagcugaa

SEQ ID NO: 464043 - RNA, 19 nt, Homo sapiens
  misc_RNA (1)...(19): siRNA sense strand
gcaucuguguuaacuucua

SEQ ID NO: 464044 - RNA, 19 nt, Homo sapiens
  misc_RNA (1)...(19): siRNA sense strand
acacuggagucacgcgaua

SEQ ID NO: 464045 - RNA, 19 nt, Homo sapiens
  misc_RNA (1)...(19): siRNA sense strand
ggacugaucaagacucugu

SEQ ID NO: 464046 - RNA, 19 nt, Homo sapiens
  misc_RNA (1)...(19): siRNA sense strand
aguaccagcuucagucuuu

SEQ ID NO: 464047 - RNA, 19 nt, Homo sapiens
  misc_RNA (1)...(19): siRNA sense strand
ggcccagacuccugaauug

SEQ ID NO: 464048 - RNA, 19 nt, Homo sapiens
  misc_RNA (1)...(19): siRNA sense strand
gcaugaccuucgagagauu

SEQ ID NO: 464049 - RNA, 19 nt, Homo sapiens
  misc_RNA (1)...(19): siRNA sense strand
gcccagacccacuacuaua

SEQ ID NO: 464050 - RNA, 19 nt, Homo sapiens
  misc_RNA (1)...(19): siRNA sense strand
cagggucgauccagcaauu

SEQ ID NO: 464051 - RNA, 19 nt, Homo sapiens
  misc_RNA (1)...(19): siRNA sense strand
gaaaagagaaccuccauca

SEQ ID NO: 464052 - RNA, 19 nt, Homo sapiens
  misc_RNA (1)...(19): siRNA sense strand
gauucacccuaguggauuu

SEQ ID NO: 464053 - RNA, 19 nt, Homo sapiens
  misc_RNA (1)...(19): siRNA sense strand
gauucaagcucuucuuacu

SEQ ID NO: 464054 - RNA, 19 nt, Homo sapiens
  misc_RNA (1)...(19): siRNA sense strand
ccagacuccugaauugcua

SEQ ID NO: 464055 - RNA, 19 nt, Homo sapiens
  misc_RNA (1)...(19): siRNA sense strand
agaaugacauccgcaagaa

SEQ ID NO: 464056 - RNA, 19 nt, Homo sapiens
  misc_RNA (1)...(19): siRNA sense strand
cuucuuagaugcugugaug

SEQ ID NO: 464057 - RNA, 19 nt, Homo sapiens
  misc_RNA (1)...(19): siRNA sense strand
gagcagcaaugcaggugau

SEQ ID NO: 464058 - RNA, 19 nt, Homo sapiens
  misc_RNA (1)...(19): siRNA sense strand
ccaacgugcugcagggauu

SEQ ID NO: 464059 - RNA, 19 nt, Homo sapiens
  misc_RNA (1)...(19): siRNA sense strand
ccuggaagaugaugaagau

SEQ ID NO: 464060 - RNA, 19 nt, Homo sapiens
  misc_RNA (1)...(19): siRNA sense strand
gaaguaaucaaaccugucu

SEQ ID NO: 464061 - RNA, 19 nt, Homo sapiens
  misc_RNA (1)...(19): siRNA sense strand
gaagaggguggcacugaga

SEQ ID NO: 464062 - RNA, 19 nt, Homo sapiens
  misc_RNA (1)...(19): siRNA sense strand
caucaaacccggaccugaa

SEQ ID NO: 464063 - RNA, 19 nt, Homo sapiens
  misc_RNA (1)...(19): siRNA sense strand
acgagaagcucaucaacau

SEQ ID NO: 464064 - RNA, 19 nt, Homo sapiens
  misc_RNA (1)...(19): siRNA sense strand
ccagaggacugaucaagac

SEQ ID NO: 464065 - RNA, 19 nt, Homo sapiens
  misc_RNA (1)...(19): siRNA sense strand
ggugugagccugacgucua

SEQ ID NO: 464066 - RNA, 19 nt, Homo sapiens
  misc_RNA (1)...(19): siRNA sense strand
guacaaagggacaccaugu

SEQ ID NO: 464067 - RNA, 19 nt, Homo sapiens
  misc_RNA (1)...(19): siRNA sense strand
gaugauaccucuuuugucu

SEQ ID NO: 464068 - RNA, 19 nt, Homo sapiens
  misc_RNA (1)...(19): siRNA sense strand
gggaucaaccucaaauuca

SEQ ID NO: 464069 - RNA, 19 nt, Homo sapiens
  misc_RNA (1)...(19): siRNA sense strand
gaguccagcuguuaugauc

SEQ ID NO: 464070 - RNA, 19 nt, Homo sapiens
  misc_RNA (1)...(19): siRNA sense strand
ggagggcguuaguggauca

SEQ ID NO: 464071 - RNA, 19 nt, Homo sapiens
  misc_RNA (1)...(19): siRNA sense strand
ccagccagcucugaccuuu

SEQ ID NO: 464072 - RNA, 19 nt, Homo sapiens
  misc_RNA (1)...(19): siRNA sense strand
uaacaucggaacaguguau

SEQ ID NO: 464073 - RNA, 19 nt, Homo sapiens
  misc_RNA (1)...(19): siRNA sense strand
caaaggcuauggcacaacu

SEQ ID NO: 464074 - RNA, 19 nt, Homo sapiens
  misc_RNA (1)...(19): siRNA sense strand
ggaagagaaguccaacaga

SEQ ID NO: 464075 - RNA, 19 nt, Homo sapiens
  misc_RNA (1)...(19): siRNA sense strand
gguguacaagggaauguua

SEQ ID NO: 464076 - RNA, 19 nt, Homo sapiens
  misc_RNA (1)...(19): siRNA sense strand
ccacggagccaacucugaa

SEQ ID NO: 464077 - RNA, 19 nt, Homo sapiens
  misc_RNA (1)...(19): siRNA sense strand
uugacgagcugcagaauca

SEQ ID NO: 464078 - RNA, 19 nt, Homo sapiens
  misc_RNA (1)...(19): siRNA sense strand
gaauucaacccacucaucu

SEQ ID NO: 464079 - RNA, 19 nt, Homo sapiens
  misc_RNA (1)...(19): siRNA sense strand
cucaacaaguucuauacua

SEQ ID NO: 464080 - RNA, 19 nt, Homo sapiens
  misc_RNA (1)...(19): siRNA sense strand
gaaggugaggcgccuaaug

SEQ ID NO: 464081 - RNA, 19 nt, Homo sapiens
  misc_RNA (1)...(19): siRNA sense strand
aggaaaugaucgacaggua

SEQ ID NO: 464082 - RNA, 19 nt, Homo sapiens
  misc_RNA (1)...(19): siRNA sense strand
ccagaaguuuaaaggaaga

SEQ ID NO: 464083 - RNA, 19 nt, Homo sapiens
  misc_RNA (1)...(19): siRNA sense strand
gccagcaucuuugggcuuu

SEQ ID NO: 464084 - RNA, 19 nt, Homo sapiens
  misc_RNA (1)...(19): siRNA sense strand
guacaguccucagcuugga

SEQ ID NO: 464085 - RNA, 19 nt, Homo sapiens
  misc_RNA (1)...(19): siRNA sense strand
gugacaagccaaaguggua

SEQ ID NO: 464086 - RNA, 19 nt, Homo sapiens
  misc_RNA (1)...(19): siRNA sense strand
uggcggaucuuuacuggau

SEQ ID NO: 464087 - RNA, 19 nt, Homo sapiens
  misc_RNA (1)...(19): siRNA sense strand
gaagguaaauaagaaugac

SEQ ID NO: 464088 - RNA, 19 nt, Homo sapiens
  misc_RNA (1)...(19): siRNA sense strand
uguuagaccuccucaagug

SEQ ID NO: 464089 - RNA, 19 nt, Homo sapiens
  misc_RNA (1)...(19): siRNA sense strand
uggcaucuguguuaacuuc

SEQ ID NO: 464090 - RNA, 19 nt, Homo sapiens
  misc_RNA (1)...(19): siRNA sense strand
ccagacccaucucgauuca

SEQ ID NO: 464091 - RNA, 19 nt, Homo sapiens
  misc_RNA (1)...(19): siRNA sense strand
gucgggagcuguacuacug

SEQ ID NO: 464092 - RNA, 19 nt, Homo sapiens
  misc_RNA (1)...(19): siRNA sense strand
guaguaacaucggaacagu

SEQ ID NO: 464093 - RNA, 19 nt, Homo sapiens
  misc_RNA (1)...(19): siRNA sense strand
cgaauucacaacaauaugu

SEQ ID NO: 464094 - RNA, 19 nt, Homo sapiens
  misc_RNA (1)...(19): siRNA sense strand
cagcgaauucacaacaaua

SEQ ID NO: 464095 - RNA, 19 nt, Homo sapiens
  misc_RNA (1)...(19): siRNA sense strand
ucuacaaacuggacuucaa

SEQ ID NO: 464096 - RNA, 19 nt, Homo sapiens
  misc_RNA (1)...(19): siRNA sense strand
cagcgagucuaucucuaug

SEQ ID NO: 464097 - RNA, 19 nt, Homo sapiens
  misc_RNA (1)...(19): siRNA sense strand
ggaagggaucaaccucaaa

SEQ ID NO: 464098 - RNA, 19 nt, Homo sapiens
  misc_RNA (1)...(19): siRNA sense strand
ugugugguguugcguagua

SEQ ID NO: 464099 - RNA, 19 nt, Homo sapiens
  misc_RNA (1)...(19): siRNA sense strand
uacaaacggagauaucuuu

SEQ ID NO: 464100 - RNA, 19 nt, Homo sapiens
  misc_RNA (1)...(19): siRNA sense strand
gcagacauuugugguacau

SEQ ID NO: 464101 - RNA, 19 nt, Homo sapiens
  misc_RNA (1)...(19): siRNA sense strand
guacagccagcaaaucaau

SEQ ID NO: 464102 - RNA, 19 nt, Homo sapiens
  misc_RNA (1)...(19): siRNA sense strand
guaccugucccuuggagaa

SEQ ID NO: 464103 - RNA, 19 nt, Homo sapiens
  misc_RNA (1)...(19): siRNA sense strand
gaagucaucugucauuaaa

SEQ ID NO: 464104 - RNA, 19 nt, Homo sapiens
  misc_RNA (1)...(19): siRNA sense strand
gaagagaaguccaacagaa

SEQ ID NO: 464105 - RNA, 19 nt, Homo sapiens
  misc_RNA (1)...(19): siRNA sense strand
gaaguucuguccucgguua

SEQ ID NO: 464106 - RNA, 19 nt, Homo sapiens
  misc_RNA (1)...(19): siRNA sense strand
cuacggagauggaugauaa

SEQ ID NO: 464107 - RNA, 19 nt, Homo sapiens
  misc_RNA (1)...(19): siRNA sense strand
gcagugauaguauggauua

SEQ ID NO: 464108 - RNA, 19 nt, Homo sapiens
  misc_RNA (1)...(19): siRNA sense strand
ggaagcgccuggaagauga

SEQ ID NO: 464109 - RNA, 19 nt, Homo sapiens
  misc_RNA (1)...(19): siRNA sense strand
caagugcccuucugcauga

SEQ ID NO: 464110 - RNA, 19 nt, Homo sapiens
  misc_RNA (1)...(19): siRNA sense strand
ggacagacgucaggcagaa

SEQ ID NO: 464111 - RNA, 19 nt, Homo sapiens
  misc_RNA (1)...(19): siRNA sense strand
caaaaugccugaugaugua

SEQ ID NO: 464112 - RNA, 19 nt, Homo sapiens
  misc_RNA (1)...(19): siRNA sense strand
aaacacagcccaacaguga

SEQ ID NO: 464113 - RNA, 19 nt, Homo sapiens
  misc_RNA (1)...(19): siRNA sense strand
gaaaucugcuacuccguau

SEQ ID NO: 464114 - RNA, 19 nt, Homo sapiens
  misc_RNA (1)...(19): siRNA sense strand
ucagugaaaugaugaaaug

SEQ ID NO: 464115 - RNA, 19 nt, Homo sapiens
  misc_RNA (1)...(19): siRNA sense strand
cgauauggcaucuguguua

SEQ ID NO: 464116 - RNA, 19 nt, Homo sapiens
  misc_RNA (1)...(19): siRNA sense strand
gugauaguauggauuauga

SEQ ID NO: 464117 - RNA, 19 nt, Homo sapiens
  misc_RNA (1)...(19): siRNA sense strand
gaugauaguggcagugaua

SEQ ID NO: 464118 - RNA, 19 nt, Homo sapiens
  misc_RNA (1)...(19): siRNA sense strand
ccacugcgcuccagcucua

SEQ ID NO: 464119 - RNA, 19 nt, Homo sapiens
  misc_RNA (1)...(19): siRNA sense strand
gugaaaugaugaaauguga

SEQ ID NO: 464120 - RNA, 19 nt, Homo sapiens
  misc_RNA (1)...(19): siRNA sense strand
ggacagcaauagggugauu

SEQ ID NO: 464121 - RNA, 19 nt, Homo sapiens
  misc_RNA (1)...(19): siRNA sense strand
gcaaaucaaugaggugcuu

SEQ ID NO: 464122 - RNA, 19 nt, Homo sapiens
  misc_RNA (1)...(19): siRNA sense strand
caccagaaguuuaaaggaa

SEQ ID NO: 464123 - RNA, 19 nt, Homo sapiens
  misc_RNA (1)...(19): siRNA sense strand
gauauggcaucuguguuaa

SEQ ID NO: 464124 - RNA, 19 nt, Homo sapiens
  misc_RNA (1)...(19): siRNA sense strand
uauuaugucucuucucgua

SEQ ID NO: 464125 - RNA, 19 nt, Homo sapiens
  misc_RNA (1)...(19): siRNA sense strand
caacagaaaguguaaauac

SEQ ID NO: 464126 - RNA, 19 nt, Homo sapiens
  misc_RNA (1)...(19): siRNA sense strand
caagcuggcuccuuucuag

SEQ ID NO: 464127 - RNA, 19 nt, Homo sapiens
  misc_RNA (1)...(19): siRNA sense strand
gugcuaaccugcauucugu

SEQ ID NO: 464128 - RNA, 19 nt, Homo sapiens
  misc_RNA (1)...(19): siRNA sense strand
gauaguggcagugauagua

SEQ ID NO: 464129 - RNA, 19 nt, Homo sapiens
  misc_RNA (1)...(19): siRNA sense strand
guacguggcugcaguucau

SEQ ID NO: 464130 - RNA, 19 nt, Homo sapiens
  misc_RNA (1)...(19): siRNA sense strand
ucaaauucaugcacaauca

SEQ ID NO: 464131 - RNA, 19 nt, Homo sapiens
  misc_RNA (1)...(19): siRNA sense strand
agacccagcucaacaaguu

SEQ ID NO: 464132 - RNA, 19 nt, Homo sapiens
  misc_RNA (1)...(19): siRNA sense strand
ccagcgagguggagauuga

SEQ ID NO: 464133 - RNA, 19 nt, Homo sapiens
  misc_RNA (1)...(19): siRNA sense strand
gagcuguacuacuguguga

SEQ ID NO: 464134 - RNA, 19 nt, Homo sapiens
  misc_RNA (1)...(19): siRNA sense strand
guacaugcagggacagaua

SEQ ID NO: 464135 - RNA, 19 nt, Homo sapiens
  misc_RNA (1)...(19): siRNA sense strand
gaagcagacauuuguggua

SEQ ID NO: 464136 - RNA, 19 nt, Homo sapiens
  misc_RNA (1)...(19): siRNA sense strand
gcucugaccuuugcucuuc

SEQ ID NO: 464137 - RNA, 19 nt, Homo sapiens
  misc_RNA (1)...(19): siRNA sense strand
gagaagggauggguaugga

SEQ ID NO: 464138 - RNA, 19 nt, Homo sapiens
  misc_RNA (1)...(19): siRNA sense strand
ugaauuggguggcgaguuc

SEQ ID NO: 464139 - RNA, 19 nt, Homo sapiens
  misc_RNA (1)...(19): siRNA sense strand
agacgaagguguugugcuu

SEQ ID NO: 464140 - RNA, 19 nt, Homo sapiens
  misc_RNA (1)...(19): siRNA sense strand
ugaagaagcagacauuugu

SEQ ID NO: 464141 - RNA, 19 nt, Homo sapiens
  misc_RNA (1)...(19): siRNA sense strand
gaagggaucaaccucaaau

SEQ ID NO: 464142 - RNA, 19 nt, Homo sapiens
  misc_RNA (1)...(19): siRNA sense strand
gcaugagccuucgggauga

SEQ ID NO: 464143 - RNA, 19 nt, Homo sapiens
  misc_RNA (1)...(19): siRNA sense strand
ggaucaaccucaaauucau

SEQ ID NO: 464144 - RNA, 19 nt, Homo sapiens
  misc_RNA (1)...(19): siRNA sense strand
gaaaugaugaaaugugaca

SEQ ID NO: 464145 - RNA, 19 nt, Homo sapiens
  misc_RNA (1)...(19): siRNA sense strand
cagaaucacuagagcugaa

SEQ ID NO: 464146 - RNA, 19 nt, Homo sapiens
  misc_RNA (1)...(19): siRNA sense strand
gcaucuguguuaacuucua

SEQ ID NO: 464147 - RNA, 19 nt, Homo sapiens
  misc_RNA (1)...(19): siRNA sense strand
acacuggagucacgcgaua

SEQ ID NO: 464148 - RNA, 19 nt, Homo sapiens
  misc_RNA (1)...(19): siRNA sense strand
ggcccagacuccugaauug

SEQ ID NO: 464149 - RNA, 19 nt, Homo sapiens
  misc_RNA (1)...(19): siRNA sense strand
ggacugaucaagacucugu

SEQ ID NO: 464150 - RNA, 19 nt, Homo sapiens
  misc_RNA (1)...(19): siRNA sense strand
aguaccagcuucagucuuu

SEQ ID NO: 464151 - RNA, 19 nt, Homo sapiens
  misc_RNA (1)...(19): siRNA sense strand
gcaugaccuucgagagauu

SEQ ID NO: 464152 - RNA, 19 nt, Homo sapiens
  misc_RNA (1)...(19): siRNA sense strand
aaucugcuacuccguauua

SEQ ID NO: 464153 - RNA, 19 nt, Homo sapiens
  misc_RNA (1)...(19): siRNA sense strand
gcccagacccacuacuaua

SEQ ID NO: 464154 - RNA, 19 nt, Homo sapiens
  misc_RNA (1)...(19): siRNA sense strand
cagggucgauccagcaauu

SEQ ID NO: 464155 - RNA, 19 nt, Homo sapiens
  misc_RNA (1)...(19): siRNA sense strand
gaaaagagaaccuccauca

SEQ ID NO: 464156 - RNA, 19 nt, Homo sapiens
  misc_RNA (1)...(19): siRNA sense strand
gauucacccuaguggauuu

SEQ ID NO: 464157 - RNA, 19 nt, Homo sapiens
  misc_RNA (1)...(19): siRNA sense strand
ccagacuccugaauugcua

SEQ ID NO: 464158 - RNA, 19 nt, Homo sapiens
  misc_RNA (1)...(19): siRNA sense strand
agaaugacauccgcaagaa

SEQ ID NO: 464159 - RNA, 19 nt, Homo sapiens
  misc_RNA (1)...(19): siRNA sense strand
cuucuuagaugcugugaug

SEQ ID NO: 464160 - RNA, 19 nt, Homo sapiens
  misc_RNA (1)...(19): siRNA sense strand
gagcagcaaugcaggugau

SEQ ID NO: 464161 - RNA, 19 nt, Homo sapiens
  misc_RNA (1)...(19): siRNA sense strand
gauucaagcucuucuuacu

SEQ ID NO: 464162 - RNA, 19 nt, Homo sapiens
  misc_RNA (1)...(19): siRNA sense strand
ccaacgugcugcagggauu

SEQ ID NO: 464163 - RNA, 19 nt, Homo sapiens
  misc_RNA (1)...(19): siRNA sense strand
ccuggaagaugaugaagau

SEQ ID NO: 464164 - RNA, 19 nt, Homo sapiens
  misc_RNA (1)...(19): siRNA sense strand
gaaguaaucaaaccugucu

SEQ ID NO: 464165 - RNA, 19 nt, Homo sapiens
  misc_RNA (1)...(19): siRNA sense strand
gaagaggguggcacugaga

SEQ ID NO: 464166 - RNA, 19 nt, Homo sapiens
  misc_RNA (1)...(19): siRNA sense strand
caucaaacccggaccugaa

SEQ ID NO: 464167 - RNA, 19 nt, Homo sapiens
  misc_RNA (1)...(19): siRNA sense strand
acgagaagcucaucaacau

SEQ ID NO: 464168 - RNA, 19 nt, Homo sapiens
  misc_RNA (1)...(19): siRNA sense strand
ccagaggacugaucaagac

SEQ ID NO: 464169 - RNA, 19 nt, Homo sapiens
  misc_RNA (1)...(19): siRNA sense strand
ggugugagccugacgucua

SEQ ID NO: 464170 - RNA, 19 nt, Homo sapiens
  misc_RNA (1)...(19): siRNA sense strand
guacaaagggacaccaugu

SEQ ID NO: 464171 - RNA, 19 nt, Homo sapiens
  misc_RNA (1)...(19): siRNA sense strand
ggagggcguuaguggauca

SEQ ID NO: 464172 - RNA, 19 nt, Homo sapiens
  misc_RNA (1)...(19): siRNA sense strand
gggaucaaccucaaauuca

SEQ ID NO: 464173 - RNA, 19 nt, Homo sapiens
  misc_RNA (1)...(19): siRNA sense strand
gaugauaccucuuuugucu

SEQ ID NO: 464174 - RNA, 19 nt, Homo sapiens
  misc_RNA (1)...(19): siRNA sense strand
gaguccagcuguuaugauc

SEQ ID NO: 464175 - RNA, 19 nt, Homo sapiens
  misc_RNA (1)...(19): siRNA sense strand
ccagccagcucugaccuuu

SEQ ID NO: 464176 - RNA, 19 nt, Homo sapiens
  misc_RNA (1)...(19): siRNA sense strand
uaacaucggaacaguguau

SEQ ID NO: 464177 - RNA, 19 nt, Homo sapiens
  misc_RNA (1)...(19): siRNA sense strand
caaaggcuauggcacaacu

SEQ ID NO: 464178 - RNA, 19 nt, Homo sapiens
  misc_RNA (1)...(19): siRNA sense strand
ggaagagaaguccaacaga

SEQ ID NO: 464179 - RNA, 19 nt, Homo sapiens
  misc_RNA (1)...(19): siRNA sense strand
gguguacaagggaauguua

SEQ ID NO: 464180 - RNA, 19 nt, Homo sapiens
  misc_RNA (1)...(19): siRNA sense strand
ccacggagccaacucugaa

SEQ ID NO: 464181 - RNA, 19 nt, Homo sapiens
  misc_RNA (1)...(19): siRNA sense strand
uugacgagcugcagaauca

SEQ ID NO: 464182 - RNA, 19 nt, Homo sapiens
  misc_RNA (1)...(19): siRNA sense strand
gaauucaacccacucaucu

SEQ ID NO: 464183 - RNA, 19 nt, Homo sapiens
  misc_RNA (1)...(19): siRNA sense strand
cucaacaaguucuauacua

SEQ ID NO: 464184 - RNA, 19 nt, Homo sapiens
  misc_RNA (1)...(19): siRNA sense strand
gaaggugaggcgccuaaug

SEQ ID NO: 464185 - RNA, 19 nt, Homo sapiens
  misc_RNA (1)...(19): siRNA sense strand
aggaaaugaucgacaggua

SEQ ID NO: 464186 - RNA, 19 nt, Homo sapiens
  misc_RNA (1)...(19): siRNA sense strand
ccagaaguuuaaaggaaga

SEQ ID NO: 464187 - RNA, 19 nt, Homo sapiens
  misc_RNA (1)...(19): siRNA sense strand
gccagcaucuuugggcuuu

SEQ ID NO: 464188 - RNA, 19 nt, Homo sapiens
  misc_RNA (1)...(19): siRNA sense strand
guacaguccucagcuugga

SEQ ID NO: 464189 - RNA, 19 nt, Homo sapiens
  misc_RNA (1)...(19): siRNA sense strand
gugacaagccaaaguggua

SEQ ID NO: 464190 - RNA, 19 nt, Homo sapiens
  misc_RNA (1)...(19): siRNA sense strand
uggcggaucuuuacuggau

SEQ ID NO: 464191 - RNA, 19 nt, Homo sapiens
  misc_RNA (1)...(19): siRNA sense strand
gaagguaaauaagaaugac

SEQ ID NO: 464192 - RNA, 19 nt, Homo sapiens
  misc_RNA (1)...(19): siRNA sense strand
uggcaucuguguuaacuuc

SEQ ID NO: 464193 - RNA, 19 nt, Homo sapiens
  misc_RNA (1)...(19): siRNA sense strand
uguuagaccuccucaagug

SEQ ID NO: 464194 - RNA, 19 nt, Homo sapiens
  misc_RNA (1)...(19): siRNA sense strand
ccagacccaucucgauuca

SEQ ID NO: 464195 - RNA, 19 nt, Homo sapiens
  misc_RNA (1)...(19): siRNA sense strand
gucgggagcuguacuacug

SEQ ID NO: 464196 - RNA, 19 nt, Homo sapiens
  misc_RNA (1)...(19): siRNA sense strand
guaguaacaucggaacagu

SEQ ID NO: 464197 - RNA, 19 nt, Homo sapiens
  misc_RNA (1)...(19): siRNA sense strand
cgaauucacaacaauaugu

SEQ ID NO: 464198 - RNA, 19 nt, Homo sapiens
  misc_RNA (1)...(19): siRNA sense strand
cagcgaauucacaacaaua

SEQ ID NO: 464199 - RNA, 19 nt, Homo sapiens
  misc_RNA (1)...(19): siRNA sense strand
ucuacaaacuggacuucaa

SEQ ID NO: 464200 - RNA, 19 nt, Homo sapiens
  misc_RNA (1)...(19): siRNA sense strand
uacaaacggagauaucuuu

SEQ ID NO: 464201 - RNA, 19 nt, Homo sapiens
  misc_RNA (1)...(19): siRNA sense strand
ggaagggaucaaccucaaa

SEQ ID NO: 464202 - RNA, 19 nt, Homo sapiens
  misc_RNA (1)...(19): siRNA sense strand
ugugugguguugcguagua

SEQ ID NO: 464203 - RNA, 19 nt, Homo sapiens
  misc_RNA (1)...(19): siRNA sense strand
gaagucaucugucauuaaa

SEQ ID NO: 464204 - RNA, 19 nt, Homo sapiens
  misc_RNA (1)...(19): siRNA sense strand
gaagagaaguccaacagaa

SEQ ID NO: 464205 - RNA, 19 nt, Homo sapiens
  misc_RNA (1)...(19): siRNA sense strand
gaaguucuguccucgguua

SEQ ID NO: 464206 - RNA, 19 nt, Homo sapiens
  misc_RNA (1)...(19): siRNA sense strand
cuacggagauggaugauaa

SEQ ID NO: 464207 - RNA, 19 nt, Homo sapiens
  misc_RNA (1)...(19): siRNA sense strand
gcagugauaguauggauua

SEQ ID NO: 464208 - RNA, 19 nt, Homo sapiens
  misc_RNA (1)...(19): siRNA sense strand
ggaagcgccuggaagauga

SEQ ID NO: 464209 - RNA, 19 nt, Homo sapiens
  misc_RNA (1)...(19): siRNA sense strand
caagugcccuucugcauga

SEQ ID NO: 464210 - RNA, 19 nt, Homo sapiens
  misc_RNA (1)...(19): siRNA sense strand
ggacagacgucaggcagaa

SEQ ID NO: 464211 - RNA, 19 nt, Homo sapiens
  misc_RNA (1)...(19): siRNA sense strand
caaaaugccugaugaugua

SEQ ID NO: 464212 - RNA, 19 nt, Homo sapiens
  misc_RNA (1)...(19): siRNA sense strand
aaacacagcccaacaguga

SEQ ID NO: 464213 - RNA, 19 nt, Homo sapiens
  misc_RNA (1)...(19): siRNA sense strand
gaaaucugcuacuccguau

SEQ ID NO: 464214 - RNA, 19 nt, Homo sapiens
  misc_RNA (1)...(19): siRNA sense strand
ucagugaaaugaugaaaug

SEQ ID NO: 464215 - RNA, 19 nt, Homo sapiens
  misc_RNA (1)...(19): siRNA sense strand
cgauauggcaucuguguua

SEQ ID NO: 464216 - RNA, 19 nt, Homo sapiens
  misc_RNA (1)...(19): siRNA sense strand
gugauaguauggauuauga

SEQ ID NO: 464217 - RNA, 19 nt, Homo sapiens
  misc_RNA (1)...(19): siRNA sense strand
gaugauaguggcagugaua

SEQ ID NO: 464218 - RNA, 19 nt, Homo sapiens
  misc_RNA (1)...(19): siRNA sense strand
ccacugcgcuccagcucua

SEQ ID NO: 464219 - RNA, 19 nt, Homo sapiens
  misc_RNA (1)...(19): siRNA sense strand
gugaaaugaugaaauguga

SEQ ID NO: 464220 - RNA, 19 nt, Homo sapiens
  misc_RNA (1)...(19): siRNA sense strand
ggacagcaauagggugauu

SEQ ID NO: 464221 - RNA, 19 nt, Homo sapiens
  misc_RNA (1)...(19): siRNA sense strand
gcaaaucaaugaggugcuu

SEQ ID NO: 464222 - RNA, 19 nt, Homo sapiens
  misc_RNA (1)...(19): siRNA sense strand
caccagaaguuuaaaggaa

SEQ ID NO: 464223 - RNA, 19 nt, Homo sapiens
  misc_RNA (1)...(19): siRNA sense strand
gauauggcaucuguguuaa

SEQ ID NO: 464224 - RNA, 19 nt, Homo sapiens
  misc_RNA (1)...(19): siRNA sense strand
uauuaugucucuucucgua

SEQ ID NO: 464225 - RNA, 19 nt, Homo sapiens
  misc_RNA (1)...(19): siRNA sense strand
caacagaaaguguaaauac

SEQ ID NO: 464226 - RNA, 19 nt, Homo sapiens
  misc_RNA (1)...(19): siRNA sense strand
caagcuggcuccuuucuag

SEQ ID NO: 464227 - RNA, 19 nt, Homo sapiens
  misc_RNA (1)...(19): siRNA sense strand
gugcuaaccugcauucugu

SEQ ID NO: 464228 - RNA, 19 nt, Homo sapiens
  misc_RNA (1)...(19): siRNA sense strand
gauaguggcagugauagua

SEQ ID NO: 464229 - RNA, 19 nt, Homo sapiens
  misc_RNA (1)...(19): siRNA sense strand
guacguggcugcaguucau

SEQ ID NO: 464230 - RNA, 19 nt, Homo sapiens
  misc_RNA (1)...(19): siRNA sense strand
ucaaauucaugcacaauca

SEQ ID NO: 464231 - RNA, 19 nt, Homo sapiens
  misc_RNA (1)...(19): siRNA sense strand
agacccagcucaacaaguu

SEQ ID NO: 464232 - RNA, 19 nt, Homo sapiens
  misc_RNA (1)...(19): siRNA sense strand
ccagcgagguggagauuga

SEQ ID NO: 464233 - RNA, 19 nt, Homo sapiens
  misc_RNA (1)...(19): siRNA sense strand
gagcuguacuacuguguga

SEQ ID NO: 464234 - RNA, 19 nt, Homo sapiens
  misc_RNA (1)...(19): siRNA sense strand
guacaugcagggacagaua

SEQ ID NO: 464235 - RNA, 19 nt, Homo sapiens
  misc_RNA (1)...(19): siRNA sense strand
gaagcagacauuuguggua

SEQ ID NO: 464236 - RNA, 19 nt, Homo sapiens
  misc_RNA (1)...(19): siRNA sense strand
gcucugaccuuugcucuuc

SEQ ID NO: 464237 - RNA, 19 nt, Homo sapiens
  misc_RNA (1)...(19): siRNA sense strand
gagaagggauggguaugga

SEQ ID NO: 464238 - RNA, 19 nt, Homo sapiens
  misc_RNA (1)...(19): siRNA sense strand
ugaauuggguggcgaguuc

SEQ ID NO: 464239 - RNA, 19 nt, Homo sapiens
  misc_RNA (1)...(19): siRNA sense strand
agacgaagguguugugcuu

SEQ ID NO: 464240 - RNA, 19 nt, Homo sapiens
  misc_RNA (1)...(19): siRNA sense strand
ugaagaagcagacauuugu

SEQ ID NO: 464241 - RNA, 19 nt, Homo sapiens
  misc_RNA (1)...(19): siRNA sense strand
gaagggaucaaccucaaau

SEQ ID NO: 464242 - RNA, 19 nt, Homo sapiens
  misc_RNA (1)...(19): siRNA sense strand
gcaugagccuucgggauga

SEQ ID NO: 464243 - RNA, 19 nt, Homo sapiens
  misc_RNA (1)...(19): siRNA sense strand
ggaucaaccucaaauucau

SEQ ID NO: 464244 - RNA, 19 nt, Homo sapiens
  misc_RNA (1)...(19): siRNA sense strand
gaaaugaugaaaugugaca

SEQ ID NO: 464245 - RNA, 19 nt, Homo sapiens
  misc_RNA (1)...(19): siRNA sense strand
cagaaucacuagagcugaa

SEQ ID NO: 464246 - RNA, 19 nt, Homo sapiens
  misc_RNA (1)...(19): siRNA sense strand
gcaucuguguuaacuucua

SEQ ID NO: 464247 - RNA, 19 nt, Homo sapiens
  misc_RNA (1)...(19): siRNA sense strand
acacuggagucacgcgaua

SEQ ID NO: 464248 - RNA, 19 nt, Homo sapiens
  misc_RNA (1)...(19): siRNA sense strand
ggcccagacuccugaauug

SEQ ID NO: 464249 - RNA, 19 nt, Homo sapiens
  misc_RNA (1)...(19): siRNA sense strand
ggacugaucaagacucugu

SEQ ID NO: 464250 - RNA, 19 nt, Homo sapiens
  misc_RNA (1)...(19): siRNA sense strand
aguaccagcuucagucuuu

SEQ ID NO: 464251 - RNA, 19 nt, Homo sapiens
  misc_RNA (1)...(19): siRNA sense strand
gcaugaccuucgagagauu

SEQ ID NO: 464252 - RNA, 19 nt, Homo sapiens
  misc_RNA (1)...(19): siRNA sense strand
aaucugcuacuccguauua

SEQ ID NO: 464253 - RNA, 19 nt, Homo sapiens
  misc_RNA (1)...(19): siRNA sense strand
gcccagacccacuacuaua

SEQ ID NO: 464254 - RNA, 19 nt, Homo sapiens
  misc_RNA (1)...(19): siRNA sense strand
cagggucgauccagcaauu

SEQ ID NO: 464255 - RNA, 19 nt, Homo sapiens
  misc_RNA (1)...(19): siRNA sense strand
gaaaagagaaccuccauca

SEQ ID NO: 464256 - RNA, 19 nt, Homo sapiens
  misc_RNA (1)...(19): siRNA sense strand
gauucacccuaguggauuu

SEQ ID NO: 464257 - RNA, 19 nt, Homo sapiens
  misc_RNA (1)...(19): siRNA sense strand
ccagacuccugaauugcua

SEQ ID NO: 464258 - RNA, 19 nt, Homo sapiens
  misc_RNA (1)...(19): siRNA sense strand
agaaugacauccgcaagaa

SEQ ID NO: 464259 - RNA, 19 nt, Homo sapiens
  misc_RNA (1)...(19): siRNA sense strand
cuucuuagaugcugugaug

SEQ ID NO: 464260 - RNA, 19 nt, Homo sapiens
  misc_RNA (1)...(19): siRNA sense strand
gagcagcaaugcaggugau

SEQ ID NO: 464261 - RNA, 19 nt, Homo sapiens
  misc_RNA (1)...(19): siRNA sense strand
gauucaagcucuucuuacu

SEQ ID NO: 464262 - RNA, 19 nt, Homo sapiens
  misc_RNA (1)...(19): siRNA sense strand
ccaacgugcugcagggauu

SEQ ID NO: 464263 - RNA, 19 nt, Homo sapiens
  misc_RNA (1)...(19): siRNA sense strand
ccuggaagaugaugaagau

SEQ ID NO: 464264 - RNA, 19 nt, Homo sapiens
  misc_RNA (1)...(19): siRNA sense strand
gaaguaaucaaaccugucu

SEQ ID NO: 464265 - RNA, 19 nt, Homo sapiens
  misc_RNA (1)...(19): siRNA sense strand
gaagaggguggcacugaga

SEQ ID NO: 464266 - RNA, 19 nt, Homo sapiens
  misc_RNA (1)...(19): siRNA sense strand
caucaaacccggaccugaa

SEQ ID NO: 464267 - RNA, 19 nt, Homo sapiens
  misc_RNA (1)...(19): siRNA sense strand
acgagaagcucaucaacau

SEQ ID NO: 464268 - RNA, 19 nt, Homo sapiens
  misc_RNA (1)...(19): siRNA sense strand
ccagaggacugaucaagac

SEQ ID NO: 464269 - RNA, 19 nt, Homo sapiens
  misc_RNA (1)...(19): siRNA sense strand
ggugugagccugacgucua

SEQ ID NO: 464270 - RNA, 19 nt, Homo sapiens
  misc_RNA (1)...(19): siRNA sense strand
guacaaagggacaccaugu

SEQ ID NO: 464271 - RNA, 19 nt, Homo sapiens
  misc_RNA (1)...(19): siRNA sense strand
ggagggcguuaguggauca

SEQ ID NO: 464272 - RNA, 19 nt, Homo sapiens
  misc_RNA (1)...(19): siRNA sense strand
gggaucaaccucaaauuca

SEQ ID NO: 464273 - RNA, 19 nt, Homo sapiens
  misc_RNA (1)...(19): siRNA sense strand
gaugauaccucuuuugucu

SEQ ID NO: 464274 - RNA, 19 nt, Homo sapiens
  misc_RNA (1)...(19): siRNA sense strand
gaguccagcuguuaugauc

SEQ ID NO: 464275 - RNA, 19 nt, Homo sapiens
  misc_RNA (1)...(19): siRNA sense strand
ccagccagcucugaccuuu

SEQ ID NO: 464276 - RNA, 19 nt, Homo sapiens
  misc_RNA (1)...(19): siRNA sense strand
uaacaucggaacaguguau

SEQ ID NO: 464277 - RNA, 19 nt, Homo sapiens
  misc_RNA (1)...(19): siRNA sense strand
caaaggcuauggcacaacu

SEQ ID NO: 464278 - RNA, 19 nt, Homo sapiens
  misc_RNA (1)...(19): siRNA sense strand
ggaagagaaguccaacaga

SEQ ID NO: 464279 - RNA, 19 nt, Homo sapiens
  misc_RNA (1)...(19): siRNA sense strand
gguguacaagggaauguua

SEQ ID NO: 464280 - RNA, 19 nt, Homo sapiens
  misc_RNA (1)...(19): siRNA sense strand
ccacggagccaacucugaa

SEQ ID NO: 464281 - RNA, 19 nt, Homo sapiens
  misc_RNA (1)...(19): siRNA sense strand
uugacgagcugcagaauca

SEQ ID NO: 464282 - RNA, 19 nt, Homo sapiens
  misc_RNA (1)...(19): siRNA sense strand
gaauucaacccacucaucu

SEQ ID NO: 464283 - RNA, 19 nt, Homo sapiens
  misc_RNA (1)...(19): siRNA sense strand
cucaacaaguucuauacua

SEQ ID NO: 464284 - RNA, 19 nt, Homo sapiens
  misc_RNA (1)...(19): siRNA sense strand
gaaggugaggcgccuaaug

SEQ ID NO: 464285 - RNA, 19 nt, Homo sapiens
  misc_RNA (1)...(19): siRNA sense strand
aggaaaugaucgacaggua

SEQ ID NO: 464286 - RNA, 19 nt, Homo sapiens
  misc_RNA (1)...(19): siRNA sense strand
ccagaaguuuaaaggaaga

SEQ ID NO: 464287 - RNA, 19 nt, Homo sapiens
  misc_RNA (1)...(19): siRNA sense strand
gccagcaucuuugggcuuu

SEQ ID NO: 464288 - RNA, 19 nt, Homo sapiens
  misc_RNA (1)...(19): siRNA sense strand
guacaguccucagcuugga

SEQ ID NO: 464289 - RNA, 19 nt, Homo sapiens
  misc_RNA (1)...(19): siRNA sense strand
gugacaagccaaaguggua

SEQ ID NO: 464290 - RNA, 19 nt, Homo sapiens
  misc_RNA (1)...(19): siRNA sense strand
uggcggaucuuuacuggau

SEQ ID NO: 464291 - RNA, 19 nt, Homo sapiens
  misc_RNA (1)...(19): siRNA sense strand
gaagguaaauaagaaugac

SEQ ID NO: 464292 - RNA, 19 nt, Homo sapiens
  misc_RNA (1)...(19): siRNA sense strand
uggcaucuguguuaacuuc

SEQ ID NO: 464293 - RNA, 19 nt, Homo sapiens
  misc_RNA (1)...(19): siRNA sense strand
uguuagaccuccucaagug

SEQ ID NO: 464294 - RNA, 19 nt, Homo sapiens
  misc_RNA (1)...(19): siRNA sense strand
ccagacccaucucgauuca

SEQ ID NO: 464295 - RNA, 19 nt, Homo sapiens
  misc_RNA (1)...(19): siRNA sense strand
gucgggagcuguacuacug

SEQ ID NO: 464296 - RNA, 19 nt, Homo sapiens
  misc_RNA (1)...(19): siRNA sense strand
guaguaacaucggaacagu

SEQ ID NO: 464297 - RNA, 19 nt, Homo sapiens
  misc_RNA (1)...(19): siRNA sense strand
cgaauucacaacaauaugu

SEQ ID NO: 464298 - RNA, 19 nt, Homo sapiens
  misc_RNA (1)...(19): siRNA sense strand
cagcgaauucacaacaaua

SEQ ID NO: 464299 - RNA, 19 nt, Homo sapiens
  misc_RNA (1)...(19): siRNA sense strand
ucuacaaacuggacuucaa

SEQ ID NO: 464300 - RNA, 19 nt, Homo sapiens
  misc_RNA (1)...(19): siRNA sense strand
uacaaacggagauaucuuu

SEQ ID NO: 464301 - RNA, 19 nt, Homo sapiens
  misc_RNA (1)...(19): siRNA sense strand
ggaagggaucaaccucaaa

SEQ ID NO: 464302 - RNA, 19 nt, Homo sapiens
  misc_RNA (1)...(19): siRNA sense strand
ugugugguguugcguagua

SEQ ID NO: 464303 - RNA, 19 nt, Homo sapiens
  misc_RNA (1)...(19): siRNA sense strand
gaagucaucugucauuaaa

SEQ ID NO: 464304 - RNA, 19 nt, Homo sapiens
  misc_RNA (1)...(19): siRNA sense strand
gaagagaaguccaacagaa

SEQ ID NO: 464305 - RNA, 19 nt, Homo sapiens
  misc_RNA (1)...(19): siRNA sense strand
gaaguucuguccucgguua

SEQ ID NO: 464306 - RNA, 19 nt, Homo sapiens
  misc_RNA (1)...(19): siRNA sense strand
cuacggagauggaugauaa

SEQ ID NO: 464307 - RNA, 19 nt, Homo sapiens
  misc_RNA (1)...(19): siRNA sense strand
gcagugauaguauggauua

SEQ ID NO: 464308 - RNA, 19 nt, Homo sapiens
  misc_RNA (1)...(19): siRNA sense strand
ggaagcgccuggaagauga

SEQ ID NO: 464309 - RNA, 19 nt, Homo sapiens
  misc_RNA (1)...(19): siRNA sense strand
caagugcccuucugcauga

SEQ ID NO: 464310 - RNA, 19 nt, Homo sapiens
  misc_RNA (1)...(19): siRNA sense strand
ggacagacgucaggcagaa

SEQ ID NO: 464311 - RNA, 19 nt, Homo sapiens
  misc_RNA (1)...(19): siRNA sense strand
caaaaugccugaugaugua

SEQ ID NO: 464312 - RNA, 19 nt, Homo sapiens
  misc_RNA (1)...(19): siRNA sense strand
aaacacagcccaacaguga

SEQ ID NO: 464313 - RNA, 19 nt, Homo sapiens
  misc_RNA (1)...(19): siRNA sense strand
gaaaucugcuacuccguau

SEQ ID NO: 464314 - RNA, 19 nt, Homo sapiens
  misc_RNA (1)...(19): siRNA sense strand
ucagugaaaugaugaaaug

SEQ ID NO: 464315 - RNA, 19 nt, Homo sapiens
  misc_RNA (1)...(19): siRNA sense strand
cgauauggcaucuguguua

SEQ ID NO: 464316 - RNA, 19 nt, Homo sapiens
  misc_RNA (1)...(19): siRNA sense strand
gugauaguauggauuauga

SEQ ID NO: 464317 - RNA, 19 nt, Homo sapiens
  misc_RNA (1)...(19): siRNA sense strand
gaugauaguggcagugaua

SEQ ID NO: 464318 - RNA, 19 nt, Homo sapiens
  misc_RNA (1)...(19): siRNA sense strand
ccacugcgcuccagcucua

SEQ ID NO: 464319 - RNA, 19 nt, Homo sapiens
  misc_RNA (1)...(19): siRNA sense strand
gugaaaugaugaaauguga

SEQ ID NO: 464320 - RNA, 19 nt, Homo sapiens
  misc_RNA (1)...(19): siRNA sense strand
ggacagcaauagggugauu

SEQ ID NO: 464321 - RNA, 19 nt, Homo sapiens
  misc_RNA (1)...(19): siRNA sense strand
gcaaaucaaugaggugcuu

SEQ ID NO: 464322 - RNA, 19 nt, Homo sapiens
  misc_RNA (1)...(19): siRNA sense strand
caccagaaguuuaaaggaa

SEQ ID NO: 464323 - RNA, 19 nt, Homo sapiens
  misc_RNA (1)...(19): siRNA sense strand
gauauggcaucuguguuaa

SEQ ID NO: 464324 - RNA, 19 nt, Homo sapiens
  misc_RNA (1)...(19): siRNA sense strand
uauuaugucucuucucgua

SEQ ID NO: 464325 - RNA, 19 nt, Homo sapiens
  misc_RNA (1)...(19): siRNA sense strand
caacagaaaguguaaauac

SEQ ID NO: 464326 - RNA, 19 nt, Homo sapiens
  misc_RNA (1)...(19): siRNA sense strand
caagcuggcuccuuucuag

SEQ ID NO: 464327 - RNA, 19 nt, Homo sapiens
  misc_RNA (1)...(19): siRNA sense strand
gugcuaaccugcauucugu

SEQ ID NO: 464328 - RNA, 19 nt, Homo sapiens
  misc_RNA (1)...(19): siRNA sense strand
gauaguggcagugauagua

SEQ ID NO: 464329 - RNA, 19 nt, Homo sapiens
  misc_RNA (1)...(19): siRNA sense strand
guacguggcugcaguucau

SEQ ID NO: 464330 - RNA, 19 nt, Homo sapiens
  misc_RNA (1)...(19): siRNA sense strand
ucaaauucaugcacaauca

SEQ ID NO: 464331 - RNA, 19 nt, Homo sapiens
  misc_RNA (1)...(19): siRNA sense strand
agacccagcucaacaaguu

SEQ ID NO: 464332 - RNA, 19 nt, Homo sapiens
  misc_RNA (1)...(19): siRNA sense strand
ccagcgagguggagauuga

SEQ ID NO: 464333 - RNA, 19 nt, Homo sapiens
  misc_RNA (1)...(19): siRNA sense strand
gagcuguacuacuguguga

SEQ ID NO: 464334 - RNA, 19 nt, Homo sapiens
  misc_RNA (1)...(19): siRNA sense strand
guacaugcagggacagaua

SEQ ID NO: 464335 - RNA, 19 nt, Homo sapiens
  misc_RNA (1)...(19): siRNA sense strand
gaagcagacauuuguggua

SEQ ID NO: 464336 - RNA, 19 nt, Homo sapiens
  misc_RNA (1)...(19): siRNA sense strand
gcucugaccuuugcucuuc

SEQ ID NO: 464337 - RNA, 19 nt, Homo sapiens
  misc_RNA (1)...(19): siRNA sense strand
gagaagggauggguaugga

SEQ ID NO: 464338 - RNA, 19 nt, Homo sapiens
  misc_RNA (1)...(19): siRNA sense strand
ugaauuggguggcgaguuc

SEQ ID NO: 464339 - RNA, 19 nt, Homo sapiens
  misc_RNA (1)...(19): siRNA sense strand
agacgaagguguugugcuu

SEQ ID NO: 464340 - RNA, 19 nt, Homo sapiens
  misc_RNA (1)...(19): siRNA sense strand
ugaagaagcagacauuugu

SEQ ID NO: 464341 - RNA, 19 nt, Homo sapiens
  misc_RNA (1)...(19): siRNA sense strand
gaagggaucaaccucaaau

SEQ ID NO: 464342 - RNA, 19 nt, Homo sapiens
  misc_RNA (1)...(19): siRNA sense strand
gcaugagccuucgggauga

SEQ ID NO: 464343 - RNA, 19 nt, Homo sapiens
  misc_RNA (1)...(19): siRNA sense strand
ggaucaaccucaaauucau

SEQ ID NO: 464344 - RNA, 19 nt, Homo sapiens
  misc_RNA (1)...(19): siRNA sense strand
gaaaugaugaaaugugaca

SEQ ID NO: 464345 - RNA, 19 nt, Homo sapiens
  misc_RNA (1)...(19): siRNA sense strand
cagaaucacuagagcugaa

SEQ ID NO: 464346 - RNA, 19 nt, Homo sapiens
  misc_RNA (1)...(19): siRNA sense strand
gcaucuguguuaacuucua

SEQ ID NO: 464347 - RNA, 19 nt, Homo sapiens
  misc_RNA (1)...(19): siRNA sense strand
acacuggagucacgcgaua

SEQ ID NO: 464348 - RNA, 19 nt, Homo sapiens
  misc_RNA (1)...(19): siRNA sense strand
ggcccagacuccugaauug

SEQ ID NO: 464349 - RNA, 19 nt, Homo sapiens
  misc_RNA (1)...(19): siRNA sense strand
ggacugaucaagacucugu

SEQ ID NO: 464350 - RNA, 19 nt, Homo sapiens
  misc_RNA (1)...(19): siRNA sense strand
aguaccagcuucagucuuu

SEQ ID NO: 464351 - RNA, 19 nt, Homo sapiens
  misc_RNA (1)...(19): siRNA sense strand
gcaugaccuucgagagauu

SEQ ID NO: 464352 - RNA, 19 nt, Homo sapiens
  misc_RNA (1)...(19): siRNA sense strand
aaucugcuacuccguauua

SEQ ID NO: 464353 - RNA, 19 nt, Homo sapiens
  misc_RNA (1)...(19): siRNA sense strand
gcccagacccacuacuaua

SEQ ID NO: 464354 - RNA, 19 nt, Homo sapiens
  misc_RNA (1)...(19): siRNA sense strand
cagggucgauccagcaauu

SEQ ID NO: 464355 - RNA, 19 nt, Homo sapiens
  misc_RNA (1)...(19): siRNA sense strand
gaaaagagaaccuccauca

SEQ ID NO: 464356 - RNA, 19 nt, Homo sapiens
  misc_RNA (1)...(19): siRNA sense strand
gauucacccuaguggauuu

SEQ ID NO: 464357 - RNA, 19 nt, Homo sapiens
  misc_RNA (1)...(19): siRNA sense strand
ccagacuccugaauugcua

SEQ ID NO: 464358 - RNA, 19 nt, Homo sapiens
  misc_RNA (1)...(19): siRNA sense strand
agaaugacauccgcaagaa

SEQ ID NO: 464359 - RNA, 19 nt, Homo sapiens
  misc_RNA (1)...(19): siRNA sense strand
cuucuuagaugcugugaug

SEQ ID NO: 464360 - RNA, 19 nt, Homo sapiens
  misc_RNA (1)...(19): siRNA sense strand
gagcagcaaugcaggugau

SEQ ID NO: 464361 - RNA, 19 nt, Homo sapiens
  misc_RNA (1)...(19): siRNA sense strand
gauucaagcucuucuuacu

SEQ ID NO: 464362 - RNA, 19 nt, Homo sapiens
  misc_RNA (1)...(19): siRNA sense strand
ccaacgugcugcagggauu

SEQ ID NO: 464363 - RNA, 19 nt, Homo sapiens
  misc_RNA (1)...(19): siRNA sense strand
ccuggaagaugaugaagau

SEQ ID NO: 464364 - RNA, 19 nt, Homo sapiens
  misc_RNA (1)...(19): siRNA sense strand
gaaguaaucaaaccugucu

SEQ ID NO: 464365 - RNA, 19 nt, Homo sapiens
  misc_RNA (1)...(19): siRNA sense strand
gaagaggguggcacugaga

SEQ ID NO: 464366 - RNA, 19 nt, Homo sapiens
  misc_RNA (1)...(19): siRNA sense strand
caucaaacccggaccugaa

SEQ ID NO: 464367 - RNA, 19 nt, Homo sapiens
  misc_RNA (1)...(19): siRNA sense strand
acgagaagcucaucaacau

SEQ ID NO: 464368 - RNA, 19 nt, Homo sapiens
  misc_RNA (1)...(19): siRNA sense strand
ccagaggacugaucaagac

SEQ ID NO: 464369 - RNA, 19 nt, Homo sapiens
  misc_RNA (1)...(19): siRNA sense strand
ggugugagccugacgucua

SEQ ID NO: 464370 - RNA, 19 nt, Homo sapiens
  misc_RNA (1)...(19): siRNA sense strand
guacaaagggacaccaugu

SEQ ID NO: 464371 - RNA, 19 nt, Homo sapiens
  misc_RNA (1)...(19): siRNA sense strand
ggagggcguuaguggauca

SEQ ID NO: 464372 - RNA, 19 nt, Homo sapiens
  misc_RNA (1)...(19): siRNA sense strand
gggaucaaccucaaauuca

SEQ ID NO: 464373 - RNA, 19 nt, Homo sapiens
  misc_RNA (1)...(19): siRNA sense strand
gaugauaccucuuuugucu

SEQ ID NO: 464374 - RNA, 19 nt, Homo sapiens
  misc_RNA (1)...(19): siRNA sense strand
gaguccagcuguuaugauc

SEQ ID NO: 464375 - RNA, 19 nt, Homo sapiens
  misc_RNA (1)...(19): siRNA sense strand
ccagccagcucugaccuuu

SEQ ID NO: 464376 - RNA, 19 nt, Homo sapiens
  misc_RNA (1)...(19): siRNA sense strand
uaacaucggaacaguguau

SEQ ID NO: 464377 - RNA, 19 nt, Homo sapiens
  misc_RNA (1)...(19): siRNA sense strand
caaaggcuauggcacaacu

SEQ ID NO: 464378 - RNA, 19 nt, Homo sapiens
  misc_RNA (1)...(19): siRNA sense strand
ggaagagaaguccaacaga

SEQ ID NO: 464379 - RNA, 19 nt, Homo sapiens
  misc_RNA (1)...(19): siRNA sense strand
gguguacaagggaauguua

SEQ ID NO: 464380 - RNA, 19 nt, Homo sapiens
  misc_RNA (1)...(19): siRNA sense strand
ccacggagccaacucugaa

SEQ ID NO: 464381 - RNA, 19 nt, Homo sapiens
  misc_RNA (1)...(19): siRNA sense strand
uugacgagcugcagaauca

SEQ ID NO: 464382 - RNA, 19 nt, Homo sapiens
  misc_RNA (1)...(19): siRNA sense strand
gaauucaacccacucaucu

SEQ ID NO: 464383 - RNA, 19 nt, Homo sapiens
  misc_RNA (1)...(19): siRNA sense strand
cucaacaaguucuauacua

SEQ ID NO: 464384 - RNA, 19 nt, Homo sapiens
  misc_RNA (1)...(19): siRNA sense strand
gaaggugaggcgccuaaug

SEQ ID NO: 464385 - RNA, 19 nt, Homo sapiens
  misc_RNA (1)...(19): siRNA sense strand
aggaaaugaucgacaggua

SEQ ID NO: 464386 - RNA, 19 nt, Homo sapiens
  misc_RNA (1)...(19): siRNA sense strand
ccagaaguuuaaaggaaga

SEQ ID NO: 464387 - RNA, 19 nt, Homo sapiens
  misc_RNA (1)...(19): siRNA sense strand
gccagcaucuuugggcuuu

SEQ ID NO: 464388 - RNA, 19 nt, Homo sapiens
  misc_RNA (1)...(19): siRNA sense strand
guacaguccucagcuugga

SEQ ID NO: 464389 - RNA, 19 nt, Homo sapiens
  misc_RNA (1)...(19): siRNA sense strand
gugacaagccaaaguggua

SEQ ID NO: 464390 - RNA, 19 nt, Homo sapiens
  misc_RNA (1)...(19): siRNA sense strand
uggcggaucuuuacuggau

SEQ ID NO: 464391 - RNA, 19 nt, Homo sapiens
  misc_RNA (1)...(19): siRNA sense strand
gaagguaaauaagaaugac

SEQ ID NO: 464392 - RNA, 19 nt, Homo sapiens
  misc_RNA (1)...(19): siRNA sense strand
uggcaucuguguuaacuuc

SEQ ID NO: 464393 - RNA, 19 nt, Homo sapiens
  misc_RNA (1)...(19): siRNA sense strand
uguuagaccuccucaagug

SEQ ID NO: 464394 - RNA, 19 nt, Homo sapiens
  misc_RNA (1)...(19): siRNA sense strand
ccagacccaucucgauuca

SEQ ID NO: 464395 - RNA, 19 nt, Homo sapiens
  misc_RNA (1)...(19): siRNA sense strand
gucgggagcuguacuacug

SEQ ID NO: 464396 - RNA, 19 nt, Homo sapiens
  misc_RNA (1)...(19): siRNA sense strand
guaguaacaucggaacagu

SEQ ID NO: 464397 - RNA, 19 nt, Homo sapiens
  misc_RNA (1)...(19): siRNA sense strand
cgaauucacaacaauaugu

SEQ ID NO: 464398 - RNA, 19 nt, Homo sapiens
  misc_RNA (1)...(19): siRNA sense strand
cagcgaauucacaacaaua

SEQ ID NO: 464399 - RNA, 19 nt, Homo sapiens
  misc_RNA (1)...(19): siRNA sense strand
ucuacaaacuggacuucaa

SEQ ID NO: 464400 - RNA, 19 nt, Homo sapiens
  misc_RNA (1)...(19): siRNA sense strand
uacaaacggagauaucuuu

SEQ ID NO: 464401 - RNA, 19 nt, Homo sapiens
  misc_RNA (1)...(19): siRNA sense strand
ggaagggaucaaccucaaa

SEQ ID NO: 464402 - RNA, 19 nt, Homo sapiens
  misc_RNA (1)...(19): siRNA sense strand
ugugugguguugcguagua

SEQ ID NO: 464403 - RNA, 19 nt, Homo sapiens
  misc_RNA (1)...(19): siRNA sense strand
gaagucaucugucauuaaa

SEQ ID NO: 464404 - RNA, 19 nt, Homo sapiens
  misc_RNA (1)...(19): siRNA sense strand
gaagagaaguccaacagaa

SEQ ID NO: 464405 - RNA, 19 nt, Homo sapiens
  misc_RNA (1)...(19): siRNA sense strand
gaaguucuguccucgguua

SEQ ID NO: 464406 - RNA, 19 nt, Homo sapiens
  misc_RNA (1)...(19): siRNA sense strand
cuacggagauggaugauaa

SEQ ID NO: 464407 - RNA, 19 nt, Homo sapiens
  misc_RNA (1)...(19): siRNA sense strand
gcagugauaguauggauua

SEQ ID NO: 464408 - RNA, 19 nt, Homo sapiens
  misc_RNA (1)...(19): siRNA sense strand
ggaagcgccuggaagauga

SEQ ID NO: 464409 - RNA, 19 nt, Homo sapiens
  misc_RNA (1)...(19): siRNA sense strand
caagugcccuucugcauga

SEQ ID NO: 464410 - RNA, 19 nt, Homo sapiens
  misc_RNA (1)...(19): siRNA sense strand
ggacagacgucaggcagaa

SEQ ID NO: 464411 - RNA, 19 nt, Homo sapiens
  misc_RNA (1)...(19): siRNA sense strand
caaaaugccugaugaugua

SEQ ID NO: 464412 - RNA, 19 nt, Homo sapiens
  misc_RNA (1)...(19): siRNA sense strand
aaacacagcccaacaguga

SEQ ID NO: 464413 - RNA, 19 nt, Homo sapiens
  misc_RNA (1)...(19): siRNA sense strand
gaaaucugcuacuccguau

SEQ ID NO: 464414 - RNA, 19 nt, Homo sapiens
  misc_RNA (1)...(19): siRNA sense strand
ucagugaaaugaugaaaug

SEQ ID NO: 464415 - RNA, 19 nt, Homo sapiens
  misc_RNA (1)...(19): siRNA sense strand
cgauauggcaucuguguua

SEQ ID NO: 464416 - RNA, 19 nt, Homo sapiens
  misc_RNA (1)...(19): siRNA sense strand
gugauaguauggauuauga

SEQ ID NO: 464417 - RNA, 19 nt, Homo sapiens
  misc_RNA (1)...(19): siRNA sense strand
gaugauaguggcagugaua

SEQ ID NO: 464418 - RNA, 19 nt, Homo sapiens
  misc_RNA (1)...(19): siRNA sense strand
ccacugcgcuccagcucua

SEQ ID NO: 464419 - RNA, 19 nt, Homo sapiens
  misc_RNA (1)...(19): siRNA sense strand
gugaaaugaugaaauguga

SEQ ID NO: 464420 - RNA, 19 nt, Homo sapiens
  misc_RNA (1)...(19): siRNA sense strand
ggacagcaauagggugauu

SEQ ID NO: 464421 - RNA, 19 nt, Homo sapiens
  misc_RNA (1)...(19): siRNA sense strand
gcaaaucaaugaggugcuu

SEQ ID NO: 464422 - RNA, 19 nt, Homo sapiens
  misc_RNA (1)...(19): siRNA sense strand
caccagaaguuuaaaggaa

SEQ ID NO: 464423 - RNA, 19 nt, Homo sapiens
  misc_RNA (1)...(19): siRNA sense strand
gauauggcaucuguguuaa

SEQ ID NO: 464424 - RNA, 19 nt, Homo sapiens
  misc_RNA (1)...(19): siRNA sense strand
uauuaugucucuucucgua

SEQ ID NO: 464425 - RNA, 19 nt, Homo sapiens
  misc_RNA (1)...(19): siRNA sense strand
caacagaaaguguaaauac

SEQ ID NO: 464426 - RNA, 19 nt, Homo sapiens
  misc_RNA (1)...(19): siRNA sense strand
caagcuggcuccuuucuag

SEQ ID NO: 464427 - RNA, 19 nt, Homo sapiens
  misc_RNA (1)...(19): siRNA sense strand
gugcuaaccugcauucugu

SEQ ID NO: 464428 - RNA, 19 nt, Homo sapiens
  misc_RNA (1)...(19): siRNA sense strand
gauaguggcagugauagua

SEQ ID NO: 464429 - RNA, 19 nt, Homo sapiens
  misc_RNA (1)...(19): siRNA sense strand
guacguggcugcaguucau

SEQ ID NO: 464430 - RNA, 19 nt, Homo sapiens
  misc_RNA (1)...(19): siRNA sense strand
ucaaauucaugcacaauca

SEQ ID NO: 464431 - RNA, 19 nt, Homo sapiens
  misc_RNA (1)...(19): siRNA sense strand
agacccagcucaacaaguu

SEQ ID NO: 464432 - RNA, 19 nt, Homo sapiens
  misc_RNA (1)...(19): siRNA sense strand
ccagcgagguggagauuga

SEQ ID NO: 464433 - RNA, 19 nt, Homo sapiens
  misc_RNA (1)...(19): siRNA sense strand
gagcuguacuacuguguga

SEQ ID NO: 464434 - RNA, 19 nt, Homo sapiens
  misc_RNA (1)...(19): siRNA sense strand
guacaugcagggacagaua

SEQ ID NO: 464435 - RNA, 19 nt, Homo sapiens
  misc_RNA (1)...(19): siRNA sense strand
gaagcagacauuuguggua

SEQ ID NO: 464436 - RNA, 19 nt, Homo sapiens
  misc_RNA (1)...(19): siRNA sense strand
gcucugaccuuugcucuuc

SEQ ID NO: 464437 - RNA, 19 nt, Homo sapiens
  misc_RNA (1)...(19): siRNA sense strand
gagaagggauggguaugga

SEQ ID NO: 464438 - RNA, 19 nt, Homo sapiens
  misc_RNA (1)...(19): siRNA sense strand
ugaauuggguggcgaguuc

SEQ ID NO: 464439 - RNA, 19 nt, Homo sapiens
  misc_RNA (1)...(19): siRNA sense strand
agacgaagguguugugcuu

SEQ ID NO: 464440 - RNA, 19 nt, Homo sapiens
  misc_RNA (1)...(19): siRNA sense strand
ugaagaagcagacauuugu

SEQ ID NO: 464441 - RNA, 19 nt, Homo sapiens
  misc_RNA (1)...(19): siRNA sense strand
gaagggaucaaccucaaau

SEQ ID NO: 464442 - RNA, 19 nt, Homo sapiens
  misc_RNA (1)...(19): siRNA sense strand
gcaugagccuucgggauga

SEQ ID NO: 464443 - RNA, 19 nt, Homo sapiens
  misc_RNA (1)...(19): siRNA sense strand
ggaucaaccucaaauucau

SEQ ID NO: 464444 - RNA, 19 nt, Homo sapiens
  misc_RNA (1)...(19): siRNA sense strand
gaaaugaugaaaugugaca

SEQ ID NO: 464445 - RNA, 19 nt, Homo sapiens
  misc_RNA (1)...(19): siRNA sense strand
cagaaucacuagagcugaa

SEQ ID NO: 464446 - RNA, 19 nt, Homo sapiens
  misc_RNA (1)...(19): siRNA sense strand
gcaucuguguuaacuucua

SEQ ID NO: 464447 - RNA, 19 nt, Homo sapiens
  misc_RNA (1)...(19): siRNA sense strand
acacuggagucacgcgaua

SEQ ID NO: 464448 - RNA, 19 nt, Homo sapiens
  misc_RNA (1)...(19): siRNA sense strand
ggcccagacuccugaauug

SEQ ID NO: 464449 - RNA, 19 nt, Homo sapiens
  misc_RNA (1)...(19): siRNA sense strand
ggacugaucaagacucugu

SEQ ID NO: 464450 - RNA, 19 nt, Homo sapiens
  misc_RNA (1)...(19): siRNA sense strand
aguaccagcuucagucuuu

SEQ ID NO: 464451 - RNA, 19 nt, Homo sapiens
  misc_RNA (1)...(19): siRNA sense strand
gcaugaccuucgagagauu

SEQ ID NO: 464452 - RNA, 19 nt, Homo sapiens
  misc_RNA (1)...(19): siRNA sense strand
aaucugcuacuccguauua

SEQ ID NO: 464453 - RNA, 19 nt, Homo sapiens
  misc_RNA (1)...(19): siRNA sense strand
gcccagacccacuacuaua

SEQ ID NO: 464454 - RNA, 19 nt, Homo sapiens
  misc_RNA (1)...(19): siRNA sense strand
cagggucgauccagcaauu

SEQ ID NO: 464455 - RNA, 19 nt, Homo sapiens
  misc_RNA (1)...(19): siRNA sense strand
gaaaagagaaccuccauca

SEQ ID NO: 464456 - RNA, 19 nt, Homo sapiens
  misc_RNA (1)...(19): siRNA sense strand
gauucacccuaguggauuu

SEQ ID NO: 464457 - RNA, 19 nt, Homo sapiens
  misc_RNA (1)...(19): siRNA sense strand
ccagacuccugaauugcua

SEQ ID NO: 464458 - RNA, 19 nt, Homo sapiens
  misc_RNA (1)...(19): siRNA sense strand
agaaugacauccgcaagaa

SEQ ID NO: 464459 - RNA, 19 nt, Homo sapiens
  misc_RNA (1)...(19): siRNA sense strand
cuucuuagaugcugugaug

SEQ ID NO: 464460 - RNA, 19 nt, Homo sapiens
  misc_RNA (1)...(19): siRNA sense strand
gagcagcaaugcaggugau

SEQ ID NO: 464461 - RNA, 19 nt, Homo sapiens
  misc_RNA (1)...(19): siRNA sense strand
gauucaagcucuucuuacu

SEQ ID NO: 464462 - RNA, 19 nt, Homo sapiens
  misc_RNA (1)...(19): siRNA sense strand
ccaacgugcugcagggauu

SEQ ID NO: 464463 - RNA, 19 nt, Homo sapiens
  misc_RNA (1)...(19): siRNA sense strand
ccuggaagaugaugaagau

SEQ ID NO: 464464 - RNA, 19 nt, Homo sapiens
  misc_RNA (1)...(19): siRNA sense strand
gaaguaaucaaaccugucu

SEQ ID NO: 464465 - RNA, 19 nt, Homo sapiens
  misc_RNA (1)...(19): siRNA sense strand
gaagaggguggcacugaga

SEQ ID NO: 464466 - RNA, 19 nt, Homo sapiens
  misc_RNA (1)...(19): siRNA sense strand
caucaaacccggaccugaa

SEQ ID NO: 464467 - RNA, 19 nt, Homo sapiens
  misc_RNA (1)...(19): siRNA sense strand
acgagaagcucaucaacau

SEQ ID NO: 464468 - RNA, 19 nt, Homo sapiens
  misc_RNA (1)...(19): siRNA sense strand
ccagaggacugaucaagac

SEQ ID NO: 464469 - RNA, 19 nt, Homo sapiens
  misc_RNA (1)...(19): siRNA sense strand
ggugugagccugacgucua

SEQ ID NO: 464470 - RNA, 19 nt, Homo sapiens
  misc_RNA (1)...(19): siRNA sense strand
guacaaagggacaccaugu

SEQ ID NO: 464471 - RNA, 19 nt, Homo sapiens
  misc_RNA (1)...(19): siRNA sense strand
ggagggcguuaguggauca

SEQ ID NO: 464472 - RNA, 19 nt, Homo sapiens
  misc_RNA (1)...(19): siRNA sense strand
gggaucaaccucaaauuca

SEQ ID NO: 464473 - RNA, 19 nt, Homo sapiens
  misc_RNA (1)...(19): siRNA sense strand
gaugauaccucuuuugucu

SEQ ID NO: 464474 - RNA, 19 nt, Homo sapiens
  misc_RNA (1)...(19): siRNA sense strand
gaguccagcuguuaugauc

SEQ ID NO: 464475 - RNA, 19 nt, Homo sapiens
  misc_RNA (1)...(19): siRNA sense strand
ccagccagcucugaccuuu

SEQ ID NO: 464476 - RNA, 19 nt, Homo sapiens
  misc_RNA (1)...(19): siRNA sense strand
uaacaucggaacaguguau

SEQ ID NO: 464477 - RNA, 19 nt, Homo sapiens
  misc_RNA (1)...(19): siRNA sense strand
caaaggcuauggcacaacu

SEQ ID NO: 464478 - RNA, 19 nt, Homo sapiens
  misc_RNA (1)...(19): siRNA sense strand
ggaagagaaguccaacaga

SEQ ID NO: 464479 - RNA, 19 nt, Homo sapiens
  misc_RNA (1)...(19): siRNA sense strand
gguguacaagggaauguua

SEQ ID NO: 464480 - RNA, 19 nt, Homo sapiens
  misc_RNA (1)...(19): siRNA sense strand
ccacggagccaacucugaa

SEQ ID NO: 464481 - RNA, 19 nt, Homo sapiens
  misc_RNA (1)...(19): siRNA sense strand
uugacgagcugcagaauca

SEQ ID NO: 464482 - RNA, 19 nt, Homo sapiens
  misc_RNA (1)...(19): siRNA sense strand
gaauucaacccacucaucu

SEQ ID NO: 464483 - RNA, 19 nt, Homo sapiens
  misc_RNA (1)...(19): siRNA sense strand
cucaacaaguucuauacua

SEQ ID NO: 464484 - RNA, 19 nt, Homo sapiens
  misc_RNA (1)...(19): siRNA sense strand
gaaggugaggcgccuaaug

SEQ ID NO: 464485 - RNA, 19 nt, Homo sapiens
  misc_RNA (1)...(19): siRNA sense strand
aggaaaugaucgacaggua

SEQ ID NO: 464486 - RNA, 19 nt, Homo sapiens
  misc_RNA (1)...(19): siRNA sense strand
ccagaaguuuaaaggaaga

SEQ ID NO: 464487 - RNA, 19 nt, Homo sapiens
  misc_RNA (1)...(19): siRNA sense strand
gccagcaucuuugggcuuu

SEQ ID NO: 464488 - RNA, 19 nt, Homo sapiens
  misc_RNA (1)...(19): siRNA sense strand
guacaguccucagcuugga

SEQ ID NO: 464489 - RNA, 19 nt, Homo sapiens
  misc_RNA (1)...(19): siRNA sense strand
gugacaagccaaaguggua

SEQ ID NO: 464490 - RNA, 19 nt, Homo sapiens
  misc_RNA (1)...(19): siRNA sense strand
uggcggaucuuuacuggau

SEQ ID NO: 464491 - RNA, 19 nt, Homo sapiens
  misc_RNA (1)...(19): siRNA sense strand
gaagguaaauaagaaugac

SEQ ID NO: 464492 - RNA, 19 nt, Homo sapiens
  misc_RNA (1)...(19): siRNA sense strand
uggcaucuguguuaacuuc

SEQ ID NO: 464493 - RNA, 19 nt, Homo sapiens
  misc_RNA (1)...(19): siRNA sense strand
uguuagaccuccucaagug

SEQ ID NO: 464494 - RNA, 19 nt, Homo sapiens
  misc_RNA (1)...(19): siRNA sense strand
ccagacccaucucgauuca

SEQ ID NO: 464495 - RNA, 19 nt, Homo sapiens
  misc_RNA (1)...(19): siRNA sense strand
gucgggagcuguacuacug

SEQ ID NO: 464496 - RNA, 19 nt, Homo sapiens
  misc_RNA (1)...(19): siRNA sense strand
guaguaacaucggaacagu

SEQ ID NO: 464497 - RNA, 19 nt, Homo sapiens
  misc_RNA (1)...(19): siRNA sense strand
cgaauucacaacaauaugu

SEQ ID NO: 464498 - RNA, 19 nt, Homo sapiens
  misc_RNA (1)...(19): siRNA sense strand
cagcgaauucacaacaaua

SEQ ID NO: 464499 - RNA, 19 nt, Homo sapiens
  misc_RNA (1)...(19): siRNA sense strand
ucuacaaacuggacuucaa

SEQ ID NO: 464500 - RNA, 19 nt, Homo sapiens
  misc_RNA (1)...(19): siRNA sense strand
uacaaacggagauaucuuu

SEQ ID NO: 464501 - RNA, 19 nt, Homo sapiens
  misc_RNA (1)...(19): siRNA sense strand
ggaagggaucaaccucaaa

SEQ ID NO: 464502 - RNA, 19 nt, Homo sapiens
  misc_RNA (1)...(19): siRNA sense strand
ugugugguguugcguagua

SEQ ID NO: 464503 - RNA, 19 nt, Homo sapiens
  misc_RNA (1)...(19): siRNA sense strand
gaagucaucugucauuaaa

SEQ ID NO: 464504 - RNA, 19 nt, Homo sapiens
  misc_RNA (1)...(19): siRNA sense strand
gaagagaaguccaacagaa

SEQ ID NO: 464505 - RNA, 19 nt, Homo sapiens
  misc_RNA (1)...(19): siRNA sense strand
gaaguucuguccucgguua

SEQ ID NO: 464506 - RNA, 19 nt, Homo sapiens
  misc_RNA (1)...(19): siRNA sense strand
cuacggagauggaugauaa

SEQ ID NO: 464507 - RNA, 19 nt, Homo sapiens
  misc_RNA (1)...(19): siRNA sense strand
gcagugauaguauggauua

SEQ ID NO: 464508 - RNA, 19 nt, Homo sapiens
  misc_RNA (1)...(19): siRNA sense strand
ggaagcgccuggaagauga

SEQ ID NO: 464509 - RNA, 19 nt, Homo sapiens
  misc_RNA (1)...(19): siRNA sense strand
caagugcccuucugcauga

SEQ ID NO: 464510 - RNA, 19 nt, Homo sapiens
  misc_RNA (1)...(19): siRNA sense strand
ggacagacgucaggcagaa

SEQ ID NO: 464511 - RNA, 19 nt, Homo sapiens
  misc_RNA (1)...(19): siRNA sense strand
caaaaugccugaugaugua

SEQ ID NO: 464512 - RNA, 19 nt, Homo sapiens
  misc_RNA (1)...(19): siRNA sense strand
aaacacagcccaacaguga

SEQ ID NO: 464513 - RNA, 19 nt, Homo sapiens
  misc_RNA (1)...(19): siRNA sense strand
gaaaucugcuacuccguau

SEQ ID NO: 464514 - RNA, 19 nt, Homo sapiens
  misc_RNA (1)...(19): siRNA sense strand
ucagugaaaugaugaaaug

SEQ ID NO: 464515 - RNA, 19 nt, Homo sapiens
  misc_RNA (1)...(19): siRNA sense strand
cgauauggcaucuguguua

SEQ ID NO: 464516 - RNA, 19 nt, Homo sapiens
  misc_RNA (1)...(19): siRNA sense strand
gugauaguauggauuauga

SEQ ID NO: 464517 - RNA, 19 nt, Homo sapiens
  misc_RNA (1)...(19): siRNA sense strand
gaugauaguggcagugaua

SEQ ID NO: 464518 - RNA, 19 nt, Homo sapiens
  misc_RNA (1)...(19): siRNA sense strand
ccacugcgcuccagcucua

SEQ ID NO: 464519 - RNA, 19 nt, Homo sapiens
  misc_RNA (1)...(19): siRNA sense strand
gugaaaugaugaaauguga

SEQ ID NO: 464520 - RNA, 19 nt, Homo sapiens
  misc_RNA (1)...(19): siRNA sense strand
ggacagcaauagggugauu

SEQ ID NO: 464521 - RNA, 19 nt, Homo sapiens
  misc_RNA (1)...(19): siRNA sense strand
gcaaaucaaugaggugcuu

SEQ ID NO: 464522 - RNA, 19 nt, Homo sapiens
  misc_RNA (1)...(19): siRNA sense strand
caccagaaguuuaaaggaa

SEQ ID NO: 464523 - RNA, 19 nt, Homo sapiens
  misc_RNA (1)...(19): siRNA sense strand
gauauggcaucuguguuaa

SEQ ID NO: 464524 - RNA, 19 nt, Homo sapiens
  misc_RNA (1)...(19): siRNA sense strand
uauuaugucucuucucgua

SEQ ID NO: 464525 - RNA, 19 nt, Homo sapiens
  misc_RNA (1)...(19): siRNA sense strand
caacagaaaguguaaauac

SEQ ID NO: 464526 - RNA, 19 nt, Homo sapiens
  misc_RNA (1)...(19): siRNA sense strand
caagcuggcuccuuucuag

SEQ ID NO: 464527 - RNA, 19 nt, Homo sapiens
  misc_RNA (1)...(19): siRNA sense strand
gugcuaaccugcauucugu

SEQ ID NO: 464528 - RNA, 19 nt, Homo sapiens
  misc_RNA (1)...(19): siRNA sense strand
gauaguggcagugauagua

SEQ ID NO: 464529 - RNA, 19 nt, Homo sapiens
  misc_RNA (1)...(19): siRNA sense strand
guacguggcugcaguucau

SEQ ID NO: 464530 - RNA, 19 nt, Homo sapiens
  misc_RNA (1)...(19): siRNA sense strand
ucaaauucaugcacaauca

SEQ ID NO: 464531 - RNA, 19 nt, Homo sapiens
  misc_RNA (1)...(19): siRNA sense strand
agacccagcucaacaaguu

SEQ ID NO: 464532 - RNA, 19 nt, Homo sapiens
  misc_RNA (1)...(19): siRNA sense strand
ccagcgagguggagauuga

SEQ ID NO: 464533 - RNA, 19 nt, Homo sapiens
  misc_RNA (1)...(19): siRNA sense strand
gagcuguacuacuguguga

SEQ ID NO: 464534 - RNA, 19 nt, Homo sapiens
  misc_RNA (1)...(19): siRNA sense strand
guacaugcagggacagaua

SEQ ID NO: 464535 - RNA, 19 nt, Homo sapiens
  misc_RNA (1)...(19): siRNA sense strand
gaagcagacauuuguggua

SEQ ID NO: 464536 - RNA, 19 nt, Homo sapiens
  misc_RNA (1)...(19): siRNA sense strand
gcucugaccuuugcucuuc

SEQ ID NO: 464537 - RNA, 19 nt, Homo sapiens
  misc_RNA (1)...(19): siRNA sense strand
gagaagggauggguaugga

SEQ ID NO: 464538 - RNA, 19 nt, Homo sapiens
  misc_RNA (1)...(19): siRNA sense strand
ugaauuggguggcgaguuc

SEQ ID NO: 464539 - RNA, 19 nt, Homo sapiens
  misc_RNA (1)...(19): siRNA sense strand
agacgaagguguugugcuu

SEQ ID NO: 464540 - RNA, 19 nt, Homo sapiens
  misc_RNA (1)...(19): siRNA sense strand
ugaagaagcagacauuugu

SEQ ID NO: 464541 - RNA, 19 nt, Homo sapiens
  misc_RNA (1)...(19): siRNA sense strand
gaagggaucaaccucaaau

SEQ ID NO: 464542 - RNA, 19 nt, Homo sapiens
  misc_RNA (1)...(19): siRNA sense strand
gcaugagccuucgggauga

SEQ ID NO: 464543 - RNA, 19 nt, Homo sapiens
  misc_RNA (1)...(19): siRNA sense strand
ggaucaaccucaaauucau

SEQ ID NO: 464544 - RNA, 19 nt, Homo sapiens
  misc_RNA (1)...(19): siRNA sense strand
gaaaugaugaaaugugaca

SEQ ID NO: 464545 - RNA, 19 nt, Homo sapiens
  misc_RNA (1)...(19): siRNA sense strand
cagaaucacuagagcugaa

SEQ ID NO: 464546 - RNA, 19 nt, Homo sapiens
  misc_RNA (1)...(19): siRNA sense strand
gcaucuguguuaacuucua

SEQ ID NO: 464547 - RNA, 19 nt, Homo sapiens
  misc_RNA (1)...(19): siRNA sense strand
acacuggagucacgcgaua

SEQ ID NO: 464548 - RNA, 19 nt, Homo sapiens
  misc_RNA (1)...(19): siRNA sense strand
ggcccagacuccugaauug

SEQ ID NO: 464549 - RNA, 19 nt, Homo sapiens
  misc_RNA (1)...(19): siRNA sense strand
ggacugaucaagacucugu

SEQ ID NO: 464550 - RNA, 19 nt, Homo sapiens
  misc_RNA (1)...(19): siRNA sense strand
aguaccagcuucagucuuu

SEQ ID NO: 464551 - RNA, 19 nt, Homo sapiens
  misc_RNA (1)...(19): siRNA sense strand
gcaugaccuucgagagauu

SEQ ID NO: 464552 - RNA, 19 nt, Homo sapiens
  misc_RNA (1)...(19): siRNA sense strand
aaucugcuacuccguauua

SEQ ID NO: 464553 - RNA, 19 nt, Homo sapiens
  misc_RNA (1)...(19): siRNA sense strand
gcccagacccacuacuaua

SEQ ID NO: 464554 - RNA, 19 nt, Homo sapiens
  misc_RNA (1)...(19): siRNA sense strand
cagggucgauccagcaauu

SEQ ID NO: 464555 - RNA, 19 nt, Homo sapiens
  misc_RNA (1)...(19): siRNA sense strand
gaaaagagaaccuccauca

SEQ ID NO: 464556 - RNA, 19 nt, Homo sapiens
  misc_RNA (1)...(19): siRNA sense strand
gauucacccuaguggauuu

SEQ ID NO: 464557 - RNA, 19 nt, Homo sapiens
  misc_RNA (1)...(19): siRNA sense strand
ccagacuccugaauugcua

SEQ ID NO: 464558 - RNA, 19 nt, Homo sapiens
  misc_RNA (1)...(19): siRNA sense strand
agaaugacauccgcaagaa

SEQ ID NO: 464559 - RNA, 19 nt, Homo sapiens
  misc_RNA (1)...(19): siRNA sense strand
cuucuuagaugcugugaug

SEQ ID NO: 464560 - RNA, 19 nt, Homo sapiens
  misc_RNA (1)...(19): siRNA sense strand
gagcagcaaugcaggugau

SEQ ID NO: 464561 - RNA, 19 nt, Homo sapiens
  misc_RNA (1)...(19): siRNA sense strand
gauucaagcucuucuuacu

SEQ ID NO: 464562 - RNA, 19 nt, Homo sapiens
  misc_RNA (1)...(19): siRNA sense strand
ccaacgugcugcagggauu

SEQ ID NO: 464563 - RNA, 19 nt, Homo sapiens
  misc_RNA (1)...(19): siRNA sense strand
ccuggaagaugaugaagau

SEQ ID NO: 464564 - RNA, 19 nt, Homo sapiens
  misc_RNA (1)...(19): siRNA sense strand
gaaguaaucaaaccugucu

SEQ ID NO: 464565 - RNA, 19 nt, Homo sapiens
  misc_RNA (1)...(19): siRNA sense strand
gaagaggguggcacugaga

SEQ ID NO: 464566 - RNA, 19 nt, Homo sapiens
  misc_RNA (1)...(19): siRNA sense strand
caucaaacccggaccugaa

SEQ ID NO: 464567 - RNA, 19 nt, Homo sapiens
  misc_RNA (1)...(19): siRNA sense strand
acgagaagcucaucaacau

SEQ ID NO: 464568 - RNA, 19 nt, Homo sapiens
  misc_RNA (1)...(19): siRNA sense strand
ccagaggacugaucaagac

SEQ ID NO: 464569 - RNA, 19 nt, Homo sapiens
  misc_RNA (1)...(19): siRNA sense strand
ggugugagccugacgucua

SEQ ID NO: 464570 - RNA, 19 nt, Homo sapiens
  misc_RNA (1)...(19): siRNA sense strand
guacaaagggacaccaugu

SEQ ID NO: 464571 - RNA, 19 nt, Homo sapiens
  misc_RNA (1)...(19): siRNA sense strand
ggagggcguuaguggauca

SEQ ID NO: 464572 - RNA, 19 nt, Homo sapiens
  misc_RNA (1)...(19): siRNA sense strand
gggaucaaccucaaauuca

SEQ ID NO: 464573 - RNA, 19 nt, Homo sapiens
  misc_RNA (1)...(19): siRNA sense strand
gaugauaccucuuuugucu

SEQ ID NO: 464574 - RNA, 19 nt, Homo sapiens
  misc_RNA (1)...(19): siRNA sense strand
gaguccagcuguuaugauc

SEQ ID NO: 464575 - RNA, 19 nt, Homo sapiens
  misc_RNA (1)...(19): siRNA sense strand
ccagccagcucugaccuuu

SEQ ID NO: 464576 - RNA, 19 nt, Homo sapiens
  misc_RNA (1)...(19): siRNA sense strand
uaacaucggaacaguguau

SEQ ID NO: 464577 - RNA, 19 nt, Homo sapiens
  misc_RNA (1)...(19): siRNA sense strand
caaaggcuauggcacaacu

SEQ ID NO: 464578 - RNA, 19 nt, Homo sapiens
  misc_RNA (1)...(19): siRNA sense strand
ggaagagaaguccaacaga

SEQ ID NO: 464579 - RNA, 19 nt, Homo sapiens
  misc_RNA (1)...(19): siRNA sense strand
gguguacaagggaauguua

SEQ ID NO: 464580 - RNA, 19 nt, Homo sapiens
  misc_RNA (1)...(19): siRNA sense strand
ccacggagccaacucugaa

SEQ ID NO: 464581 - RNA, 19 nt, Homo sapiens
  misc_RNA (1)...(19): siRNA sense strand
uugacgagcugcagaauca

SEQ ID NO: 464582 - RNA, 19 nt, Homo sapiens
  misc_RNA (1)...(19): siRNA sense strand
gaauucaacccacucaucu

SEQ ID NO: 464583 - RNA, 19 nt, Homo sapiens
  misc_RNA (1)...(19): siRNA sense strand
cucaacaaguucuauacua

SEQ ID NO: 464584 - RNA, 19 nt, Homo sapiens
  misc_RNA (1)...(19): siRNA sense strand
gaaggugaggcgccuaaug

SEQ ID NO: 464585 - RNA, 19 nt, Homo sapiens
  misc_RNA (1)...(19): siRNA sense strand
aggaaaugaucgacaggua

SEQ ID NO: 464586 - RNA, 19 nt, Homo sapiens
  misc_RNA (1)...(19): siRNA sense strand
ccagaaguuuaaaggaaga

SEQ ID NO: 464587 - RNA, 19 nt, Homo sapiens
  misc_RNA (1)...(19): siRNA sense strand
gccagcaucuuugggcuuu

SEQ ID NO: 464588 - RNA, 19 nt, Homo sapiens
  misc_RNA (1)...(19): siRNA sense strand
guacaguccucagcuugga

SEQ ID NO: 464589 - RNA, 19 nt, Homo sapiens
  misc_RNA (1)...(19): siRNA sense strand
gugacaagccaaaguggua

SEQ ID NO: 464590 - RNA, 19 nt, Homo sapiens
  misc_RNA (1)...(19): siRNA sense strand
uggcggaucuuuacuggau

SEQ ID NO: 464591 - RNA, 19 nt, Homo sapiens
  misc_RNA (1)...(19): siRNA sense strand
gaagguaaauaagaaugac

SEQ ID NO: 464592 - RNA, 19 nt, Homo sapiens
  misc_RNA (1)...(19): siRNA sense strand
uggcaucuguguuaacuuc

SEQ ID NO: 464593 - RNA, 19 nt, Homo sapiens
  misc_RNA (1)...(19): siRNA sense strand
uguuagaccuccucaagug

SEQ ID NO: 464594 - RNA, 19 nt, Homo sapiens
  misc_RNA (1)...(19): siRNA sense strand
ccagacccaucucgauuca

SEQ ID NO: 464595 - RNA, 19 nt, Homo sapiens
  misc_RNA (1)...(19): siRNA sense strand
gucgggagcuguacuacug

SEQ ID NO: 464596 - RNA, 19 nt, Homo sapiens
  misc_RNA (1)...(19): siRNA sense strand
guaguaacaucggaacagu

SEQ ID NO: 464597 - RNA, 19 nt, Homo sapiens
  misc_RNA (1)...(19): siRNA sense strand
cgaauucacaacaauaugu

SEQ ID NO: 464598 - RNA, 19 nt, Homo sapiens
  misc_RNA (1)...(19): siRNA sense strand
cagcgaauucacaacaaua

SEQ ID NO: 464599 - RNA, 19 nt, Homo sapiens
  misc_RNA (1)...(19): siRNA sense strand
ucuacaaacuggacuucaa

SEQ ID NO: 464600 - RNA, 19 nt, Homo sapiens
  misc_RNA (1)...(19): siRNA sense strand
uacaaacggagauaucuuu

SEQ ID NO: 464601 - RNA, 19 nt, Homo sapiens
  misc_RNA (1)...(19): siRNA sense strand
ggaagggaucaaccucaaa

SEQ ID NO: 464602 - RNA, 19 nt, Homo sapiens
  misc_RNA (1)...(19): siRNA sense strand
ugugugguguugcguagua

SEQ ID NO: 464603 - RNA, 19 nt, Homo sapiens
  misc_RNA (1)...(19): siRNA sense strand
gaagucaucugucauuaaa

SEQ ID NO: 464604 - RNA, 19 nt, Homo sapiens
  misc_RNA (1)...(19): siRNA sense strand
gaagagaaguccaacagaa

SEQ ID NO: 464605 - RNA, 19 nt, Homo sapiens
  misc_RNA (1)...(19): siRNA sense strand
gaaguucuguccucgguua

SEQ ID NO: 464606 - RNA, 19 nt, Homo sapiens
  misc_RNA (1)...(19): siRNA sense strand
cuacggagauggaugauaa

SEQ ID NO: 464607 - RNA, 19 nt, Homo sapiens
  misc_RNA (1)...(19): siRNA sense strand
gcagugauaguauggauua

SEQ ID NO: 464608 - RNA, 19 nt, Homo sapiens
  misc_RNA (1)...(19): siRNA sense strand
ggaagcgccuggaagauga

SEQ ID NO: 464609 - RNA, 19 nt, Homo sapiens
  misc_RNA (1)...(19): siRNA sense strand
caagugcccuucugcauga

SEQ ID NO: 464610 - RNA, 19 nt, Homo sapiens
  misc_RNA (1)...(19): siRNA sense strand
ggacagacgucaggcagaa

SEQ ID NO: 464611 - RNA, 19 nt, Homo sapiens
  misc_RNA (1)...(19): siRNA sense strand
caaaaugccugaugaugua

SEQ ID NO: 464612 - RNA, 19 nt, Homo sapiens
  misc_RNA (1)...(19): siRNA sense strand
aaacacagcccaacaguga

SEQ ID NO: 464613 - RNA, 19 nt, Homo sapiens
  misc_RNA (1)...(19): siRNA sense strand
gaaaucugcuacuccguau

SEQ ID NO: 464614 - RNA, 19 nt, Homo sapiens
  misc_RNA (1)...(19): siRNA sense strand
ucagugaaaugaugaaaug

SEQ ID NO: 464615 - RNA, 19 nt, Homo sapiens
  misc_RNA (1)...(19): siRNA sense strand
cgauauggcaucuguguua

SEQ ID NO: 464616 - RNA, 19 nt, Homo sapiens
  misc_RNA (1)...(19): siRNA sense strand
gugauaguauggauuauga

SEQ ID NO: 464617 - RNA, 19 nt, Homo sapiens
  misc_RNA (1)...(19): siRNA sense strand
gaugauaguggcagugaua

SEQ ID NO: 464618 - RNA, 19 nt, Homo sapiens
  misc_RNA (1)...(19): siRNA sense strand
ccacugcgcuccagcucua

SEQ ID NO: 464619 - RNA, 19 nt, Homo sapiens
  misc_RNA (1)...(19): siRNA sense strand
gugaaaugaugaaauguga

SEQ ID NO: 464620 - RNA, 19 nt, Homo sapiens
  misc_RNA (1)...(19): siRNA sense strand
ggacagcaauagggugauu

SEQ ID NO: 464621 - RNA, 19 nt, Homo sapiens
  misc_RNA (1)...(19): siRNA sense strand
gcaaaucaaugaggugcuu

SEQ ID NO: 464622 - RNA, 19 nt, Homo sapiens
  misc_RNA (1)...(19): siRNA sense strand
caccagaaguuuaaaggaa

SEQ ID NO: 464623 - RNA, 19 nt, Homo sapiens
  misc_RNA (1)...(19): siRNA sense strand
gauauggcaucuguguuaa

SEQ ID NO: 464624 - RNA, 19 nt, Homo sapiens
  misc_RNA (1)...(19): siRNA sense strand
uauuaugucucuucucgua

SEQ ID NO: 464625 - RNA, 19 nt, Homo sapiens
  misc_RNA (1)...(19): siRNA sense strand
caacagaaaguguaaauac

SEQ ID NO: 464626 - RNA, 19 nt, Homo sapiens
  misc_RNA (1)...(19): siRNA sense strand
caagcuggcuccuuucuag

SEQ ID NO: 464627 - RNA, 19 nt, Homo sapiens
  misc_RNA (1)...(19): siRNA sense strand
gugcuaaccugcauucugu

SEQ ID NO: 464628 - RNA, 19 nt, Homo sapiens
  misc_RNA (1)...(19): siRNA sense strand
gauaguggcagugauagua

SEQ ID NO: 464629 - RNA, 19 nt, Homo sapiens
  misc_RNA (1)...(19): siRNA sense strand
guacguggcugcaguucau

SEQ ID NO: 464630 - RNA, 19 nt, Homo sapiens
  misc_RNA (1)...(19): siRNA sense strand
ucaaauucaugcacaauca

SEQ ID NO: 464631 - RNA, 19 nt, Homo sapiens
  misc_RNA (1)...(19): siRNA sense strand
agacccagcucaacaaguu

SEQ ID NO: 464632 - RNA, 19 nt, Homo sapiens
  misc_RNA (1)...(19): siRNA sense strand
ccagcgagguggagauuga

SEQ ID NO: 464633 - RNA, 19 nt, Homo sapiens
  misc_RNA (1)...(19): siRNA sense strand
gagcuguacuacuguguga

SEQ ID NO: 464634 - RNA, 19 nt, Homo sapiens
  misc_RNA (1)...(19): siRNA sense strand
guacaugcagggacagaua

SEQ ID NO: 464635 - RNA, 19 nt, Homo sapiens
  misc_RNA (1)...(19): siRNA sense strand
gaagcagacauuuguggua

SEQ ID NO: 464636 - RNA, 19 nt, Homo sapiens
  misc_RNA (1)...(19): siRNA sense strand
gcucugaccuuugcucuuc

SEQ ID NO: 464637 - RNA, 19 nt, Homo sapiens
  misc_RNA (1)...(19): siRNA sense strand
gagaagggauggguaugga

SEQ ID NO: 464638 - RNA, 19 nt, Homo sapiens
  misc_RNA (1)...(19): siRNA sense strand
ugaauuggguggcgaguuc

SEQ ID NO: 464639 - RNA, 19 nt, Homo sapiens
  misc_RNA (1)...(19): siRNA sense strand
agacgaagguguugugcuu

SEQ ID NO: 464640 - RNA, 19 nt, Homo sapiens
  misc_RNA (1)...(19): siRNA sense strand
ugaagaagcagacauuugu

SEQ ID NO: 464641 - RNA, 19 nt, Homo sapiens
  misc_RNA (1)...(19): siRNA sense strand
gaagggaucaaccucaaau

SEQ ID NO: 464642 - RNA, 19 nt, Homo sapiens
  misc_RNA (1)...(19): siRNA sense strand
gcaugagccuucgggauga

SEQ ID NO: 464643 - RNA, 19 nt, Homo sapiens
  misc_RNA (1)...(19): siRNA sense strand
ggaucaaccucaaauucau

SEQ ID NO: 464644 - RNA, 19 nt, Homo sapiens
  misc_RNA (1)...(19): siRNA sense strand
gaaaugaugaaaugugaca

SEQ ID NO: 464645 - RNA, 19 nt, Homo sapiens
  misc_RNA (1)...(19): siRNA sense strand
cagaaucacuagagcugaa

SEQ ID NO: 464646 - RNA, 19 nt, Homo sapiens
  misc_RNA (1)...(19): siRNA sense strand
gcaucuguguuaacuucua

SEQ ID NO: 464647 - RNA, 19 nt, Homo sapiens
  misc_RNA (1)...(19): siRNA sense strand
acacuggagucacgcgaua

SEQ ID NO: 464648 - RNA, 19 nt, Homo sapiens
  misc_RNA (1)...(19): siRNA sense strand
ggcccagacuccugaauug

SEQ ID NO: 464649 - RNA, 19 nt, Homo sapiens
  misc_RNA (1)...(19): siRNA sense strand
ggacugaucaagacucugu

SEQ ID NO: 464650 - RNA, 19 nt, Homo sapiens
  misc_RNA (1)...(19): siRNA sense strand
aguaccagcuucagucuuu

SEQ ID NO: 464651 - RNA, 19 nt, Homo sapiens
  misc_RNA (1)...(19): siRNA sense strand
gcaugaccuucgagagauu

SEQ ID NO: 464652 - RNA, 19 nt, Homo sapiens
  misc_RNA (1)...(19): siRNA sense strand
aaucugcuacuccguauua

SEQ ID NO: 464653 - RNA, 19 nt, Homo sapiens
  misc_RNA (1)...(19): siRNA sense strand
gcccagacccacuacuaua

SEQ ID NO: 464654 - RNA, 19 nt, Homo sapiens
  misc_RNA (1)...(19): siRNA sense strand
cagggucgauccagcaauu

SEQ ID NO: 464655 - RNA, 19 nt, Homo sapiens
  misc_RNA (1)...(19): siRNA sense strand
gaaaagagaaccuccauca

SEQ ID NO: 464656 - RNA, 19 nt, Homo sapiens
  misc_RNA (1)...(19): siRNA sense strand
gauucacccuaguggauuu

SEQ ID NO: 464657 - RNA, 19 nt, Homo sapiens
  misc_RNA (1)...(19): siRNA sense strand
ccagacuccugaauugcua

SEQ ID NO: 464658 - RNA, 19 nt, Homo sapiens
  misc_RNA (1)...(19): siRNA sense strand
agaaugacauccgcaagaa

SEQ ID NO: 464659 - RNA, 19 nt, Homo sapiens
  misc_RNA (1)...(19): siRNA sense strand
cuucuuagaugcugugaug

SEQ ID NO: 464660 - RNA, 19 nt, Homo sapiens
  misc_RNA (1)...(19): siRNA sense strand
gagcagcaaugcaggugau

SEQ ID NO: 464661 - RNA, 19 nt, Homo sapiens
  misc_RNA (1)...(19): siRNA sense strand
gauucaagcucuucuuacu

SEQ ID NO: 464662 - RNA, 19 nt, Homo sapiens
  misc_RNA (1)...(19): siRNA sense strand
ccaacgugcugcagggauu

SEQ ID NO: 464663 - RNA, 19 nt, Homo sapiens
  misc_RNA (1)...(19): siRNA sense strand
ccuggaagaugaugaagau

SEQ ID NO: 464664 - RNA, 19 nt, Homo sapiens
  misc_RNA (1)...(19): siRNA sense strand
gaaguaaucaaaccugucu

SEQ ID NO: 464665 - RNA, 19 nt, Homo sapiens
  misc_RNA (1)...(19): siRNA sense strand
gaagaggguggcacugaga

SEQ ID NO: 464666 - RNA, 19 nt, Homo sapiens
  misc_RNA (1)...(19): siRNA sense strand
caucaaacccggaccugaa

SEQ ID NO: 464667 - RNA, 19 nt, Homo sapiens
  misc_RNA (1)...(19): siRNA sense strand
acgagaagcucaucaacau

SEQ ID NO: 464668 - RNA, 19 nt, Homo sapiens
  misc_RNA (1)...(19): siRNA sense strand
ccagaggacugaucaagac

SEQ ID NO: 464669 - RNA, 19 nt, Homo sapiens
  misc_RNA (1)...(19): siRNA sense strand
ggugugagccugacgucua

SEQ ID NO: 464670 - RNA, 19 nt, Homo sapiens
  misc_RNA (1)...(19): siRNA sense strand
guacaaagggacaccaugu

SEQ ID NO: 464671 - RNA, 19 nt, Homo sapiens
  misc_RNA (1)...(19): siRNA sense strand
ggagggcguuaguggauca

SEQ ID NO: 464672 - RNA, 19 nt, Homo sapiens
  misc_RNA (1)...(19): siRNA sense strand
gggaucaaccucaaauuca

SEQ ID NO: 464673 - RNA, 19 nt, Homo sapiens
  misc_RNA (1)...(19): siRNA sense strand
gaugauaccucuuuugucu

SEQ ID NO: 464674 - RNA, 19 nt, Homo sapiens
  misc_RNA (1)...(19): siRNA sense strand
gaguccagcuguuaugauc

SEQ ID NO: 464675 - RNA, 19 nt, Homo sapiens
  misc_RNA (1)...(19): siRNA sense strand
ccagccagcucugaccuuu

SEQ ID NO: 464676 - RNA, 19 nt, Homo sapiens
  misc_RNA (1)...(19): siRNA sense strand
uaacaucggaacaguguau

SEQ ID NO: 464677 - RNA, 19 nt, Homo sapiens
  misc_RNA (1)...(19): siRNA sense strand
caaaggcuauggcacaacu

SEQ ID NO: 464678 - RNA, 19 nt, Homo sapiens
  misc_RNA (1)...(19): siRNA sense strand
ggaagagaaguccaacaga

SEQ ID NO: 464679 - RNA, 19 nt, Homo sapiens
  misc_RNA (1)...(19): siRNA sense strand
gguguacaagggaauguua

SEQ ID NO: 464680 - RNA, 19 nt, Homo sapiens
  misc_RNA (1)...(19): siRNA sense strand
ccacggagccaacucugaa

SEQ ID NO: 464681 - RNA, 19 nt, Homo sapiens
  misc_RNA (1)...(19): siRNA sense strand
uugacgagcugcagaauca

SEQ ID NO: 464682 - RNA, 19 nt, Homo sapiens
  misc_RNA (1)...(19): siRNA sense strand
gaauucaacccacucaucu

SEQ ID NO: 464683 - RNA, 19 nt, Homo sapiens
  misc_RNA (1)...(19): siRNA sense strand
cucaacaaguucuauacua

SEQ ID NO: 464684 - RNA, 19 nt, Homo sapiens
  misc_RNA (1)...(19): siRNA sense strand
gaaggugaggcgccuaaug

SEQ ID NO: 464685 - RNA, 19 nt, Homo sapiens
  misc_RNA (1)...(19): siRNA sense strand
aggaaaugaucgacaggua

SEQ ID NO: 464686 - RNA, 19 nt, Homo sapiens
  misc_RNA (1)...(19): siRNA sense strand
ccagaaguuuaaaggaaga

SEQ ID NO: 464687 - RNA, 19 nt, Homo sapiens
  misc_RNA (1)...(19): siRNA sense strand
gccagcaucuuugggcuuu

SEQ ID NO: 464688 - RNA, 19 nt, Homo sapiens
  misc_RNA (1)...(19): siRNA sense strand
guacaguccucagcuugga

SEQ ID NO: 464689 - RNA, 19 nt, Homo sapiens
  misc_RNA (1)...(19): siRNA sense strand
gugacaagccaaaguggua

SEQ ID NO: 464690 - RNA, 19 nt, Homo sapiens
  misc_RNA (1)...(19): siRNA sense strand
uggcggaucuuuacuggau

SEQ ID NO: 464691 - RNA, 19 nt, Homo sapiens
  misc_RNA (1)...(19): siRNA sense strand
gaagguaaauaagaaugac

SEQ ID NO: 464692 - RNA, 19 nt, Homo sapiens
  misc_RNA (1)...(19): siRNA sense strand
uggcaucuguguuaacuuc

SEQ ID NO: 464693 - RNA, 19 nt, Homo sapiens
  misc_RNA (1)...(19): siRNA sense strand
uguuagaccuccucaagug

SEQ ID NO: 464694 - RNA, 19 nt, Homo sapiens
  misc_RNA (1)...(19): siRNA sense strand
ccagacccaucucgauuca

SEQ ID NO: 464695 - RNA, 19 nt, Homo sapiens
  misc_RNA (1)...(19): siRNA sense strand
gucgggagcuguacuacug

SEQ ID NO: 464696 - RNA, 19 nt, Homo sapiens
  misc_RNA (1)...(19): siRNA sense strand
guaguaacaucggaacagu

SEQ ID NO: 464697 - RNA, 19 nt, Homo sapiens
  misc_RNA (1)...(19): siRNA sense strand
cgaauucacaacaauaugu

SEQ ID NO: 464698 - RNA, 19 nt, Homo sapiens
  misc_RNA (1)...(19): siRNA sense strand
cagcgaauucacaacaaua

SEQ ID NO: 464699 - RNA, 19 nt, Homo sapiens
  misc_RNA (1)...(19): siRNA sense strand
ucuacaaacuggacuucaa

SEQ ID NO: 464700 - RNA, 19 nt, Homo sapiens
  misc_RNA (1)...(19): siRNA sense strand
uacaaacggagauaucuuu

SEQ ID NO: 464701 - RNA, 19 nt, Homo sapiens
  misc_RNA (1)...(19): siRNA sense strand
ggaagggaucaaccucaaa

SEQ ID NO: 464702 - RNA, 19 nt, Homo sapiens
  misc_RNA (1)...(19): siRNA sense strand
ugugugguguugcguagua

SEQ ID NO: 464703 - RNA, 19 nt, Homo sapiens
  misc_RNA (1)...(19): siRNA sense strand
gaagucaucugucauuaaa

SEQ ID NO: 464704 - RNA, 19 nt, Homo sapiens
  misc_RNA (1)...(19): siRNA sense strand
gaagagaaguccaacagaa

SEQ ID NO: 464705 - RNA, 19 nt, Homo sapiens
  misc_RNA (1)...(19): siRNA sense strand
gaaguucuguccucgguua

SEQ ID NO: 464706 - RNA, 19 nt, Homo sapiens
  misc_RNA (1)...(19): siRNA sense strand
cuacggagauggaugauaa

SEQ ID NO: 464707 - RNA, 19 nt, Homo sapiens
  misc_RNA (1)...(19): siRNA sense strand
gcagugauaguauggauua

SEQ ID NO: 464708 - RNA, 19 nt, Homo sapiens
  misc_RNA (1)...(19): siRNA sense strand
ggaagcgccuggaagauga

SEQ ID NO: 464709 - RNA, 19 nt, Homo sapiens
  misc_RNA (1)...(19): siRNA sense strand
caagugcccuucugcauga

SEQ ID NO: 464710 - RNA, 19 nt, Homo sapiens
  misc_RNA (1)...(19): siRNA sense strand
ggacagacgucaggcagaa

SEQ ID NO: 464711 - RNA, 19 nt, Homo sapiens
  misc_RNA (1)...(19): siRNA sense strand
caaaaugccugaugaugua

SEQ ID NO: 464712 - RNA, 19 nt, Homo sapiens
  misc_RNA (1)...(19): siRNA sense strand
aaacacagcccaacaguga

SEQ ID NO: 464713 - RNA, 19 nt, Homo sapiens
  misc_RNA (1)...(19): siRNA sense strand
ucagugaaaugaugaaaug

SEQ ID NO: 464714 - RNA, 19 nt, Homo sapiens
  misc_RNA (1)...(19): siRNA sense strand
cgauauggcaucuguguua

SEQ ID NO: 464715 - RNA, 19 nt, Homo sapiens
  misc_RNA (1)...(19): siRNA sense strand
gugauaguauggauuauga

SEQ ID NO: 464716 - RNA, 19 nt, Homo sapiens
  misc_RNA (1)...(19): siRNA sense strand
gaugauaguggcagugaua

SEQ ID NO: 464717 - RNA, 19 nt, Homo sapiens
  misc_RNA (1)...(19): siRNA sense strand
ccacugcgcuccagcucua

SEQ ID NO: 464718 - RNA, 19 nt, Homo sapiens
  misc_RNA (1)...(19): siRNA sense strand
gugaaaugaugaaauguga

SEQ ID NO: 464719 - RNA, 19 nt, Homo sapiens
  misc_RNA (1)...(19): siRNA sense strand
ggacagcaauagggugauu

SEQ ID NO: 464720 - RNA, 19 nt, Homo sapiens
  misc_RNA (1)...(19): siRNA sense strand
gcaaaucaaugaggugcuu

SEQ ID NO: 464721 - RNA, 19 nt, Homo sapiens
  misc_RNA (1)...(19): siRNA sense strand
caccagaaguuuaaaggaa

SEQ ID NO: 464722 - RNA, 19 nt, Homo sapiens
  misc_RNA (1)...(19): siRNA sense strand
gauauggcaucuguguuaa

SEQ ID NO: 464723 - RNA, 19 nt, Homo sapiens
  misc_RNA (1)...(19): siRNA sense strand
caacagaaaguguaaauac

SEQ ID NO: 464724 - RNA, 19 nt, Homo sapiens
  misc_RNA (1)...(19): siRNA sense strand
caagcuggcuccuuucuag

SEQ ID NO: 464725 - RNA, 19 nt, Homo sapiens
  misc_RNA (1)...(19): siRNA sense strand
gugcuaaccugcauucugu

SEQ ID NO: 464726 - RNA, 19 nt, Homo sapiens
  misc_RNA (1)...(19): siRNA sense strand
gauaguggcagugauagua

SEQ ID NO: 464727 - RNA, 19 nt, Homo sapiens
  misc_RNA (1)...(19): siRNA sense strand
ucaaauucaugcacaauca

SEQ ID NO: 464728 - RNA, 19 nt, Homo sapiens
  misc_RNA (1)...(19): siRNA sense strand
agacccagcucaacaaguu

SEQ ID NO: 464729 - RNA, 19 nt, Homo sapiens
  misc_RNA (1)...(19): siRNA sense strand
ccagcgagguggagauuga

SEQ ID NO: 464730 - RNA, 19 nt, Homo sapiens
  misc_RNA (1)...(19): siRNA sense strand
gagcuguacuacuguguga

SEQ ID NO: 464731 - RNA, 19 nt, Homo sapiens
  misc_RNA (1)...(19): siRNA sense strand
guacaugcagggacagaua

SEQ ID NO: 464732 - RNA, 19 nt, Homo sapiens
  misc_RNA (1)...(19): siRNA sense strand
gaagcagacauuuguggua

SEQ ID NO: 464733 - RNA, 19 nt, Homo sapiens
  misc_RNA (1)...(19): siRNA sense strand
gcucugaccuuugcucuuc

SEQ ID NO: 464734 - RNA, 19 nt, Homo sapiens
  misc_RNA (1)...(19): siRNA sense strand
gagaagggauggguaugga

SEQ ID NO: 464735 - RNA, 19 nt, Homo sapiens
  misc_RNA (1)...(19): siRNA sense strand
ugaauuggguggcgaguuc

SEQ ID NO: 464736 - RNA, 19 nt, Homo sapiens
  misc_RNA (1)...(19): siRNA sense strand
agacgaagguguugugcuu

SEQ ID NO: 464737 - RNA, 19 nt, Homo sapiens
  misc_RNA (1)...(19): siRNA sense strand
ugaagaagcagacauuugu

SEQ ID NO: 464738 - RNA, 19 nt, Homo sapiens
  misc_RNA (1)...(19): siRNA sense strand
gaagggaucaaccucaaau

SEQ ID NO: 464739 - RNA, 19 nt, Homo sapiens
  misc_RNA (1)...(19): siRNA sense strand
gcaugagccuucgggauga

SEQ ID NO: 464740 - RNA, 19 nt, Homo sapiens
  misc_RNA (1)...(19): siRNA sense strand
ggaucaaccucaaauucau

SEQ ID NO: 464741 - RNA, 19 nt, Homo sapiens
  misc_RNA (1)...(19): siRNA sense strand
gaaaugaugaaaugugaca

SEQ ID NO: 464742 - RNA, 19 nt, Homo sapiens
  misc_RNA (1)...(19): siRNA sense strand
cagaaucacuagagcugaa

SEQ ID NO: 464743 - RNA, 19 nt, Homo sapiens
  misc_RNA (1)...(19): siRNA sense strand
gcaucuguguuaacuucua

SEQ ID NO: 464744 - RNA, 19 nt, Homo sapiens
  misc_RNA (1)...(19): siRNA sense strand
acacuggagucacgcgaua

SEQ ID NO: 464745 - RNA, 19 nt, Homo sapiens
  misc_RNA (1)...(19): siRNA sense strand
ggacugaucaagacucugu

SEQ ID NO: 464746 - RNA, 19 nt, Homo sapiens
  misc_RNA (1)...(19): siRNA sense strand
aguaccagcuucagucuuu

SEQ ID NO: 464747 - RNA, 19 nt, Homo sapiens
  misc_RNA (1)...(19): siRNA sense strand
ggcccagacuccugaauug

SEQ ID NO: 464748 - RNA, 19 nt, Homo sapiens
  misc_RNA (1)...(19): siRNA sense strand
gcaugaccuucgagagauu

SEQ ID NO: 464749 - RNA, 19 nt, Homo sapiens
  misc_RNA (1)...(19): siRNA sense strand
gcccagacccacuacuaua

SEQ ID NO: 464750 - RNA, 19 nt, Homo sapiens
  misc_RNA (1)...(19): siRNA sense strand
cagggucgauccagcaauu

SEQ ID NO: 464751 - RNA, 19 nt, Homo sapiens
  misc_RNA (1)...(19): siRNA sense strand
gaaaagagaaccuccauca

SEQ ID NO: 464752 - RNA, 19 nt, Homo sapiens
  misc_RNA (1)...(19): siRNA sense strand
gauucacccuaguggauuu

SEQ ID NO: 464753 - RNA, 19 nt, Homo sapiens
  misc_RNA (1)...(19): siRNA sense strand
gauucaagcucuucuuacu

SEQ ID NO: 464754 - RNA, 19 nt, Homo sapiens
  misc_RNA (1)...(19): siRNA sense strand
ccagacuccugaauugcua

SEQ ID NO: 464755 - RNA, 19 nt, Homo sapiens
  misc_RNA (1)...(19): siRNA sense strand
agaaugacauccgcaagaa

SEQ ID NO: 464756 - RNA, 19 nt, Homo sapiens
  misc_RNA (1)...(19): siRNA sense strand
cuucuuagaugcugugaug

SEQ ID NO: 464757 - RNA, 19 nt, Homo sapiens
  misc_RNA (1)...(19): siRNA sense strand
gagcagcaaugcaggugau

SEQ ID NO: 464758 - RNA, 19 nt, Homo sapiens
  misc_RNA (1)...(19): siRNA sense strand
ccaacgugcugcagggauu

SEQ ID NO: 464759 - RNA, 19 nt, Homo sapiens
  misc_RNA (1)...(19): siRNA sense strand
ccuggaagaugaugaagau

SEQ ID NO: 464760 - RNA, 19 nt, Homo sapiens
  misc_RNA (1)...(19): siRNA sense strand
gaaguaaucaaaccugucu

SEQ ID NO: 464761 - RNA, 19 nt, Homo sapiens
  misc_RNA (1)...(19): siRNA sense strand
gaagaggguggcacugaga

SEQ ID NO: 464762 - RNA, 19 nt, Homo sapiens
  misc_RNA (1)...(19): siRNA sense strand
caucaaacccggaccugaa

SEQ ID NO: 464763 - RNA, 19 nt, Homo sapiens
  misc_RNA (1)...(19): siRNA sense strand
acgagaagcucaucaacau

SEQ ID NO: 464764 - RNA, 19 nt, Homo sapiens
  misc_RNA (1)...(19): siRNA sense strand
ccagaggacugaucaagac

SEQ ID NO: 464765 - RNA, 19 nt, Homo sapiens
  misc_RNA (1)...(19): siRNA sense strand
ggugugagccugacgucua

SEQ ID NO: 464766 - RNA, 19 nt, Homo sapiens
  misc_RNA (1)...(19): siRNA sense strand
guacaaagggacaccaugu

SEQ ID NO: 464767 - RNA, 19 nt, Homo sapiens
  misc_RNA (1)...(19): siRNA sense strand
gaugauaccucuuuugucu

SEQ ID NO: 464768 - RNA, 19 nt, Homo sapiens
  misc_RNA (1)...(19): siRNA sense strand
gggaucaaccucaaauuca

SEQ ID NO: 464769 - RNA, 19 nt, Homo sapiens
  misc_RNA (1)...(19): siRNA sense strand
gaguccagcuguuaugauc

SEQ ID NO: 464770 - RNA, 19 nt, Homo sapiens
  misc_RNA (1)...(19): siRNA sense strand
ggagggcguuaguggauca

SEQ ID NO: 464771 - RNA, 19 nt, Homo sapiens
  misc_RNA (1)...(19): siRNA sense strand
ccagccagcucugaccuuu

SEQ ID NO: 464772 - RNA, 19 nt, Homo sapiens
  misc_RNA (1)...(19): siRNA sense strand
uaacaucggaacaguguau

SEQ ID NO: 464773 - RNA, 19 nt, Homo sapiens
  misc_RNA (1)...(19): siRNA sense strand
caaaggcuauggcacaacu

SEQ ID NO: 464774 - RNA, 19 nt, Homo sapiens
  misc_RNA (1)...(19): siRNA sense strand
ggaagagaaguccaacaga

SEQ ID NO: 464775 - RNA, 19 nt, Homo sapiens
  misc_RNA (1)...(19): siRNA sense strand
gguguacaagggaauguua

SEQ ID NO: 464776 - RNA, 19 nt, Homo sapiens
  misc_RNA (1)...(19): siRNA sense strand
ccacggagccaacucugaa

SEQ ID NO: 464777 - RNA, 19 nt, Homo sapiens
  misc_RNA (1)...(19): siRNA sense strand
uugacgagcugcagaauca

SEQ ID NO: 464778 - RNA, 19 nt, Homo sapiens
  misc_RNA (1)...(19): siRNA sense strand
gaauucaacccacucaucu

SEQ ID NO: 464779 - RNA, 19 nt, Homo sapiens
  misc_RNA (1)...(19): siRNA sense strand
cucaacaaguucuauacua

SEQ ID NO: 464780 - RNA, 19 nt, Homo sapiens
  misc_RNA (1)...(19): siRNA sense strand
gaaggugaggcgccuaaug

SEQ ID NO: 464781 - RNA, 19 nt, Homo sapiens
  misc_RNA (1)...(19): siRNA sense strand
aggaaaugaucgacaggua

SEQ ID NO: 464782 - RNA, 19 nt, Homo sapiens
  misc_RNA (1)...(19): siRNA sense strand
ccagaaguuuaaaggaaga

SEQ ID NO: 464783 - RNA, 19 nt, Homo sapiens
  misc_RNA (1)...(19): siRNA sense strand
gccagcaucuuugggcuuu

SEQ ID NO: 464784 - RNA, 19 nt, Homo sapiens
  misc_RNA (1)...(19): siRNA sense strand
guacaguccucagcuugga

SEQ ID NO: 464785 - RNA, 19 nt, Homo sapiens
  misc_RNA (1)...(19): siRNA sense strand
gugacaagccaaaguggua

SEQ ID NO: 464786 - RNA, 19 nt, Homo sapiens
  misc_RNA (1)...(19): siRNA sense strand
uggcggaucuuuacuggau

SEQ ID NO: 464787 - RNA, 19 nt, Homo sapiens
  misc_RNA (1)...(19): siRNA sense strand
gaagguaaauaagaaugac

SEQ ID NO: 464788 - RNA, 19 nt, Homo sapiens
  misc_RNA (1)...(19): siRNA sense strand
uguuagaccuccucaagug

SEQ ID NO: 464789 - RNA, 19 nt, Homo sapiens
  misc_RNA (1)...(19): siRNA sense strand
uggcaucuguguuaacuuc

SEQ ID NO: 464790 - RNA, 19 nt, Homo sapiens
  misc_RNA (1)...(19): siRNA sense strand
ccagacccaucucgauuca

SEQ ID NO: 464791 - RNA, 19 nt, Homo sapiens
  misc_RNA (1)...(19): siRNA sense strand
gucgggagcuguacuacug

SEQ ID NO: 464792 - RNA, 19 nt, Homo sapiens
  misc_RNA (1)...(19): siRNA sense strand
guaguaacaucggaacagu

SEQ ID NO: 464793 - RNA, 19 nt, Homo sapiens
  misc_RNA (1)...(19): siRNA sense strand
cgaauucacaacaauaugu

SEQ ID NO: 464794 - RNA, 19 nt, Homo sapiens
  misc_RNA (1)...(19): siRNA sense strand
cagcgaauucacaacaaua

SEQ ID NO: 464795 - RNA, 19 nt, Homo sapiens
  misc_RNA (1)...(19): siRNA sense strand
ucuacaaacuggacuucaa

SEQ ID NO: 464796 - RNA, 19 nt, Homo sapiens
  misc_RNA (1)...(19): siRNA sense strand
cagcgagucuaucucuaug

SEQ ID NO: 464797 - RNA, 19 nt, Homo sapiens
  misc_RNA (1)...(19): siRNA sense strand
ggaagggaucaaccucaaa

SEQ ID NO: 464798 - RNA, 19 nt, Homo sapiens
  misc_RNA (1)...(19): siRNA sense strand
ugugugguguugcguagua

SEQ ID NO: 464799 - RNA, 19 nt, Homo sapiens
  misc_RNA (1)...(19): siRNA sense strand
uacaaacggagauaucuuu

SEQ ID NO: 464800 - RNA, 19 nt, Homo sapiens
  misc_RNA (1)...(19): siRNA sense strand
gcagacauuugugguacau

SEQ ID NO: 464801 - RNA, 19 nt, Homo sapiens
  misc_RNA (1)...(19): siRNA sense strand
guacagccagcaaaucaau

SEQ ID NO: 464802 - RNA, 19 nt, Homo sapiens
  misc_RNA (1)...(19): siRNA sense strand
guaccugucccuuggagaa

SEQ ID NO: 464803 - RNA, 19 nt, Homo sapiens
  misc_RNA (1)...(19): siRNA sense strand
gaagucaucugucauuaaa

SEQ ID NO: 464804 - RNA, 19 nt, Homo sapiens
  misc_RNA (1)...(19): siRNA sense strand
gaagagaaguccaacagaa

SEQ ID NO: 464805 - RNA, 19 nt, Homo sapiens
  misc_RNA (1)...(19): siRNA sense strand
gaaguucuguccucgguua

SEQ ID NO: 464806 - RNA, 19 nt, Homo sapiens
  misc_RNA (1)...(19): siRNA sense strand
cuacggagauggaugauaa

SEQ ID NO: 464807 - RNA, 19 nt, Homo sapiens
  misc_RNA (1)...(19): siRNA sense strand
gcagugauaguauggauua

SEQ ID NO: 464808 - RNA, 19 nt, Homo sapiens
  misc_RNA (1)...(19): siRNA sense strand
ggaagcgccuggaagauga

SEQ ID NO: 464809 - RNA, 19 nt, Homo sapiens
  misc_RNA (1)...(19): siRNA sense strand
caagugcccuucugcauga

SEQ ID NO: 464810 - RNA, 19 nt, Homo sapiens
  misc_RNA (1)...(19): siRNA sense strand
ggacagacgucaggcagaa

SEQ ID NO: 464811 - RNA, 19 nt, Homo sapiens
  misc_RNA (1)...(19): siRNA sense strand
caaaaugccugaugaugua

SEQ ID NO: 464812 - RNA, 19 nt, Homo sapiens
  misc_RNA (1)...(19): siRNA sense strand
aaacacagcccaacaguga

SEQ ID NO: 464813 - RNA, 19 nt, Homo sapiens
  misc_RNA (1)...(19): siRNA sense strand
ucagugaaaugaugaaaug

SEQ ID NO: 464814 - RNA, 19 nt, Homo sapiens
  misc_RNA (1)...(19): siRNA sense strand
cgauauggcaucuguguua

SEQ ID NO: 464815 - RNA, 19 nt, Homo sapiens
  misc_RNA (1)...(19): siRNA sense strand
gugauaguauggauuauga

SEQ ID NO: 464816 - RNA, 19 nt, Homo sapiens
  misc_RNA (1)...(19): siRNA sense strand
gaugauaguggcagugaua

SEQ ID NO: 464817 - RNA, 19 nt, Homo sapiens
  misc_RNA (1)...(19): siRNA sense strand
ccacugcgcuccagcucua

SEQ ID NO: 464818 - RNA, 19 nt, Homo sapiens
  misc_RNA (1)...(19): siRNA sense strand
gugaaaugaugaaauguga

SEQ ID NO: 464819 - RNA, 19 nt, Homo sapiens
  misc_RNA (1)...(19): siRNA sense strand
ggacagcaauagggugauu

SEQ ID NO: 464820 - RNA, 19 nt, Homo sapiens
  misc_RNA (1)...(19): siRNA sense strand
gcaaaucaaugaggugcuu

SEQ ID NO: 464821 - RNA, 19 nt, Homo sapiens
  misc_RNA (1)...(19): siRNA sense strand
caccagaaguuuaaaggaa

SEQ ID NO: 464822 - RNA, 19 nt, Homo sapiens
  misc_RNA (1)...(19): siRNA sense strand
gauauggcaucuguguuaa

SEQ ID NO: 464823 - RNA, 19 nt, Homo sapiens
  misc_RNA (1)...(19): siRNA sense strand
caacagaaaguguaaauac

SEQ ID NO: 464824 - RNA, 19 nt, Homo sapiens
  misc_RNA (1)...(19): siRNA sense strand
caagcuggcuccuuucuag

SEQ ID NO: 464825 - RNA, 19 nt, Homo sapiens
  misc_RNA (1)...(19): siRNA sense strand
gugcuaaccugcauucugu

SEQ ID NO: 464826 - RNA, 19 nt, Homo sapiens
  misc_RNA (1)...(19): siRNA sense strand
gauaguggcagugauagua

SEQ ID NO: 464827 - RNA, 19 nt, Homo sapiens
  misc_RNA (1)...(19): siRNA sense strand
ucaaauucaugcacaauca

SEQ ID NO: 464828 - RNA, 19 nt, Homo sapiens
  misc_RNA (1)...(19): siRNA sense strand
agacccagcucaacaaguu

SEQ ID NO: 464829 - RNA, 19 nt, Homo sapiens
  misc_RNA (1)...(19): siRNA sense strand
ccagcgagguggagauuga

SEQ ID NO: 464830 - RNA, 19 nt, Homo sapiens
  misc_RNA (1)...(19): siRNA sense strand
gagcuguacuacuguguga

SEQ ID NO: 464831 - RNA, 19 nt, Homo sapiens
  misc_RNA (1)...(19): siRNA sense strand
guacaugcagggacagaua

SEQ ID NO: 464832 - RNA, 19 nt, Homo sapiens
  misc_RNA (1)...(19): siRNA sense strand
gaagcagacauuuguggua

SEQ ID NO: 464833 - RNA, 19 nt, Homo sapiens
  misc_RNA (1)...(19): siRNA sense strand
gcucugaccuuugcucuuc

SEQ ID NO: 464834 - RNA, 19 nt, Homo sapiens
  misc_RNA (1)...(19): siRNA sense strand
gagaagggauggguaugga

SEQ ID NO: 464835 - RNA, 19 nt, Homo sapiens
  misc_RNA (1)...(19): siRNA sense strand
ugaauuggguggcgaguuc

SEQ ID NO: 464836 - RNA, 19 nt, Homo sapiens
  misc_RNA (1)...(19): siRNA sense strand
agacgaagguguugugcuu

SEQ ID NO: 464837 - RNA, 19 nt, Homo sapiens
  misc_RNA (1)...(19): siRNA sense strand
ugaagaagcagacauuugu

SEQ ID NO: 464838 - RNA, 19 nt, Homo sapiens
  misc_RNA (1)...(19): siRNA sense strand
gaagggaucaaccucaaau

SEQ ID NO: 464839 - RNA, 19 nt, Homo sapiens
  misc_RNA (1)...(19): siRNA sense strand
gcaugagccuucgggauga

SEQ ID NO: 464840 - RNA, 19 nt, Homo sapiens
  misc_RNA (1)...(19): siRNA sense strand
ggaucaaccucaaauucau

SEQ ID NO: 464841 - RNA, 19 nt, Homo sapiens
  misc_RNA (1)...(19): siRNA sense strand
gaaaugaugaaaugugaca

SEQ ID NO: 464842 - RNA, 19 nt, Homo sapiens
  misc_RNA (1)...(19): siRNA sense strand
cagaaucacuagagcugaa

SEQ ID NO: 464843 - RNA, 19 nt, Homo sapiens
  misc_RNA (1)...(19): siRNA sense strand
gcaucuguguuaacuucua

SEQ ID NO: 464844 - RNA, 19 nt, Homo sapiens
  misc_RNA (1)...(19): siRNA sense strand
acacuggagucacgcgaua

SEQ ID NO: 464845 - RNA, 19 nt, Homo sapiens
  misc_RNA (1)...(19): siRNA sense strand
ggacugaucaagacucugu

SEQ ID NO: 464846 - RNA, 19 nt, Homo sapiens
  misc_RNA (1)...(19): siRNA sense strand
aguaccagcuucagucuuu

SEQ ID NO: 464847 - RNA, 19 nt, Homo sapiens
  misc_RNA (1)...(19): siRNA sense strand
ggcccagacuccugaauug

SEQ ID NO: 464848 - RNA, 19 nt, Homo sapiens
  misc_RNA (1)...(19): siRNA sense strand
gcaugaccuucgagagauu

SEQ ID NO: 464849 - RNA, 19 nt, Homo sapiens
  misc_RNA (1)...(19): siRNA sense strand
gcccagacccacuacuaua

SEQ ID NO: 464850 - RNA, 19 nt, Homo sapiens
  misc_RNA (1)...(19): siRNA sense strand
cagggucgauccagcaauu

SEQ ID NO: 464851 - RNA, 19 nt, Homo sapiens
  misc_RNA (1)...(19): siRNA sense strand
gaaaagagaaccuccauca

SEQ ID NO: 464852 - RNA, 19 nt, Homo sapiens
  misc_RNA (1)...(19): siRNA sense strand
gauucacccuaguggauuu

SEQ ID NO: 464853 - RNA, 19 nt, Homo sapiens
  misc_RNA (1)...(19): siRNA sense strand
gauucaagcucuucuuacu

SEQ ID NO: 464854 - RNA, 19 nt, Homo sapiens
  misc_RNA (1)...(19): siRNA sense strand
ccagacuccugaauugcua

SEQ ID NO: 464855 - RNA, 19 nt, Homo sapiens
  misc_RNA (1)...(19): siRNA sense strand
agaaugacauccgcaagaa

SEQ ID NO: 464856 - RNA, 19 nt, Homo sapiens
  misc_RNA (1)...(19): siRNA sense strand
cuucuuagaugcugugaug

SEQ ID NO: 464857 - RNA, 19 nt, Homo sapiens
  misc_RNA (1)...(19): siRNA sense strand
gagcagcaaugcaggugau

SEQ ID NO: 464858 - RNA, 19 nt, Homo sapiens
  misc_RNA (1)...(19): siRNA sense strand
ccaacgugcugcagggauu

SEQ ID NO: 464859 - RNA, 19 nt, Homo sapiens
  misc_RNA (1)...(19): siRNA sense strand
ccuggaagaugaugaagau

SEQ ID NO: 464860 - RNA, 19 nt, Homo sapiens
  misc_RNA (1)...(19): siRNA sense strand
gaaguaaucaaaccugucu

SEQ ID NO: 464861 - RNA, 19 nt, Homo sapiens
  misc_RNA (1)...(19): siRNA sense strand
gaagaggguggcacugaga

SEQ ID NO: 464862 - RNA, 19 nt, Homo sapiens
  misc_RNA (1)...(19): siRNA sense strand
caucaaacccggaccugaa

SEQ ID NO: 464863 - RNA, 19 nt, Homo sapiens
  misc_RNA (1)...(19): siRNA sense strand
acgagaagcucaucaacau

SEQ ID NO: 464864 - RNA, 19 nt, Homo sapiens
  misc_RNA (1)...(19): siRNA sense strand
ccagaggacugaucaagac

SEQ ID NO: 464865 - RNA, 19 nt, Homo sapiens
  misc_RNA (1)...(19): siRNA sense strand
ggugugagccugacgucua

SEQ ID NO: 464866 - RNA, 19 nt, Homo sapiens
  misc_RNA (1)...(19): siRNA sense strand
guacaaagggacaccaugu

SEQ ID NO: 464867 - RNA, 19 nt, Homo sapiens
  misc_RNA (1)...(19): siRNA sense strand
gaugauaccucuuuugucu

SEQ ID NO: 464868 - RNA, 19 nt, Homo sapiens
  misc_RNA (1)...(19): siRNA sense strand
gggaucaaccucaaauuca

SEQ ID NO: 464869 - RNA, 19 nt, Homo sapiens
  misc_RNA (1)...(19): siRNA sense strand
gaguccagcuguuaugauc

SEQ ID NO: 464870 - RNA, 19 nt, Homo sapiens
  misc_RNA (1)...(19): siRNA sense strand
ggagggcguuaguggauca

SEQ ID NO: 464871 - RNA, 19 nt, Homo sapiens
  misc_RNA (1)...(19): siRNA sense strand
ccagccagcucugaccuuu

SEQ ID NO: 464872 - RNA, 19 nt, Homo sapiens
  misc_RNA (1)...(19): siRNA sense strand
uaacaucggaacaguguau

SEQ ID NO: 464873 - RNA, 19 nt, Homo sapiens
  misc_RNA (1)...(19): siRNA sense strand
caaaggcuauggcacaacu

SEQ ID NO: 464874 - RNA, 19 nt, Homo sapiens
  misc_RNA (1)...(19): siRNA sense strand
ggaagagaaguccaacaga

SEQ ID NO: 464875 - RNA, 19 nt, Homo sapiens
  misc_RNA (1)...(19): siRNA sense strand
gguguacaagggaauguua

SEQ ID NO: 464876 - RNA, 19 nt, Homo sapiens
  misc_RNA (1)...(19): siRNA sense strand
ccacggagccaacucugaa

SEQ ID NO: 464877 - RNA, 19 nt, Homo sapiens
  misc_RNA (1)...(19): siRNA sense strand
uugacgagcugcagaauca

SEQ ID NO: 464878 - RNA, 19 nt, Homo sapiens
  misc_RNA (1)...(19): siRNA sense strand
gaauucaacccacucaucu

SEQ ID NO: 464879 - RNA, 19 nt, Homo sapiens
  misc_RNA (1)...(19): siRNA sense strand
cucaacaaguucuauacua

SEQ ID NO: 464880 - RNA, 19 nt, Homo sapiens
  misc_RNA (1)...(19): siRNA sense strand
gaaggugaggcgccuaaug

SEQ ID NO: 464881 - RNA, 19 nt, Homo sapiens
  misc_RNA (1)...(19): siRNA sense strand
aggaaaugaucgacaggua

SEQ ID NO: 464882 - RNA, 19 nt, Homo sapiens
  misc_RNA (1)...(19): siRNA sense strand
ccagaaguuuaaaggaaga

SEQ ID NO: 464883 - RNA, 19 nt, Homo sapiens
  misc_RNA (1)...(19): siRNA sense strand
gccagcaucuuugggcuuu

SEQ ID NO: 464884 - RNA, 19 nt, Homo sapiens
  misc_RNA (1)...(19): siRNA sense strand
guacaguccucagcuugga

SEQ ID NO: 464885 - RNA, 19 nt, Homo sapiens
  misc_RNA (1)...(19): siRNA sense strand
gugacaagccaaaguggua

SEQ ID NO: 464886 - RNA, 19 nt, Homo sapiens
  misc_RNA (1)...(19): siRNA sense strand
uggcggaucuuuacuggau

SEQ ID NO: 464887 - RNA, 19 nt, Homo sapiens
  misc_RNA (1)...(19): siRNA sense strand
gaagguaaauaagaaugac

SEQ ID NO: 464888 - RNA, 19 nt, Homo sapiens
  misc_RNA (1)...(19): siRNA sense strand
uguuagaccuccucaagug

SEQ ID NO: 464889 - RNA, 19 nt, Homo sapiens
  misc_RNA (1)...(19): siRNA sense strand
uggcaucuguguuaacuuc

SEQ ID NO: 464890 - RNA, 19 nt, Homo sapiens
  misc_RNA (1)...(19): siRNA sense strand
ccagacccaucucgauuca

SEQ ID NO: 464891 - RNA, 19 nt, Homo sapiens
  misc_RNA (1)...(19): siRNA sense strand
gucgggagcuguacuacug

SEQ ID NO: 464892 - RNA, 19 nt, Homo sapiens
  misc_RNA (1)...(19): siRNA sense strand
guaguaacaucggaacagu

SEQ ID NO: 464893 - RNA, 19 nt, Homo sapiens
  misc_RNA (1)...(19): siRNA sense strand
cgaauucacaacaauaugu

SEQ ID NO: 464894 - RNA, 19 nt, Homo sapiens
  misc_RNA (1)...(19): siRNA sense strand
cagcgaauucacaacaaua

SEQ ID NO: 464895 - RNA, 19 nt, Homo sapiens
  misc_RNA (1)...(19): siRNA sense strand
ucuacaaacuggacuucaa

SEQ ID NO: 464896 - RNA, 19 nt, Homo sapiens
  misc_RNA (1)...(19): siRNA sense strand
cagcgagucuaucucuaug

SEQ ID NO: 464897 - RNA, 19 nt, Homo sapiens
  misc_RNA (1)...(19): siRNA sense strand
ggaagggaucaaccucaaa

SEQ ID NO: 464898 - RNA, 19 nt, Homo sapiens
  misc_RNA (1)...(19): siRNA sense strand
ugugugguguugcguagua

SEQ ID NO: 464899 - RNA, 19 nt, Homo sapiens
  misc_RNA (1)...(19): siRNA sense strand
uacaaacggagauaucuuu

SEQ ID NO: 464900 - RNA, 19 nt, Homo sapiens
  misc_RNA (1)...(19): siRNA sense strand
gcagacauuugugguacau

SEQ ID NO: 464901 - RNA, 19 nt, Homo sapiens
  misc_RNA (1)...(19): siRNA sense strand
guacagccagcaaaucaau

SEQ ID NO: 464902 - RNA, 19 nt, Homo sapiens
  misc_RNA (1)...(19): siRNA sense strand
guaccugucccuuggagaa

SEQ ID NO: 464903 - RNA, 19 nt, Homo sapiens
  misc_RNA (1)...(19): siRNA sense strand
gaagucaucugucauuaaa

SEQ ID NO: 464904 - RNA, 19 nt, Homo sapiens
  misc_RNA (1)...(19): siRNA sense strand
gaagagaaguccaacagaa

SEQ ID NO: 464905 - RNA, 19 nt, Homo sapiens
  misc_RNA (1)...(19): siRNA sense strand
gaaguucuguccucgguua

SEQ ID NO: 464906 - RNA, 19 nt, Homo sapiens
  misc_RNA (1)...(19): siRNA sense strand
cuacggagauggaugauaa

SEQ ID NO: 464907 - RNA, 19 nt, Homo sapiens
  misc_RNA (1)...(19): siRNA sense strand
gcagugauaguauggauua

SEQ ID NO: 464908 - RNA, 19 nt, Homo sapiens
  misc_RNA (1)...(19): siRNA sense strand
ggaagcgccuggaagauga

SEQ ID NO: 464909 - RNA, 19 nt, Homo sapiens
  misc_RNA (1)...(19): siRNA sense strand
caagugcccuucugcauga

SEQ ID NO: 464910 - RNA, 19 nt, Homo sapiens
  misc_RNA (1)...(19): siRNA sense strand
ggacagacgucaggcagaa

SEQ ID NO: 464911 - RNA, 19 nt, Homo sapiens
  misc_RNA (1)...(19): siRNA sense strand
caaaaugccugaugaugua

SEQ ID NO: 464912 - RNA, 19 nt, Homo sapiens
  misc_RNA (1)...(19): siRNA sense strand
aaacacagcccaacaguga

SEQ ID NO: 464913 - RNA, 19 nt, Homo sapiens
  misc_RNA (1)...(19): siRNA sense strand
gaaaucugcuacuccguau

SEQ ID NO: 464914 - RNA, 19 nt, Homo sapiens
  misc_RNA (1)...(19): siRNA sense strand
ucagugaaaugaugaaaug

SEQ ID NO: 464915 - RNA, 19 nt, Homo sapiens
  misc_RNA (1)...(19): siRNA sense strand
cgauauggcaucuguguua

SEQ ID NO: 464916 - RNA, 19 nt, Homo sapiens
  misc_RNA (1)...(19): siRNA sense strand
gugauaguauggauuauga

SEQ ID NO: 464917 - RNA, 19 nt, Homo sapiens
  misc_RNA (1)...(19): siRNA sense strand
gaugauaguggcagugaua

SEQ ID NO: 464918 - RNA, 19 nt, Homo sapiens
  misc_RNA (1)...(19): siRNA sense strand
ccacugcgcuccagcucua

SEQ ID NO: 464919 - RNA, 19 nt, Homo sapiens
  misc_RNA (1)...(19): siRNA sense strand
gugaaaugaugaaauguga

SEQ ID NO: 464920 - RNA, 19 nt, Homo sapiens
  misc_RNA (1)...(19): siRNA sense strand
ggacagcaauagggugauu

SEQ ID NO: 464921 - RNA, 19 nt, Homo sapiens
  misc_RNA (1)...(19): siRNA sense strand
gcaaaucaaugaggugcuu

SEQ ID NO: 464922 - RNA, 19 nt, Homo sapiens
  misc_RNA (1)...(19): siRNA sense strand
caccagaaguuuaaaggaa

SEQ ID NO: 464923 - RNA, 19 nt, Homo sapiens
  misc_RNA (1)...(19): siRNA sense strand
gauauggcaucuguguuaa

SEQ ID NO: 464924 - RNA, 19 nt, Homo sapiens
  misc_RNA (1)...(19): siRNA sense strand
uauuaugucucuucucgua

SEQ ID NO: 464925 - RNA, 19 nt, Homo sapiens
  misc_RNA (1)...(19): siRNA sense strand
caacagaaaguguaaauac

SEQ ID NO: 464926 - RNA, 19 nt, Homo sapiens
  misc_RNA (1)...(19): siRNA sense strand
caagcuggcuccuuucuag

SEQ ID NO: 464927 - RNA, 19 nt, Homo sapiens
  misc_RNA (1)...(19): siRNA sense strand
gugcuaaccugcauucugu

SEQ ID NO: 464928 - RNA, 19 nt, Homo sapiens
  misc_RNA (1)...(19): siRNA sense strand
gauaguggcagugauagua

SEQ ID NO: 464929 - RNA, 19 nt, Homo sapiens
  misc_RNA (1)...(19): siRNA sense strand
guacguggcugcaguucau

SEQ ID NO: 464930 - RNA, 19 nt, Homo sapiens
  misc_RNA (1)...(19): siRNA sense strand
ucaaauucaugcacaauca

SEQ ID NO: 464931 - RNA, 19 nt, Homo sapiens
  misc_RNA (1)...(19): siRNA sense strand
agacccagcucaacaaguu

SEQ ID NO: 464932 - RNA, 19 nt, Homo sapiens
  misc_RNA (1)...(19): siRNA sense strand
ccagcgagguggagauuga

SEQ ID NO: 464933 - RNA, 19 nt, Homo sapiens
  misc_RNA (1)...(19): siRNA sense strand
gagcuguacuacuguguga

SEQ ID NO: 464934 - RNA, 19 nt, Homo sapiens
  misc_RNA (1)...(19): siRNA sense strand
guacaugcagggacagaua

SEQ ID NO: 464935 - RNA, 19 nt, Homo sapiens
  misc_RNA (1)...(19): siRNA sense strand
gaagcagacauuuguggua

SEQ ID NO: 464936 - RNA, 19 nt, Homo sapiens
  misc_RNA (1)...(19): siRNA sense strand
gcucugaccuuugcucuuc

SEQ ID NO: 464937 - RNA, 19 nt, Homo sapiens
  misc_RNA (1)...(19): siRNA sense strand
gagaagggauggguaugga

SEQ ID NO: 464938 - RNA, 19 nt, Homo sapiens
  misc_RNA (1)...(19): siRNA sense strand
ugaauuggguggcgaguuc

SEQ ID NO: 464939 - RNA, 19 nt, Homo sapiens
  misc_RNA (1)...(19): siRNA sense strand
agacgaagguguugugcuu

SEQ ID NO: 464940 - RNA, 19 nt, Homo sapiens
  misc_RNA (1)...(19): siRNA sense strand
ugaagaagcagacauuugu

SEQ ID NO: 464941 - RNA, 19 nt, Homo sapiens
  misc_RNA (1)...(19): siRNA sense strand
gaagggaucaaccucaaau

SEQ ID NO: 464942 - RNA, 19 nt, Homo sapiens
  misc_RNA (1)...(19): siRNA sense strand
gcaugagccuucgggauga

SEQ ID NO: 464943 - RNA, 19 nt, Homo sapiens
  misc_RNA (1)...(19): siRNA sense strand
ggaucaaccucaaauucau

SEQ ID NO: 464944 - RNA, 19 nt, Homo sapiens
  misc_RNA (1)...(19): siRNA sense strand
gaaaugaugaaaugugaca

SEQ ID NO: 464945 - RNA, 19 nt, Homo sapiens
  misc_RNA (1)...(19): siRNA sense strand
cagaaucacuagagcugaa

SEQ ID NO: 464946 - RNA, 19 nt, Homo sapiens
  misc_RNA (1)...(19): siRNA sense strand
gcaucuguguuaacuucua

SEQ ID NO: 464947 - RNA, 19 nt, Homo sapiens
  misc_RNA (1)...(19): siRNA sense strand
acacuggagucacgcgaua

SEQ ID NO: 464948 - RNA, 19 nt, Homo sapiens
  misc_RNA (1)...(19): siRNA sense strand
ggcccagacuccugaauug

SEQ ID NO: 464949 - RNA, 19 nt, Homo sapiens
  misc_RNA (1)...(19): siRNA sense strand
ggacugaucaagacucugu

SEQ ID NO: 464950 - RNA, 19 nt, Homo sapiens
  misc_RNA (1)...(19): siRNA sense strand
aguaccagcuucagucuuu

SEQ ID NO: 464951 - RNA, 19 nt, Homo sapiens
  misc_RNA (1)...(19): siRNA sense strand
gcaugaccuucgagagauu

SEQ ID NO: 464952 - RNA, 19 nt, Homo sapiens
  misc_RNA (1)...(19): siRNA sense strand
aaucugcuacuccguauua

SEQ ID NO: 464953 - RNA, 19 nt, Homo sapiens
  misc_RNA (1)...(19): siRNA sense strand
gcccagacccacuacuaua

SEQ ID NO: 464954 - RNA, 19 nt, Homo sapiens
  misc_RNA (1)...(19): siRNA sense strand
cagggucgauccagcaauu

SEQ ID NO: 464955 - RNA, 19 nt, Homo sapiens
  misc_RNA (1)...(19): siRNA sense strand
gaaaagagaaccuccauca

SEQ ID NO: 464956 - RNA, 19 nt, Homo sapiens
  misc_RNA (1)...(19): siRNA sense strand
gauucacccuaguggauuu

SEQ ID NO: 464957 - RNA, 19 nt, Homo sapiens
  misc_RNA (1)...(19): siRNA sense strand
ccagacuccugaauugcua

SEQ ID NO: 464958 - RNA, 19 nt, Homo sapiens
  misc_RNA (1)...(19): siRNA sense strand
agaaugacauccgcaagaa

SEQ ID NO: 464959 - RNA, 19 nt, Homo sapiens
  misc_RNA (1)...(19): siRNA sense strand
cuucuuagaugcugugaug

SEQ ID NO: 464960 - RNA, 19 nt, Homo sapiens
  misc_RNA (1)...(19): siRNA sense strand
gagcagcaaugcaggugau

SEQ ID NO: 464961 - RNA, 19 nt, Homo sapiens
  misc_RNA (1)...(19): siRNA sense strand
gauucaagcucuucuuacu

SEQ ID NO: 464962 - RNA, 19 nt, Homo sapiens
  misc_RNA (1)...(19): siRNA sense strand
ccaacgugcugcagggauu

SEQ ID NO: 464963 - RNA, 19 nt, Homo sapiens
  misc_RNA (1)...(19): siRNA sense strand
ccuggaagaugaugaagau

SEQ ID NO: 464964 - RNA, 19 nt, Homo sapiens
  misc_RNA (1)...(19): siRNA sense strand
gaaguaaucaaaccugucu

SEQ ID NO: 464965 - RNA, 19 nt, Homo sapiens
  misc_RNA (1)...(19): siRNA sense strand
gaagaggguggcacugaga

SEQ ID NO: 464966 - RNA, 19 nt, Homo sapiens
  misc_RNA (1)...(19): siRNA sense strand
caucaaacccggaccugaa

SEQ ID NO: 464967 - RNA, 19 nt, Homo sapiens
  misc_RNA (1)...(19): siRNA sense strand
acgagaagcucaucaacau

SEQ ID NO: 464968 - RNA, 19 nt, Homo sapiens
  misc_RNA (1)...(19): siRNA sense strand
ccagaggacugaucaagac

SEQ ID NO: 464969 - RNA, 19 nt, Homo sapiens
  misc_RNA (1)...(19): siRNA sense strand
ggugugagccugacgucua

SEQ ID NO: 464970 - RNA, 19 nt, Homo sapiens
  misc_RNA (1)...(19): siRNA sense strand
guacaaagggacaccaugu

SEQ ID NO: 464971 - RNA, 19 nt, Homo sapiens
  misc_RNA (1)...(19): siRNA sense strand
ggagggcguuaguggauca

SEQ ID NO: 464972 - RNA, 19 nt, Homo sapiens
  misc_RNA (1)...(19): siRNA sense strand
gggaucaaccucaaauuca

SEQ ID NO: 464973 - RNA, 19 nt, Homo sapiens
  misc_RNA (1)...(19): siRNA sense strand
gaugauaccucuuuugucu

SEQ ID NO: 464974 - RNA, 19 nt, Homo sapiens
  misc_RNA (1)...(19): siRNA sense strand
gaguccagcuguuaugauc

SEQ ID NO: 464975 - RNA, 19 nt, Homo sapiens
  misc_RNA (1)...(19): siRNA sense strand
ccagccagcucugaccuuu

SEQ ID NO: 464976 - RNA, 19 nt, Homo sapiens
  misc_RNA (1)...(19): siRNA sense strand
uaacaucggaacaguguau

SEQ ID NO: 464977 - RNA, 19 nt, Homo sapiens
  misc_RNA (1)...(19): siRNA sense strand
caaaggcuauggcacaacu

SEQ ID NO: 464978 - RNA, 19 nt, Homo sapiens
  misc_RNA (1)...(19): siRNA sense strand
ggaagagaaguccaacaga

SEQ ID NO: 464979 - RNA, 19 nt, Homo sapiens
  misc_RNA (1)...(19): siRNA sense strand
gguguacaagggaauguua

SEQ ID NO: 464980 - RNA, 19 nt, Homo sapiens
  misc_RNA (1)...(19): siRNA sense strand
ccacggagccaacucugaa

SEQ ID NO: 464981 - RNA, 19 nt, Homo sapiens
  misc_RNA (1)...(19): siRNA sense strand
uugacgagcugcagaauca

SEQ ID NO: 464982 - RNA, 19 nt, Homo sapiens
  misc_RNA (1)...(19): siRNA sense strand
gaauucaacccacucaucu

SEQ ID NO: 464983 - RNA, 19 nt, Homo sapiens
  misc_RNA (1)...(19): siRNA sense strand
cucaacaaguucuauacua

SEQ ID NO: 464984 - RNA, 19 nt, Homo sapiens
  misc_RNA (1)...(19): siRNA sense strand
gaaggugaggcgccuaaug

SEQ ID NO: 464985 - RNA, 19 nt, Homo sapiens
  misc_RNA (1)...(19): siRNA sense strand
aggaaaugaucgacaggua

SEQ ID NO: 464986 - RNA, 19 nt, Homo sapiens
  misc_RNA (1)...(19): siRNA sense strand
ccagaaguuuaaaggaaga

SEQ ID NO: 464987 - RNA, 19 nt, Homo sapiens
  misc_RNA (1)...(19): siRNA sense strand
gccagcaucuuugggcuuu

SEQ ID NO: 464988 - RNA, 19 nt, Homo sapiens
  misc_RNA (1)...(19): siRNA sense strand
guacaguccucagcuugga

SEQ ID NO: 464989 - RNA, 19 nt, Homo sapiens
  misc_RNA (1)...(19): siRNA sense strand
gugacaagccaaaguggua

SEQ ID NO: 464990 - RNA, 19 nt, Homo sapiens
  misc_RNA (1)...(19): siRNA sense strand
uggcggaucuuuacuggau

SEQ ID NO: 464991 - RNA, 19 nt, Homo sapiens
  misc_RNA (1)...(19): siRNA sense strand
gaagguaaauaagaaugac

SEQ ID NO: 464992 - RNA, 19 nt, Homo sapiens
  misc_RNA (1)...(19): siRNA sense strand
uggcaucuguguuaacuuc

SEQ ID NO: 464993 - RNA, 19 nt, Homo sapiens
  misc_RNA (1)...(19): siRNA sense strand
uguuagaccuccucaagug

SEQ ID NO: 464994 - RNA, 19 nt, Homo sapiens
  misc_RNA (1)...(19): siRNA sense strand
ccagacccaucucgauuca

SEQ ID NO: 464995 - RNA, 19 nt, Homo sapiens
  misc_RNA (1)...(19): siRNA sense strand
gucgggagcuguacuacug

SEQ ID NO: 464996 - RNA, 19 nt, Homo sapiens
  misc_RNA (1)...(19): siRNA sense strand
guaguaacaucggaacagu

SEQ ID NO: 464997 - RNA, 19 nt, Homo sapiens
  misc_RNA (1)...(19): siRNA sense strand
cgaauucacaacaauaugu

SEQ ID NO: 464998 - RNA, 19 nt, Homo sapiens
  misc_RNA (1)...(19): siRNA sense strand
cagcgaauucacaacaaua

SEQ ID NO: 464999 - RNA, 19 nt, Homo sapiens
  misc_RNA (1)...(19): siRNA sense strand
ucuacaaacuggacuucaa

SEQ ID NO: 465000 - RNA, 19 nt, Homo sapiens
  misc_RNA (1)...(19): siRNA sense strand
uacaaacggagauaucuuu

SEQ ID NO: 465001 - RNA, 19 nt, Homo sapiens
  misc_RNA (1)...(19): siRNA sense strand
ggaagggaucaaccucaaa

SEQ ID NO: 465002 - RNA, 19 nt, Homo sapiens
  misc_RNA (1)...(19): siRNA sense strand
ugugugguguugcguagua

SEQ ID NO: 465003 - RNA, 19 nt, Homo sapiens
  misc_RNA (1)...(19): siRNA sense strand
gcaaauggacggaauguuu

SEQ ID NO: 465004 - RNA, 19 nt, Homo sapiens
  misc_RNA (1)...(19): siRNA sense strand
gggagaaacguaugaauua

SEQ ID NO: 465005 - RNA, 19 nt, Homo sapiens
  misc_RNA (1)...(19): siRNA sense strand
ggagaaacguaugaauuaa

SEQ ID NO: 465006 - RNA, 19 nt, Homo sapiens
  misc_RNA (1)...(19): siRNA sense strand
gaacggagaggaagaauuc

SEQ ID NO: 465007 - RNA, 19 nt, Homo sapiens
  misc_RNA (1)...(19): siRNA sense strand
gcauagauccuguuucgua

SEQ ID NO: 465008 - RNA, 19 nt, Homo sapiens
  misc_RNA (1)...(19): siRNA sense strand
ccacagaacuggacauaag

SEQ ID NO: 465009 - RNA, 19 nt, Homo sapiens
  misc_RNA (1)...(19): siRNA sense strand
gaaaagaacuucacaaggu

SEQ ID NO: 465010 - RNA, 19 nt, Homo sapiens
  misc_RNA (1)...(19): siRNA sense strand
gaaagucacgggaaugauu

SEQ ID NO: 465011 - RNA, 19 nt, Homo sapiens
  misc_RNA (1)...(19): siRNA sense strand
uaaaccguguggauuauuu

SEQ ID NO: 465012 - RNA, 19 nt, Homo sapiens
  misc_RNA (1)...(19): siRNA sense strand
caagagaacggaauucaga

SEQ ID NO: 465013 - RNA, 19 nt, Homo sapiens
  misc_RNA (1)...(19): siRNA sense strand
gaacuggacauaagugugu

SEQ ID NO: 465014 - RNA, 19 nt, Homo sapiens
  misc_RNA (1)...(19): siRNA sense strand
cggaaggucucaaccauga

SEQ ID NO: 465015 - RNA, 19 nt, Homo sapiens
  misc_RNA (1)...(19): siRNA sense strand
cagggaagauuuaggauuc

SEQ ID NO: 465016 - RNA, 19 nt, Homo sapiens
  misc_RNA (1)...(19): siRNA sense strand
gggcauagauccuguuucg

SEQ ID NO: 465017 - RNA, 19 nt, Homo sapiens
  misc_RNA (1)...(19): siRNA sense strand
ggaccauccugaagaagug

SEQ ID NO: 465018 - RNA, 19 nt, Homo sapiens
  misc_RNA (1)...(19): siRNA sense strand
gaaaggccaagcuggauga

SEQ ID NO: 465019 - RNA, 19 nt, Homo sapiens
  misc_RNA (1)...(19): siRNA sense strand
gcccagauguauaauuuca

SEQ ID NO: 465020 - RNA, 19 nt, Homo sapiens
  misc_RNA (1)...(19): siRNA sense strand
cugcccagauguauaauuu

SEQ ID NO: 465021 - RNA, 19 nt, Homo sapiens
  misc_RNA (1)...(19): siRNA sense strand
gaaggacacauucaagaca

SEQ ID NO: 465022 - RNA, 19 nt, Homo sapiens
  misc_RNA (1)...(19): siRNA sense strand
uagauccuguuucguauga

SEQ ID NO: 465023 - RNA, 19 nt, Homo sapiens
  misc_RNA (1)...(19): siRNA sense strand
cauagauccuguuucguau

SEQ ID NO: 465024 - RNA, 19 nt, Homo sapiens
  misc_RNA (1)...(19): siRNA sense strand
gaacggaauucagaaacac

SEQ ID NO: 465025 - RNA, 19 nt, Homo sapiens
  misc_RNA (1)...(19): siRNA sense strand
ucacgggaaugauugacuu

SEQ ID NO: 465026 - RNA, 19 nt, Homo sapiens
  misc_RNA (1)...(19): siRNA sense strand
gauccuguuucguaugaau

SEQ ID NO: 465027 - RNA, 19 nt, Homo sapiens
  misc_RNA (1)...(19): siRNA sense strand
caagguggaaggacacauu

SEQ ID NO: 465028 - RNA, 19 nt, Homo sapiens
  misc_RNA (1)...(19): siRNA sense strand
aggccaagcuggaugaaga

SEQ ID NO: 465029 - RNA, 19 nt, Homo sapiens
  misc_RNA (1)...(19): siRNA sense strand
ugacuuagacaccagcaaa

SEQ ID NO: 465030 - RNA, 19 nt, Homo sapiens
  misc_RNA (1)...(19): siRNA sense strand
uaugaucuauggcaaaugg

SEQ ID NO: 465031 - RNA, 19 nt, Homo sapiens
  misc_RNA (1)...(19): siRNA sense strand
gcucccauguucagcagaa

SEQ ID NO: 465032 - RNA, 19 nt, Homo sapiens
  misc_RNA (1)...(19): siRNA sense strand
cuuuaaaccguguggauua

SEQ ID NO: 465033 - RNA, 19 nt, Homo sapiens
  misc_RNA (1)...(19): siRNA sense strand
gaggaccggcaaaccauuu

SEQ ID NO: 465034 - RNA, 19 nt, Homo sapiens
  misc_RNA (1)...(19): siRNA sense strand
ucaacgagccucugagcuu

SEQ ID NO: 465035 - RNA, 19 nt, Homo sapiens
  misc_RNA (1)...(19): siRNA sense strand
aagcugcucuggaggauca

SEQ ID NO: 465036 - RNA, 19 nt, Homo sapiens
  misc_RNA (1)...(19): siRNA sense strand
gaagcucuuuaugaucuau

SEQ ID NO: 465037 - RNA, 19 nt, Homo sapiens
  misc_RNA (1)...(19): siRNA sense strand
ggagaggaccggcaaacca

SEQ ID NO: 465038 - RNA, 19 nt, Homo sapiens
  misc_RNA (1)...(19): siRNA sense strand
gcaagcugcucuggaggau

SEQ ID NO: 465039 - RNA, 19 nt, Homo sapiens
  misc_RNA (1)...(19): siRNA sense strand
gaagauuuaggauucagau

SEQ ID NO: 465040 - RNA, 19 nt, Homo sapiens
  misc_RNA (1)...(19): siRNA sense strand
gggaaugauugacuuagac

SEQ ID NO: 465041 - RNA, 19 nt, Homo sapiens
  misc_RNA (1)...(19): siRNA sense strand
cgggaaugauugacuuaga

SEQ ID NO: 465042 - RNA, 19 nt, Homo sapiens
  misc_RNA (1)...(19): siRNA sense strand
cagaaagucacgggaauga

SEQ ID NO: 465043 - RNA, 19 nt, Homo sapiens
  misc_RNA (1)...(19): siRNA sense strand
agaacggaauucagaaaca

SEQ ID NO: 465044 - RNA, 19 nt, Homo sapiens
  misc_RNA (1)...(19): siRNA sense strand
ggaccggcaaaccauuuaa

SEQ ID NO: 465045 - RNA, 19 nt, Homo sapiens
  misc_RNA (1)...(19): siRNA sense strand
ucgggaagcuguggauaga

SEQ ID NO: 465046 - RNA, 19 nt, Homo sapiens
  misc_RNA (1)...(19): siRNA sense strand
ggaaggacacauucaagac

SEQ ID NO: 465047 - RNA, 19 nt, Homo sapiens
  misc_RNA (1)...(19): siRNA sense strand
uggagaggaugcagucugu

SEQ ID NO: 465048 - RNA, 19 nt, Homo sapiens
  misc_RNA (1)...(19): siRNA sense strand
ugggagaaacguaugaauu

SEQ ID NO: 465049 - RNA, 19 nt, Homo sapiens
  misc_RNA (1)...(19): siRNA sense strand
ccguguggauuauuuggaa

SEQ ID NO: 465050 - RNA, 19 nt, Homo sapiens
  misc_RNA (1)...(19): siRNA sense strand
gagaaaggccaagcuggau

SEQ ID NO: 465051 - RNA, 19 nt, Homo sapiens
  misc_RNA (1)...(19): siRNA sense strand
ggaaugauugacuuagaca

SEQ ID NO: 465052 - RNA, 19 nt, Homo sapiens
  misc_RNA (1)...(19): siRNA sense strand
aaggacacauucaagacaa

SEQ ID NO: 465053 - RNA, 19 nt, Homo sapiens
  misc_RNA (1)...(19): siRNA sense strand
gagaggaccggcaaaccau

SEQ ID NO: 465054 - RNA, 19 nt, Homo sapiens
  misc_RNA (1)...(19): siRNA sense strand
caaccaugacuuccuguuc

SEQ ID NO: 465055 - RNA, 19 nt, Homo sapiens
  misc_RNA (1)...(19): siRNA sense strand
uaucggaacaggucaguca

SEQ ID NO: 465056 - RNA, 19 nt, Homo sapiens
  misc_RNA (1)...(19): siRNA sense strand
agacaggcauggagaagac

SEQ ID NO: 465057 - RNA, 19 nt, Homo sapiens
  misc_RNA (1)...(19): siRNA sense strand
aauccacucuugggagaaa

SEQ ID NO: 465058 - RNA, 19 nt, Homo sapiens
  misc_RNA (1)...(19): siRNA sense strand
uguggaccauccugaagaa

SEQ ID NO: 465059 - RNA, 19 nt, Homo sapiens
  misc_RNA (1)...(19): siRNA sense strand
ggacaguggagauuuuaaa

SEQ ID NO: 465060 - RNA, 19 nt, Homo sapiens
  misc_RNA (1)...(19): siRNA sense strand
ucagggaagauuuaggauu

SEQ ID NO: 465061 - RNA, 19 nt, Homo sapiens
  misc_RNA (1)...(19): siRNA sense strand
gaggagaagcagagagaag

SEQ ID NO: 465062 - RNA, 19 nt, Homo sapiens
  misc_RNA (1)...(19): siRNA sense strand
ggagaauggcaacauggau

SEQ ID NO: 465063 - RNA, 19 nt, Homo sapiens
  misc_RNA (1)...(19): siRNA sense strand
gguggaaggacacauucaa

SEQ ID NO: 465064 - RNA, 19 nt, Homo sapiens
  misc_RNA (1)...(19): siRNA sense strand
gacauaagugugugcuuca

SEQ ID NO: 465065 - RNA, 19 nt, Homo sapiens
  misc_RNA (1)...(19): siRNA sense strand
ggaagauuuaggauucaga

SEQ ID NO: 465066 - RNA, 19 nt, Homo sapiens
  misc_RNA (1)...(19): siRNA sense strand
ucagauuuauaucggaaca

SEQ ID NO: 465067 - RNA, 19 nt, Homo sapiens
  misc_RNA (1)...(19): siRNA sense strand
agagaacggaauucagaaa

SEQ ID NO: 465068 - RNA, 19 nt, Homo sapiens
  misc_RNA (1)...(19): siRNA sense strand
aggagcggcuggaggagaa

SEQ ID NO: 465069 - RNA, 19 nt, Homo sapiens
  misc_RNA (1)...(19): siRNA sense strand
gagacaggcauggagaaga

SEQ ID NO: 465070 - RNA, 19 nt, Homo sapiens
  misc_RNA (1)...(19): siRNA sense strand
gugugugcuucacuuuaaa

SEQ ID NO: 465071 - RNA, 19 nt, Homo sapiens
  misc_RNA (1)...(19): siRNA sense strand
uggaaggacacauucaaga

SEQ ID NO: 465072 - RNA, 19 nt, Homo sapiens
  misc_RNA (1)...(19): siRNA sense strand
cgacugcccagauaucuac

SEQ ID NO: 465073 - RNA, 19 nt, Homo sapiens
  misc_RNA (1)...(19): siRNA sense strand
gagaacggaauucagaaac

SEQ ID NO: 465074 - RNA, 19 nt, Homo sapiens
  misc_RNA (1)...(19): siRNA sense strand
aaagucacgggaaugauug

SEQ ID NO: 465075 - RNA, 19 nt, Homo sapiens
  misc_RNA (1)...(19): siRNA sense strand
ugcagcggaucacggagua

SEQ ID NO: 465076 - RNA, 19 nt, Homo sapiens
  misc_RNA (1)...(19): siRNA sense strand
uuuaaaccguguggauuau

SEQ ID NO: 465077 - RNA, 19 nt, Homo sapiens
  misc_RNA (1)...(19): siRNA sense strand
gaaggucucaaccaugacu

SEQ ID NO: 465078 - RNA, 19 nt, Homo sapiens
  misc_RNA (1)...(19): siRNA sense strand
agaagcucuuuaugaucua

SEQ ID NO: 465079 - RNA, 19 nt, Homo sapiens
  misc_RNA (1)...(19): siRNA sense strand
cugcccagauaucuacuga

SEQ ID NO: 465080 - RNA, 19 nt, Homo sapiens
  misc_RNA (1)...(19): siRNA sense strand
uauggcaaauggacggaau

SEQ ID NO: 465081 - RNA, 19 nt, Homo sapiens
  misc_RNA (1)...(19): siRNA sense strand
ggagaagcagagagaagca

SEQ ID NO: 465082 - RNA, 19 nt, Homo sapiens
  misc_RNA (1)...(19): siRNA sense strand
ggauuacuuugagcggaau

SEQ ID NO: 465083 - RNA, 19 nt, Homo sapiens
  misc_RNA (1)...(19): siRNA sense strand
gguucuacccaggcaauaa

SEQ ID NO: 465084 - RNA, 19 nt, Homo sapiens
  misc_RNA (1)...(19): siRNA sense strand
gaccggcaaaccauuuaau

SEQ ID NO: 465085 - RNA, 19 nt, Homo sapiens
  misc_RNA (1)...(19): siRNA sense strand
ggagacaggcauggagaag

SEQ ID NO: 465086 - RNA, 19 nt, Homo sapiens
  misc_RNA (1)...(19): siRNA sense strand
cggcaaaccauuuaaucca

SEQ ID NO: 465087 - RNA, 19 nt, Homo sapiens
  misc_RNA (1)...(19): siRNA sense strand
ggaggagaagcagagagaa

SEQ ID NO: 465088 - RNA, 19 nt, Homo sapiens
  misc_RNA (1)...(19): siRNA sense strand
uggaggagaagcagagaga

SEQ ID NO: 465089 - RNA, 19 nt, Homo sapiens
  misc_RNA (1)...(19): siRNA sense strand
gcaaauggacggaauguuu

SEQ ID NO: 465090 - RNA, 19 nt, Homo sapiens
  misc_RNA (1)...(19): siRNA sense strand
gggagaaacguaugaauua

SEQ ID NO: 465091 - RNA, 19 nt, Homo sapiens
  misc_RNA (1)...(19): siRNA sense strand
ggagaaacguaugaauuaa

SEQ ID NO: 465092 - RNA, 19 nt, Homo sapiens
  misc_RNA (1)...(19): siRNA sense strand
gaacggagaggaagaauuc

SEQ ID NO: 465093 - RNA, 19 nt, Homo sapiens
  misc_RNA (1)...(19): siRNA sense strand
gcauagauccuguuucgua

SEQ ID NO: 465094 - RNA, 19 nt, Homo sapiens
  misc_RNA (1)...(19): siRNA sense strand
ccacagaacuggacauaag

SEQ ID NO: 465095 - RNA, 19 nt, Homo sapiens
  misc_RNA (1)...(19): siRNA sense strand
gaaaagaacuucacaaggu

SEQ ID NO: 465096 - RNA, 19 nt, Homo sapiens
  misc_RNA (1)...(19): siRNA sense strand
gaaagucacgggaaugauu

SEQ ID NO: 465097 - RNA, 19 nt, Homo sapiens
  misc_RNA (1)...(19): siRNA sense strand
uaaaccguguggauuauuu

SEQ ID NO: 465098 - RNA, 19 nt, Homo sapiens
  misc_RNA (1)...(19): siRNA sense strand
caagagaacggaauucaga

SEQ ID NO: 465099 - RNA, 19 nt, Homo sapiens
  misc_RNA (1)...(19): siRNA sense strand
gaacuggacauaagugugu

SEQ ID NO: 465100 - RNA, 19 nt, Homo sapiens
  misc_RNA (1)...(19): siRNA sense strand
cggaaggucucaaccauga

SEQ ID NO: 465101 - RNA, 19 nt, Homo sapiens
  misc_RNA (1)...(19): siRNA sense strand
cagggaagauuuaggauuc

SEQ ID NO: 465102 - RNA, 19 nt, Homo sapiens
  misc_RNA (1)...(19): siRNA sense strand
gggcauagauccuguuucg

SEQ ID NO: 465103 - RNA, 19 nt, Homo sapiens
  misc_RNA (1)...(19): siRNA sense strand
ggaccauccugaagaagug

SEQ ID NO: 465104 - RNA, 19 nt, Homo sapiens
  misc_RNA (1)...(19): siRNA sense strand
gaaaggccaagcuggauga

SEQ ID NO: 465105 - RNA, 19 nt, Homo sapiens
  misc_RNA (1)...(19): siRNA sense strand
gcccagauguauaauuuca

SEQ ID NO: 465106 - RNA, 19 nt, Homo sapiens
  misc_RNA (1)...(19): siRNA sense strand
cugcccagauguauaauuu

SEQ ID NO: 465107 - RNA, 19 nt, Homo sapiens
  misc_RNA (1)...(19): siRNA sense strand
gaaggacacauucaagaca

SEQ ID NO: 465108 - RNA, 19 nt, Homo sapiens
  misc_RNA (1)...(19): siRNA sense strand
uagauccuguuucguauga

SEQ ID NO: 465109 - RNA, 19 nt, Homo sapiens
  misc_RNA (1)...(19): siRNA sense strand
cauagauccuguuucguau

SEQ ID NO: 465110 - RNA, 19 nt, Homo sapiens
  misc_RNA (1)...(19): siRNA sense strand
gaacggaauucagaaacac

SEQ ID NO: 465111 - RNA, 19 nt, Homo sapiens
  misc_RNA (1)...(19): siRNA sense strand
ucacgggaaugauugacuu

SEQ ID NO: 465112 - RNA, 19 nt, Homo sapiens
  misc_RNA (1)...(19): siRNA sense strand
gauccuguuucguaugaau

SEQ ID NO: 465113 - RNA, 19 nt, Homo sapiens
  misc_RNA (1)...(19): siRNA sense strand
caagguggaaggacacauu

SEQ ID NO: 465114 - RNA, 19 nt, Homo sapiens
  misc_RNA (1)...(19): siRNA sense strand
aggccaagcuggaugaaga

SEQ ID NO: 465115 - RNA, 19 nt, Homo sapiens
  misc_RNA (1)...(19): siRNA sense strand
ugacuuagacaccagcaaa

SEQ ID NO: 465116 - RNA, 19 nt, Homo sapiens
  misc_RNA (1)...(19): siRNA sense strand
uaugaucuauggcaaaugg

SEQ ID NO: 465117 - RNA, 19 nt, Homo sapiens
  misc_RNA (1)...(19): siRNA sense strand
gcucccauguucagcagaa

SEQ ID NO: 465118 - RNA, 19 nt, Homo sapiens
  misc_RNA (1)...(19): siRNA sense strand
cuuuaaaccguguggauua

SEQ ID NO: 465119 - RNA, 19 nt, Homo sapiens
  misc_RNA (1)...(19): siRNA sense strand
gaggaccggcaaaccauuu

SEQ ID NO: 465120 - RNA, 19 nt, Homo sapiens
  misc_RNA (1)...(19): siRNA sense strand
ucaacgagccucugagcuu

SEQ ID NO: 465121 - RNA, 19 nt, Homo sapiens
  misc_RNA (1)...(19): siRNA sense strand
aagcugcucuggaggauca

SEQ ID NO: 465122 - RNA, 19 nt, Homo sapiens
  misc_RNA (1)...(19): siRNA sense strand
gaagcucuuuaugaucuau

SEQ ID NO: 465123 - RNA, 19 nt, Homo sapiens
  misc_RNA (1)...(19): siRNA sense strand
ggagaggaccggcaaacca

SEQ ID NO: 465124 - RNA, 19 nt, Homo sapiens
  misc_RNA (1)...(19): siRNA sense strand
gcaagcugcucuggaggau

SEQ ID NO: 465125 - RNA, 19 nt, Homo sapiens
  misc_RNA (1)...(19): siRNA sense strand
gaagauuuaggauucagau

SEQ ID NO: 465126 - RNA, 19 nt, Homo sapiens
  misc_RNA (1)...(19): siRNA sense strand
gggaaugauugacuuagac

SEQ ID NO: 465127 - RNA, 19 nt, Homo sapiens
  misc_RNA (1)...(19): siRNA sense strand
cgggaaugauugacuuaga

SEQ ID NO: 465128 - RNA, 19 nt, Homo sapiens
  misc_RNA (1)...(19): siRNA sense strand
cagaaagucacgggaauga

SEQ ID NO: 465129 - RNA, 19 nt, Homo sapiens
  misc_RNA (1)...(19): siRNA sense strand
agaacggaauucagaaaca

SEQ ID NO: 465130 - RNA, 19 nt, Homo sapiens
  misc_RNA (1)...(19): siRNA sense strand
ggaccggcaaaccauuuaa

SEQ ID NO: 465131 - RNA, 19 nt, Homo sapiens
  misc_RNA (1)...(19): siRNA sense strand
ucgggaagcuguggauaga

SEQ ID NO: 465132 - RNA, 19 nt, Homo sapiens
  misc_RNA (1)...(19): siRNA sense strand
ggaaggacacauucaagac

SEQ ID NO: 465133 - RNA, 19 nt, Homo sapiens
  misc_RNA (1)...(19): siRNA sense strand
uggagaggaugcagucugu

SEQ ID NO: 465134 - RNA, 19 nt, Homo sapiens
  misc_RNA (1)...(19): siRNA sense strand
ugggagaaacguaugaauu

SEQ ID NO: 465135 - RNA, 19 nt, Homo sapiens
  misc_RNA (1)...(19): siRNA sense strand
ccguguggauuauuuggaa

SEQ ID NO: 465136 - RNA, 19 nt, Homo sapiens
  misc_RNA (1)...(19): siRNA sense strand
gagaaaggccaagcuggau

SEQ ID NO: 465137 - RNA, 19 nt, Homo sapiens
  misc_RNA (1)...(19): siRNA sense strand
ggaaugauugacuuagaca

SEQ ID NO: 465138 - RNA, 19 nt, Homo sapiens
  misc_RNA (1)...(19): siRNA sense strand
aaggacacauucaagacaa

SEQ ID NO: 465139 - RNA, 19 nt, Homo sapiens
  misc_RNA (1)...(19): siRNA sense strand
gagaggaccggcaaaccau

SEQ ID NO: 465140 - RNA, 19 nt, Homo sapiens
  misc_RNA (1)...(19): siRNA sense strand
caaccaugacuuccuguuc

SEQ ID NO: 465141 - RNA, 19 nt, Homo sapiens
  misc_RNA (1)...(19): siRNA sense strand
uaucggaacaggucaguca

SEQ ID NO: 465142 - RNA, 19 nt, Homo sapiens
  misc_RNA (1)...(19): siRNA sense strand
agacaggcauggagaagac

SEQ ID NO: 465143 - RNA, 19 nt, Homo sapiens
  misc_RNA (1)...(19): siRNA sense strand
aauccacucuugggagaaa

SEQ ID NO: 465144 - RNA, 19 nt, Homo sapiens
  misc_RNA (1)...(19): siRNA sense strand
uguggaccauccugaagaa

SEQ ID NO: 465145 - RNA, 19 nt, Homo sapiens
  misc_RNA (1)...(19): siRNA sense strand
ggacaguggagauuuuaaa

SEQ ID NO: 465146 - RNA, 19 nt, Homo sapiens
  misc_RNA (1)...(19): siRNA sense strand
ucagggaagauuuaggauu

SEQ ID NO: 465147 - RNA, 19 nt, Homo sapiens
  misc_RNA (1)...(19): siRNA sense strand
gaggagaagcagagagaag

SEQ ID NO: 465148 - RNA, 19 nt, Homo sapiens
  misc_RNA (1)...(19): siRNA sense strand
ggagaauggcaacauggau

SEQ ID NO: 465149 - RNA, 19 nt, Homo sapiens
  misc_RNA (1)...(19): siRNA sense strand
gguggaaggacacauucaa

SEQ ID NO: 465150 - RNA, 19 nt, Homo sapiens
  misc_RNA (1)...(19): siRNA sense strand
gacauaagugugugcuuca

SEQ ID NO: 465151 - RNA, 19 nt, Homo sapiens
  misc_RNA (1)...(19): siRNA sense strand
ggaagauuuaggauucaga

SEQ ID NO: 465152 - RNA, 19 nt, Homo sapiens
  misc_RNA (1)...(19): siRNA sense strand
ucagauuuauaucggaaca

SEQ ID NO: 465153 - RNA, 19 nt, Homo sapiens
  misc_RNA (1)...(19): siRNA sense strand
agagaacggaauucagaaa

SEQ ID NO: 465154 - RNA, 19 nt, Homo sapiens
  misc_RNA (1)...(19): siRNA sense strand
aggagcggcuggaggagaa

SEQ ID NO: 465155 - RNA, 19 nt, Homo sapiens
  misc_RNA (1)...(19): siRNA sense strand
gagacaggcauggagaaga

SEQ ID NO: 465156 - RNA, 19 nt, Homo sapiens
  misc_RNA (1)...(19): siRNA sense strand
gugugugcuucacuuuaaa

SEQ ID NO: 465157 - RNA, 19 nt, Homo sapiens
  misc_RNA (1)...(19): siRNA sense strand
uggaaggacacauucaaga

SEQ ID NO: 465158 - RNA, 19 nt, Homo sapiens
  misc_RNA (1)...(19): siRNA sense strand
cgacugcccagauaucuac

SEQ ID NO: 465159 - RNA, 19 nt, Homo sapiens
  misc_RNA (1)...(19): siRNA sense strand
gagaacggaauucagaaac

SEQ ID NO: 465160 - RNA, 19 nt, Homo sapiens
  misc_RNA (1)...(19): siRNA sense strand
aaagucacgggaaugauug

SEQ ID NO: 465161 - RNA, 19 nt, Homo sapiens
  misc_RNA (1)...(19): siRNA sense strand
ugcagcggaucacggagua

SEQ ID NO: 465162 - RNA, 19 nt, Homo sapiens
  misc_RNA (1)...(19): siRNA sense strand
uuuaaaccguguggauuau

SEQ ID NO: 465163 - RNA, 19 nt, Homo sapiens
  misc_RNA (1)...(19): siRNA sense strand
gaaggucucaaccaugacu

SEQ ID NO: 465164 - RNA, 19 nt, Homo sapiens
  misc_RNA (1)...(19): siRNA sense strand
agaagcucuuuaugaucua

SEQ ID NO: 465165 - RNA, 19 nt, Homo sapiens
  misc_RNA (1)...(19): siRNA sense strand
cugcccagauaucuacuga

SEQ ID NO: 465166 - RNA, 19 nt, Homo sapiens
  misc_RNA (1)...(19): siRNA sense strand
uauggcaaauggacggaau

SEQ ID NO: 465167 - RNA, 19 nt, Homo sapiens
  misc_RNA (1)...(19): siRNA sense strand
ggagaagcagagagaagca

SEQ ID NO: 465168 - RNA, 19 nt, Homo sapiens
  misc_RNA (1)...(19): siRNA sense strand
ggauuacuuugagcggaau

SEQ ID NO: 465169 - RNA, 19 nt, Homo sapiens
  misc_RNA (1)...(19): siRNA sense strand
gguucuacccaggcaauaa

SEQ ID NO: 465170 - RNA, 19 nt, Homo sapiens
  misc_RNA (1)...(19): siRNA sense strand
gaccggcaaaccauuuaau

SEQ ID NO: 465171 - RNA, 19 nt, Homo sapiens
  misc_RNA (1)...(19): siRNA sense strand
ggagacaggcauggagaag

SEQ ID NO: 465172 - RNA, 19 nt, Homo sapiens
  misc_RNA (1)...(19): siRNA sense strand
cggcaaaccauuuaaucca

SEQ ID NO: 465173 - RNA, 19 nt, Homo sapiens
  misc_RNA (1)...(19): siRNA sense strand
ggaggagaagcagagagaa

SEQ ID NO: 465174 - RNA, 19 nt, Homo sapiens
  misc_RNA (1)...(19): siRNA sense strand
uggaggagaagcagagaga

SEQ ID NO: 465175 - RNA, 19 nt, Homo sapiens
  misc_RNA (1)...(19): siRNA sense strand
gcagaaggcuuucaaguga

SEQ ID NO: 465176 - RNA, 19 nt, Homo sapiens
  misc_RNA (1)...(19): siRNA sense strand
caugauagauggcuugaaa

SEQ ID NO: 465177 - RNA, 19 nt, Homo sapiens
  misc_RNA (1)...(19): siRNA sense strand
gcaaagcugcucaggaaua

SEQ ID NO: 465178 - RNA, 19 nt, Homo sapiens
  misc_RNA (1)...(19): siRNA sense strand
ggacagcccugguauugau

SEQ ID NO: 465179 - RNA, 19 nt, Homo sapiens
  misc_RNA (1)...(19): siRNA sense strand
caugaggccuuucuccuua

SEQ ID NO: 465180 - RNA, 19 nt, Homo sapiens
  misc_RNA (1)...(19): siRNA sense strand
caagaccgacugaaauuua

SEQ ID NO: 465181 - RNA, 19 nt, Homo sapiens
  misc_RNA (1)...(19): siRNA sense strand
caaagcugcucaggaauaa

SEQ ID NO: 465182 - RNA, 19 nt, Homo sapiens
  misc_RNA (1)...(19): siRNA sense strand
gaagacacguacaggaaug

SEQ ID NO: 465183 - RNA, 19 nt, Homo sapiens
  misc_RNA (1)...(19): siRNA sense strand
gacuauaagcugcgaauua

SEQ ID NO: 465184 - RNA, 19 nt, Homo sapiens
  misc_RNA (1)...(19): siRNA sense strand
cgacugaaauuuauugaca

SEQ ID NO: 465185 - RNA, 19 nt, Homo sapiens
  misc_RNA (1)...(19): siRNA sense strand
acagugagcucaacauguu

SEQ ID NO: 465186 - RNA, 19 nt, Homo sapiens
  misc_RNA (1)...(19): siRNA sense strand
acuauaagcugcgaauuaa

SEQ ID NO: 465187 - RNA, 19 nt, Homo sapiens
  misc_RNA (1)...(19): siRNA sense strand
ggaacugucugggaccuuu

SEQ ID NO: 465188 - RNA, 19 nt, Homo sapiens
  misc_RNA (1)...(19): siRNA sense strand
guacaggaaugcagaacug

SEQ ID NO: 465189 - RNA, 19 nt, Homo sapiens
  misc_RNA (1)...(19): siRNA sense strand
gaccgcaucuucuuugugu

SEQ ID NO: 465190 - RNA, 19 nt, Homo sapiens
  misc_RNA (1)...(19): siRNA sense strand
guucuugacucacuucaga

SEQ ID NO: 465191 - RNA, 19 nt, Homo sapiens
  misc_RNA (1)...(19): siRNA sense strand
guauugaugucaccacaga

SEQ ID NO: 465192 - RNA, 19 nt, Homo sapiens
  misc_RNA (1)...(19): siRNA sense strand
gaccuuugcucaucugugu

SEQ ID NO: 465193 - RNA, 19 nt, Homo sapiens
  misc_RNA (1)...(19): siRNA sense strand
caguaguccucaagguuua

SEQ ID NO: 465194 - RNA, 19 nt, Homo sapiens
  misc_RNA (1)...(19): siRNA sense strand
gaaauugccgccaugaaca

SEQ ID NO: 465195 - RNA, 19 nt, Homo sapiens
  misc_RNA (1)...(19): siRNA sense strand
gcucauugcccucuccuuu

SEQ ID NO: 465196 - RNA, 19 nt, Homo sapiens
  misc_RNA (1)...(19): siRNA sense strand
gaagagcaccgugaucaau

SEQ ID NO: 465197 - RNA, 19 nt, Homo sapiens
  misc_RNA (1)...(19): siRNA sense strand
caggaggaguucaugguuu

SEQ ID NO: 465198 - RNA, 19 nt, Homo sapiens
  misc_RNA (1)...(19): siRNA sense strand
acacauggcugaggugaau

SEQ ID NO: 465199 - RNA, 19 nt, Homo sapiens
  misc_RNA (1)...(19): siRNA sense strand
cagcuggauugacaaguuu

SEQ ID NO: 465200 - RNA, 19 nt, Homo sapiens
  misc_RNA (1)...(19): siRNA sense strand
gcaagaccgacugaaauuu

SEQ ID NO: 465201 - RNA, 19 nt, Homo sapiens
  misc_RNA (1)...(19): siRNA sense strand
ccucaagguuuauaagaau

SEQ ID NO: 465202 - RNA, 19 nt, Homo sapiens
  misc_RNA (1)...(19): siRNA sense strand
gguggacgauuaccagaug

SEQ ID NO: 465203 - RNA, 19 nt, Homo sapiens
  misc_RNA (1)...(19): siRNA sense strand
gcaacucuaucgucacagu

SEQ ID NO: 465204 - RNA, 19 nt, Homo sapiens
  misc_RNA (1)...(19): siRNA sense strand
acuaugaccuaaacuguga

SEQ ID NO: 465205 - RNA, 19 nt, Homo sapiens
  misc_RNA (1)...(19): siRNA sense strand
gaucaggcgccucucugua

SEQ ID NO: 465206 - RNA, 19 nt, Homo sapiens
  misc_RNA (1)...(19): siRNA sense strand
ggaauaaagccgguugguu

SEQ ID NO: 465207 - RNA, 19 nt, Homo sapiens
  misc_RNA (1)...(19): siRNA sense strand
ggaaauugccgccaugaac

SEQ ID NO: 465208 - RNA, 19 nt, Homo sapiens
  misc_RNA (1)...(19): siRNA sense strand
ccaagaagaagaucaaugg

SEQ ID NO: 465209 - RNA, 19 nt, Homo sapiens
  misc_RNA (1)...(19): siRNA sense strand
ccaguaguccucaagguuu

SEQ ID NO: 465210 - RNA, 19 nt, Homo sapiens
  misc_RNA (1)...(19): siRNA sense strand
ggcaagaccgacugaaauu

SEQ ID NO: 465211 - RNA, 19 nt, Homo sapiens
  misc_RNA (1)...(19): siRNA sense strand
gcgaggaaaugcgugaaga

SEQ ID NO: 465212 - RNA, 19 nt, Homo sapiens
  misc_RNA (1)...(19): siRNA sense strand
ucuggaugcugauguguuu

SEQ ID NO: 465213 - RNA, 19 nt, Homo sapiens
  misc_RNA (1)...(19): siRNA sense strand
ggagagcgccaccuuccuu

SEQ ID NO: 465214 - RNA, 19 nt, Homo sapiens
  misc_RNA (1)...(19): siRNA sense strand
ggacagugagcucaacaug

SEQ ID NO: 465215 - RNA, 19 nt, Homo sapiens
  misc_RNA (1)...(19): siRNA sense strand
ggacugggucgaaacaugu

SEQ ID NO: 465216 - RNA, 19 nt, Homo sapiens
  misc_RNA (1)...(19): siRNA sense strand
ugauguggcccaacucuaa

SEQ ID NO: 465217 - RNA, 19 nt, Homo sapiens
  misc_RNA (1)...(19): siRNA sense strand
gcagugaagaccaaguuug

SEQ ID NO: 465218 - RNA, 19 nt, Homo sapiens
  misc_RNA (1)...(19): siRNA sense strand
caacuaugaccuaaacugu

SEQ ID NO: 465219 - RNA, 19 nt, Homo sapiens
  misc_RNA (1)...(19): siRNA sense strand
gguuaccuauccaaaguga

SEQ ID NO: 465220 - RNA, 19 nt, Homo sapiens
  misc_RNA (1)...(19): siRNA sense strand
gacauugaguuccauuucu

SEQ ID NO: 465221 - RNA, 19 nt, Homo sapiens
  misc_RNA (1)...(19): siRNA sense strand
gugaaugcauccccacuua

SEQ ID NO: 465222 - RNA, 19 nt, Homo sapiens
  misc_RNA (1)...(19): siRNA sense strand
gggcacagauggccaugag

SEQ ID NO: 465223 - RNA, 19 nt, Homo sapiens
  misc_RNA (1)...(19): siRNA sense strand
acagcuggauugacaaguu

SEQ ID NO: 465224 - RNA, 19 nt, Homo sapiens
  misc_RNA (1)...(19): siRNA sense strand
caagcugugugcugacuuc

SEQ ID NO: 465225 - RNA, 19 nt, Homo sapiens
  misc_RNA (1)...(19): siRNA sense strand
gggaagagcaccgugauca

SEQ ID NO: 465226 - RNA, 19 nt, Homo sapiens
  misc_RNA (1)...(19): siRNA sense strand
ggaagagcaccgugaucaa

SEQ ID NO: 465227 - RNA, 19 nt, Homo sapiens
  misc_RNA (1)...(19): siRNA sense strand
gagcugcaccgccacauag

SEQ ID NO: 465228 - RNA, 19 nt, Homo sapiens
  misc_RNA (1)...(19): siRNA sense strand
guucugcccucugggauug

SEQ ID NO: 465229 - RNA, 19 nt, Homo sapiens
  misc_RNA (1)...(19): siRNA sense strand
caagugaggauguuugagu

SEQ ID NO: 465230 - RNA, 19 nt, Homo sapiens
  misc_RNA (1)...(19): siRNA sense strand
ccucagagcccgaguacau

SEQ ID NO: 465231 - RNA, 19 nt, Homo sapiens
  misc_RNA (1)...(19): siRNA sense strand
ucugaaggaugaccucguu

SEQ ID NO: 465232 - RNA, 19 nt, Homo sapiens
  misc_RNA (1)...(19): siRNA sense strand
ccacuuaagcacuuuguca

SEQ ID NO: 465233 - RNA, 19 nt, Homo sapiens
  misc_RNA (1)...(19): siRNA sense strand
gaagacauugaguuccauu

SEQ ID NO: 465234 - RNA, 19 nt, Homo sapiens
  misc_RNA (1)...(19): siRNA sense strand
gaaggacugggucgaaaca

SEQ ID NO: 465235 - RNA, 19 nt, Homo sapiens
  misc_RNA (1)...(19): siRNA sense strand
cagugaagaccaaguuuga

SEQ ID NO: 465236 - RNA, 19 nt, Homo sapiens
  misc_RNA (1)...(19): siRNA sense strand
ccaggaagacauugaguuc

SEQ ID NO: 465237 - RNA, 19 nt, Homo sapiens
  misc_RNA (1)...(19): siRNA sense strand
gagcgccaccuuccuugaa

SEQ ID NO: 465238 - RNA, 19 nt, Homo sapiens
  misc_RNA (1)...(19): siRNA sense strand
cagcaggacaugauagaug

SEQ ID NO: 465239 - RNA, 19 nt, Homo sapiens
  misc_RNA (1)...(19): siRNA sense strand
cuggacagcuggauugaca

SEQ ID NO: 465240 - RNA, 19 nt, Homo sapiens
  misc_RNA (1)...(19): siRNA sense strand
ggagucagauagacaugcu

SEQ ID NO: 465241 - RNA, 19 nt, Homo sapiens
  misc_RNA (1)...(19): siRNA sense strand
cuuccacccuucuccagua

SEQ ID NO: 465242 - RNA, 19 nt, Homo sapiens
  misc_RNA (1)...(19): siRNA sense strand
gcggcaagaccgacugaaa

SEQ ID NO: 465243 - RNA, 19 nt, Homo sapiens
  misc_RNA (1)...(19): siRNA sense strand
gaaaagaggagugccaaga

SEQ ID NO: 465244 - RNA, 19 nt, Homo sapiens
  misc_RNA (1)...(19): siRNA sense strand
uaucgucacagucaagaaa

SEQ ID NO: 465245 - RNA, 19 nt, Homo sapiens
  misc_RNA (1)...(19): siRNA sense strand
aagaccgacugaaauuuau

SEQ ID NO: 465246 - RNA, 19 nt, Homo sapiens
  misc_RNA (1)...(19): siRNA sense strand
gugaggauguuugaguuuc

SEQ ID NO: 465247 - RNA, 19 nt, Homo sapiens
  misc_RNA (1)...(19): siRNA sense strand
gggcauucuuguuguugga

SEQ ID NO: 465248 - RNA, 19 nt, Homo sapiens
  misc_RNA (1)...(19): siRNA sense strand
ccaacucccugcagaccau

SEQ ID NO: 465249 - RNA, 19 nt, Homo sapiens
  misc_RNA (1)...(19): siRNA sense strand
gcagaggcgguucgacuca

SEQ ID NO: 465250 - RNA, 19 nt, Homo sapiens
  misc_RNA (1)...(19): siRNA sense strand
gaacaaccgcugggaugca

SEQ ID NO: 465251 - RNA, 19 nt, Homo sapiens
  misc_RNA (1)...(19): siRNA sense strand
ccacggccaucaccaacuc

SEQ ID NO: 465252 - RNA, 19 nt, Homo sapiens
  misc_RNA (1)...(19): siRNA sense strand
ugaggauguuugaguuuca

SEQ ID NO: 465253 - RNA, 19 nt, Homo sapiens
  misc_RNA (1)...(19): siRNA sense strand
aaagaggagugccaagacu

SEQ ID NO: 465254 - RNA, 19 nt, Homo sapiens
  misc_RNA (1)...(19): siRNA sense strand
ccgguugguuggacaguga

SEQ ID NO: 465255 - RNA, 19 nt, Homo sapiens
  misc_RNA (1)...(19): siRNA sense strand
caacugcagccaccaaguc

SEQ ID NO: 465256 - RNA, 19 nt, Homo sapiens
  misc_RNA (1)...(19): siRNA sense strand
gaggaaggacugggucgaa

SEQ ID NO: 465257 - RNA, 19 nt, Homo sapiens
  misc_RNA (1)...(19): siRNA sense strand
gaccgacugaaauuuauug

SEQ ID NO: 465258 - RNA, 19 nt, Homo sapiens
  misc_RNA (1)...(19): siRNA sense strand
gggagcagcagguuuacug

SEQ ID NO: 465259 - RNA, 19 nt, Homo sapiens
  misc_RNA (1)...(19): siRNA sense strand
cggcaagaccgacugaaau

SEQ ID NO: 465260 - RNA, 19 nt, Homo sapiens
  misc_RNA (1)...(19): siRNA sense strand
caugggcauucuuguuguu

SEQ ID NO: 465261 - RNA, 19 nt, Homo sapiens
  misc_RNA (1)...(19): siRNA sense strand
gauggacagcccugguauu

SEQ ID NO: 465262 - RNA, 19 nt, Homo sapiens
  misc_RNA (1)...(19): siRNA sense strand
ugacucacuucagagcaaa

SEQ ID NO: 465263 - RNA, 19 nt, Homo sapiens
  misc_RNA (1)...(19): siRNA sense strand
aagugaggauguuugaguu

SEQ ID NO: 465264 - RNA, 19 nt, Homo sapiens
  misc_RNA (1)...(19): siRNA sense strand
ccaugaggccuuucuccuu

SEQ ID NO: 465265 - RNA, 19 nt, Homo sapiens
  misc_RNA (1)...(19): siRNA sense strand
gacagugagcucaacaugu

SEQ ID NO: 465266 - RNA, 19 nt, Homo sapiens
  misc_RNA (1)...(19): siRNA sense strand
ucauugcccucuccuuugg

SEQ ID NO: 465267 - RNA, 19 nt, Homo sapiens
  misc_RNA (1)...(19): siRNA sense strand
ggacagcuggauugacaag

SEQ ID NO: 465268 - RNA, 19 nt, Homo sapiens
  misc_RNA (1)...(19): siRNA sense strand
aggaaggacugggucgaaa

SEQ ID NO: 465269 - RNA, 19 nt, Homo sapiens
  misc_RNA (1)...(19): siRNA sense strand
gaacaagaaaauugagguu

SEQ ID NO: 465270 - RNA, 19 nt, Homo sapiens
  misc_RNA (1)...(19): siRNA sense strand
gaacugucugggaccuuug

SEQ ID NO: 465271 - RNA, 19 nt, Homo sapiens
  misc_RNA (1)...(19): siRNA sense strand
ccaugggcauucuuguugu

SEQ ID NO: 465272 - RNA, 19 nt, Homo sapiens
  misc_RNA (1)...(19): siRNA sense strand
ggaccuccaugggcauucu

SEQ ID NO: 465273 - RNA, 19 nt, Homo sapiens
  misc_RNA (1)...(19): siRNA sense strand
aggaggaguucaugguuuc

SEQ ID NO: 465274 - RNA, 19 nt, Homo sapiens
  misc_RNA (1)...(19): siRNA sense strand
cagcgucccaucccucuga

SEQ ID NO: 465275 - RNA, 19 nt, Homo sapiens
  misc_RNA (1)...(19): siRNA sense strand
guacagagauuacgauuua

SEQ ID NO: 465276 - RNA, 19 nt, Homo sapiens
  misc_RNA (1)...(19): siRNA sense strand
ggaaagagcuacaaaguga

SEQ ID NO: 465277 - RNA, 19 nt, Homo sapiens
  misc_RNA (1)...(19): siRNA sense strand
gaagacugcugcggaagaa

SEQ ID NO: 465278 - RNA, 19 nt, Homo sapiens
  misc_RNA (1)...(19): siRNA sense strand
gaacaucaaauuagcuaga

SEQ ID NO: 465279 - RNA, 19 nt, Homo sapiens
  misc_RNA (1)...(19): siRNA sense strand
gcuacaaagugaagauaau

SEQ ID NO: 465280 - RNA, 19 nt, Homo sapiens
  misc_RNA (1)...(19): siRNA sense strand
gagggacuauucaagaugu

SEQ ID NO: 465281 - RNA, 19 nt, Homo sapiens
  misc_RNA (1)...(19): siRNA sense strand
ucacuacaacgaagaauug

SEQ ID NO: 465282 - RNA, 19 nt, Homo sapiens
  misc_RNA (1)...(19): siRNA sense strand
gacaauuaauguggaaaga

SEQ ID NO: 465283 - RNA, 19 nt, Homo sapiens
  misc_RNA (1)...(19): siRNA sense strand
ggacgaaucaagcauccuu

SEQ ID NO: 465284 - RNA, 19 nt, Homo sapiens
  misc_RNA (1)...(19): siRNA sense strand
acaugagugugcaagauaa

SEQ ID NO: 465285 - RNA, 19 nt, Homo sapiens
  misc_RNA (1)...(19): siRNA sense strand
gcgcaacguacagagauua

SEQ ID NO: 465286 - RNA, 19 nt, Homo sapiens
  misc_RNA (1)...(19): siRNA sense strand
gaaagagcuacaaagugaa

SEQ ID NO: 465287 - RNA, 19 nt, Homo sapiens
  misc_RNA (1)...(19): siRNA sense strand
gagcuacaaagugaagaua

SEQ ID NO: 465288 - RNA, 19 nt, Homo sapiens
  misc_RNA (1)...(19): siRNA sense strand
gaugugaagagaaagaaau

SEQ ID NO: 465289 - RNA, 19 nt, Homo sapiens
  misc_RNA (1)...(19): siRNA sense strand
caacgaagaauugaacauc

SEQ ID NO: 465290 - RNA, 19 nt, Homo sapiens
  misc_RNA (1)...(19): siRNA sense strand
gcagugaggccuacaugag

SEQ ID NO: 465291 - RNA, 19 nt, Homo sapiens
  misc_RNA (1)...(19): siRNA sense strand
caagaugugaagagaaaga

SEQ ID NO: 465292 - RNA, 19 nt, Homo sapiens
  misc_RNA (1)...(19): siRNA sense strand
gcacaccgcgcaacguaca

SEQ ID NO: 465293 - RNA, 19 nt, Homo sapiens
  misc_RNA (1)...(19): siRNA sense strand
cuacaugagugugcaagau

SEQ ID NO: 465294 - RNA, 19 nt, Homo sapiens
  misc_RNA (1)...(19): siRNA sense strand
gaaagaaaucccaaaagug

SEQ ID NO: 465295 - RNA, 19 nt, Homo sapiens
  misc_RNA (1)...(19): siRNA sense strand
agaaagaaaucccaaaagu

SEQ ID NO: 465296 - RNA, 19 nt, Homo sapiens
  misc_RNA (1)...(19): siRNA sense strand
ggagggacuauucaagaug

SEQ ID NO: 465297 - RNA, 19 nt, Homo sapiens
  misc_RNA (1)...(19): siRNA sense strand
cuagacaauuaauguggaa

SEQ ID NO: 465298 - RNA, 19 nt, Homo sapiens
  misc_RNA (1)...(19): siRNA sense strand
uacaugagugugcaagaua

SEQ ID NO: 465299 - RNA, 19 nt, Homo sapiens
  misc_RNA (1)...(19): siRNA sense strand
gagcagugaggccuacaug

SEQ ID NO: 465300 - RNA, 19 nt, Homo sapiens
  misc_RNA (1)...(19): siRNA sense strand
guggaaagagcuacaaagu

SEQ ID NO: 465301 - RNA, 19 nt, Homo sapiens
  misc_RNA (1)...(19): siRNA sense strand
aagcggcaguucgaaauga

SEQ ID NO: 465302 - RNA, 19 nt, Homo sapiens
  misc_RNA (1)...(19): siRNA sense strand
guuccucgguggcgacuuc

SEQ ID NO: 465303 - RNA, 19 nt, Homo sapiens
  misc_RNA (1)...(19): siRNA sense strand
uggagggacuauucaagau

SEQ ID NO: 465304 - RNA, 19 nt, Homo sapiens
  misc_RNA (1)...(19): siRNA sense strand
ggaagaaucagaggaagcu

SEQ ID NO: 465305 - RNA, 19 nt, Homo sapiens
  misc_RNA (1)...(19): siRNA sense strand
aacgaagaauugaacauca

SEQ ID NO: 465306 - RNA, 19 nt, Homo sapiens
  misc_RNA (1)...(19): siRNA sense strand
caucaaauuagcuagacaa

SEQ ID NO: 465307 - RNA, 19 nt, Homo sapiens
  misc_RNA (1)...(19): siRNA sense strand
cagugaggccuacaugaga

SEQ ID NO: 465308 - RNA, 19 nt, Homo sapiens
  misc_RNA (1)...(19): siRNA sense strand
cuacaaagugaagauaaug

SEQ ID NO: 465309 - RNA, 19 nt, Homo sapiens
  misc_RNA (1)...(19): siRNA sense strand
agugaggccuacaugagaa

SEQ ID NO: 465310 - RNA, 19 nt, Homo sapiens
  misc_RNA (1)...(19): siRNA sense strand
gcaguucgaaaugagaaga

SEQ ID NO: 465311 - RNA, 19 nt, Homo sapiens
  misc_RNA (1)...(19): siRNA sense strand
acgauuuaaugaaggcaaa

SEQ ID NO: 465312 - RNA, 19 nt, Homo sapiens
  misc_RNA (1)...(19): siRNA sense strand
gcacgaacgaagagaagac

SEQ ID NO: 465313 - RNA, 19 nt, Homo sapiens
  misc_RNA (1)...(19): siRNA sense strand
cacaaggcacgaacgaaga

SEQ ID NO: 465314 - RNA, 19 nt, Homo sapiens
  misc_RNA (1)...(19): siRNA sense strand
uggaaagagcuacaaagug

SEQ ID NO: 465315 - RNA, 19 nt, Homo sapiens
  misc_RNA (1)...(19): siRNA sense strand
cuacaacgaagaauugaac

SEQ ID NO: 465316 - RNA, 19 nt, Homo sapiens
  misc_RNA (1)...(19): siRNA sense strand
ugucgaaggagaagauuca

SEQ ID NO: 465317 - RNA, 19 nt, Homo sapiens
  misc_RNA (1)...(19): siRNA sense strand
gagguggacgagcaagaga

SEQ ID NO: 465318 - RNA, 19 nt, Homo sapiens
  misc_RNA (1)...(19): siRNA sense strand
agaagacugcugcggaaga

SEQ ID NO: 465319 - RNA, 19 nt, Homo sapiens
  misc_RNA (1)...(19): siRNA sense strand
gaaugaggcuucacaacaa

SEQ ID NO: 465320 - RNA, 19 nt, Homo sapiens
  misc_RNA (1)...(19): siRNA sense strand
gcaacaagauccccuauga

SEQ ID NO: 465321 - RNA, 19 nt, Homo sapiens
  misc_RNA (1)...(19): siRNA sense strand
gaggaggccuuccguagga

SEQ ID NO: 465322 - RNA, 19 nt, Homo sapiens
  misc_RNA (1)...(19): siRNA sense strand
ggucagcgucugcaaguga

SEQ ID NO: 465323 - RNA, 19 nt, Homo sapiens
  misc_RNA (1)...(19): siRNA sense strand
ccagaucgccauccacgaa

SEQ ID NO: 465324 - RNA, 19 nt, Homo sapiens
  misc_RNA (1)...(19): siRNA sense strand
ccacgaaugccaacaccaa

SEQ ID NO: 465325 - RNA, 19 nt, Homo sapiens
  misc_RNA (1)...(19): siRNA sense strand
ggcaggcagugauggagaa

SEQ ID NO: 465326 - RNA, 19 nt, Homo sapiens
  misc_RNA (1)...(19): siRNA sense strand
agaaugaggcuucacaaca

SEQ ID NO: 465327 - RNA, 19 nt, Homo sapiens
  misc_RNA (1)...(19): siRNA sense strand
gaaggccuguggcugugau

SEQ ID NO: 465328 - RNA, 19 nt, Homo sapiens
  misc_RNA (1)...(19): siRNA sense strand
gacauccacgcgagaauga

SEQ ID NO: 465329 - RNA, 19 nt, Homo sapiens
  misc_RNA (1)...(19): siRNA sense strand
ggaggcaggcagugaugga

SEQ ID NO: 465330 - RNA, 19 nt, Homo sapiens
  misc_RNA (1)...(19): siRNA sense strand
cuaugagagucccaucuuc

SEQ ID NO: 465331 - RNA, 19 nt, Homo sapiens
  misc_RNA (1)...(19): siRNA sense strand
ggggagcgcuuuucuaagg

SEQ ID NO: 465332 - RNA, 19 nt, Homo sapiens
  misc_RNA (1)...(19): siRNA sense strand
ccaggucagcacccaauga

SEQ ID NO: 465333 - RNA, 19 nt, Homo sapiens
  misc_RNA (1)...(19): siRNA sense strand
ccuggagacucgcaacaag

SEQ ID NO: 465334 - RNA, 19 nt, Homo sapiens
  misc_RNA (1)...(19): siRNA sense strand
gagaaugaggcuucacaac

SEQ ID NO: 465335 - RNA, 19 nt, Homo sapiens
  misc_RNA (1)...(19): siRNA sense strand
uaugagagucccaucuuca

SEQ ID NO: 465336 - RNA, 19 nt, Homo sapiens
  misc_RNA (1)...(19): siRNA sense strand
gcauccagaucgccaucca

SEQ ID NO: 465337 - RNA, 19 nt, Homo sapiens
  misc_RNA (1)...(19): siRNA sense strand
gcgagaaugaggcuucaca

SEQ ID NO: 465338 - RNA, 19 nt, Homo sapiens
  misc_RNA (1)...(19): siRNA sense strand
ccuaugagagucccaucuu

SEQ ID NO: 465339 - RNA, 19 nt, Homo sapiens
  misc_RNA (1)...(19): siRNA sense strand
cgagaaugaggcuucacaa

SEQ ID NO: 465340 - RNA, 19 nt, Homo sapiens
  misc_RNA (1)...(19): siRNA sense strand
ucugggugcuccuguucuu

SEQ ID NO: 465341 - RNA, 19 nt, Homo sapiens
  misc_RNA (1)...(19): siRNA sense strand
ggaaguaccuggaacugua

SEQ ID NO: 465342 - RNA, 19 nt, Homo sapiens
  misc_RNA (1)...(19): siRNA sense strand
gcaggaaugccagcuauua

SEQ ID NO: 465343 - RNA, 19 nt, Homo sapiens
  misc_RNA (1)...(19): siRNA sense strand
ucaccuagauggccaggaa

SEQ ID NO: 465344 - RNA, 19 nt, Homo sapiens
  misc_RNA (1)...(19): siRNA sense strand
caaacagcgucuccuggaa

SEQ ID NO: 465345 - RNA, 19 nt, Homo sapiens
  misc_RNA (1)...(19): siRNA sense strand
ucaggacucuggacauuca

SEQ ID NO: 465346 - RNA, 19 nt, Homo sapiens
  misc_RNA (1)...(19): siRNA sense strand
gaccacacccuguucuuga

SEQ ID NO: 465347 - RNA, 19 nt, Homo sapiens
  misc_RNA (1)...(19): siRNA sense strand
cagcaggaaugccagcuau

SEQ ID NO: 465348 - RNA, 19 nt, Homo sapiens
  misc_RNA (1)...(19): siRNA sense strand
gcgcuugccucuccaaugc

SEQ ID NO: 465349 - RNA, 19 nt, Homo sapiens
  misc_RNA (1)...(19): siRNA sense strand
ucucaggacucuggacauu

SEQ ID NO: 465350 - RNA, 19 nt, Homo sapiens
  misc_RNA (1)...(19): siRNA sense strand
ggacucuaccguucaccua

SEQ ID NO: 465351 - RNA, 19 nt, Homo sapiens
  misc_RNA (1)...(19): siRNA sense strand
ggaaugccagcuauuaucu

SEQ ID NO: 465352 - RNA, 19 nt, Homo sapiens
  misc_RNA (1)...(19): siRNA sense strand
gggagaugcucauggaaac

SEQ ID NO: 465353 - RNA, 19 nt, Homo sapiens
  misc_RNA (1)...(19): siRNA sense strand
ugcuugagcuggagaagaa

SEQ ID NO: 465354 - RNA, 19 nt, Homo sapiens
  misc_RNA (1)...(19): siRNA sense strand
gcuccacccuucugugaca

SEQ ID NO: 465355 - RNA, 19 nt, Homo sapiens
  misc_RNA (1)...(19): siRNA sense strand
aaacuugaaccacaccaaa

SEQ ID NO: 465356 - RNA, 19 nt, Homo sapiens
  misc_RNA (1)...(19): siRNA sense strand
gcaauagcaaccauaacug

SEQ ID NO: 465357 - RNA, 19 nt, Homo sapiens
  misc_RNA (1)...(19): siRNA sense strand
gaaacuugaaccacaccaa

SEQ ID NO: 465358 - RNA, 19 nt, Homo sapiens
  misc_RNA (1)...(19): siRNA sense strand
acugugaccucccugaguu

SEQ ID NO: 465359 - RNA, 19 nt, Homo sapiens
  misc_RNA (1)...(19): siRNA sense strand
ggugaacucugcgggagau

SEQ ID NO: 465360 - RNA, 19 nt, Homo sapiens
  misc_RNA (1)...(19): siRNA sense strand
uggaggagccggucucgaa

SEQ ID NO: 465361 - RNA, 19 nt, Homo sapiens
  misc_RNA (1)...(19): siRNA sense strand
gggcuccacccuucuguga

SEQ ID NO: 465362 - RNA, 19 nt, Homo sapiens
  misc_RNA (1)...(19): siRNA sense strand
ccaaccacacggaucauug

SEQ ID NO: 465363 - RNA, 19 nt, Homo sapiens
  misc_RNA (1)...(19): siRNA sense strand
caggaaugccagcuauuau

SEQ ID NO: 465364 - RNA, 19 nt, Homo sapiens
  misc_RNA (1)...(19): siRNA sense strand
gggaugaguggccugauca

SEQ ID NO: 465365 - RNA, 19 nt, Homo sapiens
  misc_RNA (1)...(19): siRNA sense strand
caacuacguggaccagcuu

SEQ ID NO: 465366 - RNA, 19 nt, Homo sapiens
  misc_RNA (1)...(19): siRNA sense strand
cuagauggccaggaaguga

SEQ ID NO: 465367 - RNA, 19 nt, Homo sapiens
  misc_RNA (1)...(19): siRNA sense strand
cgggagaugcucauggaaa

SEQ ID NO: 465368 - RNA, 19 nt, Homo sapiens
  misc_RNA (1)...(19): siRNA sense strand
acacggaucauugccacua

SEQ ID NO: 465369 - RNA, 19 nt, Homo sapiens
  misc_RNA (1)...(19): siRNA sense strand
cugcugggauggcgcaugu

SEQ ID NO: 465370 - RNA, 19 nt, Homo sapiens
  misc_RNA (1)...(19): siRNA sense strand
gcacuggguccuggaugga

SEQ ID NO: 465371 - RNA, 19 nt, Homo sapiens
  misc_RNA (1)...(19): siRNA sense strand
gagaugcucauggaaacug

SEQ ID NO: 465372 - RNA, 19 nt, Homo sapiens
  misc_RNA (1)...(19): siRNA sense strand
gggaacaaagcgggcauga

SEQ ID NO: 465373 - RNA, 19 nt, Homo sapiens
  misc_RNA (1)...(19): siRNA sense strand
gaaugccagcuauuaucug

SEQ ID NO: 465374 - RNA, 19 nt, Homo sapiens
  misc_RNA (1)...(19): siRNA sense strand
uaccuggaacuguacauug

SEQ ID NO: 465375 - RNA, 19 nt, Homo sapiens
  misc_RNA (1)...(19): siRNA sense strand
caaccauaacugccacugu

SEQ ID NO: 465376 - RNA, 19 nt, Homo sapiens
  misc_RNA (1)...(19): siRNA sense strand
ugcgggagaugcucaugga

SEQ ID NO: 465377 - RNA, 19 nt, Homo sapiens
  misc_RNA (1)...(19): siRNA sense strand
cgcgaccucugcugcuuug

SEQ ID NO: 465378 - RNA, 19 nt, Homo sapiens
  misc_RNA (1)...(19): siRNA sense strand
cgggaacggcuucguggaa

SEQ ID NO: 465379 - RNA, 19 nt, Homo sapiens
  misc_RNA (1)...(19): siRNA sense strand
uccuggaagucgccaacua

SEQ ID NO: 465380 - RNA, 19 nt, Homo sapiens
  misc_RNA (1)...(19): siRNA sense strand
ggaaguaccuggaacugua

SEQ ID NO: 465381 - RNA, 19 nt, Homo sapiens
  misc_RNA (1)...(19): siRNA sense strand
gcaggaaugccagcuauua

SEQ ID NO: 465382 - RNA, 19 nt, Homo sapiens
  misc_RNA (1)...(19): siRNA sense strand
ucaccuagauggccaggaa

SEQ ID NO: 465383 - RNA, 19 nt, Homo sapiens
  misc_RNA (1)...(19): siRNA sense strand
caaacagcgucuccuggaa

SEQ ID NO: 465384 - RNA, 19 nt, Homo sapiens
  misc_RNA (1)...(19): siRNA sense strand
ucaggacucuggacauuca

SEQ ID NO: 465385 - RNA, 19 nt, Homo sapiens
  misc_RNA (1)...(19): siRNA sense strand
gaccacacccuguucuuga

SEQ ID NO: 465386 - RNA, 19 nt, Homo sapiens
  misc_RNA (1)...(19): siRNA sense strand
cagcaggaaugccagcuau

SEQ ID NO: 465387 - RNA, 19 nt, Homo sapiens
  misc_RNA (1)...(19): siRNA sense strand
gcgcuugccucuccaaugc

SEQ ID NO: 465388 - RNA, 19 nt, Homo sapiens
  misc_RNA (1)...(19): siRNA sense strand
ucucaggacucuggacauu

SEQ ID NO: 465389 - RNA, 19 nt, Homo sapiens
  misc_RNA (1)...(19): siRNA sense strand
ggacucuaccguucaccua

SEQ ID NO: 465390 - RNA, 19 nt, Homo sapiens
  misc_RNA (1)...(19): siRNA sense strand
ggaaugccagcuauuaucu

SEQ ID NO: 465391 - RNA, 19 nt, Homo sapiens
  misc_RNA (1)...(19): siRNA sense strand
gggagaugcucauggaaac

SEQ ID NO: 465392 - RNA, 19 nt, Homo sapiens
  misc_RNA (1)...(19): siRNA sense strand
ugcuugagcuggagaagaa

SEQ ID NO: 465393 - RNA, 19 nt, Homo sapiens
  misc_RNA (1)...(19): siRNA sense strand
gcuccacccuucugugaca

SEQ ID NO: 465394 - RNA, 19 nt, Homo sapiens
  misc_RNA (1)...(19): siRNA sense strand
aaacuugaaccacaccaaa

SEQ ID NO: 465395 - RNA, 19 nt, Homo sapiens
  misc_RNA (1)...(19): siRNA sense strand
gcaauagcaaccauaacug

SEQ ID NO: 465396 - RNA, 19 nt, Homo sapiens
  misc_RNA (1)...(19): siRNA sense strand
gaaacuugaaccacaccaa

SEQ ID NO: 465397 - RNA, 19 nt, Homo sapiens
  misc_RNA (1)...(19): siRNA sense strand
acugugaccucccugaguu

SEQ ID NO: 465398 - RNA, 19 nt, Homo sapiens
  misc_RNA (1)...(19): siRNA sense strand
ggugaacucugcgggagau

SEQ ID NO: 465399 - RNA, 19 nt, Homo sapiens
  misc_RNA (1)...(19): siRNA sense strand
uggaggagccggucucgaa

SEQ ID NO: 465400 - RNA, 19 nt, Homo sapiens
  misc_RNA (1)...(19): siRNA sense strand
gggcuccacccuucuguga

SEQ ID NO: 465401 - RNA, 19 nt, Homo sapiens
  misc_RNA (1)...(19): siRNA sense strand
ccaaccacacggaucauug

SEQ ID NO: 465402 - RNA, 19 nt, Homo sapiens
  misc_RNA (1)...(19): siRNA sense strand
caggaaugccagcuauuau

SEQ ID NO: 465403 - RNA, 19 nt, Homo sapiens
  misc_RNA (1)...(19): siRNA sense strand
gggaugaguggccugauca

SEQ ID NO: 465404 - RNA, 19 nt, Homo sapiens
  misc_RNA (1)...(19): siRNA sense strand
caacuacguggaccagcuu

SEQ ID NO: 465405 - RNA, 19 nt, Homo sapiens
  misc_RNA (1)...(19): siRNA sense strand
cuagauggccaggaaguga

SEQ ID NO: 465406 - RNA, 19 nt, Homo sapiens
  misc_RNA (1)...(19): siRNA sense strand
cgggagaugcucauggaaa

SEQ ID NO: 465407 - RNA, 19 nt, Homo sapiens
  misc_RNA (1)...(19): siRNA sense strand
acacggaucauugccacua

SEQ ID NO: 465408 - RNA, 19 nt, Homo sapiens
  misc_RNA (1)...(19): siRNA sense strand
cugcugggauggcgcaugu

SEQ ID NO: 465409 - RNA, 19 nt, Homo sapiens
  misc_RNA (1)...(19): siRNA sense strand
gcacuggguccuggaugga

SEQ ID NO: 465410 - RNA, 19 nt, Homo sapiens
  misc_RNA (1)...(19): siRNA sense strand
gagaugcucauggaaacug

SEQ ID NO: 465411 - RNA, 19 nt, Homo sapiens
  misc_RNA (1)...(19): siRNA sense strand
gggaacaaagcgggcauga

SEQ ID NO: 465412 - RNA, 19 nt, Homo sapiens
  misc_RNA (1)...(19): siRNA sense strand
gaaugccagcuauuaucug

SEQ ID NO: 465413 - RNA, 19 nt, Homo sapiens
  misc_RNA (1)...(19): siRNA sense strand
uaccuggaacuguacauug

SEQ ID NO: 465414 - RNA, 19 nt, Homo sapiens
  misc_RNA (1)...(19): siRNA sense strand
caaccauaacugccacugu

SEQ ID NO: 465415 - RNA, 19 nt, Homo sapiens
  misc_RNA (1)...(19): siRNA sense strand
ugcgggagaugcucaugga

SEQ ID NO: 465416 - RNA, 19 nt, Homo sapiens
  misc_RNA (1)...(19): siRNA sense strand
cgcgaccucugcugcuuug

SEQ ID NO: 465417 - RNA, 19 nt, Homo sapiens
  misc_RNA (1)...(19): siRNA sense strand
cgggaacggcuucguggaa

SEQ ID NO: 465418 - RNA, 19 nt, Homo sapiens
  misc_RNA (1)...(19): siRNA sense strand
uccuggaagucgccaacua

SEQ ID NO: 465419 - RNA, 19 nt, Homo sapiens
  misc_RNA (1)...(19): siRNA sense strand
gcaagaaucuacuauauca

SEQ ID NO: 465420 - RNA, 19 nt, Homo sapiens
  misc_RNA (1)...(19): siRNA sense strand
ccugguaccugguuaauua

SEQ ID NO: 465421 - RNA, 19 nt, Homo sapiens
  misc_RNA (1)...(19): siRNA sense strand
uuaauuagcugccaaguga

SEQ ID NO: 465422 - RNA, 19 nt, Homo sapiens
  misc_RNA (1)...(19): siRNA sense strand
ggacaguuaugguuacauu

SEQ ID NO: 465423 - RNA, 19 nt, Homo sapiens
  misc_RNA (1)...(19): siRNA sense strand
gaugagacauuccaagaga

SEQ ID NO: 465424 - RNA, 19 nt, Homo sapiens
  misc_RNA (1)...(19): siRNA sense strand
ugacauggaucgggaauuu

SEQ ID NO: 465425 - RNA, 19 nt, Homo sapiens
  misc_RNA (1)...(19): siRNA sense strand
gaagaacacuugggaaucu

SEQ ID NO: 465426 - RNA, 19 nt, Homo sapiens
  misc_RNA (1)...(19): siRNA sense strand
ggaauacacugaugguaca

SEQ ID NO: 465427 - RNA, 19 nt, Homo sapiens
  misc_RNA (1)...(19): siRNA sense strand
gaagaugcauuuggaggaa

SEQ ID NO: 465428 - RNA, 19 nt, Homo sapiens
  misc_RNA (1)...(19): siRNA sense strand
guauuaaccuacaggauga

SEQ ID NO: 465429 - RNA, 19 nt, Homo sapiens
  misc_RNA (1)...(19): siRNA sense strand
gaaacucuaugccaaccuu

SEQ ID NO: 465430 - RNA, 19 nt, Homo sapiens
  misc_RNA (1)...(19): siRNA sense strand
gagacccucuucacuguuu

SEQ ID NO: 465431 - RNA, 19 nt, Homo sapiens
  misc_RNA (1)...(19): siRNA sense strand
gaagagcuccagccgaauu

SEQ ID NO: 465432 - RNA, 19 nt, Homo sapiens
  misc_RNA (1)...(19): siRNA sense strand
gagaacgaguggccuggua

SEQ ID NO: 465433 - RNA, 19 nt, Homo sapiens
  misc_RNA (1)...(19): siRNA sense strand
guacagcaaugccaaucaa

SEQ ID NO: 465434 - RNA, 19 nt, Homo sapiens
  misc_RNA (1)...(19): siRNA sense strand
gcauuguuguucuugauuu

SEQ ID NO: 465435 - RNA, 19 nt, Homo sapiens
  misc_RNA (1)...(19): siRNA sense strand
cauaaagaauguugagaug

SEQ ID NO: 465436 - RNA, 19 nt, Homo sapiens
  misc_RNA (1)...(19): siRNA sense strand
cagcugcuauguuggauuu

SEQ ID NO: 465437 - RNA, 19 nt, Homo sapiens
  misc_RNA (1)...(19): siRNA sense strand
uaucauggcagaagaagua

SEQ ID NO: 465438 - RNA, 19 nt, Homo sapiens
  misc_RNA (1)...(19): siRNA sense strand
gcucuuuccucauaccuuu

SEQ ID NO: 465439 - RNA, 19 nt, Homo sapiens
  misc_RNA (1)...(19): siRNA sense strand
ggacauuugagauuuauug

SEQ ID NO: 465440 - RNA, 19 nt, Homo sapiens
  misc_RNA (1)...(19): siRNA sense strand
guaccaacaucgacagaga

SEQ ID NO: 465441 - RNA, 19 nt, Homo sapiens
  misc_RNA (1)...(19): siRNA sense strand
gaaguagagugggacuauu

SEQ ID NO: 465442 - RNA, 19 nt, Homo sapiens
  misc_RNA (1)...(19): siRNA sense strand
ggaguacugggaagaauuu

SEQ ID NO: 465443 - RNA, 19 nt, Homo sapiens
  misc_RNA (1)...(19): siRNA sense strand
cuaccaagcugcaagaauc

SEQ ID NO: 465444 - RNA, 19 nt, Homo sapiens
  misc_RNA (1)...(19): siRNA sense strand
gaggaagggugcagcuaug

SEQ ID NO: 465445 - RNA, 19 nt, Homo sapiens
  misc_RNA (1)...(19): siRNA sense strand
gaaggacaguuaugguuac

SEQ ID NO: 465446 - RNA, 19 nt, Homo sapiens
  misc_RNA (1)...(19): siRNA sense strand
ggaugagggcaaucuauaa

SEQ ID NO: 465447 - RNA, 19 nt, Homo sapiens
  misc_RNA (1)...(19): siRNA sense strand
gggaugagggcaaucuaua

SEQ ID NO: 465448 - RNA, 19 nt, Homo sapiens
  misc_RNA (1)...(19): siRNA sense strand
uaucaaaggugaaguuggu

SEQ ID NO: 465449 - RNA, 19 nt, Homo sapiens
  misc_RNA (1)...(19): siRNA sense strand
gagaaggacaguuaugguu

SEQ ID NO: 465450 - RNA, 19 nt, Homo sapiens
  misc_RNA (1)...(19): siRNA sense strand
gcaaucaauggcuuuguuu

SEQ ID NO: 465451 - RNA, 19 nt, Homo sapiens
  misc_RNA (1)...(19): siRNA sense strand
gaauuuaccugagcugaac

SEQ ID NO: 465452 - RNA, 19 nt, Homo sapiens
  misc_RNA (1)...(19): siRNA sense strand
cugcaagaaucuacuauau

SEQ ID NO: 465453 - RNA, 19 nt, Homo sapiens
  misc_RNA (1)...(19): siRNA sense strand
caaugacucugcuuguguu

SEQ ID NO: 465454 - RNA, 19 nt, Homo sapiens
  misc_RNA (1)...(19): siRNA sense strand
aagagaagaugcauuugga

SEQ ID NO: 465455 - RNA, 19 nt, Homo sapiens
  misc_RNA (1)...(19): siRNA sense strand
agaaagcuacgacgcaaua

SEQ ID NO: 465456 - RNA, 19 nt, Homo sapiens
  misc_RNA (1)...(19): siRNA sense strand
uaccugagcugaacaugug

SEQ ID NO: 465457 - RNA, 19 nt, Homo sapiens
  misc_RNA (1)...(19): siRNA sense strand
ugaaauugauguccacaca

SEQ ID NO: 465458 - RNA, 19 nt, Homo sapiens
  misc_RNA (1)...(19): siRNA sense strand
gaauuugcauuguuguucu

SEQ ID NO: 465459 - RNA, 19 nt, Homo sapiens
  misc_RNA (1)...(19): siRNA sense strand
gaagaaggcaaugugaaga

SEQ ID NO: 465460 - RNA, 19 nt, Homo sapiens
  misc_RNA (1)...(19): siRNA sense strand
ccauucagguggucuucua

SEQ ID NO: 465461 - RNA, 19 nt, Homo sapiens
  misc_RNA (1)...(19): siRNA sense strand
uaaagaauguugagaugcu

SEQ ID NO: 465462 - RNA, 19 nt, Homo sapiens
  misc_RNA (1)...(19): siRNA sense strand
gcaauaaaaugcaugcaau

SEQ ID NO: 465463 - RNA, 19 nt, Homo sapiens
  misc_RNA (1)...(19): siRNA sense strand
agaaggacaguuaugguua

SEQ ID NO: 465464 - RNA, 19 nt, Homo sapiens
  misc_RNA (1)...(19): siRNA sense strand
ugagggcaaucuauaaugu

SEQ ID NO: 465465 - RNA, 19 nt, Homo sapiens
  misc_RNA (1)...(19): siRNA sense strand
ugacaaccuugggacauuu

SEQ ID NO: 465466 - RNA, 19 nt, Homo sapiens
  misc_RNA (1)...(19): siRNA sense strand
gcaacacugugcagcuuca

SEQ ID NO: 465467 - RNA, 19 nt, Homo sapiens
  misc_RNA (1)...(19): siRNA sense strand
gaacagucacuuucgagau

SEQ ID NO: 465468 - RNA, 19 nt, Homo sapiens
  misc_RNA (1)...(19): siRNA sense strand
caggauccaggcaguauua

SEQ ID NO: 465469 - RNA, 19 nt, Homo sapiens
  misc_RNA (1)...(19): siRNA sense strand
ugacugugguauucaagaa

SEQ ID NO: 465470 - RNA, 19 nt, Homo sapiens
  misc_RNA (1)...(19): siRNA sense strand
ggaauuuaccugagcugaa

SEQ ID NO: 465471 - RNA, 19 nt, Homo sapiens
  misc_RNA (1)...(19): siRNA sense strand
gcagaucccauaagagaca

SEQ ID NO: 465472 - RNA, 19 nt, Homo sapiens
  misc_RNA (1)...(19): siRNA sense strand
gaucgggaauuugcauugu

SEQ ID NO: 465473 - RNA, 19 nt, Homo sapiens
  misc_RNA (1)...(19): siRNA sense strand
ggaaucuuggguccacuua

SEQ ID NO: 465474 - RNA, 19 nt, Homo sapiens
  misc_RNA (1)...(19): siRNA sense strand
ugaaggcacuguguacaau

SEQ ID NO: 465475 - RNA, 19 nt, Homo sapiens
  misc_RNA (1)...(19): siRNA sense strand
gggcaacacugugcagcuu

SEQ ID NO: 465476 - RNA, 19 nt, Homo sapiens
  misc_RNA (1)...(19): siRNA sense strand
cgacugcuuucagaggaua

SEQ ID NO: 465477 - RNA, 19 nt, Homo sapiens
  misc_RNA (1)...(19): siRNA sense strand
gagaugcuggccucuguuu

SEQ ID NO: 465478 - RNA, 19 nt, Homo sapiens
  misc_RNA (1)...(19): siRNA sense strand
gaugagggcaaucuauaau

SEQ ID NO: 465479 - RNA, 19 nt, Homo sapiens
  misc_RNA (1)...(19): siRNA sense strand
gagauucaaugggacuaug

SEQ ID NO: 465480 - RNA, 19 nt, Homo sapiens
  misc_RNA (1)...(19): siRNA sense strand
cugaugcacugccauguga

SEQ ID NO: 465481 - RNA, 19 nt, Homo sapiens
  misc_RNA (1)...(19): siRNA sense strand
ggaauuugcauuguuguuc

SEQ ID NO: 465482 - RNA, 19 nt, Homo sapiens
  misc_RNA (1)...(19): siRNA sense strand
agucugagaaggacaguua

SEQ ID NO: 465483 - RNA, 19 nt, Homo sapiens
  misc_RNA (1)...(19): siRNA sense strand
guucgacaguacuucauug

SEQ ID NO: 465484 - RNA, 19 nt, Homo sapiens
  misc_RNA (1)...(19): siRNA sense strand
gcugcaagaaucuacuaua

SEQ ID NO: 465485 - RNA, 19 nt, Homo sapiens
  misc_RNA (1)...(19): siRNA sense strand
ucacuguguuggaugagaa

SEQ ID NO: 465486 - RNA, 19 nt, Homo sapiens
  misc_RNA (1)...(19): siRNA sense strand
gggugcagcuaugcucuuu

SEQ ID NO: 465487 - RNA, 19 nt, Homo sapiens
  misc_RNA (1)...(19): siRNA sense strand
ucacuuggauguacuucuc

SEQ ID NO: 465488 - RNA, 19 nt, Homo sapiens
  misc_RNA (1)...(19): siRNA sense strand
cagaagaacacuugggaau

SEQ ID NO: 465489 - RNA, 19 nt, Homo sapiens
  misc_RNA (1)...(19): siRNA sense strand
agaaagggguggauaaaga

SEQ ID NO: 465490 - RNA, 19 nt, Homo sapiens
  misc_RNA (1)...(19): siRNA sense strand
gcagauggcaagcagaaag

SEQ ID NO: 465491 - RNA, 19 nt, Homo sapiens
  misc_RNA (1)...(19): siRNA sense strand
cauaagagacacaaauucu

SEQ ID NO: 465492 - RNA, 19 nt, Homo sapiens
  misc_RNA (1)...(19): siRNA sense strand
uccaagagaagaugcauuu

SEQ ID NO: 465493 - RNA, 19 nt, Homo sapiens
  misc_RNA (1)...(19): siRNA sense strand
gaacuaccgggcagaugug

SEQ ID NO: 465494 - RNA, 19 nt, Homo sapiens
  misc_RNA (1)...(19): siRNA sense strand
gcucauggagugcuagaau

SEQ ID NO: 465495 - RNA, 19 nt, Homo sapiens
  misc_RNA (1)...(19): siRNA sense strand
gcacaaccagucugagaag

SEQ ID NO: 465496 - RNA, 19 nt, Homo sapiens
  misc_RNA (1)...(19): siRNA sense strand
caagagaagaugcauuugg

SEQ ID NO: 465497 - RNA, 19 nt, Homo sapiens
  misc_RNA (1)...(19): siRNA sense strand
cugcagaucccauaagaga

SEQ ID NO: 465498 - RNA, 19 nt, Homo sapiens
  misc_RNA (1)...(19): siRNA sense strand
gcaugcagauccccauaaa

SEQ ID NO: 465499 - RNA, 19 nt, Homo sapiens
  misc_RNA (1)...(19): siRNA sense strand
aacagucacuuucgagaug

SEQ ID NO: 465500 - RNA, 19 nt, Homo sapiens
  misc_RNA (1)...(19): siRNA sense strand
ucaagcuucugucuuucaa

SEQ ID NO: 465501 - RNA, 19 nt, Homo sapiens
  misc_RNA (1)...(19): siRNA sense strand
aaucuuggguccacuuauc

SEQ ID NO: 465502 - RNA, 19 nt, Homo sapiens
  misc_RNA (1)...(19): siRNA sense strand
ugagagagccaggcaguau

SEQ ID NO: 465503 - RNA, 19 nt, Homo sapiens
  misc_RNA (1)...(19): siRNA sense strand
ccauaaagaauguugagau

SEQ ID NO: 465504 - RNA, 19 nt, Homo sapiens
  misc_RNA (1)...(19): siRNA sense strand
gaacacuuaagcccucuca

SEQ ID NO: 465505 - RNA, 19 nt, Homo sapiens
  misc_RNA (1)...(19): siRNA sense strand
uggagacccucuucacugu

SEQ ID NO: 465506 - RNA, 19 nt, Homo sapiens
  misc_RNA (1)...(19): siRNA sense strand
gaaggcacuguguacaaug

SEQ ID NO: 465507 - RNA, 19 nt, Homo sapiens
  misc_RNA (1)...(19): siRNA sense strand
caacaucgacagagaaagc

SEQ ID NO: 465508 - RNA, 19 nt, Homo sapiens
  misc_RNA (1)...(19): siRNA sense strand
caggcaaaguucgacagua

SEQ ID NO: 465509 - RNA, 19 nt, Homo sapiens
  misc_RNA (1)...(19): siRNA sense strand
ccaaugacucugcuugugu

SEQ ID NO: 465510 - RNA, 19 nt, Homo sapiens
  misc_RNA (1)...(19): siRNA sense strand
uauccugacugugguauuc

SEQ ID NO: 465511 - RNA, 19 nt, Homo sapiens
  misc_RNA (1)...(19): siRNA sense strand
gcaggcagccaucgagaag

SEQ ID NO: 465512 - RNA, 19 nt, Homo sapiens
  misc_RNA (1)...(19): siRNA sense strand
uugggacauuugagauuua

SEQ ID NO: 465513 - RNA, 19 nt, Homo sapiens
  misc_RNA (1)...(19): siRNA sense strand
cauugaggcccaugagauu

SEQ ID NO: 465514 - RNA, 19 nt, Homo sapiens
  misc_RNA (1)...(19): siRNA sense strand
gauccugcuugucucacuu

SEQ ID NO: 465515 - RNA, 19 nt, Homo sapiens
  misc_RNA (1)...(19): siRNA sense strand
uaacauaccgcuggacagu

SEQ ID NO: 465516 - RNA, 19 nt, Homo sapiens
  misc_RNA (1)...(19): siRNA sense strand
uuuccuggaucuauuauuc

SEQ ID NO: 465517 - RNA, 19 nt, Homo sapiens
  misc_RNA (1)...(19): siRNA sense strand
ucaccgucaucaccaaaga

SEQ ID NO: 465518 - RNA, 19 nt, Homo sapiens
  misc_RNA (1)...(19): siRNA sense strand
ucgggaauuugcauuguug

SEQ ID NO: 465519 - RNA, 19 nt, Homo sapiens
  misc_RNA (1)...(19): siRNA sense strand
gcaagaaucuacuauauca

SEQ ID NO: 465520 - RNA, 19 nt, Homo sapiens
  misc_RNA (1)...(19): siRNA sense strand
caaagaagaugagacauuu

SEQ ID NO: 465521 - RNA, 19 nt, Homo sapiens
  misc_RNA (1)...(19): siRNA sense strand
ccugguaccugguuaauua

SEQ ID NO: 465522 - RNA, 19 nt, Homo sapiens
  misc_RNA (1)...(19): siRNA sense strand
uuaauuagcugccaaguga

SEQ ID NO: 465523 - RNA, 19 nt, Homo sapiens
  misc_RNA (1)...(19): siRNA sense strand
ggacaguuaugguuacauu

SEQ ID NO: 465524 - RNA, 19 nt, Homo sapiens
  misc_RNA (1)...(19): siRNA sense strand
gaucuaccauucucaugua

SEQ ID NO: 465525 - RNA, 19 nt, Homo sapiens
  misc_RNA (1)...(19): siRNA sense strand
gaugagacauuccaagaga

SEQ ID NO: 465526 - RNA, 19 nt, Homo sapiens
  misc_RNA (1)...(19): siRNA sense strand
ugacauggaucgggaauuu

SEQ ID NO: 465527 - RNA, 19 nt, Homo sapiens
  misc_RNA (1)...(19): siRNA sense strand
gcaauaggaugcaugcaau

SEQ ID NO: 465528 - RNA, 19 nt, Homo sapiens
  misc_RNA (1)...(19): siRNA sense strand
gaagaacacuugggaaucu

SEQ ID NO: 465529 - RNA, 19 nt, Homo sapiens
  misc_RNA (1)...(19): siRNA sense strand
acaagaagaccaucuauaa

SEQ ID NO: 465530 - RNA, 19 nt, Homo sapiens
  misc_RNA (1)...(19): siRNA sense strand
ggaauacacugaugguaca

SEQ ID NO: 465531 - RNA, 19 nt, Homo sapiens
  misc_RNA (1)...(19): siRNA sense strand
gaagaugcauuuggaggaa

SEQ ID NO: 465532 - RNA, 19 nt, Homo sapiens
  misc_RNA (1)...(19): siRNA sense strand
guauuaaccuacaggauga

SEQ ID NO: 465533 - RNA, 19 nt, Homo sapiens
  misc_RNA (1)...(19): siRNA sense strand
gagaaggacucugaagguu

SEQ ID NO: 465534 - RNA, 19 nt, Homo sapiens
  misc_RNA (1)...(19): siRNA sense strand
ggacaaagaagaugagaca

SEQ ID NO: 465535 - RNA, 19 nt, Homo sapiens
  misc_RNA (1)...(19): siRNA sense strand
gagacccucuucacuguuu

SEQ ID NO: 465536 - RNA, 19 nt, Homo sapiens
  misc_RNA (1)...(19): siRNA sense strand
gaaacucuaugccaaccuu

SEQ ID NO: 465537 - RNA, 19 nt, Homo sapiens
  misc_RNA (1)...(19): siRNA sense strand
gaagagcuccagccgaauu

SEQ ID NO: 465538 - RNA, 19 nt, Homo sapiens
  misc_RNA (1)...(19): siRNA sense strand
gagaacgaguggccuggua

SEQ ID NO: 465539 - RNA, 19 nt, Homo sapiens
  misc_RNA (1)...(19): siRNA sense strand
guacagcaaugccaaucaa

SEQ ID NO: 465540 - RNA, 19 nt, Homo sapiens
  misc_RNA (1)...(19): siRNA sense strand
gcauuguuguucuugauuu

SEQ ID NO: 465541 - RNA, 19 nt, Homo sapiens
  misc_RNA (1)...(19): siRNA sense strand
cauaaagaauguugagaug

SEQ ID NO: 465542 - RNA, 19 nt, Homo sapiens
  misc_RNA (1)...(19): siRNA sense strand
gaaagcugaugacucuguu

SEQ ID NO: 465543 - RNA, 19 nt, Homo sapiens
  misc_RNA (1)...(19): siRNA sense strand
uaucauggcagaagaagua

SEQ ID NO: 465544 - RNA, 19 nt, Homo sapiens
  misc_RNA (1)...(19): siRNA sense strand
gcucuuuccucauaccuuu

SEQ ID NO: 465545 - RNA, 19 nt, Homo sapiens
  misc_RNA (1)...(19): siRNA sense strand
cagcugcuauguuggauuu

SEQ ID NO: 465546 - RNA, 19 nt, Homo sapiens
  misc_RNA (1)...(19): siRNA sense strand
ggacauuugagauuuauug

SEQ ID NO: 465547 - RNA, 19 nt, Homo sapiens
  misc_RNA (1)...(19): siRNA sense strand
guaccaacaucgacagaga

SEQ ID NO: 465548 - RNA, 19 nt, Homo sapiens
  misc_RNA (1)...(19): siRNA sense strand
caagaagaccaucuauaaa

SEQ ID NO: 465549 - RNA, 19 nt, Homo sapiens
  misc_RNA (1)...(19): siRNA sense strand
agaagaccaucuauaaaga

SEQ ID NO: 465550 - RNA, 19 nt, Homo sapiens
  misc_RNA (1)...(19): siRNA sense strand
gaaguagagugggacuauu

SEQ ID NO: 465551 - RNA, 19 nt, Homo sapiens
  misc_RNA (1)...(19): siRNA sense strand
ggaguacugggaagaauuu

SEQ ID NO: 465552 - RNA, 19 nt, Homo sapiens
  misc_RNA (1)...(19): siRNA sense strand
cuaccaagcugcaagaauc

SEQ ID NO: 465553 - RNA, 19 nt, Homo sapiens
  misc_RNA (1)...(19): siRNA sense strand
gaagaccaucuauaaagaa

SEQ ID NO: 465554 - RNA, 19 nt, Homo sapiens
  misc_RNA (1)...(19): siRNA sense strand
gaaggacaguuaugguuac

SEQ ID NO: 465555 - RNA, 19 nt, Homo sapiens
  misc_RNA (1)...(19): siRNA sense strand
gaggaagggugcagcuaug

SEQ ID NO: 465556 - RNA, 19 nt, Homo sapiens
  misc_RNA (1)...(19): siRNA sense strand
ggaugagggcaaucuauaa

SEQ ID NO: 465557 - RNA, 19 nt, Homo sapiens
  misc_RNA (1)...(19): siRNA sense strand
ggauguagaccaugauuuc

SEQ ID NO: 465558 - RNA, 19 nt, Homo sapiens
  misc_RNA (1)...(19): siRNA sense strand
uaucaaaggugaaguuggu

SEQ ID NO: 465559 - RNA, 19 nt, Homo sapiens
  misc_RNA (1)...(19): siRNA sense strand
gagaaggacaguuaugguu

SEQ ID NO: 465560 - RNA, 19 nt, Homo sapiens
  misc_RNA (1)...(19): siRNA sense strand
gggaugagggcaaucuaua

SEQ ID NO: 465561 - RNA, 19 nt, Homo sapiens
  misc_RNA (1)...(19): siRNA sense strand
gaccaucuauaaagaauac

SEQ ID NO: 465562 - RNA, 19 nt, Homo sapiens
  misc_RNA (1)...(19): siRNA sense strand
gaauuuaccugagcugaac

SEQ ID NO: 465563 - RNA, 19 nt, Homo sapiens
  misc_RNA (1)...(19): siRNA sense strand
gcaaucaauggcuuuguuu

SEQ ID NO: 465564 - RNA, 19 nt, Homo sapiens
  misc_RNA (1)...(19): siRNA sense strand
augagaacauugccacuua

SEQ ID NO: 465565 - RNA, 19 nt, Homo sapiens
  misc_RNA (1)...(19): siRNA sense strand
cauugcaacuggccuaauu

SEQ ID NO: 465566 - RNA, 19 nt, Homo sapiens
  misc_RNA (1)...(19): siRNA sense strand
cugcaagaaucuacuauau

SEQ ID NO: 465567 - RNA, 19 nt, Homo sapiens
  misc_RNA (1)...(19): siRNA sense strand
caaugacucugcuuguguu

SEQ ID NO: 465568 - RNA, 19 nt, Homo sapiens
  misc_RNA (1)...(19): siRNA sense strand
uaccugagcugaacaugug

SEQ ID NO: 465569 - RNA, 19 nt, Homo sapiens
  misc_RNA (1)...(19): siRNA sense strand
agaaagcuacgacgcaaua

SEQ ID NO: 465570 - RNA, 19 nt, Homo sapiens
  misc_RNA (1)...(19): siRNA sense strand
aagagaagaugcauuugga

SEQ ID NO: 465571 - RNA, 19 nt, Homo sapiens
  misc_RNA (1)...(19): siRNA sense strand
ugaaauugauguccacaca

SEQ ID NO: 465572 - RNA, 19 nt, Homo sapiens
  misc_RNA (1)...(19): siRNA sense strand
gaauuugcauuguuguucu

SEQ ID NO: 465573 - RNA, 19 nt, Homo sapiens
  misc_RNA (1)...(19): siRNA sense strand
gaagaaggcaaugugaaga

SEQ ID NO: 465574 - RNA, 19 nt, Homo sapiens
  misc_RNA (1)...(19): siRNA sense strand
gcucagauccugcuucagu

SEQ ID NO: 465575 - RNA, 19 nt, Homo sapiens
  misc_RNA (1)...(19): siRNA sense strand
uaaagaauguugagaugcu

SEQ ID NO: 465576 - RNA, 19 nt, Homo sapiens
  misc_RNA (1)...(19): siRNA sense strand
gcaauaaaaugcaugcaau

SEQ ID NO: 465577 - RNA, 19 nt, Homo sapiens
  misc_RNA (1)...(19): siRNA sense strand
agaaggacaguuaugguua

SEQ ID NO: 465578 - RNA, 19 nt, Homo sapiens
  misc_RNA (1)...(19): siRNA sense strand
ugagggcaaucuauaaugu

SEQ ID NO: 465579 - RNA, 19 nt, Homo sapiens
  misc_RNA (1)...(19): siRNA sense strand
ugacaaccuugggacauuu

SEQ ID NO: 465580 - RNA, 19 nt, Homo sapiens
  misc_RNA (1)...(19): siRNA sense strand
gcaacacugugcagcuuca

SEQ ID NO: 465581 - RNA, 19 nt, Homo sapiens
  misc_RNA (1)...(19): siRNA sense strand
ccauucagguggucuucua

SEQ ID NO: 465582 - RNA, 19 nt, Homo sapiens
  misc_RNA (1)...(19): siRNA sense strand
gaacagucacuuucgagau

SEQ ID NO: 465583 - RNA, 19 nt, Homo sapiens
  misc_RNA (1)...(19): siRNA sense strand
caggauccaggcaguauua

SEQ ID NO: 465584 - RNA, 19 nt, Homo sapiens
  misc_RNA (1)...(19): siRNA sense strand
ugacugugguauucaagaa

SEQ ID NO: 465585 - RNA, 19 nt, Homo sapiens
  misc_RNA (1)...(19): siRNA sense strand
ucaccuggaucuaccauuc

SEQ ID NO: 465586 - RNA, 19 nt, Homo sapiens
  misc_RNA (1)...(19): siRNA sense strand
ggaauuuaccugagcugaa

SEQ ID NO: 465587 - RNA, 19 nt, Homo sapiens
  misc_RNA (1)...(19): siRNA sense strand
acaaagaagaugagacauu

SEQ ID NO: 465588 - RNA, 19 nt, Homo sapiens
  misc_RNA (1)...(19): siRNA sense strand
gccaggauguagaccauga

SEQ ID NO: 465589 - RNA, 19 nt, Homo sapiens
  misc_RNA (1)...(19): siRNA sense strand
gcagccauaucuacaacug

SEQ ID NO: 465590 - RNA, 19 nt, Homo sapiens
  misc_RNA (1)...(19): siRNA sense strand
gaucgggaauuugcauugu

SEQ ID NO: 465591 - RNA, 19 nt, Homo sapiens
  misc_RNA (1)...(19): siRNA sense strand
ggaaucuuggguccacuua

SEQ ID NO: 465592 - RNA, 19 nt, Homo sapiens
  misc_RNA (1)...(19): siRNA sense strand
acugaaagcugaugacucu

SEQ ID NO: 465593 - RNA, 19 nt, Homo sapiens
  misc_RNA (1)...(19): siRNA sense strand
gcagaucccauaagagaca

SEQ ID NO: 465594 - RNA, 19 nt, Homo sapiens
  misc_RNA (1)...(19): siRNA sense strand
ugaaggcacuguguacaau

SEQ ID NO: 465595 - RNA, 19 nt, Homo sapiens
  misc_RNA (1)...(19): siRNA sense strand
gggcaacacugugcagcuu

SEQ ID NO: 465596 - RNA, 19 nt, Homo sapiens
  misc_RNA (1)...(19): siRNA sense strand
gggaugucauucuuauuca

SEQ ID NO: 465597 - RNA, 19 nt, Homo sapiens
  misc_RNA (1)...(19): siRNA sense strand
cgacugcuuucagaggaua

SEQ ID NO: 465598 - RNA, 19 nt, Homo sapiens
  misc_RNA (1)...(19): siRNA sense strand
gagaugcuggccucuguuu

SEQ ID NO: 465599 - RNA, 19 nt, Homo sapiens
  misc_RNA (1)...(19): siRNA sense strand
gcuuccagcuucuuaaagu

SEQ ID NO: 465600 - RNA, 19 nt, Homo sapiens
  misc_RNA (1)...(19): siRNA sense strand
gaugagggcaaucuauaau

SEQ ID NO: 465601 - RNA, 19 nt, Homo sapiens
  misc_RNA (1)...(19): siRNA sense strand
gagauucaaugggacuaug

SEQ ID NO: 465602 - RNA, 19 nt, Homo sapiens
  misc_RNA (1)...(19): siRNA sense strand
cugaugcacugccauguga

SEQ ID NO: 465603 - RNA, 19 nt, Homo sapiens
  misc_RNA (1)...(19): siRNA sense strand
ggaauuugcauuguuguuc

SEQ ID NO: 465604 - RNA, 19 nt, Homo sapiens
  misc_RNA (1)...(19): siRNA sense strand
agucugagaaggacaguua

SEQ ID NO: 465605 - RNA, 19 nt, Homo sapiens
  misc_RNA (1)...(19): siRNA sense strand
guucgacaguacuucauug

SEQ ID NO: 465606 - RNA, 19 nt, Homo sapiens
  misc_RNA (1)...(19): siRNA sense strand
gcugcaagaaucuacuaua

SEQ ID NO: 465607 - RNA, 19 nt, Homo sapiens
  misc_RNA (1)...(19): siRNA sense strand
uaggaugcaugcaaucaau

SEQ ID NO: 465608 - RNA, 19 nt, Homo sapiens
  misc_RNA (1)...(19): siRNA sense strand
gggugcagcuaugcucuuu

SEQ ID NO: 465609 - RNA, 19 nt, Homo sapiens
  misc_RNA (1)...(19): siRNA sense strand
ucacuguguuggaugagaa

SEQ ID NO: 465610 - RNA, 19 nt, Homo sapiens
  misc_RNA (1)...(19): siRNA sense strand
ucacuuggauguacuucuc

SEQ ID NO: 465611 - RNA, 19 nt, Homo sapiens
  misc_RNA (1)...(19): siRNA sense strand
cagaagaacacuugggaau

SEQ ID NO: 465612 - RNA, 19 nt, Homo sapiens
  misc_RNA (1)...(19): siRNA sense strand
agaaagggguggauaaaga

SEQ ID NO: 465613 - RNA, 19 nt, Homo sapiens
  misc_RNA (1)...(19): siRNA sense strand
gcagauggcaagcagaaag

SEQ ID NO: 465614 - RNA, 19 nt, Homo sapiens
  misc_RNA (1)...(19): siRNA sense strand
cauaagagacacaaauucu

SEQ ID NO: 465615 - RNA, 19 nt, Homo sapiens
  misc_RNA (1)...(19): siRNA sense strand
aagaagaccaucuauaaag

SEQ ID NO: 465616 - RNA, 19 nt, Homo sapiens
  misc_RNA (1)...(19): siRNA sense strand
gaacuaccgggcagaugug

SEQ ID NO: 465617 - RNA, 19 nt, Homo sapiens
  misc_RNA (1)...(19): siRNA sense strand
gcucauggagugcuagaau

SEQ ID NO: 465618 - RNA, 19 nt, Homo sapiens
  misc_RNA (1)...(19): siRNA sense strand
gcacaaccagucugagaag

SEQ ID NO: 465619 - RNA, 19 nt, Homo sapiens
  misc_RNA (1)...(19): siRNA sense strand
gaggaacccuuuacaaaua

SEQ ID NO: 465620 - RNA, 19 nt, Homo sapiens
  misc_RNA (1)...(19): siRNA sense strand
gaagaagacuggaccacua

SEQ ID NO: 465621 - RNA, 19 nt, Homo sapiens
  misc_RNA (1)...(19): siRNA sense strand
gaccagagaucucaacuga

SEQ ID NO: 465622 - RNA, 19 nt, Homo sapiens
  misc_RNA (1)...(19): siRNA sense strand
uaacaaaguucuccauuuc

SEQ ID NO: 465623 - RNA, 19 nt, Homo sapiens
  misc_RNA (1)...(19): siRNA sense strand
gaagagacgucugcaauuc

SEQ ID NO: 465624 - RNA, 19 nt, Homo sapiens
  misc_RNA (1)...(19): siRNA sense strand
guacaugaauugcuuguug

SEQ ID NO: 465625 - RNA, 19 nt, Homo sapiens
  misc_RNA (1)...(19): siRNA sense strand
gaacaacaccaccgaugua

SEQ ID NO: 465626 - RNA, 19 nt, Homo sapiens
  misc_RNA (1)...(19): siRNA sense strand
ucugucagcugcuuaauua

SEQ ID NO: 465627 - RNA, 19 nt, Homo sapiens
  misc_RNA (1)...(19): siRNA sense strand
caacaacucagaaugauaa

SEQ ID NO: 465628 - RNA, 19 nt, Homo sapiens
  misc_RNA (1)...(19): siRNA sense strand
ccagagaucucaacugaug

SEQ ID NO: 465629 - RNA, 19 nt, Homo sapiens
  misc_RNA (1)...(19): siRNA sense strand
gcacuuggauagacaacaa

SEQ ID NO: 465630 - RNA, 19 nt, Homo sapiens
  misc_RNA (1)...(19): siRNA sense strand
gaacugauccaaggaauau

SEQ ID NO: 465631 - RNA, 19 nt, Homo sapiens
  misc_RNA (1)...(19): siRNA sense strand
caacacagauaugacauug

SEQ ID NO: 465632 - RNA, 19 nt, Homo sapiens
  misc_RNA (1)...(19): siRNA sense strand
gacaaucaguggucaaaga

SEQ ID NO: 465633 - RNA, 19 nt, Homo sapiens
  misc_RNA (1)...(19): siRNA sense strand
gaucucaacugaugaacga

SEQ ID NO: 465634 - RNA, 19 nt, Homo sapiens
  misc_RNA (1)...(19): siRNA sense strand
gcucauaugugaagaacug

SEQ ID NO: 465635 - RNA, 19 nt, Homo sapiens
  misc_RNA (1)...(19): siRNA sense strand
ugaagacaguggagccuua

SEQ ID NO: 465636 - RNA, 19 nt, Homo sapiens
  misc_RNA (1)...(19): siRNA sense strand
ccucagaaaugauauugaa

SEQ ID NO: 465637 - RNA, 19 nt, Homo sapiens
  misc_RNA (1)...(19): siRNA sense strand
ggagaagucuuuguuccuu

SEQ ID NO: 465638 - RNA, 19 nt, Homo sapiens
  misc_RNA (1)...(19): siRNA sense strand
gggaaauucuaguuaauca

SEQ ID NO: 465639 - RNA, 19 nt, Homo sapiens
  misc_RNA (1)...(19): siRNA sense strand
ggaggaacccuuuacaaau

SEQ ID NO: 465640 - RNA, 19 nt, Homo sapiens
  misc_RNA (1)...(19): siRNA sense strand
ugaacgaccucagaaauga

SEQ ID NO: 465641 - RNA, 19 nt, Homo sapiens
  misc_RNA (1)...(19): siRNA sense strand
cagagccacugauuucuuu

SEQ ID NO: 465642 - RNA, 19 nt, Homo sapiens
  misc_RNA (1)...(19): siRNA sense strand
cagaugcucuuaucaacuu

SEQ ID NO: 465643 - RNA, 19 nt, Homo sapiens
  misc_RNA (1)...(19): siRNA sense strand
ugucaagaguacaauguua

SEQ ID NO: 465644 - RNA, 19 nt, Homo sapiens
  misc_RNA (1)...(19): siRNA sense strand
gcaacugugugaaugaugu

SEQ ID NO: 465645 - RNA, 19 nt, Homo sapiens
  misc_RNA (1)...(19): siRNA sense strand
caacaccaccgauguagaa

SEQ ID NO: 465646 - RNA, 19 nt, Homo sapiens
  misc_RNA (1)...(19): siRNA sense strand
gguggaaucuugaugaaca

SEQ ID NO: 465647 - RNA, 19 nt, Homo sapiens
  misc_RNA (1)...(19): siRNA sense strand
gagaagucuuuguuccuuu

SEQ ID NO: 465648 - RNA, 19 nt, Homo sapiens
  misc_RNA (1)...(19): siRNA sense strand
gcacacagcaucuccaaca

SEQ ID NO: 465649 - RNA, 19 nt, Homo sapiens
  misc_RNA (1)...(19): siRNA sense strand
gaccuugggugcuggauau

SEQ ID NO: 465650 - RNA, 19 nt, Homo sapiens
  misc_RNA (1)...(19): siRNA sense strand
gccuuuaucuucaugauug

SEQ ID NO: 465651 - RNA, 19 nt, Homo sapiens
  misc_RNA (1)...(19): siRNA sense strand
cacuacagauugcaugaua

SEQ ID NO: 465652 - RNA, 19 nt, Homo sapiens
  misc_RNA (1)...(19): siRNA sense strand
gugaagaacugaagaccau

SEQ ID NO: 465653 - RNA, 19 nt, Homo sapiens
  misc_RNA (1)...(19): siRNA sense strand
gccuacaugugcccauuua

SEQ ID NO: 465654 - RNA, 19 nt, Homo sapiens
  misc_RNA (1)...(19): siRNA sense strand
gaagcuggauccugacucu

SEQ ID NO: 465655 - RNA, 19 nt, Homo sapiens
  misc_RNA (1)...(19): siRNA sense strand
ugacauugcugccugaagu

SEQ ID NO: 465656 - RNA, 19 nt, Homo sapiens
  misc_RNA (1)...(19): siRNA sense strand
gaauauucuuacuggcuaa

SEQ ID NO: 465657 - RNA, 19 nt, Homo sapiens
  misc_RNA (1)...(19): siRNA sense strand
augaauauguugccacuuu

SEQ ID NO: 465658 - RNA, 19 nt, Homo sapiens
  misc_RNA (1)...(19): siRNA sense strand
cagauuccaugaaaguauu

SEQ ID NO: 465659 - RNA, 19 nt, Homo sapiens
  misc_RNA (1)...(19): siRNA sense strand
caaaucaacagcuaugguu

SEQ ID NO: 465660 - RNA, 19 nt, Homo sapiens
  misc_RNA (1)...(19): siRNA sense strand
ugagacagaugcucuuauc

SEQ ID NO: 465661 - RNA, 19 nt, Homo sapiens
  misc_RNA (1)...(19): siRNA sense strand
ggaccacauuggaagaaga

SEQ ID NO: 465662 - RNA, 19 nt, Homo sapiens
  misc_RNA (1)...(19): siRNA sense strand
ggagauaucaguguggauu

SEQ ID NO: 465663 - RNA, 19 nt, Homo sapiens
  misc_RNA (1)...(19): siRNA sense strand
gauacaagaccaaggaaau

SEQ ID NO: 465664 - RNA, 19 nt, Homo sapiens
  misc_RNA (1)...(19): siRNA sense strand
cagauugcaugauacaaga

SEQ ID NO: 465665 - RNA, 19 nt, Homo sapiens
  misc_RNA (1)...(19): siRNA sense strand
gaaaugccaguccucgauu

SEQ ID NO: 465666 - RNA, 19 nt, Homo sapiens
  misc_RNA (1)...(19): siRNA sense strand
gaagacuggaccacuauga

SEQ ID NO: 465667 - RNA, 19 nt, Homo sapiens
  misc_RNA (1)...(19): siRNA sense strand
gcagaggaggacaaguuua

SEQ ID NO: 465668 - RNA, 19 nt, Homo sapiens
  misc_RNA (1)...(19): siRNA sense strand
gacaguuccugguagaaga

SEQ ID NO: 465669 - RNA, 19 nt, Homo sapiens
  misc_RNA (1)...(19): siRNA sense strand
cuaauggucuacacauguu

SEQ ID NO: 465670 - RNA, 19 nt, Homo sapiens
  misc_RNA (1)...(19): siRNA sense strand
acaaaguucuccauuucuu

SEQ ID NO: 465671 - RNA, 19 nt, Homo sapiens
  misc_RNA (1)...(19): siRNA sense strand
gauuauugcagaaagagua

SEQ ID NO: 465672 - RNA, 19 nt, Homo sapiens
  misc_RNA (1)...(19): siRNA sense strand
gcacgucagauauggcuaa

SEQ ID NO: 465673 - RNA, 19 nt, Homo sapiens
  misc_RNA (1)...(19): siRNA sense strand
gcagccagcucagugcuau

SEQ ID NO: 465674 - RNA, 19 nt, Homo sapiens
  misc_RNA (1)...(19): siRNA sense strand
caaaggaagagcaagaaga

SEQ ID NO: 465675 - RNA, 19 nt, Homo sapiens
  misc_RNA (1)...(19): siRNA sense strand
ggaaaugccaguccucgau

SEQ ID NO: 465676 - RNA, 19 nt, Homo sapiens
  misc_RNA (1)...(19): siRNA sense strand
caccaccgauguagaaaug

SEQ ID NO: 465677 - RNA, 19 nt, Homo sapiens
  misc_RNA (1)...(19): siRNA sense strand
auacaacaauuuccagaug

SEQ ID NO: 465678 - RNA, 19 nt, Homo sapiens
  misc_RNA (1)...(19): siRNA sense strand
ggaccagauuccagacaug

SEQ ID NO: 465679 - RNA, 19 nt, Homo sapiens
  misc_RNA (1)...(19): siRNA sense strand
ccaccagccuuuaucuuca

SEQ ID NO: 465680 - RNA, 19 nt, Homo sapiens
  misc_RNA (1)...(19): siRNA sense strand
cagcagaggaggacaaguu

SEQ ID NO: 465681 - RNA, 19 nt, Homo sapiens
  misc_RNA (1)...(19): siRNA sense strand
caacucagaaugauaaugg

SEQ ID NO: 465682 - RNA, 19 nt, Homo sapiens
  misc_RNA (1)...(19): siRNA sense strand
cauguuaccggaagaauug

SEQ ID NO: 465683 - RNA, 19 nt, Homo sapiens
  misc_RNA (1)...(19): siRNA sense strand
cgucagauauggcuaagca

SEQ ID NO: 465684 - RNA, 19 nt, Homo sapiens
  misc_RNA (1)...(19): siRNA sense strand
gguggugacugauguugga

SEQ ID NO: 465685 - RNA, 19 nt, Homo sapiens
  misc_RNA (1)...(19): siRNA sense strand
ggagaucugucagcugcuu

SEQ ID NO: 465686 - RNA, 19 nt, Homo sapiens
  misc_RNA (1)...(19): siRNA sense strand
caaacucagugaagacagu

SEQ ID NO: 465687 - RNA, 19 nt, Homo sapiens
  misc_RNA (1)...(19): siRNA sense strand
caaaugagaguccccuuua

SEQ ID NO: 465688 - RNA, 19 nt, Homo sapiens
  misc_RNA (1)...(19): siRNA sense strand
gaaaguauugccaguguac

SEQ ID NO: 465689 - RNA, 19 nt, Homo sapiens
  misc_RNA (1)...(19): siRNA sense strand
ugaaaguauugccagugua

SEQ ID NO: 465690 - RNA, 19 nt, Homo sapiens
  misc_RNA (1)...(19): siRNA sense strand
gcccauauguuggcauguu

SEQ ID NO: 465691 - RNA, 19 nt, Homo sapiens
  misc_RNA (1)...(19): siRNA sense strand
ccaaacaaaugucuaugac

SEQ ID NO: 465692 - RNA, 19 nt, Homo sapiens
  misc_RNA (1)...(19): siRNA sense strand
cauaaagaauggacuuguc

SEQ ID NO: 465693 - RNA, 19 nt, Homo sapiens
  misc_RNA (1)...(19): siRNA sense strand
ucucuaggaucuuaugaau

SEQ ID NO: 465694 - RNA, 19 nt, Homo sapiens
  misc_RNA (1)...(19): siRNA sense strand
gacagaugcucuuaucaac

SEQ ID NO: 465695 - RNA, 19 nt, Homo sapiens
  misc_RNA (1)...(19): siRNA sense strand
aaucaguggucaaagaaga

SEQ ID NO: 465696 - RNA, 19 nt, Homo sapiens
  misc_RNA (1)...(19): siRNA sense strand
gaagacaguggagccuuaa

SEQ ID NO: 465697 - RNA, 19 nt, Homo sapiens
  misc_RNA (1)...(19): siRNA sense strand
caagaaucccaaucuguga

SEQ ID NO: 465698 - RNA, 19 nt, Homo sapiens
  misc_RNA (1)...(19): siRNA sense strand
gcucagugcuaugcaaauc

SEQ ID NO: 465699 - RNA, 19 nt, Homo sapiens
  misc_RNA (1)...(19): siRNA sense strand
ggaggaaggagauaucagu

SEQ ID NO: 465700 - RNA, 19 nt, Homo sapiens
  misc_RNA (1)...(19): siRNA sense strand
gaaggaggaaggagauauc

SEQ ID NO: 465701 - RNA, 19 nt, Homo sapiens
  misc_RNA (1)...(19): siRNA sense strand
uccauuagcugcugucauc

SEQ ID NO: 465702 - RNA, 19 nt, Homo sapiens
  misc_RNA (1)...(19): siRNA sense strand
ugaauauguugccacuuug

SEQ ID NO: 465703 - RNA, 19 nt, Homo sapiens
  misc_RNA (1)...(19): siRNA sense strand
ggauuuccuuuguuguguu

SEQ ID NO: 465704 - RNA, 19 nt, Homo sapiens
  misc_RNA (1)...(19): siRNA sense strand
aagaggccauauucaauga

SEQ ID NO: 465705 - RNA, 19 nt, Homo sapiens
  misc_RNA (1)...(19): siRNA sense strand
ucuaccagauuccaugaaa

SEQ ID NO: 465706 - RNA, 19 nt, Homo sapiens
  misc_RNA (1)...(19): siRNA sense strand
cccauauguuggcauguua

SEQ ID NO: 465707 - RNA, 19 nt, Homo sapiens
  misc_RNA (1)...(19): siRNA sense strand
uggaggaacccuuuacaaa

SEQ ID NO: 465708 - RNA, 19 nt, Homo sapiens
  misc_RNA (1)...(19): siRNA sense strand
ccagauuccagacauguuu

SEQ ID NO: 465709 - RNA, 19 nt, Homo sapiens
  misc_RNA (1)...(19): siRNA sense strand
cagaggaggacaaguuuau

SEQ ID NO: 465710 - RNA, 19 nt, Homo sapiens
  misc_RNA (1)...(19): siRNA sense strand
gcagcgagaacaaccagaa

SEQ ID NO: 465711 - RNA, 19 nt, Homo sapiens
  misc_RNA (1)...(19): siRNA sense strand
ucagaaugauaauggguau

SEQ ID NO: 465712 - RNA, 19 nt, Homo sapiens
  misc_RNA (1)...(19): siRNA sense strand
ggaaacccauacucucaac

SEQ ID NO: 465713 - RNA, 19 nt, Homo sapiens
  misc_RNA (1)...(19): siRNA sense strand
gcuaauggucuacacaugu

SEQ ID NO: 465714 - RNA, 19 nt, Homo sapiens
  misc_RNA (1)...(19): siRNA sense strand
ugaacgagcauaccagaga

SEQ ID NO: 465715 - RNA, 19 nt, Homo sapiens
  misc_RNA (1)...(19): siRNA sense strand
gcauguuaccggaagaauu

SEQ ID NO: 465716 - RNA, 19 nt, Homo sapiens
  misc_RNA (1)...(19): siRNA sense strand
uaaucagacugcccauaug

SEQ ID NO: 465717 - RNA, 19 nt, Homo sapiens
  misc_RNA (1)...(19): siRNA sense strand
gcucuuaucaacuucuuug

SEQ ID NO: 465718 - RNA, 19 nt, Homo sapiens
  misc_RNA (1)...(19): siRNA sense strand
caacaucuggaccacauug

SEQ ID NO: 465719 - RNA, 19 nt, Homo sapiens
  misc_RNA (1)...(19): siRNA sense strand
uuaaagcugucuugaguaa

SEQ ID NO: 465720 - RNA, 19 nt, Homo sapiens
  misc_RNA (1)...(19): siRNA sense strand
cauuaaagcugucuugagu

SEQ ID NO: 465721 - RNA, 19 nt, Homo sapiens
  misc_RNA (1)...(19): siRNA sense strand
aacgugggcuucauugaua

SEQ ID NO: 465722 - RNA, 19 nt, Homo sapiens
  misc_RNA (1)...(19): siRNA sense strand
gcuauuccauggucagugu

SEQ ID NO: 465723 - RNA, 19 nt, Homo sapiens
  misc_RNA (1)...(19): siRNA sense strand
ggaagucaaugcuguucuc

SEQ ID NO: 465724 - RNA, 19 nt, Homo sapiens
  misc_RNA (1)...(19): siRNA sense strand
gagcuacgugucugaaauu

SEQ ID NO: 465725 - RNA, 19 nt, Homo sapiens
  misc_RNA (1)...(19): siRNA sense strand
gcacauuaaagcugucuug

SEQ ID NO: 465726 - RNA, 19 nt, Homo sapiens
  misc_RNA (1)...(19): siRNA sense strand
aaagcugucuugaguaaca

SEQ ID NO: 465727 - RNA, 19 nt, Homo sapiens
  misc_RNA (1)...(19): siRNA sense strand
gaugacaaccugcugaaca

SEQ ID NO: 465728 - RNA, 19 nt, Homo sapiens
  misc_RNA (1)...(19): siRNA sense strand
gcaggucacugucccucau

SEQ ID NO: 465729 - RNA, 19 nt, Homo sapiens
  misc_RNA (1)...(19): siRNA sense strand
agucaaugcuguucucuuc

SEQ ID NO: 465730 - RNA, 19 nt, Homo sapiens
  misc_RNA (1)...(19): siRNA sense strand
caacgugggcuucauugau

SEQ ID NO: 465731 - RNA, 19 nt, Homo sapiens
  misc_RNA (1)...(19): siRNA sense strand
caucucugccugcucuuua

SEQ ID NO: 465732 - RNA, 19 nt, Homo sapiens
  misc_RNA (1)...(19): siRNA sense strand
ccugagaucuuugucuaug

SEQ ID NO: 465733 - RNA, 19 nt, Homo sapiens
  misc_RNA (1)...(19): siRNA sense strand
ccaguggacucuucuacca

SEQ ID NO: 465734 - RNA, 19 nt, Homo sapiens
  misc_RNA (1)...(19): siRNA sense strand
ugagcuacgugucugaaau

SEQ ID NO: 465735 - RNA, 19 nt, Homo sapiens
  misc_RNA (1)...(19): siRNA sense strand
gggccacgccaacgaguuu

SEQ ID NO: 465736 - RNA, 19 nt, Homo sapiens
  misc_RNA (1)...(19): siRNA sense strand
caccugggcaccuuaauug

SEQ ID NO: 465737 - RNA, 19 nt, Homo sapiens
  misc_RNA (1)...(19): siRNA sense strand
cagcugaggucggaugaca

SEQ ID NO: 465738 - RNA, 19 nt, Homo sapiens
  misc_RNA (1)...(19): siRNA sense strand
gggcuucauugauacagau

SEQ ID NO: 465739 - RNA, 19 nt, Homo sapiens
  misc_RNA (1)...(19): siRNA sense strand
ccaccugggcaccuuaauu

SEQ ID NO: 465740 - RNA, 19 nt, Homo sapiens
  misc_RNA (1)...(19): siRNA sense strand
ccaucucaaugcucucuug

SEQ ID NO: 465741 - RNA, 19 nt, Homo sapiens
  misc_RNA (1)...(19): siRNA sense strand
uggccaugcuccacacaaa

SEQ ID NO: 465742 - RNA, 19 nt, Homo sapiens
  misc_RNA (1)...(19): siRNA sense strand
gcagcuaauuuuacuuuca

SEQ ID NO: 465743 - RNA, 19 nt, Homo sapiens
  misc_RNA (1)...(19): siRNA sense strand
gaugugguagugaacuuga

SEQ ID NO: 465744 - RNA, 19 nt, Homo sapiens
  misc_RNA (1)...(19): siRNA sense strand
acacugaugggcaccguuu

SEQ ID NO: 465745 - RNA, 19 nt, Homo sapiens
  misc_RNA (1)...(19): siRNA sense strand
ugagaucuuugucuaugag

SEQ ID NO: 465746 - RNA, 19 nt, Homo sapiens
  misc_RNA (1)...(19): siRNA sense strand
uggucaaccuccacuaugu

SEQ ID NO: 465747 - RNA, 19 nt, Homo sapiens
  misc_RNA (1)...(19): siRNA sense strand
gcagaagcacauuaaagcu

SEQ ID NO: 465748 - RNA, 19 nt, Homo sapiens
  misc_RNA (1)...(19): siRNA sense strand
cugagaucuuugucuauga

SEQ ID NO: 465749 - RNA, 19 nt, Homo sapiens
  misc_RNA (1)...(19): siRNA sense strand
ggugcagggugucaauguc

SEQ ID NO: 465750 - RNA, 19 nt, Homo sapiens
  misc_RNA (1)...(19): siRNA sense strand
accaggauccggauucuga

SEQ ID NO: 465751 - RNA, 19 nt, Homo sapiens
  misc_RNA (1)...(19): siRNA sense strand
ugagggcuacguggugaua

SEQ ID NO: 465752 - RNA, 19 nt, Homo sapiens
  misc_RNA (1)...(19): siRNA sense strand
gcaccuuaauuggccucaa

SEQ ID NO: 465753 - RNA, 19 nt, Homo sapiens
  misc_RNA (1)...(19): siRNA sense strand
ccaccaggauccggauucu

SEQ ID NO: 465754 - RNA, 19 nt, Homo sapiens
  misc_RNA (1)...(19): siRNA sense strand
gcaccgugguccgacucaa

SEQ ID NO: 465755 - RNA, 19 nt, Homo sapiens
  misc_RNA (1)...(19): siRNA sense strand
cgaguuugauggcaguaac

SEQ ID NO: 465756 - RNA, 19 nt, Homo sapiens
  misc_RNA (1)...(19): siRNA sense strand
gcaucucugccugcucuuu

SEQ ID NO: 465757 - RNA, 19 nt, Homo sapiens
  misc_RNA (1)...(19): siRNA sense strand
ccaacgugggcuucauuga

SEQ ID NO: 465758 - RNA, 19 nt, Homo sapiens
  misc_RNA (1)...(19): siRNA sense strand
uggaugugguagugaacuu

SEQ ID NO: 465759 - RNA, 19 nt, Homo sapiens
  misc_RNA (1)...(19): siRNA sense strand
gccaugcuccacacaaaca

SEQ ID NO: 465760 - RNA, 19 nt, Homo sapiens
  misc_RNA (1)...(19): siRNA sense strand
caccuuaauuggccucaac

SEQ ID NO: 465761 - RNA, 19 nt, Homo sapiens
  misc_RNA (1)...(19): siRNA sense strand
ggaagaaccugccaagcuu

SEQ ID NO: 465762 - RNA, 19 nt, Homo sapiens
  misc_RNA (1)...(19): siRNA sense strand
gcacauacuucaccacugu

SEQ ID NO: 465763 - RNA, 19 nt, Homo sapiens
  misc_RNA (1)...(19): siRNA sense strand
ccuagaggauucauucaua

SEQ ID NO: 465764 - RNA, 19 nt, Homo sapiens
  misc_RNA (1)...(19): siRNA sense strand
cuacuucuguuauuucuga

SEQ ID NO: 465765 - RNA, 19 nt, Homo sapiens
  misc_RNA (1)...(19): siRNA sense strand
gcaggcccuugguguuaua

SEQ ID NO: 465766 - RNA, 19 nt, Homo sapiens
  misc_RNA (1)...(19): siRNA sense strand
caggagugcuaccacagua

SEQ ID NO: 465767 - RNA, 19 nt, Homo sapiens
  misc_RNA (1)...(19): siRNA sense strand
gaggauucauucauacaag

SEQ ID NO: 465768 - RNA, 19 nt, Homo sapiens
  misc_RNA (1)...(19): siRNA sense strand
gaaaaguacccaaaugaug

SEQ ID NO: 465769 - RNA, 19 nt, Homo sapiens
  misc_RNA (1)...(19): siRNA sense strand
ccacaguaauggacagagu

SEQ ID NO: 465770 - RNA, 19 nt, Homo sapiens
  misc_RNA (1)...(19): siRNA sense strand
cggcaggcccuugguguua

SEQ ID NO: 465771 - RNA, 19 nt, Homo sapiens
  misc_RNA (1)...(19): siRNA sense strand
acaguaauggacagaguua

SEQ ID NO: 465772 - RNA, 19 nt, Homo sapiens
  misc_RNA (1)...(19): siRNA sense strand
ccagaaaaguacccaaaug

SEQ ID NO: 465773 - RNA, 19 nt, Homo sapiens
  misc_RNA (1)...(19): siRNA sense strand
ggagugcuaccacaguaau

SEQ ID NO: 465774 - RNA, 19 nt, Homo sapiens
  misc_RNA (1)...(19): siRNA sense strand
guagaaccccagaaaagua

SEQ ID NO: 465775 - RNA, 19 nt, Homo sapiens
  misc_RNA (1)...(19): siRNA sense strand
cuagaggauucauucauac

SEQ ID NO: 465776 - RNA, 19 nt, Homo sapiens
  misc_RNA (1)...(19): siRNA sense strand
ggcaggcccuugguguuau

SEQ ID NO: 465777 - RNA, 19 nt, Homo sapiens
  misc_RNA (1)...(19): siRNA sense strand
ccacaccagcacaguagaa

SEQ ID NO: 465778 - RNA, 19 nt, Homo sapiens
  misc_RNA (1)...(19): siRNA sense strand
guuccaagccuagaggauu

SEQ ID NO: 465779 - RNA, 19 nt, Homo sapiens
  misc_RNA (1)...(19): siRNA sense strand
guucgugccucugacuguu

SEQ ID NO: 465780 - RNA, 19 nt, Homo sapiens
  misc_RNA (1)...(19): siRNA sense strand
caaaugauggcuugaucuc

SEQ ID NO: 465781 - RNA, 19 nt, Homo sapiens
  misc_RNA (1)...(19): siRNA sense strand
guucuucuacuucuguuau

SEQ ID NO: 465782 - RNA, 19 nt, Homo sapiens
  misc_RNA (1)...(19): siRNA sense strand
gcaggagugcuaccacagu

SEQ ID NO: 465783 - RNA, 19 nt, Homo sapiens
  misc_RNA (1)...(19): siRNA sense strand
uaucgaggcacauacuuca

SEQ ID NO: 465784 - RNA, 19 nt, Homo sapiens
  misc_RNA (1)...(19): siRNA sense strand
cccaaaugauggcuugauc

SEQ ID NO: 465785 - RNA, 19 nt, Homo sapiens
  misc_RNA (1)...(19): siRNA sense strand
cagaaaaguacccaaauga

SEQ ID NO: 465786 - RNA, 19 nt, Homo sapiens
  misc_RNA (1)...(19): siRNA sense strand
agaguuaucgaggcacaua

SEQ ID NO: 465787 - RNA, 19 nt, Homo sapiens
  misc_RNA (1)...(19): siRNA sense strand
ggaacauaaggaagugguu

SEQ ID NO: 465788 - RNA, 19 nt, Homo sapiens
  misc_RNA (1)...(19): siRNA sense strand
ggaguacugcaaccugaca

SEQ ID NO: 465789 - RNA, 19 nt, Homo sapiens
  misc_RNA (1)...(19): siRNA sense strand
ucgaacuacugcaggaauc

SEQ ID NO: 465790 - RNA, 19 nt, Homo sapiens
  misc_RNA (1)...(19): siRNA sense strand
ggauucauucauacaagug

SEQ ID NO: 465791 - RNA, 19 nt, Homo sapiens
  misc_RNA (1)...(19): siRNA sense strand
ggcccuugguguuauacga

SEQ ID NO: 465792 - RNA, 19 nt, Homo sapiens
  misc_RNA (1)...(19): siRNA sense strand
ggcuugaucucgaacuacu

SEQ ID NO: 465793 - RNA, 19 nt, Homo sapiens
  misc_RNA (1)...(19): siRNA sense strand
guaauggacagaguuaucg

SEQ ID NO: 465794 - RNA, 19 nt, Homo sapiens
  misc_RNA (1)...(19): siRNA sense strand
ggaagaaccugccaagcuu

SEQ ID NO: 465795 - RNA, 19 nt, Homo sapiens
  misc_RNA (1)...(19): siRNA sense strand
gcacauacuucaccacugu

SEQ ID NO: 465796 - RNA, 19 nt, Homo sapiens
  misc_RNA (1)...(19): siRNA sense strand
ccuagaggauucauucaua

SEQ ID NO: 465797 - RNA, 19 nt, Homo sapiens
  misc_RNA (1)...(19): siRNA sense strand
cuacuucuguuauuucuga

SEQ ID NO: 465798 - RNA, 19 nt, Homo sapiens
  misc_RNA (1)...(19): siRNA sense strand
gcaggcccuugguguuaua

SEQ ID NO: 465799 - RNA, 19 nt, Homo sapiens
  misc_RNA (1)...(19): siRNA sense strand
caggagugcuaccacagua

SEQ ID NO: 465800 - RNA, 19 nt, Homo sapiens
  misc_RNA (1)...(19): siRNA sense strand
gaggauucauucauacaag

SEQ ID NO: 465801 - RNA, 19 nt, Homo sapiens
  misc_RNA (1)...(19): siRNA sense strand
gaaaaguacccaaaugaug

SEQ ID NO: 465802 - RNA, 19 nt, Homo sapiens
  misc_RNA (1)...(19): siRNA sense strand
ccacaguaauggacagagu

SEQ ID NO: 465803 - RNA, 19 nt, Homo sapiens
  misc_RNA (1)...(19): siRNA sense strand
cggcaggcccuugguguua

SEQ ID NO: 465804 - RNA, 19 nt, Homo sapiens
  misc_RNA (1)...(19): siRNA sense strand
acaguaauggacagaguua

SEQ ID NO: 465805 - RNA, 19 nt, Homo sapiens
  misc_RNA (1)...(19): siRNA sense strand
ccagaaaaguacccaaaug

SEQ ID NO: 465806 - RNA, 19 nt, Homo sapiens
  misc_RNA (1)...(19): siRNA sense strand
ggagugcuaccacaguaau

SEQ ID NO: 465807 - RNA, 19 nt, Homo sapiens
  misc_RNA (1)...(19): siRNA sense strand
guagaaccccagaaaagua

SEQ ID NO: 465808 - RNA, 19 nt, Homo sapiens
  misc_RNA (1)...(19): siRNA sense strand
cuagaggauucauucauac

SEQ ID NO: 465809 - RNA, 19 nt, Homo sapiens
  misc_RNA (1)...(19): siRNA sense strand
ggcaggcccuugguguuau

SEQ ID NO: 465810 - RNA, 19 nt, Homo sapiens
  misc_RNA (1)...(19): siRNA sense strand
ccacaccagcacaguagaa

SEQ ID NO: 465811 - RNA, 19 nt, Homo sapiens
  misc_RNA (1)...(19): siRNA sense strand
guuccaagccuagaggauu

SEQ ID NO: 465812 - RNA, 19 nt, Homo sapiens
  misc_RNA (1)...(19): siRNA sense strand
guucgugccucugacuguu

SEQ ID NO: 465813 - RNA, 19 nt, Homo sapiens
  misc_RNA (1)...(19): siRNA sense strand
caaaugauggcuugaucuc

SEQ ID NO: 465814 - RNA, 19 nt, Homo sapiens
  misc_RNA (1)...(19): siRNA sense strand
guucuucuacuucuguuau

SEQ ID NO: 465815 - RNA, 19 nt, Homo sapiens
  misc_RNA (1)...(19): siRNA sense strand
gcaggagugcuaccacagu

SEQ ID NO: 465816 - RNA, 19 nt, Homo sapiens
  misc_RNA (1)...(19): siRNA sense strand
uaucgaggcacauacuuca

SEQ ID NO: 465817 - RNA, 19 nt, Homo sapiens
  misc_RNA (1)...(19): siRNA sense strand
cccaaaugauggcuugauc

SEQ ID NO: 465818 - RNA, 19 nt, Homo sapiens
  misc_RNA (1)...(19): siRNA sense strand
cagaaaaguacccaaauga

SEQ ID NO: 465819 - RNA, 19 nt, Homo sapiens
  misc_RNA (1)...(19): siRNA sense strand
agaguuaucgaggcacaua

SEQ ID NO: 465820 - RNA, 19 nt, Homo sapiens
  misc_RNA (1)...(19): siRNA sense strand
ggaacauaaggaagugguu

SEQ ID NO: 465821 - RNA, 19 nt, Homo sapiens
  misc_RNA (1)...(19): siRNA sense strand
ggaguacugcaaccugaca

SEQ ID NO: 465822 - RNA, 19 nt, Homo sapiens
  misc_RNA (1)...(19): siRNA sense strand
ucgaacuacugcaggaauc

SEQ ID NO: 465823 - RNA, 19 nt, Homo sapiens
  misc_RNA (1)...(19): siRNA sense strand
ggauucauucauacaagug

SEQ ID NO: 465824 - RNA, 19 nt, Homo sapiens
  misc_RNA (1)...(19): siRNA sense strand
ggcccuugguguuauacga

SEQ ID NO: 465825 - RNA, 19 nt, Homo sapiens
  misc_RNA (1)...(19): siRNA sense strand
ggcuugaucucgaacuacu

SEQ ID NO: 465826 - RNA, 19 nt, Homo sapiens
  misc_RNA (1)...(19): siRNA sense strand
guaauggacagaguuaucg

SEQ ID NO: 465827 - RNA, 19 nt, Homo sapiens
  misc_RNA (1)...(19): siRNA sense strand
gauccuggcuuuccaugga

SEQ ID NO: 465828 - RNA, 19 nt, Homo sapiens
  misc_RNA (1)...(19): siRNA sense strand
ggagagauuugacgagacu

SEQ ID NO: 465829 - RNA, 19 nt, Homo sapiens
  misc_RNA (1)...(19): siRNA sense strand
agacugagacucugguuga

SEQ ID NO: 465830 - RNA, 19 nt, Homo sapiens
  misc_RNA (1)...(19): siRNA sense strand
cugagacucugguugaaga

SEQ ID NO: 465831 - RNA, 19 nt, Homo sapiens
  misc_RNA (1)...(19): siRNA sense strand
ggaaagcggcaaaaguuaa

SEQ ID NO: 465832 - RNA, 19 nt, Homo sapiens
  misc_RNA (1)...(19): siRNA sense strand
ggagagaagggcaucuaca

SEQ ID NO: 465833 - RNA, 19 nt, Homo sapiens
  misc_RNA (1)...(19): siRNA sense strand
gacugagacucugguugaa

SEQ ID NO: 465834 - RNA, 19 nt, Homo sapiens
  misc_RNA (1)...(19): siRNA sense strand
gcggaaagcggcaaaaguu

SEQ ID NO: 465835 - RNA, 19 nt, Homo sapiens
  misc_RNA (1)...(19): siRNA sense strand
gccgcagccugaggucuaa

SEQ ID NO: 465836 - RNA, 19 nt, Homo sapiens
  misc_RNA (1)...(19): siRNA sense strand
gagagaagggcaucuacac

SEQ ID NO: 465837 - RNA, 19 nt, Homo sapiens
  misc_RNA (1)...(19): siRNA sense strand
gaaagcggcaaaaguuaau

SEQ ID NO: 465838 - RNA, 19 nt, Homo sapiens
  misc_RNA (1)...(19): siRNA sense strand
aagggcaucuacacagcaa

SEQ ID NO: 465839 - RNA, 19 nt, Homo sapiens
  misc_RNA (1)...(19): siRNA sense strand
gauccuggcuuuccaugga

SEQ ID NO: 465840 - RNA, 19 nt, Homo sapiens
  misc_RNA (1)...(19): siRNA sense strand
ggagagauuugacgagacu

SEQ ID NO: 465841 - RNA, 19 nt, Homo sapiens
  misc_RNA (1)...(19): siRNA sense strand
agacugagacucugguuga

SEQ ID NO: 465842 - RNA, 19 nt, Homo sapiens
  misc_RNA (1)...(19): siRNA sense strand
cugagacucugguugaaga

SEQ ID NO: 465843 - RNA, 19 nt, Homo sapiens
  misc_RNA (1)...(19): siRNA sense strand
ggaaagcggcaaaaguuaa

SEQ ID NO: 465844 - RNA, 19 nt, Homo sapiens
  misc_RNA (1)...(19): siRNA sense strand
ggagagaagggcaucuaca

SEQ ID NO: 465845 - RNA, 19 nt, Homo sapiens
  misc_RNA (1)...(19): siRNA sense strand
gacugagacucugguugaa

SEQ ID NO: 465846 - RNA, 19 nt, Homo sapiens
  misc_RNA (1)...(19): siRNA sense strand
gcggaaagcggcaaaaguu

SEQ ID NO: 465847 - RNA, 19 nt, Homo sapiens
  misc_RNA (1)...(19): siRNA sense strand
gccgcagccugaggucuaa

SEQ ID NO: 465848 - RNA, 19 nt, Homo sapiens
  misc_RNA (1)...(19): siRNA sense strand
gagagaagggcaucuacac

SEQ ID NO: 465849 - RNA, 19 nt, Homo sapiens
  misc_RNA (1)...(19): siRNA sense strand
gaaagcggcaaaaguuaau

SEQ ID NO: 465850 - RNA, 19 nt, Homo sapiens
  misc_RNA (1)...(19): siRNA sense strand
aagggcaucuacacagcaa

SEQ ID NO: 465851 - RNA, 19 nt, Homo sapiens
  misc_RNA (1)...(19): siRNA sense strand
gcaggaguauuaauagcaa

SEQ ID NO: 465852 - RNA, 19 nt, Homo sapiens
  misc_RNA (1)...(19): siRNA sense strand
gauccuggcuuuccaugga

SEQ ID NO: 465853 - RNA, 19 nt, Homo sapiens
  misc_RNA (1)...(19): siRNA sense strand
gcccauugcaggaguauua

SEQ ID NO: 465854 - RNA, 19 nt, Homo sapiens
  misc_RNA (1)...(19): siRNA sense strand
ggagagauuugacgagacu

SEQ ID NO: 465855 - RNA, 19 nt, Homo sapiens
  misc_RNA (1)...(19): siRNA sense strand
cuacaguacuuccugacuu

SEQ ID NO: 465856 - RNA, 19 nt, Homo sapiens
  misc_RNA (1)...(19): siRNA sense strand
agacugagacucugguuga

SEQ ID NO: 465857 - RNA, 19 nt, Homo sapiens
  misc_RNA (1)...(19): siRNA sense strand
cauugcaggaguauuaaua

SEQ ID NO: 465858 - RNA, 19 nt, Homo sapiens
  misc_RNA (1)...(19): siRNA sense strand
cugagacucugguugaaga

SEQ ID NO: 465859 - RNA, 19 nt, Homo sapiens
  misc_RNA (1)...(19): siRNA sense strand
caucaguauugguaaagug

SEQ ID NO: 465860 - RNA, 19 nt, Homo sapiens
  misc_RNA (1)...(19): siRNA sense strand
gaacaggcccuccccauca

SEQ ID NO: 465861 - RNA, 19 nt, Homo sapiens
  misc_RNA (1)...(19): siRNA sense strand
ggaaagcggcaaaaguuaa

SEQ ID NO: 465862 - RNA, 19 nt, Homo sapiens
  misc_RNA (1)...(19): siRNA sense strand
ggagagaagggcaucuaca

SEQ ID NO: 465863 - RNA, 19 nt, Homo sapiens
  misc_RNA (1)...(19): siRNA sense strand
caccuggucuccacguuuc

SEQ ID NO: 465864 - RNA, 19 nt, Homo sapiens
  misc_RNA (1)...(19): siRNA sense strand
uacaguacuuccugacuuc

SEQ ID NO: 465865 - RNA, 19 nt, Homo sapiens
  misc_RNA (1)...(19): siRNA sense strand
uuaauagcaacccacauuu

SEQ ID NO: 465866 - RNA, 19 nt, Homo sapiens
  misc_RNA (1)...(19): siRNA sense strand
gacugagacucugguugaa

SEQ ID NO: 465867 - RNA, 19 nt, Homo sapiens
  misc_RNA (1)...(19): siRNA sense strand
auuaauagcaacccacauu

SEQ ID NO: 465868 - RNA, 19 nt, Homo sapiens
  misc_RNA (1)...(19): siRNA sense strand
gcggaaagcggcaaaaguu

SEQ ID NO: 465869 - RNA, 19 nt, Homo sapiens
  misc_RNA (1)...(19): siRNA sense strand
gcucaaaaccaaauccauu

SEQ ID NO: 465870 - RNA, 19 nt, Homo sapiens
  misc_RNA (1)...(19): siRNA sense strand
cuuccugacuucucccauu

SEQ ID NO: 465871 - RNA, 19 nt, Homo sapiens
  misc_RNA (1)...(19): siRNA sense strand
gccgcagccugaggucuaa

SEQ ID NO: 465872 - RNA, 19 nt, Homo sapiens
  misc_RNA (1)...(19): siRNA sense strand
ugacuucucccauucaaac

SEQ ID NO: 465873 - RNA, 19 nt, Homo sapiens
  misc_RNA (1)...(19): siRNA sense strand
gagagaagggcaucuacac

SEQ ID NO: 465874 - RNA, 19 nt, Homo sapiens
  misc_RNA (1)...(19): siRNA sense strand
ccacucauuucugggaaca

SEQ ID NO: 465875 - RNA, 19 nt, Homo sapiens
  misc_RNA (1)...(19): siRNA sense strand
ucaccuggucuccacguuu

SEQ ID NO: 465876 - RNA, 19 nt, Homo sapiens
  misc_RNA (1)...(19): siRNA sense strand
cacauucacacgcccauug

SEQ ID NO: 465877 - RNA, 19 nt, Homo sapiens
  misc_RNA (1)...(19): siRNA sense strand
ggaauuccccacucauuuc

SEQ ID NO: 465878 - RNA, 19 nt, Homo sapiens
  misc_RNA (1)...(19): siRNA sense strand
gaaagcggcaaaaguuaau

SEQ ID NO: 465879 - RNA, 19 nt, Homo sapiens
  misc_RNA (1)...(19): siRNA sense strand
aagggcaucuacacagcaa

SEQ ID NO: 465880 - RNA, 19 nt, Homo sapiens
  misc_RNA (1)...(19): siRNA sense strand
ccugacuucucccauucaa

SEQ ID NO: 465881 - RNA, 19 nt, Homo sapiens
  misc_RNA (1)...(19): siRNA sense strand
ccacgucccugcucaaaac

SEQ ID NO: 465882 - RNA, 19 nt, Homo sapiens
  misc_RNA (1)...(19): siRNA sense strand
gaauaaacgugaagugugu

SEQ ID NO: 465883 - RNA, 19 nt, Homo sapiens
  misc_RNA (1)...(19): siRNA sense strand
ggaggaggguguaaagaaa

SEQ ID NO: 465884 - RNA, 19 nt, Homo sapiens
  misc_RNA (1)...(19): siRNA sense strand
gcacacacauuuggccuaa

SEQ ID NO: 465885 - RNA, 19 nt, Homo sapiens
  misc_RNA (1)...(19): siRNA sense strand
gcaaagcagucaucuugga

SEQ ID NO: 465886 - RNA, 19 nt, Homo sapiens
  misc_RNA (1)...(19): siRNA sense strand
agacagagcugaggacuga

SEQ ID NO: 465887 - RNA, 19 nt, Homo sapiens
  misc_RNA (1)...(19): siRNA sense strand
ggaaauugcuuaccccaua

SEQ ID NO: 465888 - RNA, 19 nt, Homo sapiens
  misc_RNA (1)...(19): siRNA sense strand
caaguucaaugaucaguug

SEQ ID NO: 465889 - RNA, 19 nt, Homo sapiens
  misc_RNA (1)...(19): siRNA sense strand
ggaaaggaauagcugaugu

SEQ ID NO: 465890 - RNA, 19 nt, Homo sapiens
  misc_RNA (1)...(19): siRNA sense strand
gaaaggaauagcugaugua

SEQ ID NO: 465891 - RNA, 19 nt, Homo sapiens
  misc_RNA (1)...(19): siRNA sense strand
gaauggaacucagcucuca

SEQ ID NO: 465892 - RNA, 19 nt, Homo sapiens
  misc_RNA (1)...(19): siRNA sense strand
gggcaaagcagucaucuug

SEQ ID NO: 465893 - RNA, 19 nt, Homo sapiens
  misc_RNA (1)...(19): siRNA sense strand
gcagggagaagaacaguuu

SEQ ID NO: 465894 - RNA, 19 nt, Homo sapiens
  misc_RNA (1)...(19): siRNA sense strand
gaaagacucagaggaaauu

SEQ ID NO: 465895 - RNA, 19 nt, Homo sapiens
  misc_RNA (1)...(19): siRNA sense strand
caacagaaggaaccaagua

SEQ ID NO: 465896 - RNA, 19 nt, Homo sapiens
  misc_RNA (1)...(19): siRNA sense strand
aguagaaacucacacgaua

SEQ ID NO: 465897 - RNA, 19 nt, Homo sapiens
  misc_RNA (1)...(19): siRNA sense strand
gagguugucugcaauauac

SEQ ID NO: 465898 - RNA, 19 nt, Homo sapiens
  misc_RNA (1)...(19): siRNA sense strand
gaagagguugucugcaaua

SEQ ID NO: 465899 - RNA, 19 nt, Homo sapiens
  misc_RNA (1)...(19): siRNA sense strand
gcagaagcaccaaauuuga

SEQ ID NO: 465900 - RNA, 19 nt, Homo sapiens
  misc_RNA (1)...(19): siRNA sense strand
ggaagagguugucugcaau

SEQ ID NO: 465901 - RNA, 19 nt, Homo sapiens
  misc_RNA (1)...(19): siRNA sense strand
caaaugaggauauggaaau

SEQ ID NO: 465902 - RNA, 19 nt, Homo sapiens
  misc_RNA (1)...(19): siRNA sense strand
aaagaaagacucagaggaa

SEQ ID NO: 465903 - RNA, 19 nt, Homo sapiens
  misc_RNA (1)...(19): siRNA sense strand
guuuguauguccaggaaua

SEQ ID NO: 465904 - RNA, 19 nt, Homo sapiens
  misc_RNA (1)...(19): siRNA sense strand
gcugaggacugaggagaaa

SEQ ID NO: 465905 - RNA, 19 nt, Homo sapiens
  misc_RNA (1)...(19): siRNA sense strand
uuaccaacaugacaaaguu

SEQ ID NO: 465906 - RNA, 19 nt, Homo sapiens
  misc_RNA (1)...(19): siRNA sense strand
uggaagagguugucugcaa

SEQ ID NO: 465907 - RNA, 19 nt, Homo sapiens
  misc_RNA (1)...(19): siRNA sense strand
ggacugaggagaaaguugu

SEQ ID NO: 465908 - RNA, 19 nt, Homo sapiens
  misc_RNA (1)...(19): siRNA sense strand
gggcagaccaucauugaga

SEQ ID NO: 465909 - RNA, 19 nt, Homo sapiens
  misc_RNA (1)...(19): siRNA sense strand
ggagaauccugaagacacu

SEQ ID NO: 465910 - RNA, 19 nt, Homo sapiens
  misc_RNA (1)...(19): siRNA sense strand
gaagaacaccagcaucaag

SEQ ID NO: 465911 - RNA, 19 nt, Homo sapiens
  misc_RNA (1)...(19): siRNA sense strand
gaaauugcuuaccccauaa

SEQ ID NO: 465912 - RNA, 19 nt, Homo sapiens
  misc_RNA (1)...(19): siRNA sense strand
ggccuaaccucggcaauuc

SEQ ID NO: 465913 - RNA, 19 nt, Homo sapiens
  misc_RNA (1)...(19): siRNA sense strand
gguuagcccuguggaauug

SEQ ID NO: 465914 - RNA, 19 nt, Homo sapiens
  misc_RNA (1)...(19): siRNA sense strand
gcaaguccacucugaagga

SEQ ID NO: 465915 - RNA, 19 nt, Homo sapiens
  misc_RNA (1)...(19): siRNA sense strand
gcaaaugaggauauggaaa

SEQ ID NO: 465916 - RNA, 19 nt, Homo sapiens
  misc_RNA (1)...(19): siRNA sense strand
gcaccaaauuugaucuucu

SEQ ID NO: 465917 - RNA, 19 nt, Homo sapiens
  misc_RNA (1)...(19): siRNA sense strand
gauggacuccggacagauu

SEQ ID NO: 465918 - RNA, 19 nt, Homo sapiens
  misc_RNA (1)...(19): siRNA sense strand
aggcagggcuggaauggaa

SEQ ID NO: 465919 - RNA, 19 nt, Homo sapiens
  misc_RNA (1)...(19): siRNA sense strand
gaaacucacacgauacaca

SEQ ID NO: 465920 - RNA, 19 nt, Homo sapiens
  misc_RNA (1)...(19): siRNA sense strand
gcaauauacagaaggaaau

SEQ ID NO: 465921 - RNA, 19 nt, Homo sapiens
  misc_RNA (1)...(19): siRNA sense strand
acacuuugauguucuggaa

SEQ ID NO: 465922 - RNA, 19 nt, Homo sapiens
  misc_RNA (1)...(19): siRNA sense strand
cagaagagagcauggaaga

SEQ ID NO: 465923 - RNA, 19 nt, Homo sapiens
  misc_RNA (1)...(19): siRNA sense strand
gcuggcaaguccacucuga

SEQ ID NO: 465924 - RNA, 19 nt, Homo sapiens
  misc_RNA (1)...(19): siRNA sense strand
ggaguacacugggcaacau

SEQ ID NO: 465925 - RNA, 19 nt, Homo sapiens
  misc_RNA (1)...(19): siRNA sense strand
aagaaagacucagaggaaa

SEQ ID NO: 465926 - RNA, 19 nt, Homo sapiens
  misc_RNA (1)...(19): siRNA sense strand
acagucaucucacccauca

SEQ ID NO: 465927 - RNA, 19 nt, Homo sapiens
  misc_RNA (1)...(19): siRNA sense strand
gaaauagaggagcuacuca

SEQ ID NO: 465928 - RNA, 19 nt, Homo sapiens
  misc_RNA (1)...(19): siRNA sense strand
ccucagcucuuccgcuaug

SEQ ID NO: 465929 - RNA, 19 nt, Homo sapiens
  misc_RNA (1)...(19): siRNA sense strand
cauccaggcucccuuccaa

SEQ ID NO: 465930 - RNA, 19 nt, Homo sapiens
  misc_RNA (1)...(19): siRNA sense strand
ggaaauagaggagcuacuc

SEQ ID NO: 465931 - RNA, 19 nt, Homo sapiens
  misc_RNA (1)...(19): siRNA sense strand
caguuucucuauacucuga

SEQ ID NO: 465932 - RNA, 19 nt, Homo sapiens
  misc_RNA (1)...(19): siRNA sense strand
uccaauaccugcagaagca

SEQ ID NO: 465933 - RNA, 19 nt, Homo sapiens
  misc_RNA (1)...(19): siRNA sense strand
uggcugagauggaagaaca

SEQ ID NO: 465934 - RNA, 19 nt, Homo sapiens
  misc_RNA (1)...(19): siRNA sense strand
gaagcugggucggagaaca

SEQ ID NO: 465935 - RNA, 19 nt, Homo sapiens
  misc_RNA (1)...(19): siRNA sense strand
gcacuauagaagcaaauga

SEQ ID NO: 465936 - RNA, 19 nt, Homo sapiens
  misc_RNA (1)...(19): siRNA sense strand
ggaagaacaccagcaucaa

SEQ ID NO: 465937 - RNA, 19 nt, Homo sapiens
  misc_RNA (1)...(19): siRNA sense strand
ucaagaagguuuuagacaa

SEQ ID NO: 465938 - RNA, 19 nt, Homo sapiens
  misc_RNA (1)...(19): siRNA sense strand
ggaagaggcagggcuggaa

SEQ ID NO: 465939 - RNA, 19 nt, Homo sapiens
  misc_RNA (1)...(19): siRNA sense strand
gguagcaucacgcagauug

SEQ ID NO: 465940 - RNA, 19 nt, Homo sapiens
  misc_RNA (1)...(19): siRNA sense strand
gaaaguuguggcugagaug

SEQ ID NO: 465941 - RNA, 19 nt, Homo sapiens
  misc_RNA (1)...(19): siRNA sense strand
cagaggacacuuugauguu

SEQ ID NO: 465942 - RNA, 19 nt, Homo sapiens
  misc_RNA (1)...(19): siRNA sense strand
gaacaguuucucuauacuc

SEQ ID NO: 465943 - RNA, 19 nt, Homo sapiens
  misc_RNA (1)...(19): siRNA sense strand
gauguucuggaaaggaaua

SEQ ID NO: 465944 - RNA, 19 nt, Homo sapiens
  misc_RNA (1)...(19): siRNA sense strand
cgugaagugugucaaguuc

SEQ ID NO: 465945 - RNA, 19 nt, Homo sapiens
  misc_RNA (1)...(19): siRNA sense strand
ugaagauacugagggcaaa

SEQ ID NO: 465946 - RNA, 19 nt, Homo sapiens
  misc_RNA (1)...(19): siRNA sense strand
cccagaagcugaagauacu

SEQ ID NO: 465947 - RNA, 19 nt, Homo sapiens
  misc_RNA (1)...(19): siRNA sense strand
gaucacaggcugaaaucuc

SEQ ID NO: 465948 - RNA, 19 nt, Homo sapiens
  misc_RNA (1)...(19): siRNA sense strand
gaagaagcaaggccaggau

SEQ ID NO: 465949 - RNA, 19 nt, Homo sapiens
  misc_RNA (1)...(19): siRNA sense strand
cugcagaagcaccaaauuu

SEQ ID NO: 465950 - RNA, 19 nt, Homo sapiens
  misc_RNA (1)...(19): siRNA sense strand
ccaagcacuuuguucaucu

SEQ ID NO: 465951 - RNA, 19 nt, Homo sapiens
  misc_RNA (1)...(19): siRNA sense strand
caccaaauuugaucuucug

SEQ ID NO: 465952 - RNA, 19 nt, Homo sapiens
  misc_RNA (1)...(19): siRNA sense strand
gaaggaaauagaggagcua

SEQ ID NO: 465953 - RNA, 19 nt, Homo sapiens
  misc_RNA (1)...(19): siRNA sense strand
gauacaggcacuauagaag

SEQ ID NO: 465954 - RNA, 19 nt, Homo sapiens
  misc_RNA (1)...(19): siRNA sense strand
cacggcaguuguagcagua

SEQ ID NO: 465955 - RNA, 19 nt, Homo sapiens
  misc_RNA (1)...(19): siRNA sense strand
ggacacagucaagaagguu

SEQ ID NO: 465956 - RNA, 19 nt, Homo sapiens
  misc_RNA (1)...(19): siRNA sense strand
gaggacacuuugauguucu

SEQ ID NO: 465957 - RNA, 19 nt, Homo sapiens
  misc_RNA (1)...(19): siRNA sense strand
gaagaggcagggcuggaau

SEQ ID NO: 465958 - RNA, 19 nt, Homo sapiens
  misc_RNA (1)...(19): siRNA sense strand
agaggacacuuugauguuc

SEQ ID NO: 465959 - RNA, 19 nt, Homo sapiens
  misc_RNA (1)...(19): siRNA sense strand
ugugguaccuacugaagga

SEQ ID NO: 465960 - RNA, 19 nt, Homo sapiens
  misc_RNA (1)...(19): siRNA sense strand
ggacccagaagcugaagau

SEQ ID NO: 465961 - RNA, 19 nt, Homo sapiens
  misc_RNA (1)...(19): siRNA sense strand
agaagcaaaugaggauaug

SEQ ID NO: 465962 - RNA, 19 nt, Homo sapiens
  misc_RNA (1)...(19): siRNA sense strand
agaccaucauugagauuga

SEQ ID NO: 465963 - RNA, 19 nt, Homo sapiens
  misc_RNA (1)...(19): siRNA sense strand
cggaggaggguguaaagaa

SEQ ID NO: 465964 - RNA, 19 nt, Homo sapiens
  misc_RNA (1)...(19): siRNA sense strand
gaggauauggaaauugcuu

SEQ ID NO: 465965 - RNA, 19 nt, Homo sapiens
  misc_RNA (1)...(19): siRNA sense strand
ggcagaccaucauugagau

SEQ ID NO: 465966 - RNA, 19 nt, Homo sapiens
  misc_RNA (1)...(19): siRNA sense strand
uaauggacacagucaagaa

SEQ ID NO: 465967 - RNA, 19 nt, Homo sapiens
  misc_RNA (1)...(19): siRNA sense strand
ccaagugauuuugcaguua

SEQ ID NO: 465968 - RNA, 19 nt, Homo sapiens
  misc_RNA (1)...(19): siRNA sense strand
ggacuggaagagagcuauu

SEQ ID NO: 465969 - RNA, 19 nt, Homo sapiens
  misc_RNA (1)...(19): siRNA sense strand
ugcagaagcaccaaauuug

SEQ ID NO: 465970 - RNA, 19 nt, Homo sapiens
  misc_RNA (1)...(19): siRNA sense strand
agaaaguuguggcugagau

SEQ ID NO: 465971 - RNA, 19 nt, Homo sapiens
  misc_RNA (1)...(19): siRNA sense strand
gcagaccaucauugagauu

SEQ ID NO: 465972 - RNA, 19 nt, Homo sapiens
  misc_RNA (1)...(19): siRNA sense strand
ugauacaggcacuauagaa

SEQ ID NO: 465973 - RNA, 19 nt, Homo sapiens
  misc_RNA (1)...(19): siRNA sense strand
gaagaagggauugauacag

SEQ ID NO: 465974 - RNA, 19 nt, Homo sapiens
  misc_RNA (1)...(19): siRNA sense strand
cagccucaguucacaguca

SEQ ID NO: 465975 - RNA, 19 nt, Homo sapiens
  misc_RNA (1)...(19): siRNA sense strand
aaacucacacgauacacaa

SEQ ID NO: 465976 - RNA, 19 nt, Homo sapiens
  misc_RNA (1)...(19): siRNA sense strand
ccaaguagagcagggagaa

SEQ ID NO: 465977 - RNA, 19 nt, Homo sapiens
  misc_RNA (1)...(19): siRNA sense strand
gcaguuguagcaguagaaa

SEQ ID NO: 465978 - RNA, 19 nt, Homo sapiens
  misc_RNA (1)...(19): siRNA sense strand
caggcucccuuccaaguca

SEQ ID NO: 465979 - RNA, 19 nt, Homo sapiens
  misc_RNA (1)...(19): siRNA sense strand
ucagaggacacuuugaugu

SEQ ID NO: 465980 - RNA, 19 nt, Homo sapiens
  misc_RNA (1)...(19): siRNA sense strand
caggacagcagacaagugu

SEQ ID NO: 465981 - RNA, 19 nt, Homo sapiens
  misc_RNA (1)...(19): siRNA sense strand
uggaagaacaccagcauca

SEQ ID NO: 465982 - RNA, 19 nt, Homo sapiens
  misc_RNA (1)...(19): siRNA sense strand
gaauaaacgugaagugugu

SEQ ID NO: 465983 - RNA, 19 nt, Homo sapiens
  misc_RNA (1)...(19): siRNA sense strand
ggaggaggguguaaagaaa

SEQ ID NO: 465984 - RNA, 19 nt, Homo sapiens
  misc_RNA (1)...(19): siRNA sense strand
gcacacacauuuggccuaa

SEQ ID NO: 465985 - RNA, 19 nt, Homo sapiens
  misc_RNA (1)...(19): siRNA sense strand
gcaaagcagucaucuugga

SEQ ID NO: 465986 - RNA, 19 nt, Homo sapiens
  misc_RNA (1)...(19): siRNA sense strand
agacagagcugaggacuga

SEQ ID NO: 465987 - RNA, 19 nt, Homo sapiens
  misc_RNA (1)...(19): siRNA sense strand
ggaaauugcuuaccccaua

SEQ ID NO: 465988 - RNA, 19 nt, Homo sapiens
  misc_RNA (1)...(19): siRNA sense strand
caaguucaaugaucaguug

SEQ ID NO: 465989 - RNA, 19 nt, Homo sapiens
  misc_RNA (1)...(19): siRNA sense strand
ggaaaggaauagcugaugu

SEQ ID NO: 465990 - RNA, 19 nt, Homo sapiens
  misc_RNA (1)...(19): siRNA sense strand
gaaaggaauagcugaugua

SEQ ID NO: 465991 - RNA, 19 nt, Homo sapiens
  misc_RNA (1)...(19): siRNA sense strand
gaauggaacucagcucuca

SEQ ID NO: 465992 - RNA, 19 nt, Homo sapiens
  misc_RNA (1)...(19): siRNA sense strand
gggcaaagcagucaucuug

SEQ ID NO: 465993 - RNA, 19 nt, Homo sapiens
  misc_RNA (1)...(19): siRNA sense strand
gcagggagaagaacaguuu

SEQ ID NO: 465994 - RNA, 19 nt, Homo sapiens
  misc_RNA (1)...(19): siRNA sense strand
gaaagacucagaggaaauu

SEQ ID NO: 465995 - RNA, 19 nt, Homo sapiens
  misc_RNA (1)...(19): siRNA sense strand
caacagaaggaaccaagua

SEQ ID NO: 465996 - RNA, 19 nt, Homo sapiens
  misc_RNA (1)...(19): siRNA sense strand
aguagaaacucacacgaua

SEQ ID NO: 465997 - RNA, 19 nt, Homo sapiens
  misc_RNA (1)...(19): siRNA sense strand
gagguugucugcaauauac

SEQ ID NO: 465998 - RNA, 19 nt, Homo sapiens
  misc_RNA (1)...(19): siRNA sense strand
gaagagguugucugcaaua

SEQ ID NO: 465999 - RNA, 19 nt, Homo sapiens
  misc_RNA (1)...(19): siRNA sense strand
gcagaagcaccaaauuuga

SEQ ID NO: 466000 - RNA, 19 nt, Homo sapiens
  misc_RNA (1)...(19): siRNA sense strand
ggaagagguugucugcaau

SEQ ID NO: 466001 - RNA, 19 nt, Homo sapiens
  misc_RNA (1)...(19): siRNA sense strand
caaaugaggauauggaaau

SEQ ID NO: 466002 - RNA, 19 nt, Homo sapiens
  misc_RNA (1)...(19): siRNA sense strand
aaagaaagacucagaggaa

SEQ ID NO: 466003 - RNA, 19 nt, Homo sapiens
  misc_RNA (1)...(19): siRNA sense strand
guuuguauguccaggaaua

SEQ ID NO: 466004 - RNA, 19 nt, Homo sapiens
  misc_RNA (1)...(19): siRNA sense strand
gcugaggacugaggagaaa

SEQ ID NO: 466005 - RNA, 19 nt, Homo sapiens
  misc_RNA (1)...(19): siRNA sense strand
uuaccaacaugacaaaguu

SEQ ID NO: 466006 - RNA, 19 nt, Homo sapiens
  misc_RNA (1)...(19): siRNA sense strand
uggaagagguugucugcaa

SEQ ID NO: 466007 - RNA, 19 nt, Homo sapiens
  misc_RNA (1)...(19): siRNA sense strand
ggacugaggagaaaguugu

SEQ ID NO: 466008 - RNA, 19 nt, Homo sapiens
  misc_RNA (1)...(19): siRNA sense strand
gggcagaccaucauugaga

SEQ ID NO: 466009 - RNA, 19 nt, Homo sapiens
  misc_RNA (1)...(19): siRNA sense strand
ggagaauccugaagacacu

SEQ ID NO: 466010 - RNA, 19 nt, Homo sapiens
  misc_RNA (1)...(19): siRNA sense strand
gaagaacaccagcaucaag

SEQ ID NO: 466011 - RNA, 19 nt, Homo sapiens
  misc_RNA (1)...(19): siRNA sense strand
gaaauugcuuaccccauaa

SEQ ID NO: 466012 - RNA, 19 nt, Homo sapiens
  misc_RNA (1)...(19): siRNA sense strand
ggccuaaccucggcaauuc

SEQ ID NO: 466013 - RNA, 19 nt, Homo sapiens
  misc_RNA (1)...(19): siRNA sense strand
gguuagcccuguggaauug

SEQ ID NO: 466014 - RNA, 19 nt, Homo sapiens
  misc_RNA (1)...(19): siRNA sense strand
gcaaguccacucugaagga

SEQ ID NO: 466015 - RNA, 19 nt, Homo sapiens
  misc_RNA (1)...(19): siRNA sense strand
gcaaaugaggauauggaaa

SEQ ID NO: 466016 - RNA, 19 nt, Homo sapiens
  misc_RNA (1)...(19): siRNA sense strand
gcaccaaauuugaucuucu

SEQ ID NO: 466017 - RNA, 19 nt, Homo sapiens
  misc_RNA (1)...(19): siRNA sense strand
gauggacuccggacagauu

SEQ ID NO: 466018 - RNA, 19 nt, Homo sapiens
  misc_RNA (1)...(19): siRNA sense strand
aggcagggcuggaauggaa

SEQ ID NO: 466019 - RNA, 19 nt, Homo sapiens
  misc_RNA (1)...(19): siRNA sense strand
gaaacucacacgauacaca

SEQ ID NO: 466020 - RNA, 19 nt, Homo sapiens
  misc_RNA (1)...(19): siRNA sense strand
gcaauauacagaaggaaau

SEQ ID NO: 466021 - RNA, 19 nt, Homo sapiens
  misc_RNA (1)...(19): siRNA sense strand
acacuuugauguucuggaa

SEQ ID NO: 466022 - RNA, 19 nt, Homo sapiens
  misc_RNA (1)...(19): siRNA sense strand
cagaagagagcauggaaga

SEQ ID NO: 466023 - RNA, 19 nt, Homo sapiens
  misc_RNA (1)...(19): siRNA sense strand
gcuggcaaguccacucuga

SEQ ID NO: 466024 - RNA, 19 nt, Homo sapiens
  misc_RNA (1)...(19): siRNA sense strand
ggaguacacugggcaacau

SEQ ID NO: 466025 - RNA, 19 nt, Homo sapiens
  misc_RNA (1)...(19): siRNA sense strand
aagaaagacucagaggaaa

SEQ ID NO: 466026 - RNA, 19 nt, Homo sapiens
  misc_RNA (1)...(19): siRNA sense strand
acagucaucucacccauca

SEQ ID NO: 466027 - RNA, 19 nt, Homo sapiens
  misc_RNA (1)...(19): siRNA sense strand
gaaauagaggagcuacuca

SEQ ID NO: 466028 - RNA, 19 nt, Homo sapiens
  misc_RNA (1)...(19): siRNA sense strand
ccucagcucuuccgcuaug

SEQ ID NO: 466029 - RNA, 19 nt, Homo sapiens
  misc_RNA (1)...(19): siRNA sense strand
cauccaggcucccuuccaa

SEQ ID NO: 466030 - RNA, 19 nt, Homo sapiens
  misc_RNA (1)...(19): siRNA sense strand
ggaaauagaggagcuacuc

SEQ ID NO: 466031 - RNA, 19 nt, Homo sapiens
  misc_RNA (1)...(19): siRNA sense strand
caguuucucuauacucuga

SEQ ID NO: 466032 - RNA, 19 nt, Homo sapiens
  misc_RNA (1)...(19): siRNA sense strand
uccaauaccugcagaagca

SEQ ID NO: 466033 - RNA, 19 nt, Homo sapiens
  misc_RNA (1)...(19): siRNA sense strand
uggcugagauggaagaaca

SEQ ID NO: 466034 - RNA, 19 nt, Homo sapiens
  misc_RNA (1)...(19): siRNA sense strand
gaagcugggucggagaaca

SEQ ID NO: 466035 - RNA, 19 nt, Homo sapiens
  misc_RNA (1)...(19): siRNA sense strand
gcacuauagaagcaaauga

SEQ ID NO: 466036 - RNA, 19 nt, Homo sapiens
  misc_RNA (1)...(19): siRNA sense strand
ggaagaacaccagcaucaa

SEQ ID NO: 466037 - RNA, 19 nt, Homo sapiens
  misc_RNA (1)...(19): siRNA sense strand
ucaagaagguuuuagacaa

SEQ ID NO: 466038 - RNA, 19 nt, Homo sapiens
  misc_RNA (1)...(19): siRNA sense strand
ggaagaggcagggcuggaa

SEQ ID NO: 466039 - RNA, 19 nt, Homo sapiens
  misc_RNA (1)...(19): siRNA sense strand
gguagcaucacgcagauug

SEQ ID NO: 466040 - RNA, 19 nt, Homo sapiens
  misc_RNA (1)...(19): siRNA sense strand
gaaaguuguggcugagaug

SEQ ID NO: 466041 - RNA, 19 nt, Homo sapiens
  misc_RNA (1)...(19): siRNA sense strand
cagaggacacuuugauguu

SEQ ID NO: 466042 - RNA, 19 nt, Homo sapiens
  misc_RNA (1)...(19): siRNA sense strand
gaacaguuucucuauacuc

SEQ ID NO: 466043 - RNA, 19 nt, Homo sapiens
  misc_RNA (1)...(19): siRNA sense strand
gauguucuggaaaggaaua

SEQ ID NO: 466044 - RNA, 19 nt, Homo sapiens
  misc_RNA (1)...(19): siRNA sense strand
cgugaagugugucaaguuc

SEQ ID NO: 466045 - RNA, 19 nt, Homo sapiens
  misc_RNA (1)...(19): siRNA sense strand
ugaagauacugagggcaaa

SEQ ID NO: 466046 - RNA, 19 nt, Homo sapiens
  misc_RNA (1)...(19): siRNA sense strand
cccagaagcugaagauacu

SEQ ID NO: 466047 - RNA, 19 nt, Homo sapiens
  misc_RNA (1)...(19): siRNA sense strand
gaucacaggcugaaaucuc

SEQ ID NO: 466048 - RNA, 19 nt, Homo sapiens
  misc_RNA (1)...(19): siRNA sense strand
gaagaagcaaggccaggau

SEQ ID NO: 466049 - RNA, 19 nt, Homo sapiens
  misc_RNA (1)...(19): siRNA sense strand
cugcagaagcaccaaauuu

SEQ ID NO: 466050 - RNA, 19 nt, Homo sapiens
  misc_RNA (1)...(19): siRNA sense strand
ccaagcacuuuguucaucu

SEQ ID NO: 466051 - RNA, 19 nt, Homo sapiens
  misc_RNA (1)...(19): siRNA sense strand
caccaaauuugaucuucug

SEQ ID NO: 466052 - RNA, 19 nt, Homo sapiens
  misc_RNA (1)...(19): siRNA sense strand
gaaggaaauagaggagcua

SEQ ID NO: 466053 - RNA, 19 nt, Homo sapiens
  misc_RNA (1)...(19): siRNA sense strand
gauacaggcacuauagaag

SEQ ID NO: 466054 - RNA, 19 nt, Homo sapiens
  misc_RNA (1)...(19): siRNA sense strand
cacggcaguuguagcagua

SEQ ID NO: 466055 - RNA, 19 nt, Homo sapiens
  misc_RNA (1)...(19): siRNA sense strand
ggacacagucaagaagguu

SEQ ID NO: 466056 - RNA, 19 nt, Homo sapiens
  misc_RNA (1)...(19): siRNA sense strand
gaggacacuuugauguucu

SEQ ID NO: 466057 - RNA, 19 nt, Homo sapiens
  misc_RNA (1)...(19): siRNA sense strand
gaagaggcagggcuggaau

SEQ ID NO: 466058 - RNA, 19 nt, Homo sapiens
  misc_RNA (1)...(19): siRNA sense strand
agaggacacuuugauguuc

SEQ ID NO: 466059 - RNA, 19 nt, Homo sapiens
  misc_RNA (1)...(19): siRNA sense strand
ugugguaccuacugaagga

SEQ ID NO: 466060 - RNA, 19 nt, Homo sapiens
  misc_RNA (1)...(19): siRNA sense strand
ggacccagaagcugaagau

SEQ ID NO: 466061 - RNA, 19 nt, Homo sapiens
  misc_RNA (1)...(19): siRNA sense strand
agaagcaaaugaggauaug

SEQ ID NO: 466062 - RNA, 19 nt, Homo sapiens
  misc_RNA (1)...(19): siRNA sense strand
agaccaucauugagauuga

SEQ ID NO: 466063 - RNA, 19 nt, Homo sapiens
  misc_RNA (1)...(19): siRNA sense strand
cggaggaggguguaaagaa

SEQ ID NO: 466064 - RNA, 19 nt, Homo sapiens
  misc_RNA (1)...(19): siRNA sense strand
gaggauauggaaauugcuu

SEQ ID NO: 466065 - RNA, 19 nt, Homo sapiens
  misc_RNA (1)...(19): siRNA sense strand
ggcagaccaucauugagau

SEQ ID NO: 466066 - RNA, 19 nt, Homo sapiens
  misc_RNA (1)...(19): siRNA sense strand
uaauggacacagucaagaa

SEQ ID NO: 466067 - RNA, 19 nt, Homo sapiens
  misc_RNA (1)...(19): siRNA sense strand
ccaagugauuuugcaguua

SEQ ID NO: 466068 - RNA, 19 nt, Homo sapiens
  misc_RNA (1)...(19): siRNA sense strand
ggacuggaagagagcuauu

SEQ ID NO: 466069 - RNA, 19 nt, Homo sapiens
  misc_RNA (1)...(19): siRNA sense strand
ugcagaagcaccaaauuug

SEQ ID NO: 466070 - RNA, 19 nt, Homo sapiens
  misc_RNA (1)...(19): siRNA sense strand
agaaaguuguggcugagau

SEQ ID NO: 466071 - RNA, 19 nt, Homo sapiens
  misc_RNA (1)...(19): siRNA sense strand
gcagaccaucauugagauu

SEQ ID NO: 466072 - RNA, 19 nt, Homo sapiens
  misc_RNA (1)...(19): siRNA sense strand
ugauacaggcacuauagaa

SEQ ID NO: 466073 - RNA, 19 nt, Homo sapiens
  misc_RNA (1)...(19): siRNA sense strand
gaagaagggauugauacag

SEQ ID NO: 466074 - RNA, 19 nt, Homo sapiens
  misc_RNA (1)...(19): siRNA sense strand
cagccucaguucacaguca

SEQ ID NO: 466075 - RNA, 19 nt, Homo sapiens
  misc_RNA (1)...(19): siRNA sense strand
aaacucacacgauacacaa

SEQ ID NO: 466076 - RNA, 19 nt, Homo sapiens
  misc_RNA (1)...(19): siRNA sense strand
ccaaguagagcagggagaa

SEQ ID NO: 466077 - RNA, 19 nt, Homo sapiens
  misc_RNA (1)...(19): siRNA sense strand
gcaguuguagcaguagaaa

SEQ ID NO: 466078 - RNA, 19 nt, Homo sapiens
  misc_RNA (1)...(19): siRNA sense strand
caggcucccuuccaaguca

SEQ ID NO: 466079 - RNA, 19 nt, Homo sapiens
  misc_RNA (1)...(19): siRNA sense strand
ucagaggacacuuugaugu

SEQ ID NO: 466080 - RNA, 19 nt, Homo sapiens
  misc_RNA (1)...(19): siRNA sense strand
caggacagcagacaagugu

SEQ ID NO: 466081 - RNA, 19 nt, Homo sapiens
  misc_RNA (1)...(19): siRNA sense strand
uggaagaacaccagcauca

SEQ ID NO: 466082 - RNA, 19 nt, Homo sapiens
  misc_RNA (1)...(19): siRNA sense strand
gggagcagcaccucuacua

SEQ ID NO: 466083 - RNA, 19 nt, Homo sapiens
  misc_RNA (1)...(19): siRNA sense strand
caaccggccuggcaucuac

SEQ ID NO: 466084 - RNA, 19 nt, Homo sapiens
  misc_RNA (1)...(19): siRNA sense strand
gaccggacgucaaggaucu

SEQ ID NO: 466085 - RNA, 19 nt, Homo sapiens
  misc_RNA (1)...(19): siRNA sense strand
ggacuggauccaccacuau

SEQ ID NO: 466086 - RNA, 19 nt, Homo sapiens
  misc_RNA (1)...(19): siRNA sense strand
cauacuggaugcacuucug

SEQ ID NO: 466087 - RNA, 19 nt, Homo sapiens
  misc_RNA (1)...(19): siRNA sense strand
gauaugaucuguccugaau

SEQ ID NO: 466088 - RNA, 19 nt, Homo sapiens
  misc_RNA (1)...(19): siRNA sense strand
caaucuaccucgaaauaua

SEQ ID NO: 466089 - RNA, 19 nt, Homo sapiens
  misc_RNA (1)...(19): siRNA sense strand
gauggcagcuacacauaua

SEQ ID NO: 466090 - RNA, 19 nt, Homo sapiens
  misc_RNA (1)...(19): siRNA sense strand
gcaaguauaugaacagaag

SEQ ID NO: 466091 - RNA, 19 nt, Homo sapiens
  misc_RNA (1)...(19): siRNA sense strand
agaaauaugugccguauca

SEQ ID NO: 466092 - RNA, 19 nt, Homo sapiens
  misc_RNA (1)...(19): siRNA sense strand
ggagauuugucuaccauga

SEQ ID NO: 466093 - RNA, 19 nt, Homo sapiens
  misc_RNA (1)...(19): siRNA sense strand
gcacaggagcugcaaguuu

SEQ ID NO: 466094 - RNA, 19 nt, Homo sapiens
  misc_RNA (1)...(19): siRNA sense strand
gaaucaaucuaccucgaaa

SEQ ID NO: 466095 - RNA, 19 nt, Homo sapiens
  misc_RNA (1)...(19): siRNA sense strand
guaaagcuguggaauugga

SEQ ID NO: 466096 - RNA, 19 nt, Homo sapiens
  misc_RNA (1)...(19): siRNA sense strand
gaauguggcuugguuguag

SEQ ID NO: 466097 - RNA, 19 nt, Homo sapiens
  misc_RNA (1)...(19): siRNA sense strand
ccuaggacauuuaaagaaa

SEQ ID NO: 466098 - RNA, 19 nt, Homo sapiens
  misc_RNA (1)...(19): siRNA sense strand
cuacagagccggugauaug

SEQ ID NO: 466099 - RNA, 19 nt, Homo sapiens
  misc_RNA (1)...(19): siRNA sense strand
ucaaagaaaucacuaccau

SEQ ID NO: 466100 - RNA, 19 nt, Homo sapiens
  misc_RNA (1)...(19): siRNA sense strand
caaacuaccacagcuauaa

SEQ ID NO: 466101 - RNA, 19 nt, Homo sapiens
  misc_RNA (1)...(19): siRNA sense strand
gaaauuggucgguguuuua

SEQ ID NO: 466102 - RNA, 19 nt, Homo sapiens
  misc_RNA (1)...(19): siRNA sense strand
ccguaaagcuguggaauug

SEQ ID NO: 466103 - RNA, 19 nt, Homo sapiens
  misc_RNA (1)...(19): siRNA sense strand
gcaaugacaaagcaacaaa

SEQ ID NO: 466104 - RNA, 19 nt, Homo sapiens
  misc_RNA (1)...(19): siRNA sense strand
ggacaaacuaccacagcua

SEQ ID NO: 466105 - RNA, 19 nt, Homo sapiens
  misc_RNA (1)...(19): siRNA sense strand
gggaagagcuaaugaugcu

SEQ ID NO: 466106 - RNA, 19 nt, Homo sapiens
  misc_RNA (1)...(19): siRNA sense strand
gaagagcuaaugaugcuau

SEQ ID NO: 466107 - RNA, 19 nt, Homo sapiens
  misc_RNA (1)...(19): siRNA sense strand
cuacacauauagcccguaa

SEQ ID NO: 466108 - RNA, 19 nt, Homo sapiens
  misc_RNA (1)...(19): siRNA sense strand
aaagaaauaugugccguau

SEQ ID NO: 466109 - RNA, 19 nt, Homo sapiens
  misc_RNA (1)...(19): siRNA sense strand
cagaaucggagaacaauga

SEQ ID NO: 466110 - RNA, 19 nt, Homo sapiens
  misc_RNA (1)...(19): siRNA sense strand
ccuacagacuucaaauuug

SEQ ID NO: 466111 - RNA, 19 nt, Homo sapiens
  misc_RNA (1)...(19): siRNA sense strand
ucacaggcaucagcugaaa

SEQ ID NO: 466112 - RNA, 19 nt, Homo sapiens
  misc_RNA (1)...(19): siRNA sense strand
uaugaucuguccugaaugu

SEQ ID NO: 466113 - RNA, 19 nt, Homo sapiens
  misc_RNA (1)...(19): siRNA sense strand
caaccuuugucuuccuaaa

SEQ ID NO: 466114 - RNA, 19 nt, Homo sapiens
  misc_RNA (1)...(19): siRNA sense strand
uauauugccuguagacaag

SEQ ID NO: 466115 - RNA, 19 nt, Homo sapiens
  misc_RNA (1)...(19): siRNA sense strand
gcagacagaaucaaucuac

SEQ ID NO: 466116 - RNA, 19 nt, Homo sapiens
  misc_RNA (1)...(19): siRNA sense strand
gaagggaagagcuaaugau

SEQ ID NO: 466117 - RNA, 19 nt, Homo sapiens
  misc_RNA (1)...(19): siRNA sense strand
cgaaauauaguugaucgaa

SEQ ID NO: 466118 - RNA, 19 nt, Homo sapiens
  misc_RNA (1)...(19): siRNA sense strand
ggaucugaauggcgaacuu

SEQ ID NO: 466119 - RNA, 19 nt, Homo sapiens
  misc_RNA (1)...(19): siRNA sense strand
cacaggagcugcaaguuuu

SEQ ID NO: 466120 - RNA, 19 nt, Homo sapiens
  misc_RNA (1)...(19): siRNA sense strand
agauuugucuaccaugauu

SEQ ID NO: 466121 - RNA, 19 nt, Homo sapiens
  misc_RNA (1)...(19): siRNA sense strand
acaaugagcaguucugauc

SEQ ID NO: 466122 - RNA, 19 nt, Homo sapiens
  misc_RNA (1)...(19): siRNA sense strand
guaggugaccggguuauug

SEQ ID NO: 466123 - RNA, 19 nt, Homo sapiens
  misc_RNA (1)...(19): siRNA sense strand
gacaaacuaccacagcuau

SEQ ID NO: 466124 - RNA, 19 nt, Homo sapiens
  misc_RNA (1)...(19): siRNA sense strand
ucaagcaaguauaugaaca

SEQ ID NO: 466125 - RNA, 19 nt, Homo sapiens
  misc_RNA (1)...(19): siRNA sense strand
gaacuuucagcaaugacaa

SEQ ID NO: 466126 - RNA, 19 nt, Homo sapiens
  misc_RNA (1)...(19): siRNA sense strand
uagaaaccaguguggauuu

SEQ ID NO: 466127 - RNA, 19 nt, Homo sapiens
  misc_RNA (1)...(19): siRNA sense strand
acaaucagacaguccuaua

SEQ ID NO: 466128 - RNA, 19 nt, Homo sapiens
  misc_RNA (1)...(19): siRNA sense strand
uggcagcggcagcuauuua

SEQ ID NO: 466129 - RNA, 19 nt, Homo sapiens
  misc_RNA (1)...(19): siRNA sense strand
gaaaccaguguggauuuga

SEQ ID NO: 466130 - RNA, 19 nt, Homo sapiens
  misc_RNA (1)...(19): siRNA sense strand
ggagauauugcugguguug

SEQ ID NO: 466131 - RNA, 19 nt, Homo sapiens
  misc_RNA (1)...(19): siRNA sense strand
gaucugaauggcgaacuuu

SEQ ID NO: 466132 - RNA, 19 nt, Homo sapiens
  misc_RNA (1)...(19): siRNA sense strand
ucugagugauggagauuug

SEQ ID NO: 466133 - RNA, 19 nt, Homo sapiens
  misc_RNA (1)...(19): siRNA sense strand
agaaaccaguguggauuug

SEQ ID NO: 466134 - RNA, 19 nt, Homo sapiens
  misc_RNA (1)...(19): siRNA sense strand
cagauggcagcuacacaua

SEQ ID NO: 466135 - RNA, 19 nt, Homo sapiens
  misc_RNA (1)...(19): siRNA sense strand
aaaccaguguggauuugau

SEQ ID NO: 466136 - RNA, 19 nt, Homo sapiens
  misc_RNA (1)...(19): siRNA sense strand
cagagccggugauaugauc

SEQ ID NO: 466137 - RNA, 19 nt, Homo sapiens
  misc_RNA (1)...(19): siRNA sense strand
gcuagaaaccaguguggau

SEQ ID NO: 466138 - RNA, 19 nt, Homo sapiens
  misc_RNA (1)...(19): siRNA sense strand
ggcgaacuuucagcaauga

SEQ ID NO: 466139 - RNA, 19 nt, Homo sapiens
  misc_RNA (1)...(19): siRNA sense strand
ugcuauagcuucugcuugu

SEQ ID NO: 466140 - RNA, 19 nt, Homo sapiens
  misc_RNA (1)...(19): siRNA sense strand
gaucgggcaaugaugaaug

SEQ ID NO: 466141 - RNA, 19 nt, Homo sapiens
  misc_RNA (1)...(19): siRNA sense strand
ccaagagucacauguccaa

SEQ ID NO: 466142 - RNA, 19 nt, Homo sapiens
  misc_RNA (1)...(19): siRNA sense strand
acacauauagcccguaaag

SEQ ID NO: 466143 - RNA, 19 nt, Homo sapiens
  misc_RNA (1)...(19): siRNA sense strand
gauggagauuugucuacca

SEQ ID NO: 466144 - RNA, 19 nt, Homo sapiens
  misc_RNA (1)...(19): siRNA sense strand
uaggugaccggguuauuga

SEQ ID NO: 466145 - RNA, 19 nt, Homo sapiens
  misc_RNA (1)...(19): siRNA sense strand
cuauuuacauggccucaca

SEQ ID NO: 466146 - RNA, 19 nt, Homo sapiens
  misc_RNA (1)...(19): siRNA sense strand
uggcgaacuuucagcaaug

SEQ ID NO: 466147 - RNA, 19 nt, Homo sapiens
  misc_RNA (1)...(19): siRNA sense strand
gauguuacaaucagacagu

SEQ ID NO: 466148 - RNA, 19 nt, Homo sapiens
  misc_RNA (1)...(19): siRNA sense strand
aagagcuaaugaugcuaua

SEQ ID NO: 466149 - RNA, 19 nt, Homo sapiens
  misc_RNA (1)...(19): siRNA sense strand
aaucagacaguccuauaga

SEQ ID NO: 466150 - RNA, 19 nt, Homo sapiens
  misc_RNA (1)...(19): siRNA sense strand
uuauugaugugggaucuga

SEQ ID NO: 466151 - RNA, 19 nt, Homo sapiens
  misc_RNA (1)...(19): siRNA sense strand
gcauucaaagaaaucacua

SEQ ID NO: 466152 - RNA, 19 nt, Homo sapiens
  misc_RNA (1)...(19): siRNA sense strand
uccuacagacuucaaauuu

SEQ ID NO: 466153 - RNA, 19 nt, Homo sapiens
  misc_RNA (1)...(19): siRNA sense strand
guaucacgaauuucuaaga

SEQ ID NO: 466154 - RNA, 19 nt, Homo sapiens
  misc_RNA (1)...(19): siRNA sense strand
gcuucugcuugucucuaua

SEQ ID NO: 466155 - RNA, 19 nt, Homo sapiens
  misc_RNA (1)...(19): siRNA sense strand
ugaagggaagagcuaauga

SEQ ID NO: 466156 - RNA, 19 nt, Homo sapiens
  misc_RNA (1)...(19): siRNA sense strand
guaccagaaucggagaaca

SEQ ID NO: 466157 - RNA, 19 nt, Homo sapiens
  misc_RNA (1)...(19): siRNA sense strand
gugaccggguuauugaugu

SEQ ID NO: 466158 - RNA, 19 nt, Homo sapiens
  misc_RNA (1)...(19): siRNA sense strand
acauauagcccguaaagcu

SEQ ID NO: 466159 - RNA, 19 nt, Homo sapiens
  misc_RNA (1)...(19): siRNA sense strand
aagcaaguauaugaacaga

SEQ ID NO: 466160 - RNA, 19 nt, Homo sapiens
  misc_RNA (1)...(19): siRNA sense strand
acaaacuaccacagcuaua

SEQ ID NO: 466161 - RNA, 19 nt, Homo sapiens
  misc_RNA (1)...(19): siRNA sense strand
cuagaaaccaguguggauu

SEQ ID NO: 466162 - RNA, 19 nt, Homo sapiens
  misc_RNA (1)...(19): siRNA sense strand
uaaugaugcuauagcuucu

SEQ ID NO: 466163 - RNA, 19 nt, Homo sapiens
  misc_RNA (1)...(19): siRNA sense strand
uuucagcaaugacaaagca

SEQ ID NO: 466164 - RNA, 19 nt, Homo sapiens
  misc_RNA (1)...(19): siRNA sense strand
ugaauguggcuugguugua

SEQ ID NO: 466165 - RNA, 19 nt, Homo sapiens
  misc_RNA (1)...(19): siRNA sense strand
gagauuugucuaccaugau

SEQ ID NO: 466166 - RNA, 19 nt, Homo sapiens
  misc_RNA (1)...(19): siRNA sense strand
caaucagacaguccuauag

SEQ ID NO: 466167 - RNA, 19 nt, Homo sapiens
  misc_RNA (1)...(19): siRNA sense strand
ugugccguaucacgaauuu

SEQ ID NO: 466168 - RNA, 19 nt, Homo sapiens
  misc_RNA (1)...(19): siRNA sense strand
guuccuaggacauuuaaag

SEQ ID NO: 466169 - RNA, 19 nt, Homo sapiens
  misc_RNA (1)...(19): siRNA sense strand
aucaaucuaccucgaaaua

SEQ ID NO: 466170 - RNA, 19 nt, Homo sapiens
  misc_RNA (1)...(19): siRNA sense strand
guucugaucgggcaaugau

SEQ ID NO: 466171 - RNA, 19 nt, Homo sapiens
  misc_RNA (1)...(19): siRNA sense strand
ugacaaagcaacaaaagau

SEQ ID NO: 466172 - RNA, 19 nt, Homo sapiens
  misc_RNA (1)...(19): siRNA sense strand
aaagaaauuggucgguguu

SEQ ID NO: 466173 - RNA, 19 nt, Homo sapiens
  misc_RNA (1)...(19): siRNA sense strand
cuauauugccuguagacaa

SEQ ID NO: 466174 - RNA, 19 nt, Homo sapiens
  misc_RNA (1)...(19): siRNA sense strand
cugcuugucucuauauugc

SEQ ID NO: 466175 - RNA, 19 nt, Homo sapiens
  misc_RNA (1)...(19): siRNA sense strand
gggcacaggagcugcaagu

SEQ ID NO: 466176 - RNA, 19 nt, Homo sapiens
  misc_RNA (1)...(19): siRNA sense strand
gacuacagagccggugaua

SEQ ID NO: 466177 - RNA, 19 nt, Homo sapiens
  misc_RNA (1)...(19): siRNA sense strand
ucaaucuaccucgaaauau

SEQ ID NO: 466178 - RNA, 19 nt, Homo sapiens
  misc_RNA (1)...(19): siRNA sense strand
uaccagaaucggagaacaa

SEQ ID NO: 466179 - RNA, 19 nt, Homo sapiens
  misc_RNA (1)...(19): siRNA sense strand
ugaccggguuauugaugug

SEQ ID NO: 466180 - RNA, 19 nt, Homo sapiens
  misc_RNA (1)...(19): siRNA sense strand
ggugaccggguuauugaug

SEQ ID NO: 466181 - RNA, 19 nt, Homo sapiens
  misc_RNA (1)...(19): siRNA sense strand
ccguaucacgaauuucuaa

SEQ ID NO: 466182 - RNA, 19 nt, Homo sapiens
  misc_RNA (1)...(19): siRNA sense strand
gaugcuauagcuucugcuu

SEQ ID NO: 466183 - RNA, 19 nt, Homo sapiens
  misc_RNA (1)...(19): siRNA sense strand
agaaucaaucuaccucgaa

SEQ ID NO: 466184 - RNA, 19 nt, Homo sapiens
  misc_RNA (1)...(19): siRNA sense strand
uaccauggcagacagaauc

SEQ ID NO: 466185 - RNA, 19 nt, Homo sapiens
  misc_RNA (1)...(19): siRNA sense strand
ucugaucgggcaaugauga

SEQ ID NO: 466186 - RNA, 19 nt, Homo sapiens
  misc_RNA (1)...(19): siRNA sense strand
caguguggauuugauuaca

SEQ ID NO: 466187 - RNA, 19 nt, Homo sapiens
  misc_RNA (1)...(19): siRNA sense strand
gaaagccucugcagcacuu

SEQ ID NO: 466188 - RNA, 19 nt, Homo sapiens
  misc_RNA (1)...(19): siRNA sense strand
ugaagcaccuggacaagaa

SEQ ID NO: 466189 - RNA, 19 nt, Homo sapiens
  misc_RNA (1)...(19): siRNA sense strand
agaccaaacuggacaagga

SEQ ID NO: 466190 - RNA, 19 nt, Homo sapiens
  misc_RNA (1)...(19): siRNA sense strand
gggauuaauacuucaacua

SEQ ID NO: 466191 - RNA, 19 nt, Homo sapiens
  misc_RNA (1)...(19): siRNA sense strand
cuggagagcuacagaagga

SEQ ID NO: 466192 - RNA, 19 nt, Homo sapiens
  misc_RNA (1)...(19): siRNA sense strand
ucaacuaccugcugcuaca

SEQ ID NO: 466193 - RNA, 19 nt, Homo sapiens
  misc_RNA (1)...(19): siRNA sense strand
caguugggauuaauacuuc

SEQ ID NO: 466194 - RNA, 19 nt, Homo sapiens
  misc_RNA (1)...(19): siRNA sense strand
ggauuaauacuucaacuac

SEQ ID NO: 466195 - RNA, 19 nt, Homo sapiens
  misc_RNA (1)...(19): siRNA sense strand
gcucagccaguugggauua

SEQ ID NO: 466196 - RNA, 19 nt, Homo sapiens
  misc_RNA (1)...(19): siRNA sense strand
ccaguugggauuaauacuu

SEQ ID NO: 466197 - RNA, 19 nt, Homo sapiens
  misc_RNA (1)...(19): siRNA sense strand
agcagaggcuggagagcua

SEQ ID NO: 466198 - RNA, 19 nt, Homo sapiens
  misc_RNA (1)...(19): siRNA sense strand
gaagcaccuggacaagaaa

SEQ ID NO: 466199 - RNA, 19 nt, Homo sapiens
  misc_RNA (1)...(19): siRNA sense strand
cugcagcacuucugugucu

SEQ ID NO: 466200 - RNA, 19 nt, Homo sapiens
  misc_RNA (1)...(19): siRNA sense strand
uacagaaggaccaccagua

SEQ ID NO: 466201 - RNA, 19 nt, Homo sapiens
  misc_RNA (1)...(19): siRNA sense strand
aacccaaacuccaaagcuu

SEQ ID NO: 466202 - RNA, 19 nt, Homo sapiens
  misc_RNA (1)...(19): siRNA sense strand
acagaaggaccaccaguag

SEQ ID NO: 466203 - RNA, 19 nt, Homo sapiens
  misc_RNA (1)...(19): siRNA sense strand
uaccugcugcuacagauuu

SEQ ID NO: 466204 - RNA, 19 nt, Homo sapiens
  misc_RNA (1)...(19): siRNA sense strand
cagccaguugggauuaaua

SEQ ID NO: 466205 - RNA, 19 nt, Homo sapiens
  misc_RNA (1)...(19): siRNA sense strand
guacagagauacccauugu

SEQ ID NO: 466206 - RNA, 19 nt, Homo sapiens
  misc_RNA (1)...(19): siRNA sense strand
gugcuaagcuccucaaugu

SEQ ID NO: 466207 - RNA, 19 nt, Homo sapiens
  misc_RNA (1)...(19): siRNA sense strand
ggaggugucucugcucuaa

SEQ ID NO: 466208 - RNA, 19 nt, Homo sapiens
  misc_RNA (1)...(19): siRNA sense strand
gacuauggcaucuauguua

SEQ ID NO: 466209 - RNA, 19 nt, Homo sapiens
  misc_RNA (1)...(19): siRNA sense strand
ucaaguacuggcuauauua

SEQ ID NO: 466210 - RNA, 19 nt, Homo sapiens
  misc_RNA (1)...(19): siRNA sense strand
gcuaagcuccucaauguug

SEQ ID NO: 466211 - RNA, 19 nt, Homo sapiens
  misc_RNA (1)...(19): siRNA sense strand
gaacccaaaugugaagaug

SEQ ID NO: 466212 - RNA, 19 nt, Homo sapiens
  misc_RNA (1)...(19): siRNA sense strand
ggcaggagcaccucaagua

SEQ ID NO: 466213 - RNA, 19 nt, Homo sapiens
  misc_RNA (1)...(19): siRNA sense strand
aggagaagaugaugacauu

SEQ ID NO: 466214 - RNA, 19 nt, Homo sapiens
  misc_RNA (1)...(19): siRNA sense strand
gggagacacuauauucaau

SEQ ID NO: 466215 - RNA, 19 nt, Homo sapiens
  misc_RNA (1)...(19): siRNA sense strand
aagcagaacccaaauguga

SEQ ID NO: 466216 - RNA, 19 nt, Homo sapiens
  misc_RNA (1)...(19): siRNA sense strand
ggauucagccuaccuuaug

SEQ ID NO: 466217 - RNA, 19 nt, Homo sapiens
  misc_RNA (1)...(19): siRNA sense strand
caaagcagaacccaaaugu

SEQ ID NO: 466218 - RNA, 19 nt, Homo sapiens
  misc_RNA (1)...(19): siRNA sense strand
gcuccucaauguuggcuuu

SEQ ID NO: 466219 - RNA, 19 nt, Homo sapiens
  misc_RNA (1)...(19): siRNA sense strand
ucagagguuugaccgaauu

SEQ ID NO: 466220 - RNA, 19 nt, Homo sapiens
  misc_RNA (1)...(19): siRNA sense strand
gcuggacuauggcaucuau

SEQ ID NO: 466221 - RNA, 19 nt, Homo sapiens
  misc_RNA (1)...(19): siRNA sense strand
gaauugcacacacaaagga

SEQ ID NO: 466222 - RNA, 19 nt, Homo sapiens
  misc_RNA (1)...(19): siRNA sense strand
ucacagccacggcacauuu

SEQ ID NO: 466223 - RNA, 19 nt, Homo sapiens
  misc_RNA (1)...(19): siRNA sense strand
gcaaagcagaacccaaaug

SEQ ID NO: 466224 - RNA, 19 nt, Homo sapiens
  misc_RNA (1)...(19): siRNA sense strand
ccaugcugauugaguuuaa

SEQ ID NO: 466225 - RNA, 19 nt, Homo sapiens
  misc_RNA (1)...(19): siRNA sense strand
gcaucuauguuaucaacca

SEQ ID NO: 466226 - RNA, 19 nt, Homo sapiens
  misc_RNA (1)...(19): siRNA sense strand
gcgucacccucguuuacua

SEQ ID NO: 466227 - RNA, 19 nt, Homo sapiens
  misc_RNA (1)...(19): siRNA sense strand
acaaugcucucugaugguu

SEQ ID NO: 466228 - RNA, 19 nt, Homo sapiens
  misc_RNA (1)...(19): siRNA sense strand
uggcaaagcagaacccaaa

SEQ ID NO: 466229 - RNA, 19 nt, Homo sapiens
  misc_RNA (1)...(19): siRNA sense strand
ggugcuggauguacagaga

SEQ ID NO: 466230 - RNA, 19 nt, Homo sapiens
  misc_RNA (1)...(19): siRNA sense strand
gucgggaggugucgcauga

SEQ ID NO: 466231 - RNA, 19 nt, Homo sapiens
  misc_RNA (1)...(19): siRNA sense strand
gucuauaucucgcccaaau

SEQ ID NO: 466232 - RNA, 19 nt, Homo sapiens
  misc_RNA (1)...(19): siRNA sense strand
gagaagaugaugacauuuu

SEQ ID NO: 466233 - RNA, 19 nt, Homo sapiens
  misc_RNA (1)...(19): siRNA sense strand
ggacuauggcaucuauguu

SEQ ID NO: 466234 - RNA, 19 nt, Homo sapiens
  misc_RNA (1)...(19): siRNA sense strand
aauguuggcuuucaagaag

SEQ ID NO: 466235 - RNA, 19 nt, Homo sapiens
  misc_RNA (1)...(19): siRNA sense strand
caaguacuggcuauauuau

SEQ ID NO: 466236 - RNA, 19 nt, Homo sapiens
  misc_RNA (1)...(19): siRNA sense strand
gauucagccuaccuuaugu

SEQ ID NO: 466237 - RNA, 19 nt, Homo sapiens
  misc_RNA (1)...(19): siRNA sense strand
guacuggcuauauuauuug

SEQ ID NO: 466238 - RNA, 19 nt, Homo sapiens
  misc_RNA (1)...(19): siRNA sense strand
caauguuggcuuucaagaa

SEQ ID NO: 466239 - RNA, 19 nt, Homo sapiens
  misc_RNA (1)...(19): siRNA sense strand
caacaguuucuaaccauca

SEQ ID NO: 466240 - RNA, 19 nt, Homo sapiens
  misc_RNA (1)...(19): siRNA sense strand
caauggauaaguuuggauu

SEQ ID NO: 466241 - RNA, 19 nt, Homo sapiens
  misc_RNA (1)...(19): siRNA sense strand
cucaaguacuggcuauauu

SEQ ID NO: 466242 - RNA, 19 nt, Homo sapiens
  misc_RNA (1)...(19): siRNA sense strand
ugaacucacucaccuacca

SEQ ID NO: 466243 - RNA, 19 nt, Homo sapiens
  misc_RNA (1)...(19): siRNA sense strand
ugucucugcucuaaguaaa

SEQ ID NO: 466244 - RNA, 19 nt, Homo sapiens
  misc_RNA (1)...(19): siRNA sense strand
gagacacuauauucaaucg

SEQ ID NO: 466245 - RNA, 19 nt, Homo sapiens
  misc_RNA (1)...(19): siRNA sense strand
ugacuacaccugcuuugug

SEQ ID NO: 466246 - RNA, 19 nt, Homo sapiens
  misc_RNA (1)...(19): siRNA sense strand
gcagaacccaaaugugaag

SEQ ID NO: 466247 - RNA, 19 nt, Homo sapiens
  misc_RNA (1)...(19): siRNA sense strand
ggagacacuauauucaauc

SEQ ID NO: 466248 - RNA, 19 nt, Homo sapiens
  misc_RNA (1)...(19): siRNA sense strand
cagccuaccuuauguucag

SEQ ID NO: 466249 - RNA, 19 nt, Homo sapiens
  misc_RNA (1)...(19): siRNA sense strand
uauggcaucuauguuauca

SEQ ID NO: 466250 - RNA, 19 nt, Homo sapiens
  misc_RNA (1)...(19): siRNA sense strand
ugaccgaauugcacacaca

SEQ ID NO: 466251 - RNA, 19 nt, Homo sapiens
  misc_RNA (1)...(19): siRNA sense strand
uauauucaaucgugcuaag

SEQ ID NO: 466252 - RNA, 19 nt, Homo sapiens
  misc_RNA (1)...(19): siRNA sense strand
acuauggcaucuauguuau

SEQ ID NO: 466253 - RNA, 19 nt, Homo sapiens
  misc_RNA (1)...(19): siRNA sense strand
ggagaagaugaugacauuu

SEQ ID NO: 466254 - RNA, 19 nt, Homo sapiens
  misc_RNA (1)...(19): siRNA sense strand
ccucaauguuggcuuucaa

SEQ ID NO: 466255 - RNA, 19 nt, Homo sapiens
  misc_RNA (1)...(19): siRNA sense strand
ccguugcaauggauaaguu

SEQ ID NO: 466256 - RNA, 19 nt, Homo sapiens
  misc_RNA (1)...(19): siRNA sense strand
gcugauugaguuuaacaug

SEQ ID NO: 466257 - RNA, 19 nt, Homo sapiens
  misc_RNA (1)...(19): siRNA sense strand
aaugcucucugaugguuug

SEQ ID NO: 466258 - RNA, 19 nt, Homo sapiens
  misc_RNA (1)...(19): siRNA sense strand
gaggagaagaugaugacau

SEQ ID NO: 466259 - RNA, 19 nt, Homo sapiens
  misc_RNA (1)...(19): siRNA sense strand
uggcaucuauguuaucaac

SEQ ID NO: 466260 - RNA, 19 nt, Homo sapiens
  misc_RNA (1)...(19): siRNA sense strand
cgucugcgcucugcaccuu

SEQ ID NO: 466261 - RNA, 19 nt, Homo sapiens
  misc_RNA (1)...(19): siRNA sense strand
gcaggagcaccucaaguac

SEQ ID NO: 466262 - RNA, 19 nt, Homo sapiens
  misc_RNA (1)...(19): siRNA sense strand
ggcgggagacacuauauuc

SEQ ID NO: 466263 - RNA, 19 nt, Homo sapiens
  misc_RNA (1)...(19): siRNA sense strand
gcgggagacacuauauuca

SEQ ID NO: 466264 - RNA, 19 nt, Homo sapiens
  misc_RNA (1)...(19): siRNA sense strand
ccaaaucacaguggacauc

SEQ ID NO: 466265 - RNA, 19 nt, Homo sapiens
  misc_RNA (1)...(19): siRNA sense strand
aggagcaccucaaguacug

SEQ ID NO: 466266 - RNA, 19 nt, Homo sapiens
  misc_RNA (1)...(19): siRNA sense strand
cgggagacacuauauucaa

SEQ ID NO: 466267 - RNA, 19 nt, Homo sapiens
  misc_RNA (1)...(19): siRNA sense strand
ccucaaguacuggcuauau

SEQ ID NO: 466268 - RNA, 19 nt, Homo sapiens
  misc_RNA (1)...(19): siRNA sense strand
caugauccgccacucaaga

SEQ ID NO: 466269 - RNA, 19 nt, Homo sapiens
  misc_RNA (1)...(19): siRNA sense strand
ccaggcgggagacacuaua

SEQ ID NO: 466270 - RNA, 19 nt, Homo sapiens
  misc_RNA (1)...(19): siRNA sense strand
ugcuggauguacagagaua

SEQ ID NO: 466271 - RNA, 19 nt, Homo sapiens
  misc_RNA (1)...(19): siRNA sense strand
gcucucugaugguuugaac

SEQ ID NO: 466272 - RNA, 19 nt, Homo sapiens
  misc_RNA (1)...(19): siRNA sense strand
aacaacaguuucuaaccau

SEQ ID NO: 466273 - RNA, 19 nt, Homo sapiens
  misc_RNA (1)...(19): siRNA sense strand
caccucaaguacuggcuau

SEQ ID NO: 466274 - RNA, 19 nt, Homo sapiens
  misc_RNA (1)...(19): siRNA sense strand
ucucugcucuaaguaaaca

SEQ ID NO: 466275 - RNA, 19 nt, Homo sapiens
  misc_RNA (1)...(19): siRNA sense strand
cgggaggugucgcaugauc

SEQ ID NO: 466276 - RNA, 19 nt, Homo sapiens
  misc_RNA (1)...(19): siRNA sense strand
accuggagcucguggcaaa

SEQ ID NO: 466277 - RNA, 19 nt, Homo sapiens
  misc_RNA (1)...(19): siRNA sense strand
gcucuaaguaaacaacagu

SEQ ID NO: 466278 - RNA, 19 nt, Homo sapiens
  misc_RNA (1)...(19): siRNA sense strand
gcacacacaaaggagacaa

SEQ ID NO: 466279 - RNA, 19 nt, Homo sapiens
  misc_RNA (1)...(19): siRNA sense strand
caucaauggauuuccuaau

SEQ ID NO: 466280 - RNA, 19 nt, Homo sapiens
  misc_RNA (1)...(19): siRNA sense strand
gacugcgucucuccucaca

SEQ ID NO: 466281 - RNA, 19 nt, Homo sapiens
  misc_RNA (1)...(19): siRNA sense strand
cccauuguauacccaaauc

SEQ ID NO: 466282 - RNA, 19 nt, Homo sapiens
  misc_RNA (1)...(19): siRNA sense strand
gcaauggauaaguuuggau

SEQ ID NO: 466283 - RNA, 19 nt, Homo sapiens
  misc_RNA (1)...(19): siRNA sense strand
ggacugaucuugucuacuu

SEQ ID NO: 466284 - RNA, 19 nt, Homo sapiens
  misc_RNA (1)...(19): siRNA sense strand
cgagugaucugugacaaua

SEQ ID NO: 466285 - RNA, 19 nt, Homo sapiens
  misc_RNA (1)...(19): siRNA sense strand
ugacaacucuccagauuac

SEQ ID NO: 466286 - RNA, 19 nt, Homo sapiens
  misc_RNA (1)...(19): siRNA sense strand
ggcgugcacucucagauuu

SEQ ID NO: 466287 - RNA, 19 nt, Homo sapiens
  misc_RNA (1)...(19): siRNA sense strand
gaacagacgguugugaaau

SEQ ID NO: 466288 - RNA, 19 nt, Homo sapiens
  misc_RNA (1)...(19): siRNA sense strand
gggcacgagugaucuguga

SEQ ID NO: 466289 - RNA, 19 nt, Homo sapiens
  misc_RNA (1)...(19): siRNA sense strand
gugacaauaucccugguuu

SEQ ID NO: 466290 - RNA, 19 nt, Homo sapiens
  misc_RNA (1)...(19): siRNA sense strand
ggaacagacgguugugaaa

SEQ ID NO: 466291 - RNA, 19 nt, Homo sapiens
  misc_RNA (1)...(19): siRNA sense strand
caccaccgcuggaacugua

SEQ ID NO: 466292 - RNA, 19 nt, Homo sapiens
  misc_RNA (1)...(19): siRNA sense strand
gagagugucagcaccaauu

SEQ ID NO: 466293 - RNA, 19 nt, Homo sapiens
  misc_RNA (1)...(19): siRNA sense strand
ccaagauggugccaacuuc

SEQ ID NO: 466294 - RNA, 19 nt, Homo sapiens
  misc_RNA (1)...(19): siRNA sense strand
ggccgugucugcagcaaga

SEQ ID NO: 466295 - RNA, 19 nt, Homo sapiens
  misc_RNA (1)...(19): siRNA sense strand
uuugacaacucuccagauu

SEQ ID NO: 466296 - RNA, 19 nt, Homo sapiens
  misc_RNA (1)...(19): siRNA sense strand
gcuguacggugcaaggaau

SEQ ID NO: 466297 - RNA, 19 nt, Homo sapiens
  misc_RNA (1)...(19): siRNA sense strand
agaggcagcuuuuguauau

SEQ ID NO: 466298 - RNA, 19 nt, Homo sapiens
  misc_RNA (1)...(19): siRNA sense strand
ccaaggagaagaggcuuaa

SEQ ID NO: 466299 - RNA, 19 nt, Homo sapiens
  misc_RNA (1)...(19): siRNA sense strand
uucugaagcuggaguguaa

SEQ ID NO: 466300 - RNA, 19 nt, Homo sapiens
  misc_RNA (1)...(19): siRNA sense strand
gacaauaucccugguuugg

SEQ ID NO: 466301 - RNA, 19 nt, Homo sapiens
  misc_RNA (1)...(19): siRNA sense strand
uaagugccauggcgugagu

SEQ ID NO: 466302 - RNA, 19 nt, Homo sapiens
  misc_RNA (1)...(19): siRNA sense strand
ccacuggugcugugcugua

SEQ ID NO: 466303 - RNA, 19 nt, Homo sapiens
  misc_RNA (1)...(19): siRNA sense strand
ggagaagaggcuuaaggau

SEQ ID NO: 466304 - RNA, 19 nt, Homo sapiens
  misc_RNA (1)...(19): siRNA sense strand
agacgguugugaaaucaug

SEQ ID NO: 466305 - RNA, 19 nt, Homo sapiens
  misc_RNA (1)...(19): siRNA sense strand
aacagacgguugugaaauc

SEQ ID NO: 466306 - RNA, 19 nt, Homo sapiens
  misc_RNA (1)...(19): siRNA sense strand
gcacgagugaucugugaca

SEQ ID NO: 466307 - RNA, 19 nt, Homo sapiens
  misc_RNA (1)...(19): siRNA sense strand
ccucaugaacuuacauaau

SEQ ID NO: 466308 - RNA, 19 nt, Homo sapiens
  misc_RNA (1)...(19): siRNA sense strand
gacugaucuugucuacuuu

SEQ ID NO: 466309 - RNA, 19 nt, Homo sapiens
  misc_RNA (1)...(19): siRNA sense strand
gcaaggaaugcagaaauac

SEQ ID NO: 466310 - RNA, 19 nt, Homo sapiens
  misc_RNA (1)...(19): siRNA sense strand
caagauggugccaacuuca

SEQ ID NO: 466311 - RNA, 19 nt, Homo sapiens
  misc_RNA (1)...(19): siRNA sense strand
acucgagucacccguguua

SEQ ID NO: 466312 - RNA, 19 nt, Homo sapiens
  misc_RNA (1)...(19): siRNA sense strand
cgugucaugcucagaagua

SEQ ID NO: 466313 - RNA, 19 nt, Homo sapiens
  misc_RNA (1)...(19): siRNA sense strand
gccaaggagaagaggcuua

SEQ ID NO: 466314 - RNA, 19 nt, Homo sapiens
  misc_RNA (1)...(19): siRNA sense strand
acagacgguugugaaauca

SEQ ID NO: 466315 - RNA, 19 nt, Homo sapiens
  misc_RNA (1)...(19): siRNA sense strand
gagaggcagcuuuuguaua

SEQ ID NO: 466316 - RNA, 19 nt, Homo sapiens
  misc_RNA (1)...(19): siRNA sense strand
caacucuccagauuacugu

SEQ ID NO: 466317 - RNA, 19 nt, Homo sapiens
  misc_RNA (1)...(19): siRNA sense strand
gcccucaugaacuuacaua

SEQ ID NO: 466318 - RNA, 19 nt, Homo sapiens
  misc_RNA (1)...(19): siRNA sense strand
uagccagggugaacugagu

SEQ ID NO: 466319 - RNA, 19 nt, Homo sapiens
  misc_RNA (1)...(19): siRNA sense strand
ccagugugagugcaaauuc

SEQ ID NO: 466320 - RNA, 19 nt, Homo sapiens
  misc_RNA (1)...(19): siRNA sense strand
agugaucugugacaauauc

SEQ ID NO: 466321 - RNA, 19 nt, Homo sapiens
  misc_RNA (1)...(19): siRNA sense strand
caaggaaugcagaaauacu

SEQ ID NO: 466322 - RNA, 19 nt, Homo sapiens
  misc_RNA (1)...(19): siRNA sense strand
gcuauuacucgcgccugua

SEQ ID NO: 466323 - RNA, 19 nt, Homo sapiens
  misc_RNA (1)...(19): siRNA sense strand
uugacaacucuccagauua

SEQ ID NO: 466324 - RNA, 19 nt, Homo sapiens
  misc_RNA (1)...(19): siRNA sense strand
ggccgugucaugcucagaa

SEQ ID NO: 466325 - RNA, 19 nt, Homo sapiens
  misc_RNA (1)...(19): siRNA sense strand
uggcugcagugacaacauc

SEQ ID NO: 466326 - RNA, 19 nt, Homo sapiens
  misc_RNA (1)...(19): siRNA sense strand
ugacaauaucccugguuug

SEQ ID NO: 466327 - RNA, 19 nt, Homo sapiens
  misc_RNA (1)...(19): siRNA sense strand
ggacugaucuugucuacuu

SEQ ID NO: 466328 - RNA, 19 nt, Homo sapiens
  misc_RNA (1)...(19): siRNA sense strand
cgagugaucugugacaaua

SEQ ID NO: 466329 - RNA, 19 nt, Homo sapiens
  misc_RNA (1)...(19): siRNA sense strand
ugacaacucuccagauuac

SEQ ID NO: 466330 - RNA, 19 nt, Homo sapiens
  misc_RNA (1)...(19): siRNA sense strand
ggcgugcacucucagauuu

SEQ ID NO: 466331 - RNA, 19 nt, Homo sapiens
  misc_RNA (1)...(19): siRNA sense strand
gaacagacgguugugaaau

SEQ ID NO: 466332 - RNA, 19 nt, Homo sapiens
  misc_RNA (1)...(19): siRNA sense strand
gggcacgagugaucuguga

SEQ ID NO: 466333 - RNA, 19 nt, Homo sapiens
  misc_RNA (1)...(19): siRNA sense strand
gugacaauaucccugguuu

SEQ ID NO: 466334 - RNA, 19 nt, Homo sapiens
  misc_RNA (1)...(19): siRNA sense strand
ggaacagacgguugugaaa

SEQ ID NO: 466335 - RNA, 19 nt, Homo sapiens
  misc_RNA (1)...(19): siRNA sense strand
caccaccgcuggaacugua

SEQ ID NO: 466336 - RNA, 19 nt, Homo sapiens
  misc_RNA (1)...(19): siRNA sense strand
gagagugucagcaccaauu

SEQ ID NO: 466337 - RNA, 19 nt, Homo sapiens
  misc_RNA (1)...(19): siRNA sense strand
ccaagauggugccaacuuc

SEQ ID NO: 466338 - RNA, 19 nt, Homo sapiens
  misc_RNA (1)...(19): siRNA sense strand
ggccgugucugcagcaaga

SEQ ID NO: 466339 - RNA, 19 nt, Homo sapiens
  misc_RNA (1)...(19): siRNA sense strand
uuugacaacucuccagauu

SEQ ID NO: 466340 - RNA, 19 nt, Homo sapiens
  misc_RNA (1)...(19): siRNA sense strand
gcuguacggugcaaggaau

SEQ ID NO: 466341 - RNA, 19 nt, Homo sapiens
  misc_RNA (1)...(19): siRNA sense strand
agaggcagcuuuuguauau

SEQ ID NO: 466342 - RNA, 19 nt, Homo sapiens
  misc_RNA (1)...(19): siRNA sense strand
ccaaggagaagaggcuuaa

SEQ ID NO: 466343 - RNA, 19 nt, Homo sapiens
  misc_RNA (1)...(19): siRNA sense strand
uucugaagcuggaguguaa

SEQ ID NO: 466344 - RNA, 19 nt, Homo sapiens
  misc_RNA (1)...(19): siRNA sense strand
gacaauaucccugguuugg

SEQ ID NO: 466345 - RNA, 19 nt, Homo sapiens
  misc_RNA (1)...(19): siRNA sense strand
uaagugccauggcgugagu

SEQ ID NO: 466346 - RNA, 19 nt, Homo sapiens
  misc_RNA (1)...(19): siRNA sense strand
ccacuggugcugugcugua

SEQ ID NO: 466347 - RNA, 19 nt, Homo sapiens
  misc_RNA (1)...(19): siRNA sense strand
ggagaagaggcuuaaggau

SEQ ID NO: 466348 - RNA, 19 nt, Homo sapiens
  misc_RNA (1)...(19): siRNA sense strand
agacgguugugaaaucaug

SEQ ID NO: 466349 - RNA, 19 nt, Homo sapiens
  misc_RNA (1)...(19): siRNA sense strand
aacagacgguugugaaauc

SEQ ID NO: 466350 - RNA, 19 nt, Homo sapiens
  misc_RNA (1)...(19): siRNA sense strand
gcacgagugaucugugaca

SEQ ID NO: 466351 - RNA, 19 nt, Homo sapiens
  misc_RNA (1)...(19): siRNA sense strand
ccucaugaacuuacauaau

SEQ ID NO: 466352 - RNA, 19 nt, Homo sapiens
  misc_RNA (1)...(19): siRNA sense strand
gacugaucuugucuacuuu

SEQ ID NO: 466353 - RNA, 19 nt, Homo sapiens
  misc_RNA (1)...(19): siRNA sense strand
gcaaggaaugcagaaauac

SEQ ID NO: 466354 - RNA, 19 nt, Homo sapiens
  misc_RNA (1)...(19): siRNA sense strand
caagauggugccaacuuca

SEQ ID NO: 466355 - RNA, 19 nt, Homo sapiens
  misc_RNA (1)...(19): siRNA sense strand
acucgagucacccguguua

SEQ ID NO: 466356 - RNA, 19 nt, Homo sapiens
  misc_RNA (1)...(19): siRNA sense strand
cgugucaugcucagaagua

SEQ ID NO: 466357 - RNA, 19 nt, Homo sapiens
  misc_RNA (1)...(19): siRNA sense strand
gccaaggagaagaggcuua

SEQ ID NO: 466358 - RNA, 19 nt, Homo sapiens
  misc_RNA (1)...(19): siRNA sense strand
acagacgguugugaaauca

SEQ ID NO: 466359 - RNA, 19 nt, Homo sapiens
  misc_RNA (1)...(19): siRNA sense strand
gagaggcagcuuuuguaua

SEQ ID NO: 466360 - RNA, 19 nt, Homo sapiens
  misc_RNA (1)...(19): siRNA sense strand
caacucuccagauuacugu

SEQ ID NO: 466361 - RNA, 19 nt, Homo sapiens
  misc_RNA (1)...(19): siRNA sense strand
gcccucaugaacuuacaua

SEQ ID NO: 466362 - RNA, 19 nt, Homo sapiens
  misc_RNA (1)...(19): siRNA sense strand
uagccagggugaacugagu

SEQ ID NO: 466363 - RNA, 19 nt, Homo sapiens
  misc_RNA (1)...(19): siRNA sense strand
ccagugugagugcaaauuc

SEQ ID NO: 466364 - RNA, 19 nt, Homo sapiens
  misc_RNA (1)...(19): siRNA sense strand
agugaucugugacaauauc

SEQ ID NO: 466365 - RNA, 19 nt, Homo sapiens
  misc_RNA (1)...(19): siRNA sense strand
caaggaaugcagaaauacu

SEQ ID NO: 466366 - RNA, 19 nt, Homo sapiens
  misc_RNA (1)...(19): siRNA sense strand
gcuauuacucgcgccugua

SEQ ID NO: 466367 - RNA, 19 nt, Homo sapiens
  misc_RNA (1)...(19): siRNA sense strand
uugacaacucuccagauua

SEQ ID NO: 466368 - RNA, 19 nt, Homo sapiens
  misc_RNA (1)...(19): siRNA sense strand
ggccgugucaugcucagaa

SEQ ID NO: 466369 - RNA, 19 nt, Homo sapiens
  misc_RNA (1)...(19): siRNA sense strand
uggcugcagugacaacauc

SEQ ID NO: 466370 - RNA, 19 nt, Homo sapiens
  misc_RNA (1)...(19): siRNA sense strand
ugacaauaucccugguuug

SEQ ID NO: 466371 - RNA, 19 nt, Homo sapiens
  misc_RNA (1)...(19): siRNA sense strand
ggacugaucuugucuacuu

SEQ ID NO: 466372 - RNA, 19 nt, Homo sapiens
  misc_RNA (1)...(19): siRNA sense strand
cgagugaucugugacaaua

SEQ ID NO: 466373 - RNA, 19 nt, Homo sapiens
  misc_RNA (1)...(19): siRNA sense strand
ugacaacucuccagauuac

SEQ ID NO: 466374 - RNA, 19 nt, Homo sapiens
  misc_RNA (1)...(19): siRNA sense strand
ggcgugcacucucagauuu

SEQ ID NO: 466375 - RNA, 19 nt, Homo sapiens
  misc_RNA (1)...(19): siRNA sense strand
gaacagacgguugugaaau

SEQ ID NO: 466376 - RNA, 19 nt, Homo sapiens
  misc_RNA (1)...(19): siRNA sense strand
gggcacgagugaucuguga

SEQ ID NO: 466377 - RNA, 19 nt, Homo sapiens
  misc_RNA (1)...(19): siRNA sense strand
gugacaauaucccugguuu

SEQ ID NO: 466378 - RNA, 19 nt, Homo sapiens
  misc_RNA (1)...(19): siRNA sense strand
ggaacagacgguugugaaa

SEQ ID NO: 466379 - RNA, 19 nt, Homo sapiens
  misc_RNA (1)...(19): siRNA sense strand
caccaccgcuggaacugua

SEQ ID NO: 466380 - RNA, 19 nt, Homo sapiens
  misc_RNA (1)...(19): siRNA sense strand
gagagugucagcaccaauu

SEQ ID NO: 466381 - RNA, 19 nt, Homo sapiens
  misc_RNA (1)...(19): siRNA sense strand
ccaagauggugccaacuuc

SEQ ID NO: 466382 - RNA, 19 nt, Homo sapiens
  misc_RNA (1)...(19): siRNA sense strand
ggccgugucugcagcaaga

SEQ ID NO: 466383 - RNA, 19 nt, Homo sapiens
  misc_RNA (1)...(19): siRNA sense strand
uuugacaacucuccagauu

SEQ ID NO: 466384 - RNA, 19 nt, Homo sapiens
  misc_RNA (1)...(19): siRNA sense strand
gcuguacggugcaaggaau

SEQ ID NO: 466385 - RNA, 19 nt, Homo sapiens
  misc_RNA (1)...(19): siRNA sense strand
agaggcagcuuuuguauau

SEQ ID NO: 466386 - RNA, 19 nt, Homo sapiens
  misc_RNA (1)...(19): siRNA sense strand
ccaaggagaagaggcuuaa

SEQ ID NO: 466387 - RNA, 19 nt, Homo sapiens
  misc_RNA (1)...(19): siRNA sense strand
uucugaagcuggaguguaa

SEQ ID NO: 466388 - RNA, 19 nt, Homo sapiens
  misc_RNA (1)...(19): siRNA sense strand
gacaauaucccugguuugg

SEQ ID NO: 466389 - RNA, 19 nt, Homo sapiens
  misc_RNA (1)...(19): siRNA sense strand
uaagugccauggcgugagu

SEQ ID NO: 466390 - RNA, 19 nt, Homo sapiens
  misc_RNA (1)...(19): siRNA sense strand
ccacuggugcugugcugua

SEQ ID NO: 466391 - RNA, 19 nt, Homo sapiens
  misc_RNA (1)...(19): siRNA sense strand
ggagaagaggcuuaaggau

SEQ ID NO: 466392 - RNA, 19 nt, Homo sapiens
  misc_RNA (1)...(19): siRNA sense strand
agacgguugugaaaucaug

SEQ ID NO: 466393 - RNA, 19 nt, Homo sapiens
  misc_RNA (1)...(19): siRNA sense strand
aacagacgguugugaaauc

SEQ ID NO: 466394 - RNA, 19 nt, Homo sapiens
  misc_RNA (1)...(19): siRNA sense strand
gcacgagugaucugugaca

SEQ ID NO: 466395 - RNA, 19 nt, Homo sapiens
  misc_RNA (1)...(19): siRNA sense strand
ccucaugaacuuacauaau

SEQ ID NO: 466396 - RNA, 19 nt, Homo sapiens
  misc_RNA (1)...(19): siRNA sense strand
gacugaucuugucuacuuu

SEQ ID NO: 466397 - RNA, 19 nt, Homo sapiens
  misc_RNA (1)...(19): siRNA sense strand
gcaaggaaugcagaaauac

SEQ ID NO: 466398 - RNA, 19 nt, Homo sapiens
  misc_RNA (1)...(19): siRNA sense strand
caagauggugccaacuuca

SEQ ID NO: 466399 - RNA, 19 nt, Homo sapiens
  misc_RNA (1)...(19): siRNA sense strand
acucgagucacccguguua

SEQ ID NO: 466400 - RNA, 19 nt, Homo sapiens
  misc_RNA (1)...(19): siRNA sense strand
cgugucaugcucagaagua

SEQ ID NO: 466401 - RNA, 19 nt, Homo sapiens
  misc_RNA (1)...(19): siRNA sense strand
gccaaggagaagaggcuua

SEQ ID NO: 466402 - RNA, 19 nt, Homo sapiens
  misc_RNA (1)...(19): siRNA sense strand
acagacgguugugaaauca

SEQ ID NO: 466403 - RNA, 19 nt, Homo sapiens
  misc_RNA (1)...(19): siRNA sense strand
gagaggcagcuuuuguaua

SEQ ID NO: 466404 - RNA, 19 nt, Homo sapiens
  misc_RNA (1)...(19): siRNA sense strand
caacucuccagauuacugu

SEQ ID NO: 466405 - RNA, 19 nt, Homo sapiens
  misc_RNA (1)...(19): siRNA sense strand
gcccucaugaacuuacaua

SEQ ID NO: 466406 - RNA, 19 nt, Homo sapiens
  misc_RNA (1)...(19): siRNA sense strand
uagccagggugaacugagu

SEQ ID NO: 466407 - RNA, 19 nt, Homo sapiens
  misc_RNA (1)...(19): siRNA sense strand
ccagugugagugcaaauuc

SEQ ID NO: 466408 - RNA, 19 nt, Homo sapiens
  misc_RNA (1)...(19): siRNA sense strand
agugaucugugacaauauc

SEQ ID NO: 466409 - RNA, 19 nt, Homo sapiens
  misc_RNA (1)...(19): siRNA sense strand
caaggaaugcagaaauacu

SEQ ID NO: 466410 - RNA, 19 nt, Homo sapiens
  misc_RNA (1)...(19): siRNA sense strand
gcuauuacucgcgccugua

SEQ ID NO: 466411 - RNA, 19 nt, Homo sapiens
  misc_RNA (1)...(19): siRNA sense strand
uugacaacucuccagauua

SEQ ID NO: 466412 - RNA, 19 nt, Homo sapiens
  misc_RNA (1)...(19): siRNA sense strand
ggccgugucaugcucagaa

SEQ ID NO: 466413 - RNA, 19 nt, Homo sapiens
  misc_RNA (1)...(19): siRNA sense strand
uggcugcagugacaacauc

SEQ ID NO: 466414 - RNA, 19 nt, Homo sapiens
  misc_RNA (1)...(19): siRNA sense strand
ugacaauaucccugguuug

SEQ ID NO: 466415 - RNA, 19 nt, Homo sapiens
  misc_RNA (1)...(19): siRNA sense strand
ggacugaucuugucuacuu

SEQ ID NO: 466416 - RNA, 19 nt, Homo sapiens
  misc_RNA (1)...(19): siRNA sense strand
cgagugaucugugacaaua

SEQ ID NO: 466417 - RNA, 19 nt, Homo sapiens
  misc_RNA (1)...(19): siRNA sense strand
ugacaacucuccagauuac

SEQ ID NO: 466418 - RNA, 19 nt, Homo sapiens
  misc_RNA (1)...(19): siRNA sense strand
ggcgugcacucucagauuu

SEQ ID NO: 466419 - RNA, 19 nt, Homo sapiens
  misc_RNA (1)...(19): siRNA sense strand
gaacagacgguugugaaau

SEQ ID NO: 466420 - RNA, 19 nt, Homo sapiens
  misc_RNA (1)...(19): siRNA sense strand
gggcacgagugaucuguga

SEQ ID NO: 466421 - RNA, 19 nt, Homo sapiens
  misc_RNA (1)...(19): siRNA sense strand
gugacaauaucccugguuu

SEQ ID NO: 466422 - RNA, 19 nt, Homo sapiens
  misc_RNA (1)...(19): siRNA sense strand
ggaacagacgguugugaaa

SEQ ID NO: 466423 - RNA, 19 nt, Homo sapiens
  misc_RNA (1)...(19): siRNA sense strand
caccaccgcuggaacugua

SEQ ID NO: 466424 - RNA, 19 nt, Homo sapiens
  misc_RNA (1)...(19): siRNA sense strand
gagagugucagcaccaauu

SEQ ID NO: 466425 - RNA, 19 nt, Homo sapiens
  misc_RNA (1)...(19): siRNA sense strand
ccaagauggugccaacuuc

SEQ ID NO: 466426 - RNA, 19 nt, Homo sapiens
  misc_RNA (1)...(19): siRNA sense strand
ggccgugucugcagcaaga

SEQ ID NO: 466427 - RNA, 19 nt, Homo sapiens
  misc_RNA (1)...(19): siRNA sense strand
uuugacaacucuccagauu

SEQ ID NO: 466428 - RNA, 19 nt, Homo sapiens
  misc_RNA (1)...(19): siRNA sense strand
gcuguacggugcaaggaau

SEQ ID NO: 466429 - RNA, 19 nt, Homo sapiens
  misc_RNA (1)...(19): siRNA sense strand
agaggcagcuuuuguauau

SEQ ID NO: 466430 - RNA, 19 nt, Homo sapiens
  misc_RNA (1)...(19): siRNA sense strand
ccaaggagaagaggcuuaa

SEQ ID NO: 466431 - RNA, 19 nt, Homo sapiens
  misc_RNA (1)...(19): siRNA sense strand
uucugaagcuggaguguaa

SEQ ID NO: 466432 - RNA, 19 nt, Homo sapiens
  misc_RNA (1)...(19): siRNA sense strand
gacaauaucccugguuugg

SEQ ID NO: 466433 - RNA, 19 nt, Homo sapiens
  misc_RNA (1)...(19): siRNA sense strand
uaagugccauggcgugagu

SEQ ID NO: 466434 - RNA, 19 nt, Homo sapiens
  misc_RNA (1)...(19): siRNA sense strand
ccacuggugcugugcugua

SEQ ID NO: 466435 - RNA, 19 nt, Homo sapiens
  misc_RNA (1)...(19): siRNA sense strand
ggagaagaggcuuaaggau

SEQ ID NO: 466436 - RNA, 19 nt, Homo sapiens
  misc_RNA (1)...(19): siRNA sense strand
agacgguugugaaaucaug

SEQ ID NO: 466437 - RNA, 19 nt, Homo sapiens
  misc_RNA (1)...(19): siRNA sense strand
aacagacgguugugaaauc

SEQ ID NO: 466438 - RNA, 19 nt, Homo sapiens
  misc_RNA (1)...(19): siRNA sense strand
gcacgagugaucugugaca

SEQ ID NO: 466439 - RNA, 19 nt, Homo sapiens
  misc_RNA (1)...(19): siRNA sense strand
ccucaugaacuuacauaau

SEQ ID NO: 466440 - RNA, 19 nt, Homo sapiens
  misc_RNA (1)...(19): siRNA sense strand
gacugaucuugucuacuuu

SEQ ID NO: 466441 - RNA, 19 nt, Homo sapiens
  misc_RNA (1)...(19): siRNA sense strand
gcaaggaaugcagaaauac

SEQ ID NO: 466442 - RNA, 19 nt, Homo sapiens
  misc_RNA (1)...(19): siRNA sense strand
caagauggugccaacuuca

SEQ ID NO: 466443 - RNA, 19 nt, Homo sapiens
  misc_RNA (1)...(19): siRNA sense strand
acucgagucacccguguua

SEQ ID NO: 466444 - RNA, 19 nt, Homo sapiens
  misc_RNA (1)...(19): siRNA sense strand
cgugucaugcucagaagua

SEQ ID NO: 466445 - RNA, 19 nt, Homo sapiens
  misc_RNA (1)...(19): siRNA sense strand
gccaaggagaagaggcuua

SEQ ID NO: 466446 - RNA, 19 nt, Homo sapiens
  misc_RNA (1)...(19): siRNA sense strand
acagacgguugugaaauca

SEQ ID NO: 466447 - RNA, 19 nt, Homo sapiens
  misc_RNA (1)...(19): siRNA sense strand
gagaggcagcuuuuguaua

SEQ ID NO: 466448 - RNA, 19 nt, Homo sapiens
  misc_RNA (1)...(19): siRNA sense strand
caacucuccagauuacugu

SEQ ID NO: 466449 - RNA, 19 nt, Homo sapiens
  misc_RNA (1)...(19): siRNA sense strand
gcccucaugaacuuacaua

SEQ ID NO: 466450 - RNA, 19 nt, Homo sapiens
  misc_RNA (1)...(19): siRNA sense strand
uagccagggugaacugagu

SEQ ID NO: 466451 - RNA, 19 nt, Homo sapiens
  misc_RNA (1)...(19): siRNA sense strand
ccagugugagugcaaauuc

SEQ ID NO: 466452 - RNA, 19 nt, Homo sapiens
  misc_RNA (1)...(19): siRNA sense strand
agugaucugugacaauauc

SEQ ID NO: 466453 - RNA, 19 nt, Homo sapiens
  misc_RNA (1)...(19): siRNA sense strand
caaggaaugcagaaauacu

SEQ ID NO: 466454 - RNA, 19 nt, Homo sapiens
  misc_RNA (1)...(19): siRNA sense strand
gcuauuacucgcgccugua

SEQ ID NO: 466455 - RNA, 19 nt, Homo sapiens
  misc_RNA (1)...(19): siRNA sense strand
uugacaacucuccagauua

SEQ ID NO: 466456 - RNA, 19 nt, Homo sapiens
  misc_RNA (1)...(19): siRNA sense strand
ggccgugucaugcucagaa

SEQ ID NO: 466457 - RNA, 19 nt, Homo sapiens
  misc_RNA (1)...(19): siRNA sense strand
uggcugcagugacaacauc

SEQ ID NO: 466458 - RNA, 19 nt, Homo sapiens
  misc_RNA (1)...(19): siRNA sense strand
ugacaauaucccugguuug

SEQ ID NO: 466459 - RNA, 19 nt, Homo sapiens
  misc_RNA (1)...(19): siRNA sense strand
caacacagauguacaacua

SEQ ID NO: 466460 - RNA, 19 nt, Homo sapiens
  misc_RNA (1)...(19): siRNA sense strand
gaacaacuucggacucuua

SEQ ID NO: 466461 - RNA, 19 nt, Homo sapiens
  misc_RNA (1)...(19): siRNA sense strand
guaaacaucacacagguua

SEQ ID NO: 466462 - RNA, 19 nt, Homo sapiens
  misc_RNA (1)...(19): siRNA sense strand
caaagcaguuggaucacaa

SEQ ID NO: 466463 - RNA, 19 nt, Homo sapiens
  misc_RNA (1)...(19): siRNA sense strand
ucaagaggaugaccaugaa

SEQ ID NO: 466464 - RNA, 19 nt, Homo sapiens
  misc_RNA (1)...(19): siRNA sense strand
aaggugagcuguuucaaga

SEQ ID NO: 466465 - RNA, 19 nt, Homo sapiens
  misc_RNA (1)...(19): siRNA sense strand
cauguuacuuugccuguuu

SEQ ID NO: 466466 - RNA, 19 nt, Homo sapiens
  misc_RNA (1)...(19): siRNA sense strand
uguaugugcuguauaugua

SEQ ID NO: 466467 - RNA, 19 nt, Homo sapiens
  misc_RNA (1)...(19): siRNA sense strand
uacaaacacuggcgugauu

SEQ ID NO: 466468 - RNA, 19 nt, Homo sapiens
  misc_RNA (1)...(19): siRNA sense strand
caacccaggugauacuguu

SEQ ID NO: 466469 - RNA, 19 nt, Homo sapiens
  misc_RNA (1)...(19): siRNA sense strand
caacuucggacucuuaaau

SEQ ID NO: 466470 - RNA, 19 nt, Homo sapiens
  misc_RNA (1)...(19): siRNA sense strand
ucacacagguuauugaacu

SEQ ID NO: 466471 - RNA, 19 nt, Homo sapiens
  misc_RNA (1)...(19): siRNA sense strand
acacagauguacaacuaga

SEQ ID NO: 466472 - RNA, 19 nt, Homo sapiens
  misc_RNA (1)...(19): siRNA sense strand
gaaaagagggacugccaua

SEQ ID NO: 466473 - RNA, 19 nt, Homo sapiens
  misc_RNA (1)...(19): siRNA sense strand
ucacaaggacgagucauaa

SEQ ID NO: 466474 - RNA, 19 nt, Homo sapiens
  misc_RNA (1)...(19): siRNA sense strand
ggagcucggucacuguguu

SEQ ID NO: 466475 - RNA, 19 nt, Homo sapiens
  misc_RNA (1)...(19): siRNA sense strand
guagaagaguggccagaca

SEQ ID NO: 466476 - RNA, 19 nt, Homo sapiens
  misc_RNA (1)...(19): siRNA sense strand
cgugauucauggaaauuaa

SEQ ID NO: 466477 - RNA, 19 nt, Homo sapiens
  misc_RNA (1)...(19): siRNA sense strand
acaacuagauucucaagag

SEQ ID NO: 466478 - RNA, 19 nt, Homo sapiens
  misc_RNA (1)...(19): siRNA sense strand
uaacauucccaaaggauau

SEQ ID NO: 466479 - RNA, 19 nt, Homo sapiens
  misc_RNA (1)...(19): siRNA sense strand
ugucagagauugguugguu

SEQ ID NO: 466480 - RNA, 19 nt, Homo sapiens
  misc_RNA (1)...(19): siRNA sense strand
gaacuugcucuuucaugug

SEQ ID NO: 466481 - RNA, 19 nt, Homo sapiens
  misc_RNA (1)...(19): siRNA sense strand
caaggacgagucauaaguu

SEQ ID NO: 466482 - RNA, 19 nt, Homo sapiens
  misc_RNA (1)...(19): siRNA sense strand
accaugaucuggcuaagaa

SEQ ID NO: 466483 - RNA, 19 nt, Homo sapiens
  misc_RNA (1)...(19): siRNA sense strand
gcaguagcuuuggauaugu

SEQ ID NO: 466484 - RNA, 19 nt, Homo sapiens
  misc_RNA (1)...(19): siRNA sense strand
ggccagacaauguggauuu

SEQ ID NO: 466485 - RNA, 19 nt, Homo sapiens
  misc_RNA (1)...(19): siRNA sense strand
gcucggaaccaauucauuc

SEQ ID NO: 466486 - RNA, 19 nt, Homo sapiens
  misc_RNA (1)...(19): siRNA sense strand
gaaggucaaaccacaacuu

SEQ ID NO: 466487 - RNA, 19 nt, Homo sapiens
  misc_RNA (1)...(19): siRNA sense strand
ccugugaacuugcucuuuc

SEQ ID NO: 466488 - RNA, 19 nt, Homo sapiens
  misc_RNA (1)...(19): siRNA sense strand
gccauaacauucccaaagg

SEQ ID NO: 466489 - RNA, 19 nt, Homo sapiens
  misc_RNA (1)...(19): siRNA sense strand
ggaauucgcaccugugaac

SEQ ID NO: 466490 - RNA, 19 nt, Homo sapiens
  misc_RNA (1)...(19): siRNA sense strand
cgcaguagcuuuggauaug

SEQ ID NO: 466491 - RNA, 19 nt, Homo sapiens
  misc_RNA (1)...(19): siRNA sense strand
ggaaauuaagucauguaga

SEQ ID NO: 466492 - RNA, 19 nt, Homo sapiens
  misc_RNA (1)...(19): siRNA sense strand
ccugcgagauggagaaaga

SEQ ID NO: 466493 - RNA, 19 nt, Homo sapiens
  misc_RNA (1)...(19): siRNA sense strand
aagagggacugccauaaca

SEQ ID NO: 466494 - RNA, 19 nt, Homo sapiens
  misc_RNA (1)...(19): siRNA sense strand
aaacaucacacagguuauu

SEQ ID NO: 466495 - RNA, 19 nt, Homo sapiens
  misc_RNA (1)...(19): siRNA sense strand
uaagcauggugguguaugu

SEQ ID NO: 466496 - RNA, 19 nt, Homo sapiens
  misc_RNA (1)...(19): siRNA sense strand
aaggacgagucauaaguuu

SEQ ID NO: 466497 - RNA, 19 nt, Homo sapiens
  misc_RNA (1)...(19): siRNA sense strand
ccauaacauucccaaagga

SEQ ID NO: 466498 - RNA, 19 nt, Homo sapiens
  misc_RNA (1)...(19): siRNA sense strand
ggaugaccaugaagaaucg

SEQ ID NO: 466499 - RNA, 19 nt, Homo sapiens
  misc_RNA (1)...(19): siRNA sense strand
gaaaagaccaccaugaucu

SEQ ID NO: 466500 - RNA, 19 nt, Homo sapiens
  misc_RNA (1)...(19): siRNA sense strand
ggccagccuuggaagacua

SEQ ID NO: 466501 - RNA, 19 nt, Homo sapiens
  misc_RNA (1)...(19): siRNA sense strand
caaaccacaacuuaacuga

SEQ ID NO: 466502 - RNA, 19 nt, Homo sapiens
  misc_RNA (1)...(19): siRNA sense strand
aaagauaagcgaggucauu

SEQ ID NO: 466503 - RNA, 19 nt, Homo sapiens
  misc_RNA (1)...(19): siRNA sense strand
gagcaaccgaagacauaaa

SEQ ID NO: 466504 - RNA, 19 nt, Homo sapiens
  misc_RNA (1)...(19): siRNA sense strand
gaagaguggccagacaaug

SEQ ID NO: 466505 - RNA, 19 nt, Homo sapiens
  misc_RNA (1)...(19): siRNA sense strand
gagggacugccauaacauu

SEQ ID NO: 466506 - RNA, 19 nt, Homo sapiens
  misc_RNA (1)...(19): siRNA sense strand
ggagggagaaacaaaauuu

SEQ ID NO: 466507 - RNA, 19 nt, Homo sapiens
  misc_RNA (1)...(19): siRNA sense strand
ggucaaaccacaacuuaac

SEQ ID NO: 466508 - RNA, 19 nt, Homo sapiens
  misc_RNA (1)...(19): siRNA sense strand
cuauguugcuagaccagua

SEQ ID NO: 466509 - RNA, 19 nt, Homo sapiens
  misc_RNA (1)...(19): siRNA sense strand
aguuaaaggugagcuguuu

SEQ ID NO: 466510 - RNA, 19 nt, Homo sapiens
  misc_RNA (1)...(19): siRNA sense strand
gcgaggucauugucagaga

SEQ ID NO: 466511 - RNA, 19 nt, Homo sapiens
  misc_RNA (1)...(19): siRNA sense strand
uuuaacauuugacgcagua

SEQ ID NO: 466512 - RNA, 19 nt, Homo sapiens
  misc_RNA (1)...(19): siRNA sense strand
ggccagauacugaggaguu

SEQ ID NO: 466513 - RNA, 19 nt, Homo sapiens
  misc_RNA (1)...(19): siRNA sense strand
uucggacucuuaaauagua

SEQ ID NO: 466514 - RNA, 19 nt, Homo sapiens
  misc_RNA (1)...(19): siRNA sense strand
guuaaauccucauguuacu

SEQ ID NO: 466515 - RNA, 19 nt, Homo sapiens
  misc_RNA (1)...(19): siRNA sense strand
ugguguaugugcuguauau

SEQ ID NO: 466516 - RNA, 19 nt, Homo sapiens
  misc_RNA (1)...(19): siRNA sense strand
ggagcaaccgaagacauaa

SEQ ID NO: 466517 - RNA, 19 nt, Homo sapiens
  misc_RNA (1)...(19): siRNA sense strand
gauaagcgaggucauuguc

SEQ ID NO: 466518 - RNA, 19 nt, Homo sapiens
  misc_RNA (1)...(19): siRNA sense strand
aaggucaaaccacaacuua

SEQ ID NO: 466519 - RNA, 19 nt, Homo sapiens
  misc_RNA (1)...(19): siRNA sense strand
caagagaaaauuggaguua

SEQ ID NO: 466520 - RNA, 19 nt, Homo sapiens
  misc_RNA (1)...(19): siRNA sense strand
aggagcaaccgaagacaua

SEQ ID NO: 466521 - RNA, 19 nt, Homo sapiens
  misc_RNA (1)...(19): siRNA sense strand
ggugguguaugugcuguau

SEQ ID NO: 466522 - RNA, 19 nt, Homo sapiens
  misc_RNA (1)...(19): siRNA sense strand
ccagagagagacccuuuca

SEQ ID NO: 466523 - RNA, 19 nt, Homo sapiens
  misc_RNA (1)...(19): siRNA sense strand
aaucaacacagauguacaa

SEQ ID NO: 466524 - RNA, 19 nt, Homo sapiens
  misc_RNA (1)...(19): siRNA sense strand
gucagagauugguugguuu

SEQ ID NO: 466525 - RNA, 19 nt, Homo sapiens
  misc_RNA (1)...(19): siRNA sense strand
caucacacagguuauugaa

SEQ ID NO: 466526 - RNA, 19 nt, Homo sapiens
  misc_RNA (1)...(19): siRNA sense strand
agucauaaguuuugaggua

SEQ ID NO: 466527 - RNA, 19 nt, Homo sapiens
  misc_RNA (1)...(19): siRNA sense strand
ggacgagucauaaguuuug

SEQ ID NO: 466528 - RNA, 19 nt, Homo sapiens
  misc_RNA (1)...(19): siRNA sense strand
caguagcuuuggauauguu

SEQ ID NO: 466529 - RNA, 19 nt, Homo sapiens
  misc_RNA (1)...(19): siRNA sense strand
gcagucccguucggcaaga

SEQ ID NO: 466530 - RNA, 19 nt, Homo sapiens
  misc_RNA (1)...(19): siRNA sense strand
uggcuaagaagaauuacaa

SEQ ID NO: 466531 - RNA, 19 nt, Homo sapiens
  misc_RNA (1)...(19): siRNA sense strand
aacuugcucuuucauguga

SEQ ID NO: 466532 - RNA, 19 nt, Homo sapiens
  misc_RNA (1)...(19): siRNA sense strand
ggaguuccuucgguaagca

SEQ ID NO: 466533 - RNA, 19 nt, Homo sapiens
  misc_RNA (1)...(19): siRNA sense strand
acagauguacaacuagauu

SEQ ID NO: 466534 - RNA, 19 nt, Homo sapiens
  misc_RNA (1)...(19): siRNA sense strand
cgaggucauugucagagau

SEQ ID NO: 466535 - RNA, 19 nt, Homo sapiens
  misc_RNA (1)...(19): siRNA sense strand
gcgugauucauggaaauua

SEQ ID NO: 466536 - RNA, 19 nt, Homo sapiens
  misc_RNA (1)...(19): siRNA sense strand
ucauuucccuauguugcua

SEQ ID NO: 466537 - RNA, 19 nt, Homo sapiens
  misc_RNA (1)...(19): siRNA sense strand
gaggaugaccaugaagaau

SEQ ID NO: 466538 - RNA, 19 nt, Homo sapiens
  misc_RNA (1)...(19): siRNA sense strand
ucuuaagcaugguggugua

SEQ ID NO: 466539 - RNA, 19 nt, Homo sapiens
  misc_RNA (1)...(19): siRNA sense strand
cugagcaucucggacauug

SEQ ID NO: 466540 - RNA, 19 nt, Homo sapiens
  misc_RNA (1)...(19): siRNA sense strand
gagggagaaacaaaauuua

SEQ ID NO: 466541 - RNA, 19 nt, Homo sapiens
  misc_RNA (1)...(19): siRNA sense strand
uggaucauuucccuauguu

SEQ ID NO: 466542 - RNA, 19 nt, Homo sapiens
  misc_RNA (1)...(19): siRNA sense strand
guacaacuagauucucaag

SEQ ID NO: 466543 - RNA, 19 nt, Homo sapiens
  misc_RNA (1)...(19): siRNA sense strand
cagacaauguggauuuuau

SEQ ID NO: 466544 - RNA, 19 nt, Homo sapiens
  misc_RNA (1)...(19): siRNA sense strand
aagaguggccagacaaugu

SEQ ID NO: 466545 - RNA, 19 nt, Homo sapiens
  misc_RNA (1)...(19): siRNA sense strand
gcagguccucgccuagaga

SEQ ID NO: 466546 - RNA, 19 nt, Homo sapiens
  misc_RNA (1)...(19): siRNA sense strand
gaucuggcuaagaagaauu

SEQ ID NO: 466547 - RNA, 19 nt, Homo sapiens
  misc_RNA (1)...(19): siRNA sense strand
gaggaaggucaaaccacaa

SEQ ID NO: 466548 - RNA, 19 nt, Homo sapiens
  misc_RNA (1)...(19): siRNA sense strand
ucagagauugguugguuug

SEQ ID NO: 466549 - RNA, 19 nt, Homo sapiens
  misc_RNA (1)...(19): siRNA sense strand
gaggucauugucagagauu

SEQ ID NO: 466550 - RNA, 19 nt, Homo sapiens
  misc_RNA (1)...(19): siRNA sense strand
gccagauacugaggaguuc

SEQ ID NO: 466551 - RNA, 19 nt, Homo sapiens
  misc_RNA (1)...(19): siRNA sense strand
cauugggacuggaugucuu

SEQ ID NO: 466552 - RNA, 19 nt, Homo sapiens
  misc_RNA (1)...(19): siRNA sense strand
gaccaugaagaaucgcauu

SEQ ID NO: 466553 - RNA, 19 nt, Homo sapiens
  misc_RNA (1)...(19): siRNA sense strand
gaaaauuggaguuaaaggu

SEQ ID NO: 466554 - RNA, 19 nt, Homo sapiens
  misc_RNA (1)...(19): siRNA sense strand
cgaggcggcacaaaggaaa

SEQ ID NO: 466555 - RNA, 19 nt, Homo sapiens
  misc_RNA (1)...(19): siRNA sense strand
gggacuggaugucuuucgu

SEQ ID NO: 466556 - RNA, 19 nt, Homo sapiens
  misc_RNA (1)...(19): siRNA sense strand
caaacacuggcgugauuca

SEQ ID NO: 466557 - RNA, 19 nt, Homo sapiens
  misc_RNA (1)...(19): siRNA sense strand
gcuaagaagaauuacaaac

SEQ ID NO: 466558 - RNA, 19 nt, Homo sapiens
  misc_RNA (1)...(19): siRNA sense strand
ggucauacagcuuuucuug

SEQ ID NO: 466559 - RNA, 19 nt, Homo sapiens
  misc_RNA (1)...(19): siRNA sense strand
ggaagaagaucuaaucaua

SEQ ID NO: 466560 - RNA, 19 nt, Homo sapiens
  misc_RNA (1)...(19): siRNA sense strand
gaaauuacuucgauccuua

SEQ ID NO: 466561 - RNA, 19 nt, Homo sapiens
  misc_RNA (1)...(19): siRNA sense strand
gaaaggaugucaagaagga

SEQ ID NO: 466562 - RNA, 19 nt, Homo sapiens
  misc_RNA (1)...(19): siRNA sense strand
ggagaaagcguuuaaagaa

SEQ ID NO: 466563 - RNA, 19 nt, Homo sapiens
  misc_RNA (1)...(19): siRNA sense strand
aaagaugucuggucaagua

SEQ ID NO: 466564 - RNA, 19 nt, Homo sapiens
  misc_RNA (1)...(19): siRNA sense strand
ggaaacaagucuaccaaga

SEQ ID NO: 466565 - RNA, 19 nt, Homo sapiens
  misc_RNA (1)...(19): siRNA sense strand
guacuuggauaucgaaauu

SEQ ID NO: 466566 - RNA, 19 nt, Homo sapiens
  misc_RNA (1)...(19): siRNA sense strand
gguagaagcugaggaagaa

SEQ ID NO: 466567 - RNA, 19 nt, Homo sapiens
  misc_RNA (1)...(19): siRNA sense strand
gguaggagcuauuguggaa

SEQ ID NO: 466568 - RNA, 19 nt, Homo sapiens
  misc_RNA (1)...(19): siRNA sense strand
gcaaagaugacaccaacua

SEQ ID NO: 466569 - RNA, 19 nt, Homo sapiens
  misc_RNA (1)...(19): siRNA sense strand
ugacaaagaugaugacaca

SEQ ID NO: 466570 - RNA, 19 nt, Homo sapiens
  misc_RNA (1)...(19): siRNA sense strand
guagaacuauuccugcuaa

SEQ ID NO: 466571 - RNA, 19 nt, Homo sapiens
  misc_RNA (1)...(19): siRNA sense strand
ucaggaagcuguuaucaau

SEQ ID NO: 466572 - RNA, 19 nt, Homo sapiens
  misc_RNA (1)...(19): siRNA sense strand
gaaaagauguccaugaaau

SEQ ID NO: 466573 - RNA, 19 nt, Homo sapiens
  misc_RNA (1)...(19): siRNA sense strand
acacaaacuuggaggauuu

SEQ ID NO: 466574 - RNA, 19 nt, Homo sapiens
  misc_RNA (1)...(19): siRNA sense strand
gagaaaggaugucaagaag

SEQ ID NO: 466575 - RNA, 19 nt, Homo sapiens
  misc_RNA (1)...(19): siRNA sense strand
ccagaaagauuaaggaaag

SEQ ID NO: 466576 - RNA, 19 nt, Homo sapiens
  misc_RNA (1)...(19): siRNA sense strand
gaaacagauugaugagcua

SEQ ID NO: 466577 - RNA, 19 nt, Homo sapiens
  misc_RNA (1)...(19): siRNA sense strand
caaacgaccuguacuugga

SEQ ID NO: 466578 - RNA, 19 nt, Homo sapiens
  misc_RNA (1)...(19): siRNA sense strand
gaaagaauggugauaagga

SEQ ID NO: 466579 - RNA, 19 nt, Homo sapiens
  misc_RNA (1)...(19): siRNA sense strand
aaacaaaguucaugcagau

SEQ ID NO: 466580 - RNA, 19 nt, Homo sapiens
  misc_RNA (1)...(19): siRNA sense strand
gugaugagauugcuguaaa

SEQ ID NO: 466581 - RNA, 19 nt, Homo sapiens
  misc_RNA (1)...(19): siRNA sense strand
aguaagaccugcugauaaa

SEQ ID NO: 466582 - RNA, 19 nt, Homo sapiens
  misc_RNA (1)...(19): siRNA sense strand
gaaagcguuuaaagaagaa

SEQ ID NO: 466583 - RNA, 19 nt, Homo sapiens
  misc_RNA (1)...(19): siRNA sense strand
ugaagaagaugaagucaca

SEQ ID NO: 466584 - RNA, 19 nt, Homo sapiens
  misc_RNA (1)...(19): siRNA sense strand
gagaggugcucaagacaug

SEQ ID NO: 466585 - RNA, 19 nt, Homo sapiens
  misc_RNA (1)...(19): siRNA sense strand
guaauucagugcuaaauac

SEQ ID NO: 466586 - RNA, 19 nt, Homo sapiens
  misc_RNA (1)...(19): siRNA sense strand
gagaaagcguuuaaagaag

SEQ ID NO: 466587 - RNA, 19 nt, Homo sapiens
  misc_RNA (1)...(19): siRNA sense strand
gaacgcaucacaauucuuc

SEQ ID NO: 466588 - RNA, 19 nt, Homo sapiens
  misc_RNA (1)...(19): siRNA sense strand
caacagugguaaacaacaa

SEQ ID NO: 466589 - RNA, 19 nt, Homo sapiens
  misc_RNA (1)...(19): siRNA sense strand
caauugagguggauagugu

SEQ ID NO: 466590 - RNA, 19 nt, Homo sapiens
  misc_RNA (1)...(19): siRNA sense strand
acaaauccaucuccugaaa

SEQ ID NO: 466591 - RNA, 19 nt, Homo sapiens
  misc_RNA (1)...(19): siRNA sense strand
ggaaaaggcacaaauagua

SEQ ID NO: 466592 - RNA, 19 nt, Homo sapiens
  misc_RNA (1)...(19): siRNA sense strand
cgaagauacugauuaugaa

SEQ ID NO: 466593 - RNA, 19 nt, Homo sapiens
  misc_RNA (1)...(19): siRNA sense strand
cucaagacauggauaauaa

SEQ ID NO: 466594 - RNA, 19 nt, Homo sapiens
  misc_RNA (1)...(19): siRNA sense strand
uaauagcagugaagaagaa

SEQ ID NO: 466595 - RNA, 19 nt, Homo sapiens
  misc_RNA (1)...(19): siRNA sense strand
gaagaaagagagagaaagu

SEQ ID NO: 466596 - RNA, 19 nt, Homo sapiens
  misc_RNA (1)...(19): siRNA sense strand
gaacuuucuucagcaauug

SEQ ID NO: 466597 - RNA, 19 nt, Homo sapiens
  misc_RNA (1)...(19): siRNA sense strand
gcacuccagucauaggaaa

SEQ ID NO: 466598 - RNA, 19 nt, Homo sapiens
  misc_RNA (1)...(19): siRNA sense strand
gcagcagucuucuguaaca

SEQ ID NO: 466599 - RNA, 19 nt, Homo sapiens
  misc_RNA (1)...(19): siRNA sense strand
gaaacaagucuaccaagau

SEQ ID NO: 466600 - RNA, 19 nt, Homo sapiens
  misc_RNA (1)...(19): siRNA sense strand
gcugcaggauacaauguua

SEQ ID NO: 466601 - RNA, 19 nt, Homo sapiens
  misc_RNA (1)...(19): siRNA sense strand
agaaagcguuuaaagaaga

SEQ ID NO: 466602 - RNA, 19 nt, Homo sapiens
  misc_RNA (1)...(19): siRNA sense strand
ggacaacugguuucuauuc

SEQ ID NO: 466603 - RNA, 19 nt, Homo sapiens
  misc_RNA (1)...(19): siRNA sense strand
gaugaaucccucaacauaa

SEQ ID NO: 466604 - RNA, 19 nt, Homo sapiens
  misc_RNA (1)...(19): siRNA sense strand
agaugaagaugaagaagaa

SEQ ID NO: 466605 - RNA, 19 nt, Homo sapiens
  misc_RNA (1)...(19): siRNA sense strand
ugacaccaacuaagaaaua

SEQ ID NO: 466606 - RNA, 19 nt, Homo sapiens
  misc_RNA (1)...(19): siRNA sense strand
aaacuuggaggauuugaua

SEQ ID NO: 466607 - RNA, 19 nt, Homo sapiens
  misc_RNA (1)...(19): siRNA sense strand
gaagagguucgaaguauca

SEQ ID NO: 466608 - RNA, 19 nt, Homo sapiens
  misc_RNA (1)...(19): siRNA sense strand
aaagcagaauuuccaagua

SEQ ID NO: 466609 - RNA, 19 nt, Homo sapiens
  misc_RNA (1)...(19): siRNA sense strand
gcucaagacauggauaaua

SEQ ID NO: 466610 - RNA, 19 nt, Homo sapiens
  misc_RNA (1)...(19): siRNA sense strand
caacuaggguagaugaauc

SEQ ID NO: 466611 - RNA, 19 nt, Homo sapiens
  misc_RNA (1)...(19): siRNA sense strand
ggaauauaauaccaagaga

SEQ ID NO: 466612 - RNA, 19 nt, Homo sapiens
  misc_RNA (1)...(19): siRNA sense strand
aaacaagucuaccaagauc

SEQ ID NO: 466613 - RNA, 19 nt, Homo sapiens
  misc_RNA (1)...(19): siRNA sense strand
uggaaucccugucuuaaau

SEQ ID NO: 466614 - RNA, 19 nt, Homo sapiens
  misc_RNA (1)...(19): siRNA sense strand
agugugagcucaagcagua

SEQ ID NO: 466615 - RNA, 19 nt, Homo sapiens
  misc_RNA (1)...(19): siRNA sense strand
ucaugcagauuugguaaua

SEQ ID NO: 466616 - RNA, 19 nt, Homo sapiens
  misc_RNA (1)...(19): siRNA sense strand
gaaucuugauggugcauau

SEQ ID NO: 466617 - RNA, 19 nt, Homo sapiens
  misc_RNA (1)...(19): siRNA sense strand
caagaagagguucgaagua

SEQ ID NO: 466618 - RNA, 19 nt, Homo sapiens
  misc_RNA (1)...(19): siRNA sense strand
cggcagcagucuucuguaa

SEQ ID NO: 466619 - RNA, 19 nt, Homo sapiens
  misc_RNA (1)...(19): siRNA sense strand
ccgaagauacugauuauga

SEQ ID NO: 466620 - RNA, 19 nt, Homo sapiens
  misc_RNA (1)...(19): siRNA sense strand
gaaucuauaccuacacauu

SEQ ID NO: 466621 - RNA, 19 nt, Homo sapiens
  misc_RNA (1)...(19): siRNA sense strand
gaaacagagaucaaagaaa

SEQ ID NO: 466622 - RNA, 19 nt, Homo sapiens
  misc_RNA (1)...(19): siRNA sense strand
gaaaacaaauagaggaaga

SEQ ID NO: 466623 - RNA, 19 nt, Homo sapiens
  misc_RNA (1)...(19): siRNA sense strand
uaacagaugcgaguuggua

SEQ ID NO: 466624 - RNA, 19 nt, Homo sapiens
  misc_RNA (1)...(19): siRNA sense strand
gagagaaagugcugcuaca

SEQ ID NO: 466625 - RNA, 19 nt, Homo sapiens
  misc_RNA (1)...(19): siRNA sense strand
gaaggacacaacagauaaa

SEQ ID NO: 466626 - RNA, 19 nt, Homo sapiens
  misc_RNA (1)...(19): siRNA sense strand
gaggaggagaggaauauaa

SEQ ID NO: 466627 - RNA, 19 nt, Homo sapiens
  misc_RNA (1)...(19): siRNA sense strand
gaacaggcacuugaauuuc

SEQ ID NO: 466628 - RNA, 19 nt, Homo sapiens
  misc_RNA (1)...(19): siRNA sense strand
ugaacaggcacuugaauuu

SEQ ID NO: 466629 - RNA, 19 nt, Homo sapiens
  misc_RNA (1)...(19): siRNA sense strand
gaugauaggaaacagauug

SEQ ID NO: 466630 - RNA, 19 nt, Homo sapiens
  misc_RNA (1)...(19): siRNA sense strand
ccacuggaaugaagucuca

SEQ ID NO: 466631 - RNA, 19 nt, Homo sapiens
  misc_RNA (1)...(19): siRNA sense strand
aagaagagguucgaaguau

SEQ ID NO: 466632 - RNA, 19 nt, Homo sapiens
  misc_RNA (1)...(19): siRNA sense strand
ccauagaaauuacuucgau

SEQ ID NO: 466633 - RNA, 19 nt, Homo sapiens
  misc_RNA (1)...(19): siRNA sense strand
ggaucucacugaugccaaa

SEQ ID NO: 466634 - RNA, 19 nt, Homo sapiens
  misc_RNA (1)...(19): siRNA sense strand
guagaugaaucccucaaca

SEQ ID NO: 466635 - RNA, 19 nt, Homo sapiens
  misc_RNA (1)...(19): siRNA sense strand
ggaggagaggaauauaaua

SEQ ID NO: 466636 - RNA, 19 nt, Homo sapiens
  misc_RNA (1)...(19): siRNA sense strand
uaaauucagcugcaggaua

SEQ ID NO: 466637 - RNA, 19 nt, Homo sapiens
  misc_RNA (1)...(19): siRNA sense strand
gaacuauuccugcuaacug

SEQ ID NO: 466638 - RNA, 19 nt, Homo sapiens
  misc_RNA (1)...(19): siRNA sense strand
ucaccaacccugagcauuu

SEQ ID NO: 466639 - RNA, 19 nt, Homo sapiens
  misc_RNA (1)...(19): siRNA sense strand
caaauaguagugauaguga

SEQ ID NO: 466640 - RNA, 19 nt, Homo sapiens
  misc_RNA (1)...(19): siRNA sense strand
ccaaguaguggcaguaauu

SEQ ID NO: 466641 - RNA, 19 nt, Homo sapiens
  misc_RNA (1)...(19): siRNA sense strand
gaagagaaggccaagaaca

SEQ ID NO: 466642 - RNA, 19 nt, Homo sapiens
  misc_RNA (1)...(19): siRNA sense strand
agacugaauugaaagaaga

SEQ ID NO: 466643 - RNA, 19 nt, Homo sapiens
  misc_RNA (1)...(19): siRNA sense strand
uuacuucaguuccaagaaa

SEQ ID NO: 466644 - RNA, 19 nt, Homo sapiens
  misc_RNA (1)...(19): siRNA sense strand
aggcaaaguuguaugugua

SEQ ID NO: 466645 - RNA, 19 nt, Homo sapiens
  misc_RNA (1)...(19): siRNA sense strand
cagaaccacuggcuccaaa

SEQ ID NO: 466646 - RNA, 19 nt, Homo sapiens
  misc_RNA (1)...(19): siRNA sense strand
uugaugagccucccuauuu

SEQ ID NO: 466647 - RNA, 19 nt, Homo sapiens
  misc_RNA (1)...(19): siRNA sense strand
gaucagccaacauugaauu

SEQ ID NO: 466648 - RNA, 19 nt, Homo sapiens
  misc_RNA (1)...(19): siRNA sense strand
gauaauagcagugaagaag

SEQ ID NO: 466649 - RNA, 19 nt, Homo sapiens
  misc_RNA (1)...(19): siRNA sense strand
aaagaaagcacugugguuu

SEQ ID NO: 466650 - RNA, 19 nt, Homo sapiens
  misc_RNA (1)...(19): siRNA sense strand
ccauaaagcaacaguggua

SEQ ID NO: 466651 - RNA, 19 nt, Homo sapiens
  misc_RNA (1)...(19): siRNA sense strand
cgaaguaucaagagugaaa

SEQ ID NO: 466652 - RNA, 19 nt, Homo sapiens
  misc_RNA (1)...(19): siRNA sense strand
caaagaugacaccaacuaa

SEQ ID NO: 466653 - RNA, 19 nt, Homo sapiens
  misc_RNA (1)...(19): siRNA sense strand
ggagaggaauauaauacca

SEQ ID NO: 466654 - RNA, 19 nt, Homo sapiens
  misc_RNA (1)...(19): siRNA sense strand
uaacaaacgaccuguacuu

SEQ ID NO: 466655 - RNA, 19 nt, Homo sapiens
  misc_RNA (1)...(19): siRNA sense strand
caacuaagaaauacaaugg

SEQ ID NO: 466656 - RNA, 19 nt, Homo sapiens
  misc_RNA (1)...(19): siRNA sense strand
ggugaaaguauaacuaaga

SEQ ID NO: 466657 - RNA, 19 nt, Homo sapiens
  misc_RNA (1)...(19): siRNA sense strand
gcacaaauaguagugauag

SEQ ID NO: 466658 - RNA, 19 nt, Homo sapiens
  misc_RNA (1)...(19): siRNA sense strand
gaaacugauagcacaauug

SEQ ID NO: 466659 - RNA, 19 nt, Homo sapiens
  misc_RNA (1)...(19): siRNA sense strand
ggaagaagaucuaaucaua

SEQ ID NO: 466660 - RNA, 19 nt, Homo sapiens
  misc_RNA (1)...(19): siRNA sense strand
gaaauuacuucgauccuua

SEQ ID NO: 466661 - RNA, 19 nt, Homo sapiens
  misc_RNA (1)...(19): siRNA sense strand
gaaaggaugucaagaagga

SEQ ID NO: 466662 - RNA, 19 nt, Homo sapiens
  misc_RNA (1)...(19): siRNA sense strand
ggagaaagcguuuaaagaa

SEQ ID NO: 466663 - RNA, 19 nt, Homo sapiens
  misc_RNA (1)...(19): siRNA sense strand
aaagaugucuggucaagua

SEQ ID NO: 466664 - RNA, 19 nt, Homo sapiens
  misc_RNA (1)...(19): siRNA sense strand
ggaaacaagucuaccaaga

SEQ ID NO: 466665 - RNA, 19 nt, Homo sapiens
  misc_RNA (1)...(19): siRNA sense strand
guacuuggauaucgaaauu

SEQ ID NO: 466666 - RNA, 19 nt, Homo sapiens
  misc_RNA (1)...(19): siRNA sense strand
gguagaagcugaggaagaa

SEQ ID NO: 466667 - RNA, 19 nt, Homo sapiens
  misc_RNA (1)...(19): siRNA sense strand
gguaggagcuauuguggaa

SEQ ID NO: 466668 - RNA, 19 nt, Homo sapiens
  misc_RNA (1)...(19): siRNA sense strand
gcaaagaugacaccaacua

SEQ ID NO: 466669 - RNA, 19 nt, Homo sapiens
  misc_RNA (1)...(19): siRNA sense strand
ugacaaagaugaugacaca

SEQ ID NO: 466670 - RNA, 19 nt, Homo sapiens
  misc_RNA (1)...(19): siRNA sense strand
guagaacuauuccugcuaa

SEQ ID NO: 466671 - RNA, 19 nt, Homo sapiens
  misc_RNA (1)...(19): siRNA sense strand
ucaggaagcuguuaucaau

SEQ ID NO: 466672 - RNA, 19 nt, Homo sapiens
  misc_RNA (1)...(19): siRNA sense strand
gaaaagauguccaugaaau

SEQ ID NO: 466673 - RNA, 19 nt, Homo sapiens
  misc_RNA (1)...(19): siRNA sense strand
acacaaacuuggaggauuu

SEQ ID NO: 466674 - RNA, 19 nt, Homo sapiens
  misc_RNA (1)...(19): siRNA sense strand
gagaaaggaugucaagaag

SEQ ID NO: 466675 - RNA, 19 nt, Homo sapiens
  misc_RNA (1)...(19): siRNA sense strand
ccagaaagauuaaggaaag

SEQ ID NO: 466676 - RNA, 19 nt, Homo sapiens
  misc_RNA (1)...(19): siRNA sense strand
gaaacagauugaugagcua

SEQ ID NO: 466677 - RNA, 19 nt, Homo sapiens
  misc_RNA (1)...(19): siRNA sense strand
caaacgaccuguacuugga

SEQ ID NO: 466678 - RNA, 19 nt, Homo sapiens
  misc_RNA (1)...(19): siRNA sense strand
gaaagaauggugauaagga

SEQ ID NO: 466679 - RNA, 19 nt, Homo sapiens
  misc_RNA (1)...(19): siRNA sense strand
aaacaaaguucaugcagau

SEQ ID NO: 466680 - RNA, 19 nt, Homo sapiens
  misc_RNA (1)...(19): siRNA sense strand
gugaugagauugcuguaaa

SEQ ID NO: 466681 - RNA, 19 nt, Homo sapiens
  misc_RNA (1)...(19): siRNA sense strand
aguaagaccugcugauaaa

SEQ ID NO: 466682 - RNA, 19 nt, Homo sapiens
  misc_RNA (1)...(19): siRNA sense strand
gaaagcguuuaaagaagaa

SEQ ID NO: 466683 - RNA, 19 nt, Homo sapiens
  misc_RNA (1)...(19): siRNA sense strand
ugaagaagaugaagucaca

SEQ ID NO: 466684 - RNA, 19 nt, Homo sapiens
  misc_RNA (1)...(19): siRNA sense strand
gagaggugcucaagacaug

SEQ ID NO: 466685 - RNA, 19 nt, Homo sapiens
  misc_RNA (1)...(19): siRNA sense strand
guaauucagugcuaaauac

SEQ ID NO: 466686 - RNA, 19 nt, Homo sapiens
  misc_RNA (1)...(19): siRNA sense strand
gagaaagcguuuaaagaag

SEQ ID NO: 466687 - RNA, 19 nt, Homo sapiens
  misc_RNA (1)...(19): siRNA sense strand
gaacgcaucacaauucuuc

SEQ ID NO: 466688 - RNA, 19 nt, Homo sapiens
  misc_RNA (1)...(19): siRNA sense strand
caacagugguaaacaacaa

SEQ ID NO: 466689 - RNA, 19 nt, Homo sapiens
  misc_RNA (1)...(19): siRNA sense strand
caauugagguggauagugu

SEQ ID NO: 466690 - RNA, 19 nt, Homo sapiens
  misc_RNA (1)...(19): siRNA sense strand
acaaauccaucuccugaaa

SEQ ID NO: 466691 - RNA, 19 nt, Homo sapiens
  misc_RNA (1)...(19): siRNA sense strand
ggaaaaggcacaaauagua

SEQ ID NO: 466692 - RNA, 19 nt, Homo sapiens
  misc_RNA (1)...(19): siRNA sense strand
cgaagauacugauuaugaa

SEQ ID NO: 466693 - RNA, 19 nt, Homo sapiens
  misc_RNA (1)...(19): siRNA sense strand
cucaagacauggauaauaa

SEQ ID NO: 466694 - RNA, 19 nt, Homo sapiens
  misc_RNA (1)...(19): siRNA sense strand
uaauagcagugaagaagaa

SEQ ID NO: 466695 - RNA, 19 nt, Homo sapiens
  misc_RNA (1)...(19): siRNA sense strand
gaagaaagagagagaaagu

SEQ ID NO: 466696 - RNA, 19 nt, Homo sapiens
  misc_RNA (1)...(19): siRNA sense strand
gaacuuucuucagcaauug

SEQ ID NO: 466697 - RNA, 19 nt, Homo sapiens
  misc_RNA (1)...(19): siRNA sense strand
gcacuccagucauaggaaa

SEQ ID NO: 466698 - RNA, 19 nt, Homo sapiens
  misc_RNA (1)...(19): siRNA sense strand
gcagcagucuucuguaaca

SEQ ID NO: 466699 - RNA, 19 nt, Homo sapiens
  misc_RNA (1)...(19): siRNA sense strand
gaaacaagucuaccaagau

SEQ ID NO: 466700 - RNA, 19 nt, Homo sapiens
  misc_RNA (1)...(19): siRNA sense strand
gcugcaggauacaauguua

SEQ ID NO: 466701 - RNA, 19 nt, Homo sapiens
  misc_RNA (1)...(19): siRNA sense strand
agaaagcguuuaaagaaga

SEQ ID NO: 466702 - RNA, 19 nt, Homo sapiens
  misc_RNA (1)...(19): siRNA sense strand
ggacaacugguuucuauuc

SEQ ID NO: 466703 - RNA, 19 nt, Homo sapiens
  misc_RNA (1)...(19): siRNA sense strand
gaugaaucccucaacauaa

SEQ ID NO: 466704 - RNA, 19 nt, Homo sapiens
  misc_RNA (1)...(19): siRNA sense strand
agaugaagaugaagaagaa

SEQ ID NO: 466705 - RNA, 19 nt, Homo sapiens
  misc_RNA (1)...(19): siRNA sense strand
ugacaccaacuaagaaaua

SEQ ID NO: 466706 - RNA, 19 nt, Homo sapiens
  misc_RNA (1)...(19): siRNA sense strand
aaacuuggaggauuugaua

SEQ ID NO: 466707 - RNA, 19 nt, Homo sapiens
  misc_RNA (1)...(19): siRNA sense strand
gaagagguucgaaguauca

SEQ ID NO: 466708 - RNA, 19 nt, Homo sapiens
  misc_RNA (1)...(19): siRNA sense strand
aaagcagaauuuccaagua

SEQ ID NO: 466709 - RNA, 19 nt, Homo sapiens
  misc_RNA (1)...(19): siRNA sense strand
gcucaagacauggauaaua

SEQ ID NO: 466710 - RNA, 19 nt, Homo sapiens
  misc_RNA (1)...(19): siRNA sense strand
caacuaggguagaugaauc

SEQ ID NO: 466711 - RNA, 19 nt, Homo sapiens
  misc_RNA (1)...(19): siRNA sense strand
ggaauauaauaccaagaga

SEQ ID NO: 466712 - RNA, 19 nt, Homo sapiens
  misc_RNA (1)...(19): siRNA sense strand
aaacaagucuaccaagauc

SEQ ID NO: 466713 - RNA, 19 nt, Homo sapiens
  misc_RNA (1)...(19): siRNA sense strand
uggaaucccugucuuaaau

SEQ ID NO: 466714 - RNA, 19 nt, Homo sapiens
  misc_RNA (1)...(19): siRNA sense strand
agugugagcucaagcagua

SEQ ID NO: 466715 - RNA, 19 nt, Homo sapiens
  misc_RNA (1)...(19): siRNA sense strand
ucaugcagauuugguaaua

SEQ ID NO: 466716 - RNA, 19 nt, Homo sapiens
  misc_RNA (1)...(19): siRNA sense strand
gaaucuugauggugcauau

SEQ ID NO: 466717 - RNA, 19 nt, Homo sapiens
  misc_RNA (1)...(19): siRNA sense strand
caagaagagguucgaagua

SEQ ID NO: 466718 - RNA, 19 nt, Homo sapiens
  misc_RNA (1)...(19): siRNA sense strand
cggcagcagucuucuguaa

SEQ ID NO: 466719 - RNA, 19 nt, Homo sapiens
  misc_RNA (1)...(19): siRNA sense strand
ccgaagauacugauuauga

SEQ ID NO: 466720 - RNA, 19 nt, Homo sapiens
  misc_RNA (1)...(19): siRNA sense strand
gaaucuauaccuacacauu

SEQ ID NO: 466721 - RNA, 19 nt, Homo sapiens
  misc_RNA (1)...(19): siRNA sense strand
gaaacagagaucaaagaaa

SEQ ID NO: 466722 - RNA, 19 nt, Homo sapiens
  misc_RNA (1)...(19): siRNA sense strand
gaaaacaaauagaggaaga

SEQ ID NO: 466723 - RNA, 19 nt, Homo sapiens
  misc_RNA (1)...(19): siRNA sense strand
uaacagaugcgaguuggua

SEQ ID NO: 466724 - RNA, 19 nt, Homo sapiens
  misc_RNA (1)...(19): siRNA sense strand
gagagaaagugcugcuaca

SEQ ID NO: 466725 - RNA, 19 nt, Homo sapiens
  misc_RNA (1)...(19): siRNA sense strand
gaaggacacaacagauaaa

SEQ ID NO: 466726 - RNA, 19 nt, Homo sapiens
  misc_RNA (1)...(19): siRNA sense strand
gaggaggagaggaauauaa

SEQ ID NO: 466727 - RNA, 19 nt, Homo sapiens
  misc_RNA (1)...(19): siRNA sense strand
gaacaggcacuugaauuuc

SEQ ID NO: 466728 - RNA, 19 nt, Homo sapiens
  misc_RNA (1)...(19): siRNA sense strand
ugaacaggcacuugaauuu

SEQ ID NO: 466729 - RNA, 19 nt, Homo sapiens
  misc_RNA (1)...(19): siRNA sense strand
gaugauaggaaacagauug

SEQ ID NO: 466730 - RNA, 19 nt, Homo sapiens
  misc_RNA (1)...(19): siRNA sense strand
ccacuggaaugaagucuca

SEQ ID NO: 466731 - RNA, 19 nt, Homo sapiens
  misc_RNA (1)...(19): siRNA sense strand
aagaagagguucgaaguau

SEQ ID NO: 466732 - RNA, 19 nt, Homo sapiens
  misc_RNA (1)...(19): siRNA sense strand
ccauagaaauuacuucgau

SEQ ID NO: 466733 - RNA, 19 nt, Homo sapiens
  misc_RNA (1)...(19): siRNA sense strand
ggaucucacugaugccaaa

SEQ ID NO: 466734 - RNA, 19 nt, Homo sapiens
  misc_RNA (1)...(19): siRNA sense strand
guagaugaaucccucaaca

SEQ ID NO: 466735 - RNA, 19 nt, Homo sapiens
  misc_RNA (1)...(19): siRNA sense strand
ggaggagaggaauauaaua

SEQ ID NO: 466736 - RNA, 19 nt, Homo sapiens
  misc_RNA (1)...(19): siRNA sense strand
uaaauucagcugcaggaua

SEQ ID NO: 466737 - RNA, 19 nt, Homo sapiens
  misc_RNA (1)...(19): siRNA sense strand
gaacuauuccugcuaacug

SEQ ID NO: 466738 - RNA, 19 nt, Homo sapiens
  misc_RNA (1)...(19): siRNA sense strand
ucaccaacccugagcauuu

SEQ ID NO: 466739 - RNA, 19 nt, Homo sapiens
  misc_RNA (1)...(19): siRNA sense strand
caaauaguagugauaguga

SEQ ID NO: 466740 - RNA, 19 nt, Homo sapiens
  misc_RNA (1)...(19): siRNA sense strand
ccaaguaguggcaguaauu

SEQ ID NO: 466741 - RNA, 19 nt, Homo sapiens
  misc_RNA (1)...(19): siRNA sense strand
gaagagaaggccaagaaca

SEQ ID NO: 466742 - RNA, 19 nt, Homo sapiens
  misc_RNA (1)...(19): siRNA sense strand
agacugaauugaaagaaga

SEQ ID NO: 466743 - RNA, 19 nt, Homo sapiens
  misc_RNA (1)...(19): siRNA sense strand
uuacuucaguuccaagaaa

SEQ ID NO: 466744 - RNA, 19 nt, Homo sapiens
  misc_RNA (1)...(19): siRNA sense strand
aggcaaaguuguaugugua

SEQ ID NO: 466745 - RNA, 19 nt, Homo sapiens
  misc_RNA (1)...(19): siRNA sense strand
cagaaccacuggcuccaaa

SEQ ID NO: 466746 - RNA, 19 nt, Homo sapiens
  misc_RNA (1)...(19): siRNA sense strand
uugaugagccucccuauuu

SEQ ID NO: 466747 - RNA, 19 nt, Homo sapiens
  misc_RNA (1)...(19): siRNA sense strand
gaucagccaacauugaauu

SEQ ID NO: 466748 - RNA, 19 nt, Homo sapiens
  misc_RNA (1)...(19): siRNA sense strand
gauaauagcagugaagaag

SEQ ID NO: 466749 - RNA, 19 nt, Homo sapiens
  misc_RNA (1)...(19): siRNA sense strand
aaagaaagcacugugguuu

SEQ ID NO: 466750 - RNA, 19 nt, Homo sapiens
  misc_RNA (1)...(19): siRNA sense strand
ccauaaagcaacaguggua

SEQ ID NO: 466751 - RNA, 19 nt, Homo sapiens
  misc_RNA (1)...(19): siRNA sense strand
cgaaguaucaagagugaaa

SEQ ID NO: 466752 - RNA, 19 nt, Homo sapiens
  misc_RNA (1)...(19): siRNA sense strand
caaagaugacaccaacuaa

SEQ ID NO: 466753 - RNA, 19 nt, Homo sapiens
  misc_RNA (1)...(19): siRNA sense strand
ggagaggaauauaauacca

SEQ ID NO: 466754 - RNA, 19 nt, Homo sapiens
  misc_RNA (1)...(19): siRNA sense strand
uaacaaacgaccuguacuu

SEQ ID NO: 466755 - RNA, 19 nt, Homo sapiens
  misc_RNA (1)...(19): siRNA sense strand
caacuaagaaauacaaugg

SEQ ID NO: 466756 - RNA, 19 nt, Homo sapiens
  misc_RNA (1)...(19): siRNA sense strand
ggugaaaguauaacuaaga

SEQ ID NO: 466757 - RNA, 19 nt, Homo sapiens
  misc_RNA (1)...(19): siRNA sense strand
gcacaaauaguagugauag

SEQ ID NO: 466758 - RNA, 19 nt, Homo sapiens
  misc_RNA (1)...(19): siRNA sense strand
gaaacugauagcacaauug

SEQ ID NO: 466759 - RNA, 19 nt, Homo sapiens
  misc_RNA (1)...(19): siRNA sense strand
ggaagcagcccuacaacaa

SEQ ID NO: 466760 - RNA, 19 nt, Homo sapiens
  misc_RNA (1)...(19): siRNA sense strand
gcacaggaacuucauuauc

SEQ ID NO: 466761 - RNA, 19 nt, Homo sapiens
  misc_RNA (1)...(19): siRNA sense strand
acaacaaccugaagcacaa

SEQ ID NO: 466762 - RNA, 19 nt, Homo sapiens
  misc_RNA (1)...(19): siRNA sense strand
ggaaccaccuggagagcau

SEQ ID NO: 466763 - RNA, 19 nt, Homo sapiens
  misc_RNA (1)...(19): siRNA sense strand
gaacugcuguugggaacca

SEQ ID NO: 466764 - RNA, 19 nt, Homo sapiens
  misc_RNA (1)...(19): siRNA sense strand
gagauugucgcacugaaga

SEQ ID NO: 466765 - RNA, 19 nt, Homo sapiens
  misc_RNA (1)...(19): siRNA sense strand
ugaagaaggugcggaugga

SEQ ID NO: 466766 - RNA, 19 nt, Homo sapiens
  misc_RNA (1)...(19): siRNA sense strand
ggccuauggugucccagua

SEQ ID NO: 466767 - RNA, 19 nt, Homo sapiens
  misc_RNA (1)...(19): siRNA sense strand
ccugaagguuuccaacuug

SEQ ID NO: 466768 - RNA, 19 nt, Homo sapiens
  misc_RNA (1)...(19): siRNA sense strand
uccaguaucugcacaggaa

SEQ ID NO: 466769 - RNA, 19 nt, Homo sapiens
  misc_RNA (1)...(19): siRNA sense strand
cacaggaacuucauuaucc

SEQ ID NO: 466770 - RNA, 19 nt, Homo sapiens
  misc_RNA (1)...(19): siRNA sense strand
ccuauggugucccaguaaa

SEQ ID NO: 466771 - RNA, 19 nt, Homo sapiens
  misc_RNA (1)...(19): siRNA sense strand
cauguacgacccuaagaaa

SEQ ID NO: 466772 - RNA, 19 nt, Homo sapiens
  misc_RNA (1)...(19): siRNA sense strand
guuuccaacuugcucauga

SEQ ID NO: 466773 - RNA, 19 nt, Homo sapiens
  misc_RNA (1)...(19): siRNA sense strand
ggauggacaaggagaagga

SEQ ID NO: 466774 - RNA, 19 nt, Homo sapiens
  misc_RNA (1)...(19): siRNA sense strand
gaagcagcccuacaacaac

SEQ ID NO: 466775 - RNA, 19 nt, Homo sapiens
  misc_RNA (1)...(19): siRNA sense strand
ccaccagcaucgacaugug

SEQ ID NO: 466776 - RNA, 19 nt, Homo sapiens
  misc_RNA (1)...(19): siRNA sense strand
cugcacaggaacuucauua

SEQ ID NO: 466777 - RNA, 19 nt, Homo sapiens
  misc_RNA (1)...(19): siRNA sense strand
gaacaucguggagcugaag

SEQ ID NO: 466778 - RNA, 19 nt, Homo sapiens
  misc_RNA (1)...(19): siRNA sense strand
gaugagauugucgcacuga

SEQ ID NO: 466779 - RNA, 19 nt, Homo sapiens
  misc_RNA (1)...(19): siRNA sense strand
gggacacccagacagauga

SEQ ID NO: 466780 - RNA, 19 nt, Homo sapiens
  misc_RNA (1)...(19): siRNA sense strand
caaccugaagcacaaguuc

SEQ ID NO: 466781 - RNA, 19 nt, Homo sapiens
  misc_RNA (1)...(19): siRNA sense strand
cugcugcacuuccuguuca

SEQ ID NO: 466782 - RNA, 19 nt, Homo sapiens
  misc_RNA (1)...(19): siRNA sense strand
cgaacaucguggagcugaa

SEQ ID NO: 466783 - RNA, 19 nt, Homo sapiens
  misc_RNA (1)...(19): siRNA sense strand
gcacuuccuguucauguac

SEQ ID NO: 466784 - RNA, 19 nt, Homo sapiens
  misc_RNA (1)...(19): siRNA sense strand
cuuccgagauccaccagau

SEQ ID NO: 466785 - RNA, 19 nt, Homo sapiens
  misc_RNA (1)...(19): siRNA sense strand
ucauguacgacccuaagaa

SEQ ID NO: 466786 - RNA, 19 nt, Homo sapiens
  misc_RNA (1)...(19): siRNA sense strand
ugcacuuccuguucaugua

SEQ ID NO: 466787 - RNA, 19 nt, Homo sapiens
  misc_RNA (1)...(19): siRNA sense strand
caaggguugugugaagaca

SEQ ID NO: 466788 - RNA, 19 nt, Homo sapiens
  misc_RNA (1)...(19): siRNA sense strand
acaggaacuucauuaucca

SEQ ID NO: 466789 - RNA, 19 nt, Homo sapiens
  misc_RNA (1)...(19): siRNA sense strand
ccacgcagaccaccagcau

SEQ ID NO: 466790 - RNA, 19 nt, Homo sapiens
  misc_RNA (1)...(19): siRNA sense strand
ggaagcagcccuacaacaa

SEQ ID NO: 466791 - RNA, 19 nt, Homo sapiens
  misc_RNA (1)...(19): siRNA sense strand
gaucaguggugucugugaa

SEQ ID NO: 466792 - RNA, 19 nt, Homo sapiens
  misc_RNA (1)...(19): siRNA sense strand
gcacaggaacuucauuauc

SEQ ID NO: 466793 - RNA, 19 nt, Homo sapiens
  misc_RNA (1)...(19): siRNA sense strand
acaacaaccugaagcacaa

SEQ ID NO: 466794 - RNA, 19 nt, Homo sapiens
  misc_RNA (1)...(19): siRNA sense strand
ggaaccaccuggagagcau

SEQ ID NO: 466795 - RNA, 19 nt, Homo sapiens
  misc_RNA (1)...(19): siRNA sense strand
gaacugcuguugggaacca

SEQ ID NO: 466796 - RNA, 19 nt, Homo sapiens
  misc_RNA (1)...(19): siRNA sense strand
gagauugucgcacugaaga

SEQ ID NO: 466797 - RNA, 19 nt, Homo sapiens
  misc_RNA (1)...(19): siRNA sense strand
ugaagaaggugcggaugga

SEQ ID NO: 466798 - RNA, 19 nt, Homo sapiens
  misc_RNA (1)...(19): siRNA sense strand
ggccuauggugucccagua

SEQ ID NO: 466799 - RNA, 19 nt, Homo sapiens
  misc_RNA (1)...(19): siRNA sense strand
ccugaagguuuccaacuug

SEQ ID NO: 466800 - RNA, 19 nt, Homo sapiens
  misc_RNA (1)...(19): siRNA sense strand
uccaguaucugcacaggaa

SEQ ID NO: 466801 - RNA, 19 nt, Homo sapiens
  misc_RNA (1)...(19): siRNA sense strand
cacaggaacuucauuaucc

SEQ ID NO: 466802 - RNA, 19 nt, Homo sapiens
  misc_RNA (1)...(19): siRNA sense strand
ccuauggugucccaguaaa

SEQ ID NO: 466803 - RNA, 19 nt, Homo sapiens
  misc_RNA (1)...(19): siRNA sense strand
cauguacgacccuaagaaa

SEQ ID NO: 466804 - RNA, 19 nt, Homo sapiens
  misc_RNA (1)...(19): siRNA sense strand
guuuccaacuugcucauga

SEQ ID NO: 466805 - RNA, 19 nt, Homo sapiens
  misc_RNA (1)...(19): siRNA sense strand
ggauggacaaggagaagga

SEQ ID NO: 466806 - RNA, 19 nt, Homo sapiens
  misc_RNA (1)...(19): siRNA sense strand
gaagcagcccuacaacaac

SEQ ID NO: 466807 - RNA, 19 nt, Homo sapiens
  misc_RNA (1)...(19): siRNA sense strand
ccaccagcaucgacaugug

SEQ ID NO: 466808 - RNA, 19 nt, Homo sapiens
  misc_RNA (1)...(19): siRNA sense strand
cugcacaggaacuucauua

SEQ ID NO: 466809 - RNA, 19 nt, Homo sapiens
  misc_RNA (1)...(19): siRNA sense strand
gaacaucguggagcugaag

SEQ ID NO: 466810 - RNA, 19 nt, Homo sapiens
  misc_RNA (1)...(19): siRNA sense strand
gaugagauugucgcacuga

SEQ ID NO: 466811 - RNA, 19 nt, Homo sapiens
  misc_RNA (1)...(19): siRNA sense strand
gggacacccagacagauga

SEQ ID NO: 466812 - RNA, 19 nt, Homo sapiens
  misc_RNA (1)...(19): siRNA sense strand
caaccugaagcacaaguuc

SEQ ID NO: 466813 - RNA, 19 nt, Homo sapiens
  misc_RNA (1)...(19): siRNA sense strand
cugcugcacuuccuguuca

SEQ ID NO: 466814 - RNA, 19 nt, Homo sapiens
  misc_RNA (1)...(19): siRNA sense strand
cgaacaucguggagcugaa

SEQ ID NO: 466815 - RNA, 19 nt, Homo sapiens
  misc_RNA (1)...(19): siRNA sense strand
gcacuuccuguucauguac

SEQ ID NO: 466816 - RNA, 19 nt, Homo sapiens
  misc_RNA (1)...(19): siRNA sense strand
cuuccgagauccaccagau

SEQ ID NO: 466817 - RNA, 19 nt, Homo sapiens
  misc_RNA (1)...(19): siRNA sense strand
ucauguacgacccuaagaa

SEQ ID NO: 466818 - RNA, 19 nt, Homo sapiens
  misc_RNA (1)...(19): siRNA sense strand
ugcacuuccuguucaugua

SEQ ID NO: 466819 - RNA, 19 nt, Homo sapiens
  misc_RNA (1)...(19): siRNA sense strand
caaggguugugugaagaca

SEQ ID NO: 466820 - RNA, 19 nt, Homo sapiens
  misc_RNA (1)...(19): siRNA sense strand
acaggaacuucauuaucca

SEQ ID NO: 466821 - RNA, 19 nt, Homo sapiens
  misc_RNA (1)...(19): siRNA sense strand
ccacgcagaccaccagcau

SEQ ID NO: 466822 - RNA, 19 nt, Homo sapiens
  misc_RNA (1)...(19): siRNA sense strand
gcacaggaacuucauuauc

SEQ ID NO: 466823 - RNA, 19 nt, Homo sapiens
  misc_RNA (1)...(19): siRNA sense strand
ggaaccaccuggagagcau

SEQ ID NO: 466824 - RNA, 19 nt, Homo sapiens
  misc_RNA (1)...(19): siRNA sense strand
ccugaagguuuccaacuug

SEQ ID NO: 466825 - RNA, 19 nt, Homo sapiens
  misc_RNA (1)...(19): siRNA sense strand
uccaguaucugcacaggaa

SEQ ID NO: 466826 - RNA, 19 nt, Homo sapiens
  misc_RNA (1)...(19): siRNA sense strand
cacaggaacuucauuaucc

SEQ ID NO: 466827 - RNA, 19 nt, Homo sapiens
  misc_RNA (1)...(19): siRNA sense strand
guuuccaacuugcucauga

SEQ ID NO: 466828 - RNA, 19 nt, Homo sapiens
  misc_RNA (1)...(19): siRNA sense strand
gaacaucguggagcugaag

SEQ ID NO: 466829 - RNA, 19 nt, Homo sapiens
  misc_RNA (1)...(19): siRNA sense strand
cugcacaggaacuucauua

SEQ ID NO: 466830 - RNA, 19 nt, Homo sapiens
  misc_RNA (1)...(19): siRNA sense strand
cgaacaucguggagcugaa

SEQ ID NO: 466831 - RNA, 19 nt, Homo sapiens
  misc_RNA (1)...(19): siRNA sense strand
caaggguugugugaagaca

SEQ ID NO: 466832 - RNA, 19 nt, Homo sapiens
  misc_RNA (1)...(19): siRNA sense strand
acaggaacuucauuaucca

SEQ ID NO: 466833 - RNA, 19 nt, Homo sapiens
  misc_RNA (1)...(19): siRNA sense strand
gaacucagauuacuacuug

SEQ ID NO: 466834 - RNA, 19 nt, Homo sapiens
  misc_RNA (1)...(19): siRNA sense strand
gccaagaaauucauugaua

SEQ ID NO: 466835 - RNA, 19 nt, Homo sapiens
  misc_RNA (1)...(19): siRNA sense strand
uaaagcagcuggcaaucaa

SEQ ID NO: 466836 - RNA, 19 nt, Homo sapiens
  misc_RNA (1)...(19): siRNA sense strand
ccgagaagcucaaggcuaa

SEQ ID NO: 466837 - RNA, 19 nt, Homo sapiens
  misc_RNA (1)...(19): siRNA sense strand
caacauaacccagauagaa

SEQ ID NO: 466838 - RNA, 19 nt, Homo sapiens
  misc_RNA (1)...(19): siRNA sense strand
gcagcacauugacaacaua

SEQ ID NO: 466839 - RNA, 19 nt, Homo sapiens
  misc_RNA (1)...(19): siRNA sense strand
gagagcaacuugacaucau

SEQ ID NO: 466840 - RNA, 19 nt, Homo sapiens
  misc_RNA (1)...(19): siRNA sense strand
gaaacucagccaagaaugu

SEQ ID NO: 466841 - RNA, 19 nt, Homo sapiens
  misc_RNA (1)...(19): siRNA sense strand
ugaaugaucucuccaacag

SEQ ID NO: 466842 - RNA, 19 nt, Homo sapiens
  misc_RNA (1)...(19): siRNA sense strand
aggaagcgcuggccaagaa

SEQ ID NO: 466843 - RNA, 19 nt, Homo sapiens
  misc_RNA (1)...(19): siRNA sense strand
caacuugacaucaugaaug

SEQ ID NO: 466844 - RNA, 19 nt, Homo sapiens
  misc_RNA (1)...(19): siRNA sense strand
gcagaaacucagccaagaa

SEQ ID NO: 466845 - RNA, 19 nt, Homo sapiens
  misc_RNA (1)...(19): siRNA sense strand
uccagaggcuucaggcaua

SEQ ID NO: 466846 - RNA, 19 nt, Homo sapiens
  misc_RNA (1)...(19): siRNA sense strand
gauuacuacuugacgaaga

SEQ ID NO: 466847 - RNA, 19 nt, Homo sapiens
  misc_RNA (1)...(19): siRNA sense strand
gcagagagcaacuugacau

SEQ ID NO: 466848 - RNA, 19 nt, Homo sapiens
  misc_RNA (1)...(19): siRNA sense strand
gcuaaugcagagucaagua

SEQ ID NO: 466849 - RNA, 19 nt, Homo sapiens
  misc_RNA (1)...(19): siRNA sense strand
agaagcagcagcacauuga

SEQ ID NO: 466850 - RNA, 19 nt, Homo sapiens
  misc_RNA (1)...(19): siRNA sense strand
guacauuacagacgccauu

SEQ ID NO: 466851 - RNA, 19 nt, Homo sapiens
  misc_RNA (1)...(19): siRNA sense strand
ccaacagggucuggaguau

SEQ ID NO: 466852 - RNA, 19 nt, Homo sapiens
  misc_RNA (1)...(19): siRNA sense strand
uagaagaugccaccgagaa

SEQ ID NO: 466853 - RNA, 19 nt, Homo sapiens
  misc_RNA (1)...(19): siRNA sense strand
aacagggucuggaguauca

SEQ ID NO: 466854 - RNA, 19 nt, Homo sapiens
  misc_RNA (1)...(19): siRNA sense strand
cuaaugcagagucaaguaa

SEQ ID NO: 466855 - RNA, 19 nt, Homo sapiens
  misc_RNA (1)...(19): siRNA sense strand
gagaugcagcagcagauga

SEQ ID NO: 466856 - RNA, 19 nt, Homo sapiens
  misc_RNA (1)...(19): siRNA sense strand
cagaaacucagccaagaau

SEQ ID NO: 466857 - RNA, 19 nt, Homo sapiens
  misc_RNA (1)...(19): siRNA sense strand
ucaagaagcagcagcacau

SEQ ID NO: 466858 - RNA, 19 nt, Homo sapiens
  misc_RNA (1)...(19): siRNA sense strand
gagcaacuugacaucauga

SEQ ID NO: 466859 - RNA, 19 nt, Homo sapiens
  misc_RNA (1)...(19): siRNA sense strand
gagaagcucaaggcuaaug

SEQ ID NO: 466860 - RNA, 19 nt, Homo sapiens
  misc_RNA (1)...(19): siRNA sense strand
ugacaacauaacccagaua

SEQ ID NO: 466861 - RNA, 19 nt, Homo sapiens
  misc_RNA (1)...(19): siRNA sense strand
aaacucagccaagaauguu

SEQ ID NO: 466862 - RNA, 19 nt, Homo sapiens
  misc_RNA (1)...(19): siRNA sense strand
caaggcuaaugcagaguca

SEQ ID NO: 466863 - RNA, 19 nt, Homo sapiens
  misc_RNA (1)...(19): siRNA sense strand
gacaacauaacccagauag

SEQ ID NO: 466864 - RNA, 19 nt, Homo sapiens
  misc_RNA (1)...(19): siRNA sense strand
gcaacuugacaucaugaau

SEQ ID NO: 466865 - RNA, 19 nt, Homo sapiens
  misc_RNA (1)...(19): siRNA sense strand
uaaugcagagucaaguaaa

SEQ ID NO: 466866 - RNA, 19 nt, Homo sapiens
  misc_RNA (1)...(19): siRNA sense strand
caagaagcagcagcacauu

SEQ ID NO: 466867 - RNA, 19 nt, Homo sapiens
  misc_RNA (1)...(19): siRNA sense strand
cagccaagaauguuuaaag

SEQ ID NO: 466868 - RNA, 19 nt, Homo sapiens
  misc_RNA (1)...(19): siRNA sense strand
agagcaacuugacaucaug

SEQ ID NO: 466869 - RNA, 19 nt, Homo sapiens
  misc_RNA (1)...(19): siRNA sense strand
ugcagaaacucagccaaga

SEQ ID NO: 466870 - RNA, 19 nt, Homo sapiens
  misc_RNA (1)...(19): siRNA sense strand
cagcacauugacaacauaa

SEQ ID NO: 466871 - RNA, 19 nt, Homo sapiens
  misc_RNA (1)...(19): siRNA sense strand
guggagaguacauuacaga

SEQ ID NO: 466872 - RNA, 19 nt, Homo sapiens
  misc_RNA (1)...(19): siRNA sense strand
acucagccaagaauguuua

SEQ ID NO: 466873 - RNA, 19 nt, Homo sapiens
  misc_RNA (1)...(19): siRNA sense strand
gaagcgcuggccaagaaau

SEQ ID NO: 466874 - RNA, 19 nt, Homo sapiens
  misc_RNA (1)...(19): siRNA sense strand
guuuaaagcagcuggcaau

SEQ ID NO: 466875 - RNA, 19 nt, Homo sapiens
  misc_RNA (1)...(19): siRNA sense strand
cagauuacuacuugacgaa

SEQ ID NO: 466876 - RNA, 19 nt, Homo sapiens
  misc_RNA (1)...(19): siRNA sense strand
ggaagcgcuggccaagaaa

SEQ ID NO: 466877 - RNA, 19 nt, Homo sapiens
  misc_RNA (1)...(19): siRNA sense strand
gcacauugacaacauaacc

SEQ ID NO: 466878 - RNA, 19 nt, Homo sapiens
  misc_RNA (1)...(19): siRNA sense strand
ggagaugcagcagcagaug

SEQ ID NO: 466879 - RNA, 19 nt, Homo sapiens
  misc_RNA (1)...(19): siRNA sense strand
ccaccgagcaggagaugca

SEQ ID NO: 466880 - RNA, 19 nt, Homo sapiens
  misc_RNA (1)...(19): siRNA sense strand
acauaacccagauagaaga

SEQ ID NO: 466881 - RNA, 19 nt, Homo sapiens
  misc_RNA (1)...(19): siRNA sense strand
uggaagccguggagaguac

SEQ ID NO: 466882 - RNA, 19 nt, Homo sapiens
  misc_RNA (1)...(19): siRNA sense strand
gccaagaauguuuaaagca

SEQ ID NO: 466883 - RNA, 19 nt, Homo sapiens
  misc_RNA (1)...(19): siRNA sense strand
gcagcuggcaaucaagaag

SEQ ID NO: 466884 - RNA, 19 nt, Homo sapiens
  misc_RNA (1)...(19): siRNA sense strand
caacagggucuggaguauc

SEQ ID NO: 466885 - RNA, 19 nt, Homo sapiens
  misc_RNA (1)...(19): siRNA sense strand
gcgcuggccaagaaauuca

SEQ ID NO: 466886 - RNA, 19 nt, Homo sapiens
  misc_RNA (1)...(19): siRNA sense strand
uuaaagcagcuggcaauca

SEQ ID NO: 466887 - RNA, 19 nt, Homo sapiens
  misc_RNA (1)...(19): siRNA sense strand
gaggaagcgcuggccaaga

SEQ ID NO: 466888 - RNA, 19 nt, Homo sapiens
  misc_RNA (1)...(19): siRNA sense strand
cauuacagacgccauugga

SEQ ID NO: 466889 - RNA, 19 nt, Homo sapiens
  misc_RNA (1)...(19): siRNA sense strand
gaacucagauuacuacuug

SEQ ID NO: 466890 - RNA, 19 nt, Homo sapiens
  misc_RNA (1)...(19): siRNA sense strand
gccaagaaauucauugaua

SEQ ID NO: 466891 - RNA, 19 nt, Homo sapiens
  misc_RNA (1)...(19): siRNA sense strand
uaaagcagcuggcaaucaa

SEQ ID NO: 466892 - RNA, 19 nt, Homo sapiens
  misc_RNA (1)...(19): siRNA sense strand
ccgagaagcucaaggcuaa

SEQ ID NO: 466893 - RNA, 19 nt, Homo sapiens
  misc_RNA (1)...(19): siRNA sense strand
caacauaacccagauagaa

SEQ ID NO: 466894 - RNA, 19 nt, Homo sapiens
  misc_RNA (1)...(19): siRNA sense strand
gcagcacauugacaacaua

SEQ ID NO: 466895 - RNA, 19 nt, Homo sapiens
  misc_RNA (1)...(19): siRNA sense strand
gagagcaacuugacaucau

SEQ ID NO: 466896 - RNA, 19 nt, Homo sapiens
  misc_RNA (1)...(19): siRNA sense strand
gaaacucagccaagaaugu

SEQ ID NO: 466897 - RNA, 19 nt, Homo sapiens
  misc_RNA (1)...(19): siRNA sense strand
ugaaugaucucuccaacag

SEQ ID NO: 466898 - RNA, 19 nt, Homo sapiens
  misc_RNA (1)...(19): siRNA sense strand
aggaagcgcuggccaagaa

SEQ ID NO: 466899 - RNA, 19 nt, Homo sapiens
  misc_RNA (1)...(19): siRNA sense strand
caacuugacaucaugaaug

SEQ ID NO: 466900 - RNA, 19 nt, Homo sapiens
  misc_RNA (1)...(19): siRNA sense strand
gcagaaacucagccaagaa

SEQ ID NO: 466901 - RNA, 19 nt, Homo sapiens
  misc_RNA (1)...(19): siRNA sense strand
uccagaggcuucaggcaua

SEQ ID NO: 466902 - RNA, 19 nt, Homo sapiens
  misc_RNA (1)...(19): siRNA sense strand
gauuacuacuugacgaaga

SEQ ID NO: 466903 - RNA, 19 nt, Homo sapiens
  misc_RNA (1)...(19): siRNA sense strand
gcagagagcaacuugacau

SEQ ID NO: 466904 - RNA, 19 nt, Homo sapiens
  misc_RNA (1)...(19): siRNA sense strand
gcuaaugcagagucaagua

SEQ ID NO: 466905 - RNA, 19 nt, Homo sapiens
  misc_RNA (1)...(19): siRNA sense strand
agaagcagcagcacauuga

SEQ ID NO: 466906 - RNA, 19 nt, Homo sapiens
  misc_RNA (1)...(19): siRNA sense strand
guacauuacagacgccauu

SEQ ID NO: 466907 - RNA, 19 nt, Homo sapiens
  misc_RNA (1)...(19): siRNA sense strand
ccaacagggucuggaguau

SEQ ID NO: 466908 - RNA, 19 nt, Homo sapiens
  misc_RNA (1)...(19): siRNA sense strand
uagaagaugccaccgagaa

SEQ ID NO: 466909 - RNA, 19 nt, Homo sapiens
  misc_RNA (1)...(19): siRNA sense strand
aacagggucuggaguauca

SEQ ID NO: 466910 - RNA, 19 nt, Homo sapiens
  misc_RNA (1)...(19): siRNA sense strand
cuaaugcagagucaaguaa

SEQ ID NO: 466911 - RNA, 19 nt, Homo sapiens
  misc_RNA (1)...(19): siRNA sense strand
gagaugcagcagcagauga

SEQ ID NO: 466912 - RNA, 19 nt, Homo sapiens
  misc_RNA (1)...(19): siRNA sense strand
cagaaacucagccaagaau

SEQ ID NO: 466913 - RNA, 19 nt, Homo sapiens
  misc_RNA (1)...(19): siRNA sense strand
ucaagaagcagcagcacau

SEQ ID NO: 466914 - RNA, 19 nt, Homo sapiens
  misc_RNA (1)...(19): siRNA sense strand
gagcaacuugacaucauga

SEQ ID NO: 466915 - RNA, 19 nt, Homo sapiens
  misc_RNA (1)...(19): siRNA sense strand
gagaagcucaaggcuaaug

SEQ ID NO: 466916 - RNA, 19 nt, Homo sapiens
  misc_RNA (1)...(19): siRNA sense strand
ugacaacauaacccagaua

SEQ ID NO: 466917 - RNA, 19 nt, Homo sapiens
  misc_RNA (1)...(19): siRNA sense strand
aaacucagccaagaauguu

SEQ ID NO: 466918 - RNA, 19 nt, Homo sapiens
  misc_RNA (1)...(19): siRNA sense strand
caaggcuaaugcagaguca

SEQ ID NO: 466919 - RNA, 19 nt, Homo sapiens
  misc_RNA (1)...(19): siRNA sense strand
gacaacauaacccagauag

SEQ ID NO: 466920 - RNA, 19 nt, Homo sapiens
  misc_RNA (1)...(19): siRNA sense strand
gcaacuugacaucaugaau

SEQ ID NO: 466921 - RNA, 19 nt, Homo sapiens
  misc_RNA (1)...(19): siRNA sense strand
uaaugcagagucaaguaaa

SEQ ID NO: 466922 - RNA, 19 nt, Homo sapiens
  misc_RNA (1)...(19): siRNA sense strand
caagaagcagcagcacauu

SEQ ID NO: 466923 - RNA, 19 nt, Homo sapiens
  misc_RNA (1)...(19): siRNA sense strand
cagccaagaauguuuaaag

SEQ ID NO: 466924 - RNA, 19 nt, Homo sapiens
  misc_RNA (1)...(19): siRNA sense strand
agagcaacuugacaucaug

SEQ ID NO: 466925 - RNA, 19 nt, Homo sapiens
  misc_RNA (1)...(19): siRNA sense strand
ugcagaaacucagccaaga

SEQ ID NO: 466926 - RNA, 19 nt, Homo sapiens
  misc_RNA (1)...(19): siRNA sense strand
cagcacauugacaacauaa

SEQ ID NO: 466927 - RNA, 19 nt, Homo sapiens
  misc_RNA (1)...(19): siRNA sense strand
guggagaguacauuacaga

SEQ ID NO: 466928 - RNA, 19 nt, Homo sapiens
  misc_RNA (1)...(19): siRNA sense strand
acucagccaagaauguuua

SEQ ID NO: 466929 - RNA, 19 nt, Homo sapiens
  misc_RNA (1)...(19): siRNA sense strand
gaagcgcuggccaagaaau

SEQ ID NO: 466930 - RNA, 19 nt, Homo sapiens
  misc_RNA (1)...(19): siRNA sense strand
guuuaaagcagcuggcaau

SEQ ID NO: 466931 - RNA, 19 nt, Homo sapiens
  misc_RNA (1)...(19): siRNA sense strand
cagauuacuacuugacgaa

SEQ ID NO: 466932 - RNA, 19 nt, Homo sapiens
  misc_RNA (1)...(19): siRNA sense strand
ggaagcgcuggccaagaaa

SEQ ID NO: 466933 - RNA, 19 nt, Homo sapiens
  misc_RNA (1)...(19): siRNA sense strand
gcacauugacaacauaacc

SEQ ID NO: 466934 - RNA, 19 nt, Homo sapiens
  misc_RNA (1)...(19): siRNA sense strand
ggagaugcagcagcagaug

SEQ ID NO: 466935 - RNA, 19 nt, Homo sapiens
  misc_RNA (1)...(19): siRNA sense strand
ccaccgagcaggagaugca

SEQ ID NO: 466936 - RNA, 19 nt, Homo sapiens
  misc_RNA (1)...(19): siRNA sense strand
acauaacccagauagaaga

SEQ ID NO: 466937 - RNA, 19 nt, Homo sapiens
  misc_RNA (1)...(19): siRNA sense strand
uggaagccguggagaguac

SEQ ID NO: 466938 - RNA, 19 nt, Homo sapiens
  misc_RNA (1)...(19): siRNA sense strand
gccaagaauguuuaaagca

SEQ ID NO: 466939 - RNA, 19 nt, Homo sapiens
  misc_RNA (1)...(19): siRNA sense strand
gcagcuggcaaucaagaag

SEQ ID NO: 466940 - RNA, 19 nt, Homo sapiens
  misc_RNA (1)...(19): siRNA sense strand
caacagggucuggaguauc

SEQ ID NO: 466941 - RNA, 19 nt, Homo sapiens
  misc_RNA (1)...(19): siRNA sense strand
gcgcuggccaagaaauuca

SEQ ID NO: 466942 - RNA, 19 nt, Homo sapiens
  misc_RNA (1)...(19): siRNA sense strand
uuaaagcagcuggcaauca

SEQ ID NO: 466943 - RNA, 19 nt, Homo sapiens
  misc_RNA (1)...(19): siRNA sense strand
gaggaagcgcuggccaaga

SEQ ID NO: 466944 - RNA, 19 nt, Homo sapiens
  misc_RNA (1)...(19): siRNA sense strand
cauuacagacgccauugga

SEQ ID NO: 466945 - RNA, 19 nt, Homo sapiens
  misc_RNA (1)...(19): siRNA sense strand
gaacucagauuacuacuug

SEQ ID NO: 466946 - RNA, 19 nt, Homo sapiens
  misc_RNA (1)...(19): siRNA sense strand
gccaagaaauucauugaua

SEQ ID NO: 466947 - RNA, 19 nt, Homo sapiens
  misc_RNA (1)...(19): siRNA sense strand
uaaagcagcuggcaaucaa

SEQ ID NO: 466948 - RNA, 19 nt, Homo sapiens
  misc_RNA (1)...(19): siRNA sense strand
ccgagaagcucaaggcuaa

SEQ ID NO: 466949 - RNA, 19 nt, Homo sapiens
  misc_RNA (1)...(19): siRNA sense strand
caacauaacccagauagaa

SEQ ID NO: 466950 - RNA, 19 nt, Homo sapiens
  misc_RNA (1)...(19): siRNA sense strand
gcagcacauugacaacaua

SEQ ID NO: 466951 - RNA, 19 nt, Homo sapiens
  misc_RNA (1)...(19): siRNA sense strand
gagagcaacuugacaucau

SEQ ID NO: 466952 - RNA, 19 nt, Homo sapiens
  misc_RNA (1)...(19): siRNA sense strand
gaaacucagccaagaaugu

SEQ ID NO: 466953 - RNA, 19 nt, Homo sapiens
  misc_RNA (1)...(19): siRNA sense strand
ugaaugaucucuccaacag

SEQ ID NO: 466954 - RNA, 19 nt, Homo sapiens
  misc_RNA (1)...(19): siRNA sense strand
aggaagcgcuggccaagaa

SEQ ID NO: 466955 - RNA, 19 nt, Homo sapiens
  misc_RNA (1)...(19): siRNA sense strand
caacuugacaucaugaaug

SEQ ID NO: 466956 - RNA, 19 nt, Homo sapiens
  misc_RNA (1)...(19): siRNA sense strand
gcagaaacucagccaagaa

SEQ ID NO: 466957 - RNA, 19 nt, Homo sapiens
  misc_RNA (1)...(19): siRNA sense strand
uccagaggcuucaggcaua

SEQ ID NO: 466958 - RNA, 19 nt, Homo sapiens
  misc_RNA (1)...(19): siRNA sense strand
gauuacuacuugacgaaga

SEQ ID NO: 466959 - RNA, 19 nt, Homo sapiens
  misc_RNA (1)...(19): siRNA sense strand
gcagagagcaacuugacau

SEQ ID NO: 466960 - RNA, 19 nt, Homo sapiens
  misc_RNA (1)...(19): siRNA sense strand
gcuaaugcagagucaagua

SEQ ID NO: 466961 - RNA, 19 nt, Homo sapiens
  misc_RNA (1)...(19): siRNA sense strand
agaagcagcagcacauuga

SEQ ID NO: 466962 - RNA, 19 nt, Homo sapiens
  misc_RNA (1)...(19): siRNA sense strand
guacauuacagacgccauu

SEQ ID NO: 466963 - RNA, 19 nt, Homo sapiens
  misc_RNA (1)...(19): siRNA sense strand
ccaacagggucuggaguau

SEQ ID NO: 466964 - RNA, 19 nt, Homo sapiens
  misc_RNA (1)...(19): siRNA sense strand
uagaagaugccaccgagaa

SEQ ID NO: 466965 - RNA, 19 nt, Homo sapiens
  misc_RNA (1)...(19): siRNA sense strand
aacagggucuggaguauca

SEQ ID NO: 466966 - RNA, 19 nt, Homo sapiens
  misc_RNA (1)...(19): siRNA sense strand
cuaaugcagagucaaguaa

SEQ ID NO: 466967 - RNA, 19 nt, Homo sapiens
  misc_RNA (1)...(19): siRNA sense strand
gagaugcagcagcagauga

SEQ ID NO: 466968 - RNA, 19 nt, Homo sapiens
  misc_RNA (1)...(19): siRNA sense strand
cagaaacucagccaagaau

SEQ ID NO: 466969 - RNA, 19 nt, Homo sapiens
  misc_RNA (1)...(19): siRNA sense strand
ucaagaagcagcagcacau

SEQ ID NO: 466970 - RNA, 19 nt, Homo sapiens
  misc_RNA (1)...(19): siRNA sense strand
gagcaacuugacaucauga

SEQ ID NO: 466971 - RNA, 19 nt, Homo sapiens
  misc_RNA (1)...(19): siRNA sense strand
gagaagcucaaggcuaaug

SEQ ID NO: 466972 - RNA, 19 nt, Homo sapiens
  misc_RNA (1)...(19): siRNA sense strand
ugacaacauaacccagaua

SEQ ID NO: 466973 - RNA, 19 nt, Homo sapiens
  misc_RNA (1)...(19): siRNA sense strand
aaacucagccaagaauguu

SEQ ID NO: 466974 - RNA, 19 nt, Homo sapiens
  misc_RNA (1)...(19): siRNA sense strand
caaggcuaaugcagaguca

SEQ ID NO: 466975 - RNA, 19 nt, Homo sapiens
  misc_RNA (1)...(19): siRNA sense strand
gacaacauaacccagauag

SEQ ID NO: 466976 - RNA, 19 nt, Homo sapiens
  misc_RNA (1)...(19): siRNA sense strand
gcaacuugacaucaugaau

SEQ ID NO: 466977 - RNA, 19 nt, Homo sapiens
  misc_RNA (1)...(19): siRNA sense strand
uaaugcagagucaaguaaa

SEQ ID NO: 466978 - RNA, 19 nt, Homo sapiens
  misc_RNA (1)...(19): siRNA sense strand
caagaagcagcagcacauu

SEQ ID NO: 466979 - RNA, 19 nt, Homo sapiens
  misc_RNA (1)...(19): siRNA sense strand
cagccaagaauguuuaaag

SEQ ID NO: 466980 - RNA, 19 nt, Homo sapiens
  misc_RNA (1)...(19): siRNA sense strand
agagcaacuugacaucaug

SEQ ID NO: 466981 - RNA, 19 nt, Homo sapiens
  misc_RNA (1)...(19): siRNA sense strand
ugcagaaacucagccaaga

SEQ ID NO: 466982 - RNA, 19 nt, Homo sapiens
  misc_RNA (1)...(19): siRNA sense strand
cagcacauugacaacauaa

SEQ ID NO: 466983 - RNA, 19 nt, Homo sapiens
  misc_RNA (1)...(19): siRNA sense strand
guggagaguacauuacaga

SEQ ID NO: 466984 - RNA, 19 nt, Homo sapiens
  misc_RNA (1)...(19): siRNA sense strand
acucagccaagaauguuua

SEQ ID NO: 466985 - RNA, 19 nt, Homo sapiens
  misc_RNA (1)...(19): siRNA sense strand
gaagcgcuggccaagaaau

SEQ ID NO: 466986 - RNA, 19 nt, Homo sapiens
  misc_RNA (1)...(19): siRNA sense strand
guuuaaagcagcuggcaau

SEQ ID NO: 466987 - RNA, 19 nt, Homo sapiens
  misc_RNA (1)...(19): siRNA sense strand
cagauuacuacuugacgaa

SEQ ID NO: 466988 - RNA, 19 nt, Homo sapiens
  misc_RNA (1)...(19): siRNA sense strand
ggaagcgcuggccaagaaa

SEQ ID NO: 466989 - RNA, 19 nt, Homo sapiens
  misc_RNA (1)...(19): siRNA sense strand
gcacauugacaacauaacc

SEQ ID NO: 466990 - RNA, 19 nt, Homo sapiens
  misc_RNA (1)...(19): siRNA sense strand
ggagaugcagcagcagaug

SEQ ID NO: 466991 - RNA, 19 nt, Homo sapiens
  misc_RNA (1)...(19): siRNA sense strand
ccaccgagcaggagaugca

SEQ ID NO: 466992 - RNA, 19 nt, Homo sapiens
  misc_RNA (1)...(19): siRNA sense strand
acauaacccagauagaaga

SEQ ID NO: 466993 - RNA, 19 nt, Homo sapiens
  misc_RNA (1)...(19): siRNA sense strand
uggaagccguggagaguac

SEQ ID NO: 466994 - RNA, 19 nt, Homo sapiens
  misc_RNA (1)...(19): siRNA sense strand
gccaagaauguuuaaagca

SEQ ID NO: 466995 - RNA, 19 nt, Homo sapiens
  misc_RNA (1)...(19): siRNA sense strand
gcagcuggcaaucaagaag

SEQ ID NO: 466996 - RNA, 19 nt, Homo sapiens
  misc_RNA (1)...(19): siRNA sense strand
caacagggucuggaguauc

SEQ ID NO: 466997 - RNA, 19 nt, Homo sapiens
  misc_RNA (1)...(19): siRNA sense strand
gcgcuggccaagaaauuca

SEQ ID NO: 466998 - RNA, 19 nt, Homo sapiens
  misc_RNA (1)...(19): siRNA sense strand
uuaaagcagcuggcaauca

SEQ ID NO: 466999 - RNA, 19 nt, Homo sapiens
  misc_RNA (1)...(19): siRNA sense strand
gaggaagcgcuggccaaga

SEQ ID NO: 467000 - RNA, 19 nt, Homo sapiens
  misc_RNA (1)...(19): siRNA sense strand
cauuacagacgccauugga

SEQ ID NO: 467001 - RNA, 19 nt, Homo sapiens
  misc_RNA (1)...(19): siRNA sense strand
gaacucagauuacuacuug

SEQ ID NO: 467002 - RNA, 19 nt, Homo sapiens
  misc_RNA (1)...(19): siRNA sense strand
gccaagaaauucauugaua

SEQ ID NO: 467003 - RNA, 19 nt, Homo sapiens
  misc_RNA (1)...(19): siRNA sense strand
uaaagcagcuggcaaucaa

SEQ ID NO: 467004 - RNA, 19 nt, Homo sapiens
  misc_RNA (1)...(19): siRNA sense strand
ccgagaagcucaaggcuaa

SEQ ID NO: 467005 - RNA, 19 nt, Homo sapiens
  misc_RNA (1)...(19): siRNA sense strand
caacauaacccagauagaa

SEQ ID NO: 467006 - RNA, 19 nt, Homo sapiens
  misc_RNA (1)...(19): siRNA sense strand
gcagcacauugacaacaua

SEQ ID NO: 467007 - RNA, 19 nt, Homo sapiens
  misc_RNA (1)...(19): siRNA sense strand
gagagcaacuugacaucau

SEQ ID NO: 467008 - RNA, 19 nt, Homo sapiens
  misc_RNA (1)...(19): siRNA sense strand
gaaacucagccaagaaugu

SEQ ID NO: 467009 - RNA, 19 nt, Homo sapiens
  misc_RNA (1)...(19): siRNA sense strand
ugaaugaucucuccaacag

SEQ ID NO: 467010 - RNA, 19 nt, Homo sapiens
  misc_RNA (1)...(19): siRNA sense strand
aggaagcgcuggccaagaa

SEQ ID NO: 467011 - RNA, 19 nt, Homo sapiens
  misc_RNA (1)...(19): siRNA sense strand
caacuugacaucaugaaug

SEQ ID NO: 467012 - RNA, 19 nt, Homo sapiens
  misc_RNA (1)...(19): siRNA sense strand
gcagaaacucagccaagaa

SEQ ID NO: 467013 - RNA, 19 nt, Homo sapiens
  misc_RNA (1)...(19): siRNA sense strand
uccagaggcuucaggcaua

SEQ ID NO: 467014 - RNA, 19 nt, Homo sapiens
  misc_RNA (1)...(19): siRNA sense strand
gauuacuacuugacgaaga

SEQ ID NO: 467015 - RNA, 19 nt, Homo sapiens
  misc_RNA (1)...(19): siRNA sense strand
gcagagagcaacuugacau

SEQ ID NO: 467016 - RNA, 19 nt, Homo sapiens
  misc_RNA (1)...(19): siRNA sense strand
gcuaaugcagagucaagua

SEQ ID NO: 467017 - RNA, 19 nt, Homo sapiens
  misc_RNA (1)...(19): siRNA sense strand
agaagcagcagcacauuga

SEQ ID NO: 467018 - RNA, 19 nt, Homo sapiens
  misc_RNA (1)...(19): siRNA sense strand
guacauuacagacgccauu

SEQ ID NO: 467019 - RNA, 19 nt, Homo sapiens
  misc_RNA (1)...(19): siRNA sense strand
ccaacagggucuggaguau

SEQ ID NO: 467020 - RNA, 19 nt, Homo sapiens
  misc_RNA (1)...(19): siRNA sense strand
uagaagaugccaccgagaa

SEQ ID NO: 467021 - RNA, 19 nt, Homo sapiens
  misc_RNA (1)...(19): siRNA sense strand
aacagggucuggaguauca

SEQ ID NO: 467022 - RNA, 19 nt, Homo sapiens
  misc_RNA (1)...(19): siRNA sense strand
cuaaugcagagucaaguaa

SEQ ID NO: 467023 - RNA, 19 nt, Homo sapiens
  misc_RNA (1)...(19): siRNA sense strand
gagaugcagcagcagauga

SEQ ID NO: 467024 - RNA, 19 nt, Homo sapiens
  misc_RNA (1)...(19): siRNA sense strand
cagaaacucagccaagaau

SEQ ID NO: 467025 - RNA, 19 nt, Homo sapiens
  misc_RNA (1)...(19): siRNA sense strand
ucaagaagcagcagcacau

SEQ ID NO: 467026 - RNA, 19 nt, Homo sapiens
  misc_RNA (1)...(19): siRNA sense strand
gagcaacuugacaucauga

SEQ ID NO: 467027 - RNA, 19 nt, Homo sapiens
  misc_RNA (1)...(19): siRNA sense strand
gagaagcucaaggcuaaug

SEQ ID NO: 467028 - RNA, 19 nt, Homo sapiens
  misc_RNA (1)...(19): siRNA sense strand
ugacaacauaacccagaua

SEQ ID NO: 467029 - RNA, 19 nt, Homo sapiens
  misc_RNA (1)...(19): siRNA sense strand
aaacucagccaagaauguu

SEQ ID NO: 467030 - RNA, 19 nt, Homo sapiens
  misc_RNA (1)...(19): siRNA sense strand
caaggcuaaugcagaguca

SEQ ID NO: 467031 - RNA, 19 nt, Homo sapiens
  misc_RNA (1)...(19): siRNA sense strand
gacaacauaacccagauag

SEQ ID NO: 467032 - RNA, 19 nt, Homo sapiens
  misc_RNA (1)...(19): siRNA sense strand
gcaacuugacaucaugaau

SEQ ID NO: 467033 - RNA, 19 nt, Homo sapiens
  misc_RNA (1)...(19): siRNA sense strand
uaaugcagagucaaguaaa

SEQ ID NO: 467034 - RNA, 19 nt, Homo sapiens
  misc_RNA (1)...(19): siRNA sense strand
caagaagcagcagcacauu

SEQ ID NO: 467035 - RNA, 19 nt, Homo sapiens
  misc_RNA (1)...(19): siRNA sense strand
cagccaagaauguuuaaag

SEQ ID NO: 467036 - RNA, 19 nt, Homo sapiens
  misc_RNA (1)...(19): siRNA sense strand
agagcaacuugacaucaug

SEQ ID NO: 467037 - RNA, 19 nt, Homo sapiens
  misc_RNA (1)...(19): siRNA sense strand
ugcagaaacucagccaaga

SEQ ID NO: 467038 - RNA, 19 nt, Homo sapiens
  misc_RNA (1)...(19): siRNA sense strand
cagcacauugacaacauaa

SEQ ID NO: 467039 - RNA, 19 nt, Homo sapiens
  misc_RNA (1)...(19): siRNA sense strand
guggagaguacauuacaga

SEQ ID NO: 467040 - RNA, 19 nt, Homo sapiens
  misc_RNA (1)...(19): siRNA sense strand
acucagccaagaauguuua

SEQ ID NO: 467041 - RNA, 19 nt, Homo sapiens
  misc_RNA (1)...(19): siRNA sense strand
gaagcgcuggccaagaaau

SEQ ID NO: 467042 - RNA, 19 nt, Homo sapiens
  misc_RNA (1)...(19): siRNA sense strand
guuuaaagcagcuggcaau

SEQ ID NO: 467043 - RNA, 19 nt, Homo sapiens
  misc_RNA (1)...(19): siRNA sense strand
cagauuacuacuugacgaa

SEQ ID NO: 467044 - RNA, 19 nt, Homo sapiens
  misc_RNA (1)...(19): siRNA sense strand
ggaagcgcuggccaagaaa

SEQ ID NO: 467045 - RNA, 19 nt, Homo sapiens
  misc_RNA (1)...(19): siRNA sense strand
gcacauugacaacauaacc

SEQ ID NO: 467046 - RNA, 19 nt, Homo sapiens
  misc_RNA (1)...(19): siRNA sense strand
ggagaugcagcagcagaug

SEQ ID NO: 467047 - RNA, 19 nt, Homo sapiens
  misc_RNA (1)...(19): siRNA sense strand
ccaccgagcaggagaugca

SEQ ID NO: 467048 - RNA, 19 nt, Homo sapiens
  misc_RNA (1)...(19): siRNA sense strand
acauaacccagauagaaga

SEQ ID NO: 467049 - RNA, 19 nt, Homo sapiens
  misc_RNA (1)...(19): siRNA sense strand
uggaagccguggagaguac

SEQ ID NO: 467050 - RNA, 19 nt, Homo sapiens
  misc_RNA (1)...(19): siRNA sense strand
gccaagaauguuuaaagca

SEQ ID NO: 467051 - RNA, 19 nt, Homo sapiens
  misc_RNA (1)...(19): siRNA sense strand
gcagcuggcaaucaagaag

SEQ ID NO: 467052 - RNA, 19 nt, Homo sapiens
  misc_RNA (1)...(19): siRNA sense strand
caacagggucuggaguauc

SEQ ID NO: 467053 - RNA, 19 nt, Homo sapiens
  misc_RNA (1)...(19): siRNA sense strand
gcgcuggccaagaaauuca

SEQ ID NO: 467054 - RNA, 19 nt, Homo sapiens
  misc_RNA (1)...(19): siRNA sense strand
uuaaagcagcuggcaauca

SEQ ID NO: 467055 - RNA, 19 nt, Homo sapiens
  misc_RNA (1)...(19): siRNA sense strand
gaggaagcgcuggccaaga

SEQ ID NO: 467056 - RNA, 19 nt, Homo sapiens
  misc_RNA (1)...(19): siRNA sense strand
cauuacagacgccauugga

SEQ ID NO: 467057 - RNA, 19 nt, Homo sapiens
  misc_RNA (1)...(19): siRNA sense strand
gagcuugugguguggguuu

SEQ ID NO: 467058 - RNA, 19 nt, Homo sapiens
  misc_RNA (1)...(19): siRNA sense strand
cgacggaagugcugaauga

SEQ ID NO: 467059 - RNA, 19 nt, Homo sapiens
  misc_RNA (1)...(19): siRNA sense strand
gaaagcaugcucugaauug

SEQ ID NO: 467060 - RNA, 19 nt, Homo sapiens
  misc_RNA (1)...(19): siRNA sense strand
aagaagaggcuaccauuua

SEQ ID NO: 467061 - RNA, 19 nt, Homo sapiens
  misc_RNA (1)...(19): siRNA sense strand
gaugaagccugcucuguuc

SEQ ID NO: 467062 - RNA, 19 nt, Homo sapiens
  misc_RNA (1)...(19): siRNA sense strand
aagaagagcuggccaggaa

SEQ ID NO: 467063 - RNA, 19 nt, Homo sapiens
  misc_RNA (1)...(19): siRNA sense strand
ccagguggcuguccaaaug

SEQ ID NO: 467064 - RNA, 19 nt, Homo sapiens
  misc_RNA (1)...(19): siRNA sense strand
cggaagugcugaaugagua

SEQ ID NO: 467065 - RNA, 19 nt, Homo sapiens
  misc_RNA (1)...(19): siRNA sense strand
gcauugagcacucugacua

SEQ ID NO: 467066 - RNA, 19 nt, Homo sapiens
  misc_RNA (1)...(19): siRNA sense strand
ggaugaagccugcucuguu

SEQ ID NO: 467067 - RNA, 19 nt, Homo sapiens
  misc_RNA (1)...(19): siRNA sense strand
gggccaagcugucccagau

SEQ ID NO: 467068 - RNA, 19 nt, Homo sapiens
  misc_RNA (1)...(19): siRNA sense strand
gcgaagaagccaaagaaga

SEQ ID NO: 467069 - RNA, 19 nt, Homo sapiens
  misc_RNA (1)...(19): siRNA sense strand
caagaagaggcuaccauuu

SEQ ID NO: 467070 - RNA, 19 nt, Homo sapiens
  misc_RNA (1)...(19): siRNA sense strand
cgaagaagccaaagaagag

SEQ ID NO: 467071 - RNA, 19 nt, Homo sapiens
  misc_RNA (1)...(19): siRNA sense strand
agaagaggcuaccauuuac

SEQ ID NO: 467072 - RNA, 19 nt, Homo sapiens
  misc_RNA (1)...(19): siRNA sense strand
ucccagauccgacagauuu

SEQ ID NO: 467073 - RNA, 19 nt, Homo sapiens
  misc_RNA (1)...(19): siRNA sense strand
ucaagaagaggcuaccauu

SEQ ID NO: 467074 - RNA, 19 nt, Homo sapiens
  misc_RNA (1)...(19): siRNA sense strand
cagcgaagaagccaaagaa

SEQ ID NO: 467075 - RNA, 19 nt, Homo sapiens
  misc_RNA (1)...(19): siRNA sense strand
gcaagcaggcgacggaagu

SEQ ID NO: 467076 - RNA, 19 nt, Homo sapiens
  misc_RNA (1)...(19): siRNA sense strand
caacuccaguacaucuaau

SEQ ID NO: 467077 - RNA, 19 nt, Homo sapiens
  misc_RNA (1)...(19): siRNA sense strand
ugaagcagagcaccuguga

SEQ ID NO: 467078 - RNA, 19 nt, Homo sapiens
  misc_RNA (1)...(19): siRNA sense strand
gaagaggcuaccauuuaca

SEQ ID NO: 467079 - RNA, 19 nt, Homo sapiens
  misc_RNA (1)...(19): siRNA sense strand
acaaaagaauccgguauaa

SEQ ID NO: 467080 - RNA, 19 nt, Homo sapiens
  misc_RNA (1)...(19): siRNA sense strand
guaagcauccguggcauuc

SEQ ID NO: 467081 - RNA, 19 nt, Homo sapiens
  misc_RNA (1)...(19): siRNA sense strand
aagcauccguggcauucaa

SEQ ID NO: 467082 - RNA, 19 nt, Homo sapiens
  misc_RNA (1)...(19): siRNA sense strand
ucaacuccaguacaucuaa

SEQ ID NO: 467083 - RNA, 19 nt, Homo sapiens
  misc_RNA (1)...(19): siRNA sense strand
gauuuaccacucugagcua

SEQ ID NO: 467084 - RNA, 19 nt, Homo sapiens
  misc_RNA (1)...(19): siRNA sense strand
ggaagugcugaaugaguau

SEQ ID NO: 467085 - RNA, 19 nt, Homo sapiens
  misc_RNA (1)...(19): siRNA sense strand
gguaagcauccguggcauu

SEQ ID NO: 467086 - RNA, 19 nt, Homo sapiens
  misc_RNA (1)...(19): siRNA sense strand
cagcagaucauggccauca

SEQ ID NO: 467087 - RNA, 19 nt, Homo sapiens
  misc_RNA (1)...(19): siRNA sense strand
aaaagaacauggggaaguu

SEQ ID NO: 467088 - RNA, 19 nt, Homo sapiens
  misc_RNA (1)...(19): siRNA sense strand
agaaagcaugcucugaauu

SEQ ID NO: 467089 - RNA, 19 nt, Homo sapiens
  misc_RNA (1)...(19): siRNA sense strand
caucaacuccaguacaucu

SEQ ID NO: 467090 - RNA, 19 nt, Homo sapiens
  misc_RNA (1)...(19): siRNA sense strand
ucugugagaucaaggaaaa

SEQ ID NO: 467091 - RNA, 19 nt, Homo sapiens
  misc_RNA (1)...(19): siRNA sense strand
acuccaguacaucuaauua

SEQ ID NO: 467092 - RNA, 19 nt, Homo sapiens
  misc_RNA (1)...(19): siRNA sense strand
caaaagaauccgguauaaa

SEQ ID NO: 467093 - RNA, 19 nt, Homo sapiens
  misc_RNA (1)...(19): siRNA sense strand
gaagugcugaaugaguauu

SEQ ID NO: 467094 - RNA, 19 nt, Homo sapiens
  misc_RNA (1)...(19): siRNA sense strand
ggcagcaucaacuccagua

SEQ ID NO: 467095 - RNA, 19 nt, Homo sapiens
  misc_RNA (1)...(19): siRNA sense strand
cuaacugguuuggcaacaa

SEQ ID NO: 467096 - RNA, 19 nt, Homo sapiens
  misc_RNA (1)...(19): siRNA sense strand
ugagcuagagaaauaugaa

SEQ ID NO: 467097 - RNA, 19 nt, Homo sapiens
  misc_RNA (1)...(19): siRNA sense strand
ccaucucccaggucucuaa

SEQ ID NO: 467098 - RNA, 19 nt, Homo sapiens
  misc_RNA (1)...(19): siRNA sense strand
ccacgcacgucaccaaccu

SEQ ID NO: 467099 - RNA, 19 nt, Homo sapiens
  misc_RNA (1)...(19): siRNA sense strand
gaaaagacagugguaagca

SEQ ID NO: 467100 - RNA, 19 nt, Homo sapiens
  misc_RNA (1)...(19): siRNA sense strand
gugcaggcccgagaagaga

SEQ ID NO: 467101 - RNA, 19 nt, Homo sapiens
  misc_RNA (1)...(19): siRNA sense strand
cagcaucaacuccaguaca

SEQ ID NO: 467102 - RNA, 19 nt, Homo sapiens
  misc_RNA (1)...(19): siRNA sense strand
ucucccaggucucuaacug

SEQ ID NO: 467103 - RNA, 19 nt, Homo sapiens
  misc_RNA (1)...(19): siRNA sense strand
caggagcagagcaggauga

SEQ ID NO: 467104 - RNA, 19 nt, Homo sapiens
  misc_RNA (1)...(19): siRNA sense strand
gagcaagaccucaacaaua

SEQ ID NO: 467105 - RNA, 19 nt, Homo sapiens
  misc_RNA (1)...(19): siRNA sense strand
ggacgaggcuugggcuuug

SEQ ID NO: 467106 - RNA, 19 nt, Homo sapiens
  misc_RNA (1)...(19): siRNA sense strand
agcaagaccucaacaauau

SEQ ID NO: 467107 - RNA, 19 nt, Homo sapiens
  misc_RNA (1)...(19): siRNA sense strand
ggaaaggcuucugggacua

SEQ ID NO: 467108 - RNA, 19 nt, Homo sapiens
  misc_RNA (1)...(19): siRNA sense strand
gaaagacagccuugagcaa

SEQ ID NO: 467109 - RNA, 19 nt, Homo sapiens
  misc_RNA (1)...(19): siRNA sense strand
ggacaccuaccugcagaua

SEQ ID NO: 467110 - RNA, 19 nt, Homo sapiens
  misc_RNA (1)...(19): siRNA sense strand
caagaccucaacaauauga

SEQ ID NO: 467111 - RNA, 19 nt, Homo sapiens
  misc_RNA (1)...(19): siRNA sense strand
gccagcgacuucaggcuuu

SEQ ID NO: 467112 - RNA, 19 nt, Homo sapiens
  misc_RNA (1)...(19): siRNA sense strand
gcagauccaucagcagaag

SEQ ID NO: 467113 - RNA, 19 nt, Homo sapiens
  misc_RNA (1)...(19): siRNA sense strand
uggaugaccugugggaaga

SEQ ID NO: 467114 - RNA, 19 nt, Homo sapiens
  misc_RNA (1)...(19): siRNA sense strand
gcaagaccucaacaauaug

SEQ ID NO: 467115 - RNA, 19 nt, Homo sapiens
  misc_RNA (1)...(19): siRNA sense strand
gaaaagcugaggccucuga

SEQ ID NO: 467116 - RNA, 19 nt, Homo sapiens
  misc_RNA (1)...(19): siRNA sense strand
gcaagguucugagcaagcu

SEQ ID NO: 467117 - RNA, 19 nt, Homo sapiens
  misc_RNA (1)...(19): siRNA sense strand
guggcaagguucugagcaa

SEQ ID NO: 467118 - RNA, 19 nt, Homo sapiens
  misc_RNA (1)...(19): siRNA sense strand
gagcuggugggcuggaauu

SEQ ID NO: 467119 - RNA, 19 nt, Homo sapiens
  misc_RNA (1)...(19): siRNA sense strand
ggcucuggcucuucuuuca

SEQ ID NO: 467120 - RNA, 19 nt, Homo sapiens
  misc_RNA (1)...(19): siRNA sense strand
ucacucacagccuucauga

SEQ ID NO: 467121 - RNA, 19 nt, Homo sapiens
  misc_RNA (1)...(19): siRNA sense strand
cccggaagcucacgcucaa

SEQ ID NO: 467122 - RNA, 19 nt, Homo sapiens
  misc_RNA (1)...(19): siRNA sense strand
acaccuaccugcagauagc

SEQ ID NO: 467123 - RNA, 19 nt, Homo sapiens
  misc_RNA (1)...(19): siRNA sense strand
gaugaccugugggaagaca

SEQ ID NO: 467124 - RNA, 19 nt, Homo sapiens
  misc_RNA (1)...(19): siRNA sense strand
gacaguggcaagguucuga

SEQ ID NO: 467125 - RNA, 19 nt, Homo sapiens
  misc_RNA (1)...(19): siRNA sense strand
gaaaggcuucugggacuac

SEQ ID NO: 467126 - RNA, 19 nt, Homo sapiens
  misc_RNA (1)...(19): siRNA sense strand
cuggugggcuggaauuugg

SEQ ID NO: 467127 - RNA, 19 nt, Homo sapiens
  misc_RNA (1)...(19): siRNA sense strand
aacagacaguggcaagguu

SEQ ID NO: 467128 - RNA, 19 nt, Homo sapiens
  misc_RNA (1)...(19): siRNA sense strand
ccaucgaccaggagacuga

SEQ ID NO: 467129 - RNA, 19 nt, Homo sapiens
  misc_RNA (1)...(19): siRNA sense strand
gaccucaacaauaugaaca

SEQ ID NO: 467130 - RNA, 19 nt, Homo sapiens
  misc_RNA (1)...(19): siRNA sense strand
gcuggugggcuggaauuug

SEQ ID NO: 467131 - RNA, 19 nt, Homo sapiens
  misc_RNA (1)...(19): siRNA sense strand
ccuacacgauggaucugau

SEQ ID NO: 467132 - RNA, 19 nt, Homo sapiens
  misc_RNA (1)...(19): siRNA sense strand
gaaccaagcugggucuaua

SEQ ID NO: 467133 - RNA, 19 nt, Homo sapiens
  misc_RNA (1)...(19): siRNA sense strand
gaugaaaccugguaguaaa

SEQ ID NO: 467134 - RNA, 19 nt, Homo sapiens
  misc_RNA (1)...(19): siRNA sense strand
cagaugaaaccugguagua

SEQ ID NO: 467135 - RNA, 19 nt, Homo sapiens
  misc_RNA (1)...(19): siRNA sense strand
agaugaaaccugguaguaa

SEQ ID NO: 467136 - RNA, 19 nt, Homo sapiens
  misc_RNA (1)...(19): siRNA sense strand
guaguaaaaucagguacaa

SEQ ID NO: 467137 - RNA, 19 nt, Homo sapiens
  misc_RNA (1)...(19): siRNA sense strand
ccaagaaacaaaagcaaaa

SEQ ID NO: 467138 - RNA, 19 nt, Homo sapiens
  misc_RNA (1)...(19): siRNA sense strand
aggaggcauuggagaagaa

SEQ ID NO: 467139 - RNA, 19 nt, Homo sapiens
  misc_RNA (1)...(19): siRNA sense strand
gcgauuccuggccaagaaa

SEQ ID NO: 467140 - RNA, 19 nt, Homo sapiens
  misc_RNA (1)...(19): siRNA sense strand
gaaaccugguaguaaaauc

SEQ ID NO: 467141 - RNA, 19 nt, Homo sapiens
  misc_RNA (1)...(19): siRNA sense strand
aaggaggcauuggagaaga

SEQ ID NO: 467142 - RNA, 19 nt, Homo sapiens
  misc_RNA (1)...(19): siRNA sense strand
gaaggaaagucaauaauga

SEQ ID NO: 467143 - RNA, 19 nt, Homo sapiens
  misc_RNA (1)...(19): siRNA sense strand
gaauggaucuugacugguu

SEQ ID NO: 467144 - RNA, 19 nt, Homo sapiens
  misc_RNA (1)...(19): siRNA sense strand
gaacaucucaucagaagaa

SEQ ID NO: 467145 - RNA, 19 nt, Homo sapiens
  misc_RNA (1)...(19): siRNA sense strand
gaaagaaacagaagacaga

SEQ ID NO: 467146 - RNA, 19 nt, Homo sapiens
  misc_RNA (1)...(19): siRNA sense strand
caagaaauaugccguagau

SEQ ID NO: 467147 - RNA, 19 nt, Homo sapiens
  misc_RNA (1)...(19): siRNA sense strand
ggaguuugauuuccuuauu

SEQ ID NO: 467148 - RNA, 19 nt, Homo sapiens
  misc_RNA (1)...(19): siRNA sense strand
gggauaagaugcuaaagau

SEQ ID NO: 467149 - RNA, 19 nt, Homo sapiens
  misc_RNA (1)...(19): siRNA sense strand
ggaucagacuauucucuua

SEQ ID NO: 467150 - RNA, 19 nt, Homo sapiens
  misc_RNA (1)...(19): siRNA sense strand
gaucuugacugguucuuau

SEQ ID NO: 467151 - RNA, 19 nt, Homo sapiens
  misc_RNA (1)...(19): siRNA sense strand
gaaauugccgaccuuagua

SEQ ID NO: 467152 - RNA, 19 nt, Homo sapiens
  misc_RNA (1)...(19): siRNA sense strand
gacaggaaauaaaguguuu

SEQ ID NO: 467153 - RNA, 19 nt, Homo sapiens
  misc_RNA (1)...(19): siRNA sense strand
gcagaggaauggaucuuga

SEQ ID NO: 467154 - RNA, 19 nt, Homo sapiens
  misc_RNA (1)...(19): siRNA sense strand
agaagaaguuguggaaaua

SEQ ID NO: 467155 - RNA, 19 nt, Homo sapiens
  misc_RNA (1)...(19): siRNA sense strand
cagaagaaguuguggaaau

SEQ ID NO: 467156 - RNA, 19 nt, Homo sapiens
  misc_RNA (1)...(19): siRNA sense strand
guaaggcuccucucuauga

SEQ ID NO: 467157 - RNA, 19 nt, Homo sapiens
  misc_RNA (1)...(19): siRNA sense strand
ggaaggaaagucaauaaug

SEQ ID NO: 467158 - RNA, 19 nt, Homo sapiens
  misc_RNA (1)...(19): siRNA sense strand
ggaguggaauguagagaga

SEQ ID NO: 467159 - RNA, 19 nt, Homo sapiens
  misc_RNA (1)...(19): siRNA sense strand
gaaauaugccguagaugau

SEQ ID NO: 467160 - RNA, 19 nt, Homo sapiens
  misc_RNA (1)...(19): siRNA sense strand
gauaagacuucucggaucu

SEQ ID NO: 467161 - RNA, 19 nt, Homo sapiens
  misc_RNA (1)...(19): siRNA sense strand
uagaauacguggagaagug

SEQ ID NO: 467162 - RNA, 19 nt, Homo sapiens
  misc_RNA (1)...(19): siRNA sense strand
cuaaagaucuggucuacag

SEQ ID NO: 467163 - RNA, 19 nt, Homo sapiens
  misc_RNA (1)...(19): siRNA sense strand
gaauguagagagaaacaaa

SEQ ID NO: 467164 - RNA, 19 nt, Homo sapiens
  misc_RNA (1)...(19): siRNA sense strand
guugauggcucaggaacua

SEQ ID NO: 467165 - RNA, 19 nt, Homo sapiens
  misc_RNA (1)...(19): siRNA sense strand
ccacaaaucgaccaagaaa

SEQ ID NO: 467166 - RNA, 19 nt, Homo sapiens
  misc_RNA (1)...(19): siRNA sense strand
agacaaaguucugagugua

SEQ ID NO: 467167 - RNA, 19 nt, Homo sapiens
  misc_RNA (1)...(19): siRNA sense strand
agaaauaugccguagauga

SEQ ID NO: 467168 - RNA, 19 nt, Homo sapiens
  misc_RNA (1)...(19): siRNA sense strand
gauauucaccuaccacuuc

SEQ ID NO: 467169 - RNA, 19 nt, Homo sapiens
  misc_RNA (1)...(19): siRNA sense strand
guagagagaaacaaaguga

SEQ ID NO: 467170 - RNA, 19 nt, Homo sapiens
  misc_RNA (1)...(19): siRNA sense strand
acaaaucgaccaagaaaga

SEQ ID NO: 467171 - RNA, 19 nt, Homo sapiens
  misc_RNA (1)...(19): siRNA sense strand
uaguuuguccugcuuauua

SEQ ID NO: 467172 - RNA, 19 nt, Homo sapiens
  misc_RNA (1)...(19): siRNA sense strand
gauaguuuguccugcuuau

SEQ ID NO: 467173 - RNA, 19 nt, Homo sapiens
  misc_RNA (1)...(19): siRNA sense strand
gaggagcagacaauaaauu

SEQ ID NO: 467174 - RNA, 19 nt, Homo sapiens
  misc_RNA (1)...(19): siRNA sense strand
gaacaguugggacuaacaa

SEQ ID NO: 467175 - RNA, 19 nt, Homo sapiens
  misc_RNA (1)...(19): siRNA sense strand
ggucuacagucccuacaga

SEQ ID NO: 467176 - RNA, 19 nt, Homo sapiens
  misc_RNA (1)...(19): siRNA sense strand
aaacacgcuucuacacuga

SEQ ID NO: 467177 - RNA, 19 nt, Homo sapiens
  misc_RNA (1)...(19): siRNA sense strand
gaucagacuauucucuuau

SEQ ID NO: 467178 - RNA, 19 nt, Homo sapiens
  misc_RNA (1)...(19): siRNA sense strand
caacuuugacaggaaauaa

SEQ ID NO: 467179 - RNA, 19 nt, Homo sapiens
  misc_RNA (1)...(19): siRNA sense strand
uaacaaggacucccauagu

SEQ ID NO: 467180 - RNA, 19 nt, Homo sapiens
  misc_RNA (1)...(19): siRNA sense strand
ggacaaacacauggaagug

SEQ ID NO: 467181 - RNA, 19 nt, Homo sapiens
  misc_RNA (1)...(19): siRNA sense strand
acagaacaguugggacuaa

SEQ ID NO: 467182 - RNA, 19 nt, Homo sapiens
  misc_RNA (1)...(19): siRNA sense strand
ugcaguggcuccugggaua

SEQ ID NO: 467183 - RNA, 19 nt, Homo sapiens
  misc_RNA (1)...(19): siRNA sense strand
cuacacugauaacaagaaa

SEQ ID NO: 467184 - RNA, 19 nt, Homo sapiens
  misc_RNA (1)...(19): siRNA sense strand
gauguucccuucucaaucc

SEQ ID NO: 467185 - RNA, 19 nt, Homo sapiens
  misc_RNA (1)...(19): siRNA sense strand
ggaagcacagauaggcaua

SEQ ID NO: 467186 - RNA, 19 nt, Homo sapiens
  misc_RNA (1)...(19): siRNA sense strand
gcaguuuccucaguucugu

SEQ ID NO: 467187 - RNA, 19 nt, Homo sapiens
  misc_RNA (1)...(19): siRNA sense strand
gaccauacaauuagagugu

SEQ ID NO: 467188 - RNA, 19 nt, Homo sapiens
  misc_RNA (1)...(19): siRNA sense strand
gcgaaugcccuuggacaaa

SEQ ID NO: 467189 - RNA, 19 nt, Homo sapiens
  misc_RNA (1)...(19): siRNA sense strand
gacccucucuggccacaug

SEQ ID NO: 467190 - RNA, 19 nt, Homo sapiens
  misc_RNA (1)...(19): siRNA sense strand
acacgcuucuacacugaua

SEQ ID NO: 467191 - RNA, 19 nt, Homo sapiens
  misc_RNA (1)...(19): siRNA sense strand
uggaggagcagacaauaaa

SEQ ID NO: 467192 - RNA, 19 nt, Homo sapiens
  misc_RNA (1)...(19): siRNA sense strand
aacaaggacucccauagug

SEQ ID NO: 467193 - RNA, 19 nt, Homo sapiens
  misc_RNA (1)...(19): siRNA sense strand
cuggaucaguucaauuaaa

SEQ ID NO: 467194 - RNA, 19 nt, Homo sapiens
  misc_RNA (1)...(19): siRNA sense strand
caucucaucagaagaaguu

SEQ ID NO: 467195 - RNA, 19 nt, Homo sapiens
  misc_RNA (1)...(19): siRNA sense strand
ugaucuggcugcucaugaa

SEQ ID NO: 467196 - RNA, 19 nt, Homo sapiens
  misc_RNA (1)...(19): siRNA sense strand
guccacaaaucgaccaaga

SEQ ID NO: 467197 - RNA, 19 nt, Homo sapiens
  misc_RNA (1)...(19): siRNA sense strand
cuacagucccuacagauga

SEQ ID NO: 467198 - RNA, 19 nt, Homo sapiens
  misc_RNA (1)...(19): siRNA sense strand
gaaugcccuuggacaaaca

SEQ ID NO: 467199 - RNA, 19 nt, Homo sapiens
  misc_RNA (1)...(19): siRNA sense strand
ccuauucuccacuuuguaa

SEQ ID NO: 467200 - RNA, 19 nt, Homo sapiens
  misc_RNA (1)...(19): siRNA sense strand
agagagaaacaaagugaaa

SEQ ID NO: 467201 - RNA, 19 nt, Homo sapiens
  misc_RNA (1)...(19): siRNA sense strand
gaaguuguggaaauagaau

SEQ ID NO: 467202 - RNA, 19 nt, Homo sapiens
  misc_RNA (1)...(19): siRNA sense strand
guuaagcugugggauacaa

SEQ ID NO: 467203 - RNA, 19 nt, Homo sapiens
  misc_RNA (1)...(19): siRNA sense strand
cuacagaugaagaagauga

SEQ ID NO: 467204 - RNA, 19 nt, Homo sapiens
  misc_RNA (1)...(19): siRNA sense strand
gaagaaguuguggaaauag

SEQ ID NO: 467205 - RNA, 19 nt, Homo sapiens
  misc_RNA (1)...(19): siRNA sense strand
gaccaagaaagaaacagaa

SEQ ID NO: 467206 - RNA, 19 nt, Homo sapiens
  misc_RNA (1)...(19): siRNA sense strand
aaaaugaguuccacaaaca

SEQ ID NO: 467207 - RNA, 19 nt, Homo sapiens
  misc_RNA (1)...(19): siRNA sense strand
ugaaauugccgaccuuagu

SEQ ID NO: 467208 - RNA, 19 nt, Homo sapiens
  misc_RNA (1)...(19): siRNA sense strand
aagaaguuguggaaauaga

SEQ ID NO: 467209 - RNA, 19 nt, Homo sapiens
  misc_RNA (1)...(19): siRNA sense strand
uggaucaguucaauuaaag

SEQ ID NO: 467210 - RNA, 19 nt, Homo sapiens
  misc_RNA (1)...(19): siRNA sense strand
gacacagggcuacuucuga

SEQ ID NO: 467211 - RNA, 19 nt, Homo sapiens
  misc_RNA (1)...(19): siRNA sense strand
acaaaguucugaguguaga

SEQ ID NO: 467212 - RNA, 19 nt, Homo sapiens
  misc_RNA (1)...(19): siRNA sense strand
aagacaaaguucugagugu

SEQ ID NO: 467213 - RNA, 19 nt, Homo sapiens
  misc_RNA (1)...(19): siRNA sense strand
uuguaaggcuccucucuau

SEQ ID NO: 467214 - RNA, 19 nt, Homo sapiens
  misc_RNA (1)...(19): siRNA sense strand
acagaagacagaacaguug

SEQ ID NO: 467215 - RNA, 19 nt, Homo sapiens
  misc_RNA (1)...(19): siRNA sense strand
uugacugguucuuaugaua

SEQ ID NO: 467216 - RNA, 19 nt, Homo sapiens
  misc_RNA (1)...(19): siRNA sense strand
caaaucgaccaagaaagaa

SEQ ID NO: 467217 - RNA, 19 nt, Homo sapiens
  misc_RNA (1)...(19): siRNA sense strand
ccaagaaagaaacagaaga

SEQ ID NO: 467218 - RNA, 19 nt, Homo sapiens
  misc_RNA (1)...(19): siRNA sense strand
ggaucuugacugguucuua

SEQ ID NO: 467219 - RNA, 19 nt, Homo sapiens
  misc_RNA (1)...(19): siRNA sense strand
cuucuacacugauaacaag

SEQ ID NO: 467220 - RNA, 19 nt, Homo sapiens
  misc_RNA (1)...(19): siRNA sense strand
gcugugggauacaagaagu

SEQ ID NO: 467221 - RNA, 19 nt, Homo sapiens
  misc_RNA (1)...(19): siRNA sense strand
caagaaagaaacagaagac

SEQ ID NO: 467222 - RNA, 19 nt, Homo sapiens
  misc_RNA (1)...(19): siRNA sense strand
uacagucccuacagaugaa

SEQ ID NO: 467223 - RNA, 19 nt, Homo sapiens
  misc_RNA (1)...(19): siRNA sense strand
guggaggagcagacaauaa

SEQ ID NO: 467224 - RNA, 19 nt, Homo sapiens
  misc_RNA (1)...(19): siRNA sense strand
cgaaugcccuuggacaaac

SEQ ID NO: 467225 - RNA, 19 nt, Homo sapiens
  misc_RNA (1)...(19): siRNA sense strand
acaaggacucccauaguga

SEQ ID NO: 467226 - RNA, 19 nt, Homo sapiens
  misc_RNA (1)...(19): siRNA sense strand
caauuagagugugggaugu

SEQ ID NO: 467227 - RNA, 19 nt, Homo sapiens
  misc_RNA (1)...(19): siRNA sense strand
agaugaagaagaugaaaug

SEQ ID NO: 467228 - RNA, 19 nt, Homo sapiens
  misc_RNA (1)...(19): siRNA sense strand
ggaggagcagacaauaaau

SEQ ID NO: 467229 - RNA, 19 nt, Homo sapiens
  misc_RNA (1)...(19): siRNA sense strand
gacaaaguucugaguguag

SEQ ID NO: 467230 - RNA, 19 nt, Homo sapiens
  misc_RNA (1)...(19): siRNA sense strand
guuguaaggcuccucucua

SEQ ID NO: 467231 - RNA, 19 nt, Homo sapiens
  misc_RNA (1)...(19): siRNA sense strand
ucaguaaaauggucuccua

SEQ ID NO: 467232 - RNA, 19 nt, Homo sapiens
  misc_RNA (1)...(19): siRNA sense strand
ugacaggaaauaaaguguu

SEQ ID NO: 467233 - RNA, 19 nt, Homo sapiens
  misc_RNA (1)...(19): siRNA sense strand
ucuugggaccauacaauua

SEQ ID NO: 467234 - RNA, 19 nt, Homo sapiens
  misc_RNA (1)...(19): siRNA sense strand
cgaccaagaaagaaacaga

SEQ ID NO: 467235 - RNA, 19 nt, Homo sapiens
  misc_RNA (1)...(19): siRNA sense strand
uagaugauguucccuucuc

SEQ ID NO: 467236 - RNA, 19 nt, Homo sapiens
  misc_RNA (1)...(19): siRNA sense strand
aguggaauguagagagaaa

SEQ ID NO: 467237 - RNA, 19 nt, Homo sapiens
  misc_RNA (1)...(19): siRNA sense strand
uaaggcuccucucuaugau

SEQ ID NO: 467238 - RNA, 19 nt, Homo sapiens
  misc_RNA (1)...(19): siRNA sense strand
agaaacagaagacagaaca

SEQ ID NO: 467239 - RNA, 19 nt, Homo sapiens
  misc_RNA (1)...(19): siRNA sense strand
gaauacguggagaagugua

SEQ ID NO: 467240 - RNA, 19 nt, Homo sapiens
  misc_RNA (1)...(19): siRNA sense strand
ggaggaguccacaaaucga

SEQ ID NO: 467241 - RNA, 19 nt, Homo sapiens
  misc_RNA (1)...(19): siRNA sense strand
gcaguggcuccugggauaa

SEQ ID NO: 467242 - RNA, 19 nt, Homo sapiens
  misc_RNA (1)...(19): siRNA sense strand
ugacguauaugacgccuuu

SEQ ID NO: 467243 - RNA, 19 nt, Homo sapiens
  misc_RNA (1)...(19): siRNA sense strand
gaaguuauuuguggaaaca

SEQ ID NO: 467244 - RNA, 19 nt, Homo sapiens
  misc_RNA (1)...(19): siRNA sense strand
aaacgagacucagaaagaa

SEQ ID NO: 467245 - RNA, 19 nt, Homo sapiens
  misc_RNA (1)...(19): siRNA sense strand
guaugggucuggucaaaga

SEQ ID NO: 467246 - RNA, 19 nt, Homo sapiens
  misc_RNA (1)...(19): siRNA sense strand
ggcagaaggugucauuuua

SEQ ID NO: 467247 - RNA, 19 nt, Homo sapiens
  misc_RNA (1)...(19): siRNA sense strand
agaaacagaugaagagaag

SEQ ID NO: 467248 - RNA, 19 nt, Homo sapiens
  misc_RNA (1)...(19): siRNA sense strand
ccaaagcucccauccaaga

SEQ ID NO: 467249 - RNA, 19 nt, Homo sapiens
  misc_RNA (1)...(19): siRNA sense strand
ggaaacagggaaggcuuua

SEQ ID NO: 467250 - RNA, 19 nt, Homo sapiens
  misc_RNA (1)...(19): siRNA sense strand
acacugagcuacagaaacu

SEQ ID NO: 467251 - RNA, 19 nt, Homo sapiens
  misc_RNA (1)...(19): siRNA sense strand
gagaaguuauuuguggaaa

SEQ ID NO: 467252 - RNA, 19 nt, Homo sapiens
  misc_RNA (1)...(19): siRNA sense strand
gaaguacacugagcuacag

SEQ ID NO: 467253 - RNA, 19 nt, Homo sapiens
  misc_RNA (1)...(19): siRNA sense strand
aaacagggaaggcuuuauu

SEQ ID NO: 467254 - RNA, 19 nt, Homo sapiens
  misc_RNA (1)...(19): siRNA sense strand
acacggagguagucacguu

SEQ ID NO: 467255 - RNA, 19 nt, Homo sapiens
  misc_RNA (1)...(19): siRNA sense strand
ccacgaggaucggauuaga

SEQ ID NO: 467256 - RNA, 19 nt, Homo sapiens
  misc_RNA (1)...(19): siRNA sense strand
gagaaacagaugaagagaa

SEQ ID NO: 467257 - RNA, 19 nt, Homo sapiens
  misc_RNA (1)...(19): siRNA sense strand
acagaaacuuggagaaaca

SEQ ID NO: 467258 - RNA, 19 nt, Homo sapiens
  misc_RNA (1)...(19): siRNA sense strand
ggagaaguacacugagcua

SEQ ID NO: 467259 - RNA, 19 nt, Homo sapiens
  misc_RNA (1)...(19): siRNA sense strand
aaacagaugaagagaaguu

SEQ ID NO: 467260 - RNA, 19 nt, Homo sapiens
  misc_RNA (1)...(19): siRNA sense strand
agccaaagcucccauccaa

SEQ ID NO: 467261 - RNA, 19 nt, Homo sapiens
  misc_RNA (1)...(19): siRNA sense strand
cuacagaaacuuggagaaa

SEQ ID NO: 467262 - RNA, 19 nt, Homo sapiens
  misc_RNA (1)...(19): siRNA sense strand
gaaauccgaacacuugagu

SEQ ID NO: 467263 - RNA, 19 nt, Homo sapiens
  misc_RNA (1)...(19): siRNA sense strand
cagaugaagagaaguuauu

SEQ ID NO: 467264 - RNA, 19 nt, Homo sapiens
  misc_RNA (1)...(19): siRNA sense strand
ucuauucaauccaaacuuc

SEQ ID NO: 467265 - RNA, 19 nt, Homo sapiens
  misc_RNA (1)...(19): siRNA sense strand
guacacugagcuacagaaa

SEQ ID NO: 467266 - RNA, 19 nt, Homo sapiens
  misc_RNA (1)...(19): siRNA sense strand
gaugaagagaaguuauuug

SEQ ID NO: 467267 - RNA, 19 nt, Homo sapiens
  misc_RNA (1)...(19): siRNA sense strand
gagcgaaguuuuauucagu

SEQ ID NO: 467268 - RNA, 19 nt, Homo sapiens
  misc_RNA (1)...(19): siRNA sense strand
gaagaaaacgagacucaga

SEQ ID NO: 467269 - RNA, 19 nt, Homo sapiens
  misc_RNA (1)...(19): siRNA sense strand
gaccacagacugcguugga

SEQ ID NO: 467270 - RNA, 19 nt, Homo sapiens
  misc_RNA (1)...(19): siRNA sense strand
guguaugggucuggucaaa

SEQ ID NO: 467271 - RNA, 19 nt, Homo sapiens
  misc_RNA (1)...(19): siRNA sense strand
ggagaaacagaugaagaga

SEQ ID NO: 467272 - RNA, 19 nt, Homo sapiens
  misc_RNA (1)...(19): siRNA sense strand
gaaacuuggagaaacagau

SEQ ID NO: 467273 - RNA, 19 nt, Homo sapiens
  misc_RNA (1)...(19): siRNA sense strand
ccugugguuugacguauau

SEQ ID NO: 467274 - RNA, 19 nt, Homo sapiens
  misc_RNA (1)...(19): siRNA sense strand
gcagaaggugucauuuuaa

SEQ ID NO: 467275 - RNA, 19 nt, Homo sapiens
  misc_RNA (1)...(19): siRNA sense strand
ggauuagagcgaaguuuua

SEQ ID NO: 467276 - RNA, 19 nt, Homo sapiens
  misc_RNA (1)...(19): siRNA sense strand
gucaacgguuuguggagaa

SEQ ID NO: 467277 - RNA, 19 nt, Homo sapiens
  misc_RNA (1)...(19): siRNA sense strand
gaaacagggaaggcuuuau

SEQ ID NO: 467278 - RNA, 19 nt, Homo sapiens
  misc_RNA (1)...(19): siRNA sense strand
gagggagcccgucuuccaa

SEQ ID NO: 467279 - RNA, 19 nt, Homo sapiens
  misc_RNA (1)...(19): siRNA sense strand
ccacaggaccagcauuugg

SEQ ID NO: 467280 - RNA, 19 nt, Homo sapiens
  misc_RNA (1)...(19): siRNA sense strand
guaccacgaggaucggauu

SEQ ID NO: 467281 - RNA, 19 nt, Homo sapiens
  misc_RNA (1)...(19): siRNA sense strand
cagacugcguuggaagaaa

SEQ ID NO: 467282 - RNA, 19 nt, Homo sapiens
  misc_RNA (1)...(19): siRNA sense strand
aaacuuggagaaacagaug

SEQ ID NO: 467283 - RNA, 19 nt, Homo sapiens
  misc_RNA (1)...(19): siRNA sense strand
cuucaagucuaccugucaa

SEQ ID NO: 467284 - RNA, 19 nt, Homo sapiens
  misc_RNA (1)...(19): siRNA sense strand
uacagaaacuuggagaaac

SEQ ID NO: 467285 - RNA, 19 nt, Homo sapiens
  misc_RNA (1)...(19): siRNA sense strand
gagaagccccugugguuug

SEQ ID NO: 467286 - RNA, 19 nt, Homo sapiens
  misc_RNA (1)...(19): siRNA sense strand
gggagcccgucuuccaaag

SEQ ID NO: 467287 - RNA, 19 nt, Homo sapiens
  misc_RNA (1)...(19): siRNA sense strand
aaaacgagacucagaaaga

SEQ ID NO: 467288 - RNA, 19 nt, Homo sapiens
  misc_RNA (1)...(19): siRNA sense strand
ggaaauccgaacacuugag

SEQ ID NO: 467289 - RNA, 19 nt, Homo sapiens
  misc_RNA (1)...(19): siRNA sense strand
ugaagagaaguuauuugug

SEQ ID NO: 467290 - RNA, 19 nt, Homo sapiens
  misc_RNA (1)...(19): siRNA sense strand
aacgguuuguggagaagua

SEQ ID NO: 467291 - RNA, 19 nt, Homo sapiens
  misc_RNA (1)...(19): siRNA sense strand
agacugcguuggaagaaaa

SEQ ID NO: 467292 - RNA, 19 nt, Homo sapiens
  misc_RNA (1)...(19): siRNA sense strand
gcgaagcaaggacucaaca

SEQ ID NO: 467293 - RNA, 19 nt, Homo sapiens
  misc_RNA (1)...(19): siRNA sense strand
agaaguacacugagcuaca

SEQ ID NO: 467294 - RNA, 19 nt, Homo sapiens
  misc_RNA (1)...(19): siRNA sense strand
ugagggagcccgucuucca

SEQ ID NO: 467295 - RNA, 19 nt, Homo sapiens
  misc_RNA (1)...(19): siRNA sense strand
cgagugcgauauggcaaag

SEQ ID NO: 467296 - RNA, 19 nt, Homo sapiens
  misc_RNA (1)...(19): siRNA sense strand
cacaggaccagcauuugga

SEQ ID NO: 467297 - RNA, 19 nt, Homo sapiens
  misc_RNA (1)...(19): siRNA sense strand
ggagaagccccugugguuu

SEQ ID NO: 467298 - RNA, 19 nt, Homo sapiens
  misc_RNA (1)...(19): siRNA sense strand
cccugugguuugacguaua

SEQ ID NO: 467299 - RNA, 19 nt, Homo sapiens
  misc_RNA (1)...(19): siRNA sense strand
ccacaggucucauggagua

SEQ ID NO: 467300 - RNA, 19 nt, Homo sapiens
  misc_RNA (1)...(19): siRNA sense strand
ggagaacaguguggaguuu

SEQ ID NO: 467301 - RNA, 19 nt, Homo sapiens
  misc_RNA (1)...(19): siRNA sense strand
ggucaaggccuucaacaaa

SEQ ID NO: 467302 - RNA, 19 nt, Homo sapiens
  misc_RNA (1)...(19): siRNA sense strand
caaagaagccaaggaguuu

SEQ ID NO: 467303 - RNA, 19 nt, Homo sapiens
  misc_RNA (1)...(19): siRNA sense strand
gaagagugcaccugacuga

SEQ ID NO: 467304 - RNA, 19 nt, Homo sapiens
  misc_RNA (1)...(19): siRNA sense strand
gcaagaugcccgugugcua

SEQ ID NO: 467305 - RNA, 19 nt, Homo sapiens
  misc_RNA (1)...(19): siRNA sense strand
gcccugcucucacaauuug

SEQ ID NO: 467306 - RNA, 19 nt, Homo sapiens
  misc_RNA (1)...(19): siRNA sense strand
ccaaagaagccaaggaguu

SEQ ID NO: 467307 - RNA, 19 nt, Homo sapiens
  misc_RNA (1)...(19): siRNA sense strand
gcuuggaggugauuaagga

SEQ ID NO: 467308 - RNA, 19 nt, Homo sapiens
  misc_RNA (1)...(19): siRNA sense strand
caaggaagccaccgucaug

SEQ ID NO: 467309 - RNA, 19 nt, Homo sapiens
  misc_RNA (1)...(19): siRNA sense strand
uggcaacgguggucaauuc

SEQ ID NO: 467310 - RNA, 19 nt, Homo sapiens
  misc_RNA (1)...(19): siRNA sense strand
ccaaggaguuucugguaca

SEQ ID NO: 467311 - RNA, 19 nt, Homo sapiens
  misc_RNA (1)...(19): siRNA sense strand
caacggcguccgcguguuu

SEQ ID NO: 467312 - RNA, 19 nt, Homo sapiens
  misc_RNA (1)...(19): siRNA sense strand
gcgcuacguuguccuggaa

SEQ ID NO: 467313 - RNA, 19 nt, Homo sapiens
  misc_RNA (1)...(19): siRNA sense strand
gcaacaugguccagcagau

SEQ ID NO: 467314 - RNA, 19 nt, Homo sapiens
  misc_RNA (1)...(19): siRNA sense strand
gaaggugguucgagaucag

SEQ ID NO: 467315 - RNA, 19 nt, Homo sapiens
  misc_RNA (1)...(19): siRNA sense strand
agaacaguguggaguuuga

SEQ ID NO: 467316 - RNA, 19 nt, Homo sapiens
  misc_RNA (1)...(19): siRNA sense strand
gaccacggacuuugacuug

SEQ ID NO: 467317 - RNA, 19 nt, Homo sapiens
  misc_RNA (1)...(19): siRNA sense strand
ggagauggaagaggaguug

SEQ ID NO: 467318 - RNA, 19 nt, Homo sapiens
  misc_RNA (1)...(19): siRNA sense strand
gauggaagaggaguugaaa

SEQ ID NO: 467319 - RNA, 19 nt, Homo sapiens
  misc_RNA (1)...(19): siRNA sense strand
uggaagaggaguugaaaug

SEQ ID NO: 467320 - RNA, 19 nt, Homo sapiens
  misc_RNA (1)...(19): siRNA sense strand
acaaggagcaugagcacaa

SEQ ID NO: 467321 - RNA, 19 nt, Homo sapiens
  misc_RNA (1)...(19): siRNA sense strand
uggacaagaugagccuaua

SEQ ID NO: 467322 - RNA, 19 nt, Homo sapiens
  misc_RNA (1)...(19): siRNA sense strand
ggaugaccacggacuuuga

SEQ ID NO: 467323 - RNA, 19 nt, Homo sapiens
  misc_RNA (1)...(19): siRNA sense strand
uggauggucuucacuucaa

SEQ ID NO: 467324 - RNA, 19 nt, Homo sapiens
  misc_RNA (1)...(19): siRNA sense strand
ccagcuggauuucgugcaa

SEQ ID NO: 467325 - RNA, 19 nt, Homo sapiens
  misc_RNA (1)...(19): siRNA sense strand
gaacaguguggaguuugaa

SEQ ID NO: 467326 - RNA, 19 nt, Homo sapiens
  misc_RNA (1)...(19): siRNA sense strand
ccacggacuuugacuugag

SEQ ID NO: 467327 - RNA, 19 nt, Homo sapiens
  misc_RNA (1)...(19): siRNA sense strand
ggucuccgacuaugacuau

SEQ ID NO: 467328 - RNA, 19 nt, Homo sapiens
  misc_RNA (1)...(19): siRNA sense strand
gacaagaugagccuauaca

SEQ ID NO: 467329 - RNA, 19 nt, Homo sapiens
  misc_RNA (1)...(19): siRNA sense strand
gaaaaugauccuagugguu

SEQ ID NO: 467330 - RNA, 19 nt, Homo sapiens
  misc_RNA (1)...(19): siRNA sense strand
caagaaucgcguacuggaa

SEQ ID NO: 467331 - RNA, 19 nt, Homo sapiens
  misc_RNA (1)...(19): siRNA sense strand
caaacacuccagccacgaa

SEQ ID NO: 467332 - RNA, 19 nt, Homo sapiens
  misc_RNA (1)...(19): siRNA sense strand
acagugcgaugucuucuac

SEQ ID NO: 467333 - RNA, 19 nt, Homo sapiens
  misc_RNA (1)...(19): siRNA sense strand
caucgaugcccucaacaga

SEQ ID NO: 467334 - RNA, 19 nt, Homo sapiens
  misc_RNA (1)...(19): siRNA sense strand
auacaacgcucgggucaag

SEQ ID NO: 467335 - RNA, 19 nt, Homo sapiens
  misc_RNA (1)...(19): siRNA sense strand
ccucaucgaugcccucaac

SEQ ID NO: 467336 - RNA, 19 nt, Homo sapiens
  misc_RNA (1)...(19): siRNA sense strand
ugaaggugguucgagauca

SEQ ID NO: 467337 - RNA, 19 nt, Homo sapiens
  misc_RNA (1)...(19): siRNA sense strand
gucaaggccuucaacaaaa

SEQ ID NO: 467338 - RNA, 19 nt, Homo sapiens
  misc_RNA (1)...(19): siRNA sense strand
uguggaaacuacauaagag

SEQ ID NO: 467339 - RNA, 19 nt, Homo sapiens
  misc_RNA (1)...(19): siRNA sense strand
ggagaaccacagcauguac

SEQ ID NO: 467340 - RNA, 19 nt, Homo sapiens
  misc_RNA (1)...(19): siRNA sense strand
ggaagaggaguugaaaugc

SEQ ID NO: 467341 - RNA, 19 nt, Homo sapiens
  misc_RNA (1)...(19): siRNA sense strand
caaggagcaugagcacaag

SEQ ID NO: 467342 - RNA, 19 nt, Homo sapiens
  misc_RNA (1)...(19): siRNA sense strand
ggacaagaugagccuauac

SEQ ID NO: 467343 - RNA, 19 nt, Homo sapiens
  misc_RNA (1)...(19): siRNA sense strand
ucgaugcccucaacagaag

SEQ ID NO: 467344 - RNA, 19 nt, Homo sapiens
  misc_RNA (1)...(19): siRNA sense strand
caacaugguccagcagauc

SEQ ID NO: 467345 - RNA, 19 nt, Homo sapiens
  misc_RNA (1)...(19): siRNA sense strand
uccagcagauccaggagaa

SEQ ID NO: 467346 - RNA, 19 nt, Homo sapiens
  misc_RNA (1)...(19): siRNA sense strand
gauuucugacgcccucaua

SEQ ID NO: 467347 - RNA, 19 nt, Homo sapiens
  misc_RNA (1)...(19): siRNA sense strand
gagaacaguguggaguuug

SEQ ID NO: 467348 - RNA, 19 nt, Homo sapiens
  misc_RNA (1)...(19): siRNA sense strand
cagcauguacugcgugcaa

SEQ ID NO: 467349 - RNA, 19 nt, Homo sapiens
  misc_RNA (1)...(19): siRNA sense strand
gaacagugcgaugucuucu

SEQ ID NO: 467350 - RNA, 19 nt, Homo sapiens
  misc_RNA (1)...(19): siRNA sense strand
gcacacucacuccaaggau

SEQ ID NO: 467351 - RNA, 19 nt, Homo sapiens
  misc_RNA (1)...(19): siRNA sense strand
aaaaugauccuagugguuu

SEQ ID NO: 467352 - RNA, 19 nt, Homo sapiens
  misc_RNA (1)...(19): siRNA sense strand
cgaacagugcgaugucuuc

SEQ ID NO: 467353 - RNA, 19 nt, Homo sapiens
  misc_RNA (1)...(19): siRNA sense strand
caaggaugaccacggacuu

SEQ ID NO: 467354 - RNA, 19 nt, Homo sapiens
  misc_RNA (1)...(19): siRNA sense strand
gcauguacugcgugcaaug

SEQ ID NO: 467355 - RNA, 19 nt, Homo sapiens
  misc_RNA (1)...(19): siRNA sense strand
acacucacuccaaggauga

SEQ ID NO: 467356 - RNA, 19 nt, Homo sapiens
  misc_RNA (1)...(19): siRNA sense strand
gggucaaggccuucaacaa

SEQ ID NO: 467357 - RNA, 19 nt, Homo sapiens
  misc_RNA (1)...(19): siRNA sense strand
cagcagauccaggagaaca

SEQ ID NO: 467358 - RNA, 19 nt, Homo sapiens
  misc_RNA (1)...(19): siRNA sense strand
uggagaaccacagcaugua

SEQ ID NO: 467359 - RNA, 19 nt, Homo sapiens
  misc_RNA (1)...(19): siRNA sense strand
uguggauggucuucacuuc

SEQ ID NO: 467360 - RNA, 19 nt, Homo sapiens
  misc_RNA (1)...(19): siRNA sense strand
gacaaugugcacuguggau

SEQ ID NO: 467361 - RNA, 19 nt, Homo sapiens
  misc_RNA (1)...(19): siRNA sense strand
ucugacgcccucauaagaa

SEQ ID NO: 467362 - RNA, 19 nt, Homo sapiens
  misc_RNA (1)...(19): siRNA sense strand
ccacaggucucauggagua

SEQ ID NO: 467363 - RNA, 19 nt, Homo sapiens
  misc_RNA (1)...(19): siRNA sense strand
ggagaacaguguggaguuu

SEQ ID NO: 467364 - RNA, 19 nt, Homo sapiens
  misc_RNA (1)...(19): siRNA sense strand
ggucaaggccuucaacaaa

SEQ ID NO: 467365 - RNA, 19 nt, Homo sapiens
  misc_RNA (1)...(19): siRNA sense strand
caaagaagccaaggaguuu

SEQ ID NO: 467366 - RNA, 19 nt, Homo sapiens
  misc_RNA (1)...(19): siRNA sense strand
gaagagugcaccugacuga

SEQ ID NO: 467367 - RNA, 19 nt, Homo sapiens
  misc_RNA (1)...(19): siRNA sense strand
gcaagaugcccgugugcua

SEQ ID NO: 467368 - RNA, 19 nt, Homo sapiens
  misc_RNA (1)...(19): siRNA sense strand
gcccugcucucacaauuug

SEQ ID NO: 467369 - RNA, 19 nt, Homo sapiens
  misc_RNA (1)...(19): siRNA sense strand
ccaaagaagccaaggaguu

SEQ ID NO: 467370 - RNA, 19 nt, Homo sapiens
  misc_RNA (1)...(19): siRNA sense strand
gcuuggaggugauuaagga

SEQ ID NO: 467371 - RNA, 19 nt, Homo sapiens
  misc_RNA (1)...(19): siRNA sense strand
caaggaagccaccgucaug

SEQ ID NO: 467372 - RNA, 19 nt, Homo sapiens
  misc_RNA (1)...(19): siRNA sense strand
uggcaacgguggucaauuc

SEQ ID NO: 467373 - RNA, 19 nt, Homo sapiens
  misc_RNA (1)...(19): siRNA sense strand
ccaaggaguuucugguaca

SEQ ID NO: 467374 - RNA, 19 nt, Homo sapiens
  misc_RNA (1)...(19): siRNA sense strand
caacggcguccgcguguuu

SEQ ID NO: 467375 - RNA, 19 nt, Homo sapiens
  misc_RNA (1)...(19): siRNA sense strand
gcgcuacguuguccuggaa

SEQ ID NO: 467376 - RNA, 19 nt, Homo sapiens
  misc_RNA (1)...(19): siRNA sense strand
gcaacaugguccagcagau

SEQ ID NO: 467377 - RNA, 19 nt, Homo sapiens
  misc_RNA (1)...(19): siRNA sense strand
gaaggugguucgagaucag

SEQ ID NO: 467378 - RNA, 19 nt, Homo sapiens
  misc_RNA (1)...(19): siRNA sense strand
agaacaguguggaguuuga

SEQ ID NO: 467379 - RNA, 19 nt, Homo sapiens
  misc_RNA (1)...(19): siRNA sense strand
gaccacggacuuugacuug

SEQ ID NO: 467380 - RNA, 19 nt, Homo sapiens
  misc_RNA (1)...(19): siRNA sense strand
ggagauggaagaggaguug

SEQ ID NO: 467381 - RNA, 19 nt, Homo sapiens
  misc_RNA (1)...(19): siRNA sense strand
gauggaagaggaguugaaa

SEQ ID NO: 467382 - RNA, 19 nt, Homo sapiens
  misc_RNA (1)...(19): siRNA sense strand
uggaagaggaguugaaaug

SEQ ID NO: 467383 - RNA, 19 nt, Homo sapiens
  misc_RNA (1)...(19): siRNA sense strand
acaaggagcaugagcacaa

SEQ ID NO: 467384 - RNA, 19 nt, Homo sapiens
  misc_RNA (1)...(19): siRNA sense strand
uggacaagaugagccuaua

SEQ ID NO: 467385 - RNA, 19 nt, Homo sapiens
  misc_RNA (1)...(19): siRNA sense strand
ggaugaccacggacuuuga

SEQ ID NO: 467386 - RNA, 19 nt, Homo sapiens
  misc_RNA (1)...(19): siRNA sense strand
uggauggucuucacuucaa

SEQ ID NO: 467387 - RNA, 19 nt, Homo sapiens
  misc_RNA (1)...(19): siRNA sense strand
ccagcuggauuucgugcaa

SEQ ID NO: 467388 - RNA, 19 nt, Homo sapiens
  misc_RNA (1)...(19): siRNA sense strand
gaacaguguggaguuugaa

SEQ ID NO: 467389 - RNA, 19 nt, Homo sapiens
  misc_RNA (1)...(19): siRNA sense strand
ccacggacuuugacuugag

SEQ ID NO: 467390 - RNA, 19 nt, Homo sapiens
  misc_RNA (1)...(19): siRNA sense strand
ggucuccgacuaugacuau

SEQ ID NO: 467391 - RNA, 19 nt, Homo sapiens
  misc_RNA (1)...(19): siRNA sense strand
gacaagaugagccuauaca

SEQ ID NO: 467392 - RNA, 19 nt, Homo sapiens
  misc_RNA (1)...(19): siRNA sense strand
gaaaaugauccuagugguu

SEQ ID NO: 467393 - RNA, 19 nt, Homo sapiens
  misc_RNA (1)...(19): siRNA sense strand
caagaaucgcguacuggaa

SEQ ID NO: 467394 - RNA, 19 nt, Homo sapiens
  misc_RNA (1)...(19): siRNA sense strand
caaacacuccagccacgaa

SEQ ID NO: 467395 - RNA, 19 nt, Homo sapiens
  misc_RNA (1)...(19): siRNA sense strand
acagugcgaugucuucuac

SEQ ID NO: 467396 - RNA, 19 nt, Homo sapiens
  misc_RNA (1)...(19): siRNA sense strand
caucgaugcccucaacaga

SEQ ID NO: 467397 - RNA, 19 nt, Homo sapiens
  misc_RNA (1)...(19): siRNA sense strand
auacaacgcucgggucaag

SEQ ID NO: 467398 - RNA, 19 nt, Homo sapiens
  misc_RNA (1)...(19): siRNA sense strand
ccucaucgaugcccucaac

SEQ ID NO: 467399 - RNA, 19 nt, Homo sapiens
  misc_RNA (1)...(19): siRNA sense strand
ugaaggugguucgagauca

SEQ ID NO: 467400 - RNA, 19 nt, Homo sapiens
  misc_RNA (1)...(19): siRNA sense strand
gucaaggccuucaacaaaa

SEQ ID NO: 467401 - RNA, 19 nt, Homo sapiens
  misc_RNA (1)...(19): siRNA sense strand
uguggaaacuacauaagag

SEQ ID NO: 467402 - RNA, 19 nt, Homo sapiens
  misc_RNA (1)...(19): siRNA sense strand
ggagaaccacagcauguac

SEQ ID NO: 467403 - RNA, 19 nt, Homo sapiens
  misc_RNA (1)...(19): siRNA sense strand
ggaagaggaguugaaaugc

SEQ ID NO: 467404 - RNA, 19 nt, Homo sapiens
  misc_RNA (1)...(19): siRNA sense strand
caaggagcaugagcacaag

SEQ ID NO: 467405 - RNA, 19 nt, Homo sapiens
  misc_RNA (1)...(19): siRNA sense strand
ggacaagaugagccuauac

SEQ ID NO: 467406 - RNA, 19 nt, Homo sapiens
  misc_RNA (1)...(19): siRNA sense strand
ucgaugcccucaacagaag

SEQ ID NO: 467407 - RNA, 19 nt, Homo sapiens
  misc_RNA (1)...(19): siRNA sense strand
caacaugguccagcagauc

SEQ ID NO: 467408 - RNA, 19 nt, Homo sapiens
  misc_RNA (1)...(19): siRNA sense strand
uccagcagauccaggagaa

SEQ ID NO: 467409 - RNA, 19 nt, Homo sapiens
  misc_RNA (1)...(19): siRNA sense strand
gauuucugacgcccucaua

SEQ ID NO: 467410 - RNA, 19 nt, Homo sapiens
  misc_RNA (1)...(19): siRNA sense strand
gagaacaguguggaguuug

SEQ ID NO: 467411 - RNA, 19 nt, Homo sapiens
  misc_RNA (1)...(19): siRNA sense strand
cagcauguacugcgugcaa

SEQ ID NO: 467412 - RNA, 19 nt, Homo sapiens
  misc_RNA (1)...(19): siRNA sense strand
gaacagugcgaugucuucu

SEQ ID NO: 467413 - RNA, 19 nt, Homo sapiens
  misc_RNA (1)...(19): siRNA sense strand
gcacacucacuccaaggau

SEQ ID NO: 467414 - RNA, 19 nt, Homo sapiens
  misc_RNA (1)...(19): siRNA sense strand
aaaaugauccuagugguuu

SEQ ID NO: 467415 - RNA, 19 nt, Homo sapiens
  misc_RNA (1)...(19): siRNA sense strand
cgaacagugcgaugucuuc

SEQ ID NO: 467416 - RNA, 19 nt, Homo sapiens
  misc_RNA (1)...(19): siRNA sense strand
caaggaugaccacggacuu

SEQ ID NO: 467417 - RNA, 19 nt, Homo sapiens
  misc_RNA (1)...(19): siRNA sense strand
gcauguacugcgugcaaug

SEQ ID NO: 467418 - RNA, 19 nt, Homo sapiens
  misc_RNA (1)...(19): siRNA sense strand
acacucacuccaaggauga

SEQ ID NO: 467419 - RNA, 19 nt, Homo sapiens
  misc_RNA (1)...(19): siRNA sense strand
gggucaaggccuucaacaa

SEQ ID NO: 467420 - RNA, 19 nt, Homo sapiens
  misc_RNA (1)...(19): siRNA sense strand
cagcagauccaggagaaca

SEQ ID NO: 467421 - RNA, 19 nt, Homo sapiens
  misc_RNA (1)...(19): siRNA sense strand
uggagaaccacagcaugua

SEQ ID NO: 467422 - RNA, 19 nt, Homo sapiens
  misc_RNA (1)...(19): siRNA sense strand
uguggauggucuucacuuc

SEQ ID NO: 467423 - RNA, 19 nt, Homo sapiens
  misc_RNA (1)...(19): siRNA sense strand
gacaaugugcacuguggau

SEQ ID NO: 467424 - RNA, 19 nt, Homo sapiens
  misc_RNA (1)...(19): siRNA sense strand
ucugacgcccucauaagaa

SEQ ID NO: 467425 - RNA, 19 nt, Homo sapiens
  misc_RNA (1)...(19): siRNA sense strand
ccacaggucucauggagua

SEQ ID NO: 467426 - RNA, 19 nt, Homo sapiens
  misc_RNA (1)...(19): siRNA sense strand
ggagaacaguguggaguuu

SEQ ID NO: 467427 - RNA, 19 nt, Homo sapiens
  misc_RNA (1)...(19): siRNA sense strand
ggucaaggccuucaacaaa

SEQ ID NO: 467428 - RNA, 19 nt, Homo sapiens
  misc_RNA (1)...(19): siRNA sense strand
caaagaagccaaggaguuu

SEQ ID NO: 467429 - RNA, 19 nt, Homo sapiens
  misc_RNA (1)...(19): siRNA sense strand
gaagagugcaccugacuga

SEQ ID NO: 467430 - RNA, 19 nt, Homo sapiens
  misc_RNA (1)...(19): siRNA sense strand
gcaagaugcccgugugcua

SEQ ID NO: 467431 - RNA, 19 nt, Homo sapiens
  misc_RNA (1)...(19): siRNA sense strand
gcccugcucucacaauuug

SEQ ID NO: 467432 - RNA, 19 nt, Homo sapiens
  misc_RNA (1)...(19): siRNA sense strand
ccaaagaagccaaggaguu

SEQ ID NO: 467433 - RNA, 19 nt, Homo sapiens
  misc_RNA (1)...(19): siRNA sense strand
gcuuggaggugauuaagga

SEQ ID NO: 467434 - RNA, 19 nt, Homo sapiens
  misc_RNA (1)...(19): siRNA sense strand
caaggaagccaccgucaug

SEQ ID NO: 467435 - RNA, 19 nt, Homo sapiens
  misc_RNA (1)...(19): siRNA sense strand
uggcaacgguggucaauuc

SEQ ID NO: 467436 - RNA, 19 nt, Homo sapiens
  misc_RNA (1)...(19): siRNA sense strand
ccaaggaguuucugguaca

SEQ ID NO: 467437 - RNA, 19 nt, Homo sapiens
  misc_RNA (1)...(19): siRNA sense strand
caacggcguccgcguguuu

SEQ ID NO: 467438 - RNA, 19 nt, Homo sapiens
  misc_RNA (1)...(19): siRNA sense strand
gcgcuacguuguccuggaa

SEQ ID NO: 467439 - RNA, 19 nt, Homo sapiens
  misc_RNA (1)...(19): siRNA sense strand
gcaacaugguccagcagau

SEQ ID NO: 467440 - RNA, 19 nt, Homo sapiens
  misc_RNA (1)...(19): siRNA sense strand
gaaggugguucgagaucag

SEQ ID NO: 467441 - RNA, 19 nt, Homo sapiens
  misc_RNA (1)...(19): siRNA sense strand
agaacaguguggaguuuga

SEQ ID NO: 467442 - RNA, 19 nt, Homo sapiens
  misc_RNA (1)...(19): siRNA sense strand
gaccacggacuuugacuug

SEQ ID NO: 467443 - RNA, 19 nt, Homo sapiens
  misc_RNA (1)...(19): siRNA sense strand
ggagauggaagaggaguug

SEQ ID NO: 467444 - RNA, 19 nt, Homo sapiens
  misc_RNA (1)...(19): siRNA sense strand
gauggaagaggaguugaaa

SEQ ID NO: 467445 - RNA, 19 nt, Homo sapiens
  misc_RNA (1)...(19): siRNA sense strand
uggaagaggaguugaaaug

SEQ ID NO: 467446 - RNA, 19 nt, Homo sapiens
  misc_RNA (1)...(19): siRNA sense strand
acaaggagcaugagcacaa

SEQ ID NO: 467447 - RNA, 19 nt, Homo sapiens
  misc_RNA (1)...(19): siRNA sense strand
uggacaagaugagccuaua

SEQ ID NO: 467448 - RNA, 19 nt, Homo sapiens
  misc_RNA (1)...(19): siRNA sense strand
ggaugaccacggacuuuga

SEQ ID NO: 467449 - RNA, 19 nt, Homo sapiens
  misc_RNA (1)...(19): siRNA sense strand
uggauggucuucacuucaa

SEQ ID NO: 467450 - RNA, 19 nt, Homo sapiens
  misc_RNA (1)...(19): siRNA sense strand
ccagcuggauuucgugcaa

SEQ ID NO: 467451 - RNA, 19 nt, Homo sapiens
  misc_RNA (1)...(19): siRNA sense strand
gaacaguguggaguuugaa

SEQ ID NO: 467452 - RNA, 19 nt, Homo sapiens
  misc_RNA (1)...(19): siRNA sense strand
ccacggacuuugacuugag

SEQ ID NO: 467453 - RNA, 19 nt, Homo sapiens
  misc_RNA (1)...(19): siRNA sense strand
ggucuccgacuaugacuau

SEQ ID NO: 467454 - RNA, 19 nt, Homo sapiens
  misc_RNA (1)...(19): siRNA sense strand
gacaagaugagccuauaca

SEQ ID NO: 467455 - RNA, 19 nt, Homo sapiens
  misc_RNA (1)...(19): siRNA sense strand
gaaaaugauccuagugguu

SEQ ID NO: 467456 - RNA, 19 nt, Homo sapiens
  misc_RNA (1)...(19): siRNA sense strand
caagaaucgcguacuggaa

SEQ ID NO: 467457 - RNA, 19 nt, Homo sapiens
  misc_RNA (1)...(19): siRNA sense strand
caaacacuccagccacgaa

SEQ ID NO: 467458 - RNA, 19 nt, Homo sapiens
  misc_RNA (1)...(19): siRNA sense strand
acagugcgaugucuucuac

SEQ ID NO: 467459 - RNA, 19 nt, Homo sapiens
  misc_RNA (1)...(19): siRNA sense strand
caucgaugcccucaacaga

SEQ ID NO: 467460 - RNA, 19 nt, Homo sapiens
  misc_RNA (1)...(19): siRNA sense strand
auacaacgcucgggucaag

SEQ ID NO: 467461 - RNA, 19 nt, Homo sapiens
  misc_RNA (1)...(19): siRNA sense strand
ccucaucgaugcccucaac

SEQ ID NO: 467462 - RNA, 19 nt, Homo sapiens
  misc_RNA (1)...(19): siRNA sense strand
ugaaggugguucgagauca

SEQ ID NO: 467463 - RNA, 19 nt, Homo sapiens
  misc_RNA (1)...(19): siRNA sense strand
gucaaggccuucaacaaaa

SEQ ID NO: 467464 - RNA, 19 nt, Homo sapiens
  misc_RNA (1)...(19): siRNA sense strand
uguggaaacuacauaagag

SEQ ID NO: 467465 - RNA, 19 nt, Homo sapiens
  misc_RNA (1)...(19): siRNA sense strand
ggagaaccacagcauguac

SEQ ID NO: 467466 - RNA, 19 nt, Homo sapiens
  misc_RNA (1)...(19): siRNA sense strand
ggaagaggaguugaaaugc

SEQ ID NO: 467467 - RNA, 19 nt, Homo sapiens
  misc_RNA (1)...(19): siRNA sense strand
caaggagcaugagcacaag

SEQ ID NO: 467468 - RNA, 19 nt, Homo sapiens
  misc_RNA (1)...(19): siRNA sense strand
ggacaagaugagccuauac

SEQ ID NO: 467469 - RNA, 19 nt, Homo sapiens
  misc_RNA (1)...(19): siRNA sense strand
ucgaugcccucaacagaag

SEQ ID NO: 467470 - RNA, 19 nt, Homo sapiens
  misc_RNA (1)...(19): siRNA sense strand
caacaugguccagcagauc

SEQ ID NO: 467471 - RNA, 19 nt, Homo sapiens
  misc_RNA (1)...(19): siRNA sense strand
uccagcagauccaggagaa

SEQ ID NO: 467472 - RNA, 19 nt, Homo sapiens
  misc_RNA (1)...(19): siRNA sense strand
gauuucugacgcccucaua

SEQ ID NO: 467473 - RNA, 19 nt, Homo sapiens
  misc_RNA (1)...(19): siRNA sense strand
gagaacaguguggaguuug

SEQ ID NO: 467474 - RNA, 19 nt, Homo sapiens
  misc_RNA (1)...(19): siRNA sense strand
cagcauguacugcgugcaa

SEQ ID NO: 467475 - RNA, 19 nt, Homo sapiens
  misc_RNA (1)...(19): siRNA sense strand
gaacagugcgaugucuucu

SEQ ID NO: 467476 - RNA, 19 nt, Homo sapiens
  misc_RNA (1)...(19): siRNA sense strand
gcacacucacuccaaggau

SEQ ID NO: 467477 - RNA, 19 nt, Homo sapiens
  misc_RNA (1)...(19): siRNA sense strand
aaaaugauccuagugguuu

SEQ ID NO: 467478 - RNA, 19 nt, Homo sapiens
  misc_RNA (1)...(19): siRNA sense strand
cgaacagugcgaugucuuc

SEQ ID NO: 467479 - RNA, 19 nt, Homo sapiens
  misc_RNA (1)...(19): siRNA sense strand
caaggaugaccacggacuu

SEQ ID NO: 467480 - RNA, 19 nt, Homo sapiens
  misc_RNA (1)...(19): siRNA sense strand
gcauguacugcgugcaaug

SEQ ID NO: 467481 - RNA, 19 nt, Homo sapiens
  misc_RNA (1)...(19): siRNA sense strand
acacucacuccaaggauga

SEQ ID NO: 467482 - RNA, 19 nt, Homo sapiens
  misc_RNA (1)...(19): siRNA sense strand
gggucaaggccuucaacaa

SEQ ID NO: 467483 - RNA, 19 nt, Homo sapiens
  misc_RNA (1)...(19): siRNA sense strand
cagcagauccaggagaaca

SEQ ID NO: 467484 - RNA, 19 nt, Homo sapiens
  misc_RNA (1)...(19): siRNA sense strand
uggagaaccacagcaugua

SEQ ID NO: 467485 - RNA, 19 nt, Homo sapiens
  misc_RNA (1)...(19): siRNA sense strand
uguggauggucuucacuuc

SEQ ID NO: 467486 - RNA, 19 nt, Homo sapiens
  misc_RNA (1)...(19): siRNA sense strand
gacaaugugcacuguggau

SEQ ID NO: 467487 - RNA, 19 nt, Homo sapiens
  misc_RNA (1)...(19): siRNA sense strand
ucugacgcccucauaagaa

SEQ ID NO: 467488 - RNA, 19 nt, Homo sapiens
  misc_RNA (1)...(19): siRNA sense strand
ccacaggucucauggagua

SEQ ID NO: 467489 - RNA, 19 nt, Homo sapiens
  misc_RNA (1)...(19): siRNA sense strand
ggagaacaguguggaguuu

SEQ ID NO: 467490 - RNA, 19 nt, Homo sapiens
  misc_RNA (1)...(19): siRNA sense strand
ggucaaggccuucaacaaa

SEQ ID NO: 467491 - RNA, 19 nt, Homo sapiens
  misc_RNA (1)...(19): siRNA sense strand
caaagaagccaaggaguuu

SEQ ID NO: 467492 - RNA, 19 nt, Homo sapiens
  misc_RNA (1)...(19): siRNA sense strand
gaagagugcaccugacuga

SEQ ID NO: 467493 - RNA, 19 nt, Homo sapiens
  misc_RNA (1)...(19): siRNA sense strand
gcaagaugcccgugugcua

SEQ ID NO: 467494 - RNA, 19 nt, Homo sapiens
  misc_RNA (1)...(19): siRNA sense strand
gcccugcucucacaauuug

SEQ ID NO: 467495 - RNA, 19 nt, Homo sapiens
  misc_RNA (1)...(19): siRNA sense strand
ccaaagaagccaaggaguu

SEQ ID NO: 467496 - RNA, 19 nt, Homo sapiens
  misc_RNA (1)...(19): siRNA sense strand
gcuuggaggugauuaagga

SEQ ID NO: 467497 - RNA, 19 nt, Homo sapiens
  misc_RNA (1)...(19): siRNA sense strand
caaggaagccaccgucaug

SEQ ID NO: 467498 - RNA, 19 nt, Homo sapiens
  misc_RNA (1)...(19): siRNA sense strand
uggcaacgguggucaauuc

SEQ ID NO: 467499 - RNA, 19 nt, Homo sapiens
  misc_RNA (1)...(19): siRNA sense strand
ccaaggaguuucugguaca

SEQ ID NO: 467500 - RNA, 19 nt, Homo sapiens
  misc_RNA (1)...(19): siRNA sense strand
caacggcguccgcguguuu

SEQ ID NO: 467501 - RNA, 19 nt, Homo sapiens
  misc_RNA (1)...(19): siRNA sense strand
gcgcuacguuguccuggaa

SEQ ID NO: 467502 - RNA, 19 nt, Homo sapiens
  misc_RNA (1)...(19): siRNA sense strand
gcaacaugguccagcagau

SEQ ID NO: 467503 - RNA, 19 nt, Homo sapiens
  misc_RNA (1)...(19): siRNA sense strand
gaaggugguucgagaucag

SEQ ID NO: 467504 - RNA, 19 nt, Homo sapiens
  misc_RNA (1)...(19): siRNA sense strand
agaacaguguggaguuuga

SEQ ID NO: 467505 - RNA, 19 nt, Homo sapiens
  misc_RNA (1)...(19): siRNA sense strand
gaccacggacuuugacuug

SEQ ID NO: 467506 - RNA, 19 nt, Homo sapiens
  misc_RNA (1)...(19): siRNA sense strand
ggagauggaagaggaguug

SEQ ID NO: 467507 - RNA, 19 nt, Homo sapiens
  misc_RNA (1)...(19): siRNA sense strand
gauggaagaggaguugaaa

SEQ ID NO: 467508 - RNA, 19 nt, Homo sapiens
  misc_RNA (1)...(19): siRNA sense strand
uggaagaggaguugaaaug

SEQ ID NO: 467509 - RNA, 19 nt, Homo sapiens
  misc_RNA (1)...(19): siRNA sense strand
acaaggagcaugagcacaa

SEQ ID NO: 467510 - RNA, 19 nt, Homo sapiens
  misc_RNA (1)...(19): siRNA sense strand
uggacaagaugagccuaua

SEQ ID NO: 467511 - RNA, 19 nt, Homo sapiens
  misc_RNA (1)...(19): siRNA sense strand
ggaugaccacggacuuuga

SEQ ID NO: 467512 - RNA, 19 nt, Homo sapiens
  misc_RNA (1)...(19): siRNA sense strand
uggauggucuucacuucaa

SEQ ID NO: 467513 - RNA, 19 nt, Homo sapiens
  misc_RNA (1)...(19): siRNA sense strand
ccagcuggauuucgugcaa

SEQ ID NO: 467514 - RNA, 19 nt, Homo sapiens
  misc_RNA (1)...(19): siRNA sense strand
gaacaguguggaguuugaa

SEQ ID NO: 467515 - RNA, 19 nt, Homo sapiens
  misc_RNA (1)...(19): siRNA sense strand
ccacggacuuugacuugag

SEQ ID NO: 467516 - RNA, 19 nt, Homo sapiens
  misc_RNA (1)...(19): siRNA sense strand
ggucuccgacuaugacuau

SEQ ID NO: 467517 - RNA, 19 nt, Homo sapiens
  misc_RNA (1)...(19): siRNA sense strand
gacaagaugagccuauaca

SEQ ID NO: 467518 - RNA, 19 nt, Homo sapiens
  misc_RNA (1)...(19): siRNA sense strand
gaaaaugauccuagugguu

SEQ ID NO: 467519 - RNA, 19 nt, Homo sapiens
  misc_RNA (1)...(19): siRNA sense strand
caagaaucgcguacuggaa

SEQ ID NO: 467520 - RNA, 19 nt, Homo sapiens
  misc_RNA (1)...(19): siRNA sense strand
caaacacuccagccacgaa

SEQ ID NO: 467521 - RNA, 19 nt, Homo sapiens
  misc_RNA (1)...(19): siRNA sense strand
acagugcgaugucuucuac

SEQ ID NO: 467522 - RNA, 19 nt, Homo sapiens
  misc_RNA (1)...(19): siRNA sense strand
caucgaugcccucaacaga

SEQ ID NO: 467523 - RNA, 19 nt, Homo sapiens
  misc_RNA (1)...(19): siRNA sense strand
auacaacgcucgggucaag

SEQ ID NO: 467524 - RNA, 19 nt, Homo sapiens
  misc_RNA (1)...(19): siRNA sense strand
ccucaucgaugcccucaac

SEQ ID NO: 467525 - RNA, 19 nt, Homo sapiens
  misc_RNA (1)...(19): siRNA sense strand
ugaaggugguucgagauca

SEQ ID NO: 467526 - RNA, 19 nt, Homo sapiens
  misc_RNA (1)...(19): siRNA sense strand
gucaaggccuucaacaaaa

SEQ ID NO: 467527 - RNA, 19 nt, Homo sapiens
  misc_RNA (1)...(19): siRNA sense strand
uguggaaacuacauaagag

SEQ ID NO: 467528 - RNA, 19 nt, Homo sapiens
  misc_RNA (1)...(19): siRNA sense strand
ggagaaccacagcauguac

SEQ ID NO: 467529 - RNA, 19 nt, Homo sapiens
  misc_RNA (1)...(19): siRNA sense strand
ggaagaggaguugaaaugc

SEQ ID NO: 467530 - RNA, 19 nt, Homo sapiens
  misc_RNA (1)...(19): siRNA sense strand
caaggagcaugagcacaag

SEQ ID NO: 467531 - RNA, 19 nt, Homo sapiens
  misc_RNA (1)...(19): siRNA sense strand
ggacaagaugagccuauac

SEQ ID NO: 467532 - RNA, 19 nt, Homo sapiens
  misc_RNA (1)...(19): siRNA sense strand
ucgaugcccucaacagaag

SEQ ID NO: 467533 - RNA, 19 nt, Homo sapiens
  misc_RNA (1)...(19): siRNA sense strand
caacaugguccagcagauc

SEQ ID NO: 467534 - RNA, 19 nt, Homo sapiens
  misc_RNA (1)...(19): siRNA sense strand
uccagcagauccaggagaa

SEQ ID NO: 467535 - RNA, 19 nt, Homo sapiens
  misc_RNA (1)...(19): siRNA sense strand
gauuucugacgcccucaua

SEQ ID NO: 467536 - RNA, 19 nt, Homo sapiens
  misc_RNA (1)...(19): siRNA sense strand
gagaacaguguggaguuug

SEQ ID NO: 467537 - RNA, 19 nt, Homo sapiens
  misc_RNA (1)...(19): siRNA sense strand
cagcauguacugcgugcaa

SEQ ID NO: 467538 - RNA, 19 nt, Homo sapiens
  misc_RNA (1)...(19): siRNA sense strand
gaacagugcgaugucuucu

SEQ ID NO: 467539 - RNA, 19 nt, Homo sapiens
  misc_RNA (1)...(19): siRNA sense strand
gcacacucacuccaaggau

SEQ ID NO: 467540 - RNA, 19 nt, Homo sapiens
  misc_RNA (1)...(19): siRNA sense strand
aaaaugauccuagugguuu

SEQ ID NO: 467541 - RNA, 19 nt, Homo sapiens
  misc_RNA (1)...(19): siRNA sense strand
cgaacagugcgaugucuuc

SEQ ID NO: 467542 - RNA, 19 nt, Homo sapiens
  misc_RNA (1)...(19): siRNA sense strand
caaggaugaccacggacuu

SEQ ID NO: 467543 - RNA, 19 nt, Homo sapiens
  misc_RNA (1)...(19): siRNA sense strand
gcauguacugcgugcaaug

SEQ ID NO: 467544 - RNA, 19 nt, Homo sapiens
  misc_RNA (1)...(19): siRNA sense strand
acacucacuccaaggauga

SEQ ID NO: 467545 - RNA, 19 nt, Homo sapiens
  misc_RNA (1)...(19): siRNA sense strand
gggucaaggccuucaacaa

SEQ ID NO: 467546 - RNA, 19 nt, Homo sapiens
  misc_RNA (1)...(19): siRNA sense strand
cagcagauccaggagaaca

SEQ ID NO: 467547 - RNA, 19 nt, Homo sapiens
  misc_RNA (1)...(19): siRNA sense strand
uggagaaccacagcaugua

SEQ ID NO: 467548 - RNA, 19 nt, Homo sapiens
  misc_RNA (1)...(19): siRNA sense strand
uguggauggucuucacuuc

SEQ ID NO: 467549 - RNA, 19 nt, Homo sapiens
  misc_RNA (1)...(19): siRNA sense strand
gacaaugugcacuguggau

SEQ ID NO: 467550 - RNA, 19 nt, Homo sapiens
  misc_RNA (1)...(19): siRNA sense strand
ucugacgcccucauaagaa

SEQ ID NO: 467551 - RNA, 19 nt, Homo sapiens
  misc_RNA (1)...(19): siRNA sense strand
ugacuggccucgagaugua

SEQ ID NO: 467552 - RNA, 19 nt, Homo sapiens
  misc_RNA (1)...(19): siRNA sense strand
gaacugaccgggagaucaa

SEQ ID NO: 467553 - RNA, 19 nt, Homo sapiens
  misc_RNA (1)...(19): siRNA sense strand
ggaggaggccuucccauca

SEQ ID NO: 467554 - RNA, 19 nt, Homo sapiens
  misc_RNA (1)...(19): siRNA sense strand
gagcucugcagcacucuua

SEQ ID NO: 467555 - RNA, 19 nt, Homo sapiens
  misc_RNA (1)...(19): siRNA sense strand
ucgaaagccucucuucugu

SEQ ID NO: 467556 - RNA, 19 nt, Homo sapiens
  misc_RNA (1)...(19): siRNA sense strand
ugaggcgacuggaggcuuu

SEQ ID NO: 467557 - RNA, 19 nt, Homo sapiens
  misc_RNA (1)...(19): siRNA sense strand
gaggaggccuucccaucag

SEQ ID NO: 467558 - RNA, 19 nt, Homo sapiens
  misc_RNA (1)...(19): siRNA sense strand
uggaaaugcugacuuuuaa

SEQ ID NO: 467559 - RNA, 19 nt, Homo sapiens
  misc_RNA (1)...(19): siRNA sense strand
aagccucucuucuguggaa

SEQ ID NO: 467560 - RNA, 19 nt, Homo sapiens
  misc_RNA (1)...(19): siRNA sense strand
caagcgaaucucugccuuu

SEQ ID NO: 467561 - RNA, 19 nt, Homo sapiens
  misc_RNA (1)...(19): siRNA sense strand
aagcgaaucucugccuuuc

SEQ ID NO: 467562 - RNA, 19 nt, Homo sapiens
  misc_RNA (1)...(19): siRNA sense strand
ugaagguaauccggaguga

SEQ ID NO: 467563 - RNA, 19 nt, Homo sapiens
  misc_RNA (1)...(19): siRNA sense strand
ugcuggaaaugcugacuuu

SEQ ID NO: 467564 - RNA, 19 nt, Homo sapiens
  misc_RNA (1)...(19): siRNA sense strand
gucgaaagccucucuucug

SEQ ID NO: 467565 - RNA, 19 nt, Homo sapiens
  misc_RNA (1)...(19): siRNA sense strand
gaugacuggccucgagaug

SEQ ID NO: 467566 - RNA, 19 nt, Homo sapiens
  misc_RNA (1)...(19): siRNA sense strand
ucucuucuguggaaacucu

SEQ ID NO: 467567 - RNA, 19 nt, Homo sapiens
  misc_RNA (1)...(19): siRNA sense strand
gaacugaccgggagaucaa

SEQ ID NO: 467568 - RNA, 19 nt, Homo sapiens
  misc_RNA (1)...(19): siRNA sense strand
ggaggaggccuucccauca

SEQ ID NO: 467569 - RNA, 19 nt, Homo sapiens
  misc_RNA (1)...(19): siRNA sense strand
ucgaaagccucucuucugu

SEQ ID NO: 467570 - RNA, 19 nt, Homo sapiens
  misc_RNA (1)...(19): siRNA sense strand
ugaggcgacuggaggcuuu

SEQ ID NO: 467571 - RNA, 19 nt, Homo sapiens
  misc_RNA (1)...(19): siRNA sense strand
gaggaggccuucccaucag

SEQ ID NO: 467572 - RNA, 19 nt, Homo sapiens
  misc_RNA (1)...(19): siRNA sense strand
aagccucucuucuguggaa

SEQ ID NO: 467573 - RNA, 19 nt, Homo sapiens
  misc_RNA (1)...(19): siRNA sense strand
gucgaaagccucucuucug

SEQ ID NO: 467574 - RNA, 19 nt, Homo sapiens
  misc_RNA (1)...(19): siRNA sense strand
ucucuucuguggaaacucu

SEQ ID NO: 467575 - RNA, 19 nt, Homo sapiens
  misc_RNA (1)...(19): siRNA sense strand
ugacuggccucgagaugua

SEQ ID NO: 467576 - RNA, 19 nt, Homo sapiens
  misc_RNA (1)...(19): siRNA sense strand
gaacugaccgggagaucaa

SEQ ID NO: 467577 - RNA, 19 nt, Homo sapiens
  misc_RNA (1)...(19): siRNA sense strand
ggaggaggccuucccauca

SEQ ID NO: 467578 - RNA, 19 nt, Homo sapiens
  misc_RNA (1)...(19): siRNA sense strand
gagcucugcagcacucuua

SEQ ID NO: 467579 - RNA, 19 nt, Homo sapiens
  misc_RNA (1)...(19): siRNA sense strand
ucgaaagccucucuucugu

SEQ ID NO: 467580 - RNA, 19 nt, Homo sapiens
  misc_RNA (1)...(19): siRNA sense strand
ugaggcgacuggaggcuuu

SEQ ID NO: 467581 - RNA, 19 nt, Homo sapiens
  misc_RNA (1)...(19): siRNA sense strand
gaggaggccuucccaucag

SEQ ID NO: 467582 - RNA, 19 nt, Homo sapiens
  misc_RNA (1)...(19): siRNA sense strand
uggaaaugcugacuuuuaa

SEQ ID NO: 467583 - RNA, 19 nt, Homo sapiens
  misc_RNA (1)...(19): siRNA sense strand
aagccucucuucuguggaa

SEQ ID NO: 467584 - RNA, 19 nt, Homo sapiens
  misc_RNA (1)...(19): siRNA sense strand
caagcgaaucucugccuuu

SEQ ID NO: 467585 - RNA, 19 nt, Homo sapiens
  misc_RNA (1)...(19): siRNA sense strand
aagcgaaucucugccuuuc

SEQ ID NO: 467586 - RNA, 19 nt, Homo sapiens
  misc_RNA (1)...(19): siRNA sense strand
ugaagguaauccggaguga

SEQ ID NO: 467587 - RNA, 19 nt, Homo sapiens
  misc_RNA (1)...(19): siRNA sense strand
ugcuggaaaugcugacuuu

SEQ ID NO: 467588 - RNA, 19 nt, Homo sapiens
  misc_RNA (1)...(19): siRNA sense strand
gucgaaagccucucuucug

SEQ ID NO: 467589 - RNA, 19 nt, Homo sapiens
  misc_RNA (1)...(19): siRNA sense strand
gaugacuggccucgagaug

SEQ ID NO: 467590 - RNA, 19 nt, Homo sapiens
  misc_RNA (1)...(19): siRNA sense strand
ucucuucuguggaaacucu

SEQ ID NO: 467591 - RNA, 19 nt, Homo sapiens
  misc_RNA (1)...(19): siRNA sense strand
gaacugaccgggagaucaa

SEQ ID NO: 467592 - RNA, 19 nt, Homo sapiens
  misc_RNA (1)...(19): siRNA sense strand
ggaggaggccuucccauca

SEQ ID NO: 467593 - RNA, 19 nt, Homo sapiens
  misc_RNA (1)...(19): siRNA sense strand
ucgaaagccucucuucugu

SEQ ID NO: 467594 - RNA, 19 nt, Homo sapiens
  misc_RNA (1)...(19): siRNA sense strand
ugaggcgacuggaggcuuu

SEQ ID NO: 467595 - RNA, 19 nt, Homo sapiens
  misc_RNA (1)...(19): siRNA sense strand
gaggaggccuucccaucag

SEQ ID NO: 467596 - RNA, 19 nt, Homo sapiens
  misc_RNA (1)...(19): siRNA sense strand
aagccucucuucuguggaa

SEQ ID NO: 467597 - RNA, 19 nt, Homo sapiens
  misc_RNA (1)...(19): siRNA sense strand
gucgaaagccucucuucug

SEQ ID NO: 467598 - RNA, 19 nt, Homo sapiens
  misc_RNA (1)...(19): siRNA sense strand
ucucuucuguggaaacucu

SEQ ID NO: 467599 - RNA, 19 nt, Homo sapiens
  misc_RNA (1)...(19): siRNA sense strand
ggaagcagauuacugguuu

SEQ ID NO: 467600 - RNA, 19 nt, Homo sapiens
  misc_RNA (1)...(19): siRNA sense strand
gcagauuacugguuuauga

SEQ ID NO: 467601 - RNA, 19 nt, Homo sapiens
  misc_RNA (1)...(19): siRNA sense strand
gagcagaaaguucggauua

SEQ ID NO: 467602 - RNA, 19 nt, Homo sapiens
  misc_RNA (1)...(19): siRNA sense strand
gcagaaaguucggauuaaa

SEQ ID NO: 467603 - RNA, 19 nt, Homo sapiens
  misc_RNA (1)...(19): siRNA sense strand
guacaucccugccagauuc

SEQ ID NO: 467604 - RNA, 19 nt, Homo sapiens
  misc_RNA (1)...(19): siRNA sense strand
gaagaugggugaccucaag

SEQ ID NO: 467605 - RNA, 19 nt, Homo sapiens
  misc_RNA (1)...(19): siRNA sense strand
gaaaccggauuccaacuau

SEQ ID NO: 467606 - RNA, 19 nt, Homo sapiens
  misc_RNA (1)...(19): siRNA sense strand
caaggaagccuaccagauu

SEQ ID NO: 467607 - RNA, 19 nt, Homo sapiens
  misc_RNA (1)...(19): siRNA sense strand
gagagcagguuuaaugaug

SEQ ID NO: 467608 - RNA, 19 nt, Homo sapiens
  misc_RNA (1)...(19): siRNA sense strand
gggcaucucuaaagugaaa

SEQ ID NO: 467609 - RNA, 19 nt, Homo sapiens
  misc_RNA (1)...(19): siRNA sense strand
uacaagaccuccgauauuu

SEQ ID NO: 467610 - RNA, 19 nt, Homo sapiens
  misc_RNA (1)...(19): siRNA sense strand
guacaagaccuccgauauu

SEQ ID NO: 467611 - RNA, 19 nt, Homo sapiens
  misc_RNA (1)...(19): siRNA sense strand
gaagcagauuacugguuua

SEQ ID NO: 467612 - RNA, 19 nt, Homo sapiens
  misc_RNA (1)...(19): siRNA sense strand
ugagaagcauccugaguuu

SEQ ID NO: 467613 - RNA, 19 nt, Homo sapiens
  misc_RNA (1)...(19): siRNA sense strand
gaaacaaagaugcuaauca

SEQ ID NO: 467614 - RNA, 19 nt, Homo sapiens
  misc_RNA (1)...(19): siRNA sense strand
gaaccucgcgcuugaaaug

SEQ ID NO: 467615 - RNA, 19 nt, Homo sapiens
  misc_RNA (1)...(19): siRNA sense strand
ugauggaacucaacugauu

SEQ ID NO: 467616 - RNA, 19 nt, Homo sapiens
  misc_RNA (1)...(19): siRNA sense strand
gaaaggaucgggcacugaa

SEQ ID NO: 467617 - RNA, 19 nt, Homo sapiens
  misc_RNA (1)...(19): siRNA sense strand
uggagucucucauucguua

SEQ ID NO: 467618 - RNA, 19 nt, Homo sapiens
  misc_RNA (1)...(19): siRNA sense strand
ggaugacccuggcccauga

SEQ ID NO: 467619 - RNA, 19 nt, Homo sapiens
  misc_RNA (1)...(19): siRNA sense strand
gcuagaagguuuagauuuu

SEQ ID NO: 467620 - RNA, 19 nt, Homo sapiens
  misc_RNA (1)...(19): siRNA sense strand
caaagaugcuaaucaccaa

SEQ ID NO: 467621 - RNA, 19 nt, Homo sapiens
  misc_RNA (1)...(19): siRNA sense strand
gcugagaccuaccugaaga

SEQ ID NO: 467622 - RNA, 19 nt, Homo sapiens
  misc_RNA (1)...(19): siRNA sense strand
ggacaaaugauggucagua

SEQ ID NO: 467623 - RNA, 19 nt, Homo sapiens
  misc_RNA (1)...(19): siRNA sense strand
aggagaagauuaucaagaa

SEQ ID NO: 467624 - RNA, 19 nt, Homo sapiens
  misc_RNA (1)...(19): siRNA sense strand
gccgagcacuguauaaaug

SEQ ID NO: 467625 - RNA, 19 nt, Homo sapiens
  misc_RNA (1)...(19): siRNA sense strand
gaaaacagauuggaaagga

SEQ ID NO: 467626 - RNA, 19 nt, Homo sapiens
  misc_RNA (1)...(19): siRNA sense strand
gcagauggagucucucauu

SEQ ID NO: 467627 - RNA, 19 nt, Homo sapiens
  misc_RNA (1)...(19): siRNA sense strand
gcggagagcagguuuaaug

SEQ ID NO: 467628 - RNA, 19 nt, Homo sapiens
  misc_RNA (1)...(19): siRNA sense strand
gcagagcuguaccaugguu

SEQ ID NO: 467629 - RNA, 19 nt, Homo sapiens
  misc_RNA (1)...(19): siRNA sense strand
gggaugaggccuuugcuuu

SEQ ID NO: 467630 - RNA, 19 nt, Homo sapiens
  misc_RNA (1)...(19): siRNA sense strand
uggaagcgcuagaagguuu

SEQ ID NO: 467631 - RNA, 19 nt, Homo sapiens
  misc_RNA (1)...(19): siRNA sense strand
aaacaaagaugcuaaucac

SEQ ID NO: 467632 - RNA, 19 nt, Homo sapiens
  misc_RNA (1)...(19): siRNA sense strand
ucagaggacuuaucagaca

SEQ ID NO: 467633 - RNA, 19 nt, Homo sapiens
  misc_RNA (1)...(19): siRNA sense strand
gcaguccgcucccauguac

SEQ ID NO: 467634 - RNA, 19 nt, Homo sapiens
  misc_RNA (1)...(19): siRNA sense strand
agaagcauccugaguuuaa

SEQ ID NO: 467635 - RNA, 19 nt, Homo sapiens
  misc_RNA (1)...(19): siRNA sense strand
cuccaugucuucuccauuu

SEQ ID NO: 467636 - RNA, 19 nt, Homo sapiens
  misc_RNA (1)...(19): siRNA sense strand
gcagagaacgaucgcuuug

SEQ ID NO: 467637 - RNA, 19 nt, Homo sapiens
  misc_RNA (1)...(19): siRNA sense strand
auaggaaacuguucaagga

SEQ ID NO: 467638 - RNA, 19 nt, Homo sapiens
  misc_RNA (1)...(19): siRNA sense strand
gacaagcaaguaucucuuu

SEQ ID NO: 467639 - RNA, 19 nt, Homo sapiens
  misc_RNA (1)...(19): siRNA sense strand
aacaacagcucccagauuc

SEQ ID NO: 467640 - RNA, 19 nt, Homo sapiens
  misc_RNA (1)...(19): siRNA sense strand
ggaugaggccuuugcuuug

SEQ ID NO: 467641 - RNA, 19 nt, Homo sapiens
  misc_RNA (1)...(19): siRNA sense strand
gaccauggcuggguugaca

SEQ ID NO: 467642 - RNA, 19 nt, Homo sapiens
  misc_RNA (1)...(19): siRNA sense strand
ucuaugaguuguauucaga

SEQ ID NO: 467643 - RNA, 19 nt, Homo sapiens
  misc_RNA (1)...(19): siRNA sense strand
guguugacguggagagaua

SEQ ID NO: 467644 - RNA, 19 nt, Homo sapiens
  misc_RNA (1)...(19): siRNA sense strand
gcacaguccaugggcuuua

SEQ ID NO: 467645 - RNA, 19 nt, Homo sapiens
  misc_RNA (1)...(19): siRNA sense strand
ggacuuaucagacaugcau

SEQ ID NO: 467646 - RNA, 19 nt, Homo sapiens
  misc_RNA (1)...(19): siRNA sense strand
gacaaaugauggucaguac

SEQ ID NO: 467647 - RNA, 19 nt, Homo sapiens
  misc_RNA (1)...(19): siRNA sense strand
gaggacccguucacagcua

SEQ ID NO: 467648 - RNA, 19 nt, Homo sapiens
  misc_RNA (1)...(19): siRNA sense strand
aaacaacagcucccagauu

SEQ ID NO: 467649 - RNA, 19 nt, Homo sapiens
  misc_RNA (1)...(19): siRNA sense strand
ugacagacagcuagagauu

SEQ ID NO: 467650 - RNA, 19 nt, Homo sapiens
  misc_RNA (1)...(19): siRNA sense strand
gaacgaucgcuuugaggaa

SEQ ID NO: 467651 - RNA, 19 nt, Homo sapiens
  misc_RNA (1)...(19): siRNA sense strand
ggagaagauuaucaagaag

SEQ ID NO: 467652 - RNA, 19 nt, Homo sapiens
  misc_RNA (1)...(19): siRNA sense strand
gagcucaucagcagcauug

SEQ ID NO: 467653 - RNA, 19 nt, Homo sapiens
  misc_RNA (1)...(19): siRNA sense strand
uacaauggcuccaagaucu

SEQ ID NO: 467654 - RNA, 19 nt, Homo sapiens
  misc_RNA (1)...(19): siRNA sense strand
ugcaucagcuacuuuacua

SEQ ID NO: 467655 - RNA, 19 nt, Homo sapiens
  misc_RNA (1)...(19): siRNA sense strand
gagaagcauccugaguuua

SEQ ID NO: 467656 - RNA, 19 nt, Homo sapiens
  misc_RNA (1)...(19): siRNA sense strand
gagaaccucgcgcuugaaa

SEQ ID NO: 467657 - RNA, 19 nt, Homo sapiens
  misc_RNA (1)...(19): siRNA sense strand
gauaaagccgagcacugua

SEQ ID NO: 467658 - RNA, 19 nt, Homo sapiens
  misc_RNA (1)...(19): siRNA sense strand
gacaaucucuuugcuaucg

SEQ ID NO: 467659 - RNA, 19 nt, Homo sapiens
  misc_RNA (1)...(19): siRNA sense strand
cagauggagucucucauuc

SEQ ID NO: 467660 - RNA, 19 nt, Homo sapiens
  misc_RNA (1)...(19): siRNA sense strand
ccagaaagcguuccacaag

SEQ ID NO: 467661 - RNA, 19 nt, Homo sapiens
  misc_RNA (1)...(19): siRNA sense strand
gcgcugggaugaggccuuu

SEQ ID NO: 467662 - RNA, 19 nt, Homo sapiens
  misc_RNA (1)...(19): siRNA sense strand
caaagaaacaaagaugcua

SEQ ID NO: 467663 - RNA, 19 nt, Homo sapiens
  misc_RNA (1)...(19): siRNA sense strand
gcugaagaauggacagauc

SEQ ID NO: 467664 - RNA, 19 nt, Homo sapiens
  misc_RNA (1)...(19): siRNA sense strand
cgaaaccggauuccaacua

SEQ ID NO: 467665 - RNA, 19 nt, Homo sapiens
  misc_RNA (1)...(19): siRNA sense strand
gaugaggccuuugcuuugg

SEQ ID NO: 467666 - RNA, 19 nt, Homo sapiens
  misc_RNA (1)...(19): siRNA sense strand
caagaccuccgauauuuag

SEQ ID NO: 467667 - RNA, 19 nt, Homo sapiens
  misc_RNA (1)...(19): siRNA sense strand
uggacaaucucuuugcuau

SEQ ID NO: 467668 - RNA, 19 nt, Homo sapiens
  misc_RNA (1)...(19): siRNA sense strand
agaagucugucuccaaaca

SEQ ID NO: 467669 - RNA, 19 nt, Homo sapiens
  misc_RNA (1)...(19): siRNA sense strand
gauggaacucaacugauuu

SEQ ID NO: 467670 - RNA, 19 nt, Homo sapiens
  misc_RNA (1)...(19): siRNA sense strand
gugagaagcauccugaguu

SEQ ID NO: 467671 - RNA, 19 nt, Homo sapiens
  misc_RNA (1)...(19): siRNA sense strand
acaagaccuccgauauuua

SEQ ID NO: 467672 - RNA, 19 nt, Homo sapiens
  misc_RNA (1)...(19): siRNA sense strand
guaaaggagaagauuauca

SEQ ID NO: 467673 - RNA, 19 nt, Homo sapiens
  misc_RNA (1)...(19): siRNA sense strand
ucaaugggaucaucagcau

SEQ ID NO: 467674 - RNA, 19 nt, Homo sapiens
  misc_RNA (1)...(19): siRNA sense strand
ccacgacagugaggaguug

SEQ ID NO: 467675 - RNA, 19 nt, Homo sapiens
  misc_RNA (1)...(19): siRNA sense strand
gcaagguggcucagaguuc

SEQ ID NO: 467676 - RNA, 19 nt, Homo sapiens
  misc_RNA (1)...(19): siRNA sense strand
uccaugggcuuuacaagga

SEQ ID NO: 467677 - RNA, 19 nt, Homo sapiens
  misc_RNA (1)...(19): siRNA sense strand
gaugacagacagcuagaga

SEQ ID NO: 467678 - RNA, 19 nt, Homo sapiens
  misc_RNA (1)...(19): siRNA sense strand
ucgggcaucucuaaaguga

SEQ ID NO: 467679 - RNA, 19 nt, Homo sapiens
  misc_RNA (1)...(19): siRNA sense strand
uaaagccgagcacuguaua

SEQ ID NO: 467680 - RNA, 19 nt, Homo sapiens
  misc_RNA (1)...(19): siRNA sense strand
gugaggacaugcucugcuu

SEQ ID NO: 467681 - RNA, 19 nt, Homo sapiens
  misc_RNA (1)...(19): siRNA sense strand
ggguaaaggagaagauuau

SEQ ID NO: 467682 - RNA, 19 nt, Homo sapiens
  misc_RNA (1)...(19): siRNA sense strand
ccugaucacugagcagaaa

SEQ ID NO: 467683 - RNA, 19 nt, Homo sapiens
  misc_RNA (1)...(19): siRNA sense strand
gaaaucgauuggcuaucca

SEQ ID NO: 467684 - RNA, 19 nt, Homo sapiens
  misc_RNA (1)...(19): siRNA sense strand
ggaagcgcuagaagguuua

SEQ ID NO: 467685 - RNA, 19 nt, Homo sapiens
  misc_RNA (1)...(19): siRNA sense strand
ggcgugaacuggccaugga

SEQ ID NO: 467686 - RNA, 19 nt, Homo sapiens
  misc_RNA (1)...(19): siRNA sense strand
aaggaagccuaccagauug

SEQ ID NO: 467687 - RNA, 19 nt, Homo sapiens
  misc_RNA (1)...(19): siRNA sense strand
gagaagauuaucaagaagu

SEQ ID NO: 467688 - RNA, 19 nt, Homo sapiens
  misc_RNA (1)...(19): siRNA sense strand
gagaaaauccucaucuaug

SEQ ID NO: 467689 - RNA, 19 nt, Homo sapiens
  misc_RNA (1)...(19): siRNA sense strand
acaacccgcugcucaacaa

SEQ ID NO: 467690 - RNA, 19 nt, Homo sapiens
  misc_RNA (1)...(19): siRNA sense strand
gauggagucucucauucgu

SEQ ID NO: 467691 - RNA, 19 nt, Homo sapiens
  misc_RNA (1)...(19): siRNA sense strand
ggaaaggaucgggcacuga

SEQ ID NO: 467692 - RNA, 19 nt, Homo sapiens
  misc_RNA (1)...(19): siRNA sense strand
gaucgggcacugaacuuug

SEQ ID NO: 467693 - RNA, 19 nt, Homo sapiens
  misc_RNA (1)...(19): siRNA sense strand
agaaaguucggauuaaaug

SEQ ID NO: 467694 - RNA, 19 nt, Homo sapiens
  misc_RNA (1)...(19): siRNA sense strand
gaagcauccugaguuuaag

SEQ ID NO: 467695 - RNA, 19 nt, Homo sapiens
  misc_RNA (1)...(19): siRNA sense strand
caccucugauggcaccuua

SEQ ID NO: 467696 - RNA, 19 nt, Homo sapiens
  misc_RNA (1)...(19): siRNA sense strand
uguaugacaucgacaccaa

SEQ ID NO: 467697 - RNA, 19 nt, Homo sapiens
  misc_RNA (1)...(19): siRNA sense strand
gaagcuggccgugguagau

SEQ ID NO: 467698 - RNA, 19 nt, Homo sapiens
  misc_RNA (1)...(19): siRNA sense strand
cuaccuaccucaagaagcu

SEQ ID NO: 467699 - RNA, 19 nt, Homo sapiens
  misc_RNA (1)...(19): siRNA sense strand
ggaagcagauuacugguuu

SEQ ID NO: 467700 - RNA, 19 nt, Homo sapiens
  misc_RNA (1)...(19): siRNA sense strand
gcagauuacugguuuauga

SEQ ID NO: 467701 - RNA, 19 nt, Homo sapiens
  misc_RNA (1)...(19): siRNA sense strand
gagcagaaaguucggauua

SEQ ID NO: 467702 - RNA, 19 nt, Homo sapiens
  misc_RNA (1)...(19): siRNA sense strand
gcagaaaguucggauuaaa

SEQ ID NO: 467703 - RNA, 19 nt, Homo sapiens
  misc_RNA (1)...(19): siRNA sense strand
guacaucccugccagauuc

SEQ ID NO: 467704 - RNA, 19 nt, Homo sapiens
  misc_RNA (1)...(19): siRNA sense strand
gaagaugggugaccucaag

SEQ ID NO: 467705 - RNA, 19 nt, Homo sapiens
  misc_RNA (1)...(19): siRNA sense strand
gaaaccggauuccaacuau

SEQ ID NO: 467706 - RNA, 19 nt, Homo sapiens
  misc_RNA (1)...(19): siRNA sense strand
caaggaagccuaccagauu

SEQ ID NO: 467707 - RNA, 19 nt, Homo sapiens
  misc_RNA (1)...(19): siRNA sense strand
gagagcagguuuaaugaug

SEQ ID NO: 467708 - RNA, 19 nt, Homo sapiens
  misc_RNA (1)...(19): siRNA sense strand
gggcaucucuaaagugaaa

SEQ ID NO: 467709 - RNA, 19 nt, Homo sapiens
  misc_RNA (1)...(19): siRNA sense strand
uacaagaccuccgauauuu

SEQ ID NO: 467710 - RNA, 19 nt, Homo sapiens
  misc_RNA (1)...(19): siRNA sense strand
guacaagaccuccgauauu

SEQ ID NO: 467711 - RNA, 19 nt, Homo sapiens
  misc_RNA (1)...(19): siRNA sense strand
gaagcagauuacugguuua

SEQ ID NO: 467712 - RNA, 19 nt, Homo sapiens
  misc_RNA (1)...(19): siRNA sense strand
ugagaagcauccugaguuu

SEQ ID NO: 467713 - RNA, 19 nt, Homo sapiens
  misc_RNA (1)...(19): siRNA sense strand
gaaacaaagaugcuaauca

SEQ ID NO: 467714 - RNA, 19 nt, Homo sapiens
  misc_RNA (1)...(19): siRNA sense strand
gaaccucgcgcuugaaaug

SEQ ID NO: 467715 - RNA, 19 nt, Homo sapiens
  misc_RNA (1)...(19): siRNA sense strand
ugauggaacucaacugauu

SEQ ID NO: 467716 - RNA, 19 nt, Homo sapiens
  misc_RNA (1)...(19): siRNA sense strand
gaaaggaucgggcacugaa

SEQ ID NO: 467717 - RNA, 19 nt, Homo sapiens
  misc_RNA (1)...(19): siRNA sense strand
uggagucucucauucguua

SEQ ID NO: 467718 - RNA, 19 nt, Homo sapiens
  misc_RNA (1)...(19): siRNA sense strand
ggaugacccuggcccauga

SEQ ID NO: 467719 - RNA, 19 nt, Homo sapiens
  misc_RNA (1)...(19): siRNA sense strand
gcuagaagguuuagauuuu

SEQ ID NO: 467720 - RNA, 19 nt, Homo sapiens
  misc_RNA (1)...(19): siRNA sense strand
caaagaugcuaaucaccaa

SEQ ID NO: 467721 - RNA, 19 nt, Homo sapiens
  misc_RNA (1)...(19): siRNA sense strand
gcugagaccuaccugaaga

SEQ ID NO: 467722 - RNA, 19 nt, Homo sapiens
  misc_RNA (1)...(19): siRNA sense strand
ggacaaaugauggucagua

SEQ ID NO: 467723 - RNA, 19 nt, Homo sapiens
  misc_RNA (1)...(19): siRNA sense strand
aggagaagauuaucaagaa

SEQ ID NO: 467724 - RNA, 19 nt, Homo sapiens
  misc_RNA (1)...(19): siRNA sense strand
gccgagcacuguauaaaug

SEQ ID NO: 467725 - RNA, 19 nt, Homo sapiens
  misc_RNA (1)...(19): siRNA sense strand
gaaaacagauuggaaagga

SEQ ID NO: 467726 - RNA, 19 nt, Homo sapiens
  misc_RNA (1)...(19): siRNA sense strand
gcagauggagucucucauu

SEQ ID NO: 467727 - RNA, 19 nt, Homo sapiens
  misc_RNA (1)...(19): siRNA sense strand
gcggagagcagguuuaaug

SEQ ID NO: 467728 - RNA, 19 nt, Homo sapiens
  misc_RNA (1)...(19): siRNA sense strand
gcagagcuguaccaugguu

SEQ ID NO: 467729 - RNA, 19 nt, Homo sapiens
  misc_RNA (1)...(19): siRNA sense strand
gggaugaggccuuugcuuu

SEQ ID NO: 467730 - RNA, 19 nt, Homo sapiens
  misc_RNA (1)...(19): siRNA sense strand
uggaagcgcuagaagguuu

SEQ ID NO: 467731 - RNA, 19 nt, Homo sapiens
  misc_RNA (1)...(19): siRNA sense strand
aaacaaagaugcuaaucac

SEQ ID NO: 467732 - RNA, 19 nt, Homo sapiens
  misc_RNA (1)...(19): siRNA sense strand
ucagaggacuuaucagaca

SEQ ID NO: 467733 - RNA, 19 nt, Homo sapiens
  misc_RNA (1)...(19): siRNA sense strand
gcaguccgcucccauguac

SEQ ID NO: 467734 - RNA, 19 nt, Homo sapiens
  misc_RNA (1)...(19): siRNA sense strand
agaagcauccugaguuuaa

SEQ ID NO: 467735 - RNA, 19 nt, Homo sapiens
  misc_RNA (1)...(19): siRNA sense strand
cuccaugucuucuccauuu

SEQ ID NO: 467736 - RNA, 19 nt, Homo sapiens
  misc_RNA (1)...(19): siRNA sense strand
gcagagaacgaucgcuuug

SEQ ID NO: 467737 - RNA, 19 nt, Homo sapiens
  misc_RNA (1)...(19): siRNA sense strand
auaggaaacuguucaagga

SEQ ID NO: 467738 - RNA, 19 nt, Homo sapiens
  misc_RNA (1)...(19): siRNA sense strand
gacaagcaaguaucucuuu

SEQ ID NO: 467739 - RNA, 19 nt, Homo sapiens
  misc_RNA (1)...(19): siRNA sense strand
aacaacagcucccagauuc

SEQ ID NO: 467740 - RNA, 19 nt, Homo sapiens
  misc_RNA (1)...(19): siRNA sense strand
ggaugaggccuuugcuuug

SEQ ID NO: 467741 - RNA, 19 nt, Homo sapiens
  misc_RNA (1)...(19): siRNA sense strand
gaccauggcuggguugaca

SEQ ID NO: 467742 - RNA, 19 nt, Homo sapiens
  misc_RNA (1)...(19): siRNA sense strand
ucuaugaguuguauucaga

SEQ ID NO: 467743 - RNA, 19 nt, Homo sapiens
  misc_RNA (1)...(19): siRNA sense strand
guguugacguggagagaua

SEQ ID NO: 467744 - RNA, 19 nt, Homo sapiens
  misc_RNA (1)...(19): siRNA sense strand
gcacaguccaugggcuuua

SEQ ID NO: 467745 - RNA, 19 nt, Homo sapiens
  misc_RNA (1)...(19): siRNA sense strand
ggacuuaucagacaugcau

SEQ ID NO: 467746 - RNA, 19 nt, Homo sapiens
  misc_RNA (1)...(19): siRNA sense strand
gacaaaugauggucaguac

SEQ ID NO: 467747 - RNA, 19 nt, Homo sapiens
  misc_RNA (1)...(19): siRNA sense strand
gaggacccguucacagcua

SEQ ID NO: 467748 - RNA, 19 nt, Homo sapiens
  misc_RNA (1)...(19): siRNA sense strand
aaacaacagcucccagauu

SEQ ID NO: 467749 - RNA, 19 nt, Homo sapiens
  misc_RNA (1)...(19): siRNA sense strand
ugacagacagcuagagauu

SEQ ID NO: 467750 - RNA, 19 nt, Homo sapiens
  misc_RNA (1)...(19): siRNA sense strand
gaacgaucgcuuugaggaa

SEQ ID NO: 467751 - RNA, 19 nt, Homo sapiens
  misc_RNA (1)...(19): siRNA sense strand
ggagaagauuaucaagaag

SEQ ID NO: 467752 - RNA, 19 nt, Homo sapiens
  misc_RNA (1)...(19): siRNA sense strand
gagcucaucagcagcauug

SEQ ID NO: 467753 - RNA, 19 nt, Homo sapiens
  misc_RNA (1)...(19): siRNA sense strand
uacaauggcuccaagaucu

SEQ ID NO: 467754 - RNA, 19 nt, Homo sapiens
  misc_RNA (1)...(19): siRNA sense strand
ugcaucagcuacuuuacua

SEQ ID NO: 467755 - RNA, 19 nt, Homo sapiens
  misc_RNA (1)...(19): siRNA sense strand
gagaagcauccugaguuua

SEQ ID NO: 467756 - RNA, 19 nt, Homo sapiens
  misc_RNA (1)...(19): siRNA sense strand
gagaaccucgcgcuugaaa

SEQ ID NO: 467757 - RNA, 19 nt, Homo sapiens
  misc_RNA (1)...(19): siRNA sense strand
gauaaagccgagcacugua

SEQ ID NO: 467758 - RNA, 19 nt, Homo sapiens
  misc_RNA (1)...(19): siRNA sense strand
gacaaucucuuugcuaucg

SEQ ID NO: 467759 - RNA, 19 nt, Homo sapiens
  misc_RNA (1)...(19): siRNA sense strand
cagauggagucucucauuc

SEQ ID NO: 467760 - RNA, 19 nt, Homo sapiens
  misc_RNA (1)...(19): siRNA sense strand
ccagaaagcguuccacaag

SEQ ID NO: 467761 - RNA, 19 nt, Homo sapiens
  misc_RNA (1)...(19): siRNA sense strand
gcgcugggaugaggccuuu

SEQ ID NO: 467762 - RNA, 19 nt, Homo sapiens
  misc_RNA (1)...(19): siRNA sense strand
caaagaaacaaagaugcua

SEQ ID NO: 467763 - RNA, 19 nt, Homo sapiens
  misc_RNA (1)...(19): siRNA sense strand
gcugaagaauggacagauc

SEQ ID NO: 467764 - RNA, 19 nt, Homo sapiens
  misc_RNA (1)...(19): siRNA sense strand
cgaaaccggauuccaacua

SEQ ID NO: 467765 - RNA, 19 nt, Homo sapiens
  misc_RNA (1)...(19): siRNA sense strand
gaugaggccuuugcuuugg

SEQ ID NO: 467766 - RNA, 19 nt, Homo sapiens
  misc_RNA (1)...(19): siRNA sense strand
caagaccuccgauauuuag

SEQ ID NO: 467767 - RNA, 19 nt, Homo sapiens
  misc_RNA (1)...(19): siRNA sense strand
uggacaaucucuuugcuau

SEQ ID NO: 467768 - RNA, 19 nt, Homo sapiens
  misc_RNA (1)...(19): siRNA sense strand
agaagucugucuccaaaca

SEQ ID NO: 467769 - RNA, 19 nt, Homo sapiens
  misc_RNA (1)...(19): siRNA sense strand
gauggaacucaacugauuu

SEQ ID NO: 467770 - RNA, 19 nt, Homo sapiens
  misc_RNA (1)...(19): siRNA sense strand
gugagaagcauccugaguu

SEQ ID NO: 467771 - RNA, 19 nt, Homo sapiens
  misc_RNA (1)...(19): siRNA sense strand
acaagaccuccgauauuua

SEQ ID NO: 467772 - RNA, 19 nt, Homo sapiens
  misc_RNA (1)...(19): siRNA sense strand
guaaaggagaagauuauca

SEQ ID NO: 467773 - RNA, 19 nt, Homo sapiens
  misc_RNA (1)...(19): siRNA sense strand
ucaaugggaucaucagcau

SEQ ID NO: 467774 - RNA, 19 nt, Homo sapiens
  misc_RNA (1)...(19): siRNA sense strand
ccacgacagugaggaguug

SEQ ID NO: 467775 - RNA, 19 nt, Homo sapiens
  misc_RNA (1)...(19): siRNA sense strand
gcaagguggcucagaguuc

SEQ ID NO: 467776 - RNA, 19 nt, Homo sapiens
  misc_RNA (1)...(19): siRNA sense strand
uccaugggcuuuacaagga

SEQ ID NO: 467777 - RNA, 19 nt, Homo sapiens
  misc_RNA (1)...(19): siRNA sense strand
gaugacagacagcuagaga

SEQ ID NO: 467778 - RNA, 19 nt, Homo sapiens
  misc_RNA (1)...(19): siRNA sense strand
ucgggcaucucuaaaguga

SEQ ID NO: 467779 - RNA, 19 nt, Homo sapiens
  misc_RNA (1)...(19): siRNA sense strand
uaaagccgagcacuguaua

SEQ ID NO: 467780 - RNA, 19 nt, Homo sapiens
  misc_RNA (1)...(19): siRNA sense strand
gugaggacaugcucugcuu

SEQ ID NO: 467781 - RNA, 19 nt, Homo sapiens
  misc_RNA (1)...(19): siRNA sense strand
ggguaaaggagaagauuau

SEQ ID NO: 467782 - RNA, 19 nt, Homo sapiens
  misc_RNA (1)...(19): siRNA sense strand
ccugaucacugagcagaaa

SEQ ID NO: 467783 - RNA, 19 nt, Homo sapiens
  misc_RNA (1)...(19): siRNA sense strand
gaaaucgauuggcuaucca

SEQ ID NO: 467784 - RNA, 19 nt, Homo sapiens
  misc_RNA (1)...(19): siRNA sense strand
ggaagcgcuagaagguuua

SEQ ID NO: 467785 - RNA, 19 nt, Homo sapiens
  misc_RNA (1)...(19): siRNA sense strand
ggcgugaacuggccaugga

SEQ ID NO: 467786 - RNA, 19 nt, Homo sapiens
  misc_RNA (1)...(19): siRNA sense strand
aaggaagccuaccagauug

SEQ ID NO: 467787 - RNA, 19 nt, Homo sapiens
  misc_RNA (1)...(19): siRNA sense strand
gagaagauuaucaagaagu

SEQ ID NO: 467788 - RNA, 19 nt, Homo sapiens
  misc_RNA (1)...(19): siRNA sense strand
gagaaaauccucaucuaug

SEQ ID NO: 467789 - RNA, 19 nt, Homo sapiens
  misc_RNA (1)...(19): siRNA sense strand
acaacccgcugcucaacaa

SEQ ID NO: 467790 - RNA, 19 nt, Homo sapiens
  misc_RNA (1)...(19): siRNA sense strand
gauggagucucucauucgu

SEQ ID NO: 467791 - RNA, 19 nt, Homo sapiens
  misc_RNA (1)...(19): siRNA sense strand
ggaaaggaucgggcacuga

SEQ ID NO: 467792 - RNA, 19 nt, Homo sapiens
  misc_RNA (1)...(19): siRNA sense strand
gaucgggcacugaacuuug

SEQ ID NO: 467793 - RNA, 19 nt, Homo sapiens
  misc_RNA (1)...(19): siRNA sense strand
agaaaguucggauuaaaug

SEQ ID NO: 467794 - RNA, 19 nt, Homo sapiens
  misc_RNA (1)...(19): siRNA sense strand
gaagcauccugaguuuaag

SEQ ID NO: 467795 - RNA, 19 nt, Homo sapiens
  misc_RNA (1)...(19): siRNA sense strand
caccucugauggcaccuua

SEQ ID NO: 467796 - RNA, 19 nt, Homo sapiens
  misc_RNA (1)...(19): siRNA sense strand
uguaugacaucgacaccaa

SEQ ID NO: 467797 - RNA, 19 nt, Homo sapiens
  misc_RNA (1)...(19): siRNA sense strand
gaagcuggccgugguagau

SEQ ID NO: 467798 - RNA, 19 nt, Homo sapiens
  misc_RNA (1)...(19): siRNA sense strand
cuaccuaccucaagaagcu

SEQ ID NO: 467799 - RNA, 19 nt, Homo sapiens
  misc_RNA (1)...(19): siRNA sense strand
ggaagcagauuacugguuu

SEQ ID NO: 467800 - RNA, 19 nt, Homo sapiens
  misc_RNA (1)...(19): siRNA sense strand
gcagauuacugguuuauga

SEQ ID NO: 467801 - RNA, 19 nt, Homo sapiens
  misc_RNA (1)...(19): siRNA sense strand
gagcagaaaguucggauua

SEQ ID NO: 467802 - RNA, 19 nt, Homo sapiens
  misc_RNA (1)...(19): siRNA sense strand
gcagaaaguucggauuaaa

SEQ ID NO: 467803 - RNA, 19 nt, Homo sapiens
  misc_RNA (1)...(19): siRNA sense strand
guacaucccugccagauuc

SEQ ID NO: 467804 - RNA, 19 nt, Homo sapiens
  misc_RNA (1)...(19): siRNA sense strand
gaagaugggugaccucaag

SEQ ID NO: 467805 - RNA, 19 nt, Homo sapiens
  misc_RNA (1)...(19): siRNA sense strand
gaaaccggauuccaacuau

SEQ ID NO: 467806 - RNA, 19 nt, Homo sapiens
  misc_RNA (1)...(19): siRNA sense strand
caaggaagccuaccagauu

SEQ ID NO: 467807 - RNA, 19 nt, Homo sapiens
  misc_RNA (1)...(19): siRNA sense strand
gagagcagguuuaaugaug

SEQ ID NO: 467808 - RNA, 19 nt, Homo sapiens
  misc_RNA (1)...(19): siRNA sense strand
gggcaucucuaaagugaaa

SEQ ID NO: 467809 - RNA, 19 nt, Homo sapiens
  misc_RNA (1)...(19): siRNA sense strand
uacaagaccuccgauauuu

SEQ ID NO: 467810 - RNA, 19 nt, Homo sapiens
  misc_RNA (1)...(19): siRNA sense strand
guacaagaccuccgauauu

SEQ ID NO: 467811 - RNA, 19 nt, Homo sapiens
  misc_RNA (1)...(19): siRNA sense strand
gaagcagauuacugguuua

SEQ ID NO: 467812 - RNA, 19 nt, Homo sapiens
  misc_RNA (1)...(19): siRNA sense strand
ugagaagcauccugaguuu

SEQ ID NO: 467813 - RNA, 19 nt, Homo sapiens
  misc_RNA (1)...(19): siRNA sense strand
gaaacaaagaugcuaauca

SEQ ID NO: 467814 - RNA, 19 nt, Homo sapiens
  misc_RNA (1)...(19): siRNA sense strand
gaaccucgcgcuugaaaug

SEQ ID NO: 467815 - RNA, 19 nt, Homo sapiens
  misc_RNA (1)...(19): siRNA sense strand
ugauggaacucaacugauu

SEQ ID NO: 467816 - RNA, 19 nt, Homo sapiens
  misc_RNA (1)...(19): siRNA sense strand
gaaaggaucgggcacugaa

SEQ ID NO: 467817 - RNA, 19 nt, Homo sapiens
  misc_RNA (1)...(19): siRNA sense strand
uggagucucucauucguua

SEQ ID NO: 467818 - RNA, 19 nt, Homo sapiens
  misc_RNA (1)...(19): siRNA sense strand
ggaugacccuggcccauga

SEQ ID NO: 467819 - RNA, 19 nt, Homo sapiens
  misc_RNA (1)...(19): siRNA sense strand
gcuagaagguuuagauuuu

SEQ ID NO: 467820 - RNA, 19 nt, Homo sapiens
  misc_RNA (1)...(19): siRNA sense strand
caaagaugcuaaucaccaa

SEQ ID NO: 467821 - RNA, 19 nt, Homo sapiens
  misc_RNA (1)...(19): siRNA sense strand
gcugagaccuaccugaaga

SEQ ID NO: 467822 - RNA, 19 nt, Homo sapiens
  misc_RNA (1)...(19): siRNA sense strand
ggacaaaugauggucagua

SEQ ID NO: 467823 - RNA, 19 nt, Homo sapiens
  misc_RNA (1)...(19): siRNA sense strand
aggagaagauuaucaagaa

SEQ ID NO: 467824 - RNA, 19 nt, Homo sapiens
  misc_RNA (1)...(19): siRNA sense strand
gccgagcacuguauaaaug

SEQ ID NO: 467825 - RNA, 19 nt, Homo sapiens
  misc_RNA (1)...(19): siRNA sense strand
gaaaacagauuggaaagga

SEQ ID NO: 467826 - RNA, 19 nt, Homo sapiens
  misc_RNA (1)...(19): siRNA sense strand
gcagauggagucucucauu

SEQ ID NO: 467827 - RNA, 19 nt, Homo sapiens
  misc_RNA (1)...(19): siRNA sense strand
gcggagagcagguuuaaug

SEQ ID NO: 467828 - RNA, 19 nt, Homo sapiens
  misc_RNA (1)...(19): siRNA sense strand
gcagagcuguaccaugguu

SEQ ID NO: 467829 - RNA, 19 nt, Homo sapiens
  misc_RNA (1)...(19): siRNA sense strand
gggaugaggccuuugcuuu

SEQ ID NO: 467830 - RNA, 19 nt, Homo sapiens
  misc_RNA (1)...(19): siRNA sense strand
uggaagcgcuagaagguuu

SEQ ID NO: 467831 - RNA, 19 nt, Homo sapiens
  misc_RNA (1)...(19): siRNA sense strand
aaacaaagaugcuaaucac

SEQ ID NO: 467832 - RNA, 19 nt, Homo sapiens
  misc_RNA (1)...(19): siRNA sense strand
ucagaggacuuaucagaca

SEQ ID NO: 467833 - RNA, 19 nt, Homo sapiens
  misc_RNA (1)...(19): siRNA sense strand
gcaguccgcucccauguac

SEQ ID NO: 467834 - RNA, 19 nt, Homo sapiens
  misc_RNA (1)...(19): siRNA sense strand
agaagcauccugaguuuaa

SEQ ID NO: 467835 - RNA, 19 nt, Homo sapiens
  misc_RNA (1)...(19): siRNA sense strand
cuccaugucuucuccauuu

SEQ ID NO: 467836 - RNA, 19 nt, Homo sapiens
  misc_RNA (1)...(19): siRNA sense strand
gcagagaacgaucgcuuug

SEQ ID NO: 467837 - RNA, 19 nt, Homo sapiens
  misc_RNA (1)...(19): siRNA sense strand
auaggaaacuguucaagga

SEQ ID NO: 467838 - RNA, 19 nt, Homo sapiens
  misc_RNA (1)...(19): siRNA sense strand
gacaagcaaguaucucuuu

SEQ ID NO: 467839 - RNA, 19 nt, Homo sapiens
  misc_RNA (1)...(19): siRNA sense strand
aacaacagcucccagauuc

SEQ ID NO: 467840 - RNA, 19 nt, Homo sapiens
  misc_RNA (1)...(19): siRNA sense strand
ggaugaggccuuugcuuug

SEQ ID NO: 467841 - RNA, 19 nt, Homo sapiens
  misc_RNA (1)...(19): siRNA sense strand
gaccauggcuggguugaca

SEQ ID NO: 467842 - RNA, 19 nt, Homo sapiens
  misc_RNA (1)...(19): siRNA sense strand
ucuaugaguuguauucaga

SEQ ID NO: 467843 - RNA, 19 nt, Homo sapiens
  misc_RNA (1)...(19): siRNA sense strand
guguugacguggagagaua

SEQ ID NO: 467844 - RNA, 19 nt, Homo sapiens
  misc_RNA (1)...(19): siRNA sense strand
gcacaguccaugggcuuua

SEQ ID NO: 467845 - RNA, 19 nt, Homo sapiens
  misc_RNA (1)...(19): siRNA sense strand
ggacuuaucagacaugcau

SEQ ID NO: 467846 - RNA, 19 nt, Homo sapiens
  misc_RNA (1)...(19): siRNA sense strand
gacaaaugauggucaguac

SEQ ID NO: 467847 - RNA, 19 nt, Homo sapiens
  misc_RNA (1)...(19): siRNA sense strand
gaggacccguucacagcua

SEQ ID NO: 467848 - RNA, 19 nt, Homo sapiens
  misc_RNA (1)...(19): siRNA sense strand
aaacaacagcucccagauu

SEQ ID NO: 467849 - RNA, 19 nt, Homo sapiens
  misc_RNA (1)...(19): siRNA sense strand
ugacagacagcuagagauu

SEQ ID NO: 467850 - RNA, 19 nt, Homo sapiens
  misc_RNA (1)...(19): siRNA sense strand
gaacgaucgcuuugaggaa

SEQ ID NO: 467851 - RNA, 19 nt, Homo sapiens
  misc_RNA (1)...(19): siRNA sense strand
ggagaagauuaucaagaag

SEQ ID NO: 467852 - RNA, 19 nt, Homo sapiens
  misc_RNA (1)...(19): siRNA sense strand
gagcucaucagcagcauug

SEQ ID NO: 467853 - RNA, 19 nt, Homo sapiens
  misc_RNA (1)...(19): siRNA sense strand
uacaauggcuccaagaucu

SEQ ID NO: 467854 - RNA, 19 nt, Homo sapiens
  misc_RNA (1)...(19): siRNA sense strand
ugcaucagcuacuuuacua

SEQ ID NO: 467855 - RNA, 19 nt, Homo sapiens
  misc_RNA (1)...(19): siRNA sense strand
gagaagcauccugaguuua

SEQ ID NO: 467856 - RNA, 19 nt, Homo sapiens
  misc_RNA (1)...(19): siRNA sense strand
gagaaccucgcgcuugaaa

SEQ ID NO: 467857 - RNA, 19 nt, Homo sapiens
  misc_RNA (1)...(19): siRNA sense strand
gauaaagccgagcacugua

SEQ ID NO: 467858 - RNA, 19 nt, Homo sapiens
  misc_RNA (1)...(19): siRNA sense strand
gacaaucucuuugcuaucg

SEQ ID NO: 467859 - RNA, 19 nt, Homo sapiens
  misc_RNA (1)...(19): siRNA sense strand
cagauggagucucucauuc

SEQ ID NO: 467860 - RNA, 19 nt, Homo sapiens
  misc_RNA (1)...(19): siRNA sense strand
ccagaaagcguuccacaag

SEQ ID NO: 467861 - RNA, 19 nt, Homo sapiens
  misc_RNA (1)...(19): siRNA sense strand
gcgcugggaugaggccuuu

SEQ ID NO: 467862 - RNA, 19 nt, Homo sapiens
  misc_RNA (1)...(19): siRNA sense strand
caaagaaacaaagaugcua

SEQ ID NO: 467863 - RNA, 19 nt, Homo sapiens
  misc_RNA (1)...(19): siRNA sense strand
gcugaagaauggacagauc

SEQ ID NO: 467864 - RNA, 19 nt, Homo sapiens
  misc_RNA (1)...(19): siRNA sense strand
cgaaaccggauuccaacua

SEQ ID NO: 467865 - RNA, 19 nt, Homo sapiens
  misc_RNA (1)...(19): siRNA sense strand
gaugaggccuuugcuuugg

SEQ ID NO: 467866 - RNA, 19 nt, Homo sapiens
  misc_RNA (1)...(19): siRNA sense strand
caagaccuccgauauuuag

SEQ ID NO: 467867 - RNA, 19 nt, Homo sapiens
  misc_RNA (1)...(19): siRNA sense strand
uggacaaucucuuugcuau

SEQ ID NO: 467868 - RNA, 19 nt, Homo sapiens
  misc_RNA (1)...(19): siRNA sense strand
agaagucugucuccaaaca

SEQ ID NO: 467869 - RNA, 19 nt, Homo sapiens
  misc_RNA (1)...(19): siRNA sense strand
gauggaacucaacugauuu

SEQ ID NO: 467870 - RNA, 19 nt, Homo sapiens
  misc_RNA (1)...(19): siRNA sense strand
gugagaagcauccugaguu

SEQ ID NO: 467871 - RNA, 19 nt, Homo sapiens
  misc_RNA (1)...(19): siRNA sense strand
acaagaccuccgauauuua

SEQ ID NO: 467872 - RNA, 19 nt, Homo sapiens
  misc_RNA (1)...(19): siRNA sense strand
guaaaggagaagauuauca

SEQ ID NO: 467873 - RNA, 19 nt, Homo sapiens
  misc_RNA (1)...(19): siRNA sense strand
ucaaugggaucaucagcau

SEQ ID NO: 467874 - RNA, 19 nt, Homo sapiens
  misc_RNA (1)...(19): siRNA sense strand
ccacgacagugaggaguug

SEQ ID NO: 467875 - RNA, 19 nt, Homo sapiens
  misc_RNA (1)...(19): siRNA sense strand
gcaagguggcucagaguuc

SEQ ID NO: 467876 - RNA, 19 nt, Homo sapiens
  misc_RNA (1)...(19): siRNA sense strand
uccaugggcuuuacaagga

SEQ ID NO: 467877 - RNA, 19 nt, Homo sapiens
  misc_RNA (1)...(19): siRNA sense strand
gaugacagacagcuagaga

SEQ ID NO: 467878 - RNA, 19 nt, Homo sapiens
  misc_RNA (1)...(19): siRNA sense strand
ucgggcaucucuaaaguga

SEQ ID NO: 467879 - RNA, 19 nt, Homo sapiens
  misc_RNA (1)...(19): siRNA sense strand
uaaagccgagcacuguaua

SEQ ID NO: 467880 - RNA, 19 nt, Homo sapiens
  misc_RNA (1)...(19): siRNA sense strand
gugaggacaugcucugcuu

SEQ ID NO: 467881 - RNA, 19 nt, Homo sapiens
  misc_RNA (1)...(19): siRNA sense strand
ggguaaaggagaagauuau

SEQ ID NO: 467882 - RNA, 19 nt, Homo sapiens
  misc_RNA (1)...(19): siRNA sense strand
ccugaucacugagcagaaa

SEQ ID NO: 467883 - RNA, 19 nt, Homo sapiens
  misc_RNA (1)...(19): siRNA sense strand
gaaaucgauuggcuaucca

SEQ ID NO: 467884 - RNA, 19 nt, Homo sapiens
  misc_RNA (1)...(19): siRNA sense strand
ggaagcgcuagaagguuua

SEQ ID NO: 467885 - RNA, 19 nt, Homo sapiens
  misc_RNA (1)...(19): siRNA sense strand
ggcgugaacuggccaugga

SEQ ID NO: 467886 - RNA, 19 nt, Homo sapiens
  misc_RNA (1)...(19): siRNA sense strand
aaggaagccuaccagauug

SEQ ID NO: 467887 - RNA, 19 nt, Homo sapiens
  misc_RNA (1)...(19): siRNA sense strand
gagaagauuaucaagaagu

SEQ ID NO: 467888 - RNA, 19 nt, Homo sapiens
  misc_RNA (1)...(19): siRNA sense strand
gagaaaauccucaucuaug

SEQ ID NO: 467889 - RNA, 19 nt, Homo sapiens
  misc_RNA (1)...(19): siRNA sense strand
acaacccgcugcucaacaa

SEQ ID NO: 467890 - RNA, 19 nt, Homo sapiens
  misc_RNA (1)...(19): siRNA sense strand
gauggagucucucauucgu

SEQ ID NO: 467891 - RNA, 19 nt, Homo sapiens
  misc_RNA (1)...(19): siRNA sense strand
ggaaaggaucgggcacuga

SEQ ID NO: 467892 - RNA, 19 nt, Homo sapiens
  misc_RNA (1)...(19): siRNA sense strand
gaucgggcacugaacuuug

SEQ ID NO: 467893 - RNA, 19 nt, Homo sapiens
  misc_RNA (1)...(19): siRNA sense strand
agaaaguucggauuaaaug

SEQ ID NO: 467894 - RNA, 19 nt, Homo sapiens
  misc_RNA (1)...(19): siRNA sense strand
gaagcauccugaguuuaag

SEQ ID NO: 467895 - RNA, 19 nt, Homo sapiens
  misc_RNA (1)...(19): siRNA sense strand
caccucugauggcaccuua

SEQ ID NO: 467896 - RNA, 19 nt, Homo sapiens
  misc_RNA (1)...(19): siRNA sense strand
uguaugacaucgacaccaa

SEQ ID NO: 467897 - RNA, 19 nt, Homo sapiens
  misc_RNA (1)...(19): siRNA sense strand
gaagcuggccgugguagau

SEQ ID NO: 467898 - RNA, 19 nt, Homo sapiens
  misc_RNA (1)...(19): siRNA sense strand
cuaccuaccucaagaagcu

SEQ ID NO: 467899 - RNA, 19 nt, Homo sapiens
  misc_RNA (1)...(19): siRNA sense strand
ggaagcagauuacugguuu

SEQ ID NO: 467900 - RNA, 19 nt, Homo sapiens
  misc_RNA (1)...(19): siRNA sense strand
gcagauuacugguuuauga

SEQ ID NO: 467901 - RNA, 19 nt, Homo sapiens
  misc_RNA (1)...(19): siRNA sense strand
gagcagaaaguucggauua

SEQ ID NO: 467902 - RNA, 19 nt, Homo sapiens
  misc_RNA (1)...(19): siRNA sense strand
gcagaaaguucggauuaaa

SEQ ID NO: 467903 - RNA, 19 nt, Homo sapiens
  misc_RNA (1)...(19): siRNA sense strand
guacaucccugccagauuc

SEQ ID NO: 467904 - RNA, 19 nt, Homo sapiens
  misc_RNA (1)...(19): siRNA sense strand
gaagaugggugaccucaag

SEQ ID NO: 467905 - RNA, 19 nt, Homo sapiens
  misc_RNA (1)...(19): siRNA sense strand
gaaaccggauuccaacuau

SEQ ID NO: 467906 - RNA, 19 nt, Homo sapiens
  misc_RNA (1)...(19): siRNA sense strand
caaggaagccuaccagauu

SEQ ID NO: 467907 - RNA, 19 nt, Homo sapiens
  misc_RNA (1)...(19): siRNA sense strand
gagagcagguuuaaugaug

SEQ ID NO: 467908 - RNA, 19 nt, Homo sapiens
  misc_RNA (1)...(19): siRNA sense strand
gggcaucucuaaagugaaa

SEQ ID NO: 467909 - RNA, 19 nt, Homo sapiens
  misc_RNA (1)...(19): siRNA sense strand
uacaagaccuccgauauuu

SEQ ID NO: 467910 - RNA, 19 nt, Homo sapiens
  misc_RNA (1)...(19): siRNA sense strand
guacaagaccuccgauauu

SEQ ID NO: 467911 - RNA, 19 nt, Homo sapiens
  misc_RNA (1)...(19): siRNA sense strand
gaagcagauuacugguuua

SEQ ID NO: 467912 - RNA, 19 nt, Homo sapiens
  misc_RNA (1)...(19): siRNA sense strand
ugagaagcauccugaguuu

SEQ ID NO: 467913 - RNA, 19 nt, Homo sapiens
  misc_RNA (1)...(19): siRNA sense strand
gaaacaaagaugcuaauca

SEQ ID NO: 467914 - RNA, 19 nt, Homo sapiens
  misc_RNA (1)...(19): siRNA sense strand
gaaccucgcgcuugaaaug

SEQ ID NO: 467915 - RNA, 19 nt, Homo sapiens
  misc_RNA (1)...(19): siRNA sense strand
ugauggaacucaacugauu

SEQ ID NO: 467916 - RNA, 19 nt, Homo sapiens
  misc_RNA (1)...(19): siRNA sense strand
gaaaggaucgggcacugaa

SEQ ID NO: 467917 - RNA, 19 nt, Homo sapiens
  misc_RNA (1)...(19): siRNA sense strand
uggagucucucauucguua

SEQ ID NO: 467918 - RNA, 19 nt, Homo sapiens
  misc_RNA (1)...(19): siRNA sense strand
ggaugacccuggcccauga

SEQ ID NO: 467919 - RNA, 19 nt, Homo sapiens
  misc_RNA (1)...(19): siRNA sense strand
gcuagaagguuuagauuuu

SEQ ID NO: 467920 - RNA, 19 nt, Homo sapiens
  misc_RNA (1)...(19): siRNA sense strand
caaagaugcuaaucaccaa

SEQ ID NO: 467921 - RNA, 19 nt, Homo sapiens
  misc_RNA (1)...(19): siRNA sense strand
gcugagaccuaccugaaga

SEQ ID NO: 467922 - RNA, 19 nt, Homo sapiens
  misc_RNA (1)...(19): siRNA sense strand
ggacaaaugauggucagua

SEQ ID NO: 467923 - RNA, 19 nt, Homo sapiens
  misc_RNA (1)...(19): siRNA sense strand
aggagaagauuaucaagaa

SEQ ID NO: 467924 - RNA, 19 nt, Homo sapiens
  misc_RNA (1)...(19): siRNA sense strand
gccgagcacuguauaaaug

SEQ ID NO: 467925 - RNA, 19 nt, Homo sapiens
  misc_RNA (1)...(19): siRNA sense strand
gaaaacagauuggaaagga

SEQ ID NO: 467926 - RNA, 19 nt, Homo sapiens
  misc_RNA (1)...(19): siRNA sense strand
gcagauggagucucucauu

SEQ ID NO: 467927 - RNA, 19 nt, Homo sapiens
  misc_RNA (1)...(19): siRNA sense strand
gcggagagcagguuuaaug

SEQ ID NO: 467928 - RNA, 19 nt, Homo sapiens
  misc_RNA (1)...(19): siRNA sense strand
gcagagcuguaccaugguu

SEQ ID NO: 467929 - RNA, 19 nt, Homo sapiens
  misc_RNA (1)...(19): siRNA sense strand
gggaugaggccuuugcuuu

SEQ ID NO: 467930 - RNA, 19 nt, Homo sapiens
  misc_RNA (1)...(19): siRNA sense strand
uggaagcgcuagaagguuu

SEQ ID NO: 467931 - RNA, 19 nt, Homo sapiens
  misc_RNA (1)...(19): siRNA sense strand
aaacaaagaugcuaaucac

SEQ ID NO: 467932 - RNA, 19 nt, Homo sapiens
  misc_RNA (1)...(19): siRNA sense strand
ucagaggacuuaucagaca

SEQ ID NO: 467933 - RNA, 19 nt, Homo sapiens
  misc_RNA (1)...(19): siRNA sense strand
gcaguccgcucccauguac

SEQ ID NO: 467934 - RNA, 19 nt, Homo sapiens
  misc_RNA (1)...(19): siRNA sense strand
agaagcauccugaguuuaa

SEQ ID NO: 467935 - RNA, 19 nt, Homo sapiens
  misc_RNA (1)...(19): siRNA sense strand
cuccaugucuucuccauuu

SEQ ID NO: 467936 - RNA, 19 nt, Homo sapiens
  misc_RNA (1)...(19): siRNA sense strand
gcagagaacgaucgcuuug

SEQ ID NO: 467937 - RNA, 19 nt, Homo sapiens
  misc_RNA (1)...(19): siRNA sense strand
auaggaaacuguucaagga

SEQ ID NO: 467938 - RNA, 19 nt, Homo sapiens
  misc_RNA (1)...(19): siRNA sense strand
gacaagcaaguaucucuuu

SEQ ID NO: 467939 - RNA, 19 nt, Homo sapiens
  misc_RNA (1)...(19): siRNA sense strand
aacaacagcucccagauuc

SEQ ID NO: 467940 - RNA, 19 nt, Homo sapiens
  misc_RNA (1)...(19): siRNA sense strand
ggaugaggccuuugcuuug

SEQ ID NO: 467941 - RNA, 19 nt, Homo sapiens
  misc_RNA (1)...(19): siRNA sense strand
gaccauggcuggguugaca

SEQ ID NO: 467942 - RNA, 19 nt, Homo sapiens
  misc_RNA (1)...(19): siRNA sense strand
ucuaugaguuguauucaga

SEQ ID NO: 467943 - RNA, 19 nt, Homo sapiens
  misc_RNA (1)...(19): siRNA sense strand
guguugacguggagagaua

SEQ ID NO: 467944 - RNA, 19 nt, Homo sapiens
  misc_RNA (1)...(19): siRNA sense strand
gcacaguccaugggcuuua

SEQ ID NO: 467945 - RNA, 19 nt, Homo sapiens
  misc_RNA (1)...(19): siRNA sense strand
ggacuuaucagacaugcau

SEQ ID NO: 467946 - RNA, 19 nt, Homo sapiens
  misc_RNA (1)...(19): siRNA sense strand
gacaaaugauggucaguac

SEQ ID NO: 467947 - RNA, 19 nt, Homo sapiens
  misc_RNA (1)...(19): siRNA sense strand
gaggacccguucacagcua

SEQ ID NO: 467948 - RNA, 19 nt, Homo sapiens
  misc_RNA (1)...(19): siRNA sense strand
aaacaacagcucccagauu

SEQ ID NO: 467949 - RNA, 19 nt, Homo sapiens
  misc_RNA (1)...(19): siRNA sense strand
ugacagacagcuagagauu

SEQ ID NO: 467950 - RNA, 19 nt, Homo sapiens
  misc_RNA (1)...(19): siRNA sense strand
gaacgaucgcuuugaggaa

SEQ ID NO: 467951 - RNA, 19 nt, Homo sapiens
  misc_RNA (1)...(19): siRNA sense strand
ggagaagauuaucaagaag

SEQ ID NO: 467952 - RNA, 19 nt, Homo sapiens
  misc_RNA (1)...(19): siRNA sense strand
gagcucaucagcagcauug

SEQ ID NO: 467953 - RNA, 19 nt, Homo sapiens
  misc_RNA (1)...(19): siRNA sense strand
uacaauggcuccaagaucu

SEQ ID NO: 467954 - RNA, 19 nt, Homo sapiens
  misc_RNA (1)...(19): siRNA sense strand
ugcaucagcuacuuuacua

SEQ ID NO: 467955 - RNA, 19 nt, Homo sapiens
  misc_RNA (1)...(19): siRNA sense strand
gagaagcauccugaguuua

SEQ ID NO: 467956 - RNA, 19 nt, Homo sapiens
  misc_RNA (1)...(19): siRNA sense strand
gagaaccucgcgcuugaaa

SEQ ID NO: 467957 - RNA, 19 nt, Homo sapiens
  misc_RNA (1)...(19): siRNA sense strand
gauaaagccgagcacugua

SEQ ID NO: 467958 - RNA, 19 nt, Homo sapiens
  misc_RNA (1)...(19): siRNA sense strand
gacaaucucuuugcuaucg

SEQ ID NO: 467959 - RNA, 19 nt, Homo sapiens
  misc_RNA (1)...(19): siRNA sense strand
cagauggagucucucauuc

SEQ ID NO: 467960 - RNA, 19 nt, Homo sapiens
  misc_RNA (1)...(19): siRNA sense strand
ccagaaagcguuccacaag

SEQ ID NO: 467961 - RNA, 19 nt, Homo sapiens
  misc_RNA (1)...(19): siRNA sense strand
gcgcugggaugaggccuuu

SEQ ID NO: 467962 - RNA, 19 nt, Homo sapiens
  misc_RNA (1)...(19): siRNA sense strand
caaagaaacaaagaugcua

SEQ ID NO: 467963 - RNA, 19 nt, Homo sapiens
  misc_RNA (1)...(19): siRNA sense strand
gcugaagaauggacagauc

SEQ ID NO: 467964 - RNA, 19 nt, Homo sapiens
  misc_RNA (1)...(19): siRNA sense strand
cgaaaccggauuccaacua

SEQ ID NO: 467965 - RNA, 19 nt, Homo sapiens
  misc_RNA (1)...(19): siRNA sense strand
gaugaggccuuugcuuugg

SEQ ID NO: 467966 - RNA, 19 nt, Homo sapiens
  misc_RNA (1)...(19): siRNA sense strand
caagaccuccgauauuuag

SEQ ID NO: 467967 - RNA, 19 nt, Homo sapiens
  misc_RNA (1)...(19): siRNA sense strand
uggacaaucucuuugcuau

SEQ ID NO: 467968 - RNA, 19 nt, Homo sapiens
  misc_RNA (1)...(19): siRNA sense strand
agaagucugucuccaaaca

SEQ ID NO: 467969 - RNA, 19 nt, Homo sapiens
  misc_RNA (1)...(19): siRNA sense strand
gauggaacucaacugauuu

SEQ ID NO: 467970 - RNA, 19 nt, Homo sapiens
  misc_RNA (1)...(19): siRNA sense strand
gugagaagcauccugaguu

SEQ ID NO: 467971 - RNA, 19 nt, Homo sapiens
  misc_RNA (1)...(19): siRNA sense strand
acaagaccuccgauauuua

SEQ ID NO: 467972 - RNA, 19 nt, Homo sapiens
  misc_RNA (1)...(19): siRNA sense strand
guaaaggagaagauuauca

SEQ ID NO: 467973 - RNA, 19 nt, Homo sapiens
  misc_RNA (1)...(19): siRNA sense strand
ucaaugggaucaucagcau

SEQ ID NO: 467974 - RNA, 19 nt, Homo sapiens
  misc_RNA (1)...(19): siRNA sense strand
ccacgacagugaggaguug

SEQ ID NO: 467975 - RNA, 19 nt, Homo sapiens
  misc_RNA (1)...(19): siRNA sense strand
gcaagguggcucagaguuc

SEQ ID NO: 467976 - RNA, 19 nt, Homo sapiens
  misc_RNA (1)...(19): siRNA sense strand
uccaugggcuuuacaagga

SEQ ID NO: 467977 - RNA, 19 nt, Homo sapiens
  misc_RNA (1)...(19): siRNA sense strand
gaugacagacagcuagaga

SEQ ID NO: 467978 - RNA, 19 nt, Homo sapiens
  misc_RNA (1)...(19): siRNA sense strand
ucgggcaucucuaaaguga

SEQ ID NO: 467979 - RNA, 19 nt, Homo sapiens
  misc_RNA (1)...(19): siRNA sense strand
uaaagccgagcacuguaua

SEQ ID NO: 467980 - RNA, 19 nt, Homo sapiens
  misc_RNA (1)...(19): siRNA sense strand
gugaggacaugcucugcuu

SEQ ID NO: 467981 - RNA, 19 nt, Homo sapiens
  misc_RNA (1)...(19): siRNA sense strand
ggguaaaggagaagauuau

SEQ ID NO: 467982 - RNA, 19 nt, Homo sapiens
  misc_RNA (1)...(19): siRNA sense strand
ccugaucacugagcagaaa

SEQ ID NO: 467983 - RNA, 19 nt, Homo sapiens
  misc_RNA (1)...(19): siRNA sense strand
gaaaucgauuggcuaucca

SEQ ID NO: 467984 - RNA, 19 nt, Homo sapiens
  misc_RNA (1)...(19): siRNA sense strand
ggaagcgcuagaagguuua

SEQ ID NO: 467985 - RNA, 19 nt, Homo sapiens
  misc_RNA (1)...(19): siRNA sense strand
ggcgugaacuggccaugga

SEQ ID NO: 467986 - RNA, 19 nt, Homo sapiens
  misc_RNA (1)...(19): siRNA sense strand
aaggaagccuaccagauug

SEQ ID NO: 467987 - RNA, 19 nt, Homo sapiens
  misc_RNA (1)...(19): siRNA sense strand
gagaagauuaucaagaagu

SEQ ID NO: 467988 - RNA, 19 nt, Homo sapiens
  misc_RNA (1)...(19): siRNA sense strand
gagaaaauccucaucuaug

SEQ ID NO: 467989 - RNA, 19 nt, Homo sapiens
  misc_RNA (1)...(19): siRNA sense strand
acaacccgcugcucaacaa

SEQ ID NO: 467990 - RNA, 19 nt, Homo sapiens
  misc_RNA (1)...(19): siRNA sense strand
gauggagucucucauucgu

SEQ ID NO: 467991 - RNA, 19 nt, Homo sapiens
  misc_RNA (1)...(19): siRNA sense strand
ggaaaggaucgggcacuga

SEQ ID NO: 467992 - RNA, 19 nt, Homo sapiens
  misc_RNA (1)...(19): siRNA sense strand
gaucgggcacugaacuuug

SEQ ID NO: 467993 - RNA, 19 nt, Homo sapiens
  misc_RNA (1)...(19): siRNA sense strand
agaaaguucggauuaaaug

SEQ ID NO: 467994 - RNA, 19 nt, Homo sapiens
  misc_RNA (1)...(19): siRNA sense strand
gaagcauccugaguuuaag

SEQ ID NO: 467995 - RNA, 19 nt, Homo sapiens
  misc_RNA (1)...(19): siRNA sense strand
caccucugauggcaccuua

SEQ ID NO: 467996 - RNA, 19 nt, Homo sapiens
  misc_RNA (1)...(19): siRNA sense strand
uguaugacaucgacaccaa

SEQ ID NO: 467997 - RNA, 19 nt, Homo sapiens
  misc_RNA (1)...(19): siRNA sense strand
gaagcuggccgugguagau

SEQ ID NO: 467998 - RNA, 19 nt, Homo sapiens
  misc_RNA (1)...(19): siRNA sense strand
cuaccuaccucaagaagcu

SEQ ID NO: 467999 - RNA, 19 nt, Homo sapiens
  misc_RNA (1)...(19): siRNA sense strand
gcacugagaucaacaagaa

SEQ ID NO: 468000 - RNA, 19 nt, Homo sapiens
  misc_RNA (1)...(19): siRNA sense strand
gcaagaggcguuucuauaa

SEQ ID NO: 468001 - RNA, 19 nt, Homo sapiens
  misc_RNA (1)...(19): siRNA sense strand
gauccaaggugaacaagaa

SEQ ID NO: 468002 - RNA, 19 nt, Homo sapiens
  misc_RNA (1)...(19): siRNA sense strand
gaagaaggcccaccugaug

SEQ ID NO: 468003 - RNA, 19 nt, Homo sapiens
  misc_RNA (1)...(19): siRNA sense strand
gcaagaagcagcuggagaa

SEQ ID NO: 468004 - RNA, 19 nt, Homo sapiens
  misc_RNA (1)...(19): siRNA sense strand
gaagaaagaccgaauugca

SEQ ID NO: 468005 - RNA, 19 nt, Homo sapiens
  misc_RNA (1)...(19): siRNA sense strand
uggagaagauugaccuuaa

SEQ ID NO: 468006 - RNA, 19 nt, Homo sapiens
  misc_RNA (1)...(19): siRNA sense strand
gaagauugaccuuaaguuc

SEQ ID NO: 468007 - RNA, 19 nt, Homo sapiens
  misc_RNA (1)...(19): siRNA sense strand
agaagcagcuggagaagga

SEQ ID NO: 468008 - RNA, 19 nt, Homo sapiens
  misc_RNA (1)...(19): siRNA sense strand
gcaagcugaucaagaacaa

SEQ ID NO: 468009 - RNA, 19 nt, Homo sapiens
  misc_RNA (1)...(19): siRNA sense strand
ggccagggcuaccuuauca

SEQ ID NO: 468010 - RNA, 19 nt, Homo sapiens
  misc_RNA (1)...(19): siRNA sense strand
uggcauaaaucuaagaaga

SEQ ID NO: 468011 - RNA, 19 nt, Homo sapiens
  misc_RNA (1)...(19): siRNA sense strand
gaccuuaaguucauugaca

SEQ ID NO: 468012 - RNA, 19 nt, Homo sapiens
  misc_RNA (1)...(19): siRNA sense strand
gcauaaaucuaagaagaag

SEQ ID NO: 468013 - RNA, 19 nt, Homo sapiens
  misc_RNA (1)...(19): siRNA sense strand
caagaggcguuucuauaag

SEQ ID NO: 468014 - RNA, 19 nt, Homo sapiens
  misc_RNA (1)...(19): siRNA sense strand
gagaucaacaagaagauuu

SEQ ID NO: 468015 - RNA, 19 nt, Homo sapiens
  misc_RNA (1)...(19): siRNA sense strand
ucacagccuuccugggaua

SEQ ID NO: 468016 - RNA, 19 nt, Homo sapiens
  misc_RNA (1)...(19): siRNA sense strand
agaaggccuuuaccaagua

SEQ ID NO: 468017 - RNA, 19 nt, Homo sapiens
  misc_RNA (1)...(19): siRNA sense strand
ggagaagauugaccuuaag

SEQ ID NO: 468018 - RNA, 19 nt, Homo sapiens
  misc_RNA (1)...(19): siRNA sense strand
gcaagaaauggcaggauga

SEQ ID NO: 468019 - RNA, 19 nt, Homo sapiens
  misc_RNA (1)...(19): siRNA sense strand
gaagaaguacugccaaguc

SEQ ID NO: 468020 - RNA, 19 nt, Homo sapiens
  misc_RNA (1)...(19): siRNA sense strand
ugacaccaccuccaaguuu

SEQ ID NO: 468021 - RNA, 19 nt, Homo sapiens
  misc_RNA (1)...(19): siRNA sense strand
ucagcagcaugaagaagua

SEQ ID NO: 468022 - RNA, 19 nt, Homo sapiens
  misc_RNA (1)...(19): siRNA sense strand
ggaugaggauggcaagaag

SEQ ID NO: 468023 - RNA, 19 nt, Homo sapiens
  misc_RNA (1)...(19): siRNA sense strand
gacaccaccuccaaguuug

SEQ ID NO: 468024 - RNA, 19 nt, Homo sapiens
  misc_RNA (1)...(19): siRNA sense strand
aaaggaagaaggagcuuaa

SEQ ID NO: 468025 - RNA, 19 nt, Homo sapiens
  misc_RNA (1)...(19): siRNA sense strand
aagaggcguuucuauaaga

SEQ ID NO: 468026 - RNA, 19 nt, Homo sapiens
  misc_RNA (1)...(19): siRNA sense strand
ggagaagaaagcauucaug

SEQ ID NO: 468027 - RNA, 19 nt, Homo sapiens
  misc_RNA (1)...(19): siRNA sense strand
gguggaggcugugaccauu

SEQ ID NO: 468028 - RNA, 19 nt, Homo sapiens
  misc_RNA (1)...(19): siRNA sense strand
gaaguacugccaagucauc

SEQ ID NO: 468029 - RNA, 19 nt, Homo sapiens
  misc_RNA (1)...(19): siRNA sense strand
aagaaggccuuuaccaagu

SEQ ID NO: 468030 - RNA, 19 nt, Homo sapiens
  misc_RNA (1)...(19): siRNA sense strand
acggcaagcugaucaagaa

SEQ ID NO: 468031 - RNA, 19 nt, Homo sapiens
  misc_RNA (1)...(19): siRNA sense strand
gaauuggcauaaaucuaag

SEQ ID NO: 468032 - RNA, 19 nt, Homo sapiens
  misc_RNA (1)...(19): siRNA sense strand
caaaggaagaaggagcuua

SEQ ID NO: 468033 - RNA, 19 nt, Homo sapiens
  misc_RNA (1)...(19): siRNA sense strand
gugggaaggugaagagcuu

SEQ ID NO: 468034 - RNA, 19 nt, Homo sapiens
  misc_RNA (1)...(19): siRNA sense strand
ugcaagaggcguuucuaua

SEQ ID NO: 468035 - RNA, 19 nt, Homo sapiens
  misc_RNA (1)...(19): siRNA sense strand
agaaagaccgaauugcaaa

SEQ ID NO: 468036 - RNA, 19 nt, Homo sapiens
  misc_RNA (1)...(19): siRNA sense strand
aagaaguacugccaaguca

SEQ ID NO: 468037 - RNA, 19 nt, Homo sapiens
  misc_RNA (1)...(19): siRNA sense strand
gaaauggcaggaugaggau

SEQ ID NO: 468038 - RNA, 19 nt, Homo sapiens
  misc_RNA (1)...(19): siRNA sense strand
ggcauaaaucuaagaagaa

SEQ ID NO: 468039 - RNA, 19 nt, Homo sapiens
  misc_RNA (1)...(19): siRNA sense strand
auacaaggcuggcaugacu

SEQ ID NO: 468040 - RNA, 19 nt, Homo sapiens
  misc_RNA (1)...(19): siRNA sense strand
caagucauccgugucauug

SEQ ID NO: 468041 - RNA, 19 nt, Homo sapiens
  misc_RNA (1)...(19): siRNA sense strand
agaagaaggccuuuaccaa

SEQ ID NO: 468042 - RNA, 19 nt, Homo sapiens
  misc_RNA (1)...(19): siRNA sense strand
ccaaguacugcaagaaaug

SEQ ID NO: 468043 - RNA, 19 nt, Homo sapiens
  misc_RNA (1)...(19): siRNA sense strand
agaccgaauugcaaaggaa

SEQ ID NO: 468044 - RNA, 19 nt, Homo sapiens
  misc_RNA (1)...(19): siRNA sense strand
gcagaaaggcuaccaucac

SEQ ID NO: 468045 - RNA, 19 nt, Homo sapiens
  misc_RNA (1)...(19): siRNA sense strand
agauugaccuuaaguucau

SEQ ID NO: 468046 - RNA, 19 nt, Homo sapiens
  misc_RNA (1)...(19): siRNA sense strand
acuaugaccuaucugacaa

SEQ ID NO: 468047 - RNA, 19 nt, Homo sapiens
  misc_RNA (1)...(19): siRNA sense strand
gaggcacuguggccgagaa

SEQ ID NO: 468048 - RNA, 19 nt, Homo sapiens
  misc_RNA (1)...(19): siRNA sense strand
gagaagauugaccuuaagu

SEQ ID NO: 468049 - RNA, 19 nt, Homo sapiens
  misc_RNA (1)...(19): siRNA sense strand
caagggcaaaggcuacaaa

SEQ ID NO: 468050 - RNA, 19 nt, Homo sapiens
  misc_RNA (1)...(19): siRNA sense strand
ccaagucauccgugucauu

SEQ ID NO: 468051 - RNA, 19 nt, Homo sapiens
  misc_RNA (1)...(19): siRNA sense strand
gaaagaccgaauugcaaag

SEQ ID NO: 468052 - RNA, 19 nt, Homo sapiens
  misc_RNA (1)...(19): siRNA sense strand
gaccauggaggagaagaaa

SEQ ID NO: 468053 - RNA, 19 nt, Homo sapiens
  misc_RNA (1)...(19): siRNA sense strand
aagaaagaccgaauugcaa

SEQ ID NO: 468054 - RNA, 19 nt, Homo sapiens
  misc_RNA (1)...(19): siRNA sense strand
gaaggccuuuaccaaguac

SEQ ID NO: 468055 - RNA, 19 nt, Homo sapiens
  misc_RNA (1)...(19): siRNA sense strand
agaacaaugccuccacuga

SEQ ID NO: 468056 - RNA, 19 nt, Homo sapiens
  misc_RNA (1)...(19): siRNA sense strand
uaccaaguacugcaagaaa

SEQ ID NO: 468057 - RNA, 19 nt, Homo sapiens
  misc_RNA (1)...(19): siRNA sense strand
guucuccgcucccagacau

SEQ ID NO: 468058 - RNA, 19 nt, Homo sapiens
  misc_RNA (1)...(19): siRNA sense strand
cuaagaagaaggccuuuac

SEQ ID NO: 468059 - RNA, 19 nt, Homo sapiens
  misc_RNA (1)...(19): siRNA sense strand
gacuaugaccuaucugaca

SEQ ID NO: 468060 - RNA, 19 nt, Homo sapiens
  misc_RNA (1)...(19): siRNA sense strand
uaccaucaccgcacugaga

SEQ ID NO: 468061 - RNA, 19 nt, Homo sapiens
  misc_RNA (1)...(19): siRNA sense strand
ccaaggugaacaagaagga

SEQ ID NO: 468062 - RNA, 19 nt, Homo sapiens
  misc_RNA (1)...(19): siRNA sense strand
ggaggagaagaaagcauuc

SEQ ID NO: 468063 - RNA, 19 nt, Homo sapiens
  misc_RNA (1)...(19): siRNA sense strand
aagauugaccuuaaguuca

SEQ ID NO: 468064 - RNA, 19 nt, Homo sapiens
  misc_RNA (1)...(19): siRNA sense strand
ggauacaaggcuggcauga

SEQ ID NO: 468065 - RNA, 19 nt, Homo sapiens
  misc_RNA (1)...(19): siRNA sense strand
uggaggagaagaaagcauu

SEQ ID NO: 468066 - RNA, 19 nt, Homo sapiens
  misc_RNA (1)...(19): siRNA sense strand
gauugaccuuaaguucauu

SEQ ID NO: 468067 - RNA, 19 nt, Homo sapiens
  misc_RNA (1)...(19): siRNA sense strand
gcugugaccauuguagaga

SEQ ID NO: 468068 - RNA, 19 nt, Homo sapiens
  misc_RNA (1)...(19): siRNA sense strand
accaaguacugcaagaaau

SEQ ID NO: 468069 - RNA, 19 nt, Homo sapiens
  misc_RNA (1)...(19): siRNA sense strand
cugaagaaagaccgaauug

SEQ ID NO: 468070 - RNA, 19 nt, Homo sapiens
  misc_RNA (1)...(19): siRNA sense strand
uggaggcugugaccauugu

SEQ ID NO: 468071 - RNA, 19 nt, Homo sapiens
  misc_RNA (1)...(19): siRNA sense strand
agaagaaggcccaccugau

SEQ ID NO: 468072 - RNA, 19 nt, Homo sapiens
  misc_RNA (1)...(19): siRNA sense strand
aacaaugccuccacugacu

SEQ ID NO: 468073 - RNA, 19 nt, Homo sapiens
  misc_RNA (1)...(19): siRNA sense strand
ggcagaaaggcuaccauca

SEQ ID NO: 468074 - RNA, 19 nt, Homo sapiens
  misc_RNA (1)...(19): siRNA sense strand
uaugaccuaucugacaaga

SEQ ID NO: 468075 - RNA, 19 nt, Homo sapiens
  misc_RNA (1)...(19): siRNA sense strand
aagcugaucaagaacaaug

SEQ ID NO: 468076 - RNA, 19 nt, Homo sapiens
  misc_RNA (1)...(19): siRNA sense strand
gacggcaagcugaucaaga

SEQ ID NO: 468077 - RNA, 19 nt, Homo sapiens
  misc_RNA (1)...(19): siRNA sense strand
gcacuguggccgagaagcu

SEQ ID NO: 468078 - RNA, 19 nt, Homo sapiens
  misc_RNA (1)...(19): siRNA sense strand
gcaaaggaagaaggagcuu

SEQ ID NO: 468079 - RNA, 19 nt, Homo sapiens
  misc_RNA (1)...(19): siRNA sense strand
gagcuucccuaaggaugac

SEQ ID NO: 468080 - RNA, 19 nt, Homo sapiens
  misc_RNA (1)...(19): siRNA sense strand
cauggugguugugggcauu

SEQ ID NO: 468081 - RNA, 19 nt, Homo sapiens
  misc_RNA (1)...(19): siRNA sense strand
caaugccuccacugacuau

SEQ ID NO: 468082 - RNA, 19 nt, Homo sapiens
  misc_RNA (1)...(19): siRNA sense strand
ugagaucaacaagaagauu

SEQ ID NO: 468083 - RNA, 19 nt, Homo sapiens
  misc_RNA (1)...(19): siRNA sense strand
gaaugcaagaggcguuucu

SEQ ID NO: 468084 - RNA, 19 nt, Homo sapiens
  misc_RNA (1)...(19): siRNA sense strand
ucuaagaagaaggccuuua

SEQ ID NO: 468085 - RNA, 19 nt, Homo sapiens
  misc_RNA (1)...(19): siRNA sense strand
gaggagaagaaagcauuca

SEQ ID NO: 468086 - RNA, 19 nt, Homo sapiens
  misc_RNA (1)...(19): siRNA sense strand
ggaagcagcccuacaacaa

SEQ ID NO: 468087 - RNA, 19 nt, Homo sapiens
  misc_RNA (1)...(19): siRNA sense strand
gcacaggaacuucauuauc

SEQ ID NO: 468088 - RNA, 19 nt, Homo sapiens
  misc_RNA (1)...(19): siRNA sense strand
acaacaaccugaagcacaa

SEQ ID NO: 468089 - RNA, 19 nt, Homo sapiens
  misc_RNA (1)...(19): siRNA sense strand
ggaaccaccuggagagcau

SEQ ID NO: 468090 - RNA, 19 nt, Homo sapiens
  misc_RNA (1)...(19): siRNA sense strand
gaacugcuguugggaacca

SEQ ID NO: 468091 - RNA, 19 nt, Homo sapiens
  misc_RNA (1)...(19): siRNA sense strand
gagauugucgcacugaaga

SEQ ID NO: 468092 - RNA, 19 nt, Homo sapiens
  misc_RNA (1)...(19): siRNA sense strand
ugaagaaggugcggaugga

SEQ ID NO: 468093 - RNA, 19 nt, Homo sapiens
  misc_RNA (1)...(19): siRNA sense strand
ggccuauggugucccagua

SEQ ID NO: 468094 - RNA, 19 nt, Homo sapiens
  misc_RNA (1)...(19): siRNA sense strand
ccugaagguuuccaacuug

SEQ ID NO: 468095 - RNA, 19 nt, Homo sapiens
  misc_RNA (1)...(19): siRNA sense strand
uccaguaucugcacaggaa

SEQ ID NO: 468096 - RNA, 19 nt, Homo sapiens
  misc_RNA (1)...(19): siRNA sense strand
cacaggaacuucauuaucc

SEQ ID NO: 468097 - RNA, 19 nt, Homo sapiens
  misc_RNA (1)...(19): siRNA sense strand
ccuauggugucccaguaaa

SEQ ID NO: 468098 - RNA, 19 nt, Homo sapiens
  misc_RNA (1)...(19): siRNA sense strand
cauguacgacccuaagaaa

SEQ ID NO: 468099 - RNA, 19 nt, Homo sapiens
  misc_RNA (1)...(19): siRNA sense strand
guuuccaacuugcucauga

SEQ ID NO: 468100 - RNA, 19 nt, Homo sapiens
  misc_RNA (1)...(19): siRNA sense strand
ggauggacaaggagaagga

SEQ ID NO: 468101 - RNA, 19 nt, Homo sapiens
  misc_RNA (1)...(19): siRNA sense strand
gaagcagcccuacaacaac

SEQ ID NO: 468102 - RNA, 19 nt, Homo sapiens
  misc_RNA (1)...(19): siRNA sense strand
ccaccagcaucgacaugug

SEQ ID NO: 468103 - RNA, 19 nt, Homo sapiens
  misc_RNA (1)...(19): siRNA sense strand
cugcacaggaacuucauua

SEQ ID NO: 468104 - RNA, 19 nt, Homo sapiens
  misc_RNA (1)...(19): siRNA sense strand
gaacaucguggagcugaag

SEQ ID NO: 468105 - RNA, 19 nt, Homo sapiens
  misc_RNA (1)...(19): siRNA sense strand
gaugagauugucgcacuga

SEQ ID NO: 468106 - RNA, 19 nt, Homo sapiens
  misc_RNA (1)...(19): siRNA sense strand
gggacacccagacagauga

SEQ ID NO: 468107 - RNA, 19 nt, Homo sapiens
  misc_RNA (1)...(19): siRNA sense strand
caaccugaagcacaaguuc

SEQ ID NO: 468108 - RNA, 19 nt, Homo sapiens
  misc_RNA (1)...(19): siRNA sense strand
cugcugcacuuccuguuca

SEQ ID NO: 468109 - RNA, 19 nt, Homo sapiens
  misc_RNA (1)...(19): siRNA sense strand
cgaacaucguggagcugaa

SEQ ID NO: 468110 - RNA, 19 nt, Homo sapiens
  misc_RNA (1)...(19): siRNA sense strand
gcacuuccuguucauguac

SEQ ID NO: 468111 - RNA, 19 nt, Homo sapiens
  misc_RNA (1)...(19): siRNA sense strand
cuuccgagauccaccagau

SEQ ID NO: 468112 - RNA, 19 nt, Homo sapiens
  misc_RNA (1)...(19): siRNA sense strand
ucauguacgacccuaagaa

SEQ ID NO: 468113 - RNA, 19 nt, Homo sapiens
  misc_RNA (1)...(19): siRNA sense strand
ugcacuuccuguucaugua

SEQ ID NO: 468114 - RNA, 19 nt, Homo sapiens
  misc_RNA (1)...(19): siRNA sense strand
caaggguugugugaagaca

SEQ ID NO: 468115 - RNA, 19 nt, Homo sapiens
  misc_RNA (1)...(19): siRNA sense strand
acaggaacuucauuaucca

SEQ ID NO: 468116 - RNA, 19 nt, Homo sapiens
  misc_RNA (1)...(19): siRNA sense strand
ccacgcagaccaccagcau

SEQ ID NO: 468117 - RNA, 19 nt, Homo sapiens
  misc_RNA (1)...(19): siRNA sense strand
ggaagcagcccuacaacaa

SEQ ID NO: 468118 - RNA, 19 nt, Homo sapiens
  misc_RNA (1)...(19): siRNA sense strand
gaucaguggugucugugaa

SEQ ID NO: 468119 - RNA, 19 nt, Homo sapiens
  misc_RNA (1)...(19): siRNA sense strand
gcacaggaacuucauuauc

SEQ ID NO: 468120 - RNA, 19 nt, Homo sapiens
  misc_RNA (1)...(19): siRNA sense strand
acaacaaccugaagcacaa

SEQ ID NO: 468121 - RNA, 19 nt, Homo sapiens
  misc_RNA (1)...(19): siRNA sense strand
ggaaccaccuggagagcau

SEQ ID NO: 468122 - RNA, 19 nt, Homo sapiens
  misc_RNA (1)...(19): siRNA sense strand
gaacugcuguugggaacca

SEQ ID NO: 468123 - RNA, 19 nt, Homo sapiens
  misc_RNA (1)...(19): siRNA sense strand
gagauugucgcacugaaga

SEQ ID NO: 468124 - RNA, 19 nt, Homo sapiens
  misc_RNA (1)...(19): siRNA sense strand
ugaagaaggugcggaugga

SEQ ID NO: 468125 - RNA, 19 nt, Homo sapiens
  misc_RNA (1)...(19): siRNA sense strand
ggccuauggugucccagua

SEQ ID NO: 468126 - RNA, 19 nt, Homo sapiens
  misc_RNA (1)...(19): siRNA sense strand
ccugaagguuuccaacuug

SEQ ID NO: 468127 - RNA, 19 nt, Homo sapiens
  misc_RNA (1)...(19): siRNA sense strand
uccaguaucugcacaggaa

SEQ ID NO: 468128 - RNA, 19 nt, Homo sapiens
  misc_RNA (1)...(19): siRNA sense strand
cacaggaacuucauuaucc

SEQ ID NO: 468129 - RNA, 19 nt, Homo sapiens
  misc_RNA (1)...(19): siRNA sense strand
ccuauggugucccaguaaa

SEQ ID NO: 468130 - RNA, 19 nt, Homo sapiens
  misc_RNA (1)...(19): siRNA sense strand
cauguacgacccuaagaaa

SEQ ID NO: 468131 - RNA, 19 nt, Homo sapiens
  misc_RNA (1)...(19): siRNA sense strand
guuuccaacuugcucauga

SEQ ID NO: 468132 - RNA, 19 nt, Homo sapiens
  misc_RNA (1)...(19): siRNA sense strand
ggauggacaaggagaagga

SEQ ID NO: 468133 - RNA, 19 nt, Homo sapiens
  misc_RNA (1)...(19): siRNA sense strand
gaagcagcccuacaacaac

SEQ ID NO: 468134 - RNA, 19 nt, Homo sapiens
  misc_RNA (1)...(19): siRNA sense strand
ccaccagcaucgacaugug

SEQ ID NO: 468135 - RNA, 19 nt, Homo sapiens
  misc_RNA (1)...(19): siRNA sense strand
cugcacaggaacuucauua

SEQ ID NO: 468136 - RNA, 19 nt, Homo sapiens
  misc_RNA (1)...(19): siRNA sense strand
gaacaucguggagcugaag

SEQ ID NO: 468137 - RNA, 19 nt, Homo sapiens
  misc_RNA (1)...(19): siRNA sense strand
gaugagauugucgcacuga

SEQ ID NO: 468138 - RNA, 19 nt, Homo sapiens
  misc_RNA (1)...(19): siRNA sense strand
gggacacccagacagauga

SEQ ID NO: 468139 - RNA, 19 nt, Homo sapiens
  misc_RNA (1)...(19): siRNA sense strand
caaccugaagcacaaguuc

SEQ ID NO: 468140 - RNA, 19 nt, Homo sapiens
  misc_RNA (1)...(19): siRNA sense strand
cugcugcacuuccuguuca

SEQ ID NO: 468141 - RNA, 19 nt, Homo sapiens
  misc_RNA (1)...(19): siRNA sense strand
cgaacaucguggagcugaa

SEQ ID NO: 468142 - RNA, 19 nt, Homo sapiens
  misc_RNA (1)...(19): siRNA sense strand
gcacuuccuguucauguac

SEQ ID NO: 468143 - RNA, 19 nt, Homo sapiens
  misc_RNA (1)...(19): siRNA sense strand
cuuccgagauccaccagau

SEQ ID NO: 468144 - RNA, 19 nt, Homo sapiens
  misc_RNA (1)...(19): siRNA sense strand
ucauguacgacccuaagaa

SEQ ID NO: 468145 - RNA, 19 nt, Homo sapiens
  misc_RNA (1)...(19): siRNA sense strand
ugcacuuccuguucaugua

SEQ ID NO: 468146 - RNA, 19 nt, Homo sapiens
  misc_RNA (1)...(19): siRNA sense strand
caaggguugugugaagaca

SEQ ID NO: 468147 - RNA, 19 nt, Homo sapiens
  misc_RNA (1)...(19): siRNA sense strand
acaggaacuucauuaucca

SEQ ID NO: 468148 - RNA, 19 nt, Homo sapiens
  misc_RNA (1)...(19): siRNA sense strand
ccacgcagaccaccagcau

SEQ ID NO: 468149 - RNA, 19 nt, Homo sapiens
  misc_RNA (1)...(19): siRNA sense strand
gcacaggaacuucauuauc

SEQ ID NO: 468150 - RNA, 19 nt, Homo sapiens
  misc_RNA (1)...(19): siRNA sense strand
ggaaccaccuggagagcau

SEQ ID NO: 468151 - RNA, 19 nt, Homo sapiens
  misc_RNA (1)...(19): siRNA sense strand
ccugaagguuuccaacuug

SEQ ID NO: 468152 - RNA, 19 nt, Homo sapiens
  misc_RNA (1)...(19): siRNA sense strand
uccaguaucugcacaggaa

SEQ ID NO: 468153 - RNA, 19 nt, Homo sapiens
  misc_RNA (1)...(19): siRNA sense strand
cacaggaacuucauuaucc

SEQ ID NO: 468154 - RNA, 19 nt, Homo sapiens
  misc_RNA (1)...(19): siRNA sense strand
guuuccaacuugcucauga

SEQ ID NO: 468155 - RNA, 19 nt, Homo sapiens
  misc_RNA (1)...(19): siRNA sense strand
gaacaucguggagcugaag

SEQ ID NO: 468156 - RNA, 19 nt, Homo sapiens
  misc_RNA (1)...(19): siRNA sense strand
cugcacaggaacuucauua

SEQ ID NO: 468157 - RNA, 19 nt, Homo sapiens
  misc_RNA (1)...(19): siRNA sense strand
cgaacaucguggagcugaa

SEQ ID NO: 468158 - RNA, 19 nt, Homo sapiens
  misc_RNA (1)...(19): siRNA sense strand
caaggguugugugaagaca

SEQ ID NO: 468159 - RNA, 19 nt, Homo sapiens
  misc_RNA (1)...(19): siRNA sense strand
acaggaacuucauuaucca

SEQ ID NO: 468160 - RNA, 19 nt, Homo sapiens
  misc_RNA (1)...(19): siRNA sense strand
guugagaccuuguauaaua

SEQ ID NO: 468161 - RNA, 19 nt, Homo sapiens
  misc_RNA (1)...(19): siRNA sense strand
ggacagcacuuuauaauac

SEQ ID NO: 468162 - RNA, 19 nt, Homo sapiens
  misc_RNA (1)...(19): siRNA sense strand
ggaaaccacugcaagcaaa

SEQ ID NO: 468163 - RNA, 19 nt, Homo sapiens
  misc_RNA (1)...(19): siRNA sense strand
uaacggugcuaacucuaua

SEQ ID NO: 468164 - RNA, 19 nt, Homo sapiens
  misc_RNA (1)...(19): siRNA sense strand
gaaguuagcucgguucaac

SEQ ID NO: 468165 - RNA, 19 nt, Homo sapiens
  misc_RNA (1)...(19): siRNA sense strand
ggaaaacucccguugauua

SEQ ID NO: 468166 - RNA, 19 nt, Homo sapiens
  misc_RNA (1)...(19): siRNA sense strand
gauaaaguacaucccaaua

SEQ ID NO: 468167 - RNA, 19 nt, Homo sapiens
  misc_RNA (1)...(19): siRNA sense strand
ccaaagaucuuagcaagca

SEQ ID NO: 468168 - RNA, 19 nt, Homo sapiens
  misc_RNA (1)...(19): siRNA sense strand
guucaacgcccaugaguuu

SEQ ID NO: 468169 - RNA, 19 nt, Homo sapiens
  misc_RNA (1)...(19): siRNA sense strand
cgccauaucucccaaguga

SEQ ID NO: 468170 - RNA, 19 nt, Homo sapiens
  misc_RNA (1)...(19): siRNA sense strand
guuugagacuguuaucuuu

SEQ ID NO: 468171 - RNA, 19 nt, Homo sapiens
  misc_RNA (1)...(19): siRNA sense strand
gcagacagcagccuggauu

SEQ ID NO: 468172 - RNA, 19 nt, Homo sapiens
  misc_RNA (1)...(19): siRNA sense strand
caauaaagcggaauucauc

SEQ ID NO: 468173 - RNA, 19 nt, Homo sapiens
  misc_RNA (1)...(19): siRNA sense strand
gacccugcgucuauuauga

SEQ ID NO: 468174 - RNA, 19 nt, Homo sapiens
  misc_RNA (1)...(19): siRNA sense strand
ucauugacauucucaguga

SEQ ID NO: 468175 - RNA, 19 nt, Homo sapiens
  misc_RNA (1)...(19): siRNA sense strand
ggacagacuagccuucuau

SEQ ID NO: 468176 - RNA, 19 nt, Homo sapiens
  misc_RNA (1)...(19): siRNA sense strand
gaacagggaaucuugaaac

SEQ ID NO: 468177 - RNA, 19 nt, Homo sapiens
  misc_RNA (1)...(19): siRNA sense strand
caacacugcuucagauggu

SEQ ID NO: 468178 - RNA, 19 nt, Homo sapiens
  misc_RNA (1)...(19): siRNA sense strand
caagccaacuucuuucauc

SEQ ID NO: 468179 - RNA, 19 nt, Homo sapiens
  misc_RNA (1)...(19): siRNA sense strand
uuuacaggcugaauuauug

SEQ ID NO: 468180 - RNA, 19 nt, Homo sapiens
  misc_RNA (1)...(19): siRNA sense strand
gaaguugacaggcgagaga

SEQ ID NO: 468181 - RNA, 19 nt, Homo sapiens
  misc_RNA (1)...(19): siRNA sense strand
uaauaacggugcuaacucu

SEQ ID NO: 468182 - RNA, 19 nt, Homo sapiens
  misc_RNA (1)...(19): siRNA sense strand
gcagagcgccucguggaaa

SEQ ID NO: 468183 - RNA, 19 nt, Homo sapiens
  misc_RNA (1)...(19): siRNA sense strand
gcaggaaaccagaucacaa

SEQ ID NO: 468184 - RNA, 19 nt, Homo sapiens
  misc_RNA (1)...(19): siRNA sense strand
gaagacacagauuuggaaa

SEQ ID NO: 468185 - RNA, 19 nt, Homo sapiens
  misc_RNA (1)...(19): siRNA sense strand
caggaaaccagaucacaaa

SEQ ID NO: 468186 - RNA, 19 nt, Homo sapiens
  misc_RNA (1)...(19): siRNA sense strand
gaaaucagggcagacagaa

SEQ ID NO: 468187 - RNA, 19 nt, Homo sapiens
  misc_RNA (1)...(19): siRNA sense strand
uugaagaacuugccaugga

SEQ ID NO: 468188 - RNA, 19 nt, Homo sapiens
  misc_RNA (1)...(19): siRNA sense strand
gcacaagccaacuucuuuc

SEQ ID NO: 468189 - RNA, 19 nt, Homo sapiens
  misc_RNA (1)...(19): siRNA sense strand
agacuagccuucuaucucu

SEQ ID NO: 468190 - RNA, 19 nt, Homo sapiens
  misc_RNA (1)...(19): siRNA sense strand
gagaacagggaaucuugaa

SEQ ID NO: 468191 - RNA, 19 nt, Homo sapiens
  misc_RNA (1)...(19): siRNA sense strand
ugaagaacuugccauggau

SEQ ID NO: 468192 - RNA, 19 nt, Homo sapiens
  misc_RNA (1)...(19): siRNA sense strand
cgaagacacagauuuggaa

SEQ ID NO: 468193 - RNA, 19 nt, Homo sapiens
  misc_RNA (1)...(19): siRNA sense strand
gagcacaagccaacuucuu

SEQ ID NO: 468194 - RNA, 19 nt, Homo sapiens
  misc_RNA (1)...(19): siRNA sense strand
agacgaagacacagauuug

SEQ ID NO: 468195 - RNA, 19 nt, Homo sapiens
  misc_RNA (1)...(19): siRNA sense strand
guaaauaggggaacguuuu

SEQ ID NO: 468196 - RNA, 19 nt, Homo sapiens
  misc_RNA (1)...(19): siRNA sense strand
aaauggacagcacuuuaua

SEQ ID NO: 468197 - RNA, 19 nt, Homo sapiens
  misc_RNA (1)...(19): siRNA sense strand
ggcaaaagcugcuaagaag

SEQ ID NO: 468198 - RNA, 19 nt, Homo sapiens
  misc_RNA (1)...(19): siRNA sense strand
ggagacagcagggcaguuc

SEQ ID NO: 468199 - RNA, 19 nt, Homo sapiens
  misc_RNA (1)...(19): siRNA sense strand
ugguugagaccuuguauaa

SEQ ID NO: 468200 - RNA, 19 nt, Homo sapiens
  misc_RNA (1)...(19): siRNA sense strand
gauguuagcguucguccau

SEQ ID NO: 468201 - RNA, 19 nt, Homo sapiens
  misc_RNA (1)...(19): siRNA sense strand
agccaaguaucagauguua

SEQ ID NO: 468202 - RNA, 19 nt, Homo sapiens
  misc_RNA (1)...(19): siRNA sense strand
guggaagacguaaagcuaa

SEQ ID NO: 468203 - RNA, 19 nt, Homo sapiens
  misc_RNA (1)...(19): siRNA sense strand
acgaucagcccgacuauga

SEQ ID NO: 468204 - RNA, 19 nt, Homo sapiens
  misc_RNA (1)...(19): siRNA sense strand
cagagcgccucguggaaau

SEQ ID NO: 468205 - RNA, 19 nt, Homo sapiens
  misc_RNA (1)...(19): siRNA sense strand
gcaaggagggcaccaugag

SEQ ID NO: 468206 - RNA, 19 nt, Homo sapiens
  misc_RNA (1)...(19): siRNA sense strand
gcugaauuauuggcaguau

SEQ ID NO: 468207 - RNA, 19 nt, Homo sapiens
  misc_RNA (1)...(19): siRNA sense strand
ccaagugaggcaucugaaa

SEQ ID NO: 468208 - RNA, 19 nt, Homo sapiens
  misc_RNA (1)...(19): siRNA sense strand
caaaagcugcuaagaagaa

SEQ ID NO: 468209 - RNA, 19 nt, Homo sapiens
  misc_RNA (1)...(19): siRNA sense strand
cuauaugggagcauucuuu

SEQ ID NO: 468210 - RNA, 19 nt, Homo sapiens
  misc_RNA (1)...(19): siRNA sense strand
cgaaaucagggcagacaga

SEQ ID NO: 468211 - RNA, 19 nt, Homo sapiens
  misc_RNA (1)...(19): siRNA sense strand
guacucaucaacacgaaau

SEQ ID NO: 468212 - RNA, 19 nt, Homo sapiens
  misc_RNA (1)...(19): siRNA sense strand
gccuggauuugucugaauu

SEQ ID NO: 468213 - RNA, 19 nt, Homo sapiens
  misc_RNA (1)...(19): siRNA sense strand
gaaaacucccguugauuau

SEQ ID NO: 468214 - RNA, 19 nt, Homo sapiens
  misc_RNA (1)...(19): siRNA sense strand
gauuuuacaggcugaauua

SEQ ID NO: 468215 - RNA, 19 nt, Homo sapiens
  misc_RNA (1)...(19): siRNA sense strand
gagccaaguaucagauguu

SEQ ID NO: 468216 - RNA, 19 nt, Homo sapiens
  misc_RNA (1)...(19): siRNA sense strand
uaaagcggaauucaucaga

SEQ ID NO: 468217 - RNA, 19 nt, Homo sapiens
  misc_RNA (1)...(19): siRNA sense strand
ccaauaaagcggaauucau

SEQ ID NO: 468218 - RNA, 19 nt, Homo sapiens
  misc_RNA (1)...(19): siRNA sense strand
gcuggacccugcgucuauu

SEQ ID NO: 468219 - RNA, 19 nt, Homo sapiens
  misc_RNA (1)...(19): siRNA sense strand
uggaagacguaaagcuaau

SEQ ID NO: 468220 - RNA, 19 nt, Homo sapiens
  misc_RNA (1)...(19): siRNA sense strand
cagacgaagacacagauuu

SEQ ID NO: 468221 - RNA, 19 nt, Homo sapiens
  misc_RNA (1)...(19): siRNA sense strand
uugccacgcuggucauuga

SEQ ID NO: 468222 - RNA, 19 nt, Homo sapiens
  misc_RNA (1)...(19): siRNA sense strand
uggacagcacuuuauaaua

SEQ ID NO: 468223 - RNA, 19 nt, Homo sapiens
  misc_RNA (1)...(19): siRNA sense strand
aaacucccguugauuaugc

SEQ ID NO: 468224 - RNA, 19 nt, Homo sapiens
  misc_RNA (1)...(19): siRNA sense strand
ggaugacgauagugugacu

SEQ ID NO: 468225 - RNA, 19 nt, Homo sapiens
  misc_RNA (1)...(19): siRNA sense strand
cagcguggcaucagacgaa

SEQ ID NO: 468226 - RNA, 19 nt, Homo sapiens
  misc_RNA (1)...(19): siRNA sense strand
gaguacucaucaacacgaa

SEQ ID NO: 468227 - RNA, 19 nt, Homo sapiens
  misc_RNA (1)...(19): siRNA sense strand
cugaauuauuggcaguaua

SEQ ID NO: 468228 - RNA, 19 nt, Homo sapiens
  misc_RNA (1)...(19): siRNA sense strand
caaagaucuuagcaagcaa

SEQ ID NO: 468229 - RNA, 19 nt, Homo sapiens
  misc_RNA (1)...(19): siRNA sense strand
gugagaacagggaaucuug

SEQ ID NO: 468230 - RNA, 19 nt, Homo sapiens
  misc_RNA (1)...(19): siRNA sense strand
gaucagcccgacuaugaca

SEQ ID NO: 468231 - RNA, 19 nt, Homo sapiens
  misc_RNA (1)...(19): siRNA sense strand
uagugugacugccaaagau

SEQ ID NO: 468232 - RNA, 19 nt, Homo sapiens
  misc_RNA (1)...(19): siRNA sense strand
gacagcagccuggauuugu

SEQ ID NO: 468233 - RNA, 19 nt, Homo sapiens
  misc_RNA (1)...(19): siRNA sense strand
gagcagacccaggcacaca

SEQ ID NO: 468234 - RNA, 19 nt, Homo sapiens
  misc_RNA (1)...(19): siRNA sense strand
ugagcuaacggacagacua

SEQ ID NO: 468235 - RNA, 19 nt, Homo sapiens
  misc_RNA (1)...(19): siRNA sense strand
caagugaggcaucugaaac

SEQ ID NO: 468236 - RNA, 19 nt, Homo sapiens
  misc_RNA (1)...(19): siRNA sense strand
cggacagacuagccuucua

SEQ ID NO: 468237 - RNA, 19 nt, Homo sapiens
  misc_RNA (1)...(19): siRNA sense strand
ggacccugcgucuauuaug

SEQ ID NO: 468238 - RNA, 19 nt, Homo sapiens
  misc_RNA (1)...(19): siRNA sense strand
cagcagggcaguucucucu

SEQ ID NO: 468239 - RNA, 19 nt, Homo sapiens
  misc_RNA (1)...(19): siRNA sense strand
gagcuaacggacagacuag

SEQ ID NO: 468240 - RNA, 19 nt, Homo sapiens
  misc_RNA (1)...(19): siRNA sense strand
acaggauucuagugggaaa

SEQ ID NO: 468241 - RNA, 19 nt, Homo sapiens
  misc_RNA (1)...(19): siRNA sense strand
caaagcagggcagauuuua

SEQ ID NO: 468242 - RNA, 19 nt, Homo sapiens
  misc_RNA (1)...(19): siRNA sense strand
ccaaguaucagauguuagc

SEQ ID NO: 468243 - RNA, 19 nt, Homo sapiens
  misc_RNA (1)...(19): siRNA sense strand
gacccaggcacacaggauu

SEQ ID NO: 468244 - RNA, 19 nt, Homo sapiens
  misc_RNA (1)...(19): siRNA sense strand
caucagacgaagacacaga

SEQ ID NO: 468245 - RNA, 19 nt, Homo sapiens
  misc_RNA (1)...(19): siRNA sense strand
acaacgaucagcccgacua

SEQ ID NO: 468246 - RNA, 19 nt, Homo sapiens
  misc_RNA (1)...(19): siRNA sense strand
uauaugggagcauucuuug

SEQ ID NO: 468247 - RNA, 19 nt, Homo sapiens
  misc_RNA (1)...(19): siRNA sense strand
cuccaacacugcuucagau

SEQ ID NO: 468248 - RNA, 19 nt, Homo sapiens
  misc_RNA (1)...(19): siRNA sense strand
cagacuagccuucuaucuc

SEQ ID NO: 468249 - RNA, 19 nt, Homo sapiens
  misc_RNA (1)...(19): siRNA sense strand
ugagaacagggaaucuuga

SEQ ID NO: 468250 - RNA, 19 nt, Homo sapiens
  misc_RNA (1)...(19): siRNA sense strand
uugagacuguuaucuuuag

SEQ ID NO: 468251 - RNA, 19 nt, Homo sapiens
  misc_RNA (1)...(19): siRNA sense strand
caacgaucagcccgacuau

SEQ ID NO: 468252 - RNA, 19 nt, Homo sapiens
  misc_RNA (1)...(19): siRNA sense strand
cagccuggauuugucugaa

SEQ ID NO: 468253 - RNA, 19 nt, Homo sapiens
  misc_RNA (1)...(19): siRNA sense strand
aauggacagcacuuuauaa

SEQ ID NO: 468254 - RNA, 19 nt, Homo sapiens
  misc_RNA (1)...(19): siRNA sense strand
aguggaagacguaaagcua

SEQ ID NO: 468255 - RNA, 19 nt, Homo sapiens
  misc_RNA (1)...(19): siRNA sense strand
aaucagggcagacagaagu

SEQ ID NO: 468256 - RNA, 19 nt, Homo sapiens
  misc_RNA (1)...(19): siRNA sense strand
agacacagauuuggaaacc

SEQ ID NO: 468257 - RNA, 19 nt, Homo sapiens
  misc_RNA (1)...(19): siRNA sense strand
auguggagcucauacugaa

SEQ ID NO: 468258 - RNA, 19 nt, Homo sapiens
  misc_RNA (1)...(19): siRNA sense strand
uauaauaacggugcuaacu

SEQ ID NO: 468259 - RNA, 19 nt, Homo sapiens
  misc_RNA (1)...(19): siRNA sense strand
ucagggcagacagaaguua

SEQ ID NO: 468260 - RNA, 19 nt, Homo sapiens
  misc_RNA (1)...(19): siRNA sense strand
guugagaccuuguauaaua

SEQ ID NO: 468261 - RNA, 19 nt, Homo sapiens
  misc_RNA (1)...(19): siRNA sense strand
ggacagcacuuuauaauac

SEQ ID NO: 468262 - RNA, 19 nt, Homo sapiens
  misc_RNA (1)...(19): siRNA sense strand
ggaaaccacugcaagcaaa

SEQ ID NO: 468263 - RNA, 19 nt, Homo sapiens
  misc_RNA (1)...(19): siRNA sense strand
uaacggugcuaacucuaua

SEQ ID NO: 468264 - RNA, 19 nt, Homo sapiens
  misc_RNA (1)...(19): siRNA sense strand
gaaguuagcucgguucaac

SEQ ID NO: 468265 - RNA, 19 nt, Homo sapiens
  misc_RNA (1)...(19): siRNA sense strand
ggaaaacucccguugauua

SEQ ID NO: 468266 - RNA, 19 nt, Homo sapiens
  misc_RNA (1)...(19): siRNA sense strand
gauaaaguacaucccaaua

SEQ ID NO: 468267 - RNA, 19 nt, Homo sapiens
  misc_RNA (1)...(19): siRNA sense strand
ccaaagaucuuagcaagca

SEQ ID NO: 468268 - RNA, 19 nt, Homo sapiens
  misc_RNA (1)...(19): siRNA sense strand
guucaacgcccaugaguuu

SEQ ID NO: 468269 - RNA, 19 nt, Homo sapiens
  misc_RNA (1)...(19): siRNA sense strand
cgccauaucucccaaguga

SEQ ID NO: 468270 - RNA, 19 nt, Homo sapiens
  misc_RNA (1)...(19): siRNA sense strand
guuugagacuguuaucuuu

SEQ ID NO: 468271 - RNA, 19 nt, Homo sapiens
  misc_RNA (1)...(19): siRNA sense strand
gcagacagcagccuggauu

SEQ ID NO: 468272 - RNA, 19 nt, Homo sapiens
  misc_RNA (1)...(19): siRNA sense strand
caauaaagcggaauucauc

SEQ ID NO: 468273 - RNA, 19 nt, Homo sapiens
  misc_RNA (1)...(19): siRNA sense strand
gacccugcgucuauuauga

SEQ ID NO: 468274 - RNA, 19 nt, Homo sapiens
  misc_RNA (1)...(19): siRNA sense strand
ucauugacauucucaguga

SEQ ID NO: 468275 - RNA, 19 nt, Homo sapiens
  misc_RNA (1)...(19): siRNA sense strand
ggacagacuagccuucuau

SEQ ID NO: 468276 - RNA, 19 nt, Homo sapiens
  misc_RNA (1)...(19): siRNA sense strand
gaacagggaaucuugaaac

SEQ ID NO: 468277 - RNA, 19 nt, Homo sapiens
  misc_RNA (1)...(19): siRNA sense strand
caacacugcuucagauggu

SEQ ID NO: 468278 - RNA, 19 nt, Homo sapiens
  misc_RNA (1)...(19): siRNA sense strand
caagccaacuucuuucauc

SEQ ID NO: 468279 - RNA, 19 nt, Homo sapiens
  misc_RNA (1)...(19): siRNA sense strand
uuuacaggcugaauuauug

SEQ ID NO: 468280 - RNA, 19 nt, Homo sapiens
  misc_RNA (1)...(19): siRNA sense strand
gaaguugacaggcgagaga

SEQ ID NO: 468281 - RNA, 19 nt, Homo sapiens
  misc_RNA (1)...(19): siRNA sense strand
uaauaacggugcuaacucu

SEQ ID NO: 468282 - RNA, 19 nt, Homo sapiens
  misc_RNA (1)...(19): siRNA sense strand
gcagagcgccucguggaaa

SEQ ID NO: 468283 - RNA, 19 nt, Homo sapiens
  misc_RNA (1)...(19): siRNA sense strand
gcaggaaaccagaucacaa

SEQ ID NO: 468284 - RNA, 19 nt, Homo sapiens
  misc_RNA (1)...(19): siRNA sense strand
gaagacacagauuuggaaa

SEQ ID NO: 468285 - RNA, 19 nt, Homo sapiens
  misc_RNA (1)...(19): siRNA sense strand
caggaaaccagaucacaaa

SEQ ID NO: 468286 - RNA, 19 nt, Homo sapiens
  misc_RNA (1)...(19): siRNA sense strand
gaaaucagggcagacagaa

SEQ ID NO: 468287 - RNA, 19 nt, Homo sapiens
  misc_RNA (1)...(19): siRNA sense strand
uugaagaacuugccaugga

SEQ ID NO: 468288 - RNA, 19 nt, Homo sapiens
  misc_RNA (1)...(19): siRNA sense strand
gcacaagccaacuucuuuc

SEQ ID NO: 468289 - RNA, 19 nt, Homo sapiens
  misc_RNA (1)...(19): siRNA sense strand
agacuagccuucuaucucu

SEQ ID NO: 468290 - RNA, 19 nt, Homo sapiens
  misc_RNA (1)...(19): siRNA sense strand
gagaacagggaaucuugaa

SEQ ID NO: 468291 - RNA, 19 nt, Homo sapiens
  misc_RNA (1)...(19): siRNA sense strand
ugaagaacuugccauggau

SEQ ID NO: 468292 - RNA, 19 nt, Homo sapiens
  misc_RNA (1)...(19): siRNA sense strand
cgaagacacagauuuggaa

SEQ ID NO: 468293 - RNA, 19 nt, Homo sapiens
  misc_RNA (1)...(19): siRNA sense strand
gagcacaagccaacuucuu

SEQ ID NO: 468294 - RNA, 19 nt, Homo sapiens
  misc_RNA (1)...(19): siRNA sense strand
agacgaagacacagauuug

SEQ ID NO: 468295 - RNA, 19 nt, Homo sapiens
  misc_RNA (1)...(19): siRNA sense strand
guaaauaggggaacguuuu

SEQ ID NO: 468296 - RNA, 19 nt, Homo sapiens
  misc_RNA (1)...(19): siRNA sense strand
aaauggacagcacuuuaua

SEQ ID NO: 468297 - RNA, 19 nt, Homo sapiens
  misc_RNA (1)...(19): siRNA sense strand
ggcaaaagcugcuaagaag

SEQ ID NO: 468298 - RNA, 19 nt, Homo sapiens
  misc_RNA (1)...(19): siRNA sense strand
ggagacagcagggcaguuc

SEQ ID NO: 468299 - RNA, 19 nt, Homo sapiens
  misc_RNA (1)...(19): siRNA sense strand
ugguugagaccuuguauaa

SEQ ID NO: 468300 - RNA, 19 nt, Homo sapiens
  misc_RNA (1)...(19): siRNA sense strand
gauguuagcguucguccau

SEQ ID NO: 468301 - RNA, 19 nt, Homo sapiens
  misc_RNA (1)...(19): siRNA sense strand
agccaaguaucagauguua

SEQ ID NO: 468302 - RNA, 19 nt, Homo sapiens
  misc_RNA (1)...(19): siRNA sense strand
guggaagacguaaagcuaa

SEQ ID NO: 468303 - RNA, 19 nt, Homo sapiens
  misc_RNA (1)...(19): siRNA sense strand
acgaucagcccgacuauga

SEQ ID NO: 468304 - RNA, 19 nt, Homo sapiens
  misc_RNA (1)...(19): siRNA sense strand
cagagcgccucguggaaau

SEQ ID NO: 468305 - RNA, 19 nt, Homo sapiens
  misc_RNA (1)...(19): siRNA sense strand
gcaaggagggcaccaugag

SEQ ID NO: 468306 - RNA, 19 nt, Homo sapiens
  misc_RNA (1)...(19): siRNA sense strand
gcugaauuauuggcaguau

SEQ ID NO: 468307 - RNA, 19 nt, Homo sapiens
  misc_RNA (1)...(19): siRNA sense strand
ccaagugaggcaucugaaa

SEQ ID NO: 468308 - RNA, 19 nt, Homo sapiens
  misc_RNA (1)...(19): siRNA sense strand
caaaagcugcuaagaagaa

SEQ ID NO: 468309 - RNA, 19 nt, Homo sapiens
  misc_RNA (1)...(19): siRNA sense strand
cuauaugggagcauucuuu

SEQ ID NO: 468310 - RNA, 19 nt, Homo sapiens
  misc_RNA (1)...(19): siRNA sense strand
cgaaaucagggcagacaga

SEQ ID NO: 468311 - RNA, 19 nt, Homo sapiens
  misc_RNA (1)...(19): siRNA sense strand
guacucaucaacacgaaau

SEQ ID NO: 468312 - RNA, 19 nt, Homo sapiens
  misc_RNA (1)...(19): siRNA sense strand
gccuggauuugucugaauu

SEQ ID NO: 468313 - RNA, 19 nt, Homo sapiens
  misc_RNA (1)...(19): siRNA sense strand
gaaaacucccguugauuau

SEQ ID NO: 468314 - RNA, 19 nt, Homo sapiens
  misc_RNA (1)...(19): siRNA sense strand
gauuuuacaggcugaauua

SEQ ID NO: 468315 - RNA, 19 nt, Homo sapiens
  misc_RNA (1)...(19): siRNA sense strand
gagccaaguaucagauguu

SEQ ID NO: 468316 - RNA, 19 nt, Homo sapiens
  misc_RNA (1)...(19): siRNA sense strand
uaaagcggaauucaucaga

SEQ ID NO: 468317 - RNA, 19 nt, Homo sapiens
  misc_RNA (1)...(19): siRNA sense strand
ccaauaaagcggaauucau

SEQ ID NO: 468318 - RNA, 19 nt, Homo sapiens
  misc_RNA (1)...(19): siRNA sense strand
gcuggacccugcgucuauu

SEQ ID NO: 468319 - RNA, 19 nt, Homo sapiens
  misc_RNA (1)...(19): siRNA sense strand
uggaagacguaaagcuaau

SEQ ID NO: 468320 - RNA, 19 nt, Homo sapiens
  misc_RNA (1)...(19): siRNA sense strand
cagacgaagacacagauuu

SEQ ID NO: 468321 - RNA, 19 nt, Homo sapiens
  misc_RNA (1)...(19): siRNA sense strand
uugccacgcuggucauuga

SEQ ID NO: 468322 - RNA, 19 nt, Homo sapiens
  misc_RNA (1)...(19): siRNA sense strand
uggacagcacuuuauaaua

SEQ ID NO: 468323 - RNA, 19 nt, Homo sapiens
  misc_RNA (1)...(19): siRNA sense strand
aaacucccguugauuaugc

SEQ ID NO: 468324 - RNA, 19 nt, Homo sapiens
  misc_RNA (1)...(19): siRNA sense strand
ggaugacgauagugugacu

SEQ ID NO: 468325 - RNA, 19 nt, Homo sapiens
  misc_RNA (1)...(19): siRNA sense strand
cagcguggcaucagacgaa

SEQ ID NO: 468326 - RNA, 19 nt, Homo sapiens
  misc_RNA (1)...(19): siRNA sense strand
gaguacucaucaacacgaa

SEQ ID NO: 468327 - RNA, 19 nt, Homo sapiens
  misc_RNA (1)...(19): siRNA sense strand
cugaauuauuggcaguaua

SEQ ID NO: 468328 - RNA, 19 nt, Homo sapiens
  misc_RNA (1)...(19): siRNA sense strand
caaagaucuuagcaagcaa

SEQ ID NO: 468329 - RNA, 19 nt, Homo sapiens
  misc_RNA (1)...(19): siRNA sense strand
gugagaacagggaaucuug

SEQ ID NO: 468330 - RNA, 19 nt, Homo sapiens
  misc_RNA (1)...(19): siRNA sense strand
gaucagcccgacuaugaca

SEQ ID NO: 468331 - RNA, 19 nt, Homo sapiens
  misc_RNA (1)...(19): siRNA sense strand
uagugugacugccaaagau

SEQ ID NO: 468332 - RNA, 19 nt, Homo sapiens
  misc_RNA (1)...(19): siRNA sense strand
gacagcagccuggauuugu

SEQ ID NO: 468333 - RNA, 19 nt, Homo sapiens
  misc_RNA (1)...(19): siRNA sense strand
gagcagacccaggcacaca

SEQ ID NO: 468334 - RNA, 19 nt, Homo sapiens
  misc_RNA (1)...(19): siRNA sense strand
ugagcuaacggacagacua

SEQ ID NO: 468335 - RNA, 19 nt, Homo sapiens
  misc_RNA (1)...(19): siRNA sense strand
caagugaggcaucugaaac

SEQ ID NO: 468336 - RNA, 19 nt, Homo sapiens
  misc_RNA (1)...(19): siRNA sense strand
cggacagacuagccuucua

SEQ ID NO: 468337 - RNA, 19 nt, Homo sapiens
  misc_RNA (1)...(19): siRNA sense strand
ggacccugcgucuauuaug

SEQ ID NO: 468338 - RNA, 19 nt, Homo sapiens
  misc_RNA (1)...(19): siRNA sense strand
cagcagggcaguucucucu

SEQ ID NO: 468339 - RNA, 19 nt, Homo sapiens
  misc_RNA (1)...(19): siRNA sense strand
gagcuaacggacagacuag

SEQ ID NO: 468340 - RNA, 19 nt, Homo sapiens
  misc_RNA (1)...(19): siRNA sense strand
acaggauucuagugggaaa

SEQ ID NO: 468341 - RNA, 19 nt, Homo sapiens
  misc_RNA (1)...(19): siRNA sense strand
caaagcagggcagauuuua

SEQ ID NO: 468342 - RNA, 19 nt, Homo sapiens
  misc_RNA (1)...(19): siRNA sense strand
ccaaguaucagauguuagc

SEQ ID NO: 468343 - RNA, 19 nt, Homo sapiens
  misc_RNA (1)...(19): siRNA sense strand
gacccaggcacacaggauu

SEQ ID NO: 468344 - RNA, 19 nt, Homo sapiens
  misc_RNA (1)...(19): siRNA sense strand
caucagacgaagacacaga

SEQ ID NO: 468345 - RNA, 19 nt, Homo sapiens
  misc_RNA (1)...(19): siRNA sense strand
acaacgaucagcccgacua

SEQ ID NO: 468346 - RNA, 19 nt, Homo sapiens
  misc_RNA (1)...(19): siRNA sense strand
uauaugggagcauucuuug

SEQ ID NO: 468347 - RNA, 19 nt, Homo sapiens
  misc_RNA (1)...(19): siRNA sense strand
cuccaacacugcuucagau

SEQ ID NO: 468348 - RNA, 19 nt, Homo sapiens
  misc_RNA (1)...(19): siRNA sense strand
cagacuagccuucuaucuc

SEQ ID NO: 468349 - RNA, 19 nt, Homo sapiens
  misc_RNA (1)...(19): siRNA sense strand
ugagaacagggaaucuuga

SEQ ID NO: 468350 - RNA, 19 nt, Homo sapiens
  misc_RNA (1)...(19): siRNA sense strand
uugagacuguuaucuuuag

SEQ ID NO: 468351 - RNA, 19 nt, Homo sapiens
  misc_RNA (1)...(19): siRNA sense strand
caacgaucagcccgacuau

SEQ ID NO: 468352 - RNA, 19 nt, Homo sapiens
  misc_RNA (1)...(19): siRNA sense strand
cagccuggauuugucugaa

SEQ ID NO: 468353 - RNA, 19 nt, Homo sapiens
  misc_RNA (1)...(19): siRNA sense strand
aauggacagcacuuuauaa

SEQ ID NO: 468354 - RNA, 19 nt, Homo sapiens
  misc_RNA (1)...(19): siRNA sense strand
aguggaagacguaaagcua

SEQ ID NO: 468355 - RNA, 19 nt, Homo sapiens
  misc_RNA (1)...(19): siRNA sense strand
aaucagggcagacagaagu

SEQ ID NO: 468356 - RNA, 19 nt, Homo sapiens
  misc_RNA (1)...(19): siRNA sense strand
agacacagauuuggaaacc

SEQ ID NO: 468357 - RNA, 19 nt, Homo sapiens
  misc_RNA (1)...(19): siRNA sense strand
auguggagcucauacugaa

SEQ ID NO: 468358 - RNA, 19 nt, Homo sapiens
  misc_RNA (1)...(19): siRNA sense strand
uauaauaacggugcuaacu

SEQ ID NO: 468359 - RNA, 19 nt, Homo sapiens
  misc_RNA (1)...(19): siRNA sense strand
ucagggcagacagaaguua

SEQ ID NO: 468360 - RNA, 19 nt, Homo sapiens
  misc_RNA (1)...(19): siRNA sense strand
guugagaccuuguauaaua

SEQ ID NO: 468361 - RNA, 19 nt, Homo sapiens
  misc_RNA (1)...(19): siRNA sense strand
ggacagcacuuuauaauac

SEQ ID NO: 468362 - RNA, 19 nt, Homo sapiens
  misc_RNA (1)...(19): siRNA sense strand
ggaaaccacugcaagcaaa

SEQ ID NO: 468363 - RNA, 19 nt, Homo sapiens
  misc_RNA (1)...(19): siRNA sense strand
uaacggugcuaacucuaua

SEQ ID NO: 468364 - RNA, 19 nt, Homo sapiens
  misc_RNA (1)...(19): siRNA sense strand
gaaguuagcucgguucaac

SEQ ID NO: 468365 - RNA, 19 nt, Homo sapiens
  misc_RNA (1)...(19): siRNA sense strand
ggaaaacucccguugauua

SEQ ID NO: 468366 - RNA, 19 nt, Homo sapiens
  misc_RNA (1)...(19): siRNA sense strand
gauaaaguacaucccaaua

SEQ ID NO: 468367 - RNA, 19 nt, Homo sapiens
  misc_RNA (1)...(19): siRNA sense strand
ccaaagaucuuagcaagca

SEQ ID NO: 468368 - RNA, 19 nt, Homo sapiens
  misc_RNA (1)...(19): siRNA sense strand
guucaacgcccaugaguuu

SEQ ID NO: 468369 - RNA, 19 nt, Homo sapiens
  misc_RNA (1)...(19): siRNA sense strand
cgccauaucucccaaguga

SEQ ID NO: 468370 - RNA, 19 nt, Homo sapiens
  misc_RNA (1)...(19): siRNA sense strand
guuugagacuguuaucuuu

SEQ ID NO: 468371 - RNA, 19 nt, Homo sapiens
  misc_RNA (1)...(19): siRNA sense strand
gcagacagcagccuggauu

SEQ ID NO: 468372 - RNA, 19 nt, Homo sapiens
  misc_RNA (1)...(19): siRNA sense strand
caauaaagcggaauucauc

SEQ ID NO: 468373 - RNA, 19 nt, Homo sapiens
  misc_RNA (1)...(19): siRNA sense strand
gacccugcgucuauuauga

SEQ ID NO: 468374 - RNA, 19 nt, Homo sapiens
  misc_RNA (1)...(19): siRNA sense strand
ucauugacauucucaguga

SEQ ID NO: 468375 - RNA, 19 nt, Homo sapiens
  misc_RNA (1)...(19): siRNA sense strand
ggacagacuagccuucuau

SEQ ID NO: 468376 - RNA, 19 nt, Homo sapiens
  misc_RNA (1)...(19): siRNA sense strand
gaacagggaaucuugaaac

SEQ ID NO: 468377 - RNA, 19 nt, Homo sapiens
  misc_RNA (1)...(19): siRNA sense strand
caacacugcuucagauggu

SEQ ID NO: 468378 - RNA, 19 nt, Homo sapiens
  misc_RNA (1)...(19): siRNA sense strand
caagccaacuucuuucauc

SEQ ID NO: 468379 - RNA, 19 nt, Homo sapiens
  misc_RNA (1)...(19): siRNA sense strand
uuuacaggcugaauuauug

SEQ ID NO: 468380 - RNA, 19 nt, Homo sapiens
  misc_RNA (1)...(19): siRNA sense strand
gaaguugacaggcgagaga

SEQ ID NO: 468381 - RNA, 19 nt, Homo sapiens
  misc_RNA (1)...(19): siRNA sense strand
uaauaacggugcuaacucu

SEQ ID NO: 468382 - RNA, 19 nt, Homo sapiens
  misc_RNA (1)...(19): siRNA sense strand
gcagagcgccucguggaaa

SEQ ID NO: 468383 - RNA, 19 nt, Homo sapiens
  misc_RNA (1)...(19): siRNA sense strand
gcaggaaaccagaucacaa

SEQ ID NO: 468384 - RNA, 19 nt, Homo sapiens
  misc_RNA (1)...(19): siRNA sense strand
gaagacacagauuuggaaa

SEQ ID NO: 468385 - RNA, 19 nt, Homo sapiens
  misc_RNA (1)...(19): siRNA sense strand
caggaaaccagaucacaaa

SEQ ID NO: 468386 - RNA, 19 nt, Homo sapiens
  misc_RNA (1)...(19): siRNA sense strand
gaaaucagggcagacagaa

SEQ ID NO: 468387 - RNA, 19 nt, Homo sapiens
  misc_RNA (1)...(19): siRNA sense strand
uugaagaacuugccaugga

SEQ ID NO: 468388 - RNA, 19 nt, Homo sapiens
  misc_RNA (1)...(19): siRNA sense strand
gcacaagccaacuucuuuc

SEQ ID NO: 468389 - RNA, 19 nt, Homo sapiens
  misc_RNA (1)...(19): siRNA sense strand
agacuagccuucuaucucu

SEQ ID NO: 468390 - RNA, 19 nt, Homo sapiens
  misc_RNA (1)...(19): siRNA sense strand
gagaacagggaaucuugaa

SEQ ID NO: 468391 - RNA, 19 nt, Homo sapiens
  misc_RNA (1)...(19): siRNA sense strand
ugaagaacuugccauggau

SEQ ID NO: 468392 - RNA, 19 nt, Homo sapiens
  misc_RNA (1)...(19): siRNA sense strand
cgaagacacagauuuggaa

SEQ ID NO: 468393 - RNA, 19 nt, Homo sapiens
  misc_RNA (1)...(19): siRNA sense strand
gagcacaagccaacuucuu

SEQ ID NO: 468394 - RNA, 19 nt, Homo sapiens
  misc_RNA (1)...(19): siRNA sense strand
agacgaagacacagauuug

SEQ ID NO: 468395 - RNA, 19 nt, Homo sapiens
  misc_RNA (1)...(19): siRNA sense strand
guaaauaggggaacguuuu

SEQ ID NO: 468396 - RNA, 19 nt, Homo sapiens
  misc_RNA (1)...(19): siRNA sense strand
aaauggacagcacuuuaua

SEQ ID NO: 468397 - RNA, 19 nt, Homo sapiens
  misc_RNA (1)...(19): siRNA sense strand
ggcaaaagcugcuaagaag

SEQ ID NO: 468398 - RNA, 19 nt, Homo sapiens
  misc_RNA (1)...(19): siRNA sense strand
ggagacagcagggcaguuc

SEQ ID NO: 468399 - RNA, 19 nt, Homo sapiens
  misc_RNA (1)...(19): siRNA sense strand
ugguugagaccuuguauaa

SEQ ID NO: 468400 - RNA, 19 nt, Homo sapiens
  misc_RNA (1)...(19): siRNA sense strand
gauguuagcguucguccau

SEQ ID NO: 468401 - RNA, 19 nt, Homo sapiens
  misc_RNA (1)...(19): siRNA sense strand
agccaaguaucagauguua

SEQ ID NO: 468402 - RNA, 19 nt, Homo sapiens
  misc_RNA (1)...(19): siRNA sense strand
guggaagacguaaagcuaa

SEQ ID NO: 468403 - RNA, 19 nt, Homo sapiens
  misc_RNA (1)...(19): siRNA sense strand
acgaucagcccgacuauga

SEQ ID NO: 468404 - RNA, 19 nt, Homo sapiens
  misc_RNA (1)...(19): siRNA sense strand
cagagcgccucguggaaau

SEQ ID NO: 468405 - RNA, 19 nt, Homo sapiens
  misc_RNA (1)...(19): siRNA sense strand
gcaaggagggcaccaugag

SEQ ID NO: 468406 - RNA, 19 nt, Homo sapiens
  misc_RNA (1)...(19): siRNA sense strand
gcugaauuauuggcaguau

SEQ ID NO: 468407 - RNA, 19 nt, Homo sapiens
  misc_RNA (1)...(19): siRNA sense strand
ccaagugaggcaucugaaa

SEQ ID NO: 468408 - RNA, 19 nt, Homo sapiens
  misc_RNA (1)...(19): siRNA sense strand
caaaagcugcuaagaagaa

SEQ ID NO: 468409 - RNA, 19 nt, Homo sapiens
  misc_RNA (1)...(19): siRNA sense strand
cuauaugggagcauucuuu

SEQ ID NO: 468410 - RNA, 19 nt, Homo sapiens
  misc_RNA (1)...(19): siRNA sense strand
cgaaaucagggcagacaga

SEQ ID NO: 468411 - RNA, 19 nt, Homo sapiens
  misc_RNA (1)...(19): siRNA sense strand
guacucaucaacacgaaau

SEQ ID NO: 468412 - RNA, 19 nt, Homo sapiens
  misc_RNA (1)...(19): siRNA sense strand
gccuggauuugucugaauu

SEQ ID NO: 468413 - RNA, 19 nt, Homo sapiens
  misc_RNA (1)...(19): siRNA sense strand
gaaaacucccguugauuau

SEQ ID NO: 468414 - RNA, 19 nt, Homo sapiens
  misc_RNA (1)...(19): siRNA sense strand
gauuuuacaggcugaauua

SEQ ID NO: 468415 - RNA, 19 nt, Homo sapiens
  misc_RNA (1)...(19): siRNA sense strand
gagccaaguaucagauguu

SEQ ID NO: 468416 - RNA, 19 nt, Homo sapiens
  misc_RNA (1)...(19): siRNA sense strand
uaaagcggaauucaucaga

SEQ ID NO: 468417 - RNA, 19 nt, Homo sapiens
  misc_RNA (1)...(19): siRNA sense strand
ccaauaaagcggaauucau

SEQ ID NO: 468418 - RNA, 19 nt, Homo sapiens
  misc_RNA (1)...(19): siRNA sense strand
gcuggacccugcgucuauu

SEQ ID NO: 468419 - RNA, 19 nt, Homo sapiens
  misc_RNA (1)...(19): siRNA sense strand
uggaagacguaaagcuaau

SEQ ID NO: 468420 - RNA, 19 nt, Homo sapiens
  misc_RNA (1)...(19): siRNA sense strand
cagacgaagacacagauuu

SEQ ID NO: 468421 - RNA, 19 nt, Homo sapiens
  misc_RNA (1)...(19): siRNA sense strand
uugccacgcuggucauuga

SEQ ID NO: 468422 - RNA, 19 nt, Homo sapiens
  misc_RNA (1)...(19): siRNA sense strand
uggacagcacuuuauaaua

SEQ ID NO: 468423 - RNA, 19 nt, Homo sapiens
  misc_RNA (1)...(19): siRNA sense strand
aaacucccguugauuaugc

SEQ ID NO: 468424 - RNA, 19 nt, Homo sapiens
  misc_RNA (1)...(19): siRNA sense strand
ggaugacgauagugugacu

SEQ ID NO: 468425 - RNA, 19 nt, Homo sapiens
  misc_RNA (1)...(19): siRNA sense strand
cagcguggcaucagacgaa

SEQ ID NO: 468426 - RNA, 19 nt, Homo sapiens
  misc_RNA (1)...(19): siRNA sense strand
gaguacucaucaacacgaa

SEQ ID NO: 468427 - RNA, 19 nt, Homo sapiens
  misc_RNA (1)...(19): siRNA sense strand
cugaauuauuggcaguaua

SEQ ID NO: 468428 - RNA, 19 nt, Homo sapiens
  misc_RNA (1)...(19): siRNA sense strand
caaagaucuuagcaagcaa

SEQ ID NO: 468429 - RNA, 19 nt, Homo sapiens
  misc_RNA (1)...(19): siRNA sense strand
gugagaacagggaaucuug

SEQ ID NO: 468430 - RNA, 19 nt, Homo sapiens
  misc_RNA (1)...(19): siRNA sense strand
gaucagcccgacuaugaca

SEQ ID NO: 468431 - RNA, 19 nt, Homo sapiens
  misc_RNA (1)...(19): siRNA sense strand
uagugugacugccaaagau

SEQ ID NO: 468432 - RNA, 19 nt, Homo sapiens
  misc_RNA (1)...(19): siRNA sense strand
gacagcagccuggauuugu

SEQ ID NO: 468433 - RNA, 19 nt, Homo sapiens
  misc_RNA (1)...(19): siRNA sense strand
gagcagacccaggcacaca

SEQ ID NO: 468434 - RNA, 19 nt, Homo sapiens
  misc_RNA (1)...(19): siRNA sense strand
ugagcuaacggacagacua

SEQ ID NO: 468435 - RNA, 19 nt, Homo sapiens
  misc_RNA (1)...(19): siRNA sense strand
caagugaggcaucugaaac

SEQ ID NO: 468436 - RNA, 19 nt, Homo sapiens
  misc_RNA (1)...(19): siRNA sense strand
cggacagacuagccuucua

SEQ ID NO: 468437 - RNA, 19 nt, Homo sapiens
  misc_RNA (1)...(19): siRNA sense strand
ggacccugcgucuauuaug

SEQ ID NO: 468438 - RNA, 19 nt, Homo sapiens
  misc_RNA (1)...(19): siRNA sense strand
cagcagggcaguucucucu

SEQ ID NO: 468439 - RNA, 19 nt, Homo sapiens
  misc_RNA (1)...(19): siRNA sense strand
gagcuaacggacagacuag

SEQ ID NO: 468440 - RNA, 19 nt, Homo sapiens
  misc_RNA (1)...(19): siRNA sense strand
acaggauucuagugggaaa

SEQ ID NO: 468441 - RNA, 19 nt, Homo sapiens
  misc_RNA (1)...(19): siRNA sense strand
caaagcagggcagauuuua

SEQ ID NO: 468442 - RNA, 19 nt, Homo sapiens
  misc_RNA (1)...(19): siRNA sense strand
ccaaguaucagauguuagc

SEQ ID NO: 468443 - RNA, 19 nt, Homo sapiens
  misc_RNA (1)...(19): siRNA sense strand
gacccaggcacacaggauu

SEQ ID NO: 468444 - RNA, 19 nt, Homo sapiens
  misc_RNA (1)...(19): siRNA sense strand
caucagacgaagacacaga

SEQ ID NO: 468445 - RNA, 19 nt, Homo sapiens
  misc_RNA (1)...(19): siRNA sense strand
acaacgaucagcccgacua

SEQ ID NO: 468446 - RNA, 19 nt, Homo sapiens
  misc_RNA (1)...(19): siRNA sense strand
uauaugggagcauucuuug

SEQ ID NO: 468447 - RNA, 19 nt, Homo sapiens
  misc_RNA (1)...(19): siRNA sense strand
cuccaacacugcuucagau

SEQ ID NO: 468448 - RNA, 19 nt, Homo sapiens
  misc_RNA (1)...(19): siRNA sense strand
cagacuagccuucuaucuc

SEQ ID NO: 468449 - RNA, 19 nt, Homo sapiens
  misc_RNA (1)...(19): siRNA sense strand
ugagaacagggaaucuuga

SEQ ID NO: 468450 - RNA, 19 nt, Homo sapiens
  misc_RNA (1)...(19): siRNA sense strand
uugagacuguuaucuuuag

SEQ ID NO: 468451 - RNA, 19 nt, Homo sapiens
  misc_RNA (1)...(19): siRNA sense strand
caacgaucagcccgacuau

SEQ ID NO: 468452 - RNA, 19 nt, Homo sapiens
  misc_RNA (1)...(19): siRNA sense strand
cagccuggauuugucugaa

SEQ ID NO: 468453 - RNA, 19 nt, Homo sapiens
  misc_RNA (1)...(19): siRNA sense strand
aauggacagcacuuuauaa

SEQ ID NO: 468454 - RNA, 19 nt, Homo sapiens
  misc_RNA (1)...(19): siRNA sense strand
aguggaagacguaaagcua

SEQ ID NO: 468455 - RNA, 19 nt, Homo sapiens
  misc_RNA (1)...(19): siRNA sense strand
aaucagggcagacagaagu

SEQ ID NO: 468456 - RNA, 19 nt, Homo sapiens
  misc_RNA (1)...(19): siRNA sense strand
agacacagauuuggaaacc

SEQ ID NO: 468457 - RNA, 19 nt, Homo sapiens
  misc_RNA (1)...(19): siRNA sense strand
auguggagcucauacugaa

SEQ ID NO: 468458 - RNA, 19 nt, Homo sapiens
  misc_RNA (1)...(19): siRNA sense strand
uauaauaacggugcuaacu

SEQ ID NO: 468459 - RNA, 19 nt, Homo sapiens
  misc_RNA (1)...(19): siRNA sense strand
ucagggcagacagaaguua

SEQ ID NO: 468460 - RNA, 19 nt, Homo sapiens
  misc_RNA (1)...(19): siRNA sense strand
guugagaccuuguauaaua

SEQ ID NO: 468461 - RNA, 19 nt, Homo sapiens
  misc_RNA (1)...(19): siRNA sense strand
ggacagcacuuuauaauac

SEQ ID NO: 468462 - RNA, 19 nt, Homo sapiens
  misc_RNA (1)...(19): siRNA sense strand
ggaaaccacugcaagcaaa

SEQ ID NO: 468463 - RNA, 19 nt, Homo sapiens
  misc_RNA (1)...(19): siRNA sense strand
uaacggugcuaacucuaua

SEQ ID NO: 468464 - RNA, 19 nt, Homo sapiens
  misc_RNA (1)...(19): siRNA sense strand
gaaguuagcucgguucaac

SEQ ID NO: 468465 - RNA, 19 nt, Homo sapiens
  misc_RNA (1)...(19): siRNA sense strand
ggaaaacucccguugauua

SEQ ID NO: 468466 - RNA, 19 nt, Homo sapiens
  misc_RNA (1)...(19): siRNA sense strand
gauaaaguacaucccaaua

SEQ ID NO: 468467 - RNA, 19 nt, Homo sapiens
  misc_RNA (1)...(19): siRNA sense strand
ccaaagaucuuagcaagca

SEQ ID NO: 468468 - RNA, 19 nt, Homo sapiens
  misc_RNA (1)...(19): siRNA sense strand
guucaacgcccaugaguuu

SEQ ID NO: 468469 - RNA, 19 nt, Homo sapiens
  misc_RNA (1)...(19): siRNA sense strand
cgccauaucucccaaguga

SEQ ID NO: 468470 - RNA, 19 nt, Homo sapiens
  misc_RNA (1)...(19): siRNA sense strand
guuugagacuguuaucuuu

SEQ ID NO: 468471 - RNA, 19 nt, Homo sapiens
  misc_RNA (1)...(19): siRNA sense strand
gcagacagcagccuggauu

SEQ ID NO: 468472 - RNA, 19 nt, Homo sapiens
  misc_RNA (1)...(19): siRNA sense strand
caauaaagcggaauucauc

SEQ ID NO: 468473 - RNA, 19 nt, Homo sapiens
  misc_RNA (1)...(19): siRNA sense strand
gacccugcgucuauuauga

SEQ ID NO: 468474 - RNA, 19 nt, Homo sapiens
  misc_RNA (1)...(19): siRNA sense strand
ucauugacauucucaguga

SEQ ID NO: 468475 - RNA, 19 nt, Homo sapiens
  misc_RNA (1)...(19): siRNA sense strand
ggacagacuagccuucuau

SEQ ID NO: 468476 - RNA, 19 nt, Homo sapiens
  misc_RNA (1)...(19): siRNA sense strand
gaacagggaaucuugaaac

SEQ ID NO: 468477 - RNA, 19 nt, Homo sapiens
  misc_RNA (1)...(19): siRNA sense strand
caacacugcuucagauggu

SEQ ID NO: 468478 - RNA, 19 nt, Homo sapiens
  misc_RNA (1)...(19): siRNA sense strand
caagccaacuucuuucauc

SEQ ID NO: 468479 - RNA, 19 nt, Homo sapiens
  misc_RNA (1)...(19): siRNA sense strand
uuuacaggcugaauuauug

SEQ ID NO: 468480 - RNA, 19 nt, Homo sapiens
  misc_RNA (1)...(19): siRNA sense strand
gaaguugacaggcgagaga

SEQ ID NO: 468481 - RNA, 19 nt, Homo sapiens
  misc_RNA (1)...(19): siRNA sense strand
uaauaacggugcuaacucu

SEQ ID NO: 468482 - RNA, 19 nt, Homo sapiens
  misc_RNA (1)...(19): siRNA sense strand
gcagagcgccucguggaaa

SEQ ID NO: 468483 - RNA, 19 nt, Homo sapiens
  misc_RNA (1)...(19): siRNA sense strand
gcaggaaaccagaucacaa

SEQ ID NO: 468484 - RNA, 19 nt, Homo sapiens
  misc_RNA (1)...(19): siRNA sense strand
gaagacacagauuuggaaa

SEQ ID NO: 468485 - RNA, 19 nt, Homo sapiens
  misc_RNA (1)...(19): siRNA sense strand
caggaaaccagaucacaaa

SEQ ID NO: 468486 - RNA, 19 nt, Homo sapiens
  misc_RNA (1)...(19): siRNA sense strand
gaaaucagggcagacagaa

SEQ ID NO: 468487 - RNA, 19 nt, Homo sapiens
  misc_RNA (1)...(19): siRNA sense strand
uugaagaacuugccaugga

SEQ ID NO: 468488 - RNA, 19 nt, Homo sapiens
  misc_RNA (1)...(19): siRNA sense strand
gcacaagccaacuucuuuc

SEQ ID NO: 468489 - RNA, 19 nt, Homo sapiens
  misc_RNA (1)...(19): siRNA sense strand
agacuagccuucuaucucu

SEQ ID NO: 468490 - RNA, 19 nt, Homo sapiens
  misc_RNA (1)...(19): siRNA sense strand
gagaacagggaaucuugaa

SEQ ID NO: 468491 - RNA, 19 nt, Homo sapiens
  misc_RNA (1)...(19): siRNA sense strand
ugaagaacuugccauggau

SEQ ID NO: 468492 - RNA, 19 nt, Homo sapiens
  misc_RNA (1)...(19): siRNA sense strand
cgaagacacagauuuggaa

SEQ ID NO: 468493 - RNA, 19 nt, Homo sapiens
  misc_RNA (1)...(19): siRNA sense strand
gagcacaagccaacuucuu

SEQ ID NO: 468494 - RNA, 19 nt, Homo sapiens
  misc_RNA (1)...(19): siRNA sense strand
agacgaagacacagauuug

SEQ ID NO: 468495 - RNA, 19 nt, Homo sapiens
  misc_RNA (1)...(19): siRNA sense strand
guaaauaggggaacguuuu

SEQ ID NO: 468496 - RNA, 19 nt, Homo sapiens
  misc_RNA (1)...(19): siRNA sense strand
aaauggacagcacuuuaua

SEQ ID NO: 468497 - RNA, 19 nt, Homo sapiens
  misc_RNA (1)...(19): siRNA sense strand
ggcaaaagcugcuaagaag

SEQ ID NO: 468498 - RNA, 19 nt, Homo sapiens
  misc_RNA (1)...(19): siRNA sense strand
ggagacagcagggcaguuc

SEQ ID NO: 468499 - RNA, 19 nt, Homo sapiens
  misc_RNA (1)...(19): siRNA sense strand
ugguugagaccuuguauaa

SEQ ID NO: 468500 - RNA, 19 nt, Homo sapiens
  misc_RNA (1)...(19): siRNA sense strand
gauguuagcguucguccau

SEQ ID NO: 468501 - RNA, 19 nt, Homo sapiens
  misc_RNA (1)...(19): siRNA sense strand
agccaaguaucagauguua

SEQ ID NO: 468502 - RNA, 19 nt, Homo sapiens
  misc_RNA (1)...(19): siRNA sense strand
guggaagacguaaagcuaa

SEQ ID NO: 468503 - RNA, 19 nt, Homo sapiens
  misc_RNA (1)...(19): siRNA sense strand
cagagcgccucguggaaau

SEQ ID NO: 468504 - RNA, 19 nt, Homo sapiens
  misc_RNA (1)...(19): siRNA sense strand
gcaaggagggcaccaugag

SEQ ID NO: 468505 - RNA, 19 nt, Homo sapiens
  misc_RNA (1)...(19): siRNA sense strand
gcugaauuauuggcaguau

SEQ ID NO: 468506 - RNA, 19 nt, Homo sapiens
  misc_RNA (1)...(19): siRNA sense strand
ccaagugaggcaucugaaa

SEQ ID NO: 468507 - RNA, 19 nt, Homo sapiens
  misc_RNA (1)...(19): siRNA sense strand
caaaagcugcuaagaagaa

SEQ ID NO: 468508 - RNA, 19 nt, Homo sapiens
  misc_RNA (1)...(19): siRNA sense strand
cuauaugggagcauucuuu

SEQ ID NO: 468509 - RNA, 19 nt, Homo sapiens
  misc_RNA (1)...(19): siRNA sense strand
cgaaaucagggcagacaga

SEQ ID NO: 468510 - RNA, 19 nt, Homo sapiens
  misc_RNA (1)...(19): siRNA sense strand
guacucaucaacacgaaau

SEQ ID NO: 468511 - RNA, 19 nt, Homo sapiens
  misc_RNA (1)...(19): siRNA sense strand
gccuggauuugucugaauu

SEQ ID NO: 468512 - RNA, 19 nt, Homo sapiens
  misc_RNA (1)...(19): siRNA sense strand
gaaaacucccguugauuau

SEQ ID NO: 468513 - RNA, 19 nt, Homo sapiens
  misc_RNA (1)...(19): siRNA sense strand
gauuuuacaggcugaauua

SEQ ID NO: 468514 - RNA, 19 nt, Homo sapiens
  misc_RNA (1)...(19): siRNA sense strand
gagccaaguaucagauguu

SEQ ID NO: 468515 - RNA, 19 nt, Homo sapiens
  misc_RNA (1)...(19): siRNA sense strand
uaaagcggaauucaucaga

SEQ ID NO: 468516 - RNA, 19 nt, Homo sapiens
  misc_RNA (1)...(19): siRNA sense strand
ccaauaaagcggaauucau

SEQ ID NO: 468517 - RNA, 19 nt, Homo sapiens
  misc_RNA (1)...(19): siRNA sense strand
gcuggacccugcgucuauu

SEQ ID NO: 468518 - RNA, 19 nt, Homo sapiens
  misc_RNA (1)...(19): siRNA sense strand
uggaagacguaaagcuaau

SEQ ID NO: 468519 - RNA, 19 nt, Homo sapiens
  misc_RNA (1)...(19): siRNA sense strand
cagacgaagacacagauuu

SEQ ID NO: 468520 - RNA, 19 nt, Homo sapiens
  misc_RNA (1)...(19): siRNA sense strand
uugccacgcuggucauuga

SEQ ID NO: 468521 - RNA, 19 nt, Homo sapiens
  misc_RNA (1)...(19): siRNA sense strand
uggacagcacuuuauaaua

SEQ ID NO: 468522 - RNA, 19 nt, Homo sapiens
  misc_RNA (1)...(19): siRNA sense strand
aaacucccguugauuaugc

SEQ ID NO: 468523 - RNA, 19 nt, Homo sapiens
  misc_RNA (1)...(19): siRNA sense strand
ggaugacgauagugugacu

SEQ ID NO: 468524 - RNA, 19 nt, Homo sapiens
  misc_RNA (1)...(19): siRNA sense strand
cagcguggcaucagacgaa

SEQ ID NO: 468525 - RNA, 19 nt, Homo sapiens
  misc_RNA (1)...(19): siRNA sense strand
gaguacucaucaacacgaa

SEQ ID NO: 468526 - RNA, 19 nt, Homo sapiens
  misc_RNA (1)...(19): siRNA sense strand
cugaauuauuggcaguaua

SEQ ID NO: 468527 - RNA, 19 nt, Homo sapiens
  misc_RNA (1)...(19): siRNA sense strand
caaagaucuuagcaagcaa

SEQ ID NO: 468528 - RNA, 19 nt, Homo sapiens
  misc_RNA (1)...(19): siRNA sense strand
gugagaacagggaaucuug

SEQ ID NO: 468529 - RNA, 19 nt, Homo sapiens
  misc_RNA (1)...(19): siRNA sense strand
gaucagcccgacuaugaca

SEQ ID NO: 468530 - RNA, 19 nt, Homo sapiens
  misc_RNA (1)...(19): siRNA sense strand
uagugugacugccaaagau

SEQ ID NO: 468531 - RNA, 19 nt, Homo sapiens
  misc_RNA (1)...(19): siRNA sense strand
gacagcagccuggauuugu

SEQ ID NO: 468532 - RNA, 19 nt, Homo sapiens
  misc_RNA (1)...(19): siRNA sense strand
gagcagacccaggcacaca

SEQ ID NO: 468533 - RNA, 19 nt, Homo sapiens
  misc_RNA (1)...(19): siRNA sense strand
ugagcuaacggacagacua

SEQ ID NO: 468534 - RNA, 19 nt, Homo sapiens
  misc_RNA (1)...(19): siRNA sense strand
caagugaggcaucugaaac

SEQ ID NO: 468535 - RNA, 19 nt, Homo sapiens
  misc_RNA (1)...(19): siRNA sense strand
cggacagacuagccuucua

SEQ ID NO: 468536 - RNA, 19 nt, Homo sapiens
  misc_RNA (1)...(19): siRNA sense strand
ggacccugcgucuauuaug

SEQ ID NO: 468537 - RNA, 19 nt, Homo sapiens
  misc_RNA (1)...(19): siRNA sense strand
cagcagggcaguucucucu

SEQ ID NO: 468538 - RNA, 19 nt, Homo sapiens
  misc_RNA (1)...(19): siRNA sense strand
gagcuaacggacagacuag

SEQ ID NO: 468539 - RNA, 19 nt, Homo sapiens
  misc_RNA (1)...(19): siRNA sense strand
acaggauucuagugggaaa

SEQ ID NO: 468540 - RNA, 19 nt, Homo sapiens
  misc_RNA (1)...(19): siRNA sense strand
caaagcagggcagauuuua

SEQ ID NO: 468541 - RNA, 19 nt, Homo sapiens
  misc_RNA (1)...(19): siRNA sense strand
ccaaguaucagauguuagc

SEQ ID NO: 468542 - RNA, 19 nt, Homo sapiens
  misc_RNA (1)...(19): siRNA sense strand
gacccaggcacacaggauu

SEQ ID NO: 468543 - RNA, 19 nt, Homo sapiens
  misc_RNA (1)...(19): siRNA sense strand
caucagacgaagacacaga

SEQ ID NO: 468544 - RNA, 19 nt, Homo sapiens
  misc_RNA (1)...(19): siRNA sense strand
uauaugggagcauucuuug

SEQ ID NO: 468545 - RNA, 19 nt, Homo sapiens
  misc_RNA (1)...(19): siRNA sense strand
cuccaacacugcuucagau

SEQ ID NO: 468546 - RNA, 19 nt, Homo sapiens
  misc_RNA (1)...(19): siRNA sense strand
cagacuagccuucuaucuc

SEQ ID NO: 468547 - RNA, 19 nt, Homo sapiens
  misc_RNA (1)...(19): siRNA sense strand
ugagaacagggaaucuuga

SEQ ID NO: 468548 - RNA, 19 nt, Homo sapiens
  misc_RNA (1)...(19): siRNA sense strand
uugagacuguuaucuuuag

SEQ ID NO: 468549 - RNA, 19 nt, Homo sapiens
  misc_RNA (1)...(19): siRNA sense strand
cagccuggauuugucugaa

SEQ ID NO: 468550 - RNA, 19 nt, Homo sapiens
  misc_RNA (1)...(19): siRNA sense strand
aauggacagcacuuuauaa

SEQ ID NO: 468551 - RNA, 19 nt, Homo sapiens
  misc_RNA (1)...(19): siRNA sense strand
aguggaagacguaaagcua

SEQ ID NO: 468552 - RNA, 19 nt, Homo sapiens
  misc_RNA (1)...(19): siRNA sense strand
gaauucaucagagccaagu

SEQ ID NO: 468553 - RNA, 19 nt, Homo sapiens
  misc_RNA (1)...(19): siRNA sense strand
agacacagauuuggaaacc

SEQ ID NO: 468554 - RNA, 19 nt, Homo sapiens
  misc_RNA (1)...(19): siRNA sense strand
auguggagcucauacugaa

SEQ ID NO: 468555 - RNA, 19 nt, Homo sapiens
  misc_RNA (1)...(19): siRNA sense strand
ucagggcagacagaaguua

SEQ ID NO: 468556 - RNA, 19 nt, Homo sapiens
  misc_RNA (1)...(19): siRNA sense strand
aaucagggcagacagaagu

SEQ ID NO: 468557 - RNA, 19 nt, Homo sapiens
  misc_RNA (1)...(19): siRNA sense strand
uauaauaacggugcuaacu

SEQ ID NO: 468558 - RNA, 19 nt, Homo sapiens
  misc_RNA (1)...(19): siRNA sense strand
ggcaaggagggcaccauga

SEQ ID NO: 468559 - RNA, 19 nt, Homo sapiens
  misc_RNA (1)...(19): siRNA sense strand
ggcaucagacgaagacaca

SEQ ID NO: 468560 - RNA, 19 nt, Homo sapiens
  misc_RNA (1)...(19): siRNA sense strand
gaaccugccugaacucaua

SEQ ID NO: 468561 - RNA, 19 nt, Homo sapiens
  misc_RNA (1)...(19): siRNA sense strand
ggacauacuuccacuauau

SEQ ID NO: 468562 - RNA, 19 nt, Homo sapiens
  misc_RNA (1)...(19): siRNA sense strand
ggaaagacaucuggaauau

SEQ ID NO: 468563 - RNA, 19 nt, Homo sapiens
  misc_RNA (1)...(19): siRNA sense strand
gaaacccuauccucaaaua

SEQ ID NO: 468564 - RNA, 19 nt, Homo sapiens
  misc_RNA (1)...(19): siRNA sense strand
gaucaaaucuggcgccuau

SEQ ID NO: 468565 - RNA, 19 nt, Homo sapiens
  misc_RNA (1)...(19): siRNA sense strand
gcaaguggcugcacaguuc

SEQ ID NO: 468566 - RNA, 19 nt, Homo sapiens
  misc_RNA (1)...(19): siRNA sense strand
guucaacgcugugucauua

SEQ ID NO: 468567 - RNA, 19 nt, Homo sapiens
  misc_RNA (1)...(19): siRNA sense strand
gaacaucauucagcacuuu

SEQ ID NO: 468568 - RNA, 19 nt, Homo sapiens
  misc_RNA (1)...(19): siRNA sense strand
gaagaucccugagaugcua

SEQ ID NO: 468569 - RNA, 19 nt, Homo sapiens
  misc_RNA (1)...(19): siRNA sense strand
gagcagcaauuccaagaaa

SEQ ID NO: 468570 - RNA, 19 nt, Homo sapiens
  misc_RNA (1)...(19): siRNA sense strand
caaagcacauuucauauuc

SEQ ID NO: 468571 - RNA, 19 nt, Homo sapiens
  misc_RNA (1)...(19): siRNA sense strand
ucauagagauucacaauuc

SEQ ID NO: 468572 - RNA, 19 nt, Homo sapiens
  misc_RNA (1)...(19): siRNA sense strand
gaaacaggaugagaagcua

SEQ ID NO: 468573 - RNA, 19 nt, Homo sapiens
  misc_RNA (1)...(19): siRNA sense strand
gcgaaacccuauccucaaa

SEQ ID NO: 468574 - RNA, 19 nt, Homo sapiens
  misc_RNA (1)...(19): siRNA sense strand
gcagcuagauggacagaug

SEQ ID NO: 468575 - RNA, 19 nt, Homo sapiens
  misc_RNA (1)...(19): siRNA sense strand
gagaggaacuccagcaagu

SEQ ID NO: 468576 - RNA, 19 nt, Homo sapiens
  misc_RNA (1)...(19): siRNA sense strand
ucucaaagcacauuucaua

SEQ ID NO: 468577 - RNA, 19 nt, Homo sapiens
  misc_RNA (1)...(19): siRNA sense strand
ucaacaggcucaaggauau

SEQ ID NO: 468578 - RNA, 19 nt, Homo sapiens
  misc_RNA (1)...(19): siRNA sense strand
gggaaagacaucuggaaua

SEQ ID NO: 468579 - RNA, 19 nt, Homo sapiens
  misc_RNA (1)...(19): siRNA sense strand
ucuaugagcugguugcauu

SEQ ID NO: 468580 - RNA, 19 nt, Homo sapiens
  misc_RNA (1)...(19): siRNA sense strand
caacgagagcgacaucaua

SEQ ID NO: 468581 - RNA, 19 nt, Homo sapiens
  misc_RNA (1)...(19): siRNA sense strand
gagaagcuauugcugaagu

SEQ ID NO: 468582 - RNA, 19 nt, Homo sapiens
  misc_RNA (1)...(19): siRNA sense strand
gacaacaggucucguucaa

SEQ ID NO: 468583 - RNA, 19 nt, Homo sapiens
  misc_RNA (1)...(19): siRNA sense strand
aaacgggccuucuucauca

SEQ ID NO: 468584 - RNA, 19 nt, Homo sapiens
  misc_RNA (1)...(19): siRNA sense strand
gcaggagguuacaaaguug

SEQ ID NO: 468585 - RNA, 19 nt, Homo sapiens
  misc_RNA (1)...(19): siRNA sense strand
ggaacucgguacugucaga

SEQ ID NO: 468586 - RNA, 19 nt, Homo sapiens
  misc_RNA (1)...(19): siRNA sense strand
acaggaaucuggcugaaga

SEQ ID NO: 468587 - RNA, 19 nt, Homo sapiens
  misc_RNA (1)...(19): siRNA sense strand
ugguaaagcugaucaaauc

SEQ ID NO: 468588 - RNA, 19 nt, Homo sapiens
  misc_RNA (1)...(19): siRNA sense strand
ggacaggaaucuggcugaa

SEQ ID NO: 468589 - RNA, 19 nt, Homo sapiens
  misc_RNA (1)...(19): siRNA sense strand
gcauugacgucaucagaca

SEQ ID NO: 468590 - RNA, 19 nt, Homo sapiens
  misc_RNA (1)...(19): siRNA sense strand
ggagggcagugcagaggaa

SEQ ID NO: 468591 - RNA, 19 nt, Homo sapiens
  misc_RNA (1)...(19): siRNA sense strand
gaagaggccgugcggaaug

SEQ ID NO: 468592 - RNA, 19 nt, Homo sapiens
  misc_RNA (1)...(19): siRNA sense strand
gagugaagaucccugagau

SEQ ID NO: 468593 - RNA, 19 nt, Homo sapiens
  misc_RNA (1)...(19): siRNA sense strand
caugaaggccggugugaaa

SEQ ID NO: 468594 - RNA, 19 nt, Homo sapiens
  misc_RNA (1)...(19): siRNA sense strand
uaaguagccugucuucucu

SEQ ID NO: 468595 - RNA, 19 nt, Homo sapiens
  misc_RNA (1)...(19): siRNA sense strand
gaagaaggagaaccugaug

SEQ ID NO: 468596 - RNA, 19 nt, Homo sapiens
  misc_RNA (1)...(19): siRNA sense strand
gaagaugcccgugguguuc

SEQ ID NO: 468597 - RNA, 19 nt, Homo sapiens
  misc_RNA (1)...(19): siRNA sense strand
gaaagacaucuggaauauu

SEQ ID NO: 468598 - RNA, 19 nt, Homo sapiens
  misc_RNA (1)...(19): siRNA sense strand
gcagauccacgacuacaga

SEQ ID NO: 468599 - RNA, 19 nt, Homo sapiens
  misc_RNA (1)...(19): siRNA sense strand
ggcaugaucuuccauacca

SEQ ID NO: 468600 - RNA, 19 nt, Homo sapiens
  misc_RNA (1)...(19): siRNA sense strand
gcugugggcuccucagaca

SEQ ID NO: 468601 - RNA, 19 nt, Homo sapiens
  misc_RNA (1)...(19): siRNA sense strand
aagagcagauccacgacua

SEQ ID NO: 468602 - RNA, 19 nt, Homo sapiens
  misc_RNA (1)...(19): siRNA sense strand
acacauggauggagcucuu

SEQ ID NO: 468603 - RNA, 19 nt, Homo sapiens
  misc_RNA (1)...(19): siRNA sense strand
cagcauggcuucggcuuca

SEQ ID NO: 468604 - RNA, 19 nt, Homo sapiens
  misc_RNA (1)...(19): siRNA sense strand
cccaaaagcucuucucaaa

SEQ ID NO: 468605 - RNA, 19 nt, Homo sapiens
  misc_RNA (1)...(19): siRNA sense strand
acaaguggcuaccguucuu

SEQ ID NO: 468606 - RNA, 19 nt, Homo sapiens
  misc_RNA (1)...(19): siRNA sense strand
gagaaccugcgacaucuga

SEQ ID NO: 468607 - RNA, 19 nt, Homo sapiens
  misc_RNA (1)...(19): siRNA sense strand
gcucaaugcugugcucauc

SEQ ID NO: 468608 - RNA, 19 nt, Homo sapiens
  misc_RNA (1)...(19): siRNA sense strand
ggaacaucauucagcacuu

SEQ ID NO: 468609 - RNA, 19 nt, Homo sapiens
  misc_RNA (1)...(19): siRNA sense strand
gcagcaauuccaagaaaga

SEQ ID NO: 468610 - RNA, 19 nt, Homo sapiens
  misc_RNA (1)...(19): siRNA sense strand
gagaacaaccagcaguaug

SEQ ID NO: 468611 - RNA, 19 nt, Homo sapiens
  misc_RNA (1)...(19): siRNA sense strand
uaacccagcgggagauuga

SEQ ID NO: 468612 - RNA, 19 nt, Homo sapiens
  misc_RNA (1)...(19): siRNA sense strand
gaccggaucaucaaaguca

SEQ ID NO: 468613 - RNA, 19 nt, Homo sapiens
  misc_RNA (1)...(19): siRNA sense strand
aggcaacgaugauccaaga

SEQ ID NO: 468614 - RNA, 19 nt, Homo sapiens
  misc_RNA (1)...(19): siRNA sense strand
agcaggagguuacaaaguu

SEQ ID NO: 468615 - RNA, 19 nt, Homo sapiens
  misc_RNA (1)...(19): siRNA sense strand
gauaaacgggccuucuuca

SEQ ID NO: 468616 - RNA, 19 nt, Homo sapiens
  misc_RNA (1)...(19): siRNA sense strand
agagaucagugaccucaug

SEQ ID NO: 468617 - RNA, 19 nt, Homo sapiens
  misc_RNA (1)...(19): siRNA sense strand
ggugugaagccaugaagaa

SEQ ID NO: 468618 - RNA, 19 nt, Homo sapiens
  misc_RNA (1)...(19): siRNA sense strand
agaacaaccagcaguauga

SEQ ID NO: 468619 - RNA, 19 nt, Homo sapiens
  misc_RNA (1)...(19): siRNA sense strand
gcccagaggaagacuauga

SEQ ID NO: 468620 - RNA, 19 nt, Homo sapiens
  misc_RNA (1)...(19): siRNA sense strand
cgagagcgacaucauauuc

SEQ ID NO: 468621 - RNA, 19 nt, Homo sapiens
  misc_RNA (1)...(19): siRNA sense strand
ugcagcggcucaccaagua

SEQ ID NO: 468622 - RNA, 19 nt, Homo sapiens
  misc_RNA (1)...(19): siRNA sense strand
ugaccaggguguagaucaa

SEQ ID NO: 468623 - RNA, 19 nt, Homo sapiens
  misc_RNA (1)...(19): siRNA sense strand
uaaacgggccuucuucauc

SEQ ID NO: 468624 - RNA, 19 nt, Homo sapiens
  misc_RNA (1)...(19): siRNA sense strand
cagagaaccgccaccguuu

SEQ ID NO: 468625 - RNA, 19 nt, Homo sapiens
  misc_RNA (1)...(19): siRNA sense strand
gaugcuacaggcugaaauu

SEQ ID NO: 468626 - RNA, 19 nt, Homo sapiens
  misc_RNA (1)...(19): siRNA sense strand
gaaggccggugugaaagag

SEQ ID NO: 468627 - RNA, 19 nt, Homo sapiens
  misc_RNA (1)...(19): siRNA sense strand
gagaaccgccaccguuuag

SEQ ID NO: 468628 - RNA, 19 nt, Homo sapiens
  misc_RNA (1)...(19): siRNA sense strand
gaaugaagcgguaaaacaa

SEQ ID NO: 468629 - RNA, 19 nt, Homo sapiens
  misc_RNA (1)...(19): siRNA sense strand
gaacucauagagauucaca

SEQ ID NO: 468630 - RNA, 19 nt, Homo sapiens
  misc_RNA (1)...(19): siRNA sense strand
ccaagaagagcagcaauuc

SEQ ID NO: 468631 - RNA, 19 nt, Homo sapiens
  misc_RNA (1)...(19): siRNA sense strand
ggcacgaccuuccaacaca

SEQ ID NO: 468632 - RNA, 19 nt, Homo sapiens
  misc_RNA (1)...(19): siRNA sense strand
gcuacaggcugaaauugac

SEQ ID NO: 468633 - RNA, 19 nt, Homo sapiens
  misc_RNA (1)...(19): siRNA sense strand
caucagacaagaacacaug

SEQ ID NO: 468634 - RNA, 19 nt, Homo sapiens
  misc_RNA (1)...(19): siRNA sense strand
caaaagcucuucucaaagc

SEQ ID NO: 468635 - RNA, 19 nt, Homo sapiens
  misc_RNA (1)...(19): siRNA sense strand
ggagauauuuuguccaagu

SEQ ID NO: 468636 - RNA, 19 nt, Homo sapiens
  misc_RNA (1)...(19): siRNA sense strand
ugacuccgcucuggaagau

SEQ ID NO: 468637 - RNA, 19 nt, Homo sapiens
  misc_RNA (1)...(19): siRNA sense strand
ggaggaucagcaaggauaa

SEQ ID NO: 468638 - RNA, 19 nt, Homo sapiens
  misc_RNA (1)...(19): siRNA sense strand
agagaaccgccaccguuua

SEQ ID NO: 468639 - RNA, 19 nt, Homo sapiens
  misc_RNA (1)...(19): siRNA sense strand
gauuccagcucuucaugca

SEQ ID NO: 468640 - RNA, 19 nt, Homo sapiens
  misc_RNA (1)...(19): siRNA sense strand
gaacaaccagcaguaugau

SEQ ID NO: 468641 - RNA, 19 nt, Homo sapiens
  misc_RNA (1)...(19): siRNA sense strand
caauagcucacaccuggaa

SEQ ID NO: 468642 - RNA, 19 nt, Homo sapiens
  misc_RNA (1)...(19): siRNA sense strand
gaagucaaaccaggcaaug

SEQ ID NO: 468643 - RNA, 19 nt, Homo sapiens
  misc_RNA (1)...(19): siRNA sense strand
aaucggaacucgguacugu

SEQ ID NO: 468644 - RNA, 19 nt, Homo sapiens
  misc_RNA (1)...(19): siRNA sense strand
gaucuuccauaccauugag

SEQ ID NO: 468645 - RNA, 19 nt, Homo sapiens
  misc_RNA (1)...(19): siRNA sense strand
uuaccugugugcagaaguu

SEQ ID NO: 468646 - RNA, 19 nt, Homo sapiens
  misc_RNA (1)...(19): siRNA sense strand
uacguuacaucuucucuca

SEQ ID NO: 468647 - RNA, 19 nt, Homo sapiens
  misc_RNA (1)...(19): siRNA sense strand
ccacacagaagcagcuaga

SEQ ID NO: 468648 - RNA, 19 nt, Homo sapiens
  misc_RNA (1)...(19): siRNA sense strand
gcagggaggcaacgaugau

SEQ ID NO: 468649 - RNA, 19 nt, Homo sapiens
  misc_RNA (1)...(19): siRNA sense strand
ggacaacacccagcuugca

SEQ ID NO: 468650 - RNA, 19 nt, Homo sapiens
  misc_RNA (1)...(19): siRNA sense strand
guauagacagguuaaguag

SEQ ID NO: 468651 - RNA, 19 nt, Homo sapiens
  misc_RNA (1)...(19): siRNA sense strand
acaagaagcgaaacccuau

SEQ ID NO: 468652 - RNA, 19 nt, Homo sapiens
  misc_RNA (1)...(19): siRNA sense strand
gagauauuuuguccaagua

SEQ ID NO: 468653 - RNA, 19 nt, Homo sapiens
  misc_RNA (1)...(19): siRNA sense strand
acuaugacccggguuauuu

SEQ ID NO: 468654 - RNA, 19 nt, Homo sapiens
  misc_RNA (1)...(19): siRNA sense strand
gcgaccggaucaucaaagu

SEQ ID NO: 468655 - RNA, 19 nt, Homo sapiens
  misc_RNA (1)...(19): siRNA sense strand
uggaggaucagcaaggaua

SEQ ID NO: 468656 - RNA, 19 nt, Homo sapiens
  misc_RNA (1)...(19): siRNA sense strand
ugccugaacucauagagau

SEQ ID NO: 468657 - RNA, 19 nt, Homo sapiens
  misc_RNA (1)...(19): siRNA sense strand
gaagugguaaagcugauca

SEQ ID NO: 468658 - RNA, 19 nt, Homo sapiens
  misc_RNA (1)...(19): siRNA sense strand
augagaagcuauugcugaa

SEQ ID NO: 468659 - RNA, 19 nt, Homo sapiens
  misc_RNA (1)...(19): siRNA sense strand
ucaacgcugugucauuauc

SEQ ID NO: 468660 - RNA, 19 nt, Homo sapiens
  misc_RNA (1)...(19): siRNA sense strand
gaaccugccugaacucaua

SEQ ID NO: 468661 - RNA, 19 nt, Homo sapiens
  misc_RNA (1)...(19): siRNA sense strand
ggacauacuuccacuauau

SEQ ID NO: 468662 - RNA, 19 nt, Homo sapiens
  misc_RNA (1)...(19): siRNA sense strand
ggaaagacaucuggaauau

SEQ ID NO: 468663 - RNA, 19 nt, Homo sapiens
  misc_RNA (1)...(19): siRNA sense strand
gaaacccuauccucaaaua

SEQ ID NO: 468664 - RNA, 19 nt, Homo sapiens
  misc_RNA (1)...(19): siRNA sense strand
gaucaaaucuggcgccuau

SEQ ID NO: 468665 - RNA, 19 nt, Homo sapiens
  misc_RNA (1)...(19): siRNA sense strand
gcaaguggcugcacaguuc

SEQ ID NO: 468666 - RNA, 19 nt, Homo sapiens
  misc_RNA (1)...(19): siRNA sense strand
guucaacgcugugucauua

SEQ ID NO: 468667 - RNA, 19 nt, Homo sapiens
  misc_RNA (1)...(19): siRNA sense strand
gaacaucauucagcacuuu

SEQ ID NO: 468668 - RNA, 19 nt, Homo sapiens
  misc_RNA (1)...(19): siRNA sense strand
gaagaucccugagaugcua

SEQ ID NO: 468669 - RNA, 19 nt, Homo sapiens
  misc_RNA (1)...(19): siRNA sense strand
gagcagcaauuccaagaaa

SEQ ID NO: 468670 - RNA, 19 nt, Homo sapiens
  misc_RNA (1)...(19): siRNA sense strand
caaagcacauuucauauuc

SEQ ID NO: 468671 - RNA, 19 nt, Homo sapiens
  misc_RNA (1)...(19): siRNA sense strand
ucauagagauucacaauuc

SEQ ID NO: 468672 - RNA, 19 nt, Homo sapiens
  misc_RNA (1)...(19): siRNA sense strand
gaaacaggaugagaagcua

SEQ ID NO: 468673 - RNA, 19 nt, Homo sapiens
  misc_RNA (1)...(19): siRNA sense strand
gcgaaacccuauccucaaa

SEQ ID NO: 468674 - RNA, 19 nt, Homo sapiens
  misc_RNA (1)...(19): siRNA sense strand
gcagcuagauggacagaug

SEQ ID NO: 468675 - RNA, 19 nt, Homo sapiens
  misc_RNA (1)...(19): siRNA sense strand
gagaggaacuccagcaagu

SEQ ID NO: 468676 - RNA, 19 nt, Homo sapiens
  misc_RNA (1)...(19): siRNA sense strand
ucucaaagcacauuucaua

SEQ ID NO: 468677 - RNA, 19 nt, Homo sapiens
  misc_RNA (1)...(19): siRNA sense strand
ucaacaggcucaaggauau

SEQ ID NO: 468678 - RNA, 19 nt, Homo sapiens
  misc_RNA (1)...(19): siRNA sense strand
gggaaagacaucuggaaua

SEQ ID NO: 468679 - RNA, 19 nt, Homo sapiens
  misc_RNA (1)...(19): siRNA sense strand
ucuaugagcugguugcauu

SEQ ID NO: 468680 - RNA, 19 nt, Homo sapiens
  misc_RNA (1)...(19): siRNA sense strand
caacgagagcgacaucaua

SEQ ID NO: 468681 - RNA, 19 nt, Homo sapiens
  misc_RNA (1)...(19): siRNA sense strand
gagaagcuauugcugaagu

SEQ ID NO: 468682 - RNA, 19 nt, Homo sapiens
  misc_RNA (1)...(19): siRNA sense strand
gacaacaggucucguucaa

SEQ ID NO: 468683 - RNA, 19 nt, Homo sapiens
  misc_RNA (1)...(19): siRNA sense strand
aaacgggccuucuucauca

SEQ ID NO: 468684 - RNA, 19 nt, Homo sapiens
  misc_RNA (1)...(19): siRNA sense strand
gcaggagguuacaaaguug

SEQ ID NO: 468685 - RNA, 19 nt, Homo sapiens
  misc_RNA (1)...(19): siRNA sense strand
ggaacucgguacugucaga

SEQ ID NO: 468686 - RNA, 19 nt, Homo sapiens
  misc_RNA (1)...(19): siRNA sense strand
acaggaaucuggcugaaga

SEQ ID NO: 468687 - RNA, 19 nt, Homo sapiens
  misc_RNA (1)...(19): siRNA sense strand
ugguaaagcugaucaaauc

SEQ ID NO: 468688 - RNA, 19 nt, Homo sapiens
  misc_RNA (1)...(19): siRNA sense strand
ggacaggaaucuggcugaa

SEQ ID NO: 468689 - RNA, 19 nt, Homo sapiens
  misc_RNA (1)...(19): siRNA sense strand
gcauugacgucaucagaca

SEQ ID NO: 468690 - RNA, 19 nt, Homo sapiens
  misc_RNA (1)...(19): siRNA sense strand
ggagggcagugcagaggaa

SEQ ID NO: 468691 - RNA, 19 nt, Homo sapiens
  misc_RNA (1)...(19): siRNA sense strand
gaagaggccgugcggaaug

SEQ ID NO: 468692 - RNA, 19 nt, Homo sapiens
  misc_RNA (1)...(19): siRNA sense strand
gagugaagaucccugagau

SEQ ID NO: 468693 - RNA, 19 nt, Homo sapiens
  misc_RNA (1)...(19): siRNA sense strand
caugaaggccggugugaaa

SEQ ID NO: 468694 - RNA, 19 nt, Homo sapiens
  misc_RNA (1)...(19): siRNA sense strand
uaaguagccugucuucucu

SEQ ID NO: 468695 - RNA, 19 nt, Homo sapiens
  misc_RNA (1)...(19): siRNA sense strand
gaagaaggagaaccugaug

SEQ ID NO: 468696 - RNA, 19 nt, Homo sapiens
  misc_RNA (1)...(19): siRNA sense strand
gaagaugcccgugguguuc

SEQ ID NO: 468697 - RNA, 19 nt, Homo sapiens
  misc_RNA (1)...(19): siRNA sense strand
gaaagacaucuggaauauu

SEQ ID NO: 468698 - RNA, 19 nt, Homo sapiens
  misc_RNA (1)...(19): siRNA sense strand
gcagauccacgacuacaga

SEQ ID NO: 468699 - RNA, 19 nt, Homo sapiens
  misc_RNA (1)...(19): siRNA sense strand
ggcaugaucuuccauacca

SEQ ID NO: 468700 - RNA, 19 nt, Homo sapiens
  misc_RNA (1)...(19): siRNA sense strand
gcugugggcuccucagaca

SEQ ID NO: 468701 - RNA, 19 nt, Homo sapiens
  misc_RNA (1)...(19): siRNA sense strand
aagagcagauccacgacua

SEQ ID NO: 468702 - RNA, 19 nt, Homo sapiens
  misc_RNA (1)...(19): siRNA sense strand
acacauggauggagcucuu

SEQ ID NO: 468703 - RNA, 19 nt, Homo sapiens
  misc_RNA (1)...(19): siRNA sense strand
cagcauggcuucggcuuca

SEQ ID NO: 468704 - RNA, 19 nt, Homo sapiens
  misc_RNA (1)...(19): siRNA sense strand
cccaaaagcucuucucaaa

SEQ ID NO: 468705 - RNA, 19 nt, Homo sapiens
  misc_RNA (1)...(19): siRNA sense strand
acaaguggcuaccguucuu

SEQ ID NO: 468706 - RNA, 19 nt, Homo sapiens
  misc_RNA (1)...(19): siRNA sense strand
gagaaccugcgacaucuga

SEQ ID NO: 468707 - RNA, 19 nt, Homo sapiens
  misc_RNA (1)...(19): siRNA sense strand
gcucaaugcugugcucauc

SEQ ID NO: 468708 - RNA, 19 nt, Homo sapiens
  misc_RNA (1)...(19): siRNA sense strand
ggaacaucauucagcacuu

SEQ ID NO: 468709 - RNA, 19 nt, Homo sapiens
  misc_RNA (1)...(19): siRNA sense strand
gcagcaauuccaagaaaga

SEQ ID NO: 468710 - RNA, 19 nt, Homo sapiens
  misc_RNA (1)...(19): siRNA sense strand
gagaacaaccagcaguaug

SEQ ID NO: 468711 - RNA, 19 nt, Homo sapiens
  misc_RNA (1)...(19): siRNA sense strand
uaacccagcgggagauuga

SEQ ID NO: 468712 - RNA, 19 nt, Homo sapiens
  misc_RNA (1)...(19): siRNA sense strand
gaccggaucaucaaaguca

SEQ ID NO: 468713 - RNA, 19 nt, Homo sapiens
  misc_RNA (1)...(19): siRNA sense strand
aggcaacgaugauccaaga

SEQ ID NO: 468714 - RNA, 19 nt, Homo sapiens
  misc_RNA (1)...(19): siRNA sense strand
agcaggagguuacaaaguu

SEQ ID NO: 468715 - RNA, 19 nt, Homo sapiens
  misc_RNA (1)...(19): siRNA sense strand
gauaaacgggccuucuuca

SEQ ID NO: 468716 - RNA, 19 nt, Homo sapiens
  misc_RNA (1)...(19): siRNA sense strand
agagaucagugaccucaug

SEQ ID NO: 468717 - RNA, 19 nt, Homo sapiens
  misc_RNA (1)...(19): siRNA sense strand
ggugugaagccaugaagaa

SEQ ID NO: 468718 - RNA, 19 nt, Homo sapiens
  misc_RNA (1)...(19): siRNA sense strand
agaacaaccagcaguauga

SEQ ID NO: 468719 - RNA, 19 nt, Homo sapiens
  misc_RNA (1)...(19): siRNA sense strand
gcccagaggaagacuauga

SEQ ID NO: 468720 - RNA, 19 nt, Homo sapiens
  misc_RNA (1)...(19): siRNA sense strand
cgagagcgacaucauauuc

SEQ ID NO: 468721 - RNA, 19 nt, Homo sapiens
  misc_RNA (1)...(19): siRNA sense strand
ugcagcggcucaccaagua

SEQ ID NO: 468722 - RNA, 19 nt, Homo sapiens
  misc_RNA (1)...(19): siRNA sense strand
ugaccaggguguagaucaa

SEQ ID NO: 468723 - RNA, 19 nt, Homo sapiens
  misc_RNA (1)...(19): siRNA sense strand
uaaacgggccuucuucauc

SEQ ID NO: 468724 - RNA, 19 nt, Homo sapiens
  misc_RNA (1)...(19): siRNA sense strand
cagagaaccgccaccguuu

SEQ ID NO: 468725 - RNA, 19 nt, Homo sapiens
  misc_RNA (1)...(19): siRNA sense strand
gaugcuacaggcugaaauu

SEQ ID NO: 468726 - RNA, 19 nt, Homo sapiens
  misc_RNA (1)...(19): siRNA sense strand
gaaggccggugugaaagag

SEQ ID NO: 468727 - RNA, 19 nt, Homo sapiens
  misc_RNA (1)...(19): siRNA sense strand
gagaaccgccaccguuuag

SEQ ID NO: 468728 - RNA, 19 nt, Homo sapiens
  misc_RNA (1)...(19): siRNA sense strand
gaaugaagcgguaaaacaa

SEQ ID NO: 468729 - RNA, 19 nt, Homo sapiens
  misc_RNA (1)...(19): siRNA sense strand
gaacucauagagauucaca

SEQ ID NO: 468730 - RNA, 19 nt, Homo sapiens
  misc_RNA (1)...(19): siRNA sense strand
ccaagaagagcagcaauuc

SEQ ID NO: 468731 - RNA, 19 nt, Homo sapiens
  misc_RNA (1)...(19): siRNA sense strand
ggcacgaccuuccaacaca

SEQ ID NO: 468732 - RNA, 19 nt, Homo sapiens
  misc_RNA (1)...(19): siRNA sense strand
gcuacaggcugaaauugac

SEQ ID NO: 468733 - RNA, 19 nt, Homo sapiens
  misc_RNA (1)...(19): siRNA sense strand
caucagacaagaacacaug

SEQ ID NO: 468734 - RNA, 19 nt, Homo sapiens
  misc_RNA (1)...(19): siRNA sense strand
caaaagcucuucucaaagc

SEQ ID NO: 468735 - RNA, 19 nt, Homo sapiens
  misc_RNA (1)...(19): siRNA sense strand
ggagauauuuuguccaagu

SEQ ID NO: 468736 - RNA, 19 nt, Homo sapiens
  misc_RNA (1)...(19): siRNA sense strand
ugacuccgcucuggaagau

SEQ ID NO: 468737 - RNA, 19 nt, Homo sapiens
  misc_RNA (1)...(19): siRNA sense strand
ggaggaucagcaaggauaa

SEQ ID NO: 468738 - RNA, 19 nt, Homo sapiens
  misc_RNA (1)...(19): siRNA sense strand
agagaaccgccaccguuua

SEQ ID NO: 468739 - RNA, 19 nt, Homo sapiens
  misc_RNA (1)...(19): siRNA sense strand
gauuccagcucuucaugca

SEQ ID NO: 468740 - RNA, 19 nt, Homo sapiens
  misc_RNA (1)...(19): siRNA sense strand
gaacaaccagcaguaugau

SEQ ID NO: 468741 - RNA, 19 nt, Homo sapiens
  misc_RNA (1)...(19): siRNA sense strand
caauagcucacaccuggaa

SEQ ID NO: 468742 - RNA, 19 nt, Homo sapiens
  misc_RNA (1)...(19): siRNA sense strand
gaagucaaaccaggcaaug

SEQ ID NO: 468743 - RNA, 19 nt, Homo sapiens
  misc_RNA (1)...(19): siRNA sense strand
aaucggaacucgguacugu

SEQ ID NO: 468744 - RNA, 19 nt, Homo sapiens
  misc_RNA (1)...(19): siRNA sense strand
gaucuuccauaccauugag

SEQ ID NO: 468745 - RNA, 19 nt, Homo sapiens
  misc_RNA (1)...(19): siRNA sense strand
uuaccugugugcagaaguu

SEQ ID NO: 468746 - RNA, 19 nt, Homo sapiens
  misc_RNA (1)...(19): siRNA sense strand
uacguuacaucuucucuca

SEQ ID NO: 468747 - RNA, 19 nt, Homo sapiens
  misc_RNA (1)...(19): siRNA sense strand
ccacacagaagcagcuaga

SEQ ID NO: 468748 - RNA, 19 nt, Homo sapiens
  misc_RNA (1)...(19): siRNA sense strand
gcagggaggcaacgaugau

SEQ ID NO: 468749 - RNA, 19 nt, Homo sapiens
  misc_RNA (1)...(19): siRNA sense strand
ggacaacacccagcuugca

SEQ ID NO: 468750 - RNA, 19 nt, Homo sapiens
  misc_RNA (1)...(19): siRNA sense strand
guauagacagguuaaguag

SEQ ID NO: 468751 - RNA, 19 nt, Homo sapiens
  misc_RNA (1)...(19): siRNA sense strand
acaagaagcgaaacccuau

SEQ ID NO: 468752 - RNA, 19 nt, Homo sapiens
  misc_RNA (1)...(19): siRNA sense strand
gagauauuuuguccaagua

SEQ ID NO: 468753 - RNA, 19 nt, Homo sapiens
  misc_RNA (1)...(19): siRNA sense strand
acuaugacccggguuauuu

SEQ ID NO: 468754 - RNA, 19 nt, Homo sapiens
  misc_RNA (1)...(19): siRNA sense strand
gcgaccggaucaucaaagu

SEQ ID NO: 468755 - RNA, 19 nt, Homo sapiens
  misc_RNA (1)...(19): siRNA sense strand
uggaggaucagcaaggaua

SEQ ID NO: 468756 - RNA, 19 nt, Homo sapiens
  misc_RNA (1)...(19): siRNA sense strand
ugccugaacucauagagau

SEQ ID NO: 468757 - RNA, 19 nt, Homo sapiens
  misc_RNA (1)...(19): siRNA sense strand
gaagugguaaagcugauca

SEQ ID NO: 468758 - RNA, 19 nt, Homo sapiens
  misc_RNA (1)...(19): siRNA sense strand
augagaagcuauugcugaa

SEQ ID NO: 468759 - RNA, 19 nt, Homo sapiens
  misc_RNA (1)...(19): siRNA sense strand
ucaacgcugugucauuauc

SEQ ID NO: 468760 - RNA, 19 nt, Homo sapiens
  misc_RNA (1)...(19): siRNA sense strand
gcacaccgcugcucaaaga

SEQ ID NO: 468761 - RNA, 19 nt, Homo sapiens
  misc_RNA (1)...(19): siRNA sense strand
ucaagucacucaaggauuc

SEQ ID NO: 468762 - RNA, 19 nt, Homo sapiens
  misc_RNA (1)...(19): siRNA sense strand
gcacgagggcugcaacaaa

SEQ ID NO: 468763 - RNA, 19 nt, Homo sapiens
  misc_RNA (1)...(19): siRNA sense strand
gcaaacacaugaccaccau

SEQ ID NO: 468764 - RNA, 19 nt, Homo sapiens
  misc_RNA (1)...(19): siRNA sense strand
ccaagaagcagcgcaauga

SEQ ID NO: 468765 - RNA, 19 nt, Homo sapiens
  misc_RNA (1)...(19): siRNA sense strand
gcacuggcuucucugacaa

SEQ ID NO: 468766 - RNA, 19 nt, Homo sapiens
  misc_RNA (1)...(19): siRNA sense strand
cgucaacccugucgccauu

SEQ ID NO: 468767 - RNA, 19 nt, Homo sapiens
  misc_RNA (1)...(19): siRNA sense strand
cagacgacguggugcagua

SEQ ID NO: 468768 - RNA, 19 nt, Homo sapiens
  misc_RNA (1)...(19): siRNA sense strand
ggagaagccauaugugugu

SEQ ID NO: 468769 - RNA, 19 nt, Homo sapiens
  misc_RNA (1)...(19): siRNA sense strand
uggcugaccucaaggaaga

SEQ ID NO: 468770 - RNA, 19 nt, Homo sapiens
  misc_RNA (1)...(19): siRNA sense strand
gcccucaccuccaucaaug

SEQ ID NO: 468771 - RNA, 19 nt, Homo sapiens
  misc_RNA (1)...(19): siRNA sense strand
gcgagaacguggcgaugga

SEQ ID NO: 468772 - RNA, 19 nt, Homo sapiens
  misc_RNA (1)...(19): siRNA sense strand
gcaacaaagccuucuccaa

SEQ ID NO: 468773 - RNA, 19 nt, Homo sapiens
  misc_RNA (1)...(19): siRNA sense strand
aggcugagguggucaucua

SEQ ID NO: 468774 - RNA, 19 nt, Homo sapiens
  misc_RNA (1)...(19): siRNA sense strand
gcaccaagagauacacaga

SEQ ID NO: 468775 - RNA, 19 nt, Homo sapiens
  misc_RNA (1)...(19): siRNA sense strand
uggagaaccugaagacaca

SEQ ID NO: 468776 - RNA, 19 nt, Homo sapiens
  misc_RNA (1)...(19): siRNA sense strand
gaaggagaagcucaaguca

SEQ ID NO: 468777 - RNA, 19 nt, Homo sapiens
  misc_RNA (1)...(19): siRNA sense strand
gagaagaaggaguuugugu

SEQ ID NO: 468778 - RNA, 19 nt, Homo sapiens
  misc_RNA (1)...(19): siRNA sense strand
gagaagcucaagucacuca

SEQ ID NO: 468779 - RNA, 19 nt, Homo sapiens
  misc_RNA (1)...(19): siRNA sense strand
gggagaagaaggaguuugu

SEQ ID NO: 468780 - RNA, 19 nt, Homo sapiens
  misc_RNA (1)...(19): siRNA sense strand
cacgagggcugcaacaaag

SEQ ID NO: 468781 - RNA, 19 nt, Homo sapiens
  misc_RNA (1)...(19): siRNA sense strand
aggagcagcuggugcauca

SEQ ID NO: 468782 - RNA, 19 nt, Homo sapiens
  misc_RNA (1)...(19): siRNA sense strand
aggagaagcucaagucacu

SEQ ID NO: 468783 - RNA, 19 nt, Homo sapiens
  misc_RNA (1)...(19): siRNA sense strand
gcucaagucacucaaggau

SEQ ID NO: 468784 - RNA, 19 nt, Homo sapiens
  misc_RNA (1)...(19): siRNA sense strand
ugagugacaccaaccagaa

SEQ ID NO: 468785 - RNA, 19 nt, Homo sapiens
  misc_RNA (1)...(19): siRNA sense strand
cagcugcgcaaacacauga

SEQ ID NO: 468786 - RNA, 19 nt, Homo sapiens
  misc_RNA (1)...(19): siRNA sense strand
caccgcugcucaaagagaa

SEQ ID NO: 468787 - RNA, 19 nt, Homo sapiens
  misc_RNA (1)...(19): siRNA sense strand
gcagcaacugucugaguga

SEQ ID NO: 468788 - RNA, 19 nt, Homo sapiens
  misc_RNA (1)...(19): siRNA sense strand
gggaagacugcaccaagga

SEQ ID NO: 468789 - RNA, 19 nt, Homo sapiens
  misc_RNA (1)...(19): siRNA sense strand
ucaagaaggagaagcucaa

SEQ ID NO: 468790 - RNA, 19 nt, Homo sapiens
  misc_RNA (1)...(19): siRNA sense strand
caacgagaaacccuacauc

SEQ ID NO: 468791 - RNA, 19 nt, Homo sapiens
  misc_RNA (1)...(19): siRNA sense strand
agaacaagcagagcaguga

SEQ ID NO: 468792 - RNA, 19 nt, Homo sapiens
  misc_RNA (1)...(19): siRNA sense strand
gagcagcuggugcaucaca

SEQ ID NO: 468793 - RNA, 19 nt, Homo sapiens
  misc_RNA (1)...(19): siRNA sense strand
gcacccacuccaacgagaa

SEQ ID NO: 468794 - RNA, 19 nt, Homo sapiens
  misc_RNA (1)...(19): siRNA sense strand
ggacugccugcacgucaga

SEQ ID NO: 468795 - RNA, 19 nt, Homo sapiens
  misc_RNA (1)...(19): siRNA sense strand
agaaggagaagcucaaguc

SEQ ID NO: 468796 - RNA, 19 nt, Homo sapiens
  misc_RNA (1)...(19): siRNA sense strand
gcacgucagagccaucaag

SEQ ID NO: 468797 - RNA, 19 nt, Homo sapiens
  misc_RNA (1)...(19): siRNA sense strand
ggaugccaguuaggcuuug

SEQ ID NO: 468798 - RNA, 19 nt, Homo sapiens
  misc_RNA (1)...(19): siRNA sense strand
gcuggugcaucacaucaac

SEQ ID NO: 468799 - RNA, 19 nt, Homo sapiens
  misc_RNA (1)...(19): siRNA sense strand
gcgagaagccccacaagug

SEQ ID NO: 468800 - RNA, 19 nt, Homo sapiens
  misc_RNA (1)...(19): siRNA sense strand
gcgccaagcaccagaaucg

SEQ ID NO: 468801 - RNA, 19 nt, Homo sapiens
  misc_RNA (1)...(19): siRNA sense strand
gaagcucaagucacucaag

SEQ ID NO: 468802 - RNA, 19 nt, Homo sapiens
  misc_RNA (1)...(19): siRNA sense strand
ucaacccugucgccauuca

SEQ ID NO: 468803 - RNA, 19 nt, Homo sapiens
  misc_RNA (1)...(19): siRNA sense strand
ggagaagaaggaguuugug

SEQ ID NO: 468804 - RNA, 19 nt, Homo sapiens
  misc_RNA (1)...(19): siRNA sense strand
ggaggacgaccuggugcuu

SEQ ID NO: 468805 - RNA, 19 nt, Homo sapiens
  misc_RNA (1)...(19): siRNA sense strand
caggcugcaccaagagaua

SEQ ID NO: 468806 - RNA, 19 nt, Homo sapiens
  misc_RNA (1)...(19): siRNA sense strand
cgagcgaggugaccaugcu

SEQ ID NO: 468807 - RNA, 19 nt, Homo sapiens
  misc_RNA (1)...(19): siRNA sense strand
cagcagcaacugucugagu

SEQ ID NO: 468808 - RNA, 19 nt, Homo sapiens
  misc_RNA (1)...(19): siRNA sense strand
gcacaccgcugcucaaaga

SEQ ID NO: 468809 - RNA, 19 nt, Homo sapiens
  misc_RNA (1)...(19): siRNA sense strand
ucaagucacucaaggauuc

SEQ ID NO: 468810 - RNA, 19 nt, Homo sapiens
  misc_RNA (1)...(19): siRNA sense strand
gcacgagggcugcaacaaa

SEQ ID NO: 468811 - RNA, 19 nt, Homo sapiens
  misc_RNA (1)...(19): siRNA sense strand
gcaaacacaugaccaccau

SEQ ID NO: 468812 - RNA, 19 nt, Homo sapiens
  misc_RNA (1)...(19): siRNA sense strand
ccaagaagcagcgcaauga

SEQ ID NO: 468813 - RNA, 19 nt, Homo sapiens
  misc_RNA (1)...(19): siRNA sense strand
gcacuggcuucucugacaa

SEQ ID NO: 468814 - RNA, 19 nt, Homo sapiens
  misc_RNA (1)...(19): siRNA sense strand
cgucaacccugucgccauu

SEQ ID NO: 468815 - RNA, 19 nt, Homo sapiens
  misc_RNA (1)...(19): siRNA sense strand
cagacgacguggugcagua

SEQ ID NO: 468816 - RNA, 19 nt, Homo sapiens
  misc_RNA (1)...(19): siRNA sense strand
ggagaagccauaugugugu

SEQ ID NO: 468817 - RNA, 19 nt, Homo sapiens
  misc_RNA (1)...(19): siRNA sense strand
uggcugaccucaaggaaga

SEQ ID NO: 468818 - RNA, 19 nt, Homo sapiens
  misc_RNA (1)...(19): siRNA sense strand
gcccucaccuccaucaaug

SEQ ID NO: 468819 - RNA, 19 nt, Homo sapiens
  misc_RNA (1)...(19): siRNA sense strand
gcgagaacguggcgaugga

SEQ ID NO: 468820 - RNA, 19 nt, Homo sapiens
  misc_RNA (1)...(19): siRNA sense strand
gcaacaaagccuucuccaa

SEQ ID NO: 468821 - RNA, 19 nt, Homo sapiens
  misc_RNA (1)...(19): siRNA sense strand
aggcugagguggucaucua

SEQ ID NO: 468822 - RNA, 19 nt, Homo sapiens
  misc_RNA (1)...(19): siRNA sense strand
gcaccaagagauacacaga

SEQ ID NO: 468823 - RNA, 19 nt, Homo sapiens
  misc_RNA (1)...(19): siRNA sense strand
uggagaaccugaagacaca

SEQ ID NO: 468824 - RNA, 19 nt, Homo sapiens
  misc_RNA (1)...(19): siRNA sense strand
gaaggagaagcucaaguca

SEQ ID NO: 468825 - RNA, 19 nt, Homo sapiens
  misc_RNA (1)...(19): siRNA sense strand
gagaagaaggaguuugugu

SEQ ID NO: 468826 - RNA, 19 nt, Homo sapiens
  misc_RNA (1)...(19): siRNA sense strand
gagaagcucaagucacuca

SEQ ID NO: 468827 - RNA, 19 nt, Homo sapiens
  misc_RNA (1)...(19): siRNA sense strand
gggagaagaaggaguuugu

SEQ ID NO: 468828 - RNA, 19 nt, Homo sapiens
  misc_RNA (1)...(19): siRNA sense strand
cacgagggcugcaacaaag

SEQ ID NO: 468829 - RNA, 19 nt, Homo sapiens
  misc_RNA (1)...(19): siRNA sense strand
aggagcagcuggugcauca

SEQ ID NO: 468830 - RNA, 19 nt, Homo sapiens
  misc_RNA (1)...(19): siRNA sense strand
aggagaagcucaagucacu

SEQ ID NO: 468831 - RNA, 19 nt, Homo sapiens
  misc_RNA (1)...(19): siRNA sense strand
gcucaagucacucaaggau

SEQ ID NO: 468832 - RNA, 19 nt, Homo sapiens
  misc_RNA (1)...(19): siRNA sense strand
ugagugacaccaaccagaa

SEQ ID NO: 468833 - RNA, 19 nt, Homo sapiens
  misc_RNA (1)...(19): siRNA sense strand
cagcugcgcaaacacauga

SEQ ID NO: 468834 - RNA, 19 nt, Homo sapiens
  misc_RNA (1)...(19): siRNA sense strand
caccgcugcucaaagagaa

SEQ ID NO: 468835 - RNA, 19 nt, Homo sapiens
  misc_RNA (1)...(19): siRNA sense strand
gcagcaacugucugaguga

SEQ ID NO: 468836 - RNA, 19 nt, Homo sapiens
  misc_RNA (1)...(19): siRNA sense strand
gggaagacugcaccaagga

SEQ ID NO: 468837 - RNA, 19 nt, Homo sapiens
  misc_RNA (1)...(19): siRNA sense strand
ucaagaaggagaagcucaa

SEQ ID NO: 468838 - RNA, 19 nt, Homo sapiens
  misc_RNA (1)...(19): siRNA sense strand
caacgagaaacccuacauc

SEQ ID NO: 468839 - RNA, 19 nt, Homo sapiens
  misc_RNA (1)...(19): siRNA sense strand
agaacaagcagagcaguga

SEQ ID NO: 468840 - RNA, 19 nt, Homo sapiens
  misc_RNA (1)...(19): siRNA sense strand
gagcagcuggugcaucaca

SEQ ID NO: 468841 - RNA, 19 nt, Homo sapiens
  misc_RNA (1)...(19): siRNA sense strand
gcacccacuccaacgagaa

SEQ ID NO: 468842 - RNA, 19 nt, Homo sapiens
  misc_RNA (1)...(19): siRNA sense strand
ggacugccugcacgucaga

SEQ ID NO: 468843 - RNA, 19 nt, Homo sapiens
  misc_RNA (1)...(19): siRNA sense strand
agaaggagaagcucaaguc

SEQ ID NO: 468844 - RNA, 19 nt, Homo sapiens
  misc_RNA (1)...(19): siRNA sense strand
gcacgucagagccaucaag

SEQ ID NO: 468845 - RNA, 19 nt, Homo sapiens
  misc_RNA (1)...(19): siRNA sense strand
ggaugccaguuaggcuuug

SEQ ID NO: 468846 - RNA, 19 nt, Homo sapiens
  misc_RNA (1)...(19): siRNA sense strand
gcuggugcaucacaucaac

SEQ ID NO: 468847 - RNA, 19 nt, Homo sapiens
  misc_RNA (1)...(19): siRNA sense strand
gcgagaagccccacaagug

SEQ ID NO: 468848 - RNA, 19 nt, Homo sapiens
  misc_RNA (1)...(19): siRNA sense strand
gcgccaagcaccagaaucg

SEQ ID NO: 468849 - RNA, 19 nt, Homo sapiens
  misc_RNA (1)...(19): siRNA sense strand
gaagcucaagucacucaag

SEQ ID NO: 468850 - RNA, 19 nt, Homo sapiens
  misc_RNA (1)...(19): siRNA sense strand
ucaacccugucgccauuca

SEQ ID NO: 468851 - RNA, 19 nt, Homo sapiens
  misc_RNA (1)...(19): siRNA sense strand
ggagaagaaggaguuugug

SEQ ID NO: 468852 - RNA, 19 nt, Homo sapiens
  misc_RNA (1)...(19): siRNA sense strand
ggaggacgaccuggugcuu

SEQ ID NO: 468853 - RNA, 19 nt, Homo sapiens
  misc_RNA (1)...(19): siRNA sense strand
caggcugcaccaagagaua

SEQ ID NO: 468854 - RNA, 19 nt, Homo sapiens
  misc_RNA (1)...(19): siRNA sense strand
cgagcgaggugaccaugcu

SEQ ID NO: 468855 - RNA, 19 nt, Homo sapiens
  misc_RNA (1)...(19): siRNA sense strand
cagcagcaacugucugagu

SEQ ID NO: 468856 - RNA, 19 nt, Homo sapiens
  misc_RNA (1)...(19): siRNA sense strand
uccugaacaugaugaccua

SEQ ID NO: 468857 - RNA, 19 nt, Homo sapiens
  misc_RNA (1)...(19): siRNA sense strand
gcacaccgcugcucaaaga

SEQ ID NO: 468858 - RNA, 19 nt, Homo sapiens
  misc_RNA (1)...(19): siRNA sense strand
ucaagucacucaaggauuc

SEQ ID NO: 468859 - RNA, 19 nt, Homo sapiens
  misc_RNA (1)...(19): siRNA sense strand
gcacgagggcugcaacaaa

SEQ ID NO: 468860 - RNA, 19 nt, Homo sapiens
  misc_RNA (1)...(19): siRNA sense strand
gcaaacacaugaccaccau

SEQ ID NO: 468861 - RNA, 19 nt, Homo sapiens
  misc_RNA (1)...(19): siRNA sense strand
ccaagaagcagcgcaauga

SEQ ID NO: 468862 - RNA, 19 nt, Homo sapiens
  misc_RNA (1)...(19): siRNA sense strand
gcacuggcuucucugacaa

SEQ ID NO: 468863 - RNA, 19 nt, Homo sapiens
  misc_RNA (1)...(19): siRNA sense strand
cgucaacccugucgccauu

SEQ ID NO: 468864 - RNA, 19 nt, Homo sapiens
  misc_RNA (1)...(19): siRNA sense strand
cagacgacguggugcagua

SEQ ID NO: 468865 - RNA, 19 nt, Homo sapiens
  misc_RNA (1)...(19): siRNA sense strand
ggagaagccauaugugugu

SEQ ID NO: 468866 - RNA, 19 nt, Homo sapiens
  misc_RNA (1)...(19): siRNA sense strand
uggcugaccucaaggaaga

SEQ ID NO: 468867 - RNA, 19 nt, Homo sapiens
  misc_RNA (1)...(19): siRNA sense strand
gcccucaccuccaucaaug

SEQ ID NO: 468868 - RNA, 19 nt, Homo sapiens
  misc_RNA (1)...(19): siRNA sense strand
gcgagaacguggcgaugga

SEQ ID NO: 468869 - RNA, 19 nt, Homo sapiens
  misc_RNA (1)...(19): siRNA sense strand
gcaacaaagccuucuccaa

SEQ ID NO: 468870 - RNA, 19 nt, Homo sapiens
  misc_RNA (1)...(19): siRNA sense strand
aggcugagguggucaucua

SEQ ID NO: 468871 - RNA, 19 nt, Homo sapiens
  misc_RNA (1)...(19): siRNA sense strand
gcaccaagagauacacaga

SEQ ID NO: 468872 - RNA, 19 nt, Homo sapiens
  misc_RNA (1)...(19): siRNA sense strand
uggagaaccugaagacaca

SEQ ID NO: 468873 - RNA, 19 nt, Homo sapiens
  misc_RNA (1)...(19): siRNA sense strand
gaaggagaagcucaaguca

SEQ ID NO: 468874 - RNA, 19 nt, Homo sapiens
  misc_RNA (1)...(19): siRNA sense strand
gagaagaaggaguuugugu

SEQ ID NO: 468875 - RNA, 19 nt, Homo sapiens
  misc_RNA (1)...(19): siRNA sense strand
gagaagcucaagucacuca

SEQ ID NO: 468876 - RNA, 19 nt, Homo sapiens
  misc_RNA (1)...(19): siRNA sense strand
gggagaagaaggaguuugu

SEQ ID NO: 468877 - RNA, 19 nt, Homo sapiens
  misc_RNA (1)...(19): siRNA sense strand
cacgagggcugcaacaaag

SEQ ID NO: 468878 - RNA, 19 nt, Homo sapiens
  misc_RNA (1)...(19): siRNA sense strand
aggagcagcuggugcauca

SEQ ID NO: 468879 - RNA, 19 nt, Homo sapiens
  misc_RNA (1)...(19): siRNA sense strand
aggagaagcucaagucacu

SEQ ID NO: 468880 - RNA, 19 nt, Homo sapiens
  misc_RNA (1)...(19): siRNA sense strand
gcucaagucacucaaggau

SEQ ID NO: 468881 - RNA, 19 nt, Homo sapiens
  misc_RNA (1)...(19): siRNA sense strand
ugagugacaccaaccagaa

SEQ ID NO: 468882 - RNA, 19 nt, Homo sapiens
  misc_RNA (1)...(19): siRNA sense strand
cagcugcgcaaacacauga

SEQ ID NO: 468883 - RNA, 19 nt, Homo sapiens
  misc_RNA (1)...(19): siRNA sense strand
caccgcugcucaaagagaa

SEQ ID NO: 468884 - RNA, 19 nt, Homo sapiens
  misc_RNA (1)...(19): siRNA sense strand
gcagcaacugucugaguga

SEQ ID NO: 468885 - RNA, 19 nt, Homo sapiens
  misc_RNA (1)...(19): siRNA sense strand
gggaagacugcaccaagga

SEQ ID NO: 468886 - RNA, 19 nt, Homo sapiens
  misc_RNA (1)...(19): siRNA sense strand
ucaagaaggagaagcucaa

SEQ ID NO: 468887 - RNA, 19 nt, Homo sapiens
  misc_RNA (1)...(19): siRNA sense strand
caacgagaaacccuacauc

SEQ ID NO: 468888 - RNA, 19 nt, Homo sapiens
  misc_RNA (1)...(19): siRNA sense strand
agaacaagcagagcaguga

SEQ ID NO: 468889 - RNA, 19 nt, Homo sapiens
  misc_RNA (1)...(19): siRNA sense strand
gagcagcuggugcaucaca

SEQ ID NO: 468890 - RNA, 19 nt, Homo sapiens
  misc_RNA (1)...(19): siRNA sense strand
gcacccacuccaacgagaa

SEQ ID NO: 468891 - RNA, 19 nt, Homo sapiens
  misc_RNA (1)...(19): siRNA sense strand
ggacugccugcacgucaga

SEQ ID NO: 468892 - RNA, 19 nt, Homo sapiens
  misc_RNA (1)...(19): siRNA sense strand
agaaggagaagcucaaguc

SEQ ID NO: 468893 - RNA, 19 nt, Homo sapiens
  misc_RNA (1)...(19): siRNA sense strand
gcacgucagagccaucaag

SEQ ID NO: 468894 - RNA, 19 nt, Homo sapiens
  misc_RNA (1)...(19): siRNA sense strand
ggaugccaguuaggcuuug

SEQ ID NO: 468895 - RNA, 19 nt, Homo sapiens
  misc_RNA (1)...(19): siRNA sense strand
gcuggugcaucacaucaac

SEQ ID NO: 468896 - RNA, 19 nt, Homo sapiens
  misc_RNA (1)...(19): siRNA sense strand
gcgagaagccccacaagug

SEQ ID NO: 468897 - RNA, 19 nt, Homo sapiens
  misc_RNA (1)...(19): siRNA sense strand
gcgccaagcaccagaaucg

SEQ ID NO: 468898 - RNA, 19 nt, Homo sapiens
  misc_RNA (1)...(19): siRNA sense strand
gaagcucaagucacucaag

SEQ ID NO: 468899 - RNA, 19 nt, Homo sapiens
  misc_RNA (1)...(19): siRNA sense strand
ucaacccugucgccauuca

SEQ ID NO: 468900 - RNA, 19 nt, Homo sapiens
  misc_RNA (1)...(19): siRNA sense strand
ggagaagaaggaguuugug

SEQ ID NO: 468901 - RNA, 19 nt, Homo sapiens
  misc_RNA (1)...(19): siRNA sense strand
ggaggacgaccuggugcuu

SEQ ID NO: 468902 - RNA, 19 nt, Homo sapiens
  misc_RNA (1)...(19): siRNA sense strand
caggcugcaccaagagaua

SEQ ID NO: 468903 - RNA, 19 nt, Homo sapiens
  misc_RNA (1)...(19): siRNA sense strand
cgagcgaggugaccaugcu

SEQ ID NO: 468904 - RNA, 19 nt, Homo sapiens
  misc_RNA (1)...(19): siRNA sense strand
cagcagcaacugucugagu

SEQ ID NO: 468905 - RNA, 19 nt, Homo sapiens
  misc_RNA (1)...(19): siRNA sense strand
uccugaacaugaugaccua

SEQ ID NO: 468906 - RNA, 19 nt, Homo sapiens
  misc_RNA (1)...(19): siRNA sense strand
gcacaccgcugcucaaaga

SEQ ID NO: 468907 - RNA, 19 nt, Homo sapiens
  misc_RNA (1)...(19): siRNA sense strand
ucaagucacucaaggauuc

SEQ ID NO: 468908 - RNA, 19 nt, Homo sapiens
  misc_RNA (1)...(19): siRNA sense strand
gcacgagggcugcaacaaa

SEQ ID NO: 468909 - RNA, 19 nt, Homo sapiens
  misc_RNA (1)...(19): siRNA sense strand
gcaaacacaugaccaccau

SEQ ID NO: 468910 - RNA, 19 nt, Homo sapiens
  misc_RNA (1)...(19): siRNA sense strand
ccaagaagcagcgcaauga

SEQ ID NO: 468911 - RNA, 19 nt, Homo sapiens
  misc_RNA (1)...(19): siRNA sense strand
gcacuggcuucucugacaa

SEQ ID NO: 468912 - RNA, 19 nt, Homo sapiens
  misc_RNA (1)...(19): siRNA sense strand
cgucaacccugucgccauu

SEQ ID NO: 468913 - RNA, 19 nt, Homo sapiens
  misc_RNA (1)...(19): siRNA sense strand
cagacgacguggugcagua

SEQ ID NO: 468914 - RNA, 19 nt, Homo sapiens
  misc_RNA (1)...(19): siRNA sense strand
ggagaagccauaugugugu

SEQ ID NO: 468915 - RNA, 19 nt, Homo sapiens
  misc_RNA (1)...(19): siRNA sense strand
uggcugaccucaaggaaga

SEQ ID NO: 468916 - RNA, 19 nt, Homo sapiens
  misc_RNA (1)...(19): siRNA sense strand
gcccucaccuccaucaaug

SEQ ID NO: 468917 - RNA, 19 nt, Homo sapiens
  misc_RNA (1)...(19): siRNA sense strand
gcgagaacguggcgaugga

SEQ ID NO: 468918 - RNA, 19 nt, Homo sapiens
  misc_RNA (1)...(19): siRNA sense strand
gcaacaaagccuucuccaa

SEQ ID NO: 468919 - RNA, 19 nt, Homo sapiens
  misc_RNA (1)...(19): siRNA sense strand
aggcugagguggucaucua

SEQ ID NO: 468920 - RNA, 19 nt, Homo sapiens
  misc_RNA (1)...(19): siRNA sense strand
gcaccaagagauacacaga

SEQ ID NO: 468921 - RNA, 19 nt, Homo sapiens
  misc_RNA (1)...(19): siRNA sense strand
uggagaaccugaagacaca

SEQ ID NO: 468922 - RNA, 19 nt, Homo sapiens
  misc_RNA (1)...(19): siRNA sense strand
gaaggagaagcucaaguca

SEQ ID NO: 468923 - RNA, 19 nt, Homo sapiens
  misc_RNA (1)...(19): siRNA sense strand
gagaagaaggaguuugugu

SEQ ID NO: 468924 - RNA, 19 nt, Homo sapiens
  misc_RNA (1)...(19): siRNA sense strand
gagaagcucaagucacuca

SEQ ID NO: 468925 - RNA, 19 nt, Homo sapiens
  misc_RNA (1)...(19): siRNA sense strand
gggagaagaaggaguuugu

SEQ ID NO: 468926 - RNA, 19 nt, Homo sapiens
  misc_RNA (1)...(19): siRNA sense strand
cacgagggcugcaacaaag

SEQ ID NO: 468927 - RNA, 19 nt, Homo sapiens
  misc_RNA (1)...(19): siRNA sense strand
aggagcagcuggugcauca

SEQ ID NO: 468928 - RNA, 19 nt, Homo sapiens
  misc_RNA (1)...(19): siRNA sense strand
aggagaagcucaagucacu

SEQ ID NO: 468929 - RNA, 19 nt, Homo sapiens
  misc_RNA (1)...(19): siRNA sense strand
gcucaagucacucaaggau

SEQ ID NO: 468930 - RNA, 19 nt, Homo sapiens
  misc_RNA (1)...(19): siRNA sense strand
ugagugacaccaaccagaa

SEQ ID NO: 468931 - RNA, 19 nt, Homo sapiens
  misc_RNA (1)...(19): siRNA sense strand
cagcugcgcaaacacauga

SEQ ID NO: 468932 - RNA, 19 nt, Homo sapiens
  misc_RNA (1)...(19): siRNA sense strand
caccgcugcucaaagagaa

SEQ ID NO: 468933 - RNA, 19 nt, Homo sapiens
  misc_RNA (1)...(19): siRNA sense strand
gcagcaacugucugaguga

SEQ ID NO: 468934 - RNA, 19 nt, Homo sapiens
  misc_RNA (1)...(19): siRNA sense strand
gggaagacugcaccaagga

SEQ ID NO: 468935 - RNA, 19 nt, Homo sapiens
  misc_RNA (1)...(19): siRNA sense strand
ucaagaaggagaagcucaa

SEQ ID NO: 468936 - RNA, 19 nt, Homo sapiens
  misc_RNA (1)...(19): siRNA sense strand
caacgagaaacccuacauc

SEQ ID NO: 468937 - RNA, 19 nt, Homo sapiens
  misc_RNA (1)...(19): siRNA sense strand
agaacaagcagagcaguga

SEQ ID NO: 468938 - RNA, 19 nt, Homo sapiens
  misc_RNA (1)...(19): siRNA sense strand
gagcagcuggugcaucaca

SEQ ID NO: 468939 - RNA, 19 nt, Homo sapiens
  misc_RNA (1)...(19): siRNA sense strand
gcacccacuccaacgagaa

SEQ ID NO: 468940 - RNA, 19 nt, Homo sapiens
  misc_RNA (1)...(19): siRNA sense strand
ggacugccugcacgucaga

SEQ ID NO: 468941 - RNA, 19 nt, Homo sapiens
  misc_RNA (1)...(19): siRNA sense strand
agaaggagaagcucaaguc

SEQ ID NO: 468942 - RNA, 19 nt, Homo sapiens
  misc_RNA (1)...(19): siRNA sense strand
gcacgucagagccaucaag

SEQ ID NO: 468943 - RNA, 19 nt, Homo sapiens
  misc_RNA (1)...(19): siRNA sense strand
ggaugccaguuaggcuuug

SEQ ID NO: 468944 - RNA, 19 nt, Homo sapiens
  misc_RNA (1)...(19): siRNA sense strand
gcuggugcaucacaucaac

SEQ ID NO: 468945 - RNA, 19 nt, Homo sapiens
  misc_RNA (1)...(19): siRNA sense strand
gcgagaagccccacaagug

SEQ ID NO: 468946 - RNA, 19 nt, Homo sapiens
  misc_RNA (1)...(19): siRNA sense strand
gcgccaagcaccagaaucg

SEQ ID NO: 468947 - RNA, 19 nt, Homo sapiens
  misc_RNA (1)...(19): siRNA sense strand
gaagcucaagucacucaag

SEQ ID NO: 468948 - RNA, 19 nt, Homo sapiens
  misc_RNA (1)...(19): siRNA sense strand
ucaacccugucgccauuca

SEQ ID NO: 468949 - RNA, 19 nt, Homo sapiens
  misc_RNA (1)...(19): siRNA sense strand
ggagaagaaggaguuugug

SEQ ID NO: 468950 - RNA, 19 nt, Homo sapiens
  misc_RNA (1)...(19): siRNA sense strand
ggaggacgaccuggugcuu

SEQ ID NO: 468951 - RNA, 19 nt, Homo sapiens
  misc_RNA (1)...(19): siRNA sense strand
caggcugcaccaagagaua

SEQ ID NO: 468952 - RNA, 19 nt, Homo sapiens
  misc_RNA (1)...(19): siRNA sense strand
cgagcgaggugaccaugcu

SEQ ID NO: 468953 - RNA, 19 nt, Homo sapiens
  misc_RNA (1)...(19): siRNA sense strand
cagcagcaacugucugagu

SEQ ID NO: 468954 - RNA, 19 nt, Homo sapiens
  misc_RNA (1)...(19): siRNA sense strand
gcacaccgcugcucaaaga

SEQ ID NO: 468955 - RNA, 19 nt, Homo sapiens
  misc_RNA (1)...(19): siRNA sense strand
ucaagucacucaaggauuc

SEQ ID NO: 468956 - RNA, 19 nt, Homo sapiens
  misc_RNA (1)...(19): siRNA sense strand
gcacgagggcugcaacaaa

SEQ ID NO: 468957 - RNA, 19 nt, Homo sapiens
  misc_RNA (1)...(19): siRNA sense strand
gcaaacacaugaccaccau

SEQ ID NO: 468958 - RNA, 19 nt, Homo sapiens
  misc_RNA (1)...(19): siRNA sense strand
ccaagaagcagcgcaauga

SEQ ID NO: 468959 - RNA, 19 nt, Homo sapiens
  misc_RNA (1)...(19): siRNA sense strand
gcacuggcuucucugacaa

SEQ ID NO: 468960 - RNA, 19 nt, Homo sapiens
  misc_RNA (1)...(19): siRNA sense strand
cgucaacccugucgccauu

SEQ ID NO: 468961 - RNA, 19 nt, Homo sapiens
  misc_RNA (1)...(19): siRNA sense strand
cagacgacguggugcagua

SEQ ID NO: 468962 - RNA, 19 nt, Homo sapiens
  misc_RNA (1)...(19): siRNA sense strand
ggagaagccauaugugugu

SEQ ID NO: 468963 - RNA, 19 nt, Homo sapiens
  misc_RNA (1)...(19): siRNA sense strand
uggcugaccucaaggaaga

SEQ ID NO: 468964 - RNA, 19 nt, Homo sapiens
  misc_RNA (1)...(19): siRNA sense strand
gcccucaccuccaucaaug

SEQ ID NO: 468965 - RNA, 19 nt, Homo sapiens
  misc_RNA (1)...(19): siRNA sense strand
gcgagaacguggcgaugga

SEQ ID NO: 468966 - RNA, 19 nt, Homo sapiens
  misc_RNA (1)...(19): siRNA sense strand
gcaacaaagccuucuccaa

SEQ ID NO: 468967 - RNA, 19 nt, Homo sapiens
  misc_RNA (1)...(19): siRNA sense strand
aggcugagguggucaucua

SEQ ID NO: 468968 - RNA, 19 nt, Homo sapiens
  misc_RNA (1)...(19): siRNA sense strand
gcaccaagagauacacaga

SEQ ID NO: 468969 - RNA, 19 nt, Homo sapiens
  misc_RNA (1)...(19): siRNA sense strand
uggagaaccugaagacaca

SEQ ID NO: 468970 - RNA, 19 nt, Homo sapiens
  misc_RNA (1)...(19): siRNA sense strand
gaaggagaagcucaaguca

SEQ ID NO: 468971 - RNA, 19 nt, Homo sapiens
  misc_RNA (1)...(19): siRNA sense strand
gagaagaaggaguuugugu

SEQ ID NO: 468972 - RNA, 19 nt, Homo sapiens
  misc_RNA (1)...(19): siRNA sense strand
gagaagcucaagucacuca

SEQ ID NO: 468973 - RNA, 19 nt, Homo sapiens
  misc_RNA (1)...(19): siRNA sense strand
gggagaagaaggaguuugu

SEQ ID NO: 468974 - RNA, 19 nt, Homo sapiens
  misc_RNA (1)...(19): siRNA sense strand
cacgagggcugcaacaaag

SEQ ID NO: 468975 - RNA, 19 nt, Homo sapiens
  misc_RNA (1)...(19): siRNA sense strand
aggagcagcuggugcauca

SEQ ID NO: 468976 - RNA, 19 nt, Homo sapiens
  misc_RNA (1)...(19): siRNA sense strand
aggagaagcucaagucacu

SEQ ID NO: 468977 - RNA, 19 nt, Homo sapiens
  misc_RNA (1)...(19): siRNA sense strand
gcucaagucacucaaggau

SEQ ID NO: 468978 - RNA, 19 nt, Homo sapiens
  misc_RNA (1)...(19): siRNA sense strand
ugagugacaccaaccagaa

SEQ ID NO: 468979 - RNA, 19 nt, Homo sapiens
  misc_RNA (1)...(19): siRNA sense strand
cagcugcgcaaacacauga

SEQ ID NO: 468980 - RNA, 19 nt, Homo sapiens
  misc_RNA (1)...(19): siRNA sense strand
caccgcugcucaaagagaa

SEQ ID NO: 468981 - RNA, 19 nt, Homo sapiens
  misc_RNA (1)...(19): siRNA sense strand
gcagcaacugucugaguga

SEQ ID NO: 468982 - RNA, 19 nt, Homo sapiens
  misc_RNA (1)...(19): siRNA sense strand
gggaagacugcaccaagga

SEQ ID NO: 468983 - RNA, 19 nt, Homo sapiens
  misc_RNA (1)...(19): siRNA sense strand
ucaagaaggagaagcucaa

SEQ ID NO: 468984 - RNA, 19 nt, Homo sapiens
  misc_RNA (1)...(19): siRNA sense strand
caacgagaaacccuacauc

SEQ ID NO: 468985 - RNA, 19 nt, Homo sapiens
  misc_RNA (1)...(19): siRNA sense strand
agaacaagcagagcaguga

SEQ ID NO: 468986 - RNA, 19 nt, Homo sapiens
  misc_RNA (1)...(19): siRNA sense strand
gagcagcuggugcaucaca

SEQ ID NO: 468987 - RNA, 19 nt, Homo sapiens
  misc_RNA (1)...(19): siRNA sense strand
gcacccacuccaacgagaa

SEQ ID NO: 468988 - RNA, 19 nt, Homo sapiens
  misc_RNA (1)...(19): siRNA sense strand
ggacugccugcacgucaga

SEQ ID NO: 468989 - RNA, 19 nt, Homo sapiens
  misc_RNA (1)...(19): siRNA sense strand
agaaggagaagcucaaguc

SEQ ID NO: 468990 - RNA, 19 nt, Homo sapiens
  misc_RNA (1)...(19): siRNA sense strand
gcacgucagagccaucaag

SEQ ID NO: 468991 - RNA, 19 nt, Homo sapiens
  misc_RNA (1)...(19): siRNA sense strand
ggaugccaguuaggcuuug

SEQ ID NO: 468992 - RNA, 19 nt, Homo sapiens
  misc_RNA (1)...(19): siRNA sense strand
gcuggugcaucacaucaac

SEQ ID NO: 468993 - RNA, 19 nt, Homo sapiens
  misc_RNA (1)...(19): siRNA sense strand
gcgagaagccccacaagug

SEQ ID NO: 468994 - RNA, 19 nt, Homo sapiens
  misc_RNA (1)...(19): siRNA sense strand
gcgccaagcaccagaaucg

SEQ ID NO: 468995 - RNA, 19 nt, Homo sapiens
  misc_RNA (1)...(19): siRNA sense strand
gaagcucaagucacucaag

SEQ ID NO: 468996 - RNA, 19 nt, Homo sapiens
  misc_RNA (1)...(19): siRNA sense strand
ucaacccugucgccauuca

SEQ ID NO: 468997 - RNA, 19 nt, Homo sapiens
  misc_RNA (1)...(19): siRNA sense strand
ggagaagaaggaguuugug

SEQ ID NO: 468998 - RNA, 19 nt, Homo sapiens
  misc_RNA (1)...(19): siRNA sense strand
ggaggacgaccuggugcuu

SEQ ID NO: 468999 - RNA, 19 nt, Homo sapiens
  misc_RNA (1)...(19): siRNA sense strand
caggcugcaccaagagaua

SEQ ID NO: 469000 - RNA, 19 nt, Homo sapiens
  misc_RNA (1)...(19): siRNA sense strand
cgagcgaggugaccaugcu

SEQ ID NO: 469001 - RNA, 19 nt, Homo sapiens
  misc_RNA (1)...(19): siRNA sense strand
cagcagcaacugucugagu

SEQ ID NO: 469002 - RNA, 19 nt, Homo sapiens
  misc_RNA (1)...(19): siRNA sense strand
gcacaccgcugcucaaaga

SEQ ID NO: 469003 - RNA, 19 nt, Homo sapiens
  misc_RNA (1)...(19): siRNA sense strand
ucaagucacucaaggauuc

SEQ ID NO: 469004 - RNA, 19 nt, Homo sapiens
  misc_RNA (1)...(19): siRNA sense strand
gcacgagggcugcaacaaa

SEQ ID NO: 469005 - RNA, 19 nt, Homo sapiens
  misc_RNA (1)...(19): siRNA sense strand
gcaaacacaugaccaccau

SEQ ID NO: 469006 - RNA, 19 nt, Homo sapiens
  misc_RNA (1)...(19): siRNA sense strand
ccaagaagcagcgcaauga

SEQ ID NO: 469007 - RNA, 19 nt, Homo sapiens
  misc_RNA (1)...(19): siRNA sense strand
gcacuggcuucucugacaa

SEQ ID NO: 469008 - RNA, 19 nt, Homo sapiens
  misc_RNA (1)...(19): siRNA sense strand
cgucaacccugucgccauu

SEQ ID NO: 469009 - RNA, 19 nt, Homo sapiens
  misc_RNA (1)...(19): siRNA sense strand
cagacgacguggugcagua

SEQ ID NO: 469010 - RNA, 19 nt, Homo sapiens
  misc_RNA (1)...(19): siRNA sense strand
ggagaagccauaugugugu

SEQ ID NO: 469011 - RNA, 19 nt, Homo sapiens
  misc_RNA (1)...(19): siRNA sense strand
uggcugaccucaaggaaga

SEQ ID NO: 469012 - RNA, 19 nt, Homo sapiens
  misc_RNA (1)...(19): siRNA sense strand
gcccucaccuccaucaaug

SEQ ID NO: 469013 - RNA, 19 nt, Homo sapiens
  misc_RNA (1)...(19): siRNA sense strand
gcgagaacguggcgaugga

SEQ ID NO: 469014 - RNA, 19 nt, Homo sapiens
  misc_RNA (1)...(19): siRNA sense strand
gcaacaaagccuucuccaa

SEQ ID NO: 469015 - RNA, 19 nt, Homo sapiens
  misc_RNA (1)...(19): siRNA sense strand
aggcugagguggucaucua

SEQ ID NO: 469016 - RNA, 19 nt, Homo sapiens
  misc_RNA (1)...(19): siRNA sense strand
gcaccaagagauacacaga

SEQ ID NO: 469017 - RNA, 19 nt, Homo sapiens
  misc_RNA (1)...(19): siRNA sense strand
uggagaaccugaagacaca

SEQ ID NO: 469018 - RNA, 19 nt, Homo sapiens
  misc_RNA (1)...(19): siRNA sense strand
gaaggagaagcucaaguca

SEQ ID NO: 469019 - RNA, 19 nt, Homo sapiens
  misc_RNA (1)...(19): siRNA sense strand
gagaagaaggaguuugugu

SEQ ID NO: 469020 - RNA, 19 nt, Homo sapiens
  misc_RNA (1)...(19): siRNA sense strand
gagaagcucaagucacuca

SEQ ID NO: 469021 - RNA, 19 nt, Homo sapiens
  misc_RNA (1)...(19): siRNA sense strand
gggagaagaaggaguuugu

SEQ ID NO: 469022 - RNA, 19 nt, Homo sapiens
  misc_RNA (1)...(19): siRNA sense strand
cacgagggcugcaacaaag

SEQ ID NO: 469023 - RNA, 19 nt, Homo sapiens
  misc_RNA (1)...(19): siRNA sense strand
aggagcagcuggugcauca

SEQ ID NO: 469024 - RNA, 19 nt, Homo sapiens
  misc_RNA (1)...(19): siRNA sense strand
aggagaagcucaagucacu

SEQ ID NO: 469025 - RNA, 19 nt, Homo sapiens
  misc_RNA (1)...(19): siRNA sense strand
gcucaagucacucaaggau

SEQ ID NO: 469026 - RNA, 19 nt, Homo sapiens
  misc_RNA (1)...(19): siRNA sense strand
ugagugacaccaaccagaa

SEQ ID NO: 469027 - RNA, 19 nt, Homo sapiens
  misc_RNA (1)...(19): siRNA sense strand
cagcugcgcaaacacauga

SEQ ID NO: 469028 - RNA, 19 nt, Homo sapiens
  misc_RNA (1)...(19): siRNA sense strand
caccgcugcucaaagagaa

SEQ ID NO: 469029 - RNA, 19 nt, Homo sapiens
  misc_RNA (1)...(19): siRNA sense strand
gcagcaacugucugaguga

SEQ ID NO: 469030 - RNA, 19 nt, Homo sapiens
  misc_RNA (1)...(19): siRNA sense strand
gggaagacugcaccaagga

SEQ ID NO: 469031 - RNA, 19 nt, Homo sapiens
  misc_RNA (1)...(19): siRNA sense strand
ucaagaaggagaagcucaa

SEQ ID NO: 469032 - RNA, 19 nt, Homo sapiens
  misc_RNA (1)...(19): siRNA sense strand
caacgagaaacccuacauc

SEQ ID NO: 469033 - RNA, 19 nt, Homo sapiens
  misc_RNA (1)...(19): siRNA sense strand
agaacaagcagagcaguga

SEQ ID NO: 469034 - RNA, 19 nt, Homo sapiens
  misc_RNA (1)...(19): siRNA sense strand
gagcagcuggugcaucaca

SEQ ID NO: 469035 - RNA, 19 nt, Homo sapiens
  misc_RNA (1)...(19): siRNA sense strand
gcacccacuccaacgagaa

SEQ ID NO: 469036 - RNA, 19 nt, Homo sapiens
  misc_RNA (1)...(19): siRNA sense strand
ggacugccugcacgucaga

SEQ ID NO: 469037 - RNA, 19 nt, Homo sapiens
  misc_RNA (1)...(19): siRNA sense strand
agaaggagaagcucaaguc

SEQ ID NO: 469038 - RNA, 19 nt, Homo sapiens
  misc_RNA (1)...(19): siRNA sense strand
gcacgucagagccaucaag

SEQ ID NO: 469039 - RNA, 19 nt, Homo sapiens
  misc_RNA (1)...(19): siRNA sense strand
ggaugccaguuaggcuuug

SEQ ID NO: 469040 - RNA, 19 nt, Homo sapiens
  misc_RNA (1)...(19): siRNA sense strand
gcuggugcaucacaucaac

SEQ ID NO: 469041 - RNA, 19 nt, Homo sapiens
  misc_RNA (1)...(19): siRNA sense strand
gcgagaagccccacaagug

SEQ ID NO: 469042 - RNA, 19 nt, Homo sapiens
  misc_RNA (1)...(19): siRNA sense strand
gcgccaagcaccagaaucg

SEQ ID NO: 469043 - RNA, 19 nt, Homo sapiens
  misc_RNA (1)...(19): siRNA sense strand
gaagcucaagucacucaag

SEQ ID NO: 469044 - RNA, 19 nt, Homo sapiens
  misc_RNA (1)...(19): siRNA sense strand
ucaacccugucgccauuca

SEQ ID NO: 469045 - RNA, 19 nt, Homo sapiens
  misc_RNA (1)...(19): siRNA sense strand
ggagaagaaggaguuugug

SEQ ID NO: 469046 - RNA, 19 nt, Homo sapiens
  misc_RNA (1)...(19): siRNA sense strand
ggaggacgaccuggugcuu

SEQ ID NO: 469047 - RNA, 19 nt, Homo sapiens
  misc_RNA (1)...(19): siRNA sense strand
caggcugcaccaagagaua

SEQ ID NO: 469048 - RNA, 19 nt, Homo sapiens
  misc_RNA (1)...(19): siRNA sense strand
cgagcgaggugaccaugcu

SEQ ID NO: 469049 - RNA, 19 nt, Homo sapiens
  misc_RNA (1)...(19): siRNA sense strand
cagcagcaacugucugagu

SEQ ID NO: 469050 - RNA, 19 nt, Homo sapiens
  misc_RNA (1)...(19): siRNA sense strand
uccugaacaugaugaccua

SEQ ID NO: 469051 - RNA, 19 nt, Homo sapiens
  misc_RNA (1)...(19): siRNA sense strand
gcacaccgcugcucaaaga

SEQ ID NO: 469052 - RNA, 19 nt, Homo sapiens
  misc_RNA (1)...(19): siRNA sense strand
ucaagucacucaaggauuc

SEQ ID NO: 469053 - RNA, 19 nt, Homo sapiens
  misc_RNA (1)...(19): siRNA sense strand
gcacgagggcugcaacaaa

SEQ ID NO: 469054 - RNA, 19 nt, Homo sapiens
  misc_RNA (1)...(19): siRNA sense strand
gcaaacacaugaccaccau

SEQ ID NO: 469055 - RNA, 19 nt, Homo sapiens
  misc_RNA (1)...(19): siRNA sense strand
ccaagaagcagcgcaauga

SEQ ID NO: 469056 - RNA, 19 nt, Homo sapiens
  misc_RNA (1)...(19): siRNA sense strand
gcacuggcuucucugacaa

SEQ ID NO: 469057 - RNA, 19 nt, Homo sapiens
  misc_RNA (1)...(19): siRNA sense strand
cgucaacccugucgccauu

SEQ ID NO: 469058 - RNA, 19 nt, Homo sapiens
  misc_RNA (1)...(19): siRNA sense strand
cagacgacguggugcagua

SEQ ID NO: 469059 - RNA, 19 nt, Homo sapiens
  misc_RNA (1)...(19): siRNA sense strand
ggagaagccauaugugugu

SEQ ID NO: 469060 - RNA, 19 nt, Homo sapiens
  misc_RNA (1)...(19): siRNA sense strand
uggcugaccucaaggaaga

SEQ ID NO: 469061 - RNA, 19 nt, Homo sapiens
  misc_RNA (1)...(19): siRNA sense strand
gcccucaccuccaucaaug

SEQ ID NO: 469062 - RNA, 19 nt, Homo sapiens
  misc_RNA (1)...(19): siRNA sense strand
gcgagaacguggcgaugga

SEQ ID NO: 469063 - RNA, 19 nt, Homo sapiens
  misc_RNA (1)...(19): siRNA sense strand
gcaacaaagccuucuccaa

SEQ ID NO: 469064 - RNA, 19 nt, Homo sapiens
  misc_RNA (1)...(19): siRNA sense strand
aggcugagguggucaucua

SEQ ID NO: 469065 - RNA, 19 nt, Homo sapiens
  misc_RNA (1)...(19): siRNA sense strand
gcaccaagagauacacaga

SEQ ID NO: 469066 - RNA, 19 nt, Homo sapiens
  misc_RNA (1)...(19): siRNA sense strand
uggagaaccugaagacaca

SEQ ID NO: 469067 - RNA, 19 nt, Homo sapiens
  misc_RNA (1)...(19): siRNA sense strand
gaaggagaagcucaaguca

SEQ ID NO: 469068 - RNA, 19 nt, Homo sapiens
  misc_RNA (1)...(19): siRNA sense strand
gagaagaaggaguuugugu

SEQ ID NO: 469069 - RNA, 19 nt, Homo sapiens
  misc_RNA (1)...(19): siRNA sense strand
gagaagcucaagucacuca

SEQ ID NO: 469070 - RNA, 19 nt, Homo sapiens
  misc_RNA (1)...(19): siRNA sense strand
gggagaagaaggaguuugu

SEQ ID NO: 469071 - RNA, 19 nt, Homo sapiens
  misc_RNA (1)...(19): siRNA sense strand
cacgagggcugcaacaaag

SEQ ID NO: 469072 - RNA, 19 nt, Homo sapiens
  misc_RNA (1)...(19): siRNA sense strand
aggagcagcuggugcauca

SEQ ID NO: 469073 - RNA, 19 nt, Homo sapiens
  misc_RNA (1)...(19): siRNA sense strand
aggagaagcucaagucacu

SEQ ID NO: 469074 - RNA, 19 nt, Homo sapiens
  misc_RNA (1)...(19): siRNA sense strand
gcucaagucacucaaggau

SEQ ID NO: 469075 - RNA, 19 nt, Homo sapiens
  misc_RNA (1)...(19): siRNA sense strand
ugagugacaccaaccagaa

SEQ ID NO: 469076 - RNA, 19 nt, Homo sapiens
  misc_RNA (1)...(19): siRNA sense strand
cagcugcgcaaacacauga

SEQ ID NO: 469077 - RNA, 19 nt, Homo sapiens
  misc_RNA (1)...(19): siRNA sense strand
caccgcugcucaaagagaa

SEQ ID NO: 469078 - RNA, 19 nt, Homo sapiens
  misc_RNA (1)...(19): siRNA sense strand
gcagcaacugucugaguga

SEQ ID NO: 469079 - RNA, 19 nt, Homo sapiens
  misc_RNA (1)...(19): siRNA sense strand
gggaagacugcaccaagga

SEQ ID NO: 469080 - RNA, 19 nt, Homo sapiens
  misc_RNA (1)...(19): siRNA sense strand
ucaagaaggagaagcucaa

SEQ ID NO: 469081 - RNA, 19 nt, Homo sapiens
  misc_RNA (1)...(19): siRNA sense strand
caacgagaaacccuacauc

SEQ ID NO: 469082 - RNA, 19 nt, Homo sapiens
  misc_RNA (1)...(19): siRNA sense strand
agaacaagcagagcaguga

SEQ ID NO: 469083 - RNA, 19 nt, Homo sapiens
  misc_RNA (1)...(19): siRNA sense strand
gagcagcuggugcaucaca

SEQ ID NO: 469084 - RNA, 19 nt, Homo sapiens
  misc_RNA (1)...(19): siRNA sense strand
gcacccacuccaacgagaa

SEQ ID NO: 469085 - RNA, 19 nt, Homo sapiens
  misc_RNA (1)...(19): siRNA sense strand
ggacugccugcacgucaga

SEQ ID NO: 469086 - RNA, 19 nt, Homo sapiens
  misc_RNA (1)...(19): siRNA sense strand
agaaggagaagcucaaguc

SEQ ID NO: 469087 - RNA, 19 nt, Homo sapiens
  misc_RNA (1)...(19): siRNA sense strand
gcacgucagagccaucaag

SEQ ID NO: 469088 - RNA, 19 nt, Homo sapiens
  misc_RNA (1)...(19): siRNA sense strand
ggaugccaguuaggcuuug

SEQ ID NO: 469089 - RNA, 19 nt, Homo sapiens
  misc_RNA (1)...(19): siRNA sense strand
gcuggugcaucacaucaac

SEQ ID NO: 469090 - RNA, 19 nt, Homo sapiens
  misc_RNA (1)...(19): siRNA sense strand
gcgagaagccccacaagug

SEQ ID NO: 469091 - RNA, 19 nt, Homo sapiens
  misc_RNA (1)...(19): siRNA sense strand
gcgccaagcaccagaaucg

SEQ ID NO: 469092 - RNA, 19 nt, Homo sapiens
  misc_RNA (1)...(19): siRNA sense strand
gaagcucaagucacucaag

SEQ ID NO: 469093 - RNA, 19 nt, Homo sapiens
  misc_RNA (1)...(19): siRNA sense strand
ucaacccugucgccauuca

SEQ ID NO: 469094 - RNA, 19 nt, Homo sapiens
  misc_RNA (1)...(19): siRNA sense strand
ggagaagaaggaguuugug

SEQ ID NO: 469095 - RNA, 19 nt, Homo sapiens
  misc_RNA (1)...(19): siRNA sense strand
ggaggacgaccuggugcuu

SEQ ID NO: 469096 - RNA, 19 nt, Homo sapiens
  misc_RNA (1)...(19): siRNA sense strand
caggcugcaccaagagaua

SEQ ID NO: 469097 - RNA, 19 nt, Homo sapiens
  misc_RNA (1)...(19): siRNA sense strand
cgagcgaggugaccaugcu

SEQ ID NO: 469098 - RNA, 19 nt, Homo sapiens
  misc_RNA (1)...(19): siRNA sense strand
cagcagcaacugucugagu

SEQ ID NO: 469099 - RNA, 19 nt, Homo sapiens
  misc_RNA (1)...(19): siRNA sense strand
uccugaacaugaugaccua

SEQ ID NO: 469100 - RNA, 19 nt, Homo sapiens
  misc_RNA (1)...(19): siRNA sense strand
gcacaccgcugcucaaaga

SEQ ID NO: 469101 - RNA, 19 nt, Homo sapiens
  misc_RNA (1)...(19): siRNA sense strand
ucaagucacucaaggauuc

SEQ ID NO: 469102 - RNA, 19 nt, Homo sapiens
  misc_RNA (1)...(19): siRNA sense strand
gcacgagggcugcaacaaa

SEQ ID NO: 469103 - RNA, 19 nt, Homo sapiens
  misc_RNA (1)...(19): siRNA sense strand
gcaaacacaugaccaccau

SEQ ID NO: 469104 - RNA, 19 nt, Homo sapiens
  misc_RNA (1)...(19): siRNA sense strand
ccaagaagcagcgcaauga

SEQ ID NO: 469105 - RNA, 19 nt, Homo sapiens
  misc_RNA (1)...(19): siRNA sense strand
gcacuggcuucucugacaa

SEQ ID NO: 469106 - RNA, 19 nt, Homo sapiens
  misc_RNA (1)...(19): siRNA sense strand
cgucaacccugucgccauu

SEQ ID NO: 469107 - RNA, 19 nt, Homo sapiens
  misc_RNA (1)...(19): siRNA sense strand
cagacgacguggugcagua

SEQ ID NO: 469108 - RNA, 19 nt, Homo sapiens
  misc_RNA (1)...(19): siRNA sense strand
ggagaagccauaugugugu

SEQ ID NO: 469109 - RNA, 19 nt, Homo sapiens
  misc_RNA (1)...(19): siRNA sense strand
uggcugaccucaaggaaga

SEQ ID NO: 469110 - RNA, 19 nt, Homo sapiens
  misc_RNA (1)...(19): siRNA sense strand
gcccucaccuccaucaaug

SEQ ID NO: 469111 - RNA, 19 nt, Homo sapiens
  misc_RNA (1)...(19): siRNA sense strand
gcgagaacguggcgaugga

SEQ ID NO: 469112 - RNA, 19 nt, Homo sapiens
  misc_RNA (1)...(19): siRNA sense strand
gcaacaaagccuucuccaa

SEQ ID NO: 469113 - RNA, 19 nt, Homo sapiens
  misc_RNA (1)...(19): siRNA sense strand
aggcugagguggucaucua

SEQ ID NO: 469114 - RNA, 19 nt, Homo sapiens
  misc_RNA (1)...(19): siRNA sense strand
gcaccaagagauacacaga

SEQ ID NO: 469115 - RNA, 19 nt, Homo sapiens
  misc_RNA (1)...(19): siRNA sense strand
uggagaaccugaagacaca

SEQ ID NO: 469116 - RNA, 19 nt, Homo sapiens
  misc_RNA (1)...(19): siRNA sense strand
gaaggagaagcucaaguca

SEQ ID NO: 469117 - RNA, 19 nt, Homo sapiens
  misc_RNA (1)...(19): siRNA sense strand
gagaagaaggaguuugugu

SEQ ID NO: 469118 - RNA, 19 nt, Homo sapiens
  misc_RNA (1)...(19): siRNA sense strand
gagaagcucaagucacuca

SEQ ID NO: 469119 - RNA, 19 nt, Homo sapiens
  misc_RNA (1)...(19): siRNA sense strand
gggagaagaaggaguuugu

SEQ ID NO: 469120 - RNA, 19 nt, Homo sapiens
  misc_RNA (1)...(19): siRNA sense strand
cacgagggcugcaacaaag

SEQ ID NO: 469121 - RNA, 19 nt, Homo sapiens
  misc_RNA (1)...(19): siRNA sense strand
aggagcagcuggugcauca

SEQ ID NO: 469122 - RNA, 19 nt, Homo sapiens
  misc_RNA (1)...(19): siRNA sense strand
aggagaagcucaagucacu

SEQ ID NO: 469123 - RNA, 19 nt, Homo sapiens
  misc_RNA (1)...(19): siRNA sense strand
gcucaagucacucaaggau

SEQ ID NO: 469124 - RNA, 19 nt, Homo sapiens
  misc_RNA (1)...(19): siRNA sense strand
ugagugacaccaaccagaa

SEQ ID NO: 469125 - RNA, 19 nt, Homo sapiens
  misc_RNA (1)...(19): siRNA sense strand
cagcugcgcaaacacauga

SEQ ID NO: 469126 - RNA, 19 nt, Homo sapiens
  misc_RNA (1)...(19): siRNA sense strand
caccgcugcucaaagagaa

SEQ ID NO: 469127 - RNA, 19 nt, Homo sapiens
  misc_RNA (1)...(19): siRNA sense strand
gcagcaacugucugaguga

SEQ ID NO: 469128 - RNA, 19 nt, Homo sapiens
  misc_RNA (1)...(19): siRNA sense strand
gggaagacugcaccaagga

SEQ ID NO: 469129 - RNA, 19 nt, Homo sapiens
  misc_RNA (1)...(19): siRNA sense strand
ucaagaaggagaagcucaa

SEQ ID NO: 469130 - RNA, 19 nt, Homo sapiens
  misc_RNA (1)...(19): siRNA sense strand
caacgagaaacccuacauc

SEQ ID NO: 469131 - RNA, 19 nt, Homo sapiens
  misc_RNA (1)...(19): siRNA sense strand
agaacaagcagagcaguga

SEQ ID NO: 469132 - RNA, 19 nt, Homo sapiens
  misc_RNA (1)...(19): siRNA sense strand
gagcagcuggugcaucaca

SEQ ID NO: 469133 - RNA, 19 nt, Homo sapiens
  misc_RNA (1)...(19): siRNA sense strand
gcacccacuccaacgagaa

SEQ ID NO: 469134 - RNA, 19 nt, Homo sapiens
  misc_RNA (1)...(19): siRNA sense strand
ggacugccugcacgucaga

SEQ ID NO: 469135 - RNA, 19 nt, Homo sapiens
  misc_RNA (1)...(19): siRNA sense strand
agaaggagaagcucaaguc

SEQ ID NO: 469136 - RNA, 19 nt, Homo sapiens
  misc_RNA (1)...(19): siRNA sense strand
gcacgucagagccaucaag

SEQ ID NO: 469137 - RNA, 19 nt, Homo sapiens
  misc_RNA (1)...(19): siRNA sense strand
ggaugccaguuaggcuuug

SEQ ID NO: 469138 - RNA, 19 nt, Homo sapiens
  misc_RNA (1)...(19): siRNA sense strand
gcuggugcaucacaucaac

SEQ ID NO: 469139 - RNA, 19 nt, Homo sapiens
  misc_RNA (1)...(19): siRNA sense strand
gcgagaagccccacaagug

SEQ ID NO: 469140 - RNA, 19 nt, Homo sapiens
  misc_RNA (1)...(19): siRNA sense strand
gcgccaagcaccagaaucg

SEQ ID NO: 469141 - RNA, 19 nt, Homo sapiens
  misc_RNA (1)...(19): siRNA sense strand
gaagcucaagucacucaag

SEQ ID NO: 469142 - RNA, 19 nt, Homo sapiens
  misc_RNA (1)...(19): siRNA sense strand
ucaacccugucgccauuca

SEQ ID NO: 469143 - RNA, 19 nt, Homo sapiens
  misc_RNA (1)...(19): siRNA sense strand
ggagaagaaggaguuugug

SEQ ID NO: 469144 - RNA, 19 nt, Homo sapiens
  misc_RNA (1)...(19): siRNA sense strand
ggaggacgaccuggugcuu

SEQ ID NO: 469145 - RNA, 19 nt, Homo sapiens
  misc_RNA (1)...(19): siRNA sense strand
caggcugcaccaagagaua

SEQ ID NO: 469146 - RNA, 19 nt, Homo sapiens
  misc_RNA (1)...(19): siRNA sense strand
cgagcgaggugaccaugcu

SEQ ID NO: 469147 - RNA, 19 nt, Homo sapiens
  misc_RNA (1)...(19): siRNA sense strand
cagcagcaacugucugagu

SEQ ID NO: 469148 - RNA, 19 nt, Homo sapiens
  misc_RNA (1)...(19): siRNA sense strand
caagaugacuccugugaaa

SEQ ID NO: 469149 - RNA, 19 nt, Homo sapiens
  misc_RNA (1)...(19): siRNA sense strand
gaacugacaagguuauuaa

SEQ ID NO: 469150 - RNA, 19 nt, Homo sapiens
  misc_RNA (1)...(19): siRNA sense strand
gguacaaucucagaguuua

SEQ ID NO: 469151 - RNA, 19 nt, Homo sapiens
  misc_RNA (1)...(19): siRNA sense strand
guuauuaaguugugggaua

SEQ ID NO: 469152 - RNA, 19 nt, Homo sapiens
  misc_RNA (1)...(19): siRNA sense strand
gagagacaguggacaguau

SEQ ID NO: 469153 - RNA, 19 nt, Homo sapiens
  misc_RNA (1)...(19): siRNA sense strand
ugacaagguuauuaaguug

SEQ ID NO: 469154 - RNA, 19 nt, Homo sapiens
  misc_RNA (1)...(19): siRNA sense strand
gcaaugccuucuccauguu

SEQ ID NO: 469155 - RNA, 19 nt, Homo sapiens
  misc_RNA (1)...(19): siRNA sense strand
ccucaggccugcaauuuga

SEQ ID NO: 469156 - RNA, 19 nt, Homo sapiens
  misc_RNA (1)...(19): siRNA sense strand
gacaguucguguuugguua

SEQ ID NO: 469157 - RNA, 19 nt, Homo sapiens
  misc_RNA (1)...(19): siRNA sense strand
caagaagacuguccauagg

SEQ ID NO: 469158 - RNA, 19 nt, Homo sapiens
  misc_RNA (1)...(19): siRNA sense strand
ggacaggacaagcaauuug

SEQ ID NO: 469159 - RNA, 19 nt, Homo sapiens
  misc_RNA (1)...(19): siRNA sense strand
guccauaggucuagacaau

SEQ ID NO: 469160 - RNA, 19 nt, Homo sapiens
  misc_RNA (1)...(19): siRNA sense strand
ggaacugacaagguuauua

SEQ ID NO: 469161 - RNA, 19 nt, Homo sapiens
  misc_RNA (1)...(19): siRNA sense strand
cccaggagguggugaauau

SEQ ID NO: 469162 - RNA, 19 nt, Homo sapiens
  misc_RNA (1)...(19): siRNA sense strand
ggacaggacaguucguguu

SEQ ID NO: 469163 - RNA, 19 nt, Homo sapiens
  misc_RNA (1)...(19): siRNA sense strand
gaagugagggucugugaca

SEQ ID NO: 469164 - RNA, 19 nt, Homo sapiens
  misc_RNA (1)...(19): siRNA sense strand
gcacagcacacgcgacaau

SEQ ID NO: 469165 - RNA, 19 nt, Homo sapiens
  misc_RNA (1)...(19): siRNA sense strand
ccaaguaacaauccucaaa

SEQ ID NO: 469166 - RNA, 19 nt, Homo sapiens
  misc_RNA (1)...(19): siRNA sense strand
gaguuuauauugucagaag

SEQ ID NO: 469167 - RNA, 19 nt, Homo sapiens
  misc_RNA (1)...(19): siRNA sense strand
ggacaguucguguuugguu

SEQ ID NO: 469168 - RNA, 19 nt, Homo sapiens
  misc_RNA (1)...(19): siRNA sense strand
cugacaagguuauuaaguu

SEQ ID NO: 469169 - RNA, 19 nt, Homo sapiens
  misc_RNA (1)...(19): siRNA sense strand
gaggaugguuacugacuuc

SEQ ID NO: 469170 - RNA, 19 nt, Homo sapiens
  misc_RNA (1)...(19): siRNA sense strand
aagcaaaugugggacagua

SEQ ID NO: 469171 - RNA, 19 nt, Homo sapiens
  misc_RNA (1)...(19): siRNA sense strand
gcacccuggucacaacauu

SEQ ID NO: 469172 - RNA, 19 nt, Homo sapiens
  misc_RNA (1)...(19): siRNA sense strand
gucagaagauuauaacaag

SEQ ID NO: 469173 - RNA, 19 nt, Homo sapiens
  misc_RNA (1)...(19): siRNA sense strand
gcacaggacaggacaagca

SEQ ID NO: 469174 - RNA, 19 nt, Homo sapiens
  misc_RNA (1)...(19): siRNA sense strand
gacaguaaacauaacauug

SEQ ID NO: 469175 - RNA, 19 nt, Homo sapiens
  misc_RNA (1)...(19): siRNA sense strand
ggacaucggugggagaaaa

SEQ ID NO: 469176 - RNA, 19 nt, Homo sapiens
  misc_RNA (1)...(19): siRNA sense strand
gcaauuugauguugaaacc

SEQ ID NO: 469177 - RNA, 19 nt, Homo sapiens
  misc_RNA (1)...(19): siRNA sense strand
gacaggacaguucguguuu

SEQ ID NO: 469178 - RNA, 19 nt, Homo sapiens
  misc_RNA (1)...(19): siRNA sense strand
ccacagccaccuuccauga

SEQ ID NO: 469179 - RNA, 19 nt, Homo sapiens
  misc_RNA (1)...(19): siRNA sense strand
guucguguuugguuaaaga

SEQ ID NO: 469180 - RNA, 19 nt, Homo sapiens
  misc_RNA (1)...(19): siRNA sense strand
gagugacgaugauccuguu

SEQ ID NO: 469181 - RNA, 19 nt, Homo sapiens
  misc_RNA (1)...(19): siRNA sense strand
ugacgaugauccuguuugu

SEQ ID NO: 469182 - RNA, 19 nt, Homo sapiens
  misc_RNA (1)...(19): siRNA sense strand
ucucagaguuuauauuguc

SEQ ID NO: 469183 - RNA, 19 nt, Homo sapiens
  misc_RNA (1)...(19): siRNA sense strand
acaagaagacuguccauag

SEQ ID NO: 469184 - RNA, 19 nt, Homo sapiens
  misc_RNA (1)...(19): siRNA sense strand
gacagugauuccugccaaa

SEQ ID NO: 469185 - RNA, 19 nt, Homo sapiens
  misc_RNA (1)...(19): siRNA sense strand
cugaaugguuggacaguga

SEQ ID NO: 469186 - RNA, 19 nt, Homo sapiens
  misc_RNA (1)...(19): siRNA sense strand
agacaaugguacaaucuca

SEQ ID NO: 469187 - RNA, 19 nt, Homo sapiens
  misc_RNA (1)...(19): siRNA sense strand
guucaugcaugucuuuuaa

SEQ ID NO: 469188 - RNA, 19 nt, Homo sapiens
  misc_RNA (1)...(19): siRNA sense strand
ccacucaggccaaguaaca

SEQ ID NO: 469189 - RNA, 19 nt, Homo sapiens
  misc_RNA (1)...(19): siRNA sense strand
guuuaucggugaccacuca

SEQ ID NO: 469190 - RNA, 19 nt, Homo sapiens
  misc_RNA (1)...(19): siRNA sense strand
cagcacacgcgacaauuga

SEQ ID NO: 469191 - RNA, 19 nt, Homo sapiens
  misc_RNA (1)...(19): siRNA sense strand
caccuuccaugacaguaaa

SEQ ID NO: 469192 - RNA, 19 nt, Homo sapiens
  misc_RNA (1)...(19): siRNA sense strand
guugaaacccggcaugugu

SEQ ID NO: 469193 - RNA, 19 nt, Homo sapiens
  misc_RNA (1)...(19): siRNA sense strand
caguaaacauaacauugug

SEQ ID NO: 469194 - RNA, 19 nt, Homo sapiens
  misc_RNA (1)...(19): siRNA sense strand
ccugaugggcuucgaguuu

SEQ ID NO: 469195 - RNA, 19 nt, Homo sapiens
  misc_RNA (1)...(19): siRNA sense strand
ugcaaugccuucuccaugu

SEQ ID NO: 469196 - RNA, 19 nt, Homo sapiens
  misc_RNA (1)...(19): siRNA sense strand
ggccugcaauuugauguug

SEQ ID NO: 469197 - RNA, 19 nt, Homo sapiens
  misc_RNA (1)...(19): siRNA sense strand
cagcaccacugccgcaagu

SEQ ID NO: 469198 - RNA, 19 nt, Homo sapiens
  misc_RNA (1)...(19): siRNA sense strand
ugaccacucaggccaagua

SEQ ID NO: 469199 - RNA, 19 nt, Homo sapiens
  misc_RNA (1)...(19): siRNA sense strand
gcgcaucagagcagaguga

SEQ ID NO: 469200 - RNA, 19 nt, Homo sapiens
  misc_RNA (1)...(19): siRNA sense strand
gcaaaugugggacaguaag

SEQ ID NO: 469201 - RNA, 19 nt, Homo sapiens
  misc_RNA (1)...(19): siRNA sense strand
ccaaggacacaacgacaga

SEQ ID NO: 469202 - RNA, 19 nt, Homo sapiens
  misc_RNA (1)...(19): siRNA sense strand
cagaguuuauauugucaga

SEQ ID NO: 469203 - RNA, 19 nt, Homo sapiens
  misc_RNA (1)...(19): siRNA sense strand
caaaugugggacaguaaga

SEQ ID NO: 469204 - RNA, 19 nt, Homo sapiens
  misc_RNA (1)...(19): siRNA sense strand
cagagcagagugacgauga

SEQ ID NO: 469205 - RNA, 19 nt, Homo sapiens
  misc_RNA (1)...(19): siRNA sense strand
caggacaguucguguuugg

SEQ ID NO: 469206 - RNA, 19 nt, Homo sapiens
  misc_RNA (1)...(19): siRNA sense strand
caaagaggagggcgucauc

SEQ ID NO: 469207 - RNA, 19 nt, Homo sapiens
  misc_RNA (1)...(19): siRNA sense strand
caggacaggacaagcaauu

SEQ ID NO: 469208 - RNA, 19 nt, Homo sapiens
  misc_RNA (1)...(19): siRNA sense strand
gcacacgcgacaauugauc

SEQ ID NO: 469209 - RNA, 19 nt, Homo sapiens
  misc_RNA (1)...(19): siRNA sense strand
ccaccuuccaugacaguaa

SEQ ID NO: 469210 - RNA, 19 nt, Homo sapiens
  misc_RNA (1)...(19): siRNA sense strand
ccacgaggccaucacagau

SEQ ID NO: 469211 - RNA, 19 nt, Homo sapiens
  misc_RNA (1)...(19): siRNA sense strand
ucuagacaaugguacaauc

SEQ ID NO: 469212 - RNA, 19 nt, Homo sapiens
  misc_RNA (1)...(19): siRNA sense strand
cugaugggcuucgaguuug

SEQ ID NO: 469213 - RNA, 19 nt, Homo sapiens
  misc_RNA (1)...(19): siRNA sense strand
ccaagcguauaccaugcaa

SEQ ID NO: 469214 - RNA, 19 nt, Homo sapiens
  misc_RNA (1)...(19): siRNA sense strand
guacaaucucagaguuuau

SEQ ID NO: 469215 - RNA, 19 nt, Homo sapiens
  misc_RNA (1)...(19): siRNA sense strand
ugaugggcuucgaguuuga

SEQ ID NO: 469216 - RNA, 19 nt, Homo sapiens
  misc_RNA (1)...(19): siRNA sense strand
gugaucagccuuucuucug

SEQ ID NO: 469217 - RNA, 19 nt, Homo sapiens
  misc_RNA (1)...(19): siRNA sense strand
agaucacucugucaucaug

SEQ ID NO: 469218 - RNA, 19 nt, Homo sapiens
  misc_RNA (1)...(19): siRNA sense strand
gccuggcacugcucugaga

SEQ ID NO: 469219 - RNA, 19 nt, Homo sapiens
  misc_RNA (1)...(19): siRNA sense strand
agaggaugguuacugacuu

SEQ ID NO: 469220 - RNA, 19 nt, Homo sapiens
  misc_RNA (1)...(19): siRNA sense strand
gaucuccuguggcggugau

SEQ ID NO: 469221 - RNA, 19 nt, Homo sapiens
  misc_RNA (1)...(19): siRNA sense strand
aagcguauaccaugcaaug

SEQ ID NO: 469222 - RNA, 19 nt, Homo sapiens
  misc_RNA (1)...(19): siRNA sense strand
guuacugacuucuggaacu

SEQ ID NO: 469223 - RNA, 19 nt, Homo sapiens
  misc_RNA (1)...(19): siRNA sense strand
uccaugacaguaaacauaa

SEQ ID NO: 469224 - RNA, 19 nt, Homo sapiens
  misc_RNA (1)...(19): siRNA sense strand
uuccaugacaguaaacaua

SEQ ID NO: 469225 - RNA, 19 nt, Homo sapiens
  misc_RNA (1)...(19): siRNA sense strand
gagacaguggacaguauug

SEQ ID NO: 469226 - RNA, 19 nt, Homo sapiens
  misc_RNA (1)...(19): siRNA sense strand
caaguaacaauccucaaac

SEQ ID NO: 469227 - RNA, 19 nt, Homo sapiens
  misc_RNA (1)...(19): siRNA sense strand
ccugcaauuugauguugaa

SEQ ID NO: 469228 - RNA, 19 nt, Homo sapiens
  misc_RNA (1)...(19): siRNA sense strand
gggauugucgucuggaaca

SEQ ID NO: 469229 - RNA, 19 nt, Homo sapiens
  misc_RNA (1)...(19): siRNA sense strand
ucuggaacuucaagcaaau

SEQ ID NO: 469230 - RNA, 19 nt, Homo sapiens
  misc_RNA (1)...(19): siRNA sense strand
gccacgaggccaucacaga

SEQ ID NO: 469231 - RNA, 19 nt, Homo sapiens
  misc_RNA (1)...(19): siRNA sense strand
acagccaccuuccaugaca

SEQ ID NO: 469232 - RNA, 19 nt, Homo sapiens
  misc_RNA (1)...(19): siRNA sense strand
aacaagaugacuccuguga

SEQ ID NO: 469233 - RNA, 19 nt, Homo sapiens
  misc_RNA (1)...(19): siRNA sense strand
agagagacaguggacagua

SEQ ID NO: 469234 - RNA, 19 nt, Homo sapiens
  misc_RNA (1)...(19): siRNA sense strand
uggcggugauggugggauu

SEQ ID NO: 469235 - RNA, 19 nt, Homo sapiens
  misc_RNA (1)...(19): siRNA sense strand
acaaugguacaaucucaga

SEQ ID NO: 469236 - RNA, 19 nt, Homo sapiens
  misc_RNA (1)...(19): siRNA sense strand
uuacugacuucuggaacug

SEQ ID NO: 469237 - RNA, 19 nt, Homo sapiens
  misc_RNA (1)...(19): siRNA sense strand
acaggacaguucguguuug

SEQ ID NO: 469238 - RNA, 19 nt, Homo sapiens
  misc_RNA (1)...(19): siRNA sense strand
gaaugguuggacagugauu

SEQ ID NO: 469239 - RNA, 19 nt, Homo sapiens
  misc_RNA (1)...(19): siRNA sense strand
guguuugguuaaagagaga

SEQ ID NO: 469240 - RNA, 19 nt, Homo sapiens
  misc_RNA (1)...(19): siRNA sense strand
gaccacucaggccaaguaa

SEQ ID NO: 469241 - RNA, 19 nt, Homo sapiens
  misc_RNA (1)...(19): siRNA sense strand
acaguucguguuugguuaa

SEQ ID NO: 469242 - RNA, 19 nt, Homo sapiens
  misc_RNA (1)...(19): siRNA sense strand
gagcacaggacaggacaag

SEQ ID NO: 469243 - RNA, 19 nt, Homo sapiens
  misc_RNA (1)...(19): siRNA sense strand
gcuccaagcgcuccuccau

SEQ ID NO: 469244 - RNA, 19 nt, Homo sapiens
  misc_RNA (1)...(19): siRNA sense strand
uucuggaacuucaagcaaa

SEQ ID NO: 469245 - RNA, 19 nt, Homo sapiens
  misc_RNA (1)...(19): siRNA sense strand
gugggauugucgucuggaa

SEQ ID NO: 469246 - RNA, 19 nt, Homo sapiens
  misc_RNA (1)...(19): siRNA sense strand
gccugcaauuugauguuga

SEQ ID NO: 469247 - RNA, 19 nt, Homo sapiens
  misc_RNA (1)...(19): siRNA sense strand
ggagaucacucaucccuua

SEQ ID NO: 469248 - RNA, 19 nt, Homo sapiens
  misc_RNA (1)...(19): siRNA sense strand
ggauaaaucuggaggaaga

SEQ ID NO: 469249 - RNA, 19 nt, Homo sapiens
  misc_RNA (1)...(19): siRNA sense strand
ccuaauaacucaucaagaa

SEQ ID NO: 469250 - RNA, 19 nt, Homo sapiens
  misc_RNA (1)...(19): siRNA sense strand
ggaaagauuugcagguguu

SEQ ID NO: 469251 - RNA, 19 nt, Homo sapiens
  misc_RNA (1)...(19): siRNA sense strand
gaaaccagccagacgcuua

SEQ ID NO: 469252 - RNA, 19 nt, Homo sapiens
  misc_RNA (1)...(19): siRNA sense strand
uuucagaucuuguguguuu

SEQ ID NO: 469253 - RNA, 19 nt, Homo sapiens
  misc_RNA (1)...(19): siRNA sense strand
ugagaggaaugauuucuuu

SEQ ID NO: 469254 - RNA, 19 nt, Homo sapiens
  misc_RNA (1)...(19): siRNA sense strand
caauaugacugugcucuuu

SEQ ID NO: 469255 - RNA, 19 nt, Homo sapiens
  misc_RNA (1)...(19): siRNA sense strand
aaguuuggcuuccuaauaa

SEQ ID NO: 469256 - RNA, 19 nt, Homo sapiens
  misc_RNA (1)...(19): siRNA sense strand
gaauggauguguauguauc

SEQ ID NO: 469257 - RNA, 19 nt, Homo sapiens
  misc_RNA (1)...(19): siRNA sense strand
cauaggcuccucugaguua

SEQ ID NO: 469258 - RNA, 19 nt, Homo sapiens
  misc_RNA (1)...(19): siRNA sense strand
uagaauggauguguaugua

SEQ ID NO: 469259 - RNA, 19 nt, Homo sapiens
  misc_RNA (1)...(19): siRNA sense strand
caacagcaaugaagauguc

SEQ ID NO: 469260 - RNA, 19 nt, Homo sapiens
  misc_RNA (1)...(19): siRNA sense strand
caugauuccuuauagcuuu

SEQ ID NO: 469261 - RNA, 19 nt, Homo sapiens
  misc_RNA (1)...(19): siRNA sense strand
agacuuacuugcugguaua

SEQ ID NO: 469262 - RNA, 19 nt, Homo sapiens
  misc_RNA (1)...(19): siRNA sense strand
gauaugcaaugccuuucaa

SEQ ID NO: 469263 - RNA, 19 nt, Homo sapiens
  misc_RNA (1)...(19): siRNA sense strand
ggauguguauguaucgauu

SEQ ID NO: 469264 - RNA, 19 nt, Homo sapiens
  misc_RNA (1)...(19): siRNA sense strand
uuacaagccuucuccuuau

SEQ ID NO: 469265 - RNA, 19 nt, Homo sapiens
  misc_RNA (1)...(19): siRNA sense strand
gaucaacguucugaaagug

SEQ ID NO: 469266 - RNA, 19 nt, Homo sapiens
  misc_RNA (1)...(19): siRNA sense strand
gaacaugaacaucaacauc

SEQ ID NO: 469267 - RNA, 19 nt, Homo sapiens
  misc_RNA (1)...(19): siRNA sense strand
gccaagagcucacacuuuu

SEQ ID NO: 469268 - RNA, 19 nt, Homo sapiens
  misc_RNA (1)...(19): siRNA sense strand
uugccagucuucacaauua

SEQ ID NO: 469269 - RNA, 19 nt, Homo sapiens
  misc_RNA (1)...(19): siRNA sense strand
cgggaaaccuacucagaaa

SEQ ID NO: 469270 - RNA, 19 nt, Homo sapiens
  misc_RNA (1)...(19): siRNA sense strand
caacaucaccaccuucaga

SEQ ID NO: 469271 - RNA, 19 nt, Homo sapiens
  misc_RNA (1)...(19): siRNA sense strand
gcagcucaauuacauuugu

SEQ ID NO: 469272 - RNA, 19 nt, Homo sapiens
  misc_RNA (1)...(19): siRNA sense strand
ggaggcaggaccaauauga

SEQ ID NO: 469273 - RNA, 19 nt, Homo sapiens
  misc_RNA (1)...(19): siRNA sense strand
ggacuggacauuggacuaa

SEQ ID NO: 469274 - RNA, 19 nt, Homo sapiens
  misc_RNA (1)...(19): siRNA sense strand
cuacaaggaggaaagauuu

SEQ ID NO: 469275 - RNA, 19 nt, Homo sapiens
  misc_RNA (1)...(19): siRNA sense strand
ggagaccuuucaacaggaa

SEQ ID NO: 469276 - RNA, 19 nt, Homo sapiens
  misc_RNA (1)...(19): siRNA sense strand
ggaggaagacaacaguuug

SEQ ID NO: 469277 - RNA, 19 nt, Homo sapiens
  misc_RNA (1)...(19): siRNA sense strand
gcuauugcuaggacuauua

SEQ ID NO: 469278 - RNA, 19 nt, Homo sapiens
  misc_RNA (1)...(19): siRNA sense strand
ccuaaagcauaagcuguua

SEQ ID NO: 469279 - RNA, 19 nt, Homo sapiens
  misc_RNA (1)...(19): siRNA sense strand
ugacaccaaucuacaagga

SEQ ID NO: 469280 - RNA, 19 nt, Homo sapiens
  misc_RNA (1)...(19): siRNA sense strand
ggaaaccuacucagaaaca

SEQ ID NO: 469281 - RNA, 19 nt, Homo sapiens
  misc_RNA (1)...(19): siRNA sense strand
ccaggauucuuuacacaga

SEQ ID NO: 469282 - RNA, 19 nt, Homo sapiens
  misc_RNA (1)...(19): siRNA sense strand
gagacuuacuugcugguau

SEQ ID NO: 469283 - RNA, 19 nt, Homo sapiens
  misc_RNA (1)...(19): siRNA sense strand
ccaagugccauacacagua

SEQ ID NO: 469284 - RNA, 19 nt, Homo sapiens
  misc_RNA (1)...(19): siRNA sense strand
ugguaaaggugccucuuaa

SEQ ID NO: 469285 - RNA, 19 nt, Homo sapiens
  misc_RNA (1)...(19): siRNA sense strand
gacaacaguuugcaucucu

SEQ ID NO: 469286 - RNA, 19 nt, Homo sapiens
  misc_RNA (1)...(19): siRNA sense strand
gcuccuuucugcucauauu

SEQ ID NO: 469287 - RNA, 19 nt, Homo sapiens
  misc_RNA (1)...(19): siRNA sense strand
guucuucgguaaucuaugu

SEQ ID NO: 469288 - RNA, 19 nt, Homo sapiens
  misc_RNA (1)...(19): siRNA sense strand
aaagugagcccauucaaca

SEQ ID NO: 469289 - RNA, 19 nt, Homo sapiens
  misc_RNA (1)...(19): siRNA sense strand
cccgaagcauccuccauua

SEQ ID NO: 469290 - RNA, 19 nt, Homo sapiens
  misc_RNA (1)...(19): siRNA sense strand
gacauucucaucuucaauu

SEQ ID NO: 469291 - RNA, 19 nt, Homo sapiens
  misc_RNA (1)...(19): siRNA sense strand
caugggaucuuucgucaag

SEQ ID NO: 469292 - RNA, 19 nt, Homo sapiens
  misc_RNA (1)...(19): siRNA sense strand
caacgucauucccuaccuu

SEQ ID NO: 469293 - RNA, 19 nt, Homo sapiens
  misc_RNA (1)...(19): siRNA sense strand
uaaacuggaucccgaagca

SEQ ID NO: 469294 - RNA, 19 nt, Homo sapiens
  misc_RNA (1)...(19): siRNA sense strand
guaaaggugccucuuaaag

SEQ ID NO: 469295 - RNA, 19 nt, Homo sapiens
  misc_RNA (1)...(19): siRNA sense strand
ggacuaauuaucucaguag

SEQ ID NO: 469296 - RNA, 19 nt, Homo sapiens
  misc_RNA (1)...(19): siRNA sense strand
cugauucacugcucacauu

SEQ ID NO: 469297 - RNA, 19 nt, Homo sapiens
  misc_RNA (1)...(19): siRNA sense strand
caucaccacuguucguuca

SEQ ID NO: 469298 - RNA, 19 nt, Homo sapiens
  misc_RNA (1)...(19): siRNA sense strand
gccagacgcuuauugacau

SEQ ID NO: 469299 - RNA, 19 nt, Homo sapiens
  misc_RNA (1)...(19): siRNA sense strand
cagaaacagacaagaauga

SEQ ID NO: 469300 - RNA, 19 nt, Homo sapiens
  misc_RNA (1)...(19): siRNA sense strand
uaaaagagguugauauggu

SEQ ID NO: 469301 - RNA, 19 nt, Homo sapiens
  misc_RNA (1)...(19): siRNA sense strand
ggacauuggacuaauuauc

SEQ ID NO: 469302 - RNA, 19 nt, Homo sapiens
  misc_RNA (1)...(19): siRNA sense strand
caggauaaaucuggaggaa

SEQ ID NO: 469303 - RNA, 19 nt, Homo sapiens
  misc_RNA (1)...(19): siRNA sense strand
caacugauuccuccucuca

SEQ ID NO: 469304 - RNA, 19 nt, Homo sapiens
  misc_RNA (1)...(19): siRNA sense strand
cagcguuacuggccuaugu

SEQ ID NO: 469305 - RNA, 19 nt, Homo sapiens
  misc_RNA (1)...(19): siRNA sense strand
agacugagccugagaugga

SEQ ID NO: 469306 - RNA, 19 nt, Homo sapiens
  misc_RNA (1)...(19): siRNA sense strand
uuuacaagccuucuccuua

SEQ ID NO: 469307 - RNA, 19 nt, Homo sapiens
  misc_RNA (1)...(19): siRNA sense strand
ugagugcucugcugaucaa

SEQ ID NO: 469308 - RNA, 19 nt, Homo sapiens
  misc_RNA (1)...(19): siRNA sense strand
gcugaucaacguucugaaa

SEQ ID NO: 469309 - RNA, 19 nt, Homo sapiens
  misc_RNA (1)...(19): siRNA sense strand
aaacagacaagaaugacaa

SEQ ID NO: 469310 - RNA, 19 nt, Homo sapiens
  misc_RNA (1)...(19): siRNA sense strand
ccuaacaccaacauuuaua

SEQ ID NO: 469311 - RNA, 19 nt, Homo sapiens
  misc_RNA (1)...(19): siRNA sense strand
gacauuggacuaauuaucu

SEQ ID NO: 469312 - RNA, 19 nt, Homo sapiens
  misc_RNA (1)...(19): siRNA sense strand
gaaagugagcccauucaac

SEQ ID NO: 469313 - RNA, 19 nt, Homo sapiens
  misc_RNA (1)...(19): siRNA sense strand
gguaaaggugccucuuaaa

SEQ ID NO: 469314 - RNA, 19 nt, Homo sapiens
  misc_RNA (1)...(19): siRNA sense strand
gucauucccuaccuugaaa

SEQ ID NO: 469315 - RNA, 19 nt, Homo sapiens
  misc_RNA (1)...(19): siRNA sense strand
ucacacagagcuaagauuc

SEQ ID NO: 469316 - RNA, 19 nt, Homo sapiens
  misc_RNA (1)...(19): siRNA sense strand
ggccaagagcucacacuuu

SEQ ID NO: 469317 - RNA, 19 nt, Homo sapiens
  misc_RNA (1)...(19): siRNA sense strand
acaccaacauuuauagaag

SEQ ID NO: 469318 - RNA, 19 nt, Homo sapiens
  misc_RNA (1)...(19): siRNA sense strand
ugugcuggcugguauuauu

SEQ ID NO: 469319 - RNA, 19 nt, Homo sapiens
  misc_RNA (1)...(19): siRNA sense strand
guuacuggccuauguauca

SEQ ID NO: 469320 - RNA, 19 nt, Homo sapiens
  misc_RNA (1)...(19): siRNA sense strand
aaaagagguugauauggua

SEQ ID NO: 469321 - RNA, 19 nt, Homo sapiens
  misc_RNA (1)...(19): siRNA sense strand
ucccuaacaccaacauuua

SEQ ID NO: 469322 - RNA, 19 nt, Homo sapiens
  misc_RNA (1)...(19): siRNA sense strand
ucaauuccaaccaggauuu

SEQ ID NO: 469323 - RNA, 19 nt, Homo sapiens
  misc_RNA (1)...(19): siRNA sense strand
gagcagcaguuuucuagga

SEQ ID NO: 469324 - RNA, 19 nt, Homo sapiens
  misc_RNA (1)...(19): siRNA sense strand
gaaacagacaagaaugaca

SEQ ID NO: 469325 - RNA, 19 nt, Homo sapiens
  misc_RNA (1)...(19): siRNA sense strand
gaggaaugauuucuuugac

SEQ ID NO: 469326 - RNA, 19 nt, Homo sapiens
  misc_RNA (1)...(19): siRNA sense strand
gggugucacucuuccauag

SEQ ID NO: 469327 - RNA, 19 nt, Homo sapiens
  misc_RNA (1)...(19): siRNA sense strand
uaucguccgugucucagaa

SEQ ID NO: 469328 - RNA, 19 nt, Homo sapiens
  misc_RNA (1)...(19): siRNA sense strand
ucucaguaguuucugcuuu

SEQ ID NO: 469329 - RNA, 19 nt, Homo sapiens
  misc_RNA (1)...(19): siRNA sense strand
gauguuaagcgugaaguau

SEQ ID NO: 469330 - RNA, 19 nt, Homo sapiens
  misc_RNA (1)...(19): siRNA sense strand
gucauaggcuccucugagu

SEQ ID NO: 469331 - RNA, 19 nt, Homo sapiens
  misc_RNA (1)...(19): siRNA sense strand
gauguguauguaucgauua

SEQ ID NO: 469332 - RNA, 19 nt, Homo sapiens
  misc_RNA (1)...(19): siRNA sense strand
uagaagaggagucggaguu

SEQ ID NO: 469333 - RNA, 19 nt, Homo sapiens
  misc_RNA (1)...(19): siRNA sense strand
uaagacagauaugcaaugc

SEQ ID NO: 469334 - RNA, 19 nt, Homo sapiens
  misc_RNA (1)...(19): siRNA sense strand
uacaaucuuucccuuccua

SEQ ID NO: 469335 - RNA, 19 nt, Homo sapiens
  misc_RNA (1)...(19): siRNA sense strand
uaauucaagugacaccaau

SEQ ID NO: 469336 - RNA, 19 nt, Homo sapiens
  misc_RNA (1)...(19): siRNA sense strand
guguauguaucgauuaaag

SEQ ID NO: 469337 - RNA, 19 nt, Homo sapiens
  misc_RNA (1)...(19): siRNA sense strand
gagcuggaaucagaacaag

SEQ ID NO: 469338 - RNA, 19 nt, Homo sapiens
  misc_RNA (1)...(19): siRNA sense strand
acagauaugcaaugccuuu

SEQ ID NO: 469339 - RNA, 19 nt, Homo sapiens
  misc_RNA (1)...(19): siRNA sense strand
acucaucccuuacucagau

SEQ ID NO: 469340 - RNA, 19 nt, Homo sapiens
  misc_RNA (1)...(19): siRNA sense strand
ccgaagaccaagugccaua

SEQ ID NO: 469341 - RNA, 19 nt, Homo sapiens
  misc_RNA (1)...(19): siRNA sense strand
guccauugguuccuucuuc

SEQ ID NO: 469342 - RNA, 19 nt, Homo sapiens
  misc_RNA (1)...(19): siRNA sense strand
guauguaucgauuaaagga

SEQ ID NO: 469343 - RNA, 19 nt, Homo sapiens
  misc_RNA (1)...(19): siRNA sense strand
aguccaggcuucaucaaga

SEQ ID NO: 469344 - RNA, 19 nt, Homo sapiens
  misc_RNA (1)...(19): siRNA sense strand
gaaagauuugcagguguuu

SEQ ID NO: 469345 - RNA, 19 nt, Homo sapiens
  misc_RNA (1)...(19): siRNA sense strand
gguaggcgcaggugugaug

SEQ ID NO: 469346 - RNA, 19 nt, Homo sapiens
  misc_RNA (1)...(19): siRNA sense strand
ggagcuggagccugaaaug

SEQ ID NO: 469347 - RNA, 19 nt, Homo sapiens
  misc_RNA (1)...(19): siRNA sense strand
ggagaucacucaucccuua

SEQ ID NO: 469348 - RNA, 19 nt, Homo sapiens
  misc_RNA (1)...(19): siRNA sense strand
ggauaaaucuggaggaaga

SEQ ID NO: 469349 - RNA, 19 nt, Homo sapiens
  misc_RNA (1)...(19): siRNA sense strand
ccuaauaacucaucaagaa

SEQ ID NO: 469350 - RNA, 19 nt, Homo sapiens
  misc_RNA (1)...(19): siRNA sense strand
ggaaagauuugcagguguu

SEQ ID NO: 469351 - RNA, 19 nt, Homo sapiens
  misc_RNA (1)...(19): siRNA sense strand
gaaaccagccagacgcuua

SEQ ID NO: 469352 - RNA, 19 nt, Homo sapiens
  misc_RNA (1)...(19): siRNA sense strand
uuucagaucuuguguguuu

SEQ ID NO: 469353 - RNA, 19 nt, Homo sapiens
  misc_RNA (1)...(19): siRNA sense strand
ugagaggaaugauuucuuu

SEQ ID NO: 469354 - RNA, 19 nt, Homo sapiens
  misc_RNA (1)...(19): siRNA sense strand
caauaugacugugcucuuu

SEQ ID NO: 469355 - RNA, 19 nt, Homo sapiens
  misc_RNA (1)...(19): siRNA sense strand
aaguuuggcuuccuaauaa

SEQ ID NO: 469356 - RNA, 19 nt, Homo sapiens
  misc_RNA (1)...(19): siRNA sense strand
gaauggauguguauguauc

SEQ ID NO: 469357 - RNA, 19 nt, Homo sapiens
  misc_RNA (1)...(19): siRNA sense strand
cauaggcuccucugaguua

SEQ ID NO: 469358 - RNA, 19 nt, Homo sapiens
  misc_RNA (1)...(19): siRNA sense strand
uagaauggauguguaugua

SEQ ID NO: 469359 - RNA, 19 nt, Homo sapiens
  misc_RNA (1)...(19): siRNA sense strand
caacagcaaugaagauguc

SEQ ID NO: 469360 - RNA, 19 nt, Homo sapiens
  misc_RNA (1)...(19): siRNA sense strand
caugauuccuuauagcuuu

SEQ ID NO: 469361 - RNA, 19 nt, Homo sapiens
  misc_RNA (1)...(19): siRNA sense strand
agacuuacuugcugguaua

SEQ ID NO: 469362 - RNA, 19 nt, Homo sapiens
  misc_RNA (1)...(19): siRNA sense strand
gauaugcaaugccuuucaa

SEQ ID NO: 469363 - RNA, 19 nt, Homo sapiens
  misc_RNA (1)...(19): siRNA sense strand
ggauguguauguaucgauu

SEQ ID NO: 469364 - RNA, 19 nt, Homo sapiens
  misc_RNA (1)...(19): siRNA sense strand
uuacaagccuucuccuuau

SEQ ID NO: 469365 - RNA, 19 nt, Homo sapiens
  misc_RNA (1)...(19): siRNA sense strand
gaucaacguucugaaagug

SEQ ID NO: 469366 - RNA, 19 nt, Homo sapiens
  misc_RNA (1)...(19): siRNA sense strand
gaacaugaacaucaacauc

SEQ ID NO: 469367 - RNA, 19 nt, Homo sapiens
  misc_RNA (1)...(19): siRNA sense strand
gccaagagcucacacuuuu

SEQ ID NO: 469368 - RNA, 19 nt, Homo sapiens
  misc_RNA (1)...(19): siRNA sense strand
uugccagucuucacaauua

SEQ ID NO: 469369 - RNA, 19 nt, Homo sapiens
  misc_RNA (1)...(19): siRNA sense strand
cgggaaaccuacucagaaa

SEQ ID NO: 469370 - RNA, 19 nt, Homo sapiens
  misc_RNA (1)...(19): siRNA sense strand
caacaucaccaccuucaga

SEQ ID NO: 469371 - RNA, 19 nt, Homo sapiens
  misc_RNA (1)...(19): siRNA sense strand
gcagcucaauuacauuugu

SEQ ID NO: 469372 - RNA, 19 nt, Homo sapiens
  misc_RNA (1)...(19): siRNA sense strand
ggaggcaggaccaauauga

SEQ ID NO: 469373 - RNA, 19 nt, Homo sapiens
  misc_RNA (1)...(19): siRNA sense strand
ggacuggacauuggacuaa

SEQ ID NO: 469374 - RNA, 19 nt, Homo sapiens
  misc_RNA (1)...(19): siRNA sense strand
cuacaaggaggaaagauuu

SEQ ID NO: 469375 - RNA, 19 nt, Homo sapiens
  misc_RNA (1)...(19): siRNA sense strand
ggagaccuuucaacaggaa

SEQ ID NO: 469376 - RNA, 19 nt, Homo sapiens
  misc_RNA (1)...(19): siRNA sense strand
ggaggaagacaacaguuug

SEQ ID NO: 469377 - RNA, 19 nt, Homo sapiens
  misc_RNA (1)...(19): siRNA sense strand
gcuauugcuaggacuauua

SEQ ID NO: 469378 - RNA, 19 nt, Homo sapiens
  misc_RNA (1)...(19): siRNA sense strand
ccuaaagcauaagcuguua

SEQ ID NO: 469379 - RNA, 19 nt, Homo sapiens
  misc_RNA (1)...(19): siRNA sense strand
ugacaccaaucuacaagga

SEQ ID NO: 469380 - RNA, 19 nt, Homo sapiens
  misc_RNA (1)...(19): siRNA sense strand
ggaaaccuacucagaaaca

SEQ ID NO: 469381 - RNA, 19 nt, Homo sapiens
  misc_RNA (1)...(19): siRNA sense strand
ccaggauucuuuacacaga

SEQ ID NO: 469382 - RNA, 19 nt, Homo sapiens
  misc_RNA (1)...(19): siRNA sense strand
gagacuuacuugcugguau

SEQ ID NO: 469383 - RNA, 19 nt, Homo sapiens
  misc_RNA (1)...(19): siRNA sense strand
ccaagugccauacacagua

SEQ ID NO: 469384 - RNA, 19 nt, Homo sapiens
  misc_RNA (1)...(19): siRNA sense strand
ugguaaaggugccucuuaa

SEQ ID NO: 469385 - RNA, 19 nt, Homo sapiens
  misc_RNA (1)...(19): siRNA sense strand
gacaacaguuugcaucucu

SEQ ID NO: 469386 - RNA, 19 nt, Homo sapiens
  misc_RNA (1)...(19): siRNA sense strand
gcuccuuucugcucauauu

SEQ ID NO: 469387 - RNA, 19 nt, Homo sapiens
  misc_RNA (1)...(19): siRNA sense strand
guucuucgguaaucuaugu

SEQ ID NO: 469388 - RNA, 19 nt, Homo sapiens
  misc_RNA (1)...(19): siRNA sense strand
aaagugagcccauucaaca

SEQ ID NO: 469389 - RNA, 19 nt, Homo sapiens
  misc_RNA (1)...(19): siRNA sense strand
cccgaagcauccuccauua

SEQ ID NO: 469390 - RNA, 19 nt, Homo sapiens
  misc_RNA (1)...(19): siRNA sense strand
gacauucucaucuucaauu

SEQ ID NO: 469391 - RNA, 19 nt, Homo sapiens
  misc_RNA (1)...(19): siRNA sense strand
caugggaucuuucgucaag

SEQ ID NO: 469392 - RNA, 19 nt, Homo sapiens
  misc_RNA (1)...(19): siRNA sense strand
caacgucauucccuaccuu

SEQ ID NO: 469393 - RNA, 19 nt, Homo sapiens
  misc_RNA (1)...(19): siRNA sense strand
uaaacuggaucccgaagca

SEQ ID NO: 469394 - RNA, 19 nt, Homo sapiens
  misc_RNA (1)...(19): siRNA sense strand
guaaaggugccucuuaaag

SEQ ID NO: 469395 - RNA, 19 nt, Homo sapiens
  misc_RNA (1)...(19): siRNA sense strand
ggacuaauuaucucaguag

SEQ ID NO: 469396 - RNA, 19 nt, Homo sapiens
  misc_RNA (1)...(19): siRNA sense strand
cugauucacugcucacauu

SEQ ID NO: 469397 - RNA, 19 nt, Homo sapiens
  misc_RNA (1)...(19): siRNA sense strand
caucaccacuguucguuca

SEQ ID NO: 469398 - RNA, 19 nt, Homo sapiens
  misc_RNA (1)...(19): siRNA sense strand
gccagacgcuuauugacau

SEQ ID NO: 469399 - RNA, 19 nt, Homo sapiens
  misc_RNA (1)...(19): siRNA sense strand
cagaaacagacaagaauga

SEQ ID NO: 469400 - RNA, 19 nt, Homo sapiens
  misc_RNA (1)...(19): siRNA sense strand
uaaaagagguugauauggu

SEQ ID NO: 469401 - RNA, 19 nt, Homo sapiens
  misc_RNA (1)...(19): siRNA sense strand
ggacauuggacuaauuauc

SEQ ID NO: 469402 - RNA, 19 nt, Homo sapiens
  misc_RNA (1)...(19): siRNA sense strand
caggauaaaucuggaggaa

SEQ ID NO: 469403 - RNA, 19 nt, Homo sapiens
  misc_RNA (1)...(19): siRNA sense strand
caacugauuccuccucuca

SEQ ID NO: 469404 - RNA, 19 nt, Homo sapiens
  misc_RNA (1)...(19): siRNA sense strand
cagcguuacuggccuaugu

SEQ ID NO: 469405 - RNA, 19 nt, Homo sapiens
  misc_RNA (1)...(19): siRNA sense strand
agacugagccugagaugga

SEQ ID NO: 469406 - RNA, 19 nt, Homo sapiens
  misc_RNA (1)...(19): siRNA sense strand
uuuacaagccuucuccuua

SEQ ID NO: 469407 - RNA, 19 nt, Homo sapiens
  misc_RNA (1)...(19): siRNA sense strand
ugagugcucugcugaucaa

SEQ ID NO: 469408 - RNA, 19 nt, Homo sapiens
  misc_RNA (1)...(19): siRNA sense strand
gcugaucaacguucugaaa

SEQ ID NO: 469409 - RNA, 19 nt, Homo sapiens
  misc_RNA (1)...(19): siRNA sense strand
aaacagacaagaaugacaa

SEQ ID NO: 469410 - RNA, 19 nt, Homo sapiens
  misc_RNA (1)...(19): siRNA sense strand
ccuaacaccaacauuuaua

SEQ ID NO: 469411 - RNA, 19 nt, Homo sapiens
  misc_RNA (1)...(19): siRNA sense strand
gacauuggacuaauuaucu

SEQ ID NO: 469412 - RNA, 19 nt, Homo sapiens
  misc_RNA (1)...(19): siRNA sense strand
gaaagugagcccauucaac

SEQ ID NO: 469413 - RNA, 19 nt, Homo sapiens
  misc_RNA (1)...(19): siRNA sense strand
gguaaaggugccucuuaaa

SEQ ID NO: 469414 - RNA, 19 nt, Homo sapiens
  misc_RNA (1)...(19): siRNA sense strand
gucauucccuaccuugaaa

SEQ ID NO: 469415 - RNA, 19 nt, Homo sapiens
  misc_RNA (1)...(19): siRNA sense strand
ucacacagagcuaagauuc

SEQ ID NO: 469416 - RNA, 19 nt, Homo sapiens
  misc_RNA (1)...(19): siRNA sense strand
ggccaagagcucacacuuu

SEQ ID NO: 469417 - RNA, 19 nt, Homo sapiens
  misc_RNA (1)...(19): siRNA sense strand
acaccaacauuuauagaag

SEQ ID NO: 469418 - RNA, 19 nt, Homo sapiens
  misc_RNA (1)...(19): siRNA sense strand
ugugcuggcugguauuauu

SEQ ID NO: 469419 - RNA, 19 nt, Homo sapiens
  misc_RNA (1)...(19): siRNA sense strand
guuacuggccuauguauca

SEQ ID NO: 469420 - RNA, 19 nt, Homo sapiens
  misc_RNA (1)...(19): siRNA sense strand
aaaagagguugauauggua

SEQ ID NO: 469421 - RNA, 19 nt, Homo sapiens
  misc_RNA (1)...(19): siRNA sense strand
ucccuaacaccaacauuua

SEQ ID NO: 469422 - RNA, 19 nt, Homo sapiens
  misc_RNA (1)...(19): siRNA sense strand
ucaauuccaaccaggauuu

SEQ ID NO: 469423 - RNA, 19 nt, Homo sapiens
  misc_RNA (1)...(19): siRNA sense strand
gagcagcaguuuucuagga

SEQ ID NO: 469424 - RNA, 19 nt, Homo sapiens
  misc_RNA (1)...(19): siRNA sense strand
gaaacagacaagaaugaca

SEQ ID NO: 469425 - RNA, 19 nt, Homo sapiens
  misc_RNA (1)...(19): siRNA sense strand
gaggaaugauuucuuugac

SEQ ID NO: 469426 - RNA, 19 nt, Homo sapiens
  misc_RNA (1)...(19): siRNA sense strand
gggugucacucuuccauag

SEQ ID NO: 469427 - RNA, 19 nt, Homo sapiens
  misc_RNA (1)...(19): siRNA sense strand
uaucguccgugucucagaa

SEQ ID NO: 469428 - RNA, 19 nt, Homo sapiens
  misc_RNA (1)...(19): siRNA sense strand
ucucaguaguuucugcuuu

SEQ ID NO: 469429 - RNA, 19 nt, Homo sapiens
  misc_RNA (1)...(19): siRNA sense strand
gauguuaagcgugaaguau

SEQ ID NO: 469430 - RNA, 19 nt, Homo sapiens
  misc_RNA (1)...(19): siRNA sense strand
gucauaggcuccucugagu

SEQ ID NO: 469431 - RNA, 19 nt, Homo sapiens
  misc_RNA (1)...(19): siRNA sense strand
gauguguauguaucgauua

SEQ ID NO: 469432 - RNA, 19 nt, Homo sapiens
  misc_RNA (1)...(19): siRNA sense strand
uagaagaggagucggaguu

SEQ ID NO: 469433 - RNA, 19 nt, Homo sapiens
  misc_RNA (1)...(19): siRNA sense strand
uaagacagauaugcaaugc

SEQ ID NO: 469434 - RNA, 19 nt, Homo sapiens
  misc_RNA (1)...(19): siRNA sense strand
uacaaucuuucccuuccua

SEQ ID NO: 469435 - RNA, 19 nt, Homo sapiens
  misc_RNA (1)...(19): siRNA sense strand
uaauucaagugacaccaau

SEQ ID NO: 469436 - RNA, 19 nt, Homo sapiens
  misc_RNA (1)...(19): siRNA sense strand
guguauguaucgauuaaag

SEQ ID NO: 469437 - RNA, 19 nt, Homo sapiens
  misc_RNA (1)...(19): siRNA sense strand
gagcuggaaucagaacaag

SEQ ID NO: 469438 - RNA, 19 nt, Homo sapiens
  misc_RNA (1)...(19): siRNA sense strand
acagauaugcaaugccuuu

SEQ ID NO: 469439 - RNA, 19 nt, Homo sapiens
  misc_RNA (1)...(19): siRNA sense strand
acucaucccuuacucagau

SEQ ID NO: 469440 - RNA, 19 nt, Homo sapiens
  misc_RNA (1)...(19): siRNA sense strand
ccgaagaccaagugccaua

SEQ ID NO: 469441 - RNA, 19 nt, Homo sapiens
  misc_RNA (1)...(19): siRNA sense strand
guccauugguuccuucuuc

SEQ ID NO: 469442 - RNA, 19 nt, Homo sapiens
  misc_RNA (1)...(19): siRNA sense strand
guauguaucgauuaaagga

SEQ ID NO: 469443 - RNA, 19 nt, Homo sapiens
  misc_RNA (1)...(19): siRNA sense strand
aguccaggcuucaucaaga

SEQ ID NO: 469444 - RNA, 19 nt, Homo sapiens
  misc_RNA (1)...(19): siRNA sense strand
gaaagauuugcagguguuu

SEQ ID NO: 469445 - RNA, 19 nt, Homo sapiens
  misc_RNA (1)...(19): siRNA sense strand
gguaggcgcaggugugaug

SEQ ID NO: 469446 - RNA, 19 nt, Homo sapiens
  misc_RNA (1)...(19): siRNA sense strand
ggagcuggagccugaaaug

SEQ ID NO: 469447 - RNA, 19 nt, Homo sapiens
  misc_RNA (1)...(19): siRNA sense strand
gaagagagauguguggaaa

SEQ ID NO: 469448 - RNA, 19 nt, Homo sapiens
  misc_RNA (1)...(19): siRNA sense strand
ucacagagcgguugaaauu

SEQ ID NO: 469449 - RNA, 19 nt, Homo sapiens
  misc_RNA (1)...(19): siRNA sense strand
uguaguggcugaaauauau

SEQ ID NO: 469450 - RNA, 19 nt, Homo sapiens
  misc_RNA (1)...(19): siRNA sense strand
ucagagaagugaagagaga

SEQ ID NO: 469451 - RNA, 19 nt, Homo sapiens
  misc_RNA (1)...(19): siRNA sense strand
acagagcgguugaaauuga

SEQ ID NO: 469452 - RNA, 19 nt, Homo sapiens
  misc_RNA (1)...(19): siRNA sense strand
caacagcagugucuauuuu

SEQ ID NO: 469453 - RNA, 19 nt, Homo sapiens
  misc_RNA (1)...(19): siRNA sense strand
gaagaagucagagaaguga

SEQ ID NO: 469454 - RNA, 19 nt, Homo sapiens
  misc_RNA (1)...(19): siRNA sense strand
gaacucagucaacgcauga

SEQ ID NO: 469455 - RNA, 19 nt, Homo sapiens
  misc_RNA (1)...(19): siRNA sense strand
gcugggagcuacucagaau

SEQ ID NO: 469456 - RNA, 19 nt, Homo sapiens
  misc_RNA (1)...(19): siRNA sense strand
agagagauguguggaaauu

SEQ ID NO: 469457 - RNA, 19 nt, Homo sapiens
  misc_RNA (1)...(19): siRNA sense strand
gcaacagcagugucuauuu

SEQ ID NO: 469458 - RNA, 19 nt, Homo sapiens
  misc_RNA (1)...(19): siRNA sense strand
gaacucucuugugaccuua

SEQ ID NO: 469459 - RNA, 19 nt, Homo sapiens
  misc_RNA (1)...(19): siRNA sense strand
gccuaaacauugcuuucua

SEQ ID NO: 469460 - RNA, 19 nt, Homo sapiens
  misc_RNA (1)...(19): siRNA sense strand
cagugaaaccucagacaua

SEQ ID NO: 469461 - RNA, 19 nt, Homo sapiens
  misc_RNA (1)...(19): siRNA sense strand
ggacagagacaauggaaaa

SEQ ID NO: 469462 - RNA, 19 nt, Homo sapiens
  misc_RNA (1)...(19): siRNA sense strand
cuugugaccuuaccaguga

SEQ ID NO: 469463 - RNA, 19 nt, Homo sapiens
  misc_RNA (1)...(19): siRNA sense strand
uauaucagcccauguuaga

SEQ ID NO: 469464 - RNA, 19 nt, Homo sapiens
  misc_RNA (1)...(19): siRNA sense strand
gacagaagaagucagagaa

SEQ ID NO: 469465 - RNA, 19 nt, Homo sapiens
  misc_RNA (1)...(19): siRNA sense strand
acauacaggaaccuuauua

SEQ ID NO: 469466 - RNA, 19 nt, Homo sapiens
  misc_RNA (1)...(19): siRNA sense strand
cagaagaagucagagaagu

SEQ ID NO: 469467 - RNA, 19 nt, Homo sapiens
  misc_RNA (1)...(19): siRNA sense strand
uuucuaggcuuccucauca

SEQ ID NO: 469468 - RNA, 19 nt, Homo sapiens
  misc_RNA (1)...(19): siRNA sense strand
ccucaucaguuucuuccuu

SEQ ID NO: 469469 - RNA, 19 nt, Homo sapiens
  misc_RNA (1)...(19): siRNA sense strand
aaauauaucagcccauguu

SEQ ID NO: 469470 - RNA, 19 nt, Homo sapiens
  misc_RNA (1)...(19): siRNA sense strand
uaacaccacacuccagcua

SEQ ID NO: 469471 - RNA, 19 nt, Homo sapiens
  misc_RNA (1)...(19): siRNA sense strand
cucaucaguuucuuccuua

SEQ ID NO: 469472 - RNA, 19 nt, Homo sapiens
  misc_RNA (1)...(19): siRNA sense strand
agaacucucuugugaccuu

SEQ ID NO: 469473 - RNA, 19 nt, Homo sapiens
  misc_RNA (1)...(19): siRNA sense strand
ccuaaacauugcuuucuag

SEQ ID NO: 469474 - RNA, 19 nt, Homo sapiens
  misc_RNA (1)...(19): siRNA sense strand
cagagcgguugaaauugaa

SEQ ID NO: 469475 - RNA, 19 nt, Homo sapiens
  misc_RNA (1)...(19): siRNA sense strand
gaagugaagagagaugugu

SEQ ID NO: 469476 - RNA, 19 nt, Homo sapiens
  misc_RNA (1)...(19): siRNA sense strand
gguugaaauugaagcucua

SEQ ID NO: 469477 - RNA, 19 nt, Homo sapiens
  misc_RNA (1)...(19): siRNA sense strand
agacauacaggaaccuuau

SEQ ID NO: 469478 - RNA, 19 nt, Homo sapiens
  misc_RNA (1)...(19): siRNA sense strand
uaggcuuccucaucaguuu

SEQ ID NO: 469479 - RNA, 19 nt, Homo sapiens
  misc_RNA (1)...(19): siRNA sense strand
gaaauugaagcucuaacac

SEQ ID NO: 469480 - RNA, 19 nt, Homo sapiens
  misc_RNA (1)...(19): siRNA sense strand
ugaaauugaagcucuaaca

SEQ ID NO: 469481 - RNA, 19 nt, Homo sapiens
  misc_RNA (1)...(19): siRNA sense strand
gaagucagagaagugaaga

SEQ ID NO: 469482 - RNA, 19 nt, Homo sapiens
  misc_RNA (1)...(19): siRNA sense strand
guguaguggcugaaauaua

SEQ ID NO: 469483 - RNA, 19 nt, Homo sapiens
  misc_RNA (1)...(19): siRNA sense strand
gaaauauaucagcccaugu

SEQ ID NO: 469484 - RNA, 19 nt, Homo sapiens
  misc_RNA (1)...(19): siRNA sense strand
caacgcaugagucucugaa

SEQ ID NO: 469485 - RNA, 19 nt, Homo sapiens
  misc_RNA (1)...(19): siRNA sense strand
ggcaacagcagugucuauu

SEQ ID NO: 469486 - RNA, 19 nt, Homo sapiens
  misc_RNA (1)...(19): siRNA sense strand
cagacauacaggaaccuua

SEQ ID NO: 469487 - RNA, 19 nt, Homo sapiens
  misc_RNA (1)...(19): siRNA sense strand
aauauaucagcccauguua

SEQ ID NO: 469488 - RNA, 19 nt, Homo sapiens
  misc_RNA (1)...(19): siRNA sense strand
agaagaagucagagaagug

SEQ ID NO: 469489 - RNA, 19 nt, Homo sapiens
  misc_RNA (1)...(19): siRNA sense strand
agacagaagaagucagaga

SEQ ID NO: 469490 - RNA, 19 nt, Homo sapiens
  misc_RNA (1)...(19): siRNA sense strand
uuagacagaagaagucaga

SEQ ID NO: 469491 - RNA, 19 nt, Homo sapiens
  misc_RNA (1)...(19): siRNA sense strand
agugaaaccucagacauac

SEQ ID NO: 469492 - RNA, 19 nt, Homo sapiens
  misc_RNA (1)...(19): siRNA sense strand
ugaagagagauguguggaa

SEQ ID NO: 469493 - RNA, 19 nt, Homo sapiens
  misc_RNA (1)...(19): siRNA sense strand
uaucagcccauguuagaca

SEQ ID NO: 469494 - RNA, 19 nt, Homo sapiens
  misc_RNA (1)...(19): siRNA sense strand
gacauacaggaaccuuauu

SEQ ID NO: 469495 - RNA, 19 nt, Homo sapiens
  misc_RNA (1)...(19): siRNA sense strand
cauguuagacagaagaagu

SEQ ID NO: 469496 - RNA, 19 nt, Homo sapiens
  misc_RNA (1)...(19): siRNA sense strand
gagaagugaagagagaugu

SEQ ID NO: 469497 - RNA, 19 nt, Homo sapiens
  misc_RNA (1)...(19): siRNA sense strand
cagcccauguuagacagaa

SEQ ID NO: 469498 - RNA, 19 nt, Homo sapiens
  misc_RNA (1)...(19): siRNA sense strand
ccagugaaaccucagacau

SEQ ID NO: 469499 - RNA, 19 nt, Homo sapiens
  misc_RNA (1)...(19): siRNA sense strand
gaagagagauguguggaaa

SEQ ID NO: 469500 - RNA, 19 nt, Homo sapiens
  misc_RNA (1)...(19): siRNA sense strand
ucacagagcgguugaaauu

SEQ ID NO: 469501 - RNA, 19 nt, Homo sapiens
  misc_RNA (1)...(19): siRNA sense strand
uguaguggcugaaauauau

SEQ ID NO: 469502 - RNA, 19 nt, Homo sapiens
  misc_RNA (1)...(19): siRNA sense strand
ucagagaagugaagagaga

SEQ ID NO: 469503 - RNA, 19 nt, Homo sapiens
  misc_RNA (1)...(19): siRNA sense strand
acagagcgguugaaauuga

SEQ ID NO: 469504 - RNA, 19 nt, Homo sapiens
  misc_RNA (1)...(19): siRNA sense strand
caacagcagugucuauuuu

SEQ ID NO: 469505 - RNA, 19 nt, Homo sapiens
  misc_RNA (1)...(19): siRNA sense strand
gaagaagucagagaaguga

SEQ ID NO: 469506 - RNA, 19 nt, Homo sapiens
  misc_RNA (1)...(19): siRNA sense strand
gaacucagucaacgcauga

SEQ ID NO: 469507 - RNA, 19 nt, Homo sapiens
  misc_RNA (1)...(19): siRNA sense strand
gcugggagcuacucagaau

SEQ ID NO: 469508 - RNA, 19 nt, Homo sapiens
  misc_RNA (1)...(19): siRNA sense strand
agagagauguguggaaauu

SEQ ID NO: 469509 - RNA, 19 nt, Homo sapiens
  misc_RNA (1)...(19): siRNA sense strand
gcaacagcagugucuauuu

SEQ ID NO: 469510 - RNA, 19 nt, Homo sapiens
  misc_RNA (1)...(19): siRNA sense strand
gaacucucuugugaccuua

SEQ ID NO: 469511 - RNA, 19 nt, Homo sapiens
  misc_RNA (1)...(19): siRNA sense strand
gccuaaacauugcuuucua

SEQ ID NO: 469512 - RNA, 19 nt, Homo sapiens
  misc_RNA (1)...(19): siRNA sense strand
cagugaaaccucagacaua

SEQ ID NO: 469513 - RNA, 19 nt, Homo sapiens
  misc_RNA (1)...(19): siRNA sense strand
ggacagagacaauggaaaa

SEQ ID NO: 469514 - RNA, 19 nt, Homo sapiens
  misc_RNA (1)...(19): siRNA sense strand
cuugugaccuuaccaguga

SEQ ID NO: 469515 - RNA, 19 nt, Homo sapiens
  misc_RNA (1)...(19): siRNA sense strand
uauaucagcccauguuaga

SEQ ID NO: 469516 - RNA, 19 nt, Homo sapiens
  misc_RNA (1)...(19): siRNA sense strand
gacagaagaagucagagaa

SEQ ID NO: 469517 - RNA, 19 nt, Homo sapiens
  misc_RNA (1)...(19): siRNA sense strand
acauacaggaaccuuauua

SEQ ID NO: 469518 - RNA, 19 nt, Homo sapiens
  misc_RNA (1)...(19): siRNA sense strand
cagaagaagucagagaagu

SEQ ID NO: 469519 - RNA, 19 nt, Homo sapiens
  misc_RNA (1)...(19): siRNA sense strand
uuucuaggcuuccucauca

SEQ ID NO: 469520 - RNA, 19 nt, Homo sapiens
  misc_RNA (1)...(19): siRNA sense strand
ccucaucaguuucuuccuu

SEQ ID NO: 469521 - RNA, 19 nt, Homo sapiens
  misc_RNA (1)...(19): siRNA sense strand
aaauauaucagcccauguu

SEQ ID NO: 469522 - RNA, 19 nt, Homo sapiens
  misc_RNA (1)...(19): siRNA sense strand
uaacaccacacuccagcua

SEQ ID NO: 469523 - RNA, 19 nt, Homo sapiens
  misc_RNA (1)...(19): siRNA sense strand
cucaucaguuucuuccuua

SEQ ID NO: 469524 - RNA, 19 nt, Homo sapiens
  misc_RNA (1)...(19): siRNA sense strand
agaacucucuugugaccuu

SEQ ID NO: 469525 - RNA, 19 nt, Homo sapiens
  misc_RNA (1)...(19): siRNA sense strand
ccuaaacauugcuuucuag

SEQ ID NO: 469526 - RNA, 19 nt, Homo sapiens
  misc_RNA (1)...(19): siRNA sense strand
cagagcgguugaaauugaa

SEQ ID NO: 469527 - RNA, 19 nt, Homo sapiens
  misc_RNA (1)...(19): siRNA sense strand
gaagugaagagagaugugu

SEQ ID NO: 469528 - RNA, 19 nt, Homo sapiens
  misc_RNA (1)...(19): siRNA sense strand
gguugaaauugaagcucua

SEQ ID NO: 469529 - RNA, 19 nt, Homo sapiens
  misc_RNA (1)...(19): siRNA sense strand
agacauacaggaaccuuau

SEQ ID NO: 469530 - RNA, 19 nt, Homo sapiens
  misc_RNA (1)...(19): siRNA sense strand
uaggcuuccucaucaguuu

SEQ ID NO: 469531 - RNA, 19 nt, Homo sapiens
  misc_RNA (1)...(19): siRNA sense strand
gaaauugaagcucuaacac

SEQ ID NO: 469532 - RNA, 19 nt, Homo sapiens
  misc_RNA (1)...(19): siRNA sense strand
ugaaauugaagcucuaaca

SEQ ID NO: 469533 - RNA, 19 nt, Homo sapiens
  misc_RNA (1)...(19): siRNA sense strand
gaagucagagaagugaaga

SEQ ID NO: 469534 - RNA, 19 nt, Homo sapiens
  misc_RNA (1)...(19): siRNA sense strand
guguaguggcugaaauaua

SEQ ID NO: 469535 - RNA, 19 nt, Homo sapiens
  misc_RNA (1)...(19): siRNA sense strand
gaaauauaucagcccaugu

SEQ ID NO: 469536 - RNA, 19 nt, Homo sapiens
  misc_RNA (1)...(19): siRNA sense strand
caacgcaugagucucugaa

SEQ ID NO: 469537 - RNA, 19 nt, Homo sapiens
  misc_RNA (1)...(19): siRNA sense strand
ggcaacagcagugucuauu

SEQ ID NO: 469538 - RNA, 19 nt, Homo sapiens
  misc_RNA (1)...(19): siRNA sense strand
cagacauacaggaaccuua

SEQ ID NO: 469539 - RNA, 19 nt, Homo sapiens
  misc_RNA (1)...(19): siRNA sense strand
aauauaucagcccauguua

SEQ ID NO: 469540 - RNA, 19 nt, Homo sapiens
  misc_RNA (1)...(19): siRNA sense strand
agaagaagucagagaagug

SEQ ID NO: 469541 - RNA, 19 nt, Homo sapiens
  misc_RNA (1)...(19): siRNA sense strand
agacagaagaagucagaga

SEQ ID NO: 469542 - RNA, 19 nt, Homo sapiens
  misc_RNA (1)...(19): siRNA sense strand
uuagacagaagaagucaga

SEQ ID NO: 469543 - RNA, 19 nt, Homo sapiens
  misc_RNA (1)...(19): siRNA sense strand
agugaaaccucagacauac

SEQ ID NO: 469544 - RNA, 19 nt, Homo sapiens
  misc_RNA (1)...(19): siRNA sense strand
ugaagagagauguguggaa

SEQ ID NO: 469545 - RNA, 19 nt, Homo sapiens
  misc_RNA (1)...(19): siRNA sense strand
uaucagcccauguuagaca

SEQ ID NO: 469546 - RNA, 19 nt, Homo sapiens
  misc_RNA (1)...(19): siRNA sense strand
gacauacaggaaccuuauu

SEQ ID NO: 469547 - RNA, 19 nt, Homo sapiens
  misc_RNA (1)...(19): siRNA sense strand
cauguuagacagaagaagu

SEQ ID NO: 469548 - RNA, 19 nt, Homo sapiens
  misc_RNA (1)...(19): siRNA sense strand
gagaagugaagagagaugu

SEQ ID NO: 469549 - RNA, 19 nt, Homo sapiens
  misc_RNA (1)...(19): siRNA sense strand
cagcccauguuagacagaa

SEQ ID NO: 469550 - RNA, 19 nt, Homo sapiens
  misc_RNA (1)...(19): siRNA sense strand
ccagugaaaccucagacau

SEQ ID NO: 469551 - RNA, 19 nt, Homo sapiens
  misc_RNA (1)...(19): siRNA sense strand
caacagcagugucuauuuu

SEQ ID NO: 469552 - RNA, 19 nt, Homo sapiens
  misc_RNA (1)...(19): siRNA sense strand
gaacucagucaacgcauga

SEQ ID NO: 469553 - RNA, 19 nt, Homo sapiens
  misc_RNA (1)...(19): siRNA sense strand
gcugggagcuacucagaau

SEQ ID NO: 469554 - RNA, 19 nt, Homo sapiens
  misc_RNA (1)...(19): siRNA sense strand
gcaacagcagugucuauuu

SEQ ID NO: 469555 - RNA, 19 nt, Homo sapiens
  misc_RNA (1)...(19): siRNA sense strand
gaacucucuugugaccuua

SEQ ID NO: 469556 - RNA, 19 nt, Homo sapiens
  misc_RNA (1)...(19): siRNA sense strand
gccuaaacauugcuuucua

SEQ ID NO: 469557 - RNA, 19 nt, Homo sapiens
  misc_RNA (1)...(19): siRNA sense strand
cagugaaaccucagacaua

SEQ ID NO: 469558 - RNA, 19 nt, Homo sapiens
  misc_RNA (1)...(19): siRNA sense strand
ggacagagacaauggaaaa

SEQ ID NO: 469559 - RNA, 19 nt, Homo sapiens
  misc_RNA (1)...(19): siRNA sense strand
cuugugaccuuaccaguga

SEQ ID NO: 469560 - RNA, 19 nt, Homo sapiens
  misc_RNA (1)...(19): siRNA sense strand
acauacaggaaccuuauua

SEQ ID NO: 469561 - RNA, 19 nt, Homo sapiens
  misc_RNA (1)...(19): siRNA sense strand
ccucaucaguuucuuccuu

SEQ ID NO: 469562 - RNA, 19 nt, Homo sapiens
  misc_RNA (1)...(19): siRNA sense strand
uuucuaggcuuccucauca

SEQ ID NO: 469563 - RNA, 19 nt, Homo sapiens
  misc_RNA (1)...(19): siRNA sense strand
cucaucaguuucuuccuua

SEQ ID NO: 469564 - RNA, 19 nt, Homo sapiens
  misc_RNA (1)...(19): siRNA sense strand
agaacucucuugugaccuu

SEQ ID NO: 469565 - RNA, 19 nt, Homo sapiens
  misc_RNA (1)...(19): siRNA sense strand
ccuaaacauugcuuucuag

SEQ ID NO: 469566 - RNA, 19 nt, Homo sapiens
  misc_RNA (1)...(19): siRNA sense strand
uaggcuuccucaucaguuu

SEQ ID NO: 469567 - RNA, 19 nt, Homo sapiens
  misc_RNA (1)...(19): siRNA sense strand
agacauacaggaaccuuau

SEQ ID NO: 469568 - RNA, 19 nt, Homo sapiens
  misc_RNA (1)...(19): siRNA sense strand
caacgcaugagucucugaa

SEQ ID NO: 469569 - RNA, 19 nt, Homo sapiens
  misc_RNA (1)...(19): siRNA sense strand
ggcaacagcagugucuauu

SEQ ID NO: 469570 - RNA, 19 nt, Homo sapiens
  misc_RNA (1)...(19): siRNA sense strand
cagacauacaggaaccuua

SEQ ID NO: 469571 - RNA, 19 nt, Homo sapiens
  misc_RNA (1)...(19): siRNA sense strand
agugaaaccucagacauac

SEQ ID NO: 469572 - RNA, 19 nt, Homo sapiens
  misc_RNA (1)...(19): siRNA sense strand
gacauacaggaaccuuauu

SEQ ID NO: 469573 - RNA, 19 nt, Homo sapiens
  misc_RNA (1)...(19): siRNA sense strand
ccagugaaaccucagacau

SEQ ID NO: 469574 - RNA, 19 nt, Homo sapiens
  misc_RNA (1)...(19): siRNA sense strand
ucacggagauccacagaua

SEQ ID NO: 469575 - RNA, 19 nt, Homo sapiens
  misc_RNA (1)...(19): siRNA sense strand
ggagacagcuggagcacaa

SEQ ID NO: 469576 - RNA, 19 nt, Homo sapiens
  misc_RNA (1)...(19): siRNA sense strand
gauguuagaucaugaauac

SEQ ID NO: 469577 - RNA, 19 nt, Homo sapiens
  misc_RNA (1)...(19): siRNA sense strand
gaucaugaauacacaacaa

SEQ ID NO: 469578 - RNA, 19 nt, Homo sapiens
  misc_RNA (1)...(19): siRNA sense strand
gaacuuacagcucuuuaug

SEQ ID NO: 469579 - RNA, 19 nt, Homo sapiens
  misc_RNA (1)...(19): siRNA sense strand
ggaguguccuggagaagaa

SEQ ID NO: 469580 - RNA, 19 nt, Homo sapiens
  misc_RNA (1)...(19): siRNA sense strand
gaguucggcuacuguauuu

SEQ ID NO: 469581 - RNA, 19 nt, Homo sapiens
  misc_RNA (1)...(19): siRNA sense strand
agacgaagauccaggcaaa

SEQ ID NO: 469582 - RNA, 19 nt, Homo sapiens
  misc_RNA (1)...(19): siRNA sense strand
gagaagaucuacagcaaaa

SEQ ID NO: 469583 - RNA, 19 nt, Homo sapiens
  misc_RNA (1)...(19): siRNA sense strand
cggaggaggucgccacuuu

SEQ ID NO: 469584 - RNA, 19 nt, Homo sapiens
  misc_RNA (1)...(19): siRNA sense strand
ggagacagcuuggcagaag

SEQ ID NO: 469585 - RNA, 19 nt, Homo sapiens
  misc_RNA (1)...(19): siRNA sense strand
ucaaguacaucaugcugaa

SEQ ID NO: 469586 - RNA, 19 nt, Homo sapiens
  misc_RNA (1)...(19): siRNA sense strand
ggagauccacagauacuuu

SEQ ID NO: 469587 - RNA, 19 nt, Homo sapiens
  misc_RNA (1)...(19): siRNA sense strand
ucaagagccuggacaagug

SEQ ID NO: 469588 - RNA, 19 nt, Homo sapiens
  misc_RNA (1)...(19): siRNA sense strand
ggagugcguuucuucuaug

SEQ ID NO: 469589 - RNA, 19 nt, Homo sapiens
  misc_RNA (1)...(19): siRNA sense strand
ggaagucucgggaaaugaa

SEQ ID NO: 469590 - RNA, 19 nt, Homo sapiens
  misc_RNA (1)...(19): siRNA sense strand
gccaacacgugguggaauu

SEQ ID NO: 469591 - RNA, 19 nt, Homo sapiens
  misc_RNA (1)...(19): siRNA sense strand
ggaggauguuagaucauga

SEQ ID NO: 469592 - RNA, 19 nt, Homo sapiens
  misc_RNA (1)...(19): siRNA sense strand
gcacugagagcaggaaaug

SEQ ID NO: 469593 - RNA, 19 nt, Homo sapiens
  misc_RNA (1)...(19): siRNA sense strand
cagaggaugugguuaucaa

SEQ ID NO: 469594 - RNA, 19 nt, Homo sapiens
  misc_RNA (1)...(19): siRNA sense strand
gaggugcgcuccgauaaca

SEQ ID NO: 469595 - RNA, 19 nt, Homo sapiens
  misc_RNA (1)...(19): siRNA sense strand
gaggagaagcagaagcuaa

SEQ ID NO: 469596 - RNA, 19 nt, Homo sapiens
  misc_RNA (1)...(19): siRNA sense strand
gcacguccaagcucaacua

SEQ ID NO: 469597 - RNA, 19 nt, Homo sapiens
  misc_RNA (1)...(19): siRNA sense strand
gggaggauguuagaucaug

SEQ ID NO: 469598 - RNA, 19 nt, Homo sapiens
  misc_RNA (1)...(19): siRNA sense strand
aaacacagcgggagagguu

SEQ ID NO: 469599 - RNA, 19 nt, Homo sapiens
  misc_RNA (1)...(19): siRNA sense strand
agaagucgaugcagaaucu

SEQ ID NO: 469600 - RNA, 19 nt, Homo sapiens
  misc_RNA (1)...(19): siRNA sense strand
agaagccgguguacaagaa

SEQ ID NO: 469601 - RNA, 19 nt, Homo sapiens
  misc_RNA (1)...(19): siRNA sense strand
gcagggaggagaagcagaa

SEQ ID NO: 469602 - RNA, 19 nt, Homo sapiens
  misc_RNA (1)...(19): siRNA sense strand
auaggcaacuucaagauug

SEQ ID NO: 469603 - RNA, 19 nt, Homo sapiens
  misc_RNA (1)...(19): siRNA sense strand
ggaccgagagcguucagaa

SEQ ID NO: 469604 - RNA, 19 nt, Homo sapiens
  misc_RNA (1)...(19): siRNA sense strand
ggcgagggcugagcacaaa

SEQ ID NO: 469605 - RNA, 19 nt, Homo sapiens
  misc_RNA (1)...(19): siRNA sense strand
ggagaagaucuacagcaaa

SEQ ID NO: 469606 - RNA, 19 nt, Homo sapiens
  misc_RNA (1)...(19): siRNA sense strand
uggagaagaucuacagcaa

SEQ ID NO: 469607 - RNA, 19 nt, Homo sapiens
  misc_RNA (1)...(19): siRNA sense strand
gaagagagggaagucauca

SEQ ID NO: 469608 - RNA, 19 nt, Homo sapiens
  misc_RNA (1)...(19): siRNA sense strand
cagcuuggcagaaguuuga

SEQ ID NO: 469609 - RNA, 19 nt, Homo sapiens
  misc_RNA (1)...(19): siRNA sense strand
gaaggaaggccugugagau

SEQ ID NO: 469610 - RNA, 19 nt, Homo sapiens
  misc_RNA (1)...(19): siRNA sense strand
cgaccagccugaacaagca

SEQ ID NO: 469611 - RNA, 19 nt, Homo sapiens
  misc_RNA (1)...(19): siRNA sense strand
ugcagaaucuccagacgaa

SEQ ID NO: 469612 - RNA, 19 nt, Homo sapiens
  misc_RNA (1)...(19): siRNA sense strand
ggaaauggcgguggaagag

SEQ ID NO: 469613 - RNA, 19 nt, Homo sapiens
  misc_RNA (1)...(19): siRNA sense strand
gaagauccaggcaaagaag

SEQ ID NO: 469614 - RNA, 19 nt, Homo sapiens
  misc_RNA (1)...(19): siRNA sense strand
gagcaggaaaugagaagga

SEQ ID NO: 469615 - RNA, 19 nt, Homo sapiens
  misc_RNA (1)...(19): siRNA sense strand
gagugcguuucuucuauga

SEQ ID NO: 469616 - RNA, 19 nt, Homo sapiens
  misc_RNA (1)...(19): siRNA sense strand
cggagugcguuucuucuau

SEQ ID NO: 469617 - RNA, 19 nt, Homo sapiens
  misc_RNA (1)...(19): siRNA sense strand
caagaguucggcuacugua

SEQ ID NO: 469618 - RNA, 19 nt, Homo sapiens
  misc_RNA (1)...(19): siRNA sense strand
caggagaagacuuugaauu

SEQ ID NO: 469619 - RNA, 19 nt, Homo sapiens
  misc_RNA (1)...(19): siRNA sense strand
aaggaaggccugugagauu

SEQ ID NO: 469620 - RNA, 19 nt, Homo sapiens
  misc_RNA (1)...(19): siRNA sense strand
gagaagccgguguacaaga

SEQ ID NO: 469621 - RNA, 19 nt, Homo sapiens
  misc_RNA (1)...(19): siRNA sense strand
ggauguuagaucaugaaua

SEQ ID NO: 469622 - RNA, 19 nt, Homo sapiens
  misc_RNA (1)...(19): siRNA sense strand
ggaaggccugugagauuga

SEQ ID NO: 469623 - RNA, 19 nt, Homo sapiens
  misc_RNA (1)...(19): siRNA sense strand
uggagaagccgguguacaa

SEQ ID NO: 469624 - RNA, 19 nt, Homo sapiens
  misc_RNA (1)...(19): siRNA sense strand
ccaguacguucgagaaguc

SEQ ID NO: 469625 - RNA, 19 nt, Homo sapiens
  misc_RNA (1)...(19): siRNA sense strand
gagauccacagauacuuug

SEQ ID NO: 469626 - RNA, 19 nt, Homo sapiens
  misc_RNA (1)...(19): siRNA sense strand
aggagaagacuuugaauuc

SEQ ID NO: 469627 - RNA, 19 nt, Homo sapiens
  misc_RNA (1)...(19): siRNA sense strand
cagaaucuccagacgaaga

SEQ ID NO: 469628 - RNA, 19 nt, Homo sapiens
  misc_RNA (1)...(19): siRNA sense strand
gcaagaguucggcuacugu

SEQ ID NO: 469629 - RNA, 19 nt, Homo sapiens
  misc_RNA (1)...(19): siRNA sense strand
gaaauggcgguggaagaga

SEQ ID NO: 469630 - RNA, 19 nt, Homo sapiens
  misc_RNA (1)...(19): siRNA sense strand
gcccuguauuucaucgaua

SEQ ID NO: 469631 - RNA, 19 nt, Homo sapiens
  misc_RNA (1)...(19): siRNA sense strand
gagagggaagucaucaaga

SEQ ID NO: 469632 - RNA, 19 nt, Homo sapiens
  misc_RNA (1)...(19): siRNA sense strand
agaaggagaagcacgaaga

SEQ ID NO: 469633 - RNA, 19 nt, Homo sapiens
  misc_RNA (1)...(19): siRNA sense strand
acuuacagcucuuuaugga

SEQ ID NO: 469634 - RNA, 19 nt, Homo sapiens
  misc_RNA (1)...(19): siRNA sense strand
agagggaagucaucaagag

SEQ ID NO: 469635 - RNA, 19 nt, Homo sapiens
  misc_RNA (1)...(19): siRNA sense strand
ggaagagagggaagucauc

SEQ ID NO: 469636 - RNA, 19 nt, Homo sapiens
  misc_RNA (1)...(19): siRNA sense strand
ggcaggagaagacuuugaa

SEQ ID NO: 469637 - RNA, 19 nt, Homo sapiens
  misc_RNA (1)...(19): siRNA sense strand
aggaaggccugugagauug

SEQ ID NO: 469638 - RNA, 19 nt, Homo sapiens
  misc_RNA (1)...(19): siRNA sense strand
ggacaaggaggagaacaag

SEQ ID NO: 469639 - RNA, 19 nt, Homo sapiens
  misc_RNA (1)...(19): siRNA sense strand
cgaagauccaggcaaagaa

SEQ ID NO: 469640 - RNA, 19 nt, Homo sapiens
  misc_RNA (1)...(19): siRNA sense strand
uaaaagaagaggcagaaaa

SEQ ID NO: 469641 - RNA, 19 nt, Homo sapiens
  misc_RNA (1)...(19): siRNA sense strand
ccacggacaaggaggagaa

SEQ ID NO: 469642 - RNA, 19 nt, Homo sapiens
  misc_RNA (1)...(19): siRNA sense strand
cgacggagugcguuucuuc

SEQ ID NO: 469643 - RNA, 19 nt, Homo sapiens
  misc_RNA (1)...(19): siRNA sense strand
cuacaacgccuccaucacu

SEQ ID NO: 469644 - RNA, 19 nt, Homo sapiens
  misc_RNA (1)...(19): siRNA sense strand
cauggcaggagaagacuuu

SEQ ID NO: 469645 - RNA, 19 nt, Homo sapiens
  misc_RNA (1)...(19): siRNA sense strand
guuagaucaugaauacaca

SEQ ID NO: 469646 - RNA, 19 nt, Homo sapiens
  misc_RNA (1)...(19): siRNA sense strand
cccuguauuucaucgauaa

SEQ ID NO: 469647 - RNA, 19 nt, Homo sapiens
  misc_RNA (1)...(19): siRNA sense strand
aggagaagcagaagcuaaa

SEQ ID NO: 469648 - RNA, 19 nt, Homo sapiens
  misc_RNA (1)...(19): siRNA sense strand
gaggauguuagaucaugaa

SEQ ID NO: 469649 - RNA, 19 nt, Homo sapiens
  misc_RNA (1)...(19): siRNA sense strand
ugaaggaaggccugugaga

SEQ ID NO: 469650 - RNA, 19 nt, Homo sapiens
  misc_RNA (1)...(19): siRNA sense strand
aauaggcaacuucaagauu

SEQ ID NO: 469651 - RNA, 19 nt, Homo sapiens
  misc_RNA (1)...(19): siRNA sense strand
cguccaagcucaacuaccu

SEQ ID NO: 469652 - RNA, 19 nt, Homo sapiens
  misc_RNA (1)...(19): siRNA sense strand
gcgguggcccuguauuuca

SEQ ID NO: 469653 - RNA, 19 nt, Homo sapiens
  misc_RNA (1)...(19): siRNA sense strand
gagacagcuuggcagaagu

SEQ ID NO: 469654 - RNA, 19 nt, Homo sapiens
  misc_RNA (1)...(19): siRNA sense strand
agaacuccaucaaguacau

SEQ ID NO: 469655 - RNA, 19 nt, Homo sapiens
  misc_RNA (1)...(19): siRNA sense strand
uaugaaggaaggccuguga

SEQ ID NO: 469656 - RNA, 19 nt, Homo sapiens
  misc_RNA (1)...(19): siRNA sense strand
agaguucggcuacuguauu

SEQ ID NO: 469657 - RNA, 19 nt, Homo sapiens
  misc_RNA (1)...(19): siRNA sense strand
acagagugccgguggagaa

SEQ ID NO: 469658 - RNA, 19 nt, Homo sapiens
  misc_RNA (1)...(19): siRNA sense strand
ggacugcauccgcuacuac

SEQ ID NO: 469659 - RNA, 19 nt, Homo sapiens
  misc_RNA (1)...(19): siRNA sense strand
caacacgugguggaauuug

SEQ ID NO: 469660 - RNA, 19 nt, Homo sapiens
  misc_RNA (1)...(19): siRNA sense strand
gaaggccugugagauugag

SEQ ID NO: 469661 - RNA, 19 nt, Homo sapiens
  misc_RNA (1)...(19): siRNA sense strand
cuggaagucucgggaaaug

SEQ ID NO: 469662 - RNA, 19 nt, Homo sapiens
  misc_RNA (1)...(19): siRNA sense strand
gccagaggaugugguuauc

SEQ ID NO: 469663 - RNA, 19 nt, Homo sapiens
  misc_RNA (1)...(19): siRNA sense strand
ggagaaggagaagcacgaa

SEQ ID NO: 469664 - RNA, 19 nt, Homo sapiens
  misc_RNA (1)...(19): siRNA sense strand
acaaggaggagaacaagca

SEQ ID NO: 469665 - RNA, 19 nt, Homo sapiens
  misc_RNA (1)...(19): siRNA sense strand
ggaucacgccagaggaugu

SEQ ID NO: 469666 - RNA, 19 nt, Homo sapiens
  misc_RNA (1)...(19): siRNA sense strand
gcaggagaagacuuugaau

SEQ ID NO: 469667 - RNA, 19 nt, Homo sapiens
  misc_RNA (1)...(19): siRNA sense strand
caaccgagucguggccauu

SEQ ID NO: 469668 - RNA, 19 nt, Homo sapiens
  misc_RNA (1)...(19): siRNA sense strand
ggagaagccgguguacaag

SEQ ID NO: 469669 - RNA, 19 nt, Homo sapiens
  misc_RNA (1)...(19): siRNA sense strand
ucagaacuccaucaaguac

SEQ ID NO: 469670 - RNA, 19 nt, Homo sapiens
  misc_RNA (1)...(19): siRNA sense strand
gaagaucuacagcaaaaca

SEQ ID NO: 469671 - RNA, 19 nt, Homo sapiens
  misc_RNA (1)...(19): siRNA sense strand
gaaggagaagcacgaagac

SEQ ID NO: 469672 - RNA, 19 nt, Homo sapiens
  misc_RNA (1)...(19): siRNA sense strand
ccaggugggagaaggagaa

SEQ ID NO: 469673 - RNA, 19 nt, Homo sapiens
  misc_RNA (1)...(19): siRNA sense strand
ccaacacgugguggaauuu

SEQ ID NO: 469674 - RNA, 19 nt, Homo sapiens
  misc_RNA (1)...(19): siRNA sense strand
cgacaagacuucuaaauaa

SEQ ID NO: 469675 - RNA, 19 nt, Homo sapiens
  misc_RNA (1)...(19): siRNA sense strand
gagaaaagcugaaugauua

SEQ ID NO: 469676 - RNA, 19 nt, Homo sapiens
  misc_RNA (1)...(19): siRNA sense strand
ggauucaacugcagaaaua

SEQ ID NO: 469677 - RNA, 19 nt, Homo sapiens
  misc_RNA (1)...(19): siRNA sense strand
gaauuacgauguugaugua

SEQ ID NO: 469678 - RNA, 19 nt, Homo sapiens
  misc_RNA (1)...(19): siRNA sense strand
ggacgaggaucaucauuug

SEQ ID NO: 469679 - RNA, 19 nt, Homo sapiens
  misc_RNA (1)...(19): siRNA sense strand
ggaaugaaaugaaagugaa

SEQ ID NO: 469680 - RNA, 19 nt, Homo sapiens
  misc_RNA (1)...(19): siRNA sense strand
ggaaugguaugacuucuga

SEQ ID NO: 469681 - RNA, 19 nt, Homo sapiens
  misc_RNA (1)...(19): siRNA sense strand
ugaaaccgaugcuguauuu

SEQ ID NO: 469682 - RNA, 19 nt, Homo sapiens
  misc_RNA (1)...(19): siRNA sense strand
gaaauagacucaucaaagc

SEQ ID NO: 469683 - RNA, 19 nt, Homo sapiens
  misc_RNA (1)...(19): siRNA sense strand
gaaagaaacuugccaucag

SEQ ID NO: 469684 - RNA, 19 nt, Homo sapiens
  misc_RNA (1)...(19): siRNA sense strand
guaccaaguuuaguuguua

SEQ ID NO: 469685 - RNA, 19 nt, Homo sapiens
  misc_RNA (1)...(19): siRNA sense strand
caacagaggauacuagaaa

SEQ ID NO: 469686 - RNA, 19 nt, Homo sapiens
  misc_RNA (1)...(19): siRNA sense strand
gcaagugaauuacgauguu

SEQ ID NO: 469687 - RNA, 19 nt, Homo sapiens
  misc_RNA (1)...(19): siRNA sense strand
ugugaacgcuaaacaaaua

SEQ ID NO: 469688 - RNA, 19 nt, Homo sapiens
  misc_RNA (1)...(19): siRNA sense strand
agacacagcugguuucgaa

SEQ ID NO: 469689 - RNA, 19 nt, Homo sapiens
  misc_RNA (1)...(19): siRNA sense strand
gcgacaagacuucuaaaua

SEQ ID NO: 469690 - RNA, 19 nt, Homo sapiens
  misc_RNA (1)...(19): siRNA sense strand
gauuaaugcugaacuguug

SEQ ID NO: 469691 - RNA, 19 nt, Homo sapiens
  misc_RNA (1)...(19): siRNA sense strand
gaguacagacuuacaauaa

SEQ ID NO: 469692 - RNA, 19 nt, Homo sapiens
  misc_RNA (1)...(19): siRNA sense strand
gagauugaguagucaguuu

SEQ ID NO: 469693 - RNA, 19 nt, Homo sapiens
  misc_RNA (1)...(19): siRNA sense strand
gaaaccagcuacuccuugu

SEQ ID NO: 469694 - RNA, 19 nt, Homo sapiens
  misc_RNA (1)...(19): siRNA sense strand
gaacaaaugagugaaauca

SEQ ID NO: 469695 - RNA, 19 nt, Homo sapiens
  misc_RNA (1)...(19): siRNA sense strand
aaaguuggaugucaguuaa

SEQ ID NO: 469696 - RNA, 19 nt, Homo sapiens
  misc_RNA (1)...(19): siRNA sense strand
agacauggguucaguguga

SEQ ID NO: 469697 - RNA, 19 nt, Homo sapiens
  misc_RNA (1)...(19): siRNA sense strand
cagaagaaccugaagauga

SEQ ID NO: 469698 - RNA, 19 nt, Homo sapiens
  misc_RNA (1)...(19): siRNA sense strand
guacagacuuacaauaaca

SEQ ID NO: 469699 - RNA, 19 nt, Homo sapiens
  misc_RNA (1)...(19): siRNA sense strand
guucagaaauugugagguu

SEQ ID NO: 469700 - RNA, 19 nt, Homo sapiens
  misc_RNA (1)...(19): siRNA sense strand
caacagaguucgauuuuga

SEQ ID NO: 469701 - RNA, 19 nt, Homo sapiens
  misc_RNA (1)...(19): siRNA sense strand
gcaaggugguguucagguu

SEQ ID NO: 469702 - RNA, 19 nt, Homo sapiens
  misc_RNA (1)...(19): siRNA sense strand
ggauuuagaugagauaaca

SEQ ID NO: 469703 - RNA, 19 nt, Homo sapiens
  misc_RNA (1)...(19): siRNA sense strand
gcauguuguuguuccaaua

SEQ ID NO: 469704 - RNA, 19 nt, Homo sapiens
  misc_RNA (1)...(19): siRNA sense strand
guacaucccacuuaugaaa

SEQ ID NO: 469705 - RNA, 19 nt, Homo sapiens
  misc_RNA (1)...(19): siRNA sense strand
agacugaaguaccaaguuu

SEQ ID NO: 469706 - RNA, 19 nt, Homo sapiens
  misc_RNA (1)...(19): siRNA sense strand
cauauaugcuugacauuca

SEQ ID NO: 469707 - RNA, 19 nt, Homo sapiens
  misc_RNA (1)...(19): siRNA sense strand
ugcaguugcugaauuaaua

SEQ ID NO: 469708 - RNA, 19 nt, Homo sapiens
  misc_RNA (1)...(19): siRNA sense strand
uuagacaacuggacaaaug

SEQ ID NO: 469709 - RNA, 19 nt, Homo sapiens
  misc_RNA (1)...(19): siRNA sense strand
cagugcaguugcugaauua

SEQ ID NO: 469710 - RNA, 19 nt, Homo sapiens
  misc_RNA (1)...(19): siRNA sense strand
uggcagaacuugaugcuau

SEQ ID NO: 469711 - RNA, 19 nt, Homo sapiens
  misc_RNA (1)...(19): siRNA sense strand
gaugugaacgcuaaacaaa

SEQ ID NO: 469712 - RNA, 19 nt, Homo sapiens
  misc_RNA (1)...(19): siRNA sense strand
gaaaggauggaccagauug

SEQ ID NO: 469713 - RNA, 19 nt, Homo sapiens
  misc_RNA (1)...(19): siRNA sense strand
gaagcaaagauacaugaaa

SEQ ID NO: 469714 - RNA, 19 nt, Homo sapiens
  misc_RNA (1)...(19): siRNA sense strand
gaccauauaugcuugacau

SEQ ID NO: 469715 - RNA, 19 nt, Homo sapiens
  misc_RNA (1)...(19): siRNA sense strand
ggaaaccaccgauaaaucu

SEQ ID NO: 469716 - RNA, 19 nt, Homo sapiens
  misc_RNA (1)...(19): siRNA sense strand
cgagauagacguaagaaau

SEQ ID NO: 469717 - RNA, 19 nt, Homo sapiens
  misc_RNA (1)...(19): siRNA sense strand
gagauagacguaagaaaug

SEQ ID NO: 469718 - RNA, 19 nt, Homo sapiens
  misc_RNA (1)...(19): siRNA sense strand
caaaugagugaaaucagua

SEQ ID NO: 469719 - RNA, 19 nt, Homo sapiens
  misc_RNA (1)...(19): siRNA sense strand
ggacaacugcuggcuauga

SEQ ID NO: 469720 - RNA, 19 nt, Homo sapiens
  misc_RNA (1)...(19): siRNA sense strand
gagguugaauugcuggaaa

SEQ ID NO: 469721 - RNA, 19 nt, Homo sapiens
  misc_RNA (1)...(19): siRNA sense strand
ucagcaagcuuuggaagaa

SEQ ID NO: 469722 - RNA, 19 nt, Homo sapiens
  misc_RNA (1)...(19): siRNA sense strand
gacagaaagugaagacaca

SEQ ID NO: 469723 - RNA, 19 nt, Homo sapiens
  misc_RNA (1)...(19): siRNA sense strand
ugauguaguugaugagauu

SEQ ID NO: 469724 - RNA, 19 nt, Homo sapiens
  misc_RNA (1)...(19): siRNA sense strand
gaaguaccaaguuuaguug

SEQ ID NO: 469725 - RNA, 19 nt, Homo sapiens
  misc_RNA (1)...(19): siRNA sense strand
gacccacaguucagaaauu

SEQ ID NO: 469726 - RNA, 19 nt, Homo sapiens
  misc_RNA (1)...(19): siRNA sense strand
acuaaugaguacagacuua

SEQ ID NO: 469727 - RNA, 19 nt, Homo sapiens
  misc_RNA (1)...(19): siRNA sense strand
ucacagaaauagacucauc

SEQ ID NO: 469728 - RNA, 19 nt, Homo sapiens
  misc_RNA (1)...(19): siRNA sense strand
gguaaagacgcaaucguuu

SEQ ID NO: 469729 - RNA, 19 nt, Homo sapiens
  misc_RNA (1)...(19): siRNA sense strand
gugaagaacucaaaacuga

SEQ ID NO: 469730 - RNA, 19 nt, Homo sapiens
  misc_RNA (1)...(19): siRNA sense strand
gaucagacauggguucagu

SEQ ID NO: 469731 - RNA, 19 nt, Homo sapiens
  misc_RNA (1)...(19): siRNA sense strand
ugcaguagaucaugauauu

SEQ ID NO: 469732 - RNA, 19 nt, Homo sapiens
  misc_RNA (1)...(19): siRNA sense strand
uguagaagcugaagcaaag

SEQ ID NO: 469733 - RNA, 19 nt, Homo sapiens
  misc_RNA (1)...(19): siRNA sense strand
gacaugaaaucagaacaga

SEQ ID NO: 469734 - RNA, 19 nt, Homo sapiens
  misc_RNA (1)...(19): siRNA sense strand
cauccuacguggacagaaa

SEQ ID NO: 469735 - RNA, 19 nt, Homo sapiens
  misc_RNA (1)...(19): siRNA sense strand
gaaaugaugcagugauucu

SEQ ID NO: 469736 - RNA, 19 nt, Homo sapiens
  misc_RNA (1)...(19): siRNA sense strand
aagaaaugaugcagugauu

SEQ ID NO: 469737 - RNA, 19 nt, Homo sapiens
  misc_RNA (1)...(19): siRNA sense strand
agaagaaacuguugaagac

SEQ ID NO: 469738 - RNA, 19 nt, Homo sapiens
  misc_RNA (1)...(19): siRNA sense strand
uggagugguuggaauuaua

SEQ ID NO: 469739 - RNA, 19 nt, Homo sapiens
  misc_RNA (1)...(19): siRNA sense strand
accgacagaugauuaauuu

SEQ ID NO: 469740 - RNA, 19 nt, Homo sapiens
  misc_RNA (1)...(19): siRNA sense strand
caacagacggcaacagaug

SEQ ID NO: 469741 - RNA, 19 nt, Homo sapiens
  misc_RNA (1)...(19): siRNA sense strand
ucacaaauccguucacagu

SEQ ID NO: 469742 - RNA, 19 nt, Homo sapiens
  misc_RNA (1)...(19): siRNA sense strand
aaagugaaauggaugagau

SEQ ID NO: 469743 - RNA, 19 nt, Homo sapiens
  misc_RNA (1)...(19): siRNA sense strand
uaaaggugaugaugaugau

SEQ ID NO: 469744 - RNA, 19 nt, Homo sapiens
  misc_RNA (1)...(19): siRNA sense strand
gguaugacuucugauaaau

SEQ ID NO: 469745 - RNA, 19 nt, Homo sapiens
  misc_RNA (1)...(19): siRNA sense strand
acaaauccguucacagugu

SEQ ID NO: 469746 - RNA, 19 nt, Homo sapiens
  misc_RNA (1)...(19): siRNA sense strand
ugucauauguuuacugauc

SEQ ID NO: 469747 - RNA, 19 nt, Homo sapiens
  misc_RNA (1)...(19): siRNA sense strand
gaaggaacaaauucuuaug

SEQ ID NO: 469748 - RNA, 19 nt, Homo sapiens
  misc_RNA (1)...(19): siRNA sense strand
cgacagaugauuaauuuag

SEQ ID NO: 469749 - RNA, 19 nt, Homo sapiens
  misc_RNA (1)...(19): siRNA sense strand
caacaagcaccgacagaug

SEQ ID NO: 469750 - RNA, 19 nt, Homo sapiens
  misc_RNA (1)...(19): siRNA sense strand
acaaaugagugaaaucagu

SEQ ID NO: 469751 - RNA, 19 nt, Homo sapiens
  misc_RNA (1)...(19): siRNA sense strand
agaagaaccugaagaugag

SEQ ID NO: 469752 - RNA, 19 nt, Homo sapiens
  misc_RNA (1)...(19): siRNA sense strand
agaaauagacucaucaaag

SEQ ID NO: 469753 - RNA, 19 nt, Homo sapiens
  misc_RNA (1)...(19): siRNA sense strand
gaauggucaugucccaguu

SEQ ID NO: 469754 - RNA, 19 nt, Homo sapiens
  misc_RNA (1)...(19): siRNA sense strand
gcuaaacaaauauggauug

SEQ ID NO: 469755 - RNA, 19 nt, Homo sapiens
  misc_RNA (1)...(19): siRNA sense strand
gaagcguccugaucagaca

SEQ ID NO: 469756 - RNA, 19 nt, Homo sapiens
  misc_RNA (1)...(19): siRNA sense strand
ccucuaaauuugccaguug

SEQ ID NO: 469757 - RNA, 19 nt, Homo sapiens
  misc_RNA (1)...(19): siRNA sense strand
gauuucgacuauacuaaug

SEQ ID NO: 469758 - RNA, 19 nt, Homo sapiens
  misc_RNA (1)...(19): siRNA sense strand
ggaaaggauggaccagauu

SEQ ID NO: 469759 - RNA, 19 nt, Homo sapiens
  misc_RNA (1)...(19): siRNA sense strand
aaagaaacuugccaucagu

SEQ ID NO: 469760 - RNA, 19 nt, Homo sapiens
  misc_RNA (1)...(19): siRNA sense strand
gcagaacuugaugcuauua

SEQ ID NO: 469761 - RNA, 19 nt, Homo sapiens
  misc_RNA (1)...(19): siRNA sense strand
uaggacaacugcuggcuau

SEQ ID NO: 469762 - RNA, 19 nt, Homo sapiens
  misc_RNA (1)...(19): siRNA sense strand
ugaaguaccaaguuuaguu

SEQ ID NO: 469763 - RNA, 19 nt, Homo sapiens
  misc_RNA (1)...(19): siRNA sense strand
ugguaugacuucugauaaa

SEQ ID NO: 469764 - RNA, 19 nt, Homo sapiens
  misc_RNA (1)...(19): siRNA sense strand
gaucaucauuuggaaucuu

SEQ ID NO: 469765 - RNA, 19 nt, Homo sapiens
  misc_RNA (1)...(19): siRNA sense strand
gggacgaggaucaucauuu

SEQ ID NO: 469766 - RNA, 19 nt, Homo sapiens
  misc_RNA (1)...(19): siRNA sense strand
ccaggaaaccaccgauaaa

SEQ ID NO: 469767 - RNA, 19 nt, Homo sapiens
  misc_RNA (1)...(19): siRNA sense strand
caagugaauuacgauguug

SEQ ID NO: 469768 - RNA, 19 nt, Homo sapiens
  misc_RNA (1)...(19): siRNA sense strand
gauugugccugaucuugau

SEQ ID NO: 469769 - RNA, 19 nt, Homo sapiens
  misc_RNA (1)...(19): siRNA sense strand
gacaacugcuggcuaugau

SEQ ID NO: 469770 - RNA, 19 nt, Homo sapiens
  misc_RNA (1)...(19): siRNA sense strand
gauaaaugaccauauaugc

SEQ ID NO: 469771 - RNA, 19 nt, Homo sapiens
  misc_RNA (1)...(19): siRNA sense strand
gacaaaugcaguauugaga

SEQ ID NO: 469772 - RNA, 19 nt, Homo sapiens
  misc_RNA (1)...(19): siRNA sense strand
ggacaaaugcaguauugag

SEQ ID NO: 469773 - RNA, 19 nt, Homo sapiens
  misc_RNA (1)...(19): siRNA sense strand
gcagccaguguuccaauaa

SEQ ID NO: 469774 - RNA, 19 nt, Homo sapiens
  misc_RNA (1)...(19): siRNA sense strand
gaaagaaggugugauugga

SEQ ID NO: 469775 - RNA, 19 nt, Homo sapiens
  misc_RNA (1)...(19): siRNA sense strand
gcacacaccuccuacuaca

SEQ ID NO: 469776 - RNA, 19 nt, Homo sapiens
  misc_RNA (1)...(19): siRNA sense strand
gcagaaagaaggugugauu

SEQ ID NO: 469777 - RNA, 19 nt, Homo sapiens
  misc_RNA (1)...(19): siRNA sense strand
gagcagagcaucagcaaga

SEQ ID NO: 469778 - RNA, 19 nt, Homo sapiens
  misc_RNA (1)...(19): siRNA sense strand
gcaagauccucacccaugu

SEQ ID NO: 469779 - RNA, 19 nt, Homo sapiens
  misc_RNA (1)...(19): siRNA sense strand
ccuaugggcugcagacauu

SEQ ID NO: 469780 - RNA, 19 nt, Homo sapiens
  misc_RNA (1)...(19): siRNA sense strand
ccacagccguuaccuuaga

SEQ ID NO: 469781 - RNA, 19 nt, Homo sapiens
  misc_RNA (1)...(19): siRNA sense strand
gcaucgggcuggcagacua

SEQ ID NO: 469782 - RNA, 19 nt, Homo sapiens
  misc_RNA (1)...(19): siRNA sense strand
ggaaauccagcaacaugaa

SEQ ID NO: 469783 - RNA, 19 nt, Homo sapiens
  misc_RNA (1)...(19): siRNA sense strand
gaggaaauccagcaacaug

SEQ ID NO: 469784 - RNA, 19 nt, Homo sapiens
  misc_RNA (1)...(19): siRNA sense strand
agucagagcacccuguuua

SEQ ID NO: 469785 - RNA, 19 nt, Homo sapiens
  misc_RNA (1)...(19): siRNA sense strand
ugaagacguuccucugguu

SEQ ID NO: 469786 - RNA, 19 nt, Homo sapiens
  misc_RNA (1)...(19): siRNA sense strand
agagcacccuguuuaaaga

SEQ ID NO: 469787 - RNA, 19 nt, Homo sapiens
  misc_RNA (1)...(19): siRNA sense strand
ccaaggacuucgccaucuu

SEQ ID NO: 469788 - RNA, 19 nt, Homo sapiens
  misc_RNA (1)...(19): siRNA sense strand
gccugacgcugcagaaaga

SEQ ID NO: 469789 - RNA, 19 nt, Homo sapiens
  misc_RNA (1)...(19): siRNA sense strand
gggacgacguggaaucuca

SEQ ID NO: 469790 - RNA, 19 nt, Homo sapiens
  misc_RNA (1)...(19): siRNA sense strand
ugacguauggugcuuggua

SEQ ID NO: 469791 - RNA, 19 nt, Homo sapiens
  misc_RNA (1)...(19): siRNA sense strand
agaacugucugcccugaga

SEQ ID NO: 469792 - RNA, 19 nt, Homo sapiens
  misc_RNA (1)...(19): siRNA sense strand
caaggacuucgccaucuuu

SEQ ID NO: 469793 - RNA, 19 nt, Homo sapiens
  misc_RNA (1)...(19): siRNA sense strand
gcgagccuauucagacguu

SEQ ID NO: 469794 - RNA, 19 nt, Homo sapiens
  misc_RNA (1)...(19): siRNA sense strand
gagcugcggauccugacua

SEQ ID NO: 469795 - RNA, 19 nt, Homo sapiens
  misc_RNA (1)...(19): siRNA sense strand
ugcgagagcuggagagcaa

SEQ ID NO: 469796 - RNA, 19 nt, Homo sapiens
  misc_RNA (1)...(19): siRNA sense strand
aagaggaaauccagcaaca

SEQ ID NO: 469797 - RNA, 19 nt, Homo sapiens
  misc_RNA (1)...(19): siRNA sense strand
guauggugcuugguauuuc

SEQ ID NO: 469798 - RNA, 19 nt, Homo sapiens
  misc_RNA (1)...(19): siRNA sense strand
gacguauggugcuugguau

SEQ ID NO: 469799 - RNA, 19 nt, Homo sapiens
  misc_RNA (1)...(19): siRNA sense strand
gaaggugugauuggaguga

SEQ ID NO: 469800 - RNA, 19 nt, Homo sapiens
  misc_RNA (1)...(19): siRNA sense strand
gcaaggccaccgaggacuu

SEQ ID NO: 469801 - RNA, 19 nt, Homo sapiens
  misc_RNA (1)...(19): siRNA sense strand
gagacucaucgccacauuu

SEQ ID NO: 469802 - RNA, 19 nt, Homo sapiens
  misc_RNA (1)...(19): siRNA sense strand
ucagagcacccuguuuaaa

SEQ ID NO: 469803 - RNA, 19 nt, Homo sapiens
  misc_RNA (1)...(19): siRNA sense strand
gagagcagagcaucagcaa

SEQ ID NO: 469804 - RNA, 19 nt, Homo sapiens
  misc_RNA (1)...(19): siRNA sense strand
cagagcacccuguuuaaag

SEQ ID NO: 469805 - RNA, 19 nt, Homo sapiens
  misc_RNA (1)...(19): siRNA sense strand
cgacguggaaucucaguuc

SEQ ID NO: 469806 - RNA, 19 nt, Homo sapiens
  misc_RNA (1)...(19): siRNA sense strand
ucaggaccuugaagaggaa

SEQ ID NO: 469807 - RNA, 19 nt, Homo sapiens
  misc_RNA (1)...(19): siRNA sense strand
gaaauccagcaacaugaag

SEQ ID NO: 469808 - RNA, 19 nt, Homo sapiens
  misc_RNA (1)...(19): siRNA sense strand
gauguggaccagcagaguu

SEQ ID NO: 469809 - RNA, 19 nt, Homo sapiens
  misc_RNA (1)...(19): siRNA sense strand
ggagucagagcacccuguu

SEQ ID NO: 469810 - RNA, 19 nt, Homo sapiens
  misc_RNA (1)...(19): siRNA sense strand
ggaagcucuugcugcugaa

SEQ ID NO: 469811 - RNA, 19 nt, Homo sapiens
  misc_RNA (1)...(19): siRNA sense strand
auucagacguuucacuuuc

SEQ ID NO: 469812 - RNA, 19 nt, Homo sapiens
  misc_RNA (1)...(19): siRNA sense strand
ccgugaagcugcccugaag

SEQ ID NO: 469813 - RNA, 19 nt, Homo sapiens
  misc_RNA (1)...(19): siRNA sense strand
agacauuccacccugcuuu

SEQ ID NO: 469814 - RNA, 19 nt, Homo sapiens
  misc_RNA (1)...(19): siRNA sense strand
gacauuccacccugcuuug

SEQ ID NO: 469815 - RNA, 19 nt, Homo sapiens
  misc_RNA (1)...(19): siRNA sense strand
cguauggugcuugguauuu

SEQ ID NO: 469816 - RNA, 19 nt, Homo sapiens
  misc_RNA (1)...(19): siRNA sense strand
cgaguacaccugcaucuac

SEQ ID NO: 469817 - RNA, 19 nt, Homo sapiens
  misc_RNA (1)...(19): siRNA sense strand
agaaagaaggugugauugg

SEQ ID NO: 469818 - RNA, 19 nt, Homo sapiens
  misc_RNA (1)...(19): siRNA sense strand
uggcggcucuggcacugaa

SEQ ID NO: 469819 - RNA, 19 nt, Homo sapiens
  misc_RNA (1)...(19): siRNA sense strand
agagacucaucgccacauu

SEQ ID NO: 469820 - RNA, 19 nt, Homo sapiens
  misc_RNA (1)...(19): siRNA sense strand
agacucaucgccacauuuc

SEQ ID NO: 469821 - RNA, 19 nt, Homo sapiens
  misc_RNA (1)...(19): siRNA sense strand
gucagagcacccuguuuaa

SEQ ID NO: 469822 - RNA, 19 nt, Homo sapiens
  misc_RNA (1)...(19): siRNA sense strand
ucacccauguggcagagau

SEQ ID NO: 469823 - RNA, 19 nt, Homo sapiens
  misc_RNA (1)...(19): siRNA sense strand
agagcucgguggcggaaga

SEQ ID NO: 469824 - RNA, 19 nt, Homo sapiens
  misc_RNA (1)...(19): siRNA sense strand
gugaagcugcccugaagga

SEQ ID NO: 469825 - RNA, 19 nt, Homo sapiens
  misc_RNA (1)...(19): siRNA sense strand
ucagaguggcaaagcauga

SEQ ID NO: 469826 - RNA, 19 nt, Homo sapiens
  misc_RNA (1)...(19): siRNA sense strand
gcaucuaccgcuucagagu

SEQ ID NO: 469827 - RNA, 19 nt, Homo sapiens
  misc_RNA (1)...(19): siRNA sense strand
acacaccuccuacuacagu

SEQ ID NO: 469828 - RNA, 19 nt, Homo sapiens
  misc_RNA (1)...(19): siRNA sense strand
cagaaagaaggugugauug

SEQ ID NO: 469829 - RNA, 19 nt, Homo sapiens
  misc_RNA (1)...(19): siRNA sense strand
gcagagaugcagggcaagu

SEQ ID NO: 469830 - RNA, 19 nt, Homo sapiens
  misc_RNA (1)...(19): siRNA sense strand
gagccugacgcugcagaaa

SEQ ID NO: 469831 - RNA, 19 nt, Homo sapiens
  misc_RNA (1)...(19): siRNA sense strand
ucagagagaggagaugcaa

SEQ ID NO: 469832 - RNA, 19 nt, Homo sapiens
  misc_RNA (1)...(19): siRNA sense strand
caucuuuggguuugacgaa

SEQ ID NO: 469833 - RNA, 19 nt, Homo sapiens
  misc_RNA (1)...(19): siRNA sense strand
ggacggcgagccuauucag

SEQ ID NO: 469834 - RNA, 19 nt, Homo sapiens
  misc_RNA (1)...(19): siRNA sense strand
ucagaaagaucaagccaaa

SEQ ID NO: 469835 - RNA, 19 nt, Homo sapiens
  misc_RNA (1)...(19): siRNA sense strand
ugaauuugauccucuguga

SEQ ID NO: 469836 - RNA, 19 nt, Homo sapiens
  misc_RNA (1)...(19): siRNA sense strand
ugagauguauccugcaaga

SEQ ID NO: 469837 - RNA, 19 nt, Homo sapiens
  misc_RNA (1)...(19): siRNA sense strand
gaaagaucaagccaaagaa

SEQ ID NO: 469838 - RNA, 19 nt, Homo sapiens
  misc_RNA (1)...(19): siRNA sense strand
gacuauagaaugagaugua

SEQ ID NO: 469839 - RNA, 19 nt, Homo sapiens
  misc_RNA (1)...(19): siRNA sense strand
ugacaagcauaugaauuug

SEQ ID NO: 469840 - RNA, 19 nt, Homo sapiens
  misc_RNA (1)...(19): siRNA sense strand
gcagcacauugacuauaga

SEQ ID NO: 469841 - RNA, 19 nt, Homo sapiens
  misc_RNA (1)...(19): siRNA sense strand
gcaaccagagcgugaagaa

SEQ ID NO: 469842 - RNA, 19 nt, Homo sapiens
  misc_RNA (1)...(19): siRNA sense strand
agaaagaucaagccaaaga

SEQ ID NO: 469843 - RNA, 19 nt, Homo sapiens
  misc_RNA (1)...(19): siRNA sense strand
ugugaugaguucagaaaga

SEQ ID NO: 469844 - RNA, 19 nt, Homo sapiens
  misc_RNA (1)...(19): siRNA sense strand
gugaugaguucagaaagau

SEQ ID NO: 469845 - RNA, 19 nt, Homo sapiens
  misc_RNA (1)...(19): siRNA sense strand
caaagauacuggcauugcu

SEQ ID NO: 469846 - RNA, 19 nt, Homo sapiens
  misc_RNA (1)...(19): siRNA sense strand
gacaagcauaugaauuuga

SEQ ID NO: 469847 - RNA, 19 nt, Homo sapiens
  misc_RNA (1)...(19): siRNA sense strand
aaucuucauuggcaccuuu

SEQ ID NO: 469848 - RNA, 19 nt, Homo sapiens
  misc_RNA (1)...(19): siRNA sense strand
gggaagaggcacuguagca

SEQ ID NO: 469849 - RNA, 19 nt, Homo sapiens
  misc_RNA (1)...(19): siRNA sense strand
gggagaacuugguauccau

SEQ ID NO: 469850 - RNA, 19 nt, Homo sapiens
  misc_RNA (1)...(19): siRNA sense strand
gaugaguucagaaagauca

SEQ ID NO: 469851 - RNA, 19 nt, Homo sapiens
  misc_RNA (1)...(19): siRNA sense strand
gauccucugugauugugau

SEQ ID NO: 469852 - RNA, 19 nt, Homo sapiens
  misc_RNA (1)...(19): siRNA sense strand
gaacuugguauccaugacu

SEQ ID NO: 469853 - RNA, 19 nt, Homo sapiens
  misc_RNA (1)...(19): siRNA sense strand
aaugagauguauccugcaa

SEQ ID NO: 469854 - RNA, 19 nt, Homo sapiens
  misc_RNA (1)...(19): siRNA sense strand
cccaugggcccaccaauug

SEQ ID NO: 469855 - RNA, 19 nt, Homo sapiens
  misc_RNA (1)...(19): siRNA sense strand
ggaccaucccagcagguaa

SEQ ID NO: 469856 - RNA, 19 nt, Homo sapiens
  misc_RNA (1)...(19): siRNA sense strand
aauuugauccucugugauu

SEQ ID NO: 469857 - RNA, 19 nt, Homo sapiens
  misc_RNA (1)...(19): siRNA sense strand
gccaaagaaugcgaagcaa

SEQ ID NO: 469858 - RNA, 19 nt, Homo sapiens
  misc_RNA (1)...(19): siRNA sense strand
aggaaugcguccaccaaga

SEQ ID NO: 469859 - RNA, 19 nt, Homo sapiens
  misc_RNA (1)...(19): siRNA sense strand
gauggccgaaucuucauug

SEQ ID NO: 469860 - RNA, 19 nt, Homo sapiens
  misc_RNA (1)...(19): siRNA sense strand
gagaacuugguauccauga

SEQ ID NO: 469861 - RNA, 19 nt, Homo sapiens
  misc_RNA (1)...(19): siRNA sense strand
gaagcaaccagagcgugaa

SEQ ID NO: 469862 - RNA, 19 nt, Homo sapiens
  misc_RNA (1)...(19): siRNA sense strand
agauguauccugcaagaug

SEQ ID NO: 469863 - RNA, 19 nt, Homo sapiens
  misc_RNA (1)...(19): siRNA sense strand
aaagaucaagccaaagaau

SEQ ID NO: 469864 - RNA, 19 nt, Homo sapiens
  misc_RNA (1)...(19): siRNA sense strand
ggaaugcguccaccaagac

SEQ ID NO: 469865 - RNA, 19 nt, Homo sapiens
  misc_RNA (1)...(19): siRNA sense strand
uggcaagaguagcaagaug

SEQ ID NO: 469866 - RNA, 19 nt, Homo sapiens
  misc_RNA (1)...(19): siRNA sense strand
caaccagagcgugaagaaa

SEQ ID NO: 469867 - RNA, 19 nt, Homo sapiens
  misc_RNA (1)...(19): siRNA sense strand
gcucgagggacgccaauag

SEQ ID NO: 469868 - RNA, 19 nt, Homo sapiens
  misc_RNA (1)...(19): siRNA sense strand
gaccaucccagcagguaau

SEQ ID NO: 469869 - RNA, 19 nt, Homo sapiens
  misc_RNA (1)...(19): siRNA sense strand
ugcagcacauugacuauag

SEQ ID NO: 469870 - RNA, 19 nt, Homo sapiens
  misc_RNA (1)...(19): siRNA sense strand
ccaggaaugcguccaccaa

SEQ ID NO: 469871 - RNA, 19 nt, Homo sapiens
  misc_RNA (1)...(19): siRNA sense strand
ccugcaagauggccgaauc

SEQ ID NO: 469872 - RNA, 19 nt, Homo sapiens
  misc_RNA (1)...(19): siRNA sense strand
ggcagcugguagaggagua

SEQ ID NO: 469873 - RNA, 19 nt, Homo sapiens
  misc_RNA (1)...(19): siRNA sense strand
ccaaagauacuggcauugc

SEQ ID NO: 469874 - RNA, 19 nt, Homo sapiens
  misc_RNA (1)...(19): siRNA sense strand
gaauuugauccucugugau

SEQ ID NO: 469875 - RNA, 19 nt, Homo sapiens
  misc_RNA (1)...(19): siRNA sense strand
ugauugugaugaguucaga

SEQ ID NO: 469876 - RNA, 19 nt, Homo sapiens
  misc_RNA (1)...(19): siRNA sense strand
cagggaagaggcacuguag

SEQ ID NO: 469877 - RNA, 19 nt, Homo sapiens
  misc_RNA (1)...(19): siRNA sense strand
gaaucuucauuggcaccuu

SEQ ID NO: 469878 - RNA, 19 nt, Homo sapiens
  misc_RNA (1)...(19): siRNA sense strand
cagcacauugacuauagaa

SEQ ID NO: 469879 - RNA, 19 nt, Homo sapiens
  misc_RNA (1)...(19): siRNA sense strand
aagaucaagccaaagaaug

SEQ ID NO: 469880 - RNA, 19 nt, Homo sapiens
  misc_RNA (1)...(19): siRNA sense strand
ucagaaagaucaagccaaa

SEQ ID NO: 469881 - RNA, 19 nt, Homo sapiens
  misc_RNA (1)...(19): siRNA sense strand
ugaauuugauccucuguga

SEQ ID NO: 469882 - RNA, 19 nt, Homo sapiens
  misc_RNA (1)...(19): siRNA sense strand
ugagauguauccugcaaga

SEQ ID NO: 469883 - RNA, 19 nt, Homo sapiens
  misc_RNA (1)...(19): siRNA sense strand
gaaagaucaagccaaagaa

SEQ ID NO: 469884 - RNA, 19 nt, Homo sapiens
  misc_RNA (1)...(19): siRNA sense strand
gacuauagaaugagaugua

SEQ ID NO: 469885 - RNA, 19 nt, Homo sapiens
  misc_RNA (1)...(19): siRNA sense strand
ugacaagcauaugaauuug

SEQ ID NO: 469886 - RNA, 19 nt, Homo sapiens
  misc_RNA (1)...(19): siRNA sense strand
gcagcacauugacuauaga

SEQ ID NO: 469887 - RNA, 19 nt, Homo sapiens
  misc_RNA (1)...(19): siRNA sense strand
gcaaccagagcgugaagaa

SEQ ID NO: 469888 - RNA, 19 nt, Homo sapiens
  misc_RNA (1)...(19): siRNA sense strand
agaaagaucaagccaaaga

SEQ ID NO: 469889 - RNA, 19 nt, Homo sapiens
  misc_RNA (1)...(19): siRNA sense strand
ugugaugaguucagaaaga

SEQ ID NO: 469890 - RNA, 19 nt, Homo sapiens
  misc_RNA (1)...(19): siRNA sense strand
gugaugaguucagaaagau

SEQ ID NO: 469891 - RNA, 19 nt, Homo sapiens
  misc_RNA (1)...(19): siRNA sense strand
caaagauacuggcauugcu

SEQ ID NO: 469892 - RNA, 19 nt, Homo sapiens
  misc_RNA (1)...(19): siRNA sense strand
gacaagcauaugaauuuga

SEQ ID NO: 469893 - RNA, 19 nt, Homo sapiens
  misc_RNA (1)...(19): siRNA sense strand
aaucuucauuggcaccuuu

SEQ ID NO: 469894 - RNA, 19 nt, Homo sapiens
  misc_RNA (1)...(19): siRNA sense strand
gggaagaggcacuguagca

SEQ ID NO: 469895 - RNA, 19 nt, Homo sapiens
  misc_RNA (1)...(19): siRNA sense strand
gggagaacuugguauccau

SEQ ID NO: 469896 - RNA, 19 nt, Homo sapiens
  misc_RNA (1)...(19): siRNA sense strand
gaugaguucagaaagauca

SEQ ID NO: 469897 - RNA, 19 nt, Homo sapiens
  misc_RNA (1)...(19): siRNA sense strand
gauccucugugauugugau

SEQ ID NO: 469898 - RNA, 19 nt, Homo sapiens
  misc_RNA (1)...(19): siRNA sense strand
gaacuugguauccaugacu

SEQ ID NO: 469899 - RNA, 19 nt, Homo sapiens
  misc_RNA (1)...(19): siRNA sense strand
aaugagauguauccugcaa

SEQ ID NO: 469900 - RNA, 19 nt, Homo sapiens
  misc_RNA (1)...(19): siRNA sense strand
cccaugggcccaccaauug

SEQ ID NO: 469901 - RNA, 19 nt, Homo sapiens
  misc_RNA (1)...(19): siRNA sense strand
ggaccaucccagcagguaa

SEQ ID NO: 469902 - RNA, 19 nt, Homo sapiens
  misc_RNA (1)...(19): siRNA sense strand
aauuugauccucugugauu

SEQ ID NO: 469903 - RNA, 19 nt, Homo sapiens
  misc_RNA (1)...(19): siRNA sense strand
gccaaagaaugcgaagcaa

SEQ ID NO: 469904 - RNA, 19 nt, Homo sapiens
  misc_RNA (1)...(19): siRNA sense strand
aggaaugcguccaccaaga

SEQ ID NO: 469905 - RNA, 19 nt, Homo sapiens
  misc_RNA (1)...(19): siRNA sense strand
gauggccgaaucuucauug

SEQ ID NO: 469906 - RNA, 19 nt, Homo sapiens
  misc_RNA (1)...(19): siRNA sense strand
gagaacuugguauccauga

SEQ ID NO: 469907 - RNA, 19 nt, Homo sapiens
  misc_RNA (1)...(19): siRNA sense strand
gaagcaaccagagcgugaa

SEQ ID NO: 469908 - RNA, 19 nt, Homo sapiens
  misc_RNA (1)...(19): siRNA sense strand
agauguauccugcaagaug

SEQ ID NO: 469909 - RNA, 19 nt, Homo sapiens
  misc_RNA (1)...(19): siRNA sense strand
aaagaucaagccaaagaau

SEQ ID NO: 469910 - RNA, 19 nt, Homo sapiens
  misc_RNA (1)...(19): siRNA sense strand
ggaaugcguccaccaagac

SEQ ID NO: 469911 - RNA, 19 nt, Homo sapiens
  misc_RNA (1)...(19): siRNA sense strand
uggcaagaguagcaagaug

SEQ ID NO: 469912 - RNA, 19 nt, Homo sapiens
  misc_RNA (1)...(19): siRNA sense strand
caaccagagcgugaagaaa

SEQ ID NO: 469913 - RNA, 19 nt, Homo sapiens
  misc_RNA (1)...(19): siRNA sense strand
gcucgagggacgccaauag

SEQ ID NO: 469914 - RNA, 19 nt, Homo sapiens
  misc_RNA (1)...(19): siRNA sense strand
gaccaucccagcagguaau

SEQ ID NO: 469915 - RNA, 19 nt, Homo sapiens
  misc_RNA (1)...(19): siRNA sense strand
ugcagcacauugacuauag

SEQ ID NO: 469916 - RNA, 19 nt, Homo sapiens
  misc_RNA (1)...(19): siRNA sense strand
ccaggaaugcguccaccaa

SEQ ID NO: 469917 - RNA, 19 nt, Homo sapiens
  misc_RNA (1)...(19): siRNA sense strand
ccugcaagauggccgaauc

SEQ ID NO: 469918 - RNA, 19 nt, Homo sapiens
  misc_RNA (1)...(19): siRNA sense strand
ggcagcugguagaggagua

SEQ ID NO: 469919 - RNA, 19 nt, Homo sapiens
  misc_RNA (1)...(19): siRNA sense strand
ccaaagauacuggcauugc

SEQ ID NO: 469920 - RNA, 19 nt, Homo sapiens
  misc_RNA (1)...(19): siRNA sense strand
gaauuugauccucugugau

SEQ ID NO: 469921 - RNA, 19 nt, Homo sapiens
  misc_RNA (1)...(19): siRNA sense strand
ugauugugaugaguucaga

SEQ ID NO: 469922 - RNA, 19 nt, Homo sapiens
  misc_RNA (1)...(19): siRNA sense strand
cagggaagaggcacuguag

SEQ ID NO: 469923 - RNA, 19 nt, Homo sapiens
  misc_RNA (1)...(19): siRNA sense strand
gaaucuucauuggcaccuu

SEQ ID NO: 469924 - RNA, 19 nt, Homo sapiens
  misc_RNA (1)...(19): siRNA sense strand
cagcacauugacuauagaa

SEQ ID NO: 469925 - RNA, 19 nt, Homo sapiens
  misc_RNA (1)...(19): siRNA sense strand
aagaucaagccaaagaaug

SEQ ID NO: 469926 - RNA, 19 nt, Homo sapiens
  misc_RNA (1)...(19): siRNA sense strand
ucagaaagaucaagccaaa

SEQ ID NO: 469927 - RNA, 19 nt, Homo sapiens
  misc_RNA (1)...(19): siRNA sense strand
ugaauuugauccucuguga

SEQ ID NO: 469928 - RNA, 19 nt, Homo sapiens
  misc_RNA (1)...(19): siRNA sense strand
ugagauguauccugcaaga

SEQ ID NO: 469929 - RNA, 19 nt, Homo sapiens
  misc_RNA (1)...(19): siRNA sense strand
gaaagaucaagccaaagaa

SEQ ID NO: 469930 - RNA, 19 nt, Homo sapiens
  misc_RNA (1)...(19): siRNA sense strand
gacuauagaaugagaugua

SEQ ID NO: 469931 - RNA, 19 nt, Homo sapiens
  misc_RNA (1)...(19): siRNA sense strand
ugacaagcauaugaauuug

SEQ ID NO: 469932 - RNA, 19 nt, Homo sapiens
  misc_RNA (1)...(19): siRNA sense strand
gcagcacauugacuauaga

SEQ ID NO: 469933 - RNA, 19 nt, Homo sapiens
  misc_RNA (1)...(19): siRNA sense strand
gcaaccagagcgugaagaa

SEQ ID NO: 469934 - RNA, 19 nt, Homo sapiens
  misc_RNA (1)...(19): siRNA sense strand
agaaagaucaagccaaaga

SEQ ID NO: 469935 - RNA, 19 nt, Homo sapiens
  misc_RNA (1)...(19): siRNA sense strand
ugugaugaguucagaaaga

SEQ ID NO: 469936 - RNA, 19 nt, Homo sapiens
  misc_RNA (1)...(19): siRNA sense strand
gugaugaguucagaaagau

SEQ ID NO: 469937 - RNA, 19 nt, Homo sapiens
  misc_RNA (1)...(19): siRNA sense strand
caaagauacuggcauugcu

SEQ ID NO: 469938 - RNA, 19 nt, Homo sapiens
  misc_RNA (1)...(19): siRNA sense strand
gacaagcauaugaauuuga

SEQ ID NO: 469939 - RNA, 19 nt, Homo sapiens
  misc_RNA (1)...(19): siRNA sense strand
aaucuucauuggcaccuuu

SEQ ID NO: 469940 - RNA, 19 nt, Homo sapiens
  misc_RNA (1)...(19): siRNA sense strand
gggaagaggcacuguagca

SEQ ID NO: 469941 - RNA, 19 nt, Homo sapiens
  misc_RNA (1)...(19): siRNA sense strand
gggagaacuugguauccau

SEQ ID NO: 469942 - RNA, 19 nt, Homo sapiens
  misc_RNA (1)...(19): siRNA sense strand
gaugaguucagaaagauca

SEQ ID NO: 469943 - RNA, 19 nt, Homo sapiens
  misc_RNA (1)...(19): siRNA sense strand
gauccucugugauugugau

SEQ ID NO: 469944 - RNA, 19 nt, Homo sapiens
  misc_RNA (1)...(19): siRNA sense strand
gaacuugguauccaugacu

SEQ ID NO: 469945 - RNA, 19 nt, Homo sapiens
  misc_RNA (1)...(19): siRNA sense strand
aaugagauguauccugcaa

SEQ ID NO: 469946 - RNA, 19 nt, Homo sapiens
  misc_RNA (1)...(19): siRNA sense strand
cccaugggcccaccaauug

SEQ ID NO: 469947 - RNA, 19 nt, Homo sapiens
  misc_RNA (1)...(19): siRNA sense strand
ggaccaucccagcagguaa

SEQ ID NO: 469948 - RNA, 19 nt, Homo sapiens
  misc_RNA (1)...(19): siRNA sense strand
aauuugauccucugugauu

SEQ ID NO: 469949 - RNA, 19 nt, Homo sapiens
  misc_RNA (1)...(19): siRNA sense strand
gccaaagaaugcgaagcaa

SEQ ID NO: 469950 - RNA, 19 nt, Homo sapiens
  misc_RNA (1)...(19): siRNA sense strand
aggaaugcguccaccaaga

SEQ ID NO: 469951 - RNA, 19 nt, Homo sapiens
  misc_RNA (1)...(19): siRNA sense strand
gauggccgaaucuucauug

SEQ ID NO: 469952 - RNA, 19 nt, Homo sapiens
  misc_RNA (1)...(19): siRNA sense strand
gagaacuugguauccauga

SEQ ID NO: 469953 - RNA, 19 nt, Homo sapiens
  misc_RNA (1)...(19): siRNA sense strand
gaagcaaccagagcgugaa

SEQ ID NO: 469954 - RNA, 19 nt, Homo sapiens
  misc_RNA (1)...(19): siRNA sense strand
agauguauccugcaagaug

SEQ ID NO: 469955 - RNA, 19 nt, Homo sapiens
  misc_RNA (1)...(19): siRNA sense strand
aaagaucaagccaaagaau

SEQ ID NO: 469956 - RNA, 19 nt, Homo sapiens
  misc_RNA (1)...(19): siRNA sense strand
ggaaugcguccaccaagac

SEQ ID NO: 469957 - RNA, 19 nt, Homo sapiens
  misc_RNA (1)...(19): siRNA sense strand
uggcaagaguagcaagaug

SEQ ID NO: 469958 - RNA, 19 nt, Homo sapiens
  misc_RNA (1)...(19): siRNA sense strand
caaccagagcgugaagaaa

SEQ ID NO: 469959 - RNA, 19 nt, Homo sapiens
  misc_RNA (1)...(19): siRNA sense strand
gcucgagggacgccaauag

SEQ ID NO: 469960 - RNA, 19 nt, Homo sapiens
  misc_RNA (1)...(19): siRNA sense strand
gaccaucccagcagguaau

SEQ ID NO: 469961 - RNA, 19 nt, Homo sapiens
  misc_RNA (1)...(19): siRNA sense strand
ugcagcacauugacuauag

SEQ ID NO: 469962 - RNA, 19 nt, Homo sapiens
  misc_RNA (1)...(19): siRNA sense strand
ccaggaaugcguccaccaa

SEQ ID NO: 469963 - RNA, 19 nt, Homo sapiens
  misc_RNA (1)...(19): siRNA sense strand
ccugcaagauggccgaauc

SEQ ID NO: 469964 - RNA, 19 nt, Homo sapiens
  misc_RNA (1)...(19): siRNA sense strand
ggcagcugguagaggagua

SEQ ID NO: 469965 - RNA, 19 nt, Homo sapiens
  misc_RNA (1)...(19): siRNA sense strand
ccaaagauacuggcauugc

SEQ ID NO: 469966 - RNA, 19 nt, Homo sapiens
  misc_RNA (1)...(19): siRNA sense strand
gaauuugauccucugugau

SEQ ID NO: 469967 - RNA, 19 nt, Homo sapiens
  misc_RNA (1)...(19): siRNA sense strand
ugauugugaugaguucaga

SEQ ID NO: 469968 - RNA, 19 nt, Homo sapiens
  misc_RNA (1)...(19): siRNA sense strand
cagggaagaggcacuguag

SEQ ID NO: 469969 - RNA, 19 nt, Homo sapiens
  misc_RNA (1)...(19): siRNA sense strand
gaaucuucauuggcaccuu

SEQ ID NO: 469970 - RNA, 19 nt, Homo sapiens
  misc_RNA (1)...(19): siRNA sense strand
cagcacauugacuauagaa

SEQ ID NO: 469971 - RNA, 19 nt, Homo sapiens
  misc_RNA (1)...(19): siRNA sense strand
aagaucaagccaaagaaug

SEQ ID NO: 469972 - RNA, 19 nt, Homo sapiens
  misc_RNA (1)...(19): siRNA sense strand
ucagaaagaucaagccaaa

SEQ ID NO: 469973 - RNA, 19 nt, Homo sapiens
  misc_RNA (1)...(19): siRNA sense strand
ugaauuugauccucuguga

SEQ ID NO: 469974 - RNA, 19 nt, Homo sapiens
  misc_RNA (1)...(19): siRNA sense strand
ugagauguauccugcaaga

SEQ ID NO: 469975 - RNA, 19 nt, Homo sapiens
  misc_RNA (1)...(19): siRNA sense strand
gaaagaucaagccaaagaa

SEQ ID NO: 469976 - RNA, 19 nt, Homo sapiens
  misc_RNA (1)...(19): siRNA sense strand
gacuauagaaugagaugua

SEQ ID NO: 469977 - RNA, 19 nt, Homo sapiens
  misc_RNA (1)...(19): siRNA sense strand
ugacaagcauaugaauuug

SEQ ID NO: 469978 - RNA, 19 nt, Homo sapiens
  misc_RNA (1)...(19): siRNA sense strand
gcagcacauugacuauaga

SEQ ID NO: 469979 - RNA, 19 nt, Homo sapiens
  misc_RNA (1)...(19): siRNA sense strand
gcaaccagagcgugaagaa

SEQ ID NO: 469980 - RNA, 19 nt, Homo sapiens
  misc_RNA (1)...(19): siRNA sense strand
agaaagaucaagccaaaga

SEQ ID NO: 469981 - RNA, 19 nt, Homo sapiens
  misc_RNA (1)...(19): siRNA sense strand
ugugaugaguucagaaaga

SEQ ID NO: 469982 - RNA, 19 nt, Homo sapiens
  misc_RNA (1)...(19): siRNA sense strand
gugaugaguucagaaagau

SEQ ID NO: 469983 - RNA, 19 nt, Homo sapiens
  misc_RNA (1)...(19): siRNA sense strand
caaagauacuggcauugcu

SEQ ID NO: 469984 - RNA, 19 nt, Homo sapiens
  misc_RNA (1)...(19): siRNA sense strand
gacaagcauaugaauuuga

SEQ ID NO: 469985 - RNA, 19 nt, Homo sapiens
  misc_RNA (1)...(19): siRNA sense strand
aaucuucauuggcaccuuu

SEQ ID NO: 469986 - RNA, 19 nt, Homo sapiens
  misc_RNA (1)...(19): siRNA sense strand
gggaagaggcacuguagca

SEQ ID NO: 469987 - RNA, 19 nt, Homo sapiens
  misc_RNA (1)...(19): siRNA sense strand
gggagaacuugguauccau

SEQ ID NO: 469988 - RNA, 19 nt, Homo sapiens
  misc_RNA (1)...(19): siRNA sense strand
gaugaguucagaaagauca

SEQ ID NO: 469989 - RNA, 19 nt, Homo sapiens
  misc_RNA (1)...(19): siRNA sense strand
gauccucugugauugugau

SEQ ID NO: 469990 - RNA, 19 nt, Homo sapiens
  misc_RNA (1)...(19): siRNA sense strand
gaacuugguauccaugacu

SEQ ID NO: 469991 - RNA, 19 nt, Homo sapiens
  misc_RNA (1)...(19): siRNA sense strand
aaugagauguauccugcaa

SEQ ID NO: 469992 - RNA, 19 nt, Homo sapiens
  misc_RNA (1)...(19): siRNA sense strand
cccaugggcccaccaauug

SEQ ID NO: 469993 - RNA, 19 nt, Homo sapiens
  misc_RNA (1)...(19): siRNA sense strand
ggaccaucccagcagguaa

SEQ ID NO: 469994 - RNA, 19 nt, Homo sapiens
  misc_RNA (1)...(19): siRNA sense strand
aauuugauccucugugauu

SEQ ID NO: 469995 - RNA, 19 nt, Homo sapiens
  misc_RNA (1)...(19): siRNA sense strand
gccaaagaaugcgaagcaa

SEQ ID NO: 469996 - RNA, 19 nt, Homo sapiens
  misc_RNA (1)...(19): siRNA sense strand
aggaaugcguccaccaaga

SEQ ID NO: 469997 - RNA, 19 nt, Homo sapiens
  misc_RNA (1)...(19): siRNA sense strand
gauggccgaaucuucauug

SEQ ID NO: 469998 - RNA, 19 nt, Homo sapiens
  misc_RNA (1)...(19): siRNA sense strand
gagaacuugguauccauga

SEQ ID NO: 469999 - RNA, 19 nt, Homo sapiens
  misc_RNA (1)...(19): siRNA sense strand
gaagcaaccagagcgugaa

SEQ ID NO: 470000 - RNA, 19 nt, Homo sapiens
  misc_RNA (1)...(19): siRNA sense strand
agauguauccugcaagaug

SEQ ID NO: 470001 - RNA, 19 nt, Homo sapiens
  misc_RNA (1)...(19): siRNA sense strand
aaagaucaagccaaagaau

SEQ ID NO: 470002 - RNA, 19 nt, Homo sapiens
  misc_RNA (1)...(19): siRNA sense strand
ggaaugcguccaccaagac

SEQ ID NO: 470003 - RNA, 19 nt, Homo sapiens
  misc_RNA (1)...(19): siRNA sense strand
uggcaagaguagcaagaug

SEQ ID NO: 470004 - RNA, 19 nt, Homo sapiens
  misc_RNA (1)...(19): siRNA sense strand
caaccagagcgugaagaaa

SEQ ID NO: 470005 - RNA, 19 nt, Homo sapiens
  misc_RNA (1)...(19): siRNA sense strand
gcucgagggacgccaauag

SEQ ID NO: 470006 - RNA, 19 nt, Homo sapiens
  misc_RNA (1)...(19): siRNA sense strand
gaccaucccagcagguaau

SEQ ID NO: 470007 - RNA, 19 nt, Homo sapiens
  misc_RNA (1)...(19): siRNA sense strand
ugcagcacauugacuauag

SEQ ID NO: 470008 - RNA, 19 nt, Homo sapiens
  misc_RNA (1)...(19): siRNA sense strand
ccaggaaugcguccaccaa

SEQ ID NO: 470009 - RNA, 19 nt, Homo sapiens
  misc_RNA (1)...(19): siRNA sense strand
ccugcaagauggccgaauc

SEQ ID NO: 470010 - RNA, 19 nt, Homo sapiens
  misc_RNA (1)...(19): siRNA sense strand
ggcagcugguagaggagua

SEQ ID NO: 470011 - RNA, 19 nt, Homo sapiens
  misc_RNA (1)...(19): siRNA sense strand
ccaaagauacuggcauugc

SEQ ID NO: 470012 - RNA, 19 nt, Homo sapiens
  misc_RNA (1)...(19): siRNA sense strand
gaauuugauccucugugau

SEQ ID NO: 470013 - RNA, 19 nt, Homo sapiens
  misc_RNA (1)...(19): siRNA sense strand
ugauugugaugaguucaga

SEQ ID NO: 470014 - RNA, 19 nt, Homo sapiens
  misc_RNA (1)...(19): siRNA sense strand
cagggaagaggcacuguag

SEQ ID NO: 470015 - RNA, 19 nt, Homo sapiens
  misc_RNA (1)...(19): siRNA sense strand
gaaucuucauuggcaccuu

SEQ ID NO: 470016 - RNA, 19 nt, Homo sapiens
  misc_RNA (1)...(19): siRNA sense strand
cagcacauugacuauagaa

SEQ ID NO: 470017 - RNA, 19 nt, Homo sapiens
  misc_RNA (1)...(19): siRNA sense strand
aagaucaagccaaagaaug

SEQ ID NO: 470018 - RNA, 19 nt, Homo sapiens
  misc_RNA (1)...(19): siRNA sense strand
ucagaaagaucaagccaaa

SEQ ID NO: 470019 - RNA, 19 nt, Homo sapiens
  misc_RNA (1)...(19): siRNA sense strand
ugaauuugauccucuguga

SEQ ID NO: 470020 - RNA, 19 nt, Homo sapiens
  misc_RNA (1)...(19): siRNA sense strand
ugagauguauccugcaaga

SEQ ID NO: 470021 - RNA, 19 nt, Homo sapiens
  misc_RNA (1)...(19): siRNA sense strand
gaaagaucaagccaaagaa

SEQ ID NO: 470022 - RNA, 19 nt, Homo sapiens
  misc_RNA (1)...(19): siRNA sense strand
gacuauagaaugagaugua

SEQ ID NO: 470023 - RNA, 19 nt, Homo sapiens
  misc_RNA (1)...(19): siRNA sense strand
ugacaagcauaugaauuug

SEQ ID NO: 470024 - RNA, 19 nt, Homo sapiens
  misc_RNA (1)...(19): siRNA sense strand
gcagcacauugacuauaga

SEQ ID NO: 470025 - RNA, 19 nt, Homo sapiens
  misc_RNA (1)...(19): siRNA sense strand
gcaaccagagcgugaagaa

SEQ ID NO: 470026 - RNA, 19 nt, Homo sapiens
  misc_RNA (1)...(19): siRNA sense strand
agaaagaucaagccaaaga

SEQ ID NO: 470027 - RNA, 19 nt, Homo sapiens
  misc_RNA (1)...(19): siRNA sense strand
ugugaugaguucagaaaga

SEQ ID NO: 470028 - RNA, 19 nt, Homo sapiens
  misc_RNA (1)...(19): siRNA sense strand
gugaugaguucagaaagau

SEQ ID NO: 470029 - RNA, 19 nt, Homo sapiens
  misc_RNA (1)...(19): siRNA sense strand
caaagauacuggcauugcu

SEQ ID NO: 470030 - RNA, 19 nt, Homo sapiens
  misc_RNA (1)...(19): siRNA sense strand
gacaagcauaugaauuuga

SEQ ID NO: 470031 - RNA, 19 nt, Homo sapiens
  misc_RNA (1)...(19): siRNA sense strand
aaucuucauuggcaccuuu

SEQ ID NO: 470032 - RNA, 19 nt, Homo sapiens
  misc_RNA (1)...(19): siRNA sense strand
gggaagaggcacuguagca

SEQ ID NO: 470033 - RNA, 19 nt, Homo sapiens
  misc_RNA (1)...(19): siRNA sense strand
gggagaacuugguauccau

SEQ ID NO: 470034 - RNA, 19 nt, Homo sapiens
  misc_RNA (1)...(19): siRNA sense strand
gaugaguucagaaagauca

SEQ ID NO: 470035 - RNA, 19 nt, Homo sapiens
  misc_RNA (1)...(19): siRNA sense strand
gauccucugugauugugau

SEQ ID NO: 470036 - RNA, 19 nt, Homo sapiens
  misc_RNA (1)...(19): siRNA sense strand
gaacuugguauccaugacu

SEQ ID NO: 470037 - RNA, 19 nt, Homo sapiens
  misc_RNA (1)...(19): siRNA sense strand
aaugagauguauccugcaa

SEQ ID NO: 470038 - RNA, 19 nt, Homo sapiens
  misc_RNA (1)...(19): siRNA sense strand
cccaugggcccaccaauug

SEQ ID NO: 470039 - RNA, 19 nt, Homo sapiens
  misc_RNA (1)...(19): siRNA sense strand
ggaccaucccagcagguaa

SEQ ID NO: 470040 - RNA, 19 nt, Homo sapiens
  misc_RNA (1)...(19): siRNA sense strand
aauuugauccucugugauu

SEQ ID NO: 470041 - RNA, 19 nt, Homo sapiens
  misc_RNA (1)...(19): siRNA sense strand
gccaaagaaugcgaagcaa

SEQ ID NO: 470042 - RNA, 19 nt, Homo sapiens
  misc_RNA (1)...(19): siRNA sense strand
aggaaugcguccaccaaga

SEQ ID NO: 470043 - RNA, 19 nt, Homo sapiens
  misc_RNA (1)...(19): siRNA sense strand
gauggccgaaucuucauug

SEQ ID NO: 470044 - RNA, 19 nt, Homo sapiens
  misc_RNA (1)...(19): siRNA sense strand
gagaacuugguauccauga

SEQ ID NO: 470045 - RNA, 19 nt, Homo sapiens
  misc_RNA (1)...(19): siRNA sense strand
gaagcaaccagagcgugaa

SEQ ID NO: 470046 - RNA, 19 nt, Homo sapiens
  misc_RNA (1)...(19): siRNA sense strand
agauguauccugcaagaug

SEQ ID NO: 470047 - RNA, 19 nt, Homo sapiens
  misc_RNA (1)...(19): siRNA sense strand
aaagaucaagccaaagaau

SEQ ID NO: 470048 - RNA, 19 nt, Homo sapiens
  misc_RNA (1)...(19): siRNA sense strand
ggaaugcguccaccaagac

SEQ ID NO: 470049 - RNA, 19 nt, Homo sapiens
  misc_RNA (1)...(19): siRNA sense strand
uggcaagaguagcaagaug

SEQ ID NO: 470050 - RNA, 19 nt, Homo sapiens
  misc_RNA (1)...(19): siRNA sense strand
caaccagagcgugaagaaa

SEQ ID NO: 470051 - RNA, 19 nt, Homo sapiens
  misc_RNA (1)...(19): siRNA sense strand
gcucgagggacgccaauag

SEQ ID NO: 470052 - RNA, 19 nt, Homo sapiens
  misc_RNA (1)...(19): siRNA sense strand
gaccaucccagcagguaau

SEQ ID NO: 470053 - RNA, 19 nt, Homo sapiens
  misc_RNA (1)...(19): siRNA sense strand
ugcagcacauugacuauag

SEQ ID NO: 470054 - RNA, 19 nt, Homo sapiens
  misc_RNA (1)...(19): siRNA sense strand
ccaggaaugcguccaccaa

SEQ ID NO: 470055 - RNA, 19 nt, Homo sapiens
  misc_RNA (1)...(19): siRNA sense strand
ccugcaagauggccgaauc

SEQ ID NO: 470056 - RNA, 19 nt, Homo sapiens
  misc_RNA (1)...(19): siRNA sense strand
ggcagcugguagaggagua

SEQ ID NO: 470057 - RNA, 19 nt, Homo sapiens
  misc_RNA (1)...(19): siRNA sense strand
ccaaagauacuggcauugc

SEQ ID NO: 470058 - RNA, 19 nt, Homo sapiens
  misc_RNA (1)...(19): siRNA sense strand
gaauuugauccucugugau

SEQ ID NO: 470059 - RNA, 19 nt, Homo sapiens
  misc_RNA (1)...(19): siRNA sense strand
ugauugugaugaguucaga

SEQ ID NO: 470060 - RNA, 19 nt, Homo sapiens
  misc_RNA (1)...(19): siRNA sense strand
cagggaagaggcacuguag

SEQ ID NO: 470061 - RNA, 19 nt, Homo sapiens
  misc_RNA (1)...(19): siRNA sense strand
gaaucuucauuggcaccuu

SEQ ID NO: 470062 - RNA, 19 nt, Homo sapiens
  misc_RNA (1)...(19): siRNA sense strand
cagcacauugacuauagaa

SEQ ID NO: 470063 - RNA, 19 nt, Homo sapiens
  misc_RNA (1)...(19): siRNA sense strand
aagaucaagccaaagaaug

SEQ ID NO: 470064 - RNA, 19 nt, Homo sapiens
  misc_RNA (1)...(19): siRNA sense strand
gagcagaaguggccuauau

SEQ ID NO: 470065 - RNA, 19 nt, Homo sapiens
  misc_RNA (1)...(19): siRNA sense strand
cagaagagauuucagauga

SEQ ID NO: 470066 - RNA, 19 nt, Homo sapiens
  misc_RNA (1)...(19): siRNA sense strand
ccagggagccuuaaacuua

SEQ ID NO: 470067 - RNA, 19 nt, Homo sapiens
  misc_RNA (1)...(19): siRNA sense strand
gaaccaguauccugcauug

SEQ ID NO: 470068 - RNA, 19 nt, Homo sapiens
  misc_RNA (1)...(19): siRNA sense strand
gaaacuugguggacaguga

SEQ ID NO: 470069 - RNA, 19 nt, Homo sapiens
  misc_RNA (1)...(19): siRNA sense strand
aggaagggcuuauguuuaa

SEQ ID NO: 470070 - RNA, 19 nt, Homo sapiens
  misc_RNA (1)...(19): siRNA sense strand
gcaaauuucuuggugauuc

SEQ ID NO: 470071 - RNA, 19 nt, Homo sapiens
  misc_RNA (1)...(19): siRNA sense strand
ccagagcuauauauccuua

SEQ ID NO: 470072 - RNA, 19 nt, Homo sapiens
  misc_RNA (1)...(19): siRNA sense strand
ggagagagacacuuccuuu

SEQ ID NO: 470073 - RNA, 19 nt, Homo sapiens
  misc_RNA (1)...(19): siRNA sense strand
gaacuccagugggcaaauu

SEQ ID NO: 470074 - RNA, 19 nt, Homo sapiens
  misc_RNA (1)...(19): siRNA sense strand
gaacucuucucauccacaa

SEQ ID NO: 470075 - RNA, 19 nt, Homo sapiens
  misc_RNA (1)...(19): siRNA sense strand
gagagagacacuuccuuua

SEQ ID NO: 470076 - RNA, 19 nt, Homo sapiens
  misc_RNA (1)...(19): siRNA sense strand
aggaagaacuguuuaacuu

SEQ ID NO: 470077 - RNA, 19 nt, Homo sapiens
  misc_RNA (1)...(19): siRNA sense strand
gagaagaccaggcagaaga

SEQ ID NO: 470078 - RNA, 19 nt, Homo sapiens
  misc_RNA (1)...(19): siRNA sense strand
gggcuuauguuuaaagaag

SEQ ID NO: 470079 - RNA, 19 nt, Homo sapiens
  misc_RNA (1)...(19): siRNA sense strand
cuacggaacucuucucauc

SEQ ID NO: 470080 - RNA, 19 nt, Homo sapiens
  misc_RNA (1)...(19): siRNA sense strand
acaggucucugaaccagua

SEQ ID NO: 470081 - RNA, 19 nt, Homo sapiens
  misc_RNA (1)...(19): siRNA sense strand
caggaagggcuuauguuua

SEQ ID NO: 470082 - RNA, 19 nt, Homo sapiens
  misc_RNA (1)...(19): siRNA sense strand
gguggacagugaaaugaaa

SEQ ID NO: 470083 - RNA, 19 nt, Homo sapiens
  misc_RNA (1)...(19): siRNA sense strand
gauugucgcuauccauaug

SEQ ID NO: 470084 - RNA, 19 nt, Homo sapiens
  misc_RNA (1)...(19): siRNA sense strand
gacaacacaauaccagaua

SEQ ID NO: 470085 - RNA, 19 nt, Homo sapiens
  misc_RNA (1)...(19): siRNA sense strand
accaagaucugaaguaugu

SEQ ID NO: 470086 - RNA, 19 nt, Homo sapiens
  misc_RNA (1)...(19): siRNA sense strand
ccugaaagaucaagaagca

SEQ ID NO: 470087 - RNA, 19 nt, Homo sapiens
  misc_RNA (1)...(19): siRNA sense strand
cacaauaccagauaaaguu

SEQ ID NO: 470088 - RNA, 19 nt, Homo sapiens
  misc_RNA (1)...(19): siRNA sense strand
ugaaagaucaagaagcaaa

SEQ ID NO: 470089 - RNA, 19 nt, Homo sapiens
  misc_RNA (1)...(19): siRNA sense strand
gaaguuccagggucugauu

SEQ ID NO: 470090 - RNA, 19 nt, Homo sapiens
  misc_RNA (1)...(19): siRNA sense strand
ggaagggcuuauguuuaaa

SEQ ID NO: 470091 - RNA, 19 nt, Homo sapiens
  misc_RNA (1)...(19): siRNA sense strand
caacacaauaccagauaaa

SEQ ID NO: 470092 - RNA, 19 nt, Homo sapiens
  misc_RNA (1)...(19): siRNA sense strand
ucaggaagggcuuauguuu

SEQ ID NO: 470093 - RNA, 19 nt, Homo sapiens
  misc_RNA (1)...(19): siRNA sense strand
ggaaacaccaagaucugaa

SEQ ID NO: 470094 - RNA, 19 nt, Homo sapiens
  misc_RNA (1)...(19): siRNA sense strand
gggcaaauuucuuggugau

SEQ ID NO: 470095 - RNA, 19 nt, Homo sapiens
  misc_RNA (1)...(19): siRNA sense strand
gccuuaaacuuauauaguc

SEQ ID NO: 470096 - RNA, 19 nt, Homo sapiens
  misc_RNA (1)...(19): siRNA sense strand
cagggagccuuaaacuuau

SEQ ID NO: 470097 - RNA, 19 nt, Homo sapiens
  misc_RNA (1)...(19): siRNA sense strand
gcaaaggugagcagaagug

SEQ ID NO: 470098 - RNA, 19 nt, Homo sapiens
  misc_RNA (1)...(19): siRNA sense strand
gaacaggccaagacugaag

SEQ ID NO: 470099 - RNA, 19 nt, Homo sapiens
  misc_RNA (1)...(19): siRNA sense strand
gagaauaaucaucguguuc

SEQ ID NO: 470100 - RNA, 19 nt, Homo sapiens
  misc_RNA (1)...(19): siRNA sense strand
cuguuuaacuucuuucuga

SEQ ID NO: 470101 - RNA, 19 nt, Homo sapiens
  misc_RNA (1)...(19): siRNA sense strand
acaccaagaucugaaguau

SEQ ID NO: 470102 - RNA, 19 nt, Homo sapiens
  misc_RNA (1)...(19): siRNA sense strand
gcagaagagauuucagaug

SEQ ID NO: 470103 - RNA, 19 nt, Homo sapiens
  misc_RNA (1)...(19): siRNA sense strand
acaacacaauaccagauaa

SEQ ID NO: 470104 - RNA, 19 nt, Homo sapiens
  misc_RNA (1)...(19): siRNA sense strand
cagaugaauuaauggaguu

SEQ ID NO: 470105 - RNA, 19 nt, Homo sapiens
  misc_RNA (1)...(19): siRNA sense strand
gaagcaaaggugagcagaa

SEQ ID NO: 470106 - RNA, 19 nt, Homo sapiens
  misc_RNA (1)...(19): siRNA sense strand
ggacaacacaauaccagau

SEQ ID NO: 470107 - RNA, 19 nt, Homo sapiens
  misc_RNA (1)...(19): siRNA sense strand
ggacagugaaaugaaauau

SEQ ID NO: 470108 - RNA, 19 nt, Homo sapiens
  misc_RNA (1)...(19): siRNA sense strand
agaaacaguggcugccuua

SEQ ID NO: 470109 - RNA, 19 nt, Homo sapiens
  misc_RNA (1)...(19): siRNA sense strand
gaauaaucaucguguucca

SEQ ID NO: 470110 - RNA, 19 nt, Homo sapiens
  misc_RNA (1)...(19): siRNA sense strand
guacuacccagagcuauau

SEQ ID NO: 470111 - RNA, 19 nt, Homo sapiens
  misc_RNA (1)...(19): siRNA sense strand
gagagacacuuccuuuacc

SEQ ID NO: 470112 - RNA, 19 nt, Homo sapiens
  misc_RNA (1)...(19): siRNA sense strand
caaauuucuuggugauucu

SEQ ID NO: 470113 - RNA, 19 nt, Homo sapiens
  misc_RNA (1)...(19): siRNA sense strand
acacauccagggagccuua

SEQ ID NO: 470114 - RNA, 19 nt, Homo sapiens
  misc_RNA (1)...(19): siRNA sense strand
ugucauugauugucgcuau

SEQ ID NO: 470115 - RNA, 19 nt, Homo sapiens
  misc_RNA (1)...(19): siRNA sense strand
ccagugggcaaauuucuug

SEQ ID NO: 470116 - RNA, 19 nt, Homo sapiens
  misc_RNA (1)...(19): siRNA sense strand
gggagcagauugcccuucu

SEQ ID NO: 470117 - RNA, 19 nt, Homo sapiens
  misc_RNA (1)...(19): siRNA sense strand
ccaguauccugcauuguac

SEQ ID NO: 470118 - RNA, 19 nt, Homo sapiens
  misc_RNA (1)...(19): siRNA sense strand
agaagcccaucgucccuuu

SEQ ID NO: 470119 - RNA, 19 nt, Homo sapiens
  misc_RNA (1)...(19): siRNA sense strand
gggaaacaccaagaucuga

SEQ ID NO: 470120 - RNA, 19 nt, Homo sapiens
  misc_RNA (1)...(19): siRNA sense strand
aagcaaaggugagcagaag

SEQ ID NO: 470121 - RNA, 19 nt, Homo sapiens
  misc_RNA (1)...(19): siRNA sense strand
gaagggcuuauguuuaaag

SEQ ID NO: 470122 - RNA, 19 nt, Homo sapiens
  misc_RNA (1)...(19): siRNA sense strand
gaaagaucaagaagcaaag

SEQ ID NO: 470123 - RNA, 19 nt, Homo sapiens
  misc_RNA (1)...(19): siRNA sense strand
ggacacccagaagagaaua

SEQ ID NO: 470124 - RNA, 19 nt, Homo sapiens
  misc_RNA (1)...(19): siRNA sense strand
ucugcaaaccuaagcauuu

SEQ ID NO: 470125 - RNA, 19 nt, Homo sapiens
  misc_RNA (1)...(19): siRNA sense strand
cuacagagacuucuuucca

SEQ ID NO: 470126 - RNA, 19 nt, Homo sapiens
  misc_RNA (1)...(19): siRNA sense strand
gaaguaugucaacccagaa

SEQ ID NO: 470127 - RNA, 19 nt, Homo sapiens
  misc_RNA (1)...(19): siRNA sense strand
gaaacaccaagaucugaag

SEQ ID NO: 470128 - RNA, 19 nt, Homo sapiens
  misc_RNA (1)...(19): siRNA sense strand
gcucaggaagggcuuaugu

SEQ ID NO: 470129 - RNA, 19 nt, Homo sapiens
  misc_RNA (1)...(19): siRNA sense strand
uccagggucugauugagaa

SEQ ID NO: 470130 - RNA, 19 nt, Homo sapiens
  misc_RNA (1)...(19): siRNA sense strand
agagaauaaucaucguguu

SEQ ID NO: 470131 - RNA, 19 nt, Homo sapiens
  misc_RNA (1)...(19): siRNA sense strand
agaccaggcagaagagauu

SEQ ID NO: 470132 - RNA, 19 nt, Homo sapiens
  misc_RNA (1)...(19): siRNA sense strand
gcuacugcccuaugcauca

SEQ ID NO: 470133 - RNA, 19 nt, Homo sapiens
  misc_RNA (1)...(19): siRNA sense strand
caagaucugaaguauguca

SEQ ID NO: 470134 - RNA, 19 nt, Homo sapiens
  misc_RNA (1)...(19): siRNA sense strand
gacauuacuaucacucaga

SEQ ID NO: 470135 - RNA, 19 nt, Homo sapiens
  misc_RNA (1)...(19): siRNA sense strand
ccagaugucccuagaacuc

SEQ ID NO: 470136 - RNA, 19 nt, Homo sapiens
  misc_RNA (1)...(19): siRNA sense strand
guccagaugucccuagaac

SEQ ID NO: 470137 - RNA, 19 nt, Homo sapiens
  misc_RNA (1)...(19): siRNA sense strand
agauugcccuucuggugaa

SEQ ID NO: 470138 - RNA, 19 nt, Homo sapiens
  misc_RNA (1)...(19): siRNA sense strand
accaguauccugcauugua

SEQ ID NO: 470139 - RNA, 19 nt, Homo sapiens
  misc_RNA (1)...(19): siRNA sense strand
gcagaaguggccuauaucg

SEQ ID NO: 470140 - RNA, 19 nt, Homo sapiens
  misc_RNA (1)...(19): siRNA sense strand
auucaaggacaacacaaua

SEQ ID NO: 470141 - RNA, 19 nt, Homo sapiens
  misc_RNA (1)...(19): siRNA sense strand
ggaccacaagacugaguug

SEQ ID NO: 470142 - RNA, 19 nt, Homo sapiens
  misc_RNA (1)...(19): siRNA sense strand
agggagccuuaaacuuaua

SEQ ID NO: 470143 - RNA, 19 nt, Homo sapiens
  misc_RNA (1)...(19): siRNA sense strand
ccauuacuacuguuccaaa

SEQ ID NO: 470144 - RNA, 19 nt, Homo sapiens
  misc_RNA (1)...(19): siRNA sense strand
uguacuacccagagcuaua

SEQ ID NO: 470145 - RNA, 19 nt, Homo sapiens
  misc_RNA (1)...(19): siRNA sense strand
agagagacacuuccuuuac

SEQ ID NO: 470146 - RNA, 19 nt, Homo sapiens
  misc_RNA (1)...(19): siRNA sense strand
acacaauaccagauaaagu

SEQ ID NO: 470147 - RNA, 19 nt, Homo sapiens
  misc_RNA (1)...(19): siRNA sense strand
uugaacaggccaagacuga

SEQ ID NO: 470148 - RNA, 19 nt, Homo sapiens
  misc_RNA (1)...(19): siRNA sense strand
gaagaccaggcagaagaga

SEQ ID NO: 470149 - RNA, 19 nt, Homo sapiens
  misc_RNA (1)...(19): siRNA sense strand
acauuacuaucacucagau

SEQ ID NO: 470150 - RNA, 19 nt, Homo sapiens
  misc_RNA (1)...(19): siRNA sense strand
guaugucaacccagaaaca

SEQ ID NO: 470151 - RNA, 19 nt, Homo sapiens
  misc_RNA (1)...(19): siRNA sense strand
ggagaagaccaggcagaag

SEQ ID NO: 470152 - RNA, 19 nt, Homo sapiens
  misc_RNA (1)...(19): siRNA sense strand
cggcuacagagacuucuuu

SEQ ID NO: 470153 - RNA, 19 nt, Homo sapiens
  misc_RNA (1)...(19): siRNA sense strand
gucaggaagaacuguuuaa

SEQ ID NO: 470154 - RNA, 19 nt, Homo sapiens
  misc_RNA (1)...(19): siRNA sense strand
gagccuuaaacuuauauag

SEQ ID NO: 470155 - RNA, 19 nt, Homo sapiens
  misc_RNA (1)...(19): siRNA sense strand
cucagaugcuggaggaaga

SEQ ID NO: 470156 - RNA, 19 nt, Homo sapiens
  misc_RNA (1)...(19): siRNA sense strand
ggcuuauguuuaaagaaga

SEQ ID NO: 470157 - RNA, 19 nt, Homo sapiens
  misc_RNA (1)...(19): siRNA sense strand
gaacuguuuaacuucuuuc

SEQ ID NO: 470158 - RNA, 19 nt, Homo sapiens
  misc_RNA (1)...(19): siRNA sense strand
gagcuacugcccuaugcau

SEQ ID NO: 470159 - RNA, 19 nt, Homo sapiens
  misc_RNA (1)...(19): siRNA sense strand
acugugaauucuccucaga

SEQ ID NO: 470160 - RNA, 19 nt, Homo sapiens
  misc_RNA (1)...(19): siRNA sense strand
gccaaggaaagcucaggaa

SEQ ID NO: 470161 - RNA, 19 nt, Homo sapiens
  misc_RNA (1)...(19): siRNA sense strand
aaaggcggcuacagagacu

SEQ ID NO: 470162 - RNA, 19 nt, Homo sapiens
  misc_RNA (1)...(19): siRNA sense strand
aaacuugguggacagugaa

SEQ ID NO: 470163 - RNA, 19 nt, Homo sapiens
  misc_RNA (1)...(19): siRNA sense strand
uugauugucgcuauccaua

SEQ ID NO: 470164 - RNA, 19 nt, Homo sapiens
  misc_RNA (1)...(19): siRNA sense strand
gagcagaaguggccuauau

SEQ ID NO: 470165 - RNA, 19 nt, Homo sapiens
  misc_RNA (1)...(19): siRNA sense strand
cagaagagauuucagauga

SEQ ID NO: 470166 - RNA, 19 nt, Homo sapiens
  misc_RNA (1)...(19): siRNA sense strand
ccagggagccuuaaacuua

SEQ ID NO: 470167 - RNA, 19 nt, Homo sapiens
  misc_RNA (1)...(19): siRNA sense strand
gaaccaguauccugcauug

SEQ ID NO: 470168 - RNA, 19 nt, Homo sapiens
  misc_RNA (1)...(19): siRNA sense strand
gaaacuugguggacaguga

SEQ ID NO: 470169 - RNA, 19 nt, Homo sapiens
  misc_RNA (1)...(19): siRNA sense strand
aggaagggcuuauguuuaa

SEQ ID NO: 470170 - RNA, 19 nt, Homo sapiens
  misc_RNA (1)...(19): siRNA sense strand
gcaaauuucuuggugauuc

SEQ ID NO: 470171 - RNA, 19 nt, Homo sapiens
  misc_RNA (1)...(19): siRNA sense strand
ccagagcuauauauccuua

SEQ ID NO: 470172 - RNA, 19 nt, Homo sapiens
  misc_RNA (1)...(19): siRNA sense strand
ggagagagacacuuccuuu

SEQ ID NO: 470173 - RNA, 19 nt, Homo sapiens
  misc_RNA (1)...(19): siRNA sense strand
gaacuccagugggcaaauu

SEQ ID NO: 470174 - RNA, 19 nt, Homo sapiens
  misc_RNA (1)...(19): siRNA sense strand
gaacucuucucauccacaa

SEQ ID NO: 470175 - RNA, 19 nt, Homo sapiens
  misc_RNA (1)...(19): siRNA sense strand
gagagagacacuuccuuua

SEQ ID NO: 470176 - RNA, 19 nt, Homo sapiens
  misc_RNA (1)...(19): siRNA sense strand
aggaagaacuguuuaacuu

SEQ ID NO: 470177 - RNA, 19 nt, Homo sapiens
  misc_RNA (1)...(19): siRNA sense strand
gagaagaccaggcagaaga

SEQ ID NO: 470178 - RNA, 19 nt, Homo sapiens
  misc_RNA (1)...(19): siRNA sense strand
gggcuuauguuuaaagaag

SEQ ID NO: 470179 - RNA, 19 nt, Homo sapiens
  misc_RNA (1)...(19): siRNA sense strand
cuacggaacucuucucauc

SEQ ID NO: 470180 - RNA, 19 nt, Homo sapiens
  misc_RNA (1)...(19): siRNA sense strand
acaggucucugaaccagua

SEQ ID NO: 470181 - RNA, 19 nt, Homo sapiens
  misc_RNA (1)...(19): siRNA sense strand
caggaagggcuuauguuua

SEQ ID NO: 470182 - RNA, 19 nt, Homo sapiens
  misc_RNA (1)...(19): siRNA sense strand
gguggacagugaaaugaaa

SEQ ID NO: 470183 - RNA, 19 nt, Homo sapiens
  misc_RNA (1)...(19): siRNA sense strand
gauugucgcuauccauaug

SEQ ID NO: 470184 - RNA, 19 nt, Homo sapiens
  misc_RNA (1)...(19): siRNA sense strand
gacaacacaauaccagaua

SEQ ID NO: 470185 - RNA, 19 nt, Homo sapiens
  misc_RNA (1)...(19): siRNA sense strand
accaagaucugaaguaugu

SEQ ID NO: 470186 - RNA, 19 nt, Homo sapiens
  misc_RNA (1)...(19): siRNA sense strand
ccugaaagaucaagaagca

SEQ ID NO: 470187 - RNA, 19 nt, Homo sapiens
  misc_RNA (1)...(19): siRNA sense strand
cacaauaccagauaaaguu

SEQ ID NO: 470188 - RNA, 19 nt, Homo sapiens
  misc_RNA (1)...(19): siRNA sense strand
ugaaagaucaagaagcaaa

SEQ ID NO: 470189 - RNA, 19 nt, Homo sapiens
  misc_RNA (1)...(19): siRNA sense strand
gaaguuccagggucugauu

SEQ ID NO: 470190 - RNA, 19 nt, Homo sapiens
  misc_RNA (1)...(19): siRNA sense strand
ggaagggcuuauguuuaaa

SEQ ID NO: 470191 - RNA, 19 nt, Homo sapiens
  misc_RNA (1)...(19): siRNA sense strand
caacacaauaccagauaaa

SEQ ID NO: 470192 - RNA, 19 nt, Homo sapiens
  misc_RNA (1)...(19): siRNA sense strand
ucaggaagggcuuauguuu

SEQ ID NO: 470193 - RNA, 19 nt, Homo sapiens
  misc_RNA (1)...(19): siRNA sense strand
ggaaacaccaagaucugaa

SEQ ID NO: 470194 - RNA, 19 nt, Homo sapiens
  misc_RNA (1)...(19): siRNA sense strand
gggcaaauuucuuggugau

SEQ ID NO: 470195 - RNA, 19 nt, Homo sapiens
  misc_RNA (1)...(19): siRNA sense strand
gccuuaaacuuauauaguc

SEQ ID NO: 470196 - RNA, 19 nt, Homo sapiens
  misc_RNA (1)...(19): siRNA sense strand
cagggagccuuaaacuuau

SEQ ID NO: 470197 - RNA, 19 nt, Homo sapiens
  misc_RNA (1)...(19): siRNA sense strand
gcaaaggugagcagaagug

SEQ ID NO: 470198 - RNA, 19 nt, Homo sapiens
  misc_RNA (1)...(19): siRNA sense strand
gaacaggccaagacugaag

SEQ ID NO: 470199 - RNA, 19 nt, Homo sapiens
  misc_RNA (1)...(19): siRNA sense strand
gagaauaaucaucguguuc

SEQ ID NO: 470200 - RNA, 19 nt, Homo sapiens
  misc_RNA (1)...(19): siRNA sense strand
cuguuuaacuucuuucuga

SEQ ID NO: 470201 - RNA, 19 nt, Homo sapiens
  misc_RNA (1)...(19): siRNA sense strand
acaccaagaucugaaguau

SEQ ID NO: 470202 - RNA, 19 nt, Homo sapiens
  misc_RNA (1)...(19): siRNA sense strand
gcagaagagauuucagaug

SEQ ID NO: 470203 - RNA, 19 nt, Homo sapiens
  misc_RNA (1)...(19): siRNA sense strand
acaacacaauaccagauaa

SEQ ID NO: 470204 - RNA, 19 nt, Homo sapiens
  misc_RNA (1)...(19): siRNA sense strand
cagaugaauuaauggaguu

SEQ ID NO: 470205 - RNA, 19 nt, Homo sapiens
  misc_RNA (1)...(19): siRNA sense strand
gaagcaaaggugagcagaa

SEQ ID NO: 470206 - RNA, 19 nt, Homo sapiens
  misc_RNA (1)...(19): siRNA sense strand
ggacaacacaauaccagau

SEQ ID NO: 470207 - RNA, 19 nt, Homo sapiens
  misc_RNA (1)...(19): siRNA sense strand
ggacagugaaaugaaauau

SEQ ID NO: 470208 - RNA, 19 nt, Homo sapiens
  misc_RNA (1)...(19): siRNA sense strand
agaaacaguggcugccuua

SEQ ID NO: 470209 - RNA, 19 nt, Homo sapiens
  misc_RNA (1)...(19): siRNA sense strand
gaauaaucaucguguucca

SEQ ID NO: 470210 - RNA, 19 nt, Homo sapiens
  misc_RNA (1)...(19): siRNA sense strand
guacuacccagagcuauau

SEQ ID NO: 470211 - RNA, 19 nt, Homo sapiens
  misc_RNA (1)...(19): siRNA sense strand
gagagacacuuccuuuacc

SEQ ID NO: 470212 - RNA, 19 nt, Homo sapiens
  misc_RNA (1)...(19): siRNA sense strand
caaauuucuuggugauucu

SEQ ID NO: 470213 - RNA, 19 nt, Homo sapiens
  misc_RNA (1)...(19): siRNA sense strand
acacauccagggagccuua

SEQ ID NO: 470214 - RNA, 19 nt, Homo sapiens
  misc_RNA (1)...(19): siRNA sense strand
ugucauugauugucgcuau

SEQ ID NO: 470215 - RNA, 19 nt, Homo sapiens
  misc_RNA (1)...(19): siRNA sense strand
ccagugggcaaauuucuug

SEQ ID NO: 470216 - RNA, 19 nt, Homo sapiens
  misc_RNA (1)...(19): siRNA sense strand
gggagcagauugcccuucu

SEQ ID NO: 470217 - RNA, 19 nt, Homo sapiens
  misc_RNA (1)...(19): siRNA sense strand
ccaguauccugcauuguac

SEQ ID NO: 470218 - RNA, 19 nt, Homo sapiens
  misc_RNA (1)...(19): siRNA sense strand
agaagcccaucgucccuuu

SEQ ID NO: 470219 - RNA, 19 nt, Homo sapiens
  misc_RNA (1)...(19): siRNA sense strand
gggaaacaccaagaucuga

SEQ ID NO: 470220 - RNA, 19 nt, Homo sapiens
  misc_RNA (1)...(19): siRNA sense strand
aagcaaaggugagcagaag

SEQ ID NO: 470221 - RNA, 19 nt, Homo sapiens
  misc_RNA (1)...(19): siRNA sense strand
gaagggcuuauguuuaaag

SEQ ID NO: 470222 - RNA, 19 nt, Homo sapiens
  misc_RNA (1)...(19): siRNA sense strand
gaaagaucaagaagcaaag

SEQ ID NO: 470223 - RNA, 19 nt, Homo sapiens
  misc_RNA (1)...(19): siRNA sense strand
ggacacccagaagagaaua

SEQ ID NO: 470224 - RNA, 19 nt, Homo sapiens
  misc_RNA (1)...(19): siRNA sense strand
ucugcaaaccuaagcauuu

SEQ ID NO: 470225 - RNA, 19 nt, Homo sapiens
  misc_RNA (1)...(19): siRNA sense strand
cuacagagacuucuuucca

SEQ ID NO: 470226 - RNA, 19 nt, Homo sapiens
  misc_RNA (1)...(19): siRNA sense strand
gaaguaugucaacccagaa

SEQ ID NO: 470227 - RNA, 19 nt, Homo sapiens
  misc_RNA (1)...(19): siRNA sense strand
gaaacaccaagaucugaag

SEQ ID NO: 470228 - RNA, 19 nt, Homo sapiens
  misc_RNA (1)...(19): siRNA sense strand
gcucaggaagggcuuaugu

SEQ ID NO: 470229 - RNA, 19 nt, Homo sapiens
  misc_RNA (1)...(19): siRNA sense strand
uccagggucugauugagaa

SEQ ID NO: 470230 - RNA, 19 nt, Homo sapiens
  misc_RNA (1)...(19): siRNA sense strand
agagaauaaucaucguguu

SEQ ID NO: 470231 - RNA, 19 nt, Homo sapiens
  misc_RNA (1)...(19): siRNA sense strand
agaccaggcagaagagauu

SEQ ID NO: 470232 - RNA, 19 nt, Homo sapiens
  misc_RNA (1)...(19): siRNA sense strand
gcuacugcccuaugcauca

SEQ ID NO: 470233 - RNA, 19 nt, Homo sapiens
  misc_RNA (1)...(19): siRNA sense strand
caagaucugaaguauguca

SEQ ID NO: 470234 - RNA, 19 nt, Homo sapiens
  misc_RNA (1)...(19): siRNA sense strand
gacauuacuaucacucaga

SEQ ID NO: 470235 - RNA, 19 nt, Homo sapiens
  misc_RNA (1)...(19): siRNA sense strand
ccagaugucccuagaacuc

SEQ ID NO: 470236 - RNA, 19 nt, Homo sapiens
  misc_RNA (1)...(19): siRNA sense strand
guccagaugucccuagaac

SEQ ID NO: 470237 - RNA, 19 nt, Homo sapiens
  misc_RNA (1)...(19): siRNA sense strand
agauugcccuucuggugaa

SEQ ID NO: 470238 - RNA, 19 nt, Homo sapiens
  misc_RNA (1)...(19): siRNA sense strand
accaguauccugcauugua

SEQ ID NO: 470239 - RNA, 19 nt, Homo sapiens
  misc_RNA (1)...(19): siRNA sense strand
gcagaaguggccuauaucg

SEQ ID NO: 470240 - RNA, 19 nt, Homo sapiens
  misc_RNA (1)...(19): siRNA sense strand
auucaaggacaacacaaua

SEQ ID NO: 470241 - RNA, 19 nt, Homo sapiens
  misc_RNA (1)...(19): siRNA sense strand
ggaccacaagacugaguug

SEQ ID NO: 470242 - RNA, 19 nt, Homo sapiens
  misc_RNA (1)...(19): siRNA sense strand
agggagccuuaaacuuaua

SEQ ID NO: 470243 - RNA, 19 nt, Homo sapiens
  misc_RNA (1)...(19): siRNA sense strand
ccauuacuacuguuccaaa

SEQ ID NO: 470244 - RNA, 19 nt, Homo sapiens
  misc_RNA (1)...(19): siRNA sense strand
uguacuacccagagcuaua

SEQ ID NO: 470245 - RNA, 19 nt, Homo sapiens
  misc_RNA (1)...(19): siRNA sense strand
agagagacacuuccuuuac

SEQ ID NO: 470246 - RNA, 19 nt, Homo sapiens
  misc_RNA (1)...(19): siRNA sense strand
acacaauaccagauaaagu

SEQ ID NO: 470247 - RNA, 19 nt, Homo sapiens
  misc_RNA (1)...(19): siRNA sense strand
uugaacaggccaagacuga

SEQ ID NO: 470248 - RNA, 19 nt, Homo sapiens
  misc_RNA (1)...(19): siRNA sense strand
gaagaccaggcagaagaga

SEQ ID NO: 470249 - RNA, 19 nt, Homo sapiens
  misc_RNA (1)...(19): siRNA sense strand
acauuacuaucacucagau

SEQ ID NO: 470250 - RNA, 19 nt, Homo sapiens
  misc_RNA (1)...(19): siRNA sense strand
guaugucaacccagaaaca

SEQ ID NO: 470251 - RNA, 19 nt, Homo sapiens
  misc_RNA (1)...(19): siRNA sense strand
ggagaagaccaggcagaag

SEQ ID NO: 470252 - RNA, 19 nt, Homo sapiens
  misc_RNA (1)...(19): siRNA sense strand
cggcuacagagacuucuuu

SEQ ID NO: 470253 - RNA, 19 nt, Homo sapiens
  misc_RNA (1)...(19): siRNA sense strand
gucaggaagaacuguuuaa

SEQ ID NO: 470254 - RNA, 19 nt, Homo sapiens
  misc_RNA (1)...(19): siRNA sense strand
gagccuuaaacuuauauag

SEQ ID NO: 470255 - RNA, 19 nt, Homo sapiens
  misc_RNA (1)...(19): siRNA sense strand
cucagaugcuggaggaaga

SEQ ID NO: 470256 - RNA, 19 nt, Homo sapiens
  misc_RNA (1)...(19): siRNA sense strand
ggcuuauguuuaaagaaga

SEQ ID NO: 470257 - RNA, 19 nt, Homo sapiens
  misc_RNA (1)...(19): siRNA sense strand
gaacuguuuaacuucuuuc

SEQ ID NO: 470258 - RNA, 19 nt, Homo sapiens
  misc_RNA (1)...(19): siRNA sense strand
gagcuacugcccuaugcau

SEQ ID NO: 470259 - RNA, 19 nt, Homo sapiens
  misc_RNA (1)...(19): siRNA sense strand
acugugaauucuccucaga

SEQ ID NO: 470260 - RNA, 19 nt, Homo sapiens
  misc_RNA (1)...(19): siRNA sense strand
gccaaggaaagcucaggaa

SEQ ID NO: 470261 - RNA, 19 nt, Homo sapiens
  misc_RNA (1)...(19): siRNA sense strand
aaaggcggcuacagagacu

SEQ ID NO: 470262 - RNA, 19 nt, Homo sapiens
  misc_RNA (1)...(19): siRNA sense strand
aaacuugguggacagugaa

SEQ ID NO: 470263 - RNA, 19 nt, Homo sapiens
  misc_RNA (1)...(19): siRNA sense strand
uugauugucgcuauccaua

SEQ ID NO: 470264 - RNA, 19 nt, Homo sapiens
  misc_RNA (1)...(19): siRNA sense strand
uaaagaggcuucaaaucua

SEQ ID NO: 470265 - RNA, 19 nt, Homo sapiens
  misc_RNA (1)...(19): siRNA sense strand
gagcaugauuggaagcuuu

SEQ ID NO: 470266 - RNA, 19 nt, Homo sapiens
  misc_RNA (1)...(19): siRNA sense strand
aaagaggcuucaaaucuaa

SEQ ID NO: 470267 - RNA, 19 nt, Homo sapiens
  misc_RNA (1)...(19): siRNA sense strand
cuaccagucuaugauauua

SEQ ID NO: 470268 - RNA, 19 nt, Homo sapiens
  misc_RNA (1)...(19): siRNA sense strand
ggaaacccuuuguauaugg

SEQ ID NO: 470269 - RNA, 19 nt, Homo sapiens
  misc_RNA (1)...(19): siRNA sense strand
ugagaugucuggucugaau

SEQ ID NO: 470270 - RNA, 19 nt, Homo sapiens
  misc_RNA (1)...(19): siRNA sense strand
ucacuucguuuccagcuuu

SEQ ID NO: 470271 - RNA, 19 nt, Homo sapiens
  misc_RNA (1)...(19): siRNA sense strand
caagggagcaugauuggaa

SEQ ID NO: 470272 - RNA, 19 nt, Homo sapiens
  misc_RNA (1)...(19): siRNA sense strand
uaaagaggaagguguauug

SEQ ID NO: 470273 - RNA, 19 nt, Homo sapiens
  misc_RNA (1)...(19): siRNA sense strand
auuggaagcuuuaucgaua

SEQ ID NO: 470274 - RNA, 19 nt, Homo sapiens
  misc_RNA (1)...(19): siRNA sense strand
aaacacgacuucagguuca

SEQ ID NO: 470275 - RNA, 19 nt, Homo sapiens
  misc_RNA (1)...(19): siRNA sense strand
ggacauguggaucucuaua

SEQ ID NO: 470276 - RNA, 19 nt, Homo sapiens
  misc_RNA (1)...(19): siRNA sense strand
ccaccgauguucuaaagau

SEQ ID NO: 470277 - RNA, 19 nt, Homo sapiens
  misc_RNA (1)...(19): siRNA sense strand
uguauuggcucucuauuca

SEQ ID NO: 470278 - RNA, 19 nt, Homo sapiens
  misc_RNA (1)...(19): siRNA sense strand
gagcuaccagucuaugaua

SEQ ID NO: 470279 - RNA, 19 nt, Homo sapiens
  misc_RNA (1)...(19): siRNA sense strand
gaacucgcaugaugaacca

SEQ ID NO: 470280 - RNA, 19 nt, Homo sapiens
  misc_RNA (1)...(19): siRNA sense strand
gguagugucaggagugaua

SEQ ID NO: 470281 - RNA, 19 nt, Homo sapiens
  misc_RNA (1)...(19): siRNA sense strand
cuaaagaggcuucaaaucu

SEQ ID NO: 470282 - RNA, 19 nt, Homo sapiens
  misc_RNA (1)...(19): siRNA sense strand
cgauauauaccaacaagaa

SEQ ID NO: 470283 - RNA, 19 nt, Homo sapiens
  misc_RNA (1)...(19): siRNA sense strand
gauguuccaugcgcuguuu

SEQ ID NO: 470284 - RNA, 19 nt, Homo sapiens
  misc_RNA (1)...(19): siRNA sense strand
guagaacguuuagaagaug

SEQ ID NO: 470285 - RNA, 19 nt, Homo sapiens
  misc_RNA (1)...(19): siRNA sense strand
gcuaagacaagcaucauau

SEQ ID NO: 470286 - RNA, 19 nt, Homo sapiens
  misc_RNA (1)...(19): siRNA sense strand
gaugggcgauacaauuuua

SEQ ID NO: 470287 - RNA, 19 nt, Homo sapiens
  misc_RNA (1)...(19): siRNA sense strand
caugagaugucuggucuga

SEQ ID NO: 470288 - RNA, 19 nt, Homo sapiens
  misc_RNA (1)...(19): siRNA sense strand
cguagaacguuuagaagau

SEQ ID NO: 470289 - RNA, 19 nt, Homo sapiens
  misc_RNA (1)...(19): siRNA sense strand
gaauuggaaacccuuugua

SEQ ID NO: 470290 - RNA, 19 nt, Homo sapiens
  misc_RNA (1)...(19): siRNA sense strand
guucaaggccaaagcauug

SEQ ID NO: 470291 - RNA, 19 nt, Homo sapiens
  misc_RNA (1)...(19): siRNA sense strand
ugucuggucugaauuggaa

SEQ ID NO: 470292 - RNA, 19 nt, Homo sapiens
  misc_RNA (1)...(19): siRNA sense strand
gacauguggaucucuauaa

SEQ ID NO: 470293 - RNA, 19 nt, Homo sapiens
  misc_RNA (1)...(19): siRNA sense strand
gaagguguauuggcucucu

SEQ ID NO: 470294 - RNA, 19 nt, Homo sapiens
  misc_RNA (1)...(19): siRNA sense strand
guggaaacaugagggcuuu

SEQ ID NO: 470295 - RNA, 19 nt, Homo sapiens
  misc_RNA (1)...(19): siRNA sense strand
uggaagcuuuaucgauaua

SEQ ID NO: 470296 - RNA, 19 nt, Homo sapiens
  misc_RNA (1)...(19): siRNA sense strand
gguucgaacucgcaugaug

SEQ ID NO: 470297 - RNA, 19 nt, Homo sapiens
  misc_RNA (1)...(19): siRNA sense strand
uaagggcacuguugauggu

SEQ ID NO: 470298 - RNA, 19 nt, Homo sapiens
  misc_RNA (1)...(19): siRNA sense strand
ugucaggagugauaucuuc

SEQ ID NO: 470299 - RNA, 19 nt, Homo sapiens
  misc_RNA (1)...(19): siRNA sense strand
uggaaacccuuuguauaug

SEQ ID NO: 470300 - RNA, 19 nt, Homo sapiens
  misc_RNA (1)...(19): siRNA sense strand
uuggaaacccuuuguauau

SEQ ID NO: 470301 - RNA, 19 nt, Homo sapiens
  misc_RNA (1)...(19): siRNA sense strand
ggaaugaugggcgauacaa

SEQ ID NO: 470302 - RNA, 19 nt, Homo sapiens
  misc_RNA (1)...(19): siRNA sense strand
ugccaucguuguaggagua

SEQ ID NO: 470303 - RNA, 19 nt, Homo sapiens
  misc_RNA (1)...(19): siRNA sense strand
guaaagaggaagguguauu

SEQ ID NO: 470304 - RNA, 19 nt, Homo sapiens
  misc_RNA (1)...(19): siRNA sense strand
uggcugaguuugggacuuu

SEQ ID NO: 470305 - RNA, 19 nt, Homo sapiens
  misc_RNA (1)...(19): siRNA sense strand
gggcacuguugaugguauu

SEQ ID NO: 470306 - RNA, 19 nt, Homo sapiens
  misc_RNA (1)...(19): siRNA sense strand
cagcuaaagaggcuucaaa

SEQ ID NO: 470307 - RNA, 19 nt, Homo sapiens
  misc_RNA (1)...(19): siRNA sense strand
guaccacuguaagucauga

SEQ ID NO: 470308 - RNA, 19 nt, Homo sapiens
  misc_RNA (1)...(19): siRNA sense strand
caccgauguucuaaagauu

SEQ ID NO: 470309 - RNA, 19 nt, Homo sapiens
  misc_RNA (1)...(19): siRNA sense strand
gcuaaagaggcuucaaauc

SEQ ID NO: 470310 - RNA, 19 nt, Homo sapiens
  misc_RNA (1)...(19): siRNA sense strand
uagaacguuuagaagauga

SEQ ID NO: 470311 - RNA, 19 nt, Homo sapiens
  misc_RNA (1)...(19): siRNA sense strand
aaugaugggcgauacaauu

SEQ ID NO: 470312 - RNA, 19 nt, Homo sapiens
  misc_RNA (1)...(19): siRNA sense strand
gcuaccagucuaugauauu

SEQ ID NO: 470313 - RNA, 19 nt, Homo sapiens
  misc_RNA (1)...(19): siRNA sense strand
gaugcccguuucaaagaga

SEQ ID NO: 470314 - RNA, 19 nt, Homo sapiens
  misc_RNA (1)...(19): siRNA sense strand
uuacauacgagcagcuaaa

SEQ ID NO: 470315 - RNA, 19 nt, Homo sapiens
  misc_RNA (1)...(19): siRNA sense strand
gcuuauucguagaacguuu

SEQ ID NO: 470316 - RNA, 19 nt, Homo sapiens
  misc_RNA (1)...(19): siRNA sense strand
gaagcgcuuauucguagaa

SEQ ID NO: 470317 - RNA, 19 nt, Homo sapiens
  misc_RNA (1)...(19): siRNA sense strand
ucgcaucuguaaagaggaa

SEQ ID NO: 470318 - RNA, 19 nt, Homo sapiens
  misc_RNA (1)...(19): siRNA sense strand
ccagaaaaguaccacugua

SEQ ID NO: 470319 - RNA, 19 nt, Homo sapiens
  misc_RNA (1)...(19): siRNA sense strand
gaacguuuagaagaugaaa

SEQ ID NO: 470320 - RNA, 19 nt, Homo sapiens
  misc_RNA (1)...(19): siRNA sense strand
guucgaacucgcaugauga

SEQ ID NO: 470321 - RNA, 19 nt, Homo sapiens
  misc_RNA (1)...(19): siRNA sense strand
cacuguaagucaugagaug

SEQ ID NO: 470322 - RNA, 19 nt, Homo sapiens
  misc_RNA (1)...(19): siRNA sense strand
gcgauacaauuuuaacuca

SEQ ID NO: 470323 - RNA, 19 nt, Homo sapiens
  misc_RNA (1)...(19): siRNA sense strand
uaagacaagcaucauaugg

SEQ ID NO: 470324 - RNA, 19 nt, Homo sapiens
  misc_RNA (1)...(19): siRNA sense strand
gugauaucuuccacuauag

SEQ ID NO: 470325 - RNA, 19 nt, Homo sapiens
  misc_RNA (1)...(19): siRNA sense strand
guuuccagcuuuacaugug

SEQ ID NO: 470326 - RNA, 19 nt, Homo sapiens
  misc_RNA (1)...(19): siRNA sense strand
gaaugaugggcgauacaau

SEQ ID NO: 470327 - RNA, 19 nt, Homo sapiens
  misc_RNA (1)...(19): siRNA sense strand
gauauauaccaacaagaag

SEQ ID NO: 470328 - RNA, 19 nt, Homo sapiens
  misc_RNA (1)...(19): siRNA sense strand
gauuggaagcuuuaucgau

SEQ ID NO: 470329 - RNA, 19 nt, Homo sapiens
  misc_RNA (1)...(19): siRNA sense strand
gaaaaguaccacuguaagu

SEQ ID NO: 470330 - RNA, 19 nt, Homo sapiens
  misc_RNA (1)...(19): siRNA sense strand
acauguggaucucuauaag

SEQ ID NO: 470331 - RNA, 19 nt, Homo sapiens
  misc_RNA (1)...(19): siRNA sense strand
aaaguaccacuguaaguca

SEQ ID NO: 470332 - RNA, 19 nt, Homo sapiens
  misc_RNA (1)...(19): siRNA sense strand
ggagcaugauuggaagcuu

SEQ ID NO: 470333 - RNA, 19 nt, Homo sapiens
  misc_RNA (1)...(19): siRNA sense strand
ggauuuaccaaagcuugaa

SEQ ID NO: 470334 - RNA, 19 nt, Homo sapiens
  misc_RNA (1)...(19): siRNA sense strand
cauacgagcagcuaaagag

SEQ ID NO: 470335 - RNA, 19 nt, Homo sapiens
  misc_RNA (1)...(19): siRNA sense strand
uauaagggcacuguugaug

SEQ ID NO: 470336 - RNA, 19 nt, Homo sapiens
  misc_RNA (1)...(19): siRNA sense strand
ugggacauguggaucucua

SEQ ID NO: 470337 - RNA, 19 nt, Homo sapiens
  misc_RNA (1)...(19): siRNA sense strand
gggauuuaccaaagcuuga

SEQ ID NO: 470338 - RNA, 19 nt, Homo sapiens
  misc_RNA (1)...(19): siRNA sense strand
auuggaaacccuuuguaua

SEQ ID NO: 470339 - RNA, 19 nt, Homo sapiens
  misc_RNA (1)...(19): siRNA sense strand
ucuauaagggcacuguuga

SEQ ID NO: 470340 - RNA, 19 nt, Homo sapiens
  misc_RNA (1)...(19): siRNA sense strand
cccggaauaauccuaauuu

SEQ ID NO: 470341 - RNA, 19 nt, Homo sapiens
  misc_RNA (1)...(19): siRNA sense strand
cgaaugcaggcucaaggaa

SEQ ID NO: 470342 - RNA, 19 nt, Homo sapiens
  misc_RNA (1)...(19): siRNA sense strand
gggcaaucgugggacaugu

SEQ ID NO: 470343 - RNA, 19 nt, Homo sapiens
  misc_RNA (1)...(19): siRNA sense strand
cuuggacccuggaacauca

SEQ ID NO: 470344 - RNA, 19 nt, Homo sapiens
  misc_RNA (1)...(19): siRNA sense strand
cagaaaaguaccacuguaa

SEQ ID NO: 470345 - RNA, 19 nt, Homo sapiens
  misc_RNA (1)...(19): siRNA sense strand
cuuauucguagaacguuua

SEQ ID NO: 470346 - RNA, 19 nt, Homo sapiens
  misc_RNA (1)...(19): siRNA sense strand
gguucaaggccaaagcauu

SEQ ID NO: 470347 - RNA, 19 nt, Homo sapiens
  misc_RNA (1)...(19): siRNA sense strand
aauauugucaggaaugaug

SEQ ID NO: 470348 - RNA, 19 nt, Homo sapiens
  misc_RNA (1)...(19): siRNA sense strand
gauguucuaaagauucgaa

SEQ ID NO: 470349 - RNA, 19 nt, Homo sapiens
  misc_RNA (1)...(19): siRNA sense strand
uagccaaucccaccgaugu

SEQ ID NO: 470350 - RNA, 19 nt, Homo sapiens
  misc_RNA (1)...(19): siRNA sense strand
gaauugcuccugcguugcu

SEQ ID NO: 470351 - RNA, 19 nt, Homo sapiens
  misc_RNA (1)...(19): siRNA sense strand
ucccaccgauguucuaaag

SEQ ID NO: 470352 - RNA, 19 nt, Homo sapiens
  misc_RNA (1)...(19): siRNA sense strand
cuaagacaagcaucauaug

SEQ ID NO: 470353 - RNA, 19 nt, Homo sapiens
  misc_RNA (1)...(19): siRNA sense strand
ggacccuggaacaucauuu

SEQ ID NO: 470354 - RNA, 19 nt, Homo sapiens
  misc_RNA (1)...(19): siRNA sense strand
ugcacucuauaaaggauuu

SEQ ID NO: 470355 - RNA, 19 nt, Homo sapiens
  misc_RNA (1)...(19): siRNA sense strand
ccucuaucguggcugaguu

SEQ ID NO: 470356 - RNA, 19 nt, Homo sapiens
  misc_RNA (1)...(19): siRNA sense strand
uuggaagcuuuaucgauau

SEQ ID NO: 470357 - RNA, 19 nt, Homo sapiens
  misc_RNA (1)...(19): siRNA sense strand
ugaauuggaaacccuuugu

SEQ ID NO: 470358 - RNA, 19 nt, Homo sapiens
  misc_RNA (1)...(19): siRNA sense strand
gagaugucuggucugaauu

SEQ ID NO: 470359 - RNA, 19 nt, Homo sapiens
  misc_RNA (1)...(19): siRNA sense strand
augaugggcgauacaauuu

SEQ ID NO: 470360 - RNA, 19 nt, Homo sapiens
  misc_RNA (1)...(19): siRNA sense strand
ucguagaacguuuagaaga

SEQ ID NO: 470361 - RNA, 19 nt, Homo sapiens
  misc_RNA (1)...(19): siRNA sense strand
cuugaagcgcuuauucgua

SEQ ID NO: 470362 - RNA, 19 nt, Homo sapiens
  misc_RNA (1)...(19): siRNA sense strand
auucguagaacguuuagaa

SEQ ID NO: 470363 - RNA, 19 nt, Homo sapiens
  misc_RNA (1)...(19): siRNA sense strand
caaucccaccgauguucua

SEQ ID NO: 470364 - RNA, 19 nt, Homo sapiens
  misc_RNA (1)...(19): siRNA sense strand
uaaagaggcuucaaaucua

SEQ ID NO: 470365 - RNA, 19 nt, Homo sapiens
  misc_RNA (1)...(19): siRNA sense strand
gagcaugauuggaagcuuu

SEQ ID NO: 470366 - RNA, 19 nt, Homo sapiens
  misc_RNA (1)...(19): siRNA sense strand
aaagaggcuucaaaucuaa

SEQ ID NO: 470367 - RNA, 19 nt, Homo sapiens
  misc_RNA (1)...(19): siRNA sense strand
cuaccagucuaugauauua

SEQ ID NO: 470368 - RNA, 19 nt, Homo sapiens
  misc_RNA (1)...(19): siRNA sense strand
ggaaacccuuuguauaugg

SEQ ID NO: 470369 - RNA, 19 nt, Homo sapiens
  misc_RNA (1)...(19): siRNA sense strand
ugagaugucuggucugaau

SEQ ID NO: 470370 - RNA, 19 nt, Homo sapiens
  misc_RNA (1)...(19): siRNA sense strand
ucacuucguuuccagcuuu

SEQ ID NO: 470371 - RNA, 19 nt, Homo sapiens
  misc_RNA (1)...(19): siRNA sense strand
caagggagcaugauuggaa

SEQ ID NO: 470372 - RNA, 19 nt, Homo sapiens
  misc_RNA (1)...(19): siRNA sense strand
uaaagaggaagguguauug

SEQ ID NO: 470373 - RNA, 19 nt, Homo sapiens
  misc_RNA (1)...(19): siRNA sense strand
auuggaagcuuuaucgaua

SEQ ID NO: 470374 - RNA, 19 nt, Homo sapiens
  misc_RNA (1)...(19): siRNA sense strand
aaacacgacuucagguuca

SEQ ID NO: 470375 - RNA, 19 nt, Homo sapiens
  misc_RNA (1)...(19): siRNA sense strand
ggacauguggaucucuaua

SEQ ID NO: 470376 - RNA, 19 nt, Homo sapiens
  misc_RNA (1)...(19): siRNA sense strand
ccaccgauguucuaaagau

SEQ ID NO: 470377 - RNA, 19 nt, Homo sapiens
  misc_RNA (1)...(19): siRNA sense strand
uguauuggcucucuauuca

SEQ ID NO: 470378 - RNA, 19 nt, Homo sapiens
  misc_RNA (1)...(19): siRNA sense strand
gagcuaccagucuaugaua

SEQ ID NO: 470379 - RNA, 19 nt, Homo sapiens
  misc_RNA (1)...(19): siRNA sense strand
gaacucgcaugaugaacca

SEQ ID NO: 470380 - RNA, 19 nt, Homo sapiens
  misc_RNA (1)...(19): siRNA sense strand
gguagugucaggagugaua

SEQ ID NO: 470381 - RNA, 19 nt, Homo sapiens
  misc_RNA (1)...(19): siRNA sense strand
cuaaagaggcuucaaaucu

SEQ ID NO: 470382 - RNA, 19 nt, Homo sapiens
  misc_RNA (1)...(19): siRNA sense strand
cgauauauaccaacaagaa

SEQ ID NO: 470383 - RNA, 19 nt, Homo sapiens
  misc_RNA (1)...(19): siRNA sense strand
gauguuccaugcgcuguuu

SEQ ID NO: 470384 - RNA, 19 nt, Homo sapiens
  misc_RNA (1)...(19): siRNA sense strand
guagaacguuuagaagaug

SEQ ID NO: 470385 - RNA, 19 nt, Homo sapiens
  misc_RNA (1)...(19): siRNA sense strand
gcuaagacaagcaucauau

SEQ ID NO: 470386 - RNA, 19 nt, Homo sapiens
  misc_RNA (1)...(19): siRNA sense strand
gaugggcgauacaauuuua

SEQ ID NO: 470387 - RNA, 19 nt, Homo sapiens
  misc_RNA (1)...(19): siRNA sense strand
caugagaugucuggucuga

SEQ ID NO: 470388 - RNA, 19 nt, Homo sapiens
  misc_RNA (1)...(19): siRNA sense strand
cguagaacguuuagaagau

SEQ ID NO: 470389 - RNA, 19 nt, Homo sapiens
  misc_RNA (1)...(19): siRNA sense strand
gaauuggaaacccuuugua

SEQ ID NO: 470390 - RNA, 19 nt, Homo sapiens
  misc_RNA (1)...(19): siRNA sense strand
guucaaggccaaagcauug

SEQ ID NO: 470391 - RNA, 19 nt, Homo sapiens
  misc_RNA (1)...(19): siRNA sense strand
ugucuggucugaauuggaa

SEQ ID NO: 470392 - RNA, 19 nt, Homo sapiens
  misc_RNA (1)...(19): siRNA sense strand
gacauguggaucucuauaa

SEQ ID NO: 470393 - RNA, 19 nt, Homo sapiens
  misc_RNA (1)...(19): siRNA sense strand
gaagguguauuggcucucu

SEQ ID NO: 470394 - RNA, 19 nt, Homo sapiens
  misc_RNA (1)...(19): siRNA sense strand
guggaaacaugagggcuuu

SEQ ID NO: 470395 - RNA, 19 nt, Homo sapiens
  misc_RNA (1)...(19): siRNA sense strand
uggaagcuuuaucgauaua

SEQ ID NO: 470396 - RNA, 19 nt, Homo sapiens
  misc_RNA (1)...(19): siRNA sense strand
gguucgaacucgcaugaug

SEQ ID NO: 470397 - RNA, 19 nt, Homo sapiens
  misc_RNA (1)...(19): siRNA sense strand
uaagggcacuguugauggu

SEQ ID NO: 470398 - RNA, 19 nt, Homo sapiens
  misc_RNA (1)...(19): siRNA sense strand
ugucaggagugauaucuuc

SEQ ID NO: 470399 - RNA, 19 nt, Homo sapiens
  misc_RNA (1)...(19): siRNA sense strand
uggaaacccuuuguauaug

SEQ ID NO: 470400 - RNA, 19 nt, Homo sapiens
  misc_RNA (1)...(19): siRNA sense strand
uuggaaacccuuuguauau

SEQ ID NO: 470401 - RNA, 19 nt, Homo sapiens
  misc_RNA (1)...(19): siRNA sense strand
ggaaugaugggcgauacaa

SEQ ID NO: 470402 - RNA, 19 nt, Homo sapiens
  misc_RNA (1)...(19): siRNA sense strand
ugccaucguuguaggagua

SEQ ID NO: 470403 - RNA, 19 nt, Homo sapiens
  misc_RNA (1)...(19): siRNA sense strand
guaaagaggaagguguauu

SEQ ID NO: 470404 - RNA, 19 nt, Homo sapiens
  misc_RNA (1)...(19): siRNA sense strand
uggcugaguuugggacuuu

SEQ ID NO: 470405 - RNA, 19 nt, Homo sapiens
  misc_RNA (1)...(19): siRNA sense strand
gggcacuguugaugguauu

SEQ ID NO: 470406 - RNA, 19 nt, Homo sapiens
  misc_RNA (1)...(19): siRNA sense strand
cagcuaaagaggcuucaaa

SEQ ID NO: 470407 - RNA, 19 nt, Homo sapiens
  misc_RNA (1)...(19): siRNA sense strand
guaccacuguaagucauga

SEQ ID NO: 470408 - RNA, 19 nt, Homo sapiens
  misc_RNA (1)...(19): siRNA sense strand
caccgauguucuaaagauu

SEQ ID NO: 470409 - RNA, 19 nt, Homo sapiens
  misc_RNA (1)...(19): siRNA sense strand
gcuaaagaggcuucaaauc

SEQ ID NO: 470410 - RNA, 19 nt, Homo sapiens
  misc_RNA (1)...(19): siRNA sense strand
uagaacguuuagaagauga

SEQ ID NO: 470411 - RNA, 19 nt, Homo sapiens
  misc_RNA (1)...(19): siRNA sense strand
aaugaugggcgauacaauu

SEQ ID NO: 470412 - RNA, 19 nt, Homo sapiens
  misc_RNA (1)...(19): siRNA sense strand
gcuaccagucuaugauauu

SEQ ID NO: 470413 - RNA, 19 nt, Homo sapiens
  misc_RNA (1)...(19): siRNA sense strand
gaugcccguuucaaagaga

SEQ ID NO: 470414 - RNA, 19 nt, Homo sapiens
  misc_RNA (1)...(19): siRNA sense strand
uuacauacgagcagcuaaa

SEQ ID NO: 470415 - RNA, 19 nt, Homo sapiens
  misc_RNA (1)...(19): siRNA sense strand
gcuuauucguagaacguuu

SEQ ID NO: 470416 - RNA, 19 nt, Homo sapiens
  misc_RNA (1)...(19): siRNA sense strand
gaagcgcuuauucguagaa

SEQ ID NO: 470417 - RNA, 19 nt, Homo sapiens
  misc_RNA (1)...(19): siRNA sense strand
ucgcaucuguaaagaggaa

SEQ ID NO: 470418 - RNA, 19 nt, Homo sapiens
  misc_RNA (1)...(19): siRNA sense strand
ccagaaaaguaccacugua

SEQ ID NO: 470419 - RNA, 19 nt, Homo sapiens
  misc_RNA (1)...(19): siRNA sense strand
gaacguuuagaagaugaaa

SEQ ID NO: 470420 - RNA, 19 nt, Homo sapiens
  misc_RNA (1)...(19): siRNA sense strand
guucgaacucgcaugauga

SEQ ID NO: 470421 - RNA, 19 nt, Homo sapiens
  misc_RNA (1)...(19): siRNA sense strand
cacuguaagucaugagaug

SEQ ID NO: 470422 - RNA, 19 nt, Homo sapiens
  misc_RNA (1)...(19): siRNA sense strand
gcgauacaauuuuaacuca

SEQ ID NO: 470423 - RNA, 19 nt, Homo sapiens
  misc_RNA (1)...(19): siRNA sense strand
uaagacaagcaucauaugg

SEQ ID NO: 470424 - RNA, 19 nt, Homo sapiens
  misc_RNA (1)...(19): siRNA sense strand
gugauaucuuccacuauag

SEQ ID NO: 470425 - RNA, 19 nt, Homo sapiens
  misc_RNA (1)...(19): siRNA sense strand
guuuccagcuuuacaugug

SEQ ID NO: 470426 - RNA, 19 nt, Homo sapiens
  misc_RNA (1)...(19): siRNA sense strand
gaaugaugggcgauacaau

SEQ ID NO: 470427 - RNA, 19 nt, Homo sapiens
  misc_RNA (1)...(19): siRNA sense strand
gauauauaccaacaagaag

SEQ ID NO: 470428 - RNA, 19 nt, Homo sapiens
  misc_RNA (1)...(19): siRNA sense strand
gauuggaagcuuuaucgau

SEQ ID NO: 470429 - RNA, 19 nt, Homo sapiens
  misc_RNA (1)...(19): siRNA sense strand
gaaaaguaccacuguaagu

SEQ ID NO: 470430 - RNA, 19 nt, Homo sapiens
  misc_RNA (1)...(19): siRNA sense strand
acauguggaucucuauaag

SEQ ID NO: 470431 - RNA, 19 nt, Homo sapiens
  misc_RNA (1)...(19): siRNA sense strand
aaaguaccacuguaaguca

SEQ ID NO: 470432 - RNA, 19 nt, Homo sapiens
  misc_RNA (1)...(19): siRNA sense strand
ggagcaugauuggaagcuu

SEQ ID NO: 470433 - RNA, 19 nt, Homo sapiens
  misc_RNA (1)...(19): siRNA sense strand
ggauuuaccaaagcuugaa

SEQ ID NO: 470434 - RNA, 19 nt, Homo sapiens
  misc_RNA (1)...(19): siRNA sense strand
cauacgagcagcuaaagag

SEQ ID NO: 470435 - RNA, 19 nt, Homo sapiens
  misc_RNA (1)...(19): siRNA sense strand
uauaagggcacuguugaug

SEQ ID NO: 470436 - RNA, 19 nt, Homo sapiens
  misc_RNA (1)...(19): siRNA sense strand
ugggacauguggaucucua

SEQ ID NO: 470437 - RNA, 19 nt, Homo sapiens
  misc_RNA (1)...(19): siRNA sense strand
gggauuuaccaaagcuuga

SEQ ID NO: 470438 - RNA, 19 nt, Homo sapiens
  misc_RNA (1)...(19): siRNA sense strand
auuggaaacccuuuguaua

SEQ ID NO: 470439 - RNA, 19 nt, Homo sapiens
  misc_RNA (1)...(19): siRNA sense strand
ucuauaagggcacuguuga

SEQ ID NO: 470440 - RNA, 19 nt, Homo sapiens
  misc_RNA (1)...(19): siRNA sense strand
cccggaauaauccuaauuu

SEQ ID NO: 470441 - RNA, 19 nt, Homo sapiens
  misc_RNA (1)...(19): siRNA sense strand
cgaaugcaggcucaaggaa

SEQ ID NO: 470442 - RNA, 19 nt, Homo sapiens
  misc_RNA (1)...(19): siRNA sense strand
gggcaaucgugggacaugu

SEQ ID NO: 470443 - RNA, 19 nt, Homo sapiens
  misc_RNA (1)...(19): siRNA sense strand
cuuggacccuggaacauca

SEQ ID NO: 470444 - RNA, 19 nt, Homo sapiens
  misc_RNA (1)...(19): siRNA sense strand
cagaaaaguaccacuguaa

SEQ ID NO: 470445 - RNA, 19 nt, Homo sapiens
  misc_RNA (1)...(19): siRNA sense strand
cuuauucguagaacguuua

SEQ ID NO: 470446 - RNA, 19 nt, Homo sapiens
  misc_RNA (1)...(19): siRNA sense strand
gguucaaggccaaagcauu

SEQ ID NO: 470447 - RNA, 19 nt, Homo sapiens
  misc_RNA (1)...(19): siRNA sense strand
aauauugucaggaaugaug

SEQ ID NO: 470448 - RNA, 19 nt, Homo sapiens
  misc_RNA (1)...(19): siRNA sense strand
gauguucuaaagauucgaa

SEQ ID NO: 470449 - RNA, 19 nt, Homo sapiens
  misc_RNA (1)...(19): siRNA sense strand
uagccaaucccaccgaugu

SEQ ID NO: 470450 - RNA, 19 nt, Homo sapiens
  misc_RNA (1)...(19): siRNA sense strand
gaauugcuccugcguugcu

SEQ ID NO: 470451 - RNA, 19 nt, Homo sapiens
  misc_RNA (1)...(19): siRNA sense strand
ucccaccgauguucuaaag

SEQ ID NO: 470452 - RNA, 19 nt, Homo sapiens
  misc_RNA (1)...(19): siRNA sense strand
cuaagacaagcaucauaug

SEQ ID NO: 470453 - RNA, 19 nt, Homo sapiens
  misc_RNA (1)...(19): siRNA sense strand
ggacccuggaacaucauuu

SEQ ID NO: 470454 - RNA, 19 nt, Homo sapiens
  misc_RNA (1)...(19): siRNA sense strand
ugcacucuauaaaggauuu

SEQ ID NO: 470455 - RNA, 19 nt, Homo sapiens
  misc_RNA (1)...(19): siRNA sense strand
ccucuaucguggcugaguu

SEQ ID NO: 470456 - RNA, 19 nt, Homo sapiens
  misc_RNA (1)...(19): siRNA sense strand
uuggaagcuuuaucgauau

SEQ ID NO: 470457 - RNA, 19 nt, Homo sapiens
  misc_RNA (1)...(19): siRNA sense strand
ugaauuggaaacccuuugu

SEQ ID NO: 470458 - RNA, 19 nt, Homo sapiens
  misc_RNA (1)...(19): siRNA sense strand
gagaugucuggucugaauu

SEQ ID NO: 470459 - RNA, 19 nt, Homo sapiens
  misc_RNA (1)...(19): siRNA sense strand
augaugggcgauacaauuu

SEQ ID NO: 470460 - RNA, 19 nt, Homo sapiens
  misc_RNA (1)...(19): siRNA sense strand
ucguagaacguuuagaaga

SEQ ID NO: 470461 - RNA, 19 nt, Homo sapiens
  misc_RNA (1)...(19): siRNA sense strand
cuugaagcgcuuauucgua

SEQ ID NO: 470462 - RNA, 19 nt, Homo sapiens
  misc_RNA (1)...(19): siRNA sense strand
auucguagaacguuuagaa

SEQ ID NO: 470463 - RNA, 19 nt, Homo sapiens
  misc_RNA (1)...(19): siRNA sense strand
caaucccaccgauguucua

SEQ ID NO: 470464 - RNA, 19 nt, Homo sapiens
  misc_RNA (1)...(19): siRNA sense strand
gaagaaugccgauauguuu

SEQ ID NO: 470465 - RNA, 19 nt, Homo sapiens
  misc_RNA (1)...(19): siRNA sense strand
gaacacaacccaucuacaa

SEQ ID NO: 470466 - RNA, 19 nt, Homo sapiens
  misc_RNA (1)...(19): siRNA sense strand
guacaucucugaccagguu

SEQ ID NO: 470467 - RNA, 19 nt, Homo sapiens
  misc_RNA (1)...(19): siRNA sense strand
gaaagccaaugaagaguau

SEQ ID NO: 470468 - RNA, 19 nt, Homo sapiens
  misc_RNA (1)...(19): siRNA sense strand
gagcagacgugcccuccua

SEQ ID NO: 470469 - RNA, 19 nt, Homo sapiens
  misc_RNA (1)...(19): siRNA sense strand
gaaaguggacacacacaaa

SEQ ID NO: 470470 - RNA, 19 nt, Homo sapiens
  misc_RNA (1)...(19): siRNA sense strand
gagaguacaucacguugga

SEQ ID NO: 470471 - RNA, 19 nt, Homo sapiens
  misc_RNA (1)...(19): siRNA sense strand
gaaaaucuccuucaucauu

SEQ ID NO: 470472 - RNA, 19 nt, Homo sapiens
  misc_RNA (1)...(19): siRNA sense strand
gaauggauacgcggaauuu

SEQ ID NO: 470473 - RNA, 19 nt, Homo sapiens
  misc_RNA (1)...(19): siRNA sense strand
gcauggaggagaaaucuuu

SEQ ID NO: 470474 - RNA, 19 nt, Homo sapiens
  misc_RNA (1)...(19): siRNA sense strand
cuucagcgaugccaaguuu

SEQ ID NO: 470475 - RNA, 19 nt, Homo sapiens
  misc_RNA (1)...(19): siRNA sense strand
gcauccauauuucacugua

SEQ ID NO: 470476 - RNA, 19 nt, Homo sapiens
  misc_RNA (1)...(19): siRNA sense strand
ggacaugagaccaacgaaa

SEQ ID NO: 470477 - RNA, 19 nt, Homo sapiens
  misc_RNA (1)...(19): siRNA sense strand
ccaacaaggugcugagagu

SEQ ID NO: 470478 - RNA, 19 nt, Homo sapiens
  misc_RNA (1)...(19): siRNA sense strand
ugaccagguugcauccaua

SEQ ID NO: 470479 - RNA, 19 nt, Homo sapiens
  misc_RNA (1)...(19): siRNA sense strand
ccagguugcauccauauuu

SEQ ID NO: 470480 - RNA, 19 nt, Homo sapiens
  misc_RNA (1)...(19): siRNA sense strand
gaggagauggagagcguua

SEQ ID NO: 470481 - RNA, 19 nt, Homo sapiens
  misc_RNA (1)...(19): siRNA sense strand
gcaguggagcagauucuuu

SEQ ID NO: 470482 - RNA, 19 nt, Homo sapiens
  misc_RNA (1)...(19): siRNA sense strand
ugaaagccaaugaagagua

SEQ ID NO: 470483 - RNA, 19 nt, Homo sapiens
  misc_RNA (1)...(19): siRNA sense strand
ggaaaagccacgagaauga

SEQ ID NO: 470484 - RNA, 19 nt, Homo sapiens
  misc_RNA (1)...(19): siRNA sense strand
ugaagaaugccgauauguu

SEQ ID NO: 470485 - RNA, 19 nt, Homo sapiens
  misc_RNA (1)...(19): siRNA sense strand
aagaaugcauggaggagaa

SEQ ID NO: 470486 - RNA, 19 nt, Homo sapiens
  misc_RNA (1)...(19): siRNA sense strand
ggugaaagccaaugaagag

SEQ ID NO: 470487 - RNA, 19 nt, Homo sapiens
  misc_RNA (1)...(19): siRNA sense strand
ggacacacacaaagaacug

SEQ ID NO: 470488 - RNA, 19 nt, Homo sapiens
  misc_RNA (1)...(19): siRNA sense strand
gcgggcagccuuucgacua

SEQ ID NO: 470489 - RNA, 19 nt, Homo sapiens
  misc_RNA (1)...(19): siRNA sense strand
cgaccagucuucgaaagug

SEQ ID NO: 470490 - RNA, 19 nt, Homo sapiens
  misc_RNA (1)...(19): siRNA sense strand
cagguugcauccauauuuc

SEQ ID NO: 470491 - RNA, 19 nt, Homo sapiens
  misc_RNA (1)...(19): siRNA sense strand
ccaccucccugcagacaag

SEQ ID NO: 470492 - RNA, 19 nt, Homo sapiens
  misc_RNA (1)...(19): siRNA sense strand
caaccacccauacaccaaa

SEQ ID NO: 470493 - RNA, 19 nt, Homo sapiens
  misc_RNA (1)...(19): siRNA sense strand
cauccauauuucacuguaa

SEQ ID NO: 470494 - RNA, 19 nt, Homo sapiens
  misc_RNA (1)...(19): siRNA sense strand
acacacaaagaacugauaa

SEQ ID NO: 470495 - RNA, 19 nt, Homo sapiens
  misc_RNA (1)...(19): siRNA sense strand
gcaggugaaagccaaugaa

SEQ ID NO: 470496 - RNA, 19 nt, Homo sapiens
  misc_RNA (1)...(19): siRNA sense strand
gggugggcccuuugaauga

SEQ ID NO: 470497 - RNA, 19 nt, Homo sapiens
  misc_RNA (1)...(19): siRNA sense strand
cacaacccaucuacaagug

SEQ ID NO: 470498 - RNA, 19 nt, Homo sapiens
  misc_RNA (1)...(19): siRNA sense strand
gggcagccuuucgacuauu

SEQ ID NO: 470499 - RNA, 19 nt, Homo sapiens
  misc_RNA (1)...(19): siRNA sense strand
ccagaguccagauaccuuu

SEQ ID NO: 470500 - RNA, 19 nt, Homo sapiens
  misc_RNA (1)...(19): siRNA sense strand
aagccaaugaagaguauua

SEQ ID NO: 470501 - RNA, 19 nt, Homo sapiens
  misc_RNA (1)...(19): siRNA sense strand
guagcgaccagucuucgaa

SEQ ID NO: 470502 - RNA, 19 nt, Homo sapiens
  misc_RNA (1)...(19): siRNA sense strand
ugugaagaaugccgauaug

SEQ ID NO: 470503 - RNA, 19 nt, Homo sapiens
  misc_RNA (1)...(19): siRNA sense strand
gacaugagaccaacgaaaa

SEQ ID NO: 470504 - RNA, 19 nt, Homo sapiens
  misc_RNA (1)...(19): siRNA sense strand
ccuagaauuccuccugaaa

SEQ ID NO: 470505 - RNA, 19 nt, Homo sapiens
  misc_RNA (1)...(19): siRNA sense strand
ccacccauacaccaaauug

SEQ ID NO: 470506 - RNA, 19 nt, Homo sapiens
  misc_RNA (1)...(19): siRNA sense strand
gcaguagcgaccagucuuc

SEQ ID NO: 470507 - RNA, 19 nt, Homo sapiens
  misc_RNA (1)...(19): siRNA sense strand
cccauacaccaaauuguuu

SEQ ID NO: 470508 - RNA, 19 nt, Homo sapiens
  misc_RNA (1)...(19): siRNA sense strand
cagaguccagauaccuuua

SEQ ID NO: 470509 - RNA, 19 nt, Homo sapiens
  misc_RNA (1)...(19): siRNA sense strand
ccaaugaagaguauuacca

SEQ ID NO: 470510 - RNA, 19 nt, Homo sapiens
  misc_RNA (1)...(19): siRNA sense strand
cuucgaaaguggacacaca

SEQ ID NO: 470511 - RNA, 19 nt, Homo sapiens
  misc_RNA (1)...(19): siRNA sense strand
ggcaaaaucugaacacaac

SEQ ID NO: 470512 - RNA, 19 nt, Homo sapiens
  misc_RNA (1)...(19): siRNA sense strand
cgggcagccuuucgacuau

SEQ ID NO: 470513 - RNA, 19 nt, Homo sapiens
  misc_RNA (1)...(19): siRNA sense strand
acacaacccaucuacaagu

SEQ ID NO: 470514 - RNA, 19 nt, Homo sapiens
  misc_RNA (1)...(19): siRNA sense strand
ggcagccuuucgacuauuc

SEQ ID NO: 470515 - RNA, 19 nt, Homo sapiens
  misc_RNA (1)...(19): siRNA sense strand
agaaugaaauccgcuacca

SEQ ID NO: 470516 - RNA, 19 nt, Homo sapiens
  misc_RNA (1)...(19): siRNA sense strand
gaaaagccacgagaaugaa

SEQ ID NO: 470517 - RNA, 19 nt, Homo sapiens
  misc_RNA (1)...(19): siRNA sense strand
cugggaagauccuguacau

SEQ ID NO: 470518 - RNA, 19 nt, Homo sapiens
  misc_RNA (1)...(19): siRNA sense strand
cgaaaguggacacacacaa

SEQ ID NO: 470519 - RNA, 19 nt, Homo sapiens
  misc_RNA (1)...(19): siRNA sense strand
gaccagguugcauccauau

SEQ ID NO: 470520 - RNA, 19 nt, Homo sapiens
  misc_RNA (1)...(19): siRNA sense strand
aaaaucuccuucaucauug

SEQ ID NO: 470521 - RNA, 19 nt, Homo sapiens
  misc_RNA (1)...(19): siRNA sense strand
uuucgacuauucucccauu

SEQ ID NO: 470522 - RNA, 19 nt, Homo sapiens
  misc_RNA (1)...(19): siRNA sense strand
gagcagauucuuuuacuca

SEQ ID NO: 470523 - RNA, 19 nt, Homo sapiens
  misc_RNA (1)...(19): siRNA sense strand
caugugcaguggagcagau

SEQ ID NO: 470524 - RNA, 19 nt, Homo sapiens
  misc_RNA (1)...(19): siRNA sense strand
gagcgugaagcaggugaaa

SEQ ID NO: 470525 - RNA, 19 nt, Homo sapiens
  misc_RNA (1)...(19): siRNA sense strand
caaggugcgggaccaacaa

SEQ ID NO: 470526 - RNA, 19 nt, Homo sapiens
  misc_RNA (1)...(19): siRNA sense strand
guacgcuggccaccuugaa

SEQ ID NO: 470527 - RNA, 19 nt, Homo sapiens
  misc_RNA (1)...(19): siRNA sense strand
ccaguggacaugagaccaa

SEQ ID NO: 470528 - RNA, 19 nt, Homo sapiens
  misc_RNA (1)...(19): siRNA sense strand
ggaaggagcuggggaugcu

SEQ ID NO: 470529 - RNA, 19 nt, Homo sapiens
  misc_RNA (1)...(19): siRNA sense strand
cacacacaaagaacugaua

SEQ ID NO: 470530 - RNA, 19 nt, Homo sapiens
  misc_RNA (1)...(19): siRNA sense strand
agugcacucugguuaugaa

SEQ ID NO: 470531 - RNA, 19 nt, Homo sapiens
  misc_RNA (1)...(19): siRNA sense strand
aagaaugccgauauguuug

SEQ ID NO: 470532 - RNA, 19 nt, Homo sapiens
  misc_RNA (1)...(19): siRNA sense strand
cguuaccucugagcacauu

SEQ ID NO: 470533 - RNA, 19 nt, Homo sapiens
  misc_RNA (1)...(19): siRNA sense strand
gccaagggcaaggccagua

SEQ ID NO: 470534 - RNA, 19 nt, Homo sapiens
  misc_RNA (1)...(19): siRNA sense strand
gaagaaugccgauauguuu

SEQ ID NO: 470535 - RNA, 19 nt, Homo sapiens
  misc_RNA (1)...(19): siRNA sense strand
gaacacaacccaucuacaa

SEQ ID NO: 470536 - RNA, 19 nt, Homo sapiens
  misc_RNA (1)...(19): siRNA sense strand
guacaucucugaccagguu

SEQ ID NO: 470537 - RNA, 19 nt, Homo sapiens
  misc_RNA (1)...(19): siRNA sense strand
gaaagccaaugaagaguau

SEQ ID NO: 470538 - RNA, 19 nt, Homo sapiens
  misc_RNA (1)...(19): siRNA sense strand
gagcagacgugcccuccua

SEQ ID NO: 470539 - RNA, 19 nt, Homo sapiens
  misc_RNA (1)...(19): siRNA sense strand
gaaaguggacacacacaaa

SEQ ID NO: 470540 - RNA, 19 nt, Homo sapiens
  misc_RNA (1)...(19): siRNA sense strand
gagaguacaucacguugga

SEQ ID NO: 470541 - RNA, 19 nt, Homo sapiens
  misc_RNA (1)...(19): siRNA sense strand
gaaaaucuccuucaucauu

SEQ ID NO: 470542 - RNA, 19 nt, Homo sapiens
  misc_RNA (1)...(19): siRNA sense strand
gaauggauacgcggaauuu

SEQ ID NO: 470543 - RNA, 19 nt, Homo sapiens
  misc_RNA (1)...(19): siRNA sense strand
gcauggaggagaaaucuuu

SEQ ID NO: 470544 - RNA, 19 nt, Homo sapiens
  misc_RNA (1)...(19): siRNA sense strand
cuucagcgaugccaaguuu

SEQ ID NO: 470545 - RNA, 19 nt, Homo sapiens
  misc_RNA (1)...(19): siRNA sense strand
gcauccauauuucacugua

SEQ ID NO: 470546 - RNA, 19 nt, Homo sapiens
  misc_RNA (1)...(19): siRNA sense strand
ggacaugagaccaacgaaa

SEQ ID NO: 470547 - RNA, 19 nt, Homo sapiens
  misc_RNA (1)...(19): siRNA sense strand
ccaacaaggugcugagagu

SEQ ID NO: 470548 - RNA, 19 nt, Homo sapiens
  misc_RNA (1)...(19): siRNA sense strand
ugaccagguugcauccaua

SEQ ID NO: 470549 - RNA, 19 nt, Homo sapiens
  misc_RNA (1)...(19): siRNA sense strand
ccagguugcauccauauuu

SEQ ID NO: 470550 - RNA, 19 nt, Homo sapiens
  misc_RNA (1)...(19): siRNA sense strand
gaggagauggagagcguua

SEQ ID NO: 470551 - RNA, 19 nt, Homo sapiens
  misc_RNA (1)...(19): siRNA sense strand
gcaguggagcagauucuuu

SEQ ID NO: 470552 - RNA, 19 nt, Homo sapiens
  misc_RNA (1)...(19): siRNA sense strand
ugaaagccaaugaagagua

SEQ ID NO: 470553 - RNA, 19 nt, Homo sapiens
  misc_RNA (1)...(19): siRNA sense strand
ggaaaagccacgagaauga

SEQ ID NO: 470554 - RNA, 19 nt, Homo sapiens
  misc_RNA (1)...(19): siRNA sense strand
ugaagaaugccgauauguu

SEQ ID NO: 470555 - RNA, 19 nt, Homo sapiens
  misc_RNA (1)...(19): siRNA sense strand
aagaaugcauggaggagaa

SEQ ID NO: 470556 - RNA, 19 nt, Homo sapiens
  misc_RNA (1)...(19): siRNA sense strand
ggugaaagccaaugaagag

SEQ ID NO: 470557 - RNA, 19 nt, Homo sapiens
  misc_RNA (1)...(19): siRNA sense strand
ggacacacacaaagaacug

SEQ ID NO: 470558 - RNA, 19 nt, Homo sapiens
  misc_RNA (1)...(19): siRNA sense strand
gcgggcagccuuucgacua

SEQ ID NO: 470559 - RNA, 19 nt, Homo sapiens
  misc_RNA (1)...(19): siRNA sense strand
cgaccagucuucgaaagug

SEQ ID NO: 470560 - RNA, 19 nt, Homo sapiens
  misc_RNA (1)...(19): siRNA sense strand
cagguugcauccauauuuc

SEQ ID NO: 470561 - RNA, 19 nt, Homo sapiens
  misc_RNA (1)...(19): siRNA sense strand
ccaccucccugcagacaag

SEQ ID NO: 470562 - RNA, 19 nt, Homo sapiens
  misc_RNA (1)...(19): siRNA sense strand
caaccacccauacaccaaa

SEQ ID NO: 470563 - RNA, 19 nt, Homo sapiens
  misc_RNA (1)...(19): siRNA sense strand
cauccauauuucacuguaa

SEQ ID NO: 470564 - RNA, 19 nt, Homo sapiens
  misc_RNA (1)...(19): siRNA sense strand
acacacaaagaacugauaa

SEQ ID NO: 470565 - RNA, 19 nt, Homo sapiens
  misc_RNA (1)...(19): siRNA sense strand
gcaggugaaagccaaugaa

SEQ ID NO: 470566 - RNA, 19 nt, Homo sapiens
  misc_RNA (1)...(19): siRNA sense strand
gggugggcccuuugaauga

SEQ ID NO: 470567 - RNA, 19 nt, Homo sapiens
  misc_RNA (1)...(19): siRNA sense strand
cacaacccaucuacaagug

SEQ ID NO: 470568 - RNA, 19 nt, Homo sapiens
  misc_RNA (1)...(19): siRNA sense strand
gggcagccuuucgacuauu

SEQ ID NO: 470569 - RNA, 19 nt, Homo sapiens
  misc_RNA (1)...(19): siRNA sense strand
ccagaguccagauaccuuu

SEQ ID NO: 470570 - RNA, 19 nt, Homo sapiens
  misc_RNA (1)...(19): siRNA sense strand
aagccaaugaagaguauua

SEQ ID NO: 470571 - RNA, 19 nt, Homo sapiens
  misc_RNA (1)...(19): siRNA sense strand
guagcgaccagucuucgaa

SEQ ID NO: 470572 - RNA, 19 nt, Homo sapiens
  misc_RNA (1)...(19): siRNA sense strand
ugugaagaaugccgauaug

SEQ ID NO: 470573 - RNA, 19 nt, Homo sapiens
  misc_RNA (1)...(19): siRNA sense strand
gacaugagaccaacgaaaa

SEQ ID NO: 470574 - RNA, 19 nt, Homo sapiens
  misc_RNA (1)...(19): siRNA sense strand
ccuagaauuccuccugaaa

SEQ ID NO: 470575 - RNA, 19 nt, Homo sapiens
  misc_RNA (1)...(19): siRNA sense strand
ccacccauacaccaaauug

SEQ ID NO: 470576 - RNA, 19 nt, Homo sapiens
  misc_RNA (1)...(19): siRNA sense strand
gcaguagcgaccagucuuc

SEQ ID NO: 470577 - RNA, 19 nt, Homo sapiens
  misc_RNA (1)...(19): siRNA sense strand
cccauacaccaaauuguuu

SEQ ID NO: 470578 - RNA, 19 nt, Homo sapiens
  misc_RNA (1)...(19): siRNA sense strand
cagaguccagauaccuuua

SEQ ID NO: 470579 - RNA, 19 nt, Homo sapiens
  misc_RNA (1)...(19): siRNA sense strand
ccaaugaagaguauuacca

SEQ ID NO: 470580 - RNA, 19 nt, Homo sapiens
  misc_RNA (1)...(19): siRNA sense strand
cuucgaaaguggacacaca

SEQ ID NO: 470581 - RNA, 19 nt, Homo sapiens
  misc_RNA (1)...(19): siRNA sense strand
ggcaaaaucugaacacaac

SEQ ID NO: 470582 - RNA, 19 nt, Homo sapiens
  misc_RNA (1)...(19): siRNA sense strand
cgggcagccuuucgacuau

SEQ ID NO: 470583 - RNA, 19 nt, Homo sapiens
  misc_RNA (1)...(19): siRNA sense strand
acacaacccaucuacaagu

SEQ ID NO: 470584 - RNA, 19 nt, Homo sapiens
  misc_RNA (1)...(19): siRNA sense strand
ggcagccuuucgacuauuc

SEQ ID NO: 470585 - RNA, 19 nt, Homo sapiens
  misc_RNA (1)...(19): siRNA sense strand
agaaugaaauccgcuacca

SEQ ID NO: 470586 - RNA, 19 nt, Homo sapiens
  misc_RNA (1)...(19): siRNA sense strand
gaaaagccacgagaaugaa

SEQ ID NO: 470587 - RNA, 19 nt, Homo sapiens
  misc_RNA (1)...(19): siRNA sense strand
cugggaagauccuguacau

SEQ ID NO: 470588 - RNA, 19 nt, Homo sapiens
  misc_RNA (1)...(19): siRNA sense strand
cgaaaguggacacacacaa

SEQ ID NO: 470589 - RNA, 19 nt, Homo sapiens
  misc_RNA (1)...(19): siRNA sense strand
gaccagguugcauccauau

SEQ ID NO: 470590 - RNA, 19 nt, Homo sapiens
  misc_RNA (1)...(19): siRNA sense strand
aaaaucuccuucaucauug

SEQ ID NO: 470591 - RNA, 19 nt, Homo sapiens
  misc_RNA (1)...(19): siRNA sense strand
uuucgacuauucucccauu

SEQ ID NO: 470592 - RNA, 19 nt, Homo sapiens
  misc_RNA (1)...(19): siRNA sense strand
gagcagauucuuuuacuca

SEQ ID NO: 470593 - RNA, 19 nt, Homo sapiens
  misc_RNA (1)...(19): siRNA sense strand
caugugcaguggagcagau

SEQ ID NO: 470594 - RNA, 19 nt, Homo sapiens
  misc_RNA (1)...(19): siRNA sense strand
gagcgugaagcaggugaaa

SEQ ID NO: 470595 - RNA, 19 nt, Homo sapiens
  misc_RNA (1)...(19): siRNA sense strand
caaggugcgggaccaacaa

SEQ ID NO: 470596 - RNA, 19 nt, Homo sapiens
  misc_RNA (1)...(19): siRNA sense strand
guacgcuggccaccuugaa

SEQ ID NO: 470597 - RNA, 19 nt, Homo sapiens
  misc_RNA (1)...(19): siRNA sense strand
ccaguggacaugagaccaa

SEQ ID NO: 470598 - RNA, 19 nt, Homo sapiens
  misc_RNA (1)...(19): siRNA sense strand
ggaaggagcuggggaugcu

SEQ ID NO: 470599 - RNA, 19 nt, Homo sapiens
  misc_RNA (1)...(19): siRNA sense strand
cacacacaaagaacugaua

SEQ ID NO: 470600 - RNA, 19 nt, Homo sapiens
  misc_RNA (1)...(19): siRNA sense strand
agugcacucugguuaugaa

SEQ ID NO: 470601 - RNA, 19 nt, Homo sapiens
  misc_RNA (1)...(19): siRNA sense strand
aagaaugccgauauguuug

SEQ ID NO: 470602 - RNA, 19 nt, Homo sapiens
  misc_RNA (1)...(19): siRNA sense strand
cguuaccucugagcacauu

SEQ ID NO: 470603 - RNA, 19 nt, Homo sapiens
  misc_RNA (1)...(19): siRNA sense strand
gccaagggcaaggccagua

SEQ ID NO: 470604 - RNA, 19 nt, Homo sapiens
  misc_RNA (1)...(19): siRNA sense strand
ggagaugaauuugaccuua

SEQ ID NO: 470605 - RNA, 19 nt, Homo sapiens
  misc_RNA (1)...(19): siRNA sense strand
caugaccucuggaaguuua

SEQ ID NO: 470606 - RNA, 19 nt, Homo sapiens
  misc_RNA (1)...(19): siRNA sense strand
gagaugaauuugaccuuau

SEQ ID NO: 470607 - RNA, 19 nt, Homo sapiens
  misc_RNA (1)...(19): siRNA sense strand
acaaugagauuuacugcaa

SEQ ID NO: 470608 - RNA, 19 nt, Homo sapiens
  misc_RNA (1)...(19): siRNA sense strand
ggcaagaucauguacauuu

SEQ ID NO: 470609 - RNA, 19 nt, Homo sapiens
  misc_RNA (1)...(19): siRNA sense strand
gacauggacucuuaucugu

SEQ ID NO: 470610 - RNA, 19 nt, Homo sapiens
  misc_RNA (1)...(19): siRNA sense strand
guacaucuuuggugguuau

SEQ ID NO: 470611 - RNA, 19 nt, Homo sapiens
  misc_RNA (1)...(19): siRNA sense strand
gcugggaagucacauguau

SEQ ID NO: 470612 - RNA, 19 nt, Homo sapiens
  misc_RNA (1)...(19): siRNA sense strand
caaccgcauucgagucuuu

SEQ ID NO: 470613 - RNA, 19 nt, Homo sapiens
  misc_RNA (1)...(19): siRNA sense strand
gaauuugaccuuauagauc

SEQ ID NO: 470614 - RNA, 19 nt, Homo sapiens
  misc_RNA (1)...(19): siRNA sense strand
ccacaaugcugggaaguca

SEQ ID NO: 470615 - RNA, 19 nt, Homo sapiens
  misc_RNA (1)...(19): siRNA sense strand
cgccagugcugcuguauug

SEQ ID NO: 470616 - RNA, 19 nt, Homo sapiens
  misc_RNA (1)...(19): siRNA sense strand
cauucugacuuacacauuu

SEQ ID NO: 470617 - RNA, 19 nt, Homo sapiens
  misc_RNA (1)...(19): siRNA sense strand
gcaguguccuugcguugga

SEQ ID NO: 470618 - RNA, 19 nt, Homo sapiens
  misc_RNA (1)...(19): siRNA sense strand
gcaagaucauguacauuuu

SEQ ID NO: 470619 - RNA, 19 nt, Homo sapiens
  misc_RNA (1)...(19): siRNA sense strand
ugggcaagcuccuguggua

SEQ ID NO: 470620 - RNA, 19 nt, Homo sapiens
  misc_RNA (1)...(19): siRNA sense strand
ggacucuuaucuguacaaa

SEQ ID NO: 470621 - RNA, 19 nt, Homo sapiens
  misc_RNA (1)...(19): siRNA sense strand
gacauucacaagcuagaua

SEQ ID NO: 470622 - RNA, 19 nt, Homo sapiens
  misc_RNA (1)...(19): siRNA sense strand
caucuuuggugguuauaau

SEQ ID NO: 470623 - RNA, 19 nt, Homo sapiens
  misc_RNA (1)...(19): siRNA sense strand
cuagauaccagcaccauga

SEQ ID NO: 470624 - RNA, 19 nt, Homo sapiens
  misc_RNA (1)...(19): siRNA sense strand
ucaauacgcacaagugguu

SEQ ID NO: 470625 - RNA, 19 nt, Homo sapiens
  misc_RNA (1)...(19): siRNA sense strand
ugaaugccaugaccaccaa

SEQ ID NO: 470626 - RNA, 19 nt, Homo sapiens
  misc_RNA (1)...(19): siRNA sense strand
cauggacucuuaucuguac

SEQ ID NO: 470627 - RNA, 19 nt, Homo sapiens
  misc_RNA (1)...(19): siRNA sense strand
gcaaacuggccgugauuca

SEQ ID NO: 470628 - RNA, 19 nt, Homo sapiens
  misc_RNA (1)...(19): siRNA sense strand
gccauuccauuccaacaau

SEQ ID NO: 470629 - RNA, 19 nt, Homo sapiens
  misc_RNA (1)...(19): siRNA sense strand
acucuuaucuguacaaagg

SEQ ID NO: 470630 - RNA, 19 nt, Homo sapiens
  misc_RNA (1)...(19): siRNA sense strand
uggccgugauucaguauaa

SEQ ID NO: 470631 - RNA, 19 nt, Homo sapiens
  misc_RNA (1)...(19): siRNA sense strand
gaggaaggccugggagaug

SEQ ID NO: 470632 - RNA, 19 nt, Homo sapiens
  misc_RNA (1)...(19): siRNA sense strand
ugacauggacucuuaucug

SEQ ID NO: 470633 - RNA, 19 nt, Homo sapiens
  misc_RNA (1)...(19): siRNA sense strand
ugaagacucugugcaaacu

SEQ ID NO: 470634 - RNA, 19 nt, Homo sapiens
  misc_RNA (1)...(19): siRNA sense strand
uaggcaagaucauguacau

SEQ ID NO: 470635 - RNA, 19 nt, Homo sapiens
  misc_RNA (1)...(19): siRNA sense strand
cagugcugcuguauuguug

SEQ ID NO: 470636 - RNA, 19 nt, Homo sapiens
  misc_RNA (1)...(19): siRNA sense strand
uuacugcucuggugaagac

SEQ ID NO: 470637 - RNA, 19 nt, Homo sapiens
  misc_RNA (1)...(19): siRNA sense strand
ucugaagacucugugcaaa

SEQ ID NO: 470638 - RNA, 19 nt, Homo sapiens
  misc_RNA (1)...(19): siRNA sense strand
aggaaggccugggagauga

SEQ ID NO: 470639 - RNA, 19 nt, Homo sapiens
  misc_RNA (1)...(19): siRNA sense strand
uaugagacacugcgucaga

SEQ ID NO: 470640 - RNA, 19 nt, Homo sapiens
  misc_RNA (1)...(19): siRNA sense strand
acauucagccuguguccua

SEQ ID NO: 470641 - RNA, 19 nt, Homo sapiens
  misc_RNA (1)...(19): siRNA sense strand
ugagacacugcgucagaua

SEQ ID NO: 470642 - RNA, 19 nt, Homo sapiens
  misc_RNA (1)...(19): siRNA sense strand
guuuaauccuguguccuuu

SEQ ID NO: 470643 - RNA, 19 nt, Homo sapiens
  misc_RNA (1)...(19): siRNA sense strand
cgacacaguccuccuuugg

SEQ ID NO: 470644 - RNA, 19 nt, Homo sapiens
  misc_RNA (1)...(19): siRNA sense strand
ggaaggccugggagaugaa

SEQ ID NO: 470645 - RNA, 19 nt, Homo sapiens
  misc_RNA (1)...(19): siRNA sense strand
gcucuggugaagacuauga

SEQ ID NO: 470646 - RNA, 19 nt, Homo sapiens
  misc_RNA (1)...(19): siRNA sense strand
ggccugcaaugugcucuau

SEQ ID NO: 470647 - RNA, 19 nt, Homo sapiens
  misc_RNA (1)...(19): siRNA sense strand
gacgacacaguccuccuuu

SEQ ID NO: 470648 - RNA, 19 nt, Homo sapiens
  misc_RNA (1)...(19): siRNA sense strand
ccagugcugcuguauuguu

SEQ ID NO: 470649 - RNA, 19 nt, Homo sapiens
  misc_RNA (1)...(19): siRNA sense strand
caaugugcucuaugccuuu

SEQ ID NO: 470650 - RNA, 19 nt, Homo sapiens
  misc_RNA (1)...(19): siRNA sense strand
ccaacaaugagauuuacug

SEQ ID NO: 470651 - RNA, 19 nt, Homo sapiens
  misc_RNA (1)...(19): siRNA sense strand
gugcaaacuggccgugauu

SEQ ID NO: 470652 - RNA, 19 nt, Homo sapiens
  misc_RNA (1)...(19): siRNA sense strand
gauaccagcaccaugacau

SEQ ID NO: 470653 - RNA, 19 nt, Homo sapiens
  misc_RNA (1)...(19): siRNA sense strand
ugaaccggcacuuccauga

SEQ ID NO: 470654 - RNA, 19 nt, Homo sapiens
  misc_RNA (1)...(19): siRNA sense strand
gagacacugcgucagauag

SEQ ID NO: 470655 - RNA, 19 nt, Homo sapiens
  misc_RNA (1)...(19): siRNA sense strand
cgacgacacaguccuccuu

SEQ ID NO: 470656 - RNA, 19 nt, Homo sapiens
  misc_RNA (1)...(19): siRNA sense strand
ccugggagaugaauuugac

SEQ ID NO: 470657 - RNA, 19 nt, Homo sapiens
  misc_RNA (1)...(19): siRNA sense strand
ccuguuugccucaugauau

SEQ ID NO: 470658 - RNA, 19 nt, Homo sapiens
  misc_RNA (1)...(19): siRNA sense strand
acacucaaccguccucauc

SEQ ID NO: 470659 - RNA, 19 nt, Homo sapiens
  misc_RNA (1)...(19): siRNA sense strand
caugcgcuauggacacuca

SEQ ID NO: 470660 - RNA, 19 nt, Homo sapiens
  misc_RNA (1)...(19): siRNA sense strand
gacacugcgucagauagau

SEQ ID NO: 470661 - RNA, 19 nt, Homo sapiens
  misc_RNA (1)...(19): siRNA sense strand
uuaauccuguguccuuuac

SEQ ID NO: 470662 - RNA, 19 nt, Homo sapiens
  misc_RNA (1)...(19): siRNA sense strand
gcuuugggccauuccauuc

SEQ ID NO: 470663 - RNA, 19 nt, Homo sapiens
  misc_RNA (1)...(19): siRNA sense strand
agacacugcgucagauaga

SEQ ID NO: 470664 - RNA, 19 nt, Homo sapiens
  misc_RNA (1)...(19): siRNA sense strand
ggcaucggguauacuccuu

SEQ ID NO: 470665 - RNA, 19 nt, Homo sapiens
  misc_RNA (1)...(19): siRNA sense strand
ggccauuccauuccaacaa

SEQ ID NO: 470666 - RNA, 19 nt, Homo sapiens
  misc_RNA (1)...(19): siRNA sense strand
gcaaccgcauucgagucuu

SEQ ID NO: 470667 - RNA, 19 nt, Homo sapiens
  misc_RNA (1)...(19): siRNA sense strand
gaaccggcacuuccaugac

SEQ ID NO: 470668 - RNA, 19 nt, Homo sapiens
  misc_RNA (1)...(19): siRNA sense strand
ggaaggccauccugacaca

SEQ ID NO: 470669 - RNA, 19 nt, Homo sapiens
  misc_RNA (1)...(19): siRNA sense strand
ucaugaaccuccacaacaa

SEQ ID NO: 470670 - RNA, 19 nt, Homo sapiens
  misc_RNA (1)...(19): siRNA sense strand
gugcccagcuggccauuga

SEQ ID NO: 470671 - RNA, 19 nt, Homo sapiens
  misc_RNA (1)...(19): siRNA sense strand
gcagagcccucaugaaccu

SEQ ID NO: 470672 - RNA, 19 nt, Homo sapiens
  misc_RNA (1)...(19): siRNA sense strand
ggaggagacgugcgagaaa

SEQ ID NO: 470673 - RNA, 19 nt, Homo sapiens
  misc_RNA (1)...(19): siRNA sense strand
gguguggccuuugcaguga

SEQ ID NO: 470674 - RNA, 19 nt, Homo sapiens
  misc_RNA (1)...(19): siRNA sense strand
gcacugaaggagaaguuug

SEQ ID NO: 470675 - RNA, 19 nt, Homo sapiens
  misc_RNA (1)...(19): siRNA sense strand
cagcagagcccucaugaac

SEQ ID NO: 470676 - RNA, 19 nt, Homo sapiens
  misc_RNA (1)...(19): siRNA sense strand
gcuccacacucgacuccuu

SEQ ID NO: 470677 - RNA, 19 nt, Homo sapiens
  misc_RNA (1)...(19): siRNA sense strand
cagaugaggaccuggugua

SEQ ID NO: 470678 - RNA, 19 nt, Homo sapiens
  misc_RNA (1)...(19): siRNA sense strand
ggccgcacaugcaacaaga

SEQ ID NO: 470679 - RNA, 19 nt, Homo sapiens
  misc_RNA (1)...(19): siRNA sense strand
gagaagugcggcugugaca

SEQ ID NO: 470680 - RNA, 19 nt, Homo sapiens
  misc_RNA (1)...(19): siRNA sense strand
ucaagccgcacacagauga

SEQ ID NO: 470681 - RNA, 19 nt, Homo sapiens
  misc_RNA (1)...(19): siRNA sense strand
gaggagacgugcgagaaac

SEQ ID NO: 470682 - RNA, 19 nt, Homo sapiens
  misc_RNA (1)...(19): siRNA sense strand
augaggaccugguguacuu

SEQ ID NO: 470683 - RNA, 19 nt, Homo sapiens
  misc_RNA (1)...(19): siRNA sense strand
cgucuucgccgucuucuca

SEQ ID NO: 470684 - RNA, 19 nt, Homo sapiens
  misc_RNA (1)...(19): siRNA sense strand
gaaacucaagggccugauc

SEQ ID NO: 470685 - RNA, 19 nt, Homo sapiens
  misc_RNA (1)...(19): siRNA sense strand
agaggcaggugcagaugug

SEQ ID NO: 470686 - RNA, 19 nt, Homo sapiens
  misc_RNA (1)...(19): siRNA sense strand
gucacgcacugaaggagaa

SEQ ID NO: 470687 - RNA, 19 nt, Homo sapiens
  misc_RNA (1)...(19): siRNA sense strand
ggagugccaguaccaguuc

SEQ ID NO: 470688 - RNA, 19 nt, Homo sapiens
  misc_RNA (1)...(19): siRNA sense strand
gaaggagaaguuugauggu

SEQ ID NO: 470689 - RNA, 19 nt, Homo sapiens
  misc_RNA (1)...(19): siRNA sense strand
gcaagcggaaccuggaagu

SEQ ID NO: 470690 - RNA, 19 nt, Homo sapiens
  misc_RNA (1)...(19): siRNA sense strand
ccacgcaacgcacaguuca

SEQ ID NO: 470691 - RNA, 19 nt, Homo sapiens
  misc_RNA (1)...(19): siRNA sense strand
guggggagcuggagaagug

SEQ ID NO: 470692 - RNA, 19 nt, Homo sapiens
  misc_RNA (1)...(19): siRNA sense strand
ccauugaggagugccagua

SEQ ID NO: 470693 - RNA, 19 nt, Homo sapiens
  misc_RNA (1)...(19): siRNA sense strand
gaaccuccacaacaaugag

SEQ ID NO: 470694 - RNA, 19 nt, Homo sapiens
  misc_RNA (1)...(19): siRNA sense strand
guucaagccgcacacagau

SEQ ID NO: 470695 - RNA, 19 nt, Homo sapiens
  misc_RNA (1)...(19): siRNA sense strand
ggugcugcuucgucaagug

SEQ ID NO: 470696 - RNA, 19 nt, Homo sapiens
  misc_RNA (1)...(19): siRNA sense strand
gaaaguagaacgaaucgaa

SEQ ID NO: 470697 - RNA, 19 nt, Homo sapiens
  misc_RNA (1)...(19): siRNA sense strand
caaagagaguuaugacuau

SEQ ID NO: 470698 - RNA, 19 nt, Homo sapiens
  misc_RNA (1)...(19): siRNA sense strand
gagaugaugugaaaguaga

SEQ ID NO: 470699 - RNA, 19 nt, Homo sapiens
  misc_RNA (1)...(19): siRNA sense strand
ccaaagagaguuaugacua

SEQ ID NO: 470700 - RNA, 19 nt, Homo sapiens
  misc_RNA (1)...(19): siRNA sense strand
gaggagacuucgaugagaa

SEQ ID NO: 470701 - RNA, 19 nt, Homo sapiens
  misc_RNA (1)...(19): siRNA sense strand
ucgaugagaaucugaauua

SEQ ID NO: 470702 - RNA, 19 nt, Homo sapiens
  misc_RNA (1)...(19): siRNA sense strand
ggacacacacacaaauuug

SEQ ID NO: 470703 - RNA, 19 nt, Homo sapiens
  misc_RNA (1)...(19): siRNA sense strand
ccacaccggugcaacaguu

SEQ ID NO: 470704 - RNA, 19 nt, Homo sapiens
  misc_RNA (1)...(19): siRNA sense strand
uauaaugccuuggaaacaa

SEQ ID NO: 470705 - RNA, 19 nt, Homo sapiens
  misc_RNA (1)...(19): siRNA sense strand
cuacaguggucaccuaugu

SEQ ID NO: 470706 - RNA, 19 nt, Homo sapiens
  misc_RNA (1)...(19): siRNA sense strand
ugaauuauccagaacagaa

SEQ ID NO: 470707 - RNA, 19 nt, Homo sapiens
  misc_RNA (1)...(19): siRNA sense strand
ucauuuguguugauggaua

SEQ ID NO: 470708 - RNA, 19 nt, Homo sapiens
  misc_RNA (1)...(19): siRNA sense strand
aauuggagaugaugugaaa

SEQ ID NO: 470709 - RNA, 19 nt, Homo sapiens
  misc_RNA (1)...(19): siRNA sense strand
gaacgaaucgaauacaaaa

SEQ ID NO: 470710 - RNA, 19 nt, Homo sapiens
  misc_RNA (1)...(19): siRNA sense strand
cacauucucugcacaggaa

SEQ ID NO: 470711 - RNA, 19 nt, Homo sapiens
  misc_RNA (1)...(19): siRNA sense strand
gggacacacacacaaauuu

SEQ ID NO: 470712 - RNA, 19 nt, Homo sapiens
  misc_RNA (1)...(19): siRNA sense strand
gaauuauccagaacagaaa

SEQ ID NO: 470713 - RNA, 19 nt, Homo sapiens
  misc_RNA (1)...(19): siRNA sense strand
caggaaaccuuugcaccaa

SEQ ID NO: 470714 - RNA, 19 nt, Homo sapiens
  misc_RNA (1)...(19): siRNA sense strand
gcaccaaagagaguuauga

SEQ ID NO: 470715 - RNA, 19 nt, Homo sapiens
  misc_RNA (1)...(19): siRNA sense strand
uagaacgaaucgaauacaa

SEQ ID NO: 470716 - RNA, 19 nt, Homo sapiens
  misc_RNA (1)...(19): siRNA sense strand
gaugagaaucugaauuauc

SEQ ID NO: 470717 - RNA, 19 nt, Homo sapiens
  misc_RNA (1)...(19): siRNA sense strand
gagaggagacuucgaugag

SEQ ID NO: 470718 - RNA, 19 nt, Homo sapiens
  misc_RNA (1)...(19): siRNA sense strand
gacucuggcuggugauguu

SEQ ID NO: 470719 - RNA, 19 nt, Homo sapiens
  misc_RNA (1)...(19): siRNA sense strand
auaaugccuuggaaacaaa

SEQ ID NO: 470720 - RNA, 19 nt, Homo sapiens
  misc_RNA (1)...(19): siRNA sense strand
gacacacacacaaauuuga

SEQ ID NO: 470721 - RNA, 19 nt, Homo sapiens
  misc_RNA (1)...(19): siRNA sense strand
uggagaugaugugaaagua

SEQ ID NO: 470722 - RNA, 19 nt, Homo sapiens
  misc_RNA (1)...(19): siRNA sense strand
gcagaggcaauuugaugug

SEQ ID NO: 470723 - RNA, 19 nt, Homo sapiens
  misc_RNA (1)...(19): siRNA sense strand
cacacaaauuugaagcauu

SEQ ID NO: 470724 - RNA, 19 nt, Homo sapiens
  misc_RNA (1)...(19): siRNA sense strand
cgaugagaaucugaauuau

SEQ ID NO: 470725 - RNA, 19 nt, Homo sapiens
  misc_RNA (1)...(19): siRNA sense strand
ggagaugaugugaaaguag

SEQ ID NO: 470726 - RNA, 19 nt, Homo sapiens
  misc_RNA (1)...(19): siRNA sense strand
cuauguguaucagcuaauu

SEQ ID NO: 470727 - RNA, 19 nt, Homo sapiens
  misc_RNA (1)...(19): siRNA sense strand
agaggagacuucgaugaga

SEQ ID NO: 470728 - RNA, 19 nt, Homo sapiens
  misc_RNA (1)...(19): siRNA sense strand
aaguagaacgaaucgaaua

SEQ ID NO: 470729 - RNA, 19 nt, Homo sapiens
  misc_RNA (1)...(19): siRNA sense strand
uugaagcauuugagcauga

SEQ ID NO: 470730 - RNA, 19 nt, Homo sapiens
  misc_RNA (1)...(19): siRNA sense strand
aaagagaguuaugacuauc

SEQ ID NO: 470731 - RNA, 19 nt, Homo sapiens
  misc_RNA (1)...(19): siRNA sense strand
ugaagcauuugagcaugaa

SEQ ID NO: 470732 - RNA, 19 nt, Homo sapiens
  misc_RNA (1)...(19): siRNA sense strand
acaguuugccagcuaaauu

SEQ ID NO: 470733 - RNA, 19 nt, Homo sapiens
  misc_RNA (1)...(19): siRNA sense strand
cuggugauguucauauugu

SEQ ID NO: 470734 - RNA, 19 nt, Homo sapiens
  misc_RNA (1)...(19): siRNA sense strand
agaacgaaucgaauacaaa

SEQ ID NO: 470735 - RNA, 19 nt, Homo sapiens
  misc_RNA (1)...(19): siRNA sense strand
cuucuacaguggucaccua

SEQ ID NO: 470736 - RNA, 19 nt, Homo sapiens
  misc_RNA (1)...(19): siRNA sense strand
acacacacacaaauuugaa

SEQ ID NO: 470737 - RNA, 19 nt, Homo sapiens
  misc_RNA (1)...(19): siRNA sense strand
ggcuggugauguucauauu

SEQ ID NO: 470738 - RNA, 19 nt, Homo sapiens
  misc_RNA (1)...(19): siRNA sense strand
ggugauguucauauuguga

SEQ ID NO: 470739 - RNA, 19 nt, Homo sapiens
  misc_RNA (1)...(19): siRNA sense strand
gaugugaaaguagaacgaa

SEQ ID NO: 470740 - RNA, 19 nt, Homo sapiens
  misc_RNA (1)...(19): siRNA sense strand
acacacaaauuugaagcau

SEQ ID NO: 470741 - RNA, 19 nt, Homo sapiens
  misc_RNA (1)...(19): siRNA sense strand
ugagaggagacuucgauga

SEQ ID NO: 470742 - RNA, 19 nt, Homo sapiens
  misc_RNA (1)...(19): siRNA sense strand
cagaaaguugugacuguug

SEQ ID NO: 470743 - RNA, 19 nt, Homo sapiens
  misc_RNA (1)...(19): siRNA sense strand
cauuuguguugauggauau

SEQ ID NO: 470744 - RNA, 19 nt, Homo sapiens
  misc_RNA (1)...(19): siRNA sense strand
cuacauuaauccagguucu

SEQ ID NO: 470745 - RNA, 19 nt, Homo sapiens
  misc_RNA (1)...(19): siRNA sense strand
agacuucgaugagaaucug

SEQ ID NO: 470746 - RNA, 19 nt, Homo sapiens
  misc_RNA (1)...(19): siRNA sense strand
caacaguuugccagcuaaa

SEQ ID NO: 470747 - RNA, 19 nt, Homo sapiens
  misc_RNA (1)...(19): siRNA sense strand
ucagcuaauuggagaugau

SEQ ID NO: 470748 - RNA, 19 nt, Homo sapiens
  misc_RNA (1)...(19): siRNA sense strand
gccuuggaaacaaacauua

SEQ ID NO: 470749 - RNA, 19 nt, Homo sapiens
  misc_RNA (1)...(19): siRNA sense strand
gaaaguugugacuguugga

SEQ ID NO: 470750 - RNA, 19 nt, Homo sapiens
  misc_RNA (1)...(19): siRNA sense strand
cauauaaugccuuggaaac

SEQ ID NO: 470751 - RNA, 19 nt, Homo sapiens
  misc_RNA (1)...(19): siRNA sense strand
aguuaugacuaucucaaga

SEQ ID NO: 470752 - RNA, 19 nt, Homo sapiens
  misc_RNA (1)...(19): siRNA sense strand
gcuaauuggagaugaugug

SEQ ID NO: 470753 - RNA, 19 nt, Homo sapiens
  misc_RNA (1)...(19): siRNA sense strand
augagaaucugaauuaucc

SEQ ID NO: 470754 - RNA, 19 nt, Homo sapiens
  misc_RNA (1)...(19): siRNA sense strand
gcuggugauguucauauug

SEQ ID NO: 470755 - RNA, 19 nt, Homo sapiens
  misc_RNA (1)...(19): siRNA sense strand
guagaacgaaucgaauaca

SEQ ID NO: 470756 - RNA, 19 nt, Homo sapiens
  misc_RNA (1)...(19): siRNA sense strand
aaaguagaacgaaucgaau

SEQ ID NO: 470757 - RNA, 19 nt, Homo sapiens
  misc_RNA (1)...(19): siRNA sense strand
cgggacacacacacaaauu

SEQ ID NO: 470758 - RNA, 19 nt, Homo sapiens
  misc_RNA (1)...(19): siRNA sense strand
caguuugccagcuaaauuc

SEQ ID NO: 470759 - RNA, 19 nt, Homo sapiens
  misc_RNA (1)...(19): siRNA sense strand
gaaaguagaacgaaucgaa

SEQ ID NO: 470760 - RNA, 19 nt, Homo sapiens
  misc_RNA (1)...(19): siRNA sense strand
caaagagaguuaugacuau

SEQ ID NO: 470761 - RNA, 19 nt, Homo sapiens
  misc_RNA (1)...(19): siRNA sense strand
gagaugaugugaaaguaga

SEQ ID NO: 470762 - RNA, 19 nt, Homo sapiens
  misc_RNA (1)...(19): siRNA sense strand
ccaaagagaguuaugacua

SEQ ID NO: 470763 - RNA, 19 nt, Homo sapiens
  misc_RNA (1)...(19): siRNA sense strand
gaggagacuucgaugagaa

SEQ ID NO: 470764 - RNA, 19 nt, Homo sapiens
  misc_RNA (1)...(19): siRNA sense strand
ucgaugagaaucugaauua

SEQ ID NO: 470765 - RNA, 19 nt, Homo sapiens
  misc_RNA (1)...(19): siRNA sense strand
ggacacacacacaaauuug

SEQ ID NO: 470766 - RNA, 19 nt, Homo sapiens
  misc_RNA (1)...(19): siRNA sense strand
ccacaccggugcaacaguu

SEQ ID NO: 470767 - RNA, 19 nt, Homo sapiens
  misc_RNA (1)...(19): siRNA sense strand
uauaaugccuuggaaacaa

SEQ ID NO: 470768 - RNA, 19 nt, Homo sapiens
  misc_RNA (1)...(19): siRNA sense strand
cuacaguggucaccuaugu

SEQ ID NO: 470769 - RNA, 19 nt, Homo sapiens
  misc_RNA (1)...(19): siRNA sense strand
ugaauuauccagaacagaa

SEQ ID NO: 470770 - RNA, 19 nt, Homo sapiens
  misc_RNA (1)...(19): siRNA sense strand
ucauuuguguugauggaua

SEQ ID NO: 470771 - RNA, 19 nt, Homo sapiens
  misc_RNA (1)...(19): siRNA sense strand
aauuggagaugaugugaaa

SEQ ID NO: 470772 - RNA, 19 nt, Homo sapiens
  misc_RNA (1)...(19): siRNA sense strand
gaacgaaucgaauacaaaa

SEQ ID NO: 470773 - RNA, 19 nt, Homo sapiens
  misc_RNA (1)...(19): siRNA sense strand
cacauucucugcacaggaa

SEQ ID NO: 470774 - RNA, 19 nt, Homo sapiens
  misc_RNA (1)...(19): siRNA sense strand
gggacacacacacaaauuu

SEQ ID NO: 470775 - RNA, 19 nt, Homo sapiens
  misc_RNA (1)...(19): siRNA sense strand
gaauuauccagaacagaaa

SEQ ID NO: 470776 - RNA, 19 nt, Homo sapiens
  misc_RNA (1)...(19): siRNA sense strand
caggaaaccuuugcaccaa

SEQ ID NO: 470777 - RNA, 19 nt, Homo sapiens
  misc_RNA (1)...(19): siRNA sense strand
gcaccaaagagaguuauga

SEQ ID NO: 470778 - RNA, 19 nt, Homo sapiens
  misc_RNA (1)...(19): siRNA sense strand
uagaacgaaucgaauacaa

SEQ ID NO: 470779 - RNA, 19 nt, Homo sapiens
  misc_RNA (1)...(19): siRNA sense strand
gaugagaaucugaauuauc

SEQ ID NO: 470780 - RNA, 19 nt, Homo sapiens
  misc_RNA (1)...(19): siRNA sense strand
gagaggagacuucgaugag

SEQ ID NO: 470781 - RNA, 19 nt, Homo sapiens
  misc_RNA (1)...(19): siRNA sense strand
gacucuggcuggugauguu

SEQ ID NO: 470782 - RNA, 19 nt, Homo sapiens
  misc_RNA (1)...(19): siRNA sense strand
auaaugccuuggaaacaaa

SEQ ID NO: 470783 - RNA, 19 nt, Homo sapiens
  misc_RNA (1)...(19): siRNA sense strand
gacacacacacaaauuuga

SEQ ID NO: 470784 - RNA, 19 nt, Homo sapiens
  misc_RNA (1)...(19): siRNA sense strand
uggagaugaugugaaagua

SEQ ID NO: 470785 - RNA, 19 nt, Homo sapiens
  misc_RNA (1)...(19): siRNA sense strand
gcagaggcaauuugaugug

SEQ ID NO: 470786 - RNA, 19 nt, Homo sapiens
  misc_RNA (1)...(19): siRNA sense strand
cacacaaauuugaagcauu

SEQ ID NO: 470787 - RNA, 19 nt, Homo sapiens
  misc_RNA (1)...(19): siRNA sense strand
cgaugagaaucugaauuau

SEQ ID NO: 470788 - RNA, 19 nt, Homo sapiens
  misc_RNA (1)...(19): siRNA sense strand
ggagaugaugugaaaguag

SEQ ID NO: 470789 - RNA, 19 nt, Homo sapiens
  misc_RNA (1)...(19): siRNA sense strand
cuauguguaucagcuaauu

SEQ ID NO: 470790 - RNA, 19 nt, Homo sapiens
  misc_RNA (1)...(19): siRNA sense strand
agaggagacuucgaugaga

SEQ ID NO: 470791 - RNA, 19 nt, Homo sapiens
  misc_RNA (1)...(19): siRNA sense strand
aaguagaacgaaucgaaua

SEQ ID NO: 470792 - RNA, 19 nt, Homo sapiens
  misc_RNA (1)...(19): siRNA sense strand
uugaagcauuugagcauga

SEQ ID NO: 470793 - RNA, 19 nt, Homo sapiens
  misc_RNA (1)...(19): siRNA sense strand
aaagagaguuaugacuauc

SEQ ID NO: 470794 - RNA, 19 nt, Homo sapiens
  misc_RNA (1)...(19): siRNA sense strand
ugaagcauuugagcaugaa

SEQ ID NO: 470795 - RNA, 19 nt, Homo sapiens
  misc_RNA (1)...(19): siRNA sense strand
acaguuugccagcuaaauu

SEQ ID NO: 470796 - RNA, 19 nt, Homo sapiens
  misc_RNA (1)...(19): siRNA sense strand
cuggugauguucauauugu

SEQ ID NO: 470797 - RNA, 19 nt, Homo sapiens
  misc_RNA (1)...(19): siRNA sense strand
agaacgaaucgaauacaaa

SEQ ID NO: 470798 - RNA, 19 nt, Homo sapiens
  misc_RNA (1)...(19): siRNA sense strand
cuucuacaguggucaccua

SEQ ID NO: 470799 - RNA, 19 nt, Homo sapiens
  misc_RNA (1)...(19): siRNA sense strand
acacacacacaaauuugaa

SEQ ID NO: 470800 - RNA, 19 nt, Homo sapiens
  misc_RNA (1)...(19): siRNA sense strand
ggcuggugauguucauauu

SEQ ID NO: 470801 - RNA, 19 nt, Homo sapiens
  misc_RNA (1)...(19): siRNA sense strand
ggugauguucauauuguga

SEQ ID NO: 470802 - RNA, 19 nt, Homo sapiens
  misc_RNA (1)...(19): siRNA sense strand
gaugugaaaguagaacgaa

SEQ ID NO: 470803 - RNA, 19 nt, Homo sapiens
  misc_RNA (1)...(19): siRNA sense strand
acacacaaauuugaagcau

SEQ ID NO: 470804 - RNA, 19 nt, Homo sapiens
  misc_RNA (1)...(19): siRNA sense strand
ugagaggagacuucgauga

SEQ ID NO: 470805 - RNA, 19 nt, Homo sapiens
  misc_RNA (1)...(19): siRNA sense strand
cagaaaguugugacuguug

SEQ ID NO: 470806 - RNA, 19 nt, Homo sapiens
  misc_RNA (1)...(19): siRNA sense strand
cauuuguguugauggauau

SEQ ID NO: 470807 - RNA, 19 nt, Homo sapiens
  misc_RNA (1)...(19): siRNA sense strand
cuacauuaauccagguucu

SEQ ID NO: 470808 - RNA, 19 nt, Homo sapiens
  misc_RNA (1)...(19): siRNA sense strand
agacuucgaugagaaucug

SEQ ID NO: 470809 - RNA, 19 nt, Homo sapiens
  misc_RNA (1)...(19): siRNA sense strand
caacaguuugccagcuaaa

SEQ ID NO: 470810 - RNA, 19 nt, Homo sapiens
  misc_RNA (1)...(19): siRNA sense strand
ucagcuaauuggagaugau

SEQ ID NO: 470811 - RNA, 19 nt, Homo sapiens
  misc_RNA (1)...(19): siRNA sense strand
gccuuggaaacaaacauua

SEQ ID NO: 470812 - RNA, 19 nt, Homo sapiens
  misc_RNA (1)...(19): siRNA sense strand
gaaaguugugacuguugga

SEQ ID NO: 470813 - RNA, 19 nt, Homo sapiens
  misc_RNA (1)...(19): siRNA sense strand
cauauaaugccuuggaaac

SEQ ID NO: 470814 - RNA, 19 nt, Homo sapiens
  misc_RNA (1)...(19): siRNA sense strand
aguuaugacuaucucaaga

SEQ ID NO: 470815 - RNA, 19 nt, Homo sapiens
  misc_RNA (1)...(19): siRNA sense strand
gcuaauuggagaugaugug

SEQ ID NO: 470816 - RNA, 19 nt, Homo sapiens
  misc_RNA (1)...(19): siRNA sense strand
augagaaucugaauuaucc

SEQ ID NO: 470817 - RNA, 19 nt, Homo sapiens
  misc_RNA (1)...(19): siRNA sense strand
gcuggugauguucauauug

SEQ ID NO: 470818 - RNA, 19 nt, Homo sapiens
  misc_RNA (1)...(19): siRNA sense strand
guagaacgaaucgaauaca

SEQ ID NO: 470819 - RNA, 19 nt, Homo sapiens
  misc_RNA (1)...(19): siRNA sense strand
aaaguagaacgaaucgaau

SEQ ID NO: 470820 - RNA, 19 nt, Homo sapiens
  misc_RNA (1)...(19): siRNA sense strand
cgggacacacacacaaauu

SEQ ID NO: 470821 - RNA, 19 nt, Homo sapiens
  misc_RNA (1)...(19): siRNA sense strand
caguuugccagcuaaauuc

SEQ ID NO: 470822 - RNA, 19 nt, Homo sapiens
  misc_RNA (1)...(19): siRNA sense strand
guacugagcugggcaaaua

SEQ ID NO: 470823 - RNA, 19 nt, Homo sapiens
  misc_RNA (1)...(19): siRNA sense strand
cagcaaaucuuuauacaga

SEQ ID NO: 470824 - RNA, 19 nt, Homo sapiens
  misc_RNA (1)...(19): siRNA sense strand
ggacaaagcccgagcaaag

SEQ ID NO: 470825 - RNA, 19 nt, Homo sapiens
  misc_RNA (1)...(19): siRNA sense strand
ggaaaucuauccuccaaag

SEQ ID NO: 470826 - RNA, 19 nt, Homo sapiens
  misc_RNA (1)...(19): siRNA sense strand
ggacaauaaugcagucugu

SEQ ID NO: 470827 - RNA, 19 nt, Homo sapiens
  misc_RNA (1)...(19): siRNA sense strand
ggaggugugugaagucuau

SEQ ID NO: 470828 - RNA, 19 nt, Homo sapiens
  misc_RNA (1)...(19): siRNA sense strand
cuaaaugacuuacaugaag

SEQ ID NO: 470829 - RNA, 19 nt, Homo sapiens
  misc_RNA (1)...(19): siRNA sense strand
gggcgucgcugaugaagau

SEQ ID NO: 470830 - RNA, 19 nt, Homo sapiens
  misc_RNA (1)...(19): siRNA sense strand
gauguugacugccuugaau

SEQ ID NO: 470831 - RNA, 19 nt, Homo sapiens
  misc_RNA (1)...(19): siRNA sense strand
agaaagccauguugucuga

SEQ ID NO: 470832 - RNA, 19 nt, Homo sapiens
  misc_RNA (1)...(19): siRNA sense strand
ggauccagaugaagaaaug

SEQ ID NO: 470833 - RNA, 19 nt, Homo sapiens
  misc_RNA (1)...(19): siRNA sense strand
cagccaaacuugaggaaau

SEQ ID NO: 470834 - RNA, 19 nt, Homo sapiens
  misc_RNA (1)...(19): siRNA sense strand
gcaaagaaagccauguugu

SEQ ID NO: 470835 - RNA, 19 nt, Homo sapiens
  misc_RNA (1)...(19): siRNA sense strand
uguccuggcugaauguaua

SEQ ID NO: 470836 - RNA, 19 nt, Homo sapiens
  misc_RNA (1)...(19): siRNA sense strand
gugcaagccucggauuauu

SEQ ID NO: 470837 - RNA, 19 nt, Homo sapiens
  misc_RNA (1)...(19): siRNA sense strand
gagcaaagaaagccauguu

SEQ ID NO: 470838 - RNA, 19 nt, Homo sapiens
  misc_RNA (1)...(19): siRNA sense strand
ugaagaugcacacaacaua

SEQ ID NO: 470839 - RNA, 19 nt, Homo sapiens
  misc_RNA (1)...(19): siRNA sense strand
gcagguugcauaucuaaau

SEQ ID NO: 470840 - RNA, 19 nt, Homo sapiens
  misc_RNA (1)...(19): siRNA sense strand
gaggaagucuggaaaauca

SEQ ID NO: 470841 - RNA, 19 nt, Homo sapiens
  misc_RNA (1)...(19): siRNA sense strand
gcaaaagguuucaggguau

SEQ ID NO: 470842 - RNA, 19 nt, Homo sapiens
  misc_RNA (1)...(19): siRNA sense strand
gcucaaaacugaagcacuu

SEQ ID NO: 470843 - RNA, 19 nt, Homo sapiens
  misc_RNA (1)...(19): siRNA sense strand
cuuaagggaucagcacuuu

SEQ ID NO: 470844 - RNA, 19 nt, Homo sapiens
  misc_RNA (1)...(19): siRNA sense strand
caacauacagacccacaga

SEQ ID NO: 470845 - RNA, 19 nt, Homo sapiens
  misc_RNA (1)...(19): siRNA sense strand
uugcagagcuguuggaucu

SEQ ID NO: 470846 - RNA, 19 nt, Homo sapiens
  misc_RNA (1)...(19): siRNA sense strand
gggaucagcacuuucuuga

SEQ ID NO: 470847 - RNA, 19 nt, Homo sapiens
  misc_RNA (1)...(19): siRNA sense strand
aaucuauccuccaaaguug

SEQ ID NO: 470848 - RNA, 19 nt, Homo sapiens
  misc_RNA (1)...(19): siRNA sense strand
caaagaaagccauguuguc

SEQ ID NO: 470849 - RNA, 19 nt, Homo sapiens
  misc_RNA (1)...(19): siRNA sense strand
guauauggcgacacaagaa

SEQ ID NO: 470850 - RNA, 19 nt, Homo sapiens
  misc_RNA (1)...(19): siRNA sense strand
gaagaugcacacaacauac

SEQ ID NO: 470851 - RNA, 19 nt, Homo sapiens
  misc_RNA (1)...(19): siRNA sense strand
gcuucggccuuguaucauu

SEQ ID NO: 470852 - RNA, 19 nt, Homo sapiens
  misc_RNA (1)...(19): siRNA sense strand
acagagacagcuuggauuu

SEQ ID NO: 470853 - RNA, 19 nt, Homo sapiens
  misc_RNA (1)...(19): siRNA sense strand
gcaggauccagaugaagaa

SEQ ID NO: 470854 - RNA, 19 nt, Homo sapiens
  misc_RNA (1)...(19): siRNA sense strand
gacaaagcccgagcaaaga

SEQ ID NO: 470855 - RNA, 19 nt, Homo sapiens
  misc_RNA (1)...(19): siRNA sense strand
ccacagagacagcuuggau

SEQ ID NO: 470856 - RNA, 19 nt, Homo sapiens
  misc_RNA (1)...(19): siRNA sense strand
gaagaugaugaccggguuu

SEQ ID NO: 470857 - RNA, 19 nt, Homo sapiens
  misc_RNA (1)...(19): siRNA sense strand
cagguugcauaucuaaaug

SEQ ID NO: 470858 - RNA, 19 nt, Homo sapiens
  misc_RNA (1)...(19): siRNA sense strand
caccauggaauuaaugauu

SEQ ID NO: 470859 - RNA, 19 nt, Homo sapiens
  misc_RNA (1)...(19): siRNA sense strand
aaaucuauccuccaaaguu

SEQ ID NO: 470860 - RNA, 19 nt, Homo sapiens
  misc_RNA (1)...(19): siRNA sense strand
gcaaauagagaggaagucu

SEQ ID NO: 470861 - RNA, 19 nt, Homo sapiens
  misc_RNA (1)...(19): siRNA sense strand
uaucauuucucgucaucug

SEQ ID NO: 470862 - RNA, 19 nt, Homo sapiens
  misc_RNA (1)...(19): siRNA sense strand
ccaggaagaggaaggcaaa

SEQ ID NO: 470863 - RNA, 19 nt, Homo sapiens
  misc_RNA (1)...(19): siRNA sense strand
gagccagccuugggacaau

SEQ ID NO: 470864 - RNA, 19 nt, Homo sapiens
  misc_RNA (1)...(19): siRNA sense strand
uaauggaggugugugaagu

SEQ ID NO: 470865 - RNA, 19 nt, Homo sapiens
  misc_RNA (1)...(19): siRNA sense strand
caaacuugaggaaaucuau

SEQ ID NO: 470866 - RNA, 19 nt, Homo sapiens
  misc_RNA (1)...(19): siRNA sense strand
ugaugaagaugcacacaac

SEQ ID NO: 470867 - RNA, 19 nt, Homo sapiens
  misc_RNA (1)...(19): siRNA sense strand
cuccaaaguugcaccaguu

SEQ ID NO: 470868 - RNA, 19 nt, Homo sapiens
  misc_RNA (1)...(19): siRNA sense strand
auagagaacugugucaagu

SEQ ID NO: 470869 - RNA, 19 nt, Homo sapiens
  misc_RNA (1)...(19): siRNA sense strand
gcgagcaauucuucuggau

SEQ ID NO: 470870 - RNA, 19 nt, Homo sapiens
  misc_RNA (1)...(19): siRNA sense strand
cuucggccuuguaucauuu

SEQ ID NO: 470871 - RNA, 19 nt, Homo sapiens
  misc_RNA (1)...(19): siRNA sense strand
cgaaggagcgggacaccau

SEQ ID NO: 470872 - RNA, 19 nt, Homo sapiens
  misc_RNA (1)...(19): siRNA sense strand
caaagcccgagcaaagaaa

SEQ ID NO: 470873 - RNA, 19 nt, Homo sapiens
  misc_RNA (1)...(19): siRNA sense strand
gaauuuccuuaugguauac

SEQ ID NO: 470874 - RNA, 19 nt, Homo sapiens
  misc_RNA (1)...(19): siRNA sense strand
agacauacuuaagggauca

SEQ ID NO: 470875 - RNA, 19 nt, Homo sapiens
  misc_RNA (1)...(19): siRNA sense strand
gagaggaagucuggaaaau

SEQ ID NO: 470876 - RNA, 19 nt, Homo sapiens
  misc_RNA (1)...(19): siRNA sense strand
aaagaaagccauguugucu

SEQ ID NO: 470877 - RNA, 19 nt, Homo sapiens
  misc_RNA (1)...(19): siRNA sense strand
acaaagcccgagcaaagaa

SEQ ID NO: 470878 - RNA, 19 nt, Homo sapiens
  misc_RNA (1)...(19): siRNA sense strand
agagacagcuuggauuugc

SEQ ID NO: 470879 - RNA, 19 nt, Homo sapiens
  misc_RNA (1)...(19): siRNA sense strand
ggaagaggaaggcaaacgu

SEQ ID NO: 470880 - RNA, 19 nt, Homo sapiens
  misc_RNA (1)...(19): siRNA sense strand
gguauauggcgacacaaga

SEQ ID NO: 470881 - RNA, 19 nt, Homo sapiens
  misc_RNA (1)...(19): siRNA sense strand
uaagggaucagcacuuucu

SEQ ID NO: 470882 - RNA, 19 nt, Homo sapiens
  misc_RNA (1)...(19): siRNA sense strand
caaggaaaagacauacuua

SEQ ID NO: 470883 - RNA, 19 nt, Homo sapiens
  misc_RNA (1)...(19): siRNA sense strand
gaaaucuauccuccaaagu

SEQ ID NO: 470884 - RNA, 19 nt, Homo sapiens
  misc_RNA (1)...(19): siRNA sense strand
ggauguugacugccuugaa

SEQ ID NO: 470885 - RNA, 19 nt, Homo sapiens
  misc_RNA (1)...(19): siRNA sense strand
ugugacagauggagcuugu

SEQ ID NO: 470886 - RNA, 19 nt, Homo sapiens
  misc_RNA (1)...(19): siRNA sense strand
ugacaaagaagaugaugac

SEQ ID NO: 470887 - RNA, 19 nt, Homo sapiens
  misc_RNA (1)...(19): siRNA sense strand
gcuuggauuugcuggacaa

SEQ ID NO: 470888 - RNA, 19 nt, Homo sapiens
  misc_RNA (1)...(19): siRNA sense strand
ggaucucuguguccuggau

SEQ ID NO: 470889 - RNA, 19 nt, Homo sapiens
  misc_RNA (1)...(19): siRNA sense strand
ugacagauggagcuuguuc

SEQ ID NO: 470890 - RNA, 19 nt, Homo sapiens
  misc_RNA (1)...(19): siRNA sense strand
ugugugaagucuauaaacu

SEQ ID NO: 470891 - RNA, 19 nt, Homo sapiens
  misc_RNA (1)...(19): siRNA sense strand
ggaaaagacauacuuaagg

SEQ ID NO: 470892 - RNA, 19 nt, Homo sapiens
  misc_RNA (1)...(19): siRNA sense strand
gaauugaugcaaaagguuu

SEQ ID NO: 470893 - RNA, 19 nt, Homo sapiens
  misc_RNA (1)...(19): siRNA sense strand
gcaccaguuugcguaugug

SEQ ID NO: 470894 - RNA, 19 nt, Homo sapiens
  misc_RNA (1)...(19): siRNA sense strand
ccacaccugacaaagaaga

SEQ ID NO: 470895 - RNA, 19 nt, Homo sapiens
  misc_RNA (1)...(19): siRNA sense strand
uaucaguggugcgacauag

SEQ ID NO: 470896 - RNA, 19 nt, Homo sapiens
  misc_RNA (1)...(19): siRNA sense strand
ggugugugaagucuauaaa

SEQ ID NO: 470897 - RNA, 19 nt, Homo sapiens
  misc_RNA (1)...(19): siRNA sense strand
agaacugugucaaguggau

SEQ ID NO: 470898 - RNA, 19 nt, Homo sapiens
  misc_RNA (1)...(19): siRNA sense strand
gccuugaauuuccuuaugg

SEQ ID NO: 470899 - RNA, 19 nt, Homo sapiens
  misc_RNA (1)...(19): siRNA sense strand
ugccuugaauuuccuuaug

SEQ ID NO: 470900 - RNA, 19 nt, Homo sapiens
  misc_RNA (1)...(19): siRNA sense strand
cccagcaaaucuuuauaca

SEQ ID NO: 470901 - RNA, 19 nt, Homo sapiens
  misc_RNA (1)...(19): siRNA sense strand
ggagccagccuugggacaa

SEQ ID NO: 470902 - RNA, 19 nt, Homo sapiens
  misc_RNA (1)...(19): siRNA sense strand
ucggcucgcuccaggaaga

SEQ ID NO: 470903 - RNA, 19 nt, Homo sapiens
  misc_RNA (1)...(19): siRNA sense strand
ggugcgacauagagaacug

SEQ ID NO: 470904 - RNA, 19 nt, Homo sapiens
  misc_RNA (1)...(19): siRNA sense strand
uauauggcgacacaagaaa

SEQ ID NO: 470905 - RNA, 19 nt, Homo sapiens
  misc_RNA (1)...(19): siRNA sense strand
auacagacccacagagaca

SEQ ID NO: 470906 - RNA, 19 nt, Homo sapiens
  misc_RNA (1)...(19): siRNA sense strand
acauacagacccacagaga

SEQ ID NO: 470907 - RNA, 19 nt, Homo sapiens
  misc_RNA (1)...(19): siRNA sense strand
uagagaggaagucuggaaa

SEQ ID NO: 470908 - RNA, 19 nt, Homo sapiens
  misc_RNA (1)...(19): siRNA sense strand
gggcaaauagagaggaagu

SEQ ID NO: 470909 - RNA, 19 nt, Homo sapiens
  misc_RNA (1)...(19): siRNA sense strand
ggagcuuguucaggagaug

SEQ ID NO: 470910 - RNA, 19 nt, Homo sapiens
  misc_RNA (1)...(19): siRNA sense strand
cgagcaauucuucuggauu

SEQ ID NO: 470911 - RNA, 19 nt, Homo sapiens
  misc_RNA (1)...(19): siRNA sense strand
cauuugccaugguuauaag

SEQ ID NO: 470912 - RNA, 19 nt, Homo sapiens
  misc_RNA (1)...(19): siRNA sense strand
ucuguguccuggauguuga

SEQ ID NO: 470913 - RNA, 19 nt, Homo sapiens
  misc_RNA (1)...(19): siRNA sense strand
gaagaaauggccaaaaucg

SEQ ID NO: 470914 - RNA, 19 nt, Homo sapiens
  misc_RNA (1)...(19): siRNA sense strand
ccaaacuugaggaaaucua

SEQ ID NO: 470915 - RNA, 19 nt, Homo sapiens
  misc_RNA (1)...(19): siRNA sense strand
guaucaguggugcgacaua

SEQ ID NO: 470916 - RNA, 19 nt, Homo sapiens
  misc_RNA (1)...(19): siRNA sense strand
acggggagcucaaaacuga

SEQ ID NO: 470917 - RNA, 19 nt, Homo sapiens
  misc_RNA (1)...(19): siRNA sense strand
ccccacaccugacaaagaa

SEQ ID NO: 470918 - RNA, 19 nt, Homo sapiens
  misc_RNA (1)...(19): siRNA sense strand
aagaugaugaccggguuua

SEQ ID NO: 470919 - RNA, 19 nt, Homo sapiens
  misc_RNA (1)...(19): siRNA sense strand
uguaucauuucucgucauc

SEQ ID NO: 470920 - RNA, 19 nt, Homo sapiens
  misc_RNA (1)...(19): siRNA sense strand
augaaauucucaccaugga

SEQ ID NO: 470921 - RNA, 19 nt, Homo sapiens
  misc_RNA (1)...(19): siRNA sense strand
ccaguuugcguaugugaca

SEQ ID NO: 470922 - RNA, 19 nt, Homo sapiens
  misc_RNA (1)...(19): siRNA sense strand
guacugagcugggcaaaua

SEQ ID NO: 470923 - RNA, 19 nt, Homo sapiens
  misc_RNA (1)...(19): siRNA sense strand
cagcaaaucuuuauacaga

SEQ ID NO: 470924 - RNA, 19 nt, Homo sapiens
  misc_RNA (1)...(19): siRNA sense strand
ggacaaagcccgagcaaag

SEQ ID NO: 470925 - RNA, 19 nt, Homo sapiens
  misc_RNA (1)...(19): siRNA sense strand
ggaaaucuauccuccaaag

SEQ ID NO: 470926 - RNA, 19 nt, Homo sapiens
  misc_RNA (1)...(19): siRNA sense strand
ggacaauaaugcagucugu

SEQ ID NO: 470927 - RNA, 19 nt, Homo sapiens
  misc_RNA (1)...(19): siRNA sense strand
ggaggugugugaagucuau

SEQ ID NO: 470928 - RNA, 19 nt, Homo sapiens
  misc_RNA (1)...(19): siRNA sense strand
cuaaaugacuuacaugaag

SEQ ID NO: 470929 - RNA, 19 nt, Homo sapiens
  misc_RNA (1)...(19): siRNA sense strand
gggcgucgcugaugaagau

SEQ ID NO: 470930 - RNA, 19 nt, Homo sapiens
  misc_RNA (1)...(19): siRNA sense strand
gauguugacugccuugaau

SEQ ID NO: 470931 - RNA, 19 nt, Homo sapiens
  misc_RNA (1)...(19): siRNA sense strand
agaaagccauguugucuga

SEQ ID NO: 470932 - RNA, 19 nt, Homo sapiens
  misc_RNA (1)...(19): siRNA sense strand
ggauccagaugaagaaaug

SEQ ID NO: 470933 - RNA, 19 nt, Homo sapiens
  misc_RNA (1)...(19): siRNA sense strand
cagccaaacuugaggaaau

SEQ ID NO: 470934 - RNA, 19 nt, Homo sapiens
  misc_RNA (1)...(19): siRNA sense strand
gcaaagaaagccauguugu

SEQ ID NO: 470935 - RNA, 19 nt, Homo sapiens
  misc_RNA (1)...(19): siRNA sense strand
uguccuggcugaauguaua

SEQ ID NO: 470936 - RNA, 19 nt, Homo sapiens
  misc_RNA (1)...(19): siRNA sense strand
gugcaagccucggauuauu

SEQ ID NO: 470937 - RNA, 19 nt, Homo sapiens
  misc_RNA (1)...(19): siRNA sense strand
gagcaaagaaagccauguu

SEQ ID NO: 470938 - RNA, 19 nt, Homo sapiens
  misc_RNA (1)...(19): siRNA sense strand
ugaagaugcacacaacaua

SEQ ID NO: 470939 - RNA, 19 nt, Homo sapiens
  misc_RNA (1)...(19): siRNA sense strand
gcagguugcauaucuaaau

SEQ ID NO: 470940 - RNA, 19 nt, Homo sapiens
  misc_RNA (1)...(19): siRNA sense strand
gaggaagucuggaaaauca

SEQ ID NO: 470941 - RNA, 19 nt, Homo sapiens
  misc_RNA (1)...(19): siRNA sense strand
gcaaaagguuucaggguau

SEQ ID NO: 470942 - RNA, 19 nt, Homo sapiens
  misc_RNA (1)...(19): siRNA sense strand
gcucaaaacugaagcacuu

SEQ ID NO: 470943 - RNA, 19 nt, Homo sapiens
  misc_RNA (1)...(19): siRNA sense strand
cuuaagggaucagcacuuu

SEQ ID NO: 470944 - RNA, 19 nt, Homo sapiens
  misc_RNA (1)...(19): siRNA sense strand
caacauacagacccacaga

SEQ ID NO: 470945 - RNA, 19 nt, Homo sapiens
  misc_RNA (1)...(19): siRNA sense strand
uugcagagcuguuggaucu

SEQ ID NO: 470946 - RNA, 19 nt, Homo sapiens
  misc_RNA (1)...(19): siRNA sense strand
gggaucagcacuuucuuga

SEQ ID NO: 470947 - RNA, 19 nt, Homo sapiens
  misc_RNA (1)...(19): siRNA sense strand
aaucuauccuccaaaguug

SEQ ID NO: 470948 - RNA, 19 nt, Homo sapiens
  misc_RNA (1)...(19): siRNA sense strand
caaagaaagccauguuguc

SEQ ID NO: 470949 - RNA, 19 nt, Homo sapiens
  misc_RNA (1)...(19): siRNA sense strand
guauauggcgacacaagaa

SEQ ID NO: 470950 - RNA, 19 nt, Homo sapiens
  misc_RNA (1)...(19): siRNA sense strand
gaagaugcacacaacauac

SEQ ID NO: 470951 - RNA, 19 nt, Homo sapiens
  misc_RNA (1)...(19): siRNA sense strand
gcuucggccuuguaucauu

SEQ ID NO: 470952 - RNA, 19 nt, Homo sapiens
  misc_RNA (1)...(19): siRNA sense strand
acagagacagcuuggauuu

SEQ ID NO: 470953 - RNA, 19 nt, Homo sapiens
  misc_RNA (1)...(19): siRNA sense strand
gcaggauccagaugaagaa

SEQ ID NO: 470954 - RNA, 19 nt, Homo sapiens
  misc_RNA (1)...(19): siRNA sense strand
gacaaagcccgagcaaaga

SEQ ID NO: 470955 - RNA, 19 nt, Homo sapiens
  misc_RNA (1)...(19): siRNA sense strand
ccacagagacagcuuggau

SEQ ID NO: 470956 - RNA, 19 nt, Homo sapiens
  misc_RNA (1)...(19): siRNA sense strand
gaagaugaugaccggguuu

SEQ ID NO: 470957 - RNA, 19 nt, Homo sapiens
  misc_RNA (1)...(19): siRNA sense strand
cagguugcauaucuaaaug

SEQ ID NO: 470958 - RNA, 19 nt, Homo sapiens
  misc_RNA (1)...(19): siRNA sense strand
caccauggaauuaaugauu

SEQ ID NO: 470959 - RNA, 19 nt, Homo sapiens
  misc_RNA (1)...(19): siRNA sense strand
aaaucuauccuccaaaguu

SEQ ID NO: 470960 - RNA, 19 nt, Homo sapiens
  misc_RNA (1)...(19): siRNA sense strand
gcaaauagagaggaagucu

SEQ ID NO: 470961 - RNA, 19 nt, Homo sapiens
  misc_RNA (1)...(19): siRNA sense strand
uaucauuucucgucaucug

SEQ ID NO: 470962 - RNA, 19 nt, Homo sapiens
  misc_RNA (1)...(19): siRNA sense strand
ccaggaagaggaaggcaaa

SEQ ID NO: 470963 - RNA, 19 nt, Homo sapiens
  misc_RNA (1)...(19): siRNA sense strand
gagccagccuugggacaau

SEQ ID NO: 470964 - RNA, 19 nt, Homo sapiens
  misc_RNA (1)...(19): siRNA sense strand
uaauggaggugugugaagu

SEQ ID NO: 470965 - RNA, 19 nt, Homo sapiens
  misc_RNA (1)...(19): siRNA sense strand
caaacuugaggaaaucuau

SEQ ID NO: 470966 - RNA, 19 nt, Homo sapiens
  misc_RNA (1)...(19): siRNA sense strand
ugaugaagaugcacacaac

SEQ ID NO: 470967 - RNA, 19 nt, Homo sapiens
  misc_RNA (1)...(19): siRNA sense strand
cuccaaaguugcaccaguu

SEQ ID NO: 470968 - RNA, 19 nt, Homo sapiens
  misc_RNA (1)...(19): siRNA sense strand
auagagaacugugucaagu

SEQ ID NO: 470969 - RNA, 19 nt, Homo sapiens
  misc_RNA (1)...(19): siRNA sense strand
gcgagcaauucuucuggau

SEQ ID NO: 470970 - RNA, 19 nt, Homo sapiens
  misc_RNA (1)...(19): siRNA sense strand
cuucggccuuguaucauuu

SEQ ID NO: 470971 - RNA, 19 nt, Homo sapiens
  misc_RNA (1)...(19): siRNA sense strand
agacauacuuaagggauca

SEQ ID NO: 470972 - RNA, 19 nt, Homo sapiens
  misc_RNA (1)...(19): siRNA sense strand
caaagcccgagcaaagaaa

SEQ ID NO: 470973 - RNA, 19 nt, Homo sapiens
  misc_RNA (1)...(19): siRNA sense strand
gaauuuccuuaugguauac

SEQ ID NO: 470974 - RNA, 19 nt, Homo sapiens
  misc_RNA (1)...(19): siRNA sense strand
gagaggaagucuggaaaau

SEQ ID NO: 470975 - RNA, 19 nt, Homo sapiens
  misc_RNA (1)...(19): siRNA sense strand
aaagaaagccauguugucu

SEQ ID NO: 470976 - RNA, 19 nt, Homo sapiens
  misc_RNA (1)...(19): siRNA sense strand
acaaagcccgagcaaagaa

SEQ ID NO: 470977 - RNA, 19 nt, Homo sapiens
  misc_RNA (1)...(19): siRNA sense strand
agagacagcuuggauuugc

SEQ ID NO: 470978 - RNA, 19 nt, Homo sapiens
  misc_RNA (1)...(19): siRNA sense strand
ggaagaggaaggcaaacgu

SEQ ID NO: 470979 - RNA, 19 nt, Homo sapiens
  misc_RNA (1)...(19): siRNA sense strand
gguauauggcgacacaaga

SEQ ID NO: 470980 - RNA, 19 nt, Homo sapiens
  misc_RNA (1)...(19): siRNA sense strand
uaagggaucagcacuuucu

SEQ ID NO: 470981 - RNA, 19 nt, Homo sapiens
  misc_RNA (1)...(19): siRNA sense strand
caaggaaaagacauacuua

SEQ ID NO: 470982 - RNA, 19 nt, Homo sapiens
  misc_RNA (1)...(19): siRNA sense strand
gaaaucuauccuccaaagu

SEQ ID NO: 470983 - RNA, 19 nt, Homo sapiens
  misc_RNA (1)...(19): siRNA sense strand
ggauguugacugccuugaa

SEQ ID NO: 470984 - RNA, 19 nt, Homo sapiens
  misc_RNA (1)...(19): siRNA sense strand
ugacaaagaagaugaugac

SEQ ID NO: 470985 - RNA, 19 nt, Homo sapiens
  misc_RNA (1)...(19): siRNA sense strand
gcuuggauuugcuggacaa

SEQ ID NO: 470986 - RNA, 19 nt, Homo sapiens
  misc_RNA (1)...(19): siRNA sense strand
ggaucucuguguccuggau

SEQ ID NO: 470987 - RNA, 19 nt, Homo sapiens
  misc_RNA (1)...(19): siRNA sense strand
ugacagauggagcuuguuc

SEQ ID NO: 470988 - RNA, 19 nt, Homo sapiens
  misc_RNA (1)...(19): siRNA sense strand
ugugacagauggagcuugu

SEQ ID NO: 470989 - RNA, 19 nt, Homo sapiens
  misc_RNA (1)...(19): siRNA sense strand
ugugugaagucuauaaacu

SEQ ID NO: 470990 - RNA, 19 nt, Homo sapiens
  misc_RNA (1)...(19): siRNA sense strand
ggaaaagacauacuuaagg

SEQ ID NO: 470991 - RNA, 19 nt, Homo sapiens
  misc_RNA (1)...(19): siRNA sense strand
gaauugaugcaaaagguuu

SEQ ID NO: 470992 - RNA, 19 nt, Homo sapiens
  misc_RNA (1)...(19): siRNA sense strand
gcaccaguuugcguaugug

SEQ ID NO: 470993 - RNA, 19 nt, Homo sapiens
  misc_RNA (1)...(19): siRNA sense strand
ccacaccugacaaagaaga

SEQ ID NO: 470994 - RNA, 19 nt, Homo sapiens
  misc_RNA (1)...(19): siRNA sense strand
uaucaguggugcgacauag

SEQ ID NO: 470995 - RNA, 19 nt, Homo sapiens
  misc_RNA (1)...(19): siRNA sense strand
ggugugugaagucuauaaa

SEQ ID NO: 470996 - RNA, 19 nt, Homo sapiens
  misc_RNA (1)...(19): siRNA sense strand
agaacugugucaaguggau

SEQ ID NO: 470997 - RNA, 19 nt, Homo sapiens
  misc_RNA (1)...(19): siRNA sense strand
gccuugaauuuccuuaugg

SEQ ID NO: 470998 - RNA, 19 nt, Homo sapiens
  misc_RNA (1)...(19): siRNA sense strand
ugccuugaauuuccuuaug

SEQ ID NO: 470999 - RNA, 19 nt, Homo sapiens
  misc_RNA (1)...(19): siRNA sense strand
cccagcaaaucuuuauaca

SEQ ID NO: 471000 - RNA, 19 nt, Homo sapiens
  misc_RNA (1)...(19): siRNA sense strand
ggugcgacauagagaacug

SEQ ID NO: 471001 - RNA, 19 nt, Homo sapiens
  misc_RNA (1)...(19): siRNA sense strand
ggagccagccuugggacaa

SEQ ID NO: 471002 - RNA, 19 nt, Homo sapiens
  misc_RNA (1)...(19): siRNA sense strand
ucggcucgcuccaggaaga

SEQ ID NO: 471003 - RNA, 19 nt, Homo sapiens
  misc_RNA (1)...(19): siRNA sense strand
gggcaaauagagaggaagu

SEQ ID NO: 471004 - RNA, 19 nt, Homo sapiens
  misc_RNA (1)...(19): siRNA sense strand
auacagacccacagagaca

SEQ ID NO: 471005 - RNA, 19 nt, Homo sapiens
  misc_RNA (1)...(19): siRNA sense strand
acauacagacccacagaga

SEQ ID NO: 471006 - RNA, 19 nt, Homo sapiens
  misc_RNA (1)...(19): siRNA sense strand
uagagaggaagucuggaaa

SEQ ID NO: 471007 - RNA, 19 nt, Homo sapiens
  misc_RNA (1)...(19): siRNA sense strand
ggagcuuguucaggagaug

SEQ ID NO: 471008 - RNA, 19 nt, Homo sapiens
  misc_RNA (1)...(19): siRNA sense strand
uauauggcgacacaagaaa

SEQ ID NO: 471009 - RNA, 19 nt, Homo sapiens
  misc_RNA (1)...(19): siRNA sense strand
cgagcaauucuucuggauu

SEQ ID NO: 471010 - RNA, 19 nt, Homo sapiens
  misc_RNA (1)...(19): siRNA sense strand
gaagaaauggccaaaaucg

SEQ ID NO: 471011 - RNA, 19 nt, Homo sapiens
  misc_RNA (1)...(19): siRNA sense strand
cauuugccaugguuauaag

SEQ ID NO: 471012 - RNA, 19 nt, Homo sapiens
  misc_RNA (1)...(19): siRNA sense strand
ucuguguccuggauguuga

SEQ ID NO: 471013 - RNA, 19 nt, Homo sapiens
  misc_RNA (1)...(19): siRNA sense strand
ccaaacuugaggaaaucua

SEQ ID NO: 471014 - RNA, 19 nt, Homo sapiens
  misc_RNA (1)...(19): siRNA sense strand
guaucaguggugcgacaua

SEQ ID NO: 471015 - RNA, 19 nt, Homo sapiens
  misc_RNA (1)...(19): siRNA sense strand
acggggagcucaaaacuga

SEQ ID NO: 471016 - RNA, 19 nt, Homo sapiens
  misc_RNA (1)...(19): siRNA sense strand
gcagccaaacuugaggaaa

SEQ ID NO: 471017 - RNA, 19 nt, Homo sapiens
  misc_RNA (1)...(19): siRNA sense strand
uguaucauuucucgucauc

SEQ ID NO: 471018 - RNA, 19 nt, Homo sapiens
  misc_RNA (1)...(19): siRNA sense strand
aagaugaugaccggguuua

SEQ ID NO: 471019 - RNA, 19 nt, Homo sapiens
  misc_RNA (1)...(19): siRNA sense strand
augaaauucucaccaugga

SEQ ID NO: 471020 - RNA, 19 nt, Homo sapiens
  misc_RNA (1)...(19): siRNA sense strand
ccaguuugcguaugugaca

SEQ ID NO: 471021 - RNA, 19 nt, Homo sapiens
  misc_RNA (1)...(19): siRNA sense strand
ccccacaccugacaaagaa

SEQ ID NO: 471022 - RNA, 19 nt, Homo sapiens
  misc_RNA (1)...(19): siRNA sense strand
gaaaugguaucaagaaacc

SEQ ID NO: 471023 - RNA, 19 nt, Homo sapiens
  misc_RNA (1)...(19): siRNA sense strand
gaagaugcaggccaacaau

SEQ ID NO: 471024 - RNA, 19 nt, Homo sapiens
  misc_RNA (1)...(19): siRNA sense strand
guaaagcccaaggagguua

SEQ ID NO: 471025 - RNA, 19 nt, Homo sapiens
  misc_RNA (1)...(19): siRNA sense strand
gcucaggcucccaaacgua

SEQ ID NO: 471026 - RNA, 19 nt, Homo sapiens
  misc_RNA (1)...(19): siRNA sense strand
gaucacaaagauacgaauc

SEQ ID NO: 471027 - RNA, 19 nt, Homo sapiens
  misc_RNA (1)...(19): siRNA sense strand
aacaugcgcuuugccaaga

SEQ ID NO: 471028 - RNA, 19 nt, Homo sapiens
  misc_RNA (1)...(19): siRNA sense strand
uaaagcccaaggagguuaa

SEQ ID NO: 471029 - RNA, 19 nt, Homo sapiens
  misc_RNA (1)...(19): siRNA sense strand
agaagaugcaggccaacaa

SEQ ID NO: 471030 - RNA, 19 nt, Homo sapiens
  misc_RNA (1)...(19): siRNA sense strand
ggauggaacucauuauauu

SEQ ID NO: 471031 - RNA, 19 nt, Homo sapiens
  misc_RNA (1)...(19): siRNA sense strand
gcagauauguucaugacaa

SEQ ID NO: 471032 - RNA, 19 nt, Homo sapiens
  misc_RNA (1)...(19): siRNA sense strand
uaaagaugcuccuaaaguu

SEQ ID NO: 471033 - RNA, 19 nt, Homo sapiens
  misc_RNA (1)...(19): siRNA sense strand
cagugaagcugaagacuuu

SEQ ID NO: 471034 - RNA, 19 nt, Homo sapiens
  misc_RNA (1)...(19): siRNA sense strand
caggaaacauucauucaaa

SEQ ID NO: 471035 - RNA, 19 nt, Homo sapiens
  misc_RNA (1)...(19): siRNA sense strand
cauaauauccagacacaua

SEQ ID NO: 471036 - RNA, 19 nt, Homo sapiens
  misc_RNA (1)...(19): siRNA sense strand
uaagaaagccucagguuug

SEQ ID NO: 471037 - RNA, 19 nt, Homo sapiens
  misc_RNA (1)...(19): siRNA sense strand
ggacaguauuucagaaugu

SEQ ID NO: 471038 - RNA, 19 nt, Homo sapiens
  misc_RNA (1)...(19): siRNA sense strand
aaagaagucuggcuaaaca

SEQ ID NO: 471039 - RNA, 19 nt, Homo sapiens
  misc_RNA (1)...(19): siRNA sense strand
cagaugagguccauacuuc

SEQ ID NO: 471040 - RNA, 19 nt, Homo sapiens
  misc_RNA (1)...(19): siRNA sense strand
ccaaguugaugcucuuaaa

SEQ ID NO: 471041 - RNA, 19 nt, Homo sapiens
  misc_RNA (1)...(19): siRNA sense strand
acaaucaucuccuggcuaa

SEQ ID NO: 471042 - RNA, 19 nt, Homo sapiens
  misc_RNA (1)...(19): siRNA sense strand
ccauugaagugguuaagaa

SEQ ID NO: 471043 - RNA, 19 nt, Homo sapiens
  misc_RNA (1)...(19): siRNA sense strand
uagauuggaugguaccuuu

SEQ ID NO: 471044 - RNA, 19 nt, Homo sapiens
  misc_RNA (1)...(19): siRNA sense strand
uuaagaagauuccuaugga

SEQ ID NO: 471045 - RNA, 19 nt, Homo sapiens
  misc_RNA (1)...(19): siRNA sense strand
gacauaauauccagacaca

SEQ ID NO: 471046 - RNA, 19 nt, Homo sapiens
  misc_RNA (1)...(19): siRNA sense strand
gagcagauauguucaugac

SEQ ID NO: 471047 - RNA, 19 nt, Homo sapiens
  misc_RNA (1)...(19): siRNA sense strand
ccagacacauacaaacuau

SEQ ID NO: 471048 - RNA, 19 nt, Homo sapiens
  misc_RNA (1)...(19): siRNA sense strand
cagauauguucaugacaaa

SEQ ID NO: 471049 - RNA, 19 nt, Homo sapiens
  misc_RNA (1)...(19): siRNA sense strand
ggaacuuuguccuguaaca

SEQ ID NO: 471050 - RNA, 19 nt, Homo sapiens
  misc_RNA (1)...(19): siRNA sense strand
gaugagguccauacuucua

SEQ ID NO: 471051 - RNA, 19 nt, Homo sapiens
  misc_RNA (1)...(19): siRNA sense strand
gagagcagauauguucaug

SEQ ID NO: 471052 - RNA, 19 nt, Homo sapiens
  misc_RNA (1)...(19): siRNA sense strand
gggacaguauuucagaaug

SEQ ID NO: 471053 - RNA, 19 nt, Homo sapiens
  misc_RNA (1)...(19): siRNA sense strand
gaagacagacauaauaucc

SEQ ID NO: 471054 - RNA, 19 nt, Homo sapiens
  misc_RNA (1)...(19): siRNA sense strand
gaugguaccuuuugucaau

SEQ ID NO: 471055 - RNA, 19 nt, Homo sapiens
  misc_RNA (1)...(19): siRNA sense strand
ucuagccauugauucauua

SEQ ID NO: 471056 - RNA, 19 nt, Homo sapiens
  misc_RNA (1)...(19): siRNA sense strand
caaaagaagucuggcuaaa

SEQ ID NO: 471057 - RNA, 19 nt, Homo sapiens
  misc_RNA (1)...(19): siRNA sense strand
uuaaggauggaacucauua

SEQ ID NO: 471058 - RNA, 19 nt, Homo sapiens
  misc_RNA (1)...(19): siRNA sense strand
uuaaagaugcuccuaaagu

SEQ ID NO: 471059 - RNA, 19 nt, Homo sapiens
  misc_RNA (1)...(19): siRNA sense strand
uuaagaaagccucagguuu

SEQ ID NO: 471060 - RNA, 19 nt, Homo sapiens
  misc_RNA (1)...(19): siRNA sense strand
uugaaguucugcauucuga

SEQ ID NO: 471061 - RNA, 19 nt, Homo sapiens
  misc_RNA (1)...(19): siRNA sense strand
ggaagacagacauaauauc

SEQ ID NO: 471062 - RNA, 19 nt, Homo sapiens
  misc_RNA (1)...(19): siRNA sense strand
ggagugggacaguauuuca

SEQ ID NO: 471063 - RNA, 19 nt, Homo sapiens
  misc_RNA (1)...(19): siRNA sense strand
gcugcugccuugugccauu

SEQ ID NO: 471064 - RNA, 19 nt, Homo sapiens
  misc_RNA (1)...(19): siRNA sense strand
acauaaacaccuucagaaa

SEQ ID NO: 471065 - RNA, 19 nt, Homo sapiens
  misc_RNA (1)...(19): siRNA sense strand
cagaauguguagauuggau

SEQ ID NO: 471066 - RNA, 19 nt, Homo sapiens
  misc_RNA (1)...(19): siRNA sense strand
aaggauggaacucauuaua

SEQ ID NO: 471067 - RNA, 19 nt, Homo sapiens
  misc_RNA (1)...(19): siRNA sense strand
gaagucuggcuaaacaugu

SEQ ID NO: 471068 - RNA, 19 nt, Homo sapiens
  misc_RNA (1)...(19): siRNA sense strand
ugggaacuuuguccuguaa

SEQ ID NO: 471069 - RNA, 19 nt, Homo sapiens
  misc_RNA (1)...(19): siRNA sense strand
aaggagagcagauauguuc

SEQ ID NO: 471070 - RNA, 19 nt, Homo sapiens
  misc_RNA (1)...(19): siRNA sense strand
gacaguauuucagaaugug

SEQ ID NO: 471071 - RNA, 19 nt, Homo sapiens
  misc_RNA (1)...(19): siRNA sense strand
uuacauaaacaccuucaga

SEQ ID NO: 471072 - RNA, 19 nt, Homo sapiens
  misc_RNA (1)...(19): siRNA sense strand
uuagagguaugugaaguau

SEQ ID NO: 471073 - RNA, 19 nt, Homo sapiens
  misc_RNA (1)...(19): siRNA sense strand
guuaagaaagccucagguu

SEQ ID NO: 471074 - RNA, 19 nt, Homo sapiens
  misc_RNA (1)...(19): siRNA sense strand
ucaggaaacauucauucaa

SEQ ID NO: 471075 - RNA, 19 nt, Homo sapiens
  misc_RNA (1)...(19): siRNA sense strand
ugauggugcuugcagugaa

SEQ ID NO: 471076 - RNA, 19 nt, Homo sapiens
  misc_RNA (1)...(19): siRNA sense strand
ccacagaugagguccauac

SEQ ID NO: 471077 - RNA, 19 nt, Homo sapiens
  misc_RNA (1)...(19): siRNA sense strand
cauuagaguuccaguacag

SEQ ID NO: 471078 - RNA, 19 nt, Homo sapiens
  misc_RNA (1)...(19): siRNA sense strand
ccaccgaagagcacugaaa

SEQ ID NO: 471079 - RNA, 19 nt, Homo sapiens
  misc_RNA (1)...(19): siRNA sense strand
cauaaacaccuucagaaaa

SEQ ID NO: 471080 - RNA, 19 nt, Homo sapiens
  misc_RNA (1)...(19): siRNA sense strand
uacauaaacaccuucagaa

SEQ ID NO: 471081 - RNA, 19 nt, Homo sapiens
  misc_RNA (1)...(19): siRNA sense strand
ccagugaagcugaagacuu

SEQ ID NO: 471082 - RNA, 19 nt, Homo sapiens
  misc_RNA (1)...(19): siRNA sense strand
gauggugcuugcagugaag

SEQ ID NO: 471083 - RNA, 19 nt, Homo sapiens
  misc_RNA (1)...(19): siRNA sense strand
agaguuccaguacagaaua

SEQ ID NO: 471084 - RNA, 19 nt, Homo sapiens
  misc_RNA (1)...(19): siRNA sense strand
ucaguauucucaggaaaca

SEQ ID NO: 471085 - RNA, 19 nt, Homo sapiens
  misc_RNA (1)...(19): siRNA sense strand
uggaagacagacauaauau

SEQ ID NO: 471086 - RNA, 19 nt, Homo sapiens
  misc_RNA (1)...(19): siRNA sense strand
gcugaagacuuuuaagaag

SEQ ID NO: 471087 - RNA, 19 nt, Homo sapiens
  misc_RNA (1)...(19): siRNA sense strand
ugacuuggaaccacagaug

SEQ ID NO: 471088 - RNA, 19 nt, Homo sapiens
  misc_RNA (1)...(19): siRNA sense strand
gccauugauucauuagagu

SEQ ID NO: 471089 - RNA, 19 nt, Homo sapiens
  misc_RNA (1)...(19): siRNA sense strand
aaaucucuuucuccaaguu

SEQ ID NO: 471090 - RNA, 19 nt, Homo sapiens
  misc_RNA (1)...(19): siRNA sense strand
auggaagacagacauaaua

SEQ ID NO: 471091 - RNA, 19 nt, Homo sapiens
  misc_RNA (1)...(19): siRNA sense strand
gguuuggagugggacagua

SEQ ID NO: 471092 - RNA, 19 nt, Homo sapiens
  misc_RNA (1)...(19): siRNA sense strand
ccucaguauucucaggaaa

SEQ ID NO: 471093 - RNA, 19 nt, Homo sapiens
  misc_RNA (1)...(19): siRNA sense strand
aaagaugcuccuaaaguuc

SEQ ID NO: 471094 - RNA, 19 nt, Homo sapiens
  misc_RNA (1)...(19): siRNA sense strand
guucuucuaccucaguauu

SEQ ID NO: 471095 - RNA, 19 nt, Homo sapiens
  misc_RNA (1)...(19): siRNA sense strand
ugagguccauacuucuaga

SEQ ID NO: 471096 - RNA, 19 nt, Homo sapiens
  misc_RNA (1)...(19): siRNA sense strand
ggagagcagauauguucau

SEQ ID NO: 471097 - RNA, 19 nt, Homo sapiens
  misc_RNA (1)...(19): siRNA sense strand
gugggacaguauuucagaa

SEQ ID NO: 471098 - RNA, 19 nt, Homo sapiens
  misc_RNA (1)...(19): siRNA sense strand
aagaaagccucagguuugg

SEQ ID NO: 471099 - RNA, 19 nt, Homo sapiens
  misc_RNA (1)...(19): siRNA sense strand
aaucaucuccuggcuaaau

SEQ ID NO: 471100 - RNA, 19 nt, Homo sapiens
  misc_RNA (1)...(19): siRNA sense strand
cauugaagugguuaagaaa

SEQ ID NO: 471101 - RNA, 19 nt, Homo sapiens
  misc_RNA (1)...(19): siRNA sense strand
gaaguucugcauucugacu

SEQ ID NO: 471102 - RNA, 19 nt, Homo sapiens
  misc_RNA (1)...(19): siRNA sense strand
auaaacaccuucagaaaag

SEQ ID NO: 471103 - RNA, 19 nt, Homo sapiens
  misc_RNA (1)...(19): siRNA sense strand
uggcuaugcuggaggaagu

SEQ ID NO: 471104 - RNA, 19 nt, Homo sapiens
  misc_RNA (1)...(19): siRNA sense strand
uaaaucucuuucuccaagu

SEQ ID NO: 471105 - RNA, 19 nt, Homo sapiens
  misc_RNA (1)...(19): siRNA sense strand
uguguauucuagccauuga

SEQ ID NO: 471106 - RNA, 19 nt, Homo sapiens
  misc_RNA (1)...(19): siRNA sense strand
aggauggaacucauuauau

SEQ ID NO: 471107 - RNA, 19 nt, Homo sapiens
  misc_RNA (1)...(19): siRNA sense strand
gcuuuaaaaugggaacuuu

SEQ ID NO: 471108 - RNA, 19 nt, Homo sapiens
  misc_RNA (1)...(19): siRNA sense strand
guacuaguccagugaagcu

SEQ ID NO: 471109 - RNA, 19 nt, Homo sapiens
  misc_RNA (1)...(19): siRNA sense strand
aguauucucaggaaacauu

SEQ ID NO: 471110 - RNA, 19 nt, Homo sapiens
  misc_RNA (1)...(19): siRNA sense strand
gacuuggaaccacagauga

SEQ ID NO: 471111 - RNA, 19 nt, Homo sapiens
  misc_RNA (1)...(19): siRNA sense strand
gaguuccaguacagaauac

SEQ ID NO: 471112 - RNA, 19 nt, Homo sapiens
  misc_RNA (1)...(19): siRNA sense strand
ucauuagaguuccaguaca

SEQ ID NO: 471113 - RNA, 19 nt, Homo sapiens
  misc_RNA (1)...(19): siRNA sense strand
caaguugaugcucuuaaag

SEQ ID NO: 471114 - RNA, 19 nt, Homo sapiens
  misc_RNA (1)...(19): siRNA sense strand
agggaaacauuuuaucuug

SEQ ID NO: 471115 - RNA, 19 nt, Homo sapiens
  misc_RNA (1)...(19): siRNA sense strand
cuaguccagugaagcugaa

SEQ ID NO: 471116 - RNA, 19 nt, Homo sapiens
  misc_RNA (1)...(19): siRNA sense strand
gcuaaaucucuuucuccaa

SEQ ID NO: 471117 - RNA, 19 nt, Homo sapiens
  misc_RNA (1)...(19): siRNA sense strand
ucuccuggcuaaaucucuu

SEQ ID NO: 471118 - RNA, 19 nt, Homo sapiens
  misc_RNA (1)...(19): siRNA sense strand
ugcuggaggaaguaaauua

SEQ ID NO: 471119 - RNA, 19 nt, Homo sapiens
  misc_RNA (1)...(19): siRNA sense strand
uccagacacauacaaacua

SEQ ID NO: 471120 - RNA, 19 nt, Homo sapiens
  misc_RNA (1)...(19): siRNA sense strand
caguauuucagaaugugua

SEQ ID NO: 471121 - RNA, 19 nt, Homo sapiens
  misc_RNA (1)...(19): siRNA sense strand
aagucuggcuaaacauguu

SEQ ID NO: 471122 - RNA, 19 nt, Homo sapiens
  misc_RNA (1)...(19): siRNA sense strand
ucuccaaguugaugcucuu

SEQ ID NO: 471123 - RNA, 19 nt, Homo sapiens
  misc_RNA (1)...(19): siRNA sense strand
ggauggaacucauuauauu

SEQ ID NO: 471124 - RNA, 19 nt, Homo sapiens
  misc_RNA (1)...(19): siRNA sense strand
gcagauauguucaugacaa

SEQ ID NO: 471125 - RNA, 19 nt, Homo sapiens
  misc_RNA (1)...(19): siRNA sense strand
uaaagaugcuccuaaaguu

SEQ ID NO: 471126 - RNA, 19 nt, Homo sapiens
  misc_RNA (1)...(19): siRNA sense strand
cagugaagcugaagacuuu

SEQ ID NO: 471127 - RNA, 19 nt, Homo sapiens
  misc_RNA (1)...(19): siRNA sense strand
caggaaacauucauucaaa

SEQ ID NO: 471128 - RNA, 19 nt, Homo sapiens
  misc_RNA (1)...(19): siRNA sense strand
cauaauauccagacacaua

SEQ ID NO: 471129 - RNA, 19 nt, Homo sapiens
  misc_RNA (1)...(19): siRNA sense strand
uaagaaagccucagguuug

SEQ ID NO: 471130 - RNA, 19 nt, Homo sapiens
  misc_RNA (1)...(19): siRNA sense strand
ggacaguauuucagaaugu

SEQ ID NO: 471131 - RNA, 19 nt, Homo sapiens
  misc_RNA (1)...(19): siRNA sense strand
aaagaagucuggcuaaaca

SEQ ID NO: 471132 - RNA, 19 nt, Homo sapiens
  misc_RNA (1)...(19): siRNA sense strand
cagaugagguccauacuuc

SEQ ID NO: 471133 - RNA, 19 nt, Homo sapiens
  misc_RNA (1)...(19): siRNA sense strand
ccaaguugaugcucuuaaa

SEQ ID NO: 471134 - RNA, 19 nt, Homo sapiens
  misc_RNA (1)...(19): siRNA sense strand
acaaucaucuccuggcuaa

SEQ ID NO: 471135 - RNA, 19 nt, Homo sapiens
  misc_RNA (1)...(19): siRNA sense strand
ccauugaagugguuaagaa

SEQ ID NO: 471136 - RNA, 19 nt, Homo sapiens
  misc_RNA (1)...(19): siRNA sense strand
uagauuggaugguaccuuu

SEQ ID NO: 471137 - RNA, 19 nt, Homo sapiens
  misc_RNA (1)...(19): siRNA sense strand
uuaagaagauuccuaugga

SEQ ID NO: 471138 - RNA, 19 nt, Homo sapiens
  misc_RNA (1)...(19): siRNA sense strand
gacauaauauccagacaca

SEQ ID NO: 471139 - RNA, 19 nt, Homo sapiens
  misc_RNA (1)...(19): siRNA sense strand
gagcagauauguucaugac

SEQ ID NO: 471140 - RNA, 19 nt, Homo sapiens
  misc_RNA (1)...(19): siRNA sense strand
cgaaguagccguuuacaag

SEQ ID NO: 471141 - RNA, 19 nt, Homo sapiens
  misc_RNA (1)...(19): siRNA sense strand
ccagacacauacaaacuau

SEQ ID NO: 471142 - RNA, 19 nt, Homo sapiens
  misc_RNA (1)...(19): siRNA sense strand
ccaagaagcccagauaauc

SEQ ID NO: 471143 - RNA, 19 nt, Homo sapiens
  misc_RNA (1)...(19): siRNA sense strand
cagauauguucaugacaaa

SEQ ID NO: 471144 - RNA, 19 nt, Homo sapiens
  misc_RNA (1)...(19): siRNA sense strand
ggaacuuuguccuguaaca

SEQ ID NO: 471145 - RNA, 19 nt, Homo sapiens
  misc_RNA (1)...(19): siRNA sense strand
gagagcagauauguucaug

SEQ ID NO: 471146 - RNA, 19 nt, Homo sapiens
  misc_RNA (1)...(19): siRNA sense strand
gaugagguccauacuucua

SEQ ID NO: 471147 - RNA, 19 nt, Homo sapiens
  misc_RNA (1)...(19): siRNA sense strand
gggacaguauuucagaaug

SEQ ID NO: 471148 - RNA, 19 nt, Homo sapiens
  misc_RNA (1)...(19): siRNA sense strand
gaagacagacauaauaucc

SEQ ID NO: 471149 - RNA, 19 nt, Homo sapiens
  misc_RNA (1)...(19): siRNA sense strand
gaugguaccuuuugucaau

SEQ ID NO: 471150 - RNA, 19 nt, Homo sapiens
  misc_RNA (1)...(19): siRNA sense strand
ucuagccauugauucauua

SEQ ID NO: 471151 - RNA, 19 nt, Homo sapiens
  misc_RNA (1)...(19): siRNA sense strand
caaaagaagucuggcuaaa

SEQ ID NO: 471152 - RNA, 19 nt, Homo sapiens
  misc_RNA (1)...(19): siRNA sense strand
uuaaggauggaacucauua

SEQ ID NO: 471153 - RNA, 19 nt, Homo sapiens
  misc_RNA (1)...(19): siRNA sense strand
aagacgaaguagccguuua

SEQ ID NO: 471154 - RNA, 19 nt, Homo sapiens
  misc_RNA (1)...(19): siRNA sense strand
uuaaagaugcuccuaaagu

SEQ ID NO: 471155 - RNA, 19 nt, Homo sapiens
  misc_RNA (1)...(19): siRNA sense strand
uuaagaaagccucagguuu

SEQ ID NO: 471156 - RNA, 19 nt, Homo sapiens
  misc_RNA (1)...(19): siRNA sense strand
uugaaguucugcauucuga

SEQ ID NO: 471157 - RNA, 19 nt, Homo sapiens
  misc_RNA (1)...(19): siRNA sense strand
ggaagacagacauaauauc

SEQ ID NO: 471158 - RNA, 19 nt, Homo sapiens
  misc_RNA (1)...(19): siRNA sense strand
ggagugggacaguauuuca

SEQ ID NO: 471159 - RNA, 19 nt, Homo sapiens
  misc_RNA (1)...(19): siRNA sense strand
gcugcugccuugugccauu

SEQ ID NO: 471160 - RNA, 19 nt, Homo sapiens
  misc_RNA (1)...(19): siRNA sense strand
acauaaacaccuucagaaa

SEQ ID NO: 471161 - RNA, 19 nt, Homo sapiens
  misc_RNA (1)...(19): siRNA sense strand
cagaauguguagauuggau

SEQ ID NO: 471162 - RNA, 19 nt, Homo sapiens
  misc_RNA (1)...(19): siRNA sense strand
gaagucuggcuaaacaugu

SEQ ID NO: 471163 - RNA, 19 nt, Homo sapiens
  misc_RNA (1)...(19): siRNA sense strand
ugggaacuuuguccuguaa

SEQ ID NO: 471164 - RNA, 19 nt, Homo sapiens
  misc_RNA (1)...(19): siRNA sense strand
aaggauggaacucauuaua

SEQ ID NO: 471165 - RNA, 19 nt, Homo sapiens
  misc_RNA (1)...(19): siRNA sense strand
aaggagagcagauauguuc

SEQ ID NO: 471166 - RNA, 19 nt, Homo sapiens
  misc_RNA (1)...(19): siRNA sense strand
gacaguauuucagaaugug

SEQ ID NO: 471167 - RNA, 19 nt, Homo sapiens
  misc_RNA (1)...(19): siRNA sense strand
uuacauaaacaccuucaga

SEQ ID NO: 471168 - RNA, 19 nt, Homo sapiens
  misc_RNA (1)...(19): siRNA sense strand
uuagagguaugugaaguau

SEQ ID NO: 471169 - RNA, 19 nt, Homo sapiens
  misc_RNA (1)...(19): siRNA sense strand
guuaagaaagccucagguu

SEQ ID NO: 471170 - RNA, 19 nt, Homo sapiens
  misc_RNA (1)...(19): siRNA sense strand
ucaggaaacauucauucaa

SEQ ID NO: 471171 - RNA, 19 nt, Homo sapiens
  misc_RNA (1)...(19): siRNA sense strand
ccacagaugagguccauac

SEQ ID NO: 471172 - RNA, 19 nt, Homo sapiens
  misc_RNA (1)...(19): siRNA sense strand
ugauggugcuugcagugaa

SEQ ID NO: 471173 - RNA, 19 nt, Homo sapiens
  misc_RNA (1)...(19): siRNA sense strand
gaggaaaacuacccaggau

SEQ ID NO: 471174 - RNA, 19 nt, Homo sapiens
  misc_RNA (1)...(19): siRNA sense strand
ccaccgaagagcacugaaa

SEQ ID NO: 471175 - RNA, 19 nt, Homo sapiens
  misc_RNA (1)...(19): siRNA sense strand
cauaaacaccuucagaaaa

SEQ ID NO: 471176 - RNA, 19 nt, Homo sapiens
  misc_RNA (1)...(19): siRNA sense strand
uacauaaacaccuucagaa

SEQ ID NO: 471177 - RNA, 19 nt, Homo sapiens
  misc_RNA (1)...(19): siRNA sense strand
gauaauccaggccaagaag

SEQ ID NO: 471178 - RNA, 19 nt, Homo sapiens
  misc_RNA (1)...(19): siRNA sense strand
ccagugaagcugaagacuu

SEQ ID NO: 471179 - RNA, 19 nt, Homo sapiens
  misc_RNA (1)...(19): siRNA sense strand
cauuagaguuccaguacag

SEQ ID NO: 471180 - RNA, 19 nt, Homo sapiens
  misc_RNA (1)...(19): siRNA sense strand
gauggugcuugcagugaag

SEQ ID NO: 471181 - RNA, 19 nt, Homo sapiens
  misc_RNA (1)...(19): siRNA sense strand
agaguuccaguacagaaua

SEQ ID NO: 471182 - RNA, 19 nt, Homo sapiens
  misc_RNA (1)...(19): siRNA sense strand
ugacuuggaaccacagaug

SEQ ID NO: 471183 - RNA, 19 nt, Homo sapiens
  misc_RNA (1)...(19): siRNA sense strand
uggaagacagacauaauau

SEQ ID NO: 471184 - RNA, 19 nt, Homo sapiens
  misc_RNA (1)...(19): siRNA sense strand
gcugaagacuuuuaagaag

SEQ ID NO: 471185 - RNA, 19 nt, Homo sapiens
  misc_RNA (1)...(19): siRNA sense strand
gccauugauucauuagagu

SEQ ID NO: 471186 - RNA, 19 nt, Homo sapiens
  misc_RNA (1)...(19): siRNA sense strand
ucaguauucucaggaaaca

SEQ ID NO: 471187 - RNA, 19 nt, Homo sapiens
  misc_RNA (1)...(19): siRNA sense strand
aaaucucuuucuccaaguu

SEQ ID NO: 471188 - RNA, 19 nt, Homo sapiens
  misc_RNA (1)...(19): siRNA sense strand
auggaagacagacauaaua

SEQ ID NO: 471189 - RNA, 19 nt, Homo sapiens
  misc_RNA (1)...(19): siRNA sense strand
gguuuggagugggacagua

SEQ ID NO: 471190 - RNA, 19 nt, Homo sapiens
  misc_RNA (1)...(19): siRNA sense strand
ccucaguauucucaggaaa

SEQ ID NO: 471191 - RNA, 19 nt, Homo sapiens
  misc_RNA (1)...(19): siRNA sense strand
aaagaugcuccuaaaguuc

SEQ ID NO: 471192 - RNA, 19 nt, Homo sapiens
  misc_RNA (1)...(19): siRNA sense strand
ugagguccauacuucuaga

SEQ ID NO: 471193 - RNA, 19 nt, Homo sapiens
  misc_RNA (1)...(19): siRNA sense strand
ggagagcagauauguucau

SEQ ID NO: 471194 - RNA, 19 nt, Homo sapiens
  misc_RNA (1)...(19): siRNA sense strand
gugggacaguauuucagaa

SEQ ID NO: 471195 - RNA, 19 nt, Homo sapiens
  misc_RNA (1)...(19): siRNA sense strand
aagaaagccucagguuugg

SEQ ID NO: 471196 - RNA, 19 nt, Homo sapiens
  misc_RNA (1)...(19): siRNA sense strand
guucuucuaccucaguauu

SEQ ID NO: 471197 - RNA, 19 nt, Homo sapiens
  misc_RNA (1)...(19): siRNA sense strand
aaucaucuccuggcuaaau

SEQ ID NO: 471198 - RNA, 19 nt, Homo sapiens
  misc_RNA (1)...(19): siRNA sense strand
ggaaaacuacccaggaugu

SEQ ID NO: 471199 - RNA, 19 nt, Homo sapiens
  misc_RNA (1)...(19): siRNA sense strand
caagaagcccagauaaucc

SEQ ID NO: 471200 - RNA, 19 nt, Homo sapiens
  misc_RNA (1)...(19): siRNA sense strand
cauugaagugguuaagaaa

SEQ ID NO: 471201 - RNA, 19 nt, Homo sapiens
  misc_RNA (1)...(19): siRNA sense strand
gaaguucugcauucugacu

SEQ ID NO: 471202 - RNA, 19 nt, Homo sapiens
  misc_RNA (1)...(19): siRNA sense strand
auaaacaccuucagaaaag

SEQ ID NO: 471203 - RNA, 19 nt, Homo sapiens
  misc_RNA (1)...(19): siRNA sense strand
uggcuaugcuggaggaagu

SEQ ID NO: 471204 - RNA, 19 nt, Homo sapiens
  misc_RNA (1)...(19): siRNA sense strand
uaaaucucuuucuccaagu

SEQ ID NO: 471205 - RNA, 19 nt, Homo sapiens
  misc_RNA (1)...(19): siRNA sense strand
cagauaauccaggccaaga

SEQ ID NO: 471206 - RNA, 19 nt, Homo sapiens
  misc_RNA (1)...(19): siRNA sense strand
uguguauucuagccauuga

SEQ ID NO: 471207 - RNA, 19 nt, Homo sapiens
  misc_RNA (1)...(19): siRNA sense strand
aggauggaacucauuauau

SEQ ID NO: 471208 - RNA, 19 nt, Homo sapiens
  misc_RNA (1)...(19): siRNA sense strand
aaacuacccaggaugucaa

SEQ ID NO: 471209 - RNA, 19 nt, Homo sapiens
  misc_RNA (1)...(19): siRNA sense strand
gcuuuaaaaugggaacuuu

SEQ ID NO: 471210 - RNA, 19 nt, Homo sapiens
  misc_RNA (1)...(19): siRNA sense strand
guacuaguccagugaagcu

SEQ ID NO: 471211 - RNA, 19 nt, Homo sapiens
  misc_RNA (1)...(19): siRNA sense strand
aguauucucaggaaacauu

SEQ ID NO: 471212 - RNA, 19 nt, Homo sapiens
  misc_RNA (1)...(19): siRNA sense strand
caaguugaugcucuuaaag

SEQ ID NO: 471213 - RNA, 19 nt, Homo sapiens
  misc_RNA (1)...(19): siRNA sense strand
cccaagaagcccagauaau

SEQ ID NO: 471214 - RNA, 19 nt, Homo sapiens
  misc_RNA (1)...(19): siRNA sense strand
gaguuccaguacagaauac

SEQ ID NO: 471215 - RNA, 19 nt, Homo sapiens
  misc_RNA (1)...(19): siRNA sense strand
ucauuagaguuccaguaca

SEQ ID NO: 471216 - RNA, 19 nt, Homo sapiens
  misc_RNA (1)...(19): siRNA sense strand
gacuuggaaccacagauga

SEQ ID NO: 471217 - RNA, 19 nt, Homo sapiens
  misc_RNA (1)...(19): siRNA sense strand
agggaaacauuuuaucuug

SEQ ID NO: 471218 - RNA, 19 nt, Homo sapiens
  misc_RNA (1)...(19): siRNA sense strand
cuaguccagugaagcugaa

SEQ ID NO: 471219 - RNA, 19 nt, Homo sapiens
  misc_RNA (1)...(19): siRNA sense strand
gcuaaaucucuuucuccaa

SEQ ID NO: 471220 - RNA, 19 nt, Homo sapiens
  misc_RNA (1)...(19): siRNA sense strand
caguauuucagaaugugua

SEQ ID NO: 471221 - RNA, 19 nt, Homo sapiens
  misc_RNA (1)...(19): siRNA sense strand
ugcuggaggaaguaaauua

SEQ ID NO: 471222 - RNA, 19 nt, Homo sapiens
  misc_RNA (1)...(19): siRNA sense strand
uccagacacauacaaacua

SEQ ID NO: 471223 - RNA, 19 nt, Homo sapiens
  misc_RNA (1)...(19): siRNA sense strand
ggauggaacucauuauauu

SEQ ID NO: 471224 - RNA, 19 nt, Homo sapiens
  misc_RNA (1)...(19): siRNA sense strand
gcagauauguucaugacaa

SEQ ID NO: 471225 - RNA, 19 nt, Homo sapiens
  misc_RNA (1)...(19): siRNA sense strand
uaaagaugcuccuaaaguu

SEQ ID NO: 471226 - RNA, 19 nt, Homo sapiens
  misc_RNA (1)...(19): siRNA sense strand
cagugaagcugaagacuuu

SEQ ID NO: 471227 - RNA, 19 nt, Homo sapiens
  misc_RNA (1)...(19): siRNA sense strand
caggaaacauucauucaaa

SEQ ID NO: 471228 - RNA, 19 nt, Homo sapiens
  misc_RNA (1)...(19): siRNA sense strand
cauaauauccagacacaua

SEQ ID NO: 471229 - RNA, 19 nt, Homo sapiens
  misc_RNA (1)...(19): siRNA sense strand
uaagaaagccucagguuug

SEQ ID NO: 471230 - RNA, 19 nt, Homo sapiens
  misc_RNA (1)...(19): siRNA sense strand
ggacaguauuucagaaugu

SEQ ID NO: 471231 - RNA, 19 nt, Homo sapiens
  misc_RNA (1)...(19): siRNA sense strand
aaagaagucuggcuaaaca

SEQ ID NO: 471232 - RNA, 19 nt, Homo sapiens
  misc_RNA (1)...(19): siRNA sense strand
cagaugagguccauacuuc

SEQ ID NO: 471233 - RNA, 19 nt, Homo sapiens
  misc_RNA (1)...(19): siRNA sense strand
ccaaguugaugcucuuaaa

SEQ ID NO: 471234 - RNA, 19 nt, Homo sapiens
  misc_RNA (1)...(19): siRNA sense strand
acaaucaucuccuggcuaa

SEQ ID NO: 471235 - RNA, 19 nt, Homo sapiens
  misc_RNA (1)...(19): siRNA sense strand
ccauugaagugguuaagaa

SEQ ID NO: 471236 - RNA, 19 nt, Homo sapiens
  misc_RNA (1)...(19): siRNA sense strand
uagauuggaugguaccuuu

SEQ ID NO: 471237 - RNA, 19 nt, Homo sapiens
  misc_RNA (1)...(19): siRNA sense strand
uuaagaagauuccuaugga

SEQ ID NO: 471238 - RNA, 19 nt, Homo sapiens
  misc_RNA (1)...(19): siRNA sense strand
gacauaauauccagacaca

SEQ ID NO: 471239 - RNA, 19 nt, Homo sapiens
  misc_RNA (1)...(19): siRNA sense strand
gagcagauauguucaugac

SEQ ID NO: 471240 - RNA, 19 nt, Homo sapiens
  misc_RNA (1)...(19): siRNA sense strand
cgaaguagccguuuacaag

SEQ ID NO: 471241 - RNA, 19 nt, Homo sapiens
  misc_RNA (1)...(19): siRNA sense strand
ccagacacauacaaacuau

SEQ ID NO: 471242 - RNA, 19 nt, Homo sapiens
  misc_RNA (1)...(19): siRNA sense strand
ccaagaagcccagauaauc

SEQ ID NO: 471243 - RNA, 19 nt, Homo sapiens
  misc_RNA (1)...(19): siRNA sense strand
cagauauguucaugacaaa

SEQ ID NO: 471244 - RNA, 19 nt, Homo sapiens
  misc_RNA (1)...(19): siRNA sense strand
ggaacuuuguccuguaaca

SEQ ID NO: 471245 - RNA, 19 nt, Homo sapiens
  misc_RNA (1)...(19): siRNA sense strand
gagagcagauauguucaug

SEQ ID NO: 471246 - RNA, 19 nt, Homo sapiens
  misc_RNA (1)...(19): siRNA sense strand
gaugagguccauacuucua

SEQ ID NO: 471247 - RNA, 19 nt, Homo sapiens
  misc_RNA (1)...(19): siRNA sense strand
gggacaguauuucagaaug

SEQ ID NO: 471248 - RNA, 19 nt, Homo sapiens
  misc_RNA (1)...(19): siRNA sense strand
gaagacagacauaauaucc

SEQ ID NO: 471249 - RNA, 19 nt, Homo sapiens
  misc_RNA (1)...(19): siRNA sense strand
gaugguaccuuuugucaau

SEQ ID NO: 471250 - RNA, 19 nt, Homo sapiens
  misc_RNA (1)...(19): siRNA sense strand
ucuagccauugauucauua

SEQ ID NO: 471251 - RNA, 19 nt, Homo sapiens
  misc_RNA (1)...(19): siRNA sense strand
caaaagaagucuggcuaaa

SEQ ID NO: 471252 - RNA, 19 nt, Homo sapiens
  misc_RNA (1)...(19): siRNA sense strand
uuaaggauggaacucauua

SEQ ID NO: 471253 - RNA, 19 nt, Homo sapiens
  misc_RNA (1)...(19): siRNA sense strand
aagacgaaguagccguuua

SEQ ID NO: 471254 - RNA, 19 nt, Homo sapiens
  misc_RNA (1)...(19): siRNA sense strand
uuaaagaugcuccuaaagu

SEQ ID NO: 471255 - RNA, 19 nt, Homo sapiens
  misc_RNA (1)...(19): siRNA sense strand
uuaagaaagccucagguuu

SEQ ID NO: 471256 - RNA, 19 nt, Homo sapiens
  misc_RNA (1)...(19): siRNA sense strand
uugaaguucugcauucuga

SEQ ID NO: 471257 - RNA, 19 nt, Homo sapiens
  misc_RNA (1)...(19): siRNA sense strand
ggaagacagacauaauauc

SEQ ID NO: 471258 - RNA, 19 nt, Homo sapiens
  misc_RNA (1)...(19): siRNA sense strand
ggagugggacaguauuuca

SEQ ID NO: 471259 - RNA, 19 nt, Homo sapiens
  misc_RNA (1)...(19): siRNA sense strand
gcugcugccuugugccauu

SEQ ID NO: 471260 - RNA, 19 nt, Homo sapiens
  misc_RNA (1)...(19): siRNA sense strand
acauaaacaccuucagaaa

SEQ ID NO: 471261 - RNA, 19 nt, Homo sapiens
  misc_RNA (1)...(19): siRNA sense strand
cagaauguguagauuggau

SEQ ID NO: 471262 - RNA, 19 nt, Homo sapiens
  misc_RNA (1)...(19): siRNA sense strand
gaagucuggcuaaacaugu

SEQ ID NO: 471263 - RNA, 19 nt, Homo sapiens
  misc_RNA (1)...(19): siRNA sense strand
ugggaacuuuguccuguaa

SEQ ID NO: 471264 - RNA, 19 nt, Homo sapiens
  misc_RNA (1)...(19): siRNA sense strand
aaggauggaacucauuaua

SEQ ID NO: 471265 - RNA, 19 nt, Homo sapiens
  misc_RNA (1)...(19): siRNA sense strand
aaggagagcagauauguuc

SEQ ID NO: 471266 - RNA, 19 nt, Homo sapiens
  misc_RNA (1)...(19): siRNA sense strand
gacaguauuucagaaugug

SEQ ID NO: 471267 - RNA, 19 nt, Homo sapiens
  misc_RNA (1)...(19): siRNA sense strand
uuacauaaacaccuucaga

SEQ ID NO: 471268 - RNA, 19 nt, Homo sapiens
  misc_RNA (1)...(19): siRNA sense strand
uuagagguaugugaaguau

SEQ ID NO: 471269 - RNA, 19 nt, Homo sapiens
  misc_RNA (1)...(19): siRNA sense strand
guuaagaaagccucagguu

SEQ ID NO: 471270 - RNA, 19 nt, Homo sapiens
  misc_RNA (1)...(19): siRNA sense strand
ucaggaaacauucauucaa

SEQ ID NO: 471271 - RNA, 19 nt, Homo sapiens
  misc_RNA (1)...(19): siRNA sense strand
ccacagaugagguccauac

SEQ ID NO: 471272 - RNA, 19 nt, Homo sapiens
  misc_RNA (1)...(19): siRNA sense strand
ugauggugcuugcagugaa

SEQ ID NO: 471273 - RNA, 19 nt, Homo sapiens
  misc_RNA (1)...(19): siRNA sense strand
gaggaaaacuacccaggau

SEQ ID NO: 471274 - RNA, 19 nt, Homo sapiens
  misc_RNA (1)...(19): siRNA sense strand
ccaccgaagagcacugaaa

SEQ ID NO: 471275 - RNA, 19 nt, Homo sapiens
  misc_RNA (1)...(19): siRNA sense strand
cauaaacaccuucagaaaa

SEQ ID NO: 471276 - RNA, 19 nt, Homo sapiens
  misc_RNA (1)...(19): siRNA sense strand
uacauaaacaccuucagaa

SEQ ID NO: 471277 - RNA, 19 nt, Homo sapiens
  misc_RNA (1)...(19): siRNA sense strand
gauaauccaggccaagaag

SEQ ID NO: 471278 - RNA, 19 nt, Homo sapiens
  misc_RNA (1)...(19): siRNA sense strand
ccagugaagcugaagacuu

SEQ ID NO: 471279 - RNA, 19 nt, Homo sapiens
  misc_RNA (1)...(19): siRNA sense strand
cauuagaguuccaguacag

SEQ ID NO: 471280 - RNA, 19 nt, Homo sapiens
  misc_RNA (1)...(19): siRNA sense strand
gauggugcuugcagugaag

SEQ ID NO: 471281 - RNA, 19 nt, Homo sapiens
  misc_RNA (1)...(19): siRNA sense strand
agaguuccaguacagaaua

SEQ ID NO: 471282 - RNA, 19 nt, Homo sapiens
  misc_RNA (1)...(19): siRNA sense strand
ugacuuggaaccacagaug

SEQ ID NO: 471283 - RNA, 19 nt, Homo sapiens
  misc_RNA (1)...(19): siRNA sense strand
uggaagacagacauaauau

SEQ ID NO: 471284 - RNA, 19 nt, Homo sapiens
  misc_RNA (1)...(19): siRNA sense strand
gcugaagacuuuuaagaag

SEQ ID NO: 471285 - RNA, 19 nt, Homo sapiens
  misc_RNA (1)...(19): siRNA sense strand
gccauugauucauuagagu

SEQ ID NO: 471286 - RNA, 19 nt, Homo sapiens
  misc_RNA (1)...(19): siRNA sense strand
ucaguauucucaggaaaca

SEQ ID NO: 471287 - RNA, 19 nt, Homo sapiens
  misc_RNA (1)...(19): siRNA sense strand
aaaucucuuucuccaaguu

SEQ ID NO: 471288 - RNA, 19 nt, Homo sapiens
  misc_RNA (1)...(19): siRNA sense strand
auggaagacagacauaaua

SEQ ID NO: 471289 - RNA, 19 nt, Homo sapiens
  misc_RNA (1)...(19): siRNA sense strand
gguuuggagugggacagua

SEQ ID NO: 471290 - RNA, 19 nt, Homo sapiens
  misc_RNA (1)...(19): siRNA sense strand
ccucaguauucucaggaaa

SEQ ID NO: 471291 - RNA, 19 nt, Homo sapiens
  misc_RNA (1)...(19): siRNA sense strand
aaagaugcuccuaaaguuc

SEQ ID NO: 471292 - RNA, 19 nt, Homo sapiens
  misc_RNA (1)...(19): siRNA sense strand
ugagguccauacuucuaga

SEQ ID NO: 471293 - RNA, 19 nt, Homo sapiens
  misc_RNA (1)...(19): siRNA sense strand
ggagagcagauauguucau

SEQ ID NO: 471294 - RNA, 19 nt, Homo sapiens
  misc_RNA (1)...(19): siRNA sense strand
gugggacaguauuucagaa

SEQ ID NO: 471295 - RNA, 19 nt, Homo sapiens
  misc_RNA (1)...(19): siRNA sense strand
aagaaagccucagguuugg

SEQ ID NO: 471296 - RNA, 19 nt, Homo sapiens
  misc_RNA (1)...(19): siRNA sense strand
guucuucuaccucaguauu

SEQ ID NO: 471297 - RNA, 19 nt, Homo sapiens
  misc_RNA (1)...(19): siRNA sense strand
aaucaucuccuggcuaaau

SEQ ID NO: 471298 - RNA, 19 nt, Homo sapiens
  misc_RNA (1)...(19): siRNA sense strand
ggaaaacuacccaggaugu

SEQ ID NO: 471299 - RNA, 19 nt, Homo sapiens
  misc_RNA (1)...(19): siRNA sense strand
caagaagcccagauaaucc

SEQ ID NO: 471300 - RNA, 19 nt, Homo sapiens
  misc_RNA (1)...(19): siRNA sense strand
cauugaagugguuaagaaa

SEQ ID NO: 471301 - RNA, 19 nt, Homo sapiens
  misc_RNA (1)...(19): siRNA sense strand
gaaguucugcauucugacu

SEQ ID NO: 471302 - RNA, 19 nt, Homo sapiens
  misc_RNA (1)...(19): siRNA sense strand
auaaacaccuucagaaaag

SEQ ID NO: 471303 - RNA, 19 nt, Homo sapiens
  misc_RNA (1)...(19): siRNA sense strand
uggcuaugcuggaggaagu

SEQ ID NO: 471304 - RNA, 19 nt, Homo sapiens
  misc_RNA (1)...(19): siRNA sense strand
uaaaucucuuucuccaagu

SEQ ID NO: 471305 - RNA, 19 nt, Homo sapiens
  misc_RNA (1)...(19): siRNA sense strand
cagauaauccaggccaaga

SEQ ID NO: 471306 - RNA, 19 nt, Homo sapiens
  misc_RNA (1)...(19): siRNA sense strand
uguguauucuagccauuga

SEQ ID NO: 471307 - RNA, 19 nt, Homo sapiens
  misc_RNA (1)...(19): siRNA sense strand
aggauggaacucauuauau

SEQ ID NO: 471308 - RNA, 19 nt, Homo sapiens
  misc_RNA (1)...(19): siRNA sense strand
aaacuacccaggaugucaa

SEQ ID NO: 471309 - RNA, 19 nt, Homo sapiens
  misc_RNA (1)...(19): siRNA sense strand
gcuuuaaaaugggaacuuu

SEQ ID NO: 471310 - RNA, 19 nt, Homo sapiens
  misc_RNA (1)...(19): siRNA sense strand
guacuaguccagugaagcu

SEQ ID NO: 471311 - RNA, 19 nt, Homo sapiens
  misc_RNA (1)...(19): siRNA sense strand
aguauucucaggaaacauu

SEQ ID NO: 471312 - RNA, 19 nt, Homo sapiens
  misc_RNA (1)...(19): siRNA sense strand
caaguugaugcucuuaaag

SEQ ID NO: 471313 - RNA, 19 nt, Homo sapiens
  misc_RNA (1)...(19): siRNA sense strand
cccaagaagcccagauaau

SEQ ID NO: 471314 - RNA, 19 nt, Homo sapiens
  misc_RNA (1)...(19): siRNA sense strand
gaguuccaguacagaauac

SEQ ID NO: 471315 - RNA, 19 nt, Homo sapiens
  misc_RNA (1)...(19): siRNA sense strand
ucauuagaguuccaguaca

SEQ ID NO: 471316 - RNA, 19 nt, Homo sapiens
  misc_RNA (1)...(19): siRNA sense strand
gacuuggaaccacagauga

SEQ ID NO: 471317 - RNA, 19 nt, Homo sapiens
  misc_RNA (1)...(19): siRNA sense strand
agggaaacauuuuaucuug

SEQ ID NO: 471318 - RNA, 19 nt, Homo sapiens
  misc_RNA (1)...(19): siRNA sense strand
cuaguccagugaagcugaa

SEQ ID NO: 471319 - RNA, 19 nt, Homo sapiens
  misc_RNA (1)...(19): siRNA sense strand
gcuaaaucucuuucuccaa

SEQ ID NO: 471320 - RNA, 19 nt, Homo sapiens
  misc_RNA (1)...(19): siRNA sense strand
caguauuucagaaugugua

SEQ ID NO: 471321 - RNA, 19 nt, Homo sapiens
  misc_RNA (1)...(19): siRNA sense strand
ugcuggaggaaguaaauua

SEQ ID NO: 471322 - RNA, 19 nt, Homo sapiens
  misc_RNA (1)...(19): siRNA sense strand
uccagacacauacaaacua

SEQ ID NO: 471323 - RNA, 19 nt, Homo sapiens
  misc_RNA (1)...(19): siRNA sense strand
ggauggaacucauuauauu

SEQ ID NO: 471324 - RNA, 19 nt, Homo sapiens
  misc_RNA (1)...(19): siRNA sense strand
gcagauauguucaugacaa

SEQ ID NO: 471325 - RNA, 19 nt, Homo sapiens
  misc_RNA (1)...(19): siRNA sense strand
uaaagaugcuccuaaaguu

SEQ ID NO: 471326 - RNA, 19 nt, Homo sapiens
  misc_RNA (1)...(19): siRNA sense strand
cagugaagcugaagacuuu

SEQ ID NO: 471327 - RNA, 19 nt, Homo sapiens
  misc_RNA (1)...(19): siRNA sense strand
caggaaacauucauucaaa

SEQ ID NO: 471328 - RNA, 19 nt, Homo sapiens
  misc_RNA (1)...(19): siRNA sense strand
cauaauauccagacacaua

SEQ ID NO: 471329 - RNA, 19 nt, Homo sapiens
  misc_RNA (1)...(19): siRNA sense strand
uaagaaagccucagguuug

SEQ ID NO: 471330 - RNA, 19 nt, Homo sapiens
  misc_RNA (1)...(19): siRNA sense strand
ggacaguauuucagaaugu

SEQ ID NO: 471331 - RNA, 19 nt, Homo sapiens
  misc_RNA (1)...(19): siRNA sense strand
aaagaagucuggcuaaaca

SEQ ID NO: 471332 - RNA, 19 nt, Homo sapiens
  misc_RNA (1)...(19): siRNA sense strand
cagaugagguccauacuuc

SEQ ID NO: 471333 - RNA, 19 nt, Homo sapiens
  misc_RNA (1)...(19): siRNA sense strand
ccaaguugaugcucuuaaa

SEQ ID NO: 471334 - RNA, 19 nt, Homo sapiens
  misc_RNA (1)...(19): siRNA sense strand
acaaucaucuccuggcuaa

SEQ ID NO: 471335 - RNA, 19 nt, Homo sapiens
  misc_RNA (1)...(19): siRNA sense strand
ccauugaagugguuaagaa

SEQ ID NO: 471336 - RNA, 19 nt, Homo sapiens
  misc_RNA (1)...(19): siRNA sense strand
uagauuggaugguaccuuu

SEQ ID NO: 471337 - RNA, 19 nt, Homo sapiens
  misc_RNA (1)...(19): siRNA sense strand
uuaagaagauuccuaugga

SEQ ID NO: 471338 - RNA, 19 nt, Homo sapiens
  misc_RNA (1)...(19): siRNA sense strand
gacauaauauccagacaca

SEQ ID NO: 471339 - RNA, 19 nt, Homo sapiens
  misc_RNA (1)...(19): siRNA sense strand
gagcagauauguucaugac

SEQ ID NO: 471340 - RNA, 19 nt, Homo sapiens
  misc_RNA (1)...(19): siRNA sense strand
ccagacacauacaaacuau

SEQ ID NO: 471341 - RNA, 19 nt, Homo sapiens
  misc_RNA (1)...(19): siRNA sense strand
cagauauguucaugacaaa

SEQ ID NO: 471342 - RNA, 19 nt, Homo sapiens
  misc_RNA (1)...(19): siRNA sense strand
ggaacuuuguccuguaaca

SEQ ID NO: 471343 - RNA, 19 nt, Homo sapiens
  misc_RNA (1)...(19): siRNA sense strand
gaugagguccauacuucua

SEQ ID NO: 471344 - RNA, 19 nt, Homo sapiens
  misc_RNA (1)...(19): siRNA sense strand
gagagcagauauguucaug

SEQ ID NO: 471345 - RNA, 19 nt, Homo sapiens
  misc_RNA (1)...(19): siRNA sense strand
gggacaguauuucagaaug

SEQ ID NO: 471346 - RNA, 19 nt, Homo sapiens
  misc_RNA (1)...(19): siRNA sense strand
gaagacagacauaauaucc

SEQ ID NO: 471347 - RNA, 19 nt, Homo sapiens
  misc_RNA (1)...(19): siRNA sense strand
gaugguaccuuuugucaau

SEQ ID NO: 471348 - RNA, 19 nt, Homo sapiens
  misc_RNA (1)...(19): siRNA sense strand
ucuagccauugauucauua

SEQ ID NO: 471349 - RNA, 19 nt, Homo sapiens
  misc_RNA (1)...(19): siRNA sense strand
caaaagaagucuggcuaaa

SEQ ID NO: 471350 - RNA, 19 nt, Homo sapiens
  misc_RNA (1)...(19): siRNA sense strand
uuaaggauggaacucauua

SEQ ID NO: 471351 - RNA, 19 nt, Homo sapiens
  misc_RNA (1)...(19): siRNA sense strand
uuaaagaugcuccuaaagu

SEQ ID NO: 471352 - RNA, 19 nt, Homo sapiens
  misc_RNA (1)...(19): siRNA sense strand
uuaagaaagccucagguuu

SEQ ID NO: 471353 - RNA, 19 nt, Homo sapiens
  misc_RNA (1)...(19): siRNA sense strand
uugaaguucugcauucuga

SEQ ID NO: 471354 - RNA, 19 nt, Homo sapiens
  misc_RNA (1)...(19): siRNA sense strand
ggaagacagacauaauauc

SEQ ID NO: 471355 - RNA, 19 nt, Homo sapiens
  misc_RNA (1)...(19): siRNA sense strand
ggagugggacaguauuuca

SEQ ID NO: 471356 - RNA, 19 nt, Homo sapiens
  misc_RNA (1)...(19): siRNA sense strand
gcugcugccuugugccauu

SEQ ID NO: 471357 - RNA, 19 nt, Homo sapiens
  misc_RNA (1)...(19): siRNA sense strand
acauaaacaccuucagaaa

SEQ ID NO: 471358 - RNA, 19 nt, Homo sapiens
  misc_RNA (1)...(19): siRNA sense strand
cagaauguguagauuggau

SEQ ID NO: 471359 - RNA, 19 nt, Homo sapiens
  misc_RNA (1)...(19): siRNA sense strand
aaggauggaacucauuaua

SEQ ID NO: 471360 - RNA, 19 nt, Homo sapiens
  misc_RNA (1)...(19): siRNA sense strand
gaagucuggcuaaacaugu

SEQ ID NO: 471361 - RNA, 19 nt, Homo sapiens
  misc_RNA (1)...(19): siRNA sense strand
ugggaacuuuguccuguaa

SEQ ID NO: 471362 - RNA, 19 nt, Homo sapiens
  misc_RNA (1)...(19): siRNA sense strand
aaggagagcagauauguuc

SEQ ID NO: 471363 - RNA, 19 nt, Homo sapiens
  misc_RNA (1)...(19): siRNA sense strand
gacaguauuucagaaugug

SEQ ID NO: 471364 - RNA, 19 nt, Homo sapiens
  misc_RNA (1)...(19): siRNA sense strand
uuacauaaacaccuucaga

SEQ ID NO: 471365 - RNA, 19 nt, Homo sapiens
  misc_RNA (1)...(19): siRNA sense strand
uuagagguaugugaaguau

SEQ ID NO: 471366 - RNA, 19 nt, Homo sapiens
  misc_RNA (1)...(19): siRNA sense strand
guuaagaaagccucagguu

SEQ ID NO: 471367 - RNA, 19 nt, Homo sapiens
  misc_RNA (1)...(19): siRNA sense strand
ucaggaaacauucauucaa

SEQ ID NO: 471368 - RNA, 19 nt, Homo sapiens
  misc_RNA (1)...(19): siRNA sense strand
ugauggugcuugcagugaa

SEQ ID NO: 471369 - RNA, 19 nt, Homo sapiens
  misc_RNA (1)...(19): siRNA sense strand
ccacagaugagguccauac

SEQ ID NO: 471370 - RNA, 19 nt, Homo sapiens
  misc_RNA (1)...(19): siRNA sense strand
cauuagaguuccaguacag

SEQ ID NO: 471371 - RNA, 19 nt, Homo sapiens
  misc_RNA (1)...(19): siRNA sense strand
ccaccgaagagcacugaaa

SEQ ID NO: 471372 - RNA, 19 nt, Homo sapiens
  misc_RNA (1)...(19): siRNA sense strand
cauaaacaccuucagaaaa

SEQ ID NO: 471373 - RNA, 19 nt, Homo sapiens
  misc_RNA (1)...(19): siRNA sense strand
uacauaaacaccuucagaa

SEQ ID NO: 471374 - RNA, 19 nt, Homo sapiens
  misc_RNA (1)...(19): siRNA sense strand
ccagugaagcugaagacuu

SEQ ID NO: 471375 - RNA, 19 nt, Homo sapiens
  misc_RNA (1)...(19): siRNA sense strand
gauggugcuugcagugaag

SEQ ID NO: 471376 - RNA, 19 nt, Homo sapiens
  misc_RNA (1)...(19): siRNA sense strand
agaguuccaguacagaaua

SEQ ID NO: 471377 - RNA, 19 nt, Homo sapiens
  misc_RNA (1)...(19): siRNA sense strand
ucaguauucucaggaaaca

SEQ ID NO: 471378 - RNA, 19 nt, Homo sapiens
  misc_RNA (1)...(19): siRNA sense strand
uggaagacagacauaauau

SEQ ID NO: 471379 - RNA, 19 nt, Homo sapiens
  misc_RNA (1)...(19): siRNA sense strand
gcugaagacuuuuaagaag

SEQ ID NO: 471380 - RNA, 19 nt, Homo sapiens
  misc_RNA (1)...(19): siRNA sense strand
ugacuuggaaccacagaug

SEQ ID NO: 471381 - RNA, 19 nt, Homo sapiens
  misc_RNA (1)...(19): siRNA sense strand
gccauugauucauuagagu

SEQ ID NO: 471382 - RNA, 19 nt, Homo sapiens
  misc_RNA (1)...(19): siRNA sense strand
aaaucucuuucuccaaguu

SEQ ID NO: 471383 - RNA, 19 nt, Homo sapiens
  misc_RNA (1)...(19): siRNA sense strand
auggaagacagacauaaua

SEQ ID NO: 471384 - RNA, 19 nt, Homo sapiens
  misc_RNA (1)...(19): siRNA sense strand
gguuuggagugggacagua

SEQ ID NO: 471385 - RNA, 19 nt, Homo sapiens
  misc_RNA (1)...(19): siRNA sense strand
ccucaguauucucaggaaa

SEQ ID NO: 471386 - RNA, 19 nt, Homo sapiens
  misc_RNA (1)...(19): siRNA sense strand
aaagaugcuccuaaaguuc

SEQ ID NO: 471387 - RNA, 19 nt, Homo sapiens
  misc_RNA (1)...(19): siRNA sense strand
guucuucuaccucaguauu

SEQ ID NO: 471388 - RNA, 19 nt, Homo sapiens
  misc_RNA (1)...(19): siRNA sense strand
ugagguccauacuucuaga

SEQ ID NO: 471389 - RNA, 19 nt, Homo sapiens
  misc_RNA (1)...(19): siRNA sense strand
ggagagcagauauguucau

SEQ ID NO: 471390 - RNA, 19 nt, Homo sapiens
  misc_RNA (1)...(19): siRNA sense strand
gugggacaguauuucagaa

SEQ ID NO: 471391 - RNA, 19 nt, Homo sapiens
  misc_RNA (1)...(19): siRNA sense strand
aagaaagccucagguuugg

SEQ ID NO: 471392 - RNA, 19 nt, Homo sapiens
  misc_RNA (1)...(19): siRNA sense strand
aaucaucuccuggcuaaau

SEQ ID NO: 471393 - RNA, 19 nt, Homo sapiens
  misc_RNA (1)...(19): siRNA sense strand
cauugaagugguuaagaaa

SEQ ID NO: 471394 - RNA, 19 nt, Homo sapiens
  misc_RNA (1)...(19): siRNA sense strand
gaaguucugcauucugacu

SEQ ID NO: 471395 - RNA, 19 nt, Homo sapiens
  misc_RNA (1)...(19): siRNA sense strand
auaaacaccuucagaaaag

SEQ ID NO: 471396 - RNA, 19 nt, Homo sapiens
  misc_RNA (1)...(19): siRNA sense strand
uggcuaugcuggaggaagu

SEQ ID NO: 471397 - RNA, 19 nt, Homo sapiens
  misc_RNA (1)...(19): siRNA sense strand
uaaaucucuuucuccaagu

SEQ ID NO: 471398 - RNA, 19 nt, Homo sapiens
  misc_RNA (1)...(19): siRNA sense strand
uguguauucuagccauuga

SEQ ID NO: 471399 - RNA, 19 nt, Homo sapiens
  misc_RNA (1)...(19): siRNA sense strand
aggauggaacucauuauau

SEQ ID NO: 471400 - RNA, 19 nt, Homo sapiens
  misc_RNA (1)...(19): siRNA sense strand
gcuuuaaaaugggaacuuu

SEQ ID NO: 471401 - RNA, 19 nt, Homo sapiens
  misc_RNA (1)...(19): siRNA sense strand
guacuaguccagugaagcu

SEQ ID NO: 471402 - RNA, 19 nt, Homo sapiens
  misc_RNA (1)...(19): siRNA sense strand
aguauucucaggaaacauu

SEQ ID NO: 471403 - RNA, 19 nt, Homo sapiens
  misc_RNA (1)...(19): siRNA sense strand
gacuuggaaccacagauga

SEQ ID NO: 471404 - RNA, 19 nt, Homo sapiens
  misc_RNA (1)...(19): siRNA sense strand
gaguuccaguacagaauac

SEQ ID NO: 471405 - RNA, 19 nt, Homo sapiens
  misc_RNA (1)...(19): siRNA sense strand
ucauuagaguuccaguaca

SEQ ID NO: 471406 - RNA, 19 nt, Homo sapiens
  misc_RNA (1)...(19): siRNA sense strand
caaguugaugcucuuaaag

SEQ ID NO: 471407 - RNA, 19 nt, Homo sapiens
  misc_RNA (1)...(19): siRNA sense strand
agggaaacauuuuaucuug

SEQ ID NO: 471408 - RNA, 19 nt, Homo sapiens
  misc_RNA (1)...(19): siRNA sense strand
cuaguccagugaagcugaa

SEQ ID NO: 471409 - RNA, 19 nt, Homo sapiens
  misc_RNA (1)...(19): siRNA sense strand
gcuaaaucucuuucuccaa

SEQ ID NO: 471410 - RNA, 19 nt, Homo sapiens
  misc_RNA (1)...(19): siRNA sense strand
ucuccuggcuaaaucucuu

SEQ ID NO: 471411 - RNA, 19 nt, Homo sapiens
  misc_RNA (1)...(19): siRNA sense strand
ugcuggaggaaguaaauua

SEQ ID NO: 471412 - RNA, 19 nt, Homo sapiens
  misc_RNA (1)...(19): siRNA sense strand
uccagacacauacaaacua

SEQ ID NO: 471413 - RNA, 19 nt, Homo sapiens
  misc_RNA (1)...(19): siRNA sense strand
caguauuucagaaugugua

SEQ ID NO: 471414 - RNA, 19 nt, Homo sapiens
  misc_RNA (1)...(19): siRNA sense strand
aagucuggcuaaacauguu

SEQ ID NO: 471415 - RNA, 19 nt, Homo sapiens
  misc_RNA (1)...(19): siRNA sense strand
ucuccaaguugaugcucuu

SEQ ID NO: 471416 - RNA, 19 nt, Homo sapiens
  misc_RNA (1)...(19): siRNA sense strand
ggauggaacucauuauauu

SEQ ID NO: 471417 - RNA, 19 nt, Homo sapiens
  misc_RNA (1)...(19): siRNA sense strand
gcagauauguucaugacaa

SEQ ID NO: 471418 - RNA, 19 nt, Homo sapiens
  misc_RNA (1)...(19): siRNA sense strand
uaaagaugcuccuaaaguu

SEQ ID NO: 471419 - RNA, 19 nt, Homo sapiens
  misc_RNA (1)...(19): siRNA sense strand
cagugaagcugaagacuuu

SEQ ID NO: 471420 - RNA, 19 nt, Homo sapiens
  misc_RNA (1)...(19): siRNA sense strand
caggaaacauucauucaaa

SEQ ID NO: 471421 - RNA, 19 nt, Homo sapiens
  misc_RNA (1)...(19): siRNA sense strand
cauaauauccagacacaua

SEQ ID NO: 471422 - RNA, 19 nt, Homo sapiens
  misc_RNA (1)...(19): siRNA sense strand
uaagaaagccucagguuug

SEQ ID NO: 471423 - RNA, 19 nt, Homo sapiens
  misc_RNA (1)...(19): siRNA sense strand
ggacaguauuucagaaugu

SEQ ID NO: 471424 - RNA, 19 nt, Homo sapiens
  misc_RNA (1)...(19): siRNA sense strand
aaagaagucuggcuaaaca

SEQ ID NO: 471425 - RNA, 19 nt, Homo sapiens
  misc_RNA (1)...(19): siRNA sense strand
cagaugagguccauacuuc

SEQ ID NO: 471426 - RNA, 19 nt, Homo sapiens
  misc_RNA (1)...(19): siRNA sense strand
ccaaguugaugcucuuaaa

SEQ ID NO: 471427 - RNA, 19 nt, Homo sapiens
  misc_RNA (1)...(19): siRNA sense strand
acaaucaucuccuggcuaa

SEQ ID NO: 471428 - RNA, 19 nt, Homo sapiens
  misc_RNA (1)...(19): siRNA sense strand
ccauugaagugguuaagaa

SEQ ID NO: 471429 - RNA, 19 nt, Homo sapiens
  misc_RNA (1)...(19): siRNA sense strand
uagauuggaugguaccuuu

SEQ ID NO: 471430 - RNA, 19 nt, Homo sapiens
  misc_RNA (1)...(19): siRNA sense strand
uuaagaagauuccuaugga

SEQ ID NO: 471431 - RNA, 19 nt, Homo sapiens
  misc_RNA (1)...(19): siRNA sense strand
gacauaauauccagacaca

SEQ ID NO: 471432 - RNA, 19 nt, Homo sapiens
  misc_RNA (1)...(19): siRNA sense strand
gagcagauauguucaugac

SEQ ID NO: 471433 - RNA, 19 nt, Homo sapiens
  misc_RNA (1)...(19): siRNA sense strand
cgaaguagccguuuacaag

SEQ ID NO: 471434 - RNA, 19 nt, Homo sapiens
  misc_RNA (1)...(19): siRNA sense strand
ccagacacauacaaacuau

SEQ ID NO: 471435 - RNA, 19 nt, Homo sapiens
  misc_RNA (1)...(19): siRNA sense strand
ccaagaagcccagauaauc

SEQ ID NO: 471436 - RNA, 19 nt, Homo sapiens
  misc_RNA (1)...(19): siRNA sense strand
cagauauguucaugacaaa

SEQ ID NO: 471437 - RNA, 19 nt, Homo sapiens
  misc_RNA (1)...(19): siRNA sense strand
ggaacuuuguccuguaaca

SEQ ID NO: 471438 - RNA, 19 nt, Homo sapiens
  misc_RNA (1)...(19): siRNA sense strand
gagagcagauauguucaug

SEQ ID NO: 471439 - RNA, 19 nt, Homo sapiens
  misc_RNA (1)...(19): siRNA sense strand
gaugagguccauacuucua

SEQ ID NO: 471440 - RNA, 19 nt, Homo sapiens
  misc_RNA (1)...(19): siRNA sense strand
gggacaguauuucagaaug

SEQ ID NO: 471441 - RNA, 19 nt, Homo sapiens
  misc_RNA (1)...(19): siRNA sense strand
gaagacagacauaauaucc

SEQ ID NO: 471442 - RNA, 19 nt, Homo sapiens
  misc_RNA (1)...(19): siRNA sense strand
gaugguaccuuuugucaau

SEQ ID NO: 471443 - RNA, 19 nt, Homo sapiens
  misc_RNA (1)...(19): siRNA sense strand
ucuagccauugauucauua

SEQ ID NO: 471444 - RNA, 19 nt, Homo sapiens
  misc_RNA (1)...(19): siRNA sense strand
caaaagaagucuggcuaaa

SEQ ID NO: 471445 - RNA, 19 nt, Homo sapiens
  misc_RNA (1)...(19): siRNA sense strand
uuaaggauggaacucauua

SEQ ID NO: 471446 - RNA, 19 nt, Homo sapiens
  misc_RNA (1)...(19): siRNA sense strand
aagacgaaguagccguuua

SEQ ID NO: 471447 - RNA, 19 nt, Homo sapiens
  misc_RNA (1)...(19): siRNA sense strand
uuaaagaugcuccuaaagu

SEQ ID NO: 471448 - RNA, 19 nt, Homo sapiens
  misc_RNA (1)...(19): siRNA sense strand
uuaagaaagccucagguuu

SEQ ID NO: 471449 - RNA, 19 nt, Homo sapiens
  misc_RNA (1)...(19): siRNA sense strand
uugaaguucugcauucuga

SEQ ID NO: 471450 - RNA, 19 nt, Homo sapiens
  misc_RNA (1)...(19): siRNA sense strand
ggaagacagacauaauauc

SEQ ID NO: 471451 - RNA, 19 nt, Homo sapiens
  misc_RNA (1)...(19): siRNA sense strand
ggagugggacaguauuuca

SEQ ID NO: 471452 - RNA, 19 nt, Homo sapiens
  misc_RNA (1)...(19): siRNA sense strand
gcugcugccuugugccauu

SEQ ID NO: 471453 - RNA, 19 nt, Homo sapiens
  misc_RNA (1)...(19): siRNA sense strand
acauaaacaccuucagaaa

SEQ ID NO: 471454 - RNA, 19 nt, Homo sapiens
  misc_RNA (1)...(19): siRNA sense strand
cagaauguguagauuggau

SEQ ID NO: 471455 - RNA, 19 nt, Homo sapiens
  misc_RNA (1)...(19): siRNA sense strand
gaagucuggcuaaacaugu

SEQ ID NO: 471456 - RNA, 19 nt, Homo sapiens
  misc_RNA (1)...(19): siRNA sense strand
ugggaacuuuguccuguaa

SEQ ID NO: 471457 - RNA, 19 nt, Homo sapiens
  misc_RNA (1)...(19): siRNA sense strand
aaggauggaacucauuaua

SEQ ID NO: 471458 - RNA, 19 nt, Homo sapiens
  misc_RNA (1)...(19): siRNA sense strand
aaggagagcagauauguuc

SEQ ID NO: 471459 - RNA, 19 nt, Homo sapiens
  misc_RNA (1)...(19): siRNA sense strand
gacaguauuucagaaugug

SEQ ID NO: 471460 - RNA, 19 nt, Homo sapiens
  misc_RNA (1)...(19): siRNA sense strand
uuacauaaacaccuucaga

SEQ ID NO: 471461 - RNA, 19 nt, Homo sapiens
  misc_RNA (1)...(19): siRNA sense strand
uuagagguaugugaaguau

SEQ ID NO: 471462 - RNA, 19 nt, Homo sapiens
  misc_RNA (1)...(19): siRNA sense strand
guuaagaaagccucagguu

SEQ ID NO: 471463 - RNA, 19 nt, Homo sapiens
  misc_RNA (1)...(19): siRNA sense strand
ucaggaaacauucauucaa

SEQ ID NO: 471464 - RNA, 19 nt, Homo sapiens
  misc_RNA (1)...(19): siRNA sense strand
ccacagaugagguccauac

SEQ ID NO: 471465 - RNA, 19 nt, Homo sapiens
  misc_RNA (1)...(19): siRNA sense strand
ugauggugcuugcagugaa

SEQ ID NO: 471466 - RNA, 19 nt, Homo sapiens
  misc_RNA (1)...(19): siRNA sense strand
gaggaaaacuacccaggau

SEQ ID NO: 471467 - RNA, 19 nt, Homo sapiens
  misc_RNA (1)...(19): siRNA sense strand
ccaccgaagagcacugaaa

SEQ ID NO: 471468 - RNA, 19 nt, Homo sapiens
  misc_RNA (1)...(19): siRNA sense strand
cauaaacaccuucagaaaa

SEQ ID NO: 471469 - RNA, 19 nt, Homo sapiens
  misc_RNA (1)...(19): siRNA sense strand
uacauaaacaccuucagaa

SEQ ID NO: 471470 - RNA, 19 nt, Homo sapiens
  misc_RNA (1)...(19): siRNA sense strand
gauaauccaggccaagaag

SEQ ID NO: 471471 - RNA, 19 nt, Homo sapiens
  misc_RNA (1)...(19): siRNA sense strand
ccagugaagcugaagacuu

SEQ ID NO: 471472 - RNA, 19 nt, Homo sapiens
  misc_RNA (1)...(19): siRNA sense strand
cauuagaguuccaguacag

SEQ ID NO: 471473 - RNA, 19 nt, Homo sapiens
  misc_RNA (1)...(19): siRNA sense strand
gauggugcuugcagugaag

SEQ ID NO: 471474 - RNA, 19 nt, Homo sapiens
  misc_RNA (1)...(19): siRNA sense strand
agaguuccaguacagaaua

SEQ ID NO: 471475 - RNA, 19 nt, Homo sapiens
  misc_RNA (1)...(19): siRNA sense strand
ugacuuggaaccacagaug

SEQ ID NO: 471476 - RNA, 19 nt, Homo sapiens
  misc_RNA (1)...(19): siRNA sense strand
uggaagacagacauaauau

SEQ ID NO: 471477 - RNA, 19 nt, Homo sapiens
  misc_RNA (1)...(19): siRNA sense strand
gcugaagacuuuuaagaag

SEQ ID NO: 471478 - RNA, 19 nt, Homo sapiens
  misc_RNA (1)...(19): siRNA sense strand
gccauugauucauuagagu

SEQ ID NO: 471479 - RNA, 19 nt, Homo sapiens
  misc_RNA (1)...(19): siRNA sense strand
ucaguauucucaggaaaca

SEQ ID NO: 471480 - RNA, 19 nt, Homo sapiens
  misc_RNA (1)...(19): siRNA sense strand
aaaucucuuucuccaaguu

SEQ ID NO: 471481 - RNA, 19 nt, Homo sapiens
  misc_RNA (1)...(19): siRNA sense strand
auggaagacagacauaaua

SEQ ID NO: 471482 - RNA, 19 nt, Homo sapiens
  misc_RNA (1)...(19): siRNA sense strand
gguuuggagugggacagua

SEQ ID NO: 471483 - RNA, 19 nt, Homo sapiens
  misc_RNA (1)...(19): siRNA sense strand
ccucaguauucucaggaaa

SEQ ID NO: 471484 - RNA, 19 nt, Homo sapiens
  misc_RNA (1)...(19): siRNA sense strand
aaagaugcuccuaaaguuc

SEQ ID NO: 471485 - RNA, 19 nt, Homo sapiens
  misc_RNA (1)...(19): siRNA sense strand
ugagguccauacuucuaga

SEQ ID NO: 471486 - RNA, 19 nt, Homo sapiens
  misc_RNA (1)...(19): siRNA sense strand
ggagagcagauauguucau

SEQ ID NO: 471487 - RNA, 19 nt, Homo sapiens
  misc_RNA (1)...(19): siRNA sense strand
gugggacaguauuucagaa

SEQ ID NO: 471488 - RNA, 19 nt, Homo sapiens
  misc_RNA (1)...(19): siRNA sense strand
aagaaagccucagguuugg

SEQ ID NO: 471489 - RNA, 19 nt, Homo sapiens
  misc_RNA (1)...(19): siRNA sense strand
guucuucuaccucaguauu

SEQ ID NO: 471490 - RNA, 19 nt, Homo sapiens
  misc_RNA (1)...(19): siRNA sense strand
aaucaucuccuggcuaaau

SEQ ID NO: 471491 - RNA, 19 nt, Homo sapiens
  misc_RNA (1)...(19): siRNA sense strand
ggaaaacuacccaggaugu

SEQ ID NO: 471492 - RNA, 19 nt, Homo sapiens
  misc_RNA (1)...(19): siRNA sense strand
caagaagcccagauaaucc

SEQ ID NO: 471493 - RNA, 19 nt, Homo sapiens
  misc_RNA (1)...(19): siRNA sense strand
cauugaagugguuaagaaa

SEQ ID NO: 471494 - RNA, 19 nt, Homo sapiens
  misc_RNA (1)...(19): siRNA sense strand
gaaguucugcauucugacu

SEQ ID NO: 471495 - RNA, 19 nt, Homo sapiens
  misc_RNA (1)...(19): siRNA sense strand
auaaacaccuucagaaaag

SEQ ID NO: 471496 - RNA, 19 nt, Homo sapiens
  misc_RNA (1)...(19): siRNA sense strand
uggcuaugcuggaggaagu

SEQ ID NO: 471497 - RNA, 19 nt, Homo sapiens
  misc_RNA (1)...(19): siRNA sense strand
uaaaucucuuucuccaagu

SEQ ID NO: 471498 - RNA, 19 nt, Homo sapiens
  misc_RNA (1)...(19): siRNA sense strand
cagauaauccaggccaaga

SEQ ID NO: 471499 - RNA, 19 nt, Homo sapiens
  misc_RNA (1)...(19): siRNA sense strand
uguguauucuagccauuga

SEQ ID NO: 471500 - RNA, 19 nt, Homo sapiens
  misc_RNA (1)...(19): siRNA sense strand
aggauggaacucauuauau

SEQ ID NO: 471501 - RNA, 19 nt, Homo sapiens
  misc_RNA (1)...(19): siRNA sense strand
aaacuacccaggaugucaa

SEQ ID NO: 471502 - RNA, 19 nt, Homo sapiens
  misc_RNA (1)...(19): siRNA sense strand
gcuuuaaaaugggaacuuu

SEQ ID NO: 471503 - RNA, 19 nt, Homo sapiens
  misc_RNA (1)...(19): siRNA sense strand
guacuaguccagugaagcu

SEQ ID NO: 471504 - RNA, 19 nt, Homo sapiens
  misc_RNA (1)...(19): siRNA sense strand
aguauucucaggaaacauu

SEQ ID NO: 471505 - RNA, 19 nt, Homo sapiens
  misc_RNA (1)...(19): siRNA sense strand
caaguugaugcucuuaaag

SEQ ID NO: 471506 - RNA, 19 nt, Homo sapiens
  misc_RNA (1)...(19): siRNA sense strand
cccaagaagcccagauaau

SEQ ID NO: 471507 - RNA, 19 nt, Homo sapiens
  misc_RNA (1)...(19): siRNA sense strand
gaguuccaguacagaauac

SEQ ID NO: 471508 - RNA, 19 nt, Homo sapiens
  misc_RNA (1)...(19): siRNA sense strand
ucauuagaguuccaguaca

SEQ ID NO: 471509 - RNA, 19 nt, Homo sapiens
  misc_RNA (1)...(19): siRNA sense strand
gacuuggaaccacagauga

SEQ ID NO: 471510 - RNA, 19 nt, Homo sapiens
  misc_RNA (1)...(19): siRNA sense strand
agggaaacauuuuaucuug

SEQ ID NO: 471511 - RNA, 19 nt, Homo sapiens
  misc_RNA (1)...(19): siRNA sense strand
cuaguccagugaagcugaa

SEQ ID NO: 471512 - RNA, 19 nt, Homo sapiens
  misc_RNA (1)...(19): siRNA sense strand
gcuaaaucucuuucuccaa

SEQ ID NO: 471513 - RNA, 19 nt, Homo sapiens
  misc_RNA (1)...(19): siRNA sense strand
caguauuucagaaugugua

SEQ ID NO: 471514 - RNA, 19 nt, Homo sapiens
  misc_RNA (1)...(19): siRNA sense strand
ugcuggaggaaguaaauua

SEQ ID NO: 471515 - RNA, 19 nt, Homo sapiens
  misc_RNA (1)...(19): siRNA sense strand
uccagacacauacaaacua

SEQ ID NO: 471516 - RNA, 19 nt, Homo sapiens
  misc_RNA (1)...(19): siRNA sense strand
ggauggaacucauuauauu

SEQ ID NO: 471517 - RNA, 19 nt, Homo sapiens
  misc_RNA (1)...(19): siRNA sense strand
gcagauauguucaugacaa

SEQ ID NO: 471518 - RNA, 19 nt, Homo sapiens
  misc_RNA (1)...(19): siRNA sense strand
uaaagaugcuccuaaaguu

SEQ ID NO: 471519 - RNA, 19 nt, Homo sapiens
  misc_RNA (1)...(19): siRNA sense strand
cagugaagcugaagacuuu

SEQ ID NO: 471520 - RNA, 19 nt, Homo sapiens
  misc_RNA (1)...(19): siRNA sense strand
caggaaacauucauucaaa

SEQ ID NO: 471521 - RNA, 19 nt, Homo sapiens
  misc_RNA (1)...(19): siRNA sense strand
cauaauauccagacacaua

SEQ ID NO: 471522 - RNA, 19 nt, Homo sapiens
  misc_RNA (1)...(19): siRNA sense strand
uaagaaagccucagguuug

SEQ ID NO: 471523 - RNA, 19 nt, Homo sapiens
  misc_RNA (1)...(19): siRNA sense strand
ggacaguauuucagaaugu

SEQ ID NO: 471524 - RNA, 19 nt, Homo sapiens
  misc_RNA (1)...(19): siRNA sense strand
aaagaagucuggcuaaaca

SEQ ID NO: 471525 - RNA, 19 nt, Homo sapiens
  misc_RNA (1)...(19): siRNA sense strand
cagaugagguccauacuuc

SEQ ID NO: 471526 - RNA, 19 nt, Homo sapiens
  misc_RNA (1)...(19): siRNA sense strand
ccaaguugaugcucuuaaa

SEQ ID NO: 471527 - RNA, 19 nt, Homo sapiens
  misc_RNA (1)...(19): siRNA sense strand
acaaucaucuccuggcuaa

SEQ ID NO: 471528 - RNA, 19 nt, Homo sapiens
  misc_RNA (1)...(19): siRNA sense strand
ccauugaagugguuaagaa

SEQ ID NO: 471529 - RNA, 19 nt, Homo sapiens
  misc_RNA (1)...(19): siRNA sense strand
uagauuggaugguaccuuu

SEQ ID NO: 471530 - RNA, 19 nt, Homo sapiens
  misc_RNA (1)...(19): siRNA sense strand
uuaagaagauuccuaugga

SEQ ID NO: 471531 - RNA, 19 nt, Homo sapiens
  misc_RNA (1)...(19): siRNA sense strand
gacauaauauccagacaca

SEQ ID NO: 471532 - RNA, 19 nt, Homo sapiens
  misc_RNA (1)...(19): siRNA sense strand
gagcagauauguucaugac

SEQ ID NO: 471533 - RNA, 19 nt, Homo sapiens
  misc_RNA (1)...(19): siRNA sense strand
cgaaguagccguuuacaag

SEQ ID NO: 471534 - RNA, 19 nt, Homo sapiens
  misc_RNA (1)...(19): siRNA sense strand
ccagacacauacaaacuau

SEQ ID NO: 471535 - RNA, 19 nt, Homo sapiens
  misc_RNA (1)...(19): siRNA sense strand
ccaagaagcccagauaauc

SEQ ID NO: 471536 - RNA, 19 nt, Homo sapiens
  misc_RNA (1)...(19): siRNA sense strand
cagauauguucaugacaaa

SEQ ID NO: 471537 - RNA, 19 nt, Homo sapiens
  misc_RNA (1)...(19): siRNA sense strand
ggaacuuuguccuguaaca

SEQ ID NO: 471538 - RNA, 19 nt, Homo sapiens
  misc_RNA (1)...(19): siRNA sense strand
gagagcagauauguucaug

SEQ ID NO: 471539 - RNA, 19 nt, Homo sapiens
  misc_RNA (1)...(19): siRNA sense strand
gaugagguccauacuucua

SEQ ID NO: 471540 - RNA, 19 nt, Homo sapiens
  misc_RNA (1)...(19): siRNA sense strand
gggacaguauuucagaaug

SEQ ID NO: 471541 - RNA, 19 nt, Homo sapiens
  misc_RNA (1)...(19): siRNA sense strand
gaagacagacauaauaucc

SEQ ID NO: 471542 - RNA, 19 nt, Homo sapiens
  misc_RNA (1)...(19): siRNA sense strand
gaugguaccuuuugucaau

SEQ ID NO: 471543 - RNA, 19 nt, Homo sapiens
  misc_RNA (1)...(19): siRNA sense strand
ucuagccauugauucauua

SEQ ID NO: 471544 - RNA, 19 nt, Homo sapiens
  misc_RNA (1)...(19): siRNA sense strand
caaaagaagucuggcuaaa

SEQ ID NO: 471545 - RNA, 19 nt, Homo sapiens
  misc_RNA (1)...(19): siRNA sense strand
uuaaggauggaacucauua

SEQ ID NO: 471546 - RNA, 19 nt, Homo sapiens
  misc_RNA (1)...(19): siRNA sense strand
aagacgaaguagccguuua

SEQ ID NO: 471547 - RNA, 19 nt, Homo sapiens
  misc_RNA (1)...(19): siRNA sense strand
uuaaagaugcuccuaaagu

SEQ ID NO: 471548 - RNA, 19 nt, Homo sapiens
  misc_RNA (1)...(19): siRNA sense strand
uuaagaaagccucagguuu

SEQ ID NO: 471549 - RNA, 19 nt, Homo sapiens
  misc_RNA (1)...(19): siRNA sense strand
uugaaguucugcauucuga

SEQ ID NO: 471550 - RNA, 19 nt, Homo sapiens
  misc_RNA (1)...(19): siRNA sense strand
ggaagacagacauaauauc

SEQ ID NO: 471551 - RNA, 19 nt, Homo sapiens
  misc_RNA (1)...(19): siRNA sense strand
ggagugggacaguauuuca

SEQ ID NO: 471552 - RNA, 19 nt, Homo sapiens
  misc_RNA (1)...(19): siRNA sense strand
gcugcugccuugugccauu

SEQ ID NO: 471553 - RNA, 19 nt, Homo sapiens
  misc_RNA (1)...(19): siRNA sense strand
acauaaacaccuucagaaa

SEQ ID NO: 471554 - RNA, 19 nt, Homo sapiens
  misc_RNA (1)...(19): siRNA sense strand
cagaauguguagauuggau

SEQ ID NO: 471555 - RNA, 19 nt, Homo sapiens
  misc_RNA (1)...(19): siRNA sense strand
gaagucuggcuaaacaugu

SEQ ID NO: 471556 - RNA, 19 nt, Homo sapiens
  misc_RNA (1)...(19): siRNA sense strand
ugggaacuuuguccuguaa

SEQ ID NO: 471557 - RNA, 19 nt, Homo sapiens
  misc_RNA (1)...(19): siRNA sense strand
aaggauggaacucauuaua

SEQ ID NO: 471558 - RNA, 19 nt, Homo sapiens
  misc_RNA (1)...(19): siRNA sense strand
aaggagagcagauauguuc

SEQ ID NO: 471559 - RNA, 19 nt, Homo sapiens
  misc_RNA (1)...(19): siRNA sense strand
gacaguauuucagaaugug

SEQ ID NO: 471560 - RNA, 19 nt, Homo sapiens
  misc_RNA (1)...(19): siRNA sense strand
uuacauaaacaccuucaga

SEQ ID NO: 471561 - RNA, 19 nt, Homo sapiens
  misc_RNA (1)...(19): siRNA sense strand
uuagagguaugugaaguau

SEQ ID NO: 471562 - RNA, 19 nt, Homo sapiens
  misc_RNA (1)...(19): siRNA sense strand
guuaagaaagccucagguu

SEQ ID NO: 471563 - RNA, 19 nt, Homo sapiens
  misc_RNA (1)...(19): siRNA sense strand
ucaggaaacauucauucaa

SEQ ID NO: 471564 - RNA, 19 nt, Homo sapiens
  misc_RNA (1)...(19): siRNA sense strand
ccacagaugagguccauac

SEQ ID NO: 471565 - RNA, 19 nt, Homo sapiens
  misc_RNA (1)...(19): siRNA sense strand
ugauggugcuugcagugaa

SEQ ID NO: 471566 - RNA, 19 nt, Homo sapiens
  misc_RNA (1)...(19): siRNA sense strand
gaggaaaacuacccaggau

SEQ ID NO: 471567 - RNA, 19 nt, Homo sapiens
  misc_RNA (1)...(19): siRNA sense strand
ccaccgaagagcacugaaa

SEQ ID NO: 471568 - RNA, 19 nt, Homo sapiens
  misc_RNA (1)...(19): siRNA sense strand
cauaaacaccuucagaaaa

SEQ ID NO: 471569 - RNA, 19 nt, Homo sapiens
  misc_RNA (1)...(19): siRNA sense strand
uacauaaacaccuucagaa

SEQ ID NO: 471570 - RNA, 19 nt, Homo sapiens
  misc_RNA (1)...(19): siRNA sense strand
gauaauccaggccaagaag

SEQ ID NO: 471571 - RNA, 19 nt, Homo sapiens
  misc_RNA (1)...(19): siRNA sense strand
ccagugaagcugaagacuu

SEQ ID NO: 471572 - RNA, 19 nt, Homo sapiens
  misc_RNA (1)...(19): siRNA sense strand
cauuagaguuccaguacag

SEQ ID NO: 471573 - RNA, 19 nt, Homo sapiens
  misc_RNA (1)...(19): siRNA sense strand
gauggugcuugcagugaag

SEQ ID NO: 471574 - RNA, 19 nt, Homo sapiens
  misc_RNA (1)...(19): siRNA sense strand
agaguuccaguacagaaua

SEQ ID NO: 471575 - RNA, 19 nt, Homo sapiens
  misc_RNA (1)...(19): siRNA sense strand
ugacuuggaaccacagaug

SEQ ID NO: 471576 - RNA, 19 nt, Homo sapiens
  misc_RNA (1)...(19): siRNA sense strand
uggaagacagacauaauau

SEQ ID NO: 471577 - RNA, 19 nt, Homo sapiens
  misc_RNA (1)...(19): siRNA sense strand
gcugaagacuuuuaagaag

SEQ ID NO: 471578 - RNA, 19 nt, Homo sapiens
  misc_RNA (1)...(19): siRNA sense strand
gccauugauucauuagagu

SEQ ID NO: 471579 - RNA, 19 nt, Homo sapiens
  misc_RNA (1)...(19): siRNA sense strand
ucaguauucucaggaaaca

SEQ ID NO: 471580 - RNA, 19 nt, Homo sapiens
  misc_RNA (1)...(19): siRNA sense strand
aaaucucuuucuccaaguu

SEQ ID NO: 471581 - RNA, 19 nt, Homo sapiens
  misc_RNA (1)...(19): siRNA sense strand
auggaagacagacauaaua

SEQ ID NO: 471582 - RNA, 19 nt, Homo sapiens
  misc_RNA (1)...(19): siRNA sense strand
gguuuggagugggacagua

SEQ ID NO: 471583 - RNA, 19 nt, Homo sapiens
  misc_RNA (1)...(19): siRNA sense strand
ccucaguauucucaggaaa

SEQ ID NO: 471584 - RNA, 19 nt, Homo sapiens
  misc_RNA (1)...(19): siRNA sense strand
aaagaugcuccuaaaguuc

SEQ ID NO: 471585 - RNA, 19 nt, Homo sapiens
  misc_RNA (1)...(19): siRNA sense strand
ugagguccauacuucuaga

SEQ ID NO: 471586 - RNA, 19 nt, Homo sapiens
  misc_RNA (1)...(19): siRNA sense strand
ggagagcagauauguucau

SEQ ID NO: 471587 - RNA, 19 nt, Homo sapiens
  misc_RNA (1)...(19): siRNA sense strand
gugggacaguauuucagaa

SEQ ID NO: 471588 - RNA, 19 nt, Homo sapiens
  misc_RNA (1)...(19): siRNA sense strand
aagaaagccucagguuugg

SEQ ID NO: 471589 - RNA, 19 nt, Homo sapiens
  misc_RNA (1)...(19): siRNA sense strand
guucuucuaccucaguauu

SEQ ID NO: 471590 - RNA, 19 nt, Homo sapiens
  misc_RNA (1)...(19): siRNA sense strand
aaucaucuccuggcuaaau

SEQ ID NO: 471591 - RNA, 19 nt, Homo sapiens
  misc_RNA (1)...(19): siRNA sense strand
ggaaaacuacccaggaugu

SEQ ID NO: 471592 - RNA, 19 nt, Homo sapiens
  misc_RNA (1)...(19): siRNA sense strand
caagaagcccagauaaucc

SEQ ID NO: 471593 - RNA, 19 nt, Homo sapiens
  misc_RNA (1)...(19): siRNA sense strand
cauugaagugguuaagaaa

SEQ ID NO: 471594 - RNA, 19 nt, Homo sapiens
  misc_RNA (1)...(19): siRNA sense strand
gaaguucugcauucugacu

SEQ ID NO: 471595 - RNA, 19 nt, Homo sapiens
  misc_RNA (1)...(19): siRNA sense strand
auaaacaccuucagaaaag

SEQ ID NO: 471596 - RNA, 19 nt, Homo sapiens
  misc_RNA (1)...(19): siRNA sense strand
uggcuaugcuggaggaagu

SEQ ID NO: 471597 - RNA, 19 nt, Homo sapiens
  misc_RNA (1)...(19): siRNA sense strand
uaaaucucuuucuccaagu

SEQ ID NO: 471598 - RNA, 19 nt, Homo sapiens
  misc_RNA (1)...(19): siRNA sense strand
cagauaauccaggccaaga

SEQ ID NO: 471599 - RNA, 19 nt, Homo sapiens
  misc_RNA (1)...(19): siRNA sense strand
uguguauucuagccauuga

SEQ ID NO: 471600 - RNA, 19 nt, Homo sapiens
  misc_RNA (1)...(19): siRNA sense strand
aggauggaacucauuauau

SEQ ID NO: 471601 - RNA, 19 nt, Homo sapiens
  misc_RNA (1)...(19): siRNA sense strand
aaacuacccaggaugucaa

SEQ ID NO: 471602 - RNA, 19 nt, Homo sapiens
  misc_RNA (1)...(19): siRNA sense strand
gcuuuaaaaugggaacuuu

SEQ ID NO: 471603 - RNA, 19 nt, Homo sapiens
  misc_RNA (1)...(19): siRNA sense strand
guacuaguccagugaagcu

SEQ ID NO: 471604 - RNA, 19 nt, Homo sapiens
  misc_RNA (1)...(19): siRNA sense strand
aguauucucaggaaacauu

SEQ ID NO: 471605 - RNA, 19 nt, Homo sapiens
  misc_RNA (1)...(19): siRNA sense strand
caaguugaugcucuuaaag

SEQ ID NO: 471606 - RNA, 19 nt, Homo sapiens
  misc_RNA (1)...(19): siRNA sense strand
cccaagaagcccagauaau

SEQ ID NO: 471607 - RNA, 19 nt, Homo sapiens
  misc_RNA (1)...(19): siRNA sense strand
gaguuccaguacagaauac

SEQ ID NO: 471608 - RNA, 19 nt, Homo sapiens
  misc_RNA (1)...(19): siRNA sense strand
ucauuagaguuccaguaca

SEQ ID NO: 471609 - RNA, 19 nt, Homo sapiens
  misc_RNA (1)...(19): siRNA sense strand
gacuuggaaccacagauga

SEQ ID NO: 471610 - RNA, 19 nt, Homo sapiens
  misc_RNA (1)...(19): siRNA sense strand
agggaaacauuuuaucuug

SEQ ID NO: 471611 - RNA, 19 nt, Homo sapiens
  misc_RNA (1)...(19): siRNA sense strand
cuaguccagugaagcugaa

SEQ ID NO: 471612 - RNA, 19 nt, Homo sapiens
  misc_RNA (1)...(19): siRNA sense strand
gcuaaaucucuuucuccaa

SEQ ID NO: 471613 - RNA, 19 nt, Homo sapiens
  misc_RNA (1)...(19): siRNA sense strand
caguauuucagaaugugua

SEQ ID NO: 471614 - RNA, 19 nt, Homo sapiens
  misc_RNA (1)...(19): siRNA sense strand
ugcuggaggaaguaaauua

SEQ ID NO: 471615 - RNA, 19 nt, Homo sapiens
  misc_RNA (1)...(19): siRNA sense strand
uccagacacauacaaacua

SEQ ID NO: 471616 - RNA, 19 nt, Homo sapiens
  misc_RNA (1)...(19): siRNA sense strand
gcagaaauuuggccuguuu

SEQ ID NO: 471617 - RNA, 19 nt, Homo sapiens
  misc_RNA (1)...(19): siRNA sense strand
gacauaagcaucaugauua

SEQ ID NO: 471618 - RNA, 19 nt, Homo sapiens
  misc_RNA (1)...(19): siRNA sense strand
gcucccagcugcacaaaua

SEQ ID NO: 471619 - RNA, 19 nt, Homo sapiens
  misc_RNA (1)...(19): siRNA sense strand
gagcaucucucccuaccua

SEQ ID NO: 471620 - RNA, 19 nt, Homo sapiens
  misc_RNA (1)...(19): siRNA sense strand
ggaagcaagucaacccaaa

SEQ ID NO: 471621 - RNA, 19 nt, Homo sapiens
  misc_RNA (1)...(19): siRNA sense strand
gguuugagaucgccaagua

SEQ ID NO: 471622 - RNA, 19 nt, Homo sapiens
  misc_RNA (1)...(19): siRNA sense strand
gugaagcgauguggaguua

SEQ ID NO: 471623 - RNA, 19 nt, Homo sapiens
  misc_RNA (1)...(19): siRNA sense strand
ccacaggccucuccuacuu

SEQ ID NO: 471624 - RNA, 19 nt, Homo sapiens
  misc_RNA (1)...(19): siRNA sense strand
gcacaaauacuacaugaag

SEQ ID NO: 471625 - RNA, 19 nt, Homo sapiens
  misc_RNA (1)...(19): siRNA sense strand
gcgcgaggcugcaaauuuc

SEQ ID NO: 471626 - RNA, 19 nt, Homo sapiens
  misc_RNA (1)...(19): siRNA sense strand
gaagacauaagcaucauga

SEQ ID NO: 471627 - RNA, 19 nt, Homo sapiens
  misc_RNA (1)...(19): siRNA sense strand
gaacaugaagacuaacauu

SEQ ID NO: 471628 - RNA, 19 nt, Homo sapiens
  misc_RNA (1)...(19): siRNA sense strand
gcaaugugcuucgcgagaa

SEQ ID NO: 471629 - RNA, 19 nt, Homo sapiens
  misc_RNA (1)...(19): siRNA sense strand
agacacaacggcaacauua

SEQ ID NO: 471630 - RNA, 19 nt, Homo sapiens
  misc_RNA (1)...(19): siRNA sense strand
gaagcgauguggaguuagu

SEQ ID NO: 471631 - RNA, 19 nt, Homo sapiens
  misc_RNA (1)...(19): siRNA sense strand
ggaccgccauguucucaga

SEQ ID NO: 471632 - RNA, 19 nt, Homo sapiens
  misc_RNA (1)...(19): siRNA sense strand
aaucaggcaugucuaagaa

SEQ ID NO: 471633 - RNA, 19 nt, Homo sapiens
  misc_RNA (1)...(19): siRNA sense strand
gaagagggccaccagaaag

SEQ ID NO: 471634 - RNA, 19 nt, Homo sapiens
  misc_RNA (1)...(19): siRNA sense strand
ggagcaaccuggacauaac

SEQ ID NO: 471635 - RNA, 19 nt, Homo sapiens
  misc_RNA (1)...(19): siRNA sense strand
ucuggaacaugaagacuaa

SEQ ID NO: 471636 - RNA, 19 nt, Homo sapiens
  misc_RNA (1)...(19): siRNA sense strand
gcgggaguuugauuucuuu

SEQ ID NO: 471637 - RNA, 19 nt, Homo sapiens
  misc_RNA (1)...(19): siRNA sense strand
ggaguuugauuucuuuaac

SEQ ID NO: 471638 - RNA, 19 nt, Homo sapiens
  misc_RNA (1)...(19): siRNA sense strand
gaucuacuccacugccuuu

SEQ ID NO: 471639 - RNA, 19 nt, Homo sapiens
  misc_RNA (1)...(19): siRNA sense strand
gaucgagcgucucaucaca

SEQ ID NO: 471640 - RNA, 19 nt, Homo sapiens
  misc_RNA (1)...(19): siRNA sense strand
gaucaucgaccucuucaag

SEQ ID NO: 471641 - RNA, 19 nt, Homo sapiens
  misc_RNA (1)...(19): siRNA sense strand
ccuacgacaugauccagua

SEQ ID NO: 471642 - RNA, 19 nt, Homo sapiens
  misc_RNA (1)...(19): siRNA sense strand
caagaaaucaggcaugucu

SEQ ID NO: 471643 - RNA, 19 nt, Homo sapiens
  misc_RNA (1)...(19): siRNA sense strand
agacagacuucggcaugua

SEQ ID NO: 471644 - RNA, 19 nt, Homo sapiens
  misc_RNA (1)...(19): siRNA sense strand
agacauaagcaucaugauu

SEQ ID NO: 471645 - RNA, 19 nt, Homo sapiens
  misc_RNA (1)...(19): siRNA sense strand
ccacugccuuugacuacuu

SEQ ID NO: 471646 - RNA, 19 nt, Homo sapiens
  misc_RNA (1)...(19): siRNA sense strand
cggaugagauggugaugau

SEQ ID NO: 471647 - RNA, 19 nt, Homo sapiens
  misc_RNA (1)...(19): siRNA sense strand
acauuaugcuggacaagaa

SEQ ID NO: 471648 - RNA, 19 nt, Homo sapiens
  misc_RNA (1)...(19): siRNA sense strand
gcaacauuaugcuggacaa

SEQ ID NO: 471649 - RNA, 19 nt, Homo sapiens
  misc_RNA (1)...(19): siRNA sense strand
caucaagcccuacccuaaa

SEQ ID NO: 471650 - RNA, 19 nt, Homo sapiens
  misc_RNA (1)...(19): siRNA sense strand
ccagaaagacccugacauc

SEQ ID NO: 471651 - RNA, 19 nt, Homo sapiens
  misc_RNA (1)...(19): siRNA sense strand
uaagaacacagaagccauu

SEQ ID NO: 471652 - RNA, 19 nt, Homo sapiens
  misc_RNA (1)...(19): siRNA sense strand
gcggcugcgugaagacaua

SEQ ID NO: 471653 - RNA, 19 nt, Homo sapiens
  misc_RNA (1)...(19): siRNA sense strand
cagcaacccugaggccauu

SEQ ID NO: 471654 - RNA, 19 nt, Homo sapiens
  misc_RNA (1)...(19): siRNA sense strand
ccuggucacucucauguug

SEQ ID NO: 471655 - RNA, 19 nt, Homo sapiens
  misc_RNA (1)...(19): siRNA sense strand
ggccuggaccucuuuguuu

SEQ ID NO: 471656 - RNA, 19 nt, Homo sapiens
  misc_RNA (1)...(19): siRNA sense strand
aaggcuggaucaacacaua

SEQ ID NO: 471657 - RNA, 19 nt, Homo sapiens
  misc_RNA (1)...(19): siRNA sense strand
agaaaucaggcaugucuaa

SEQ ID NO: 471658 - RNA, 19 nt, Homo sapiens
  misc_RNA (1)...(19): siRNA sense strand
gcuaugugcgggaguauau

SEQ ID NO: 471659 - RNA, 19 nt, Homo sapiens
  misc_RNA (1)...(19): siRNA sense strand
ucaccaacgugucggcuau

SEQ ID NO: 471660 - RNA, 19 nt, Homo sapiens
  misc_RNA (1)...(19): siRNA sense strand
ugaagagggccaccagaaa

SEQ ID NO: 471661 - RNA, 19 nt, Homo sapiens
  misc_RNA (1)...(19): siRNA sense strand
cgaagugacccgucucguu

SEQ ID NO: 471662 - RNA, 19 nt, Homo sapiens
  misc_RNA (1)...(19): siRNA sense strand
ucaagugguucauggagau

SEQ ID NO: 471663 - RNA, 19 nt, Homo sapiens
  misc_RNA (1)...(19): siRNA sense strand
gagaagcggcugcgugaag

SEQ ID NO: 471664 - RNA, 19 nt, Homo sapiens
  misc_RNA (1)...(19): siRNA sense strand
gcagaucaucgaccucuuc

SEQ ID NO: 471665 - RNA, 19 nt, Homo sapiens
  misc_RNA (1)...(19): siRNA sense strand
ucaucaagcccuacccuaa

SEQ ID NO: 471666 - RNA, 19 nt, Homo sapiens
  misc_RNA (1)...(19): siRNA sense strand
cugcagcucugaccaagug

SEQ ID NO: 471667 - RNA, 19 nt, Homo sapiens
  misc_RNA (1)...(19): siRNA sense strand
cugcacaaauacuacauga

SEQ ID NO: 471668 - RNA, 19 nt, Homo sapiens
  misc_RNA (1)...(19): siRNA sense strand
gccauguucucagauaaga

SEQ ID NO: 471669 - RNA, 19 nt, Homo sapiens
  misc_RNA (1)...(19): siRNA sense strand
gcaggcagccaucuucaag

SEQ ID NO: 471670 - RNA, 19 nt, Homo sapiens
  misc_RNA (1)...(19): siRNA sense strand
caacgugucggcuaucauc

SEQ ID NO: 471671 - RNA, 19 nt, Homo sapiens
  misc_RNA (1)...(19): siRNA sense strand
ccaacuggagaucuaagua

SEQ ID NO: 471672 - RNA, 19 nt, Homo sapiens
  misc_RNA (1)...(19): siRNA sense strand
uaucauccacaucgacuuu

SEQ ID NO: 471673 - RNA, 19 nt, Homo sapiens
  misc_RNA (1)...(19): siRNA sense strand
uuaacaagaucaccaacgu

SEQ ID NO: 471674 - RNA, 19 nt, Homo sapiens
  misc_RNA (1)...(19): siRNA sense strand
guggccaacuggagaucua

SEQ ID NO: 471675 - RNA, 19 nt, Homo sapiens
  misc_RNA (1)...(19): siRNA sense strand
gggaguuugauuucuuuaa

SEQ ID NO: 471676 - RNA, 19 nt, Homo sapiens
  misc_RNA (1)...(19): siRNA sense strand
ugaugugccugaagcaauc

SEQ ID NO: 471677 - RNA, 19 nt, Homo sapiens
  misc_RNA (1)...(19): siRNA sense strand
agaagcggcugcgugaaga

SEQ ID NO: 471678 - RNA, 19 nt, Homo sapiens
  misc_RNA (1)...(19): siRNA sense strand
gagccggaccuacgacaug

SEQ ID NO: 471679 - RNA, 19 nt, Homo sapiens
  misc_RNA (1)...(19): siRNA sense strand
gcugggaacccgacaucaa

SEQ ID NO: 471680 - RNA, 19 nt, Homo sapiens
  misc_RNA (1)...(19): siRNA sense strand
agaaagaaggcuugucugu

SEQ ID NO: 471681 - RNA, 19 nt, Homo sapiens
  misc_RNA (1)...(19): siRNA sense strand
ugagugagaagcaguggaa

SEQ ID NO: 471682 - RNA, 19 nt, Homo sapiens
  misc_RNA (1)...(19): siRNA sense strand
acacaacggcaacauuaug

SEQ ID NO: 471683 - RNA, 19 nt, Homo sapiens
  misc_RNA (1)...(19): siRNA sense strand
acccaaggcuggaucaaca

SEQ ID NO: 471684 - RNA, 19 nt, Homo sapiens
  misc_RNA (1)...(19): siRNA sense strand
gacaugauccaguacuauc

SEQ ID NO: 471685 - RNA, 19 nt, Homo sapiens
  misc_RNA (1)...(19): siRNA sense strand
acaugacgguggagcagaa

SEQ ID NO: 471686 - RNA, 19 nt, Homo sapiens
  misc_RNA (1)...(19): siRNA sense strand
gaucaaggacagacacaac

SEQ ID NO: 471687 - RNA, 19 nt, Homo sapiens
  misc_RNA (1)...(19): siRNA sense strand
cuaaaggcgacgagagaaa

SEQ ID NO: 471688 - RNA, 19 nt, Homo sapiens
  misc_RNA (1)...(19): siRNA sense strand
ugaaaguccugcgguccuu

SEQ ID NO: 471689 - RNA, 19 nt, Homo sapiens
  misc_RNA (1)...(19): siRNA sense strand
cuccagagcucagccaugu

SEQ ID NO: 471690 - RNA, 19 nt, Homo sapiens
  misc_RNA (1)...(19): siRNA sense strand
guacugcagcucugaccaa

SEQ ID NO: 471691 - RNA, 19 nt, Homo sapiens
  misc_RNA (1)...(19): siRNA sense strand
gaaaucaggcaugucuaag

SEQ ID NO: 471692 - RNA, 19 nt, Homo sapiens
  misc_RNA (1)...(19): siRNA sense strand
ccuccuggaucaguuggua

SEQ ID NO: 471693 - RNA, 19 nt, Homo sapiens
  misc_RNA (1)...(19): siRNA sense strand
cagaagccauugggaacga

SEQ ID NO: 471694 - RNA, 19 nt, Homo sapiens
  misc_RNA (1)...(19): siRNA sense strand
ccgccauguucucagauaa

SEQ ID NO: 471695 - RNA, 19 nt, Homo sapiens
  misc_RNA (1)...(19): siRNA sense strand
gacgguggagcagaaauuu

SEQ ID NO: 471696 - RNA, 19 nt, Homo sapiens
  misc_RNA (1)...(19): siRNA sense strand
ccccauaucuggccaaguu

SEQ ID NO: 471697 - RNA, 19 nt, Homo sapiens
  misc_RNA (1)...(19): siRNA sense strand
ccauugugcuggacaucga

SEQ ID NO: 471698 - RNA, 19 nt, Homo sapiens
  misc_RNA (1)...(19): siRNA sense strand
ugacgguggagcagaaauu

SEQ ID NO: 471699 - RNA, 19 nt, Homo sapiens
  misc_RNA (1)...(19): siRNA sense strand
ucgagcgucucaucacaug

SEQ ID NO: 471700 - RNA, 19 nt, Homo sapiens
  misc_RNA (1)...(19): siRNA sense strand
gacacaacggcaacauuau

SEQ ID NO: 471701 - RNA, 19 nt, Homo sapiens
  misc_RNA (1)...(19): siRNA sense strand
gugcgggaguauauucugu

SEQ ID NO: 471702 - RNA, 19 nt, Homo sapiens
  misc_RNA (1)...(19): siRNA sense strand
caacuggagaucuaaguac

SEQ ID NO: 471703 - RNA, 19 nt, Homo sapiens
  misc_RNA (1)...(19): siRNA sense strand
uguccaccaucuccaagaa

SEQ ID NO: 471704 - RNA, 19 nt, Homo sapiens
  misc_RNA (1)...(19): siRNA sense strand
cgacaugauccaguacuau

SEQ ID NO: 471705 - RNA, 19 nt, Homo sapiens
  misc_RNA (1)...(19): siRNA sense strand
ggcugcaaauuucaucaug

SEQ ID NO: 471706 - RNA, 19 nt, Homo sapiens
  misc_RNA (1)...(19): siRNA sense strand
ggcccugucugaagugaag

SEQ ID NO: 471707 - RNA, 19 nt, Homo sapiens
  misc_RNA (1)...(19): siRNA sense strand
gugagaagcaguggaagga

SEQ ID NO: 471708 - RNA, 19 nt, Homo sapiens
  misc_RNA (1)...(19): siRNA sense strand
aaaucaggcaugucuaaga

SEQ ID NO: 471709 - RNA, 19 nt, Homo sapiens
  misc_RNA (1)...(19): siRNA sense strand
cggagcaaccuggacauaa

SEQ ID NO: 471710 - RNA, 19 nt, Homo sapiens
  misc_RNA (1)...(19): siRNA sense strand
caagcugacggaugagaug

SEQ ID NO: 471711 - RNA, 19 nt, Homo sapiens
  misc_RNA (1)...(19): siRNA sense strand
cagacagacuucggcaugu

SEQ ID NO: 471712 - RNA, 19 nt, Homo sapiens
  misc_RNA (1)...(19): siRNA sense strand
gcgaccuccuggaucaguu

SEQ ID NO: 471713 - RNA, 19 nt, Homo sapiens
  misc_RNA (1)...(19): siRNA sense strand
ugucggcccugucugaagu

SEQ ID NO: 471714 - RNA, 19 nt, Homo sapiens
  misc_RNA (1)...(19): siRNA sense strand
agagaaagaaggcuugucu

SEQ ID NO: 471715 - RNA, 19 nt, Homo sapiens
  misc_RNA (1)...(19): siRNA sense strand
acgacaugauccaguacua

SEQ ID NO: 471716 - RNA, 19 nt, Homo sapiens
  misc_RNA (1)...(19): siRNA sense strand
gcagaaauuuggccuguuu

SEQ ID NO: 471717 - RNA, 19 nt, Homo sapiens
  misc_RNA (1)...(19): siRNA sense strand
gacauaagcaucaugauua

SEQ ID NO: 471718 - RNA, 19 nt, Homo sapiens
  misc_RNA (1)...(19): siRNA sense strand
gcucccagcugcacaaaua

SEQ ID NO: 471719 - RNA, 19 nt, Homo sapiens
  misc_RNA (1)...(19): siRNA sense strand
gagcaucucucccuaccua

SEQ ID NO: 471720 - RNA, 19 nt, Homo sapiens
  misc_RNA (1)...(19): siRNA sense strand
ggaagcaagucaacccaaa

SEQ ID NO: 471721 - RNA, 19 nt, Homo sapiens
  misc_RNA (1)...(19): siRNA sense strand
gguuugagaucgccaagua

SEQ ID NO: 471722 - RNA, 19 nt, Homo sapiens
  misc_RNA (1)...(19): siRNA sense strand
gugaagcgauguggaguua

SEQ ID NO: 471723 - RNA, 19 nt, Homo sapiens
  misc_RNA (1)...(19): siRNA sense strand
ccacaggccucuccuacuu

SEQ ID NO: 471724 - RNA, 19 nt, Homo sapiens
  misc_RNA (1)...(19): siRNA sense strand
gcacaaauacuacaugaag

SEQ ID NO: 471725 - RNA, 19 nt, Homo sapiens
  misc_RNA (1)...(19): siRNA sense strand
gcgcgaggcugcaaauuuc

SEQ ID NO: 471726 - RNA, 19 nt, Homo sapiens
  misc_RNA (1)...(19): siRNA sense strand
gaagacauaagcaucauga

SEQ ID NO: 471727 - RNA, 19 nt, Homo sapiens
  misc_RNA (1)...(19): siRNA sense strand
gaacaugaagacuaacauu

SEQ ID NO: 471728 - RNA, 19 nt, Homo sapiens
  misc_RNA (1)...(19): siRNA sense strand
gcaaugugcuucgcgagaa

SEQ ID NO: 471729 - RNA, 19 nt, Homo sapiens
  misc_RNA (1)...(19): siRNA sense strand
agacacaacggcaacauua

SEQ ID NO: 471730 - RNA, 19 nt, Homo sapiens
  misc_RNA (1)...(19): siRNA sense strand
gaagcgauguggaguuagu

SEQ ID NO: 471731 - RNA, 19 nt, Homo sapiens
  misc_RNA (1)...(19): siRNA sense strand
ggaccgccauguucucaga

SEQ ID NO: 471732 - RNA, 19 nt, Homo sapiens
  misc_RNA (1)...(19): siRNA sense strand
aaucaggcaugucuaagaa

SEQ ID NO: 471733 - RNA, 19 nt, Homo sapiens
  misc_RNA (1)...(19): siRNA sense strand
gaagagggccaccagaaag

SEQ ID NO: 471734 - RNA, 19 nt, Homo sapiens
  misc_RNA (1)...(19): siRNA sense strand
ggagcaaccuggacauaac

SEQ ID NO: 471735 - RNA, 19 nt, Homo sapiens
  misc_RNA (1)...(19): siRNA sense strand
ucuggaacaugaagacuaa

SEQ ID NO: 471736 - RNA, 19 nt, Homo sapiens
  misc_RNA (1)...(19): siRNA sense strand
gcgggaguuugauuucuuu

SEQ ID NO: 471737 - RNA, 19 nt, Homo sapiens
  misc_RNA (1)...(19): siRNA sense strand
ggaguuugauuucuuuaac

SEQ ID NO: 471738 - RNA, 19 nt, Homo sapiens
  misc_RNA (1)...(19): siRNA sense strand
gaucuacuccacugccuuu

SEQ ID NO: 471739 - RNA, 19 nt, Homo sapiens
  misc_RNA (1)...(19): siRNA sense strand
gaucgagcgucucaucaca

SEQ ID NO: 471740 - RNA, 19 nt, Homo sapiens
  misc_RNA (1)...(19): siRNA sense strand
gaucaucgaccucuucaag

SEQ ID NO: 471741 - RNA, 19 nt, Homo sapiens
  misc_RNA (1)...(19): siRNA sense strand
ccuacgacaugauccagua

SEQ ID NO: 471742 - RNA, 19 nt, Homo sapiens
  misc_RNA (1)...(19): siRNA sense strand
caagaaaucaggcaugucu

SEQ ID NO: 471743 - RNA, 19 nt, Homo sapiens
  misc_RNA (1)...(19): siRNA sense strand
agacagacuucggcaugua

SEQ ID NO: 471744 - RNA, 19 nt, Homo sapiens
  misc_RNA (1)...(19): siRNA sense strand
agacauaagcaucaugauu

SEQ ID NO: 471745 - RNA, 19 nt, Homo sapiens
  misc_RNA (1)...(19): siRNA sense strand
ccacugccuuugacuacuu

SEQ ID NO: 471746 - RNA, 19 nt, Homo sapiens
  misc_RNA (1)...(19): siRNA sense strand
cggaugagauggugaugau

SEQ ID NO: 471747 - RNA, 19 nt, Homo sapiens
  misc_RNA (1)...(19): siRNA sense strand
acauuaugcuggacaagaa

SEQ ID NO: 471748 - RNA, 19 nt, Homo sapiens
  misc_RNA (1)...(19): siRNA sense strand
gcaacauuaugcuggacaa

SEQ ID NO: 471749 - RNA, 19 nt, Homo sapiens
  misc_RNA (1)...(19): siRNA sense strand
caucaagcccuacccuaaa

SEQ ID NO: 471750 - RNA, 19 nt, Homo sapiens
  misc_RNA (1)...(19): siRNA sense strand
ccagaaagacccugacauc

SEQ ID NO: 471751 - RNA, 19 nt, Homo sapiens
  misc_RNA (1)...(19): siRNA sense strand
uaagaacacagaagccauu

SEQ ID NO: 471752 - RNA, 19 nt, Homo sapiens
  misc_RNA (1)...(19): siRNA sense strand
gcggcugcgugaagacaua

SEQ ID NO: 471753 - RNA, 19 nt, Homo sapiens
  misc_RNA (1)...(19): siRNA sense strand
cagcaacccugaggccauu

SEQ ID NO: 471754 - RNA, 19 nt, Homo sapiens
  misc_RNA (1)...(19): siRNA sense strand
ccuggucacucucauguug

SEQ ID NO: 471755 - RNA, 19 nt, Homo sapiens
  misc_RNA (1)...(19): siRNA sense strand
ggccuggaccucuuuguuu

SEQ ID NO: 471756 - RNA, 19 nt, Homo sapiens
  misc_RNA (1)...(19): siRNA sense strand
aaggcuggaucaacacaua

SEQ ID NO: 471757 - RNA, 19 nt, Homo sapiens
  misc_RNA (1)...(19): siRNA sense strand
agaaaucaggcaugucuaa

SEQ ID NO: 471758 - RNA, 19 nt, Homo sapiens
  misc_RNA (1)...(19): siRNA sense strand
gcuaugugcgggaguauau

SEQ ID NO: 471759 - RNA, 19 nt, Homo sapiens
  misc_RNA (1)...(19): siRNA sense strand
ucaccaacgugucggcuau

SEQ ID NO: 471760 - RNA, 19 nt, Homo sapiens
  misc_RNA (1)...(19): siRNA sense strand
ugaagagggccaccagaaa

SEQ ID NO: 471761 - RNA, 19 nt, Homo sapiens
  misc_RNA (1)...(19): siRNA sense strand
cgaagugacccgucucguu

SEQ ID NO: 471762 - RNA, 19 nt, Homo sapiens
  misc_RNA (1)...(19): siRNA sense strand
ucaagugguucauggagau

SEQ ID NO: 471763 - RNA, 19 nt, Homo sapiens
  misc_RNA (1)...(19): siRNA sense strand
gagaagcggcugcgugaag

SEQ ID NO: 471764 - RNA, 19 nt, Homo sapiens
  misc_RNA (1)...(19): siRNA sense strand
gcagaucaucgaccucuuc

SEQ ID NO: 471765 - RNA, 19 nt, Homo sapiens
  misc_RNA (1)...(19): siRNA sense strand
ucaucaagcccuacccuaa

SEQ ID NO: 471766 - RNA, 19 nt, Homo sapiens
  misc_RNA (1)...(19): siRNA sense strand
cugcagcucugaccaagug

SEQ ID NO: 471767 - RNA, 19 nt, Homo sapiens
  misc_RNA (1)...(19): siRNA sense strand
cugcacaaauacuacauga

SEQ ID NO: 471768 - RNA, 19 nt, Homo sapiens
  misc_RNA (1)...(19): siRNA sense strand
gccauguucucagauaaga

SEQ ID NO: 471769 - RNA, 19 nt, Homo sapiens
  misc_RNA (1)...(19): siRNA sense strand
gcaggcagccaucuucaag

SEQ ID NO: 471770 - RNA, 19 nt, Homo sapiens
  misc_RNA (1)...(19): siRNA sense strand
caacgugucggcuaucauc

SEQ ID NO: 471771 - RNA, 19 nt, Homo sapiens
  misc_RNA (1)...(19): siRNA sense strand
ccaacuggagaucuaagua

SEQ ID NO: 471772 - RNA, 19 nt, Homo sapiens
  misc_RNA (1)...(19): siRNA sense strand
uaucauccacaucgacuuu

SEQ ID NO: 471773 - RNA, 19 nt, Homo sapiens
  misc_RNA (1)...(19): siRNA sense strand
uuaacaagaucaccaacgu

SEQ ID NO: 471774 - RNA, 19 nt, Homo sapiens
  misc_RNA (1)...(19): siRNA sense strand
guggccaacuggagaucua

SEQ ID NO: 471775 - RNA, 19 nt, Homo sapiens
  misc_RNA (1)...(19): siRNA sense strand
gggaguuugauuucuuuaa

SEQ ID NO: 471776 - RNA, 19 nt, Homo sapiens
  misc_RNA (1)...(19): siRNA sense strand
ugaugugccugaagcaauc

SEQ ID NO: 471777 - RNA, 19 nt, Homo sapiens
  misc_RNA (1)...(19): siRNA sense strand
agaagcggcugcgugaaga

SEQ ID NO: 471778 - RNA, 19 nt, Homo sapiens
  misc_RNA (1)...(19): siRNA sense strand
gagccggaccuacgacaug

SEQ ID NO: 471779 - RNA, 19 nt, Homo sapiens
  misc_RNA (1)...(19): siRNA sense strand
gcugggaacccgacaucaa

SEQ ID NO: 471780 - RNA, 19 nt, Homo sapiens
  misc_RNA (1)...(19): siRNA sense strand
agaaagaaggcuugucugu

SEQ ID NO: 471781 - RNA, 19 nt, Homo sapiens
  misc_RNA (1)...(19): siRNA sense strand
ugagugagaagcaguggaa

SEQ ID NO: 471782 - RNA, 19 nt, Homo sapiens
  misc_RNA (1)...(19): siRNA sense strand
acacaacggcaacauuaug

SEQ ID NO: 471783 - RNA, 19 nt, Homo sapiens
  misc_RNA (1)...(19): siRNA sense strand
acccaaggcuggaucaaca

SEQ ID NO: 471784 - RNA, 19 nt, Homo sapiens
  misc_RNA (1)...(19): siRNA sense strand
gacaugauccaguacuauc

SEQ ID NO: 471785 - RNA, 19 nt, Homo sapiens
  misc_RNA (1)...(19): siRNA sense strand
acaugacgguggagcagaa

SEQ ID NO: 471786 - RNA, 19 nt, Homo sapiens
  misc_RNA (1)...(19): siRNA sense strand
gaucaaggacagacacaac

SEQ ID NO: 471787 - RNA, 19 nt, Homo sapiens
  misc_RNA (1)...(19): siRNA sense strand
cuaaaggcgacgagagaaa

SEQ ID NO: 471788 - RNA, 19 nt, Homo sapiens
  misc_RNA (1)...(19): siRNA sense strand
ugaaaguccugcgguccuu

SEQ ID NO: 471789 - RNA, 19 nt, Homo sapiens
  misc_RNA (1)...(19): siRNA sense strand
cuccagagcucagccaugu

SEQ ID NO: 471790 - RNA, 19 nt, Homo sapiens
  misc_RNA (1)...(19): siRNA sense strand
guacugcagcucugaccaa

SEQ ID NO: 471791 - RNA, 19 nt, Homo sapiens
  misc_RNA (1)...(19): siRNA sense strand
gaaaucaggcaugucuaag

SEQ ID NO: 471792 - RNA, 19 nt, Homo sapiens
  misc_RNA (1)...(19): siRNA sense strand
ccuccuggaucaguuggua

SEQ ID NO: 471793 - RNA, 19 nt, Homo sapiens
  misc_RNA (1)...(19): siRNA sense strand
cagaagccauugggaacga

SEQ ID NO: 471794 - RNA, 19 nt, Homo sapiens
  misc_RNA (1)...(19): siRNA sense strand
ccgccauguucucagauaa

SEQ ID NO: 471795 - RNA, 19 nt, Homo sapiens
  misc_RNA (1)...(19): siRNA sense strand
gacgguggagcagaaauuu

SEQ ID NO: 471796 - RNA, 19 nt, Homo sapiens
  misc_RNA (1)...(19): siRNA sense strand
ccccauaucuggccaaguu

SEQ ID NO: 471797 - RNA, 19 nt, Homo sapiens
  misc_RNA (1)...(19): siRNA sense strand
ccauugugcuggacaucga

SEQ ID NO: 471798 - RNA, 19 nt, Homo sapiens
  misc_RNA (1)...(19): siRNA sense strand
ugacgguggagcagaaauu

SEQ ID NO: 471799 - RNA, 19 nt, Homo sapiens
  misc_RNA (1)...(19): siRNA sense strand
ucgagcgucucaucacaug

SEQ ID NO: 471800 - RNA, 19 nt, Homo sapiens
  misc_RNA (1)...(19): siRNA sense strand
gacacaacggcaacauuau

SEQ ID NO: 471801 - RNA, 19 nt, Homo sapiens
  misc_RNA (1)...(19): siRNA sense strand
gugcgggaguauauucugu

SEQ ID NO: 471802 - RNA, 19 nt, Homo sapiens
  misc_RNA (1)...(19): siRNA sense strand
caacuggagaucuaaguac

SEQ ID NO: 471803 - RNA, 19 nt, Homo sapiens
  misc_RNA (1)...(19): siRNA sense strand
uguccaccaucuccaagaa

SEQ ID NO: 471804 - RNA, 19 nt, Homo sapiens
  misc_RNA (1)...(19): siRNA sense strand
cgacaugauccaguacuau

SEQ ID NO: 471805 - RNA, 19 nt, Homo sapiens
  misc_RNA (1)...(19): siRNA sense strand
ggcugcaaauuucaucaug

SEQ ID NO: 471806 - RNA, 19 nt, Homo sapiens
  misc_RNA (1)...(19): siRNA sense strand
ggcccugucugaagugaag

SEQ ID NO: 471807 - RNA, 19 nt, Homo sapiens
  misc_RNA (1)...(19): siRNA sense strand
gugagaagcaguggaagga

SEQ ID NO: 471808 - RNA, 19 nt, Homo sapiens
  misc_RNA (1)...(19): siRNA sense strand
aaaucaggcaugucuaaga

SEQ ID NO: 471809 - RNA, 19 nt, Homo sapiens
  misc_RNA (1)...(19): siRNA sense strand
cggagcaaccuggacauaa

SEQ ID NO: 471810 - RNA, 19 nt, Homo sapiens
  misc_RNA (1)...(19): siRNA sense strand
caagcugacggaugagaug

SEQ ID NO: 471811 - RNA, 19 nt, Homo sapiens
  misc_RNA (1)...(19): siRNA sense strand
cagacagacuucggcaugu

SEQ ID NO: 471812 - RNA, 19 nt, Homo sapiens
  misc_RNA (1)...(19): siRNA sense strand
gcgaccuccuggaucaguu

SEQ ID NO: 471813 - RNA, 19 nt, Homo sapiens
  misc_RNA (1)...(19): siRNA sense strand
ugucggcccugucugaagu

SEQ ID NO: 471814 - RNA, 19 nt, Homo sapiens
  misc_RNA (1)...(19): siRNA sense strand
agagaaagaaggcuugucu

SEQ ID NO: 471815 - RNA, 19 nt, Homo sapiens
  misc_RNA (1)...(19): siRNA sense strand
acgacaugauccaguacua

SEQ ID NO: 471816 - RNA, 19 nt, Homo sapiens
  misc_RNA (1)...(19): siRNA sense strand
gaaagaagcugcccugugu

SEQ ID NO: 471817 - RNA, 19 nt, Homo sapiens
  misc_RNA (1)...(19): siRNA sense strand
uaaagaagcugaagaacga

SEQ ID NO: 471818 - RNA, 19 nt, Homo sapiens
  misc_RNA (1)...(19): siRNA sense strand
guagagagcugacagaugu

SEQ ID NO: 471819 - RNA, 19 nt, Homo sapiens
  misc_RNA (1)...(19): siRNA sense strand
cuacaaagcugagaaguau

SEQ ID NO: 471820 - RNA, 19 nt, Homo sapiens
  misc_RNA (1)...(19): siRNA sense strand
cagaagcucucccuacaaa

SEQ ID NO: 471821 - RNA, 19 nt, Homo sapiens
  misc_RNA (1)...(19): siRNA sense strand
ggaccuacauucucuuuca

SEQ ID NO: 471822 - RNA, 19 nt, Homo sapiens
  misc_RNA (1)...(19): siRNA sense strand
ccacuacucuuuguccaua

SEQ ID NO: 471823 - RNA, 19 nt, Homo sapiens
  misc_RNA (1)...(19): siRNA sense strand
caucuacacuuucucuaaa

SEQ ID NO: 471824 - RNA, 19 nt, Homo sapiens
  misc_RNA (1)...(19): siRNA sense strand
gugauuggguuacagcaua

SEQ ID NO: 471825 - RNA, 19 nt, Homo sapiens
  misc_RNA (1)...(19): siRNA sense strand
gaaauauccuagacagagu

SEQ ID NO: 471826 - RNA, 19 nt, Homo sapiens
  misc_RNA (1)...(19): siRNA sense strand
uagaagaggcugagaauga

SEQ ID NO: 471827 - RNA, 19 nt, Homo sapiens
  misc_RNA (1)...(19): siRNA sense strand
uuaaucagcugcgaaauau

SEQ ID NO: 471828 - RNA, 19 nt, Homo sapiens
  misc_RNA (1)...(19): siRNA sense strand
gcuaacagcuuuuaucaga

SEQ ID NO: 471829 - RNA, 19 nt, Homo sapiens
  misc_RNA (1)...(19): siRNA sense strand
gcucagagagguaguguug

SEQ ID NO: 471830 - RNA, 19 nt, Homo sapiens
  misc_RNA (1)...(19): siRNA sense strand
cagcauaaccaugaauaua

SEQ ID NO: 471831 - RNA, 19 nt, Homo sapiens
  misc_RNA (1)...(19): siRNA sense strand
gaagacauccuggaagaau

SEQ ID NO: 471832 - RNA, 19 nt, Homo sapiens
  misc_RNA (1)...(19): siRNA sense strand
ccacacacagcuaauuuaa

SEQ ID NO: 471833 - RNA, 19 nt, Homo sapiens
  misc_RNA (1)...(19): siRNA sense strand
aagaagacauccuggaaga

SEQ ID NO: 471834 - RNA, 19 nt, Homo sapiens
  misc_RNA (1)...(19): siRNA sense strand
gcaacuguguaauuccuau

SEQ ID NO: 471835 - RNA, 19 nt, Homo sapiens
  misc_RNA (1)...(19): siRNA sense strand
gccagaagcucucccuaca

SEQ ID NO: 471836 - RNA, 19 nt, Homo sapiens
  misc_RNA (1)...(19): siRNA sense strand
ggaaaagcauuaugacugu

SEQ ID NO: 471837 - RNA, 19 nt, Homo sapiens
  misc_RNA (1)...(19): siRNA sense strand
cagcacuucuccucuggua

SEQ ID NO: 471838 - RNA, 19 nt, Homo sapiens
  misc_RNA (1)...(19): siRNA sense strand
gaugcaggauccagacaga

SEQ ID NO: 471839 - RNA, 19 nt, Homo sapiens
  misc_RNA (1)...(19): siRNA sense strand
gcauaaccaugaauauagg

SEQ ID NO: 471840 - RNA, 19 nt, Homo sapiens
  misc_RNA (1)...(19): siRNA sense strand
gccuggagcuccuaacaga

SEQ ID NO: 471841 - RNA, 19 nt, Homo sapiens
  misc_RNA (1)...(19): siRNA sense strand
uaaaucuuguccuggcuaa

SEQ ID NO: 471842 - RNA, 19 nt, Homo sapiens
  misc_RNA (1)...(19): siRNA sense strand
gguacugucuccuuuuaua

SEQ ID NO: 471843 - RNA, 19 nt, Homo sapiens
  misc_RNA (1)...(19): siRNA sense strand
ucaggagucucuaaagaag

SEQ ID NO: 471844 - RNA, 19 nt, Homo sapiens
  misc_RNA (1)...(19): siRNA sense strand
gaagacugccuggauccua

SEQ ID NO: 471845 - RNA, 19 nt, Homo sapiens
  misc_RNA (1)...(19): siRNA sense strand
gaagaacgaggagcaggaa

SEQ ID NO: 471846 - RNA, 19 nt, Homo sapiens
  misc_RNA (1)...(19): siRNA sense strand
gcuaaaguaucuggaccuu

SEQ ID NO: 471847 - RNA, 19 nt, Homo sapiens
  misc_RNA (1)...(19): siRNA sense strand
ccaagaagacugccuggau

SEQ ID NO: 471848 - RNA, 19 nt, Homo sapiens
  misc_RNA (1)...(19): siRNA sense strand
gcacuucuccucugguaag

SEQ ID NO: 471849 - RNA, 19 nt, Homo sapiens
  misc_RNA (1)...(19): siRNA sense strand
uuucaggagucucuaaaga

SEQ ID NO: 471850 - RNA, 19 nt, Homo sapiens
  misc_RNA (1)...(19): siRNA sense strand
ugauuggguuacagcauaa

SEQ ID NO: 471851 - RNA, 19 nt, Homo sapiens
  misc_RNA (1)...(19): siRNA sense strand
gaccuacauucucuuucaa

SEQ ID NO: 471852 - RNA, 19 nt, Homo sapiens
  misc_RNA (1)...(19): siRNA sense strand
agaagaggcugagaaugau

SEQ ID NO: 471853 - RNA, 19 nt, Homo sapiens
  misc_RNA (1)...(19): siRNA sense strand
uuuaaucagcugcgaaaua

SEQ ID NO: 471854 - RNA, 19 nt, Homo sapiens
  misc_RNA (1)...(19): siRNA sense strand
ugugggagcuaaaguaucu

SEQ ID NO: 471855 - RNA, 19 nt, Homo sapiens
  misc_RNA (1)...(19): siRNA sense strand
ggauccagacagaguuuaa

SEQ ID NO: 471856 - RNA, 19 nt, Homo sapiens
  misc_RNA (1)...(19): siRNA sense strand
ccaucuacacuuucucuaa

SEQ ID NO: 471857 - RNA, 19 nt, Homo sapiens
  misc_RNA (1)...(19): siRNA sense strand
ccuacaaagcugagaagua

SEQ ID NO: 471858 - RNA, 19 nt, Homo sapiens
  misc_RNA (1)...(19): siRNA sense strand
agaagaagacauccuggaa

SEQ ID NO: 471859 - RNA, 19 nt, Homo sapiens
  misc_RNA (1)...(19): siRNA sense strand
gaaaagcauuaugacugua

SEQ ID NO: 471860 - RNA, 19 nt, Homo sapiens
  misc_RNA (1)...(19): siRNA sense strand
gaagaaggggcuacgaauu

SEQ ID NO: 471861 - RNA, 19 nt, Homo sapiens
  misc_RNA (1)...(19): siRNA sense strand
ggagaaguuucaggagucu

SEQ ID NO: 471862 - RNA, 19 nt, Homo sapiens
  misc_RNA (1)...(19): siRNA sense strand
ucagagagaagaagacauc

SEQ ID NO: 471863 - RNA, 19 nt, Homo sapiens
  misc_RNA (1)...(19): siRNA sense strand
uaacagcuuuuaucagaga

SEQ ID NO: 471864 - RNA, 19 nt, Homo sapiens
  misc_RNA (1)...(19): siRNA sense strand
ggaguaccaggagaaguuu

SEQ ID NO: 471865 - RNA, 19 nt, Homo sapiens
  misc_RNA (1)...(19): siRNA sense strand
aagaaggggcuacgaauua

SEQ ID NO: 471866 - RNA, 19 nt, Homo sapiens
  misc_RNA (1)...(19): siRNA sense strand
guagauguggccaagaaga

SEQ ID NO: 471867 - RNA, 19 nt, Homo sapiens
  misc_RNA (1)...(19): siRNA sense strand
gucauuugcuggcuuugug

SEQ ID NO: 471868 - RNA, 19 nt, Homo sapiens
  misc_RNA (1)...(19): siRNA sense strand
aauauuacuuucccacuac

SEQ ID NO: 471869 - RNA, 19 nt, Homo sapiens
  misc_RNA (1)...(19): siRNA sense strand
ugaauccacacacagcuaa

SEQ ID NO: 471870 - RNA, 19 nt, Homo sapiens
  misc_RNA (1)...(19): siRNA sense strand
gaagcucucccuacaaagc

SEQ ID NO: 471871 - RNA, 19 nt, Homo sapiens
  misc_RNA (1)...(19): siRNA sense strand
uauagaagaggcugagaau

SEQ ID NO: 471872 - RNA, 19 nt, Homo sapiens
  misc_RNA (1)...(19): siRNA sense strand
agauggagccugagagaug

SEQ ID NO: 471873 - RNA, 19 nt, Homo sapiens
  misc_RNA (1)...(19): siRNA sense strand
acaaagcugagaaguaugu

SEQ ID NO: 471874 - RNA, 19 nt, Homo sapiens
  misc_RNA (1)...(19): siRNA sense strand
uacauucucuuucaaccau

SEQ ID NO: 471875 - RNA, 19 nt, Homo sapiens
  misc_RNA (1)...(19): siRNA sense strand
agguagauguggccaagaa

SEQ ID NO: 471876 - RNA, 19 nt, Homo sapiens
  misc_RNA (1)...(19): siRNA sense strand
gaggaugggaaggucauuu

SEQ ID NO: 471877 - RNA, 19 nt, Homo sapiens
  misc_RNA (1)...(19): siRNA sense strand
cauucucuuucaaccauuu

SEQ ID NO: 471878 - RNA, 19 nt, Homo sapiens
  misc_RNA (1)...(19): siRNA sense strand
gcaggauccagacagaguu

SEQ ID NO: 471879 - RNA, 19 nt, Homo sapiens
  misc_RNA (1)...(19): siRNA sense strand
gcaucuggccaacauagug

SEQ ID NO: 471880 - RNA, 19 nt, Homo sapiens
  misc_RNA (1)...(19): siRNA sense strand
ggcuacgaauuauagaaga

SEQ ID NO: 471881 - RNA, 19 nt, Homo sapiens
  misc_RNA (1)...(19): siRNA sense strand
gacccugaauccacacaca

SEQ ID NO: 471882 - RNA, 19 nt, Homo sapiens
  misc_RNA (1)...(19): siRNA sense strand
gcuacgaauuauagaagag

SEQ ID NO: 471883 - RNA, 19 nt, Homo sapiens
  misc_RNA (1)...(19): siRNA sense strand
ggcugguacugucuccuuu

SEQ ID NO: 471884 - RNA, 19 nt, Homo sapiens
  misc_RNA (1)...(19): siRNA sense strand
gggcuacgaauuauagaag

SEQ ID NO: 471885 - RNA, 19 nt, Homo sapiens
  misc_RNA (1)...(19): siRNA sense strand
uacagcauaaccaugaaua

SEQ ID NO: 471886 - RNA, 19 nt, Homo sapiens
  misc_RNA (1)...(19): siRNA sense strand
caaauggcagggaaucagu

SEQ ID NO: 471887 - RNA, 19 nt, Homo sapiens
  misc_RNA (1)...(19): siRNA sense strand
caucuggccaacauaguga

SEQ ID NO: 471888 - RNA, 19 nt, Homo sapiens
  misc_RNA (1)...(19): siRNA sense strand
gcucuucugucaggaggau

SEQ ID NO: 471889 - RNA, 19 nt, Homo sapiens
  misc_RNA (1)...(19): siRNA sense strand
ccuugcaacuguguaauuc

SEQ ID NO: 471890 - RNA, 19 nt, Homo sapiens
  misc_RNA (1)...(19): siRNA sense strand
gaguggauacugggugauu

SEQ ID NO: 471891 - RNA, 19 nt, Homo sapiens
  misc_RNA (1)...(19): siRNA sense strand
ucacugggaccuacauucu

SEQ ID NO: 471892 - RNA, 19 nt, Homo sapiens
  misc_RNA (1)...(19): siRNA sense strand
gaagaggcugagaaugauc

SEQ ID NO: 471893 - RNA, 19 nt, Homo sapiens
  misc_RNA (1)...(19): siRNA sense strand
aaggucauuugcuggcuuu

SEQ ID NO: 471894 - RNA, 19 nt, Homo sapiens
  misc_RNA (1)...(19): siRNA sense strand
gcgaaauauccuagacaga

SEQ ID NO: 471895 - RNA, 19 nt, Homo sapiens
  misc_RNA (1)...(19): siRNA sense strand
guuugugggagcuaaagua

SEQ ID NO: 471896 - RNA, 19 nt, Homo sapiens
  misc_RNA (1)...(19): siRNA sense strand
ccagaagcucucccuacaa

SEQ ID NO: 471897 - RNA, 19 nt, Homo sapiens
  misc_RNA (1)...(19): siRNA sense strand
aggaguaccaggagaaguu

SEQ ID NO: 471898 - RNA, 19 nt, Homo sapiens
  misc_RNA (1)...(19): siRNA sense strand
aagccugcaucacaccaaa

SEQ ID NO: 471899 - RNA, 19 nt, Homo sapiens
  misc_RNA (1)...(19): siRNA sense strand
aacugcagcucuucuguca

SEQ ID NO: 471900 - RNA, 19 nt, Homo sapiens
  misc_RNA (1)...(19): siRNA sense strand
agacauccuggaagaauca

SEQ ID NO: 471901 - RNA, 19 nt, Homo sapiens
  misc_RNA (1)...(19): siRNA sense strand
ugagguuugugggagcuaa

SEQ ID NO: 471902 - RNA, 19 nt, Homo sapiens
  misc_RNA (1)...(19): siRNA sense strand
uccacacacagcuaauuua

SEQ ID NO: 471903 - RNA, 19 nt, Homo sapiens
  misc_RNA (1)...(19): siRNA sense strand
gaaggggcuacgaauuaua

SEQ ID NO: 471904 - RNA, 19 nt, Homo sapiens
  misc_RNA (1)...(19): siRNA sense strand
ggagcaacgggagcugaaa

SEQ ID NO: 471905 - RNA, 19 nt, Homo sapiens
  misc_RNA (1)...(19): siRNA sense strand
gggaaccugcggccuaauc

SEQ ID NO: 471906 - RNA, 19 nt, Homo sapiens
  misc_RNA (1)...(19): siRNA sense strand
gggccuaugaggauucuuc

SEQ ID NO: 471907 - RNA, 19 nt, Homo sapiens
  misc_RNA (1)...(19): siRNA sense strand
cacacacagcuaauuuaaa

SEQ ID NO: 471908 - RNA, 19 nt, Homo sapiens
  misc_RNA (1)...(19): siRNA sense strand
gaucuggagcgucgauguc

SEQ ID NO: 471909 - RNA, 19 nt, Homo sapiens
  misc_RNA (1)...(19): siRNA sense strand
caggauccagacagaguuu

SEQ ID NO: 471910 - RNA, 19 nt, Homo sapiens
  misc_RNA (1)...(19): siRNA sense strand
gaacgaggagcaggaagcu

SEQ ID NO: 471911 - RNA, 19 nt, Homo sapiens
  misc_RNA (1)...(19): siRNA sense strand
gauccagacagaguuuaau

SEQ ID NO: 471912 - RNA, 19 nt, Homo sapiens
  misc_RNA (1)...(19): siRNA sense strand
ucuccucugguaagcauua

SEQ ID NO: 471913 - RNA, 19 nt, Homo sapiens
  misc_RNA (1)...(19): siRNA sense strand
uaacagaaccccugagcau

SEQ ID NO: 471914 - RNA, 19 nt, Homo sapiens
  misc_RNA (1)...(19): siRNA sense strand
acuacucuuuguccauauu

SEQ ID NO: 471915 - RNA, 19 nt, Homo sapiens
  misc_RNA (1)...(19): siRNA sense strand
agcauaaccaugaauauag

SEQ ID NO: 471916 - RNA, 19 nt, Homo sapiens
  misc_RNA (1)...(19): siRNA sense strand
gaagagccguuguuuauaa

SEQ ID NO: 471917 - RNA, 19 nt, Homo sapiens
  misc_RNA (1)...(19): siRNA sense strand
gaagaaagcuuguacucaa

SEQ ID NO: 471918 - RNA, 19 nt, Homo sapiens
  misc_RNA (1)...(19): siRNA sense strand
gauaagaacuccucaguca

SEQ ID NO: 471919 - RNA, 19 nt, Homo sapiens
  misc_RNA (1)...(19): siRNA sense strand
gaaaguagauuagcagaau

SEQ ID NO: 471920 - RNA, 19 nt, Homo sapiens
  misc_RNA (1)...(19): siRNA sense strand
gcccagagcuuugauauuu

SEQ ID NO: 471921 - RNA, 19 nt, Homo sapiens
  misc_RNA (1)...(19): siRNA sense strand
ggagagaccuuauuaugga

SEQ ID NO: 471922 - RNA, 19 nt, Homo sapiens
  misc_RNA (1)...(19): siRNA sense strand
cagaagaacuuaaacagaa

SEQ ID NO: 471923 - RNA, 19 nt, Homo sapiens
  misc_RNA (1)...(19): siRNA sense strand
gaaguucccuuaaaccuau

SEQ ID NO: 471924 - RNA, 19 nt, Homo sapiens
  misc_RNA (1)...(19): siRNA sense strand
ggauaaagauggcaauguu

SEQ ID NO: 471925 - RNA, 19 nt, Homo sapiens
  misc_RNA (1)...(19): siRNA sense strand
caacagagauggcuuuaag

SEQ ID NO: 471926 - RNA, 19 nt, Homo sapiens
  misc_RNA (1)...(19): siRNA sense strand
gaaacaaagugaaaguaga

SEQ ID NO: 471927 - RNA, 19 nt, Homo sapiens
  misc_RNA (1)...(19): siRNA sense strand
agaacgagcugaagccuua

SEQ ID NO: 471928 - RNA, 19 nt, Homo sapiens
  misc_RNA (1)...(19): siRNA sense strand
gaacuccucagucaauuua

SEQ ID NO: 471929 - RNA, 19 nt, Homo sapiens
  misc_RNA (1)...(19): siRNA sense strand
ggaaagccaucuacagaga

SEQ ID NO: 471930 - RNA, 19 nt, Homo sapiens
  misc_RNA (1)...(19): siRNA sense strand
gaaccuauguauauucaga

SEQ ID NO: 471931 - RNA, 19 nt, Homo sapiens
  misc_RNA (1)...(19): siRNA sense strand
ggagugacauggcuaauuc

SEQ ID NO: 471932 - RNA, 19 nt, Homo sapiens
  misc_RNA (1)...(19): siRNA sense strand
gaaguacucuccaucugaa

SEQ ID NO: 471933 - RNA, 19 nt, Homo sapiens
  misc_RNA (1)...(19): siRNA sense strand
agacgagccuuucuuauuu

SEQ ID NO: 471934 - RNA, 19 nt, Homo sapiens
  misc_RNA (1)...(19): siRNA sense strand
gaaagaauauuggauacug

SEQ ID NO: 471935 - RNA, 19 nt, Homo sapiens
  misc_RNA (1)...(19): siRNA sense strand
gaaggacucuaaugcagaa

SEQ ID NO: 471936 - RNA, 19 nt, Homo sapiens
  misc_RNA (1)...(19): siRNA sense strand
uggauaagcuuucaacuga

SEQ ID NO: 471937 - RNA, 19 nt, Homo sapiens
  misc_RNA (1)...(19): siRNA sense strand
ugacuaugcucuuguauau

SEQ ID NO: 471938 - RNA, 19 nt, Homo sapiens
  misc_RNA (1)...(19): siRNA sense strand
acacucagaugaagaagua

SEQ ID NO: 471939 - RNA, 19 nt, Homo sapiens
  misc_RNA (1)...(19): siRNA sense strand
ugagacaacuggccaaauu

SEQ ID NO: 471940 - RNA, 19 nt, Homo sapiens
  misc_RNA (1)...(19): siRNA sense strand
gaacacaucaugcaaagga

SEQ ID NO: 471941 - RNA, 19 nt, Homo sapiens
  misc_RNA (1)...(19): siRNA sense strand
ugacauggcuaauuccaaa

SEQ ID NO: 471942 - RNA, 19 nt, Homo sapiens
  misc_RNA (1)...(19): siRNA sense strand
cauaaccacuuuguucuua

SEQ ID NO: 471943 - RNA, 19 nt, Homo sapiens
  misc_RNA (1)...(19): siRNA sense strand
gaggacaaaucaagaaguu

SEQ ID NO: 471944 - RNA, 19 nt, Homo sapiens
  misc_RNA (1)...(19): siRNA sense strand
gaagagggcauuaagaaau

SEQ ID NO: 471945 - RNA, 19 nt, Homo sapiens
  misc_RNA (1)...(19): siRNA sense strand
ugauaaagcuugggaauau

SEQ ID NO: 471946 - RNA, 19 nt, Homo sapiens
  misc_RNA (1)...(19): siRNA sense strand
cagaacaacugaaugcaaa

SEQ ID NO: 471947 - RNA, 19 nt, Homo sapiens
  misc_RNA (1)...(19): siRNA sense strand
gacagaagaugaugaaagu

SEQ ID NO: 471948 - RNA, 19 nt, Homo sapiens
  misc_RNA (1)...(19): siRNA sense strand
gagccuuucuuauuucuuu

SEQ ID NO: 471949 - RNA, 19 nt, Homo sapiens
  misc_RNA (1)...(19): siRNA sense strand
aaccauaccuuaccacuaa

SEQ ID NO: 471950 - RNA, 19 nt, Homo sapiens
  misc_RNA (1)...(19): siRNA sense strand
cauuaaagaugaacucuga

SEQ ID NO: 471951 - RNA, 19 nt, Homo sapiens
  misc_RNA (1)...(19): siRNA sense strand
uaacgauacugaagaagaa

SEQ ID NO: 471952 - RNA, 19 nt, Homo sapiens
  misc_RNA (1)...(19): siRNA sense strand
gaacauggcauuaaaucug

SEQ ID NO: 471953 - RNA, 19 nt, Homo sapiens
  misc_RNA (1)...(19): siRNA sense strand
agaagcagcaguagaauua

SEQ ID NO: 471954 - RNA, 19 nt, Homo sapiens
  misc_RNA (1)...(19): siRNA sense strand
gcaacgagguguucaugga

SEQ ID NO: 471955 - RNA, 19 nt, Homo sapiens
  misc_RNA (1)...(19): siRNA sense strand
gaacuuaaacagaaugaga

SEQ ID NO: 471956 - RNA, 19 nt, Homo sapiens
  misc_RNA (1)...(19): siRNA sense strand
acacuucacuucuaacaaa

SEQ ID NO: 471957 - RNA, 19 nt, Homo sapiens
  misc_RNA (1)...(19): siRNA sense strand
caacaauucuucagguuuc

SEQ ID NO: 471958 - RNA, 19 nt, Homo sapiens
  misc_RNA (1)...(19): siRNA sense strand
gaauaaaccaucaaaguca

SEQ ID NO: 471959 - RNA, 19 nt, Homo sapiens
  misc_RNA (1)...(19): siRNA sense strand
uaaaggagcuaagccugua

SEQ ID NO: 471960 - RNA, 19 nt, Homo sapiens
  misc_RNA (1)...(19): siRNA sense strand
gcugaacaguauuaugaua

SEQ ID NO: 471961 - RNA, 19 nt, Homo sapiens
  misc_RNA (1)...(19): siRNA sense strand
caacagcaagguuaacaua

SEQ ID NO: 471962 - RNA, 19 nt, Homo sapiens
  misc_RNA (1)...(19): siRNA sense strand
ggucuaggauuugccuuua

SEQ ID NO: 471963 - RNA, 19 nt, Homo sapiens
  misc_RNA (1)...(19): siRNA sense strand
acauugagauccucuagua

SEQ ID NO: 471964 - RNA, 19 nt, Homo sapiens
  misc_RNA (1)...(19): siRNA sense strand
gggcuuguuucaauagaua

SEQ ID NO: 471965 - RNA, 19 nt, Homo sapiens
  misc_RNA (1)...(19): siRNA sense strand
gcaguauucucaagauaug

SEQ ID NO: 471966 - RNA, 19 nt, Homo sapiens
  misc_RNA (1)...(19): siRNA sense strand
ugaagaagaagaaagguua

SEQ ID NO: 471967 - RNA, 19 nt, Homo sapiens
  misc_RNA (1)...(19): siRNA sense strand
gauaaagauggcaauguua

SEQ ID NO: 471968 - RNA, 19 nt, Homo sapiens
  misc_RNA (1)...(19): siRNA sense strand
uaucauuggucuaggauuu

SEQ ID NO: 471969 - RNA, 19 nt, Homo sapiens
  misc_RNA (1)...(19): siRNA sense strand
gcagaagaagauucaaaua

SEQ ID NO: 471970 - RNA, 19 nt, Homo sapiens
  misc_RNA (1)...(19): siRNA sense strand
gagaaccuauguauauuca

SEQ ID NO: 471971 - RNA, 19 nt, Homo sapiens
  misc_RNA (1)...(19): siRNA sense strand
gcuaaauguucuacccaua

SEQ ID NO: 471972 - RNA, 19 nt, Homo sapiens
  misc_RNA (1)...(19): siRNA sense strand
ugacaguccucguguuaaa

SEQ ID NO: 471973 - RNA, 19 nt, Homo sapiens
  misc_RNA (1)...(19): siRNA sense strand
cgauauaaauucagugaug

SEQ ID NO: 471974 - RNA, 19 nt, Homo sapiens
  misc_RNA (1)...(19): siRNA sense strand
gcaaucaacacaugccuaa

SEQ ID NO: 471975 - RNA, 19 nt, Homo sapiens
  misc_RNA (1)...(19): siRNA sense strand
gauagagacuggaagaaag

SEQ ID NO: 471976 - RNA, 19 nt, Homo sapiens
  misc_RNA (1)...(19): siRNA sense strand
gcagagauacuggauauga

SEQ ID NO: 471977 - RNA, 19 nt, Homo sapiens
  misc_RNA (1)...(19): siRNA sense strand
gaaagcauaugaaccaaaa

SEQ ID NO: 471978 - RNA, 19 nt, Homo sapiens
  misc_RNA (1)...(19): siRNA sense strand
aggcagaauuuccaaguua

SEQ ID NO: 471979 - RNA, 19 nt, Homo sapiens
  misc_RNA (1)...(19): siRNA sense strand
gaugaaauguuugccagaa

SEQ ID NO: 471980 - RNA, 19 nt, Homo sapiens
  misc_RNA (1)...(19): siRNA sense strand
guauauagcagacaaucua

SEQ ID NO: 471981 - RNA, 19 nt, Homo sapiens
  misc_RNA (1)...(19): siRNA sense strand
cauauaaaccugugaagaa

SEQ ID NO: 471982 - RNA, 19 nt, Homo sapiens
  misc_RNA (1)...(19): siRNA sense strand
uuacuucacuugcaagauu

SEQ ID NO: 471983 - RNA, 19 nt, Homo sapiens
  misc_RNA (1)...(19): siRNA sense strand
guuagcagcuuaucagaau

SEQ ID NO: 471984 - RNA, 19 nt, Homo sapiens
  misc_RNA (1)...(19): siRNA sense strand
gagauucacagccucaaua

SEQ ID NO: 471985 - RNA, 19 nt, Homo sapiens
  misc_RNA (1)...(19): siRNA sense strand
gaaaacaucagcuuaauga

SEQ ID NO: 471986 - RNA, 19 nt, Homo sapiens
  misc_RNA (1)...(19): siRNA sense strand
ggaaacguguagauucaga

SEQ ID NO: 471987 - RNA, 19 nt, Homo sapiens
  misc_RNA (1)...(19): siRNA sense strand
cagacaaucuagccuguuu

SEQ ID NO: 471988 - RNA, 19 nt, Homo sapiens
  misc_RNA (1)...(19): siRNA sense strand
ccaaauaacacuucacuuc

SEQ ID NO: 471989 - RNA, 19 nt, Homo sapiens
  misc_RNA (1)...(19): siRNA sense strand
caaaggaaauugagacaac

SEQ ID NO: 471990 - RNA, 19 nt, Homo sapiens
  misc_RNA (1)...(19): siRNA sense strand
ggauguaauugaaagaguu

SEQ ID NO: 471991 - RNA, 19 nt, Homo sapiens
  misc_RNA (1)...(19): siRNA sense strand
gacgugaccaugauaauaa

SEQ ID NO: 471992 - RNA, 19 nt, Homo sapiens
  misc_RNA (1)...(19): siRNA sense strand
gaugaugcuugcuugauug

SEQ ID NO: 471993 - RNA, 19 nt, Homo sapiens
  misc_RNA (1)...(19): siRNA sense strand
gcacugguuuuacaacuua

SEQ ID NO: 471994 - RNA, 19 nt, Homo sapiens
  misc_RNA (1)...(19): siRNA sense strand
guuagucacugcaguauuc

SEQ ID NO: 471995 - RNA, 19 nt, Homo sapiens
  misc_RNA (1)...(19): siRNA sense strand
cagauuagauccucaugga

SEQ ID NO: 471996 - RNA, 19 nt, Homo sapiens
  misc_RNA (1)...(19): siRNA sense strand
caggaugggucaaagcuuu

SEQ ID NO: 471997 - RNA, 19 nt, Homo sapiens
  misc_RNA (1)...(19): siRNA sense strand
gagcuaagccuguaguugu

SEQ ID NO: 471998 - RNA, 19 nt, Homo sapiens
  misc_RNA (1)...(19): siRNA sense strand
ccugaagugucuaaacaua

SEQ ID NO: 471999 - RNA, 19 nt, Homo sapiens
  misc_RNA (1)...(19): siRNA sense strand
aaauucagcuccuuuaauc

SEQ ID NO: 472000 - RNA, 19 nt, Homo sapiens
  misc_RNA (1)...(19): siRNA sense strand
gacauuacacucucaguuu

SEQ ID NO: 472001 - RNA, 19 nt, Homo sapiens
  misc_RNA (1)...(19): siRNA sense strand
ucagagacauuuguauuga

SEQ ID NO: 472002 - RNA, 19 nt, Homo sapiens
  misc_RNA (1)...(19): siRNA sense strand
cauggacgauugauggaua

SEQ ID NO: 472003 - RNA, 19 nt, Homo sapiens
  misc_RNA (1)...(19): siRNA sense strand
caaaagccaugaaguguuu

SEQ ID NO: 472004 - RNA, 19 nt, Homo sapiens
  misc_RNA (1)...(19): siRNA sense strand
ccaaacagaagaacuuaaa

SEQ ID NO: 472005 - RNA, 19 nt, Homo sapiens
  misc_RNA (1)...(19): siRNA sense strand
ggaagagccguuguuuaua

SEQ ID NO: 472006 - RNA, 19 nt, Homo sapiens
  misc_RNA (1)...(19): siRNA sense strand
gacgauugauggauaauuc

SEQ ID NO: 472007 - RNA, 19 nt, Homo sapiens
  misc_RNA (1)...(19): siRNA sense strand
gaagaaucaucugaaggaa

SEQ ID NO: 472008 - RNA, 19 nt, Homo sapiens
  misc_RNA (1)...(19): siRNA sense strand
uaagcaaggugaagaagau

SEQ ID NO: 472009 - RNA, 19 nt, Homo sapiens
  misc_RNA (1)...(19): siRNA sense strand
gcaauggguauaauggaua

SEQ ID NO: 472010 - RNA, 19 nt, Homo sapiens
  misc_RNA (1)...(19): siRNA sense strand
ugacauuguuagcagcuua

SEQ ID NO: 472011 - RNA, 19 nt, Homo sapiens
  misc_RNA (1)...(19): siRNA sense strand
acagcaagguuaacauaaa

SEQ ID NO: 472012 - RNA, 19 nt, Homo sapiens
  misc_RNA (1)...(19): siRNA sense strand
ugaagcucaucaucaaaua

SEQ ID NO: 472013 - RNA, 19 nt, Homo sapiens
  misc_RNA (1)...(19): siRNA sense strand
gaacaaccaacauuuccaa

SEQ ID NO: 472014 - RNA, 19 nt, Homo sapiens
  misc_RNA (1)...(19): siRNA sense strand
ggacucuaaugcagaagaa

SEQ ID NO: 472015 - RNA, 19 nt, Homo sapiens
  misc_RNA (1)...(19): siRNA sense strand
cuagagauacaacuucuua

SEQ ID NO: 472016 - RNA, 19 nt, Homo sapiens
  misc_RNA (1)...(19): siRNA sense strand
gaagagccguuguuuauaa

SEQ ID NO: 472017 - RNA, 19 nt, Homo sapiens
  misc_RNA (1)...(19): siRNA sense strand
gaagaaagcuuguacucaa

SEQ ID NO: 472018 - RNA, 19 nt, Homo sapiens
  misc_RNA (1)...(19): siRNA sense strand
gauaagaacuccucaguca

SEQ ID NO: 472019 - RNA, 19 nt, Homo sapiens
  misc_RNA (1)...(19): siRNA sense strand
gaaaguagauuagcagaau

SEQ ID NO: 472020 - RNA, 19 nt, Homo sapiens
  misc_RNA (1)...(19): siRNA sense strand
gcccagagcuuugauauuu

SEQ ID NO: 472021 - RNA, 19 nt, Homo sapiens
  misc_RNA (1)...(19): siRNA sense strand
ggagagaccuuauuaugga

SEQ ID NO: 472022 - RNA, 19 nt, Homo sapiens
  misc_RNA (1)...(19): siRNA sense strand
cagaagaacuuaaacagaa

SEQ ID NO: 472023 - RNA, 19 nt, Homo sapiens
  misc_RNA (1)...(19): siRNA sense strand
gaaguucccuuaaaccuau

SEQ ID NO: 472024 - RNA, 19 nt, Homo sapiens
  misc_RNA (1)...(19): siRNA sense strand
ggauaaagauggcaauguu

SEQ ID NO: 472025 - RNA, 19 nt, Homo sapiens
  misc_RNA (1)...(19): siRNA sense strand
caacagagauggcuuuaag

SEQ ID NO: 472026 - RNA, 19 nt, Homo sapiens
  misc_RNA (1)...(19): siRNA sense strand
gaaacaaagugaaaguaga

SEQ ID NO: 472027 - RNA, 19 nt, Homo sapiens
  misc_RNA (1)...(19): siRNA sense strand
agaacgagcugaagccuua

SEQ ID NO: 472028 - RNA, 19 nt, Homo sapiens
  misc_RNA (1)...(19): siRNA sense strand
gaacuccucagucaauuua

SEQ ID NO: 472029 - RNA, 19 nt, Homo sapiens
  misc_RNA (1)...(19): siRNA sense strand
ggaaagccaucuacagaga

SEQ ID NO: 472030 - RNA, 19 nt, Homo sapiens
  misc_RNA (1)...(19): siRNA sense strand
gaaccuauguauauucaga

SEQ ID NO: 472031 - RNA, 19 nt, Homo sapiens
  misc_RNA (1)...(19): siRNA sense strand
ggagugacauggcuaauuc

SEQ ID NO: 472032 - RNA, 19 nt, Homo sapiens
  misc_RNA (1)...(19): siRNA sense strand
gaaguacucuccaucugaa

SEQ ID NO: 472033 - RNA, 19 nt, Homo sapiens
  misc_RNA (1)...(19): siRNA sense strand
agacgagccuuucuuauuu

SEQ ID NO: 472034 - RNA, 19 nt, Homo sapiens
  misc_RNA (1)...(19): siRNA sense strand
gaaagaauauuggauacug

SEQ ID NO: 472035 - RNA, 19 nt, Homo sapiens
  misc_RNA (1)...(19): siRNA sense strand
gaaggacucuaaugcagaa

SEQ ID NO: 472036 - RNA, 19 nt, Homo sapiens
  misc_RNA (1)...(19): siRNA sense strand
uggauaagcuuucaacuga

SEQ ID NO: 472037 - RNA, 19 nt, Homo sapiens
  misc_RNA (1)...(19): siRNA sense strand
ugacuaugcucuuguauau

SEQ ID NO: 472038 - RNA, 19 nt, Homo sapiens
  misc_RNA (1)...(19): siRNA sense strand
acacucagaugaagaagua

SEQ ID NO: 472039 - RNA, 19 nt, Homo sapiens
  misc_RNA (1)...(19): siRNA sense strand
ugagacaacuggccaaauu

SEQ ID NO: 472040 - RNA, 19 nt, Homo sapiens
  misc_RNA (1)...(19): siRNA sense strand
gaacacaucaugcaaagga

SEQ ID NO: 472041 - RNA, 19 nt, Homo sapiens
  misc_RNA (1)...(19): siRNA sense strand
ugacauggcuaauuccaaa

SEQ ID NO: 472042 - RNA, 19 nt, Homo sapiens
  misc_RNA (1)...(19): siRNA sense strand
cauaaccacuuuguucuua

SEQ ID NO: 472043 - RNA, 19 nt, Homo sapiens
  misc_RNA (1)...(19): siRNA sense strand
gaggacaaaucaagaaguu

SEQ ID NO: 472044 - RNA, 19 nt, Homo sapiens
  misc_RNA (1)...(19): siRNA sense strand
gaagagggcauuaagaaau

SEQ ID NO: 472045 - RNA, 19 nt, Homo sapiens
  misc_RNA (1)...(19): siRNA sense strand
ugauaaagcuugggaauau

SEQ ID NO: 472046 - RNA, 19 nt, Homo sapiens
  misc_RNA (1)...(19): siRNA sense strand
cagaacaacugaaugcaaa

SEQ ID NO: 472047 - RNA, 19 nt, Homo sapiens
  misc_RNA (1)...(19): siRNA sense strand
gacagaagaugaugaaagu

SEQ ID NO: 472048 - RNA, 19 nt, Homo sapiens
  misc_RNA (1)...(19): siRNA sense strand
gagccuuucuuauuucuuu

SEQ ID NO: 472049 - RNA, 19 nt, Homo sapiens
  misc_RNA (1)...(19): siRNA sense strand
aaccauaccuuaccacuaa

SEQ ID NO: 472050 - RNA, 19 nt, Homo sapiens
  misc_RNA (1)...(19): siRNA sense strand
cauuaaagaugaacucuga

SEQ ID NO: 472051 - RNA, 19 nt, Homo sapiens
  misc_RNA (1)...(19): siRNA sense strand
uaacgauacugaagaagaa

SEQ ID NO: 472052 - RNA, 19 nt, Homo sapiens
  misc_RNA (1)...(19): siRNA sense strand
gaacauggcauuaaaucug

SEQ ID NO: 472053 - RNA, 19 nt, Homo sapiens
  misc_RNA (1)...(19): siRNA sense strand
agaagcagcaguagaauua

SEQ ID NO: 472054 - RNA, 19 nt, Homo sapiens
  misc_RNA (1)...(19): siRNA sense strand
gcaacgagguguucaugga

SEQ ID NO: 472055 - RNA, 19 nt, Homo sapiens
  misc_RNA (1)...(19): siRNA sense strand
gaacuuaaacagaaugaga

SEQ ID NO: 472056 - RNA, 19 nt, Homo sapiens
  misc_RNA (1)...(19): siRNA sense strand
acacuucacuucuaacaaa

SEQ ID NO: 472057 - RNA, 19 nt, Homo sapiens
  misc_RNA (1)...(19): siRNA sense strand
caacaauucuucagguuuc

SEQ ID NO: 472058 - RNA, 19 nt, Homo sapiens
  misc_RNA (1)...(19): siRNA sense strand
gaauaaaccaucaaaguca

SEQ ID NO: 472059 - RNA, 19 nt, Homo sapiens
  misc_RNA (1)...(19): siRNA sense strand
uaaaggagcuaagccugua

SEQ ID NO: 472060 - RNA, 19 nt, Homo sapiens
  misc_RNA (1)...(19): siRNA sense strand
gcugaacaguauuaugaua

SEQ ID NO: 472061 - RNA, 19 nt, Homo sapiens
  misc_RNA (1)...(19): siRNA sense strand
caacagcaagguuaacaua

SEQ ID NO: 472062 - RNA, 19 nt, Homo sapiens
  misc_RNA (1)...(19): siRNA sense strand
ggucuaggauuugccuuua

SEQ ID NO: 472063 - RNA, 19 nt, Homo sapiens
  misc_RNA (1)...(19): siRNA sense strand
acauugagauccucuagua

SEQ ID NO: 472064 - RNA, 19 nt, Homo sapiens
  misc_RNA (1)...(19): siRNA sense strand
gggcuuguuucaauagaua

SEQ ID NO: 472065 - RNA, 19 nt, Homo sapiens
  misc_RNA (1)...(19): siRNA sense strand
gcaguauucucaagauaug

SEQ ID NO: 472066 - RNA, 19 nt, Homo sapiens
  misc_RNA (1)...(19): siRNA sense strand
ugaagaagaagaaagguua

SEQ ID NO: 472067 - RNA, 19 nt, Homo sapiens
  misc_RNA (1)...(19): siRNA sense strand
gauaaagauggcaauguua

SEQ ID NO: 472068 - RNA, 19 nt, Homo sapiens
  misc_RNA (1)...(19): siRNA sense strand
uaucauuggucuaggauuu

SEQ ID NO: 472069 - RNA, 19 nt, Homo sapiens
  misc_RNA (1)...(19): siRNA sense strand
gcagaagaagauucaaaua

SEQ ID NO: 472070 - RNA, 19 nt, Homo sapiens
  misc_RNA (1)...(19): siRNA sense strand
gagaaccuauguauauuca

SEQ ID NO: 472071 - RNA, 19 nt, Homo sapiens
  misc_RNA (1)...(19): siRNA sense strand
gcuaaauguucuacccaua

SEQ ID NO: 472072 - RNA, 19 nt, Homo sapiens
  misc_RNA (1)...(19): siRNA sense strand
ugacaguccucguguuaaa

SEQ ID NO: 472073 - RNA, 19 nt, Homo sapiens
  misc_RNA (1)...(19): siRNA sense strand
cgauauaaauucagugaug

SEQ ID NO: 472074 - RNA, 19 nt, Homo sapiens
  misc_RNA (1)...(19): siRNA sense strand
gcaaucaacacaugccuaa

SEQ ID NO: 472075 - RNA, 19 nt, Homo sapiens
  misc_RNA (1)...(19): siRNA sense strand
gauagagacuggaagaaag

SEQ ID NO: 472076 - RNA, 19 nt, Homo sapiens
  misc_RNA (1)...(19): siRNA sense strand
gcagagauacuggauauga

SEQ ID NO: 472077 - RNA, 19 nt, Homo sapiens
  misc_RNA (1)...(19): siRNA sense strand
gaaagcauaugaaccaaaa

SEQ ID NO: 472078 - RNA, 19 nt, Homo sapiens
  misc_RNA (1)...(19): siRNA sense strand
aggcagaauuuccaaguua

SEQ ID NO: 472079 - RNA, 19 nt, Homo sapiens
  misc_RNA (1)...(19): siRNA sense strand
gaugaaauguuugccagaa

SEQ ID NO: 472080 - RNA, 19 nt, Homo sapiens
  misc_RNA (1)...(19): siRNA sense strand
guauauagcagacaaucua

SEQ ID NO: 472081 - RNA, 19 nt, Homo sapiens
  misc_RNA (1)...(19): siRNA sense strand
cauauaaaccugugaagaa

SEQ ID NO: 472082 - RNA, 19 nt, Homo sapiens
  misc_RNA (1)...(19): siRNA sense strand
uuacuucacuugcaagauu

SEQ ID NO: 472083 - RNA, 19 nt, Homo sapiens
  misc_RNA (1)...(19): siRNA sense strand
guuagcagcuuaucagaau

SEQ ID NO: 472084 - RNA, 19 nt, Homo sapiens
  misc_RNA (1)...(19): siRNA sense strand
gagauucacagccucaaua

SEQ ID NO: 472085 - RNA, 19 nt, Homo sapiens
  misc_RNA (1)...(19): siRNA sense strand
gaaaacaucagcuuaauga

SEQ ID NO: 472086 - RNA, 19 nt, Homo sapiens
  misc_RNA (1)...(19): siRNA sense strand
ggaaacguguagauucaga

SEQ ID NO: 472087 - RNA, 19 nt, Homo sapiens
  misc_RNA (1)...(19): siRNA sense strand
cagacaaucuagccuguuu

SEQ ID NO: 472088 - RNA, 19 nt, Homo sapiens
  misc_RNA (1)...(19): siRNA sense strand
ccaaauaacacuucacuuc

SEQ ID NO: 472089 - RNA, 19 nt, Homo sapiens
  misc_RNA (1)...(19): siRNA sense strand
caaaggaaauugagacaac

SEQ ID NO: 472090 - RNA, 19 nt, Homo sapiens
  misc_RNA (1)...(19): siRNA sense strand
ggauguaauugaaagaguu

SEQ ID NO: 472091 - RNA, 19 nt, Homo sapiens
  misc_RNA (1)...(19): siRNA sense strand
gacgugaccaugauaauaa

SEQ ID NO: 472092 - RNA, 19 nt, Homo sapiens
  misc_RNA (1)...(19): siRNA sense strand
gaugaugcuugcuugauug

SEQ ID NO: 472093 - RNA, 19 nt, Homo sapiens
  misc_RNA (1)...(19): siRNA sense strand
gcacugguuuuacaacuua

SEQ ID NO: 472094 - RNA, 19 nt, Homo sapiens
  misc_RNA (1)...(19): siRNA sense strand
guuagucacugcaguauuc

SEQ ID NO: 472095 - RNA, 19 nt, Homo sapiens
  misc_RNA (1)...(19): siRNA sense strand
cagauuagauccucaugga

SEQ ID NO: 472096 - RNA, 19 nt, Homo sapiens
  misc_RNA (1)...(19): siRNA sense strand
caggaugggucaaagcuuu

SEQ ID NO: 472097 - RNA, 19 nt, Homo sapiens
  misc_RNA (1)...(19): siRNA sense strand
gagcuaagccuguaguugu

SEQ ID NO: 472098 - RNA, 19 nt, Homo sapiens
  misc_RNA (1)...(19): siRNA sense strand
ccugaagugucuaaacaua

SEQ ID NO: 472099 - RNA, 19 nt, Homo sapiens
  misc_RNA (1)...(19): siRNA sense strand
aaauucagcuccuuuaauc

SEQ ID NO: 472100 - RNA, 19 nt, Homo sapiens
  misc_RNA (1)...(19): siRNA sense strand
gacauuacacucucaguuu

SEQ ID NO: 472101 - RNA, 19 nt, Homo sapiens
  misc_RNA (1)...(19): siRNA sense strand
ucagagacauuuguauuga

SEQ ID NO: 472102 - RNA, 19 nt, Homo sapiens
  misc_RNA (1)...(19): siRNA sense strand
cauggacgauugauggaua

SEQ ID NO: 472103 - RNA, 19 nt, Homo sapiens
  misc_RNA (1)...(19): siRNA sense strand
caaaagccaugaaguguuu

SEQ ID NO: 472104 - RNA, 19 nt, Homo sapiens
  misc_RNA (1)...(19): siRNA sense strand
ccaaacagaagaacuuaaa

SEQ ID NO: 472105 - RNA, 19 nt, Homo sapiens
  misc_RNA (1)...(19): siRNA sense strand
ggaagagccguuguuuaua

SEQ ID NO: 472106 - RNA, 19 nt, Homo sapiens
  misc_RNA (1)...(19): siRNA sense strand
gacgauugauggauaauuc

SEQ ID NO: 472107 - RNA, 19 nt, Homo sapiens
  misc_RNA (1)...(19): siRNA sense strand
gaagaaucaucugaaggaa

SEQ ID NO: 472108 - RNA, 19 nt, Homo sapiens
  misc_RNA (1)...(19): siRNA sense strand
uaagcaaggugaagaagau

SEQ ID NO: 472109 - RNA, 19 nt, Homo sapiens
  misc_RNA (1)...(19): siRNA sense strand
gcaauggguauaauggaua

SEQ ID NO: 472110 - RNA, 19 nt, Homo sapiens
  misc_RNA (1)...(19): siRNA sense strand
ugacauuguuagcagcuua

SEQ ID NO: 472111 - RNA, 19 nt, Homo sapiens
  misc_RNA (1)...(19): siRNA sense strand
acagcaagguuaacauaaa

SEQ ID NO: 472112 - RNA, 19 nt, Homo sapiens
  misc_RNA (1)...(19): siRNA sense strand
ugaagcucaucaucaaaua

SEQ ID NO: 472113 - RNA, 19 nt, Homo sapiens
  misc_RNA (1)...(19): siRNA sense strand
gaacaaccaacauuuccaa

SEQ ID NO: 472114 - RNA, 19 nt, Homo sapiens
  misc_RNA (1)...(19): siRNA sense strand
ggacucuaaugcagaagaa

SEQ ID NO: 472115 - RNA, 19 nt, Homo sapiens
  misc_RNA (1)...(19): siRNA sense strand
cuagagauacaacuucuua

SEQ ID NO: 472116 - RNA, 19 nt, Homo sapiens
  misc_RNA (1)...(19): siRNA sense strand
gaugaaaccuggaggaauu

SEQ ID NO: 472117 - RNA, 19 nt, Homo sapiens
  misc_RNA (1)...(19): siRNA sense strand
gaagagauccuuaguauac

SEQ ID NO: 472118 - RNA, 19 nt, Homo sapiens
  misc_RNA (1)...(19): siRNA sense strand
ccaccaaacugccauauug

SEQ ID NO: 472119 - RNA, 19 nt, Homo sapiens
  misc_RNA (1)...(19): siRNA sense strand
gugaagagauccuuaguau

SEQ ID NO: 472120 - RNA, 19 nt, Homo sapiens
  misc_RNA (1)...(19): siRNA sense strand
gguagugaauggucaguuu

SEQ ID NO: 472121 - RNA, 19 nt, Homo sapiens
  misc_RNA (1)...(19): siRNA sense strand
cauccgagcucagagauuu

SEQ ID NO: 472122 - RNA, 19 nt, Homo sapiens
  misc_RNA (1)...(19): siRNA sense strand
gaaacuaaccacuggcaaa

SEQ ID NO: 472123 - RNA, 19 nt, Homo sapiens
  misc_RNA (1)...(19): siRNA sense strand
gaagucaggcuacagaaug

SEQ ID NO: 472124 - RNA, 19 nt, Homo sapiens
  misc_RNA (1)...(19): siRNA sense strand
ccaacagucuugccaucua

SEQ ID NO: 472125 - RNA, 19 nt, Homo sapiens
  misc_RNA (1)...(19): siRNA sense strand
ucucagugguugaaucaua

SEQ ID NO: 472126 - RNA, 19 nt, Homo sapiens
  misc_RNA (1)...(19): siRNA sense strand
ggcaaaggcuggcugaauc

SEQ ID NO: 472127 - RNA, 19 nt, Homo sapiens
  misc_RNA (1)...(19): siRNA sense strand
ggaaaguaguuagcaggaa

SEQ ID NO: 472128 - RNA, 19 nt, Homo sapiens
  misc_RNA (1)...(19): siRNA sense strand
caacagucuugccaucuau

SEQ ID NO: 472129 - RNA, 19 nt, Homo sapiens
  misc_RNA (1)...(19): siRNA sense strand
ggagagagaguuucaccuu

SEQ ID NO: 472130 - RNA, 19 nt, Homo sapiens
  misc_RNA (1)...(19): siRNA sense strand
gagcugaauccuucuagaa

SEQ ID NO: 472131 - RNA, 19 nt, Homo sapiens
  misc_RNA (1)...(19): siRNA sense strand
cuucagggcuccauggaaa

SEQ ID NO: 472132 - RNA, 19 nt, Homo sapiens
  misc_RNA (1)...(19): siRNA sense strand
gggagaaucugaaacuaac

SEQ ID NO: 472133 - RNA, 19 nt, Homo sapiens
  misc_RNA (1)...(19): siRNA sense strand
ggaauccggucagugaguu

SEQ ID NO: 472134 - RNA, 19 nt, Homo sapiens
  misc_RNA (1)...(19): siRNA sense strand
gcucuggccuucaacaaca

SEQ ID NO: 472135 - RNA, 19 nt, Homo sapiens
  misc_RNA (1)...(19): siRNA sense strand
gcucccugcuguucuauga

SEQ ID NO: 472136 - RNA, 19 nt, Homo sapiens
  misc_RNA (1)...(19): siRNA sense strand
caagccagaucaccaagau

SEQ ID NO: 472137 - RNA, 19 nt, Homo sapiens
  misc_RNA (1)...(19): siRNA sense strand
guagugaauggucaguuua

SEQ ID NO: 472138 - RNA, 19 nt, Homo sapiens
  misc_RNA (1)...(19): siRNA sense strand
gcugaauccuucuagaaca

SEQ ID NO: 472139 - RNA, 19 nt, Homo sapiens
  misc_RNA (1)...(19): siRNA sense strand
uaaaggacauccccaaaga

SEQ ID NO: 472140 - RNA, 19 nt, Homo sapiens
  misc_RNA (1)...(19): siRNA sense strand
acacaaacccugacaacug

SEQ ID NO: 472141 - RNA, 19 nt, Homo sapiens
  misc_RNA (1)...(19): siRNA sense strand
cauacaacgucaagucugu

SEQ ID NO: 472142 - RNA, 19 nt, Homo sapiens
  misc_RNA (1)...(19): siRNA sense strand
gaaugugugucuggcuuau

SEQ ID NO: 472143 - RNA, 19 nt, Homo sapiens
  misc_RNA (1)...(19): siRNA sense strand
ggaggugacagaugauguu

SEQ ID NO: 472144 - RNA, 19 nt, Homo sapiens
  misc_RNA (1)...(19): siRNA sense strand
gcaaaggcuggcugaauca

SEQ ID NO: 472145 - RNA, 19 nt, Homo sapiens
  misc_RNA (1)...(19): siRNA sense strand
gaaugaaaccagcuacucu

SEQ ID NO: 472146 - RNA, 19 nt, Homo sapiens
  misc_RNA (1)...(19): siRNA sense strand
acacaaggacuggaucuuu

SEQ ID NO: 472147 - RNA, 19 nt, Homo sapiens
  misc_RNA (1)...(19): siRNA sense strand
aaggcuggcugaaucauga

SEQ ID NO: 472148 - RNA, 19 nt, Homo sapiens
  misc_RNA (1)...(19): siRNA sense strand
caucaucacugugggaaca

SEQ ID NO: 472149 - RNA, 19 nt, Homo sapiens
  misc_RNA (1)...(19): siRNA sense strand
caacaacaagaacaaggaa

SEQ ID NO: 472150 - RNA, 19 nt, Homo sapiens
  misc_RNA (1)...(19): siRNA sense strand
gacccuuaauaaaguguuu

SEQ ID NO: 472151 - RNA, 19 nt, Homo sapiens
  misc_RNA (1)...(19): siRNA sense strand
augcugggcucuggaguua

SEQ ID NO: 472152 - RNA, 19 nt, Homo sapiens
  misc_RNA (1)...(19): siRNA sense strand
ggugacagaugauguuuug

SEQ ID NO: 472153 - RNA, 19 nt, Homo sapiens
  misc_RNA (1)...(19): siRNA sense strand
ggaagucaggcuacagaau

SEQ ID NO: 472154 - RNA, 19 nt, Homo sapiens
  misc_RNA (1)...(19): siRNA sense strand
gaaaauacacuaucuaagc

SEQ ID NO: 472155 - RNA, 19 nt, Homo sapiens
  misc_RNA (1)...(19): siRNA sense strand
gcagggcugugguauccau

SEQ ID NO: 472156 - RNA, 19 nt, Homo sapiens
  misc_RNA (1)...(19): siRNA sense strand
ugaagagauccuuaguaua

SEQ ID NO: 472157 - RNA, 19 nt, Homo sapiens
  misc_RNA (1)...(19): siRNA sense strand
caccuugggacccuuaaua

SEQ ID NO: 472158 - RNA, 19 nt, Homo sapiens
  misc_RNA (1)...(19): siRNA sense strand
caacacgcuauuugucgua

SEQ ID NO: 472159 - RNA, 19 nt, Homo sapiens
  misc_RNA (1)...(19): siRNA sense strand
uuucagacauugacuucuu

SEQ ID NO: 472160 - RNA, 19 nt, Homo sapiens
  misc_RNA (1)...(19): siRNA sense strand
auaaaguguuugcaucuca

SEQ ID NO: 472161 - RNA, 19 nt, Homo sapiens
  misc_RNA (1)...(19): siRNA sense strand
cauauugccgugagaaugu

SEQ ID NO: 472162 - RNA, 19 nt, Homo sapiens
  misc_RNA (1)...(19): siRNA sense strand
ugucacgggucccugugua

SEQ ID NO: 472163 - RNA, 19 nt, Homo sapiens
  misc_RNA (1)...(19): siRNA sense strand
gcaucucagugguugaauc

SEQ ID NO: 472164 - RNA, 19 nt, Homo sapiens
  misc_RNA (1)...(19): siRNA sense strand
gagaugauggacacaagga

SEQ ID NO: 472165 - RNA, 19 nt, Homo sapiens
  misc_RNA (1)...(19): siRNA sense strand
cacaaggacuggaucuuuu

SEQ ID NO: 472166 - RNA, 19 nt, Homo sapiens
  misc_RNA (1)...(19): siRNA sense strand
ggaauuacuuuucagacau

SEQ ID NO: 472167 - RNA, 19 nt, Homo sapiens
  misc_RNA (1)...(19): siRNA sense strand
caacgucaagucugucugu

SEQ ID NO: 472168 - RNA, 19 nt, Homo sapiens
  misc_RNA (1)...(19): siRNA sense strand
ggaucacucgcuucacaaa

SEQ ID NO: 472169 - RNA, 19 nt, Homo sapiens
  misc_RNA (1)...(19): siRNA sense strand
gcauggaucagcgacacua

SEQ ID NO: 472170 - RNA, 19 nt, Homo sapiens
  misc_RNA (1)...(19): siRNA sense strand
gcaguggaauccggucagu

SEQ ID NO: 472171 - RNA, 19 nt, Homo sapiens
  misc_RNA (1)...(19): siRNA sense strand
gaagacacaaacccugaca

SEQ ID NO: 472172 - RNA, 19 nt, Homo sapiens
  misc_RNA (1)...(19): siRNA sense strand
cacagcaacuucccagucu

SEQ ID NO: 472173 - RNA, 19 nt, Homo sapiens
  misc_RNA (1)...(19): siRNA sense strand
caucauacaacgucaaguc

SEQ ID NO: 472174 - RNA, 19 nt, Homo sapiens
  misc_RNA (1)...(19): siRNA sense strand
cgagcugaauccuucuaga

SEQ ID NO: 472175 - RNA, 19 nt, Homo sapiens
  misc_RNA (1)...(19): siRNA sense strand
aagucaggcuacagaauga

SEQ ID NO: 472176 - RNA, 19 nt, Homo sapiens
  misc_RNA (1)...(19): siRNA sense strand
ucucgaguguugcaugguu

SEQ ID NO: 472177 - RNA, 19 nt, Homo sapiens
  misc_RNA (1)...(19): siRNA sense strand
ugggaucacucgcuucaca

SEQ ID NO: 472178 - RNA, 19 nt, Homo sapiens
  misc_RNA (1)...(19): siRNA sense strand
gcuggauccugugugugua

SEQ ID NO: 472179 - RNA, 19 nt, Homo sapiens
  misc_RNA (1)...(19): siRNA sense strand
ucacucacaaggccuuaaa

SEQ ID NO: 472180 - RNA, 19 nt, Homo sapiens
  misc_RNA (1)...(19): siRNA sense strand
agacaagccagaucaccaa

SEQ ID NO: 472181 - RNA, 19 nt, Homo sapiens
  misc_RNA (1)...(19): siRNA sense strand
aaaccuggaggaauuacuu

SEQ ID NO: 472182 - RNA, 19 nt, Homo sapiens
  misc_RNA (1)...(19): siRNA sense strand
aagcucaugucuccuucuu

SEQ ID NO: 472183 - RNA, 19 nt, Homo sapiens
  misc_RNA (1)...(19): siRNA sense strand
ucaacaacaagaacaagga

SEQ ID NO: 472184 - RNA, 19 nt, Homo sapiens
  misc_RNA (1)...(19): siRNA sense strand
gaggugacagaugauguuu

SEQ ID NO: 472185 - RNA, 19 nt, Homo sapiens
  misc_RNA (1)...(19): siRNA sense strand
gugucuggcucacgugaug

SEQ ID NO: 472186 - RNA, 19 nt, Homo sapiens
  misc_RNA (1)...(19): siRNA sense strand
caucucagugguugaauca

SEQ ID NO: 472187 - RNA, 19 nt, Homo sapiens
  misc_RNA (1)...(19): siRNA sense strand
ugacauccgagcucagaga

SEQ ID NO: 472188 - RNA, 19 nt, Homo sapiens
  misc_RNA (1)...(19): siRNA sense strand
ggagcgaggcaguggaauc

SEQ ID NO: 472189 - RNA, 19 nt, Homo sapiens
  misc_RNA (1)...(19): siRNA sense strand
ggacacaaggacuggaucu

SEQ ID NO: 472190 - RNA, 19 nt, Homo sapiens
  misc_RNA (1)...(19): siRNA sense strand
caagauccccauucugaaa

SEQ ID NO: 472191 - RNA, 19 nt, Homo sapiens
  misc_RNA (1)...(19): siRNA sense strand
ugugaagagauccuuagua

SEQ ID NO: 472192 - RNA, 19 nt, Homo sapiens
  misc_RNA (1)...(19): siRNA sense strand
gucucuggauggcuacuuu

SEQ ID NO: 472193 - RNA, 19 nt, Homo sapiens
  misc_RNA (1)...(19): siRNA sense strand
cagaugauguuuugaccaa

SEQ ID NO: 472194 - RNA, 19 nt, Homo sapiens
  misc_RNA (1)...(19): siRNA sense strand
caacaagaacaaggaacug

SEQ ID NO: 472195 - RNA, 19 nt, Homo sapiens
  misc_RNA (1)...(19): siRNA sense strand
ggucagugaguuucuacga

SEQ ID NO: 472196 - RNA, 19 nt, Homo sapiens
  misc_RNA (1)...(19): siRNA sense strand
gaauccggucagugaguuu

SEQ ID NO: 472197 - RNA, 19 nt, Homo sapiens
  misc_RNA (1)...(19): siRNA sense strand
uugggacccuuaauaaagu

SEQ ID NO: 472198 - RNA, 19 nt, Homo sapiens
  misc_RNA (1)...(19): siRNA sense strand
agaaugugugucuggcuua

SEQ ID NO: 472199 - RNA, 19 nt, Homo sapiens
  misc_RNA (1)...(19): siRNA sense strand
cuaagcuccucuccaccaa

SEQ ID NO: 472200 - RNA, 19 nt, Homo sapiens
  misc_RNA (1)...(19): siRNA sense strand
gcugggaucacucgcuuca

SEQ ID NO: 472201 - RNA, 19 nt, Homo sapiens
  misc_RNA (1)...(19): siRNA sense strand
aguggaauccggucaguga

SEQ ID NO: 472202 - RNA, 19 nt, Homo sapiens
  misc_RNA (1)...(19): siRNA sense strand
ccugaaggagagagaguuu

SEQ ID NO: 472203 - RNA, 19 nt, Homo sapiens
  misc_RNA (1)...(19): siRNA sense strand
aaacuaaccacuggcaaag

SEQ ID NO: 472204 - RNA, 19 nt, Homo sapiens
  misc_RNA (1)...(19): siRNA sense strand
ugaauggucaguuuaugca

SEQ ID NO: 472205 - RNA, 19 nt, Homo sapiens
  misc_RNA (1)...(19): siRNA sense strand
cucgaguguugcaugguua

SEQ ID NO: 472206 - RNA, 19 nt, Homo sapiens
  misc_RNA (1)...(19): siRNA sense strand
ccacggcagccaucauaca

SEQ ID NO: 472207 - RNA, 19 nt, Homo sapiens
  misc_RNA (1)...(19): siRNA sense strand
gagaaucugaaacuaacca

SEQ ID NO: 472208 - RNA, 19 nt, Homo sapiens
  misc_RNA (1)...(19): siRNA sense strand
ggggagaaucugaaacuaa

SEQ ID NO: 472209 - RNA, 19 nt, Homo sapiens
  misc_RNA (1)...(19): siRNA sense strand
gaggcucucagcuuguuau

SEQ ID NO: 472210 - RNA, 19 nt, Homo sapiens
  misc_RNA (1)...(19): siRNA sense strand
acgagcacaucaucacugu

SEQ ID NO: 472211 - RNA, 19 nt, Homo sapiens
  misc_RNA (1)...(19): siRNA sense strand
ccuugggacccuuaauaaa

SEQ ID NO: 472212 - RNA, 19 nt, Homo sapiens
  misc_RNA (1)...(19): siRNA sense strand
ccauauugccgugagaaug

SEQ ID NO: 472213 - RNA, 19 nt, Homo sapiens
  misc_RNA (1)...(19): siRNA sense strand
gggaagucaggcuacagaa

SEQ ID NO: 472214 - RNA, 19 nt, Homo sapiens
  misc_RNA (1)...(19): siRNA sense strand
cuugggacccuuaauaaag

SEQ ID NO: 472215 - RNA, 19 nt, Homo sapiens
  misc_RNA (1)...(19): siRNA sense strand
ucagaaagaucaagccaaa

SEQ ID NO: 472216 - RNA, 19 nt, Homo sapiens
  misc_RNA (1)...(19): siRNA sense strand
ugaauuugauccucuguga

SEQ ID NO: 472217 - RNA, 19 nt, Homo sapiens
  misc_RNA (1)...(19): siRNA sense strand
ugagauguauccugcaaga

SEQ ID NO: 472218 - RNA, 19 nt, Homo sapiens
  misc_RNA (1)...(19): siRNA sense strand
gaaagaucaagccaaagaa

SEQ ID NO: 472219 - RNA, 19 nt, Homo sapiens
  misc_RNA (1)...(19): siRNA sense strand
gacuauagaaugagaugua

SEQ ID NO: 472220 - RNA, 19 nt, Homo sapiens
  misc_RNA (1)...(19): siRNA sense strand
ugacaagcauaugaauuug

SEQ ID NO: 472221 - RNA, 19 nt, Homo sapiens
  misc_RNA (1)...(19): siRNA sense strand
gcagcacauugacuauaga

SEQ ID NO: 472222 - RNA, 19 nt, Homo sapiens
  misc_RNA (1)...(19): siRNA sense strand
gcaaccagagcgugaagaa

SEQ ID NO: 472223 - RNA, 19 nt, Homo sapiens
  misc_RNA (1)...(19): siRNA sense strand
agaaagaucaagccaaaga

SEQ ID NO: 472224 - RNA, 19 nt, Homo sapiens
  misc_RNA (1)...(19): siRNA sense strand
ugugaugaguucagaaaga

SEQ ID NO: 472225 - RNA, 19 nt, Homo sapiens
  misc_RNA (1)...(19): siRNA sense strand
gugaugaguucagaaagau

SEQ ID NO: 472226 - RNA, 19 nt, Homo sapiens
  misc_RNA (1)...(19): siRNA sense strand
caaagauacuggcauugcu

SEQ ID NO: 472227 - RNA, 19 nt, Homo sapiens
  misc_RNA (1)...(19): siRNA sense strand
gacaagcauaugaauuuga

SEQ ID NO: 472228 - RNA, 19 nt, Homo sapiens
  misc_RNA (1)...(19): siRNA sense strand
aaucuucauuggcaccuuu

SEQ ID NO: 472229 - RNA, 19 nt, Homo sapiens
  misc_RNA (1)...(19): siRNA sense strand
gggaagaggcacuguagca

SEQ ID NO: 472230 - RNA, 19 nt, Homo sapiens
  misc_RNA (1)...(19): siRNA sense strand
gggagaacuugguauccau

SEQ ID NO: 472231 - RNA, 19 nt, Homo sapiens
  misc_RNA (1)...(19): siRNA sense strand
gaugaguucagaaagauca

SEQ ID NO: 472232 - RNA, 19 nt, Homo sapiens
  misc_RNA (1)...(19): siRNA sense strand
gauccucugugauugugau

SEQ ID NO: 472233 - RNA, 19 nt, Homo sapiens
  misc_RNA (1)...(19): siRNA sense strand
gaacuugguauccaugacu

SEQ ID NO: 472234 - RNA, 19 nt, Homo sapiens
  misc_RNA (1)...(19): siRNA sense strand
aaugagauguauccugcaa

SEQ ID NO: 472235 - RNA, 19 nt, Homo sapiens
  misc_RNA (1)...(19): siRNA sense strand
cccaugggcccaccaauug

SEQ ID NO: 472236 - RNA, 19 nt, Homo sapiens
  misc_RNA (1)...(19): siRNA sense strand
ggaccaucccagcagguaa

SEQ ID NO: 472237 - RNA, 19 nt, Homo sapiens
  misc_RNA (1)...(19): siRNA sense strand
aauuugauccucugugauu

SEQ ID NO: 472238 - RNA, 19 nt, Homo sapiens
  misc_RNA (1)...(19): siRNA sense strand
gccaaagaaugcgaagcaa

SEQ ID NO: 472239 - RNA, 19 nt, Homo sapiens
  misc_RNA (1)...(19): siRNA sense strand
aggaaugcguccaccaaga

SEQ ID NO: 472240 - RNA, 19 nt, Homo sapiens
  misc_RNA (1)...(19): siRNA sense strand
gauggccgaaucuucauug

SEQ ID NO: 472241 - RNA, 19 nt, Homo sapiens
  misc_RNA (1)...(19): siRNA sense strand
gagaacuugguauccauga

SEQ ID NO: 472242 - RNA, 19 nt, Homo sapiens
  misc_RNA (1)...(19): siRNA sense strand
gaagcaaccagagcgugaa

SEQ ID NO: 472243 - RNA, 19 nt, Homo sapiens
  misc_RNA (1)...(19): siRNA sense strand
agauguauccugcaagaug

SEQ ID NO: 472244 - RNA, 19 nt, Homo sapiens
  misc_RNA (1)...(19): siRNA sense strand
aaagaucaagccaaagaau

SEQ ID NO: 472245 - RNA, 19 nt, Homo sapiens
  misc_RNA (1)...(19): siRNA sense strand
ggaaugcguccaccaagac

SEQ ID NO: 472246 - RNA, 19 nt, Homo sapiens
  misc_RNA (1)...(19): siRNA sense strand
uggcaagaguagcaagaug

SEQ ID NO: 472247 - RNA, 19 nt, Homo sapiens
  misc_RNA (1)...(19): siRNA sense strand
caaccagagcgugaagaaa

SEQ ID NO: 472248 - RNA, 19 nt, Homo sapiens
  misc_RNA (1)...(19): siRNA sense strand
gcucgagggacgccaauag

SEQ ID NO: 472249 - RNA, 19 nt, Homo sapiens
  misc_RNA (1)...(19): siRNA sense strand
gaccaucccagcagguaau

SEQ ID NO: 472250 - RNA, 19 nt, Homo sapiens
  misc_RNA (1)...(19): siRNA sense strand
ugcagcacauugacuauag

SEQ ID NO: 472251 - RNA, 19 nt, Homo sapiens
  misc_RNA (1)...(19): siRNA sense strand
ccaggaaugcguccaccaa

SEQ ID NO: 472252 - RNA, 19 nt, Homo sapiens
  misc_RNA (1)...(19): siRNA sense strand
ccugcaagauggccgaauc

SEQ ID NO: 472253 - RNA, 19 nt, Homo sapiens
  misc_RNA (1)...(19): siRNA sense strand
ggcagcugguagaggagua

SEQ ID NO: 472254 - RNA, 19 nt, Homo sapiens
  misc_RNA (1)...(19): siRNA sense strand
ccaaagauacuggcauugc

SEQ ID NO: 472255 - RNA, 19 nt, Homo sapiens
  misc_RNA (1)...(19): siRNA sense strand
gaauuugauccucugugau

SEQ ID NO: 472256 - RNA, 19 nt, Homo sapiens
  misc_RNA (1)...(19): siRNA sense strand
ugauugugaugaguucaga

SEQ ID NO: 472257 - RNA, 19 nt, Homo sapiens
  misc_RNA (1)...(19): siRNA sense strand
cagggaagaggcacuguag

SEQ ID NO: 472258 - RNA, 19 nt, Homo sapiens
  misc_RNA (1)...(19): siRNA sense strand
gaaucuucauuggcaccuu

SEQ ID NO: 472259 - RNA, 19 nt, Homo sapiens
  misc_RNA (1)...(19): siRNA sense strand
cagcacauugacuauagaa

SEQ ID NO: 472260 - RNA, 19 nt, Homo sapiens
  misc_RNA (1)...(19): siRNA sense strand
aagaucaagccaaagaaug

SEQ ID NO: 472261 - RNA, 19 nt, Homo sapiens
  misc_RNA (1)...(19): siRNA sense strand
ucagaaagaucaagccaaa

SEQ ID NO: 472262 - RNA, 19 nt, Homo sapiens
  misc_RNA (1)...(19): siRNA sense strand
ugaauuugauccucuguga

SEQ ID NO: 472263 - RNA, 19 nt, Homo sapiens
  misc_RNA (1)...(19): siRNA sense strand
ugagauguauccugcaaga

SEQ ID NO: 472264 - RNA, 19 nt, Homo sapiens
  misc_RNA (1)...(19): siRNA sense strand
gaaagaucaagccaaagaa

SEQ ID NO: 472265 - RNA, 19 nt, Homo sapiens
  misc_RNA (1)...(19): siRNA sense strand
gacuauagaaugagaugua

SEQ ID NO: 472266 - RNA, 19 nt, Homo sapiens
  misc_RNA (1)...(19): siRNA sense strand
ugacaagcauaugaauuug

SEQ ID NO: 472267 - RNA, 19 nt, Homo sapiens
  misc_RNA (1)...(19): siRNA sense strand
gcagcacauugacuauaga

SEQ ID NO: 472268 - RNA, 19 nt, Homo sapiens
  misc_RNA (1)...(19): siRNA sense strand
gcaaccagagcgugaagaa

SEQ ID NO: 472269 - RNA, 19 nt, Homo sapiens
  misc_RNA (1)...(19): siRNA sense strand
agaaagaucaagccaaaga

SEQ ID NO: 472270 - RNA, 19 nt, Homo sapiens
  misc_RNA (1)...(19): siRNA sense strand
ugugaugaguucagaaaga

SEQ ID NO: 472271 - RNA, 19 nt, Homo sapiens
  misc_RNA (1)...(19): siRNA sense strand
gugaugaguucagaaagau

SEQ ID NO: 472272 - RNA, 19 nt, Homo sapiens
  misc_RNA (1)...(19): siRNA sense strand
caaagauacuggcauugcu

SEQ ID NO: 472273 - RNA, 19 nt, Homo sapiens
  misc_RNA (1)...(19): siRNA sense strand
gacaagcauaugaauuuga

SEQ ID NO: 472274 - RNA, 19 nt, Homo sapiens
  misc_RNA (1)...(19): siRNA sense strand
aaucuucauuggcaccuuu

SEQ ID NO: 472275 - RNA, 19 nt, Homo sapiens
  misc_RNA (1)...(19): siRNA sense strand
gggaagaggcacuguagca

SEQ ID NO: 472276 - RNA, 19 nt, Homo sapiens
  misc_RNA (1)...(19): siRNA sense strand
gggagaacuugguauccau

SEQ ID NO: 472277 - RNA, 19 nt, Homo sapiens
  misc_RNA (1)...(19): siRNA sense strand
gaugaguucagaaagauca

SEQ ID NO: 472278 - RNA, 19 nt, Homo sapiens
  misc_RNA (1)...(19): siRNA sense strand
gauccucugugauugugau

SEQ ID NO: 472279 - RNA, 19 nt, Homo sapiens
  misc_RNA (1)...(19): siRNA sense strand
gaacuugguauccaugacu

SEQ ID NO: 472280 - RNA, 19 nt, Homo sapiens
  misc_RNA (1)...(19): siRNA sense strand
aaugagauguauccugcaa

SEQ ID NO: 472281 - RNA, 19 nt, Homo sapiens
  misc_RNA (1)...(19): siRNA sense strand
cccaugggcccaccaauug

SEQ ID NO: 472282 - RNA, 19 nt, Homo sapiens
  misc_RNA (1)...(19): siRNA sense strand
ggaccaucccagcagguaa

SEQ ID NO: 472283 - RNA, 19 nt, Homo sapiens
  misc_RNA (1)...(19): siRNA sense strand
aauuugauccucugugauu

SEQ ID NO: 472284 - RNA, 19 nt, Homo sapiens
  misc_RNA (1)...(19): siRNA sense strand
gccaaagaaugcgaagcaa

SEQ ID NO: 472285 - RNA, 19 nt, Homo sapiens
  misc_RNA (1)...(19): siRNA sense strand
aggaaugcguccaccaaga

SEQ ID NO: 472286 - RNA, 19 nt, Homo sapiens
  misc_RNA (1)...(19): siRNA sense strand
gauggccgaaucuucauug

SEQ ID NO: 472287 - RNA, 19 nt, Homo sapiens
  misc_RNA (1)...(19): siRNA sense strand
gagaacuugguauccauga

SEQ ID NO: 472288 - RNA, 19 nt, Homo sapiens
  misc_RNA (1)...(19): siRNA sense strand
gaagcaaccagagcgugaa

SEQ ID NO: 472289 - RNA, 19 nt, Homo sapiens
  misc_RNA (1)...(19): siRNA sense strand
agauguauccugcaagaug

SEQ ID NO: 472290 - RNA, 19 nt, Homo sapiens
  misc_RNA (1)...(19): siRNA sense strand
aaagaucaagccaaagaau

SEQ ID NO: 472291 - RNA, 19 nt, Homo sapiens
  misc_RNA (1)...(19): siRNA sense strand
ggaaugcguccaccaagac

SEQ ID NO: 472292 - RNA, 19 nt, Homo sapiens
  misc_RNA (1)...(19): siRNA sense strand
uggcaagaguagcaagaug

SEQ ID NO: 472293 - RNA, 19 nt, Homo sapiens
  misc_RNA (1)...(19): siRNA sense strand
caaccagagcgugaagaaa

SEQ ID NO: 472294 - RNA, 19 nt, Homo sapiens
  misc_RNA (1)...(19): siRNA sense strand
gcucgagggacgccaauag

SEQ ID NO: 472295 - RNA, 19 nt, Homo sapiens
  misc_RNA (1)...(19): siRNA sense strand
gaccaucccagcagguaau

SEQ ID NO: 472296 - RNA, 19 nt, Homo sapiens
  misc_RNA (1)...(19): siRNA sense strand
ugcagcacauugacuauag

SEQ ID NO: 472297 - RNA, 19 nt, Homo sapiens
  misc_RNA (1)...(19): siRNA sense strand
ccaggaaugcguccaccaa

SEQ ID NO: 472298 - RNA, 19 nt, Homo sapiens
  misc_RNA (1)...(19): siRNA sense strand
ccugcaagauggccgaauc

SEQ ID NO: 472299 - RNA, 19 nt, Homo sapiens
  misc_RNA (1)...(19): siRNA sense strand
ggcagcugguagaggagua

SEQ ID NO: 472300 - RNA, 19 nt, Homo sapiens
  misc_RNA (1)...(19): siRNA sense strand
ccaaagauacuggcauugc

SEQ ID NO: 472301 - RNA, 19 nt, Homo sapiens
  misc_RNA (1)...(19): siRNA sense strand
gaauuugauccucugugau

SEQ ID NO: 472302 - RNA, 19 nt, Homo sapiens
  misc_RNA (1)...(19): siRNA sense strand
ugauugugaugaguucaga

SEQ ID NO: 472303 - RNA, 19 nt, Homo sapiens
  misc_RNA (1)...(19): siRNA sense strand
cagggaagaggcacuguag

SEQ ID NO: 472304 - RNA, 19 nt, Homo sapiens
  misc_RNA (1)...(19): siRNA sense strand
gaaucuucauuggcaccuu

SEQ ID NO: 472305 - RNA, 19 nt, Homo sapiens
  misc_RNA (1)...(19): siRNA sense strand
cagcacauugacuauagaa

SEQ ID NO: 472306 - RNA, 19 nt, Homo sapiens
  misc_RNA (1)...(19): siRNA sense strand
aagaucaagccaaagaaug

SEQ ID NO: 472307 - RNA, 19 nt, Homo sapiens
  misc_RNA (1)...(19): siRNA sense strand
ucagaaagaucaagccaaa

SEQ ID NO: 472308 - RNA, 19 nt, Homo sapiens
  misc_RNA (1)...(19): siRNA sense strand
ugaauuugauccucuguga

SEQ ID NO: 472309 - RNA, 19 nt, Homo sapiens
  misc_RNA (1)...(19): siRNA sense strand
ugagauguauccugcaaga

SEQ ID NO: 472310 - RNA, 19 nt, Homo sapiens
  misc_RNA (1)...(19): siRNA sense strand
gaaagaucaagccaaagaa

SEQ ID NO: 472311 - RNA, 19 nt, Homo sapiens
  misc_RNA (1)...(19): siRNA sense strand
gacuauagaaugagaugua

SEQ ID NO: 472312 - RNA, 19 nt, Homo sapiens
  misc_RNA (1)...(19): siRNA sense strand
ugacaagcauaugaauuug

SEQ ID NO: 472313 - RNA, 19 nt, Homo sapiens
  misc_RNA (1)...(19): siRNA sense strand
gcagcacauugacuauaga

SEQ ID NO: 472314 - RNA, 19 nt, Homo sapiens
  misc_RNA (1)...(19): siRNA sense strand
gcaaccagagcgugaagaa

SEQ ID NO: 472315 - RNA, 19 nt, Homo sapiens
  misc_RNA (1)...(19): siRNA sense strand
agaaagaucaagccaaaga

SEQ ID NO: 472316 - RNA, 19 nt, Homo sapiens
  misc_RNA (1)...(19): siRNA sense strand
ugugaugaguucagaaaga

SEQ ID NO: 472317 - RNA, 19 nt, Homo sapiens
  misc_RNA (1)...(19): siRNA sense strand
gugaugaguucagaaagau

SEQ ID NO: 472318 - RNA, 19 nt, Homo sapiens
  misc_RNA (1)...(19): siRNA sense strand
caaagauacuggcauugcu

SEQ ID NO: 472319 - RNA, 19 nt, Homo sapiens
  misc_RNA (1)...(19): siRNA sense strand
gacaagcauaugaauuuga

SEQ ID NO: 472320 - RNA, 19 nt, Homo sapiens
  misc_RNA (1)...(19): siRNA sense strand
aaucuucauuggcaccuuu

SEQ ID NO: 472321 - RNA, 19 nt, Homo sapiens
  misc_RNA (1)...(19): siRNA sense strand
gggaagaggcacuguagca

SEQ ID NO: 472322 - RNA, 19 nt, Homo sapiens
  misc_RNA (1)...(19): siRNA sense strand
gggagaacuugguauccau

SEQ ID NO: 472323 - RNA, 19 nt, Homo sapiens
  misc_RNA (1)...(19): siRNA sense strand
gaugaguucagaaagauca

SEQ ID NO: 472324 - RNA, 19 nt, Homo sapiens
  misc_RNA (1)...(19): siRNA sense strand
gauccucugugauugugau

SEQ ID NO: 472325 - RNA, 19 nt, Homo sapiens
  misc_RNA (1)...(19): siRNA sense strand
gaacuugguauccaugacu

SEQ ID NO: 472326 - RNA, 19 nt, Homo sapiens
  misc_RNA (1)...(19): siRNA sense strand
aaugagauguauccugcaa

SEQ ID NO: 472327 - RNA, 19 nt, Homo sapiens
  misc_RNA (1)...(19): siRNA sense strand
cccaugggcccaccaauug

SEQ ID NO: 472328 - RNA, 19 nt, Homo sapiens
  misc_RNA (1)...(19): siRNA sense strand
ggaccaucccagcagguaa

SEQ ID NO: 472329 - RNA, 19 nt, Homo sapiens
  misc_RNA (1)...(19): siRNA sense strand
aauuugauccucugugauu

SEQ ID NO: 472330 - RNA, 19 nt, Homo sapiens
  misc_RNA (1)...(19): siRNA sense strand
gccaaagaaugcgaagcaa

SEQ ID NO: 472331 - RNA, 19 nt, Homo sapiens
  misc_RNA (1)...(19): siRNA sense strand
aggaaugcguccaccaaga

SEQ ID NO: 472332 - RNA, 19 nt, Homo sapiens
  misc_RNA (1)...(19): siRNA sense strand
gauggccgaaucuucauug

SEQ ID NO: 472333 - RNA, 19 nt, Homo sapiens
  misc_RNA (1)...(19): siRNA sense strand
gagaacuugguauccauga

SEQ ID NO: 472334 - RNA, 19 nt, Homo sapiens
  misc_RNA (1)...(19): siRNA sense strand
gaagcaaccagagcgugaa

SEQ ID NO: 472335 - RNA, 19 nt, Homo sapiens
  misc_RNA (1)...(19): siRNA sense strand
agauguauccugcaagaug

SEQ ID NO: 472336 - RNA, 19 nt, Homo sapiens
  misc_RNA (1)...(19): siRNA sense strand
aaagaucaagccaaagaau

SEQ ID NO: 472337 - RNA, 19 nt, Homo sapiens
  misc_RNA (1)...(19): siRNA sense strand
ggaaugcguccaccaagac

SEQ ID NO: 472338 - RNA, 19 nt, Homo sapiens
  misc_RNA (1)...(19): siRNA sense strand
uggcaagaguagcaagaug

SEQ ID NO: 472339 - RNA, 19 nt, Homo sapiens
  misc_RNA (1)...(19): siRNA sense strand
caaccagagcgugaagaaa

SEQ ID NO: 472340 - RNA, 19 nt, Homo sapiens
  misc_RNA (1)...(19): siRNA sense strand
gcucgagggacgccaauag

SEQ ID NO: 472341 - RNA, 19 nt, Homo sapiens
  misc_RNA (1)...(19): siRNA sense strand
gaccaucccagcagguaau

SEQ ID NO: 472342 - RNA, 19 nt, Homo sapiens
  misc_RNA (1)...(19): siRNA sense strand
ugcagcacauugacuauag

SEQ ID NO: 472343 - RNA, 19 nt, Homo sapiens
  misc_RNA (1)...(19): siRNA sense strand
ccaggaaugcguccaccaa

SEQ ID NO: 472344 - RNA, 19 nt, Homo sapiens
  misc_RNA (1)...(19): siRNA sense strand
ccugcaagauggccgaauc

SEQ ID NO: 472345 - RNA, 19 nt, Homo sapiens
  misc_RNA (1)...(19): siRNA sense strand
ggcagcugguagaggagua

SEQ ID NO: 472346 - RNA, 19 nt, Homo sapiens
  misc_RNA (1)...(19): siRNA sense strand
ccaaagauacuggcauugc

SEQ ID NO: 472347 - RNA, 19 nt, Homo sapiens
  misc_RNA (1)...(19): siRNA sense strand
gaauuugauccucugugau

SEQ ID NO: 472348 - RNA, 19 nt, Homo sapiens
  misc_RNA (1)...(19): siRNA sense strand
ugauugugaugaguucaga

SEQ ID NO: 472349 - RNA, 19 nt, Homo sapiens
  misc_RNA (1)...(19): siRNA sense strand
cagggaagaggcacuguag

SEQ ID NO: 472350 - RNA, 19 nt, Homo sapiens
  misc_RNA (1)...(19): siRNA sense strand
gaaucuucauuggcaccuu

SEQ ID NO: 472351 - RNA, 19 nt, Homo sapiens
  misc_RNA (1)...(19): siRNA sense strand
cagcacauugacuauagaa

SEQ ID NO: 472352 - RNA, 19 nt, Homo sapiens
  misc_RNA (1)...(19): siRNA sense strand
aagaucaagccaaagaaug

SEQ ID NO: 472353 - RNA, 19 nt, Homo sapiens
  misc_RNA (1)...(19): siRNA sense strand
ucagaaagaucaagccaaa

SEQ ID NO: 472354 - RNA, 19 nt, Homo sapiens
  misc_RNA (1)...(19): siRNA sense strand
ugaauuugauccucuguga

SEQ ID NO: 472355 - RNA, 19 nt, Homo sapiens
  misc_RNA (1)...(19): siRNA sense strand
ugagauguauccugcaaga

SEQ ID NO: 472356 - RNA, 19 nt, Homo sapiens
  misc_RNA (1)...(19): siRNA sense strand
gaaagaucaagccaaagaa

SEQ ID NO: 472357 - RNA, 19 nt, Homo sapiens
  misc_RNA (1)...(19): siRNA sense strand
gacuauagaaugagaugua

SEQ ID NO: 472358 - RNA, 19 nt, Homo sapiens
  misc_RNA (1)...(19): siRNA sense strand
ugacaagcauaugaauuug

SEQ ID NO: 472359 - RNA, 19 nt, Homo sapiens
  misc_RNA (1)...(19): siRNA sense strand
gcagcacauugacuauaga

SEQ ID NO: 472360 - RNA, 19 nt, Homo sapiens
  misc_RNA (1)...(19): siRNA sense strand
gcaaccagagcgugaagaa

SEQ ID NO: 472361 - RNA, 19 nt, Homo sapiens
  misc_RNA (1)...(19): siRNA sense strand
agaaagaucaagccaaaga

SEQ ID NO: 472362 - RNA, 19 nt, Homo sapiens
  misc_RNA (1)...(19): siRNA sense strand
ugugaugaguucagaaaga

SEQ ID NO: 472363 - RNA, 19 nt, Homo sapiens
  misc_RNA (1)...(19): siRNA sense strand
gugaugaguucagaaagau

SEQ ID NO: 472364 - RNA, 19 nt, Homo sapiens
  misc_RNA (1)...(19): siRNA sense strand
caaagauacuggcauugcu

SEQ ID NO: 472365 - RNA, 19 nt, Homo sapiens
  misc_RNA (1)...(19): siRNA sense strand
gacaagcauaugaauuuga

SEQ ID NO: 472366 - RNA, 19 nt, Homo sapiens
  misc_RNA (1)...(19): siRNA sense strand
aaucuucauuggcaccuuu

SEQ ID NO: 472367 - RNA, 19 nt, Homo sapiens
  misc_RNA (1)...(19): siRNA sense strand
gggaagaggcacuguagca

SEQ ID NO: 472368 - RNA, 19 nt, Homo sapiens
  misc_RNA (1)...(19): siRNA sense strand
gggagaacuugguauccau

SEQ ID NO: 472369 - RNA, 19 nt, Homo sapiens
  misc_RNA (1)...(19): siRNA sense strand
gaugaguucagaaagauca

SEQ ID NO: 472370 - RNA, 19 nt, Homo sapiens
  misc_RNA (1)...(19): siRNA sense strand
gauccucugugauugugau

SEQ ID NO: 472371 - RNA, 19 nt, Homo sapiens
  misc_RNA (1)...(19): siRNA sense strand
gaacuugguauccaugacu

SEQ ID NO: 472372 - RNA, 19 nt, Homo sapiens
  misc_RNA (1)...(19): siRNA sense strand
aaugagauguauccugcaa

SEQ ID NO: 472373 - RNA, 19 nt, Homo sapiens
  misc_RNA (1)...(19): siRNA sense strand
cccaugggcccaccaauug

SEQ ID NO: 472374 - RNA, 19 nt, Homo sapiens
  misc_RNA (1)...(19): siRNA sense strand
ggaccaucccagcagguaa

SEQ ID NO: 472375 - RNA, 19 nt, Homo sapiens
  misc_RNA (1)...(19): siRNA sense strand
aauuugauccucugugauu

SEQ ID NO: 472376 - RNA, 19 nt, Homo sapiens
  misc_RNA (1)...(19): siRNA sense strand
gccaaagaaugcgaagcaa

SEQ ID NO: 472377 - RNA, 19 nt, Homo sapiens
  misc_RNA (1)...(19): siRNA sense strand
aggaaugcguccaccaaga

SEQ ID NO: 472378 - RNA, 19 nt, Homo sapiens
  misc_RNA (1)...(19): siRNA sense strand
gauggccgaaucuucauug

SEQ ID NO: 472379 - RNA, 19 nt, Homo sapiens
  misc_RNA (1)...(19): siRNA sense strand
gagaacuugguauccauga

SEQ ID NO: 472380 - RNA, 19 nt, Homo sapiens
  misc_RNA (1)...(19): siRNA sense strand
gaagcaaccagagcgugaa

SEQ ID NO: 472381 - RNA, 19 nt, Homo sapiens
  misc_RNA (1)...(19): siRNA sense strand
agauguauccugcaagaug

SEQ ID NO: 472382 - RNA, 19 nt, Homo sapiens
  misc_RNA (1)...(19): siRNA sense strand
aaagaucaagccaaagaau

SEQ ID NO: 472383 - RNA, 19 nt, Homo sapiens
  misc_RNA (1)...(19): siRNA sense strand
ggaaugcguccaccaagac

SEQ ID NO: 472384 - RNA, 19 nt, Homo sapiens
  misc_RNA (1)...(19): siRNA sense strand
uggcaagaguagcaagaug

SEQ ID NO: 472385 - RNA, 19 nt, Homo sapiens
  misc_RNA (1)...(19): siRNA sense strand
caaccagagcgugaagaaa

SEQ ID NO: 472386 - RNA, 19 nt, Homo sapiens
  misc_RNA (1)...(19): siRNA sense strand
gcucgagggacgccaauag

SEQ ID NO: 472387 - RNA, 19 nt, Homo sapiens
  misc_RNA (1)...(19): siRNA sense strand
gaccaucccagcagguaau

SEQ ID NO: 472388 - RNA, 19 nt, Homo sapiens
  misc_RNA (1)...(19): siRNA sense strand
ugcagcacauugacuauag

SEQ ID NO: 472389 - RNA, 19 nt, Homo sapiens
  misc_RNA (1)...(19): siRNA sense strand
ccaggaaugcguccaccaa

SEQ ID NO: 472390 - RNA, 19 nt, Homo sapiens
  misc_RNA (1)...(19): siRNA sense strand
ccugcaagauggccgaauc

SEQ ID NO: 472391 - RNA, 19 nt, Homo sapiens
  misc_RNA (1)...(19): siRNA sense strand
ggcagcugguagaggagua

SEQ ID NO: 472392 - RNA, 19 nt, Homo sapiens
  misc_RNA (1)...(19): siRNA sense strand
ccaaagauacuggcauugc

SEQ ID NO: 472393 - RNA, 19 nt, Homo sapiens
  misc_RNA (1)...(19): siRNA sense strand
gaauuugauccucugugau

SEQ ID NO: 472394 - RNA, 19 nt, Homo sapiens
  misc_RNA (1)...(19): siRNA sense strand
ugauugugaugaguucaga

SEQ ID NO: 472395 - RNA, 19 nt, Homo sapiens
  misc_RNA (1)...(19): siRNA sense strand
cagggaagaggcacuguag

SEQ ID NO: 472396 - RNA, 19 nt, Homo sapiens
  misc_RNA (1)...(19): siRNA sense strand
gaaucuucauuggcaccuu

SEQ ID NO: 472397 - RNA, 19 nt, Homo sapiens
  misc_RNA (1)...(19): siRNA sense strand
cagcacauugacuauagaa

SEQ ID NO: 472398 - RNA, 19 nt, Homo sapiens
  misc_RNA (1)...(19): siRNA sense strand
aagaucaagccaaagaaug

SEQ ID NO: 472399 - RNA, 19 nt, Homo sapiens
  misc_RNA (1)...(19): siRNA sense strand
ucagaaagaucaagccaaa

SEQ ID NO: 472400 - RNA, 19 nt, Homo sapiens
  misc_RNA (1)...(19): siRNA sense strand
ugaauuugauccucuguga

SEQ ID NO: 472401 - RNA, 19 nt, Homo sapiens
  misc_RNA (1)...(19): siRNA sense strand
ugagauguauccugcaaga

SEQ ID NO: 472402 - RNA, 19 nt, Homo sapiens
  misc_RNA (1)...(19): siRNA sense strand
gaaagaucaagccaaagaa

SEQ ID NO: 472403 - RNA, 19 nt, Homo sapiens
  misc_RNA (1)...(19): siRNA sense strand
gacuauagaaugagaugua

SEQ ID NO: 472404 - RNA, 19 nt, Homo sapiens
  misc_RNA (1)...(19): siRNA sense strand
ugacaagcauaugaauuug

SEQ ID NO: 472405 - RNA, 19 nt, Homo sapiens
  misc_RNA (1)...(19): siRNA sense strand
gcagcacauugacuauaga

SEQ ID NO: 472406 - RNA, 19 nt, Homo sapiens
  misc_RNA (1)...(19): siRNA sense strand
gcaaccagagcgugaagaa

SEQ ID NO: 472407 - RNA, 19 nt, Homo sapiens
  misc_RNA (1)...(19): siRNA sense strand
agaaagaucaagccaaaga

SEQ ID NO: 472408 - RNA, 19 nt, Homo sapiens
  misc_RNA (1)...(19): siRNA sense strand
ugugaugaguucagaaaga

SEQ ID NO: 472409 - RNA, 19 nt, Homo sapiens
  misc_RNA (1)...(19): siRNA sense strand
gugaugaguucagaaagau

SEQ ID NO: 472410 - RNA, 19 nt, Homo sapiens
  misc_RNA (1)...(19): siRNA sense strand
caaagauacuggcauugcu

SEQ ID NO: 472411 - RNA, 19 nt, Homo sapiens
  misc_RNA (1)...(19): siRNA sense strand
gacaagcauaugaauuuga

SEQ ID NO: 472412 - RNA, 19 nt, Homo sapiens
  misc_RNA (1)...(19): siRNA sense strand
aaucuucauuggcaccuuu

SEQ ID NO: 472413 - RNA, 19 nt, Homo sapiens
  misc_RNA (1)...(19): siRNA sense strand
gggaagaggcacuguagca

SEQ ID NO: 472414 - RNA, 19 nt, Homo sapiens
  misc_RNA (1)...(19): siRNA sense strand
gggagaacuugguauccau

SEQ ID NO: 472415 - RNA, 19 nt, Homo sapiens
  misc_RNA (1)...(19): siRNA sense strand
gaugaguucagaaagauca

SEQ ID NO: 472416 - RNA, 19 nt, Homo sapiens
  misc_RNA (1)...(19): siRNA sense strand
gauccucugugauugugau

SEQ ID NO: 472417 - RNA, 19 nt, Homo sapiens
  misc_RNA (1)...(19): siRNA sense strand
gaacuugguauccaugacu

SEQ ID NO: 472418 - RNA, 19 nt, Homo sapiens
  misc_RNA (1)...(19): siRNA sense strand
aaugagauguauccugcaa

SEQ ID NO: 472419 - RNA, 19 nt, Homo sapiens
  misc_RNA (1)...(19): siRNA sense strand
cccaugggcccaccaauug

SEQ ID NO: 472420 - RNA, 19 nt, Homo sapiens
  misc_RNA (1)...(19): siRNA sense strand
ggaccaucccagcagguaa

SEQ ID NO: 472421 - RNA, 19 nt, Homo sapiens
  misc_RNA (1)...(19): siRNA sense strand
aauuugauccucugugauu

SEQ ID NO: 472422 - RNA, 19 nt, Homo sapiens
  misc_RNA (1)...(19): siRNA sense strand
gccaaagaaugcgaagcaa

SEQ ID NO: 472423 - RNA, 19 nt, Homo sapiens
  misc_RNA (1)...(19): siRNA sense strand
aggaaugcguccaccaaga

SEQ ID NO: 472424 - RNA, 19 nt, Homo sapiens
  misc_RNA (1)...(19): siRNA sense strand
gauggccgaaucuucauug

SEQ ID NO: 472425 - RNA, 19 nt, Homo sapiens
  misc_RNA (1)...(19): siRNA sense strand
gagaacuugguauccauga

SEQ ID NO: 472426 - RNA, 19 nt, Homo sapiens
  misc_RNA (1)...(19): siRNA sense strand
gaagcaaccagagcgugaa

SEQ ID NO: 472427 - RNA, 19 nt, Homo sapiens
  misc_RNA (1)...(19): siRNA sense strand
agauguauccugcaagaug

SEQ ID NO: 472428 - RNA, 19 nt, Homo sapiens
  misc_RNA (1)...(19): siRNA sense strand
aaagaucaagccaaagaau

SEQ ID NO: 472429 - RNA, 19 nt, Homo sapiens
  misc_RNA (1)...(19): siRNA sense strand
ggaaugcguccaccaagac

SEQ ID NO: 472430 - RNA, 19 nt, Homo sapiens
  misc_RNA (1)...(19): siRNA sense strand
uggcaagaguagcaagaug

SEQ ID NO: 472431 - RNA, 19 nt, Homo sapiens
  misc_RNA (1)...(19): siRNA sense strand
caaccagagcgugaagaaa

SEQ ID NO: 472432 - RNA, 19 nt, Homo sapiens
  misc_RNA (1)...(19): siRNA sense strand
gcucgagggacgccaauag

SEQ ID NO: 472433 - RNA, 19 nt, Homo sapiens
  misc_RNA (1)...(19): siRNA sense strand
gaccaucccagcagguaau

SEQ ID NO: 472434 - RNA, 19 nt, Homo sapiens
  misc_RNA (1)...(19): siRNA sense strand
ugcagcacauugacuauag

SEQ ID NO: 472435 - RNA, 19 nt, Homo sapiens
  misc_RNA (1)...(19): siRNA sense strand
ccaggaaugcguccaccaa

SEQ ID NO: 472436 - RNA, 19 nt, Homo sapiens
  misc_RNA (1)...(19): siRNA sense strand
ccugcaagauggccgaauc

SEQ ID NO: 472437 - RNA, 19 nt, Homo sapiens
  misc_RNA (1)...(19): siRNA sense strand
ggcagcugguagaggagua

SEQ ID NO: 472438 - RNA, 19 nt, Homo sapiens
  misc_RNA (1)...(19): siRNA sense strand
ccaaagauacuggcauugc

SEQ ID NO: 472439 - RNA, 19 nt, Homo sapiens
  misc_RNA (1)...(19): siRNA sense strand
gaauuugauccucugugau

SEQ ID NO: 472440 - RNA, 19 nt, Homo sapiens
  misc_RNA (1)...(19): siRNA sense strand
ugauugugaugaguucaga

SEQ ID NO: 472441 - RNA, 19 nt, Homo sapiens
  misc_RNA (1)...(19): siRNA sense strand
cagggaagaggcacuguag

SEQ ID NO: 472442 - RNA, 19 nt, Homo sapiens
  misc_RNA (1)...(19): siRNA sense strand
gaaucuucauuggcaccuu

SEQ ID NO: 472443 - RNA, 19 nt, Homo sapiens
  misc_RNA (1)...(19): siRNA sense strand
cagcacauugacuauagaa

SEQ ID NO: 472444 - RNA, 19 nt, Homo sapiens
  misc_RNA (1)...(19): siRNA sense strand
aagaucaagccaaagaaug

SEQ ID NO: 472445 - RNA, 19 nt, Homo sapiens
  misc_RNA (1)...(19): siRNA sense strand
ucagaaagaucaagccaaa

SEQ ID NO: 472446 - RNA, 19 nt, Homo sapiens
  misc_RNA (1)...(19): siRNA sense strand
ugaauuugauccucuguga

SEQ ID NO: 472447 - RNA, 19 nt, Homo sapiens
  misc_RNA (1)...(19): siRNA sense strand
ugagauguauccugcaaga

SEQ ID NO: 472448 - RNA, 19 nt, Homo sapiens
  misc_RNA (1)...(19): siRNA sense strand
gaaagaucaagccaaagaa

SEQ ID NO: 472449 - RNA, 19 nt, Homo sapiens
  misc_RNA (1)...(19): siRNA sense strand
gacuauagaaugagaugua

SEQ ID NO: 472450 - RNA, 19 nt, Homo sapiens
  misc_RNA (1)...(19): siRNA sense strand
ugacaagcauaugaauuug

SEQ ID NO: 472451 - RNA, 19 nt, Homo sapiens
  misc_RNA (1)...(19): siRNA sense strand
gcagcacauugacuauaga

SEQ ID NO: 472452 - RNA, 19 nt, Homo sapiens
  misc_RNA (1)...(19): siRNA sense strand
gcaaccagagcgugaagaa

SEQ ID NO: 472453 - RNA, 19 nt, Homo sapiens
  misc_RNA (1)...(19): siRNA sense strand
agaaagaucaagccaaaga

SEQ ID NO: 472454 - RNA, 19 nt, Homo sapiens
  misc_RNA (1)...(19): siRNA sense strand
ugugaugaguucagaaaga

SEQ ID NO: 472455 - RNA, 19 nt, Homo sapiens
  misc_RNA (1)...(19): siRNA sense strand
gugaugaguucagaaagau

SEQ ID NO: 472456 - RNA, 19 nt, Homo sapiens
  misc_RNA (1)...(19): siRNA sense strand
caaagauacuggcauugcu

SEQ ID NO: 472457 - RNA, 19 nt, Homo sapiens
  misc_RNA (1)...(19): siRNA sense strand
gacaagcauaugaauuuga

SEQ ID NO: 472458 - RNA, 19 nt, Homo sapiens
  misc_RNA (1)...(19): siRNA sense strand
aaucuucauuggcaccuuu

SEQ ID NO: 472459 - RNA, 19 nt, Homo sapiens
  misc_RNA (1)...(19): siRNA sense strand
gggaagaggcacuguagca

SEQ ID NO: 472460 - RNA, 19 nt, Homo sapiens
  misc_RNA (1)...(19): siRNA sense strand
gggagaacuugguauccau

SEQ ID NO: 472461 - RNA, 19 nt, Homo sapiens
  misc_RNA (1)...(19): siRNA sense strand
gaugaguucagaaagauca

SEQ ID NO: 472462 - RNA, 19 nt, Homo sapiens
  misc_RNA (1)...(19): siRNA sense strand
gauccucugugauugugau

SEQ ID NO: 472463 - RNA, 19 nt, Homo sapiens
  misc_RNA (1)...(19): siRNA sense strand
gaacuugguauccaugacu

SEQ ID NO: 472464 - RNA, 19 nt, Homo sapiens
  misc_RNA (1)...(19): siRNA sense strand
aaugagauguauccugcaa

SEQ ID NO: 472465 - RNA, 19 nt, Homo sapiens
  misc_RNA (1)...(19): siRNA sense strand
cccaugggcccaccaauug

SEQ ID NO: 472466 - RNA, 19 nt, Homo sapiens
  misc_RNA (1)...(19): siRNA sense strand
ggaccaucccagcagguaa

SEQ ID NO: 472467 - RNA, 19 nt, Homo sapiens
  misc_RNA (1)...(19): siRNA sense strand
aauuugauccucugugauu

SEQ ID NO: 472468 - RNA, 19 nt, Homo sapiens
  misc_RNA (1)...(19): siRNA sense strand
gccaaagaaugcgaagcaa

SEQ ID NO: 472469 - RNA, 19 nt, Homo sapiens
  misc_RNA (1)...(19): siRNA sense strand
aggaaugcguccaccaaga

SEQ ID NO: 472470 - RNA, 19 nt, Homo sapiens
  misc_RNA (1)...(19): siRNA sense strand
gauggccgaaucuucauug

SEQ ID NO: 472471 - RNA, 19 nt, Homo sapiens
  misc_RNA (1)...(19): siRNA sense strand
gagaacuugguauccauga

SEQ ID NO: 472472 - RNA, 19 nt, Homo sapiens
  misc_RNA (1)...(19): siRNA sense strand
gaagcaaccagagcgugaa

SEQ ID NO: 472473 - RNA, 19 nt, Homo sapiens
  misc_RNA (1)...(19): siRNA sense strand
agauguauccugcaagaug

SEQ ID NO: 472474 - RNA, 19 nt, Homo sapiens
  misc_RNA (1)...(19): siRNA sense strand
aaagaucaagccaaagaau

SEQ ID NO: 472475 - RNA, 19 nt, Homo sapiens
  misc_RNA (1)...(19): siRNA sense strand
ggaaugcguccaccaagac

SEQ ID NO: 472476 - RNA, 19 nt, Homo sapiens
  misc_RNA (1)...(19): siRNA sense strand
uggcaagaguagcaagaug

SEQ ID NO: 472477 - RNA, 19 nt, Homo sapiens
  misc_RNA (1)...(19): siRNA sense strand
caaccagagcgugaagaaa

SEQ ID NO: 472478 - RNA, 19 nt, Homo sapiens
  misc_RNA (1)...(19): siRNA sense strand
gcucgagggacgccaauag

SEQ ID NO: 472479 - RNA, 19 nt, Homo sapiens
  misc_RNA (1)...(19): siRNA sense strand
gaccaucccagcagguaau

SEQ ID NO: 472480 - RNA, 19 nt, Homo sapiens
  misc_RNA (1)...(19): siRNA sense strand
ugcagcacauugacuauag

SEQ ID NO: 472481 - RNA, 19 nt, Homo sapiens
  misc_RNA (1)...(19): siRNA sense strand
ccaggaaugcguccaccaa

SEQ ID NO: 472482 - RNA, 19 nt, Homo sapiens
  misc_RNA (1)...(19): siRNA sense strand
ccugcaagauggccgaauc

SEQ ID NO: 472483 - RNA, 19 nt, Homo sapiens
  misc_RNA (1)...(19): siRNA sense strand
ggcagcugguagaggagua

SEQ ID NO: 472484 - RNA, 19 nt, Homo sapiens
  misc_RNA (1)...(19): siRNA sense strand
ccaaagauacuggcauugc

SEQ ID NO: 472485 - RNA, 19 nt, Homo sapiens
  misc_RNA (1)...(19): siRNA sense strand
gaauuugauccucugugau

SEQ ID NO: 472486 - RNA, 19 nt, Homo sapiens
  misc_RNA (1)...(19): siRNA sense strand
ugauugugaugaguucaga

SEQ ID NO: 472487 - RNA, 19 nt, Homo sapiens
  misc_RNA (1)...(19): siRNA sense strand
cagggaagaggcacuguag

SEQ ID NO: 472488 - RNA, 19 nt, Homo sapiens
  misc_RNA (1)...(19): siRNA sense strand
gaaucuucauuggcaccuu

SEQ ID NO: 472489 - RNA, 19 nt, Homo sapiens
  misc_RNA (1)...(19): siRNA sense strand
cagcacauugacuauagaa

SEQ ID NO: 472490 - RNA, 19 nt, Homo sapiens
  misc_RNA (1)...(19): siRNA sense strand
aagaucaagccaaagaaug

SEQ ID NO: 472491 - RNA, 19 nt, Homo sapiens
  misc_RNA (1)...(19): siRNA sense strand
ucagaaagaucaagccaaa

SEQ ID NO: 472492 - RNA, 19 nt, Homo sapiens
  misc_RNA (1)...(19): siRNA sense strand
ugaauuugauccucuguga

SEQ ID NO: 472493 - RNA, 19 nt, Homo sapiens
  misc_RNA (1)...(19): siRNA sense strand
ugagauguauccugcaaga

SEQ ID NO: 472494 - RNA, 19 nt, Homo sapiens
  misc_RNA (1)...(19): siRNA sense strand
gaaagaucaagccaaagaa

SEQ ID NO: 472495 - RNA, 19 nt, Homo sapiens
  misc_RNA (1)...(19): siRNA sense strand
gacuauagaaugagaugua

SEQ ID NO: 472496 - RNA, 19 nt, Homo sapiens
  misc_RNA (1)...(19): siRNA sense strand
ugacaagcauaugaauuug

SEQ ID NO: 472497 - RNA, 19 nt, Homo sapiens
  misc_RNA (1)...(19): siRNA sense strand
gcagcacauugacuauaga

SEQ ID NO: 472498 - RNA, 19 nt, Homo sapiens
  misc_RNA (1)...(19): siRNA sense strand
gcaaccagagcgugaagaa

SEQ ID NO: 472499 - RNA, 19 nt, Homo sapiens
  misc_RNA (1)...(19): siRNA sense strand
agaaagaucaagccaaaga

SEQ ID NO: 472500 - RNA, 19 nt, Homo sapiens
  misc_RNA (1)...(19): siRNA sense strand
ugugaugaguucagaaaga

SEQ ID NO: 472501 - RNA, 19 nt, Homo sapiens
  misc_RNA (1)...(19): siRNA sense strand
gugaugaguucagaaagau

SEQ ID NO: 472502 - RNA, 19 nt, Homo sapiens
  misc_RNA (1)...(19): siRNA sense strand
caaagauacuggcauugcu

SEQ ID NO: 472503 - RNA, 19 nt, Homo sapiens
  misc_RNA (1)...(19): siRNA sense strand
gacaagcauaugaauuuga

SEQ ID NO: 472504 - RNA, 19 nt, Homo sapiens
  misc_RNA (1)...(19): siRNA sense strand
aaucuucauuggcaccuuu

SEQ ID NO: 472505 - RNA, 19 nt, Homo sapiens
  misc_RNA (1)...(19): siRNA sense strand
gggaagaggcacuguagca

SEQ ID NO: 472506 - RNA, 19 nt, Homo sapiens
  misc_RNA (1)...(19): siRNA sense strand
gggagaacuugguauccau

SEQ ID NO: 472507 - RNA, 19 nt, Homo sapiens
  misc_RNA (1)...(19): siRNA sense strand
gaugaguucagaaagauca

SEQ ID NO: 472508 - RNA, 19 nt, Homo sapiens
  misc_RNA (1)...(19): siRNA sense strand
gauccucugugauugugau

SEQ ID NO: 472509 - RNA, 19 nt, Homo sapiens
  misc_RNA (1)...(19): siRNA sense strand
gaacuugguauccaugacu

SEQ ID NO: 472510 - RNA, 19 nt, Homo sapiens
  misc_RNA (1)...(19): siRNA sense strand
aaugagauguauccugcaa

SEQ ID NO: 472511 - RNA, 19 nt, Homo sapiens
  misc_RNA (1)...(19): siRNA sense strand
cccaugggcccaccaauug

SEQ ID NO: 472512 - RNA, 19 nt, Homo sapiens
  misc_RNA (1)...(19): siRNA sense strand
ggaccaucccagcagguaa

SEQ ID NO: 472513 - RNA, 19 nt, Homo sapiens
  misc_RNA (1)...(19): siRNA sense strand
aauuugauccucugugauu

SEQ ID NO: 472514 - RNA, 19 nt, Homo sapiens
  misc_RNA (1)...(19): siRNA sense strand
gccaaagaaugcgaagcaa

SEQ ID NO: 472515 - RNA, 19 nt, Homo sapiens
  misc_RNA (1)...(19): siRNA sense strand
aggaaugcguccaccaaga

SEQ ID NO: 472516 - RNA, 19 nt, Homo sapiens
  misc_RNA (1)...(19): siRNA sense strand
gauggccgaaucuucauug

SEQ ID NO: 472517 - RNA, 19 nt, Homo sapiens
  misc_RNA (1)...(19): siRNA sense strand
gagaacuugguauccauga

SEQ ID NO: 472518 - RNA, 19 nt, Homo sapiens
  misc_RNA (1)...(19): siRNA sense strand
gaagcaaccagagcgugaa

SEQ ID NO: 472519 - RNA, 19 nt, Homo sapiens
  misc_RNA (1)...(19): siRNA sense strand
agauguauccugcaagaug

SEQ ID NO: 472520 - RNA, 19 nt, Homo sapiens
  misc_RNA (1)...(19): siRNA sense strand
aaagaucaagccaaagaau

SEQ ID NO: 472521 - RNA, 19 nt, Homo sapiens
  misc_RNA (1)...(19): siRNA sense strand
ggaaugcguccaccaagac

SEQ ID NO: 472522 - RNA, 19 nt, Homo sapiens
  misc_RNA (1)...(19): siRNA sense strand
uggcaagaguagcaagaug

SEQ ID NO: 472523 - RNA, 19 nt, Homo sapiens
  misc_RNA (1)...(19): siRNA sense strand
caaccagagcgugaagaaa

SEQ ID NO: 472524 - RNA, 19 nt, Homo sapiens
  misc_RNA (1)...(19): siRNA sense strand
gcucgagggacgccaauag

SEQ ID NO: 472525 - RNA, 19 nt, Homo sapiens
  misc_RNA (1)...(19): siRNA sense strand
gaccaucccagcagguaau

SEQ ID NO: 472526 - RNA, 19 nt, Homo sapiens
  misc_RNA (1)...(19): siRNA sense strand
ugcagcacauugacuauag

SEQ ID NO: 472527 - RNA, 19 nt, Homo sapiens
  misc_RNA (1)...(19): siRNA sense strand
ccaggaaugcguccaccaa

SEQ ID NO: 472528 - RNA, 19 nt, Homo sapiens
  misc_RNA (1)...(19): siRNA sense strand
ccugcaagauggccgaauc

SEQ ID NO: 472529 - RNA, 19 nt, Homo sapiens
  misc_RNA (1)...(19): siRNA sense strand
ggcagcugguagaggagua

SEQ ID NO: 472530 - RNA, 19 nt, Homo sapiens
  misc_RNA (1)...(19): siRNA sense strand
ccaaagauacuggcauugc

SEQ ID NO: 472531 - RNA, 19 nt, Homo sapiens
  misc_RNA (1)...(19): siRNA sense strand
gaauuugauccucugugau

SEQ ID NO: 472532 - RNA, 19 nt, Homo sapiens
  misc_RNA (1)...(19): siRNA sense strand
ugauugugaugaguucaga

SEQ ID NO: 472533 - RNA, 19 nt, Homo sapiens
  misc_RNA (1)...(19): siRNA sense strand
cagggaagaggcacuguag

SEQ ID NO: 472534 - RNA, 19 nt, Homo sapiens
  misc_RNA (1)...(19): siRNA sense strand
gaaucuucauuggcaccuu

SEQ ID NO: 472535 - RNA, 19 nt, Homo sapiens
  misc_RNA (1)...(19): siRNA sense strand
cagcacauugacuauagaa

SEQ ID NO: 472536 - RNA, 19 nt, Homo sapiens
  misc_RNA (1)...(19): siRNA sense strand
aagaucaagccaaagaaug

SEQ ID NO: 472537 - RNA, 19 nt, Homo sapiens
  misc_RNA (1)...(19): siRNA sense strand
ucagaaagaucaagccaaa

SEQ ID NO: 472538 - RNA, 19 nt, Homo sapiens
  misc_RNA (1)...(19): siRNA sense strand
ugaauuugauccucuguga

SEQ ID NO: 472539 - RNA, 19 nt, Homo sapiens
  misc_RNA (1)...(19): siRNA sense strand
ugagauguauccugcaaga

SEQ ID NO: 472540 - RNA, 19 nt, Homo sapiens
  misc_RNA (1)...(19): siRNA sense strand
gaaagaucaagccaaagaa

SEQ ID NO: 472541 - RNA, 19 nt, Homo sapiens
  misc_RNA (1)...(19): siRNA sense strand
gacuauagaaugagaugua

SEQ ID NO: 472542 - RNA, 19 nt, Homo sapiens
  misc_RNA (1)...(19): siRNA sense strand
ugacaagcauaugaauuug

SEQ ID NO: 472543 - RNA, 19 nt, Homo sapiens
  misc_RNA (1)...(19): siRNA sense strand
gcagcacauugacuauaga

SEQ ID NO: 472544 - RNA, 19 nt, Homo sapiens
  misc_RNA (1)...(19): siRNA sense strand
gcaaccagagcgugaagaa

SEQ ID NO: 472545 - RNA, 19 nt, Homo sapiens
  misc_RNA (1)...(19): siRNA sense strand
agaaagaucaagccaaaga

SEQ ID NO: 472546 - RNA, 19 nt, Homo sapiens
  misc_RNA (1)...(19): siRNA sense strand
ugugaugaguucagaaaga

SEQ ID NO: 472547 - RNA, 19 nt, Homo sapiens
  misc_RNA (1)...(19): siRNA sense strand
gugaugaguucagaaagau

SEQ ID NO: 472548 - RNA, 19 nt, Homo sapiens
  misc_RNA (1)...(19): siRNA sense strand
caaagauacuggcauugcu

SEQ ID NO: 472549 - RNA, 19 nt, Homo sapiens
  misc_RNA (1)...(19): siRNA sense strand
gacaagcauaugaauuuga

SEQ ID NO: 472550 - RNA, 19 nt, Homo sapiens
  misc_RNA (1)...(19): siRNA sense strand
aaucuucauuggcaccuuu

SEQ ID NO: 472551 - RNA, 19 nt, Homo sapiens
  misc_RNA (1)...(19): siRNA sense strand
gggaagaggcacuguagca

SEQ ID NO: 472552 - RNA, 19 nt, Homo sapiens
  misc_RNA (1)...(19): siRNA sense strand
gggagaacuugguauccau

SEQ ID NO: 472553 - RNA, 19 nt, Homo sapiens
  misc_RNA (1)...(19): siRNA sense strand
gaugaguucagaaagauca

SEQ ID NO: 472554 - RNA, 19 nt, Homo sapiens
  misc_RNA (1)...(19): siRNA sense strand
gauccucugugauugugau

SEQ ID NO: 472555 - RNA, 19 nt, Homo sapiens
  misc_RNA (1)...(19): siRNA sense strand
gaacuugguauccaugacu

SEQ ID NO: 472556 - RNA, 19 nt, Homo sapiens
  misc_RNA (1)...(19): siRNA sense strand
aaugagauguauccugcaa

SEQ ID NO: 472557 - RNA, 19 nt, Homo sapiens
  misc_RNA (1)...(19): siRNA sense strand
cccaugggcccaccaauug

SEQ ID NO: 472558 - RNA, 19 nt, Homo sapiens
  misc_RNA (1)...(19): siRNA sense strand
ggaccaucccagcagguaa

SEQ ID NO: 472559 - RNA, 19 nt, Homo sapiens
  misc_RNA (1)...(19): siRNA sense strand
aauuugauccucugugauu

SEQ ID NO: 472560 - RNA, 19 nt, Homo sapiens
  misc_RNA (1)...(19): siRNA sense strand
gccaaagaaugcgaagcaa

SEQ ID NO: 472561 - RNA, 19 nt, Homo sapiens
  misc_RNA (1)...(19): siRNA sense strand
aggaaugcguccaccaaga

SEQ ID NO: 472562 - RNA, 19 nt, Homo sapiens
  misc_RNA (1)...(19): siRNA sense strand
gauggccgaaucuucauug

SEQ ID NO: 472563 - RNA, 19 nt, Homo sapiens
  misc_RNA (1)...(19): siRNA sense strand
gagaacuugguauccauga

SEQ ID NO: 472564 - RNA, 19 nt, Homo sapiens
  misc_RNA (1)...(19): siRNA sense strand
gaagcaaccagagcgugaa

SEQ ID NO: 472565 - RNA, 19 nt, Homo sapiens
  misc_RNA (1)...(19): siRNA sense strand
agauguauccugcaagaug

SEQ ID NO: 472566 - RNA, 19 nt, Homo sapiens
  misc_RNA (1)...(19): siRNA sense strand
aaagaucaagccaaagaau

SEQ ID NO: 472567 - RNA, 19 nt, Homo sapiens
  misc_RNA (1)...(19): siRNA sense strand
ggaaugcguccaccaagac

SEQ ID NO: 472568 - RNA, 19 nt, Homo sapiens
  misc_RNA (1)...(19): siRNA sense strand
uggcaagaguagcaagaug

SEQ ID NO: 472569 - RNA, 19 nt, Homo sapiens
  misc_RNA (1)...(19): siRNA sense strand
caaccagagcgugaagaaa

SEQ ID NO: 472570 - RNA, 19 nt, Homo sapiens
  misc_RNA (1)...(19): siRNA sense strand
gcucgagggacgccaauag

SEQ ID NO: 472571 - RNA, 19 nt, Homo sapiens
  misc_RNA (1)...(19): siRNA sense strand
gaccaucccagcagguaau

SEQ ID NO: 472572 - RNA, 19 nt, Homo sapiens
  misc_RNA (1)...(19): siRNA sense strand
ugcagcacauugacuauag

SEQ ID NO: 472573 - RNA, 19 nt, Homo sapiens
  misc_RNA (1)...(19): siRNA sense strand
ccaggaaugcguccaccaa

SEQ ID NO: 472574 - RNA, 19 nt, Homo sapiens
  misc_RNA (1)...(19): siRNA sense strand
ccugcaagauggccgaauc

SEQ ID NO: 472575 - RNA, 19 nt, Homo sapiens
  misc_RNA (1)...(19): siRNA sense strand
ggcagcugguagaggagua

SEQ ID NO: 472576 - RNA, 19 nt, Homo sapiens
  misc_RNA (1)...(19): siRNA sense strand
ccaaagauacuggcauugc

SEQ ID NO: 472577 - RNA, 19 nt, Homo sapiens
  misc_RNA (1)...(19): siRNA sense strand
gaauuugauccucugugau

SEQ ID NO: 472578 - RNA, 19 nt, Homo sapiens
  misc_RNA (1)...(19): siRNA sense strand
ugauugugaugaguucaga

SEQ ID NO: 472579 - RNA, 19 nt, Homo sapiens
  misc_RNA (1)...(19): siRNA sense strand
cagggaagaggcacuguag

SEQ ID NO: 472580 - RNA, 19 nt, Homo sapiens
  misc_RNA (1)...(19): siRNA sense strand
gaaucuucauuggcaccuu

SEQ ID NO: 472581 - RNA, 19 nt, Homo sapiens
  misc_RNA (1)...(19): siRNA sense strand
cagcacauugacuauagaa

SEQ ID NO: 472582 - RNA, 19 nt, Homo sapiens
  misc_RNA (1)...(19): siRNA sense strand
aagaucaagccaaagaaug

SEQ ID NO: 472583 - RNA, 19 nt, Homo sapiens
  misc_RNA (1)...(19): siRNA sense strand
ucagaaagaucaagccaaa

SEQ ID NO: 472584 - RNA, 19 nt, Homo sapiens
  misc_RNA (1)...(19): siRNA sense strand
ugaauuugauccucuguga

SEQ ID NO: 472585 - RNA, 19 nt, Homo sapiens
  misc_RNA (1)...(19): siRNA sense strand
ugagauguauccugcaaga

SEQ ID NO: 472586 - RNA, 19 nt, Homo sapiens
  misc_RNA (1)...(19): siRNA sense strand
gaaagaucaagccaaagaa

SEQ ID NO: 472587 - RNA, 19 nt, Homo sapiens
  misc_RNA (1)...(19): siRNA sense strand
gacuauagaaugagaugua

SEQ ID NO: 472588 - RNA, 19 nt, Homo sapiens
  misc_RNA (1)...(19): siRNA sense strand
ugacaagcauaugaauuug

SEQ ID NO: 472589 - RNA, 19 nt, Homo sapiens
  misc_RNA (1)...(19): siRNA sense strand
gcagcacauugacuauaga

SEQ ID NO: 472590 - RNA, 19 nt, Homo sapiens
  misc_RNA (1)...(19): siRNA sense strand
gcaaccagagcgugaagaa

SEQ ID NO: 472591 - RNA, 19 nt, Homo sapiens
  misc_RNA (1)...(19): siRNA sense strand
agaaagaucaagccaaaga

SEQ ID NO: 472592 - RNA, 19 nt, Homo sapiens
  misc_RNA (1)...(19): siRNA sense strand
ugugaugaguucagaaaga

SEQ ID NO: 472593 - RNA, 19 nt, Homo sapiens
  misc_RNA (1)...(19): siRNA sense strand
gugaugaguucagaaagau

SEQ ID NO: 472594 - RNA, 19 nt, Homo sapiens
  misc_RNA (1)...(19): siRNA sense strand
caaagauacuggcauugcu

SEQ ID NO: 472595 - RNA, 19 nt, Homo sapiens
  misc_RNA (1)...(19): siRNA sense strand
gacaagcauaugaauuuga

SEQ ID NO: 472596 - RNA, 19 nt, Homo sapiens
  misc_RNA (1)...(19): siRNA sense strand
aaucuucauuggcaccuuu

SEQ ID NO: 472597 - RNA, 19 nt, Homo sapiens
  misc_RNA (1)...(19): siRNA sense strand
gggaagaggcacuguagca

SEQ ID NO: 472598 - RNA, 19 nt, Homo sapiens
  misc_RNA (1)...(19): siRNA sense strand
gggagaacuugguauccau

SEQ ID NO: 472599 - RNA, 19 nt, Homo sapiens
  misc_RNA (1)...(19): siRNA sense strand
gaugaguucagaaagauca

SEQ ID NO: 472600 - RNA, 19 nt, Homo sapiens
  misc_RNA (1)...(19): siRNA sense strand
gauccucugugauugugau

SEQ ID NO: 472601 - RNA, 19 nt, Homo sapiens
  misc_RNA (1)...(19): siRNA sense strand
gaacuugguauccaugacu

SEQ ID NO: 472602 - RNA, 19 nt, Homo sapiens
  misc_RNA (1)...(19): siRNA sense strand
aaugagauguauccugcaa

SEQ ID NO: 472603 - RNA, 19 nt, Homo sapiens
  misc_RNA (1)...(19): siRNA sense strand
cccaugggcccaccaauug

SEQ ID NO: 472604 - RNA, 19 nt, Homo sapiens
  misc_RNA (1)...(19): siRNA sense strand
ggaccaucccagcagguaa

SEQ ID NO: 472605 - RNA, 19 nt, Homo sapiens
  misc_RNA (1)...(19): siRNA sense strand
aauuugauccucugugauu

SEQ ID NO: 472606 - RNA, 19 nt, Homo sapiens
  misc_RNA (1)...(19): siRNA sense strand
gccaaagaaugcgaagcaa

SEQ ID NO: 472607 - RNA, 19 nt, Homo sapiens
  misc_RNA (1)...(19): siRNA sense strand
aggaaugcguccaccaaga

SEQ ID NO: 472608 - RNA, 19 nt, Homo sapiens
  misc_RNA (1)...(19): siRNA sense strand
gauggccgaaucuucauug

SEQ ID NO: 472609 - RNA, 19 nt, Homo sapiens
  misc_RNA (1)...(19): siRNA sense strand
gagaacuugguauccauga

SEQ ID NO: 472610 - RNA, 19 nt, Homo sapiens
  misc_RNA (1)...(19): siRNA sense strand
gaagcaaccagagcgugaa

SEQ ID NO: 472611 - RNA, 19 nt, Homo sapiens
  misc_RNA (1)...(19): siRNA sense strand
agauguauccugcaagaug

SEQ ID NO: 472612 - RNA, 19 nt, Homo sapiens
  misc_RNA (1)...(19): siRNA sense strand
aaagaucaagccaaagaau

SEQ ID NO: 472613 - RNA, 19 nt, Homo sapiens
  misc_RNA (1)...(19): siRNA sense strand
ggaaugcguccaccaagac

SEQ ID NO: 472614 - RNA, 19 nt, Homo sapiens
  misc_RNA (1)...(19): siRNA sense strand
uggcaagaguagcaagaug

SEQ ID NO: 472615 - RNA, 19 nt, Homo sapiens
  misc_RNA (1)...(19): siRNA sense strand
caaccagagcgugaagaaa

SEQ ID NO: 472616 - RNA, 19 nt, Homo sapiens
  misc_RNA (1)...(19): siRNA sense strand
gcucgagggacgccaauag

SEQ ID NO: 472617 - RNA, 19 nt, Homo sapiens
  misc_RNA (1)...(19): siRNA sense strand
gaccaucccagcagguaau

SEQ ID NO: 472618 - RNA, 19 nt, Homo sapiens
  misc_RNA (1)...(19): siRNA sense strand
ugcagcacauugacuauag

SEQ ID NO: 472619 - RNA, 19 nt, Homo sapiens
  misc_RNA (1)...(19): siRNA sense strand
ccaggaaugcguccaccaa

SEQ ID NO: 472620 - RNA, 19 nt, Homo sapiens
  misc_RNA (1)...(19): siRNA sense strand
ccugcaagauggccgaauc

SEQ ID NO: 472621 - RNA, 19 nt, Homo sapiens
  misc_RNA (1)...(19): siRNA sense strand
ggcagcugguagaggagua

SEQ ID NO: 472622 - RNA, 19 nt, Homo sapiens
  misc_RNA (1)...(19): siRNA sense strand
ccaaagauacuggcauugc

SEQ ID NO: 472623 - RNA, 19 nt, Homo sapiens
  misc_RNA (1)...(19): siRNA sense strand
gaauuugauccucugugau

SEQ ID NO: 472624 - RNA, 19 nt, Homo sapiens
  misc_RNA (1)...(19): siRNA sense strand
ugauugugaugaguucaga

SEQ ID NO: 472625 - RNA, 19 nt, Homo sapiens
  misc_RNA (1)...(19): siRNA sense strand
cagggaagaggcacuguag

SEQ ID NO: 472626 - RNA, 19 nt, Homo sapiens
  misc_RNA (1)...(19): siRNA sense strand
gaaucuucauuggcaccuu

SEQ ID NO: 472627 - RNA, 19 nt, Homo sapiens
  misc_RNA (1)...(19): siRNA sense strand
cagcacauugacuauagaa

SEQ ID NO: 472628 - RNA, 19 nt, Homo sapiens
  misc_RNA (1)...(19): siRNA sense strand
aagaucaagccaaagaaug

SEQ ID NO: 472629 - RNA, 19 nt, Homo sapiens
  misc_RNA (1)...(19): siRNA sense strand
ucagaaagaucaagccaaa

SEQ ID NO: 472630 - RNA, 19 nt, Homo sapiens
  misc_RNA (1)...(19): siRNA sense strand
ugaauuugauccucuguga

SEQ ID NO: 472631 - RNA, 19 nt, Homo sapiens
  misc_RNA (1)...(19): siRNA sense strand
ugagauguauccugcaaga

SEQ ID NO: 472632 - RNA, 19 nt, Homo sapiens
  misc_RNA (1)...(19): siRNA sense strand
gaaagaucaagccaaagaa

SEQ ID NO: 472633 - RNA, 19 nt, Homo sapiens
  misc_RNA (1)...(19): siRNA sense strand
gacuauagaaugagaugua

SEQ ID NO: 472634 - RNA, 19 nt, Homo sapiens
  misc_RNA (1)...(19): siRNA sense strand
ugacaagcauaugaauuug

SEQ ID NO: 472635 - RNA, 19 nt, Homo sapiens
  misc_RNA (1)...(19): siRNA sense strand
gcagcacauugacuauaga

SEQ ID NO: 472636 - RNA, 19 nt, Homo sapiens
  misc_RNA (1)...(19): siRNA sense strand
gcaaccagagcgugaagaa

SEQ ID NO: 472637 - RNA, 19 nt, Homo sapiens
  misc_RNA (1)...(19): siRNA sense strand
agaaagaucaagccaaaga

SEQ ID NO: 472638 - RNA, 19 nt, Homo sapiens
  misc_RNA (1)...(19): siRNA sense strand
ugugaugaguucagaaaga

SEQ ID NO: 472639 - RNA, 19 nt, Homo sapiens
  misc_RNA (1)...(19): siRNA sense strand
gugaugaguucagaaagau

SEQ ID NO: 472640 - RNA, 19 nt, Homo sapiens
  misc_RNA (1)...(19): siRNA sense strand
caaagauacuggcauugcu

SEQ ID NO: 472641 - RNA, 19 nt, Homo sapiens
  misc_RNA (1)...(19): siRNA sense strand
gacaagcauaugaauuuga

SEQ ID NO: 472642 - RNA, 19 nt, Homo sapiens
  misc_RNA (1)...(19): siRNA sense strand
aaucuucauuggcaccuuu

SEQ ID NO: 472643 - RNA, 19 nt, Homo sapiens
  misc_RNA (1)...(19): siRNA sense strand
gggaagaggcacuguagca

SEQ ID NO: 472644 - RNA, 19 nt, Homo sapiens
  misc_RNA (1)...(19): siRNA sense strand
gggagaacuugguauccau

SEQ ID NO: 472645 - RNA, 19 nt, Homo sapiens
  misc_RNA (1)...(19): siRNA sense strand
gaugaguucagaaagauca

SEQ ID NO: 472646 - RNA, 19 nt, Homo sapiens
  misc_RNA (1)...(19): siRNA sense strand
gauccucugugauugugau

SEQ ID NO: 472647 - RNA, 19 nt, Homo sapiens
  misc_RNA (1)...(19): siRNA sense strand
gaacuugguauccaugacu

SEQ ID NO: 472648 - RNA, 19 nt, Homo sapiens
  misc_RNA (1)...(19): siRNA sense strand
aaugagauguauccugcaa

SEQ ID NO: 472649 - RNA, 19 nt, Homo sapiens
  misc_RNA (1)...(19): siRNA sense strand
cccaugggcccaccaauug

SEQ ID NO: 472650 - RNA, 19 nt, Homo sapiens
  misc_RNA (1)...(19): siRNA sense strand
ggaccaucccagcagguaa

SEQ ID NO: 472651 - RNA, 19 nt, Homo sapiens
  misc_RNA (1)...(19): siRNA sense strand
aauuugauccucugugauu

SEQ ID NO: 472652 - RNA, 19 nt, Homo sapiens
  misc_RNA (1)...(19): siRNA sense strand
gccaaagaaugcgaagcaa

SEQ ID NO: 472653 - RNA, 19 nt, Homo sapiens
  misc_RNA (1)...(19): siRNA sense strand
aggaaugcguccaccaaga

SEQ ID NO: 472654 - RNA, 19 nt, Homo sapiens
  misc_RNA (1)...(19): siRNA sense strand
gauggccgaaucuucauug

SEQ ID NO: 472655 - RNA, 19 nt, Homo sapiens
  misc_RNA (1)...(19): siRNA sense strand
gagaacuugguauccauga

SEQ ID NO: 472656 - RNA, 19 nt, Homo sapiens
  misc_RNA (1)...(19): siRNA sense strand
gaagcaaccagagcgugaa

SEQ ID NO: 472657 - RNA, 19 nt, Homo sapiens
  misc_RNA (1)...(19): siRNA sense strand
agauguauccugcaagaug

SEQ ID NO: 472658 - RNA, 19 nt, Homo sapiens
  misc_RNA (1)...(19): siRNA sense strand
aaagaucaagccaaagaau

SEQ ID NO: 472659 - RNA, 19 nt, Homo sapiens
  misc_RNA (1)...(19): siRNA sense strand
ggaaugcguccaccaagac

SEQ ID NO: 472660 - RNA, 19 nt, Homo sapiens
  misc_RNA (1)...(19): siRNA sense strand
uggcaagaguagcaagaug

SEQ ID NO: 472661 - RNA, 19 nt, Homo sapiens
  misc_RNA (1)...(19): siRNA sense strand
caaccagagcgugaagaaa

SEQ ID NO: 472662 - RNA, 19 nt, Homo sapiens
  misc_RNA (1)...(19): siRNA sense strand
gcucgagggacgccaauag

SEQ ID NO: 472663 - RNA, 19 nt, Homo sapiens
  misc_RNA (1)...(19): siRNA sense strand
gaccaucccagcagguaau

SEQ ID NO: 472664 - RNA, 19 nt, Homo sapiens
  misc_RNA (1)...(19): siRNA sense strand
ugcagcacauugacuauag

SEQ ID NO: 472665 - RNA, 19 nt, Homo sapiens
  misc_RNA (1)...(19): siRNA sense strand
ccaggaaugcguccaccaa

SEQ ID NO: 472666 - RNA, 19 nt, Homo sapiens
  misc_RNA (1)...(19): siRNA sense strand
ccugcaagauggccgaauc

SEQ ID NO: 472667 - RNA, 19 nt, Homo sapiens
  misc_RNA (1)...(19): siRNA sense strand
ggcagcugguagaggagua

SEQ ID NO: 472668 - RNA, 19 nt, Homo sapiens
  misc_RNA (1)...(19): siRNA sense strand
ccaaagauacuggcauugc

SEQ ID NO: 472669 - RNA, 19 nt, Homo sapiens
  misc_RNA (1)...(19): siRNA sense strand
gaauuugauccucugugau

SEQ ID NO: 472670 - RNA, 19 nt, Homo sapiens
  misc_RNA (1)...(19): siRNA sense strand
ugauugugaugaguucaga

SEQ ID NO: 472671 - RNA, 19 nt, Homo sapiens
  misc_RNA (1)...(19): siRNA sense strand
cagggaagaggcacuguag

SEQ ID NO: 472672 - RNA, 19 nt, Homo sapiens
  misc_RNA (1)...(19): siRNA sense strand
gaaucuucauuggcaccuu

SEQ ID NO: 472673 - RNA, 19 nt, Homo sapiens
  misc_RNA (1)...(19): siRNA sense strand
cagcacauugacuauagaa

SEQ ID NO: 472674 - RNA, 19 nt, Homo sapiens
  misc_RNA (1)...(19): siRNA sense strand
aagaucaagccaaagaaug

SEQ ID NO: 472675 - RNA, 19 nt, Homo sapiens
  misc_RNA (1)...(19): siRNA sense strand
ucaagaaccucgaguggau

SEQ ID NO: 472676 - RNA, 19 nt, Homo sapiens
  misc_RNA (1)...(19): siRNA sense strand
ucaaggaggcugucaagaa

SEQ ID NO: 472677 - RNA, 19 nt, Homo sapiens
  misc_RNA (1)...(19): siRNA sense strand
caaggaggcugucaagaac

SEQ ID NO: 472678 - RNA, 19 nt, Homo sapiens
  misc_RNA (1)...(19): siRNA sense strand
aaggugagcugccuggaaa

SEQ ID NO: 472679 - RNA, 19 nt, Homo sapiens
  misc_RNA (1)...(19): siRNA sense strand
ggacgaugaccucaacuug

SEQ ID NO: 472680 - RNA, 19 nt, Homo sapiens
  misc_RNA (1)...(19): siRNA sense strand
gggcguuccuggcuucaaa

SEQ ID NO: 472681 - RNA, 19 nt, Homo sapiens
  misc_RNA (1)...(19): siRNA sense strand
gagaagcacgagagugaaa

SEQ ID NO: 472682 - RNA, 19 nt, Homo sapiens
  misc_RNA (1)...(19): siRNA sense strand
agagaagggugaauuugga

SEQ ID NO: 472683 - RNA, 19 nt, Homo sapiens
  misc_RNA (1)...(19): siRNA sense strand
ccacggacauccugcucuu

SEQ ID NO: 472684 - RNA, 19 nt, Homo sapiens
  misc_RNA (1)...(19): siRNA sense strand
ggagagaagggugaauuug

SEQ ID NO: 472685 - RNA, 19 nt, Homo sapiens
  misc_RNA (1)...(19): siRNA sense strand
aacaacaacugcccagaga

SEQ ID NO: 472686 - RNA, 19 nt, Homo sapiens
  misc_RNA (1)...(19): siRNA sense strand
gagagaagggugaauuugg

SEQ ID NO: 472687 - RNA, 19 nt, Homo sapiens
  misc_RNA (1)...(19): siRNA sense strand
caacaacugcccagagaag

SEQ ID NO: 472688 - RNA, 19 nt, Homo sapiens
  misc_RNA (1)...(19): siRNA sense strand
caagggcaccguccacuuc

SEQ ID NO: 472689 - RNA, 19 nt, Homo sapiens
  misc_RNA (1)...(19): siRNA sense strand
gaccuucccugccaaacag

SEQ ID NO: 472690 - RNA, 19 nt, Homo sapiens
  misc_RNA (1)...(19): siRNA sense strand
gaggaaaggagagaaagga

SEQ ID NO: 472691 - RNA, 19 nt, Homo sapiens
  misc_RNA (1)...(19): siRNA sense strand
gggccuccuucaucaagaa

SEQ ID NO: 472692 - RNA, 19 nt, Homo sapiens
  misc_RNA (1)...(19): siRNA sense strand
ggacauguuccacgagaag

SEQ ID NO: 472693 - RNA, 19 nt, Homo sapiens
  misc_RNA (1)...(19): siRNA sense strand
cagcaggugcgcaacauga

SEQ ID NO: 472694 - RNA, 19 nt, Homo sapiens
  misc_RNA (1)...(19): siRNA sense strand
gcaagggcaccguccacuu

SEQ ID NO: 472695 - RNA, 19 nt, Homo sapiens
  misc_RNA (1)...(19): siRNA sense strand
gggcuaccguggacagaag

SEQ ID NO: 472696 - RNA, 19 nt, Homo sapiens
  misc_RNA (1)...(19): siRNA sense strand
ccucagcccucaaguuugc

SEQ ID NO: 472697 - RNA, 19 nt, Homo sapiens
  misc_RNA (1)...(19): siRNA sense strand
caacaugacggagcagauc

SEQ ID NO: 472698 - RNA, 19 nt, Homo sapiens
  misc_RNA (1)...(19): siRNA sense strand
acgagaagcacgagaguga

SEQ ID NO: 472699 - RNA, 19 nt, Homo sapiens
  misc_RNA (1)...(19): siRNA sense strand
caaggugagcugccuggaa

SEQ ID NO: 472700 - RNA, 19 nt, Homo sapiens
  misc_RNA (1)...(19): siRNA sense strand
agugugacgucaugaccua

SEQ ID NO: 472701 - RNA, 19 nt, Homo sapiens
  misc_RNA (1)...(19): siRNA sense strand
cgaggcgacuuuggcuuga

SEQ ID NO: 472702 - RNA, 19 nt, Homo sapiens
  misc_RNA (1)...(19): siRNA sense strand
ccuggucgcugagaaguuc

SEQ ID NO: 472703 - RNA, 19 nt, Homo sapiens
  misc_RNA (1)...(19): siRNA sense strand
aggagaaccugggaggaaa

SEQ ID NO: 472704 - RNA, 19 nt, Homo sapiens
  misc_RNA (1)...(19): siRNA sense strand
gggacauguuccacgagaa

SEQ ID NO: 472705 - RNA, 19 nt, Homo sapiens
  misc_RNA (1)...(19): siRNA sense strand
gaucgugugcccagaccuu

SEQ ID NO: 472706 - RNA, 19 nt, Homo sapiens
  misc_RNA (1)...(19): siRNA sense strand
gccggacacuaccgagaga

SEQ ID NO: 472707 - RNA, 19 nt, Homo sapiens
  misc_RNA (1)...(19): siRNA sense strand
gaggcgacuuuggcuugaa

SEQ ID NO: 472708 - RNA, 19 nt, Homo sapiens
  misc_RNA (1)...(19): siRNA sense strand
gugaaaaccucuacuccau

SEQ ID NO: 472709 - RNA, 19 nt, Homo sapiens
  misc_RNA (1)...(19): siRNA sense strand
caaaggagagaagggugaa

SEQ ID NO: 472710 - RNA, 19 nt, Homo sapiens
  misc_RNA (1)...(19): siRNA sense strand
acccucagcccucaaguuu

SEQ ID NO: 472711 - RNA, 19 nt, Homo sapiens
  misc_RNA (1)...(19): siRNA sense strand
gugugggcguggugcagua

SEQ ID NO: 472712 - RNA, 19 nt, Homo sapiens
  misc_RNA (1)...(19): siRNA sense strand
ccaaccagaaccugaagga

SEQ ID NO: 472713 - RNA, 19 nt, Homo sapiens
  misc_RNA (1)...(19): siRNA sense strand
cuacggagagugcuacaag

SEQ ID NO: 472714 - RNA, 19 nt, Homo sapiens
  misc_RNA (1)...(19): siRNA sense strand
caagaacgggaccgaugga

SEQ ID NO: 472715 - RNA, 19 nt, Homo sapiens
  misc_RNA (1)...(19): siRNA sense strand
gacacuaccgagagaaaca

SEQ ID NO: 472716 - RNA, 19 nt, Homo sapiens
  misc_RNA (1)...(19): siRNA sense strand
gccacgagggcaccuuuga

SEQ ID NO: 472717 - RNA, 19 nt, Homo sapiens
  misc_RNA (1)...(19): siRNA sense strand
ggaggaaaggagagaaagg

SEQ ID NO: 472718 - RNA, 19 nt, Homo sapiens
  misc_RNA (1)...(19): siRNA sense strand
aggcgacuuuggcuugaaa

SEQ ID NO: 472719 - RNA, 19 nt, Homo sapiens
  misc_RNA (1)...(19): siRNA sense strand
auccugcucuuccacauga

SEQ ID NO: 472720 - RNA, 19 nt, Homo sapiens
  misc_RNA (1)...(19): siRNA sense strand
gguaucaaggcaacaaugg

SEQ ID NO: 472721 - RNA, 19 nt, Homo sapiens
  misc_RNA (1)...(19): siRNA sense strand
cacggagugugacgucaug

SEQ ID NO: 472722 - RNA, 19 nt, Homo sapiens
  misc_RNA (1)...(19): siRNA sense strand
caagaaccucgaguggauu

SEQ ID NO: 472723 - RNA, 19 nt, Homo sapiens
  misc_RNA (1)...(19): siRNA sense strand
gaaguccuggugugaaagg

SEQ ID NO: 472724 - RNA, 19 nt, Homo sapiens
  misc_RNA (1)...(19): siRNA sense strand
gggacgaugaccucaacuu

SEQ ID NO: 472725 - RNA, 19 nt, Homo sapiens
  misc_RNA (1)...(19): siRNA sense strand
cuaccgagagaaacaacaa

SEQ ID NO: 472726 - RNA, 19 nt, Homo sapiens
  misc_RNA (1)...(19): siRNA sense strand
ccacagcaggugcgcaaca

SEQ ID NO: 472727 - RNA, 19 nt, Homo sapiens
  misc_RNA (1)...(19): siRNA sense strand
aggagagaagggugaauuu

SEQ ID NO: 472728 - RNA, 19 nt, Homo sapiens
  misc_RNA (1)...(19): siRNA sense strand
ucaagaaccucgaguggau

SEQ ID NO: 472729 - RNA, 19 nt, Homo sapiens
  misc_RNA (1)...(19): siRNA sense strand
ucaaggaggcugucaagaa

SEQ ID NO: 472730 - RNA, 19 nt, Homo sapiens
  misc_RNA (1)...(19): siRNA sense strand
caaggaggcugucaagaac

SEQ ID NO: 472731 - RNA, 19 nt, Homo sapiens
  misc_RNA (1)...(19): siRNA sense strand
aaggugagcugccuggaaa

SEQ ID NO: 472732 - RNA, 19 nt, Homo sapiens
  misc_RNA (1)...(19): siRNA sense strand
ggacgaugaccucaacuug

SEQ ID NO: 472733 - RNA, 19 nt, Homo sapiens
  misc_RNA (1)...(19): siRNA sense strand
gggcguuccuggcuucaaa

SEQ ID NO: 472734 - RNA, 19 nt, Homo sapiens
  misc_RNA (1)...(19): siRNA sense strand
gagaagcacgagagugaaa

SEQ ID NO: 472735 - RNA, 19 nt, Homo sapiens
  misc_RNA (1)...(19): siRNA sense strand
agagaagggugaauuugga

SEQ ID NO: 472736 - RNA, 19 nt, Homo sapiens
  misc_RNA (1)...(19): siRNA sense strand
ccacggacauccugcucuu

SEQ ID NO: 472737 - RNA, 19 nt, Homo sapiens
  misc_RNA (1)...(19): siRNA sense strand
ggagagaagggugaauuug

SEQ ID NO: 472738 - RNA, 19 nt, Homo sapiens
  misc_RNA (1)...(19): siRNA sense strand
aacaacaacugcccagaga

SEQ ID NO: 472739 - RNA, 19 nt, Homo sapiens
  misc_RNA (1)...(19): siRNA sense strand
gagagaagggugaauuugg

SEQ ID NO: 472740 - RNA, 19 nt, Homo sapiens
  misc_RNA (1)...(19): siRNA sense strand
caacaacugcccagagaag

SEQ ID NO: 472741 - RNA, 19 nt, Homo sapiens
  misc_RNA (1)...(19): siRNA sense strand
caagggcaccguccacuuc

SEQ ID NO: 472742 - RNA, 19 nt, Homo sapiens
  misc_RNA (1)...(19): siRNA sense strand
gaccuucccugccaaacag

SEQ ID NO: 472743 - RNA, 19 nt, Homo sapiens
  misc_RNA (1)...(19): siRNA sense strand
gaggaaaggagagaaagga

SEQ ID NO: 472744 - RNA, 19 nt, Homo sapiens
  misc_RNA (1)...(19): siRNA sense strand
gggccuccuucaucaagaa

SEQ ID NO: 472745 - RNA, 19 nt, Homo sapiens
  misc_RNA (1)...(19): siRNA sense strand
ggacauguuccacgagaag

SEQ ID NO: 472746 - RNA, 19 nt, Homo sapiens
  misc_RNA (1)...(19): siRNA sense strand
cagcaggugcgcaacauga

SEQ ID NO: 472747 - RNA, 19 nt, Homo sapiens
  misc_RNA (1)...(19): siRNA sense strand
gcaagggcaccguccacuu

SEQ ID NO: 472748 - RNA, 19 nt, Homo sapiens
  misc_RNA (1)...(19): siRNA sense strand
gggcuaccguggacagaag

SEQ ID NO: 472749 - RNA, 19 nt, Homo sapiens
  misc_RNA (1)...(19): siRNA sense strand
ccucagcccucaaguuugc

SEQ ID NO: 472750 - RNA, 19 nt, Homo sapiens
  misc_RNA (1)...(19): siRNA sense strand
caacaugacggagcagauc

SEQ ID NO: 472751 - RNA, 19 nt, Homo sapiens
  misc_RNA (1)...(19): siRNA sense strand
acgagaagcacgagaguga

SEQ ID NO: 472752 - RNA, 19 nt, Homo sapiens
  misc_RNA (1)...(19): siRNA sense strand
caaggugagcugccuggaa

SEQ ID NO: 472753 - RNA, 19 nt, Homo sapiens
  misc_RNA (1)...(19): siRNA sense strand
agugugacgucaugaccua

SEQ ID NO: 472754 - RNA, 19 nt, Homo sapiens
  misc_RNA (1)...(19): siRNA sense strand
cgaggcgacuuuggcuuga

SEQ ID NO: 472755 - RNA, 19 nt, Homo sapiens
  misc_RNA (1)...(19): siRNA sense strand
ccuggucgcugagaaguuc

SEQ ID NO: 472756 - RNA, 19 nt, Homo sapiens
  misc_RNA (1)...(19): siRNA sense strand
aggagaaccugggaggaaa

SEQ ID NO: 472757 - RNA, 19 nt, Homo sapiens
  misc_RNA (1)...(19): siRNA sense strand
gggacauguuccacgagaa

SEQ ID NO: 472758 - RNA, 19 nt, Homo sapiens
  misc_RNA (1)...(19): siRNA sense strand
gaucgugugcccagaccuu

SEQ ID NO: 472759 - RNA, 19 nt, Homo sapiens
  misc_RNA (1)...(19): siRNA sense strand
gccggacacuaccgagaga

SEQ ID NO: 472760 - RNA, 19 nt, Homo sapiens
  misc_RNA (1)...(19): siRNA sense strand
gaggcgacuuuggcuugaa

SEQ ID NO: 472761 - RNA, 19 nt, Homo sapiens
  misc_RNA (1)...(19): siRNA sense strand
gugaaaaccucuacuccau

SEQ ID NO: 472762 - RNA, 19 nt, Homo sapiens
  misc_RNA (1)...(19): siRNA sense strand
caaaggagagaagggugaa

SEQ ID NO: 472763 - RNA, 19 nt, Homo sapiens
  misc_RNA (1)...(19): siRNA sense strand
acccucagcccucaaguuu

SEQ ID NO: 472764 - RNA, 19 nt, Homo sapiens
  misc_RNA (1)...(19): siRNA sense strand
gugugggcguggugcagua

SEQ ID NO: 472765 - RNA, 19 nt, Homo sapiens
  misc_RNA (1)...(19): siRNA sense strand
ccaaccagaaccugaagga

SEQ ID NO: 472766 - RNA, 19 nt, Homo sapiens
  misc_RNA (1)...(19): siRNA sense strand
cuacggagagugcuacaag

SEQ ID NO: 472767 - RNA, 19 nt, Homo sapiens
  misc_RNA (1)...(19): siRNA sense strand
caagaacgggaccgaugga

SEQ ID NO: 472768 - RNA, 19 nt, Homo sapiens
  misc_RNA (1)...(19): siRNA sense strand
gacacuaccgagagaaaca

SEQ ID NO: 472769 - RNA, 19 nt, Homo sapiens
  misc_RNA (1)...(19): siRNA sense strand
gccacgagggcaccuuuga

SEQ ID NO: 472770 - RNA, 19 nt, Homo sapiens
  misc_RNA (1)...(19): siRNA sense strand
ggaggaaaggagagaaagg

SEQ ID NO: 472771 - RNA, 19 nt, Homo sapiens
  misc_RNA (1)...(19): siRNA sense strand
aggcgacuuuggcuugaaa

SEQ ID NO: 472772 - RNA, 19 nt, Homo sapiens
  misc_RNA (1)...(19): siRNA sense strand
auccugcucuuccacauga

SEQ ID NO: 472773 - RNA, 19 nt, Homo sapiens
  misc_RNA (1)...(19): siRNA sense strand
gguaucaaggcaacaaugg

SEQ ID NO: 472774 - RNA, 19 nt, Homo sapiens
  misc_RNA (1)...(19): siRNA sense strand
cacggagugugacgucaug

SEQ ID NO: 472775 - RNA, 19 nt, Homo sapiens
  misc_RNA (1)...(19): siRNA sense strand
caagaaccucgaguggauu

SEQ ID NO: 472776 - RNA, 19 nt, Homo sapiens
  misc_RNA (1)...(19): siRNA sense strand
gaaguccuggugugaaagg

SEQ ID NO: 472777 - RNA, 19 nt, Homo sapiens
  misc_RNA (1)...(19): siRNA sense strand
gggacgaugaccucaacuu

SEQ ID NO: 472778 - RNA, 19 nt, Homo sapiens
  misc_RNA (1)...(19): siRNA sense strand
cuaccgagagaaacaacaa

SEQ ID NO: 472779 - RNA, 19 nt, Homo sapiens
  misc_RNA (1)...(19): siRNA sense strand
ccacagcaggugcgcaaca

SEQ ID NO: 472780 - RNA, 19 nt, Homo sapiens
  misc_RNA (1)...(19): siRNA sense strand
aggagagaagggugaauuu

SEQ ID NO: 472781 - RNA, 19 nt, Homo sapiens
  misc_RNA (1)...(19): siRNA sense strand
ucaagaaccucgaguggau

SEQ ID NO: 472782 - RNA, 19 nt, Homo sapiens
  misc_RNA (1)...(19): siRNA sense strand
ucaaggaggcugucaagaa

SEQ ID NO: 472783 - RNA, 19 nt, Homo sapiens
  misc_RNA (1)...(19): siRNA sense strand
caaggaggcugucaagaac

SEQ ID NO: 472784 - RNA, 19 nt, Homo sapiens
  misc_RNA (1)...(19): siRNA sense strand
aaggugagcugccuggaaa

SEQ ID NO: 472785 - RNA, 19 nt, Homo sapiens
  misc_RNA (1)...(19): siRNA sense strand
ggacgaugaccucaacuug

SEQ ID NO: 472786 - RNA, 19 nt, Homo sapiens
  misc_RNA (1)...(19): siRNA sense strand
gggcguuccuggcuucaaa

SEQ ID NO: 472787 - RNA, 19 nt, Homo sapiens
  misc_RNA (1)...(19): siRNA sense strand
gagaagcacgagagugaaa

SEQ ID NO: 472788 - RNA, 19 nt, Homo sapiens
  misc_RNA (1)...(19): siRNA sense strand
agagaagggugaauuugga

SEQ ID NO: 472789 - RNA, 19 nt, Homo sapiens
  misc_RNA (1)...(19): siRNA sense strand
ccacggacauccugcucuu

SEQ ID NO: 472790 - RNA, 19 nt, Homo sapiens
  misc_RNA (1)...(19): siRNA sense strand
ggagagaagggugaauuug

SEQ ID NO: 472791 - RNA, 19 nt, Homo sapiens
  misc_RNA (1)...(19): siRNA sense strand
aacaacaacugcccagaga

SEQ ID NO: 472792 - RNA, 19 nt, Homo sapiens
  misc_RNA (1)...(19): siRNA sense strand
gagagaagggugaauuugg

SEQ ID NO: 472793 - RNA, 19 nt, Homo sapiens
  misc_RNA (1)...(19): siRNA sense strand
caacaacugcccagagaag

SEQ ID NO: 472794 - RNA, 19 nt, Homo sapiens
  misc_RNA (1)...(19): siRNA sense strand
caagggcaccguccacuuc

SEQ ID NO: 472795 - RNA, 19 nt, Homo sapiens
  misc_RNA (1)...(19): siRNA sense strand
gaccuucccugccaaacag

SEQ ID NO: 472796 - RNA, 19 nt, Homo sapiens
  misc_RNA (1)...(19): siRNA sense strand
gaggaaaggagagaaagga

SEQ ID NO: 472797 - RNA, 19 nt, Homo sapiens
  misc_RNA (1)...(19): siRNA sense strand
gggccuccuucaucaagaa

SEQ ID NO: 472798 - RNA, 19 nt, Homo sapiens
  misc_RNA (1)...(19): siRNA sense strand
ggacauguuccacgagaag

SEQ ID NO: 472799 - RNA, 19 nt, Homo sapiens
  misc_RNA (1)...(19): siRNA sense strand
cagcaggugcgcaacauga

SEQ ID NO: 472800 - RNA, 19 nt, Homo sapiens
  misc_RNA (1)...(19): siRNA sense strand
gcaagggcaccguccacuu

SEQ ID NO: 472801 - RNA, 19 nt, Homo sapiens
  misc_RNA (1)...(19): siRNA sense strand
gggcuaccguggacagaag

SEQ ID NO: 472802 - RNA, 19 nt, Homo sapiens
  misc_RNA (1)...(19): siRNA sense strand
ccucagcccucaaguuugc

SEQ ID NO: 472803 - RNA, 19 nt, Homo sapiens
  misc_RNA (1)...(19): siRNA sense strand
caacaugacggagcagauc

SEQ ID NO: 472804 - RNA, 19 nt, Homo sapiens
  misc_RNA (1)...(19): siRNA sense strand
acgagaagcacgagaguga

SEQ ID NO: 472805 - RNA, 19 nt, Homo sapiens
  misc_RNA (1)...(19): siRNA sense strand
caaggugagcugccuggaa

SEQ ID NO: 472806 - RNA, 19 nt, Homo sapiens
  misc_RNA (1)...(19): siRNA sense strand
agugugacgucaugaccua

SEQ ID NO: 472807 - RNA, 19 nt, Homo sapiens
  misc_RNA (1)...(19): siRNA sense strand
cgaggcgacuuuggcuuga

SEQ ID NO: 472808 - RNA, 19 nt, Homo sapiens
  misc_RNA (1)...(19): siRNA sense strand
ccuggucgcugagaaguuc

SEQ ID NO: 472809 - RNA, 19 nt, Homo sapiens
  misc_RNA (1)...(19): siRNA sense strand
aggagaaccugggaggaaa

SEQ ID NO: 472810 - RNA, 19 nt, Homo sapiens
  misc_RNA (1)...(19): siRNA sense strand
gggacauguuccacgagaa

SEQ ID NO: 472811 - RNA, 19 nt, Homo sapiens
  misc_RNA (1)...(19): siRNA sense strand
gaucgugugcccagaccuu

SEQ ID NO: 472812 - RNA, 19 nt, Homo sapiens
  misc_RNA (1)...(19): siRNA sense strand
gccggacacuaccgagaga

SEQ ID NO: 472813 - RNA, 19 nt, Homo sapiens
  misc_RNA (1)...(19): siRNA sense strand
gaggcgacuuuggcuugaa

SEQ ID NO: 472814 - RNA, 19 nt, Homo sapiens
  misc_RNA (1)...(19): siRNA sense strand
gugaaaaccucuacuccau

SEQ ID NO: 472815 - RNA, 19 nt, Homo sapiens
  misc_RNA (1)...(19): siRNA sense strand
caaaggagagaagggugaa

SEQ ID NO: 472816 - RNA, 19 nt, Homo sapiens
  misc_RNA (1)...(19): siRNA sense strand
acccucagcccucaaguuu

SEQ ID NO: 472817 - RNA, 19 nt, Homo sapiens
  misc_RNA (1)...(19): siRNA sense strand
gugugggcguggugcagua

SEQ ID NO: 472818 - RNA, 19 nt, Homo sapiens
  misc_RNA (1)...(19): siRNA sense strand
ccaaccagaaccugaagga

SEQ ID NO: 472819 - RNA, 19 nt, Homo sapiens
  misc_RNA (1)...(19): siRNA sense strand
cuacggagagugcuacaag

SEQ ID NO: 472820 - RNA, 19 nt, Homo sapiens
  misc_RNA (1)...(19): siRNA sense strand
caagaacgggaccgaugga

SEQ ID NO: 472821 - RNA, 19 nt, Homo sapiens
  misc_RNA (1)...(19): siRNA sense strand
gacacuaccgagagaaaca

SEQ ID NO: 472822 - RNA, 19 nt, Homo sapiens
  misc_RNA (1)...(19): siRNA sense strand
gccacgagggcaccuuuga

SEQ ID NO: 472823 - RNA, 19 nt, Homo sapiens
  misc_RNA (1)...(19): siRNA sense strand
ggaggaaaggagagaaagg

SEQ ID NO: 472824 - RNA, 19 nt, Homo sapiens
  misc_RNA (1)...(19): siRNA sense strand
aggcgacuuuggcuugaaa

SEQ ID NO: 472825 - RNA, 19 nt, Homo sapiens
  misc_RNA (1)...(19): siRNA sense strand
auccugcucuuccacauga

SEQ ID NO: 472826 - RNA, 19 nt, Homo sapiens
  misc_RNA (1)...(19): siRNA sense strand
gguaucaaggcaacaaugg

SEQ ID NO: 472827 - RNA, 19 nt, Homo sapiens
  misc_RNA (1)...(19): siRNA sense strand
cacggagugugacgucaug

SEQ ID NO: 472828 - RNA, 19 nt, Homo sapiens
  misc_RNA (1)...(19): siRNA sense strand
caagaaccucgaguggauu

SEQ ID NO: 472829 - RNA, 19 nt, Homo sapiens
  misc_RNA (1)...(19): siRNA sense strand
gaaguccuggugugaaagg

SEQ ID NO: 472830 - RNA, 19 nt, Homo sapiens
  misc_RNA (1)...(19): siRNA sense strand
gggacgaugaccucaacuu

SEQ ID NO: 472831 - RNA, 19 nt, Homo sapiens
  misc_RNA (1)...(19): siRNA sense strand
cuaccgagagaaacaacaa

SEQ ID NO: 472832 - RNA, 19 nt, Homo sapiens
  misc_RNA (1)...(19): siRNA sense strand
ccacagcaggugcgcaaca

SEQ ID NO: 472833 - RNA, 19 nt, Homo sapiens
  misc_RNA (1)...(19): siRNA sense strand
aggagagaagggugaauuu

SEQ ID NO: 472834 - RNA, 19 nt, Homo sapiens
  misc_RNA (1)...(19): siRNA sense strand
ucaagaaccucgaguggau

SEQ ID NO: 472835 - RNA, 19 nt, Homo sapiens
  misc_RNA (1)...(19): siRNA sense strand
ucaaggaggcugucaagaa

SEQ ID NO: 472836 - RNA, 19 nt, Homo sapiens
  misc_RNA (1)...(19): siRNA sense strand
caaggaggcugucaagaac

SEQ ID NO: 472837 - RNA, 19 nt, Homo sapiens
  misc_RNA (1)...(19): siRNA sense strand
aaggugagcugccuggaaa

SEQ ID NO: 472838 - RNA, 19 nt, Homo sapiens
  misc_RNA (1)...(19): siRNA sense strand
ggacgaugaccucaacuug

SEQ ID NO: 472839 - RNA, 19 nt, Homo sapiens
  misc_RNA (1)...(19): siRNA sense strand
gggcguuccuggcuucaaa

SEQ ID NO: 472840 - RNA, 19 nt, Homo sapiens
  misc_RNA (1)...(19): siRNA sense strand
gagaagcacgagagugaaa

SEQ ID NO: 472841 - RNA, 19 nt, Homo sapiens
  misc_RNA (1)...(19): siRNA sense strand
agagaagggugaauuugga

SEQ ID NO: 472842 - RNA, 19 nt, Homo sapiens
  misc_RNA (1)...(19): siRNA sense strand
ccacggacauccugcucuu

SEQ ID NO: 472843 - RNA, 19 nt, Homo sapiens
  misc_RNA (1)...(19): siRNA sense strand
ggagagaagggugaauuug

SEQ ID NO: 472844 - RNA, 19 nt, Homo sapiens
  misc_RNA (1)...(19): siRNA sense strand
aacaacaacugcccagaga

SEQ ID NO: 472845 - RNA, 19 nt, Homo sapiens
  misc_RNA (1)...(19): siRNA sense strand
gagagaagggugaauuugg

SEQ ID NO: 472846 - RNA, 19 nt, Homo sapiens
  misc_RNA (1)...(19): siRNA sense strand
caacaacugcccagagaag

SEQ ID NO: 472847 - RNA, 19 nt, Homo sapiens
  misc_RNA (1)...(19): siRNA sense strand
caagggcaccguccacuuc

SEQ ID NO: 472848 - RNA, 19 nt, Homo sapiens
  misc_RNA (1)...(19): siRNA sense strand
gaccuucccugccaaacag

SEQ ID NO: 472849 - RNA, 19 nt, Homo sapiens
  misc_RNA (1)...(19): siRNA sense strand
gaggaaaggagagaaagga

SEQ ID NO: 472850 - RNA, 19 nt, Homo sapiens
  misc_RNA (1)...(19): siRNA sense strand
gggccuccuucaucaagaa

SEQ ID NO: 472851 - RNA, 19 nt, Homo sapiens
  misc_RNA (1)...(19): siRNA sense strand
ggacauguuccacgagaag

SEQ ID NO: 472852 - RNA, 19 nt, Homo sapiens
  misc_RNA (1)...(19): siRNA sense strand
cagcaggugcgcaacauga

SEQ ID NO: 472853 - RNA, 19 nt, Homo sapiens
  misc_RNA (1)...(19): siRNA sense strand
gcaagggcaccguccacuu

SEQ ID NO: 472854 - RNA, 19 nt, Homo sapiens
  misc_RNA (1)...(19): siRNA sense strand
gggcuaccguggacagaag

SEQ ID NO: 472855 - RNA, 19 nt, Homo sapiens
  misc_RNA (1)...(19): siRNA sense strand
ccucagcccucaaguuugc

SEQ ID NO: 472856 - RNA, 19 nt, Homo sapiens
  misc_RNA (1)...(19): siRNA sense strand
caacaugacggagcagauc

SEQ ID NO: 472857 - RNA, 19 nt, Homo sapiens
  misc_RNA (1)...(19): siRNA sense strand
acgagaagcacgagaguga

SEQ ID NO: 472858 - RNA, 19 nt, Homo sapiens
  misc_RNA (1)...(19): siRNA sense strand
caaggugagcugccuggaa

SEQ ID NO: 472859 - RNA, 19 nt, Homo sapiens
  misc_RNA (1)...(19): siRNA sense strand
agugugacgucaugaccua

SEQ ID NO: 472860 - RNA, 19 nt, Homo sapiens
  misc_RNA (1)...(19): siRNA sense strand
cgaggcgacuuuggcuuga

SEQ ID NO: 472861 - RNA, 19 nt, Homo sapiens
  misc_RNA (1)...(19): siRNA sense strand
ccuggucgcugagaaguuc

SEQ ID NO: 472862 - RNA, 19 nt, Homo sapiens
  misc_RNA (1)...(19): siRNA sense strand
aggagaaccugggaggaaa

SEQ ID NO: 472863 - RNA, 19 nt, Homo sapiens
  misc_RNA (1)...(19): siRNA sense strand
gggacauguuccacgagaa

SEQ ID NO: 472864 - RNA, 19 nt, Homo sapiens
  misc_RNA (1)...(19): siRNA sense strand
gaucgugugcccagaccuu

SEQ ID NO: 472865 - RNA, 19 nt, Homo sapiens
  misc_RNA (1)...(19): siRNA sense strand
gccggacacuaccgagaga

SEQ ID NO: 472866 - RNA, 19 nt, Homo sapiens
  misc_RNA (1)...(19): siRNA sense strand
gaggcgacuuuggcuugaa

SEQ ID NO: 472867 - RNA, 19 nt, Homo sapiens
  misc_RNA (1)...(19): siRNA sense strand
gugaaaaccucuacuccau

SEQ ID NO: 472868 - RNA, 19 nt, Homo sapiens
  misc_RNA (1)...(19): siRNA sense strand
caaaggagagaagggugaa

SEQ ID NO: 472869 - RNA, 19 nt, Homo sapiens
  misc_RNA (1)...(19): siRNA sense strand
acccucagcccucaaguuu

SEQ ID NO: 472870 - RNA, 19 nt, Homo sapiens
  misc_RNA (1)...(19): siRNA sense strand
gugugggcguggugcagua

SEQ ID NO: 472871 - RNA, 19 nt, Homo sapiens
  misc_RNA (1)...(19): siRNA sense strand
ccaaccagaaccugaagga

SEQ ID NO: 472872 - RNA, 19 nt, Homo sapiens
  misc_RNA (1)...(19): siRNA sense strand
cuacggagagugcuacaag

SEQ ID NO: 472873 - RNA, 19 nt, Homo sapiens
  misc_RNA (1)...(19): siRNA sense strand
caagaacgggaccgaugga

SEQ ID NO: 472874 - RNA, 19 nt, Homo sapiens
  misc_RNA (1)...(19): siRNA sense strand
gacacuaccgagagaaaca

SEQ ID NO: 472875 - RNA, 19 nt, Homo sapiens
  misc_RNA (1)...(19): siRNA sense strand
gccacgagggcaccuuuga

SEQ ID NO: 472876 - RNA, 19 nt, Homo sapiens
  misc_RNA (1)...(19): siRNA sense strand
ggaggaaaggagagaaagg

SEQ ID NO: 472877 - RNA, 19 nt, Homo sapiens
  misc_RNA (1)...(19): siRNA sense strand
aggcgacuuuggcuugaaa

SEQ ID NO: 472878 - RNA, 19 nt, Homo sapiens
  misc_RNA (1)...(19): siRNA sense strand
auccugcucuuccacauga

SEQ ID NO: 472879 - RNA, 19 nt, Homo sapiens
  misc_RNA (1)...(19): siRNA sense strand
gguaucaaggcaacaaugg

SEQ ID NO: 472880 - RNA, 19 nt, Homo sapiens
  misc_RNA (1)...(19): siRNA sense strand
cacggagugugacgucaug

SEQ ID NO: 472881 - RNA, 19 nt, Homo sapiens
  misc_RNA (1)...(19): siRNA sense strand
caagaaccucgaguggauu

SEQ ID NO: 472882 - RNA, 19 nt, Homo sapiens
  misc_RNA (1)...(19): siRNA sense strand
gaaguccuggugugaaagg

SEQ ID NO: 472883 - RNA, 19 nt, Homo sapiens
  misc_RNA (1)...(19): siRNA sense strand
gggacgaugaccucaacuu

SEQ ID NO: 472884 - RNA, 19 nt, Homo sapiens
  misc_RNA (1)...(19): siRNA sense strand
cuaccgagagaaacaacaa

SEQ ID NO: 472885 - RNA, 19 nt, Homo sapiens
  misc_RNA (1)...(19): siRNA sense strand
ccacagcaggugcgcaaca

SEQ ID NO: 472886 - RNA, 19 nt, Homo sapiens
  misc_RNA (1)...(19): siRNA sense strand
aggagagaagggugaauuu

SEQ ID NO: 472887 - RNA, 19 nt, Homo sapiens
  misc_RNA (1)...(19): siRNA sense strand
ucaagaaccucgaguggau

SEQ ID NO: 472888 - RNA, 19 nt, Homo sapiens
  misc_RNA (1)...(19): siRNA sense strand
ucaaggaggcugucaagaa

SEQ ID NO: 472889 - RNA, 19 nt, Homo sapiens
  misc_RNA (1)...(19): siRNA sense strand
caaggaggcugucaagaac

SEQ ID NO: 472890 - RNA, 19 nt, Homo sapiens
  misc_RNA (1)...(19): siRNA sense strand
aaggugagcugccuggaaa

SEQ ID NO: 472891 - RNA, 19 nt, Homo sapiens
  misc_RNA (1)...(19): siRNA sense strand
ggacgaugaccucaacuug

SEQ ID NO: 472892 - RNA, 19 nt, Homo sapiens
  misc_RNA (1)...(19): siRNA sense strand
gggcguuccuggcuucaaa

SEQ ID NO: 472893 - RNA, 19 nt, Homo sapiens
  misc_RNA (1)...(19): siRNA sense strand
gagaagcacgagagugaaa

SEQ ID NO: 472894 - RNA, 19 nt, Homo sapiens
  misc_RNA (1)...(19): siRNA sense strand
agagaagggugaauuugga

SEQ ID NO: 472895 - RNA, 19 nt, Homo sapiens
  misc_RNA (1)...(19): siRNA sense strand
ccacggacauccugcucuu

SEQ ID NO: 472896 - RNA, 19 nt, Homo sapiens
  misc_RNA (1)...(19): siRNA sense strand
ggagagaagggugaauuug

SEQ ID NO: 472897 - RNA, 19 nt, Homo sapiens
  misc_RNA (1)...(19): siRNA sense strand
aacaacaacugcccagaga

SEQ ID NO: 472898 - RNA, 19 nt, Homo sapiens
  misc_RNA (1)...(19): siRNA sense strand
gagagaagggugaauuugg

SEQ ID NO: 472899 - RNA, 19 nt, Homo sapiens
  misc_RNA (1)...(19): siRNA sense strand
caacaacugcccagagaag

SEQ ID NO: 472900 - RNA, 19 nt, Homo sapiens
  misc_RNA (1)...(19): siRNA sense strand
caagggcaccguccacuuc

SEQ ID NO: 472901 - RNA, 19 nt, Homo sapiens
  misc_RNA (1)...(19): siRNA sense strand
gaccuucccugccaaacag

SEQ ID NO: 472902 - RNA, 19 nt, Homo sapiens
  misc_RNA (1)...(19): siRNA sense strand
gaggaaaggagagaaagga

SEQ ID NO: 472903 - RNA, 19 nt, Homo sapiens
  misc_RNA (1)...(19): siRNA sense strand
gggccuccuucaucaagaa

SEQ ID NO: 472904 - RNA, 19 nt, Homo sapiens
  misc_RNA (1)...(19): siRNA sense strand
ggacauguuccacgagaag

SEQ ID NO: 472905 - RNA, 19 nt, Homo sapiens
  misc_RNA (1)...(19): siRNA sense strand
cagcaggugcgcaacauga

SEQ ID NO: 472906 - RNA, 19 nt, Homo sapiens
  misc_RNA (1)...(19): siRNA sense strand
gcaagggcaccguccacuu

SEQ ID NO: 472907 - RNA, 19 nt, Homo sapiens
  misc_RNA (1)...(19): siRNA sense strand
gggcuaccguggacagaag

SEQ ID NO: 472908 - RNA, 19 nt, Homo sapiens
  misc_RNA (1)...(19): siRNA sense strand
ccucagcccucaaguuugc

SEQ ID NO: 472909 - RNA, 19 nt, Homo sapiens
  misc_RNA (1)...(19): siRNA sense strand
caacaugacggagcagauc

SEQ ID NO: 472910 - RNA, 19 nt, Homo sapiens
  misc_RNA (1)...(19): siRNA sense strand
acgagaagcacgagaguga

SEQ ID NO: 472911 - RNA, 19 nt, Homo sapiens
  misc_RNA (1)...(19): siRNA sense strand
caaggugagcugccuggaa

SEQ ID NO: 472912 - RNA, 19 nt, Homo sapiens
  misc_RNA (1)...(19): siRNA sense strand
agugugacgucaugaccua

SEQ ID NO: 472913 - RNA, 19 nt, Homo sapiens
  misc_RNA (1)...(19): siRNA sense strand
cgaggcgacuuuggcuuga

SEQ ID NO: 472914 - RNA, 19 nt, Homo sapiens
  misc_RNA (1)...(19): siRNA sense strand
ccuggucgcugagaaguuc

SEQ ID NO: 472915 - RNA, 19 nt, Homo sapiens
  misc_RNA (1)...(19): siRNA sense strand
aggagaaccugggaggaaa

SEQ ID NO: 472916 - RNA, 19 nt, Homo sapiens
  misc_RNA (1)...(19): siRNA sense strand
gggacauguuccacgagaa

SEQ ID NO: 472917 - RNA, 19 nt, Homo sapiens
  misc_RNA (1)...(19): siRNA sense strand
gaucgugugcccagaccuu

SEQ ID NO: 472918 - RNA, 19 nt, Homo sapiens
  misc_RNA (1)...(19): siRNA sense strand
gccggacacuaccgagaga

SEQ ID NO: 472919 - RNA, 19 nt, Homo sapiens
  misc_RNA (1)...(19): siRNA sense strand
gaggcgacuuuggcuugaa

SEQ ID NO: 472920 - RNA, 19 nt, Homo sapiens
  misc_RNA (1)...(19): siRNA sense strand
gugaaaaccucuacuccau

SEQ ID NO: 472921 - RNA, 19 nt, Homo sapiens
  misc_RNA (1)...(19): siRNA sense strand
caaaggagagaagggugaa

SEQ ID NO: 472922 - RNA, 19 nt, Homo sapiens
  misc_RNA (1)...(19): siRNA sense strand
acccucagcccucaaguuu

SEQ ID NO: 472923 - RNA, 19 nt, Homo sapiens
  misc_RNA (1)...(19): siRNA sense strand
gugugggcguggugcagua

SEQ ID NO: 472924 - RNA, 19 nt, Homo sapiens
  misc_RNA (1)...(19): siRNA sense strand
ccaaccagaaccugaagga

SEQ ID NO: 472925 - RNA, 19 nt, Homo sapiens
  misc_RNA (1)...(19): siRNA sense strand
cuacggagagugcuacaag

SEQ ID NO: 472926 - RNA, 19 nt, Homo sapiens
  misc_RNA (1)...(19): siRNA sense strand
caagaacgggaccgaugga

SEQ ID NO: 472927 - RNA, 19 nt, Homo sapiens
  misc_RNA (1)...(19): siRNA sense strand
gacacuaccgagagaaaca

SEQ ID NO: 472928 - RNA, 19 nt, Homo sapiens
  misc_RNA (1)...(19): siRNA sense strand
gccacgagggcaccuuuga

SEQ ID NO: 472929 - RNA, 19 nt, Homo sapiens
  misc_RNA (1)...(19): siRNA sense strand
ggaggaaaggagagaaagg

SEQ ID NO: 472930 - RNA, 19 nt, Homo sapiens
  misc_RNA (1)...(19): siRNA sense strand
aggcgacuuuggcuugaaa

SEQ ID NO: 472931 - RNA, 19 nt, Homo sapiens
  misc_RNA (1)...(19): siRNA sense strand
auccugcucuuccacauga

SEQ ID NO: 472932 - RNA, 19 nt, Homo sapiens
  misc_RNA (1)...(19): siRNA sense strand
gguaucaaggcaacaaugg

SEQ ID NO: 472933 - RNA, 19 nt, Homo sapiens
  misc_RNA (1)...(19): siRNA sense strand
cacggagugugacgucaug

SEQ ID NO: 472934 - RNA, 19 nt, Homo sapiens
  misc_RNA (1)...(19): siRNA sense strand
caagaaccucgaguggauu

SEQ ID NO: 472935 - RNA, 19 nt, Homo sapiens
  misc_RNA (1)...(19): siRNA sense strand
gaaguccuggugugaaagg

SEQ ID NO: 472936 - RNA, 19 nt, Homo sapiens
  misc_RNA (1)...(19): siRNA sense strand
gggacgaugaccucaacuu

SEQ ID NO: 472937 - RNA, 19 nt, Homo sapiens
  misc_RNA (1)...(19): siRNA sense strand
cuaccgagagaaacaacaa

SEQ ID NO: 472938 - RNA, 19 nt, Homo sapiens
  misc_RNA (1)...(19): siRNA sense strand
ccacagcaggugcgcaaca

SEQ ID NO: 472939 - RNA, 19 nt, Homo sapiens
  misc_RNA (1)...(19): siRNA sense strand
aggagagaagggugaauuu

SEQ ID NO: 472940 - RNA, 19 nt, Homo sapiens
  misc_RNA (1)...(19): siRNA sense strand
ucaagaaccucgaguggau

SEQ ID NO: 472941 - RNA, 19 nt, Homo sapiens
  misc_RNA (1)...(19): siRNA sense strand
ucaaggaggcugucaagaa

SEQ ID NO: 472942 - RNA, 19 nt, Homo sapiens
  misc_RNA (1)...(19): siRNA sense strand
caaggaggcugucaagaac

SEQ ID NO: 472943 - RNA, 19 nt, Homo sapiens
  misc_RNA (1)...(19): siRNA sense strand
aaggugagcugccuggaaa

SEQ ID NO: 472944 - RNA, 19 nt, Homo sapiens
  misc_RNA (1)...(19): siRNA sense strand
ggacgaugaccucaacuug

SEQ ID NO: 472945 - RNA, 19 nt, Homo sapiens
  misc_RNA (1)...(19): siRNA sense strand
gggcguuccuggcuucaaa

SEQ ID NO: 472946 - RNA, 19 nt, Homo sapiens
  misc_RNA (1)...(19): siRNA sense strand
gagaagcacgagagugaaa

SEQ ID NO: 472947 - RNA, 19 nt, Homo sapiens
  misc_RNA (1)...(19): siRNA sense strand
agagaagggugaauuugga

SEQ ID NO: 472948 - RNA, 19 nt, Homo sapiens
  misc_RNA (1)...(19): siRNA sense strand
ccacggacauccugcucuu

SEQ ID NO: 472949 - RNA, 19 nt, Homo sapiens
  misc_RNA (1)...(19): siRNA sense strand
ggagagaagggugaauuug

SEQ ID NO: 472950 - RNA, 19 nt, Homo sapiens
  misc_RNA (1)...(19): siRNA sense strand
aacaacaacugcccagaga

SEQ ID NO: 472951 - RNA, 19 nt, Homo sapiens
  misc_RNA (1)...(19): siRNA sense strand
gagagaagggugaauuugg

SEQ ID NO: 472952 - RNA, 19 nt, Homo sapiens
  misc_RNA (1)...(19): siRNA sense strand
caacaacugcccagagaag

SEQ ID NO: 472953 - RNA, 19 nt, Homo sapiens
  misc_RNA (1)...(19): siRNA sense strand
caagggcaccguccacuuc

SEQ ID NO: 472954 - RNA, 19 nt, Homo sapiens
  misc_RNA (1)...(19): siRNA sense strand
gaccuucccugccaaacag

SEQ ID NO: 472955 - RNA, 19 nt, Homo sapiens
  misc_RNA (1)...(19): siRNA sense strand
gaggaaaggagagaaagga

SEQ ID NO: 472956 - RNA, 19 nt, Homo sapiens
  misc_RNA (1)...(19): siRNA sense strand
gggccuccuucaucaagaa

SEQ ID NO: 472957 - RNA, 19 nt, Homo sapiens
  misc_RNA (1)...(19): siRNA sense strand
ggacauguuccacgagaag

SEQ ID NO: 472958 - RNA, 19 nt, Homo sapiens
  misc_RNA (1)...(19): siRNA sense strand
cagcaggugcgcaacauga

SEQ ID NO: 472959 - RNA, 19 nt, Homo sapiens
  misc_RNA (1)...(19): siRNA sense strand
gcaagggcaccguccacuu

SEQ ID NO: 472960 - RNA, 19 nt, Homo sapiens
  misc_RNA (1)...(19): siRNA sense strand
gggcuaccguggacagaag

SEQ ID NO: 472961 - RNA, 19 nt, Homo sapiens
  misc_RNA (1)...(19): siRNA sense strand
ccucagcccucaaguuugc

SEQ ID NO: 472962 - RNA, 19 nt, Homo sapiens
  misc_RNA (1)...(19): siRNA sense strand
caacaugacggagcagauc

SEQ ID NO: 472963 - RNA, 19 nt, Homo sapiens
  misc_RNA (1)...(19): siRNA sense strand
acgagaagcacgagaguga

SEQ ID NO: 472964 - RNA, 19 nt, Homo sapiens
  misc_RNA (1)...(19): siRNA sense strand
caaggugagcugccuggaa

SEQ ID NO: 472965 - RNA, 19 nt, Homo sapiens
  misc_RNA (1)...(19): siRNA sense strand
agugugacgucaugaccua

SEQ ID NO: 472966 - RNA, 19 nt, Homo sapiens
  misc_RNA (1)...(19): siRNA sense strand
cgaggcgacuuuggcuuga

SEQ ID NO: 472967 - RNA, 19 nt, Homo sapiens
  misc_RNA (1)...(19): siRNA sense strand
ccuggucgcugagaaguuc

SEQ ID NO: 472968 - RNA, 19 nt, Homo sapiens
  misc_RNA (1)...(19): siRNA sense strand
aggagaaccugggaggaaa

SEQ ID NO: 472969 - RNA, 19 nt, Homo sapiens
  misc_RNA (1)...(19): siRNA sense strand
gggacauguuccacgagaa

SEQ ID NO: 472970 - RNA, 19 nt, Homo sapiens
  misc_RNA (1)...(19): siRNA sense strand
gaucgugugcccagaccuu

SEQ ID NO: 472971 - RNA, 19 nt, Homo sapiens
  misc_RNA (1)...(19): siRNA sense strand
gccggacacuaccgagaga

SEQ ID NO: 472972 - RNA, 19 nt, Homo sapiens
  misc_RNA (1)...(19): siRNA sense strand
gaggcgacuuuggcuugaa

SEQ ID NO: 472973 - RNA, 19 nt, Homo sapiens
  misc_RNA (1)...(19): siRNA sense strand
gugaaaaccucuacuccau

SEQ ID NO: 472974 - RNA, 19 nt, Homo sapiens
  misc_RNA (1)...(19): siRNA sense strand
caaaggagagaagggugaa

SEQ ID NO: 472975 - RNA, 19 nt, Homo sapiens
  misc_RNA (1)...(19): siRNA sense strand
acccucagcccucaaguuu

SEQ ID NO: 472976 - RNA, 19 nt, Homo sapiens
  misc_RNA (1)...(19): siRNA sense strand
gugugggcguggugcagua

SEQ ID NO: 472977 - RNA, 19 nt, Homo sapiens
  misc_RNA (1)...(19): siRNA sense strand
ccaaccagaaccugaagga

SEQ ID NO: 472978 - RNA, 19 nt, Homo sapiens
  misc_RNA (1)...(19): siRNA sense strand
cuacggagagugcuacaag

SEQ ID NO: 472979 - RNA, 19 nt, Homo sapiens
  misc_RNA (1)...(19): siRNA sense strand
caagaacgggaccgaugga

SEQ ID NO: 472980 - RNA, 19 nt, Homo sapiens
  misc_RNA (1)...(19): siRNA sense strand
gacacuaccgagagaaaca

SEQ ID NO: 472981 - RNA, 19 nt, Homo sapiens
  misc_RNA (1)...(19): siRNA sense strand
gccacgagggcaccuuuga

SEQ ID NO: 472982 - RNA, 19 nt, Homo sapiens
  misc_RNA (1)...(19): siRNA sense strand
ggaggaaaggagagaaagg

SEQ ID NO: 472983 - RNA, 19 nt, Homo sapiens
  misc_RNA (1)...(19): siRNA sense strand
aggcgacuuuggcuugaaa

SEQ ID NO: 472984 - RNA, 19 nt, Homo sapiens
  misc_RNA (1)...(19): siRNA sense strand
auccugcucuuccacauga

SEQ ID NO: 472985 - RNA, 19 nt, Homo sapiens
  misc_RNA (1)...(19): siRNA sense strand
gguaucaaggcaacaaugg

SEQ ID NO: 472986 - RNA, 19 nt, Homo sapiens
  misc_RNA (1)...(19): siRNA sense strand
cacggagugugacgucaug

SEQ ID NO: 472987 - RNA, 19 nt, Homo sapiens
  misc_RNA (1)...(19): siRNA sense strand
caagaaccucgaguggauu

SEQ ID NO: 472988 - RNA, 19 nt, Homo sapiens
  misc_RNA (1)...(19): siRNA sense strand
gaaguccuggugugaaagg

SEQ ID NO: 472989 - RNA, 19 nt, Homo sapiens
  misc_RNA (1)...(19): siRNA sense strand
gggacgaugaccucaacuu

SEQ ID NO: 472990 - RNA, 19 nt, Homo sapiens
  misc_RNA (1)...(19): siRNA sense strand
cuaccgagagaaacaacaa

SEQ ID NO: 472991 - RNA, 19 nt, Homo sapiens
  misc_RNA (1)...(19): siRNA sense strand
ccacagcaggugcgcaaca

SEQ ID NO: 472992 - RNA, 19 nt, Homo sapiens
  misc_RNA (1)...(19): siRNA sense strand
aggagagaagggugaauuu

SEQ ID NO: 472993 - RNA, 19 nt, Homo sapiens
  misc_RNA (1)...(19): siRNA sense strand
gaaagacacuccaacuaau

SEQ ID NO: 472994 - RNA, 19 nt, Homo sapiens
  misc_RNA (1)...(19): siRNA sense strand
cagcaggaauuacuucuua

SEQ ID NO: 472995 - RNA, 19 nt, Homo sapiens
  misc_RNA (1)...(19): siRNA sense strand
gaacaaaugcgacagcaaa

SEQ ID NO: 472996 - RNA, 19 nt, Homo sapiens
  misc_RNA (1)...(19): siRNA sense strand
gcaaaugguuucacagcaa

SEQ ID NO: 472997 - RNA, 19 nt, Homo sapiens
  misc_RNA (1)...(19): siRNA sense strand
guacagaaguaaagcagaa

SEQ ID NO: 472998 - RNA, 19 nt, Homo sapiens
  misc_RNA (1)...(19): siRNA sense strand
ggacagaccucaggaugau

SEQ ID NO: 472999 - RNA, 19 nt, Homo sapiens
  misc_RNA (1)...(19): siRNA sense strand
gaacaucuccauccuacaa

SEQ ID NO: 473000 - RNA, 19 nt, Homo sapiens
  misc_RNA (1)...(19): siRNA sense strand
cgaaagacacuccaacuaa

SEQ ID NO: 473001 - RNA, 19 nt, Homo sapiens
  misc_RNA (1)...(19): siRNA sense strand
gaacaaacugcuuucgaaa

SEQ ID NO: 473002 - RNA, 19 nt, Homo sapiens
  misc_RNA (1)...(19): siRNA sense strand
ugaacaaacugcuuucgaa

SEQ ID NO: 473003 - RNA, 19 nt, Homo sapiens
  misc_RNA (1)...(19): siRNA sense strand
caacaagaacuccuagaaa

SEQ ID NO: 473004 - RNA, 19 nt, Homo sapiens
  misc_RNA (1)...(19): siRNA sense strand
gaaacagcaugagaacuug

SEQ ID NO: 473005 - RNA, 19 nt, Homo sapiens
  misc_RNA (1)...(19): siRNA sense strand
caucucaccuuuagaccua

SEQ ID NO: 473006 - RNA, 19 nt, Homo sapiens
  misc_RNA (1)...(19): siRNA sense strand
gcaacaagaacuccuagaa

SEQ ID NO: 473007 - RNA, 19 nt, Homo sapiens
  misc_RNA (1)...(19): siRNA sense strand
gcagaagcuucaagaguuc

SEQ ID NO: 473008 - RNA, 19 nt, Homo sapiens
  misc_RNA (1)...(19): siRNA sense strand
gcggaaggauggaaauguu

SEQ ID NO: 473009 - RNA, 19 nt, Homo sapiens
  misc_RNA (1)...(19): siRNA sense strand
aaagauagaggacgagaaa

SEQ ID NO: 473010 - RNA, 19 nt, Homo sapiens
  misc_RNA (1)...(19): siRNA sense strand
gcucaaugcuucgaauuca

SEQ ID NO: 473011 - RNA, 19 nt, Homo sapiens
  misc_RNA (1)...(19): siRNA sense strand
gaaggugcgguccagguua

SEQ ID NO: 473012 - RNA, 19 nt, Homo sapiens
  misc_RNA (1)...(19): siRNA sense strand
ucacagcaacgcauucuaa

SEQ ID NO: 473013 - RNA, 19 nt, Homo sapiens
  misc_RNA (1)...(19): siRNA sense strand
cauuagagguacccacaaa

SEQ ID NO: 473014 - RNA, 19 nt, Homo sapiens
  misc_RNA (1)...(19): siRNA sense strand
cagcaacgcauucuaauuc

SEQ ID NO: 473015 - RNA, 19 nt, Homo sapiens
  misc_RNA (1)...(19): siRNA sense strand
gagcccaucucaccuuuag

SEQ ID NO: 473016 - RNA, 19 nt, Homo sapiens
  misc_RNA (1)...(19): siRNA sense strand
gaacccagucugcaccuuu

SEQ ID NO: 473017 - RNA, 19 nt, Homo sapiens
  misc_RNA (1)...(19): siRNA sense strand
cgaaaucuauugaacaacu

SEQ ID NO: 473018 - RNA, 19 nt, Homo sapiens
  misc_RNA (1)...(19): siRNA sense strand
aaacugcuuucgaaaucua

SEQ ID NO: 473019 - RNA, 19 nt, Homo sapiens
  misc_RNA (1)...(19): siRNA sense strand
acaaacugcuuucgaaauc

SEQ ID NO: 473020 - RNA, 19 nt, Homo sapiens
  misc_RNA (1)...(19): siRNA sense strand
cgaauucacucaaagaaaa

SEQ ID NO: 473021 - RNA, 19 nt, Homo sapiens
  misc_RNA (1)...(19): siRNA sense strand
uggagaagcagaagcaaua

SEQ ID NO: 473022 - RNA, 19 nt, Homo sapiens
  misc_RNA (1)...(19): siRNA sense strand
gaaagggcaguggcaagua

SEQ ID NO: 473023 - RNA, 19 nt, Homo sapiens
  misc_RNA (1)...(19): siRNA sense strand
gaugugaagucagaaguuc

SEQ ID NO: 473024 - RNA, 19 nt, Homo sapiens
  misc_RNA (1)...(19): siRNA sense strand
guaaaucagcaacgaaaga

SEQ ID NO: 473025 - RNA, 19 nt, Homo sapiens
  misc_RNA (1)...(19): siRNA sense strand
gaguaaaucagcaacgaaa

SEQ ID NO: 473026 - RNA, 19 nt, Homo sapiens
  misc_RNA (1)...(19): siRNA sense strand
gaaaucuauugaacaacug

SEQ ID NO: 473027 - RNA, 19 nt, Homo sapiens
  misc_RNA (1)...(19): siRNA sense strand
ggacagugaugaagaugcu

SEQ ID NO: 473028 - RNA, 19 nt, Homo sapiens
  misc_RNA (1)...(19): siRNA sense strand
agaaacagcaugagaacuu

SEQ ID NO: 473029 - RNA, 19 nt, Homo sapiens
  misc_RNA (1)...(19): siRNA sense strand
caacuggaaguguuacuga

SEQ ID NO: 473030 - RNA, 19 nt, Homo sapiens
  misc_RNA (1)...(19): siRNA sense strand
agcagaagcuucaagaguu

SEQ ID NO: 473031 - RNA, 19 nt, Homo sapiens
  misc_RNA (1)...(19): siRNA sense strand
gcagcuuccuccucucaga

SEQ ID NO: 473032 - RNA, 19 nt, Homo sapiens
  misc_RNA (1)...(19): siRNA sense strand
ccaugaaccugcuaagucu

SEQ ID NO: 473033 - RNA, 19 nt, Homo sapiens
  misc_RNA (1)...(19): siRNA sense strand
ggauggaaauguugucacu

SEQ ID NO: 473034 - RNA, 19 nt, Homo sapiens
  misc_RNA (1)...(19): siRNA sense strand
cuucaagaguuccuacuga

SEQ ID NO: 473035 - RNA, 19 nt, Homo sapiens
  misc_RNA (1)...(19): siRNA sense strand
ugaugaagaugcucagauc

SEQ ID NO: 473036 - RNA, 19 nt, Homo sapiens
  misc_RNA (1)...(19): siRNA sense strand
uggcucagcuggucauuca

SEQ ID NO: 473037 - RNA, 19 nt, Homo sapiens
  misc_RNA (1)...(19): siRNA sense strand
ccucugagcccaacuugaa

SEQ ID NO: 473038 - RNA, 19 nt, Homo sapiens
  misc_RNA (1)...(19): siRNA sense strand
gcaagaacaggaaguagag

SEQ ID NO: 473039 - RNA, 19 nt, Homo sapiens
  misc_RNA (1)...(19): siRNA sense strand
ccacccucauguuacuuua

SEQ ID NO: 473040 - RNA, 19 nt, Homo sapiens
  misc_RNA (1)...(19): siRNA sense strand
gacagaauccucagucagu

SEQ ID NO: 473041 - RNA, 19 nt, Homo sapiens
  misc_RNA (1)...(19): siRNA sense strand
gagaauuucaccuggcauu

SEQ ID NO: 473042 - RNA, 19 nt, Homo sapiens
  misc_RNA (1)...(19): siRNA sense strand
ucuuguagcugguggaguu

SEQ ID NO: 473043 - RNA, 19 nt, Homo sapiens
  misc_RNA (1)...(19): siRNA sense strand
gagcacaagaugcaaagga

SEQ ID NO: 473044 - RNA, 19 nt, Homo sapiens
  misc_RNA (1)...(19): siRNA sense strand
cugcagcauuuauuauuga

SEQ ID NO: 473045 - RNA, 19 nt, Homo sapiens
  misc_RNA (1)...(19): siRNA sense strand
caacgcauucuaauucaug

SEQ ID NO: 473046 - RNA, 19 nt, Homo sapiens
  misc_RNA (1)...(19): siRNA sense strand
gaaaaugagacuucgguuu

SEQ ID NO: 473047 - RNA, 19 nt, Homo sapiens
  misc_RNA (1)...(19): siRNA sense strand
acagaauccucagucagua

SEQ ID NO: 473048 - RNA, 19 nt, Homo sapiens
  misc_RNA (1)...(19): siRNA sense strand
gcagaggcaagaacaggaa

SEQ ID NO: 473049 - RNA, 19 nt, Homo sapiens
  misc_RNA (1)...(19): siRNA sense strand
gcaacaccagcaauucuug

SEQ ID NO: 473050 - RNA, 19 nt, Homo sapiens
  misc_RNA (1)...(19): siRNA sense strand
gcauucuaauucaugaaga

SEQ ID NO: 473051 - RNA, 19 nt, Homo sapiens
  misc_RNA (1)...(19): siRNA sense strand
agagaggcaucgcagagaa

SEQ ID NO: 473052 - RNA, 19 nt, Homo sapiens
  misc_RNA (1)...(19): siRNA sense strand
gcaacgcauucuaauucau

SEQ ID NO: 473053 - RNA, 19 nt, Homo sapiens
  misc_RNA (1)...(19): siRNA sense strand
caguggaugugaagucaga

SEQ ID NO: 473054 - RNA, 19 nt, Homo sapiens
  misc_RNA (1)...(19): siRNA sense strand
ccugcagcauuuauuauug

SEQ ID NO: 473055 - RNA, 19 nt, Homo sapiens
  misc_RNA (1)...(19): siRNA sense strand
aacaagaacuccuagaaaa

SEQ ID NO: 473056 - RNA, 19 nt, Homo sapiens
  misc_RNA (1)...(19): siRNA sense strand
gcagauccacaugaacaaa

SEQ ID NO: 473057 - RNA, 19 nt, Homo sapiens
  misc_RNA (1)...(19): siRNA sense strand
cagcagauccacaugaaca

SEQ ID NO: 473058 - RNA, 19 nt, Homo sapiens
  misc_RNA (1)...(19): siRNA sense strand
gaauuucaccuggcauuag

SEQ ID NO: 473059 - RNA, 19 nt, Homo sapiens
  misc_RNA (1)...(19): siRNA sense strand
gggccaacuggaaguguua

SEQ ID NO: 473060 - RNA, 19 nt, Homo sapiens
  misc_RNA (1)...(19): siRNA sense strand
ggucccaguucaccaaaca

SEQ ID NO: 473061 - RNA, 19 nt, Homo sapiens
  misc_RNA (1)...(19): siRNA sense strand
aaggugcgguccagguuaa

SEQ ID NO: 473062 - RNA, 19 nt, Homo sapiens
  misc_RNA (1)...(19): siRNA sense strand
acacaucauuggaucaaag

SEQ ID NO: 473063 - RNA, 19 nt, Homo sapiens
  misc_RNA (1)...(19): siRNA sense strand
ggcaagaacaggaaguaga

SEQ ID NO: 473064 - RNA, 19 nt, Homo sapiens
  misc_RNA (1)...(19): siRNA sense strand
gaggcaagaacaggaagua

SEQ ID NO: 473065 - RNA, 19 nt, Homo sapiens
  misc_RNA (1)...(19): siRNA sense strand
uuagagguacccacaaauu

SEQ ID NO: 473066 - RNA, 19 nt, Homo sapiens
  misc_RNA (1)...(19): siRNA sense strand
ggaaggauggaaauguugu

SEQ ID NO: 473067 - RNA, 19 nt, Homo sapiens
  misc_RNA (1)...(19): siRNA sense strand
cacaagaugcaaaggauga

SEQ ID NO: 473068 - RNA, 19 nt, Homo sapiens
  misc_RNA (1)...(19): siRNA sense strand
cuuuauaccucuccuucuu

SEQ ID NO: 473069 - RNA, 19 nt, Homo sapiens
  misc_RNA (1)...(19): siRNA sense strand
ugaaccugcuaagucuuua

SEQ ID NO: 473070 - RNA, 19 nt, Homo sapiens
  misc_RNA (1)...(19): siRNA sense strand
ggaugugaagucagaaguu

SEQ ID NO: 473071 - RNA, 19 nt, Homo sapiens
  misc_RNA (1)...(19): siRNA sense strand
uagagguacccacaaauug

SEQ ID NO: 473072 - RNA, 19 nt, Homo sapiens
  misc_RNA (1)...(19): siRNA sense strand
uuauaccucuccuucuuug

SEQ ID NO: 473073 - RNA, 19 nt, Homo sapiens
  misc_RNA (1)...(19): siRNA sense strand
aaagacacuccaacuaaug

SEQ ID NO: 473074 - RNA, 19 nt, Homo sapiens
  misc_RNA (1)...(19): siRNA sense strand
gcaccaggcucagcuucag

SEQ ID NO: 473075 - RNA, 19 nt, Homo sapiens
  misc_RNA (1)...(19): siRNA sense strand
gcaggaauuacuucuuauc

SEQ ID NO: 473076 - RNA, 19 nt, Homo sapiens
  misc_RNA (1)...(19): siRNA sense strand
gaaguguuacugaaaauga

SEQ ID NO: 473077 - RNA, 19 nt, Homo sapiens
  misc_RNA (1)...(19): siRNA sense strand
gcucagauccaggaaaugg

SEQ ID NO: 473078 - RNA, 19 nt, Homo sapiens
  misc_RNA (1)...(19): siRNA sense strand
caacagcaacaccagcaau

SEQ ID NO: 473079 - RNA, 19 nt, Homo sapiens
  misc_RNA (1)...(19): siRNA sense strand
ucucagaggcaaagauaga

SEQ ID NO: 473080 - RNA, 19 nt, Homo sapiens
  misc_RNA (1)...(19): siRNA sense strand
gcagugcuuguguggauga

SEQ ID NO: 473081 - RNA, 19 nt, Homo sapiens
  misc_RNA (1)...(19): siRNA sense strand
cacaugaacaaacugcuuu

SEQ ID NO: 473082 - RNA, 19 nt, Homo sapiens
  misc_RNA (1)...(19): siRNA sense strand
aauuucaccuggcauuaga

SEQ ID NO: 473083 - RNA, 19 nt, Homo sapiens
  misc_RNA (1)...(19): siRNA sense strand
gcaacaaaagagagaauuu

SEQ ID NO: 473084 - RNA, 19 nt, Homo sapiens
  misc_RNA (1)...(19): siRNA sense strand
guugucacuucauucaaga

SEQ ID NO: 473085 - RNA, 19 nt, Homo sapiens
  misc_RNA (1)...(19): siRNA sense strand
aaacagaaaguggcagaga

SEQ ID NO: 473086 - RNA, 19 nt, Homo sapiens
  misc_RNA (1)...(19): siRNA sense strand
ggaaauguugucacuucau

SEQ ID NO: 473087 - RNA, 19 nt, Homo sapiens
  misc_RNA (1)...(19): siRNA sense strand
caaacugcuuucgaaaucu

SEQ ID NO: 473088 - RNA, 19 nt, Homo sapiens
  misc_RNA (1)...(19): siRNA sense strand
ccacaugaacaaacugcuu

SEQ ID NO: 473089 - RNA, 19 nt, Homo sapiens
  misc_RNA (1)...(19): siRNA sense strand
cagcagcagauccacauga

SEQ ID NO: 473090 - RNA, 19 nt, Homo sapiens
  misc_RNA (1)...(19): siRNA sense strand
gaaccugcuaagucuuuau

SEQ ID NO: 473091 - RNA, 19 nt, Homo sapiens
  misc_RNA (1)...(19): siRNA sense strand
ucuccugcagcauuuauua

SEQ ID NO: 473092 - RNA, 19 nt, Homo sapiens
  misc_RNA (1)...(19): siRNA sense strand
gagggaaagccacccaaca

SEQ ID NO: 473093 - RNA, 19 nt, Homo sapiens
  misc_RNA (1)...(19): siRNA sense strand
gaaagacacuccaacuaau

SEQ ID NO: 473094 - RNA, 19 nt, Homo sapiens
  misc_RNA (1)...(19): siRNA sense strand
cagcaggaauuacuucuua

SEQ ID NO: 473095 - RNA, 19 nt, Homo sapiens
  misc_RNA (1)...(19): siRNA sense strand
gaacaaaugcgacagcaaa

SEQ ID NO: 473096 - RNA, 19 nt, Homo sapiens
  misc_RNA (1)...(19): siRNA sense strand
gcaaaugguuucacagcaa

SEQ ID NO: 473097 - RNA, 19 nt, Homo sapiens
  misc_RNA (1)...(19): siRNA sense strand
guacagaaguaaagcagaa

SEQ ID NO: 473098 - RNA, 19 nt, Homo sapiens
  misc_RNA (1)...(19): siRNA sense strand
ggacagaccucaggaugau

SEQ ID NO: 473099 - RNA, 19 nt, Homo sapiens
  misc_RNA (1)...(19): siRNA sense strand
gaacaucuccauccuacaa

SEQ ID NO: 473100 - RNA, 19 nt, Homo sapiens
  misc_RNA (1)...(19): siRNA sense strand
cgaaagacacuccaacuaa

SEQ ID NO: 473101 - RNA, 19 nt, Homo sapiens
  misc_RNA (1)...(19): siRNA sense strand
gaacaaacugcuuucgaaa

SEQ ID NO: 473102 - RNA, 19 nt, Homo sapiens
  misc_RNA (1)...(19): siRNA sense strand
ugaacaaacugcuuucgaa

SEQ ID NO: 473103 - RNA, 19 nt, Homo sapiens
  misc_RNA (1)...(19): siRNA sense strand
caacaagaacuccuagaaa

SEQ ID NO: 473104 - RNA, 19 nt, Homo sapiens
  misc_RNA (1)...(19): siRNA sense strand
gaaacagcaugagaacuug

SEQ ID NO: 473105 - RNA, 19 nt, Homo sapiens
  misc_RNA (1)...(19): siRNA sense strand
caucucaccuuuagaccua

SEQ ID NO: 473106 - RNA, 19 nt, Homo sapiens
  misc_RNA (1)...(19): siRNA sense strand
gcaacaagaacuccuagaa

SEQ ID NO: 473107 - RNA, 19 nt, Homo sapiens
  misc_RNA (1)...(19): siRNA sense strand
gcagaagcuucaagaguuc

SEQ ID NO: 473108 - RNA, 19 nt, Homo sapiens
  misc_RNA (1)...(19): siRNA sense strand
gcggaaggauggaaauguu

SEQ ID NO: 473109 - RNA, 19 nt, Homo sapiens
  misc_RNA (1)...(19): siRNA sense strand
aaagauagaggacgagaaa

SEQ ID NO: 473110 - RNA, 19 nt, Homo sapiens
  misc_RNA (1)...(19): siRNA sense strand
gcucaaugcuucgaauuca

SEQ ID NO: 473111 - RNA, 19 nt, Homo sapiens
  misc_RNA (1)...(19): siRNA sense strand
gaaggugcgguccagguua

SEQ ID NO: 473112 - RNA, 19 nt, Homo sapiens
  misc_RNA (1)...(19): siRNA sense strand
ucacagcaacgcauucuaa

SEQ ID NO: 473113 - RNA, 19 nt, Homo sapiens
  misc_RNA (1)...(19): siRNA sense strand
cauuagagguacccacaaa

SEQ ID NO: 473114 - RNA, 19 nt, Homo sapiens
  misc_RNA (1)...(19): siRNA sense strand
cagcaacgcauucuaauuc

SEQ ID NO: 473115 - RNA, 19 nt, Homo sapiens
  misc_RNA (1)...(19): siRNA sense strand
gagcccaucucaccuuuag

SEQ ID NO: 473116 - RNA, 19 nt, Homo sapiens
  misc_RNA (1)...(19): siRNA sense strand
gaacccagucugcaccuuu

SEQ ID NO: 473117 - RNA, 19 nt, Homo sapiens
  misc_RNA (1)...(19): siRNA sense strand
cgaaaucuauugaacaacu

SEQ ID NO: 473118 - RNA, 19 nt, Homo sapiens
  misc_RNA (1)...(19): siRNA sense strand
aaacugcuuucgaaaucua

SEQ ID NO: 473119 - RNA, 19 nt, Homo sapiens
  misc_RNA (1)...(19): siRNA sense strand
acaaacugcuuucgaaauc

SEQ ID NO: 473120 - RNA, 19 nt, Homo sapiens
  misc_RNA (1)...(19): siRNA sense strand
cgaauucacucaaagaaaa

SEQ ID NO: 473121 - RNA, 19 nt, Homo sapiens
  misc_RNA (1)...(19): siRNA sense strand
uggagaagcagaagcaaua

SEQ ID NO: 473122 - RNA, 19 nt, Homo sapiens
  misc_RNA (1)...(19): siRNA sense strand
gaaagggcaguggcaagua

SEQ ID NO: 473123 - RNA, 19 nt, Homo sapiens
  misc_RNA (1)...(19): siRNA sense strand
gaugugaagucagaaguuc

SEQ ID NO: 473124 - RNA, 19 nt, Homo sapiens
  misc_RNA (1)...(19): siRNA sense strand
guaaaucagcaacgaaaga

SEQ ID NO: 473125 - RNA, 19 nt, Homo sapiens
  misc_RNA (1)...(19): siRNA sense strand
gaguaaaucagcaacgaaa

SEQ ID NO: 473126 - RNA, 19 nt, Homo sapiens
  misc_RNA (1)...(19): siRNA sense strand
gaaaucuauugaacaacug

SEQ ID NO: 473127 - RNA, 19 nt, Homo sapiens
  misc_RNA (1)...(19): siRNA sense strand
ggacagugaugaagaugcu

SEQ ID NO: 473128 - RNA, 19 nt, Homo sapiens
  misc_RNA (1)...(19): siRNA sense strand
agaaacagcaugagaacuu

SEQ ID NO: 473129 - RNA, 19 nt, Homo sapiens
  misc_RNA (1)...(19): siRNA sense strand
caacuggaaguguuacuga

SEQ ID NO: 473130 - RNA, 19 nt, Homo sapiens
  misc_RNA (1)...(19): siRNA sense strand
agcagaagcuucaagaguu

SEQ ID NO: 473131 - RNA, 19 nt, Homo sapiens
  misc_RNA (1)...(19): siRNA sense strand
gcagcuuccuccucucaga

SEQ ID NO: 473132 - RNA, 19 nt, Homo sapiens
  misc_RNA (1)...(19): siRNA sense strand
ccaugaaccugcuaagucu

SEQ ID NO: 473133 - RNA, 19 nt, Homo sapiens
  misc_RNA (1)...(19): siRNA sense strand
ggauggaaauguugucacu

SEQ ID NO: 473134 - RNA, 19 nt, Homo sapiens
  misc_RNA (1)...(19): siRNA sense strand
cuucaagaguuccuacuga

SEQ ID NO: 473135 - RNA, 19 nt, Homo sapiens
  misc_RNA (1)...(19): siRNA sense strand
ugaugaagaugcucagauc

SEQ ID NO: 473136 - RNA, 19 nt, Homo sapiens
  misc_RNA (1)...(19): siRNA sense strand
uggcucagcuggucauuca

SEQ ID NO: 473137 - RNA, 19 nt, Homo sapiens
  misc_RNA (1)...(19): siRNA sense strand
ccucugagcccaacuugaa

SEQ ID NO: 473138 - RNA, 19 nt, Homo sapiens
  misc_RNA (1)...(19): siRNA sense strand
gcaagaacaggaaguagag

SEQ ID NO: 473139 - RNA, 19 nt, Homo sapiens
  misc_RNA (1)...(19): siRNA sense strand
ccacccucauguuacuuua

SEQ ID NO: 473140 - RNA, 19 nt, Homo sapiens
  misc_RNA (1)...(19): siRNA sense strand
gacagaauccucagucagu

SEQ ID NO: 473141 - RNA, 19 nt, Homo sapiens
  misc_RNA (1)...(19): siRNA sense strand
gagaauuucaccuggcauu

SEQ ID NO: 473142 - RNA, 19 nt, Homo sapiens
  misc_RNA (1)...(19): siRNA sense strand
ucuuguagcugguggaguu

SEQ ID NO: 473143 - RNA, 19 nt, Homo sapiens
  misc_RNA (1)...(19): siRNA sense strand
gagcacaagaugcaaagga

SEQ ID NO: 473144 - RNA, 19 nt, Homo sapiens
  misc_RNA (1)...(19): siRNA sense strand
cugcagcauuuauuauuga

SEQ ID NO: 473145 - RNA, 19 nt, Homo sapiens
  misc_RNA (1)...(19): siRNA sense strand
caacgcauucuaauucaug

SEQ ID NO: 473146 - RNA, 19 nt, Homo sapiens
  misc_RNA (1)...(19): siRNA sense strand
gaaaaugagacuucgguuu

SEQ ID NO: 473147 - RNA, 19 nt, Homo sapiens
  misc_RNA (1)...(19): siRNA sense strand
acagaauccucagucagua

SEQ ID NO: 473148 - RNA, 19 nt, Homo sapiens
  misc_RNA (1)...(19): siRNA sense strand
gcagaggcaagaacaggaa

SEQ ID NO: 473149 - RNA, 19 nt, Homo sapiens
  misc_RNA (1)...(19): siRNA sense strand
gcaacaccagcaauucuug

SEQ ID NO: 473150 - RNA, 19 nt, Homo sapiens
  misc_RNA (1)...(19): siRNA sense strand
gcauucuaauucaugaaga

SEQ ID NO: 473151 - RNA, 19 nt, Homo sapiens
  misc_RNA (1)...(19): siRNA sense strand
agagaggcaucgcagagaa

SEQ ID NO: 473152 - RNA, 19 nt, Homo sapiens
  misc_RNA (1)...(19): siRNA sense strand
gcaacgcauucuaauucau

SEQ ID NO: 473153 - RNA, 19 nt, Homo sapiens
  misc_RNA (1)...(19): siRNA sense strand
caguggaugugaagucaga

SEQ ID NO: 473154 - RNA, 19 nt, Homo sapiens
  misc_RNA (1)...(19): siRNA sense strand
ccugcagcauuuauuauug

SEQ ID NO: 473155 - RNA, 19 nt, Homo sapiens
  misc_RNA (1)...(19): siRNA sense strand
aacaagaacuccuagaaaa

SEQ ID NO: 473156 - RNA, 19 nt, Homo sapiens
  misc_RNA (1)...(19): siRNA sense strand
gcagauccacaugaacaaa

SEQ ID NO: 473157 - RNA, 19 nt, Homo sapiens
  misc_RNA (1)...(19): siRNA sense strand
cagcagauccacaugaaca

SEQ ID NO: 473158 - RNA, 19 nt, Homo sapiens
  misc_RNA (1)...(19): siRNA sense strand
gaauuucaccuggcauuag

SEQ ID NO: 473159 - RNA, 19 nt, Homo sapiens
  misc_RNA (1)...(19): siRNA sense strand
gggccaacuggaaguguua

SEQ ID NO: 473160 - RNA, 19 nt, Homo sapiens
  misc_RNA (1)...(19): siRNA sense strand
ggucccaguucaccaaaca

SEQ ID NO: 473161 - RNA, 19 nt, Homo sapiens
  misc_RNA (1)...(19): siRNA sense strand
aaggugcgguccagguuaa

SEQ ID NO: 473162 - RNA, 19 nt, Homo sapiens
  misc_RNA (1)...(19): siRNA sense strand
acacaucauuggaucaaag

SEQ ID NO: 473163 - RNA, 19 nt, Homo sapiens
  misc_RNA (1)...(19): siRNA sense strand
ggcaagaacaggaaguaga

SEQ ID NO: 473164 - RNA, 19 nt, Homo sapiens
  misc_RNA (1)...(19): siRNA sense strand
gaggcaagaacaggaagua

SEQ ID NO: 473165 - RNA, 19 nt, Homo sapiens
  misc_RNA (1)...(19): siRNA sense strand
uuagagguacccacaaauu

SEQ ID NO: 473166 - RNA, 19 nt, Homo sapiens
  misc_RNA (1)...(19): siRNA sense strand
ggaaggauggaaauguugu

SEQ ID NO: 473167 - RNA, 19 nt, Homo sapiens
  misc_RNA (1)...(19): siRNA sense strand
cacaagaugcaaaggauga

SEQ ID NO: 473168 - RNA, 19 nt, Homo sapiens
  misc_RNA (1)...(19): siRNA sense strand
cuuuauaccucuccuucuu

SEQ ID NO: 473169 - RNA, 19 nt, Homo sapiens
  misc_RNA (1)...(19): siRNA sense strand
ugaaccugcuaagucuuua

SEQ ID NO: 473170 - RNA, 19 nt, Homo sapiens
  misc_RNA (1)...(19): siRNA sense strand
ggaugugaagucagaaguu

SEQ ID NO: 473171 - RNA, 19 nt, Homo sapiens
  misc_RNA (1)...(19): siRNA sense strand
uagagguacccacaaauug

SEQ ID NO: 473172 - RNA, 19 nt, Homo sapiens
  misc_RNA (1)...(19): siRNA sense strand
uuauaccucuccuucuuug

SEQ ID NO: 473173 - RNA, 19 nt, Homo sapiens
  misc_RNA (1)...(19): siRNA sense strand
aaagacacuccaacuaaug

SEQ ID NO: 473174 - RNA, 19 nt, Homo sapiens
  misc_RNA (1)...(19): siRNA sense strand
gcaccaggcucagcuucag

SEQ ID NO: 473175 - RNA, 19 nt, Homo sapiens
  misc_RNA (1)...(19): siRNA sense strand
gcaggaauuacuucuuauc

SEQ ID NO: 473176 - RNA, 19 nt, Homo sapiens
  misc_RNA (1)...(19): siRNA sense strand
gaaguguuacugaaaauga

SEQ ID NO: 473177 - RNA, 19 nt, Homo sapiens
  misc_RNA (1)...(19): siRNA sense strand
gcucagauccaggaaaugg

SEQ ID NO: 473178 - RNA, 19 nt, Homo sapiens
  misc_RNA (1)...(19): siRNA sense strand
caacagcaacaccagcaau

SEQ ID NO: 473179 - RNA, 19 nt, Homo sapiens
  misc_RNA (1)...(19): siRNA sense strand
ucucagaggcaaagauaga

SEQ ID NO: 473180 - RNA, 19 nt, Homo sapiens
  misc_RNA (1)...(19): siRNA sense strand
gcagugcuuguguggauga

SEQ ID NO: 473181 - RNA, 19 nt, Homo sapiens
  misc_RNA (1)...(19): siRNA sense strand
cacaugaacaaacugcuuu

SEQ ID NO: 473182 - RNA, 19 nt, Homo sapiens
  misc_RNA (1)...(19): siRNA sense strand
aauuucaccuggcauuaga

SEQ ID NO: 473183 - RNA, 19 nt, Homo sapiens
  misc_RNA (1)...(19): siRNA sense strand
gcaacaaaagagagaauuu

SEQ ID NO: 473184 - RNA, 19 nt, Homo sapiens
  misc_RNA (1)...(19): siRNA sense strand
guugucacuucauucaaga

SEQ ID NO: 473185 - RNA, 19 nt, Homo sapiens
  misc_RNA (1)...(19): siRNA sense strand
aaacagaaaguggcagaga

SEQ ID NO: 473186 - RNA, 19 nt, Homo sapiens
  misc_RNA (1)...(19): siRNA sense strand
ggaaauguugucacuucau

SEQ ID NO: 473187 - RNA, 19 nt, Homo sapiens
  misc_RNA (1)...(19): siRNA sense strand
caaacugcuuucgaaaucu

SEQ ID NO: 473188 - RNA, 19 nt, Homo sapiens
  misc_RNA (1)...(19): siRNA sense strand
ccacaugaacaaacugcuu

SEQ ID NO: 473189 - RNA, 19 nt, Homo sapiens
  misc_RNA (1)...(19): siRNA sense strand
cagcagcagauccacauga

SEQ ID NO: 473190 - RNA, 19 nt, Homo sapiens
  misc_RNA (1)...(19): siRNA sense strand
gaaccugcuaagucuuuau

SEQ ID NO: 473191 - RNA, 19 nt, Homo sapiens
  misc_RNA (1)...(19): siRNA sense strand
ucuccugcagcauuuauua

SEQ ID NO: 473192 - RNA, 19 nt, Homo sapiens
  misc_RNA (1)...(19): siRNA sense strand
gagggaaagccacccaaca

SEQ ID NO: 473193 - RNA, 19 nt, Homo sapiens
  misc_RNA (1)...(19): siRNA sense strand
gaaagacacuccaacuaau

SEQ ID NO: 473194 - RNA, 19 nt, Homo sapiens
  misc_RNA (1)...(19): siRNA sense strand
cagcaggaauuacuucuua

SEQ ID NO: 473195 - RNA, 19 nt, Homo sapiens
  misc_RNA (1)...(19): siRNA sense strand
gaacaaaugcgacagcaaa

SEQ ID NO: 473196 - RNA, 19 nt, Homo sapiens
  misc_RNA (1)...(19): siRNA sense strand
gcaaaugguuucacagcaa

SEQ ID NO: 473197 - RNA, 19 nt, Homo sapiens
  misc_RNA (1)...(19): siRNA sense strand
guacagaaguaaagcagaa

SEQ ID NO: 473198 - RNA, 19 nt, Homo sapiens
  misc_RNA (1)...(19): siRNA sense strand
ggacagaccucaggaugau

SEQ ID NO: 473199 - RNA, 19 nt, Homo sapiens
  misc_RNA (1)...(19): siRNA sense strand
gaacaucuccauccuacaa

SEQ ID NO: 473200 - RNA, 19 nt, Homo sapiens
  misc_RNA (1)...(19): siRNA sense strand
cgaaagacacuccaacuaa

SEQ ID NO: 473201 - RNA, 19 nt, Homo sapiens
  misc_RNA (1)...(19): siRNA sense strand
gaacaaacugcuuucgaaa

SEQ ID NO: 473202 - RNA, 19 nt, Homo sapiens
  misc_RNA (1)...(19): siRNA sense strand
ugaacaaacugcuuucgaa

SEQ ID NO: 473203 - RNA, 19 nt, Homo sapiens
  misc_RNA (1)...(19): siRNA sense strand
caacaagaacuccuagaaa

SEQ ID NO: 473204 - RNA, 19 nt, Homo sapiens
  misc_RNA (1)...(19): siRNA sense strand
gaaacagcaugagaacuug

SEQ ID NO: 473205 - RNA, 19 nt, Homo sapiens
  misc_RNA (1)...(19): siRNA sense strand
caucucaccuuuagaccua

SEQ ID NO: 473206 - RNA, 19 nt, Homo sapiens
  misc_RNA (1)...(19): siRNA sense strand
gcaacaagaacuccuagaa

SEQ ID NO: 473207 - RNA, 19 nt, Homo sapiens
  misc_RNA (1)...(19): siRNA sense strand
gcagaagcuucaagaguuc

SEQ ID NO: 473208 - RNA, 19 nt, Homo sapiens
  misc_RNA (1)...(19): siRNA sense strand
gcggaaggauggaaauguu

SEQ ID NO: 473209 - RNA, 19 nt, Homo sapiens
  misc_RNA (1)...(19): siRNA sense strand
aaagauagaggacgagaaa

SEQ ID NO: 473210 - RNA, 19 nt, Homo sapiens
  misc_RNA (1)...(19): siRNA sense strand
gcucaaugcuucgaauuca

SEQ ID NO: 473211 - RNA, 19 nt, Homo sapiens
  misc_RNA (1)...(19): siRNA sense strand
gaaggugcgguccagguua

SEQ ID NO: 473212 - RNA, 19 nt, Homo sapiens
  misc_RNA (1)...(19): siRNA sense strand
ucacagcaacgcauucuaa

SEQ ID NO: 473213 - RNA, 19 nt, Homo sapiens
  misc_RNA (1)...(19): siRNA sense strand
cauuagagguacccacaaa

SEQ ID NO: 473214 - RNA, 19 nt, Homo sapiens
  misc_RNA (1)...(19): siRNA sense strand
cagcaacgcauucuaauuc

SEQ ID NO: 473215 - RNA, 19 nt, Homo sapiens
  misc_RNA (1)...(19): siRNA sense strand
gagcccaucucaccuuuag

SEQ ID NO: 473216 - RNA, 19 nt, Homo sapiens
  misc_RNA (1)...(19): siRNA sense strand
gaacccagucugcaccuuu

SEQ ID NO: 473217 - RNA, 19 nt, Homo sapiens
  misc_RNA (1)...(19): siRNA sense strand
cgaaaucuauugaacaacu

SEQ ID NO: 473218 - RNA, 19 nt, Homo sapiens
  misc_RNA (1)...(19): siRNA sense strand
aaacugcuuucgaaaucua

SEQ ID NO: 473219 - RNA, 19 nt, Homo sapiens
  misc_RNA (1)...(19): siRNA sense strand
acaaacugcuuucgaaauc

SEQ ID NO: 473220 - RNA, 19 nt, Homo sapiens
  misc_RNA (1)...(19): siRNA sense strand
cgaauucacucaaagaaaa

SEQ ID NO: 473221 - RNA, 19 nt, Homo sapiens
  misc_RNA (1)...(19): siRNA sense strand
uggagaagcagaagcaaua

SEQ ID NO: 473222 - RNA, 19 nt, Homo sapiens
  misc_RNA (1)...(19): siRNA sense strand
gaaagggcaguggcaagua

SEQ ID NO: 473223 - RNA, 19 nt, Homo sapiens
  misc_RNA (1)...(19): siRNA sense strand
gaugugaagucagaaguuc

SEQ ID NO: 473224 - RNA, 19 nt, Homo sapiens
  misc_RNA (1)...(19): siRNA sense strand
guaaaucagcaacgaaaga

SEQ ID NO: 473225 - RNA, 19 nt, Homo sapiens
  misc_RNA (1)...(19): siRNA sense strand
gaguaaaucagcaacgaaa

SEQ ID NO: 473226 - RNA, 19 nt, Homo sapiens
  misc_RNA (1)...(19): siRNA sense strand
gaaaucuauugaacaacug

SEQ ID NO: 473227 - RNA, 19 nt, Homo sapiens
  misc_RNA (1)...(19): siRNA sense strand
ggacagugaugaagaugcu

SEQ ID NO: 473228 - RNA, 19 nt, Homo sapiens
  misc_RNA (1)...(19): siRNA sense strand
agaaacagcaugagaacuu

SEQ ID NO: 473229 - RNA, 19 nt, Homo sapiens
  misc_RNA (1)...(19): siRNA sense strand
caacuggaaguguuacuga

SEQ ID NO: 473230 - RNA, 19 nt, Homo sapiens
  misc_RNA (1)...(19): siRNA sense strand
agcagaagcuucaagaguu

SEQ ID NO: 473231 - RNA, 19 nt, Homo sapiens
  misc_RNA (1)...(19): siRNA sense strand
gcagcuuccuccucucaga

SEQ ID NO: 473232 - RNA, 19 nt, Homo sapiens
  misc_RNA (1)...(19): siRNA sense strand
ccaugaaccugcuaagucu

SEQ ID NO: 473233 - RNA, 19 nt, Homo sapiens
  misc_RNA (1)...(19): siRNA sense strand
ggauggaaauguugucacu

SEQ ID NO: 473234 - RNA, 19 nt, Homo sapiens
  misc_RNA (1)...(19): siRNA sense strand
cuucaagaguuccuacuga

SEQ ID NO: 473235 - RNA, 19 nt, Homo sapiens
  misc_RNA (1)...(19): siRNA sense strand
ugaugaagaugcucagauc

SEQ ID NO: 473236 - RNA, 19 nt, Homo sapiens
  misc_RNA (1)...(19): siRNA sense strand
uggcucagcuggucauuca

SEQ ID NO: 473237 - RNA, 19 nt, Homo sapiens
  misc_RNA (1)...(19): siRNA sense strand
ccucugagcccaacuugaa

SEQ ID NO: 473238 - RNA, 19 nt, Homo sapiens
  misc_RNA (1)...(19): siRNA sense strand
gcaagaacaggaaguagag

SEQ ID NO: 473239 - RNA, 19 nt, Homo sapiens
  misc_RNA (1)...(19): siRNA sense strand
ccacccucauguuacuuua

SEQ ID NO: 473240 - RNA, 19 nt, Homo sapiens
  misc_RNA (1)...(19): siRNA sense strand
gacagaauccucagucagu

SEQ ID NO: 473241 - RNA, 19 nt, Homo sapiens
  misc_RNA (1)...(19): siRNA sense strand
gagaauuucaccuggcauu

SEQ ID NO: 473242 - RNA, 19 nt, Homo sapiens
  misc_RNA (1)...(19): siRNA sense strand
ucuuguagcugguggaguu

SEQ ID NO: 473243 - RNA, 19 nt, Homo sapiens
  misc_RNA (1)...(19): siRNA sense strand
gagcacaagaugcaaagga

SEQ ID NO: 473244 - RNA, 19 nt, Homo sapiens
  misc_RNA (1)...(19): siRNA sense strand
cugcagcauuuauuauuga

SEQ ID NO: 473245 - RNA, 19 nt, Homo sapiens
  misc_RNA (1)...(19): siRNA sense strand
caacgcauucuaauucaug

SEQ ID NO: 473246 - RNA, 19 nt, Homo sapiens
  misc_RNA (1)...(19): siRNA sense strand
gaaaaugagacuucgguuu

SEQ ID NO: 473247 - RNA, 19 nt, Homo sapiens
  misc_RNA (1)...(19): siRNA sense strand
acagaauccucagucagua

SEQ ID NO: 473248 - RNA, 19 nt, Homo sapiens
  misc_RNA (1)...(19): siRNA sense strand
gcagaggcaagaacaggaa

SEQ ID NO: 473249 - RNA, 19 nt, Homo sapiens
  misc_RNA (1)...(19): siRNA sense strand
gcaacaccagcaauucuug

SEQ ID NO: 473250 - RNA, 19 nt, Homo sapiens
  misc_RNA (1)...(19): siRNA sense strand
gcauucuaauucaugaaga

SEQ ID NO: 473251 - RNA, 19 nt, Homo sapiens
  misc_RNA (1)...(19): siRNA sense strand
agagaggcaucgcagagaa

SEQ ID NO: 473252 - RNA, 19 nt, Homo sapiens
  misc_RNA (1)...(19): siRNA sense strand
gcaacgcauucuaauucau

SEQ ID NO: 473253 - RNA, 19 nt, Homo sapiens
  misc_RNA (1)...(19): siRNA sense strand
caguggaugugaagucaga

SEQ ID NO: 473254 - RNA, 19 nt, Homo sapiens
  misc_RNA (1)...(19): siRNA sense strand
ccugcagcauuuauuauug

SEQ ID NO: 473255 - RNA, 19 nt, Homo sapiens
  misc_RNA (1)...(19): siRNA sense strand
aacaagaacuccuagaaaa

SEQ ID NO: 473256 - RNA, 19 nt, Homo sapiens
  misc_RNA (1)...(19): siRNA sense strand
gcagauccacaugaacaaa

SEQ ID NO: 473257 - RNA, 19 nt, Homo sapiens
  misc_RNA (1)...(19): siRNA sense strand
cagcagauccacaugaaca

SEQ ID NO: 473258 - RNA, 19 nt, Homo sapiens
  misc_RNA (1)...(19): siRNA sense strand
gaauuucaccuggcauuag

SEQ ID NO: 473259 - RNA, 19 nt, Homo sapiens
  misc_RNA (1)...(19): siRNA sense strand
gggccaacuggaaguguua

SEQ ID NO: 473260 - RNA, 19 nt, Homo sapiens
  misc_RNA (1)...(19): siRNA sense strand
ggucccaguucaccaaaca

SEQ ID NO: 473261 - RNA, 19 nt, Homo sapiens
  misc_RNA (1)...(19): siRNA sense strand
aaggugcgguccagguuaa

SEQ ID NO: 473262 - RNA, 19 nt, Homo sapiens
  misc_RNA (1)...(19): siRNA sense strand
acacaucauuggaucaaag

SEQ ID NO: 473263 - RNA, 19 nt, Homo sapiens
  misc_RNA (1)...(19): siRNA sense strand
ggcaagaacaggaaguaga

SEQ ID NO: 473264 - RNA, 19 nt, Homo sapiens
  misc_RNA (1)...(19): siRNA sense strand
gaggcaagaacaggaagua

SEQ ID NO: 473265 - RNA, 19 nt, Homo sapiens
  misc_RNA (1)...(19): siRNA sense strand
uuagagguacccacaaauu

SEQ ID NO: 473266 - RNA, 19 nt, Homo sapiens
  misc_RNA (1)...(19): siRNA sense strand
ggaaggauggaaauguugu

SEQ ID NO: 473267 - RNA, 19 nt, Homo sapiens
  misc_RNA (1)...(19): siRNA sense strand
cacaagaugcaaaggauga

SEQ ID NO: 473268 - RNA, 19 nt, Homo sapiens
  misc_RNA (1)...(19): siRNA sense strand
cuuuauaccucuccuucuu

SEQ ID NO: 473269 - RNA, 19 nt, Homo sapiens
  misc_RNA (1)...(19): siRNA sense strand
ugaaccugcuaagucuuua

SEQ ID NO: 473270 - RNA, 19 nt, Homo sapiens
  misc_RNA (1)...(19): siRNA sense strand
ggaugugaagucagaaguu

SEQ ID NO: 473271 - RNA, 19 nt, Homo sapiens
  misc_RNA (1)...(19): siRNA sense strand
uagagguacccacaaauug

SEQ ID NO: 473272 - RNA, 19 nt, Homo sapiens
  misc_RNA (1)...(19): siRNA sense strand
uuauaccucuccuucuuug

SEQ ID NO: 473273 - RNA, 19 nt, Homo sapiens
  misc_RNA (1)...(19): siRNA sense strand
aaagacacuccaacuaaug

SEQ ID NO: 473274 - RNA, 19 nt, Homo sapiens
  misc_RNA (1)...(19): siRNA sense strand
gcaccaggcucagcuucag

SEQ ID NO: 473275 - RNA, 19 nt, Homo sapiens
  misc_RNA (1)...(19): siRNA sense strand
gcaggaauuacuucuuauc

SEQ ID NO: 473276 - RNA, 19 nt, Homo sapiens
  misc_RNA (1)...(19): siRNA sense strand
gaaguguuacugaaaauga

SEQ ID NO: 473277 - RNA, 19 nt, Homo sapiens
  misc_RNA (1)...(19): siRNA sense strand
gcucagauccaggaaaugg

SEQ ID NO: 473278 - RNA, 19 nt, Homo sapiens
  misc_RNA (1)...(19): siRNA sense strand
caacagcaacaccagcaau

SEQ ID NO: 473279 - RNA, 19 nt, Homo sapiens
  misc_RNA (1)...(19): siRNA sense strand
ucucagaggcaaagauaga

SEQ ID NO: 473280 - RNA, 19 nt, Homo sapiens
  misc_RNA (1)...(19): siRNA sense strand
gcagugcuuguguggauga

SEQ ID NO: 473281 - RNA, 19 nt, Homo sapiens
  misc_RNA (1)...(19): siRNA sense strand
cacaugaacaaacugcuuu

SEQ ID NO: 473282 - RNA, 19 nt, Homo sapiens
  misc_RNA (1)...(19): siRNA sense strand
aauuucaccuggcauuaga

SEQ ID NO: 473283 - RNA, 19 nt, Homo sapiens
  misc_RNA (1)...(19): siRNA sense strand
gcaacaaaagagagaauuu

SEQ ID NO: 473284 - RNA, 19 nt, Homo sapiens
  misc_RNA (1)...(19): siRNA sense strand
guugucacuucauucaaga

SEQ ID NO: 473285 - RNA, 19 nt, Homo sapiens
  misc_RNA (1)...(19): siRNA sense strand
aaacagaaaguggcagaga

SEQ ID NO: 473286 - RNA, 19 nt, Homo sapiens
  misc_RNA (1)...(19): siRNA sense strand
ggaaauguugucacuucau

SEQ ID NO: 473287 - RNA, 19 nt, Homo sapiens
  misc_RNA (1)...(19): siRNA sense strand
caaacugcuuucgaaaucu

SEQ ID NO: 473288 - RNA, 19 nt, Homo sapiens
  misc_RNA (1)...(19): siRNA sense strand
ccacaugaacaaacugcuu

SEQ ID NO: 473289 - RNA, 19 nt, Homo sapiens
  misc_RNA (1)...(19): siRNA sense strand
cagcagcagauccacauga

SEQ ID NO: 473290 - RNA, 19 nt, Homo sapiens
  misc_RNA (1)...(19): siRNA sense strand
gaaccugcuaagucuuuau

SEQ ID NO: 473291 - RNA, 19 nt, Homo sapiens
  misc_RNA (1)...(19): siRNA sense strand
ucuccugcagcauuuauua

SEQ ID NO: 473292 - RNA, 19 nt, Homo sapiens
  misc_RNA (1)...(19): siRNA sense strand
gagggaaagccacccaaca

SEQ ID NO: 473293 - RNA, 19 nt, Homo sapiens
  misc_RNA (1)...(19): siRNA sense strand
gaaagacacuccaacuaau

SEQ ID NO: 473294 - RNA, 19 nt, Homo sapiens
  misc_RNA (1)...(19): siRNA sense strand
cagcaggaauuacuucuua

SEQ ID NO: 473295 - RNA, 19 nt, Homo sapiens
  misc_RNA (1)...(19): siRNA sense strand
gaacaaaugcgacagcaaa

SEQ ID NO: 473296 - RNA, 19 nt, Homo sapiens
  misc_RNA (1)...(19): siRNA sense strand
gcaaaugguuucacagcaa

SEQ ID NO: 473297 - RNA, 19 nt, Homo sapiens
  misc_RNA (1)...(19): siRNA sense strand
guacagaaguaaagcagaa

SEQ ID NO: 473298 - RNA, 19 nt, Homo sapiens
  misc_RNA (1)...(19): siRNA sense strand
ggacagaccucaggaugau

SEQ ID NO: 473299 - RNA, 19 nt, Homo sapiens
  misc_RNA (1)...(19): siRNA sense strand
gaacaucuccauccuacaa

SEQ ID NO: 473300 - RNA, 19 nt, Homo sapiens
  misc_RNA (1)...(19): siRNA sense strand
cgaaagacacuccaacuaa

SEQ ID NO: 473301 - RNA, 19 nt, Homo sapiens
  misc_RNA (1)...(19): siRNA sense strand
gaacaaacugcuuucgaaa

SEQ ID NO: 473302 - RNA, 19 nt, Homo sapiens
  misc_RNA (1)...(19): siRNA sense strand
ugaacaaacugcuuucgaa

SEQ ID NO: 473303 - RNA, 19 nt, Homo sapiens
  misc_RNA (1)...(19): siRNA sense strand
caacaagaacuccuagaaa

SEQ ID NO: 473304 - RNA, 19 nt, Homo sapiens
  misc_RNA (1)...(19): siRNA sense strand
gaaacagcaugagaacuug

SEQ ID NO: 473305 - RNA, 19 nt, Homo sapiens
  misc_RNA (1)...(19): siRNA sense strand
caucucaccuuuagaccua

SEQ ID NO: 473306 - RNA, 19 nt, Homo sapiens
  misc_RNA (1)...(19): siRNA sense strand
gcaacaagaacuccuagaa

SEQ ID NO: 473307 - RNA, 19 nt, Homo sapiens
  misc_RNA (1)...(19): siRNA sense strand
gcagaagcuucaagaguuc

SEQ ID NO: 473308 - RNA, 19 nt, Homo sapiens
  misc_RNA (1)...(19): siRNA sense strand
gcggaaggauggaaauguu

SEQ ID NO: 473309 - RNA, 19 nt, Homo sapiens
  misc_RNA (1)...(19): siRNA sense strand
aaagauagaggacgagaaa

SEQ ID NO: 473310 - RNA, 19 nt, Homo sapiens
  misc_RNA (1)...(19): siRNA sense strand
gcucaaugcuucgaauuca

SEQ ID NO: 473311 - RNA, 19 nt, Homo sapiens
  misc_RNA (1)...(19): siRNA sense strand
gaaggugcgguccagguua

SEQ ID NO: 473312 - RNA, 19 nt, Homo sapiens
  misc_RNA (1)...(19): siRNA sense strand
ucacagcaacgcauucuaa

SEQ ID NO: 473313 - RNA, 19 nt, Homo sapiens
  misc_RNA (1)...(19): siRNA sense strand
cauuagagguacccacaaa

SEQ ID NO: 473314 - RNA, 19 nt, Homo sapiens
  misc_RNA (1)...(19): siRNA sense strand
cagcaacgcauucuaauuc

SEQ ID NO: 473315 - RNA, 19 nt, Homo sapiens
  misc_RNA (1)...(19): siRNA sense strand
gagcccaucucaccuuuag

SEQ ID NO: 473316 - RNA, 19 nt, Homo sapiens
  misc_RNA (1)...(19): siRNA sense strand
gaacccagucugcaccuuu

SEQ ID NO: 473317 - RNA, 19 nt, Homo sapiens
  misc_RNA (1)...(19): siRNA sense strand
cgaaaucuauugaacaacu

SEQ ID NO: 473318 - RNA, 19 nt, Homo sapiens
  misc_RNA (1)...(19): siRNA sense strand
aaacugcuuucgaaaucua

SEQ ID NO: 473319 - RNA, 19 nt, Homo sapiens
  misc_RNA (1)...(19): siRNA sense strand
acaaacugcuuucgaaauc

SEQ ID NO: 473320 - RNA, 19 nt, Homo sapiens
  misc_RNA (1)...(19): siRNA sense strand
cgaauucacucaaagaaaa

SEQ ID NO: 473321 - RNA, 19 nt, Homo sapiens
  misc_RNA (1)...(19): siRNA sense strand
uggagaagcagaagcaaua

SEQ ID NO: 473322 - RNA, 19 nt, Homo sapiens
  misc_RNA (1)...(19): siRNA sense strand
gaaagggcaguggcaagua

SEQ ID NO: 473323 - RNA, 19 nt, Homo sapiens
  misc_RNA (1)...(19): siRNA sense strand
gaugugaagucagaaguuc

SEQ ID NO: 473324 - RNA, 19 nt, Homo sapiens
  misc_RNA (1)...(19): siRNA sense strand
guaaaucagcaacgaaaga

SEQ ID NO: 473325 - RNA, 19 nt, Homo sapiens
  misc_RNA (1)...(19): siRNA sense strand
gaguaaaucagcaacgaaa

SEQ ID NO: 473326 - RNA, 19 nt, Homo sapiens
  misc_RNA (1)...(19): siRNA sense strand
gaaaucuauugaacaacug

SEQ ID NO: 473327 - RNA, 19 nt, Homo sapiens
  misc_RNA (1)...(19): siRNA sense strand
ggacagugaugaagaugcu

SEQ ID NO: 473328 - RNA, 19 nt, Homo sapiens
  misc_RNA (1)...(19): siRNA sense strand
agaaacagcaugagaacuu

SEQ ID NO: 473329 - RNA, 19 nt, Homo sapiens
  misc_RNA (1)...(19): siRNA sense strand
caacuggaaguguuacuga

SEQ ID NO: 473330 - RNA, 19 nt, Homo sapiens
  misc_RNA (1)...(19): siRNA sense strand
agcagaagcuucaagaguu

SEQ ID NO: 473331 - RNA, 19 nt, Homo sapiens
  misc_RNA (1)...(19): siRNA sense strand
gcagcuuccuccucucaga

SEQ ID NO: 473332 - RNA, 19 nt, Homo sapiens
  misc_RNA (1)...(19): siRNA sense strand
ccaugaaccugcuaagucu

SEQ ID NO: 473333 - RNA, 19 nt, Homo sapiens
  misc_RNA (1)...(19): siRNA sense strand
ggauggaaauguugucacu

SEQ ID NO: 473334 - RNA, 19 nt, Homo sapiens
  misc_RNA (1)...(19): siRNA sense strand
cuucaagaguuccuacuga

SEQ ID NO: 473335 - RNA, 19 nt, Homo sapiens
  misc_RNA (1)...(19): siRNA sense strand
ugaugaagaugcucagauc

SEQ ID NO: 473336 - RNA, 19 nt, Homo sapiens
  misc_RNA (1)...(19): siRNA sense strand
uggcucagcuggucauuca

SEQ ID NO: 473337 - RNA, 19 nt, Homo sapiens
  misc_RNA (1)...(19): siRNA sense strand
ccucugagcccaacuugaa

SEQ ID NO: 473338 - RNA, 19 nt, Homo sapiens
  misc_RNA (1)...(19): siRNA sense strand
gcaagaacaggaaguagag

SEQ ID NO: 473339 - RNA, 19 nt, Homo sapiens
  misc_RNA (1)...(19): siRNA sense strand
ccacccucauguuacuuua

SEQ ID NO: 473340 - RNA, 19 nt, Homo sapiens
  misc_RNA (1)...(19): siRNA sense strand
gacagaauccucagucagu

SEQ ID NO: 473341 - RNA, 19 nt, Homo sapiens
  misc_RNA (1)...(19): siRNA sense strand
gagaauuucaccuggcauu

SEQ ID NO: 473342 - RNA, 19 nt, Homo sapiens
  misc_RNA (1)...(19): siRNA sense strand
ucuuguagcugguggaguu

SEQ ID NO: 473343 - RNA, 19 nt, Homo sapiens
  misc_RNA (1)...(19): siRNA sense strand
gagcacaagaugcaaagga

SEQ ID NO: 473344 - RNA, 19 nt, Homo sapiens
  misc_RNA (1)...(19): siRNA sense strand
cugcagcauuuauuauuga

SEQ ID NO: 473345 - RNA, 19 nt, Homo sapiens
  misc_RNA (1)...(19): siRNA sense strand
caacgcauucuaauucaug

SEQ ID NO: 473346 - RNA, 19 nt, Homo sapiens
  misc_RNA (1)...(19): siRNA sense strand
gaaaaugagacuucgguuu

SEQ ID NO: 473347 - RNA, 19 nt, Homo sapiens
  misc_RNA (1)...(19): siRNA sense strand
acagaauccucagucagua

SEQ ID NO: 473348 - RNA, 19 nt, Homo sapiens
  misc_RNA (1)...(19): siRNA sense strand
gcagaggcaagaacaggaa

SEQ ID NO: 473349 - RNA, 19 nt, Homo sapiens
  misc_RNA (1)...(19): siRNA sense strand
gcaacaccagcaauucuug

SEQ ID NO: 473350 - RNA, 19 nt, Homo sapiens
  misc_RNA (1)...(19): siRNA sense strand
gcauucuaauucaugaaga

SEQ ID NO: 473351 - RNA, 19 nt, Homo sapiens
  misc_RNA (1)...(19): siRNA sense strand
agagaggcaucgcagagaa

SEQ ID NO: 473352 - RNA, 19 nt, Homo sapiens
  misc_RNA (1)...(19): siRNA sense strand
gcaacgcauucuaauucau

SEQ ID NO: 473353 - RNA, 19 nt, Homo sapiens
  misc_RNA (1)...(19): siRNA sense strand
caguggaugugaagucaga

SEQ ID NO: 473354 - RNA, 19 nt, Homo sapiens
  misc_RNA (1)...(19): siRNA sense strand
ccugcagcauuuauuauug

SEQ ID NO: 473355 - RNA, 19 nt, Homo sapiens
  misc_RNA (1)...(19): siRNA sense strand
aacaagaacuccuagaaaa

SEQ ID NO: 473356 - RNA, 19 nt, Homo sapiens
  misc_RNA (1)...(19): siRNA sense strand
gcagauccacaugaacaaa

SEQ ID NO: 473357 - RNA, 19 nt, Homo sapiens
  misc_RNA (1)...(19): siRNA sense strand
cagcagauccacaugaaca

SEQ ID NO: 473358 - RNA, 19 nt, Homo sapiens
  misc_RNA (1)...(19): siRNA sense strand
gaauuucaccuggcauuag

SEQ ID NO: 473359 - RNA, 19 nt, Homo sapiens
  misc_RNA (1)...(19): siRNA sense strand
gggccaacuggaaguguua

SEQ ID NO: 473360 - RNA, 19 nt, Homo sapiens
  misc_RNA (1)...(19): siRNA sense strand
ggucccaguucaccaaaca

SEQ ID NO: 473361 - RNA, 19 nt, Homo sapiens
  misc_RNA (1)...(19): siRNA sense strand
aaggugcgguccagguuaa

SEQ ID NO: 473362 - RNA, 19 nt, Homo sapiens
  misc_RNA (1)...(19): siRNA sense strand
acacaucauuggaucaaag

SEQ ID NO: 473363 - RNA, 19 nt, Homo sapiens
  misc_RNA (1)...(19): siRNA sense strand
ggcaagaacaggaaguaga

SEQ ID NO: 473364 - RNA, 19 nt, Homo sapiens
  misc_RNA (1)...(19): siRNA sense strand
gaggcaagaacaggaagua

SEQ ID NO: 473365 - RNA, 19 nt, Homo sapiens
  misc_RNA (1)...(19): siRNA sense strand
uuagagguacccacaaauu

SEQ ID NO: 473366 - RNA, 19 nt, Homo sapiens
  misc_RNA (1)...(19): siRNA sense strand
ggaaggauggaaauguugu

SEQ ID NO: 473367 - RNA, 19 nt, Homo sapiens
  misc_RNA (1)...(19): siRNA sense strand
cacaagaugcaaaggauga

SEQ ID NO: 473368 - RNA, 19 nt, Homo sapiens
  misc_RNA (1)...(19): siRNA sense strand
cuuuauaccucuccuucuu

SEQ ID NO: 473369 - RNA, 19 nt, Homo sapiens
  misc_RNA (1)...(19): siRNA sense strand
ugaaccugcuaagucuuua

SEQ ID NO: 473370 - RNA, 19 nt, Homo sapiens
  misc_RNA (1)...(19): siRNA sense strand
ggaugugaagucagaaguu

SEQ ID NO: 473371 - RNA, 19 nt, Homo sapiens
  misc_RNA (1)...(19): siRNA sense strand
uagagguacccacaaauug

SEQ ID NO: 473372 - RNA, 19 nt, Homo sapiens
  misc_RNA (1)...(19): siRNA sense strand
uuauaccucuccuucuuug

SEQ ID NO: 473373 - RNA, 19 nt, Homo sapiens
  misc_RNA (1)...(19): siRNA sense strand
aaagacacuccaacuaaug

SEQ ID NO: 473374 - RNA, 19 nt, Homo sapiens
  misc_RNA (1)...(19): siRNA sense strand
gcaccaggcucagcuucag

SEQ ID NO: 473375 - RNA, 19 nt, Homo sapiens
  misc_RNA (1)...(19): siRNA sense strand
gcaggaauuacuucuuauc

SEQ ID NO: 473376 - RNA, 19 nt, Homo sapiens
  misc_RNA (1)...(19): siRNA sense strand
gaaguguuacugaaaauga

SEQ ID NO: 473377 - RNA, 19 nt, Homo sapiens
  misc_RNA (1)...(19): siRNA sense strand
gcucagauccaggaaaugg

SEQ ID NO: 473378 - RNA, 19 nt, Homo sapiens
  misc_RNA (1)...(19): siRNA sense strand
caacagcaacaccagcaau

SEQ ID NO: 473379 - RNA, 19 nt, Homo sapiens
  misc_RNA (1)...(19): siRNA sense strand
ucucagaggcaaagauaga

SEQ ID NO: 473380 - RNA, 19 nt, Homo sapiens
  misc_RNA (1)...(19): siRNA sense strand
gcagugcuuguguggauga

SEQ ID NO: 473381 - RNA, 19 nt, Homo sapiens
  misc_RNA (1)...(19): siRNA sense strand
cacaugaacaaacugcuuu

SEQ ID NO: 473382 - RNA, 19 nt, Homo sapiens
  misc_RNA (1)...(19): siRNA sense strand
aauuucaccuggcauuaga

SEQ ID NO: 473383 - RNA, 19 nt, Homo sapiens
  misc_RNA (1)...(19): siRNA sense strand
gcaacaaaagagagaauuu

SEQ ID NO: 473384 - RNA, 19 nt, Homo sapiens
  misc_RNA (1)...(19): siRNA sense strand
guugucacuucauucaaga

SEQ ID NO: 473385 - RNA, 19 nt, Homo sapiens
  misc_RNA (1)...(19): siRNA sense strand
aaacagaaaguggcagaga

SEQ ID NO: 473386 - RNA, 19 nt, Homo sapiens
  misc_RNA (1)...(19): siRNA sense strand
ggaaauguugucacuucau

SEQ ID NO: 473387 - RNA, 19 nt, Homo sapiens
  misc_RNA (1)...(19): siRNA sense strand
caaacugcuuucgaaaucu

SEQ ID NO: 473388 - RNA, 19 nt, Homo sapiens
  misc_RNA (1)...(19): siRNA sense strand
ccacaugaacaaacugcuu

SEQ ID NO: 473389 - RNA, 19 nt, Homo sapiens
  misc_RNA (1)...(19): siRNA sense strand
cagcagcagauccacauga

SEQ ID NO: 473390 - RNA, 19 nt, Homo sapiens
  misc_RNA (1)...(19): siRNA sense strand
gaaccugcuaagucuuuau

SEQ ID NO: 473391 - RNA, 19 nt, Homo sapiens
  misc_RNA (1)...(19): siRNA sense strand
ucuccugcagcauuuauua

SEQ ID NO: 473392 - RNA, 19 nt, Homo sapiens
  misc_RNA (1)...(19): siRNA sense strand
gagggaaagccacccaaca

SEQ ID NO: 473393 - RNA, 19 nt, Homo sapiens
  misc_RNA (1)...(19): siRNA sense strand
gaaagacacuccaacuaau

SEQ ID NO: 473394 - RNA, 19 nt, Homo sapiens
  misc_RNA (1)...(19): siRNA sense strand
cagcaggaauuacuucuua

SEQ ID NO: 473395 - RNA, 19 nt, Homo sapiens
  misc_RNA (1)...(19): siRNA sense strand
gaacaaaugcgacagcaaa

SEQ ID NO: 473396 - RNA, 19 nt, Homo sapiens
  misc_RNA (1)...(19): siRNA sense strand
gcaaaugguuucacagcaa

SEQ ID NO: 473397 - RNA, 19 nt, Homo sapiens
  misc_RNA (1)...(19): siRNA sense strand
guacagaaguaaagcagaa

SEQ ID NO: 473398 - RNA, 19 nt, Homo sapiens
  misc_RNA (1)...(19): siRNA sense strand
ggacagaccucaggaugau

SEQ ID NO: 473399 - RNA, 19 nt, Homo sapiens
  misc_RNA (1)...(19): siRNA sense strand
gaacaucuccauccuacaa

SEQ ID NO: 473400 - RNA, 19 nt, Homo sapiens
  misc_RNA (1)...(19): siRNA sense strand
cgaaagacacuccaacuaa

SEQ ID NO: 473401 - RNA, 19 nt, Homo sapiens
  misc_RNA (1)...(19): siRNA sense strand
gaacaaacugcuuucgaaa

SEQ ID NO: 473402 - RNA, 19 nt, Homo sapiens
  misc_RNA (1)...(19): siRNA sense strand
ugaacaaacugcuuucgaa

SEQ ID NO: 473403 - RNA, 19 nt, Homo sapiens
  misc_RNA (1)...(19): siRNA sense strand
caacaagaacuccuagaaa

SEQ ID NO: 473404 - RNA, 19 nt, Homo sapiens
  misc_RNA (1)...(19): siRNA sense strand
gaaacagcaugagaacuug

SEQ ID NO: 473405 - RNA, 19 nt, Homo sapiens
  misc_RNA (1)...(19): siRNA sense strand
caucucaccuuuagaccua

SEQ ID NO: 473406 - RNA, 19 nt, Homo sapiens
  misc_RNA (1)...(19): siRNA sense strand
gcaacaagaacuccuagaa

SEQ ID NO: 473407 - RNA, 19 nt, Homo sapiens
  misc_RNA (1)...(19): siRNA sense strand
gcagaagcuucaagaguuc

SEQ ID NO: 473408 - RNA, 19 nt, Homo sapiens
  misc_RNA (1)...(19): siRNA sense strand
gcggaaggauggaaauguu

SEQ ID NO: 473409 - RNA, 19 nt, Homo sapiens
  misc_RNA (1)...(19): siRNA sense strand
aaagauagaggacgagaaa

SEQ ID NO: 473410 - RNA, 19 nt, Homo sapiens
  misc_RNA (1)...(19): siRNA sense strand
gcucaaugcuucgaauuca

SEQ ID NO: 473411 - RNA, 19 nt, Homo sapiens
  misc_RNA (1)...(19): siRNA sense strand
gaaggugcgguccagguua

SEQ ID NO: 473412 - RNA, 19 nt, Homo sapiens
  misc_RNA (1)...(19): siRNA sense strand
ucacagcaacgcauucuaa

SEQ ID NO: 473413 - RNA, 19 nt, Homo sapiens
  misc_RNA (1)...(19): siRNA sense strand
cauuagagguacccacaaa

SEQ ID NO: 473414 - RNA, 19 nt, Homo sapiens
  misc_RNA (1)...(19): siRNA sense strand
cagcaacgcauucuaauuc

SEQ ID NO: 473415 - RNA, 19 nt, Homo sapiens
  misc_RNA (1)...(19): siRNA sense strand
gagcccaucucaccuuuag

SEQ ID NO: 473416 - RNA, 19 nt, Homo sapiens
  misc_RNA (1)...(19): siRNA sense strand
gaacccagucugcaccuuu

SEQ ID NO: 473417 - RNA, 19 nt, Homo sapiens
  misc_RNA (1)...(19): siRNA sense strand
cgaaaucuauugaacaacu

SEQ ID NO: 473418 - RNA, 19 nt, Homo sapiens
  misc_RNA (1)...(19): siRNA sense strand
aaacugcuuucgaaaucua

SEQ ID NO: 473419 - RNA, 19 nt, Homo sapiens
  misc_RNA (1)...(19): siRNA sense strand
acaaacugcuuucgaaauc

SEQ ID NO: 473420 - RNA, 19 nt, Homo sapiens
  misc_RNA (1)...(19): siRNA sense strand
cgaauucacucaaagaaaa

SEQ ID NO: 473421 - RNA, 19 nt, Homo sapiens
  misc_RNA (1)...(19): siRNA sense strand
uggagaagcagaagcaaua

SEQ ID NO: 473422 - RNA, 19 nt, Homo sapiens
  misc_RNA (1)...(19): siRNA sense strand
gaaagggcaguggcaagua

SEQ ID NO: 473423 - RNA, 19 nt, Homo sapiens
  misc_RNA (1)...(19): siRNA sense strand
gaugugaagucagaaguuc

SEQ ID NO: 473424 - RNA, 19 nt, Homo sapiens
  misc_RNA (1)...(19): siRNA sense strand
guaaaucagcaacgaaaga

SEQ ID NO: 473425 - RNA, 19 nt, Homo sapiens
  misc_RNA (1)...(19): siRNA sense strand
gaguaaaucagcaacgaaa

SEQ ID NO: 473426 - RNA, 19 nt, Homo sapiens
  misc_RNA (1)...(19): siRNA sense strand
gaaaucuauugaacaacug

SEQ ID NO: 473427 - RNA, 19 nt, Homo sapiens
  misc_RNA (1)...(19): siRNA sense strand
ggacagugaugaagaugcu

SEQ ID NO: 473428 - RNA, 19 nt, Homo sapiens
  misc_RNA (1)...(19): siRNA sense strand
agaaacagcaugagaacuu

SEQ ID NO: 473429 - RNA, 19 nt, Homo sapiens
  misc_RNA (1)...(19): siRNA sense strand
caacuggaaguguuacuga

SEQ ID NO: 473430 - RNA, 19 nt, Homo sapiens
  misc_RNA (1)...(19): siRNA sense strand
agcagaagcuucaagaguu

SEQ ID NO: 473431 - RNA, 19 nt, Homo sapiens
  misc_RNA (1)...(19): siRNA sense strand
gcagcuuccuccucucaga

SEQ ID NO: 473432 - RNA, 19 nt, Homo sapiens
  misc_RNA (1)...(19): siRNA sense strand
ccaugaaccugcuaagucu

SEQ ID NO: 473433 - RNA, 19 nt, Homo sapiens
  misc_RNA (1)...(19): siRNA sense strand
ggauggaaauguugucacu

SEQ ID NO: 473434 - RNA, 19 nt, Homo sapiens
  misc_RNA (1)...(19): siRNA sense strand
cuucaagaguuccuacuga

SEQ ID NO: 473435 - RNA, 19 nt, Homo sapiens
  misc_RNA (1)...(19): siRNA sense strand
ugaugaagaugcucagauc

SEQ ID NO: 473436 - RNA, 19 nt, Homo sapiens
  misc_RNA (1)...(19): siRNA sense strand
uggcucagcuggucauuca

SEQ ID NO: 473437 - RNA, 19 nt, Homo sapiens
  misc_RNA (1)...(19): siRNA sense strand
ccucugagcccaacuugaa

SEQ ID NO: 473438 - RNA, 19 nt, Homo sapiens
  misc_RNA (1)...(19): siRNA sense strand
gcaagaacaggaaguagag

SEQ ID NO: 473439 - RNA, 19 nt, Homo sapiens
  misc_RNA (1)...(19): siRNA sense strand
ccacccucauguuacuuua

SEQ ID NO: 473440 - RNA, 19 nt, Homo sapiens
  misc_RNA (1)...(19): siRNA sense strand
gacagaauccucagucagu

SEQ ID NO: 473441 - RNA, 19 nt, Homo sapiens
  misc_RNA (1)...(19): siRNA sense strand
gagaauuucaccuggcauu

SEQ ID NO: 473442 - RNA, 19 nt, Homo sapiens
  misc_RNA (1)...(19): siRNA sense strand
ucuuguagcugguggaguu

SEQ ID NO: 473443 - RNA, 19 nt, Homo sapiens
  misc_RNA (1)...(19): siRNA sense strand
gagcacaagaugcaaagga

SEQ ID NO: 473444 - RNA, 19 nt, Homo sapiens
  misc_RNA (1)...(19): siRNA sense strand
cugcagcauuuauuauuga

SEQ ID NO: 473445 - RNA, 19 nt, Homo sapiens
  misc_RNA (1)...(19): siRNA sense strand
caacgcauucuaauucaug

SEQ ID NO: 473446 - RNA, 19 nt, Homo sapiens
  misc_RNA (1)...(19): siRNA sense strand
gaaaaugagacuucgguuu

SEQ ID NO: 473447 - RNA, 19 nt, Homo sapiens
  misc_RNA (1)...(19): siRNA sense strand
acagaauccucagucagua

SEQ ID NO: 473448 - RNA, 19 nt, Homo sapiens
  misc_RNA (1)...(19): siRNA sense strand
gcagaggcaagaacaggaa

SEQ ID NO: 473449 - RNA, 19 nt, Homo sapiens
  misc_RNA (1)...(19): siRNA sense strand
gcaacaccagcaauucuug

SEQ ID NO: 473450 - RNA, 19 nt, Homo sapiens
  misc_RNA (1)...(19): siRNA sense strand
gcauucuaauucaugaaga

SEQ ID NO: 473451 - RNA, 19 nt, Homo sapiens
  misc_RNA (1)...(19): siRNA sense strand
agagaggcaucgcagagaa

SEQ ID NO: 473452 - RNA, 19 nt, Homo sapiens
  misc_RNA (1)...(19): siRNA sense strand
gcaacgcauucuaauucau

SEQ ID NO: 473453 - RNA, 19 nt, Homo sapiens
  misc_RNA (1)...(19): siRNA sense strand
caguggaugugaagucaga

SEQ ID NO: 473454 - RNA, 19 nt, Homo sapiens
  misc_RNA (1)...(19): siRNA sense strand
ccugcagcauuuauuauug

SEQ ID NO: 473455 - RNA, 19 nt, Homo sapiens
  misc_RNA (1)...(19): siRNA sense strand
aacaagaacuccuagaaaa

SEQ ID NO: 473456 - RNA, 19 nt, Homo sapiens
  misc_RNA (1)...(19): siRNA sense strand
gcagauccacaugaacaaa

SEQ ID NO: 473457 - RNA, 19 nt, Homo sapiens
  misc_RNA (1)...(19): siRNA sense strand
cagcagauccacaugaaca

SEQ ID NO: 473458 - RNA, 19 nt, Homo sapiens
  misc_RNA (1)...(19): siRNA sense strand
gaauuucaccuggcauuag

SEQ ID NO: 473459 - RNA, 19 nt, Homo sapiens
  misc_RNA (1)...(19): siRNA sense strand
gggccaacuggaaguguua

SEQ ID NO: 473460 - RNA, 19 nt, Homo sapiens
  misc_RNA (1)...(19): siRNA sense strand
ggucccaguucaccaaaca

SEQ ID NO: 473461 - RNA, 19 nt, Homo sapiens
  misc_RNA (1)...(19): siRNA sense strand
aaggugcgguccagguuaa

SEQ ID NO: 473462 - RNA, 19 nt, Homo sapiens
  misc_RNA (1)...(19): siRNA sense strand
acacaucauuggaucaaag

SEQ ID NO: 473463 - RNA, 19 nt, Homo sapiens
  misc_RNA (1)...(19): siRNA sense strand
ggcaagaacaggaaguaga

SEQ ID NO: 473464 - RNA, 19 nt, Homo sapiens
  misc_RNA (1)...(19): siRNA sense strand
gaggcaagaacaggaagua

SEQ ID NO: 473465 - RNA, 19 nt, Homo sapiens
  misc_RNA (1)...(19): siRNA sense strand
uuagagguacccacaaauu

SEQ ID NO: 473466 - RNA, 19 nt, Homo sapiens
  misc_RNA (1)...(19): siRNA sense strand
ggaaggauggaaauguugu

SEQ ID NO: 473467 - RNA, 19 nt, Homo sapiens
  misc_RNA (1)...(19): siRNA sense strand
cacaagaugcaaaggauga

SEQ ID NO: 473468 - RNA, 19 nt, Homo sapiens
  misc_RNA (1)...(19): siRNA sense strand
cuuuauaccucuccuucuu

SEQ ID NO: 473469 - RNA, 19 nt, Homo sapiens
  misc_RNA (1)...(19): siRNA sense strand
ugaaccugcuaagucuuua

SEQ ID NO: 473470 - RNA, 19 nt, Homo sapiens
  misc_RNA (1)...(19): siRNA sense strand
ggaugugaagucagaaguu

SEQ ID NO: 473471 - RNA, 19 nt, Homo sapiens
  misc_RNA (1)...(19): siRNA sense strand
uagagguacccacaaauug

SEQ ID NO: 473472 - RNA, 19 nt, Homo sapiens
  misc_RNA (1)...(19): siRNA sense strand
uuauaccucuccuucuuug

SEQ ID NO: 473473 - RNA, 19 nt, Homo sapiens
  misc_RNA (1)...(19): siRNA sense strand
aaagacacuccaacuaaug

SEQ ID NO: 473474 - RNA, 19 nt, Homo sapiens
  misc_RNA (1)...(19): siRNA sense strand
gcaccaggcucagcuucag

SEQ ID NO: 473475 - RNA, 19 nt, Homo sapiens
  misc_RNA (1)...(19): siRNA sense strand
gcaggaauuacuucuuauc

SEQ ID NO: 473476 - RNA, 19 nt, Homo sapiens
  misc_RNA (1)...(19): siRNA sense strand
gaaguguuacugaaaauga

SEQ ID NO: 473477 - RNA, 19 nt, Homo sapiens
  misc_RNA (1)...(19): siRNA sense strand
gcucagauccaggaaaugg

SEQ ID NO: 473478 - RNA, 19 nt, Homo sapiens
  misc_RNA (1)...(19): siRNA sense strand
caacagcaacaccagcaau

SEQ ID NO: 473479 - RNA, 19 nt, Homo sapiens
  misc_RNA (1)...(19): siRNA sense strand
ucucagaggcaaagauaga

SEQ ID NO: 473480 - RNA, 19 nt, Homo sapiens
  misc_RNA (1)...(19): siRNA sense strand
gcagugcuuguguggauga

SEQ ID NO: 473481 - RNA, 19 nt, Homo sapiens
  misc_RNA (1)...(19): siRNA sense strand
cacaugaacaaacugcuuu

SEQ ID NO: 473482 - RNA, 19 nt, Homo sapiens
  misc_RNA (1)...(19): siRNA sense strand
aauuucaccuggcauuaga

SEQ ID NO: 473483 - RNA, 19 nt, Homo sapiens
  misc_RNA (1)...(19): siRNA sense strand
gcaacaaaagagagaauuu

SEQ ID NO: 473484 - RNA, 19 nt, Homo sapiens
  misc_RNA (1)...(19): siRNA sense strand
guugucacuucauucaaga

SEQ ID NO: 473485 - RNA, 19 nt, Homo sapiens
  misc_RNA (1)...(19): siRNA sense strand
aaacagaaaguggcagaga

SEQ ID NO: 473486 - RNA, 19 nt, Homo sapiens
  misc_RNA (1)...(19): siRNA sense strand
ggaaauguugucacuucau

SEQ ID NO: 473487 - RNA, 19 nt, Homo sapiens
  misc_RNA (1)...(19): siRNA sense strand
caaacugcuuucgaaaucu

SEQ ID NO: 473488 - RNA, 19 nt, Homo sapiens
  misc_RNA (1)...(19): siRNA sense strand
ccacaugaacaaacugcuu

SEQ ID NO: 473489 - RNA, 19 nt, Homo sapiens
  misc_RNA (1)...(19): siRNA sense strand
cagcagcagauccacauga

SEQ ID NO: 473490 - RNA, 19 nt, Homo sapiens
  misc_RNA (1)...(19): siRNA sense strand
gaaccugcuaagucuuuau

SEQ ID NO: 473491 - RNA, 19 nt, Homo sapiens
  misc_RNA (1)...(19): siRNA sense strand
ucuccugcagcauuuauua

SEQ ID NO: 473492 - RNA, 19 nt, Homo sapiens
  misc_RNA (1)...(19): siRNA sense strand
gagggaaagccacccaaca

SEQ ID NO: 473493 - RNA, 19 nt, Homo sapiens
  misc_RNA (1)...(19): siRNA sense strand
gaaagacacuccaacuaau

SEQ ID NO: 473494 - RNA, 19 nt, Homo sapiens
  misc_RNA (1)...(19): siRNA sense strand
cagcaggaauuacuucuua

SEQ ID NO: 473495 - RNA, 19 nt, Homo sapiens
  misc_RNA (1)...(19): siRNA sense strand
gaacaaaugcgacagcaaa

SEQ ID NO: 473496 - RNA, 19 nt, Homo sapiens
  misc_RNA (1)...(19): siRNA sense strand
gcaaaugguuucacagcaa

SEQ ID NO: 473497 - RNA, 19 nt, Homo sapiens
  misc_RNA (1)...(19): siRNA sense strand
guacagaaguaaagcagaa

SEQ ID NO: 473498 - RNA, 19 nt, Homo sapiens
  misc_RNA (1)...(19): siRNA sense strand
ggacagaccucaggaugau

SEQ ID NO: 473499 - RNA, 19 nt, Homo sapiens
  misc_RNA (1)...(19): siRNA sense strand
gaacaucuccauccuacaa

SEQ ID NO: 473500 - RNA, 19 nt, Homo sapiens
  misc_RNA (1)...(19): siRNA sense strand
cgaaagacacuccaacuaa

SEQ ID NO: 473501 - RNA, 19 nt, Homo sapiens
  misc_RNA (1)...(19): siRNA sense strand
gaacaaacugcuuucgaaa

SEQ ID NO: 473502 - RNA, 19 nt, Homo sapiens
  misc_RNA (1)...(19): siRNA sense strand
ugaacaaacugcuuucgaa

SEQ ID NO: 473503 - RNA, 19 nt, Homo sapiens
  misc_RNA (1)...(19): siRNA sense strand
caacaagaacuccuagaaa

SEQ ID NO: 473504 - RNA, 19 nt, Homo sapiens
  misc_RNA (1)...(19): siRNA sense strand
gaaacagcaugagaacuug

SEQ ID NO: 473505 - RNA, 19 nt, Homo sapiens
  misc_RNA (1)...(19): siRNA sense strand
caucucaccuuuagaccua

SEQ ID NO: 473506 - RNA, 19 nt, Homo sapiens
  misc_RNA (1)...(19): siRNA sense strand
gcaacaagaacuccuagaa

SEQ ID NO: 473507 - RNA, 19 nt, Homo sapiens
  misc_RNA (1)...(19): siRNA sense strand
gcagaagcuucaagaguuc

SEQ ID NO: 473508 - RNA, 19 nt, Homo sapiens
  misc_RNA (1)...(19): siRNA sense strand
gcggaaggauggaaauguu

SEQ ID NO: 473509 - RNA, 19 nt, Homo sapiens
  misc_RNA (1)...(19): siRNA sense strand
aaagauagaggacgagaaa

SEQ ID NO: 473510 - RNA, 19 nt, Homo sapiens
  misc_RNA (1)...(19): siRNA sense strand
gcucaaugcuucgaauuca

SEQ ID NO: 473511 - RNA, 19 nt, Homo sapiens
  misc_RNA (1)...(19): siRNA sense strand
gaaggugcgguccagguua

SEQ ID NO: 473512 - RNA, 19 nt, Homo sapiens
  misc_RNA (1)...(19): siRNA sense strand
ucacagcaacgcauucuaa

SEQ ID NO: 473513 - RNA, 19 nt, Homo sapiens
  misc_RNA (1)...(19): siRNA sense strand
cauuagagguacccacaaa

SEQ ID NO: 473514 - RNA, 19 nt, Homo sapiens
  misc_RNA (1)...(19): siRNA sense strand
cagcaacgcauucuaauuc

SEQ ID NO: 473515 - RNA, 19 nt, Homo sapiens
  misc_RNA (1)...(19): siRNA sense strand
gagcccaucucaccuuuag

SEQ ID NO: 473516 - RNA, 19 nt, Homo sapiens
  misc_RNA (1)...(19): siRNA sense strand
gaacccagucugcaccuuu

SEQ ID NO: 473517 - RNA, 19 nt, Homo sapiens
  misc_RNA (1)...(19): siRNA sense strand
cgaaaucuauugaacaacu

SEQ ID NO: 473518 - RNA, 19 nt, Homo sapiens
  misc_RNA (1)...(19): siRNA sense strand
aaacugcuuucgaaaucua

SEQ ID NO: 473519 - RNA, 19 nt, Homo sapiens
  misc_RNA (1)...(19): siRNA sense strand
acaaacugcuuucgaaauc

SEQ ID NO: 473520 - RNA, 19 nt, Homo sapiens
  misc_RNA (1)...(19): siRNA sense strand
cgaauucacucaaagaaaa

SEQ ID NO: 473521 - RNA, 19 nt, Homo sapiens
  misc_RNA (1)...(19): siRNA sense strand
uggagaagcagaagcaaua

SEQ ID NO: 473522 - RNA, 19 nt, Homo sapiens
  misc_RNA (1)...(19): siRNA sense strand
gaaagggcaguggcaagua

SEQ ID NO: 473523 - RNA, 19 nt, Homo sapiens
  misc_RNA (1)...(19): siRNA sense strand
gaugugaagucagaaguuc

SEQ ID NO: 473524 - RNA, 19 nt, Homo sapiens
  misc_RNA (1)...(19): siRNA sense strand
guaaaucagcaacgaaaga

SEQ ID NO: 473525 - RNA, 19 nt, Homo sapiens
  misc_RNA (1)...(19): siRNA sense strand
gaguaaaucagcaacgaaa

SEQ ID NO: 473526 - RNA, 19 nt, Homo sapiens
  misc_RNA (1)...(19): siRNA sense strand
gaaaucuauugaacaacug

SEQ ID NO: 473527 - RNA, 19 nt, Homo sapiens
  misc_RNA (1)...(19): siRNA sense strand
ggacagugaugaagaugcu

SEQ ID NO: 473528 - RNA, 19 nt, Homo sapiens
  misc_RNA (1)...(19): siRNA sense strand
agaaacagcaugagaacuu

SEQ ID NO: 473529 - RNA, 19 nt, Homo sapiens
  misc_RNA (1)...(19): siRNA sense strand
caacuggaaguguuacuga

SEQ ID NO: 473530 - RNA, 19 nt, Homo sapiens
  misc_RNA (1)...(19): siRNA sense strand
agcagaagcuucaagaguu

SEQ ID NO: 473531 - RNA, 19 nt, Homo sapiens
  misc_RNA (1)...(19): siRNA sense strand
gcagcuuccuccucucaga

SEQ ID NO: 473532 - RNA, 19 nt, Homo sapiens
  misc_RNA (1)...(19): siRNA sense strand
ccaugaaccugcuaagucu

SEQ ID NO: 473533 - RNA, 19 nt, Homo sapiens
  misc_RNA (1)...(19): siRNA sense strand
ggauggaaauguugucacu

SEQ ID NO: 473534 - RNA, 19 nt, Homo sapiens
  misc_RNA (1)...(19): siRNA sense strand
cuucaagaguuccuacuga

SEQ ID NO: 473535 - RNA, 19 nt, Homo sapiens
  misc_RNA (1)...(19): siRNA sense strand
ugaugaagaugcucagauc

SEQ ID NO: 473536 - RNA, 19 nt, Homo sapiens
  misc_RNA (1)...(19): siRNA sense strand
uggcucagcuggucauuca

SEQ ID NO: 473537 - RNA, 19 nt, Homo sapiens
  misc_RNA (1)...(19): siRNA sense strand
ccucugagcccaacuugaa

SEQ ID NO: 473538 - RNA, 19 nt, Homo sapiens
  misc_RNA (1)...(19): siRNA sense strand
gcaagaacaggaaguagag

SEQ ID NO: 473539 - RNA, 19 nt, Homo sapiens
  misc_RNA (1)...(19): siRNA sense strand
ccacccucauguuacuuua

SEQ ID NO: 473540 - RNA, 19 nt, Homo sapiens
  misc_RNA (1)...(19): siRNA sense strand
gacagaauccucagucagu

SEQ ID NO: 473541 - RNA, 19 nt, Homo sapiens
  misc_RNA (1)...(19): siRNA sense strand
gagaauuucaccuggcauu

SEQ ID NO: 473542 - RNA, 19 nt, Homo sapiens
  misc_RNA (1)...(19): siRNA sense strand
ucuuguagcugguggaguu

SEQ ID NO: 473543 - RNA, 19 nt, Homo sapiens
  misc_RNA (1)...(19): siRNA sense strand
gagcacaagaugcaaagga

SEQ ID NO: 473544 - RNA, 19 nt, Homo sapiens
  misc_RNA (1)...(19): siRNA sense strand
cugcagcauuuauuauuga

SEQ ID NO: 473545 - RNA, 19 nt, Homo sapiens
  misc_RNA (1)...(19): siRNA sense strand
caacgcauucuaauucaug

SEQ ID NO: 473546 - RNA, 19 nt, Homo sapiens
  misc_RNA (1)...(19): siRNA sense strand
gaaaaugagacuucgguuu

SEQ ID NO: 473547 - RNA, 19 nt, Homo sapiens
  misc_RNA (1)...(19): siRNA sense strand
acagaauccucagucagua

SEQ ID NO: 473548 - RNA, 19 nt, Homo sapiens
  misc_RNA (1)...(19): siRNA sense strand
gcagaggcaagaacaggaa

SEQ ID NO: 473549 - RNA, 19 nt, Homo sapiens
  misc_RNA (1)...(19): siRNA sense strand
gcaacaccagcaauucuug

SEQ ID NO: 473550 - RNA, 19 nt, Homo sapiens
  misc_RNA (1)...(19): siRNA sense strand
gcauucuaauucaugaaga

SEQ ID NO: 473551 - RNA, 19 nt, Homo sapiens
  misc_RNA (1)...(19): siRNA sense strand
agagaggcaucgcagagaa

SEQ ID NO: 473552 - RNA, 19 nt, Homo sapiens
  misc_RNA (1)...(19): siRNA sense strand
gcaacgcauucuaauucau

SEQ ID NO: 473553 - RNA, 19 nt, Homo sapiens
  misc_RNA (1)...(19): siRNA sense strand
caguggaugugaagucaga

SEQ ID NO: 473554 - RNA, 19 nt, Homo sapiens
  misc_RNA (1)...(19): siRNA sense strand
ccugcagcauuuauuauug

SEQ ID NO: 473555 - RNA, 19 nt, Homo sapiens
  misc_RNA (1)...(19): siRNA sense strand
aacaagaacuccuagaaaa

SEQ ID NO: 473556 - RNA, 19 nt, Homo sapiens
  misc_RNA (1)...(19): siRNA sense strand
gcagauccacaugaacaaa

SEQ ID NO: 473557 - RNA, 19 nt, Homo sapiens
  misc_RNA (1)...(19): siRNA sense strand
cagcagauccacaugaaca

SEQ ID NO: 473558 - RNA, 19 nt, Homo sapiens
  misc_RNA (1)...(19): siRNA sense strand
gaauuucaccuggcauuag

SEQ ID NO: 473559 - RNA, 19 nt, Homo sapiens
  misc_RNA (1)...(19): siRNA sense strand
gggccaacuggaaguguua

SEQ ID NO: 473560 - RNA, 19 nt, Homo sapiens
  misc_RNA (1)...(19): siRNA sense strand
ggucccaguucaccaaaca

SEQ ID NO: 473561 - RNA, 19 nt, Homo sapiens
  misc_RNA (1)...(19): siRNA sense strand
aaggugcgguccagguuaa

SEQ ID NO: 473562 - RNA, 19 nt, Homo sapiens
  misc_RNA (1)...(19): siRNA sense strand
acacaucauuggaucaaag

SEQ ID NO: 473563 - RNA, 19 nt, Homo sapiens
  misc_RNA (1)...(19): siRNA sense strand
ggcaagaacaggaaguaga

SEQ ID NO: 473564 - RNA, 19 nt, Homo sapiens
  misc_RNA (1)...(19): siRNA sense strand
gaggcaagaacaggaagua

SEQ ID NO: 473565 - RNA, 19 nt, Homo sapiens
  misc_RNA (1)...(19): siRNA sense strand
uuagagguacccacaaauu

SEQ ID NO: 473566 - RNA, 19 nt, Homo sapiens
  misc_RNA (1)...(19): siRNA sense strand
ggaaggauggaaauguugu

SEQ ID NO: 473567 - RNA, 19 nt, Homo sapiens
  misc_RNA (1)...(19): siRNA sense strand
cacaagaugcaaaggauga

SEQ ID NO: 473568 - RNA, 19 nt, Homo sapiens
  misc_RNA (1)...(19): siRNA sense strand
cuuuauaccucuccuucuu

SEQ ID NO: 473569 - RNA, 19 nt, Homo sapiens
  misc_RNA (1)...(19): siRNA sense strand
ugaaccugcuaagucuuua

SEQ ID NO: 473570 - RNA, 19 nt, Homo sapiens
  misc_RNA (1)...(19): siRNA sense strand
ggaugugaagucagaaguu

SEQ ID NO: 473571 - RNA, 19 nt, Homo sapiens
  misc_RNA (1)...(19): siRNA sense strand
uagagguacccacaaauug

SEQ ID NO: 473572 - RNA, 19 nt, Homo sapiens
  misc_RNA (1)...(19): siRNA sense strand
uuauaccucuccuucuuug

SEQ ID NO: 473573 - RNA, 19 nt, Homo sapiens
  misc_RNA (1)...(19): siRNA sense strand
aaagacacuccaacuaaug

SEQ ID NO: 473574 - RNA, 19 nt, Homo sapiens
  misc_RNA (1)...(19): siRNA sense strand
gcaccaggcucagcuucag

SEQ ID NO: 473575 - RNA, 19 nt, Homo sapiens
  misc_RNA (1)...(19): siRNA sense strand
gcaggaauuacuucuuauc

SEQ ID NO: 473576 - RNA, 19 nt, Homo sapiens
  misc_RNA (1)...(19): siRNA sense strand
gaaguguuacugaaaauga

SEQ ID NO: 473577 - RNA, 19 nt, Homo sapiens
  misc_RNA (1)...(19): siRNA sense strand
gcucagauccaggaaaugg

SEQ ID NO: 473578 - RNA, 19 nt, Homo sapiens
  misc_RNA (1)...(19): siRNA sense strand
caacagcaacaccagcaau

SEQ ID NO: 473579 - RNA, 19 nt, Homo sapiens
  misc_RNA (1)...(19): siRNA sense strand
ucucagaggcaaagauaga

SEQ ID NO: 473580 - RNA, 19 nt, Homo sapiens
  misc_RNA (1)...(19): siRNA sense strand
gcagugcuuguguggauga

SEQ ID NO: 473581 - RNA, 19 nt, Homo sapiens
  misc_RNA (1)...(19): siRNA sense strand
cacaugaacaaacugcuuu

SEQ ID NO: 473582 - RNA, 19 nt, Homo sapiens
  misc_RNA (1)...(19): siRNA sense strand
aauuucaccuggcauuaga

SEQ ID NO: 473583 - RNA, 19 nt, Homo sapiens
  misc_RNA (1)...(19): siRNA sense strand
gcaacaaaagagagaauuu

SEQ ID NO: 473584 - RNA, 19 nt, Homo sapiens
  misc_RNA (1)...(19): siRNA sense strand
guugucacuucauucaaga

SEQ ID NO: 473585 - RNA, 19 nt, Homo sapiens
  misc_RNA (1)...(19): siRNA sense strand
aaacagaaaguggcagaga

SEQ ID NO: 473586 - RNA, 19 nt, Homo sapiens
  misc_RNA (1)...(19): siRNA sense strand
ggaaauguugucacuucau

SEQ ID NO: 473587 - RNA, 19 nt, Homo sapiens
  misc_RNA (1)...(19): siRNA sense strand
caaacugcuuucgaaaucu

SEQ ID NO: 473588 - RNA, 19 nt, Homo sapiens
  misc_RNA (1)...(19): siRNA sense strand
ccacaugaacaaacugcuu

SEQ ID NO: 473589 - RNA, 19 nt, Homo sapiens
  misc_RNA (1)...(19): siRNA sense strand
cagcagcagauccacauga

SEQ ID NO: 473590 - RNA, 19 nt, Homo sapiens
  misc_RNA (1)...(19): siRNA sense strand
gaaccugcuaagucuuuau

SEQ ID NO: 473591 - RNA, 19 nt, Homo sapiens
  misc_RNA (1)...(19): siRNA sense strand
ucuccugcagcauuuauua

SEQ ID NO: 473592 - RNA, 19 nt, Homo sapiens
  misc_RNA (1)...(19): siRNA sense strand
gagggaaagccacccaaca

SEQ ID NO: 473593 - RNA, 19 nt, Homo sapiens
  misc_RNA (1)...(19): siRNA sense strand
gaaagacacuccaacuaau

SEQ ID NO: 473594 - RNA, 19 nt, Homo sapiens
  misc_RNA (1)...(19): siRNA sense strand
cagcaggaauuacuucuua

SEQ ID NO: 473595 - RNA, 19 nt, Homo sapiens
  misc_RNA (1)...(19): siRNA sense strand
gaacaaaugcgacagcaaa

SEQ ID NO: 473596 - RNA, 19 nt, Homo sapiens
  misc_RNA (1)...(19): siRNA sense strand
gcaaaugguuucacagcaa

SEQ ID NO: 473597 - RNA, 19 nt, Homo sapiens
  misc_RNA (1)...(19): siRNA sense strand
guacagaaguaaagcagaa

SEQ ID NO: 473598 - RNA, 19 nt, Homo sapiens
  misc_RNA (1)...(19): siRNA sense strand
ggacagaccucaggaugau

SEQ ID NO: 473599 - RNA, 19 nt, Homo sapiens
  misc_RNA (1)...(19): siRNA sense strand
gaacaucuccauccuacaa

SEQ ID NO: 473600 - RNA, 19 nt, Homo sapiens
  misc_RNA (1)...(19): siRNA sense strand
cgaaagacacuccaacuaa

SEQ ID NO: 473601 - RNA, 19 nt, Homo sapiens
  misc_RNA (1)...(19): siRNA sense strand
gaacaaacugcuuucgaaa

SEQ ID NO: 473602 - RNA, 19 nt, Homo sapiens
  misc_RNA (1)...(19): siRNA sense strand
ugaacaaacugcuuucgaa

SEQ ID NO: 473603 - RNA, 19 nt, Homo sapiens
  misc_RNA (1)...(19): siRNA sense strand
caacaagaacuccuagaaa

SEQ ID NO: 473604 - RNA, 19 nt, Homo sapiens
  misc_RNA (1)...(19): siRNA sense strand
gaaacagcaugagaacuug

SEQ ID NO: 473605 - RNA, 19 nt, Homo sapiens
  misc_RNA (1)...(19): siRNA sense strand
caucucaccuuuagaccua

SEQ ID NO: 473606 - RNA, 19 nt, Homo sapiens
  misc_RNA (1)...(19): siRNA sense strand
gcaacaagaacuccuagaa

SEQ ID NO: 473607 - RNA, 19 nt, Homo sapiens
  misc_RNA (1)...(19): siRNA sense strand
gcagaagcuucaagaguuc

SEQ ID NO: 473608 - RNA, 19 nt, Homo sapiens
  misc_RNA (1)...(19): siRNA sense strand
gcggaaggauggaaauguu

SEQ ID NO: 473609 - RNA, 19 nt, Homo sapiens
  misc_RNA (1)...(19): siRNA sense strand
aaagauagaggacgagaaa

SEQ ID NO: 473610 - RNA, 19 nt, Homo sapiens
  misc_RNA (1)...(19): siRNA sense strand
gcucaaugcuucgaauuca

SEQ ID NO: 473611 - RNA, 19 nt, Homo sapiens
  misc_RNA (1)...(19): siRNA sense strand
gaaggugcgguccagguua

SEQ ID NO: 473612 - RNA, 19 nt, Homo sapiens
  misc_RNA (1)...(19): siRNA sense strand
ucacagcaacgcauucuaa

SEQ ID NO: 473613 - RNA, 19 nt, Homo sapiens
  misc_RNA (1)...(19): siRNA sense strand
cauuagagguacccacaaa

SEQ ID NO: 473614 - RNA, 19 nt, Homo sapiens
  misc_RNA (1)...(19): siRNA sense strand
cagcaacgcauucuaauuc

SEQ ID NO: 473615 - RNA, 19 nt, Homo sapiens
  misc_RNA (1)...(19): siRNA sense strand
gagcccaucucaccuuuag

SEQ ID NO: 473616 - RNA, 19 nt, Homo sapiens
  misc_RNA (1)...(19): siRNA sense strand
gaacccagucugcaccuuu

SEQ ID NO: 473617 - RNA, 19 nt, Homo sapiens
  misc_RNA (1)...(19): siRNA sense strand
cgaaaucuauugaacaacu

SEQ ID NO: 473618 - RNA, 19 nt, Homo sapiens
  misc_RNA (1)...(19): siRNA sense strand
aaacugcuuucgaaaucua

SEQ ID NO: 473619 - RNA, 19 nt, Homo sapiens
  misc_RNA (1)...(19): siRNA sense strand
acaaacugcuuucgaaauc

SEQ ID NO: 473620 - RNA, 19 nt, Homo sapiens
  misc_RNA (1)...(19): siRNA sense strand
cgaauucacucaaagaaaa

SEQ ID NO: 473621 - RNA, 19 nt, Homo sapiens
  misc_RNA (1)...(19): siRNA sense strand
uggagaagcagaagcaaua

SEQ ID NO: 473622 - RNA, 19 nt, Homo sapiens
  misc_RNA (1)...(19): siRNA sense strand
gaaagggcaguggcaagua

SEQ ID NO: 473623 - RNA, 19 nt, Homo sapiens
  misc_RNA (1)...(19): siRNA sense strand
gaugugaagucagaaguuc

SEQ ID NO: 473624 - RNA, 19 nt, Homo sapiens
  misc_RNA (1)...(19): siRNA sense strand
guaaaucagcaacgaaaga

SEQ ID NO: 473625 - RNA, 19 nt, Homo sapiens
  misc_RNA (1)...(19): siRNA sense strand
gaguaaaucagcaacgaaa

SEQ ID NO: 473626 - RNA, 19 nt, Homo sapiens
  misc_RNA (1)...(19): siRNA sense strand
gaaaucuauugaacaacug

SEQ ID NO: 473627 - RNA, 19 nt, Homo sapiens
  misc_RNA (1)...(19): siRNA sense strand
ggacagugaugaagaugcu

SEQ ID NO: 473628 - RNA, 19 nt, Homo sapiens
  misc_RNA (1)...(19): siRNA sense strand
agaaacagcaugagaacuu

SEQ ID NO: 473629 - RNA, 19 nt, Homo sapiens
  misc_RNA (1)...(19): siRNA sense strand
caacuggaaguguuacuga

SEQ ID NO: 473630 - RNA, 19 nt, Homo sapiens
  misc_RNA (1)...(19): siRNA sense strand
agcagaagcuucaagaguu

SEQ ID NO: 473631 - RNA, 19 nt, Homo sapiens
  misc_RNA (1)...(19): siRNA sense strand
gcagcuuccuccucucaga

SEQ ID NO: 473632 - RNA, 19 nt, Homo sapiens
  misc_RNA (1)...(19): siRNA sense strand
ccaugaaccugcuaagucu

SEQ ID NO: 473633 - RNA, 19 nt, Homo sapiens
  misc_RNA (1)...(19): siRNA sense strand
ggauggaaauguugucacu

SEQ ID NO: 473634 - RNA, 19 nt, Homo sapiens
  misc_RNA (1)...(19): siRNA sense strand
cuucaagaguuccuacuga

SEQ ID NO: 473635 - RNA, 19 nt, Homo sapiens
  misc_RNA (1)...(19): siRNA sense strand
ugaugaagaugcucagauc

SEQ ID NO: 473636 - RNA, 19 nt, Homo sapiens
  misc_RNA (1)...(19): siRNA sense strand
uggcucagcuggucauuca

SEQ ID NO: 473637 - RNA, 19 nt, Homo sapiens
  misc_RNA (1)...(19): siRNA sense strand
ccucugagcccaacuugaa

SEQ ID NO: 473638 - RNA, 19 nt, Homo sapiens
  misc_RNA (1)...(19): siRNA sense strand
gcaagaacaggaaguagag

SEQ ID NO: 473639 - RNA, 19 nt, Homo sapiens
  misc_RNA (1)...(19): siRNA sense strand
ccacccucauguuacuuua

SEQ ID NO: 473640 - RNA, 19 nt, Homo sapiens
  misc_RNA (1)...(19): siRNA sense strand
gacagaauccucagucagu

SEQ ID NO: 473641 - RNA, 19 nt, Homo sapiens
  misc_RNA (1)...(19): siRNA sense strand
gagaauuucaccuggcauu

SEQ ID NO: 473642 - RNA, 19 nt, Homo sapiens
  misc_RNA (1)...(19): siRNA sense strand
ucuuguagcugguggaguu

SEQ ID NO: 473643 - RNA, 19 nt, Homo sapiens
  misc_RNA (1)...(19): siRNA sense strand
gagcacaagaugcaaagga

SEQ ID NO: 473644 - RNA, 19 nt, Homo sapiens
  misc_RNA (1)...(19): siRNA sense strand
cugcagcauuuauuauuga

SEQ ID NO: 473645 - RNA, 19 nt, Homo sapiens
  misc_RNA (1)...(19): siRNA sense strand
caacgcauucuaauucaug

SEQ ID NO: 473646 - RNA, 19 nt, Homo sapiens
  misc_RNA (1)...(19): siRNA sense strand
gaaaaugagacuucgguuu

SEQ ID NO: 473647 - RNA, 19 nt, Homo sapiens
  misc_RNA (1)...(19): siRNA sense strand
acagaauccucagucagua

SEQ ID NO: 473648 - RNA, 19 nt, Homo sapiens
  misc_RNA (1)...(19): siRNA sense strand
gcagaggcaagaacaggaa

SEQ ID NO: 473649 - RNA, 19 nt, Homo sapiens
  misc_RNA (1)...(19): siRNA sense strand
gcaacaccagcaauucuug

SEQ ID NO: 473650 - RNA, 19 nt, Homo sapiens
  misc_RNA (1)...(19): siRNA sense strand
gcauucuaauucaugaaga

SEQ ID NO: 473651 - RNA, 19 nt, Homo sapiens
  misc_RNA (1)...(19): siRNA sense strand
agagaggcaucgcagagaa

SEQ ID NO: 473652 - RNA, 19 nt, Homo sapiens
  misc_RNA (1)...(19): siRNA sense strand
gcaacgcauucuaauucau

SEQ ID NO: 473653 - RNA, 19 nt, Homo sapiens
  misc_RNA (1)...(19): siRNA sense strand
caguggaugugaagucaga

SEQ ID NO: 473654 - RNA, 19 nt, Homo sapiens
  misc_RNA (1)...(19): siRNA sense strand
ccugcagcauuuauuauug

SEQ ID NO: 473655 - RNA, 19 nt, Homo sapiens
  misc_RNA (1)...(19): siRNA sense strand
aacaagaacuccuagaaaa

SEQ ID NO: 473656 - RNA, 19 nt, Homo sapiens
  misc_RNA (1)...(19): siRNA sense strand
gcagauccacaugaacaaa

SEQ ID NO: 473657 - RNA, 19 nt, Homo sapiens
  misc_RNA (1)...(19): siRNA sense strand
cagcagauccacaugaaca

SEQ ID NO: 473658 - RNA, 19 nt, Homo sapiens
  misc_RNA (1)...(19): siRNA sense strand
gaauuucaccuggcauuag

SEQ ID NO: 473659 - RNA, 19 nt, Homo sapiens
  misc_RNA (1)...(19): siRNA sense strand
gggccaacuggaaguguua

SEQ ID NO: 473660 - RNA, 19 nt, Homo sapiens
  misc_RNA (1)...(19): siRNA sense strand
ggucccaguucaccaaaca

SEQ ID NO: 473661 - RNA, 19 nt, Homo sapiens
  misc_RNA (1)...(19): siRNA sense strand
aaggugcgguccagguuaa

SEQ ID NO: 473662 - RNA, 19 nt, Homo sapiens
  misc_RNA (1)...(19): siRNA sense strand
acacaucauuggaucaaag

SEQ ID NO: 473663 - RNA, 19 nt, Homo sapiens
  misc_RNA (1)...(19): siRNA sense strand
ggcaagaacaggaaguaga

SEQ ID NO: 473664 - RNA, 19 nt, Homo sapiens
  misc_RNA (1)...(19): siRNA sense strand
gaggcaagaacaggaagua

SEQ ID NO: 473665 - RNA, 19 nt, Homo sapiens
  misc_RNA (1)...(19): siRNA sense strand
uuagagguacccacaaauu

SEQ ID NO: 473666 - RNA, 19 nt, Homo sapiens
  misc_RNA (1)...(19): siRNA sense strand
ggaaggauggaaauguugu

SEQ ID NO: 473667 - RNA, 19 nt, Homo sapiens
  misc_RNA (1)...(19): siRNA sense strand
cacaagaugcaaaggauga

SEQ ID NO: 473668 - RNA, 19 nt, Homo sapiens
  misc_RNA (1)...(19): siRNA sense strand
cuuuauaccucuccuucuu

SEQ ID NO: 473669 - RNA, 19 nt, Homo sapiens
  misc_RNA (1)...(19): siRNA sense strand
ugaaccugcuaagucuuua

SEQ ID NO: 473670 - RNA, 19 nt, Homo sapiens
  misc_RNA (1)...(19): siRNA sense strand
ggaugugaagucagaaguu

SEQ ID NO: 473671 - RNA, 19 nt, Homo sapiens
  misc_RNA (1)...(19): siRNA sense strand
uagagguacccacaaauug

SEQ ID NO: 473672 - RNA, 19 nt, Homo sapiens
  misc_RNA (1)...(19): siRNA sense strand
uuauaccucuccuucuuug

SEQ ID NO: 473673 - RNA, 19 nt, Homo sapiens
  misc_RNA (1)...(19): siRNA sense strand
aaagacacuccaacuaaug

SEQ ID NO: 473674 - RNA, 19 nt, Homo sapiens
  misc_RNA (1)...(19): siRNA sense strand
gcaccaggcucagcuucag

SEQ ID NO: 473675 - RNA, 19 nt, Homo sapiens
  misc_RNA (1)...(19): siRNA sense strand
gcaggaauuacuucuuauc

SEQ ID NO: 473676 - RNA, 19 nt, Homo sapiens
  misc_RNA (1)...(19): siRNA sense strand
gaaguguuacugaaaauga

SEQ ID NO: 473677 - RNA, 19 nt, Homo sapiens
  misc_RNA (1)...(19): siRNA sense strand
gcucagauccaggaaaugg

SEQ ID NO: 473678 - RNA, 19 nt, Homo sapiens
  misc_RNA (1)...(19): siRNA sense strand
caacagcaacaccagcaau

SEQ ID NO: 473679 - RNA, 19 nt, Homo sapiens
  misc_RNA (1)...(19): siRNA sense strand
ucucagaggcaaagauaga

SEQ ID NO: 473680 - RNA, 19 nt, Homo sapiens
  misc_RNA (1)...(19): siRNA sense strand
gcagugcuuguguggauga

SEQ ID NO: 473681 - RNA, 19 nt, Homo sapiens
  misc_RNA (1)...(19): siRNA sense strand
cacaugaacaaacugcuuu

SEQ ID NO: 473682 - RNA, 19 nt, Homo sapiens
  misc_RNA (1)...(19): siRNA sense strand
aauuucaccuggcauuaga

SEQ ID NO: 473683 - RNA, 19 nt, Homo sapiens
  misc_RNA (1)...(19): siRNA sense strand
gcaacaaaagagagaauuu

SEQ ID NO: 473684 - RNA, 19 nt, Homo sapiens
  misc_RNA (1)...(19): siRNA sense strand
guugucacuucauucaaga

SEQ ID NO: 473685 - RNA, 19 nt, Homo sapiens
  misc_RNA (1)...(19): siRNA sense strand
aaacagaaaguggcagaga

SEQ ID NO: 473686 - RNA, 19 nt, Homo sapiens
  misc_RNA (1)...(19): siRNA sense strand
ggaaauguugucacuucau

SEQ ID NO: 473687 - RNA, 19 nt, Homo sapiens
  misc_RNA (1)...(19): siRNA sense strand
caaacugcuuucgaaaucu

SEQ ID NO: 473688 - RNA, 19 nt, Homo sapiens
  misc_RNA (1)...(19): siRNA sense strand
ccacaugaacaaacugcuu

SEQ ID NO: 473689 - RNA, 19 nt, Homo sapiens
  misc_RNA (1)...(19): siRNA sense strand
cagcagcagauccacauga

SEQ ID NO: 473690 - RNA, 19 nt, Homo sapiens
  misc_RNA (1)...(19): siRNA sense strand
gaaccugcuaagucuuuau

SEQ ID NO: 473691 - RNA, 19 nt, Homo sapiens
  misc_RNA (1)...(19): siRNA sense strand
ucuccugcagcauuuauua

SEQ ID NO: 473692 - RNA, 19 nt, Homo sapiens
  misc_RNA (1)...(19): siRNA sense strand
gagggaaagccacccaaca

SEQ ID NO: 473693 - RNA, 19 nt, Homo sapiens
  misc_RNA (1)...(19): siRNA sense strand
gaaagacacuccaacuaau

SEQ ID NO: 473694 - RNA, 19 nt, Homo sapiens
  misc_RNA (1)...(19): siRNA sense strand
cagcaggaauuacuucuua

SEQ ID NO: 473695 - RNA, 19 nt, Homo sapiens
  misc_RNA (1)...(19): siRNA sense strand
gaacaaaugcgacagcaaa

SEQ ID NO: 473696 - RNA, 19 nt, Homo sapiens
  misc_RNA (1)...(19): siRNA sense strand
gcaaaugguuucacagcaa

SEQ ID NO: 473697 - RNA, 19 nt, Homo sapiens
  misc_RNA (1)...(19): siRNA sense strand
guacagaaguaaagcagaa

SEQ ID NO: 473698 - RNA, 19 nt, Homo sapiens
  misc_RNA (1)...(19): siRNA sense strand
ggacagaccucaggaugau

SEQ ID NO: 473699 - RNA, 19 nt, Homo sapiens
  misc_RNA (1)...(19): siRNA sense strand
gaacaucuccauccuacaa

SEQ ID NO: 473700 - RNA, 19 nt, Homo sapiens
  misc_RNA (1)...(19): siRNA sense strand
cgaaagacacuccaacuaa

SEQ ID NO: 473701 - RNA, 19 nt, Homo sapiens
  misc_RNA (1)...(19): siRNA sense strand
gaacaaacugcuuucgaaa

SEQ ID NO: 473702 - RNA, 19 nt, Homo sapiens
  misc_RNA (1)...(19): siRNA sense strand
ugaacaaacugcuuucgaa

SEQ ID NO: 473703 - RNA, 19 nt, Homo sapiens
  misc_RNA (1)...(19): siRNA sense strand
caacaagaacuccuagaaa

SEQ ID NO: 473704 - RNA, 19 nt, Homo sapiens
  misc_RNA (1)...(19): siRNA sense strand
gaaacagcaugagaacuug

SEQ ID NO: 473705 - RNA, 19 nt, Homo sapiens
  misc_RNA (1)...(19): siRNA sense strand
caucucaccuuuagaccua

SEQ ID NO: 473706 - RNA, 19 nt, Homo sapiens
  misc_RNA (1)...(19): siRNA sense strand
gcaacaagaacuccuagaa

SEQ ID NO: 473707 - RNA, 19 nt, Homo sapiens
  misc_RNA (1)...(19): siRNA sense strand
gcagaagcuucaagaguuc

SEQ ID NO: 473708 - RNA, 19 nt, Homo sapiens
  misc_RNA (1)...(19): siRNA sense strand
gcggaaggauggaaauguu

SEQ ID NO: 473709 - RNA, 19 nt, Homo sapiens
  misc_RNA (1)...(19): siRNA sense strand
aaagauagaggacgagaaa

SEQ ID NO: 473710 - RNA, 19 nt, Homo sapiens
  misc_RNA (1)...(19): siRNA sense strand
gcucaaugcuucgaauuca

SEQ ID NO: 473711 - RNA, 19 nt, Homo sapiens
  misc_RNA (1)...(19): siRNA sense strand
gaaggugcgguccagguua

SEQ ID NO: 473712 - RNA, 19 nt, Homo sapiens
  misc_RNA (1)...(19): siRNA sense strand
ucacagcaacgcauucuaa

SEQ ID NO: 473713 - RNA, 19 nt, Homo sapiens
  misc_RNA (1)...(19): siRNA sense strand
cauuagagguacccacaaa

SEQ ID NO: 473714 - RNA, 19 nt, Homo sapiens
  misc_RNA (1)...(19): siRNA sense strand
cagcaacgcauucuaauuc

SEQ ID NO: 473715 - RNA, 19 nt, Homo sapiens
  misc_RNA (1)...(19): siRNA sense strand
gagcccaucucaccuuuag

SEQ ID NO: 473716 - RNA, 19 nt, Homo sapiens
  misc_RNA (1)...(19): siRNA sense strand
gaacccagucugcaccuuu

SEQ ID NO: 473717 - RNA, 19 nt, Homo sapiens
  misc_RNA (1)...(19): siRNA sense strand
cgaaaucuauugaacaacu

SEQ ID NO: 473718 - RNA, 19 nt, Homo sapiens
  misc_RNA (1)...(19): siRNA sense strand
aaacugcuuucgaaaucua

SEQ ID NO: 473719 - RNA, 19 nt, Homo sapiens
  misc_RNA (1)...(19): siRNA sense strand
acaaacugcuuucgaaauc

SEQ ID NO: 473720 - RNA, 19 nt, Homo sapiens
  misc_RNA (1)...(19): siRNA sense strand
cgaauucacucaaagaaaa

SEQ ID NO: 473721 - RNA, 19 nt, Homo sapiens
  misc_RNA (1)...(19): siRNA sense strand
uggagaagcagaagcaaua

SEQ ID NO: 473722 - RNA, 19 nt, Homo sapiens
  misc_RNA (1)...(19): siRNA sense strand
gaaagggcaguggcaagua

SEQ ID NO: 473723 - RNA, 19 nt, Homo sapiens
  misc_RNA (1)...(19): siRNA sense strand
gaugugaagucagaaguuc

SEQ ID NO: 473724 - RNA, 19 nt, Homo sapiens
  misc_RNA (1)...(19): siRNA sense strand
guaaaucagcaacgaaaga

SEQ ID NO: 473725 - RNA, 19 nt, Homo sapiens
  misc_RNA (1)...(19): siRNA sense strand
gaguaaaucagcaacgaaa

SEQ ID NO: 473726 - RNA, 19 nt, Homo sapiens
  misc_RNA (1)...(19): siRNA sense strand
gaaaucuauugaacaacug

SEQ ID NO: 473727 - RNA, 19 nt, Homo sapiens
  misc_RNA (1)...(19): siRNA sense strand
ggacagugaugaagaugcu

SEQ ID NO: 473728 - RNA, 19 nt, Homo sapiens
  misc_RNA (1)...(19): siRNA sense strand
agaaacagcaugagaacuu

SEQ ID NO: 473729 - RNA, 19 nt, Homo sapiens
  misc_RNA (1)...(19): siRNA sense strand
caacuggaaguguuacuga

SEQ ID NO: 473730 - RNA, 19 nt, Homo sapiens
  misc_RNA (1)...(19): siRNA sense strand
agcagaagcuucaagaguu

SEQ ID NO: 473731 - RNA, 19 nt, Homo sapiens
  misc_RNA (1)...(19): siRNA sense strand
gcagcuuccuccucucaga

SEQ ID NO: 473732 - RNA, 19 nt, Homo sapiens
  misc_RNA (1)...(19): siRNA sense strand
ccaugaaccugcuaagucu

SEQ ID NO: 473733 - RNA, 19 nt, Homo sapiens
  misc_RNA (1)...(19): siRNA sense strand
ggauggaaauguugucacu

SEQ ID NO: 473734 - RNA, 19 nt, Homo sapiens
  misc_RNA (1)...(19): siRNA sense strand
cuucaagaguuccuacuga

SEQ ID NO: 473735 - RNA, 19 nt, Homo sapiens
  misc_RNA (1)...(19): siRNA sense strand
ugaugaagaugcucagauc

SEQ ID NO: 473736 - RNA, 19 nt, Homo sapiens
  misc_RNA (1)...(19): siRNA sense strand
uggcucagcuggucauuca

SEQ ID NO: 473737 - RNA, 19 nt, Homo sapiens
  misc_RNA (1)...(19): siRNA sense strand
ccucugagcccaacuugaa

SEQ ID NO: 473738 - RNA, 19 nt, Homo sapiens
  misc_RNA (1)...(19): siRNA sense strand
gcaagaacaggaaguagag

SEQ ID NO: 473739 - RNA, 19 nt, Homo sapiens
  misc_RNA (1)...(19): siRNA sense strand
ccacccucauguuacuuua

SEQ ID NO: 473740 - RNA, 19 nt, Homo sapiens
  misc_RNA (1)...(19): siRNA sense strand
gacagaauccucagucagu

SEQ ID NO: 473741 - RNA, 19 nt, Homo sapiens
  misc_RNA (1)...(19): siRNA sense strand
gagaauuucaccuggcauu

SEQ ID NO: 473742 - RNA, 19 nt, Homo sapiens
  misc_RNA (1)...(19): siRNA sense strand
ucuuguagcugguggaguu

SEQ ID NO: 473743 - RNA, 19 nt, Homo sapiens
  misc_RNA (1)...(19): siRNA sense strand
gagcacaagaugcaaagga

SEQ ID NO: 473744 - RNA, 19 nt, Homo sapiens
  misc_RNA (1)...(19): siRNA sense strand
cugcagcauuuauuauuga

SEQ ID NO: 473745 - RNA, 19 nt, Homo sapiens
  misc_RNA (1)...(19): siRNA sense strand
caacgcauucuaauucaug

SEQ ID NO: 473746 - RNA, 19 nt, Homo sapiens
  misc_RNA (1)...(19): siRNA sense strand
gaaaaugagacuucgguuu

SEQ ID NO: 473747 - RNA, 19 nt, Homo sapiens
  misc_RNA (1)...(19): siRNA sense strand
acagaauccucagucagua

SEQ ID NO: 473748 - RNA, 19 nt, Homo sapiens
  misc_RNA (1)...(19): siRNA sense strand
gcagaggcaagaacaggaa

SEQ ID NO: 473749 - RNA, 19 nt, Homo sapiens
  misc_RNA (1)...(19): siRNA sense strand
gcaacaccagcaauucuug

SEQ ID NO: 473750 - RNA, 19 nt, Homo sapiens
  misc_RNA (1)...(19): siRNA sense strand
gcauucuaauucaugaaga

SEQ ID NO: 473751 - RNA, 19 nt, Homo sapiens
  misc_RNA (1)...(19): siRNA sense strand
agagaggcaucgcagagaa

SEQ ID NO: 473752 - RNA, 19 nt, Homo sapiens
  misc_RNA (1)...(19): siRNA sense strand
gcaacgcauucuaauucau

SEQ ID NO: 473753 - RNA, 19 nt, Homo sapiens
  misc_RNA (1)...(19): siRNA sense strand
caguggaugugaagucaga

SEQ ID NO: 473754 - RNA, 19 nt, Homo sapiens
  misc_RNA (1)...(19): siRNA sense strand
ccugcagcauuuauuauug

SEQ ID NO: 473755 - RNA, 19 nt, Homo sapiens
  misc_RNA (1)...(19): siRNA sense strand
aacaagaacuccuagaaaa

SEQ ID NO: 473756 - RNA, 19 nt, Homo sapiens
  misc_RNA (1)...(19): siRNA sense strand
gcagauccacaugaacaaa

SEQ ID NO: 473757 - RNA, 19 nt, Homo sapiens
  misc_RNA (1)...(19): siRNA sense strand
cagcagauccacaugaaca

SEQ ID NO: 473758 - RNA, 19 nt, Homo sapiens
  misc_RNA (1)...(19): siRNA sense strand
gaauuucaccuggcauuag

SEQ ID NO: 473759 - RNA, 19 nt, Homo sapiens
  misc_RNA (1)...(19): siRNA sense strand
gggccaacuggaaguguua

SEQ ID NO: 473760 - RNA, 19 nt, Homo sapiens
  misc_RNA (1)...(19): siRNA sense strand
ggucccaguucaccaaaca

SEQ ID NO: 473761 - RNA, 19 nt, Homo sapiens
  misc_RNA (1)...(19): siRNA sense strand
aaggugcgguccagguuaa

SEQ ID NO: 473762 - RNA, 19 nt, Homo sapiens
  misc_RNA (1)...(19): siRNA sense strand
acacaucauuggaucaaag

SEQ ID NO: 473763 - RNA, 19 nt, Homo sapiens
  misc_RNA (1)...(19): siRNA sense strand
ggcaagaacaggaaguaga

SEQ ID NO: 473764 - RNA, 19 nt, Homo sapiens
  misc_RNA (1)...(19): siRNA sense strand
gaggcaagaacaggaagua

SEQ ID NO: 473765 - RNA, 19 nt, Homo sapiens
  misc_RNA (1)...(19): siRNA sense strand
uuagagguacccacaaauu

SEQ ID NO: 473766 - RNA, 19 nt, Homo sapiens
  misc_RNA (1)...(19): siRNA sense strand
ggaaggauggaaauguugu

SEQ ID NO: 473767 - RNA, 19 nt, Homo sapiens
  misc_RNA (1)...(19): siRNA sense strand
cacaagaugcaaaggauga

SEQ ID NO: 473768 - RNA, 19 nt, Homo sapiens
  misc_RNA (1)...(19): siRNA sense strand
cuuuauaccucuccuucuu

SEQ ID NO: 473769 - RNA, 19 nt, Homo sapiens
  misc_RNA (1)...(19): siRNA sense strand
ugaaccugcuaagucuuua

SEQ ID NO: 473770 - RNA, 19 nt, Homo sapiens
  misc_RNA (1)...(19): siRNA sense strand
ggaugugaagucagaaguu

SEQ ID NO: 473771 - RNA, 19 nt, Homo sapiens
  misc_RNA (1)...(19): siRNA sense strand
uagagguacccacaaauug

SEQ ID NO: 473772 - RNA, 19 nt, Homo sapiens
  misc_RNA (1)...(19): siRNA sense strand
uuauaccucuccuucuuug

SEQ ID NO: 473773 - RNA, 19 nt, Homo sapiens
  misc_RNA (1)...(19): siRNA sense strand
aaagacacuccaacuaaug

SEQ ID NO: 473774 - RNA, 19 nt, Homo sapiens
  misc_RNA (1)...(19): siRNA sense strand
gcaccaggcucagcuucag

SEQ ID NO: 473775 - RNA, 19 nt, Homo sapiens
  misc_RNA (1)...(19): siRNA sense strand
gcaggaauuacuucuuauc

SEQ ID NO: 473776 - RNA, 19 nt, Homo sapiens
  misc_RNA (1)...(19): siRNA sense strand
gaaguguuacugaaaauga

SEQ ID NO: 473777 - RNA, 19 nt, Homo sapiens
  misc_RNA (1)...(19): siRNA sense strand
gcucagauccaggaaaugg

SEQ ID NO: 473778 - RNA, 19 nt, Homo sapiens
  misc_RNA (1)...(19): siRNA sense strand
caacagcaacaccagcaau

SEQ ID NO: 473779 - RNA, 19 nt, Homo sapiens
  misc_RNA (1)...(19): siRNA sense strand
ucucagaggcaaagauaga

SEQ ID NO: 473780 - RNA, 19 nt, Homo sapiens
  misc_RNA (1)...(19): siRNA sense strand
gcagugcuuguguggauga

SEQ ID NO: 473781 - RNA, 19 nt, Homo sapiens
  misc_RNA (1)...(19): siRNA sense strand
cacaugaacaaacugcuuu

SEQ ID NO: 473782 - RNA, 19 nt, Homo sapiens
  misc_RNA (1)...(19): siRNA sense strand
aauuucaccuggcauuaga

SEQ ID NO: 473783 - RNA, 19 nt, Homo sapiens
  misc_RNA (1)...(19): siRNA sense strand
gcaacaaaagagagaauuu

SEQ ID NO: 473784 - RNA, 19 nt, Homo sapiens
  misc_RNA (1)...(19): siRNA sense strand
guugucacuucauucaaga

SEQ ID NO: 473785 - RNA, 19 nt, Homo sapiens
  misc_RNA (1)...(19): siRNA sense strand
aaacagaaaguggcagaga

SEQ ID NO: 473786 - RNA, 19 nt, Homo sapiens
  misc_RNA (1)...(19): siRNA sense strand
ggaaauguugucacuucau

SEQ ID NO: 473787 - RNA, 19 nt, Homo sapiens
  misc_RNA (1)...(19): siRNA sense strand
caaacugcuuucgaaaucu

SEQ ID NO: 473788 - RNA, 19 nt, Homo sapiens
  misc_RNA (1)...(19): siRNA sense strand
ccacaugaacaaacugcuu

SEQ ID NO: 473789 - RNA, 19 nt, Homo sapiens
  misc_RNA (1)...(19): siRNA sense strand
cagcagcagauccacauga

SEQ ID NO: 473790 - RNA, 19 nt, Homo sapiens
  misc_RNA (1)...(19): siRNA sense strand
gaaccugcuaagucuuuau

SEQ ID NO: 473791 - RNA, 19 nt, Homo sapiens
  misc_RNA (1)...(19): siRNA sense strand
ucuccugcagcauuuauua

SEQ ID NO: 473792 - RNA, 19 nt, Homo sapiens
  misc_RNA (1)...(19): siRNA sense strand
gagggaaagccacccaaca

SEQ ID NO: 473793 - RNA, 19 nt, Homo sapiens
  misc_RNA (1)...(19): siRNA sense strand
gaaagacacuccaacuaau

SEQ ID NO: 473794 - RNA, 19 nt, Homo sapiens
  misc_RNA (1)...(19): siRNA sense strand
cagcaggaauuacuucuua

SEQ ID NO: 473795 - RNA, 19 nt, Homo sapiens
  misc_RNA (1)...(19): siRNA sense strand
gaacaaaugcgacagcaaa

SEQ ID NO: 473796 - RNA, 19 nt, Homo sapiens
  misc_RNA (1)...(19): siRNA sense strand
gcaaaugguuucacagcaa

SEQ ID NO: 473797 - RNA, 19 nt, Homo sapiens
  misc_RNA (1)...(19): siRNA sense strand
guacagaaguaaagcagaa

SEQ ID NO: 473798 - RNA, 19 nt, Homo sapiens
  misc_RNA (1)...(19): siRNA sense strand
ggacagaccucaggaugau

SEQ ID NO: 473799 - RNA, 19 nt, Homo sapiens
  misc_RNA (1)...(19): siRNA sense strand
gaacaucuccauccuacaa

SEQ ID NO: 473800 - RNA, 19 nt, Homo sapiens
  misc_RNA (1)...(19): siRNA sense strand
cgaaagacacuccaacuaa

SEQ ID NO: 473801 - RNA, 19 nt, Homo sapiens
  misc_RNA (1)...(19): siRNA sense strand
gaacaaacugcuuucgaaa

SEQ ID NO: 473802 - RNA, 19 nt, Homo sapiens
  misc_RNA (1)...(19): siRNA sense strand
ugaacaaacugcuuucgaa

SEQ ID NO: 473803 - RNA, 19 nt, Homo sapiens
  misc_RNA (1)...(19): siRNA sense strand
caacaagaacuccuagaaa

SEQ ID NO: 473804 - RNA, 19 nt, Homo sapiens
  misc_RNA (1)...(19): siRNA sense strand
gaaacagcaugagaacuug

SEQ ID NO: 473805 - RNA, 19 nt, Homo sapiens
  misc_RNA (1)...(19): siRNA sense strand
caucucaccuuuagaccua

SEQ ID NO: 473806 - RNA, 19 nt, Homo sapiens
  misc_RNA (1)...(19): siRNA sense strand
gcaacaagaacuccuagaa

SEQ ID NO: 473807 - RNA, 19 nt, Homo sapiens
  misc_RNA (1)...(19): siRNA sense strand
gcagaagcuucaagaguuc

SEQ ID NO: 473808 - RNA, 19 nt, Homo sapiens
  misc_RNA (1)...(19): siRNA sense strand
gcggaaggauggaaauguu

SEQ ID NO: 473809 - RNA, 19 nt, Homo sapiens
  misc_RNA (1)...(19): siRNA sense strand
aaagauagaggacgagaaa

SEQ ID NO: 473810 - RNA, 19 nt, Homo sapiens
  misc_RNA (1)...(19): siRNA sense strand
gcucaaugcuucgaauuca

SEQ ID NO: 473811 - RNA, 19 nt, Homo sapiens
  misc_RNA (1)...(19): siRNA sense strand
gaaggugcgguccagguua

SEQ ID NO: 473812 - RNA, 19 nt, Homo sapiens
  misc_RNA (1)...(19): siRNA sense strand
ucacagcaacgcauucuaa

SEQ ID NO: 473813 - RNA, 19 nt, Homo sapiens
  misc_RNA (1)...(19): siRNA sense strand
cauuagagguacccacaaa

SEQ ID NO: 473814 - RNA, 19 nt, Homo sapiens
  misc_RNA (1)...(19): siRNA sense strand
cagcaacgcauucuaauuc

SEQ ID NO: 473815 - RNA, 19 nt, Homo sapiens
  misc_RNA (1)...(19): siRNA sense strand
gagcccaucucaccuuuag

SEQ ID NO: 473816 - RNA, 19 nt, Homo sapiens
  misc_RNA (1)...(19): siRNA sense strand
gaacccagucugcaccuuu

SEQ ID NO: 473817 - RNA, 19 nt, Homo sapiens
  misc_RNA (1)...(19): siRNA sense strand
cgaaaucuauugaacaacu

SEQ ID NO: 473818 - RNA, 19 nt, Homo sapiens
  misc_RNA (1)...(19): siRNA sense strand
aaacugcuuucgaaaucua

SEQ ID NO: 473819 - RNA, 19 nt, Homo sapiens
  misc_RNA (1)...(19): siRNA sense strand
acaaacugcuuucgaaauc

SEQ ID NO: 473820 - RNA, 19 nt, Homo sapiens
  misc_RNA (1)...(19): siRNA sense strand
cgaauucacucaaagaaaa

SEQ ID NO: 473821 - RNA, 19 nt, Homo sapiens
  misc_RNA (1)...(19): siRNA sense strand
uggagaagcagaagcaaua

SEQ ID NO: 473822 - RNA, 19 nt, Homo sapiens
  misc_RNA (1)...(19): siRNA sense strand
gaaagggcaguggcaagua

SEQ ID NO: 473823 - RNA, 19 nt, Homo sapiens
  misc_RNA (1)...(19): siRNA sense strand
gaugugaagucagaaguuc

SEQ ID NO: 473824 - RNA, 19 nt, Homo sapiens
  misc_RNA (1)...(19): siRNA sense strand
guaaaucagcaacgaaaga

SEQ ID NO: 473825 - RNA, 19 nt, Homo sapiens
  misc_RNA (1)...(19): siRNA sense strand
gaguaaaucagcaacgaaa

SEQ ID NO: 473826 - RNA, 19 nt, Homo sapiens
  misc_RNA (1)...(19): siRNA sense strand
gaaaucuauugaacaacug

SEQ ID NO: 473827 - RNA, 19 nt, Homo sapiens
  misc_RNA (1)...(19): siRNA sense strand
ggacagugaugaagaugcu

SEQ ID NO: 473828 - RNA, 19 nt, Homo sapiens
  misc_RNA (1)...(19): siRNA sense strand
agaaacagcaugagaacuu

SEQ ID NO: 473829 - RNA, 19 nt, Homo sapiens
  misc_RNA (1)...(19): siRNA sense strand
caacuggaaguguuacuga

SEQ ID NO: 473830 - RNA, 19 nt, Homo sapiens
  misc_RNA (1)...(19): siRNA sense strand
agcagaagcuucaagaguu

SEQ ID NO: 473831 - RNA, 19 nt, Homo sapiens
  misc_RNA (1)...(19): siRNA sense strand
gcagcuuccuccucucaga

SEQ ID NO: 473832 - RNA, 19 nt, Homo sapiens
  misc_RNA (1)...(19): siRNA sense strand
ccaugaaccugcuaagucu

SEQ ID NO: 473833 - RNA, 19 nt, Homo sapiens
  misc_RNA (1)...(19): siRNA sense strand
ggauggaaauguugucacu

SEQ ID NO: 473834 - RNA, 19 nt, Homo sapiens
  misc_RNA (1)...(19): siRNA sense strand
cuucaagaguuccuacuga

SEQ ID NO: 473835 - RNA, 19 nt, Homo sapiens
  misc_RNA (1)...(19): siRNA sense strand
ugaugaagaugcucagauc

SEQ ID NO: 473836 - RNA, 19 nt, Homo sapiens
  misc_RNA (1)...(19): siRNA sense strand
uggcucagcuggucauuca

SEQ ID NO: 473837 - RNA, 19 nt, Homo sapiens
  misc_RNA (1)...(19): siRNA sense strand
ccucugagcccaacuugaa

SEQ ID NO: 473838 - RNA, 19 nt, Homo sapiens
  misc_RNA (1)...(19): siRNA sense strand
gcaagaacaggaaguagag

SEQ ID NO: 473839 - RNA, 19 nt, Homo sapiens
  misc_RNA (1)...(19): siRNA sense strand
ccacccucauguuacuuua

SEQ ID NO: 473840 - RNA, 19 nt, Homo sapiens
  misc_RNA (1)...(19): siRNA sense strand
gacagaauccucagucagu

SEQ ID NO: 473841 - RNA, 19 nt, Homo sapiens
  misc_RNA (1)...(19): siRNA sense strand
gagaauuucaccuggcauu

SEQ ID NO: 473842 - RNA, 19 nt, Homo sapiens
  misc_RNA (1)...(19): siRNA sense strand
ucuuguagcugguggaguu

SEQ ID NO: 473843 - RNA, 19 nt, Homo sapiens
  misc_RNA (1)...(19): siRNA sense strand
gagcacaagaugcaaagga

SEQ ID NO: 473844 - RNA, 19 nt, Homo sapiens
  misc_RNA (1)...(19): siRNA sense strand
cugcagcauuuauuauuga

SEQ ID NO: 473845 - RNA, 19 nt, Homo sapiens
  misc_RNA (1)...(19): siRNA sense strand
caacgcauucuaauucaug

SEQ ID NO: 473846 - RNA, 19 nt, Homo sapiens
  misc_RNA (1)...(19): siRNA sense strand
gaaaaugagacuucgguuu

SEQ ID NO: 473847 - RNA, 19 nt, Homo sapiens
  misc_RNA (1)...(19): siRNA sense strand
acagaauccucagucagua

SEQ ID NO: 473848 - RNA, 19 nt, Homo sapiens
  misc_RNA (1)...(19): siRNA sense strand
gcagaggcaagaacaggaa

SEQ ID NO: 473849 - RNA, 19 nt, Homo sapiens
  misc_RNA (1)...(19): siRNA sense strand
gcaacaccagcaauucuug

SEQ ID NO: 473850 - RNA, 19 nt, Homo sapiens
  misc_RNA (1)...(19): siRNA sense strand
gcauucuaauucaugaaga

SEQ ID NO: 473851 - RNA, 19 nt, Homo sapiens
  misc_RNA (1)...(19): siRNA sense strand
agagaggcaucgcagagaa

SEQ ID NO: 473852 - RNA, 19 nt, Homo sapiens
  misc_RNA (1)...(19): siRNA sense strand
gcaacgcauucuaauucau

SEQ ID NO: 473853 - RNA, 19 nt, Homo sapiens
  misc_RNA (1)...(19): siRNA sense strand
caguggaugugaagucaga

SEQ ID NO: 473854 - RNA, 19 nt, Homo sapiens
  misc_RNA (1)...(19): siRNA sense strand
ccugcagcauuuauuauug

SEQ ID NO: 473855 - RNA, 19 nt, Homo sapiens
  misc_RNA (1)...(19): siRNA sense strand
aacaagaacuccuagaaaa

SEQ ID NO: 473856 - RNA, 19 nt, Homo sapiens
  misc_RNA (1)...(19): siRNA sense strand
gcagauccacaugaacaaa

SEQ ID NO: 473857 - RNA, 19 nt, Homo sapiens
  misc_RNA (1)...(19): siRNA sense strand
cagcagauccacaugaaca

SEQ ID NO: 473858 - RNA, 19 nt, Homo sapiens
  misc_RNA (1)...(19): siRNA sense strand
gaauuucaccuggcauuag

SEQ ID NO: 473859 - RNA, 19 nt, Homo sapiens
  misc_RNA (1)...(19): siRNA sense strand
gggccaacuggaaguguua

SEQ ID NO: 473860 - RNA, 19 nt, Homo sapiens
  misc_RNA (1)...(19): siRNA sense strand
ggucccaguucaccaaaca

SEQ ID NO: 473861 - RNA, 19 nt, Homo sapiens
  misc_RNA (1)...(19): siRNA sense strand
aaggugcgguccagguuaa

SEQ ID NO: 473862 - RNA, 19 nt, Homo sapiens
  misc_RNA (1)...(19): siRNA sense strand
acacaucauuggaucaaag

SEQ ID NO: 473863 - RNA, 19 nt, Homo sapiens
  misc_RNA (1)...(19): siRNA sense strand
ggcaagaacaggaaguaga

SEQ ID NO: 473864 - RNA, 19 nt, Homo sapiens
  misc_RNA (1)...(19): siRNA sense strand
gaggcaagaacaggaagua

SEQ ID NO: 473865 - RNA, 19 nt, Homo sapiens
  misc_RNA (1)...(19): siRNA sense strand
uuagagguacccacaaauu

SEQ ID NO: 473866 - RNA, 19 nt, Homo sapiens
  misc_RNA (1)...(19): siRNA sense strand
ggaaggauggaaauguugu

SEQ ID NO: 473867 - RNA, 19 nt, Homo sapiens
  misc_RNA (1)...(19): siRNA sense strand
cacaagaugcaaaggauga

SEQ ID NO: 473868 - RNA, 19 nt, Homo sapiens
  misc_RNA (1)...(19): siRNA sense strand
cuuuauaccucuccuucuu

SEQ ID NO: 473869 - RNA, 19 nt, Homo sapiens
  misc_RNA (1)...(19): siRNA sense strand
ugaaccugcuaagucuuua

SEQ ID NO: 473870 - RNA, 19 nt, Homo sapiens
  misc_RNA (1)...(19): siRNA sense strand
ggaugugaagucagaaguu

SEQ ID NO: 473871 - RNA, 19 nt, Homo sapiens
  misc_RNA (1)...(19): siRNA sense strand
uagagguacccacaaauug

SEQ ID NO: 473872 - RNA, 19 nt, Homo sapiens
  misc_RNA (1)...(19): siRNA sense strand
uuauaccucuccuucuuug

SEQ ID NO: 473873 - RNA, 19 nt, Homo sapiens
  misc_RNA (1)...(19): siRNA sense strand
aaagacacuccaacuaaug

SEQ ID NO: 473874 - RNA, 19 nt, Homo sapiens
  misc_RNA (1)...(19): siRNA sense strand
gcaccaggcucagcuucag

SEQ ID NO: 473875 - RNA, 19 nt, Homo sapiens
  misc_RNA (1)...(19): siRNA sense strand
gcaggaauuacuucuuauc

SEQ ID NO: 473876 - RNA, 19 nt, Homo sapiens
  misc_RNA (1)...(19): siRNA sense strand
gaaguguuacugaaaauga

SEQ ID NO: 473877 - RNA, 19 nt, Homo sapiens
  misc_RNA (1)...(19): siRNA sense strand
gcucagauccaggaaaugg

SEQ ID NO: 473878 - RNA, 19 nt, Homo sapiens
  misc_RNA (1)...(19): siRNA sense strand
caacagcaacaccagcaau

SEQ ID NO: 473879 - RNA, 19 nt, Homo sapiens
  misc_RNA (1)...(19): siRNA sense strand
ucucagaggcaaagauaga

SEQ ID NO: 473880 - RNA, 19 nt, Homo sapiens
  misc_RNA (1)...(19): siRNA sense strand
gcagugcuuguguggauga

SEQ ID NO: 473881 - RNA, 19 nt, Homo sapiens
  misc_RNA (1)...(19): siRNA sense strand
cacaugaacaaacugcuuu

SEQ ID NO: 473882 - RNA, 19 nt, Homo sapiens
  misc_RNA (1)...(19): siRNA sense strand
aauuucaccuggcauuaga

SEQ ID NO: 473883 - RNA, 19 nt, Homo sapiens
  misc_RNA (1)...(19): siRNA sense strand
gcaacaaaagagagaauuu

SEQ ID NO: 473884 - RNA, 19 nt, Homo sapiens
  misc_RNA (1)...(19): siRNA sense strand
guugucacuucauucaaga

SEQ ID NO: 473885 - RNA, 19 nt, Homo sapiens
  misc_RNA (1)...(19): siRNA sense strand
aaacagaaaguggcagaga

SEQ ID NO: 473886 - RNA, 19 nt, Homo sapiens
  misc_RNA (1)...(19): siRNA sense strand
ggaaauguugucacuucau

SEQ ID NO: 473887 - RNA, 19 nt, Homo sapiens
  misc_RNA (1)...(19): siRNA sense strand
caaacugcuuucgaaaucu

SEQ ID NO: 473888 - RNA, 19 nt, Homo sapiens
  misc_RNA (1)...(19): siRNA sense strand
ccacaugaacaaacugcuu

SEQ ID NO: 473889 - RNA, 19 nt, Homo sapiens
  misc_RNA (1)...(19): siRNA sense strand
cagcagcagauccacauga

SEQ ID NO: 473890 - RNA, 19 nt, Homo sapiens
  misc_RNA (1)...(19): siRNA sense strand
gaaccugcuaagucuuuau

SEQ ID NO: 473891 - RNA, 19 nt, Homo sapiens
  misc_RNA (1)...(19): siRNA sense strand
ucuccugcagcauuuauua

SEQ ID NO: 473892 - RNA, 19 nt, Homo sapiens
  misc_RNA (1)...(19): siRNA sense strand
gagggaaagccacccaaca

SEQ ID NO: 473893 - RNA, 19 nt, Homo sapiens
  misc_RNA (1)...(19): siRNA sense strand
gaaagacacuccaacuaau

SEQ ID NO: 473894 - RNA, 19 nt, Homo sapiens
  misc_RNA (1)...(19): siRNA sense strand
cagcaggaauuacuucuua

SEQ ID NO: 473895 - RNA, 19 nt, Homo sapiens
  misc_RNA (1)...(19): siRNA sense strand
gaacaaaugcgacagcaaa

SEQ ID NO: 473896 - RNA, 19 nt, Homo sapiens
  misc_RNA (1)...(19): siRNA sense strand
gcaaaugguuucacagcaa

SEQ ID NO: 473897 - RNA, 19 nt, Homo sapiens
  misc_RNA (1)...(19): siRNA sense strand
guacagaaguaaagcagaa

SEQ ID NO: 473898 - RNA, 19 nt, Homo sapiens
  misc_RNA (1)...(19): siRNA sense strand
ggacagaccucaggaugau

SEQ ID NO: 473899 - RNA, 19 nt, Homo sapiens
  misc_RNA (1)...(19): siRNA sense strand
gaacaucuccauccuacaa

SEQ ID NO: 473900 - RNA, 19 nt, Homo sapiens
  misc_RNA (1)...(19): siRNA sense strand
cgaaagacacuccaacuaa

SEQ ID NO: 473901 - RNA, 19 nt, Homo sapiens
  misc_RNA (1)...(19): siRNA sense strand
gaacaaacugcuuucgaaa

SEQ ID NO: 473902 - RNA, 19 nt, Homo sapiens
  misc_RNA (1)...(19): siRNA sense strand
ugaacaaacugcuuucgaa

SEQ ID NO: 473903 - RNA, 19 nt, Homo sapiens
  misc_RNA (1)...(19): siRNA sense strand
caacaagaacuccuagaaa

SEQ ID NO: 473904 - RNA, 19 nt, Homo sapiens
  misc_RNA (1)...(19): siRNA sense strand
gaaacagcaugagaacuug

SEQ ID NO: 473905 - RNA, 19 nt, Homo sapiens
  misc_RNA (1)...(19): siRNA sense strand
caucucaccuuuagaccua

SEQ ID NO: 473906 - RNA, 19 nt, Homo sapiens
  misc_RNA (1)...(19): siRNA sense strand
gcaacaagaacuccuagaa

SEQ ID NO: 473907 - RNA, 19 nt, Homo sapiens
  misc_RNA (1)...(19): siRNA sense strand
gcagaagcuucaagaguuc

SEQ ID NO: 473908 - RNA, 19 nt, Homo sapiens
  misc_RNA (1)...(19): siRNA sense strand
gcggaaggauggaaauguu

SEQ ID NO: 473909 - RNA, 19 nt, Homo sapiens
  misc_RNA (1)...(19): siRNA sense strand
aaagauagaggacgagaaa

SEQ ID NO: 473910 - RNA, 19 nt, Homo sapiens
  misc_RNA (1)...(19): siRNA sense strand
gcucaaugcuucgaauuca

SEQ ID NO: 473911 - RNA, 19 nt, Homo sapiens
  misc_RNA (1)...(19): siRNA sense strand
gaaggugcgguccagguua

SEQ ID NO: 473912 - RNA, 19 nt, Homo sapiens
  misc_RNA (1)...(19): siRNA sense strand
ucacagcaacgcauucuaa

SEQ ID NO: 473913 - RNA, 19 nt, Homo sapiens
  misc_RNA (1)...(19): siRNA sense strand
cauuagagguacccacaaa

SEQ ID NO: 473914 - RNA, 19 nt, Homo sapiens
  misc_RNA (1)...(19): siRNA sense strand
cagcaacgcauucuaauuc

SEQ ID NO: 473915 - RNA, 19 nt, Homo sapiens
  misc_RNA (1)...(19): siRNA sense strand
gagcccaucucaccuuuag

SEQ ID NO: 473916 - RNA, 19 nt, Homo sapiens
  misc_RNA (1)...(19): siRNA sense strand
gaacccagucugcaccuuu

SEQ ID NO: 473917 - RNA, 19 nt, Homo sapiens
  misc_RNA (1)...(19): siRNA sense strand
cgaaaucuauugaacaacu

SEQ ID NO: 473918 - RNA, 19 nt, Homo sapiens
  misc_RNA (1)...(19): siRNA sense strand
aaacugcuuucgaaaucua

SEQ ID NO: 473919 - RNA, 19 nt, Homo sapiens
  misc_RNA (1)...(19): siRNA sense strand
acaaacugcuuucgaaauc

SEQ ID NO: 473920 - RNA, 19 nt, Homo sapiens
  misc_RNA (1)...(19): siRNA sense strand
cgaauucacucaaagaaaa

SEQ ID NO: 473921 - RNA, 19 nt, Homo sapiens
  misc_RNA (1)...(19): siRNA sense strand
uggagaagcagaagcaaua

SEQ ID NO: 473922 - RNA, 19 nt, Homo sapiens
  misc_RNA (1)...(19): siRNA sense strand
gaaagggcaguggcaagua

SEQ ID NO: 473923 - RNA, 19 nt, Homo sapiens
  misc_RNA (1)...(19): siRNA sense strand
gaugugaagucagaaguuc

SEQ ID NO: 473924 - RNA, 19 nt, Homo sapiens
  misc_RNA (1)...(19): siRNA sense strand
guaaaucagcaacgaaaga

SEQ ID NO: 473925 - RNA, 19 nt, Homo sapiens
  misc_RNA (1)...(19): siRNA sense strand
gaguaaaucagcaacgaaa

SEQ ID NO: 473926 - RNA, 19 nt, Homo sapiens
  misc_RNA (1)...(19): siRNA sense strand
gaaaucuauugaacaacug

SEQ ID NO: 473927 - RNA, 19 nt, Homo sapiens
  misc_RNA (1)...(19): siRNA sense strand
ggacagugaugaagaugcu

SEQ ID NO: 473928 - RNA, 19 nt, Homo sapiens
  misc_RNA (1)...(19): siRNA sense strand
agaaacagcaugagaacuu

SEQ ID NO: 473929 - RNA, 19 nt, Homo sapiens
  misc_RNA (1)...(19): siRNA sense strand
caacuggaaguguuacuga

SEQ ID NO: 473930 - RNA, 19 nt, Homo sapiens
  misc_RNA (1)...(19): siRNA sense strand
agcagaagcuucaagaguu

SEQ ID NO: 473931 - RNA, 19 nt, Homo sapiens
  misc_RNA (1)...(19): siRNA sense strand
gcagcuuccuccucucaga

SEQ ID NO: 473932 - RNA, 19 nt, Homo sapiens
  misc_RNA (1)...(19): siRNA sense strand
ccaugaaccugcuaagucu

SEQ ID NO: 473933 - RNA, 19 nt, Homo sapiens
  misc_RNA (1)...(19): siRNA sense strand
ggauggaaauguugucacu

SEQ ID NO: 473934 - RNA, 19 nt, Homo sapiens
  misc_RNA (1)...(19): siRNA sense strand
cuucaagaguuccuacuga

SEQ ID NO: 473935 - RNA, 19 nt, Homo sapiens
  misc_RNA (1)...(19): siRNA sense strand
ugaugaagaugcucagauc

SEQ ID NO: 473936 - RNA, 19 nt, Homo sapiens
  misc_RNA (1)...(19): siRNA sense strand
uggcucagcuggucauuca

SEQ ID NO: 473937 - RNA, 19 nt, Homo sapiens
  misc_RNA (1)...(19): siRNA sense strand
ccucugagcccaacuugaa

SEQ ID NO: 473938 - RNA, 19 nt, Homo sapiens
  misc_RNA (1)...(19): siRNA sense strand
gcaagaacaggaaguagag

SEQ ID NO: 473939 - RNA, 19 nt, Homo sapiens
  misc_RNA (1)...(19): siRNA sense strand
ccacccucauguuacuuua

SEQ ID NO: 473940 - RNA, 19 nt, Homo sapiens
  misc_RNA (1)...(19): siRNA sense strand
gacagaauccucagucagu

SEQ ID NO: 473941 - RNA, 19 nt, Homo sapiens
  misc_RNA (1)...(19): siRNA sense strand
gagaauuucaccuggcauu

SEQ ID NO: 473942 - RNA, 19 nt, Homo sapiens
  misc_RNA (1)...(19): siRNA sense strand
ucuuguagcugguggaguu

SEQ ID NO: 473943 - RNA, 19 nt, Homo sapiens
  misc_RNA (1)...(19): siRNA sense strand
gagcacaagaugcaaagga

SEQ ID NO: 473944 - RNA, 19 nt, Homo sapiens
  misc_RNA (1)...(19): siRNA sense strand
cugcagcauuuauuauuga

SEQ ID NO: 473945 - RNA, 19 nt, Homo sapiens
  misc_RNA (1)...(19): siRNA sense strand
caacgcauucuaauucaug

SEQ ID NO: 473946 - RNA, 19 nt, Homo sapiens
  misc_RNA (1)...(19): siRNA sense strand
gaaaaugagacuucgguuu

SEQ ID NO: 473947 - RNA, 19 nt, Homo sapiens
  misc_RNA (1)...(19): siRNA sense strand
acagaauccucagucagua

SEQ ID NO: 473948 - RNA, 19 nt, Homo sapiens
  misc_RNA (1)...(19): siRNA sense strand
gcagaggcaagaacaggaa

SEQ ID NO: 473949 - RNA, 19 nt, Homo sapiens
  misc_RNA (1)...(19): siRNA sense strand
gcaacaccagcaauucuug

SEQ ID NO: 473950 - RNA, 19 nt, Homo sapiens
  misc_RNA (1)...(19): siRNA sense strand
gcauucuaauucaugaaga

SEQ ID NO: 473951 - RNA, 19 nt, Homo sapiens
  misc_RNA (1)...(19): siRNA sense strand
agagaggcaucgcagagaa

SEQ ID NO: 473952 - RNA, 19 nt, Homo sapiens
  misc_RNA (1)...(19): siRNA sense strand
gcaacgcauucuaauucau

SEQ ID NO: 473953 - RNA, 19 nt, Homo sapiens
  misc_RNA (1)...(19): siRNA sense strand
caguggaugugaagucaga

SEQ ID NO: 473954 - RNA, 19 nt, Homo sapiens
  misc_RNA (1)...(19): siRNA sense strand
ccugcagcauuuauuauug

SEQ ID NO: 473955 - RNA, 19 nt, Homo sapiens
  misc_RNA (1)...(19): siRNA sense strand
aacaagaacuccuagaaaa

SEQ ID NO: 473956 - RNA, 19 nt, Homo sapiens
  misc_RNA (1)...(19): siRNA sense strand
gcagauccacaugaacaaa

SEQ ID NO: 473957 - RNA, 19 nt, Homo sapiens
  misc_RNA (1)...(19): siRNA sense strand
cagcagauccacaugaaca

SEQ ID NO: 473958 - RNA, 19 nt, Homo sapiens
  misc_RNA (1)...(19): siRNA sense strand
gaauuucaccuggcauuag

SEQ ID NO: 473959 - RNA, 19 nt, Homo sapiens
  misc_RNA (1)...(19): siRNA sense strand
gggccaacuggaaguguua

SEQ ID NO: 473960 - RNA, 19 nt, Homo sapiens
  misc_RNA (1)...(19): siRNA sense strand
ggucccaguucaccaaaca

SEQ ID NO: 473961 - RNA, 19 nt, Homo sapiens
  misc_RNA (1)...(19): siRNA sense strand
aaggugcgguccagguuaa

SEQ ID NO: 473962 - RNA, 19 nt, Homo sapiens
  misc_RNA (1)...(19): siRNA sense strand
acacaucauuggaucaaag

SEQ ID NO: 473963 - RNA, 19 nt, Homo sapiens
  misc_RNA (1)...(19): siRNA sense strand
ggcaagaacaggaaguaga

SEQ ID NO: 473964 - RNA, 19 nt, Homo sapiens
  misc_RNA (1)...(19): siRNA sense strand
gaggcaagaacaggaagua

SEQ ID NO: 473965 - RNA, 19 nt, Homo sapiens
  misc_RNA (1)...(19): siRNA sense strand
uuagagguacccacaaauu

SEQ ID NO: 473966 - RNA, 19 nt, Homo sapiens
  misc_RNA (1)...(19): siRNA sense strand
ggaaggauggaaauguugu

SEQ ID NO: 473967 - RNA, 19 nt, Homo sapiens
  misc_RNA (1)...(19): siRNA sense strand
cacaagaugcaaaggauga

SEQ ID NO: 473968 - RNA, 19 nt, Homo sapiens
  misc_RNA (1)...(19): siRNA sense strand
cuuuauaccucuccuucuu

SEQ ID NO: 473969 - RNA, 19 nt, Homo sapiens
  misc_RNA (1)...(19): siRNA sense strand
ugaaccugcuaagucuuua

SEQ ID NO: 473970 - RNA, 19 nt, Homo sapiens
  misc_RNA (1)...(19): siRNA sense strand
ggaugugaagucagaaguu

SEQ ID NO: 473971 - RNA, 19 nt, Homo sapiens
  misc_RNA (1)...(19): siRNA sense strand
uagagguacccacaaauug

SEQ ID NO: 473972 - RNA, 19 nt, Homo sapiens
  misc_RNA (1)...(19): siRNA sense strand
uuauaccucuccuucuuug

SEQ ID NO: 473973 - RNA, 19 nt, Homo sapiens
  misc_RNA (1)...(19): siRNA sense strand
aaagacacuccaacuaaug

SEQ ID NO: 473974 - RNA, 19 nt, Homo sapiens
  misc_RNA (1)...(19): siRNA sense strand
gcaccaggcucagcuucag

SEQ ID NO: 473975 - RNA, 19 nt, Homo sapiens
  misc_RNA (1)...(19): siRNA sense strand
gcaggaauuacuucuuauc

SEQ ID NO: 473976 - RNA, 19 nt, Homo sapiens
  misc_RNA (1)...(19): siRNA sense strand
gaaguguuacugaaaauga

SEQ ID NO: 473977 - RNA, 19 nt, Homo sapiens
  misc_RNA (1)...(19): siRNA sense strand
gcucagauccaggaaaugg

SEQ ID NO: 473978 - RNA, 19 nt, Homo sapiens
  misc_RNA (1)...(19): siRNA sense strand
caacagcaacaccagcaau

SEQ ID NO: 473979 - RNA, 19 nt, Homo sapiens
  misc_RNA (1)...(19): siRNA sense strand
ucucagaggcaaagauaga

SEQ ID NO: 473980 - RNA, 19 nt, Homo sapiens
  misc_RNA (1)...(19): siRNA sense strand
gcagugcuuguguggauga

SEQ ID NO: 473981 - RNA, 19 nt, Homo sapiens
  misc_RNA (1)...(19): siRNA sense strand
cacaugaacaaacugcuuu

SEQ ID NO: 473982 - RNA, 19 nt, Homo sapiens
  misc_RNA (1)...(19): siRNA sense strand
aauuucaccuggcauuaga

SEQ ID NO: 473983 - RNA, 19 nt, Homo sapiens
  misc_RNA (1)...(19): siRNA sense strand
gcaacaaaagagagaauuu

SEQ ID NO: 473984 - RNA, 19 nt, Homo sapiens
  misc_RNA (1)...(19): siRNA sense strand
guugucacuucauucaaga

SEQ ID NO: 473985 - RNA, 19 nt, Homo sapiens
  misc_RNA (1)...(19): siRNA sense strand
aaacagaaaguggcagaga

SEQ ID NO: 473986 - RNA, 19 nt, Homo sapiens
  misc_RNA (1)...(19): siRNA sense strand
ggaaauguugucacuucau

SEQ ID NO: 473987 - RNA, 19 nt, Homo sapiens
  misc_RNA (1)...(19): siRNA sense strand
caaacugcuuucgaaaucu

SEQ ID NO: 473988 - RNA, 19 nt, Homo sapiens
  misc_RNA (1)...(19): siRNA sense strand
ccacaugaacaaacugcuu

SEQ ID NO: 473989 - RNA, 19 nt, Homo sapiens
  misc_RNA (1)...(19): siRNA sense strand
cagcagcagauccacauga

SEQ ID NO: 473990 - RNA, 19 nt, Homo sapiens
  misc_RNA (1)...(19): siRNA sense strand
gaaccugcuaagucuuuau

SEQ ID NO: 473991 - RNA, 19 nt, Homo sapiens
  misc_RNA (1)...(19): siRNA sense strand
ucuccugcagcauuuauua

SEQ ID NO: 473992 - RNA, 19 nt, Homo sapiens
  misc_RNA (1)...(19): siRNA sense strand
gagggaaagccacccaaca

SEQ ID NO: 473993 - RNA, 19 nt, Homo sapiens
  misc_RNA (1)...(19): siRNA sense strand
ccagaugccuucaagauca

SEQ ID NO: 473994 - RNA, 19 nt, Homo sapiens
  misc_RNA (1)...(19): siRNA sense strand
caacgagauuguacugcua

SEQ ID NO: 473995 - RNA, 19 nt, Homo sapiens
  misc_RNA (1)...(19): siRNA sense strand
ccauggagcugcugaucaa

SEQ ID NO: 473996 - RNA, 19 nt, Homo sapiens
  misc_RNA (1)...(19): siRNA sense strand
ggacucgccugcgcucauu

SEQ ID NO: 473997 - RNA, 19 nt, Homo sapiens
  misc_RNA (1)...(19): siRNA sense strand
cacaagggauggccuaugg

SEQ ID NO: 473998 - RNA, 19 nt, Homo sapiens
  misc_RNA (1)...(19): siRNA sense strand
gcagaggcaggaaguggaa

SEQ ID NO: 473999 - RNA, 19 nt, Homo sapiens
  misc_RNA (1)...(19): siRNA sense strand
ugcccgagcucuacgcauu

SEQ ID NO: 474000 - RNA, 19 nt, Homo sapiens
  misc_RNA (1)...(19): siRNA sense strand
ggugacauugcccaguuua

SEQ ID NO: 474001 - RNA, 19 nt, Homo sapiens
  misc_RNA (1)...(19): siRNA sense strand
gagcuuccagcccguguga

SEQ ID NO: 474002 - RNA, 19 nt, Homo sapiens
  misc_RNA (1)...(19): siRNA sense strand
ccaccggccuacacuccaa

SEQ ID NO: 474003 - RNA, 19 nt, Homo sapiens
  misc_RNA (1)...(19): siRNA sense strand
ucggugacauugcccaguu

SEQ ID NO: 474004 - RNA, 19 nt, Homo sapiens
  misc_RNA (1)...(19): siRNA sense strand
gcauucaccgccugcaugu

SEQ ID NO: 474005 - RNA, 19 nt, Homo sapiens
  misc_RNA (1)...(19): siRNA sense strand
gcaggccaacgagauugua

SEQ ID NO: 474006 - RNA, 19 nt, Homo sapiens
  misc_RNA (1)...(19): siRNA sense strand
guuccucggugccgucauc

SEQ ID NO: 474007 - RNA, 19 nt, Homo sapiens
  misc_RNA (1)...(19): siRNA sense strand
ggcaggaaguggaaaagga

SEQ ID NO: 474008 - RNA, 19 nt, Homo sapiens
  misc_RNA (1)...(19): siRNA sense strand
cggugacauugcccaguuu

SEQ ID NO: 474009 - RNA, 19 nt, Homo sapiens
  misc_RNA (1)...(19): siRNA sense strand
cucaugggauccuuaucuu

SEQ ID NO: 474010 - RNA, 19 nt, Homo sapiens
  misc_RNA (1)...(19): siRNA sense strand
ccucaugggauccuuaucu

SEQ ID NO: 474011 - RNA, 19 nt, Homo sapiens
  misc_RNA (1)...(19): siRNA sense strand
uggagcugcugaucaacga

SEQ ID NO: 474012 - RNA, 19 nt, Homo sapiens
  misc_RNA (1)...(19): siRNA sense strand
ccagaugccuucaagauca

SEQ ID NO: 474013 - RNA, 19 nt, Homo sapiens
  misc_RNA (1)...(19): siRNA sense strand
caacgagauuguacugcua

SEQ ID NO: 474014 - RNA, 19 nt, Homo sapiens
  misc_RNA (1)...(19): siRNA sense strand
ccauggagcugcugaucaa

SEQ ID NO: 474015 - RNA, 19 nt, Homo sapiens
  misc_RNA (1)...(19): siRNA sense strand
ggacucgccugcgcucauu

SEQ ID NO: 474016 - RNA, 19 nt, Homo sapiens
  misc_RNA (1)...(19): siRNA sense strand
cacaagggauggccuaugg

SEQ ID NO: 474017 - RNA, 19 nt, Homo sapiens
  misc_RNA (1)...(19): siRNA sense strand
gcagaggcaggaaguggaa

SEQ ID NO: 474018 - RNA, 19 nt, Homo sapiens
  misc_RNA (1)...(19): siRNA sense strand
ugcccgagcucuacgcauu

SEQ ID NO: 474019 - RNA, 19 nt, Homo sapiens
  misc_RNA (1)...(19): siRNA sense strand
ggugacauugcccaguuua

SEQ ID NO: 474020 - RNA, 19 nt, Homo sapiens
  misc_RNA (1)...(19): siRNA sense strand
gagcuuccagcccguguga

SEQ ID NO: 474021 - RNA, 19 nt, Homo sapiens
  misc_RNA (1)...(19): siRNA sense strand
ccaccggccuacacuccaa

SEQ ID NO: 474022 - RNA, 19 nt, Homo sapiens
  misc_RNA (1)...(19): siRNA sense strand
ucggugacauugcccaguu

SEQ ID NO: 474023 - RNA, 19 nt, Homo sapiens
  misc_RNA (1)...(19): siRNA sense strand
gcauucaccgccugcaugu

SEQ ID NO: 474024 - RNA, 19 nt, Homo sapiens
  misc_RNA (1)...(19): siRNA sense strand
gcaggccaacgagauugua

SEQ ID NO: 474025 - RNA, 19 nt, Homo sapiens
  misc_RNA (1)...(19): siRNA sense strand
guuccucggugccgucauc

SEQ ID NO: 474026 - RNA, 19 nt, Homo sapiens
  misc_RNA (1)...(19): siRNA sense strand
ggcaggaaguggaaaagga

SEQ ID NO: 474027 - RNA, 19 nt, Homo sapiens
  misc_RNA (1)...(19): siRNA sense strand
cggugacauugcccaguuu

SEQ ID NO: 474028 - RNA, 19 nt, Homo sapiens
  misc_RNA (1)...(19): siRNA sense strand
cucaugggauccuuaucuu

SEQ ID NO: 474029 - RNA, 19 nt, Homo sapiens
  misc_RNA (1)...(19): siRNA sense strand
ccucaugggauccuuaucu

SEQ ID NO: 474030 - RNA, 19 nt, Homo sapiens
  misc_RNA (1)...(19): siRNA sense strand
uggagcugcugaucaacga

SEQ ID NO: 474031 - RNA, 19 nt, Homo sapiens
  misc_RNA (1)...(19): siRNA sense strand
caagaaauaucgugacuuu

SEQ ID NO: 474032 - RNA, 19 nt, Homo sapiens
  misc_RNA (1)...(19): siRNA sense strand
cagaaagccugaagaacua

SEQ ID NO: 474033 - RNA, 19 nt, Homo sapiens
  misc_RNA (1)...(19): siRNA sense strand
uaaaguugcugccaagaaa

SEQ ID NO: 474034 - RNA, 19 nt, Homo sapiens
  misc_RNA (1)...(19): siRNA sense strand
agaaauaucgugacuuuga

SEQ ID NO: 474035 - RNA, 19 nt, Homo sapiens
  misc_RNA (1)...(19): siRNA sense strand
gcgucuggaugacuacuua

SEQ ID NO: 474036 - RNA, 19 nt, Homo sapiens
  misc_RNA (1)...(19): siRNA sense strand
uaaccucuuugccaaguuu

SEQ ID NO: 474037 - RNA, 19 nt, Homo sapiens
  misc_RNA (1)...(19): siRNA sense strand
uacccaagcugaacauuau

SEQ ID NO: 474038 - RNA, 19 nt, Homo sapiens
  misc_RNA (1)...(19): siRNA sense strand
gcaaauguggcuaaacaga

SEQ ID NO: 474039 - RNA, 19 nt, Homo sapiens
  misc_RNA (1)...(19): siRNA sense strand
ucaagcgucuggaugacua

SEQ ID NO: 474040 - RNA, 19 nt, Homo sapiens
  misc_RNA (1)...(19): siRNA sense strand
uggcuaaacagaagaguua

SEQ ID NO: 474041 - RNA, 19 nt, Homo sapiens
  misc_RNA (1)...(19): siRNA sense strand
gaagugauggagagaguau

SEQ ID NO: 474042 - RNA, 19 nt, Homo sapiens
  misc_RNA (1)...(19): siRNA sense strand
ugaaauugauccagacagu

SEQ ID NO: 474043 - RNA, 19 nt, Homo sapiens
  misc_RNA (1)...(19): siRNA sense strand
cugcauacauuaagaauac

SEQ ID NO: 474044 - RNA, 19 nt, Homo sapiens
  misc_RNA (1)...(19): siRNA sense strand
gaccagaaagccugaagaa

SEQ ID NO: 474045 - RNA, 19 nt, Homo sapiens
  misc_RNA (1)...(19): siRNA sense strand
caaauguggcuaaacagaa

SEQ ID NO: 474046 - RNA, 19 nt, Homo sapiens
  misc_RNA (1)...(19): siRNA sense strand
gaaaauacuuacgcaaaug

SEQ ID NO: 474047 - RNA, 19 nt, Homo sapiens
  misc_RNA (1)...(19): siRNA sense strand
gaaauaucgugacuuugac

SEQ ID NO: 474048 - RNA, 19 nt, Homo sapiens
  misc_RNA (1)...(19): siRNA sense strand
ccagaaagccugaagaacu

SEQ ID NO: 474049 - RNA, 19 nt, Homo sapiens
  misc_RNA (1)...(19): siRNA sense strand
aaucucugcucaaagaauu

SEQ ID NO: 474050 - RNA, 19 nt, Homo sapiens
  misc_RNA (1)...(19): siRNA sense strand
cugaagaacuaaaggacuu

SEQ ID NO: 474051 - RNA, 19 nt, Homo sapiens
  misc_RNA (1)...(19): siRNA sense strand
ucaaguggacccugagauu

SEQ ID NO: 474052 - RNA, 19 nt, Homo sapiens
  misc_RNA (1)...(19): siRNA sense strand
uguaaaggcuggaagugau

SEQ ID NO: 474053 - RNA, 19 nt, Homo sapiens
  misc_RNA (1)...(19): siRNA sense strand
gcagaauucucaggagucu

SEQ ID NO: 474054 - RNA, 19 nt, Homo sapiens
  misc_RNA (1)...(19): siRNA sense strand
acgcaaauguggcuaaaca

SEQ ID NO: 474055 - RNA, 19 nt, Homo sapiens
  misc_RNA (1)...(19): siRNA sense strand
gagagaguauuggaaacug

SEQ ID NO: 474056 - RNA, 19 nt, Homo sapiens
  misc_RNA (1)...(19): siRNA sense strand
ggcguuaucuccacaaugc

SEQ ID NO: 474057 - RNA, 19 nt, Homo sapiens
  misc_RNA (1)...(19): siRNA sense strand
uaucgugacuuugacauuc

SEQ ID NO: 474058 - RNA, 19 nt, Homo sapiens
  misc_RNA (1)...(19): siRNA sense strand
ucaggagucuggcguuauc

SEQ ID NO: 474059 - RNA, 19 nt, Homo sapiens
  misc_RNA (1)...(19): siRNA sense strand
caaguuuucugcauacauu

SEQ ID NO: 474060 - RNA, 19 nt, Homo sapiens
  misc_RNA (1)...(19): siRNA sense strand
ucucaggagucuggcguua

SEQ ID NO: 474061 - RNA, 19 nt, Homo sapiens
  misc_RNA (1)...(19): siRNA sense strand
uuacccaagcugaacauua

SEQ ID NO: 474062 - RNA, 19 nt, Homo sapiens
  misc_RNA (1)...(19): siRNA sense strand
aaauguggcuaaacagaag

SEQ ID NO: 474063 - RNA, 19 nt, Homo sapiens
  misc_RNA (1)...(19): siRNA sense strand
cuaugcccgugaagaauuu

SEQ ID NO: 474064 - RNA, 19 nt, Homo sapiens
  misc_RNA (1)...(19): siRNA sense strand
caaguggacccugagauug

SEQ ID NO: 474065 - RNA, 19 nt, Homo sapiens
  misc_RNA (1)...(19): siRNA sense strand
gaaagccugaagaacuaaa

SEQ ID NO: 474066 - RNA, 19 nt, Homo sapiens
  misc_RNA (1)...(19): siRNA sense strand
ccaagcugaacauuauuaa

SEQ ID NO: 474067 - RNA, 19 nt, Homo sapiens
  misc_RNA (1)...(19): siRNA sense strand
cuccguuccugguguauaa

SEQ ID NO: 474068 - RNA, 19 nt, Homo sapiens
  misc_RNA (1)...(19): siRNA sense strand
gccaagaaauaucgugacu

SEQ ID NO: 474069 - RNA, 19 nt, Homo sapiens
  misc_RNA (1)...(19): siRNA sense strand
cccaagcugaacauuauua

SEQ ID NO: 474070 - RNA, 19 nt, Homo sapiens
  misc_RNA (1)...(19): siRNA sense strand
uucaugauccucuggcuua

SEQ ID NO: 474071 - RNA, 19 nt, Homo sapiens
  misc_RNA (1)...(19): siRNA sense strand
uaacacuggcugauuguag

SEQ ID NO: 474072 - RNA, 19 nt, Homo sapiens
  misc_RNA (1)...(19): siRNA sense strand
guaaaggcuggaagugaug

SEQ ID NO: 474073 - RNA, 19 nt, Homo sapiens
  misc_RNA (1)...(19): siRNA sense strand
ggaagugauggagagagua

SEQ ID NO: 474074 - RNA, 19 nt, Homo sapiens
  misc_RNA (1)...(19): siRNA sense strand
cuggaugacuacuuaaaca

SEQ ID NO: 474075 - RNA, 19 nt, Homo sapiens
  misc_RNA (1)...(19): siRNA sense strand
ugaagaacuaaaggacuua

SEQ ID NO: 474076 - RNA, 19 nt, Homo sapiens
  misc_RNA (1)...(19): siRNA sense strand
ccacacguguccugaagac

SEQ ID NO: 474077 - RNA, 19 nt, Homo sapiens
  misc_RNA (1)...(19): siRNA sense strand
cacaaaaggaggcaaauaa

SEQ ID NO: 474078 - RNA, 19 nt, Homo sapiens
  misc_RNA (1)...(19): siRNA sense strand
acaaggaguugaaaacaga

SEQ ID NO: 474079 - RNA, 19 nt, Homo sapiens
  misc_RNA (1)...(19): siRNA sense strand
uuacgcaaauguggcuaaa

SEQ ID NO: 474080 - RNA, 19 nt, Homo sapiens
  misc_RNA (1)...(19): siRNA sense strand
ggcugauuguagcuuguua

SEQ ID NO: 474081 - RNA, 19 nt, Homo sapiens
  misc_RNA (1)...(19): siRNA sense strand
aaaggaggcaaauaagaau

SEQ ID NO: 474082 - RNA, 19 nt, Homo sapiens
  misc_RNA (1)...(19): siRNA sense strand
gauggagagaguauuggaa

SEQ ID NO: 474083 - RNA, 19 nt, Homo sapiens
  misc_RNA (1)...(19): siRNA sense strand
ggagagaguauuggaaacu

SEQ ID NO: 474084 - RNA, 19 nt, Homo sapiens
  misc_RNA (1)...(19): siRNA sense strand
cuguugacaugaccagaaa

SEQ ID NO: 474085 - RNA, 19 nt, Homo sapiens
  misc_RNA (1)...(19): siRNA sense strand
guaaccucuuugccaaguu

SEQ ID NO: 474086 - RNA, 19 nt, Homo sapiens
  misc_RNA (1)...(19): siRNA sense strand
ccuaugcccgugaagaauu

SEQ ID NO: 474087 - RNA, 19 nt, Homo sapiens
  misc_RNA (1)...(19): siRNA sense strand
uuaaaguugcugccaagaa

SEQ ID NO: 474088 - RNA, 19 nt, Homo sapiens
  misc_RNA (1)...(19): siRNA sense strand
caaaaggaggcaaauaaga

SEQ ID NO: 474089 - RNA, 19 nt, Homo sapiens
  misc_RNA (1)...(19): siRNA sense strand
aaaaggaggcaaauaagaa

SEQ ID NO: 474090 - RNA, 19 nt, Homo sapiens
  misc_RNA (1)...(19): siRNA sense strand
caaugccuaugcccgugaa

SEQ ID NO: 474091 - RNA, 19 nt, Homo sapiens
  misc_RNA (1)...(19): siRNA sense strand
ucaccugagucccaaguac

SEQ ID NO: 474092 - RNA, 19 nt, Homo sapiens
  misc_RNA (1)...(19): siRNA sense strand
uggaagugauggagagagu

SEQ ID NO: 474093 - RNA, 19 nt, Homo sapiens
  misc_RNA (1)...(19): siRNA sense strand
ucaugauccucuggcuuaa

SEQ ID NO: 474094 - RNA, 19 nt, Homo sapiens
  misc_RNA (1)...(19): siRNA sense strand
ugugggcuguaaccucuuu

SEQ ID NO: 474095 - RNA, 19 nt, Homo sapiens
  misc_RNA (1)...(19): siRNA sense strand
guauaacaaggaguugaaa

SEQ ID NO: 474096 - RNA, 19 nt, Homo sapiens
  misc_RNA (1)...(19): siRNA sense strand
uauuggaaacugucccuuu

SEQ ID NO: 474097 - RNA, 19 nt, Homo sapiens
  misc_RNA (1)...(19): siRNA sense strand
agagaguauuggaaacugu

SEQ ID NO: 474098 - RNA, 19 nt, Homo sapiens
  misc_RNA (1)...(19): siRNA sense strand
aaguugcugccaagaaaua

SEQ ID NO: 474099 - RNA, 19 nt, Homo sapiens
  misc_RNA (1)...(19): siRNA sense strand
ccaguuuccagaagacuau

SEQ ID NO: 474100 - RNA, 19 nt, Homo sapiens
  misc_RNA (1)...(19): siRNA sense strand
aaguggacccugagauuga

SEQ ID NO: 474101 - RNA, 19 nt, Homo sapiens
  misc_RNA (1)...(19): siRNA sense strand
gaugaaauugauccagaca

SEQ ID NO: 474102 - RNA, 19 nt, Homo sapiens
  misc_RNA (1)...(19): siRNA sense strand
cugaagacaaagaaauuga

SEQ ID NO: 474103 - RNA, 19 nt, Homo sapiens
  misc_RNA (1)...(19): siRNA sense strand
agcuaacacuggcugauug

SEQ ID NO: 474104 - RNA, 19 nt, Homo sapiens
  misc_RNA (1)...(19): siRNA sense strand
uguauaacaaggaguugaa

SEQ ID NO: 474105 - RNA, 19 nt, Homo sapiens
  misc_RNA (1)...(19): siRNA sense strand
ccacuucuggaugaaauug

SEQ ID NO: 474106 - RNA, 19 nt, Homo sapiens
  misc_RNA (1)...(19): siRNA sense strand
gcuaacacuggcugauugu

SEQ ID NO: 474107 - RNA, 19 nt, Homo sapiens
  misc_RNA (1)...(19): siRNA sense strand
ggaaacagcuccuuguaca

SEQ ID NO: 474108 - RNA, 19 nt, Homo sapiens
  misc_RNA (1)...(19): siRNA sense strand
gagcaguacugguuuguga

SEQ ID NO: 474109 - RNA, 19 nt, Homo sapiens
  misc_RNA (1)...(19): siRNA sense strand
guauaaugcugucacaauu

SEQ ID NO: 474110 - RNA, 19 nt, Homo sapiens
  misc_RNA (1)...(19): siRNA sense strand
ggagaugcaucagcuauga

SEQ ID NO: 474111 - RNA, 19 nt, Homo sapiens
  misc_RNA (1)...(19): siRNA sense strand
caaaggaguuggcauuagu

SEQ ID NO: 474112 - RNA, 19 nt, Homo sapiens
  misc_RNA (1)...(19): siRNA sense strand
uaaauaucguucacccuaa

SEQ ID NO: 474113 - RNA, 19 nt, Homo sapiens
  misc_RNA (1)...(19): siRNA sense strand
gcauuaguguucuugaaau

SEQ ID NO: 474114 - RNA, 19 nt, Homo sapiens
  misc_RNA (1)...(19): siRNA sense strand
caagaaguuugggacuaua

SEQ ID NO: 474115 - RNA, 19 nt, Homo sapiens
  misc_RNA (1)...(19): siRNA sense strand
ggaguuggcauuaguguuc

SEQ ID NO: 474116 - RNA, 19 nt, Homo sapiens
  misc_RNA (1)...(19): siRNA sense strand
caagggagcaguacugguu

SEQ ID NO: 474117 - RNA, 19 nt, Homo sapiens
  misc_RNA (1)...(19): siRNA sense strand
gaagaagccaagaaguuug

SEQ ID NO: 474118 - RNA, 19 nt, Homo sapiens
  misc_RNA (1)...(19): siRNA sense strand
cagaagaagccaagaaguu

SEQ ID NO: 474119 - RNA, 19 nt, Homo sapiens
  misc_RNA (1)...(19): siRNA sense strand
ccuccuacguguauuauug

SEQ ID NO: 474120 - RNA, 19 nt, Homo sapiens
  misc_RNA (1)...(19): siRNA sense strand
ugacauguccucaaacuuc

SEQ ID NO: 474121 - RNA, 19 nt, Homo sapiens
  misc_RNA (1)...(19): siRNA sense strand
agucacaggucaucagauu

SEQ ID NO: 474122 - RNA, 19 nt, Homo sapiens
  misc_RNA (1)...(19): siRNA sense strand
gguguggaguuugacuuua

SEQ ID NO: 474123 - RNA, 19 nt, Homo sapiens
  misc_RNA (1)...(19): siRNA sense strand
aaauaucguucacccuaaa

SEQ ID NO: 474124 - RNA, 19 nt, Homo sapiens
  misc_RNA (1)...(19): siRNA sense strand
ccaggcagguggucaacuu

SEQ ID NO: 474125 - RNA, 19 nt, Homo sapiens
  misc_RNA (1)...(19): siRNA sense strand
agaagaagccaagaaguuu

SEQ ID NO: 474126 - RNA, 19 nt, Homo sapiens
  misc_RNA (1)...(19): siRNA sense strand
auaaugcugucacaauuga

SEQ ID NO: 474127 - RNA, 19 nt, Homo sapiens
  misc_RNA (1)...(19): siRNA sense strand
cuacaaaggaguuggcauu

SEQ ID NO: 474128 - RNA, 19 nt, Homo sapiens
  misc_RNA (1)...(19): siRNA sense strand
ugauaauucucaaggauuc

SEQ ID NO: 474129 - RNA, 19 nt, Homo sapiens
  misc_RNA (1)...(19): siRNA sense strand
guacaacacgccuccaugu

SEQ ID NO: 474130 - RNA, 19 nt, Homo sapiens
  misc_RNA (1)...(19): siRNA sense strand
aaaccucauuggcuugaaa

SEQ ID NO: 474131 - RNA, 19 nt, Homo sapiens
  misc_RNA (1)...(19): siRNA sense strand
gaaacagcuccuuguacaa

SEQ ID NO: 474132 - RNA, 19 nt, Homo sapiens
  misc_RNA (1)...(19): siRNA sense strand
guucagugcuguccccuua

SEQ ID NO: 474133 - RNA, 19 nt, Homo sapiens
  misc_RNA (1)...(19): siRNA sense strand
agacaacuauaaggugauu

SEQ ID NO: 474134 - RNA, 19 nt, Homo sapiens
  misc_RNA (1)...(19): siRNA sense strand
guguggaguuugacuuuau

SEQ ID NO: 474135 - RNA, 19 nt, Homo sapiens
  misc_RNA (1)...(19): siRNA sense strand
gaaguuugggacuauaaau

SEQ ID NO: 474136 - RNA, 19 nt, Homo sapiens
  misc_RNA (1)...(19): siRNA sense strand
cagcuaaggccgcagaaga

SEQ ID NO: 474137 - RNA, 19 nt, Homo sapiens
  misc_RNA (1)...(19): siRNA sense strand
gggccucucuguauaaugc

SEQ ID NO: 474138 - RNA, 19 nt, Homo sapiens
  misc_RNA (1)...(19): siRNA sense strand
ccucaaacuuccuguccaa

SEQ ID NO: 474139 - RNA, 19 nt, Homo sapiens
  misc_RNA (1)...(19): siRNA sense strand
ggcauuaguguucuugaaa

SEQ ID NO: 474140 - RNA, 19 nt, Homo sapiens
  misc_RNA (1)...(19): siRNA sense strand
uguggaguuugacuuuaua

SEQ ID NO: 474141 - RNA, 19 nt, Homo sapiens
  misc_RNA (1)...(19): siRNA sense strand
guacugguuugugacaugu

SEQ ID NO: 474142 - RNA, 19 nt, Homo sapiens
  misc_RNA (1)...(19): siRNA sense strand
acaaaggaguuggcauuag

SEQ ID NO: 474143 - RNA, 19 nt, Homo sapiens
  misc_RNA (1)...(19): siRNA sense strand
ugucacaauugaagacguu

SEQ ID NO: 474144 - RNA, 19 nt, Homo sapiens
  misc_RNA (1)...(19): siRNA sense strand
ccaagccaguggauguuuc

SEQ ID NO: 474145 - RNA, 19 nt, Homo sapiens
  misc_RNA (1)...(19): siRNA sense strand
uacaaaggaguuggcauua

SEQ ID NO: 474146 - RNA, 19 nt, Homo sapiens
  misc_RNA (1)...(19): siRNA sense strand
gcagaagaagccaagaagu

SEQ ID NO: 474147 - RNA, 19 nt, Homo sapiens
  misc_RNA (1)...(19): siRNA sense strand
ccucgguccuggaauacaa

SEQ ID NO: 474148 - RNA, 19 nt, Homo sapiens
  misc_RNA (1)...(19): siRNA sense strand
uggcauuaguguucuugaa

SEQ ID NO: 474149 - RNA, 19 nt, Homo sapiens
  misc_RNA (1)...(19): siRNA sense strand
uauaaugcugucacaauug

SEQ ID NO: 474150 - RNA, 19 nt, Homo sapiens
  misc_RNA (1)...(19): siRNA sense strand
ggacuauaaauaucguuca

SEQ ID NO: 474151 - RNA, 19 nt, Homo sapiens
  misc_RNA (1)...(19): siRNA sense strand
guucuggaguggauuaaaa

SEQ ID NO: 474152 - RNA, 19 nt, Homo sapiens
  misc_RNA (1)...(19): siRNA sense strand
uccaucaaaucucaaacaa

SEQ ID NO: 474153 - RNA, 19 nt, Homo sapiens
  misc_RNA (1)...(19): siRNA sense strand
uguauuauugcgcaaauga

SEQ ID NO: 474154 - RNA, 19 nt, Homo sapiens
  misc_RNA (1)...(19): siRNA sense strand
gcaguacugguuugugaca

SEQ ID NO: 474155 - RNA, 19 nt, Homo sapiens
  misc_RNA (1)...(19): siRNA sense strand
ucacaggucaucagauuuu

SEQ ID NO: 474156 - RNA, 19 nt, Homo sapiens
  misc_RNA (1)...(19): siRNA sense strand
ugcaugguguggaguuuga

SEQ ID NO: 474157 - RNA, 19 nt, Homo sapiens
  misc_RNA (1)...(19): siRNA sense strand
ggugcaugguguggaguuu

SEQ ID NO: 474158 - RNA, 19 nt, Homo sapiens
  misc_RNA (1)...(19): siRNA sense strand
uguauaaugcugucacaau

SEQ ID NO: 474159 - RNA, 19 nt, Homo sapiens
  misc_RNA (1)...(19): siRNA sense strand
caucagauuuugccaagau

SEQ ID NO: 474160 - RNA, 19 nt, Homo sapiens
  misc_RNA (1)...(19): siRNA sense strand
guuugggacuauaaauauc

SEQ ID NO: 474161 - RNA, 19 nt, Homo sapiens
  misc_RNA (1)...(19): siRNA sense strand
caauacagagaaucuugug

SEQ ID NO: 474162 - RNA, 19 nt, Homo sapiens
  misc_RNA (1)...(19): siRNA sense strand
uuagcuccaucaaaucuca

SEQ ID NO: 474163 - RNA, 19 nt, Homo sapiens
  misc_RNA (1)...(19): siRNA sense strand
ggcagguggucaacuuugg

SEQ ID NO: 474164 - RNA, 19 nt, Homo sapiens
  misc_RNA (1)...(19): siRNA sense strand
gagaaucuugugcgggaau

SEQ ID NO: 474165 - RNA, 19 nt, Homo sapiens
  misc_RNA (1)...(19): siRNA sense strand
aaacagcuccuuguacaac

SEQ ID NO: 474166 - RNA, 19 nt, Homo sapiens
  misc_RNA (1)...(19): siRNA sense strand
ccgcagaagaagccaagaa

SEQ ID NO: 474167 - RNA, 19 nt, Homo sapiens
  misc_RNA (1)...(19): siRNA sense strand
gcuuagcuccaucaaaucu

SEQ ID NO: 474168 - RNA, 19 nt, Homo sapiens
  misc_RNA (1)...(19): siRNA sense strand
aagaaguuugggacuauaa

SEQ ID NO: 474169 - RNA, 19 nt, Homo sapiens
  misc_RNA (1)...(19): siRNA sense strand
uagcuguuccagacaacua

SEQ ID NO: 474170 - RNA, 19 nt, Homo sapiens
  misc_RNA (1)...(19): siRNA sense strand
gcuguuccagacaacuaua

SEQ ID NO: 474171 - RNA, 19 nt, Homo sapiens
  misc_RNA (1)...(19): siRNA sense strand
uuaguguucuugaaaugag

SEQ ID NO: 474172 - RNA, 19 nt, Homo sapiens
  misc_RNA (1)...(19): siRNA sense strand
gcuugguucuggaguggau

SEQ ID NO: 474173 - RNA, 19 nt, Homo sapiens
  misc_RNA (1)...(19): siRNA sense strand
acaaggugcaggcuggaaa

SEQ ID NO: 474174 - RNA, 19 nt, Homo sapiens
  misc_RNA (1)...(19): siRNA sense strand
ugugacauguccucaaacu

SEQ ID NO: 474175 - RNA, 19 nt, Homo sapiens
  misc_RNA (1)...(19): siRNA sense strand
cguguauuauugcgcaaau

SEQ ID NO: 474176 - RNA, 19 nt, Homo sapiens
  misc_RNA (1)...(19): siRNA sense strand
aacaauacagagaaucuug

SEQ ID NO: 474177 - RNA, 19 nt, Homo sapiens
  misc_RNA (1)...(19): siRNA sense strand
cuggaaacagcuccuugua

SEQ ID NO: 474178 - RNA, 19 nt, Homo sapiens
  misc_RNA (1)...(19): siRNA sense strand
gccccucgguccuggaaua

SEQ ID NO: 474179 - RNA, 19 nt, Homo sapiens
  misc_RNA (1)...(19): siRNA sense strand
uauuauugcgcaaaugaga

SEQ ID NO: 474180 - RNA, 19 nt, Homo sapiens
  misc_RNA (1)...(19): siRNA sense strand
ggaaacagcuccuuguaca

SEQ ID NO: 474181 - RNA, 19 nt, Homo sapiens
  misc_RNA (1)...(19): siRNA sense strand
gagcaguacugguuuguga

SEQ ID NO: 474182 - RNA, 19 nt, Homo sapiens
  misc_RNA (1)...(19): siRNA sense strand
guauaaugcugucacaauu

SEQ ID NO: 474183 - RNA, 19 nt, Homo sapiens
  misc_RNA (1)...(19): siRNA sense strand
ggagaugcaucagcuauga

SEQ ID NO: 474184 - RNA, 19 nt, Homo sapiens
  misc_RNA (1)...(19): siRNA sense strand
caaaggaguuggcauuagu

SEQ ID NO: 474185 - RNA, 19 nt, Homo sapiens
  misc_RNA (1)...(19): siRNA sense strand
uaaauaucguucacccuaa

SEQ ID NO: 474186 - RNA, 19 nt, Homo sapiens
  misc_RNA (1)...(19): siRNA sense strand
gcauuaguguucuugaaau

SEQ ID NO: 474187 - RNA, 19 nt, Homo sapiens
  misc_RNA (1)...(19): siRNA sense strand
caagaaguuugggacuaua

SEQ ID NO: 474188 - RNA, 19 nt, Homo sapiens
  misc_RNA (1)...(19): siRNA sense strand
ggaguuggcauuaguguuc

SEQ ID NO: 474189 - RNA, 19 nt, Homo sapiens
  misc_RNA (1)...(19): siRNA sense strand
caagggagcaguacugguu

SEQ ID NO: 474190 - RNA, 19 nt, Homo sapiens
  misc_RNA (1)...(19): siRNA sense strand
gaagaagccaagaaguuug

SEQ ID NO: 474191 - RNA, 19 nt, Homo sapiens
  misc_RNA (1)...(19): siRNA sense strand
cagaagaagccaagaaguu

SEQ ID NO: 474192 - RNA, 19 nt, Homo sapiens
  misc_RNA (1)...(19): siRNA sense strand
ccuccuacguguauuauug

SEQ ID NO: 474193 - RNA, 19 nt, Homo sapiens
  misc_RNA (1)...(19): siRNA sense strand
ugacauguccucaaacuuc

SEQ ID NO: 474194 - RNA, 19 nt, Homo sapiens
  misc_RNA (1)...(19): siRNA sense strand
agucacaggucaucagauu

SEQ ID NO: 474195 - RNA, 19 nt, Homo sapiens
  misc_RNA (1)...(19): siRNA sense strand
gguguggaguuugacuuua

SEQ ID NO: 474196 - RNA, 19 nt, Homo sapiens
  misc_RNA (1)...(19): siRNA sense strand
aaauaucguucacccuaaa

SEQ ID NO: 474197 - RNA, 19 nt, Homo sapiens
  misc_RNA (1)...(19): siRNA sense strand
ccaggcagguggucaacuu

SEQ ID NO: 474198 - RNA, 19 nt, Homo sapiens
  misc_RNA (1)...(19): siRNA sense strand
agaagaagccaagaaguuu

SEQ ID NO: 474199 - RNA, 19 nt, Homo sapiens
  misc_RNA (1)...(19): siRNA sense strand
auaaugcugucacaauuga

SEQ ID NO: 474200 - RNA, 19 nt, Homo sapiens
  misc_RNA (1)...(19): siRNA sense strand
cuacaaaggaguuggcauu

SEQ ID NO: 474201 - RNA, 19 nt, Homo sapiens
  misc_RNA (1)...(19): siRNA sense strand
ugauaauucucaaggauuc

SEQ ID NO: 474202 - RNA, 19 nt, Homo sapiens
  misc_RNA (1)...(19): siRNA sense strand
guacaacacgccuccaugu

SEQ ID NO: 474203 - RNA, 19 nt, Homo sapiens
  misc_RNA (1)...(19): siRNA sense strand
aaaccucauuggcuugaaa

SEQ ID NO: 474204 - RNA, 19 nt, Homo sapiens
  misc_RNA (1)...(19): siRNA sense strand
gaaacagcuccuuguacaa

SEQ ID NO: 474205 - RNA, 19 nt, Homo sapiens
  misc_RNA (1)...(19): siRNA sense strand
guucagugcuguccccuua

SEQ ID NO: 474206 - RNA, 19 nt, Homo sapiens
  misc_RNA (1)...(19): siRNA sense strand
agacaacuauaaggugauu

SEQ ID NO: 474207 - RNA, 19 nt, Homo sapiens
  misc_RNA (1)...(19): siRNA sense strand
guguggaguuugacuuuau

SEQ ID NO: 474208 - RNA, 19 nt, Homo sapiens
  misc_RNA (1)...(19): siRNA sense strand
gaaguuugggacuauaaau

SEQ ID NO: 474209 - RNA, 19 nt, Homo sapiens
  misc_RNA (1)...(19): siRNA sense strand
cagcuaaggccgcagaaga

SEQ ID NO: 474210 - RNA, 19 nt, Homo sapiens
  misc_RNA (1)...(19): siRNA sense strand
gggccucucuguauaaugc

SEQ ID NO: 474211 - RNA, 19 nt, Homo sapiens
  misc_RNA (1)...(19): siRNA sense strand
ccucaaacuuccuguccaa

SEQ ID NO: 474212 - RNA, 19 nt, Homo sapiens
  misc_RNA (1)...(19): siRNA sense strand
ggcauuaguguucuugaaa

SEQ ID NO: 474213 - RNA, 19 nt, Homo sapiens
  misc_RNA (1)...(19): siRNA sense strand
uguggaguuugacuuuaua

SEQ ID NO: 474214 - RNA, 19 nt, Homo sapiens
  misc_RNA (1)...(19): siRNA sense strand
guacugguuugugacaugu

SEQ ID NO: 474215 - RNA, 19 nt, Homo sapiens
  misc_RNA (1)...(19): siRNA sense strand
acaaaggaguuggcauuag

SEQ ID NO: 474216 - RNA, 19 nt, Homo sapiens
  misc_RNA (1)...(19): siRNA sense strand
ugucacaauugaagacguu

SEQ ID NO: 474217 - RNA, 19 nt, Homo sapiens
  misc_RNA (1)...(19): siRNA sense strand
ccaagccaguggauguuuc

SEQ ID NO: 474218 - RNA, 19 nt, Homo sapiens
  misc_RNA (1)...(19): siRNA sense strand
uacaaaggaguuggcauua

SEQ ID NO: 474219 - RNA, 19 nt, Homo sapiens
  misc_RNA (1)...(19): siRNA sense strand
gcagaagaagccaagaagu

SEQ ID NO: 474220 - RNA, 19 nt, Homo sapiens
  misc_RNA (1)...(19): siRNA sense strand
ccucgguccuggaauacaa

SEQ ID NO: 474221 - RNA, 19 nt, Homo sapiens
  misc_RNA (1)...(19): siRNA sense strand
uggcauuaguguucuugaa

SEQ ID NO: 474222 - RNA, 19 nt, Homo sapiens
  misc_RNA (1)...(19): siRNA sense strand
uauaaugcugucacaauug

SEQ ID NO: 474223 - RNA, 19 nt, Homo sapiens
  misc_RNA (1)...(19): siRNA sense strand
ggacuauaaauaucguuca

SEQ ID NO: 474224 - RNA, 19 nt, Homo sapiens
  misc_RNA (1)...(19): siRNA sense strand
guucuggaguggauuaaaa

SEQ ID NO: 474225 - RNA, 19 nt, Homo sapiens
  misc_RNA (1)...(19): siRNA sense strand
uccaucaaaucucaaacaa

SEQ ID NO: 474226 - RNA, 19 nt, Homo sapiens
  misc_RNA (1)...(19): siRNA sense strand
uguauuauugcgcaaauga

SEQ ID NO: 474227 - RNA, 19 nt, Homo sapiens
  misc_RNA (1)...(19): siRNA sense strand
gcaguacugguuugugaca

SEQ ID NO: 474228 - RNA, 19 nt, Homo sapiens
  misc_RNA (1)...(19): siRNA sense strand
ucacaggucaucagauuuu

SEQ ID NO: 474229 - RNA, 19 nt, Homo sapiens
  misc_RNA (1)...(19): siRNA sense strand
ugcaugguguggaguuuga

SEQ ID NO: 474230 - RNA, 19 nt, Homo sapiens
  misc_RNA (1)...(19): siRNA sense strand
ggugcaugguguggaguuu

SEQ ID NO: 474231 - RNA, 19 nt, Homo sapiens
  misc_RNA (1)...(19): siRNA sense strand
uguauaaugcugucacaau

SEQ ID NO: 474232 - RNA, 19 nt, Homo sapiens
  misc_RNA (1)...(19): siRNA sense strand
caucagauuuugccaagau

SEQ ID NO: 474233 - RNA, 19 nt, Homo sapiens
  misc_RNA (1)...(19): siRNA sense strand
guuugggacuauaaauauc

SEQ ID NO: 474234 - RNA, 19 nt, Homo sapiens
  misc_RNA (1)...(19): siRNA sense strand
caauacagagaaucuugug

SEQ ID NO: 474235 - RNA, 19 nt, Homo sapiens
  misc_RNA (1)...(19): siRNA sense strand
uuagcuccaucaaaucuca

SEQ ID NO: 474236 - RNA, 19 nt, Homo sapiens
  misc_RNA (1)...(19): siRNA sense strand
ggcagguggucaacuuugg

SEQ ID NO: 474237 - RNA, 19 nt, Homo sapiens
  misc_RNA (1)...(19): siRNA sense strand
gagaaucuugugcgggaau

SEQ ID NO: 474238 - RNA, 19 nt, Homo sapiens
  misc_RNA (1)...(19): siRNA sense strand
aaacagcuccuuguacaac

SEQ ID NO: 474239 - RNA, 19 nt, Homo sapiens
  misc_RNA (1)...(19): siRNA sense strand
ccgcagaagaagccaagaa

SEQ ID NO: 474240 - RNA, 19 nt, Homo sapiens
  misc_RNA (1)...(19): siRNA sense strand
gcuuagcuccaucaaaucu

SEQ ID NO: 474241 - RNA, 19 nt, Homo sapiens
  misc_RNA (1)...(19): siRNA sense strand
aagaaguuugggacuauaa

SEQ ID NO: 474242 - RNA, 19 nt, Homo sapiens
  misc_RNA (1)...(19): siRNA sense strand
uagcuguuccagacaacua

SEQ ID NO: 474243 - RNA, 19 nt, Homo sapiens
  misc_RNA (1)...(19): siRNA sense strand
gcuguuccagacaacuaua

SEQ ID NO: 474244 - RNA, 19 nt, Homo sapiens
  misc_RNA (1)...(19): siRNA sense strand
uuaguguucuugaaaugag

SEQ ID NO: 474245 - RNA, 19 nt, Homo sapiens
  misc_RNA (1)...(19): siRNA sense strand
gcuugguucuggaguggau

SEQ ID NO: 474246 - RNA, 19 nt, Homo sapiens
  misc_RNA (1)...(19): siRNA sense strand
acaaggugcaggcuggaaa

SEQ ID NO: 474247 - RNA, 19 nt, Homo sapiens
  misc_RNA (1)...(19): siRNA sense strand
ugugacauguccucaaacu

SEQ ID NO: 474248 - RNA, 19 nt, Homo sapiens
  misc_RNA (1)...(19): siRNA sense strand
cguguauuauugcgcaaau

SEQ ID NO: 474249 - RNA, 19 nt, Homo sapiens
  misc_RNA (1)...(19): siRNA sense strand
aacaauacagagaaucuug

SEQ ID NO: 474250 - RNA, 19 nt, Homo sapiens
  misc_RNA (1)...(19): siRNA sense strand
cuggaaacagcuccuugua

SEQ ID NO: 474251 - RNA, 19 nt, Homo sapiens
  misc_RNA (1)...(19): siRNA sense strand
gccccucgguccuggaaua

SEQ ID NO: 474252 - RNA, 19 nt, Homo sapiens
  misc_RNA (1)...(19): siRNA sense strand
uauuauugcgcaaaugaga

SEQ ID NO: 474253 - RNA, 19 nt, Homo sapiens
  misc_RNA (1)...(19): siRNA sense strand
cuaaagagauggaacauaa

SEQ ID NO: 474254 - RNA, 19 nt, Homo sapiens
  misc_RNA (1)...(19): siRNA sense strand
agaaggagcuuuagcauuu

SEQ ID NO: 474255 - RNA, 19 nt, Homo sapiens
  misc_RNA (1)...(19): siRNA sense strand
gcuagaaccuccuguagua

SEQ ID NO: 474256 - RNA, 19 nt, Homo sapiens
  misc_RNA (1)...(19): siRNA sense strand
ggaaauuggugaagagaaa

SEQ ID NO: 474257 - RNA, 19 nt, Homo sapiens
  misc_RNA (1)...(19): siRNA sense strand
gagccagaaucuucaauua

SEQ ID NO: 474258 - RNA, 19 nt, Homo sapiens
  misc_RNA (1)...(19): siRNA sense strand
ggauaaggcucaauuacuu

SEQ ID NO: 474259 - RNA, 19 nt, Homo sapiens
  misc_RNA (1)...(19): siRNA sense strand
caacugagguggcuauaga

SEQ ID NO: 474260 - RNA, 19 nt, Homo sapiens
  misc_RNA (1)...(19): siRNA sense strand
ugacaaagauucuggauuc

SEQ ID NO: 474261 - RNA, 19 nt, Homo sapiens
  misc_RNA (1)...(19): siRNA sense strand
cgacagcgcuggaauccua

SEQ ID NO: 474262 - RNA, 19 nt, Homo sapiens
  misc_RNA (1)...(19): siRNA sense strand
gcgcuggaauccuauaaua

SEQ ID NO: 474263 - RNA, 19 nt, Homo sapiens
  misc_RNA (1)...(19): siRNA sense strand
ggucuuagauacagaacua

SEQ ID NO: 474264 - RNA, 19 nt, Homo sapiens
  misc_RNA (1)...(19): siRNA sense strand
gaagauagaggaaguacuu

SEQ ID NO: 474265 - RNA, 19 nt, Homo sapiens
  misc_RNA (1)...(19): siRNA sense strand
gaaguaagcguuccaaauc

SEQ ID NO: 474266 - RNA, 19 nt, Homo sapiens
  misc_RNA (1)...(19): siRNA sense strand
ucauuaagaucucgaagua

SEQ ID NO: 474267 - RNA, 19 nt, Homo sapiens
  misc_RNA (1)...(19): siRNA sense strand
aaacagauccuacugauga

SEQ ID NO: 474268 - RNA, 19 nt, Homo sapiens
  misc_RNA (1)...(19): siRNA sense strand
ggaagaagaucuguaucaa

SEQ ID NO: 474269 - RNA, 19 nt, Homo sapiens
  misc_RNA (1)...(19): siRNA sense strand
ggauacagaagaaccauua

SEQ ID NO: 474270 - RNA, 19 nt, Homo sapiens
  misc_RNA (1)...(19): siRNA sense strand
agaaagagcuucagagucu

SEQ ID NO: 474271 - RNA, 19 nt, Homo sapiens
  misc_RNA (1)...(19): siRNA sense strand
gcucuaugaugucagcuua

SEQ ID NO: 474272 - RNA, 19 nt, Homo sapiens
  misc_RNA (1)...(19): siRNA sense strand
ggagaucucuguucagucu

SEQ ID NO: 474273 - RNA, 19 nt, Homo sapiens
  misc_RNA (1)...(19): siRNA sense strand
caucaucccuuuaaacuca

SEQ ID NO: 474274 - RNA, 19 nt, Homo sapiens
  misc_RNA (1)...(19): siRNA sense strand
agacgaagcuucaguaucu

SEQ ID NO: 474275 - RNA, 19 nt, Homo sapiens
  misc_RNA (1)...(19): siRNA sense strand
gcugaacgcucuaugaugu

SEQ ID NO: 474276 - RNA, 19 nt, Homo sapiens
  misc_RNA (1)...(19): siRNA sense strand
gcucuaugaugucuuauga

SEQ ID NO: 474277 - RNA, 19 nt, Homo sapiens
  misc_RNA (1)...(19): siRNA sense strand
gaagaaauagugcagaaga

SEQ ID NO: 474278 - RNA, 19 nt, Homo sapiens
  misc_RNA (1)...(19): siRNA sense strand
caaaucuucugaacacaaa

SEQ ID NO: 474279 - RNA, 19 nt, Homo sapiens
  misc_RNA (1)...(19): siRNA sense strand
gauauaagccagacuugaa

SEQ ID NO: 474280 - RNA, 19 nt, Homo sapiens
  misc_RNA (1)...(19): siRNA sense strand
gaaacucuaucuucuacug

SEQ ID NO: 474281 - RNA, 19 nt, Homo sapiens
  misc_RNA (1)...(19): siRNA sense strand
gaugaagucugugcugaaa

SEQ ID NO: 474282 - RNA, 19 nt, Homo sapiens
  misc_RNA (1)...(19): siRNA sense strand
gaagucaucugagccaguu

SEQ ID NO: 474283 - RNA, 19 nt, Homo sapiens
  misc_RNA (1)...(19): siRNA sense strand
gcugagcgcucuaugaugu

SEQ ID NO: 474284 - RNA, 19 nt, Homo sapiens
  misc_RNA (1)...(19): siRNA sense strand
aaacagaucgcacagagua

SEQ ID NO: 474285 - RNA, 19 nt, Homo sapiens
  misc_RNA (1)...(19): siRNA sense strand
gaagaagaucuguaucaaa

SEQ ID NO: 474286 - RNA, 19 nt, Homo sapiens
  misc_RNA (1)...(19): siRNA sense strand
caucggagauugcagauuc

SEQ ID NO: 474287 - RNA, 19 nt, Homo sapiens
  misc_RNA (1)...(19): siRNA sense strand
ugaagcagauuuagugaga

SEQ ID NO: 474288 - RNA, 19 nt, Homo sapiens
  misc_RNA (1)...(19): siRNA sense strand
gaaagugaacaugguauaa

SEQ ID NO: 474289 - RNA, 19 nt, Homo sapiens
  misc_RNA (1)...(19): siRNA sense strand
agagcagacucaaguaaua

SEQ ID NO: 474290 - RNA, 19 nt, Homo sapiens
  misc_RNA (1)...(19): siRNA sense strand
gguagaagaaggagcuuua

SEQ ID NO: 474291 - RNA, 19 nt, Homo sapiens
  misc_RNA (1)...(19): siRNA sense strand
ccaggagucuaccaaauga

SEQ ID NO: 474292 - RNA, 19 nt, Homo sapiens
  misc_RNA (1)...(19): siRNA sense strand
gaacgucuuacaagccuua

SEQ ID NO: 474293 - RNA, 19 nt, Homo sapiens
  misc_RNA (1)...(19): siRNA sense strand
ugacuuguaugguaucuga

SEQ ID NO: 474294 - RNA, 19 nt, Homo sapiens
  misc_RNA (1)...(19): siRNA sense strand
caaagauucuggauuccuu

SEQ ID NO: 474295 - RNA, 19 nt, Homo sapiens
  misc_RNA (1)...(19): siRNA sense strand
uguagagucugcaguagua

SEQ ID NO: 474296 - RNA, 19 nt, Homo sapiens
  misc_RNA (1)...(19): siRNA sense strand
gcugaucgaucuaugaugu

SEQ ID NO: 474297 - RNA, 19 nt, Homo sapiens
  misc_RNA (1)...(19): siRNA sense strand
caucaaagaucauguuggu

SEQ ID NO: 474298 - RNA, 19 nt, Homo sapiens
  misc_RNA (1)...(19): siRNA sense strand
caucagagccuccuguuau

SEQ ID NO: 474299 - RNA, 19 nt, Homo sapiens
  misc_RNA (1)...(19): siRNA sense strand
gaagaagguuuagcagauc

SEQ ID NO: 474300 - RNA, 19 nt, Homo sapiens
  misc_RNA (1)...(19): siRNA sense strand
gaaaggaauuaaucuaucc

SEQ ID NO: 474301 - RNA, 19 nt, Homo sapiens
  misc_RNA (1)...(19): siRNA sense strand
ccaagcacaucaacaacaa

SEQ ID NO: 474302 - RNA, 19 nt, Homo sapiens
  misc_RNA (1)...(19): siRNA sense strand
uaugaacgcuccaugaugu

SEQ ID NO: 474303 - RNA, 19 nt, Homo sapiens
  misc_RNA (1)...(19): siRNA sense strand
uaugaacgcuccaugaugu

SEQ ID NO: 474304 - RNA, 19 nt, Homo sapiens
  misc_RNA (1)...(19): siRNA sense strand
cgacagcagugccugaguu

SEQ ID NO: 474305 - RNA, 19 nt, Homo sapiens
  misc_RNA (1)...(19): siRNA sense strand
agaagaagguuuagcagau

SEQ ID NO: 474306 - RNA, 19 nt, Homo sapiens
  misc_RNA (1)...(19): siRNA sense strand
cgacgaaggucuagaucug

SEQ ID NO: 474307 - RNA, 19 nt, Homo sapiens
  misc_RNA (1)...(19): siRNA sense strand
ccuuagagcuggcauugaa

SEQ ID NO: 474308 - RNA, 19 nt, Homo sapiens
  misc_RNA (1)...(19): siRNA sense strand
gaaaguaguggaggagaaa

SEQ ID NO: 474309 - RNA, 19 nt, Homo sapiens
  misc_RNA (1)...(19): siRNA sense strand
gcucagcccuaaagaaagu

SEQ ID NO: 474310 - RNA, 19 nt, Homo sapiens
  misc_RNA (1)...(19): siRNA sense strand
gcuccaugaugucagcuua

SEQ ID NO: 474311 - RNA, 19 nt, Homo sapiens
  misc_RNA (1)...(19): siRNA sense strand
caacgauggugcuggaguu

SEQ ID NO: 474312 - RNA, 19 nt, Homo sapiens
  misc_RNA (1)...(19): siRNA sense strand
gauacagaacuacgauaua

SEQ ID NO: 474313 - RNA, 19 nt, Homo sapiens
  misc_RNA (1)...(19): siRNA sense strand
agaacacccuuaagaagaa

SEQ ID NO: 474314 - RNA, 19 nt, Homo sapiens
  misc_RNA (1)...(19): siRNA sense strand
uagugaagcugacauugaa

SEQ ID NO: 474315 - RNA, 19 nt, Homo sapiens
  misc_RNA (1)...(19): siRNA sense strand
cugaugaaauucccacuaa

SEQ ID NO: 474316 - RNA, 19 nt, Homo sapiens
  misc_RNA (1)...(19): siRNA sense strand
ugaaagagggcuccagaaa

SEQ ID NO: 474317 - RNA, 19 nt, Homo sapiens
  misc_RNA (1)...(19): siRNA sense strand
ggauaguguuuauggagaa

SEQ ID NO: 474318 - RNA, 19 nt, Homo sapiens
  misc_RNA (1)...(19): siRNA sense strand
guaaagaagaugaugaugu

SEQ ID NO: 474319 - RNA, 19 nt, Homo sapiens
  misc_RNA (1)...(19): siRNA sense strand
uaaugcagcugccaugugu

SEQ ID NO: 474320 - RNA, 19 nt, Homo sapiens
  misc_RNA (1)...(19): siRNA sense strand
agaucaagcuccagggaua

SEQ ID NO: 474321 - RNA, 19 nt, Homo sapiens
  misc_RNA (1)...(19): siRNA sense strand
ugaaacaaauacacccauu

SEQ ID NO: 474322 - RNA, 19 nt, Homo sapiens
  misc_RNA (1)...(19): siRNA sense strand
aaacaaauacacccauuga

SEQ ID NO: 474323 - RNA, 19 nt, Homo sapiens
  misc_RNA (1)...(19): siRNA sense strand
gcagcugaccgaucuauga

SEQ ID NO: 474324 - RNA, 19 nt, Homo sapiens
  misc_RNA (1)...(19): siRNA sense strand
ccagagccaucaaagauca

SEQ ID NO: 474325 - RNA, 19 nt, Homo sapiens
  misc_RNA (1)...(19): siRNA sense strand
ggaugaagaggaagaagaa

SEQ ID NO: 474326 - RNA, 19 nt, Homo sapiens
  misc_RNA (1)...(19): siRNA sense strand
aggaggagcuacuauagaa

SEQ ID NO: 474327 - RNA, 19 nt, Homo sapiens
  misc_RNA (1)...(19): siRNA sense strand
gaagaucuguaucaaaaga

SEQ ID NO: 474328 - RNA, 19 nt, Homo sapiens
  misc_RNA (1)...(19): siRNA sense strand
guaaguaguaugccagaaa

SEQ ID NO: 474329 - RNA, 19 nt, Homo sapiens
  misc_RNA (1)...(19): siRNA sense strand
gaaacaaauacacccauug

SEQ ID NO: 474330 - RNA, 19 nt, Homo sapiens
  misc_RNA (1)...(19): siRNA sense strand
ggucuuucguggucaguaa

SEQ ID NO: 474331 - RNA, 19 nt, Homo sapiens
  misc_RNA (1)...(19): siRNA sense strand
caaugucaguggaguauca

SEQ ID NO: 474332 - RNA, 19 nt, Homo sapiens
  misc_RNA (1)...(19): siRNA sense strand
agagacagcagaaacauuu

SEQ ID NO: 474333 - RNA, 19 nt, Homo sapiens
  misc_RNA (1)...(19): siRNA sense strand
gagccaagcacaucaacaa

SEQ ID NO: 474334 - RNA, 19 nt, Homo sapiens
  misc_RNA (1)...(19): siRNA sense strand
ucaagaacacccuuaagaa

SEQ ID NO: 474335 - RNA, 19 nt, Homo sapiens
  misc_RNA (1)...(19): siRNA sense strand
guagugaagcugacauuga

SEQ ID NO: 474336 - RNA, 19 nt, Homo sapiens
  misc_RNA (1)...(19): siRNA sense strand
gcugaucguucaaugaugu

SEQ ID NO: 474337 - RNA, 19 nt, Homo sapiens
  misc_RNA (1)...(19): siRNA sense strand
gaaauagugcagaagauag

SEQ ID NO: 474338 - RNA, 19 nt, Homo sapiens
  misc_RNA (1)...(19): siRNA sense strand
gcauuuggcccaucugaga

SEQ ID NO: 474339 - RNA, 19 nt, Homo sapiens
  misc_RNA (1)...(19): siRNA sense strand
guuaacaccuguagagucu

SEQ ID NO: 474340 - RNA, 19 nt, Homo sapiens
  misc_RNA (1)...(19): siRNA sense strand
caaagaucauguugguaga

SEQ ID NO: 474341 - RNA, 19 nt, Homo sapiens
  misc_RNA (1)...(19): siRNA sense strand
gcugaauggugaaacaaau

SEQ ID NO: 474342 - RNA, 19 nt, Homo sapiens
  misc_RNA (1)...(19): siRNA sense strand
ugaagucugugcugaaauc

SEQ ID NO: 474343 - RNA, 19 nt, Homo sapiens
  misc_RNA (1)...(19): siRNA sense strand
ggacauggaacgucuuaca

SEQ ID NO: 474344 - RNA, 19 nt, Homo sapiens
  misc_RNA (1)...(19): siRNA sense strand
aaagagacacugccugauu

SEQ ID NO: 474345 - RNA, 19 nt, Homo sapiens
  misc_RNA (1)...(19): siRNA sense strand
cagcaucuacucucaguuu

SEQ ID NO: 474346 - RNA, 19 nt, Homo sapiens
  misc_RNA (1)...(19): siRNA sense strand
gcagaaacauuugauucca

SEQ ID NO: 474347 - RNA, 19 nt, Homo sapiens
  misc_RNA (1)...(19): siRNA sense strand
cagaaacccuugugguauc

SEQ ID NO: 474348 - RNA, 19 nt, Homo sapiens
  misc_RNA (1)...(19): siRNA sense strand
caucacauguuaugaaagg

SEQ ID NO: 474349 - RNA, 19 nt, Homo sapiens
  misc_RNA (1)...(19): siRNA sense strand
gaaggagcuuuagcauuuc

SEQ ID NO: 474350 - RNA, 19 nt, Homo sapiens
  misc_RNA (1)...(19): siRNA sense strand
aagcacagauccaagucua

SEQ ID NO: 474351 - RNA, 19 nt, Homo sapiens
  misc_RNA (1)...(19): siRNA sense strand
uaaugaagcagauuuagug

SEQ ID NO: 474352 - RNA, 19 nt, Homo sapiens
  misc_RNA (1)...(19): siRNA sense strand
gaacuaguaaggguauuga

SEQ ID NO: 474353 - RNA, 19 nt, Homo sapiens
  misc_RNA (1)...(19): siRNA sense strand
cuaaagagauggaacauaa

SEQ ID NO: 474354 - RNA, 19 nt, Homo sapiens
  misc_RNA (1)...(19): siRNA sense strand
agaaggagcuuuagcauuu

SEQ ID NO: 474355 - RNA, 19 nt, Homo sapiens
  misc_RNA (1)...(19): siRNA sense strand
gcuagaaccuccuguagua

SEQ ID NO: 474356 - RNA, 19 nt, Homo sapiens
  misc_RNA (1)...(19): siRNA sense strand
ggaaauuggugaagagaaa

SEQ ID NO: 474357 - RNA, 19 nt, Homo sapiens
  misc_RNA (1)...(19): siRNA sense strand
gagccagaaucuucaauua

SEQ ID NO: 474358 - RNA, 19 nt, Homo sapiens
  misc_RNA (1)...(19): siRNA sense strand
ggauaaggcucaauuacuu

SEQ ID NO: 474359 - RNA, 19 nt, Homo sapiens
  misc_RNA (1)...(19): siRNA sense strand
caacugagguggcuauaga

SEQ ID NO: 474360 - RNA, 19 nt, Homo sapiens
  misc_RNA (1)...(19): siRNA sense strand
ugacaaagauucuggauuc

SEQ ID NO: 474361 - RNA, 19 nt, Homo sapiens
  misc_RNA (1)...(19): siRNA sense strand
cgacagcgcuggaauccua

SEQ ID NO: 474362 - RNA, 19 nt, Homo sapiens
  misc_RNA (1)...(19): siRNA sense strand
gcgcuggaauccuauaaua

SEQ ID NO: 474363 - RNA, 19 nt, Homo sapiens
  misc_RNA (1)...(19): siRNA sense strand
ggucuuagauacagaacua

SEQ ID NO: 474364 - RNA, 19 nt, Homo sapiens
  misc_RNA (1)...(19): siRNA sense strand
gaagauagaggaaguacuu

SEQ ID NO: 474365 - RNA, 19 nt, Homo sapiens
  misc_RNA (1)...(19): siRNA sense strand
gaaguaagcguuccaaauc

SEQ ID NO: 474366 - RNA, 19 nt, Homo sapiens
  misc_RNA (1)...(19): siRNA sense strand
ucauuaagaucucgaagua

SEQ ID NO: 474367 - RNA, 19 nt, Homo sapiens
  misc_RNA (1)...(19): siRNA sense strand
aaacagauccuacugauga

SEQ ID NO: 474368 - RNA, 19 nt, Homo sapiens
  misc_RNA (1)...(19): siRNA sense strand
ggaagaagaucuguaucaa

SEQ ID NO: 474369 - RNA, 19 nt, Homo sapiens
  misc_RNA (1)...(19): siRNA sense strand
ggauacagaagaaccauua

SEQ ID NO: 474370 - RNA, 19 nt, Homo sapiens
  misc_RNA (1)...(19): siRNA sense strand
agaaagagcuucagagucu

SEQ ID NO: 474371 - RNA, 19 nt, Homo sapiens
  misc_RNA (1)...(19): siRNA sense strand
gcucuaugaugucagcuua

SEQ ID NO: 474372 - RNA, 19 nt, Homo sapiens
  misc_RNA (1)...(19): siRNA sense strand
ggagaucucuguucagucu

SEQ ID NO: 474373 - RNA, 19 nt, Homo sapiens
  misc_RNA (1)...(19): siRNA sense strand
caucaucccuuuaaacuca

SEQ ID NO: 474374 - RNA, 19 nt, Homo sapiens
  misc_RNA (1)...(19): siRNA sense strand
agacgaagcuucaguaucu

SEQ ID NO: 474375 - RNA, 19 nt, Homo sapiens
  misc_RNA (1)...(19): siRNA sense strand
gcugaacgcucuaugaugu

SEQ ID NO: 474376 - RNA, 19 nt, Homo sapiens
  misc_RNA (1)...(19): siRNA sense strand
gcucuaugaugucuuauga

SEQ ID NO: 474377 - RNA, 19 nt, Homo sapiens
  misc_RNA (1)...(19): siRNA sense strand
gaagaaauagugcagaaga

SEQ ID NO: 474378 - RNA, 19 nt, Homo sapiens
  misc_RNA (1)...(19): siRNA sense strand
caaaucuucugaacacaaa

SEQ ID NO: 474379 - RNA, 19 nt, Homo sapiens
  misc_RNA (1)...(19): siRNA sense strand
gauauaagccagacuugaa

SEQ ID NO: 474380 - RNA, 19 nt, Homo sapiens
  misc_RNA (1)...(19): siRNA sense strand
gaaacucuaucuucuacug

SEQ ID NO: 474381 - RNA, 19 nt, Homo sapiens
  misc_RNA (1)...(19): siRNA sense strand
gaugaagucugugcugaaa

SEQ ID NO: 474382 - RNA, 19 nt, Homo sapiens
  misc_RNA (1)...(19): siRNA sense strand
gaagucaucugagccaguu

SEQ ID NO: 474383 - RNA, 19 nt, Homo sapiens
  misc_RNA (1)...(19): siRNA sense strand
gcugagcgcucuaugaugu

SEQ ID NO: 474384 - RNA, 19 nt, Homo sapiens
  misc_RNA (1)...(19): siRNA sense strand
aaacagaucgcacagagua

SEQ ID NO: 474385 - RNA, 19 nt, Homo sapiens
  misc_RNA (1)...(19): siRNA sense strand
gaagaagaucuguaucaaa

SEQ ID NO: 474386 - RNA, 19 nt, Homo sapiens
  misc_RNA (1)...(19): siRNA sense strand
caucggagauugcagauuc

SEQ ID NO: 474387 - RNA, 19 nt, Homo sapiens
  misc_RNA (1)...(19): siRNA sense strand
ugaagcagauuuagugaga

SEQ ID NO: 474388 - RNA, 19 nt, Homo sapiens
  misc_RNA (1)...(19): siRNA sense strand
gaaagugaacaugguauaa

SEQ ID NO: 474389 - RNA, 19 nt, Homo sapiens
  misc_RNA (1)...(19): siRNA sense strand
agagcagacucaaguaaua

SEQ ID NO: 474390 - RNA, 19 nt, Homo sapiens
  misc_RNA (1)...(19): siRNA sense strand
gguagaagaaggagcuuua

SEQ ID NO: 474391 - RNA, 19 nt, Homo sapiens
  misc_RNA (1)...(19): siRNA sense strand
ccaggagucuaccaaauga

SEQ ID NO: 474392 - RNA, 19 nt, Homo sapiens
  misc_RNA (1)...(19): siRNA sense strand
gaacgucuuacaagccuua

SEQ ID NO: 474393 - RNA, 19 nt, Homo sapiens
  misc_RNA (1)...(19): siRNA sense strand
ugacuuguaugguaucuga

SEQ ID NO: 474394 - RNA, 19 nt, Homo sapiens
  misc_RNA (1)...(19): siRNA sense strand
caaagauucuggauuccuu

SEQ ID NO: 474395 - RNA, 19 nt, Homo sapiens
  misc_RNA (1)...(19): siRNA sense strand
uguagagucugcaguagua

SEQ ID NO: 474396 - RNA, 19 nt, Homo sapiens
  misc_RNA (1)...(19): siRNA sense strand
gcugaucgaucuaugaugu

SEQ ID NO: 474397 - RNA, 19 nt, Homo sapiens
  misc_RNA (1)...(19): siRNA sense strand
caucaaagaucauguuggu

SEQ ID NO: 474398 - RNA, 19 nt, Homo sapiens
  misc_RNA (1)...(19): siRNA sense strand
caucagagccuccuguuau

SEQ ID NO: 474399 - RNA, 19 nt, Homo sapiens
  misc_RNA (1)...(19): siRNA sense strand
gaagaagguuuagcagauc

SEQ ID NO: 474400 - RNA, 19 nt, Homo sapiens
  misc_RNA (1)...(19): siRNA sense strand
gaaaggaauuaaucuaucc

SEQ ID NO: 474401 - RNA, 19 nt, Homo sapiens
  misc_RNA (1)...(19): siRNA sense strand
ccaagcacaucaacaacaa

SEQ ID NO: 474402 - RNA, 19 nt, Homo sapiens
  misc_RNA (1)...(19): siRNA sense strand
uaugaacgcuccaugaugu

SEQ ID NO: 474403 - RNA, 19 nt, Homo sapiens
  misc_RNA (1)...(19): siRNA sense strand
uaugaacgcuccaugaugu

SEQ ID NO: 474404 - RNA, 19 nt, Homo sapiens
  misc_RNA (1)...(19): siRNA sense strand
cgacagcagugccugaguu

SEQ ID NO: 474405 - RNA, 19 nt, Homo sapiens
  misc_RNA (1)...(19): siRNA sense strand
agaagaagguuuagcagau

SEQ ID NO: 474406 - RNA, 19 nt, Homo sapiens
  misc_RNA (1)...(19): siRNA sense strand
cgacgaaggucuagaucug

SEQ ID NO: 474407 - RNA, 19 nt, Homo sapiens
  misc_RNA (1)...(19): siRNA sense strand
ccuuagagcuggcauugaa

SEQ ID NO: 474408 - RNA, 19 nt, Homo sapiens
  misc_RNA (1)...(19): siRNA sense strand
gaaaguaguggaggagaaa

SEQ ID NO: 474409 - RNA, 19 nt, Homo sapiens
  misc_RNA (1)...(19): siRNA sense strand
gcucagcccuaaagaaagu

SEQ ID NO: 474410 - RNA, 19 nt, Homo sapiens
  misc_RNA (1)...(19): siRNA sense strand
gcuccaugaugucagcuua

SEQ ID NO: 474411 - RNA, 19 nt, Homo sapiens
  misc_RNA (1)...(19): siRNA sense strand
caacgauggugcuggaguu

SEQ ID NO: 474412 - RNA, 19 nt, Homo sapiens
  misc_RNA (1)...(19): siRNA sense strand
gauacagaacuacgauaua

SEQ ID NO: 474413 - RNA, 19 nt, Homo sapiens
  misc_RNA (1)...(19): siRNA sense strand
agaacacccuuaagaagaa

SEQ ID NO: 474414 - RNA, 19 nt, Homo sapiens
  misc_RNA (1)...(19): siRNA sense strand
uagugaagcugacauugaa

SEQ ID NO: 474415 - RNA, 19 nt, Homo sapiens
  misc_RNA (1)...(19): siRNA sense strand
cugaugaaauucccacuaa

SEQ ID NO: 474416 - RNA, 19 nt, Homo sapiens
  misc_RNA (1)...(19): siRNA sense strand
ugaaagagggcuccagaaa

SEQ ID NO: 474417 - RNA, 19 nt, Homo sapiens
  misc_RNA (1)...(19): siRNA sense strand
ggauaguguuuauggagaa

SEQ ID NO: 474418 - RNA, 19 nt, Homo sapiens
  misc_RNA (1)...(19): siRNA sense strand
uaaugcagcugccaugugu

SEQ ID NO: 474419 - RNA, 19 nt, Homo sapiens
  misc_RNA (1)...(19): siRNA sense strand
agaucaagcuccagggaua

SEQ ID NO: 474420 - RNA, 19 nt, Homo sapiens
  misc_RNA (1)...(19): siRNA sense strand
ugaaacaaauacacccauu

SEQ ID NO: 474421 - RNA, 19 nt, Homo sapiens
  misc_RNA (1)...(19): siRNA sense strand
aaacaaauacacccauuga

SEQ ID NO: 474422 - RNA, 19 nt, Homo sapiens
  misc_RNA (1)...(19): siRNA sense strand
gcagcugaccgaucuauga

SEQ ID NO: 474423 - RNA, 19 nt, Homo sapiens
  misc_RNA (1)...(19): siRNA sense strand
ccagagccaucaaagauca

SEQ ID NO: 474424 - RNA, 19 nt, Homo sapiens
  misc_RNA (1)...(19): siRNA sense strand
ggaugaagaggaagaagaa

SEQ ID NO: 474425 - RNA, 19 nt, Homo sapiens
  misc_RNA (1)...(19): siRNA sense strand
aggaggagcuacuauagaa

SEQ ID NO: 474426 - RNA, 19 nt, Homo sapiens
  misc_RNA (1)...(19): siRNA sense strand
gaagaucuguaucaaaaga

SEQ ID NO: 474427 - RNA, 19 nt, Homo sapiens
  misc_RNA (1)...(19): siRNA sense strand
guaaguaguaugccagaaa

SEQ ID NO: 474428 - RNA, 19 nt, Homo sapiens
  misc_RNA (1)...(19): siRNA sense strand
gaaacaaauacacccauug

SEQ ID NO: 474429 - RNA, 19 nt, Homo sapiens
  misc_RNA (1)...(19): siRNA sense strand
ggucuuucguggucaguaa

SEQ ID NO: 474430 - RNA, 19 nt, Homo sapiens
  misc_RNA (1)...(19): siRNA sense strand
caaugucaguggaguauca

SEQ ID NO: 474431 - RNA, 19 nt, Homo sapiens
  misc_RNA (1)...(19): siRNA sense strand
agagacagcagaaacauuu

SEQ ID NO: 474432 - RNA, 19 nt, Homo sapiens
  misc_RNA (1)...(19): siRNA sense strand
gaaauagugcagaagauag

SEQ ID NO: 474433 - RNA, 19 nt, Homo sapiens
  misc_RNA (1)...(19): siRNA sense strand
ucaagaacacccuuaagaa

SEQ ID NO: 474434 - RNA, 19 nt, Homo sapiens
  misc_RNA (1)...(19): siRNA sense strand
guagugaagcugacauuga

SEQ ID NO: 474435 - RNA, 19 nt, Homo sapiens
  misc_RNA (1)...(19): siRNA sense strand
gcugaucguucaaugaugu

SEQ ID NO: 474436 - RNA, 19 nt, Homo sapiens
  misc_RNA (1)...(19): siRNA sense strand
gagccaagcacaucaacaa

SEQ ID NO: 474437 - RNA, 19 nt, Homo sapiens
  misc_RNA (1)...(19): siRNA sense strand
gcauuuggcccaucugaga

SEQ ID NO: 474438 - RNA, 19 nt, Homo sapiens
  misc_RNA (1)...(19): siRNA sense strand
guuaacaccuguagagucu

SEQ ID NO: 474439 - RNA, 19 nt, Homo sapiens
  misc_RNA (1)...(19): siRNA sense strand
caaagaucauguugguaga

SEQ ID NO: 474440 - RNA, 19 nt, Homo sapiens
  misc_RNA (1)...(19): siRNA sense strand
gcugaauggugaaacaaau

SEQ ID NO: 474441 - RNA, 19 nt, Homo sapiens
  misc_RNA (1)...(19): siRNA sense strand
ugaagucugugcugaaauc

SEQ ID NO: 474442 - RNA, 19 nt, Homo sapiens
  misc_RNA (1)...(19): siRNA sense strand
ggacauggaacgucuuaca

SEQ ID NO: 474443 - RNA, 19 nt, Homo sapiens
  misc_RNA (1)...(19): siRNA sense strand
aaagagacacugccugauu

SEQ ID NO: 474444 - RNA, 19 nt, Homo sapiens
  misc_RNA (1)...(19): siRNA sense strand
cagcaucuacucucaguuu

SEQ ID NO: 474445 - RNA, 19 nt, Homo sapiens
  misc_RNA (1)...(19): siRNA sense strand
gcagaaacauuugauucca

SEQ ID NO: 474446 - RNA, 19 nt, Homo sapiens
  misc_RNA (1)...(19): siRNA sense strand
cagaaacccuugugguauc

SEQ ID NO: 474447 - RNA, 19 nt, Homo sapiens
  misc_RNA (1)...(19): siRNA sense strand
gaaccauccaugacaaaga

SEQ ID NO: 474448 - RNA, 19 nt, Homo sapiens
  misc_RNA (1)...(19): siRNA sense strand
gaaggagcuuuagcauuuc

SEQ ID NO: 474449 - RNA, 19 nt, Homo sapiens
  misc_RNA (1)...(19): siRNA sense strand
aagcacagauccaagucua

SEQ ID NO: 474450 - RNA, 19 nt, Homo sapiens
  misc_RNA (1)...(19): siRNA sense strand
uaaugaagcagauuuagug

SEQ ID NO: 474451 - RNA, 19 nt, Homo sapiens
  misc_RNA (1)...(19): siRNA sense strand
gaacuaguaaggguauuga

SEQ ID NO: 474452 - RNA, 19 nt, Homo sapiens
  misc_RNA (1)...(19): siRNA sense strand
caucacauguuaugaaagg

SEQ ID NO: 474453 - RNA, 19 nt, Homo sapiens
  misc_RNA (1)...(19): siRNA sense strand
cuaaagagauggaacauaa

SEQ ID NO: 474454 - RNA, 19 nt, Homo sapiens
  misc_RNA (1)...(19): siRNA sense strand
agaaggagcuuuagcauuu

SEQ ID NO: 474455 - RNA, 19 nt, Homo sapiens
  misc_RNA (1)...(19): siRNA sense strand
gcuagaaccuccuguagua

SEQ ID NO: 474456 - RNA, 19 nt, Homo sapiens
  misc_RNA (1)...(19): siRNA sense strand
ggaaauuggugaagagaaa

SEQ ID NO: 474457 - RNA, 19 nt, Homo sapiens
  misc_RNA (1)...(19): siRNA sense strand
gagccagaaucuucaauua

SEQ ID NO: 474458 - RNA, 19 nt, Homo sapiens
  misc_RNA (1)...(19): siRNA sense strand
ggauaaggcucaauuacuu

SEQ ID NO: 474459 - RNA, 19 nt, Homo sapiens
  misc_RNA (1)...(19): siRNA sense strand
caacugagguggcuauaga

SEQ ID NO: 474460 - RNA, 19 nt, Homo sapiens
  misc_RNA (1)...(19): siRNA sense strand
ugacaaagauucuggauuc

SEQ ID NO: 474461 - RNA, 19 nt, Homo sapiens
  misc_RNA (1)...(19): siRNA sense strand
cgacagcgcuggaauccua

SEQ ID NO: 474462 - RNA, 19 nt, Homo sapiens
  misc_RNA (1)...(19): siRNA sense strand
gcgcuggaauccuauaaua

SEQ ID NO: 474463 - RNA, 19 nt, Homo sapiens
  misc_RNA (1)...(19): siRNA sense strand
ggucuuagauacagaacua

SEQ ID NO: 474464 - RNA, 19 nt, Homo sapiens
  misc_RNA (1)...(19): siRNA sense strand
gaagauagaggaaguacuu

SEQ ID NO: 474465 - RNA, 19 nt, Homo sapiens
  misc_RNA (1)...(19): siRNA sense strand
gaaguaagcguuccaaauc

SEQ ID NO: 474466 - RNA, 19 nt, Homo sapiens
  misc_RNA (1)...(19): siRNA sense strand
ucauuaagaucucgaagua

SEQ ID NO: 474467 - RNA, 19 nt, Homo sapiens
  misc_RNA (1)...(19): siRNA sense strand
aaacagauccuacugauga

SEQ ID NO: 474468 - RNA, 19 nt, Homo sapiens
  misc_RNA (1)...(19): siRNA sense strand
ggaagaagaucuguaucaa

SEQ ID NO: 474469 - RNA, 19 nt, Homo sapiens
  misc_RNA (1)...(19): siRNA sense strand
ggauacagaagaaccauua

SEQ ID NO: 474470 - RNA, 19 nt, Homo sapiens
  misc_RNA (1)...(19): siRNA sense strand
agaaagagcuucagagucu

SEQ ID NO: 474471 - RNA, 19 nt, Homo sapiens
  misc_RNA (1)...(19): siRNA sense strand
gcucuaugaugucagcuua

SEQ ID NO: 474472 - RNA, 19 nt, Homo sapiens
  misc_RNA (1)...(19): siRNA sense strand
ggagaucucuguucagucu

SEQ ID NO: 474473 - RNA, 19 nt, Homo sapiens
  misc_RNA (1)...(19): siRNA sense strand
agacgaagcuucaguaucu

SEQ ID NO: 474474 - RNA, 19 nt, Homo sapiens
  misc_RNA (1)...(19): siRNA sense strand
gcugaacgcucuaugaugu

SEQ ID NO: 474475 - RNA, 19 nt, Homo sapiens
  misc_RNA (1)...(19): siRNA sense strand
gcucuaugaugucuuauga

SEQ ID NO: 474476 - RNA, 19 nt, Homo sapiens
  misc_RNA (1)...(19): siRNA sense strand
gaagaaauagugcagaaga

SEQ ID NO: 474477 - RNA, 19 nt, Homo sapiens
  misc_RNA (1)...(19): siRNA sense strand
caaaucuucugaacacaaa

SEQ ID NO: 474478 - RNA, 19 nt, Homo sapiens
  misc_RNA (1)...(19): siRNA sense strand
gauauaagccagacuugaa

SEQ ID NO: 474479 - RNA, 19 nt, Homo sapiens
  misc_RNA (1)...(19): siRNA sense strand
gaaacucuaucuucuacug

SEQ ID NO: 474480 - RNA, 19 nt, Homo sapiens
  misc_RNA (1)...(19): siRNA sense strand
gaugaagucugugcugaaa

SEQ ID NO: 474481 - RNA, 19 nt, Homo sapiens
  misc_RNA (1)...(19): siRNA sense strand
gaagucaucugagccaguu

SEQ ID NO: 474482 - RNA, 19 nt, Homo sapiens
  misc_RNA (1)...(19): siRNA sense strand
gcugagcgcucuaugaugu

SEQ ID NO: 474483 - RNA, 19 nt, Homo sapiens
  misc_RNA (1)...(19): siRNA sense strand
gaagaagaucuguaucaaa

SEQ ID NO: 474484 - RNA, 19 nt, Homo sapiens
  misc_RNA (1)...(19): siRNA sense strand
caucggagauugcagauuc

SEQ ID NO: 474485 - RNA, 19 nt, Homo sapiens
  misc_RNA (1)...(19): siRNA sense strand
ugaagcagauuuagugaga

SEQ ID NO: 474486 - RNA, 19 nt, Homo sapiens
  misc_RNA (1)...(19): siRNA sense strand
gaaagugaacaugguauaa

SEQ ID NO: 474487 - RNA, 19 nt, Homo sapiens
  misc_RNA (1)...(19): siRNA sense strand
agagcagacucaaguaaua

SEQ ID NO: 474488 - RNA, 19 nt, Homo sapiens
  misc_RNA (1)...(19): siRNA sense strand
gguagaagaaggagcuuua

SEQ ID NO: 474489 - RNA, 19 nt, Homo sapiens
  misc_RNA (1)...(19): siRNA sense strand
ccaggagucuaccaaauga

SEQ ID NO: 474490 - RNA, 19 nt, Homo sapiens
  misc_RNA (1)...(19): siRNA sense strand
gaacgucuuacaagccuua

SEQ ID NO: 474491 - RNA, 19 nt, Homo sapiens
  misc_RNA (1)...(19): siRNA sense strand
ugacuuguaugguaucuga

SEQ ID NO: 474492 - RNA, 19 nt, Homo sapiens
  misc_RNA (1)...(19): siRNA sense strand
caaagauucuggauuccuu

SEQ ID NO: 474493 - RNA, 19 nt, Homo sapiens
  misc_RNA (1)...(19): siRNA sense strand
uguagagucugcaguagua

SEQ ID NO: 474494 - RNA, 19 nt, Homo sapiens
  misc_RNA (1)...(19): siRNA sense strand
gcugaucgaucuaugaugu

SEQ ID NO: 474495 - RNA, 19 nt, Homo sapiens
  misc_RNA (1)...(19): siRNA sense strand
caucaaagaucauguuggu

SEQ ID NO: 474496 - RNA, 19 nt, Homo sapiens
  misc_RNA (1)...(19): siRNA sense strand
caucagagccuccuguuau

SEQ ID NO: 474497 - RNA, 19 nt, Homo sapiens
  misc_RNA (1)...(19): siRNA sense strand
gaagaagguuuagcagauc

SEQ ID NO: 474498 - RNA, 19 nt, Homo sapiens
  misc_RNA (1)...(19): siRNA sense strand
gaaaggaauuaaucuaucc

SEQ ID NO: 474499 - RNA, 19 nt, Homo sapiens
  misc_RNA (1)...(19): siRNA sense strand
ccaagcacaucaacaacaa

SEQ ID NO: 474500 - RNA, 19 nt, Homo sapiens
  misc_RNA (1)...(19): siRNA sense strand
uaugaacgcuccaugaugu

SEQ ID NO: 474501 - RNA, 19 nt, Homo sapiens
  misc_RNA (1)...(19): siRNA sense strand
uaugaacgcuccaugaugu

SEQ ID NO: 474502 - RNA, 19 nt, Homo sapiens
  misc_RNA (1)...(19): siRNA sense strand
cgacagcagugccugaguu

SEQ ID NO: 474503 - RNA, 19 nt, Homo sapiens
  misc_RNA (1)...(19): siRNA sense strand
agaagaagguuuagcagau

SEQ ID NO: 474504 - RNA, 19 nt, Homo sapiens
  misc_RNA (1)...(19): siRNA sense strand
cgacgaaggucuagaucug

SEQ ID NO: 474505 - RNA, 19 nt, Homo sapiens
  misc_RNA (1)...(19): siRNA sense strand
ccuuagagcuggcauugaa

SEQ ID NO: 474506 - RNA, 19 nt, Homo sapiens
  misc_RNA (1)...(19): siRNA sense strand
gaaaguaguggaggagaaa

SEQ ID NO: 474507 - RNA, 19 nt, Homo sapiens
  misc_RNA (1)...(19): siRNA sense strand
gcucagcccuaaagaaagu

SEQ ID NO: 474508 - RNA, 19 nt, Homo sapiens
  misc_RNA (1)...(19): siRNA sense strand
gcuccaugaugucagcuua

SEQ ID NO: 474509 - RNA, 19 nt, Homo sapiens
  misc_RNA (1)...(19): siRNA sense strand
caacgauggugcuggaguu

SEQ ID NO: 474510 - RNA, 19 nt, Homo sapiens
  misc_RNA (1)...(19): siRNA sense strand
gauacagaacuacgauaua

SEQ ID NO: 474511 - RNA, 19 nt, Homo sapiens
  misc_RNA (1)...(19): siRNA sense strand
agaacacccuuaagaagaa

SEQ ID NO: 474512 - RNA, 19 nt, Homo sapiens
  misc_RNA (1)...(19): siRNA sense strand
uagugaagcugacauugaa

SEQ ID NO: 474513 - RNA, 19 nt, Homo sapiens
  misc_RNA (1)...(19): siRNA sense strand
cugaugaaauucccacuaa

SEQ ID NO: 474514 - RNA, 19 nt, Homo sapiens
  misc_RNA (1)...(19): siRNA sense strand
ugaaagagggcuccagaaa

SEQ ID NO: 474515 - RNA, 19 nt, Homo sapiens
  misc_RNA (1)...(19): siRNA sense strand
uaaugcagcugccaugugu

SEQ ID NO: 474516 - RNA, 19 nt, Homo sapiens
  misc_RNA (1)...(19): siRNA sense strand
aaacaaauacacccauuga

SEQ ID NO: 474517 - RNA, 19 nt, Homo sapiens
  misc_RNA (1)...(19): siRNA sense strand
agaucaagcuccagggaua

SEQ ID NO: 474518 - RNA, 19 nt, Homo sapiens
  misc_RNA (1)...(19): siRNA sense strand
ugaaacaaauacacccauu

SEQ ID NO: 474519 - RNA, 19 nt, Homo sapiens
  misc_RNA (1)...(19): siRNA sense strand
gcagcugaccgaucuauga

SEQ ID NO: 474520 - RNA, 19 nt, Homo sapiens
  misc_RNA (1)...(19): siRNA sense strand
ccagagccaucaaagauca

SEQ ID NO: 474521 - RNA, 19 nt, Homo sapiens
  misc_RNA (1)...(19): siRNA sense strand
aggaggagcuacuauagaa

SEQ ID NO: 474522 - RNA, 19 nt, Homo sapiens
  misc_RNA (1)...(19): siRNA sense strand
gaagaucuguaucaaaaga

SEQ ID NO: 474523 - RNA, 19 nt, Homo sapiens
  misc_RNA (1)...(19): siRNA sense strand
guaaguaguaugccagaaa

SEQ ID NO: 474524 - RNA, 19 nt, Homo sapiens
  misc_RNA (1)...(19): siRNA sense strand
ggucuuucguggucaguaa

SEQ ID NO: 474525 - RNA, 19 nt, Homo sapiens
  misc_RNA (1)...(19): siRNA sense strand
gaaacaaauacacccauug

SEQ ID NO: 474526 - RNA, 19 nt, Homo sapiens
  misc_RNA (1)...(19): siRNA sense strand
caaugucaguggaguauca

SEQ ID NO: 474527 - RNA, 19 nt, Homo sapiens
  misc_RNA (1)...(19): siRNA sense strand
agagacagcagaaacauuu

SEQ ID NO: 474528 - RNA, 19 nt, Homo sapiens
  misc_RNA (1)...(19): siRNA sense strand
gagccaagcacaucaacaa

SEQ ID NO: 474529 - RNA, 19 nt, Homo sapiens
  misc_RNA (1)...(19): siRNA sense strand
ucaagaacacccuuaagaa

SEQ ID NO: 474530 - RNA, 19 nt, Homo sapiens
  misc_RNA (1)...(19): siRNA sense strand
gaaauagugcagaagauag

SEQ ID NO: 474531 - RNA, 19 nt, Homo sapiens
  misc_RNA (1)...(19): siRNA sense strand
guagugaagcugacauuga

SEQ ID NO: 474532 - RNA, 19 nt, Homo sapiens
  misc_RNA (1)...(19): siRNA sense strand
gcugaucguucaaugaugu

SEQ ID NO: 474533 - RNA, 19 nt, Homo sapiens
  misc_RNA (1)...(19): siRNA sense strand
gcugaauggugaaacaaau

SEQ ID NO: 474534 - RNA, 19 nt, Homo sapiens
  misc_RNA (1)...(19): siRNA sense strand
guuaacaccuguagagucu

SEQ ID NO: 474535 - RNA, 19 nt, Homo sapiens
  misc_RNA (1)...(19): siRNA sense strand
caaagaucauguugguaga

SEQ ID NO: 474536 - RNA, 19 nt, Homo sapiens
  misc_RNA (1)...(19): siRNA sense strand
gcauuuggcccaucugaga

SEQ ID NO: 474537 - RNA, 19 nt, Homo sapiens
  misc_RNA (1)...(19): siRNA sense strand
ugaagucugugcugaaauc

SEQ ID NO: 474538 - RNA, 19 nt, Homo sapiens
  misc_RNA (1)...(19): siRNA sense strand
ggacauggaacgucuuaca

SEQ ID NO: 474539 - RNA, 19 nt, Homo sapiens
  misc_RNA (1)...(19): siRNA sense strand
aaagagacacugccugauu

SEQ ID NO: 474540 - RNA, 19 nt, Homo sapiens
  misc_RNA (1)...(19): siRNA sense strand
cagcaucuacucucaguuu

SEQ ID NO: 474541 - RNA, 19 nt, Homo sapiens
  misc_RNA (1)...(19): siRNA sense strand
gcagaaacauuugauucca

SEQ ID NO: 474542 - RNA, 19 nt, Homo sapiens
  misc_RNA (1)...(19): siRNA sense strand
cagaaacccuugugguauc

SEQ ID NO: 474543 - RNA, 19 nt, Homo sapiens
  misc_RNA (1)...(19): siRNA sense strand
ccacacaucuuagaaacuc

SEQ ID NO: 474544 - RNA, 19 nt, Homo sapiens
  misc_RNA (1)...(19): siRNA sense strand
gaaggagcuuuagcauuuc

SEQ ID NO: 474545 - RNA, 19 nt, Homo sapiens
  misc_RNA (1)...(19): siRNA sense strand
aagcacagauccaagucua

SEQ ID NO: 474546 - RNA, 19 nt, Homo sapiens
  misc_RNA (1)...(19): siRNA sense strand
uaaugaagcagauuuagug

SEQ ID NO: 474547 - RNA, 19 nt, Homo sapiens
  misc_RNA (1)...(19): siRNA sense strand
gaacuaguaaggguauuga

SEQ ID NO: 474548 - RNA, 19 nt, Homo sapiens
  misc_RNA (1)...(19): siRNA sense strand
caucacauguuaugaaagg

SEQ ID NO: 474549 - RNA, 19 nt, Homo sapiens
  misc_RNA (1)...(19): siRNA sense strand
gaaccauccaugacaaaga

SEQ ID NO: 474550 - RNA, 19 nt, Homo sapiens
  misc_RNA (1)...(19): siRNA sense strand
ccagaaccauccaugacaa

SEQ ID NO: 474551 - RNA, 19 nt, Homo sapiens
  misc_RNA (1)...(19): siRNA sense strand
cuacaucaguaaucucaga

SEQ ID NO: 474552 - RNA, 19 nt, Homo sapiens
  misc_RNA (1)...(19): siRNA sense strand
caagaacacccuuaagaag

SEQ ID NO: 474553 - RNA, 19 nt, Homo sapiens
  misc_RNA (1)...(19): siRNA sense strand
cuaaagagauggaacauaa

SEQ ID NO: 474554 - RNA, 19 nt, Homo sapiens
  misc_RNA (1)...(19): siRNA sense strand
agaaggagcuuuagcauuu

SEQ ID NO: 474555 - RNA, 19 nt, Homo sapiens
  misc_RNA (1)...(19): siRNA sense strand
gcuagaaccuccuguagua

SEQ ID NO: 474556 - RNA, 19 nt, Homo sapiens
  misc_RNA (1)...(19): siRNA sense strand
ggaaauuggugaagagaaa

SEQ ID NO: 474557 - RNA, 19 nt, Homo sapiens
  misc_RNA (1)...(19): siRNA sense strand
gagccagaaucuucaauua

SEQ ID NO: 474558 - RNA, 19 nt, Homo sapiens
  misc_RNA (1)...(19): siRNA sense strand
ggauaaggcucaauuacuu

SEQ ID NO: 474559 - RNA, 19 nt, Homo sapiens
  misc_RNA (1)...(19): siRNA sense strand
caacugagguggcuauaga

SEQ ID NO: 474560 - RNA, 19 nt, Homo sapiens
  misc_RNA (1)...(19): siRNA sense strand
ugacaaagauucuggauuc

SEQ ID NO: 474561 - RNA, 19 nt, Homo sapiens
  misc_RNA (1)...(19): siRNA sense strand
cgacagcgcuggaauccua

SEQ ID NO: 474562 - RNA, 19 nt, Homo sapiens
  misc_RNA (1)...(19): siRNA sense strand
gcgcuggaauccuauaaua

SEQ ID NO: 474563 - RNA, 19 nt, Homo sapiens
  misc_RNA (1)...(19): siRNA sense strand
ggucuuagauacagaacua

SEQ ID NO: 474564 - RNA, 19 nt, Homo sapiens
  misc_RNA (1)...(19): siRNA sense strand
gaagauagaggaaguacuu

SEQ ID NO: 474565 - RNA, 19 nt, Homo sapiens
  misc_RNA (1)...(19): siRNA sense strand
gaaguaagcguuccaaauc

SEQ ID NO: 474566 - RNA, 19 nt, Homo sapiens
  misc_RNA (1)...(19): siRNA sense strand
ucauuaagaucucgaagua

SEQ ID NO: 474567 - RNA, 19 nt, Homo sapiens
  misc_RNA (1)...(19): siRNA sense strand
aaacagauccuacugauga

SEQ ID NO: 474568 - RNA, 19 nt, Homo sapiens
  misc_RNA (1)...(19): siRNA sense strand
ggaagaagaucuguaucaa

SEQ ID NO: 474569 - RNA, 19 nt, Homo sapiens
  misc_RNA (1)...(19): siRNA sense strand
ggauacagaagaaccauua

SEQ ID NO: 474570 - RNA, 19 nt, Homo sapiens
  misc_RNA (1)...(19): siRNA sense strand
agaaagagcuucagagucu

SEQ ID NO: 474571 - RNA, 19 nt, Homo sapiens
  misc_RNA (1)...(19): siRNA sense strand
gcucuaugaugucagcuua

SEQ ID NO: 474572 - RNA, 19 nt, Homo sapiens
  misc_RNA (1)...(19): siRNA sense strand
ggagaucucuguucagucu

SEQ ID NO: 474573 - RNA, 19 nt, Homo sapiens
  misc_RNA (1)...(19): siRNA sense strand
caucaucccuuuaaacuca

SEQ ID NO: 474574 - RNA, 19 nt, Homo sapiens
  misc_RNA (1)...(19): siRNA sense strand
agacgaagcuucaguaucu

SEQ ID NO: 474575 - RNA, 19 nt, Homo sapiens
  misc_RNA (1)...(19): siRNA sense strand
gcugaacgcucuaugaugu

SEQ ID NO: 474576 - RNA, 19 nt, Homo sapiens
  misc_RNA (1)...(19): siRNA sense strand
gcucuaugaugucuuauga

SEQ ID NO: 474577 - RNA, 19 nt, Homo sapiens
  misc_RNA (1)...(19): siRNA sense strand
gaagaaauagugcagaaga

SEQ ID NO: 474578 - RNA, 19 nt, Homo sapiens
  misc_RNA (1)...(19): siRNA sense strand
caaaucuucugaacacaaa

SEQ ID NO: 474579 - RNA, 19 nt, Homo sapiens
  misc_RNA (1)...(19): siRNA sense strand
gauauaagccagacuugaa

SEQ ID NO: 474580 - RNA, 19 nt, Homo sapiens
  misc_RNA (1)...(19): siRNA sense strand
gaaacucuaucuucuacug

SEQ ID NO: 474581 - RNA, 19 nt, Homo sapiens
  misc_RNA (1)...(19): siRNA sense strand
gaugaagucugugcugaaa

SEQ ID NO: 474582 - RNA, 19 nt, Homo sapiens
  misc_RNA (1)...(19): siRNA sense strand
gaagucaucugagccaguu

SEQ ID NO: 474583 - RNA, 19 nt, Homo sapiens
  misc_RNA (1)...(19): siRNA sense strand
gcugagcgcucuaugaugu

SEQ ID NO: 474584 - RNA, 19 nt, Homo sapiens
  misc_RNA (1)...(19): siRNA sense strand
aaacagaucgcacagagua

SEQ ID NO: 474585 - RNA, 19 nt, Homo sapiens
  misc_RNA (1)...(19): siRNA sense strand
gaagaagaucuguaucaaa

SEQ ID NO: 474586 - RNA, 19 nt, Homo sapiens
  misc_RNA (1)...(19): siRNA sense strand
caucggagauugcagauuc

SEQ ID NO: 474587 - RNA, 19 nt, Homo sapiens
  misc_RNA (1)...(19): siRNA sense strand
ugaagcagauuuagugaga

SEQ ID NO: 474588 - RNA, 19 nt, Homo sapiens
  misc_RNA (1)...(19): siRNA sense strand
gaaagugaacaugguauaa

SEQ ID NO: 474589 - RNA, 19 nt, Homo sapiens
  misc_RNA (1)...(19): siRNA sense strand
agagcagacucaaguaaua

SEQ ID NO: 474590 - RNA, 19 nt, Homo sapiens
  misc_RNA (1)...(19): siRNA sense strand
gguagaagaaggagcuuua

SEQ ID NO: 474591 - RNA, 19 nt, Homo sapiens
  misc_RNA (1)...(19): siRNA sense strand
ccaggagucuaccaaauga

SEQ ID NO: 474592 - RNA, 19 nt, Homo sapiens
  misc_RNA (1)...(19): siRNA sense strand
gaacgucuuacaagccuua

SEQ ID NO: 474593 - RNA, 19 nt, Homo sapiens
  misc_RNA (1)...(19): siRNA sense strand
ugacuuguaugguaucuga

SEQ ID NO: 474594 - RNA, 19 nt, Homo sapiens
  misc_RNA (1)...(19): siRNA sense strand
caaagauucuggauuccuu

SEQ ID NO: 474595 - RNA, 19 nt, Homo sapiens
  misc_RNA (1)...(19): siRNA sense strand
uguagagucugcaguagua

SEQ ID NO: 474596 - RNA, 19 nt, Homo sapiens
  misc_RNA (1)...(19): siRNA sense strand
gcugaucgaucuaugaugu

SEQ ID NO: 474597 - RNA, 19 nt, Homo sapiens
  misc_RNA (1)...(19): siRNA sense strand
caucaaagaucauguuggu

SEQ ID NO: 474598 - RNA, 19 nt, Homo sapiens
  misc_RNA (1)...(19): siRNA sense strand
caucagagccuccuguuau

SEQ ID NO: 474599 - RNA, 19 nt, Homo sapiens
  misc_RNA (1)...(19): siRNA sense strand
gaagaagguuuagcagauc

SEQ ID NO: 474600 - RNA, 19 nt, Homo sapiens
  misc_RNA (1)...(19): siRNA sense strand
gaaaggaauuaaucuaucc

SEQ ID NO: 474601 - RNA, 19 nt, Homo sapiens
  misc_RNA (1)...(19): siRNA sense strand
ccaagcacaucaacaacaa

SEQ ID NO: 474602 - RNA, 19 nt, Homo sapiens
  misc_RNA (1)...(19): siRNA sense strand
uaugaacgcuccaugaugu

SEQ ID NO: 474603 - RNA, 19 nt, Homo sapiens
  misc_RNA (1)...(19): siRNA sense strand
uaugaacgcuccaugaugu

SEQ ID NO: 474604 - RNA, 19 nt, Homo sapiens
  misc_RNA (1)...(19): siRNA sense strand
cgacagcagugccugaguu

SEQ ID NO: 474605 - RNA, 19 nt, Homo sapiens
  misc_RNA (1)...(19): siRNA sense strand
agaagaagguuuagcagau

SEQ ID NO: 474606 - RNA, 19 nt, Homo sapiens
  misc_RNA (1)...(19): siRNA sense strand
cgacgaaggucuagaucug

SEQ ID NO: 474607 - RNA, 19 nt, Homo sapiens
  misc_RNA (1)...(19): siRNA sense strand
ccuuagagcuggcauugaa

SEQ ID NO: 474608 - RNA, 19 nt, Homo sapiens
  misc_RNA (1)...(19): siRNA sense strand
gaaaguaguggaggagaaa

SEQ ID NO: 474609 - RNA, 19 nt, Homo sapiens
  misc_RNA (1)...(19): siRNA sense strand
gcucagcccuaaagaaagu

SEQ ID NO: 474610 - RNA, 19 nt, Homo sapiens
  misc_RNA (1)...(19): siRNA sense strand
gcuccaugaugucagcuua

SEQ ID NO: 474611 - RNA, 19 nt, Homo sapiens
  misc_RNA (1)...(19): siRNA sense strand
caacgauggugcuggaguu

SEQ ID NO: 474612 - RNA, 19 nt, Homo sapiens
  misc_RNA (1)...(19): siRNA sense strand
gauacagaacuacgauaua

SEQ ID NO: 474613 - RNA, 19 nt, Homo sapiens
  misc_RNA (1)...(19): siRNA sense strand
agaacacccuuaagaagaa

SEQ ID NO: 474614 - RNA, 19 nt, Homo sapiens
  misc_RNA (1)...(19): siRNA sense strand
uagugaagcugacauugaa

SEQ ID NO: 474615 - RNA, 19 nt, Homo sapiens
  misc_RNA (1)...(19): siRNA sense strand
cugaugaaauucccacuaa

SEQ ID NO: 474616 - RNA, 19 nt, Homo sapiens
  misc_RNA (1)...(19): siRNA sense strand
ugaaagagggcuccagaaa

SEQ ID NO: 474617 - RNA, 19 nt, Homo sapiens
  misc_RNA (1)...(19): siRNA sense strand
ggauaguguuuauggagaa

SEQ ID NO: 474618 - RNA, 19 nt, Homo sapiens
  misc_RNA (1)...(19): siRNA sense strand
uaaugcagcugccaugugu

SEQ ID NO: 474619 - RNA, 19 nt, Homo sapiens
  misc_RNA (1)...(19): siRNA sense strand
agaucaagcuccagggaua

SEQ ID NO: 474620 - RNA, 19 nt, Homo sapiens
  misc_RNA (1)...(19): siRNA sense strand
ugaaacaaauacacccauu

SEQ ID NO: 474621 - RNA, 19 nt, Homo sapiens
  misc_RNA (1)...(19): siRNA sense strand
aaacaaauacacccauuga

SEQ ID NO: 474622 - RNA, 19 nt, Homo sapiens
  misc_RNA (1)...(19): siRNA sense strand
gcagcugaccgaucuauga

SEQ ID NO: 474623 - RNA, 19 nt, Homo sapiens
  misc_RNA (1)...(19): siRNA sense strand
ccagagccaucaaagauca

SEQ ID NO: 474624 - RNA, 19 nt, Homo sapiens
  misc_RNA (1)...(19): siRNA sense strand
ggaugaagaggaagaagaa

SEQ ID NO: 474625 - RNA, 19 nt, Homo sapiens
  misc_RNA (1)...(19): siRNA sense strand
aggaggagcuacuauagaa

SEQ ID NO: 474626 - RNA, 19 nt, Homo sapiens
  misc_RNA (1)...(19): siRNA sense strand
gaagaucuguaucaaaaga

SEQ ID NO: 474627 - RNA, 19 nt, Homo sapiens
  misc_RNA (1)...(19): siRNA sense strand
guaaguaguaugccagaaa

SEQ ID NO: 474628 - RNA, 19 nt, Homo sapiens
  misc_RNA (1)...(19): siRNA sense strand
gaaacaaauacacccauug

SEQ ID NO: 474629 - RNA, 19 nt, Homo sapiens
  misc_RNA (1)...(19): siRNA sense strand
ggucuuucguggucaguaa

SEQ ID NO: 474630 - RNA, 19 nt, Homo sapiens
  misc_RNA (1)...(19): siRNA sense strand
caaugucaguggaguauca

SEQ ID NO: 474631 - RNA, 19 nt, Homo sapiens
  misc_RNA (1)...(19): siRNA sense strand
agagacagcagaaacauuu

SEQ ID NO: 474632 - RNA, 19 nt, Homo sapiens
  misc_RNA (1)...(19): siRNA sense strand
gaaauagugcagaagauag

SEQ ID NO: 474633 - RNA, 19 nt, Homo sapiens
  misc_RNA (1)...(19): siRNA sense strand
ucaagaacacccuuaagaa

SEQ ID NO: 474634 - RNA, 19 nt, Homo sapiens
  misc_RNA (1)...(19): siRNA sense strand
guagugaagcugacauuga

SEQ ID NO: 474635 - RNA, 19 nt, Homo sapiens
  misc_RNA (1)...(19): siRNA sense strand
gcugaucguucaaugaugu

SEQ ID NO: 474636 - RNA, 19 nt, Homo sapiens
  misc_RNA (1)...(19): siRNA sense strand
gagccaagcacaucaacaa

SEQ ID NO: 474637 - RNA, 19 nt, Homo sapiens
  misc_RNA (1)...(19): siRNA sense strand
gcauuuggcccaucugaga

SEQ ID NO: 474638 - RNA, 19 nt, Homo sapiens
  misc_RNA (1)...(19): siRNA sense strand
guuaacaccuguagagucu

SEQ ID NO: 474639 - RNA, 19 nt, Homo sapiens
  misc_RNA (1)...(19): siRNA sense strand
caaagaucauguugguaga

SEQ ID NO: 474640 - RNA, 19 nt, Homo sapiens
  misc_RNA (1)...(19): siRNA sense strand
gcugaauggugaaacaaau

SEQ ID NO: 474641 - RNA, 19 nt, Homo sapiens
  misc_RNA (1)...(19): siRNA sense strand
ugaagucugugcugaaauc

SEQ ID NO: 474642 - RNA, 19 nt, Homo sapiens
  misc_RNA (1)...(19): siRNA sense strand
ggacauggaacgucuuaca

SEQ ID NO: 474643 - RNA, 19 nt, Homo sapiens
  misc_RNA (1)...(19): siRNA sense strand
aaagagacacugccugauu

SEQ ID NO: 474644 - RNA, 19 nt, Homo sapiens
  misc_RNA (1)...(19): siRNA sense strand
cagcaucuacucucaguuu

SEQ ID NO: 474645 - RNA, 19 nt, Homo sapiens
  misc_RNA (1)...(19): siRNA sense strand
gcagaaacauuugauucca

SEQ ID NO: 474646 - RNA, 19 nt, Homo sapiens
  misc_RNA (1)...(19): siRNA sense strand
cagaaacccuugugguauc

SEQ ID NO: 474647 - RNA, 19 nt, Homo sapiens
  misc_RNA (1)...(19): siRNA sense strand
gaaccauccaugacaaaga

SEQ ID NO: 474648 - RNA, 19 nt, Homo sapiens
  misc_RNA (1)...(19): siRNA sense strand
gaaggagcuuuagcauuuc

SEQ ID NO: 474649 - RNA, 19 nt, Homo sapiens
  misc_RNA (1)...(19): siRNA sense strand
aagcacagauccaagucua

SEQ ID NO: 474650 - RNA, 19 nt, Homo sapiens
  misc_RNA (1)...(19): siRNA sense strand
uaaugaagcagauuuagug

SEQ ID NO: 474651 - RNA, 19 nt, Homo sapiens
  misc_RNA (1)...(19): siRNA sense strand
gaacuaguaaggguauuga

SEQ ID NO: 474652 - RNA, 19 nt, Homo sapiens
  misc_RNA (1)...(19): siRNA sense strand
caucacauguuaugaaagg

SEQ ID NO: 474653 - RNA, 19 nt, Homo sapiens
  misc_RNA (1)...(19): siRNA sense strand
cuaaagagauggaacauaa

SEQ ID NO: 474654 - RNA, 19 nt, Homo sapiens
  misc_RNA (1)...(19): siRNA sense strand
agaaggagcuuuagcauuu

SEQ ID NO: 474655 - RNA, 19 nt, Homo sapiens
  misc_RNA (1)...(19): siRNA sense strand
gcuagaaccuccuguagua

SEQ ID NO: 474656 - RNA, 19 nt, Homo sapiens
  misc_RNA (1)...(19): siRNA sense strand
ggaaauuggugaagagaaa

SEQ ID NO: 474657 - RNA, 19 nt, Homo sapiens
  misc_RNA (1)...(19): siRNA sense strand
gagccagaaucuucaauua

SEQ ID NO: 474658 - RNA, 19 nt, Homo sapiens
  misc_RNA (1)...(19): siRNA sense strand
ggauaaggcucaauuacuu

SEQ ID NO: 474659 - RNA, 19 nt, Homo sapiens
  misc_RNA (1)...(19): siRNA sense strand
caacugagguggcuauaga

SEQ ID NO: 474660 - RNA, 19 nt, Homo sapiens
  misc_RNA (1)...(19): siRNA sense strand
ugacaaagauucuggauuc

SEQ ID NO: 474661 - RNA, 19 nt, Homo sapiens
  misc_RNA (1)...(19): siRNA sense strand
cgacagcgcuggaauccua

SEQ ID NO: 474662 - RNA, 19 nt, Homo sapiens
  misc_RNA (1)...(19): siRNA sense strand
gcgcuggaauccuauaaua

SEQ ID NO: 474663 - RNA, 19 nt, Homo sapiens
  misc_RNA (1)...(19): siRNA sense strand
ggucuuagauacagaacua

SEQ ID NO: 474664 - RNA, 19 nt, Homo sapiens
  misc_RNA (1)...(19): siRNA sense strand
gaagauagaggaaguacuu

SEQ ID NO: 474665 - RNA, 19 nt, Homo sapiens
  misc_RNA (1)...(19): siRNA sense strand
gaaguaagcguuccaaauc

SEQ ID NO: 474666 - RNA, 19 nt, Homo sapiens
  misc_RNA (1)...(19): siRNA sense strand
ucauuaagaucucgaagua

SEQ ID NO: 474667 - RNA, 19 nt, Homo sapiens
  misc_RNA (1)...(19): siRNA sense strand
aaacagauccuacugauga

SEQ ID NO: 474668 - RNA, 19 nt, Homo sapiens
  misc_RNA (1)...(19): siRNA sense strand
ggaagaagaucuguaucaa

SEQ ID NO: 474669 - RNA, 19 nt, Homo sapiens
  misc_RNA (1)...(19): siRNA sense strand
ggauacagaagaaccauua

SEQ ID NO: 474670 - RNA, 19 nt, Homo sapiens
  misc_RNA (1)...(19): siRNA sense strand
agaaagagcuucagagucu

SEQ ID NO: 474671 - RNA, 19 nt, Homo sapiens
  misc_RNA (1)...(19): siRNA sense strand
gcucuaugaugucagcuua

SEQ ID NO: 474672 - RNA, 19 nt, Homo sapiens
  misc_RNA (1)...(19): siRNA sense strand
ggagaucucuguucagucu

SEQ ID NO: 474673 - RNA, 19 nt, Homo sapiens
  misc_RNA (1)...(19): siRNA sense strand
caucaucccuuuaaacuca

SEQ ID NO: 474674 - RNA, 19 nt, Homo sapiens
  misc_RNA (1)...(19): siRNA sense strand
agacgaagcuucaguaucu

SEQ ID NO: 474675 - RNA, 19 nt, Homo sapiens
  misc_RNA (1)...(19): siRNA sense strand
gcugaacgcucuaugaugu

SEQ ID NO: 474676 - RNA, 19 nt, Homo sapiens
  misc_RNA (1)...(19): siRNA sense strand
gcucuaugaugucuuauga

SEQ ID NO: 474677 - RNA, 19 nt, Homo sapiens
  misc_RNA (1)...(19): siRNA sense strand
gaagaaauagugcagaaga

SEQ ID NO: 474678 - RNA, 19 nt, Homo sapiens
  misc_RNA (1)...(19): siRNA sense strand
caaaucuucugaacacaaa

SEQ ID NO: 474679 - RNA, 19 nt, Homo sapiens
  misc_RNA (1)...(19): siRNA sense strand
gauauaagccagacuugaa

SEQ ID NO: 474680 - RNA, 19 nt, Homo sapiens
  misc_RNA (1)...(19): siRNA sense strand
gaaacucuaucuucuacug

SEQ ID NO: 474681 - RNA, 19 nt, Homo sapiens
  misc_RNA (1)...(19): siRNA sense strand
gaugaagucugugcugaaa

SEQ ID NO: 474682 - RNA, 19 nt, Homo sapiens
  misc_RNA (1)...(19): siRNA sense strand
gaagucaucugagccaguu

SEQ ID NO: 474683 - RNA, 19 nt, Homo sapiens
  misc_RNA (1)...(19): siRNA sense strand
gcugagcgcucuaugaugu

SEQ ID NO: 474684 - RNA, 19 nt, Homo sapiens
  misc_RNA (1)...(19): siRNA sense strand
aaacagaucgcacagagua

SEQ ID NO: 474685 - RNA, 19 nt, Homo sapiens
  misc_RNA (1)...(19): siRNA sense strand
gaagaagaucuguaucaaa

SEQ ID NO: 474686 - RNA, 19 nt, Homo sapiens
  misc_RNA (1)...(19): siRNA sense strand
caucggagauugcagauuc

SEQ ID NO: 474687 - RNA, 19 nt, Homo sapiens
  misc_RNA (1)...(19): siRNA sense strand
ugaagcagauuuagugaga

SEQ ID NO: 474688 - RNA, 19 nt, Homo sapiens
  misc_RNA (1)...(19): siRNA sense strand
gaaagugaacaugguauaa

SEQ ID NO: 474689 - RNA, 19 nt, Homo sapiens
  misc_RNA (1)...(19): siRNA sense strand
agagcagacucaaguaaua

SEQ ID NO: 474690 - RNA, 19 nt, Homo sapiens
  misc_RNA (1)...(19): siRNA sense strand
gguagaagaaggagcuuua

SEQ ID NO: 474691 - RNA, 19 nt, Homo sapiens
  misc_RNA (1)...(19): siRNA sense strand
ccaggagucuaccaaauga

SEQ ID NO: 474692 - RNA, 19 nt, Homo sapiens
  misc_RNA (1)...(19): siRNA sense strand
gaacgucuuacaagccuua

SEQ ID NO: 474693 - RNA, 19 nt, Homo sapiens
  misc_RNA (1)...(19): siRNA sense strand
ugacuuguaugguaucuga

SEQ ID NO: 474694 - RNA, 19 nt, Homo sapiens
  misc_RNA (1)...(19): siRNA sense strand
caaagauucuggauuccuu

SEQ ID NO: 474695 - RNA, 19 nt, Homo sapiens
  misc_RNA (1)...(19): siRNA sense strand
uguagagucugcaguagua

SEQ ID NO: 474696 - RNA, 19 nt, Homo sapiens
  misc_RNA (1)...(19): siRNA sense strand
gcugaucgaucuaugaugu

SEQ ID NO: 474697 - RNA, 19 nt, Homo sapiens
  misc_RNA (1)...(19): siRNA sense strand
caucaaagaucauguuggu

SEQ ID NO: 474698 - RNA, 19 nt, Homo sapiens
  misc_RNA (1)...(19): siRNA sense strand
caucagagccuccuguuau

SEQ ID NO: 474699 - RNA, 19 nt, Homo sapiens
  misc_RNA (1)...(19): siRNA sense strand
gaagaagguuuagcagauc

SEQ ID NO: 474700 - RNA, 19 nt, Homo sapiens
  misc_RNA (1)...(19): siRNA sense strand
gaaaggaauuaaucuaucc

SEQ ID NO: 474701 - RNA, 19 nt, Homo sapiens
  misc_RNA (1)...(19): siRNA sense strand
ccaagcacaucaacaacaa

SEQ ID NO: 474702 - RNA, 19 nt, Homo sapiens
  misc_RNA (1)...(19): siRNA sense strand
uaugaacgcuccaugaugu

SEQ ID NO: 474703 - RNA, 19 nt, Homo sapiens
  misc_RNA (1)...(19): siRNA sense strand
uaugaacgcuccaugaugu

SEQ ID NO: 474704 - RNA, 19 nt, Homo sapiens
  misc_RNA (1)...(19): siRNA sense strand
cgacagcagugccugaguu

SEQ ID NO: 474705 - RNA, 19 nt, Homo sapiens
  misc_RNA (1)...(19): siRNA sense strand
agaagaagguuuagcagau

SEQ ID NO: 474706 - RNA, 19 nt, Homo sapiens
  misc_RNA (1)...(19): siRNA sense strand
cgacgaaggucuagaucug

SEQ ID NO: 474707 - RNA, 19 nt, Homo sapiens
  misc_RNA (1)...(19): siRNA sense strand
ccuuagagcuggcauugaa

SEQ ID NO: 474708 - RNA, 19 nt, Homo sapiens
  misc_RNA (1)...(19): siRNA sense strand
gaaaguaguggaggagaaa

SEQ ID NO: 474709 - RNA, 19 nt, Homo sapiens
  misc_RNA (1)...(19): siRNA sense strand
gcucagcccuaaagaaagu

SEQ ID NO: 474710 - RNA, 19 nt, Homo sapiens
  misc_RNA (1)...(19): siRNA sense strand
gcuccaugaugucagcuua

SEQ ID NO: 474711 - RNA, 19 nt, Homo sapiens
  misc_RNA (1)...(19): siRNA sense strand
caacgauggugcuggaguu

SEQ ID NO: 474712 - RNA, 19 nt, Homo sapiens
  misc_RNA (1)...(19): siRNA sense strand
gauacagaacuacgauaua

SEQ ID NO: 474713 - RNA, 19 nt, Homo sapiens
  misc_RNA (1)...(19): siRNA sense strand
agaacacccuuaagaagaa

SEQ ID NO: 474714 - RNA, 19 nt, Homo sapiens
  misc_RNA (1)...(19): siRNA sense strand
uagugaagcugacauugaa

SEQ ID NO: 474715 - RNA, 19 nt, Homo sapiens
  misc_RNA (1)...(19): siRNA sense strand
cugaugaaauucccacuaa

SEQ ID NO: 474716 - RNA, 19 nt, Homo sapiens
  misc_RNA (1)...(19): siRNA sense strand
ugaaagagggcuccagaaa

SEQ ID NO: 474717 - RNA, 19 nt, Homo sapiens
  misc_RNA (1)...(19): siRNA sense strand
ggauaguguuuauggagaa

SEQ ID NO: 474718 - RNA, 19 nt, Homo sapiens
  misc_RNA (1)...(19): siRNA sense strand
uaaugcagcugccaugugu

SEQ ID NO: 474719 - RNA, 19 nt, Homo sapiens
  misc_RNA (1)...(19): siRNA sense strand
agaucaagcuccagggaua

SEQ ID NO: 474720 - RNA, 19 nt, Homo sapiens
  misc_RNA (1)...(19): siRNA sense strand
ugaaacaaauacacccauu

SEQ ID NO: 474721 - RNA, 19 nt, Homo sapiens
  misc_RNA (1)...(19): siRNA sense strand
aaacaaauacacccauuga

SEQ ID NO: 474722 - RNA, 19 nt, Homo sapiens
  misc_RNA (1)...(19): siRNA sense strand
gcagcugaccgaucuauga

SEQ ID NO: 474723 - RNA, 19 nt, Homo sapiens
  misc_RNA (1)...(19): siRNA sense strand
ccagagccaucaaagauca

SEQ ID NO: 474724 - RNA, 19 nt, Homo sapiens
  misc_RNA (1)...(19): siRNA sense strand
ggaugaagaggaagaagaa

SEQ ID NO: 474725 - RNA, 19 nt, Homo sapiens
  misc_RNA (1)...(19): siRNA sense strand
aggaggagcuacuauagaa

SEQ ID NO: 474726 - RNA, 19 nt, Homo sapiens
  misc_RNA (1)...(19): siRNA sense strand
gaagaucuguaucaaaaga

SEQ ID NO: 474727 - RNA, 19 nt, Homo sapiens
  misc_RNA (1)...(19): siRNA sense strand
guaaguaguaugccagaaa

SEQ ID NO: 474728 - RNA, 19 nt, Homo sapiens
  misc_RNA (1)...(19): siRNA sense strand
gaaacaaauacacccauug

SEQ ID NO: 474729 - RNA, 19 nt, Homo sapiens
  misc_RNA (1)...(19): siRNA sense strand
ggucuuucguggucaguaa

SEQ ID NO: 474730 - RNA, 19 nt, Homo sapiens
  misc_RNA (1)...(19): siRNA sense strand
caaugucaguggaguauca

SEQ ID NO: 474731 - RNA, 19 nt, Homo sapiens
  misc_RNA (1)...(19): siRNA sense strand
agagacagcagaaacauuu

SEQ ID NO: 474732 - RNA, 19 nt, Homo sapiens
  misc_RNA (1)...(19): siRNA sense strand
gaaauagugcagaagauag

SEQ ID NO: 474733 - RNA, 19 nt, Homo sapiens
  misc_RNA (1)...(19): siRNA sense strand
ucaagaacacccuuaagaa

SEQ ID NO: 474734 - RNA, 19 nt, Homo sapiens
  misc_RNA (1)...(19): siRNA sense strand
guagugaagcugacauuga

SEQ ID NO: 474735 - RNA, 19 nt, Homo sapiens
  misc_RNA (1)...(19): siRNA sense strand
gcugaucguucaaugaugu

SEQ ID NO: 474736 - RNA, 19 nt, Homo sapiens
  misc_RNA (1)...(19): siRNA sense strand
gagccaagcacaucaacaa

SEQ ID NO: 474737 - RNA, 19 nt, Homo sapiens
  misc_RNA (1)...(19): siRNA sense strand
gcauuuggcccaucugaga

SEQ ID NO: 474738 - RNA, 19 nt, Homo sapiens
  misc_RNA (1)...(19): siRNA sense strand
guuaacaccuguagagucu

SEQ ID NO: 474739 - RNA, 19 nt, Homo sapiens
  misc_RNA (1)...(19): siRNA sense strand
caaagaucauguugguaga

SEQ ID NO: 474740 - RNA, 19 nt, Homo sapiens
  misc_RNA (1)...(19): siRNA sense strand
gcugaauggugaaacaaau

SEQ ID NO: 474741 - RNA, 19 nt, Homo sapiens
  misc_RNA (1)...(19): siRNA sense strand
ugaagucugugcugaaauc

SEQ ID NO: 474742 - RNA, 19 nt, Homo sapiens
  misc_RNA (1)...(19): siRNA sense strand
ggacauggaacgucuuaca

SEQ ID NO: 474743 - RNA, 19 nt, Homo sapiens
  misc_RNA (1)...(19): siRNA sense strand
aaagagacacugccugauu

SEQ ID NO: 474744 - RNA, 19 nt, Homo sapiens
  misc_RNA (1)...(19): siRNA sense strand
cagcaucuacucucaguuu

SEQ ID NO: 474745 - RNA, 19 nt, Homo sapiens
  misc_RNA (1)...(19): siRNA sense strand
gcagaaacauuugauucca

SEQ ID NO: 474746 - RNA, 19 nt, Homo sapiens
  misc_RNA (1)...(19): siRNA sense strand
cagaaacccuugugguauc

SEQ ID NO: 474747 - RNA, 19 nt, Homo sapiens
  misc_RNA (1)...(19): siRNA sense strand
gaaccauccaugacaaaga

SEQ ID NO: 474748 - RNA, 19 nt, Homo sapiens
  misc_RNA (1)...(19): siRNA sense strand
gaaggagcuuuagcauuuc

SEQ ID NO: 474749 - RNA, 19 nt, Homo sapiens
  misc_RNA (1)...(19): siRNA sense strand
aagcacagauccaagucua

SEQ ID NO: 474750 - RNA, 19 nt, Homo sapiens
  misc_RNA (1)...(19): siRNA sense strand
uaaugaagcagauuuagug

SEQ ID NO: 474751 - RNA, 19 nt, Homo sapiens
  misc_RNA (1)...(19): siRNA sense strand
gaacuaguaaggguauuga

SEQ ID NO: 474752 - RNA, 19 nt, Homo sapiens
  misc_RNA (1)...(19): siRNA sense strand
caucacauguuaugaaagg

SEQ ID NO: 474753 - RNA, 19 nt, Homo sapiens
  misc_RNA (1)...(19): siRNA sense strand
cuaaagagauggaacauaa

SEQ ID NO: 474754 - RNA, 19 nt, Homo sapiens
  misc_RNA (1)...(19): siRNA sense strand
agaaggagcuuuagcauuu

SEQ ID NO: 474755 - RNA, 19 nt, Homo sapiens
  misc_RNA (1)...(19): siRNA sense strand
gcuagaaccuccuguagua

SEQ ID NO: 474756 - RNA, 19 nt, Homo sapiens
  misc_RNA (1)...(19): siRNA sense strand
ggaaauuggugaagagaaa

SEQ ID NO: 474757 - RNA, 19 nt, Homo sapiens
  misc_RNA (1)...(19): siRNA sense strand
gagccagaaucuucaauua

SEQ ID NO: 474758 - RNA, 19 nt, Homo sapiens
  misc_RNA (1)...(19): siRNA sense strand
ggauaaggcucaauuacuu

SEQ ID NO: 474759 - RNA, 19 nt, Homo sapiens
  misc_RNA (1)...(19): siRNA sense strand
caacugagguggcuauaga

SEQ ID NO: 474760 - RNA, 19 nt, Homo sapiens
  misc_RNA (1)...(19): siRNA sense strand
ugacaaagauucuggauuc

SEQ ID NO: 474761 - RNA, 19 nt, Homo sapiens
  misc_RNA (1)...(19): siRNA sense strand
cgacagcgcuggaauccua

SEQ ID NO: 474762 - RNA, 19 nt, Homo sapiens
  misc_RNA (1)...(19): siRNA sense strand
gcgcuggaauccuauaaua

SEQ ID NO: 474763 - RNA, 19 nt, Homo sapiens
  misc_RNA (1)...(19): siRNA sense strand
ggucuuagauacagaacua

SEQ ID NO: 474764 - RNA, 19 nt, Homo sapiens
  misc_RNA (1)...(19): siRNA sense strand
gaagauagaggaaguacuu

SEQ ID NO: 474765 - RNA, 19 nt, Homo sapiens
  misc_RNA (1)...(19): siRNA sense strand
gaaguaagcguuccaaauc

SEQ ID NO: 474766 - RNA, 19 nt, Homo sapiens
  misc_RNA (1)...(19): siRNA sense strand
ucauuaagaucucgaagua

SEQ ID NO: 474767 - RNA, 19 nt, Homo sapiens
  misc_RNA (1)...(19): siRNA sense strand
aaacagauccuacugauga

SEQ ID NO: 474768 - RNA, 19 nt, Homo sapiens
  misc_RNA (1)...(19): siRNA sense strand
ggaagaagaucuguaucaa

SEQ ID NO: 474769 - RNA, 19 nt, Homo sapiens
  misc_RNA (1)...(19): siRNA sense strand
ggauacagaagaaccauua

SEQ ID NO: 474770 - RNA, 19 nt, Homo sapiens
  misc_RNA (1)...(19): siRNA sense strand
agaaagagcuucagagucu

SEQ ID NO: 474771 - RNA, 19 nt, Homo sapiens
  misc_RNA (1)...(19): siRNA sense strand
gcucuaugaugucagcuua

SEQ ID NO: 474772 - RNA, 19 nt, Homo sapiens
  misc_RNA (1)...(19): siRNA sense strand
ggagaucucuguucagucu

SEQ ID NO: 474773 - RNA, 19 nt, Homo sapiens
  misc_RNA (1)...(19): siRNA sense strand
caucaucccuuuaaacuca

SEQ ID NO: 474774 - RNA, 19 nt, Homo sapiens
  misc_RNA (1)...(19): siRNA sense strand
agacgaagcuucaguaucu

SEQ ID NO: 474775 - RNA, 19 nt, Homo sapiens
  misc_RNA (1)...(19): siRNA sense strand
gcugaacgcucuaugaugu

SEQ ID NO: 474776 - RNA, 19 nt, Homo sapiens
  misc_RNA (1)...(19): siRNA sense strand
gcucuaugaugucuuauga

SEQ ID NO: 474777 - RNA, 19 nt, Homo sapiens
  misc_RNA (1)...(19): siRNA sense strand
gaagaaauagugcagaaga

SEQ ID NO: 474778 - RNA, 19 nt, Homo sapiens
  misc_RNA (1)...(19): siRNA sense strand
caaaucuucugaacacaaa

SEQ ID NO: 474779 - RNA, 19 nt, Homo sapiens
  misc_RNA (1)...(19): siRNA sense strand
gauauaagccagacuugaa

SEQ ID NO: 474780 - RNA, 19 nt, Homo sapiens
  misc_RNA (1)...(19): siRNA sense strand
gaaacucuaucuucuacug

SEQ ID NO: 474781 - RNA, 19 nt, Homo sapiens
  misc_RNA (1)...(19): siRNA sense strand
gaugaagucugugcugaaa

SEQ ID NO: 474782 - RNA, 19 nt, Homo sapiens
  misc_RNA (1)...(19): siRNA sense strand
gaagucaucugagccaguu

SEQ ID NO: 474783 - RNA, 19 nt, Homo sapiens
  misc_RNA (1)...(19): siRNA sense strand
gcugagcgcucuaugaugu

SEQ ID NO: 474784 - RNA, 19 nt, Homo sapiens
  misc_RNA (1)...(19): siRNA sense strand
aaacagaucgcacagagua

SEQ ID NO: 474785 - RNA, 19 nt, Homo sapiens
  misc_RNA (1)...(19): siRNA sense strand
gaagaagaucuguaucaaa

SEQ ID NO: 474786 - RNA, 19 nt, Homo sapiens
  misc_RNA (1)...(19): siRNA sense strand
caucggagauugcagauuc

SEQ ID NO: 474787 - RNA, 19 nt, Homo sapiens
  misc_RNA (1)...(19): siRNA sense strand
ugaagcagauuuagugaga

SEQ ID NO: 474788 - RNA, 19 nt, Homo sapiens
  misc_RNA (1)...(19): siRNA sense strand
gaaagugaacaugguauaa

SEQ ID NO: 474789 - RNA, 19 nt, Homo sapiens
  misc_RNA (1)...(19): siRNA sense strand
agagcagacucaaguaaua

SEQ ID NO: 474790 - RNA, 19 nt, Homo sapiens
  misc_RNA (1)...(19): siRNA sense strand
gguagaagaaggagcuuua

SEQ ID NO: 474791 - RNA, 19 nt, Homo sapiens
  misc_RNA (1)...(19): siRNA sense strand
ccaggagucuaccaaauga

SEQ ID NO: 474792 - RNA, 19 nt, Homo sapiens
  misc_RNA (1)...(19): siRNA sense strand
gaacgucuuacaagccuua

SEQ ID NO: 474793 - RNA, 19 nt, Homo sapiens
  misc_RNA (1)...(19): siRNA sense strand
ugacuuguaugguaucuga

SEQ ID NO: 474794 - RNA, 19 nt, Homo sapiens
  misc_RNA (1)...(19): siRNA sense strand
caaagauucuggauuccuu

SEQ ID NO: 474795 - RNA, 19 nt, Homo sapiens
  misc_RNA (1)...(19): siRNA sense strand
uguagagucugcaguagua

SEQ ID NO: 474796 - RNA, 19 nt, Homo sapiens
  misc_RNA (1)...(19): siRNA sense strand
gcugaucgaucuaugaugu

SEQ ID NO: 474797 - RNA, 19 nt, Homo sapiens
  misc_RNA (1)...(19): siRNA sense strand
caucaaagaucauguuggu

SEQ ID NO: 474798 - RNA, 19 nt, Homo sapiens
  misc_RNA (1)...(19): siRNA sense strand
caucagagccuccuguuau

SEQ ID NO: 474799 - RNA, 19 nt, Homo sapiens
  misc_RNA (1)...(19): siRNA sense strand
gaagaagguuuagcagauc

SEQ ID NO: 474800 - RNA, 19 nt, Homo sapiens
  misc_RNA (1)...(19): siRNA sense strand
gaaaggaauuaaucuaucc

SEQ ID NO: 474801 - RNA, 19 nt, Homo sapiens
  misc_RNA (1)...(19): siRNA sense strand
ccaagcacaucaacaacaa

SEQ ID NO: 474802 - RNA, 19 nt, Homo sapiens
  misc_RNA (1)...(19): siRNA sense strand
uaugaacgcuccaugaugu

SEQ ID NO: 474803 - RNA, 19 nt, Homo sapiens
  misc_RNA (1)...(19): siRNA sense strand
uaugaacgcuccaugaugu

SEQ ID NO: 474804 - RNA, 19 nt, Homo sapiens
  misc_RNA (1)...(19): siRNA sense strand
cgacagcagugccugaguu

SEQ ID NO: 474805 - RNA, 19 nt, Homo sapiens
  misc_RNA (1)...(19): siRNA sense strand
agaagaagguuuagcagau

SEQ ID NO: 474806 - RNA, 19 nt, Homo sapiens
  misc_RNA (1)...(19): siRNA sense strand
cgacgaaggucuagaucug

SEQ ID NO: 474807 - RNA, 19 nt, Homo sapiens
  misc_RNA (1)...(19): siRNA sense strand
ccuuagagcuggcauugaa

SEQ ID NO: 474808 - RNA, 19 nt, Homo sapiens
  misc_RNA (1)...(19): siRNA sense strand
gaaaguaguggaggagaaa

SEQ ID NO: 474809 - RNA, 19 nt, Homo sapiens
  misc_RNA (1)...(19): siRNA sense strand
gcucagcccuaaagaaagu

SEQ ID NO: 474810 - RNA, 19 nt, Homo sapiens
  misc_RNA (1)...(19): siRNA sense strand
gcuccaugaugucagcuua

SEQ ID NO: 474811 - RNA, 19 nt, Homo sapiens
  misc_RNA (1)...(19): siRNA sense strand
caacgauggugcuggaguu

SEQ ID NO: 474812 - RNA, 19 nt, Homo sapiens
  misc_RNA (1)...(19): siRNA sense strand
gauacagaacuacgauaua

SEQ ID NO: 474813 - RNA, 19 nt, Homo sapiens
  misc_RNA (1)...(19): siRNA sense strand
agaacacccuuaagaagaa

SEQ ID NO: 474814 - RNA, 19 nt, Homo sapiens
  misc_RNA (1)...(19): siRNA sense strand
uagugaagcugacauugaa

SEQ ID NO: 474815 - RNA, 19 nt, Homo sapiens
  misc_RNA (1)...(19): siRNA sense strand
cugaugaaauucccacuaa

SEQ ID NO: 474816 - RNA, 19 nt, Homo sapiens
  misc_RNA (1)...(19): siRNA sense strand
ugaaagagggcuccagaaa

SEQ ID NO: 474817 - RNA, 19 nt, Homo sapiens
  misc_RNA (1)...(19): siRNA sense strand
ggauaguguuuauggagaa

SEQ ID NO: 474818 - RNA, 19 nt, Homo sapiens
  misc_RNA (1)...(19): siRNA sense strand
uaaugcagcugccaugugu

SEQ ID NO: 474819 - RNA, 19 nt, Homo sapiens
  misc_RNA (1)...(19): siRNA sense strand
agaucaagcuccagggaua

SEQ ID NO: 474820 - RNA, 19 nt, Homo sapiens
  misc_RNA (1)...(19): siRNA sense strand
ugaaacaaauacacccauu

SEQ ID NO: 474821 - RNA, 19 nt, Homo sapiens
  misc_RNA (1)...(19): siRNA sense strand
aaacaaauacacccauuga

SEQ ID NO: 474822 - RNA, 19 nt, Homo sapiens
  misc_RNA (1)...(19): siRNA sense strand
gcagcugaccgaucuauga

SEQ ID NO: 474823 - RNA, 19 nt, Homo sapiens
  misc_RNA (1)...(19): siRNA sense strand
ccagagccaucaaagauca

SEQ ID NO: 474824 - RNA, 19 nt, Homo sapiens
  misc_RNA (1)...(19): siRNA sense strand
ggaugaagaggaagaagaa

SEQ ID NO: 474825 - RNA, 19 nt, Homo sapiens
  misc_RNA (1)...(19): siRNA sense strand
aggaggagcuacuauagaa

SEQ ID NO: 474826 - RNA, 19 nt, Homo sapiens
  misc_RNA (1)...(19): siRNA sense strand
gaagaucuguaucaaaaga

SEQ ID NO: 474827 - RNA, 19 nt, Homo sapiens
  misc_RNA (1)...(19): siRNA sense strand
guaaguaguaugccagaaa

SEQ ID NO: 474828 - RNA, 19 nt, Homo sapiens
  misc_RNA (1)...(19): siRNA sense strand
gaaacaaauacacccauug

SEQ ID NO: 474829 - RNA, 19 nt, Homo sapiens
  misc_RNA (1)...(19): siRNA sense strand
ggucuuucguggucaguaa

SEQ ID NO: 474830 - RNA, 19 nt, Homo sapiens
  misc_RNA (1)...(19): siRNA sense strand
caaugucaguggaguauca

SEQ ID NO: 474831 - RNA, 19 nt, Homo sapiens
  misc_RNA (1)...(19): siRNA sense strand
agagacagcagaaacauuu

SEQ ID NO: 474832 - RNA, 19 nt, Homo sapiens
  misc_RNA (1)...(19): siRNA sense strand
gaaauagugcagaagauag

SEQ ID NO: 474833 - RNA, 19 nt, Homo sapiens
  misc_RNA (1)...(19): siRNA sense strand
ucaagaacacccuuaagaa

SEQ ID NO: 474834 - RNA, 19 nt, Homo sapiens
  misc_RNA (1)...(19): siRNA sense strand
guagugaagcugacauuga

SEQ ID NO: 474835 - RNA, 19 nt, Homo sapiens
  misc_RNA (1)...(19): siRNA sense strand
gcugaucguucaaugaugu

SEQ ID NO: 474836 - RNA, 19 nt, Homo sapiens
  misc_RNA (1)...(19): siRNA sense strand
gagccaagcacaucaacaa

SEQ ID NO: 474837 - RNA, 19 nt, Homo sapiens
  misc_RNA (1)...(19): siRNA sense strand
gcauuuggcccaucugaga

SEQ ID NO: 474838 - RNA, 19 nt, Homo sapiens
  misc_RNA (1)...(19): siRNA sense strand
guuaacaccuguagagucu

SEQ ID NO: 474839 - RNA, 19 nt, Homo sapiens
  misc_RNA (1)...(19): siRNA sense strand
caaagaucauguugguaga

SEQ ID NO: 474840 - RNA, 19 nt, Homo sapiens
  misc_RNA (1)...(19): siRNA sense strand
gcugaauggugaaacaaau

SEQ ID NO: 474841 - RNA, 19 nt, Homo sapiens
  misc_RNA (1)...(19): siRNA sense strand
ugaagucugugcugaaauc

SEQ ID NO: 474842 - RNA, 19 nt, Homo sapiens
  misc_RNA (1)...(19): siRNA sense strand
ggacauggaacgucuuaca

SEQ ID NO: 474843 - RNA, 19 nt, Homo sapiens
  misc_RNA (1)...(19): siRNA sense strand
aaagagacacugccugauu

SEQ ID NO: 474844 - RNA, 19 nt, Homo sapiens
  misc_RNA (1)...(19): siRNA sense strand
cagcaucuacucucaguuu

SEQ ID NO: 474845 - RNA, 19 nt, Homo sapiens
  misc_RNA (1)...(19): siRNA sense strand
gcagaaacauuugauucca

SEQ ID NO: 474846 - RNA, 19 nt, Homo sapiens
  misc_RNA (1)...(19): siRNA sense strand
cagaaacccuugugguauc

SEQ ID NO: 474847 - RNA, 19 nt, Homo sapiens
  misc_RNA (1)...(19): siRNA sense strand
gaaccauccaugacaaaga

SEQ ID NO: 474848 - RNA, 19 nt, Homo sapiens
  misc_RNA (1)...(19): siRNA sense strand
gaaggagcuuuagcauuuc

SEQ ID NO: 474849 - RNA, 19 nt, Homo sapiens
  misc_RNA (1)...(19): siRNA sense strand
aagcacagauccaagucua

SEQ ID NO: 474850 - RNA, 19 nt, Homo sapiens
  misc_RNA (1)...(19): siRNA sense strand
uaaugaagcagauuuagug

SEQ ID NO: 474851 - RNA, 19 nt, Homo sapiens
  misc_RNA (1)...(19): siRNA sense strand
gaacuaguaaggguauuga

SEQ ID NO: 474852 - RNA, 19 nt, Homo sapiens
  misc_RNA (1)...(19): siRNA sense strand
caucacauguuaugaaagg

SEQ ID NO: 474853 - RNA, 19 nt, Homo sapiens
  misc_RNA (1)...(19): siRNA sense strand
ccaaauggcccgagaauug

SEQ ID NO: 474854 - RNA, 19 nt, Homo sapiens
  misc_RNA (1)...(19): siRNA sense strand
gaacgacuccgaagaggaa

SEQ ID NO: 474855 - RNA, 19 nt, Homo sapiens
  misc_RNA (1)...(19): siRNA sense strand
ccgcagaagugaauaugua

SEQ ID NO: 474856 - RNA, 19 nt, Homo sapiens
  misc_RNA (1)...(19): siRNA sense strand
agacagaacucaacucauc

SEQ ID NO: 474857 - RNA, 19 nt, Homo sapiens
  misc_RNA (1)...(19): siRNA sense strand
ggaagaaaaugaagaaguu

SEQ ID NO: 474858 - RNA, 19 nt, Homo sapiens
  misc_RNA (1)...(19): siRNA sense strand
ucaagaagauggaguuauc

SEQ ID NO: 474859 - RNA, 19 nt, Homo sapiens
  misc_RNA (1)...(19): siRNA sense strand
ggauacaaaucaagaagau

SEQ ID NO: 474860 - RNA, 19 nt, Homo sapiens
  misc_RNA (1)...(19): siRNA sense strand
gagugaugaugaugcuuua

SEQ ID NO: 474861 - RNA, 19 nt, Homo sapiens
  misc_RNA (1)...(19): siRNA sense strand
aaauggauauggaaaguga

SEQ ID NO: 474862 - RNA, 19 nt, Homo sapiens
  misc_RNA (1)...(19): siRNA sense strand
gaacaggagcagauaagga

SEQ ID NO: 474863 - RNA, 19 nt, Homo sapiens
  misc_RNA (1)...(19): siRNA sense strand
ccagaacacuuaccagaca

SEQ ID NO: 474864 - RNA, 19 nt, Homo sapiens
  misc_RNA (1)...(19): siRNA sense strand
gaagaaguuuucaaaguga

SEQ ID NO: 474865 - RNA, 19 nt, Homo sapiens
  misc_RNA (1)...(19): siRNA sense strand
ccagggcuauugaaagauu

SEQ ID NO: 474866 - RNA, 19 nt, Homo sapiens
  misc_RNA (1)...(19): siRNA sense strand
uaccagggcuauugaaaga

SEQ ID NO: 474867 - RNA, 19 nt, Homo sapiens
  misc_RNA (1)...(19): siRNA sense strand
gcagauaaggaaaggaauu

SEQ ID NO: 474868 - RNA, 19 nt, Homo sapiens
  misc_RNA (1)...(19): siRNA sense strand
gaggguauguccaagacuu

SEQ ID NO: 474869 - RNA, 19 nt, Homo sapiens
  misc_RNA (1)...(19): siRNA sense strand
gauaauacagucccuuuca

SEQ ID NO: 474870 - RNA, 19 nt, Homo sapiens
  misc_RNA (1)...(19): siRNA sense strand
ggagugaugaugaugcuuu

SEQ ID NO: 474871 - RNA, 19 nt, Homo sapiens
  misc_RNA (1)...(19): siRNA sense strand
gagcagauaaggaaaggaa

SEQ ID NO: 474872 - RNA, 19 nt, Homo sapiens
  misc_RNA (1)...(19): siRNA sense strand
ugaugaugaugcuuuagua

SEQ ID NO: 474873 - RNA, 19 nt, Homo sapiens
  misc_RNA (1)...(19): siRNA sense strand
guaaagaaacagcuuaaag

SEQ ID NO: 474874 - RNA, 19 nt, Homo sapiens
  misc_RNA (1)...(19): siRNA sense strand
uaaaauugcucaagaagga

SEQ ID NO: 474875 - RNA, 19 nt, Homo sapiens
  misc_RNA (1)...(19): siRNA sense strand
cagauaaggaaaggaauua

SEQ ID NO: 474876 - RNA, 19 nt, Homo sapiens
  misc_RNA (1)...(19): siRNA sense strand
gcaagaggccucgcgagaa

SEQ ID NO: 474877 - RNA, 19 nt, Homo sapiens
  misc_RNA (1)...(19): siRNA sense strand
aagacuugcuugaguguuu

SEQ ID NO: 474878 - RNA, 19 nt, Homo sapiens
  misc_RNA (1)...(19): siRNA sense strand
gcucaagaaggaauauaaa

SEQ ID NO: 474879 - RNA, 19 nt, Homo sapiens
  misc_RNA (1)...(19): siRNA sense strand
ugacucccguuacuauuga

SEQ ID NO: 474880 - RNA, 19 nt, Homo sapiens
  misc_RNA (1)...(19): siRNA sense strand
caagaggccucgcgagaac

SEQ ID NO: 474881 - RNA, 19 nt, Homo sapiens
  misc_RNA (1)...(19): siRNA sense strand
gaacauggugaagaugaaa

SEQ ID NO: 474882 - RNA, 19 nt, Homo sapiens
  misc_RNA (1)...(19): siRNA sense strand
gaaagaaaagucacaaaga

SEQ ID NO: 474883 - RNA, 19 nt, Homo sapiens
  misc_RNA (1)...(19): siRNA sense strand
gaugaugaugcuuuaguaa

SEQ ID NO: 474884 - RNA, 19 nt, Homo sapiens
  misc_RNA (1)...(19): siRNA sense strand
gaagaaaucaaguuauagc

SEQ ID NO: 474885 - RNA, 19 nt, Homo sapiens
  misc_RNA (1)...(19): siRNA sense strand
ugaaauggauauggaaagu

SEQ ID NO: 474886 - RNA, 19 nt, Homo sapiens
  misc_RNA (1)...(19): siRNA sense strand
caacucaucagcugaaagu

SEQ ID NO: 474887 - RNA, 19 nt, Homo sapiens
  misc_RNA (1)...(19): siRNA sense strand
gaugagaaacgccggauag

SEQ ID NO: 474888 - RNA, 19 nt, Homo sapiens
  misc_RNA (1)...(19): siRNA sense strand
aagaugaaauggauaugga

SEQ ID NO: 474889 - RNA, 19 nt, Homo sapiens
  misc_RNA (1)...(19): siRNA sense strand
caaaucgacagcagcauga

SEQ ID NO: 474890 - RNA, 19 nt, Homo sapiens
  misc_RNA (1)...(19): siRNA sense strand
gaugaaauggauauggaaa

SEQ ID NO: 474891 - RNA, 19 nt, Homo sapiens
  misc_RNA (1)...(19): siRNA sense strand
uaauacagucccuuucaaa

SEQ ID NO: 474892 - RNA, 19 nt, Homo sapiens
  misc_RNA (1)...(19): siRNA sense strand
uguacuaccagaacacuua

SEQ ID NO: 474893 - RNA, 19 nt, Homo sapiens
  misc_RNA (1)...(19): siRNA sense strand
uauacaugcugcaaggaaa

SEQ ID NO: 474894 - RNA, 19 nt, Homo sapiens
  misc_RNA (1)...(19): siRNA sense strand
uaagacagaacucaacuca

SEQ ID NO: 474895 - RNA, 19 nt, Homo sapiens
  misc_RNA (1)...(19): siRNA sense strand
ggugaacgguauaaauuuu

SEQ ID NO: 474896 - RNA, 19 nt, Homo sapiens
  misc_RNA (1)...(19): siRNA sense strand
uggcauuccuuauaguuau

SEQ ID NO: 474897 - RNA, 19 nt, Homo sapiens
  misc_RNA (1)...(19): siRNA sense strand
uaauaucccucagguucaa

SEQ ID NO: 474898 - RNA, 19 nt, Homo sapiens
  misc_RNA (1)...(19): siRNA sense strand
uuagagaagaugagaauga

SEQ ID NO: 474899 - RNA, 19 nt, Homo sapiens
  misc_RNA (1)...(19): siRNA sense strand
ggaguuaucaucagugaac

SEQ ID NO: 474900 - RNA, 19 nt, Homo sapiens
  misc_RNA (1)...(19): siRNA sense strand
gcaagaaaugcgaggguau

SEQ ID NO: 474901 - RNA, 19 nt, Homo sapiens
  misc_RNA (1)...(19): siRNA sense strand
cagaagugaauauguacua

SEQ ID NO: 474902 - RNA, 19 nt, Homo sapiens
  misc_RNA (1)...(19): siRNA sense strand
uagagaagaugagaaugau

SEQ ID NO: 474903 - RNA, 19 nt, Homo sapiens
  misc_RNA (1)...(19): siRNA sense strand
ugaacauggugaagaugaa

SEQ ID NO: 474904 - RNA, 19 nt, Homo sapiens
  misc_RNA (1)...(19): siRNA sense strand
gagauuucacuccucauga

SEQ ID NO: 474905 - RNA, 19 nt, Homo sapiens
  misc_RNA (1)...(19): siRNA sense strand
gacagcagcaugagaaaca

SEQ ID NO: 474906 - RNA, 19 nt, Homo sapiens
  misc_RNA (1)...(19): siRNA sense strand
ccagugaugaugaagauga

SEQ ID NO: 474907 - RNA, 19 nt, Homo sapiens
  misc_RNA (1)...(19): siRNA sense strand
gaagaugaaauggauaugg

SEQ ID NO: 474908 - RNA, 19 nt, Homo sapiens
  misc_RNA (1)...(19): siRNA sense strand
ugagaugacucccguuacu

SEQ ID NO: 474909 - RNA, 19 nt, Homo sapiens
  misc_RNA (1)...(19): siRNA sense strand
cagauaauacagucccuuu

SEQ ID NO: 474910 - RNA, 19 nt, Homo sapiens
  misc_RNA (1)...(19): siRNA sense strand
cauccuauggcauuccuua

SEQ ID NO: 474911 - RNA, 19 nt, Homo sapiens
  misc_RNA (1)...(19): siRNA sense strand
ugaagaugacgaugagaaa

SEQ ID NO: 474912 - RNA, 19 nt, Homo sapiens
  misc_RNA (1)...(19): siRNA sense strand
gugaacaaccuuuggacaa

SEQ ID NO: 474913 - RNA, 19 nt, Homo sapiens
  misc_RNA (1)...(19): siRNA sense strand
caugaaagaauugcacaaa

SEQ ID NO: 474914 - RNA, 19 nt, Homo sapiens
  misc_RNA (1)...(19): siRNA sense strand
gagaugacucccguuacua

SEQ ID NO: 474915 - RNA, 19 nt, Homo sapiens
  misc_RNA (1)...(19): siRNA sense strand
gaauauguacuaccagaac

SEQ ID NO: 474916 - RNA, 19 nt, Homo sapiens
  misc_RNA (1)...(19): siRNA sense strand
caggacauguuaaggauac

SEQ ID NO: 474917 - RNA, 19 nt, Homo sapiens
  misc_RNA (1)...(19): siRNA sense strand
gauuucacuccucaugaua

SEQ ID NO: 474918 - RNA, 19 nt, Homo sapiens
  misc_RNA (1)...(19): siRNA sense strand
cagugaacauggugaagau

SEQ ID NO: 474919 - RNA, 19 nt, Homo sapiens
  misc_RNA (1)...(19): siRNA sense strand
ggguauuggugaacgguau

SEQ ID NO: 474920 - RNA, 19 nt, Homo sapiens
  misc_RNA (1)...(19): siRNA sense strand
cagggcuauugaaagauua

SEQ ID NO: 474921 - RNA, 19 nt, Homo sapiens
  misc_RNA (1)...(19): siRNA sense strand
gaugaugcuuuaguaacug

SEQ ID NO: 474922 - RNA, 19 nt, Homo sapiens
  misc_RNA (1)...(19): siRNA sense strand
uaucaucagugaacauggu

SEQ ID NO: 474923 - RNA, 19 nt, Homo sapiens
  misc_RNA (1)...(19): siRNA sense strand
aaugagaugacucccguua

SEQ ID NO: 474924 - RNA, 19 nt, Homo sapiens
  misc_RNA (1)...(19): siRNA sense strand
ugaugaagaugacgaugag

SEQ ID NO: 474925 - RNA, 19 nt, Homo sapiens
  misc_RNA (1)...(19): siRNA sense strand
gauaaugagccugguaaag

SEQ ID NO: 474926 - RNA, 19 nt, Homo sapiens
  misc_RNA (1)...(19): siRNA sense strand
gaacacuuaccagacaaug

SEQ ID NO: 474927 - RNA, 19 nt, Homo sapiens
  misc_RNA (1)...(19): siRNA sense strand
ugaugaugcuuuaguaacu

SEQ ID NO: 474928 - RNA, 19 nt, Homo sapiens
  misc_RNA (1)...(19): siRNA sense strand
gugaacauggugaagauga

SEQ ID NO: 474929 - RNA, 19 nt, Homo sapiens
  misc_RNA (1)...(19): siRNA sense strand
caagaaaugcgaggguaug

SEQ ID NO: 474930 - RNA, 19 nt, Homo sapiens
  misc_RNA (1)...(19): siRNA sense strand
caugagaaacaucugcaaa

SEQ ID NO: 474931 - RNA, 19 nt, Homo sapiens
  misc_RNA (1)...(19): siRNA sense strand
gguaaagaaacagcuuaaa

SEQ ID NO: 474932 - RNA, 19 nt, Homo sapiens
  misc_RNA (1)...(19): siRNA sense strand
auaauacagucccuuucaa

SEQ ID NO: 474933 - RNA, 19 nt, Homo sapiens
  misc_RNA (1)...(19): siRNA sense strand
cucaucagcugaaagugaa

SEQ ID NO: 474934 - RNA, 19 nt, Homo sapiens
  misc_RNA (1)...(19): siRNA sense strand
gaaauggauauggaaagug

SEQ ID NO: 474935 - RNA, 19 nt, Homo sapiens
  misc_RNA (1)...(19): siRNA sense strand
gugaagaugaaauggauau

SEQ ID NO: 474936 - RNA, 19 nt, Homo sapiens
  misc_RNA (1)...(19): siRNA sense strand
gagaaugaugccagugaug

SEQ ID NO: 474937 - RNA, 19 nt, Homo sapiens
  misc_RNA (1)...(19): siRNA sense strand
gaugacucccguuacuauu

SEQ ID NO: 474938 - RNA, 19 nt, Homo sapiens
  misc_RNA (1)...(19): siRNA sense strand
gaugggaacaggagcagau

SEQ ID NO: 474939 - RNA, 19 nt, Homo sapiens
  misc_RNA (1)...(19): siRNA sense strand
gcccgagaauugggagauu

SEQ ID NO: 474940 - RNA, 19 nt, Homo sapiens
  misc_RNA (1)...(19): siRNA sense strand
cagaacacuuaccagacaa

SEQ ID NO: 474941 - RNA, 19 nt, Homo sapiens
  misc_RNA (1)...(19): siRNA sense strand
gaaaagucacaaagacaaa

SEQ ID NO: 474942 - RNA, 19 nt, Homo sapiens
  misc_RNA (1)...(19): siRNA sense strand
ugagaaacgccggauaguu

SEQ ID NO: 474943 - RNA, 19 nt, Homo sapiens
  misc_RNA (1)...(19): siRNA sense strand
gaaugaugccagugaugau

SEQ ID NO: 474944 - RNA, 19 nt, Homo sapiens
  misc_RNA (1)...(19): siRNA sense strand
ugagaaugaugccagugau

SEQ ID NO: 474945 - RNA, 19 nt, Homo sapiens
  misc_RNA (1)...(19): siRNA sense strand
agauuucacuccucaugau

SEQ ID NO: 474946 - RNA, 19 nt, Homo sapiens
  misc_RNA (1)...(19): siRNA sense strand
ugagaaacaucugcaaagc

SEQ ID NO: 474947 - RNA, 19 nt, Homo sapiens
  misc_RNA (1)...(19): siRNA sense strand
ggacuccaugaaagaauug

SEQ ID NO: 474948 - RNA, 19 nt, Homo sapiens
  misc_RNA (1)...(19): siRNA sense strand
agaaugaugccagugauga

SEQ ID NO: 474949 - RNA, 19 nt, Homo sapiens
  misc_RNA (1)...(19): siRNA sense strand
uuuaguaacuggagaacag

SEQ ID NO: 474950 - RNA, 19 nt, Homo sapiens
  misc_RNA (1)...(19): siRNA sense strand
gcgaggguauguccaagac

SEQ ID NO: 474951 - RNA, 19 nt, Homo sapiens
  misc_RNA (1)...(19): siRNA sense strand
gaaagaauugcacaaaaca

SEQ ID NO: 474952 - RNA, 19 nt, Homo sapiens
  misc_RNA (1)...(19): siRNA sense strand
uaacuggagaacaggauga

SEQ ID NO: 474953 - RNA, 19 nt, Homo sapiens
  misc_RNA (1)...(19): siRNA sense strand
ccaaauggcccgagaauug

SEQ ID NO: 474954 - RNA, 19 nt, Homo sapiens
  misc_RNA (1)...(19): siRNA sense strand
gaacgacuccgaagaggaa

SEQ ID NO: 474955 - RNA, 19 nt, Homo sapiens
  misc_RNA (1)...(19): siRNA sense strand
ccgcagaagugaauaugua

SEQ ID NO: 474956 - RNA, 19 nt, Homo sapiens
  misc_RNA (1)...(19): siRNA sense strand
agacagaacucaacucauc

SEQ ID NO: 474957 - RNA, 19 nt, Homo sapiens
  misc_RNA (1)...(19): siRNA sense strand
ggaagaaaaugaagaaguu

SEQ ID NO: 474958 - RNA, 19 nt, Homo sapiens
  misc_RNA (1)...(19): siRNA sense strand
ucaagaagauggaguuauc

SEQ ID NO: 474959 - RNA, 19 nt, Homo sapiens
  misc_RNA (1)...(19): siRNA sense strand
ggauacaaaucaagaagau

SEQ ID NO: 474960 - RNA, 19 nt, Homo sapiens
  misc_RNA (1)...(19): siRNA sense strand
gagugaugaugaugcuuua

SEQ ID NO: 474961 - RNA, 19 nt, Homo sapiens
  misc_RNA (1)...(19): siRNA sense strand
aaauggauauggaaaguga

SEQ ID NO: 474962 - RNA, 19 nt, Homo sapiens
  misc_RNA (1)...(19): siRNA sense strand
gaacaggagcagauaagga

SEQ ID NO: 474963 - RNA, 19 nt, Homo sapiens
  misc_RNA (1)...(19): siRNA sense strand
ccagaacacuuaccagaca

SEQ ID NO: 474964 - RNA, 19 nt, Homo sapiens
  misc_RNA (1)...(19): siRNA sense strand
gaagaaguuuucaaaguga

SEQ ID NO: 474965 - RNA, 19 nt, Homo sapiens
  misc_RNA (1)...(19): siRNA sense strand
ccagggcuauugaaagauu

SEQ ID NO: 474966 - RNA, 19 nt, Homo sapiens
  misc_RNA (1)...(19): siRNA sense strand
uaccagggcuauugaaaga

SEQ ID NO: 474967 - RNA, 19 nt, Homo sapiens
  misc_RNA (1)...(19): siRNA sense strand
gcagauaaggaaaggaauu

SEQ ID NO: 474968 - RNA, 19 nt, Homo sapiens
  misc_RNA (1)...(19): siRNA sense strand
gaggguauguccaagacuu

SEQ ID NO: 474969 - RNA, 19 nt, Homo sapiens
  misc_RNA (1)...(19): siRNA sense strand
gauaauacagucccuuuca

SEQ ID NO: 474970 - RNA, 19 nt, Homo sapiens
  misc_RNA (1)...(19): siRNA sense strand
ggagugaugaugaugcuuu

SEQ ID NO: 474971 - RNA, 19 nt, Homo sapiens
  misc_RNA (1)...(19): siRNA sense strand
gagcagauaaggaaaggaa

SEQ ID NO: 474972 - RNA, 19 nt, Homo sapiens
  misc_RNA (1)...(19): siRNA sense strand
ugaugaugaugcuuuagua

SEQ ID NO: 474973 - RNA, 19 nt, Homo sapiens
  misc_RNA (1)...(19): siRNA sense strand
guaaagaaacagcuuaaag

SEQ ID NO: 474974 - RNA, 19 nt, Homo sapiens
  misc_RNA (1)...(19): siRNA sense strand
uaaaauugcucaagaagga

SEQ ID NO: 474975 - RNA, 19 nt, Homo sapiens
  misc_RNA (1)...(19): siRNA sense strand
cagauaaggaaaggaauua

SEQ ID NO: 474976 - RNA, 19 nt, Homo sapiens
  misc_RNA (1)...(19): siRNA sense strand
gcaagaggccucgcgagaa

SEQ ID NO: 474977 - RNA, 19 nt, Homo sapiens
  misc_RNA (1)...(19): siRNA sense strand
aagacuugcuugaguguuu

SEQ ID NO: 474978 - RNA, 19 nt, Homo sapiens
  misc_RNA (1)...(19): siRNA sense strand
gcucaagaaggaauauaaa

SEQ ID NO: 474979 - RNA, 19 nt, Homo sapiens
  misc_RNA (1)...(19): siRNA sense strand
ugacucccguuacuauuga

SEQ ID NO: 474980 - RNA, 19 nt, Homo sapiens
  misc_RNA (1)...(19): siRNA sense strand
caagaggccucgcgagaac

SEQ ID NO: 474981 - RNA, 19 nt, Homo sapiens
  misc_RNA (1)...(19): siRNA sense strand
gaacauggugaagaugaaa

SEQ ID NO: 474982 - RNA, 19 nt, Homo sapiens
  misc_RNA (1)...(19): siRNA sense strand
gaaagaaaagucacaaaga

SEQ ID NO: 474983 - RNA, 19 nt, Homo sapiens
  misc_RNA (1)...(19): siRNA sense strand
gaugaugaugcuuuaguaa

SEQ ID NO: 474984 - RNA, 19 nt, Homo sapiens
  misc_RNA (1)...(19): siRNA sense strand
gaagaaaucaaguuauagc

SEQ ID NO: 474985 - RNA, 19 nt, Homo sapiens
  misc_RNA (1)...(19): siRNA sense strand
ugaaauggauauggaaagu

SEQ ID NO: 474986 - RNA, 19 nt, Homo sapiens
  misc_RNA (1)...(19): siRNA sense strand
caacucaucagcugaaagu

SEQ ID NO: 474987 - RNA, 19 nt, Homo sapiens
  misc_RNA (1)...(19): siRNA sense strand
gaugagaaacgccggauag

SEQ ID NO: 474988 - RNA, 19 nt, Homo sapiens
  misc_RNA (1)...(19): siRNA sense strand
aagaugaaauggauaugga

SEQ ID NO: 474989 - RNA, 19 nt, Homo sapiens
  misc_RNA (1)...(19): siRNA sense strand
caaaucgacagcagcauga

SEQ ID NO: 474990 - RNA, 19 nt, Homo sapiens
  misc_RNA (1)...(19): siRNA sense strand
gaugaaauggauauggaaa

SEQ ID NO: 474991 - RNA, 19 nt, Homo sapiens
  misc_RNA (1)...(19): siRNA sense strand
uaauacagucccuuucaaa

SEQ ID NO: 474992 - RNA, 19 nt, Homo sapiens
  misc_RNA (1)...(19): siRNA sense strand
uguacuaccagaacacuua

SEQ ID NO: 474993 - RNA, 19 nt, Homo sapiens
  misc_RNA (1)...(19): siRNA sense strand
uauacaugcugcaaggaaa

SEQ ID NO: 474994 - RNA, 19 nt, Homo sapiens
  misc_RNA (1)...(19): siRNA sense strand
uaagacagaacucaacuca

SEQ ID NO: 474995 - RNA, 19 nt, Homo sapiens
  misc_RNA (1)...(19): siRNA sense strand
ggugaacgguauaaauuuu

SEQ ID NO: 474996 - RNA, 19 nt, Homo sapiens
  misc_RNA (1)...(19): siRNA sense strand
uggcauuccuuauaguuau

SEQ ID NO: 474997 - RNA, 19 nt, Homo sapiens
  misc_RNA (1)...(19): siRNA sense strand
uaauaucccucagguucaa

SEQ ID NO: 474998 - RNA, 19 nt, Homo sapiens
  misc_RNA (1)...(19): siRNA sense strand
uuagagaagaugagaauga

SEQ ID NO: 474999 - RNA, 19 nt, Homo sapiens
  misc_RNA (1)...(19): siRNA sense strand
ggaguuaucaucagugaac

SEQ ID NO: 475000 - RNA, 19 nt, Homo sapiens
  misc_RNA (1)...(19): siRNA sense strand
gcaagaaaugcgaggguau

SEQ ID NO: 475001 - RNA, 19 nt, Homo sapiens
  misc_RNA (1)...(19): siRNA sense strand
cagaagugaauauguacua

SEQ ID NO: 475002 - RNA, 19 nt, Homo sapiens
  misc_RNA (1)...(19): siRNA sense strand
uagagaagaugagaaugau

SEQ ID NO: 475003 - RNA, 19 nt, Homo sapiens
  misc_RNA (1)...(19): siRNA sense strand
ugaacauggugaagaugaa

SEQ ID NO: 475004 - RNA, 19 nt, Homo sapiens
  misc_RNA (1)...(19): siRNA sense strand
gagauuucacuccucauga

SEQ ID NO: 475005 - RNA, 19 nt, Homo sapiens
  misc_RNA (1)...(19): siRNA sense strand
gacagcagcaugagaaaca

SEQ ID NO: 475006 - RNA, 19 nt, Homo sapiens
  misc_RNA (1)...(19): siRNA sense strand
ccagugaugaugaagauga

SEQ ID NO: 475007 - RNA, 19 nt, Homo sapiens
  misc_RNA (1)...(19): siRNA sense strand
gaagaugaaauggauaugg

SEQ ID NO: 475008 - RNA, 19 nt, Homo sapiens
  misc_RNA (1)...(19): siRNA sense strand
ugagaugacucccguuacu

SEQ ID NO: 475009 - RNA, 19 nt, Homo sapiens
  misc_RNA (1)...(19): siRNA sense strand
cagauaauacagucccuuu

SEQ ID NO: 475010 - RNA, 19 nt, Homo sapiens
  misc_RNA (1)...(19): siRNA sense strand
cauccuauggcauuccuua

SEQ ID NO: 475011 - RNA, 19 nt, Homo sapiens
  misc_RNA (1)...(19): siRNA sense strand
ugaagaugacgaugagaaa

SEQ ID NO: 475012 - RNA, 19 nt, Homo sapiens
  misc_RNA (1)...(19): siRNA sense strand
gugaacaaccuuuggacaa

SEQ ID NO: 475013 - RNA, 19 nt, Homo sapiens
  misc_RNA (1)...(19): siRNA sense strand
caugaaagaauugcacaaa

SEQ ID NO: 475014 - RNA, 19 nt, Homo sapiens
  misc_RNA (1)...(19): siRNA sense strand
gagaugacucccguuacua

SEQ ID NO: 475015 - RNA, 19 nt, Homo sapiens
  misc_RNA (1)...(19): siRNA sense strand
gaauauguacuaccagaac

SEQ ID NO: 475016 - RNA, 19 nt, Homo sapiens
  misc_RNA (1)...(19): siRNA sense strand
caggacauguuaaggauac

SEQ ID NO: 475017 - RNA, 19 nt, Homo sapiens
  misc_RNA (1)...(19): siRNA sense strand
gauuucacuccucaugaua

SEQ ID NO: 475018 - RNA, 19 nt, Homo sapiens
  misc_RNA (1)...(19): siRNA sense strand
cagugaacauggugaagau

SEQ ID NO: 475019 - RNA, 19 nt, Homo sapiens
  misc_RNA (1)...(19): siRNA sense strand
ggguauuggugaacgguau

SEQ ID NO: 475020 - RNA, 19 nt, Homo sapiens
  misc_RNA (1)...(19): siRNA sense strand
cagggcuauugaaagauua

SEQ ID NO: 475021 - RNA, 19 nt, Homo sapiens
  misc_RNA (1)...(19): siRNA sense strand
gaugaugcuuuaguaacug

SEQ ID NO: 475022 - RNA, 19 nt, Homo sapiens
  misc_RNA (1)...(19): siRNA sense strand
uaucaucagugaacauggu

SEQ ID NO: 475023 - RNA, 19 nt, Homo sapiens
  misc_RNA (1)...(19): siRNA sense strand
aaugagaugacucccguua

SEQ ID NO: 475024 - RNA, 19 nt, Homo sapiens
  misc_RNA (1)...(19): siRNA sense strand
ugaugaagaugacgaugag

SEQ ID NO: 475025 - RNA, 19 nt, Homo sapiens
  misc_RNA (1)...(19): siRNA sense strand
gauaaugagccugguaaag

SEQ ID NO: 475026 - RNA, 19 nt, Homo sapiens
  misc_RNA (1)...(19): siRNA sense strand
gaacacuuaccagacaaug

SEQ ID NO: 475027 - RNA, 19 nt, Homo sapiens
  misc_RNA (1)...(19): siRNA sense strand
ugaugaugcuuuaguaacu

SEQ ID NO: 475028 - RNA, 19 nt, Homo sapiens
  misc_RNA (1)...(19): siRNA sense strand
gugaacauggugaagauga

SEQ ID NO: 475029 - RNA, 19 nt, Homo sapiens
  misc_RNA (1)...(19): siRNA sense strand
caagaaaugcgaggguaug

SEQ ID NO: 475030 - RNA, 19 nt, Homo sapiens
  misc_RNA (1)...(19): siRNA sense strand
caugagaaacaucugcaaa

SEQ ID NO: 475031 - RNA, 19 nt, Homo sapiens
  misc_RNA (1)...(19): siRNA sense strand
gguaaagaaacagcuuaaa

SEQ ID NO: 475032 - RNA, 19 nt, Homo sapiens
  misc_RNA (1)...(19): siRNA sense strand
auaauacagucccuuucaa

SEQ ID NO: 475033 - RNA, 19 nt, Homo sapiens
  misc_RNA (1)...(19): siRNA sense strand
cucaucagcugaaagugaa

SEQ ID NO: 475034 - RNA, 19 nt, Homo sapiens
  misc_RNA (1)...(19): siRNA sense strand
gaaauggauauggaaagug

SEQ ID NO: 475035 - RNA, 19 nt, Homo sapiens
  misc_RNA (1)...(19): siRNA sense strand
gugaagaugaaauggauau

SEQ ID NO: 475036 - RNA, 19 nt, Homo sapiens
  misc_RNA (1)...(19): siRNA sense strand
gagaaugaugccagugaug

SEQ ID NO: 475037 - RNA, 19 nt, Homo sapiens
  misc_RNA (1)...(19): siRNA sense strand
gaugacucccguuacuauu

SEQ ID NO: 475038 - RNA, 19 nt, Homo sapiens
  misc_RNA (1)...(19): siRNA sense strand
gaugggaacaggagcagau

SEQ ID NO: 475039 - RNA, 19 nt, Homo sapiens
  misc_RNA (1)...(19): siRNA sense strand
gcccgagaauugggagauu

SEQ ID NO: 475040 - RNA, 19 nt, Homo sapiens
  misc_RNA (1)...(19): siRNA sense strand
cagaacacuuaccagacaa

SEQ ID NO: 475041 - RNA, 19 nt, Homo sapiens
  misc_RNA (1)...(19): siRNA sense strand
gaaaagucacaaagacaaa

SEQ ID NO: 475042 - RNA, 19 nt, Homo sapiens
  misc_RNA (1)...(19): siRNA sense strand
ugagaaacgccggauaguu

SEQ ID NO: 475043 - RNA, 19 nt, Homo sapiens
  misc_RNA (1)...(19): siRNA sense strand
gaaugaugccagugaugau

SEQ ID NO: 475044 - RNA, 19 nt, Homo sapiens
  misc_RNA (1)...(19): siRNA sense strand
ugagaaugaugccagugau

SEQ ID NO: 475045 - RNA, 19 nt, Homo sapiens
  misc_RNA (1)...(19): siRNA sense strand
agauuucacuccucaugau

SEQ ID NO: 475046 - RNA, 19 nt, Homo sapiens
  misc_RNA (1)...(19): siRNA sense strand
ugagaaacaucugcaaagc

SEQ ID NO: 475047 - RNA, 19 nt, Homo sapiens
  misc_RNA (1)...(19): siRNA sense strand
ggacuccaugaaagaauug

SEQ ID NO: 475048 - RNA, 19 nt, Homo sapiens
  misc_RNA (1)...(19): siRNA sense strand
agaaugaugccagugauga

SEQ ID NO: 475049 - RNA, 19 nt, Homo sapiens
  misc_RNA (1)...(19): siRNA sense strand
uuuaguaacuggagaacag

SEQ ID NO: 475050 - RNA, 19 nt, Homo sapiens
  misc_RNA (1)...(19): siRNA sense strand
gcgaggguauguccaagac

SEQ ID NO: 475051 - RNA, 19 nt, Homo sapiens
  misc_RNA (1)...(19): siRNA sense strand
gaaagaauugcacaaaaca

SEQ ID NO: 475052 - RNA, 19 nt, Homo sapiens
  misc_RNA (1)...(19): siRNA sense strand
uaacuggagaacaggauga

SEQ ID NO: 475053 - RNA, 19 nt, Homo sapiens
  misc_RNA (1)...(19): siRNA sense strand
ccaaauggcccgagaauug

SEQ ID NO: 475054 - RNA, 19 nt, Homo sapiens
  misc_RNA (1)...(19): siRNA sense strand
gaacgacuccgaagaggaa

SEQ ID NO: 475055 - RNA, 19 nt, Homo sapiens
  misc_RNA (1)...(19): siRNA sense strand
ccgcagaagugaauaugua

SEQ ID NO: 475056 - RNA, 19 nt, Homo sapiens
  misc_RNA (1)...(19): siRNA sense strand
agacagaacucaacucauc

SEQ ID NO: 475057 - RNA, 19 nt, Homo sapiens
  misc_RNA (1)...(19): siRNA sense strand
ggaagaaaaugaagaaguu

SEQ ID NO: 475058 - RNA, 19 nt, Homo sapiens
  misc_RNA (1)...(19): siRNA sense strand
ucaagaagauggaguuauc

SEQ ID NO: 475059 - RNA, 19 nt, Homo sapiens
  misc_RNA (1)...(19): siRNA sense strand
ggauacaaaucaagaagau

SEQ ID NO: 475060 - RNA, 19 nt, Homo sapiens
  misc_RNA (1)...(19): siRNA sense strand
gagugaugaugaugcuuua

SEQ ID NO: 475061 - RNA, 19 nt, Homo sapiens
  misc_RNA (1)...(19): siRNA sense strand
aaauggauauggaaaguga

SEQ ID NO: 475062 - RNA, 19 nt, Homo sapiens
  misc_RNA (1)...(19): siRNA sense strand
gaacaggagcagauaagga

SEQ ID NO: 475063 - RNA, 19 nt, Homo sapiens
  misc_RNA (1)...(19): siRNA sense strand
ccagaacacuuaccagaca

SEQ ID NO: 475064 - RNA, 19 nt, Homo sapiens
  misc_RNA (1)...(19): siRNA sense strand
gaagaaguuuucaaaguga

SEQ ID NO: 475065 - RNA, 19 nt, Homo sapiens
  misc_RNA (1)...(19): siRNA sense strand
ccagggcuauugaaagauu

SEQ ID NO: 475066 - RNA, 19 nt, Homo sapiens
  misc_RNA (1)...(19): siRNA sense strand
uaccagggcuauugaaaga

SEQ ID NO: 475067 - RNA, 19 nt, Homo sapiens
  misc_RNA (1)...(19): siRNA sense strand
gcagauaaggaaaggaauu

SEQ ID NO: 475068 - RNA, 19 nt, Homo sapiens
  misc_RNA (1)...(19): siRNA sense strand
gaggguauguccaagacuu

SEQ ID NO: 475069 - RNA, 19 nt, Homo sapiens
  misc_RNA (1)...(19): siRNA sense strand
gauaauacagucccuuuca

SEQ ID NO: 475070 - RNA, 19 nt, Homo sapiens
  misc_RNA (1)...(19): siRNA sense strand
ggagugaugaugaugcuuu

SEQ ID NO: 475071 - RNA, 19 nt, Homo sapiens
  misc_RNA (1)...(19): siRNA sense strand
gagcagauaaggaaaggaa

SEQ ID NO: 475072 - RNA, 19 nt, Homo sapiens
  misc_RNA (1)...(19): siRNA sense strand
ugaugaugaugcuuuagua

SEQ ID NO: 475073 - RNA, 19 nt, Homo sapiens
  misc_RNA (1)...(19): siRNA sense strand
guaaagaaacagcuuaaag

SEQ ID NO: 475074 - RNA, 19 nt, Homo sapiens
  misc_RNA (1)...(19): siRNA sense strand
uaaaauugcucaagaagga

SEQ ID NO: 475075 - RNA, 19 nt, Homo sapiens
  misc_RNA (1)...(19): siRNA sense strand
cagauaaggaaaggaauua

SEQ ID NO: 475076 - RNA, 19 nt, Homo sapiens
  misc_RNA (1)...(19): siRNA sense strand
gcaagaggccucgcgagaa

SEQ ID NO: 475077 - RNA, 19 nt, Homo sapiens
  misc_RNA (1)...(19): siRNA sense strand
aagacuugcuugaguguuu

SEQ ID NO: 475078 - RNA, 19 nt, Homo sapiens
  misc_RNA (1)...(19): siRNA sense strand
gcucaagaaggaauauaaa

SEQ ID NO: 475079 - RNA, 19 nt, Homo sapiens
  misc_RNA (1)...(19): siRNA sense strand
ugacucccguuacuauuga

SEQ ID NO: 475080 - RNA, 19 nt, Homo sapiens
  misc_RNA (1)...(19): siRNA sense strand
caagaggccucgcgagaac

SEQ ID NO: 475081 - RNA, 19 nt, Homo sapiens
  misc_RNA (1)...(19): siRNA sense strand
gaacauggugaagaugaaa

SEQ ID NO: 475082 - RNA, 19 nt, Homo sapiens
  misc_RNA (1)...(19): siRNA sense strand
gaaagaaaagucacaaaga

SEQ ID NO: 475083 - RNA, 19 nt, Homo sapiens
  misc_RNA (1)...(19): siRNA sense strand
gaugaugaugcuuuaguaa

SEQ ID NO: 475084 - RNA, 19 nt, Homo sapiens
  misc_RNA (1)...(19): siRNA sense strand
gaagaaaucaaguuauagc

SEQ ID NO: 475085 - RNA, 19 nt, Homo sapiens
  misc_RNA (1)...(19): siRNA sense strand
ugaaauggauauggaaagu

SEQ ID NO: 475086 - RNA, 19 nt, Homo sapiens
  misc_RNA (1)...(19): siRNA sense strand
caacucaucagcugaaagu

SEQ ID NO: 475087 - RNA, 19 nt, Homo sapiens
  misc_RNA (1)...(19): siRNA sense strand
gaugagaaacgccggauag

SEQ ID NO: 475088 - RNA, 19 nt, Homo sapiens
  misc_RNA (1)...(19): siRNA sense strand
aagaugaaauggauaugga

SEQ ID NO: 475089 - RNA, 19 nt, Homo sapiens
  misc_RNA (1)...(19): siRNA sense strand
caaaucgacagcagcauga

SEQ ID NO: 475090 - RNA, 19 nt, Homo sapiens
  misc_RNA (1)...(19): siRNA sense strand
gaugaaauggauauggaaa

SEQ ID NO: 475091 - RNA, 19 nt, Homo sapiens
  misc_RNA (1)...(19): siRNA sense strand
uaauacagucccuuucaaa

SEQ ID NO: 475092 - RNA, 19 nt, Homo sapiens
  misc_RNA (1)...(19): siRNA sense strand
uguacuaccagaacacuua

SEQ ID NO: 475093 - RNA, 19 nt, Homo sapiens
  misc_RNA (1)...(19): siRNA sense strand
uauacaugcugcaaggaaa

SEQ ID NO: 475094 - RNA, 19 nt, Homo sapiens
  misc_RNA (1)...(19): siRNA sense strand
uaagacagaacucaacuca

SEQ ID NO: 475095 - RNA, 19 nt, Homo sapiens
  misc_RNA (1)...(19): siRNA sense strand
ggugaacgguauaaauuuu

SEQ ID NO: 475096 - RNA, 19 nt, Homo sapiens
  misc_RNA (1)...(19): siRNA sense strand
uggcauuccuuauaguuau

SEQ ID NO: 475097 - RNA, 19 nt, Homo sapiens
  misc_RNA (1)...(19): siRNA sense strand
uaauaucccucagguucaa

SEQ ID NO: 475098 - RNA, 19 nt, Homo sapiens
  misc_RNA (1)...(19): siRNA sense strand
uuagagaagaugagaauga

SEQ ID NO: 475099 - RNA, 19 nt, Homo sapiens
  misc_RNA (1)...(19): siRNA sense strand
ggaguuaucaucagugaac

SEQ ID NO: 475100 - RNA, 19 nt, Homo sapiens
  misc_RNA (1)...(19): siRNA sense strand
gcaagaaaugcgaggguau
